United States Patent Application Publication US 2005/0244851 A1 - sequence listing, part 130

SEQ ID NO: 5073672 - DNA, 25 bp, Homo sapien
agaaccaacgacactgtttcgccac

SEQ ID NO: 5073673 - DNA, 25 bp, Homo sapien
gagaggtcaagagccaccagtagct

SEQ ID NO: 5073674 - DNA, 25 bp, Homo sapien
caacgacactgtttcgccacagctg

SEQ ID NO: 5073675 - DNA, 25 bp, Homo sapien
gacatttccaggtaagatctcttag

SEQ ID NO: 5073676 - DNA, 25 bp, Homo sapien
catttccaggtaagatctcttaggc

SEQ ID NO: 5073677 - DNA, 25 bp, Homo sapien
tttccaggtaagatctcttaggctg

SEQ ID NO: 5073678 - DNA, 25 bp, Homo sapien
ccaggtaagatctcttaggctgaac

SEQ ID NO: 5073679 - DNA, 25 bp, Homo sapien
tgtaacgtgaatttattctccttgt

SEQ ID NO: 5073680 - DNA, 25 bp, Homo sapien
acatatttatgtgcgatacatgaaa

SEQ ID NO: 5073681 - DNA, 25 bp, Homo sapien
cccatgtaacgtgaatttattctcc

SEQ ID NO: 5073682 - DNA, 25 bp, Homo sapien
ttttcattacccatgtaacgtgaat

SEQ ID NO: 5073683 - DNA, 25 bp, Homo sapien
ctttctctttcttgcttagaattac

SEQ ID NO: 5073684 - DNA, 25 bp, Homo sapien
tctctctttctctttcttgcttaga

SEQ ID NO: 5073685 - DNA, 25 bp, Homo sapien
tctctttctctttcttgcttagaat

SEQ ID NO: 5073686 - DNA, 25 bp, Homo sapien
tctttctctttcttgcttagaatta

SEQ ID NO: 5073687 - DNA, 25 bp, Homo sapien
gaggttgctttgtaagtgataagtc

SEQ ID NO: 5073688 - DNA, 25 bp, Homo sapien
agcttttttaccatgagtctgtgtg

SEQ ID NO: 5073689 - DNA, 25 bp, Homo sapien
agtgtagtctatttccctgcagtgg

SEQ ID NO: 5073690 - DNA, 25 bp, Homo sapien
ccctcctacctgtaaatgtggcctt

SEQ ID NO: 5073691 - DNA, 25 bp, Homo sapien
tcatagttcacagattgattcagct

SEQ ID NO: 5073692 - DNA, 25 bp, Homo sapien
gcttccatcacaatgactgcaggag

SEQ ID NO: 5073693 - DNA, 25 bp, Homo sapien
aaccccatatctgccagcaccatca

SEQ ID NO: 5073694 - DNA, 25 bp, Homo sapien
caggagctttgtggaaccccatatc

SEQ ID NO: 5073695 - DNA, 25 bp, Homo sapien
agttttatcctcttgttggtggcat

SEQ ID NO: 5073696 - DNA, 25 bp, Homo sapien
gttttatcctcttgttggtggcatc

SEQ ID NO: 5073697 - DNA, 25 bp, Homo sapien
gagcctgatggccagacccggcctg

SEQ ID NO: 5073698 - DNA, 25 bp, Homo sapien
tattgaagccggagacttggccagc

SEQ ID NO: 5073699 - DNA, 25 bp, Homo sapien
cctgcagggacaaactgggttgagt

SEQ ID NO: 5073700 - DNA, 25 bp, Homo sapien
gtccaagtccaagttggctattgaa

SEQ ID NO: 5073701 - DNA, 25 bp, Homo sapien
ctgctttattggtctgaatatatat

SEQ ID NO: 5073702 - DNA, 25 bp, Homo sapien
ctgcatggctgctttattggtctga

SEQ ID NO: 5073703 - DNA, 25 bp, Homo sapien
catggctgctttattggtctgaata

SEQ ID NO: 5073704 - DNA, 25 bp, Homo sapien
ctttattggtctgaatatatatggg

SEQ ID NO: 5073705 - DNA, 25 bp, Homo sapien
ctcctgcaggaagagttcccctgag

SEQ ID NO: 5073706 - DNA, 25 bp, Homo sapien
ggctcctgcaggaagagttcccctg

SEQ ID NO: 5073707 - DNA, 25 bp, Homo sapien
tgggctcctgcaggaagagttcccc

SEQ ID NO: 5073708 - DNA, 25 bp, Homo sapien
ctgggctcctgcaggaagagttccc

SEQ ID NO: 5073709 - DNA, 25 bp, Homo sapien
tttataattaattggatcctaagtc

SEQ ID NO: 5073710 - DNA, 25 bp, Homo sapien
tgctcttgtgccttgttattggcta

SEQ ID NO: 5073711 - DNA, 25 bp, Homo sapien
gatcctaagtctttggttaacagca

SEQ ID NO: 5073712 - DNA, 25 bp, Homo sapien
gctcttgtgccttgttattggctat

SEQ ID NO: 5073713 - DNA, 25 bp, Homo sapien
attgacccaacatgtccacagatgt

SEQ ID NO: 5073714 - DNA, 25 bp, Homo sapien
gccttgcttggcctttcttctccat

SEQ ID NO: 5073715 - DNA, 25 bp, Homo sapien
actgccttgcttggcctttcttctc

SEQ ID NO: 5073716 - DNA, 25 bp, Homo sapien
cgcccactgccttgcttggcctttc

SEQ ID NO: 5073717 - DNA, 25 bp, Homo sapien
ctcgcccactgccttgcttggcctt

SEQ ID NO: 5073718 - DNA, 25 bp, Homo sapien
taggatctatcagcttgggaaccac

SEQ ID NO: 5073719 - DNA, 25 bp, Homo sapien
tgtgtcccaggacaagaagatctgg

SEQ ID NO: 5073720 - DNA, 25 bp, Homo sapien
ctgaaaccagcagccggttaggatc

SEQ ID NO: 5073721 - DNA, 25 bp, Homo sapien
caggacaagaagatctgggaccact

SEQ ID NO: 5073722 - DNA, 25 bp, Homo sapien
tcagcccaataactgcgtaggaata

SEQ ID NO: 5073723 - DNA, 25 bp, Homo sapien
taggcaagaccatggatggcgctga

SEQ ID NO: 5073724 - DNA, 25 bp, Homo sapien
catgcttctctagggtaggcaagac

SEQ ID NO: 5073725 - DNA, 25 bp, Homo sapien
tctagggtaggcaagaccatggatg

SEQ ID NO: 5073726 - DNA, 25 bp, Homo sapien
gcaagaccatggatggcgctgatgt

SEQ ID NO: 5073727 - DNA, 25 bp, Homo sapien
cagcctttttacttcttctaggatt

SEQ ID NO: 5073728 - DNA, 25 bp, Homo sapien
tttacttcttctaggatttcttctc

SEQ ID NO: 5073729 - DNA, 25 bp, Homo sapien
ttacttcttctaggatttcttctcc

SEQ ID NO: 5073730 - DNA, 25 bp, Homo sapien
ccagcagcctttttacttcttctag

SEQ ID NO: 5073731 - DNA, 25 bp, Homo sapien
tcctgtccgcaataaatggcaaagt

SEQ ID NO: 5073732 - DNA, 25 bp, Homo sapien
cactgccgaaggtcatagagagcct

SEQ ID NO: 5073733 - DNA, 25 bp, Homo sapien
tagagagcctatccagaaaggctgg

SEQ ID NO: 5073734 - DNA, 25 bp, Homo sapien
gagacttatgtctggcactgccgaa

SEQ ID NO: 5073735 - DNA, 25 bp, Homo sapien
tattaacatccacccacgttccatg

SEQ ID NO: 5073736 - DNA, 25 bp, Homo sapien
catgtgcattgactcttccgaaaaa

SEQ ID NO: 5073737 - DNA, 25 bp, Homo sapien
cagctgcatggcttggttattaaca

SEQ ID NO: 5073738 - DNA, 25 bp, Homo sapien
ggtgacaaacagtgatgcattctca

SEQ ID NO: 5073739 - DNA, 25 bp, Homo sapien
tgccccttgtcagttccctagctag

SEQ ID NO: 5073740 - DNA, 25 bp, Homo sapien
gactgcagccggctctcaattaggt

SEQ ID NO: 5073741 - DNA, 25 bp, Homo sapien
tcggcagtgacacttgttgtagcca

SEQ ID NO: 5073742 - DNA, 25 bp, Homo sapien
cagccggctctcaattaggttttca

SEQ ID NO: 5073743 - DNA, 25 bp, Homo sapien
agagatgcatggaccaccacaatcc

SEQ ID NO: 5073744 - DNA, 25 bp, Homo sapien
acagagatgcatggaccaccacaat

SEQ ID NO: 5073745 - DNA, 25 bp, Homo sapien
agatgcatggaccaccacaatcccg

SEQ ID NO: 5073746 - DNA, 25 bp, Homo sapien
gaccaccacaatcccgctgtccagg

SEQ ID NO: 5073747 - DNA, 25 bp, Homo sapien
ctgctccggcatcagtaaatgctgc

SEQ ID NO: 5073748 - DNA, 25 bp, Homo sapien
tctgctccggcatcagtaaatgctg

SEQ ID NO: 5073749 - DNA, 25 bp, Homo sapien
ttcttattcaggatctccctcgccg

SEQ ID NO: 5073750 - DNA, 25 bp, Homo sapien
tcttattcaggatctccctcgccgt

SEQ ID NO: 5073751 - DNA, 25 bp, Homo sapien
cttattcaggatctccctcgccgtc

SEQ ID NO: 5073752 - DNA, 25 bp, Homo sapien
gcatcaaagggcacttcagcaggct

SEQ ID NO: 5073753 - DNA, 25 bp, Homo sapien
aagggcacttcagcaggctcacctt

SEQ ID NO: 5073754 - DNA, 25 bp, Homo sapien
tccccagcatcaaagggcacttcag

SEQ ID NO: 5073755 - DNA, 25 bp, Homo sapien
ctccccagcatcaaagggcacttca

SEQ ID NO: 5073756 - DNA, 25 bp, Homo sapien
gccgtgcaggtattaataatgtaac

SEQ ID NO: 5073757 - DNA, 25 bp, Homo sapien
gggctgtgtttgcagctggagtgcc

SEQ ID NO: 5073758 - DNA, 25 bp, Homo sapien
gaagttgccgtgcaggtattaataa

SEQ ID NO: 5073759 - DNA, 25 bp, Homo sapien
ctgtgtttgcagctggagtgccgct

SEQ ID NO: 5073760 - DNA, 25 bp, Homo sapien
gagcaacacccagacgggccggcag

SEQ ID NO: 5073761 - DNA, 25 bp, Homo sapien
acacccagacgggccggcagcatgg

SEQ ID NO: 5073762 - DNA, 25 bp, Homo sapien
aaggaaaatgtagagcaacacccag

SEQ ID NO: 5073763 - DNA, 25 bp, Homo sapien
tggtaggaaggaaaatgtagagcaa

SEQ ID NO: 5073764 - DNA, 25 bp, Homo sapien
ccaagttagcctgcagttggaaggc

SEQ ID NO: 5073765 - DNA, 25 bp, Homo sapien
gttggcattgacagttgagggcatt

SEQ ID NO: 5073766 - DNA, 25 bp, Homo sapien
catttgccaagttagcctgcagttg

SEQ ID NO: 5073767 - DNA, 25 bp, Homo sapien
caagttggcattgacagttgagggc

SEQ ID NO: 5073768 - DNA, 25 bp, Homo sapien
attcagactgctcgttaaatttctt

SEQ ID NO: 5073769 - DNA, 25 bp, Homo sapien
cattcagactgctcgttaaatttct

SEQ ID NO: 5073770 - DNA, 25 bp, Homo sapien
ttcagactgctcgttaaatttcttt

SEQ ID NO: 5073771 - DNA, 25 bp, Homo sapien
gtggcataagcgtcagcccctctga

SEQ ID NO: 5073772 - DNA, 25 bp, Homo sapien
ataaatagccccaaaccacgtcagg

SEQ ID NO: 5073773 - DNA, 25 bp, Homo sapien
tgttcaagctgaaccaaactgtcat

SEQ ID NO: 5073774 - DNA, 25 bp, Homo sapien
tgactccccgccattgggcagcagg

SEQ ID NO: 5073775 - DNA, 25 bp, Homo sapien
gaatagcttatctggttcatcaggt

SEQ ID NO: 5073776 - DNA, 25 bp, Homo sapien
gcttatctggttcatcaggtgagtg

SEQ ID NO: 5073777 - DNA, 25 bp, Homo sapien
gttttgtgtagaatagcttatctgg

SEQ ID NO: 5073778 - DNA, 25 bp, Homo sapien
tgttaacatcccaggttttgtgtag

SEQ ID NO: 5073779 - DNA, 25 bp, Homo sapien
gctagactccagaacaccgaaccag

SEQ ID NO: 5073780 - DNA, 25 bp, Homo sapien
gaacaccgaaccagccattctatag

SEQ ID NO: 5073781 - DNA, 25 bp, Homo sapien
agccattctatagaaggagttctgc

SEQ ID NO: 5073782 - DNA, 25 bp, Homo sapien
cttggcaaaatccagggctagactc

SEQ ID NO: 5073783 - DNA, 25 bp, Homo sapien
tgttagtcatcttgcagcagacccc

SEQ ID NO: 5073784 - DNA, 25 bp, Homo sapien
ctgttagtcatcttgcagcagaccc

SEQ ID NO: 5073785 - DNA, 25 bp, Homo sapien
ccaccttcaggtgtcctcagaggca

SEQ ID NO: 5073786 - DNA, 25 bp, Homo sapien
cctcaggacactgagctggtagagt

SEQ ID NO: 5073787 - DNA, 25 bp, Homo sapien
ggacactgagctggtagagttcctg

SEQ ID NO: 5073788 - DNA, 25 bp, Homo sapien
ccgcccccaccttcaggtgtcctca

SEQ ID NO: 5073789 - DNA, 25 bp, Homo sapien
cagctcctccaaaccaagctccacc

SEQ ID NO: 5073790 - DNA, 25 bp, Homo sapien
aagctccacccgctcctctgcaaac

SEQ ID NO: 5073791 - DNA, 25 bp, Homo sapien
cttgctccattggaacagctcctcc

SEQ ID NO: 5073792 - DNA, 25 bp, Homo sapien
aaaccaagctccacccgctcctctg

SEQ ID NO: 5073793 - DNA, 25 bp, Homo sapien
tcaggtcctcattgccctccaccaa

SEQ ID NO: 5073794 - DNA, 25 bp, Homo sapien
tggctcaggtcctcattgccctcca

SEQ ID NO: 5073795 - DNA, 25 bp, Homo sapien
caggtcctcattgccctccaccaag

SEQ ID NO: 5073796 - DNA, 25 bp, Homo sapien
gctcaggtcctcattgccctccacc

SEQ ID NO: 5073797 - DNA, 25 bp, Homo sapien
aataattactggaaggcatgctaga

SEQ ID NO: 5073798 - DNA, 25 bp, Homo sapien
ggcatgctagacctggaagacccaa

SEQ ID NO: 5073799 - DNA, 25 bp, Homo sapien
ccacaaactgtatgacccaagcttc

SEQ ID NO: 5073800 - DNA, 25 bp, Homo sapien
tgtatgacccaagcttcctttttca

SEQ ID NO: 5073801 - DNA, 25 bp, Homo sapien
gaactgatgccgttttctatgttaa

SEQ ID NO: 5073802 - DNA, 25 bp, Homo sapien
ctgaactgatgccgttttctatgtt

SEQ ID NO: 5073803 - DNA, 25 bp, Homo sapien
tgaactgatgccgttttctatgtta

SEQ ID NO: 5073804 - DNA, 25 bp, Homo sapien
aactgatgccgttttctatgttaaa

SEQ ID NO: 5073805 - DNA, 25 bp, Homo sapien
tcttatccgaatcatagaagtggaa

SEQ ID NO: 5073806 - DNA, 25 bp, Homo sapien
cattgacataaactattcttatccg

SEQ ID NO: 5073807 - DNA, 25 bp, Homo sapien
gaagtggaaatatcattcaatgaaa

SEQ ID NO: 5073808 - DNA, 25 bp, Homo sapien
tgagccagatagtgtggtgagtcct

SEQ ID NO: 5073809 - DNA, 25 bp, Homo sapien
ggaatgccattttcatcattgccac

SEQ ID NO: 5073810 - DNA, 25 bp, Homo sapien
cctctgaaccatggttggaatgcca

SEQ ID NO: 5073811 - DNA, 25 bp, Homo sapien
taagcagacttatgcaaatcaaccc

SEQ ID NO: 5073812 - DNA, 25 bp, Homo sapien
tttagtgggctaagatcatctctcc

SEQ ID NO: 5073813 - DNA, 25 bp, Homo sapien
tagcatgcatagtgtggcagctccc

SEQ ID NO: 5073814 - DNA, 25 bp, Homo sapien
tgtgttatatttggcaacctccttc

SEQ ID NO: 5073815 - DNA, 25 bp, Homo sapien
cctccttctttctgttgtgatcagc

SEQ ID NO: 5073816 - DNA, 25 bp, Homo sapien
tctggagcaccatgacttgtatttg

SEQ ID NO: 5073817 - DNA, 25 bp, Homo sapien
taccagtgatactggggtgtccgct

SEQ ID NO: 5073818 - DNA, 25 bp, Homo sapien
cagataccagtgatactggggtgtc

SEQ ID NO: 5073819 - DNA, 25 bp, Homo sapien
tcccagataccagtgatactggggt

SEQ ID NO: 5073820 - DNA, 25 bp, Homo sapien
gtgatactggggtgtccgctttgtc

SEQ ID NO: 5073821 - DNA, 25 bp, Homo sapien
ctagggtggttggaggaggcagtga

SEQ ID NO: 5073822 - DNA, 25 bp, Homo sapien
agggtggttggaggaggcagtgaaa

SEQ ID NO: 5073823 - DNA, 25 bp, Homo sapien
tagggtggttggaggaggcagtgaa

SEQ ID NO: 5073824 - DNA, 25 bp, Homo sapien
agctgccaagggctcggtttctatg

SEQ ID NO: 5073825 - DNA, 25 bp, Homo sapien
aagggctcggtttctatgaagctcc

SEQ ID NO: 5073826 - DNA, 25 bp, Homo sapien
ctgccaagggctcggtttctatgaa

SEQ ID NO: 5073827 - DNA, 25 bp, Homo sapien
gccaagggctcggtttctatgaagc

SEQ ID NO: 5073828 - DNA, 25 bp, Homo sapien
agcatcaggtagtagttagcaatac

SEQ ID NO: 5073829 - DNA, 25 bp, Homo sapien
aatactaaggatggtggtgtgaaca

SEQ ID NO: 5073830 - DNA, 25 bp, Homo sapien
gctgtggatacaccagtctccttta

SEQ ID NO: 5073831 - DNA, 25 bp, Homo sapien
tgtgaacaaccatagcaaaagctgc

SEQ ID NO: 5073832 - DNA, 25 bp, Homo sapien
ctccacctgtgatcgctgacatgcg

SEQ ID NO: 5073833 - DNA, 25 bp, Homo sapien
cacctgtgatcgctgacatgcgcac

SEQ ID NO: 5073834 - DNA, 25 bp, Homo sapien
tgacatgcgcacaatacactgagtg

SEQ ID NO: 5073835 - DNA, 25 bp, Homo sapien
gatcgctgacatgcgcacaatacac

SEQ ID NO: 5073836 - DNA, 25 bp, Homo sapien
gtccaatatctatcacattatccca

SEQ ID NO: 5073837 - DNA, 25 bp, Homo sapien
aagaggtggttgaacattttgcatc

SEQ ID NO: 5073838 - DNA, 25 bp, Homo sapien
tgagagcccgccatggcaaagttct

SEQ ID NO: 5073839 - DNA, 25 bp, Homo sapien
tccataagccagctttgagagcccg

SEQ ID NO: 5073840 - DNA, 25 bp, Homo sapien
ttgtggagctcgtacactgtttcct

SEQ ID NO: 5073841 - DNA, 25 bp, Homo sapien
tggagctcgtacactgtttcctgcc

SEQ ID NO: 5073842 - DNA, 25 bp, Homo sapien
tcgtacactgtttcctgcctcactg

SEQ ID NO: 5073843 - DNA, 25 bp, Homo sapien
agctcgtacactgtttcctgcctca

SEQ ID NO: 5073844 - DNA, 25 bp, Homo sapien
tatcccagtagttagacatcaagtc

SEQ ID NO: 5073845 - DNA, 25 bp, Homo sapien
gactgattggtatcacagacatcac

SEQ ID NO: 5073846 - DNA, 25 bp, Homo sapien
ttcaacaagtgaggacagtcaggcc

SEQ ID NO: 5073847 - DNA, 25 bp, Homo sapien
tcaggcccagcgtcaggctctgtat

SEQ ID NO: 5073848 - DNA, 25 bp, Homo sapien
tcacccatatatctgcattgatgag

SEQ ID NO: 5073849 - DNA, 25 bp, Homo sapien
cttcacccatatatctgcattgatg

SEQ ID NO: 5073850 - DNA, 25 bp, Homo sapien
attgatgaggcccatttcactctgg

SEQ ID NO: 5073851 - DNA, 25 bp, Homo sapien
ggcccatttcactctggatcctcat

SEQ ID NO: 5073852 - DNA, 25 bp, Homo sapien
gatatcagcagtgcttagaggcagg

SEQ ID NO: 5073853 - DNA, 25 bp, Homo sapien
tgtctaagccagtacttgtccctct

SEQ ID NO: 5073854 - DNA, 25 bp, Homo sapien
agagtgtaggcccagctctccggat

SEQ ID NO: 5073855 - DNA, 25 bp, Homo sapien
ttgtccctctttttgctatgctgtc

SEQ ID NO: 5073856 - DNA, 25 bp, Homo sapien
tgtgaaaggttgtggacaaatggaa

SEQ ID NO: 5073857 - DNA, 25 bp, Homo sapien
ctctgttaatgcaaggttgtgtgaa

SEQ ID NO: 5073858 - DNA, 25 bp, Homo sapien
aatggaacttttgtaaatcgaatca

SEQ ID NO: 5073859 - DNA, 25 bp, Homo sapien
taatgcaaggttgtgtgaaaggttg

SEQ ID NO: 5073860 - DNA, 25 bp, Homo sapien
tgttatatggaagtaggtccacaag

SEQ ID NO: 5073861 - DNA, 25 bp, Homo sapien
ttttctctgttatatggaagtaggt

SEQ ID NO: 5073862 - DNA, 25 bp, Homo sapien
tatggaagtaggtccacaagaatgt

SEQ ID NO: 5073863 - DNA, 25 bp, Homo sapien
tccacaagaatgtgtgtcatgaagg

SEQ ID NO: 5073864 - DNA, 25 bp, Homo sapien
atttgcatctttctgagctttgaaa

SEQ ID NO: 5073865 - DNA, 25 bp, Homo sapien
ttgcatctttctgagctttgaaatg

SEQ ID NO: 5073866 - DNA, 25 bp, Homo sapien
gcatctttctgagctttgaaatgaa

SEQ ID NO: 5073867 - DNA, 25 bp, Homo sapien
catttgcatctttctgagctttgaa

SEQ ID NO: 5073868 - DNA, 25 bp, Homo sapien
attgtttaacggtagcttctaagct

SEQ ID NO: 5073869 - DNA, 25 bp, Homo sapien
taacggtagcttctaagctatcttt

SEQ ID NO: 5073870 - DNA, 25 bp, Homo sapien
tgtttaacggtagcttctaagctat

SEQ ID NO: 5073871 - DNA, 25 bp, Homo sapien
tttaacggtagcttctaagctatct

SEQ ID NO: 5073872 - DNA, 25 bp, Homo sapien
actttcactcagcaaatcatcagag

SEQ ID NO: 5073873 - DNA, 25 bp, Homo sapien
cttcaaacaacttccaggtgctaaa

SEQ ID NO: 5073874 - DNA, 25 bp, Homo sapien
caggtgctaaaaccattgtcacttt

SEQ ID NO: 5073875 - DNA, 25 bp, Homo sapien
ctttcactcagcaaatcatcagagc

SEQ ID NO: 5073876 - DNA, 25 bp, Homo sapien
tcatcaaagtgtctctgggctttat

SEQ ID NO: 5073877 - DNA, 25 bp, Homo sapien
tacttcatcaaagtgtctctgggct

SEQ ID NO: 5073878 - DNA, 25 bp, Homo sapien
atttacttcatcaaagtgtctctgg

SEQ ID NO: 5073879 - DNA, 25 bp, Homo sapien
cttcatcaaagtgtctctgggcttt

SEQ ID NO: 5073880 - DNA, 25 bp, Homo sapien
tcaataagggactcattattccact

SEQ ID NO: 5073881 - DNA, 25 bp, Homo sapien
catcaataagggactcattattcca

SEQ ID NO: 5073882 - DNA, 25 bp, Homo sapien
tcatcaataagggactcattattcc

SEQ ID NO: 5073883 - DNA, 25 bp, Homo sapien
caataagggactcattattccactg

SEQ ID NO: 5073884 - DNA, 25 bp, Homo sapien
tactgggatgttcttcagcctcctc

SEQ ID NO: 5073885 - DNA, 25 bp, Homo sapien
gccgtatttactgggatgttcttca

SEQ ID NO: 5073886 - DNA, 25 bp, Homo sapien
tatttactgggatgttcttcagcct

SEQ ID NO: 5073887 - DNA, 25 bp, Homo sapien
tcagccgtatttactgggatgttct

SEQ ID NO: 5073888 - DNA, 25 bp, Homo sapien
aagagagatttatcaaaattggtgc

SEQ ID NO: 5073889 - DNA, 25 bp, Homo sapien
atcaaaattggtgcttgtccccttc

SEQ ID NO: 5073890 - DNA, 25 bp, Homo sapien
ccctcaaattcaggtgctcttcact

SEQ ID NO: 5073891 - DNA, 25 bp, Homo sapien
aggatatgagaacctcttggccctc

SEQ ID NO: 5073892 - DNA, 25 bp, Homo sapien
cttggccctcaaattcaggtgctct

SEQ ID NO: 5073893 - DNA, 25 bp, Homo sapien
caggatatgagaacctcttggccct

SEQ ID NO: 5073894 - DNA, 25 bp, Homo sapien
tggattattggagaaatgtgcataa

SEQ ID NO: 5073895 - DNA, 25 bp, Homo sapien
ggattattggagaaatgtgcataaa

SEQ ID NO: 5073896 - DNA, 25 bp, Homo sapien
tgcatgaggcttgtataagactgac

SEQ ID NO: 5073897 - DNA, 25 bp, Homo sapien
tgactgagtatgtgaatgctaaacc

SEQ ID NO: 5073898 - DNA, 25 bp, Homo sapien
cacagaaagagttgcataaacattt

SEQ ID NO: 5073899 - DNA, 25 bp, Homo sapien
attccttgcacaccaagaacatttg

SEQ ID NO: 5073900 - DNA, 25 bp, Homo sapien
tgggtagctaaagaagtgttggggc

SEQ ID NO: 5073901 - DNA, 25 bp, Homo sapien
gggtagctaaagaagtgttggggca

SEQ ID NO: 5073902 - DNA, 25 bp, Homo sapien
ggtagctaaagaagtgttggggcag

SEQ ID NO: 5073903 - DNA, 25 bp, Homo sapien
ggcccatcttggtaggtaatggtga

SEQ ID NO: 5073904 - DNA, 25 bp, Homo sapien
actgtcttacttgtaggtctggctg

SEQ ID NO: 5073905 - DNA, 25 bp, Homo sapien
aaagtatagtcagcaactgtcttac

SEQ ID NO: 5073906 - DNA, 25 bp, Homo sapien
ctggtgtggcccatcttggtaggta

SEQ ID NO: 5073907 - DNA, 25 bp, Homo sapien
tcttacatgcatgattttgttgaca

SEQ ID NO: 5073908 - DNA, 25 bp, Homo sapien
attcttacatgcatgattttgttga

SEQ ID NO: 5073909 - DNA, 25 bp, Homo sapien
tacatgcatgattttgttgacatcg

SEQ ID NO: 5073910 - DNA, 25 bp, Homo sapien
ttacatgcatgattttgttgacatc

SEQ ID NO: 5073911 - DNA, 25 bp, Homo sapien
tcagaccttttgtccatgtaacctc

SEQ ID NO: 5073912 - DNA, 25 bp, Homo sapien
acctgcggttttgccgtggcccact

SEQ ID NO: 5073913 - DNA, 25 bp, Homo sapien
tatacttctcattgcctcccctgat

SEQ ID NO: 5073914 - DNA, 25 bp, Homo sapien
tacacgtgccacttgtgcctgagtc

SEQ ID NO: 5073915 - DNA, 25 bp, Homo sapien
tctcagcagttttggcatcccatag

SEQ ID NO: 5073916 - DNA, 25 bp, Homo sapien
tcagccctgcttgatctccagtgcc

SEQ ID NO: 5073917 - DNA, 25 bp, Homo sapien
ttctgctcatcactacctctttcgt

SEQ ID NO: 5073918 - DNA, 25 bp, Homo sapien
tcatcactacctctttcgtggccag

SEQ ID NO: 5073919 - DNA, 25 bp, Homo sapien
agctccaactctacagcctttctgc

SEQ ID NO: 5073920 - DNA, 25 bp, Homo sapien
ttgccttccagctccaactctacag

SEQ ID NO: 5073921 - DNA, 25 bp, Homo sapien
cctgcatgaccttgtggttcctgtg

SEQ ID NO: 5073922 - DNA, 25 bp, Homo sapien
gctctttatcaaagacctaaaacac

SEQ ID NO: 5073923 - DNA, 25 bp, Homo sapien
ccctgtgatcctgcatgaccttgtg

SEQ ID NO: 5073924 - DNA, 25 bp, Homo sapien
aattgttcctactggaaaactgaga

SEQ ID NO: 5073925 - DNA, 25 bp, Homo sapien
ggcttgagttgacagtcatcaaaca

SEQ ID NO: 5073926 - DNA, 25 bp, Homo sapien
ttgagttgacagtcatcaaacattg

SEQ ID NO: 5073927 - DNA, 25 bp, Homo sapien
gcttgagttgacagtcatcaaacat

SEQ ID NO: 5073928 - DNA, 25 bp, Homo sapien
tgagttgacagtcatcaaacattgc

SEQ ID NO: 5073929 - DNA, 25 bp, Homo sapien
cacttgatgagcagggggaaggtgg

SEQ ID NO: 5073930 - DNA, 25 bp, Homo sapien
tcacttgatgagcagggggaaggtg

SEQ ID NO: 5073931 - DNA, 25 bp, Homo sapien
tagaaggatacatgttgcaaaagaa

SEQ ID NO: 5073932 - DNA, 25 bp, Homo sapien
ggatcattacaaaggtcttcattat

SEQ ID NO: 5073933 - DNA, 25 bp, Homo sapien
aggagaggcaggcatatatggtgta

SEQ ID NO: 5073934 - DNA, 25 bp, Homo sapien
gtactttagtttcagcaccctcata

SEQ ID NO: 5073935 - DNA, 25 bp, Homo sapien
tgaggcaagggaacggttagctacc

SEQ ID NO: 5073936 - DNA, 25 bp, Homo sapien
aacagaggttctgcctgaaaaggca

SEQ ID NO: 5073937 - DNA, 25 bp, Homo sapien
gaggcaagtctccaataacacagaa

SEQ ID NO: 5073938 - DNA, 25 bp, Homo sapien
gttttgagggttctaggacacggca

SEQ ID NO: 5073939 - DNA, 25 bp, Homo sapien
tcagtagattcagatctgctccatg

SEQ ID NO: 5073940 - DNA, 25 bp, Homo sapien
tgtcagtagattcagatctgctcca

SEQ ID NO: 5073941 - DNA, 25 bp, Homo sapien
gtcagtagattcagatctgctccat

SEQ ID NO: 5073942 - DNA, 25 bp, Homo sapien
tacaggacttagatgccgttatatc

SEQ ID NO: 5073943 - DNA, 25 bp, Homo sapien
ccgttatatctagggccctgtctgc

SEQ ID NO: 5073944 - DNA, 25 bp, Homo sapien
gacttagatgccgttatatctaggg

SEQ ID NO: 5073945 - DNA, 25 bp, Homo sapien
gatgccgttatatctagggccctgt

SEQ ID NO: 5073946 - DNA, 25 bp, Homo sapien
caggctgccgttatctgactctagg

SEQ ID NO: 5073947 - DNA, 25 bp, Homo sapien
atctggaatattaagatgccgggct

SEQ ID NO: 5073948 - DNA, 25 bp, Homo sapien
gaatattaagatgccgggcttctcc

SEQ ID NO: 5073949 - DNA, 25 bp, Homo sapien
tgactctaggctgccagacacggct

SEQ ID NO: 5073950 - DNA, 25 bp, Homo sapien
aggctgttttctgaaagtaggacat

SEQ ID NO: 5073951 - DNA, 25 bp, Homo sapien
gtcagctccccacttggtacattta

SEQ ID NO: 5073952 - DNA, 25 bp, Homo sapien
tgttttctgaaagtaggacatttgg

SEQ ID NO: 5073953 - DNA, 25 bp, Homo sapien
ccttaaaggcaatataccgtcagct

SEQ ID NO: 5073954 - DNA, 25 bp, Homo sapien
tgcgtctcctattcgggatgtccag

SEQ ID NO: 5073955 - DNA, 25 bp, Homo sapien
agtagctgcgtctcctattcgggat

SEQ ID NO: 5073956 - DNA, 25 bp, Homo sapien
gtccagtggacttaaagcgctcaaa

SEQ ID NO: 5073957 - DNA, 25 bp, Homo sapien
cctattcgggatgtccagtggactt

SEQ ID NO: 5073958 - DNA, 25 bp, Homo sapien
cgtaattctggacttgttccctgag

SEQ ID NO: 5073959 - DNA, 25 bp, Homo sapien
gctctctggccagatgtagatgcag

SEQ ID NO: 5073960 - DNA, 25 bp, Homo sapien
atgcaggtgcctcccgtaattctgg

SEQ ID NO: 5073961 - DNA, 25 bp, Homo sapien
gcagctctgcgttgggctcagctct

SEQ ID NO: 5073962 - DNA, 25 bp, Homo sapien
agtattgttactccgccagaacact

SEQ ID NO: 5073963 - DNA, 25 bp, Homo sapien
tggcagtattgttactccgccagaa

SEQ ID NO: 5073964 - DNA, 25 bp, Homo sapien
gcagtattgttactccgccagaaca

SEQ ID NO: 5073965 - DNA, 25 bp, Homo sapien
ggcagtattgttactccgccagaac

SEQ ID NO: 5073966 - DNA, 25 bp, Homo sapien
cagatgaagctcctaagactcctgg

SEQ ID NO: 5073967 - DNA, 25 bp, Homo sapien
gagtcagatgaagctcctaagactc

SEQ ID NO: 5073968 - DNA, 25 bp, Homo sapien
ctcctaagactcctggattgaaggc

SEQ ID NO: 5073969 - DNA, 25 bp, Homo sapien
gaagctcctaagactcctggattga

SEQ ID NO: 5073970 - DNA, 25 bp, Homo sapien
tgcagagagctgcaaaatggagaag

SEQ ID NO: 5073971 - DNA, 25 bp, Homo sapien
aaatggagaagagtctatttacaga

SEQ ID NO: 5073972 - DNA, 25 bp, Homo sapien
gcagagagctgcaaaatggagaaga

SEQ ID NO: 5073973 - DNA, 25 bp, Homo sapien
agaagagtctatttacagaattacc

SEQ ID NO: 5073974 - DNA, 25 bp, Homo sapien
gggcaagctggggtgtaggcaggac

SEQ ID NO: 5073975 - DNA, 25 bp, Homo sapien
gcaggacactgaccaccttggccat

SEQ ID NO: 5073976 - DNA, 25 bp, Homo sapien
ggcagctatcaacagtgacctccag

SEQ ID NO: 5073977 - DNA, 25 bp, Homo sapien
tatcaacagtgacctccagggcaag

SEQ ID NO: 5073978 - DNA, 25 bp, Homo sapien
tacggtccggattgctgtgaggcca

SEQ ID NO: 5073979 - DNA, 25 bp, Homo sapien
ccactctgccttgtacggtccggat

SEQ ID NO: 5073980 - DNA, 25 bp, Homo sapien
aggccatgacaaggaaccaagttct

SEQ ID NO: 5073981 - DNA, 25 bp, Homo sapien
tgctttaaaagtgccccccactctg

SEQ ID NO: 5073982 - DNA, 25 bp, Homo sapien
gagaggagtttattgtgctttccaa

SEQ ID NO: 5073983 - DNA, 25 bp, Homo sapien
gctcagggttgatttgctcatttcc

SEQ ID NO: 5073984 - DNA, 25 bp, Homo sapien
caaatggctaaaagcctcactgaga

SEQ ID NO: 5073985 - DNA, 25 bp, Homo sapien
cctccaatcccagggtagggaaatg

SEQ ID NO: 5073986 - DNA, 25 bp, Homo sapien
tgtaccttgaaggtgtaattgtgtg

SEQ ID NO: 5073987 - DNA, 25 bp, Homo sapien
tgcagagagtaacatgagaaaggtc

SEQ ID NO: 5073988 - DNA, 25 bp, Homo sapien
gtgtgttgctaatataatggctgga

SEQ ID NO: 5073989 - DNA, 25 bp, Homo sapien
ctggcagtgcctgaacttgaatgta

SEQ ID NO: 5073990 - DNA, 25 bp, Homo sapien
gaggttcttactctaatcctgatga

SEQ ID NO: 5073991 - DNA, 25 bp, Homo sapien
cagctatctggagaatggatttgag

SEQ ID NO: 5073992 - DNA, 25 bp, Homo sapien
agggccttgggacttctgttggatc

SEQ ID NO: 5073993 - DNA, 25 bp, Homo sapien
gaaaggtcatggcagcagctatctg

SEQ ID NO: 5073994 - DNA, 25 bp, Homo sapien
ggatggtttgatgatcttgatagca

SEQ ID NO: 5073995 - DNA, 25 bp, Homo sapien
gaagtccctggatggtttgatgatc

SEQ ID NO: 5073996 - DNA, 25 bp, Homo sapien
aactagttgttgcttcattttggtg

SEQ ID NO: 5073997 - DNA, 25 bp, Homo sapien
gtgagaattatgcttttccctgaag

SEQ ID NO: 5073998 - DNA, 25 bp, Homo sapien
ttgtcaaagaaaaggcataaactcc

SEQ ID NO: 5073999 - DNA, 25 bp, Homo sapien
ctttgtcaaagaaaaggcataaact

SEQ ID NO: 5074000 - DNA, 25 bp, Homo sapien
tcaaagaaaaggcataaactcccat

SEQ ID NO: 5074001 - DNA, 25 bp, Homo sapien
tgtcaaagaaaaggcataaactccc

SEQ ID NO: 5074002 - DNA, 25 bp, Homo sapien
tgattcttagtcagacgcattatcc

SEQ ID NO: 5074003 - DNA, 25 bp, Homo sapien
ttctgattcttagtcagacgcatta

SEQ ID NO: 5074004 - DNA, 25 bp, Homo sapien
ttagtcagacgcattatccattgag

SEQ ID NO: 5074005 - DNA, 25 bp, Homo sapien
ttcttagtcagacgcattatccatt

SEQ ID NO: 5074006 - DNA, 25 bp, Homo sapien
ccattggttccaaatccacatctta

SEQ ID NO: 5074007 - DNA, 25 bp, Homo sapien
atattcaggcctttgtgcattgcca

SEQ ID NO: 5074008 - DNA, 25 bp, Homo sapien
catcttatattcaggcctttgtgca

SEQ ID NO: 5074009 - DNA, 25 bp, Homo sapien
caaatccacatcttatattcaggcc

SEQ ID NO: 5074010 - DNA, 25 bp, Homo sapien
tgggaagcccaaacgctgccctggc

SEQ ID NO: 5074011 - DNA, 25 bp, Homo sapien
taccaaggagtccatccctcttcag

SEQ ID NO: 5074012 - DNA, 25 bp, Homo sapien
aagcccaaacgctgccctggctgtg

SEQ ID NO: 5074013 - DNA, 25 bp, Homo sapien
gtgtgataccaaggagtccatccct

SEQ ID NO: 5074014 - DNA, 25 bp, Homo sapien
catattctcagctggccgcttttag

SEQ ID NO: 5074015 - DNA, 25 bp, Homo sapien
ctcagctggccgcttttagcaacac

SEQ ID NO: 5074016 - DNA, 25 bp, Homo sapien
cattttcttccgaacttcccatatt

SEQ ID NO: 5074017 - DNA, 25 bp, Homo sapien
ttgccattttcttccgaacttccca

SEQ ID NO: 5074018 - DNA, 25 bp, Homo sapien
tgtccactgggagggtgaagtaggg

SEQ ID NO: 5074019 - DNA, 25 bp, Homo sapien
ttttttctccactgtccactgggag

SEQ ID NO: 5074020 - DNA, 25 bp, Homo sapien
actggggcctgagaagctaggctga

SEQ ID NO: 5074021 - DNA, 25 bp, Homo sapien
tgtcttcagagatgtgagtactggg

SEQ ID NO: 5074022 - DNA, 25 bp, Homo sapien
gattctttttggtcctagatcctct

SEQ ID NO: 5074023 - DNA, 25 bp, Homo sapien
acactttcacctgctgccgctatgg

SEQ ID NO: 5074024 - DNA, 25 bp, Homo sapien
ggactttgactgacacacctgaact

SEQ ID NO: 5074025 - DNA, 25 bp, Homo sapien
gggtatggctgtccctgtctgtctt

SEQ ID NO: 5074026 - DNA, 25 bp, Homo sapien
agtagtcattcgacttctttccaca

SEQ ID NO: 5074027 - DNA, 25 bp, Homo sapien
aaagtagtcattcgacttctttcca

SEQ ID NO: 5074028 - DNA, 25 bp, Homo sapien
aagtagtcattcgacttctttccac

SEQ ID NO: 5074029 - DNA, 25 bp, Homo sapien
gcttgtcgctcttcagctggtatga

SEQ ID NO: 5074030 - DNA, 25 bp, Homo sapien
acccgagtctccaggtttagtcagg

SEQ ID NO: 5074031 - DNA, 25 bp, Homo sapien
tgagcggcggtgagatccgcggctg

SEQ ID NO: 5074032 - DNA, 25 bp, Homo sapien
ccaggtttagtcaggccctggcctt

SEQ ID NO: 5074033 - DNA, 25 bp, Homo sapien
tgcgctgtcagtcccgggtcctctg

SEQ ID NO: 5074034 - DNA, 25 bp, Homo sapien
gtcatcgcggcccaaacaactcggt

SEQ ID NO: 5074035 - DNA, 25 bp, Homo sapien
cggtcaagttccgacttggattcgg

SEQ ID NO: 5074036 - DNA, 25 bp, Homo sapien
acggttcacgccgtgcggtcatcgc

SEQ ID NO: 5074037 - DNA, 25 bp, Homo sapien
gactgcaagcggagggaaggccgca

SEQ ID NO: 5074038 - DNA, 25 bp, Homo sapien
gcccaccctcccgactgcaagcgga

SEQ ID NO: 5074039 - DNA, 25 bp, Homo sapien
tacaggaaaggggttgcaagggcac

SEQ ID NO: 5074040 - DNA, 25 bp, Homo sapien
cctcccgactgcaagcggagggaag

SEQ ID NO: 5074041 - DNA, 25 bp, Homo sapien
ttccatctgtcaagacgacgtagaa

SEQ ID NO: 5074042 - DNA, 25 bp, Homo sapien
tcaagacgacgtagaataaaaatcc

SEQ ID NO: 5074043 - DNA, 25 bp, Homo sapien
tctgtcaagacgacgtagaataaaa

SEQ ID NO: 5074044 - DNA, 25 bp, Homo sapien
gacgacgtagaataaaaatcctcag

SEQ ID NO: 5074045 - DNA, 25 bp, Homo sapien
caagtatgcgataaactttcaggaa

SEQ ID NO: 5074046 - DNA, 25 bp, Homo sapien
tatgtggctatgcaaagttagctaa

SEQ ID NO: 5074047 - DNA, 25 bp, Homo sapien
ggaaacgaattcaccaaagcacttc

SEQ ID NO: 5074048 - DNA, 25 bp, Homo sapien
gtggaatgcagctgcgacgctctat

SEQ ID NO: 5074049 - DNA, 25 bp, Homo sapien
ttttccattgcatcagaagatggga

SEQ ID NO: 5074050 - DNA, 25 bp, Homo sapien
agaccacagtgggttttccattgca

SEQ ID NO: 5074051 - DNA, 25 bp, Homo sapien
aaaggcaaggtacaaagactgctgc

SEQ ID NO: 5074052 - DNA, 25 bp, Homo sapien
caaggtacaaagactgctgcaggga

SEQ ID NO: 5074053 - DNA, 25 bp, Homo sapien
tgggtcaattcagctcgccacctgt

SEQ ID NO: 5074054 - DNA, 25 bp, Homo sapien
tgtattctgagaacggtgcctagca

SEQ ID NO: 5074055 - DNA, 25 bp, Homo sapien
cacaggctttggtacatgtcagtgc

SEQ ID NO: 5074056 - DNA, 25 bp, Homo sapien
gaggagctgctacagaaaccttctg

SEQ ID NO: 5074057 - DNA, 25 bp, Homo sapien
tgtgccgcccatttctaaaagctca

SEQ ID NO: 5074058 - DNA, 25 bp, Homo sapien
cagcgagtgtgactgttaaacccaa

SEQ ID NO: 5074059 - DNA, 25 bp, Homo sapien
taaggaatactctacatgacaaagt

SEQ ID NO: 5074060 - DNA, 25 bp, Homo sapien
ggataaaactttcagggtcagcgag

SEQ ID NO: 5074061 - DNA, 25 bp, Homo sapien
tgtgagcagttaagtttggtcatgt

SEQ ID NO: 5074062 - DNA, 25 bp, Homo sapien
tgagcagttaagtttggtcatgttt

SEQ ID NO: 5074063 - DNA, 25 bp, Homo sapien
gtgagcagttaagtttggtcatgtt

SEQ ID NO: 5074064 - DNA, 25 bp, Homo sapien
ctgtgagcagttaagtttggtcatg

SEQ ID NO: 5074065 - DNA, 25 bp, Homo sapien
ttgcaaattcgaggcctacaggctg

SEQ ID NO: 5074066 - DNA, 25 bp, Homo sapien
tatggcaacaactgactacaagtga

SEQ ID NO: 5074067 - DNA, 25 bp, Homo sapien
gagggcacatattctcctatggcaa

SEQ ID NO: 5074068 - DNA, 25 bp, Homo sapien
gctgaattcatttggtagcctagga

SEQ ID NO: 5074069 - DNA, 25 bp, Homo sapien
ctaaagcaatgagaacagaataagg

SEQ ID NO: 5074070 - DNA, 25 bp, Homo sapien
tgagaacagaataagggaaagataa

SEQ ID NO: 5074071 - DNA, 25 bp, Homo sapien
gagaacagaataagggaaagataag

SEQ ID NO: 5074072 - DNA, 25 bp, Homo sapien
aagcaatgagaacagaataagggaa

SEQ ID NO: 5074073 - DNA, 25 bp, Homo sapien
atgatcctacactgcctccaagatg

SEQ ID NO: 5074074 - DNA, 25 bp, Homo sapien
tgatcctacactgcctccaagatgg

SEQ ID NO: 5074075 - DNA, 25 bp, Homo sapien
tccatgatcctacactgcctccaag

SEQ ID NO: 5074076 - DNA, 25 bp, Homo sapien
catgatcctacactgcctccaagat

SEQ ID NO: 5074077 - DNA, 25 bp, Homo sapien
aatctctgctttgtagtactcgatg

SEQ ID NO: 5074078 - DNA, 25 bp, Homo sapien
tcgatgtgtgaaatagctgatcctg

SEQ ID NO: 5074079 - DNA, 25 bp, Homo sapien
gctgatcctgaacaaaaagatccaa

SEQ ID NO: 5074080 - DNA, 25 bp, Homo sapien
ataatcatgttagcacctacttggg

SEQ ID NO: 5074081 - DNA, 25 bp, Homo sapien
tgccagtggcgcctgtgaaacgagt

SEQ ID NO: 5074082 - DNA, 25 bp, Homo sapien
aaacgagtggagatgagttctgagc

SEQ ID NO: 5074083 - DNA, 25 bp, Homo sapien
ggtaccaccgatatgatcaaggaaa

SEQ ID NO: 5074084 - DNA, 25 bp, Homo sapien
gagcggttggtcaggatcgtatcac

SEQ ID NO: 5074085 - DNA, 25 bp, Homo sapien
tctacatggaacagaggagtgccca

SEQ ID NO: 5074086 - DNA, 25 bp, Homo sapien
tctattatataccagattccgggag

SEQ ID NO: 5074087 - DNA, 25 bp, Homo sapien
tagatgatcgttattcgctgtcaag

SEQ ID NO: 5074088 - DNA, 25 bp, Homo sapien
gaatcacggcatccaatttgaaagc

SEQ ID NO: 5074089 - DNA, 25 bp, Homo sapien
gttccaggatcacgcggccttcctt

SEQ ID NO: 5074090 - DNA, 25 bp, Homo sapien
atctcgaaccatgtggcggccagtg

SEQ ID NO: 5074091 - DNA, 25 bp, Homo sapien
gcagtttttgcagctcacatctcga

SEQ ID NO: 5074092 - DNA, 25 bp, Homo sapien
tttgcagctcacatctcgaaccatg

SEQ ID NO: 5074093 - DNA, 25 bp, Homo sapien
ggaaaaagacaacccagcagttctg

SEQ ID NO: 5074094 - DNA, 25 bp, Homo sapien
tccgactctgatgctaaggtgacag

SEQ ID NO: 5074095 - DNA, 25 bp, Homo sapien
cactgagcctttagcgctgggcaca

SEQ ID NO: 5074096 - DNA, 25 bp, Homo sapien
ggtgctacggttcatctccaacaag

SEQ ID NO: 5074097 - DNA, 25 bp, Homo sapien
gaaactattaggctctacagacttg

SEQ ID NO: 5074098 - DNA, 25 bp, Homo sapien
gatctaggcctttgatggaaactat

SEQ ID NO: 5074099 - DNA, 25 bp, Homo sapien
gcgggtttcaacagtatgctttcat

SEQ ID NO: 5074100 - DNA, 25 bp, Homo sapien
tctaaatgcaacactgcgggtttca

SEQ ID NO: 5074101 - DNA, 25 bp, Homo sapien
catttaattccaccagaagcaaata

SEQ ID NO: 5074102 - DNA, 25 bp, Homo sapien
cacttttaatatcaacgacagaaat

SEQ ID NO: 5074103 - DNA, 25 bp, Homo sapien
aatatttcactaattcaactgaggc

SEQ ID NO: 5074104 - DNA, 25 bp, Homo sapien
aaggacctagaaattgagcatgcaa

SEQ ID NO: 5074105 - DNA, 25 bp, Homo sapien
tgcacatagtgctgtaggtaaggca

SEQ ID NO: 5074106 - DNA, 25 bp, Homo sapien
ggaatctgcatataatcaaaagcca

SEQ ID NO: 5074107 - DNA, 25 bp, Homo sapien
taaggcatgctactaggaatctgca

SEQ ID NO: 5074108 - DNA, 25 bp, Homo sapien
cccagtggcaaataggaggaactta

SEQ ID NO: 5074109 - DNA, 25 bp, Homo sapien
gaagaaagctacaggtactcaaaga

SEQ ID NO: 5074110 - DNA, 25 bp, Homo sapien
aggagcttgctgctggtacctgcca

SEQ ID NO: 5074111 - DNA, 25 bp, Homo sapien
gataccaagtatgtgttcagagata

SEQ ID NO: 5074112 - DNA, 25 bp, Homo sapien
taggcagttaatcaagtcagacatc

SEQ ID NO: 5074113 - DNA, 25 bp, Homo sapien
ccaggggatttctcaaactgcacca

SEQ ID NO: 5074114 - DNA, 25 bp, Homo sapien
tcgggggcataccaggggatttctc

SEQ ID NO: 5074115 - DNA, 25 bp, Homo sapien
ggagtggcggaagccaacctcctct

SEQ ID NO: 5074116 - DNA, 25 bp, Homo sapien
gcagtttaactgctggaaaagaggg

SEQ ID NO: 5074117 - DNA, 25 bp, Homo sapien
tccaggtagagtgggatagttgaga

SEQ ID NO: 5074118 - DNA, 25 bp, Homo sapien
attacactcgtggaattttctggag

SEQ ID NO: 5074119 - DNA, 25 bp, Homo sapien
gtgggaagagattacactcgtggaa

SEQ ID NO: 5074120 - DNA, 25 bp, Homo sapien
tagttgagaaggtggtggccagctc

SEQ ID NO: 5074121 - DNA, 25 bp, Homo sapien
tgacaagcttcagaaacgcctctga

SEQ ID NO: 5074122 - DNA, 25 bp, Homo sapien
gaacaccttgcattgggctgggatc

SEQ ID NO: 5074123 - DNA, 25 bp, Homo sapien
ttcagaaacgcctctgaacaccttg

SEQ ID NO: 5074124 - DNA, 25 bp, Homo sapien
ctctgaacaccttgcattgggctgg

SEQ ID NO: 5074125 - DNA, 25 bp, Homo sapien
gtaagacggtcccttgcatcagctc

SEQ ID NO: 5074126 - DNA, 25 bp, Homo sapien
gatgtcgtgccattgcagtaagacg

SEQ ID NO: 5074127 - DNA, 25 bp, Homo sapien
gcattttctccataattcgattctg

SEQ ID NO: 5074128 - DNA, 25 bp, Homo sapien
gattctgcccaatgatgtcgtgcca

SEQ ID NO: 5074129 - DNA, 25 bp, Homo sapien
caagctggagagagcgtgccacttt

SEQ ID NO: 5074130 - DNA, 25 bp, Homo sapien
cttcgaggacaagtaggagaattcc

SEQ ID NO: 5074131 - DNA, 25 bp, Homo sapien
cactttcgggatgaacgaggacttg

SEQ ID NO: 5074132 - DNA, 25 bp, Homo sapien
tcagaagaaagaccgaatgcagcag

SEQ ID NO: 5074133 - DNA, 25 bp, Homo sapien
tggattttccaaccaaggacagtga

SEQ ID NO: 5074134 - DNA, 25 bp, Homo sapien
gagccttcctgtaccctgccatgga

SEQ ID NO: 5074135 - DNA, 25 bp, Homo sapien
tgtccactaatgaaagagtaactac

SEQ ID NO: 5074136 - DNA, 25 bp, Homo sapien
tgcttgtggtttgatgttgcctcct

SEQ ID NO: 5074137 - DNA, 25 bp, Homo sapien
gttgcccagggtggcagtgcagccc

SEQ ID NO: 5074138 - DNA, 25 bp, Homo sapien
tgcccagggtggcagtgcagccccg

SEQ ID NO: 5074139 - DNA, 25 bp, Homo sapien
aagttgcccagggtggcagtgcagc

SEQ ID NO: 5074140 - DNA, 25 bp, Homo sapien
actgaagttgcccagggtggcagtg

SEQ ID NO: 5074141 - DNA, 25 bp, Homo sapien
cattctgggcgggtctgtcgtgcat

SEQ ID NO: 5074142 - DNA, 25 bp, Homo sapien
gtcgtgcattaggagagcctttctc

SEQ ID NO: 5074143 - DNA, 25 bp, Homo sapien
agaggccattctgggcgggtctgtc

SEQ ID NO: 5074144 - DNA, 25 bp, Homo sapien
tgcctccctgaaaacacgccaagca

SEQ ID NO: 5074145 - DNA, 25 bp, Homo sapien
tacattaagaaatcgcccagcctgg

SEQ ID NO: 5074146 - DNA, 25 bp, Homo sapien
cagagctcaaatctgagagctgagg

SEQ ID NO: 5074147 - DNA, 25 bp, Homo sapien
cattctctccagagctcaaatctga

SEQ ID NO: 5074148 - DNA, 25 bp, Homo sapien
ctgtttaatccacgttctgtaccct

SEQ ID NO: 5074149 - DNA, 25 bp, Homo sapien
catttcacaatttagcctttgccac

SEQ ID NO: 5074150 - DNA, 25 bp, Homo sapien
tcatttcacaatttagcctttgcca

SEQ ID NO: 5074151 - DNA, 25 bp, Homo sapien
gaagtcccgcccagctgattgacac

SEQ ID NO: 5074152 - DNA, 25 bp, Homo sapien
atgcaggtgttcttgcacaccctct

SEQ ID NO: 5074153 - DNA, 25 bp, Homo sapien
catgcaggtgttcttgcacaccctc

SEQ ID NO: 5074154 - DNA, 25 bp, Homo sapien
tcagtatgaagtcccgcccagctga

SEQ ID NO: 5074155 - DNA, 25 bp, Homo sapien
taagcggctagaatggcaggcttct

SEQ ID NO: 5074156 - DNA, 25 bp, Homo sapien
taacttccagacctctacgggcttg

SEQ ID NO: 5074157 - DNA, 25 bp, Homo sapien
tggccactcatgagcattaccctga

SEQ ID NO: 5074158 - DNA, 25 bp, Homo sapien
ttaccctgacagctaatccagccat

SEQ ID NO: 5074159 - DNA, 25 bp, Homo sapien
tagaggtttggccaaagcaataaaa

SEQ ID NO: 5074160 - DNA, 25 bp, Homo sapien
ctagaggtttggccaaagcaataaa

SEQ ID NO: 5074161 - DNA, 25 bp, Homo sapien
ctgaaagcacccctccgggatagtc

SEQ ID NO: 5074162 - DNA, 25 bp, Homo sapien
ctcagtgaacttctgaaaatgtcca

SEQ ID NO: 5074163 - DNA, 25 bp, Homo sapien
tcagtgaacttctgaaaatgtccaa

SEQ ID NO: 5074164 - DNA, 25 bp, Homo sapien
cagtggcaggcctgaaagcacccct

SEQ ID NO: 5074165 - DNA, 25 bp, Homo sapien
gtgttctggaagcacgatctgtttt

SEQ ID NO: 5074166 - DNA, 25 bp, Homo sapien
tgtgttctggaagcacgatctgttt

SEQ ID NO: 5074167 - DNA, 25 bp, Homo sapien
tgttctggaagcacgatctgttttg

SEQ ID NO: 5074168 - DNA, 25 bp, Homo sapien
tgttccccatcataacagattctta

SEQ ID NO: 5074169 - DNA, 25 bp, Homo sapien
ctggagtgcgggctggatatatttt

SEQ ID NO: 5074170 - DNA, 25 bp, Homo sapien
aagcatgccctccatatatctggag

SEQ ID NO: 5074171 - DNA, 25 bp, Homo sapien
taacagattcttaagcatgccctcc

SEQ ID NO: 5074172 - DNA, 25 bp, Homo sapien
ggcttcagtatctttccttactata

SEQ ID NO: 5074173 - DNA, 25 bp, Homo sapien
gacgcatgtcataatgataggaggg

SEQ ID NO: 5074174 - DNA, 25 bp, Homo sapien
tgtgcaaaaggtgaagcccagacgc

SEQ ID NO: 5074175 - DNA, 25 bp, Homo sapien
gaagcccagacgcatgtcataatga

SEQ ID NO: 5074176 - DNA, 25 bp, Homo sapien
tgatgtcattctttccacggaactt

SEQ ID NO: 5074177 - DNA, 25 bp, Homo sapien
tccacggaacttctcaaaggcattg

SEQ ID NO: 5074178 - DNA, 25 bp, Homo sapien
tgacttccaggcgctgcctgtgtgt

SEQ ID NO: 5074179 - DNA, 25 bp, Homo sapien
gggagtgactggtcatgatgtcatt

SEQ ID NO: 5074180 - DNA, 25 bp, Homo sapien
cctcggacccctctgaagcgtttgt

SEQ ID NO: 5074181 - DNA, 25 bp, Homo sapien
gcccgcagccttgcgatcagcgagg

SEQ ID NO: 5074182 - DNA, 25 bp, Homo sapien
cccatactaggcctctctctggaat

SEQ ID NO: 5074183 - DNA, 25 bp, Homo sapien
gccgctcgggacatgacagctcggc

SEQ ID NO: 5074184 - DNA, 25 bp, Homo sapien
ctgtgatttaaaaacggtccctgcg

SEQ ID NO: 5074185 - DNA, 25 bp, Homo sapien
caggctgacacacgcccctgtgatt

SEQ ID NO: 5074186 - DNA, 25 bp, Homo sapien
tagcgacgtcggcaaggtggacaca

SEQ ID NO: 5074187 - DNA, 25 bp, Homo sapien
cccgagtgaggatgacacgggcgca

SEQ ID NO: 5074188 - DNA, 25 bp, Homo sapien
agtgaatggggaaatatatagacat

SEQ ID NO: 5074189 - DNA, 25 bp, Homo sapien
cagtgaatggggaaatatatagaca

SEQ ID NO: 5074190 - DNA, 25 bp, Homo sapien
aggctgcagcgcgtgccctgctgct

SEQ ID NO: 5074191 - DNA, 25 bp, Homo sapien
caccaatgtgcgtcggtttttaggg

SEQ ID NO: 5074192 - DNA, 25 bp, Homo sapien
ttccccttcagcacggcgaaggcgg

SEQ ID NO: 5074193 - DNA, 25 bp, Homo sapien
gctgccggcctcgacgttgagactt

SEQ ID NO: 5074194 - DNA, 25 bp, Homo sapien
tttccgcttcttgggccaggccgga

SEQ ID NO: 5074195 - DNA, 25 bp, Homo sapien
tgaagcgagaagcatgaactttccg

SEQ ID NO: 5074196 - DNA, 25 bp, Homo sapien
ttgcgccggttttcccttcgctcag

SEQ ID NO: 5074197 - DNA, 25 bp, Homo sapien
tggcgccggcccgaaaagttgaagc

SEQ ID NO: 5074198 - DNA, 25 bp, Homo sapien
aagttcagtcccctctctaaacact

SEQ ID NO: 5074199 - DNA, 25 bp, Homo sapien
ttgcggcaagtttaggttcgggagc

SEQ ID NO: 5074200 - DNA, 25 bp, Homo sapien
tataataaggcacctagctgctcac

SEQ ID NO: 5074201 - DNA, 25 bp, Homo sapien
gctcacacaccacgggagaggcaag

SEQ ID NO: 5074202 - DNA, 25 bp, Homo sapien
cttggccgatctcagatagtcgggg

SEQ ID NO: 5074203 - DNA, 25 bp, Homo sapien
tggtaggaaaggccatccttgcggg

SEQ ID NO: 5074204 - DNA, 25 bp, Homo sapien
atgggctgggtgttcatcatcacct

SEQ ID NO: 5074205 - DNA, 25 bp, Homo sapien
ctggtaggaaaggccatccttgcgg

SEQ ID NO: 5074206 - DNA, 25 bp, Homo sapien
tccatgggctgggtgttcatcatca

SEQ ID NO: 5074207 - DNA, 25 bp, Homo sapien
agttctaaggaatgaccagccagag

SEQ ID NO: 5074208 - DNA, 25 bp, Homo sapien
catgtctgtagcacggacccatgga

SEQ ID NO: 5074209 - DNA, 25 bp, Homo sapien
gtaagatgtgagcaaggcagcgtct

SEQ ID NO: 5074210 - DNA, 25 bp, Homo sapien
cgtgcagtgggcataccttcatgtc

SEQ ID NO: 5074211 - DNA, 25 bp, Homo sapien
taatgtaaccttaaatggccctgtg

SEQ ID NO: 5074212 - DNA, 25 bp, Homo sapien
tagggaccgggctatcaactgtctg

SEQ ID NO: 5074213 - DNA, 25 bp, Homo sapien
aactgaaaggcaacaccagggcttc

SEQ ID NO: 5074214 - DNA, 25 bp, Homo sapien
tagtatgcggacgatgaaggcagca

SEQ ID NO: 5074215 - DNA, 25 bp, Homo sapien
gctgttggtcggccaaacaaacgcc

SEQ ID NO: 5074216 - DNA, 25 bp, Homo sapien
agcctctgctgttggtcggccaaac

SEQ ID NO: 5074217 - DNA, 25 bp, Homo sapien
cagcctctgctgttggtcggccaaa

SEQ ID NO: 5074218 - DNA, 25 bp, Homo sapien
ctgctgttggtcggccaaacaaacg

SEQ ID NO: 5074219 - DNA, 25 bp, Homo sapien
caaacacatccttcttcacaaggtg

SEQ ID NO: 5074220 - DNA, 25 bp, Homo sapien
tggtggaagcggaagcaaacacatc

SEQ ID NO: 5074221 - DNA, 25 bp, Homo sapien
acatccttcttcacaaggtggcagg

SEQ ID NO: 5074222 - DNA, 25 bp, Homo sapien
catggtggaagcggaagcaaacaca

SEQ ID NO: 5074223 - DNA, 25 bp, Homo sapien
acgtggggcttccaggaatcacagg

SEQ ID NO: 5074224 - DNA, 25 bp, Homo sapien
cacgtggggcttccaggaatcacag

SEQ ID NO: 5074225 - DNA, 25 bp, Homo sapien
tttgcagcagcggtcaaaatctgac

SEQ ID NO: 5074226 - DNA, 25 bp, Homo sapien
gcagacggtccttcagtttgcagca

SEQ ID NO: 5074227 - DNA, 25 bp, Homo sapien
tccaccactatggagggcagacggt

SEQ ID NO: 5074228 - DNA, 25 bp, Homo sapien
gcagttatcttgctcatcctcctgg

SEQ ID NO: 5074229 - DNA, 25 bp, Homo sapien
catacaactggtgcccttgcaggaa

SEQ ID NO: 5074230 - DNA, 25 bp, Homo sapien
caacctggactgactggagacctga

SEQ ID NO: 5074231 - DNA, 25 bp, Homo sapien
tatgtgagcctaccacagctgggag

SEQ ID NO: 5074232 - DNA, 25 bp, Homo sapien
caaattgtcagagggctccactgct

SEQ ID NO: 5074233 - DNA, 25 bp, Homo sapien
gtatggatgaaccactctctgcagc

SEQ ID NO: 5074234 - DNA, 25 bp, Homo sapien
cagggtagcagataagggaagacac

SEQ ID NO: 5074235 - DNA, 25 bp, Homo sapien
agaggaaagcccctctcggtgcagg

SEQ ID NO: 5074236 - DNA, 25 bp, Homo sapien
tggcttcccagaacggaattccgcg

SEQ ID NO: 5074237 - DNA, 25 bp, Homo sapien
agaagttacaggaggttcatctcac

SEQ ID NO: 5074238 - DNA, 25 bp, Homo sapien
aacggtcatacaaagtggtctaggg

SEQ ID NO: 5074239 - DNA, 25 bp, Homo sapien
taggagctcagccacttgtccaaga

SEQ ID NO: 5074240 - DNA, 25 bp, Homo sapien
tgacattagctgtcagcccctggcc

SEQ ID NO: 5074241 - DNA, 25 bp, Homo sapien
tttcaaactttatttacaactgtca

SEQ ID NO: 5074242 - DNA, 25 bp, Homo sapien
ttcaaactttatttacaactgtcac

SEQ ID NO: 5074243 - DNA, 25 bp, Homo sapien
tcaaactttatttacaactgtcaca

SEQ ID NO: 5074244 - DNA, 25 bp, Homo sapien
gccagcagtgacaaacatgcagtga

SEQ ID NO: 5074245 - DNA, 25 bp, Homo sapien
gatgtcactattgttggttgtctgc

SEQ ID NO: 5074246 - DNA, 25 bp, Homo sapien
ttgtctgctagctgctgcagtgggt

SEQ ID NO: 5074247 - DNA, 25 bp, Homo sapien
gagggtttcctgtgtagcttccgcc

SEQ ID NO: 5074248 - DNA, 25 bp, Homo sapien
taattattcgggtgatgtggaaact

SEQ ID NO: 5074249 - DNA, 25 bp, Homo sapien
aaatctataattattcgggtgatgt

SEQ ID NO: 5074250 - DNA, 25 bp, Homo sapien
tgatgtggaaactgtacgtttaaaa

SEQ ID NO: 5074251 - DNA, 25 bp, Homo sapien
tcgggtgatgtggaaactgtacgtt

SEQ ID NO: 5074252 - DNA, 25 bp, Homo sapien
catcattgaacaggggctgtaactc

SEQ ID NO: 5074253 - DNA, 25 bp, Homo sapien
cattttgcatgtagaaggcacatga

SEQ ID NO: 5074254 - DNA, 25 bp, Homo sapien
gtaactcctcaaagcagttgatgac

SEQ ID NO: 5074255 - DNA, 25 bp, Homo sapien
ggcacatgatacatcatcataccct

SEQ ID NO: 5074256 - DNA, 25 bp, Homo sapien
tgttgctgggaagaacaatggtcac

SEQ ID NO: 5074257 - DNA, 25 bp, Homo sapien
cagccctttgttgctgggaagaaca

SEQ ID NO: 5074258 - DNA, 25 bp, Homo sapien
tagccagcagccctttgttgctggg

SEQ ID NO: 5074259 - DNA, 25 bp, Homo sapien
ggaagaacaatggtcacaggttcca

SEQ ID NO: 5074260 - DNA, 25 bp, Homo sapien
gcccatctttgcctttactcgcccc

SEQ ID NO: 5074261 - DNA, 25 bp, Homo sapien
atctttgcctttactcgccccagcc

SEQ ID NO: 5074262 - DNA, 25 bp, Homo sapien
agcccaccagagctgatgttcacag

SEQ ID NO: 5074263 - DNA, 25 bp, Homo sapien
tttgcctttactcgccccagccagc

SEQ ID NO: 5074264 - DNA, 25 bp, Homo sapien
caggaacccagtgaaagcaagcaag

SEQ ID NO: 5074265 - DNA, 25 bp, Homo sapien
ttccaggaacccagtgaaagcaagc

SEQ ID NO: 5074266 - DNA, 25 bp, Homo sapien
aggcttccaggaacccagtgaaagc

SEQ ID NO: 5074267 - DNA, 25 bp, Homo sapien
aagcaagcaagcaggcctgcatggg

SEQ ID NO: 5074268 - DNA, 25 bp, Homo sapien
ttaggatgacatcctccagtgtagg

SEQ ID NO: 5074269 - DNA, 25 bp, Homo sapien
taggatgacatcctccagtgtaggc

SEQ ID NO: 5074270 - DNA, 25 bp, Homo sapien
ggatgacatcctccagtgtaggccc

SEQ ID NO: 5074271 - DNA, 25 bp, Homo sapien
aggatgacatcctccagtgtaggcc

SEQ ID NO: 5074272 - DNA, 25 bp, Homo sapien
caggacatgtggtgtggcctttcat

SEQ ID NO: 5074273 - DNA, 25 bp, Homo sapien
gctctgaatatctgctccataagtt

SEQ ID NO: 5074274 - DNA, 25 bp, Homo sapien
ggcagggcttgttatggaagaccat

SEQ ID NO: 5074275 - DNA, 25 bp, Homo sapien
gggctctgaatatctgctccataag

SEQ ID NO: 5074276 - DNA, 25 bp, Homo sapien
ggggcagggcttgttatggaagacc

SEQ ID NO: 5074277 - DNA, 25 bp, Homo sapien
caccgtgcccaatctggggtctcat

SEQ ID NO: 5074278 - DNA, 25 bp, Homo sapien
ccgtgcccaatctggggtctcatat

SEQ ID NO: 5074279 - DNA, 25 bp, Homo sapien
accgtgcccaatctggggtctcata

SEQ ID NO: 5074280 - DNA, 25 bp, Homo sapien
accctggcgtttcatggaccttcca

SEQ ID NO: 5074281 - DNA, 25 bp, Homo sapien
caaaccctggcgtttcatggacctt

SEQ ID NO: 5074282 - DNA, 25 bp, Homo sapien
cctggcgtttcatggaccttccatg

SEQ ID NO: 5074283 - DNA, 25 bp, Homo sapien
tgcccaaaccctggcgtttcatgga

SEQ ID NO: 5074284 - DNA, 25 bp, Homo sapien
gaagcatgggttgctcagcccagca

SEQ ID NO: 5074285 - DNA, 25 bp, Homo sapien
cagtctgcgattggttgctgccgtt

SEQ ID NO: 5074286 - DNA, 25 bp, Homo sapien
catttggctggtgcccgaagcatgg

SEQ ID NO: 5074287 - DNA, 25 bp, Homo sapien
atttcaaggttgacccagtctgcga

SEQ ID NO: 5074288 - DNA, 25 bp, Homo sapien
gttgacagcgatgaagccatgtcca

SEQ ID NO: 5074289 - DNA, 25 bp, Homo sapien
ggagatgctgaccatgatgtctgtc

SEQ ID NO: 5074290 - DNA, 25 bp, Homo sapien
tgtgtttgacggtgctatacctctc

SEQ ID NO: 5074291 - DNA, 25 bp, Homo sapien
cagcactactggcatttggcaaggg

SEQ ID NO: 5074292 - DNA, 25 bp, Homo sapien
cattgtttccgtgggatgtctgcct

SEQ ID NO: 5074293 - DNA, 25 bp, Homo sapien
tttccacttcattgtttccgtggga

SEQ ID NO: 5074294 - DNA, 25 bp, Homo sapien
tcagcggcaagtccgaagggtcctg

SEQ ID NO: 5074295 - DNA, 25 bp, Homo sapien
gtaaactcaacatccgacgaaaatc

SEQ ID NO: 5074296 - DNA, 25 bp, Homo sapien
ttcatcggcctgacttgggcttcca

SEQ ID NO: 5074297 - DNA, 25 bp, Homo sapien
cactcagccaatgaatggtggagcc

SEQ ID NO: 5074298 - DNA, 25 bp, Homo sapien
tccatgtgccctcctggtaaaccag

SEQ ID NO: 5074299 - DNA, 25 bp, Homo sapien
ttcccacgtggtcaggcgcagggtc

SEQ ID NO: 5074300 - DNA, 25 bp, Homo sapien
gcaaaggcgggttgaattgctccat

SEQ ID NO: 5074301 - DNA, 25 bp, Homo sapien
gaaagaggtatgatgatgttgcctc

SEQ ID NO: 5074302 - DNA, 25 bp, Homo sapien
tcaaagaattacaccgaagagtcct

SEQ ID NO: 5074303 - DNA, 25 bp, Homo sapien
atgttgcctcttgagggatggtaga

SEQ ID NO: 5074304 - DNA, 25 bp, Homo sapien
cttggtggacgaagacacaatgtct

SEQ ID NO: 5074305 - DNA, 25 bp, Homo sapien
cagattctccggtgaggccactgga

SEQ ID NO: 5074306 - DNA, 25 bp, Homo sapien
tgggtttaccggctcttgcagattc

SEQ ID NO: 5074307 - DNA, 25 bp, Homo sapien
tccaggaatggacggccaagcttct

SEQ ID NO: 5074308 - DNA, 25 bp, Homo sapien
tataggcactgtgttttacgtgcat

SEQ ID NO: 5074309 - DNA, 25 bp, Homo sapien
ccaatgtgatactataggcactgtg

SEQ ID NO: 5074310 - DNA, 25 bp, Homo sapien
aaaaaaccccaatgtgatactatag

SEQ ID NO: 5074311 - DNA, 25 bp, Homo sapien
cactgtgttttacgtgcatcgcctc

SEQ ID NO: 5074312 - DNA, 25 bp, Homo sapien
tcacattgtgcaagcatggcagcct

SEQ ID NO: 5074313 - DNA, 25 bp, Homo sapien
tctctgctggaacgatagccctcag

SEQ ID NO: 5074314 - DNA, 25 bp, Homo sapien
tgtcatgggcctatgcaagagacca

SEQ ID NO: 5074315 - DNA, 25 bp, Homo sapien
tttcactgcaaaccgagaggaggct

SEQ ID NO: 5074316 - DNA, 25 bp, Homo sapien
gatcacgtgatatgactccaccgtg

SEQ ID NO: 5074317 - DNA, 25 bp, Homo sapien
ccaccgtgttgacgctcagcatctc

SEQ ID NO: 5074318 - DNA, 25 bp, Homo sapien
gtgatatgactccaccgtgttgacg

SEQ ID NO: 5074319 - DNA, 25 bp, Homo sapien
agctgggatctgtgatcacgtgata

SEQ ID NO: 5074320 - DNA, 25 bp, Homo sapien
cattgaggatgcaaagatgctttca

SEQ ID NO: 5074321 - DNA, 25 bp, Homo sapien
aaaaactccagatgggccgggcgcg

SEQ ID NO: 5074322 - DNA, 25 bp, Homo sapien
caaaccccatggttgccgaggaagg

SEQ ID NO: 5074323 - DNA, 25 bp, Homo sapien
ctcgtagcctttatgaggaacaaac

SEQ ID NO: 5074324 - DNA, 25 bp, Homo sapien
tgaatccagcccacattacactcag

SEQ ID NO: 5074325 - DNA, 25 bp, Homo sapien
atccagcccacattacactcagatt

SEQ ID NO: 5074326 - DNA, 25 bp, Homo sapien
gcccacattacactcagattccagg

SEQ ID NO: 5074327 - DNA, 25 bp, Homo sapien
ccagcccacattacactcagattcc

SEQ ID NO: 5074328 - DNA, 25 bp, Homo sapien
cacgctatggatcatggcttgtggg

SEQ ID NO: 5074329 - DNA, 25 bp, Homo sapien
aaagcacttctccaacacgctatgg

SEQ ID NO: 5074330 - DNA, 25 bp, Homo sapien
ctttggagccatggcagaaagtctc

SEQ ID NO: 5074331 - DNA, 25 bp, Homo sapien
tgtgggggacgacatgacacatgcc

SEQ ID NO: 5074332 - DNA, 25 bp, Homo sapien
ccccacagaagttttggacaggctg

SEQ ID NO: 5074333 - DNA, 25 bp, Homo sapien
tccgaagatactgcgcgtcaacctg

SEQ ID NO: 5074334 - DNA, 25 bp, Homo sapien
gtccctgtgctgctccgaagatact

SEQ ID NO: 5074335 - DNA, 25 bp, Homo sapien
ttcatgcagaacacgaagggggccg

SEQ ID NO: 5074336 - DNA, 25 bp, Homo sapien
cagctgacagttccccttgtcccag

SEQ ID NO: 5074337 - DNA, 25 bp, Homo sapien
agctgacagttccccttgtcccagc

SEQ ID NO: 5074338 - DNA, 25 bp, Homo sapien
tcagctgacagttccccttgtccca

SEQ ID NO: 5074339 - DNA, 25 bp, Homo sapien
ctgacagttccccttgtcccagctt

SEQ ID NO: 5074340 - DNA, 25 bp, Homo sapien
tcattccatgagtaaggtttgtgga

SEQ ID NO: 5074341 - DNA, 25 bp, Homo sapien
ctttataggggaaaagatgctctgc

SEQ ID NO: 5074342 - DNA, 25 bp, Homo sapien
tgagtaaggtttgtggagactttcc

SEQ ID NO: 5074343 - DNA, 25 bp, Homo sapien
ttcacctttataggggaaaagatgc

SEQ ID NO: 5074344 - DNA, 25 bp, Homo sapien
tacacacaggaataggaatgcccat

SEQ ID NO: 5074345 - DNA, 25 bp, Homo sapien
cctggacttcggatgggacaagact

SEQ ID NO: 5074346 - DNA, 25 bp, Homo sapien
gcagacctgagagggagttcgcaca

SEQ ID NO: 5074347 - DNA, 25 bp, Homo sapien
tcatgagaagcgcatgcagacctga

SEQ ID NO: 5074348 - DNA, 25 bp, Homo sapien
gtatttacaaaaagcactcagtggg

SEQ ID NO: 5074349 - DNA, 25 bp, Homo sapien
ggaagttaggataggctcagcaaca

SEQ ID NO: 5074350 - DNA, 25 bp, Homo sapien
taggacctattcctgtccagggccg

SEQ ID NO: 5074351 - DNA, 25 bp, Homo sapien
tgtcacttaatcacatccacaggtg

SEQ ID NO: 5074352 - DNA, 25 bp, Homo sapien
gcagagcagtggctgatgcaagaat

SEQ ID NO: 5074353 - DNA, 25 bp, Homo sapien
tgatgcaagaattgaacacagcagg

SEQ ID NO: 5074354 - DNA, 25 bp, Homo sapien
cagtggctgatgcaagaattgaaca

SEQ ID NO: 5074355 - DNA, 25 bp, Homo sapien
ctggaaaccgtcaaatgattcagaa

SEQ ID NO: 5074356 - DNA, 25 bp, Homo sapien
ctgacaaagtaaagatggaggtgac

SEQ ID NO: 5074357 - DNA, 25 bp, Homo sapien
ttgggtcacgttcctaggtctcctc

SEQ ID NO: 5074358 - DNA, 25 bp, Homo sapien
cttggctacccctaggctaaggagt

SEQ ID NO: 5074359 - DNA, 25 bp, Homo sapien
caaatcgtatttgggtcacgttcct

SEQ ID NO: 5074360 - DNA, 25 bp, Homo sapien
tgagggttaactgcttaggaagctt

SEQ ID NO: 5074361 - DNA, 25 bp, Homo sapien
ctgctaaattctgtttgtaggagcc

SEQ ID NO: 5074362 - DNA, 25 bp, Homo sapien
aattctgtttgtaggagcctcctcc

SEQ ID NO: 5074363 - DNA, 25 bp, Homo sapien
gctgagggttaactgcttaggaagc

SEQ ID NO: 5074364 - DNA, 25 bp, Homo sapien
aaattggaggaatcaggcaatagga

SEQ ID NO: 5074365 - DNA, 25 bp, Homo sapien
ggaatcaggcaataggaggaagaga

SEQ ID NO: 5074366 - DNA, 25 bp, Homo sapien
aggaatcaggcaataggaggaagag

SEQ ID NO: 5074367 - DNA, 25 bp, Homo sapien
ttggaggaatcaggcaataggagga

SEQ ID NO: 5074368 - DNA, 25 bp, Homo sapien
ccagatcttgtcgtgaccataggta

SEQ ID NO: 5074369 - DNA, 25 bp, Homo sapien
aggaggcattggctcgccagatctt

SEQ ID NO: 5074370 - DNA, 25 bp, Homo sapien
ctgcaggtgccggtcattgatgaag

SEQ ID NO: 5074371 - DNA, 25 bp, Homo sapien
accataggtatcttcattggcaaaa

SEQ ID NO: 5074372 - DNA, 25 bp, Homo sapien
tggcagcagacaggctcactatagc

SEQ ID NO: 5074373 - DNA, 25 bp, Homo sapien
tctcagctgtcagcgagtgatggca

SEQ ID NO: 5074374 - DNA, 25 bp, Homo sapien
caaaggccgatgcatactcatgaac

SEQ ID NO: 5074375 - DNA, 25 bp, Homo sapien
atagctggcaaaggccgatgcatac

SEQ ID NO: 5074376 - DNA, 25 bp, Homo sapien
ttacttgcaagggtcaggggggtca

SEQ ID NO: 5074377 - DNA, 25 bp, Homo sapien
tttgtactgcataatctgaatgctt

SEQ ID NO: 5074378 - DNA, 25 bp, Homo sapien
caggggggtcagtgacagtggcaag

SEQ ID NO: 5074379 - DNA, 25 bp, Homo sapien
gctgagatttgtactgcataatctg

SEQ ID NO: 5074380 - DNA, 25 bp, Homo sapien
gaaatctgttcaggttcacagctct

SEQ ID NO: 5074381 - DNA, 25 bp, Homo sapien
ccagatctgaagtcgactcgccgtg

SEQ ID NO: 5074382 - DNA, 25 bp, Homo sapien
catagtctttctctgctggagctga

SEQ ID NO: 5074383 - DNA, 25 bp, Homo sapien
ggactcggaggagccttgtccccag

SEQ ID NO: 5074384 - DNA, 25 bp, Homo sapien
tccaatctggctaagcagacagaac

SEQ ID NO: 5074385 - DNA, 25 bp, Homo sapien
caatctggctaagcagacagaactg

SEQ ID NO: 5074386 - DNA, 25 bp, Homo sapien
atctggctaagcagacagaactgaa

SEQ ID NO: 5074387 - DNA, 25 bp, Homo sapien
ttccaatctggctaagcagacagaa

SEQ ID NO: 5074388 - DNA, 25 bp, Homo sapien
cttctctgtatctaggtctttgctg

SEQ ID NO: 5074389 - DNA, 25 bp, Homo sapien
ctctgtatctaggtctttgctggag

SEQ ID NO: 5074390 - DNA, 25 bp, Homo sapien
tctctgtatctaggtctttgctgga

SEQ ID NO: 5074391 - DNA, 25 bp, Homo sapien
ttctctgtatctaggtctttgctgg

SEQ ID NO: 5074392 - DNA, 25 bp, Homo sapien
ttcatcccgtaacgcggaggcgtcc

SEQ ID NO: 5074393 - DNA, 25 bp, Homo sapien
tgacaagcagggcacgccgcgcgac

SEQ ID NO: 5074394 - DNA, 25 bp, Homo sapien
taggggtcacaacctccgtgcggaa

SEQ ID NO: 5074395 - DNA, 25 bp, Homo sapien
cgtgcggaacccgccgttaattcat

SEQ ID NO: 5074396 - DNA, 25 bp, Homo sapien
gcggcccggggaaggtccatggctc

SEQ ID NO: 5074397 - DNA, 25 bp, Homo sapien
tcgcggcccggggaaggtccatggc

SEQ ID NO: 5074398 - DNA, 25 bp, Homo sapien
cgcggcccggggaaggtccatggct

SEQ ID NO: 5074399 - DNA, 25 bp, Homo sapien
caaatctccatggatccagtttgga

SEQ ID NO: 5074400 - DNA, 25 bp, Homo sapien
aatctccatggatccagtttggaag

SEQ ID NO: 5074401 - DNA, 25 bp, Homo sapien
tctccatggatccagtttggaagaa

SEQ ID NO: 5074402 - DNA, 25 bp, Homo sapien
aaatctccatggatccagtttggaa

SEQ ID NO: 5074403 - DNA, 25 bp, Homo sapien
gcagacacatacttaggcaatggga

SEQ ID NO: 5074404 - DNA, 25 bp, Homo sapien
cagcacctgggttccactgaagcta

SEQ ID NO: 5074405 - DNA, 25 bp, Homo sapien
caaaaaggtggcactgtgtctctca

SEQ ID NO: 5074406 - DNA, 25 bp, Homo sapien
taaaattccgtgacccaaatcgcaa

SEQ ID NO: 5074407 - DNA, 25 bp, Homo sapien
tccatttgttgccagcttcccagaa

SEQ ID NO: 5074408 - DNA, 25 bp, Homo sapien
aagagagtacccactctgtttttca

SEQ ID NO: 5074409 - DNA, 25 bp, Homo sapien
gcctcgttaattgaccatgggttca

SEQ ID NO: 5074410 - DNA, 25 bp, Homo sapien
cagtagctagaaactgcctcgttaa

SEQ ID NO: 5074411 - DNA, 25 bp, Homo sapien
gagtcctgctttatgaagtacgtgc

SEQ ID NO: 5074412 - DNA, 25 bp, Homo sapien
catgggttcagaagcaccacaattt

SEQ ID NO: 5074413 - DNA, 25 bp, Homo sapien
agttctgaaagtcttgtctcctttt

SEQ ID NO: 5074414 - DNA, 25 bp, Homo sapien
gttctgaaagtcttgtctcctttta

SEQ ID NO: 5074415 - DNA, 25 bp, Homo sapien
ctgtatattcttgcccatgtaagcc

SEQ ID NO: 5074416 - DNA, 25 bp, Homo sapien
ttctgtatattcttgcccatgtaag

SEQ ID NO: 5074417 - DNA, 25 bp, Homo sapien
tagactatgggttaactgagggaca

SEQ ID NO: 5074418 - DNA, 25 bp, Homo sapien
caagaggatcaaggagttcaagccc

SEQ ID NO: 5074419 - DNA, 25 bp, Homo sapien
gagcaggttcagttgtcctcctgag

SEQ ID NO: 5074420 - DNA, 25 bp, Homo sapien
taaattctatcctgtcagggagcag

SEQ ID NO: 5074421 - DNA, 25 bp, Homo sapien
gggaatgctgctatcagaactacat

SEQ ID NO: 5074422 - DNA, 25 bp, Homo sapien
cacttgtatggtacaatggtggaga

SEQ ID NO: 5074423 - DNA, 25 bp, Homo sapien
gagaactgtattctccaagcccact

SEQ ID NO: 5074424 - DNA, 25 bp, Homo sapien
gagaggggaatgctgctatcagaac

SEQ ID NO: 5074425 - DNA, 25 bp, Homo sapien
tcagcttcctaacactctactcaag

SEQ ID NO: 5074426 - DNA, 25 bp, Homo sapien
tcaaggtcttctacagtctggcccc

SEQ ID NO: 5074427 - DNA, 25 bp, Homo sapien
catcctacaagtccagctcagttct

SEQ ID NO: 5074428 - DNA, 25 bp, Homo sapien
tatacccgctttactcctctcaagg

SEQ ID NO: 5074429 - DNA, 25 bp, Homo sapien
cacaaccatttcaatcttaggaggg

SEQ ID NO: 5074430 - DNA, 25 bp, Homo sapien
cagtaaagggatagcacaaggagtt

SEQ ID NO: 5074431 - DNA, 25 bp, Homo sapien
tgtacattctcatgaaacagttgcc

SEQ ID NO: 5074432 - DNA, 25 bp, Homo sapien
caaggagttttctagagtgacagag

SEQ ID NO: 5074433 - DNA, 25 bp, Homo sapien
gactaaaaactacagatgagtttcc

SEQ ID NO: 5074434 - DNA, 25 bp, Homo sapien
caacggtccccactttggatccatt

SEQ ID NO: 5074435 - DNA, 25 bp, Homo sapien
cagtagatgcctgaatcacagatag

SEQ ID NO: 5074436 - DNA, 25 bp, Homo sapien
tacccagaagtagaagcaattgact

SEQ ID NO: 5074437 - DNA, 25 bp, Homo sapien
catcaaaggtaaaaagggactcagc

SEQ ID NO: 5074438 - DNA, 25 bp, Homo sapien
ccagcgataccaagatgggtttaca

SEQ ID NO: 5074439 - DNA, 25 bp, Homo sapien
caggtagggtgagccatgttgccac

SEQ ID NO: 5074440 - DNA, 25 bp, Homo sapien
caaggcggttgttgatccagcgata

SEQ ID NO: 5074441 - DNA, 25 bp, Homo sapien
tggttcctctcaagatcacagagaa

SEQ ID NO: 5074442 - DNA, 25 bp, Homo sapien
cacaaagatgagagtggttcctctc

SEQ ID NO: 5074443 - DNA, 25 bp, Homo sapien
gaaagttttaccatcatgcccgctg

SEQ ID NO: 5074444 - DNA, 25 bp, Homo sapien
gatcacagagaaagttttaccatca

SEQ ID NO: 5074445 - DNA, 25 bp, Homo sapien
ccaggaacacctttgagactcgctt

SEQ ID NO: 5074446 - DNA, 25 bp, Homo sapien
gaggtagctatatcgcatcaggcaa

SEQ ID NO: 5074447 - DNA, 25 bp, Homo sapien
tccgatggttcatgataatgacact

SEQ ID NO: 5074448 - DNA, 25 bp, Homo sapien
catccagtccattcttgtccgatgg

SEQ ID NO: 5074449 - DNA, 25 bp, Homo sapien
caaaagaaccagagattgtttttgg

SEQ ID NO: 5074450 - DNA, 25 bp, Homo sapien
gatccactaaagacaaaagaaccag

SEQ ID NO: 5074451 - DNA, 25 bp, Homo sapien
aaagtcatctgccatagcagatcca

SEQ ID NO: 5074452 - DNA, 25 bp, Homo sapien
tggaatcgctttaatgcttaagtca

SEQ ID NO: 5074453 - DNA, 25 bp, Homo sapien
gtactttatcagcacagaccagttt

SEQ ID NO: 5074454 - DNA, 25 bp, Homo sapien
ttctggccgaaatcacaagtactac

SEQ ID NO: 5074455 - DNA, 25 bp, Homo sapien
cacagaccagtttctggccgaaatc

SEQ ID NO: 5074456 - DNA, 25 bp, Homo sapien
agtcaatgtcaagtactttatcagc

SEQ ID NO: 5074457 - DNA, 25 bp, Homo sapien
catgttgtattcctagccatttaaa

SEQ ID NO: 5074458 - DNA, 25 bp, Homo sapien
tgcaatgttgaaatatccctacttc

SEQ ID NO: 5074459 - DNA, 25 bp, Homo sapien
tatacaagcgcgataaaaacatttt

SEQ ID NO: 5074460 - DNA, 25 bp, Homo sapien
gcacctagcataatgaatgcttcga

SEQ ID NO: 5074461 - DNA, 25 bp, Homo sapien
catgtcttcgaaatggctcttgtca

SEQ ID NO: 5074462 - DNA, 25 bp, Homo sapien
gaagtggttcgtgaatatcacaaaa

SEQ ID NO: 5074463 - DNA, 25 bp, Homo sapien
ctgggaatatgaggagttgaagtgg

SEQ ID NO: 5074464 - DNA, 25 bp, Homo sapien
tcgaaatggctcttgtcatccttcc

SEQ ID NO: 5074465 - DNA, 25 bp, Homo sapien
gatacaaacattgcagatggtccat

SEQ ID NO: 5074466 - DNA, 25 bp, Homo sapien
cttatgtaaccagacccaggtttgg

SEQ ID NO: 5074467 - DNA, 25 bp, Homo sapien
gatggtccattatcaagatcccaga

SEQ ID NO: 5074468 - DNA, 25 bp, Homo sapien
caggtttggctatttgctgctcgaa

SEQ ID NO: 5074469 - DNA, 25 bp, Homo sapien
gcaaatgcattacttcgagacttgc

SEQ ID NO: 5074470 - DNA, 25 bp, Homo sapien
tctcttagacggtctaccacaaaag

SEQ ID NO: 5074471 - DNA, 25 bp, Homo sapien
ctgtagttcttggatgtaaaacata

SEQ ID NO: 5074472 - DNA, 25 bp, Homo sapien
ccacaaaagtaaagcctgtagttct

SEQ ID NO: 5074473 - DNA, 25 bp, Homo sapien
tttcaaaagagagctctatagattg

SEQ ID NO: 5074474 - DNA, 25 bp, Homo sapien
gagagctctatagattgttctatga

SEQ ID NO: 5074475 - DNA, 25 bp, Homo sapien
ctatagattgttctatgatgtcaga

SEQ ID NO: 5074476 - DNA, 25 bp, Homo sapien
gattgttctatgatgtcagaaatac

SEQ ID NO: 5074477 - DNA, 25 bp, Homo sapien
ggaaagggggcgaggtgggcagtga

SEQ ID NO: 5074478 - DNA, 25 bp, Homo sapien
ctaaatgagcagctcagatttttcg

SEQ ID NO: 5074479 - DNA, 25 bp, Homo sapien
ttcactaaacacaagaagatctgtc

SEQ ID NO: 5074480 - DNA, 25 bp, Homo sapien
cattgaccaattagttgataggctc

SEQ ID NO: 5074481 - DNA, 25 bp, Homo sapien
gaacaaatggtacaactagggagac

SEQ ID NO: 5074482 - DNA, 25 bp, Homo sapien
tgacatcttaagaggataccgtggg

SEQ ID NO: 5074483 - DNA, 25 bp, Homo sapien
tataaagcaaggtacccaaccaagc

SEQ ID NO: 5074484 - DNA, 25 bp, Homo sapien
gcattgcagaggatacgaaaaacac

SEQ ID NO: 5074485 - DNA, 25 bp, Homo sapien
tacgaaaaacacatactcctcattg

SEQ ID NO: 5074486 - DNA, 25 bp, Homo sapien
actcctcattgttttctaaggacat

SEQ ID NO: 5074487 - DNA, 25 bp, Homo sapien
tatgtgcaagcattgcagaggatac

SEQ ID NO: 5074488 - DNA, 25 bp, Homo sapien
tagctgtgctgttgtatccattaac

SEQ ID NO: 5074489 - DNA, 25 bp, Homo sapien
caacctttggctatttcccttcact

SEQ ID NO: 5074490 - DNA, 25 bp, Homo sapien
tgtaaattatagtcaccccacagtg

SEQ ID NO: 5074491 - DNA, 25 bp, Homo sapien
tcagatcagtaactggcatatccat

SEQ ID NO: 5074492 - DNA, 25 bp, Homo sapien
cagaaatgatggcagctcactcgtc

SEQ ID NO: 5074493 - DNA, 25 bp, Homo sapien
aattcggacaatttcagcagatgga

SEQ ID NO: 5074494 - DNA, 25 bp, Homo sapien
cagatggacctggaagctaagggtt

SEQ ID NO: 5074495 - DNA, 25 bp, Homo sapien
ccccaaggtgagagtatgatgtttc

SEQ ID NO: 5074496 - DNA, 25 bp, Homo sapien
taattattacagaggcctgatggcc

SEQ ID NO: 5074497 - DNA, 25 bp, Homo sapien
aaatcaccggcacaaaggaacattg

SEQ ID NO: 5074498 - DNA, 25 bp, Homo sapien
gaaccttccaggatattgtcagagt

SEQ ID NO: 5074499 - DNA, 25 bp, Homo sapien
tcagggcagcaagtggttcttccac

SEQ ID NO: 5074500 - DNA, 25 bp, Homo sapien
gatttcaggtttctagcttacagac

SEQ ID NO: 5074501 - DNA, 25 bp, Homo sapien
tgagagaataaattcctactgggtt

SEQ ID NO: 5074502 - DNA, 25 bp, Homo sapien
ctagcttacagactgtgagagaata

SEQ ID NO: 5074503 - DNA, 25 bp, Homo sapien
gagcgtggctctgccaataccttga

SEQ ID NO: 5074504 - DNA, 25 bp, Homo sapien
aaaggatgtttgggggcacagccac

SEQ ID NO: 5074505 - DNA, 25 bp, Homo sapien
ctcctcatccccatgtatgtgcatg

SEQ ID NO: 5074506 - DNA, 25 bp, Homo sapien
aagaagcctctgaaaaggatgtttg

SEQ ID NO: 5074507 - DNA, 25 bp, Homo sapien
tcctcatccccatgtatgtgcatga

SEQ ID NO: 5074508 - DNA, 25 bp, Homo sapien
caataccaagaataggacatttaaa

SEQ ID NO: 5074509 - DNA, 25 bp, Homo sapien
cctttaatctatggccattcaatac

SEQ ID NO: 5074510 - DNA, 25 bp, Homo sapien
taattaaacctttaatctatggcca

SEQ ID NO: 5074511 - DNA, 25 bp, Homo sapien
aaagctctttaaatggattaattag

SEQ ID NO: 5074512 - DNA, 25 bp, Homo sapien
tctccttgaagtggtcctttacttc

SEQ ID NO: 5074513 - DNA, 25 bp, Homo sapien
ggtcctttacttccctcgctctgcc

SEQ ID NO: 5074514 - DNA, 25 bp, Homo sapien
tgaagtggtcctttacttccctcgc

SEQ ID NO: 5074515 - DNA, 25 bp, Homo sapien
agtggtcctttacttccctcgctct

SEQ ID NO: 5074516 - DNA, 25 bp, Homo sapien
tacacaggtacacaagaagacatct

SEQ ID NO: 5074517 - DNA, 25 bp, Homo sapien
gatggctgtagttgcacggacttat

SEQ ID NO: 5074518 - DNA, 25 bp, Homo sapien
caaggtcttcagaggtaataacaag

SEQ ID NO: 5074519 - DNA, 25 bp, Homo sapien
tacacaactggtagcatagtggttt

SEQ ID NO: 5074520 - DNA, 25 bp, Homo sapien
cagtctgaagacgtaaccggcaagt

SEQ ID NO: 5074521 - DNA, 25 bp, Homo sapien
tgtgaagactaactcagtggagacc

SEQ ID NO: 5074522 - DNA, 25 bp, Homo sapien
actggcctgggtaaactgtgaagac

SEQ ID NO: 5074523 - DNA, 25 bp, Homo sapien
caaggtagggaagggtctcatttca

SEQ ID NO: 5074524 - DNA, 25 bp, Homo sapien
gaaggaagcatgatcacccaactat

SEQ ID NO: 5074525 - DNA, 25 bp, Homo sapien
aaagactctcccttagttcacacgg

SEQ ID NO: 5074526 - DNA, 25 bp, Homo sapien
tttagcaagcactccaagagatgat

SEQ ID NO: 5074527 - DNA, 25 bp, Homo sapien
tcacacggctgggatgaggcaaact

SEQ ID NO: 5074528 - DNA, 25 bp, Homo sapien
ttctccttgtcctttgagagagatg

SEQ ID NO: 5074529 - DNA, 25 bp, Homo sapien
ccttgtcctttgagagagatgaagt

SEQ ID NO: 5074530 - DNA, 25 bp, Homo sapien
agagatgaagtctgttatagggcat

SEQ ID NO: 5074531 - DNA, 25 bp, Homo sapien
ctccttgtcctttgagagagatgaa

SEQ ID NO: 5074532 - DNA, 25 bp, Homo sapien
gagtccactgataccaacatagtag

SEQ ID NO: 5074533 - DNA, 25 bp, Homo sapien
gctgagttactcaatatctctgtgg

SEQ ID NO: 5074534 - DNA, 25 bp, Homo sapien
taaaggctgtttactaggctgtacc

SEQ ID NO: 5074535 - DNA, 25 bp, Homo sapien
agattctagattcatggcagcaccg

SEQ ID NO: 5074536 - DNA, 25 bp, Homo sapien
tgtctattggataccggtggacgtg

SEQ ID NO: 5074537 - DNA, 25 bp, Homo sapien
tggacgtgaaagtggatttccctgg

SEQ ID NO: 5074538 - DNA, 25 bp, Homo sapien
tgtggcaccagagttgaaggtcctc

SEQ ID NO: 5074539 - DNA, 25 bp, Homo sapien
ccacagtgatatcatggacagcatc

SEQ ID NO: 5074540 - DNA, 25 bp, Homo sapien
gcaatttgaccacaaggaccctgag

SEQ ID NO: 5074541 - DNA, 25 bp, Homo sapien
tgcaaggtggaatgacactctgtcc

SEQ ID NO: 5074542 - DNA, 25 bp, Homo sapien
ccttgatagaaggaacgcagcctct

SEQ ID NO: 5074543 - DNA, 25 bp, Homo sapien
tgcagggctgaacagggtccaatac

SEQ ID NO: 5074544 - DNA, 25 bp, Homo sapien
aatgtgtgtgttccttgtcgctaaa

SEQ ID NO: 5074545 - DNA, 25 bp, Homo sapien
aatatgctctaggttttcacatggc

SEQ ID NO: 5074546 - DNA, 25 bp, Homo sapien
ggcccaagttatttcaccccgatca

SEQ ID NO: 5074547 - DNA, 25 bp, Homo sapien
aaaatgcatctgagcttagaaaggt

SEQ ID NO: 5074548 - DNA, 25 bp, Homo sapien
tgttgacgagttccagatctgcctc

SEQ ID NO: 5074549 - DNA, 25 bp, Homo sapien
tccagtaacagcatgtgatccgggc

SEQ ID NO: 5074550 - DNA, 25 bp, Homo sapien
gggacagcgctcacctcaatgaggt

SEQ ID NO: 5074551 - DNA, 25 bp, Homo sapien
gatccgggctgttgttgacgagttc

SEQ ID NO: 5074552 - DNA, 25 bp, Homo sapien
gaaaaagctacacctgccaaaatgt

SEQ ID NO: 5074553 - DNA, 25 bp, Homo sapien
caaaatgcttgatcggtttcacgac

SEQ ID NO: 5074554 - DNA, 25 bp, Homo sapien
tatcttccacgagagaaaagggcac

SEQ ID NO: 5074555 - DNA, 25 bp, Homo sapien
aagtgtgcagctccaacagagtgaa

SEQ ID NO: 5074556 - DNA, 25 bp, Homo sapien
tcatggcaatgcacgatgcaattat

SEQ ID NO: 5074557 - DNA, 25 bp, Homo sapien
tggcaatgcacgatgcaattattgg

SEQ ID NO: 5074558 - DNA, 25 bp, Homo sapien
ctttcatggcaatgcacgatgcaat

SEQ ID NO: 5074559 - DNA, 25 bp, Homo sapien
caatgcacgatgcaattattgggta

SEQ ID NO: 5074560 - DNA, 25 bp, Homo sapien
tgaccagtgtttagagaccatttcc

SEQ ID NO: 5074561 - DNA, 25 bp, Homo sapien
tgtcaacagtgttcagcctcaacca

SEQ ID NO: 5074562 - DNA, 25 bp, Homo sapien
taaggcaaccactacctcagcatga

SEQ ID NO: 5074563 - DNA, 25 bp, Homo sapien
gaaagggagctgtaactaaggcact

SEQ ID NO: 5074564 - DNA, 25 bp, Homo sapien
ggccctaatgtaatctgtttccacc

SEQ ID NO: 5074565 - DNA, 25 bp, Homo sapien
cctgggttatgtgctgcacgagaac

SEQ ID NO: 5074566 - DNA, 25 bp, Homo sapien
caccacctgtcatggccctaatgta

SEQ ID NO: 5074567 - DNA, 25 bp, Homo sapien
gtttccacctgggttatgtgctgca

SEQ ID NO: 5074568 - DNA, 25 bp, Homo sapien
gcactgctggaatctcggaaagtct

SEQ ID NO: 5074569 - DNA, 25 bp, Homo sapien
actgctggaatctcggaaagtctcc

SEQ ID NO: 5074570 - DNA, 25 bp, Homo sapien
cctctactaccttcaaatcctttgg

SEQ ID NO: 5074571 - DNA, 25 bp, Homo sapien
caaatcctttggcactgctggaatc

SEQ ID NO: 5074572 - DNA, 25 bp, Homo sapien
cagagataggagcatgttatcctct

SEQ ID NO: 5074573 - DNA, 25 bp, Homo sapien
gataggagcatgttatcctctgggt

SEQ ID NO: 5074574 - DNA, 25 bp, Homo sapien
taggagcatgttatcctctgggtat

SEQ ID NO: 5074575 - DNA, 25 bp, Homo sapien
ccctgaaattctccaaggctgcctg

SEQ ID NO: 5074576 - DNA, 25 bp, Homo sapien
ttgtgagatttagggtgtgggaacc

SEQ ID NO: 5074577 - DNA, 25 bp, Homo sapien
tcatgtctcatcgacttccaccttg

SEQ ID NO: 5074578 - DNA, 25 bp, Homo sapien
cgacttccaccttgatagaagaggg

SEQ ID NO: 5074579 - DNA, 25 bp, Homo sapien
tcatcgacttccaccttgatagaag

SEQ ID NO: 5074580 - DNA, 25 bp, Homo sapien
gatcaggtgaaaagacccaatgcca

SEQ ID NO: 5074581 - DNA, 25 bp, Homo sapien
gaatgacggttgcagcaagccacac

SEQ ID NO: 5074582 - DNA, 25 bp, Homo sapien
agttcaccttcagaatggcaagatt

SEQ ID NO: 5074583 - DNA, 25 bp, Homo sapien
ggttgatttccatggagtccaacta

SEQ ID NO: 5074584 - DNA, 25 bp, Homo sapien
gcttagggcccatggcagttggtcg

SEQ ID NO: 5074585 - DNA, 25 bp, Homo sapien
gtcgagcatgaaaatcccgcaggcc

SEQ ID NO: 5074586 - DNA, 25 bp, Homo sapien
gaaccaggagggcttagggcccatg

SEQ ID NO: 5074587 - DNA, 25 bp, Homo sapien
tggcagttggtcgagcatgaaaatc

SEQ ID NO: 5074588 - DNA, 25 bp, Homo sapien
cacagttggcactcgaagaacagcc

SEQ ID NO: 5074589 - DNA, 25 bp, Homo sapien
tgcaggtatggccacagcacaatgg

SEQ ID NO: 5074590 - DNA, 25 bp, Homo sapien
gcatgagtgcaggagccagtcacat

SEQ ID NO: 5074591 - DNA, 25 bp, Homo sapien
ggcatttcctacacccacagttggc

SEQ ID NO: 5074592 - DNA, 25 bp, Homo sapien
ccaagaacatggagggacccttctt

SEQ ID NO: 5074593 - DNA, 25 bp, Homo sapien
aatgggtgtacagctccaagaacat

SEQ ID NO: 5074594 - DNA, 25 bp, Homo sapien
ctccaagaacatggagggacccttc

SEQ ID NO: 5074595 - DNA, 25 bp, Homo sapien
ccaatgggtgtacagctccaagaac

SEQ ID NO: 5074596 - DNA, 25 bp, Homo sapien
gatcagagtgtgaattaacttctgg

SEQ ID NO: 5074597 - DNA, 25 bp, Homo sapien
gttctgctgaaggtcttgaacttct

SEQ ID NO: 5074598 - DNA, 25 bp, Homo sapien
cctggttacagtgtttaatgacata

SEQ ID NO: 5074599 - DNA, 25 bp, Homo sapien
tgacatatctcaggggcaaaaatgc

SEQ ID NO: 5074600 - DNA, 25 bp, Homo sapien
tgaagagataggtgatccaggccat

SEQ ID NO: 5074601 - DNA, 25 bp, Homo sapien
ctgggtttctcctaatgatcttttg

SEQ ID NO: 5074602 - DNA, 25 bp, Homo sapien
gatcttttgatgaaggggcagtagc

SEQ ID NO: 5074603 - DNA, 25 bp, Homo sapien
agcattaggggcttttttgcaagca

SEQ ID NO: 5074604 - DNA, 25 bp, Homo sapien
tagcattaggggcttttttgcaagc

SEQ ID NO: 5074605 - DNA, 25 bp, Homo sapien
cagatcctgttcagtgtagggagct

SEQ ID NO: 5074606 - DNA, 25 bp, Homo sapien
gcagatcctgttcagtgtagggagc

SEQ ID NO: 5074607 - DNA, 25 bp, Homo sapien
gggcagatcctgttcagtgtaggga

SEQ ID NO: 5074608 - DNA, 25 bp, Homo sapien
atcctgttcagtgtagggagctgtg

SEQ ID NO: 5074609 - DNA, 25 bp, Homo sapien
ggtcagccatccagcggtctgtctg

SEQ ID NO: 5074610 - DNA, 25 bp, Homo sapien
ctaaataagggtcagccatccagcg

SEQ ID NO: 5074611 - DNA, 25 bp, Homo sapien
catccagcggtctgtctgctgctga

SEQ ID NO: 5074612 - DNA, 25 bp, Homo sapien
tcttcccactgacagtatcttctaa

SEQ ID NO: 5074613 - DNA, 25 bp, Homo sapien
ttccaactgaatgggagctacaaag

SEQ ID NO: 5074614 - DNA, 25 bp, Homo sapien
accttctgccacacctaggccagtg

SEQ ID NO: 5074615 - DNA, 25 bp, Homo sapien
agtcaaaggaggctttcttgtcacc

SEQ ID NO: 5074616 - DNA, 25 bp, Homo sapien
ctgaatgggagctacaaagagaatg

SEQ ID NO: 5074617 - DNA, 25 bp, Homo sapien
gaggggaggcaaaaacgagtggcca

SEQ ID NO: 5074618 - DNA, 25 bp, Homo sapien
gcagcgaggggaggcaaaaacgagt

SEQ ID NO: 5074619 - DNA, 25 bp, Homo sapien
ggacacagcgcagcttcctggaatt

SEQ ID NO: 5074620 - DNA, 25 bp, Homo sapien
gaggcaaaaacgagtggccacagga

SEQ ID NO: 5074621 - DNA, 25 bp, Homo sapien
agccagtgctcctggagcaggttta

SEQ ID NO: 5074622 - DNA, 25 bp, Homo sapien
ctatagagccagtgctcctggagca

SEQ ID NO: 5074623 - DNA, 25 bp, Homo sapien
tatagagccagtgctcctggagcag

SEQ ID NO: 5074624 - DNA, 25 bp, Homo sapien
cagtgctcctggagcaggtttagcc

SEQ ID NO: 5074625 - DNA, 25 bp, Homo sapien
gcacacttagtaggtcaccagtagc

SEQ ID NO: 5074626 - DNA, 25 bp, Homo sapien
cacttagtaggtcaccagtagctgt

SEQ ID NO: 5074627 - DNA, 25 bp, Homo sapien
tagtaggtcaccagtagctgtgggt

SEQ ID NO: 5074628 - DNA, 25 bp, Homo sapien
taggtcaccagtagctgtgggtgaa

SEQ ID NO: 5074629 - DNA, 25 bp, Homo sapien
cagtcaaatccgaatattgagtttg

SEQ ID NO: 5074630 - DNA, 25 bp, Homo sapien
tcagtcaaatccgaatattgagttt

SEQ ID NO: 5074631 - DNA, 25 bp, Homo sapien
caaatccgaatattgagtttgaatg

SEQ ID NO: 5074632 - DNA, 25 bp, Homo sapien
atccgaatattgagtttgaatgcca

SEQ ID NO: 5074633 - DNA, 25 bp, Homo sapien
gtaaagagtcgagtgtgtgcagccc

SEQ ID NO: 5074634 - DNA, 25 bp, Homo sapien
gcaatgctcttgtggcctcctatag

SEQ ID NO: 5074635 - DNA, 25 bp, Homo sapien
cgcagactgctatagacttggaaag

SEQ ID NO: 5074636 - DNA, 25 bp, Homo sapien
cctcctatagttacgatgtggctct

SEQ ID NO: 5074637 - DNA, 25 bp, Homo sapien
cattccctgattggtatctggagac

SEQ ID NO: 5074638 - DNA, 25 bp, Homo sapien
ttcactaggccaggactacattgag

SEQ ID NO: 5074639 - DNA, 25 bp, Homo sapien
tctcaaggccgttaagttccagtcc

SEQ ID NO: 5074640 - DNA, 25 bp, Homo sapien
ggctcaaagacaaatcccacatgtt

SEQ ID NO: 5074641 - DNA, 25 bp, Homo sapien
cacccgtaagtgtggttgtatccca

SEQ ID NO: 5074642 - DNA, 25 bp, Homo sapien
ccgagtctctggcacttgagtagca

SEQ ID NO: 5074643 - DNA, 25 bp, Homo sapien
gatttccatggagatatgacctccg

SEQ ID NO: 5074644 - DNA, 25 bp, Homo sapien
gatcattgcctactgggacccttgg

SEQ ID NO: 5074645 - DNA, 25 bp, Homo sapien
gccaccgcgcctgaccctcttttag

SEQ ID NO: 5074646 - DNA, 25 bp, Homo sapien
aggctccagcaattctccttcttca

SEQ ID NO: 5074647 - DNA, 25 bp, Homo sapien
ttcttcagcctcctgagtagctggg

SEQ ID NO: 5074648 - DNA, 25 bp, Homo sapien
caccgcgcctgaccctcttttagtt

SEQ ID NO: 5074649 - DNA, 25 bp, Homo sapien
tccctctgtagctcctgggtctttc

SEQ ID NO: 5074650 - DNA, 25 bp, Homo sapien
ctccctctgtagctcctgggtcttt

SEQ ID NO: 5074651 - DNA, 25 bp, Homo sapien
gctcctgggtctttccttgccacct

SEQ ID NO: 5074652 - DNA, 25 bp, Homo sapien
cctgggtctttccttgccacctcat

SEQ ID NO: 5074653 - DNA, 25 bp, Homo sapien
tgacaccagcttcactgcaggtact

SEQ ID NO: 5074654 - DNA, 25 bp, Homo sapien
caccagcttcactgcaggtactcat

SEQ ID NO: 5074655 - DNA, 25 bp, Homo sapien
ctgcttgggtttgagccctgactta

SEQ ID NO: 5074656 - DNA, 25 bp, Homo sapien
gccctgacttacagactcactgaca

SEQ ID NO: 5074657 - DNA, 25 bp, Homo sapien
tctgcgctgccagagcttcaagtgg

SEQ ID NO: 5074658 - DNA, 25 bp, Homo sapien
ggagaatatctaccctgaactcagg

SEQ ID NO: 5074659 - DNA, 25 bp, Homo sapien
cttcaagtggtacctggagaatatc

SEQ ID NO: 5074660 - DNA, 25 bp, Homo sapien
cctgttggagctttggctggctgaa

SEQ ID NO: 5074661 - DNA, 25 bp, Homo sapien
ccgcccccatcaggccatggcctgt

SEQ ID NO: 5074662 - DNA, 25 bp, Homo sapien
tgaagtcaaggccgcccccatcagg

SEQ ID NO: 5074663 - DNA, 25 bp, Homo sapien
gccatggcctgtgccgactgtgctg

SEQ ID NO: 5074664 - DNA, 25 bp, Homo sapien
accctgaagtcaaggccgcccccat

SEQ ID NO: 5074665 - DNA, 25 bp, Homo sapien
atctggtgaaatttgtgcttgaaag

SEQ ID NO: 5074666 - DNA, 25 bp, Homo sapien
caaaatgagcgaggaggcgactgca

SEQ ID NO: 5074667 - DNA, 25 bp, Homo sapien
gcaaaatgagcgaggaggcgactgc

SEQ ID NO: 5074668 - DNA, 25 bp, Homo sapien
ccagcaacagttctggtttcatcat

SEQ ID NO: 5074669 - DNA, 25 bp, Homo sapien
gaccagcaacagttctggtttcatc

SEQ ID NO: 5074670 - DNA, 25 bp, Homo sapien
aggaccagcaacagttctggtttca

SEQ ID NO: 5074671 - DNA, 25 bp, Homo sapien
agcaacagttctggtttcatcatct

SEQ ID NO: 5074672 - DNA, 25 bp, Homo sapien
gggcagctggggcctgctgcagtca

SEQ ID NO: 5074673 - DNA, 25 bp, Homo sapien
tcaggagggcagctggggcctgctg

SEQ ID NO: 5074674 - DNA, 25 bp, Homo sapien
ggagggcagctggggcctgctgcag

SEQ ID NO: 5074675 - DNA, 25 bp, Homo sapien
ggcagctggggcctgctgcagtcac

SEQ ID NO: 5074676 - DNA, 25 bp, Homo sapien
ttcaaaaggggaccagtcaacaaca

SEQ ID NO: 5074677 - DNA, 25 bp, Homo sapien
cacgtagcaaagcacaggagttagc

SEQ ID NO: 5074678 - DNA, 25 bp, Homo sapien
acatcctggaagtggctctgtagca

SEQ ID NO: 5074679 - DNA, 25 bp, Homo sapien
gcagtttgcagtaccatcttgccag

SEQ ID NO: 5074680 - DNA, 25 bp, Homo sapien
gagcaggaagagttgcaggacatcc

SEQ ID NO: 5074681 - DNA, 25 bp, Homo sapien
ctcaagtctccacacaattatagat

SEQ ID NO: 5074682 - DNA, 25 bp, Homo sapien
tctgagtcgagagtagaggccctgc

SEQ ID NO: 5074683 - DNA, 25 bp, Homo sapien
gaagttcataggtaggactggtgca

SEQ ID NO: 5074684 - DNA, 25 bp, Homo sapien
tgacttctgtctcgggctctgcgga

SEQ ID NO: 5074685 - DNA, 25 bp, Homo sapien
tagaggccctgcaataaggccacca

SEQ ID NO: 5074686 - DNA, 25 bp, Homo sapien
ctagccaggaaagttgctggcgcac

SEQ ID NO: 5074687 - DNA, 25 bp, Homo sapien
ccaggaaagttgctggcgcacctgg

SEQ ID NO: 5074688 - DNA, 25 bp, Homo sapien
ttgctggcgcacctggatgacagcc

SEQ ID NO: 5074689 - DNA, 25 bp, Homo sapien
tggatgacagccccccgagagacac

SEQ ID NO: 5074690 - DNA, 25 bp, Homo sapien
aagctccgctgggtcttaggcaggt

SEQ ID NO: 5074691 - DNA, 25 bp, Homo sapien
caggtggacccttgtcctgagtcca

SEQ ID NO: 5074692 - DNA, 25 bp, Homo sapien
ggagacaggaacctgagaagctccg

SEQ ID NO: 5074693 - DNA, 25 bp, Homo sapien
tatttccccgagcagaaactgcaga

SEQ ID NO: 5074694 - DNA, 25 bp, Homo sapien
tctgagagaattttatttaaatatt

SEQ ID NO: 5074695 - DNA, 25 bp, Homo sapien
catctgagagaattttatttaaata

SEQ ID NO: 5074696 - DNA, 25 bp, Homo sapien
ttggcatctgagagaattttattta

SEQ ID NO: 5074697 - DNA, 25 bp, Homo sapien
ggcatctgagagaattttatttaaa

SEQ ID NO: 5074698 - DNA, 25 bp, Homo sapien
tggtggacccgtgttcttctgctta

SEQ ID NO: 5074699 - DNA, 25 bp, Homo sapien
tgactgtaggctccttgagtgcagg

SEQ ID NO: 5074700 - DNA, 25 bp, Homo sapien
gctgtgtggtggacccgtgttcttc

SEQ ID NO: 5074701 - DNA, 25 bp, Homo sapien
tgggactatcccgtcatcatcctca

SEQ ID NO: 5074702 - DNA, 25 bp, Homo sapien
gtgtgctggggaaggggctggccat

SEQ ID NO: 5074703 - DNA, 25 bp, Homo sapien
ccagggtgtgctggggaaggggctg

SEQ ID NO: 5074704 - DNA, 25 bp, Homo sapien
ggctgagataagccagggtgtgctg

SEQ ID NO: 5074705 - DNA, 25 bp, Homo sapien
gctgagataagccagggtgtgctgg

SEQ ID NO: 5074706 - DNA, 25 bp, Homo sapien
ccaagtccctgactgagttgctcat

SEQ ID NO: 5074707 - DNA, 25 bp, Homo sapien
tctctgacgtgtgttcccaagtccc

SEQ ID NO: 5074708 - DNA, 25 bp, Homo sapien
cccaagtccctgactgagttgctca

SEQ ID NO: 5074709 - DNA, 25 bp, Homo sapien
ctctgacgtgtgttcccaagtccct

SEQ ID NO: 5074710 - DNA, 25 bp, Homo sapien
cccattggcaattgattaagatccc

SEQ ID NO: 5074711 - DNA, 25 bp, Homo sapien
taagatcccatacttttctgacagc

SEQ ID NO: 5074712 - DNA, 25 bp, Homo sapien
tggctccgagatgggcatttgtgct

SEQ ID NO: 5074713 - DNA, 25 bp, Homo sapien
tgctggctgttcaagctcttgtttg

SEQ ID NO: 5074714 - DNA, 25 bp, Homo sapien
ctctaaaatggcccatctgtgcagc

SEQ ID NO: 5074715 - DNA, 25 bp, Homo sapien
tctaaaatggcccatctgtgcagca

SEQ ID NO: 5074716 - DNA, 25 bp, Homo sapien
ctaaaatggcccatctgtgcagcac

SEQ ID NO: 5074717 - DNA, 25 bp, Homo sapien
ttcaaggcctctctcaaatgcgccc

SEQ ID NO: 5074718 - DNA, 25 bp, Homo sapien
ttcccacaatagtcctgctggaagc

SEQ ID NO: 5074719 - DNA, 25 bp, Homo sapien
cctctctcaaatgcgcccttcctca

SEQ ID NO: 5074720 - DNA, 25 bp, Homo sapien
attcccacaatagtcctgctggaag

SEQ ID NO: 5074721 - DNA, 25 bp, Homo sapien
ctgatgaagatgccactgatgaagg

SEQ ID NO: 5074722 - DNA, 25 bp, Homo sapien
actgatgaaggctcccctaccccaa

SEQ ID NO: 5074723 - DNA, 25 bp, Homo sapien
tgccactgatgaaggctcccctacc

SEQ ID NO: 5074724 - DNA, 25 bp, Homo sapien
gaagatgccactgatgaaggctccc

SEQ ID NO: 5074725 - DNA, 25 bp, Homo sapien
ctgaggagcaggcagaagaggagaa

SEQ ID NO: 5074726 - DNA, 25 bp, Homo sapien
gcaggcagaagaggagaaaaagtgt

SEQ ID NO: 5074727 - DNA, 25 bp, Homo sapien
gcagaagaggagaaaaagtgtatgt

SEQ ID NO: 5074728 - DNA, 25 bp, Homo sapien
aggcagaagaggagaaaaagtgtat

SEQ ID NO: 5074729 - DNA, 25 bp, Homo sapien
ctgagcaactatgtgggtgaggacc

SEQ ID NO: 5074730 - DNA, 25 bp, Homo sapien
gagcaactatgtgggtgaggacctc

SEQ ID NO: 5074731 - DNA, 25 bp, Homo sapien
caactatgtgggtgaggacctcaac

SEQ ID NO: 5074732 - DNA, 25 bp, Homo sapien
tatgtgggtgaggacctcaacttcc

SEQ ID NO: 5074733 - DNA, 25 bp, Homo sapien
ccagcagggctgaattagggtctct

SEQ ID NO: 5074734 - DNA, 25 bp, Homo sapien
aggtggtggcggctctagctgagat

SEQ ID NO: 5074735 - DNA, 25 bp, Homo sapien
cgttatgtgtgggagcaccccatgg

SEQ ID NO: 5074736 - DNA, 25 bp, Homo sapien
ggcggctctagctgagatggaggga

SEQ ID NO: 5074737 - DNA, 25 bp, Homo sapien
tagtgtcttctgctcccagtgacaa

SEQ ID NO: 5074738 - DNA, 25 bp, Homo sapien
taaatagcccctggtgtttcaccgc

SEQ ID NO: 5074739 - DNA, 25 bp, Homo sapien
agtgacaaataaatccctgggctga

SEQ ID NO: 5074740 - DNA, 25 bp, Homo sapien
cagcatgggagttggaggctcataa

SEQ ID NO: 5074741 - DNA, 25 bp, Homo sapien
catgattgcgactggccatcagcat

SEQ ID NO: 5074742 - DNA, 25 bp, Homo sapien
tacatgattgcgactggccatcagc

SEQ ID NO: 5074743 - DNA, 25 bp, Homo sapien
gtctacatgattgcgactggccatc

SEQ ID NO: 5074744 - DNA, 25 bp, Homo sapien
ctagtctacatgattgcgactggcc

SEQ ID NO: 5074745 - DNA, 25 bp, Homo sapien
catctttctcattcccaaccctggg

SEQ ID NO: 5074746 - DNA, 25 bp, Homo sapien
tggccactcttgttctccctcccaa

SEQ ID NO: 5074747 - DNA, 25 bp, Homo sapien
ccatctttctcattcccaaccctgg

SEQ ID NO: 5074748 - DNA, 25 bp, Homo sapien
ctcgtggccactcttgttctccctc

SEQ ID NO: 5074749 - DNA, 25 bp, Homo sapien
tcatgtaccatgagggacagccatg

SEQ ID NO: 5074750 - DNA, 25 bp, Homo sapien
cactactcattcgtacatcctcatg

SEQ ID NO: 5074751 - DNA, 25 bp, Homo sapien
tctgacctcatcatcactactcatt

SEQ ID NO: 5074752 - DNA, 25 bp, Homo sapien
gaaacttttactctacccctgcagc

SEQ ID NO: 5074753 - DNA, 25 bp, Homo sapien
gagcctcgggtcttctttctgggta

SEQ ID NO: 5074754 - DNA, 25 bp, Homo sapien
tggctgcttctatctcccagtctga

SEQ ID NO: 5074755 - DNA, 25 bp, Homo sapien
gccacacacatgatgagtcttggga

SEQ ID NO: 5074756 - DNA, 25 bp, Homo sapien
tctcctctgaggtagctagtgtccc

SEQ ID NO: 5074757 - DNA, 25 bp, Homo sapien
actcagcacggcattcccagactct

SEQ ID NO: 5074758 - DNA, 25 bp, Homo sapien
agacagcctgagtctctcggtgacc

SEQ ID NO: 5074759 - DNA, 25 bp, Homo sapien
aaagtctgcaaagtccggggatgtc

SEQ ID NO: 5074760 - DNA, 25 bp, Homo sapien
gactctcagggcttctctagggtaa

SEQ ID NO: 5074761 - DNA, 25 bp, Homo sapien
aggcctcttgggaagaaaaagacat

SEQ ID NO: 5074762 - DNA, 25 bp, Homo sapien
tccccttgggcacgccgataaattg

SEQ ID NO: 5074763 - DNA, 25 bp, Homo sapien
aaattgctgccgagcatttttcagg

SEQ ID NO: 5074764 - DNA, 25 bp, Homo sapien
gcccttgtttgtttcggctgtgctg

SEQ ID NO: 5074765 - DNA, 25 bp, Homo sapien
cacgccgataaattgctgccgagca

SEQ ID NO: 5074766 - DNA, 25 bp, Homo sapien
gctgttgtccctattgactaatgaa

SEQ ID NO: 5074767 - DNA, 25 bp, Homo sapien
agccagtctcttctcaagatcacct

SEQ ID NO: 5074768 - DNA, 25 bp, Homo sapien
actgtctccactggagccagtctct

SEQ ID NO: 5074769 - DNA, 25 bp, Homo sapien
tgaacataattggtcccgggctatt

SEQ ID NO: 5074770 - DNA, 25 bp, Homo sapien
atgtgtatcactgcatccctttgag

SEQ ID NO: 5074771 - DNA, 25 bp, Homo sapien
ctttttggtcaaagctctgattttg

SEQ ID NO: 5074772 - DNA, 25 bp, Homo sapien
gattttgccccatgcactgttttca

SEQ ID NO: 5074773 - DNA, 25 bp, Homo sapien
tgatgtgtatcactgcatccctttg

SEQ ID NO: 5074774 - DNA, 25 bp, Homo sapien
acctgctgactattacagccctggt

SEQ ID NO: 5074775 - DNA, 25 bp, Homo sapien
tgctgactattacagccctggtgat

SEQ ID NO: 5074776 - DNA, 25 bp, Homo sapien
ctgactattacagccctggtgattg

SEQ ID NO: 5074777 - DNA, 25 bp, Homo sapien
ctgctgactattacagccctggtga

SEQ ID NO: 5074778 - DNA, 25 bp, Homo sapien
tttggctgttttgagactcagcagc

SEQ ID NO: 5074779 - DNA, 25 bp, Homo sapien
tctctggaggcccttctcattgtcc

SEQ ID NO: 5074780 - DNA, 25 bp, Homo sapien
gagatccaagcctgcctttccgaat

SEQ ID NO: 5074781 - DNA, 25 bp, Homo sapien
accccgatgtccctggtagtaaatg

SEQ ID NO: 5074782 - DNA, 25 bp, Homo sapien
ggcccttctcattgtcctgatagct

SEQ ID NO: 5074783 - DNA, 25 bp, Homo sapien
gccctggtgatttgatgttgtccat

SEQ ID NO: 5074784 - DNA, 25 bp, Homo sapien
actgatgtagtgatggtggagtcct

SEQ ID NO: 5074785 - DNA, 25 bp, Homo sapien
tattagtaagggcaatatttgtgac

SEQ ID NO: 5074786 - DNA, 25 bp, Homo sapien
ggcaagcaaattgcttttgaagaat

SEQ ID NO: 5074787 - DNA, 25 bp, Homo sapien
taaaatccaaagctcagtagggagc

SEQ ID NO: 5074788 - DNA, 25 bp, Homo sapien
gtaaaatccaaagctcagtagggag

SEQ ID NO: 5074789 - DNA, 25 bp, Homo sapien
aaatccaaagctcagtagggagcag

SEQ ID NO: 5074790 - DNA, 25 bp, Homo sapien
tgtaaaatccaaagctcagtaggga

SEQ ID NO: 5074791 - DNA, 25 bp, Homo sapien
gagtgcctgttgttttaaatcctct

SEQ ID NO: 5074792 - DNA, 25 bp, Homo sapien
aggctgggtagctcaacaggtagca

SEQ ID NO: 5074793 - DNA, 25 bp, Homo sapien
tccctgtcctggtgtcattgaagct

SEQ ID NO: 5074794 - DNA, 25 bp, Homo sapien
ggtctttgtccttgatccctgcagg

SEQ ID NO: 5074795 - DNA, 25 bp, Homo sapien
tttcaattttaatttgtgtagctgc

SEQ ID NO: 5074796 - DNA, 25 bp, Homo sapien
tcaattttaatttgtgtagctgctc

SEQ ID NO: 5074797 - DNA, 25 bp, Homo sapien
gtgtagctgctcttagagaaattac

SEQ ID NO: 5074798 - DNA, 25 bp, Homo sapien
aatttgtgtagctgctcttagagaa

SEQ ID NO: 5074799 - DNA, 25 bp, Homo sapien
cttgattctggcttttctcgaccac

SEQ ID NO: 5074800 - DNA, 25 bp, Homo sapien
gcttgattctggcttttctcgacca

SEQ ID NO: 5074801 - DNA, 25 bp, Homo sapien
agccccctgtgtccagtggccggcc

SEQ ID NO: 5074802 - DNA, 25 bp, Homo sapien
tgtggtacccggagccccctgtgtc

SEQ ID NO: 5074803 - DNA, 25 bp, Homo sapien
ctgtggtacccggagccccctgtgt

SEQ ID NO: 5074804 - DNA, 25 bp, Homo sapien
cccctgtgtccagtggccggccttc

SEQ ID NO: 5074805 - DNA, 25 bp, Homo sapien
cacgttctgcttatcccgggctagt

SEQ ID NO: 5074806 - DNA, 25 bp, Homo sapien
tcacagcgattctggaggcttcctc

SEQ ID NO: 5074807 - DNA, 25 bp, Homo sapien
caccatcacggctgtttcatcattg

SEQ ID NO: 5074808 - DNA, 25 bp, Homo sapien
cctccatgccaggtaatgtgggaag

SEQ ID NO: 5074809 - DNA, 25 bp, Homo sapien
tcaagtttgtccgaacatccggcaa

SEQ ID NO: 5074810 - DNA, 25 bp, Homo sapien
cgaacatccggcaaacccatatggg

SEQ ID NO: 5074811 - DNA, 25 bp, Homo sapien
ttgtccgaacatccggcaaacccat

SEQ ID NO: 5074812 - DNA, 25 bp, Homo sapien
tcactggatcaagtttgtccgaaca

SEQ ID NO: 5074813 - DNA, 25 bp, Homo sapien
tcttcctacaggtaggttgactgtg

SEQ ID NO: 5074814 - DNA, 25 bp, Homo sapien
cctacaggtaggttgactgtgtgtc

SEQ ID NO: 5074815 - DNA, 25 bp, Homo sapien
ggcatcttcctacaggtaggttgac

SEQ ID NO: 5074816 - DNA, 25 bp, Homo sapien
acaggtaggttgactgtgtgtcccc

SEQ ID NO: 5074817 - DNA, 25 bp, Homo sapien
caggcttattgtttcctaggatctc

SEQ ID NO: 5074818 - DNA, 25 bp, Homo sapien
tcgcagctgcaacatgcaggcataa

SEQ ID NO: 5074819 - DNA, 25 bp, Homo sapien
ttatgtgcccatctctcgcagctgc

SEQ ID NO: 5074820 - DNA, 25 bp, Homo sapien
ccagattccttgatggccactgaaa

SEQ ID NO: 5074821 - DNA, 25 bp, Homo sapien
ctgggaatacagagccatctgatcc

SEQ ID NO: 5074822 - DNA, 25 bp, Homo sapien
tacaaagccttttctgcgtgccatt

SEQ ID NO: 5074823 - DNA, 25 bp, Homo sapien
tacagagccatctgatcccctgcat

SEQ ID NO: 5074824 - DNA, 25 bp, Homo sapien
ctggacaatgctggtttcaagtaca

SEQ ID NO: 5074825 - DNA, 25 bp, Homo sapien
agttcgtgcaatttctctgggctcc

SEQ ID NO: 5074826 - DNA, 25 bp, Homo sapien
gaaacttctgggcttagcagcctcc

SEQ ID NO: 5074827 - DNA, 25 bp, Homo sapien
catcttgctgtaggcagttcgtgca

SEQ ID NO: 5074828 - DNA, 25 bp, Homo sapien
cgtagaaatgcctcagctccctgat

SEQ ID NO: 5074829 - DNA, 25 bp, Homo sapien
tctcacaaatccatgcccttctccc

SEQ ID NO: 5074830 - DNA, 25 bp, Homo sapien
gtaatatctcacaaatccatgccct

SEQ ID NO: 5074831 - DNA, 25 bp, Homo sapien
tcacaaatccatgcccttctcccat

SEQ ID NO: 5074832 - DNA, 25 bp, Homo sapien
ctgtaatatctcacaaatccatgcc

SEQ ID NO: 5074833 - DNA, 25 bp, Homo sapien
gcacagggagttttatggaaggagg

SEQ ID NO: 5074834 - DNA, 25 bp, Homo sapien
cagggagttttatggaaggagggat

SEQ ID NO: 5074835 - DNA, 25 bp, Homo sapien
ttgagcacagggagttttatggaag

SEQ ID NO: 5074836 - DNA, 25 bp, Homo sapien
gttttatggaaggagggatctgcat

SEQ ID NO: 5074837 - DNA, 25 bp, Homo sapien
tagcgagttgaggaaacaaggcatg

SEQ ID NO: 5074838 - DNA, 25 bp, Homo sapien
ttctccattcgagagaggcctccaa

SEQ ID NO: 5074839 - DNA, 25 bp, Homo sapien
gatgtccaggacatagtcgtcacaa

SEQ ID NO: 5074840 - DNA, 25 bp, Homo sapien
acagtaccgccagtcaacgagtggg

SEQ ID NO: 5074841 - DNA, 25 bp, Homo sapien
ctagcagtttgtacaagtctgcgtg

SEQ ID NO: 5074842 - DNA, 25 bp, Homo sapien
cagtttgtacaagtctgcgtgcttc

SEQ ID NO: 5074843 - DNA, 25 bp, Homo sapien
gtacaagtctgcgtgcttcctcctg

SEQ ID NO: 5074844 - DNA, 25 bp, Homo sapien
ttgtacaagtctgcgtgcttcctcc

SEQ ID NO: 5074845 - DNA, 25 bp, Homo sapien
ctgggaaaggcttcaccactcctaa

SEQ ID NO: 5074846 - DNA, 25 bp, Homo sapien
agtgctccggttctactgctcctga

SEQ ID NO: 5074847 - DNA, 25 bp, Homo sapien
gattgcctgtgccttgcagagacag

SEQ ID NO: 5074848 - DNA, 25 bp, Homo sapien
cccactgtgggtcaggattgcctgt

SEQ ID NO: 5074849 - DNA, 25 bp, Homo sapien
agatactaactcaggccgaaccctc

SEQ ID NO: 5074850 - DNA, 25 bp, Homo sapien
tctcccactcagatactaactcagg

SEQ ID NO: 5074851 - DNA, 25 bp, Homo sapien
tcagatactaactcaggccgaaccc

SEQ ID NO: 5074852 - DNA, 25 bp, Homo sapien
ccactcagatactaactcaggccga

SEQ ID NO: 5074853 - DNA, 25 bp, Homo sapien
ccaaaacttaggagacagctgcaat

SEQ ID NO: 5074854 - DNA, 25 bp, Homo sapien
gccaagagaccatttaggaaactat

SEQ ID NO: 5074855 - DNA, 25 bp, Homo sapien
tgaaaacagacgaatacagaggcca

SEQ ID NO: 5074856 - DNA, 25 bp, Homo sapien
gacgaatacagaggccaagagacca

SEQ ID NO: 5074857 - DNA, 25 bp, Homo sapien
gctgcgaggacagagttgacctatt

SEQ ID NO: 5074858 - DNA, 25 bp, Homo sapien
tcagttgctgaggtcaattccctag

SEQ ID NO: 5074859 - DNA, 25 bp, Homo sapien
tagctaggcttagggtgaagtcaaa

SEQ ID NO: 5074860 - DNA, 25 bp, Homo sapien
gggatccactatcaggttacacaaa

SEQ ID NO: 5074861 - DNA, 25 bp, Homo sapien
caaggcagggccggccccacggttg

SEQ ID NO: 5074862 - DNA, 25 bp, Homo sapien
cggttgcggcgacgggaagccgcgc

SEQ ID NO: 5074863 - DNA, 25 bp, Homo sapien
cacggttgcggcgacgggaagccgc

SEQ ID NO: 5074864 - DNA, 25 bp, Homo sapien
cagggccggccccacggttgcggcg

SEQ ID NO: 5074865 - DNA, 25 bp, Homo sapien
cagcaagggatgcttcggctccgct

SEQ ID NO: 5074866 - DNA, 25 bp, Homo sapien
cccaggcggtggtttaaatgccagc

SEQ ID NO: 5074867 - DNA, 25 bp, Homo sapien
taaagttgaacctgcaaggaaactg

SEQ ID NO: 5074868 - DNA, 25 bp, Homo sapien
gaacctgcaaggaaactgccagatg

SEQ ID NO: 5074869 - DNA, 25 bp, Homo sapien
gggctcagccgcaccatggcccggg

SEQ ID NO: 5074870 - DNA, 25 bp, Homo sapien
acgcggctaggagggccgggagcgc

SEQ ID NO: 5074871 - DNA, 25 bp, Homo sapien
gggccgggagcgcactctccctgct

SEQ ID NO: 5074872 - DNA, 25 bp, Homo sapien
ccgggcacgcggctaggagggccgg

SEQ ID NO: 5074873 - DNA, 25 bp, Homo sapien
tcaggggaagatgtcccgtaggacc

SEQ ID NO: 5074874 - DNA, 25 bp, Homo sapien
agccccaggggaagactcctcctca

SEQ ID NO: 5074875 - DNA, 25 bp, Homo sapien
tcctcctcaggggaagatgtcccgt

SEQ ID NO: 5074876 - DNA, 25 bp, Homo sapien
agactcctcctcaggggaagatgtc

SEQ ID NO: 5074877 - DNA, 25 bp, Homo sapien
gtagagtttcttgagcccctcactc

SEQ ID NO: 5074878 - DNA, 25 bp, Homo sapien
gtcttcccagtggagtactggccca

SEQ ID NO: 5074879 - DNA, 25 bp, Homo sapien
cactcaccgtctggaaaacctcggg

SEQ ID NO: 5074880 - DNA, 25 bp, Homo sapien
cagaaccatgggcttgttgtcgaag

SEQ ID NO: 5074881 - DNA, 25 bp, Homo sapien
tggctttacacttgaatacttcagg

SEQ ID NO: 5074882 - DNA, 25 bp, Homo sapien
gaccaccacagccaagggccaagta

SEQ ID NO: 5074883 - DNA, 25 bp, Homo sapien
gggtaagattttgacgcctgcacaa

SEQ ID NO: 5074884 - DNA, 25 bp, Homo sapien
ttcagagccctcaactgaaggcttc

SEQ ID NO: 5074885 - DNA, 25 bp, Homo sapien
catgtgagtgccaagccccttgaaa

SEQ ID NO: 5074886 - DNA, 25 bp, Homo sapien
aagatatatacacaggagctctgct

SEQ ID NO: 5074887 - DNA, 25 bp, Homo sapien
aaagtgaagacgtaagacatcccca

SEQ ID NO: 5074888 - DNA, 25 bp, Homo sapien
ggaagaggttttgcccgtgaatgat

SEQ ID NO: 5074889 - DNA, 25 bp, Homo sapien
taaaacatacaagagccaacaggcc

SEQ ID NO: 5074890 - DNA, 25 bp, Homo sapien
tctctaaagataagaagggcctctg

SEQ ID NO: 5074891 - DNA, 25 bp, Homo sapien
cattctcagagttacaggcgtttag

SEQ ID NO: 5074892 - DNA, 25 bp, Homo sapien
aaaccctctgcaggagatgagcaca

SEQ ID NO: 5074893 - DNA, 25 bp, Homo sapien
ccatatgtgtagagagccagggaag

SEQ ID NO: 5074894 - DNA, 25 bp, Homo sapien
tgcaaaatgtctactgggaacctcc

SEQ ID NO: 5074895 - DNA, 25 bp, Homo sapien
gtgtctcagacaaaaggcgctcaaa

SEQ ID NO: 5074896 - DNA, 25 bp, Homo sapien
caatgattgtacaccaggaaggaga

SEQ ID NO: 5074897 - DNA, 25 bp, Homo sapien
acagggcacagatgggtttcaggtt

SEQ ID NO: 5074898 - DNA, 25 bp, Homo sapien
tactctgcagttccatggtagttaa

SEQ ID NO: 5074899 - DNA, 25 bp, Homo sapien
gagttggagccctcctgtccaaagg

SEQ ID NO: 5074900 - DNA, 25 bp, Homo sapien
gttgctgtgggctccgtccccaagg

SEQ ID NO: 5074901 - DNA, 25 bp, Homo sapien
ttgtaatgtgcacaggtggactgca

SEQ ID NO: 5074902 - DNA, 25 bp, Homo sapien
gctttgtaaccatgaaggatgttgt

SEQ ID NO: 5074903 - DNA, 25 bp, Homo sapien
atgtgcacaggtggactgcagcagc

SEQ ID NO: 5074904 - DNA, 25 bp, Homo sapien
caacgtgtgcatgctttgtaaccat

SEQ ID NO: 5074905 - DNA, 25 bp, Homo sapien
taatgcaggcgttctgcgcaaagat

SEQ ID NO: 5074906 - DNA, 25 bp, Homo sapien
ggcgttctgcgcaaagatcaacacg

SEQ ID NO: 5074907 - DNA, 25 bp, Homo sapien
cgcaaagatcaacacggcatgtcta

SEQ ID NO: 5074908 - DNA, 25 bp, Homo sapien
agcacagtcctaatgcaggcgttct

SEQ ID NO: 5074909 - DNA, 25 bp, Homo sapien
ttcaagaaggcgttgccaaaggcgt

SEQ ID NO: 5074910 - DNA, 25 bp, Homo sapien
gcatcaccgcaatgaaggagtctgt

SEQ ID NO: 5074911 - DNA, 25 bp, Homo sapien
tcctgaagggtttcttgggatccac

SEQ ID NO: 5074912 - DNA, 25 bp, Homo sapien
caccagggcgttcccagggatgatc

SEQ ID NO: 5074913 - DNA, 25 bp, Homo sapien
cactgtaggccggttacaggctcac

SEQ ID NO: 5074914 - DNA, 25 bp, Homo sapien
taggaaggtgttcctcttctctatc

SEQ ID NO: 5074915 - DNA, 25 bp, Homo sapien
aaatgaaataggaaggtgttcctct

SEQ ID NO: 5074916 - DNA, 25 bp, Homo sapien
acttcctaaatggaaccactgtagg

SEQ ID NO: 5074917 - DNA, 25 bp, Homo sapien
cagagaggatccctggtgtgtcgat

SEQ ID NO: 5074918 - DNA, 25 bp, Homo sapien
ggttaggtagctgggcacacacgaa

SEQ ID NO: 5074919 - DNA, 25 bp, Homo sapien
ctccagcacagggttaggtagctgg

SEQ ID NO: 5074920 - DNA, 25 bp, Homo sapien
gatccctggtgtgtcgatgacgctg

SEQ ID NO: 5074921 - DNA, 25 bp, Homo sapien
tcaatacacaactgcaggagcactg

SEQ ID NO: 5074922 - DNA, 25 bp, Homo sapien
ctcacaggagcactggacagaagcc

SEQ ID NO: 5074923 - DNA, 25 bp, Homo sapien
aagggcctgcaccacttgggcctcg

SEQ ID NO: 5074924 - DNA, 25 bp, Homo sapien
ccaggtctggcactagtggcctgca

SEQ ID NO: 5074925 - DNA, 25 bp, Homo sapien
tgccctcatcagaagagagctgctt

SEQ ID NO: 5074926 - DNA, 25 bp, Homo sapien
gccctcatcagaagagagctgcttt

SEQ ID NO: 5074927 - DNA, 25 bp, Homo sapien
ctgccctcatcagaagagagctgct

SEQ ID NO: 5074928 - DNA, 25 bp, Homo sapien
ggcagagggacaatcaggggctggg

SEQ ID NO: 5074929 - DNA, 25 bp, Homo sapien
ccggcagagggacaatcaggggctg

SEQ ID NO: 5074930 - DNA, 25 bp, Homo sapien
ctgccggcagagggacaatcagggg

SEQ ID NO: 5074931 - DNA, 25 bp, Homo sapien
tgccggcagagggacaatcaggggc

SEQ ID NO: 5074932 - DNA, 25 bp, Homo sapien
ggtgttcacgatcttccccaaggac

SEQ ID NO: 5074933 - DNA, 25 bp, Homo sapien
tcggcaaaccactcaaggacagctg

SEQ ID NO: 5074934 - DNA, 25 bp, Homo sapien
gagcagaatgatgcggtcaacccgc

SEQ ID NO: 5074935 - DNA, 25 bp, Homo sapien
cagcctggcccttttgatgaggtcg

SEQ ID NO: 5074936 - DNA, 25 bp, Homo sapien
tcctcttcagattggggaagtcccc

SEQ ID NO: 5074937 - DNA, 25 bp, Homo sapien
tggtgctcccgctcgatccggccat

SEQ ID NO: 5074938 - DNA, 25 bp, Homo sapien
cttgttgtccttcccgaacaccgag

SEQ ID NO: 5074939 - DNA, 25 bp, Homo sapien
tcgatccggccatagatctcggcca

SEQ ID NO: 5074940 - DNA, 25 bp, Homo sapien
gcggtgggctccgtgtttctcccca

SEQ ID NO: 5074941 - DNA, 25 bp, Homo sapien
gggacactgtcccttgtcttagaga

SEQ ID NO: 5074942 - DNA, 25 bp, Homo sapien
ctaggagtgtagatccagggccacc

SEQ ID NO: 5074943 - DNA, 25 bp, Homo sapien
ggctgtgactagagaaggtcattaa

SEQ ID NO: 5074944 - DNA, 25 bp, Homo sapien
acagctgtttacattgtggattcag

SEQ ID NO: 5074945 - DNA, 25 bp, Homo sapien
ttacattgtggattcagcatattga

SEQ ID NO: 5074946 - DNA, 25 bp, Homo sapien
tacattgtggattcagcatattgaa

SEQ ID NO: 5074947 - DNA, 25 bp, Homo sapien
gtttacattgtggattcagcatatt

SEQ ID NO: 5074948 - DNA, 25 bp, Homo sapien
caatgcattactgaggatgtgtccc

SEQ ID NO: 5074949 - DNA, 25 bp, Homo sapien
ggtaggccctaccatgcaggtttgt

SEQ ID NO: 5074950 - DNA, 25 bp, Homo sapien
tctccatggcctgtagagggtgata

SEQ ID NO: 5074951 - DNA, 25 bp, Homo sapien
tgtccccgagggtttgacacagcag

SEQ ID NO: 5074952 - DNA, 25 bp, Homo sapien
tgtcatgggccagcatgtcgtccac

SEQ ID NO: 5074953 - DNA, 25 bp, Homo sapien
tcttgccatccaccggtgacagggt

SEQ ID NO: 5074954 - DNA, 25 bp, Homo sapien
tggcgcactagcaccatgagctggg

SEQ ID NO: 5074955 - DNA, 25 bp, Homo sapien
gttggccagtgcaaactcgtcgtcg

SEQ ID NO: 5074956 - DNA, 25 bp, Homo sapien
taatcccgagaacttggaggtgtgc

SEQ ID NO: 5074957 - DNA, 25 bp, Homo sapien
gaggtgtgcccaaacaagtatcagc

SEQ ID NO: 5074958 - DNA, 25 bp, Homo sapien
catctaaacatcataggccaggtgg

SEQ ID NO: 5074959 - DNA, 25 bp, Homo sapien
caaggtttgccgaagaagacagagg

SEQ ID NO: 5074960 - DNA, 25 bp, Homo sapien
catggcccagactgagtaatgtcgg

SEQ ID NO: 5074961 - DNA, 25 bp, Homo sapien
cagactttactcttgtccgtgggac

SEQ ID NO: 5074962 - DNA, 25 bp, Homo sapien
ccgtgggactttgcatacattgagc

SEQ ID NO: 5074963 - DNA, 25 bp, Homo sapien
ggaacaacaggacaagtgctctaga

SEQ ID NO: 5074964 - DNA, 25 bp, Homo sapien
gcacattggcaacaaaactctctca

SEQ ID NO: 5074965 - DNA, 25 bp, Homo sapien
ggaagggtaccctacacctcatgaa

SEQ ID NO: 5074966 - DNA, 25 bp, Homo sapien
ctacacttcagtgatgcgccctggg

SEQ ID NO: 5074967 - DNA, 25 bp, Homo sapien
gaagcatgcctcttctagcacattg

SEQ ID NO: 5074968 - DNA, 25 bp, Homo sapien
gagtggctttggctttacacttggg

SEQ ID NO: 5074969 - DNA, 25 bp, Homo sapien
agagagtggctttggctttacactt

SEQ ID NO: 5074970 - DNA, 25 bp, Homo sapien
tggctttggctttacacttgggaag

SEQ ID NO: 5074971 - DNA, 25 bp, Homo sapien
gctttggctttacacttgggaagga

SEQ ID NO: 5074972 - DNA, 25 bp, Homo sapien
tgctggaggtttttggcaggcaaca

SEQ ID NO: 5074973 - DNA, 25 bp, Homo sapien
ctgctggaggtttttggcaggcaac

SEQ ID NO: 5074974 - DNA, 25 bp, Homo sapien
tctgctggaggtttttggcaggcaa

SEQ ID NO: 5074975 - DNA, 25 bp, Homo sapien
cataaggctgccctctgttagctta

SEQ ID NO: 5074976 - DNA, 25 bp, Homo sapien
aggctgccctctgttagcttacagc

SEQ ID NO: 5074977 - DNA, 25 bp, Homo sapien
ggaaacataaggctgccctctgtta

SEQ ID NO: 5074978 - DNA, 25 bp, Homo sapien
aaacataaggctgccctctgttagc

SEQ ID NO: 5074979 - DNA, 25 bp, Homo sapien
tgtgtgaccggcacagccgggcaag

SEQ ID NO: 5074980 - DNA, 25 bp, Homo sapien
gctgggcctgtgctgacacgtccag

SEQ ID NO: 5074981 - DNA, 25 bp, Homo sapien
ctggaggctttgtaggttgctgccc

SEQ ID NO: 5074982 - DNA, 25 bp, Homo sapien
gccaaacaccagcagatcgcctatg

SEQ ID NO: 5074983 - DNA, 25 bp, Homo sapien
gaaggtttgaggactctcccgtggc

SEQ ID NO: 5074984 - DNA, 25 bp, Homo sapien
agggttgtccttgtcgccatttgca

SEQ ID NO: 5074985 - DNA, 25 bp, Homo sapien
tccaaatgaactgttgacatcaggc

SEQ ID NO: 5074986 - DNA, 25 bp, Homo sapien
ctctgggtgtccgttaagcataggg

SEQ ID NO: 5074987 - DNA, 25 bp, Homo sapien
aacatgtgtcgggtgcctctcttct

SEQ ID NO: 5074988 - DNA, 25 bp, Homo sapien
agacctagagaacatgtgtcgggtg

SEQ ID NO: 5074989 - DNA, 25 bp, Homo sapien
taaaagacctagagaacatgtgtcg

SEQ ID NO: 5074990 - DNA, 25 bp, Homo sapien
aaagacctagagaacatgtgtcggg

SEQ ID NO: 5074991 - DNA, 25 bp, Homo sapien
ctataatatggcctttcttatagat

SEQ ID NO: 5074992 - DNA, 25 bp, Homo sapien
cttatagatttgcttgtatgtggcc

SEQ ID NO: 5074993 - DNA, 25 bp, Homo sapien
tataatatggcctttcttatagatt

SEQ ID NO: 5074994 - DNA, 25 bp, Homo sapien
tagatttgcttgtatgtggccaaag

SEQ ID NO: 5074995 - DNA, 25 bp, Homo sapien
ataatgccaacaacacgctgggtgg

SEQ ID NO: 5074996 - DNA, 25 bp, Homo sapien
ggtggcattgtaggttcttccagta

SEQ ID NO: 5074997 - DNA, 25 bp, Homo sapien
ccaacaacacgctgggtggcattgt

SEQ ID NO: 5074998 - DNA, 25 bp, Homo sapien
caacacgctgggtggcattgtaggt

SEQ ID NO: 5074999 - DNA, 25 bp, Homo sapien
gtggagcaggctggcacttcagctg

SEQ ID NO: 5075000 - DNA, 25 bp, Homo sapien
tagtggagcaggctggcacttcagc

SEQ ID NO: 5075001 - DNA, 25 bp, Homo sapien
ctagtggagcaggctggcacttcag

SEQ ID NO: 5075002 - DNA, 25 bp, Homo sapien
gagcaggctggcacttcagctgaat

SEQ ID NO: 5075003 - DNA, 25 bp, Homo sapien
ccataagaaagaggttctagcagct

SEQ ID NO: 5075004 - DNA, 25 bp, Homo sapien
gaatccataagaaagaggttctagc

SEQ ID NO: 5075005 - DNA, 25 bp, Homo sapien
atccataagaaagaggttctagcag

SEQ ID NO: 5075006 - DNA, 25 bp, Homo sapien
catgaatccataagaaagaggttct

SEQ ID NO: 5075007 - DNA, 25 bp, Homo sapien
gcaggggtttggtaacatcgtcatc

SEQ ID NO: 5075008 - DNA, 25 bp, Homo sapien
aggggtttggtaacatcgtcatcat

SEQ ID NO: 5075009 - DNA, 25 bp, Homo sapien
caggggtttggtaacatcgtcatca

SEQ ID NO: 5075010 - DNA, 25 bp, Homo sapien
ggaataggattaactcccttctctc

SEQ ID NO: 5075011 - DNA, 25 bp, Homo sapien
tctcctataagaaactgcaggctgc

SEQ ID NO: 5075012 - DNA, 25 bp, Homo sapien
tcaactctggaactgcgagagccaa

SEQ ID NO: 5075013 - DNA, 25 bp, Homo sapien
tttgagagtagagccagtaagtccc

SEQ ID NO: 5075014 - DNA, 25 bp, Homo sapien
gctttacaaaggaggctgacaggct

SEQ ID NO: 5075015 - DNA, 25 bp, Homo sapien
tctggaaagctcctaatggcaggcc

SEQ ID NO: 5075016 - DNA, 25 bp, Homo sapien
tagagctgtgccagtaatcctgctg

SEQ ID NO: 5075017 - DNA, 25 bp, Homo sapien
gacaggctgagactgacaggaacca

SEQ ID NO: 5075018 - DNA, 25 bp, Homo sapien
aatgtctcttgtggcacatctatgc

SEQ ID NO: 5075019 - DNA, 25 bp, Homo sapien
tcctgcaagtatgcccaaaatgtct

SEQ ID NO: 5075020 - DNA, 25 bp, Homo sapien
agcactggcttctaacctggggggg

SEQ ID NO: 5075021 - DNA, 25 bp, Homo sapien
tgtggcacatctatgccttcctcaa

SEQ ID NO: 5075022 - DNA, 25 bp, Homo sapien
cggatgtggggccatgggtagccag

SEQ ID NO: 5075023 - DNA, 25 bp, Homo sapien
tcggatgtggggccatgggtagcca

SEQ ID NO: 5075024 - DNA, 25 bp, Homo sapien
tacccactgagccttcggatgtggg

SEQ ID NO: 5075025 - DNA, 25 bp, Homo sapien
ttctacccactgagccttcggatgt

SEQ ID NO: 5075026 - DNA, 25 bp, Homo sapien
gttggcaccccctttaagcctgaca

SEQ ID NO: 5075027 - DNA, 25 bp, Homo sapien
ttggcaccccctttaagcctgacaa

SEQ ID NO: 5075028 - DNA, 25 bp, Homo sapien
tggcaccccctttaagcctgacaaa

SEQ ID NO: 5075029 - DNA, 25 bp, Homo sapien
caacatagaggagccattcttgaac

SEQ ID NO: 5075030 - DNA, 25 bp, Homo sapien
gcagtcggcgctgggctgctgtgct

SEQ ID NO: 5075031 - DNA, 25 bp, Homo sapien
gccattcttgaacctccaggaactt

SEQ ID NO: 5075032 - DNA, 25 bp, Homo sapien
gacagggagtcaacatagaggagcc

SEQ ID NO: 5075033 - DNA, 25 bp, Homo sapien
ccgtatataaaagtccagcatggca

SEQ ID NO: 5075034 - DNA, 25 bp, Homo sapien
cgtatataaaagtccagcatggcac

SEQ ID NO: 5075035 - DNA, 25 bp, Homo sapien
agaccccgtatataaaagtccagca

SEQ ID NO: 5075036 - DNA, 25 bp, Homo sapien
ccccgtatataaaagtccagcatgg

SEQ ID NO: 5075037 - DNA, 25 bp, Homo sapien
tgggctctcctatgcactactttaa

SEQ ID NO: 5075038 - DNA, 25 bp, Homo sapien
gccaggaccctgtgtactttatagg

SEQ ID NO: 5075039 - DNA, 25 bp, Homo sapien
gagagccatcagtcttatcaagtga

SEQ ID NO: 5075040 - DNA, 25 bp, Homo sapien
caatggtcccgtggtggttctgtag

SEQ ID NO: 5075041 - DNA, 25 bp, Homo sapien
ttttggcacaaatgattgattagca

SEQ ID NO: 5075042 - DNA, 25 bp, Homo sapien
tgattgattagcatgtctcagcttc

SEQ ID NO: 5075043 - DNA, 25 bp, Homo sapien
ggctgggtaggagggccggctctca

SEQ ID NO: 5075044 - DNA, 25 bp, Homo sapien
agcttctcacgtgaatgtgattttc

SEQ ID NO: 5075045 - DNA, 25 bp, Homo sapien
ttcccaccgaggctagactgagcac

SEQ ID NO: 5075046 - DNA, 25 bp, Homo sapien
gcttcccaccgaggctagactgagc

SEQ ID NO: 5075047 - DNA, 25 bp, Homo sapien
ttccttgcttcccaccgaggctaga

SEQ ID NO: 5075048 - DNA, 25 bp, Homo sapien
cttgcttcccaccgaggctagactg

SEQ ID NO: 5075049 - DNA, 25 bp, Homo sapien
atctgatgccccaggatcaaaatag

SEQ ID NO: 5075050 - DNA, 25 bp, Homo sapien
tgaggagtgcccacacatccttgcc

SEQ ID NO: 5075051 - DNA, 25 bp, Homo sapien
tggcccatgaggagtgcccacacat

SEQ ID NO: 5075052 - DNA, 25 bp, Homo sapien
cccaggatcaaaatagcctcgggct

SEQ ID NO: 5075053 - DNA, 25 bp, Homo sapien
gggcagctgatgagactccccttac

SEQ ID NO: 5075054 - DNA, 25 bp, Homo sapien
cgtttcatttataggcaggctgagg

SEQ ID NO: 5075055 - DNA, 25 bp, Homo sapien
gatgagactccccttactccagagc

SEQ ID NO: 5075056 - DNA, 25 bp, Homo sapien
gtttcatttataggcaggctgagga

SEQ ID NO: 5075057 - DNA, 25 bp, Homo sapien
gaggtggatggaggcaccaggatgc

SEQ ID NO: 5075058 - DNA, 25 bp, Homo sapien
tggatggaggcaccaggatgcccac

SEQ ID NO: 5075059 - DNA, 25 bp, Homo sapien
ggtggatggaggcaccaggatgccc

SEQ ID NO: 5075060 - DNA, 25 bp, Homo sapien
ggaggtggatggaggcaccaggatg

SEQ ID NO: 5075061 - DNA, 25 bp, Homo sapien
acactgcctgcggtatcgcctggaa

SEQ ID NO: 5075062 - DNA, 25 bp, Homo sapien
cagaggcatcgtccgtctgagacac

SEQ ID NO: 5075063 - DNA, 25 bp, Homo sapien
agtgcttccagtctatacagtgaga

SEQ ID NO: 5075064 - DNA, 25 bp, Homo sapien
gccctgttgtcttaaagtgcttcca

SEQ ID NO: 5075065 - DNA, 25 bp, Homo sapien
gctgtgtagtgttatgagttaggca

SEQ ID NO: 5075066 - DNA, 25 bp, Homo sapien
tattggggccagtacctaaccattc

SEQ ID NO: 5075067 - DNA, 25 bp, Homo sapien
gaacctgttcccctgtttcctcatg

SEQ ID NO: 5075068 - DNA, 25 bp, Homo sapien
taggcattgctgttagctatgcatc

SEQ ID NO: 5075069 - DNA, 25 bp, Homo sapien
atgtcgtcctaacctcactggtcca

SEQ ID NO: 5075070 - DNA, 25 bp, Homo sapien
aacagacttccgctaatttcagtct

SEQ ID NO: 5075071 - DNA, 25 bp, Homo sapien
taaaatatgtggaatggccacactg

SEQ ID NO: 5075072 - DNA, 25 bp, Homo sapien
cttccgctaatttcagtctaaagat

SEQ ID NO: 5075073 - DNA, 25 bp, Homo sapien
gctactactatcactgcagctatga

SEQ ID NO: 5075074 - DNA, 25 bp, Homo sapien
gatgctgctggtgctatgactgcta

SEQ ID NO: 5075075 - DNA, 25 bp, Homo sapien
tcactgctgcaattcctactgtcac

SEQ ID NO: 5075076 - DNA, 25 bp, Homo sapien
tatgattgctactactccagctgct

SEQ ID NO: 5075077 - DNA, 25 bp, Homo sapien
ccgcactggcaactctccagggggc

SEQ ID NO: 5075078 - DNA, 25 bp, Homo sapien
cattcttcttgtgatggctttcaag

SEQ ID NO: 5075079 - DNA, 25 bp, Homo sapien
caagggccaccacagggaatatttg

SEQ ID NO: 5075080 - DNA, 25 bp, Homo sapien
ggctttcaaggatcttcaagggcca

SEQ ID NO: 5075081 - DNA, 25 bp, Homo sapien
cagggaatatttgcatgcatgtctc

SEQ ID NO: 5075082 - DNA, 25 bp, Homo sapien
ggcttcactaaatggggtcctgcag

SEQ ID NO: 5075083 - DNA, 25 bp, Homo sapien
gatgagccttgatgactattgtttt

SEQ ID NO: 5075084 - DNA, 25 bp, Homo sapien
aagaagtcgaatacctctagggcct

SEQ ID NO: 5075085 - DNA, 25 bp, Homo sapien
ggtcctgcagaaggtgttcgatgca

SEQ ID NO: 5075086 - DNA, 25 bp, Homo sapien
tggactgtgcgtgatgaatgtgccc

SEQ ID NO: 5075087 - DNA, 25 bp, Homo sapien
ccaggatgtgtttgggtgactgtaa

SEQ ID NO: 5075088 - DNA, 25 bp, Homo sapien
tattggcatttttgcattgagttga

SEQ ID NO: 5075089 - DNA, 25 bp, Homo sapien
catgaactgtttcaacgtcagtgct

SEQ ID NO: 5075090 - DNA, 25 bp, Homo sapien
cacagacgtgacatatggagggtca

SEQ ID NO: 5075091 - DNA, 25 bp, Homo sapien
agaggaagcttgaccaggaggccat

SEQ ID NO: 5075092 - DNA, 25 bp, Homo sapien
cagggaccactgatttccagaagcc

SEQ ID NO: 5075093 - DNA, 25 bp, Homo sapien
ctggcaccgcagtcatggctatggg

SEQ ID NO: 5075094 - DNA, 25 bp, Homo sapien
ccttcaggctgggctgctcggtcat

SEQ ID NO: 5075095 - DNA, 25 bp, Homo sapien
ctttttggcataggttggccacttg

SEQ ID NO: 5075096 - DNA, 25 bp, Homo sapien
ggccttcaggctgggctgctcggtc

SEQ ID NO: 5075097 - DNA, 25 bp, Homo sapien
ttctttttggcataggttggccact

SEQ ID NO: 5075098 - DNA, 25 bp, Homo sapien
caggcagtcctggacagacggtcat

SEQ ID NO: 5075099 - DNA, 25 bp, Homo sapien
gcatcagtgtatggatctctaaggg

SEQ ID NO: 5075100 - DNA, 25 bp, Homo sapien
tgggcctggtatcatccagtcaagc

SEQ ID NO: 5075101 - DNA, 25 bp, Homo sapien
ccagtcaagcatagagcagagtgtc

SEQ ID NO: 5075102 - DNA, 25 bp, Homo sapien
tggtggaagattggcagtggccact

SEQ ID NO: 5075103 - DNA, 25 bp, Homo sapien
taaaggtgcaggaaaacgtcatgag

SEQ ID NO: 5075104 - DNA, 25 bp, Homo sapien
aaatcttcaggtgtagcttgagctc

SEQ ID NO: 5075105 - DNA, 25 bp, Homo sapien
tcagccacaattcagaactacaagg

SEQ ID NO: 5075106 - DNA, 25 bp, Homo sapien
caggccggtccttgagatgaaataa

SEQ ID NO: 5075107 - DNA, 25 bp, Homo sapien
ttaaacatgaacagaggagagtgct

SEQ ID NO: 5075108 - DNA, 25 bp, Homo sapien
tcctatgactatggagggagcctcc

SEQ ID NO: 5075109 - DNA, 25 bp, Homo sapien
cccgttaagcagttgaggccactct

SEQ ID NO: 5075110 - DNA, 25 bp, Homo sapien
tacccaaagctagtggtccagcagt

SEQ ID NO: 5075111 - DNA, 25 bp, Homo sapien
ctgttaccccatttggacatgtcag

SEQ ID NO: 5075112 - DNA, 25 bp, Homo sapien
tgttaccccatttggacatgtcagc

SEQ ID NO: 5075113 - DNA, 25 bp, Homo sapien
ccactgttaccccatttggacatgt

SEQ ID NO: 5075114 - DNA, 25 bp, Homo sapien
ttaccccatttggacatgtcagcat

SEQ ID NO: 5075115 - DNA, 25 bp, Homo sapien
cattaccataagtctgcttggccag

SEQ ID NO: 5075116 - DNA, 25 bp, Homo sapien
taccataagtctgcttggccagcat

SEQ ID NO: 5075117 - DNA, 25 bp, Homo sapien
ttagcatgtacattaccataagtct

SEQ ID NO: 5075118 - DNA, 25 bp, Homo sapien
tgtacattaccataagtctgcttgg

SEQ ID NO: 5075119 - DNA, 25 bp, Homo sapien
tcactgaggttatgaaccatggcca

SEQ ID NO: 5075120 - DNA, 25 bp, Homo sapien
ggagatgacaagctcctcactgagg

SEQ ID NO: 5075121 - DNA, 25 bp, Homo sapien
taaagttaagctgatccatcctaga

SEQ ID NO: 5075122 - DNA, 25 bp, Homo sapien
gcaattccttggctgctggattggg

SEQ ID NO: 5075123 - DNA, 25 bp, Homo sapien
gtgggatgccttcactgtttgtacc

SEQ ID NO: 5075124 - DNA, 25 bp, Homo sapien
tgctgtccatagctttgaacttgcc

SEQ ID NO: 5075125 - DNA, 25 bp, Homo sapien
tccatagctttgaacttgccgaagg

SEQ ID NO: 5075126 - DNA, 25 bp, Homo sapien
tgtccatagctttgaacttgccgaa

SEQ ID NO: 5075127 - DNA, 25 bp, Homo sapien
ccatagctttgaacttgccgaaggc

SEQ ID NO: 5075128 - DNA, 25 bp, Homo sapien
tctgatgagtcccatatctctggaa

SEQ ID NO: 5075129 - DNA, 25 bp, Homo sapien
ctggaactgtatgtttttgctggca

SEQ ID NO: 5075130 - DNA, 25 bp, Homo sapien
tatctctggaactgtatgtttttgc

SEQ ID NO: 5075131 - DNA, 25 bp, Homo sapien
gagtcccatatctctggaactgtat

SEQ ID NO: 5075132 - DNA, 25 bp, Homo sapien
gcaaacagcaggtataacttttcca

SEQ ID NO: 5075133 - DNA, 25 bp, Homo sapien
tgcaaacagcaggtataacttttcc

SEQ ID NO: 5075134 - DNA, 25 bp, Homo sapien
ttgcaaacagcaggtataacttttc

SEQ ID NO: 5075135 - DNA, 25 bp, Homo sapien
ttatgtggtttcagcccaatctcag

SEQ ID NO: 5075136 - DNA, 25 bp, Homo sapien
caagtagtgtatccttgccagtgct

SEQ ID NO: 5075137 - DNA, 25 bp, Homo sapien
ggctcttgctactttgcttatgtgg

SEQ ID NO: 5075138 - DNA, 25 bp, Homo sapien
tctcagtcctgttcatcctaatttc

SEQ ID NO: 5075139 - DNA, 25 bp, Homo sapien
ctaggctgtctcctctatgcaaaat

SEQ ID NO: 5075140 - DNA, 25 bp, Homo sapien
accatgatgtgcttgctcaggcccc

SEQ ID NO: 5075141 - DNA, 25 bp, Homo sapien
cacttcctcaacacgagtgggacga

SEQ ID NO: 5075142 - DNA, 25 bp, Homo sapien
cagtgctcatgagtggtctgttttt

SEQ ID NO: 5075143 - DNA, 25 bp, Homo sapien
tagggagaaaacagcattgaaacaa

SEQ ID NO: 5075144 - DNA, 25 bp, Homo sapien
ccttagggagaaaacagcattgaaa

SEQ ID NO: 5075145 - DNA, 25 bp, Homo sapien
ggagaaaacagcattgaaacaatat

SEQ ID NO: 5075146 - DNA, 25 bp, Homo sapien
cttagggagaaaacagcattgaaac

SEQ ID NO: 5075147 - DNA, 25 bp, Homo sapien
ttccctctccttcaagatgatttgt

SEQ ID NO: 5075148 - DNA, 25 bp, Homo sapien
tccctcctgatgataaagctagctc

SEQ ID NO: 5075149 - DNA, 25 bp, Homo sapien
gtttagggaaaggagatctcttgga

SEQ ID NO: 5075150 - DNA, 25 bp, Homo sapien
ggcaccacagattcttataaacacc

SEQ ID NO: 5075151 - DNA, 25 bp, Homo sapien
caatgaggcccacagttgaggcccc

SEQ ID NO: 5075152 - DNA, 25 bp, Homo sapien
cccagactgaagatgttcgagggca

SEQ ID NO: 5075153 - DNA, 25 bp, Homo sapien
agtattaaccatcgcaggaggagag

SEQ ID NO: 5075154 - DNA, 25 bp, Homo sapien
tatattctctagaagctaattagat

SEQ ID NO: 5075155 - DNA, 25 bp, Homo sapien
ggagagcatgagctaccttccaggt

SEQ ID NO: 5075156 - DNA, 25 bp, Homo sapien
caggatgggtgcacatatagacagc

SEQ ID NO: 5075157 - DNA, 25 bp, Homo sapien
gcttgcatgggagatagggtcacaa

SEQ ID NO: 5075158 - DNA, 25 bp, Homo sapien
caggaggagcactcttcaggttcag

SEQ ID NO: 5075159 - DNA, 25 bp, Homo sapien
gtgactgcattcacacaggaggagc

SEQ ID NO: 5075160 - DNA, 25 bp, Homo sapien
ctgactgagatacttgatagaaact

SEQ ID NO: 5075161 - DNA, 25 bp, Homo sapien
tctgactacagaaactgactgagat

SEQ ID NO: 5075162 - DNA, 25 bp, Homo sapien
gactacagaaactgactgagatact

SEQ ID NO: 5075163 - DNA, 25 bp, Homo sapien
aaactgactgagatacttgatagaa

SEQ ID NO: 5075164 - DNA, 25 bp, Homo sapien
tgcctgaagcagccttcaggaccca

SEQ ID NO: 5075165 - DNA, 25 bp, Homo sapien
ctcttgtcctctgttgacttcaggg

SEQ ID NO: 5075166 - DNA, 25 bp, Homo sapien
ctggttgtggaactggttggttgag

SEQ ID NO: 5075167 - DNA, 25 bp, Homo sapien
tgtaagtctggaagagcaactcttg

SEQ ID NO: 5075168 - DNA, 25 bp, Homo sapien
ttttctaacatcttgttggttctct

SEQ ID NO: 5075169 - DNA, 25 bp, Homo sapien
tttctaacatcttgttggttctctg

SEQ ID NO: 5075170 - DNA, 25 bp, Homo sapien
cttcctagatcttggtccggtaagt

SEQ ID NO: 5075171 - DNA, 25 bp, Homo sapien
ctgggtgatcctgcattgagtgtat

SEQ ID NO: 5075172 - DNA, 25 bp, Homo sapien
ctatctatttgattcagtgctgagt

SEQ ID NO: 5075173 - DNA, 25 bp, Homo sapien
tatgtggaagtctagatctctttga

SEQ ID NO: 5075174 - DNA, 25 bp, Homo sapien
tagatcttcttgttaaattgaacac

SEQ ID NO: 5075175 - DNA, 25 bp, Homo sapien
cctccaacatcttttccaatacctt

SEQ ID NO: 5075176 - DNA, 25 bp, Homo sapien
caacatcttttccaataccttcttt

SEQ ID NO: 5075177 - DNA, 25 bp, Homo sapien
tttccttcctccaacatcttttcca

SEQ ID NO: 5075178 - DNA, 25 bp, Homo sapien
tccaacatcttttccaataccttct

SEQ ID NO: 5075179 - DNA, 25 bp, Homo sapien
gatggagaatctaattggtgcacct

SEQ ID NO: 5075180 - DNA, 25 bp, Homo sapien
tctaattggtgcacctccttggtcc

SEQ ID NO: 5075181 - DNA, 25 bp, Homo sapien
gagaatctaattggtgcacctcctt

SEQ ID NO: 5075182 - DNA, 25 bp, Homo sapien
gatggatggagaatctaattggtgc

SEQ ID NO: 5075183 - DNA, 25 bp, Homo sapien
tccgaggaagcatctggtcagcaaa

SEQ ID NO: 5075184 - DNA, 25 bp, Homo sapien
gaaatccgaggaagcatctggtcag

SEQ ID NO: 5075185 - DNA, 25 bp, Homo sapien
ttcaggaaatccgaggaagcatctg

SEQ ID NO: 5075186 - DNA, 25 bp, Homo sapien
aaagggtgcttggatcagggaggga

SEQ ID NO: 5075187 - DNA, 25 bp, Homo sapien
cagttatcttggtgcagtgctctct

SEQ ID NO: 5075188 - DNA, 25 bp, Homo sapien
cctctgaaaagtctgtcctgcccat

SEQ ID NO: 5075189 - DNA, 25 bp, Homo sapien
ctttaacacattttggcaggcctgt

SEQ ID NO: 5075190 - DNA, 25 bp, Homo sapien
ttctgctcagaagggctaccttcag

SEQ ID NO: 5075191 - DNA, 25 bp, Homo sapien
cagtgtggttgctttggctttccca

SEQ ID NO: 5075192 - DNA, 25 bp, Homo sapien
tctatatacttcctcatgcctacat

SEQ ID NO: 5075193 - DNA, 25 bp, Homo sapien
gccagtgtggttgctttggctttcc

SEQ ID NO: 5075194 - DNA, 25 bp, Homo sapien
tggctccaggtcagcagatctatat

SEQ ID NO: 5075195 - DNA, 25 bp, Homo sapien
ttgggtcctggcctgatattgtttg

SEQ ID NO: 5075196 - DNA, 25 bp, Homo sapien
atttcatcttcccaatgtgttacag

SEQ ID NO: 5075197 - DNA, 25 bp, Homo sapien
aaagagcatttttgggtcctggcct

SEQ ID NO: 5075198 - DNA, 25 bp, Homo sapien
tggaatcctgagttgctcctggcat

SEQ ID NO: 5075199 - DNA, 25 bp, Homo sapien
tcagtaggacccttttgcaataatt

SEQ ID NO: 5075200 - DNA, 25 bp, Homo sapien
gtaggacccttttgcaataatttca

SEQ ID NO: 5075201 - DNA, 25 bp, Homo sapien
taggacccttttgcaataatttcaa

SEQ ID NO: 5075202 - DNA, 25 bp, Homo sapien
gacccttttgcaataatttcaaatc

SEQ ID NO: 5075203 - DNA, 25 bp, Homo sapien
caaatatggagttagatctggttag

SEQ ID NO: 5075204 - DNA, 25 bp, Homo sapien
tatctagaggagcttttctgactgc

SEQ ID NO: 5075205 - DNA, 25 bp, Homo sapien
tctgactgctaaagtatatggcact

SEQ ID NO: 5075206 - DNA, 25 bp, Homo sapien
tcacccatttagtgctcttggcagc

SEQ ID NO: 5075207 - DNA, 25 bp, Homo sapien
tttgaaaatgtaatctcctcagtca

SEQ ID NO: 5075208 - DNA, 25 bp, Homo sapien
ttgaaaatgtaatctcctcagtcat

SEQ ID NO: 5075209 - DNA, 25 bp, Homo sapien
ctttgaaaatgtaatctcctcagtc

SEQ ID NO: 5075210 - DNA, 25 bp, Homo sapien
tcttcaaaagtgtatgctgtagcac

SEQ ID NO: 5075211 - DNA, 25 bp, Homo sapien
gctgtagcaccaaccctactaaaaa

SEQ ID NO: 5075212 - DNA, 25 bp, Homo sapien
tccctgctcttcaaaagtgtatgct

SEQ ID NO: 5075213 - DNA, 25 bp, Homo sapien
gtatgctgtagcaccaaccctacta

SEQ ID NO: 5075214 - DNA, 25 bp, Homo sapien
caagcaacaggggtcatggctgccc

SEQ ID NO: 5075215 - DNA, 25 bp, Homo sapien
tggtgcaaccccgatcccaccttga

SEQ ID NO: 5075216 - DNA, 25 bp, Homo sapien
tcagtcaagcaacaggggtcatggc

SEQ ID NO: 5075217 - DNA, 25 bp, Homo sapien
aaacaaatagtgctttttcagtcaa

SEQ ID NO: 5075218 - DNA, 25 bp, Homo sapien
atcttggtgataccctggactgcag

SEQ ID NO: 5075219 - DNA, 25 bp, Homo sapien
ggtgataccctggactgcagcaact

SEQ ID NO: 5075220 - DNA, 25 bp, Homo sapien
ttcaatcttggtgataccctggact

SEQ ID NO: 5075221 - DNA, 25 bp, Homo sapien
ttggtgataccctggactgcagcaa

SEQ ID NO: 5075222 - DNA, 25 bp, Homo sapien
ttgaatgtgggaagagaggcaacat

SEQ ID NO: 5075223 - DNA, 25 bp, Homo sapien
gctatggttgcgtcactccagtcca

SEQ ID NO: 5075224 - DNA, 25 bp, Homo sapien
tagggactctccatatagaataggg

SEQ ID NO: 5075225 - DNA, 25 bp, Homo sapien
catttgagatgcatagaggagacat

SEQ ID NO: 5075226 - DNA, 25 bp, Homo sapien
ccgtgagggcgtagaagaagaataa

SEQ ID NO: 5075227 - DNA, 25 bp, Homo sapien
ggcactaggcattaagcaactgaac

SEQ ID NO: 5075228 - DNA, 25 bp, Homo sapien
taggaatccctcaaagcagctgagt

SEQ ID NO: 5075229 - DNA, 25 bp, Homo sapien
ttataaaacagtggcaccgtgaggg

SEQ ID NO: 5075230 - DNA, 25 bp, Homo sapien
tacttgctgagggtaataatccggc

SEQ ID NO: 5075231 - DNA, 25 bp, Homo sapien
tccggcattatacatacagtatgtg

SEQ ID NO: 5075232 - DNA, 25 bp, Homo sapien
cttggaaatagaaactctgcttact

SEQ ID NO: 5075233 - DNA, 25 bp, Homo sapien
tagtagggcaaattattcaggcctt

SEQ ID NO: 5075234 - DNA, 25 bp, Homo sapien
ggagcactcacggtccactgaagct

SEQ ID NO: 5075235 - DNA, 25 bp, Homo sapien
tcagtgagttatgcagctggagcac

SEQ ID NO: 5075236 - DNA, 25 bp, Homo sapien
agcctagcctttaccacgatactgg

SEQ ID NO: 5075237 - DNA, 25 bp, Homo sapien
taaaggctcagttgtggcagacagt

SEQ ID NO: 5075238 - DNA, 25 bp, Homo sapien
gtttttgcagcatacatttacaact

SEQ ID NO: 5075239 - DNA, 25 bp, Homo sapien
cactatactgcttcatgggtagtag

SEQ ID NO: 5075240 - DNA, 25 bp, Homo sapien
gctcttactcttatttaggctggag

SEQ ID NO: 5075241 - DNA, 25 bp, Homo sapien
tcctgtcccttatgacattactgtc

SEQ ID NO: 5075242 - DNA, 25 bp, Homo sapien
tgtatataagtctgtgtcccttcca

SEQ ID NO: 5075243 - DNA, 25 bp, Homo sapien
gcatcataaggctaaattcaaggag

SEQ ID NO: 5075244 - DNA, 25 bp, Homo sapien
tgcctggagcaactagtcttgaccg

SEQ ID NO: 5075245 - DNA, 25 bp, Homo sapien
tcttgaccgtatctgctatgcatag

SEQ ID NO: 5075246 - DNA, 25 bp, Homo sapien
gaatgggatattaatcacttcaagc

SEQ ID NO: 5075247 - DNA, 25 bp, Homo sapien
ggtcatgcagtgtaaaataatcaca

SEQ ID NO: 5075248 - DNA, 25 bp, Homo sapien
tacatgagaagttttgatacggtca

SEQ ID NO: 5075249 - DNA, 25 bp, Homo sapien
cgggagcttactttattcctcaggc

SEQ ID NO: 5075250 - DNA, 25 bp, Homo sapien
cgcgcctggcccggtgttgtcatct

SEQ ID NO: 5075251 - DNA, 25 bp, Homo sapien
agcctactatacaccaaggctagat

SEQ ID NO: 5075252 - DNA, 25 bp, Homo sapien
gagtctcactctcttcaggggcgtg

SEQ ID NO: 5075253 - DNA, 25 bp, Homo sapien
tactacaggcagttgtaacaaaatg

SEQ ID NO: 5075254 - DNA, 25 bp, Homo sapien
gtggtggcggtggcagtggtggcgc

SEQ ID NO: 5075255 - DNA, 25 bp, Homo sapien
acctctaacaaaaaatgcagaaatt

SEQ ID NO: 5075256 - DNA, 25 bp, Homo sapien
gtggcggtggcagtggtggcgcaca

SEQ ID NO: 5075257 - DNA, 25 bp, Homo sapien
tggcggtggcagtggtggcgcacac

SEQ ID NO: 5075258 - DNA, 25 bp, Homo sapien
tggcatgatcttggctcactgtaac

SEQ ID NO: 5075259 - DNA, 25 bp, Homo sapien
cctctgtcaccaggctgcagtgcag

SEQ ID NO: 5075260 - DNA, 25 bp, Homo sapien
cctcatgatccacccaccttggtct

SEQ ID NO: 5075261 - DNA, 25 bp, Homo sapien
ttttttcgaagacagagtcttcctc

SEQ ID NO: 5075262 - DNA, 25 bp, Homo sapien
gagaagggaagaaagaatagaacag

SEQ ID NO: 5075263 - DNA, 25 bp, Homo sapien
agaaagaatagaacagggagttcca

SEQ ID NO: 5075264 - DNA, 25 bp, Homo sapien
gaataatctattgagataactcaca

SEQ ID NO: 5075265 - DNA, 25 bp, Homo sapien
agggaagaaagaatagaacagggag

SEQ ID NO: 5075266 - DNA, 25 bp, Homo sapien
aactagtatttgcatgaccacaggc

SEQ ID NO: 5075267 - DNA, 25 bp, Homo sapien
gccaccctaggaatgagaccttggg

SEQ ID NO: 5075268 - DNA, 25 bp, Homo sapien
tgtatatgatggatacccgcgggac

SEQ ID NO: 5075269 - DNA, 25 bp, Homo sapien
tctacagatgaacttcccggcgtgc

SEQ ID NO: 5075270 - DNA, 25 bp, Homo sapien
tagacagccagtcatctactctgga

SEQ ID NO: 5075271 - DNA, 25 bp, Homo sapien
acagtggagattttagcctaattag

SEQ ID NO: 5075272 - DNA, 25 bp, Homo sapien
agtgttccagtaattgactaggctt

SEQ ID NO: 5075273 - DNA, 25 bp, Homo sapien
ctaggctttaggacagggatactgc

SEQ ID NO: 5075274 - DNA, 25 bp, Homo sapien
tgacagataacactgaggctagaaa

SEQ ID NO: 5075275 - DNA, 25 bp, Homo sapien
gacttacgattgttgctaggagtag

SEQ ID NO: 5075276 - DNA, 25 bp, Homo sapien
tctcacagcaagcatatgagttagc

SEQ ID NO: 5075277 - DNA, 25 bp, Homo sapien
tactagtttggaatgagacttacga

SEQ ID NO: 5075278 - DNA, 25 bp, Homo sapien
gaagatcgaaactgacttaatggga

SEQ ID NO: 5075279 - DNA, 25 bp, Homo sapien
tagttgctactgtagatttacatga

SEQ ID NO: 5075280 - DNA, 25 bp, Homo sapien
gtataagaaccttccggacaacaga

SEQ ID NO: 5075281 - DNA, 25 bp, Homo sapien
taagaggcagctttaattgccatga

SEQ ID NO: 5075282 - DNA, 25 bp, Homo sapien
ttgtcacgttgccaggttgattttg

SEQ ID NO: 5075283 - DNA, 25 bp, Homo sapien
ttttaagttcaagctcgtaaataca

SEQ ID NO: 5075284 - DNA, 25 bp, Homo sapien
gcttggaagtgatcctccttggact

SEQ ID NO: 5075285 - DNA, 25 bp, Homo sapien
taagttcaagctcgtaaatacattt

SEQ ID NO: 5075286 - DNA, 25 bp, Homo sapien
tcaactcagggagactactaggctc

SEQ ID NO: 5075287 - DNA, 25 bp, Homo sapien
gcgccatgcttgtgtagcttgcaga

SEQ ID NO: 5075288 - DNA, 25 bp, Homo sapien
taagctgggacagtcatagtactca

SEQ ID NO: 5075289 - DNA, 25 bp, Homo sapien
agtattcacctgaagactggaaggc

SEQ ID NO: 5075290 - DNA, 25 bp, Homo sapien
aggagctccgcactgccgcacgctg

SEQ ID NO: 5075291 - DNA, 25 bp, Homo sapien
tccttcctcggccaggagcacaacc

SEQ ID NO: 5075292 - DNA, 25 bp, Homo sapien
cagacccccgtgtgcccgccggtct

SEQ ID NO: 5075293 - DNA, 25 bp, Homo sapien
gtgtgcccgccggtctcaggagctc

SEQ ID NO: 5075294 - DNA, 25 bp, Homo sapien
cagaccgacgggaaccaagcgacgg

SEQ ID NO: 5075295 - DNA, 25 bp, Homo sapien
ccgcagaccgacgggaaccaagcga

SEQ ID NO: 5075296 - DNA, 25 bp, Homo sapien
gcctcccgcagaccgacgggaacca

SEQ ID NO: 5075297 - DNA, 25 bp, Homo sapien
gacgggaaccaagcgacggcggcag

SEQ ID NO: 5075298 - DNA, 25 bp, Homo sapien
tccctcgtccacccggagaattcat

SEQ ID NO: 5075299 - DNA, 25 bp, Homo sapien
ttccctcgtccacccggagaattca

SEQ ID NO: 5075300 - DNA, 25 bp, Homo sapien
tacaaacagcgggtaggagaaatag

SEQ ID NO: 5075301 - DNA, 25 bp, Homo sapien
tacaggttccgcttatgcggcgact

SEQ ID NO: 5075302 - DNA, 25 bp, Homo sapien
cttatgcggcgactcgggcggaggg

SEQ ID NO: 5075303 - DNA, 25 bp, Homo sapien
ggagaaatagtacaggttccgctta

SEQ ID NO: 5075304 - DNA, 25 bp, Homo sapien
catcctcatcgatgcgcagggcaat

SEQ ID NO: 5075305 - DNA, 25 bp, Homo sapien
gatgtactcgaaggcctgtttgtgg

SEQ ID NO: 5075306 - DNA, 25 bp, Homo sapien
gtggaaggcgaccaaacgcagcagc

SEQ ID NO: 5075307 - DNA, 25 bp, Homo sapien
tgtttgtggaagactcggacgcgct

SEQ ID NO: 5075308 - DNA, 25 bp, Homo sapien
tgaaacaaagtcgacagctacagtg

SEQ ID NO: 5075309 - DNA, 25 bp, Homo sapien
aaacaaagtcgacagctacagtgcc

SEQ ID NO: 5075310 - DNA, 25 bp, Homo sapien
tctgaaacaaagtcgacagctacag

SEQ ID NO: 5075311 - DNA, 25 bp, Homo sapien
gtctgaaacaaagtcgacagctaca

SEQ ID NO: 5075312 - DNA, 25 bp, Homo sapien
ttcacagtgctagaaaggatcagtg

SEQ ID NO: 5075313 - DNA, 25 bp, Homo sapien
acacgtctgggtgtctcatagtgac

SEQ ID NO: 5075314 - DNA, 25 bp, Homo sapien
cagtgtggtcactctaggacaaatg

SEQ ID NO: 5075315 - DNA, 25 bp, Homo sapien
cactgtcatcaacacgtctgggtgt

SEQ ID NO: 5075316 - DNA, 25 bp, Homo sapien
ccagtaaggcggcactgcttcttca

SEQ ID NO: 5075317 - DNA, 25 bp, Homo sapien
gtaaggcggcactgcttcttcaata

SEQ ID NO: 5075318 - DNA, 25 bp, Homo sapien
ggcggcactgcttcttcaatatcaa

SEQ ID NO: 5075319 - DNA, 25 bp, Homo sapien
aggcggcactgcttcttcaatatca

SEQ ID NO: 5075320 - DNA, 25 bp, Homo sapien
cacccagttcggagtgcagttgcac

SEQ ID NO: 5075321 - DNA, 25 bp, Homo sapien
actcctgtcacccagttcggagtgc

SEQ ID NO: 5075322 - DNA, 25 bp, Homo sapien
ttttactcctgtcacccagttcgga

SEQ ID NO: 5075323 - DNA, 25 bp, Homo sapien
agcctgaacaacctgagctcaagtg

SEQ ID NO: 5075324 - DNA, 25 bp, Homo sapien
attgttgaaatttctccagcctggc

SEQ ID NO: 5075325 - DNA, 25 bp, Homo sapien
ttaagcctaggaatgagccttgagg

SEQ ID NO: 5075326 - DNA, 25 bp, Homo sapien
cacttaagcctaggaatgagccttg

SEQ ID NO: 5075327 - DNA, 25 bp, Homo sapien
taagcctaggaatgagccttgaggc

SEQ ID NO: 5075328 - DNA, 25 bp, Homo sapien
ttccagttcttcaatacctttctta

SEQ ID NO: 5075329 - DNA, 25 bp, Homo sapien
gttcttcaatacctttcttatacca

SEQ ID NO: 5075330 - DNA, 25 bp, Homo sapien
tcttcaatacctttcttataccatt

SEQ ID NO: 5075331 - DNA, 25 bp, Homo sapien
ccagttcttcaatacctttcttata

SEQ ID NO: 5075332 - DNA, 25 bp, Homo sapien
ttttagcttgaaggcgtctagctct

SEQ ID NO: 5075333 - DNA, 25 bp, Homo sapien
gaagttgtaagcggtccttggccat

SEQ ID NO: 5075334 - DNA, 25 bp, Homo sapien
tcattttagcttgaaggcgtctagc

SEQ ID NO: 5075335 - DNA, 25 bp, Homo sapien
gcttgaaggcgtctagctctttcac

SEQ ID NO: 5075336 - DNA, 25 bp, Homo sapien
tgagccacagtgcccggcgtttttt

SEQ ID NO: 5075337 - DNA, 25 bp, Homo sapien
tgcccaggcacccagctggtctcga

SEQ ID NO: 5075338 - DNA, 25 bp, Homo sapien
gttgcccaggcacccagctggtctc

SEQ ID NO: 5075339 - DNA, 25 bp, Homo sapien
tatgttgcccaggcacccagctggt

SEQ ID NO: 5075340 - DNA, 25 bp, Homo sapien
tcctgcagtgatgactatttatgtg

SEQ ID NO: 5075341 - DNA, 25 bp, Homo sapien
gcaaatctagttgttcgaccttcaa

SEQ ID NO: 5075342 - DNA, 25 bp, Homo sapien
aatatttctaatacccatcctgcag

SEQ ID NO: 5075343 - DNA, 25 bp, Homo sapien
gagaggaccattttatccaatctat

SEQ ID NO: 5075344 - DNA, 25 bp, Homo sapien
gcggcatgccaagttagtactgtca

SEQ ID NO: 5075345 - DNA, 25 bp, Homo sapien
gactggagatgtccattgcggcatg

SEQ ID NO: 5075346 - DNA, 25 bp, Homo sapien
tagacgtccgtttgtgacttggaaa

SEQ ID NO: 5075347 - DNA, 25 bp, Homo sapien
ttagtactgtcattatagacgtccg

SEQ ID NO: 5075348 - DNA, 25 bp, Homo sapien
tgccaacggaacctcgctcactgct

SEQ ID NO: 5075349 - DNA, 25 bp, Homo sapien
ccaacggaacctcgctcactgctag

SEQ ID NO: 5075350 - DNA, 25 bp, Homo sapien
tcagagggtcccatgccaacggaac

SEQ ID NO: 5075351 - DNA, 25 bp, Homo sapien
agggtcccatgccaacggaacctcg

SEQ ID NO: 5075352 - DNA, 25 bp, Homo sapien
cccacatagtgtgagctgaagggcg

SEQ ID NO: 5075353 - DNA, 25 bp, Homo sapien
aatccttttactctatctcttctcc

SEQ ID NO: 5075354 - DNA, 25 bp, Homo sapien
gaaactgccactgactatactgtaa

SEQ ID NO: 5075355 - DNA, 25 bp, Homo sapien
caaaccaacataagaagtccttagg

SEQ ID NO: 5075356 - DNA, 25 bp, Homo sapien
ggagtcaatgattatcaaaaactga

SEQ ID NO: 5075357 - DNA, 25 bp, Homo sapien
agtcttctttgaccataaggagtca

SEQ ID NO: 5075358 - DNA, 25 bp, Homo sapien
ggttgctacgtgagaggaaagaaac

SEQ ID NO: 5075359 - DNA, 25 bp, Homo sapien
aaataatctgatcatggtggcacac

SEQ ID NO: 5075360 - DNA, 25 bp, Homo sapien
ccagaaaccatggataaaccactgt

SEQ ID NO: 5075361 - DNA, 25 bp, Homo sapien
cataactgtttttgaacgaggcagt

SEQ ID NO: 5075362 - DNA, 25 bp, Homo sapien
ggaccagatccctgtttcactccag

SEQ ID NO: 5075363 - DNA, 25 bp, Homo sapien
tgtaactaggtgctctatggtggcc

SEQ ID NO: 5075364 - DNA, 25 bp, Homo sapien
tataaggttagcaaggttgctgtcc

SEQ ID NO: 5075365 - DNA, 25 bp, Homo sapien
tcttttttcttacgagtagcagttg

SEQ ID NO: 5075366 - DNA, 25 bp, Homo sapien
tttttcttacgagtagcagttgtag

SEQ ID NO: 5075367 - DNA, 25 bp, Homo sapien
gtccacattcctaaaattcttcaag

SEQ ID NO: 5075368 - DNA, 25 bp, Homo sapien
ctaagaaacaagacctcagttagtt

SEQ ID NO: 5075369 - DNA, 25 bp, Homo sapien
cttgaccagctatatcatcaaattt

SEQ ID NO: 5075370 - DNA, 25 bp, Homo sapien
tgttttgccaagtcttgaccagcta

SEQ ID NO: 5075371 - DNA, 25 bp, Homo sapien
caagtcttgaccagctatatcatca

SEQ ID NO: 5075372 - DNA, 25 bp, Homo sapien
tgcttgttttgccaagtcttgacca

SEQ ID NO: 5075373 - DNA, 25 bp, Homo sapien
ctttgagcggcatttccaagcaatc

SEQ ID NO: 5075374 - DNA, 25 bp, Homo sapien
atcactgtcacgttggtatttagcc

SEQ ID NO: 5075375 - DNA, 25 bp, Homo sapien
tagccttcgatggagtttaccacac

SEQ ID NO: 5075376 - DNA, 25 bp, Homo sapien
tctgggaaaactcattgtgtcaggg

SEQ ID NO: 5075377 - DNA, 25 bp, Homo sapien
tcccaggtggaccaaagagtaacag

SEQ ID NO: 5075378 - DNA, 25 bp, Homo sapien
tggaccaaagagtaacagccctctg

SEQ ID NO: 5075379 - DNA, 25 bp, Homo sapien
cccattcccaggtggaccaaagagt

SEQ ID NO: 5075380 - DNA, 25 bp, Homo sapien
caggtggaccaaagagtaacagccc

SEQ ID NO: 5075381 - DNA, 25 bp, Homo sapien
agttaaacttgcagcacttatatta

SEQ ID NO: 5075382 - DNA, 25 bp, Homo sapien
taaagaaggttgcattcgattctgc

SEQ ID NO: 5075383 - DNA, 25 bp, Homo sapien
tgcattcgattctgcagctactgct

SEQ ID NO: 5075384 - DNA, 25 bp, Homo sapien
cagcacttatattaaagaaggttgc

SEQ ID NO: 5075385 - DNA, 25 bp, Homo sapien
tgctgggaccacgtattcgctggca

SEQ ID NO: 5075386 - DNA, 25 bp, Homo sapien
accacgtattcgctggcatgtccag

SEQ ID NO: 5075387 - DNA, 25 bp, Homo sapien
tattcgctggcatgtccagctaaat

SEQ ID NO: 5075388 - DNA, 25 bp, Homo sapien
ctgatttgctgggaccacgtattcg

SEQ ID NO: 5075389 - DNA, 25 bp, Homo sapien
taatccactgagctgtatacagctg

SEQ ID NO: 5075390 - DNA, 25 bp, Homo sapien
gataagcaggttaactgttcgaaca

SEQ ID NO: 5075391 - DNA, 25 bp, Homo sapien
tatgatgcagttcctcccaaaagct

SEQ ID NO: 5075392 - DNA, 25 bp, Homo sapien
gtatattcgctttgtggtaatccac

SEQ ID NO: 5075393 - DNA, 25 bp, Homo sapien
tagaaggttgaagttctcgagccac

SEQ ID NO: 5075394 - DNA, 25 bp, Homo sapien
aaattatagaaggttgaagttctcg

SEQ ID NO: 5075395 - DNA, 25 bp, Homo sapien
agaaggttgaagttctcgagccaca

SEQ ID NO: 5075396 - DNA, 25 bp, Homo sapien
ttatagaaggttgaagttctcgagc

SEQ ID NO: 5075397 - DNA, 25 bp, Homo sapien
attcagtttttaggcgtctactagc

SEQ ID NO: 5075398 - DNA, 25 bp, Homo sapien
ctcttctttcacacaaaaggctatc

SEQ ID NO: 5075399 - DNA, 25 bp, Homo sapien
cttctttcacacaaaaggctatcaa

SEQ ID NO: 5075400 - DNA, 25 bp, Homo sapien
taggcgtctactagcatcgtgctcc

SEQ ID NO: 5075401 - DNA, 25 bp, Homo sapien
tgagaacagcctcatcaagctcttg

SEQ ID NO: 5075402 - DNA, 25 bp, Homo sapien
catcaagctcttgtggcctattagt

SEQ ID NO: 5075403 - DNA, 25 bp, Homo sapien
ccattacaagtactctgtcatctcc

SEQ ID NO: 5075404 - DNA, 25 bp, Homo sapien
ggcctattagttgcacccattacaa

SEQ ID NO: 5075405 - DNA, 25 bp, Homo sapien
aatccagcacttttagaaatataat

SEQ ID NO: 5075406 - DNA, 25 bp, Homo sapien
aaaaatccagcacttttagaaatat

SEQ ID NO: 5075407 - DNA, 25 bp, Homo sapien
aattttgaatttaaagctgaaacag

SEQ ID NO: 5075408 - DNA, 25 bp, Homo sapien
agctgaaacagcaaatgacaggaaa

SEQ ID NO: 5075409 - DNA, 25 bp, Homo sapien
ggtaaagacacatatacccgtttga

SEQ ID NO: 5075410 - DNA, 25 bp, Homo sapien
aagtagctgtaccatggattggaag

SEQ ID NO: 5075411 - DNA, 25 bp, Homo sapien
atggtagttcttgtttctgctctaa

SEQ ID NO: 5075412 - DNA, 25 bp, Homo sapien
tgctggctctgacagtaagcttatg

SEQ ID NO: 5075413 - DNA, 25 bp, Homo sapien
taatatatgaagtgagtatgcagca

SEQ ID NO: 5075414 - DNA, 25 bp, Homo sapien
gggtcaatggacttccttgtttaca

SEQ ID NO: 5075415 - DNA, 25 bp, Homo sapien
ttgtgctagttctttttgggtcaat

SEQ ID NO: 5075416 - DNA, 25 bp, Homo sapien
gtgctagttctttttgggtcaatgg

SEQ ID NO: 5075417 - DNA, 25 bp, Homo sapien
atggacttccttgtttacataacag

SEQ ID NO: 5075418 - DNA, 25 bp, Homo sapien
tcttttgccaaagctgttaggtcac

SEQ ID NO: 5075419 - DNA, 25 bp, Homo sapien
gcatcttttgccaaagctgttaggt

SEQ ID NO: 5075420 - DNA, 25 bp, Homo sapien
tttgccaaagctgttaggtcacttc

SEQ ID NO: 5075421 - DNA, 25 bp, Homo sapien
gccaaagctgttaggtcacttcctg

SEQ ID NO: 5075422 - DNA, 25 bp, Homo sapien
actggcagacatattcttcacctgt

SEQ ID NO: 5075423 - DNA, 25 bp, Homo sapien
cactggcagacatattcttcacctg

SEQ ID NO: 5075424 - DNA, 25 bp, Homo sapien
tcactggcagacatattcttcacct

SEQ ID NO: 5075425 - DNA, 25 bp, Homo sapien
tggcagacatattcttcacctgttc

SEQ ID NO: 5075426 - DNA, 25 bp, Homo sapien
gaagtcagataatcgaatatttctc

SEQ ID NO: 5075427 - DNA, 25 bp, Homo sapien
agtccttgttccaacgtatgtacgc

SEQ ID NO: 5075428 - DNA, 25 bp, Homo sapien
tctaaagtttgagggctgacgctgc

SEQ ID NO: 5075429 - DNA, 25 bp, Homo sapien
tatgtacgcttctaaagtttgaggg

SEQ ID NO: 5075430 - DNA, 25 bp, Homo sapien
caggtcacatgaagactgatctaca

SEQ ID NO: 5075431 - DNA, 25 bp, Homo sapien
taggctgtttctgtagccgatgacg

SEQ ID NO: 5075432 - DNA, 25 bp, Homo sapien
ggataactgtgaccatcaaggcaag

SEQ ID NO: 5075433 - DNA, 25 bp, Homo sapien
gaacaaaaggcagatcaacagacta

SEQ ID NO: 5075434 - DNA, 25 bp, Homo sapien
aacagcatatgatcctaagaaatca

SEQ ID NO: 5075435 - DNA, 25 bp, Homo sapien
acagcatatgatcctaagaaatcat

SEQ ID NO: 5075436 - DNA, 25 bp, Homo sapien
tattaaaagttgagctggaaccaca

SEQ ID NO: 5075437 - DNA, 25 bp, Homo sapien
tctacactataaacaaagacggctg

SEQ ID NO: 5075438 - DNA, 25 bp, Homo sapien
tgactcagagtccaaaaccgaactg

SEQ ID NO: 5075439 - DNA, 25 bp, Homo sapien
tattcagggagttccaaagtcatga

SEQ ID NO: 5075440 - DNA, 25 bp, Homo sapien
tgagctctccgagagattggtcggg

SEQ ID NO: 5075441 - DNA, 25 bp, Homo sapien
aaggcggctagagcggctccctctg

SEQ ID NO: 5075442 - DNA, 25 bp, Homo sapien
agctctccgagagattggtcgggac

SEQ ID NO: 5075443 - DNA, 25 bp, Homo sapien
ctgtccctgcactccgtggcggaag

SEQ ID NO: 5075444 - DNA, 25 bp, Homo sapien
ccgccggaagccgttctgggtgctc

SEQ ID NO: 5075445 - DNA, 25 bp, Homo sapien
ctcccgccggaagccgttctgggtg

SEQ ID NO: 5075446 - DNA, 25 bp, Homo sapien
tgctcgagttttcccagaacggaag

SEQ ID NO: 5075447 - DNA, 25 bp, Homo sapien
ctgggtgctcgagttttcccagaac

SEQ ID NO: 5075448 - DNA, 25 bp, Homo sapien
ggctgagggatttcaaggtcgcttc

SEQ ID NO: 5075449 - DNA, 25 bp, Homo sapien
gtcgcttcgggaccaaataagataa

SEQ ID NO: 5075450 - DNA, 25 bp, Homo sapien
gaatcagctacagccgaaaccctca

SEQ ID NO: 5075451 - DNA, 25 bp, Homo sapien
ccaaataagataaaccgaatcagct

SEQ ID NO: 5075452 - DNA, 25 bp, Homo sapien
tatagtgccataggttttcagtgct

SEQ ID NO: 5075453 - DNA, 25 bp, Homo sapien
tgtttccctgcatgactaatactga

SEQ ID NO: 5075454 - DNA, 25 bp, Homo sapien
gggtgaaatacataggtcctgctct

SEQ ID NO: 5075455 - DNA, 25 bp, Homo sapien
ggcacgctacaaagctctgggaatt

SEQ ID NO: 5075456 - DNA, 25 bp, Homo sapien
gctacaagtctaaattcccgtaaca

SEQ ID NO: 5075457 - DNA, 25 bp, Homo sapien
gctgctacaagtctaaattcccgta

SEQ ID NO: 5075458 - DNA, 25 bp, Homo sapien
cagctgctacaagtctaaattcccg

SEQ ID NO: 5075459 - DNA, 25 bp, Homo sapien
ggatctttgtggttttcgaaagaga

SEQ ID NO: 5075460 - DNA, 25 bp, Homo sapien
gcaggaagccagtacatatcaagtt

SEQ ID NO: 5075461 - DNA, 25 bp, Homo sapien
tatactattagtagaactgcaccac

SEQ ID NO: 5075462 - DNA, 25 bp, Homo sapien
tacaccaaagagcagtatcttccag

SEQ ID NO: 5075463 - DNA, 25 bp, Homo sapien
gcaccacataagcaggaagccagta

SEQ ID NO: 5075464 - DNA, 25 bp, Homo sapien
tggtcaggtaagtataggcagttaa

SEQ ID NO: 5075465 - DNA, 25 bp, Homo sapien
gtcaggtaagtataggcagttaaag

SEQ ID NO: 5075466 - DNA, 25 bp, Homo sapien
ggtcaggtaagtataggcagttaaa

SEQ ID NO: 5075467 - DNA, 25 bp, Homo sapien
atggtcaggtaagtataggcagtta

SEQ ID NO: 5075468 - DNA, 25 bp, Homo sapien
taagctttcccaacgtgacaggcaa

SEQ ID NO: 5075469 - DNA, 25 bp, Homo sapien
tcccaacgtgacaggcaaaacagca

SEQ ID NO: 5075470 - DNA, 25 bp, Homo sapien
aacagcatctcagagtaattttaat

SEQ ID NO: 5075471 - DNA, 25 bp, Homo sapien
tttcttaagctttcccaacgtgaca

SEQ ID NO: 5075472 - DNA, 25 bp, Homo sapien
gcattgtgctaagaagacagtcata

SEQ ID NO: 5075473 - DNA, 25 bp, Homo sapien
gactggagagtaatagctaaggcga

SEQ ID NO: 5075474 - DNA, 25 bp, Homo sapien
ccagagtaggtaaatctatcgcgag

SEQ ID NO: 5075475 - DNA, 25 bp, Homo sapien
taaggcgagtggtctctttttgaga

SEQ ID NO: 5075476 - DNA, 25 bp, Homo sapien
tgagaccagcccagccaaaatggtg

SEQ ID NO: 5075477 - DNA, 25 bp, Homo sapien
ctattgctcaggcacggtagctcac

SEQ ID NO: 5075478 - DNA, 25 bp, Homo sapien
gccgaggtgggtggaccacttgagg

SEQ ID NO: 5075479 - DNA, 25 bp, Homo sapien
gcctgttatcccagcactttggtag

SEQ ID NO: 5075480 - DNA, 25 bp, Homo sapien
gtaacttattaaacatgtcattaaa

SEQ ID NO: 5075481 - DNA, 25 bp, Homo sapien
ccaaatgaatagacagggctaggtt

SEQ ID NO: 5075482 - DNA, 25 bp, Homo sapien
taggtttcctcaatgttacccagta

SEQ ID NO: 5075483 - DNA, 25 bp, Homo sapien
gaatagacagggctaggtttcctca

SEQ ID NO: 5075484 - DNA, 25 bp, Homo sapien
gaacaggacatgcagagaaaagcag

SEQ ID NO: 5075485 - DNA, 25 bp, Homo sapien
acaggacatgcagagaaaagcaggc

SEQ ID NO: 5075486 - DNA, 25 bp, Homo sapien
ctgaacaggacatgcagagaaaagc

SEQ ID NO: 5075487 - DNA, 25 bp, Homo sapien
tgaacaggacatgcagagaaaagca

SEQ ID NO: 5075488 - DNA, 25 bp, Homo sapien
tgtgaattaaggtcttgataggagc

SEQ ID NO: 5075489 - DNA, 25 bp, Homo sapien
gtgagaaggtgtgaattaaggtctt

SEQ ID NO: 5075490 - DNA, 25 bp, Homo sapien
gaattaaggtcttgataggagcatc

SEQ ID NO: 5075491 - DNA, 25 bp, Homo sapien
agcatcatttcggattggtggagaa

SEQ ID NO: 5075492 - DNA, 25 bp, Homo sapien
tctgaatggttaatcaacataggca

SEQ ID NO: 5075493 - DNA, 25 bp, Homo sapien
aaagaactgttacagattaatacag

SEQ ID NO: 5075494 - DNA, 25 bp, Homo sapien
aaggtgctcaattagtcataaggaa

SEQ ID NO: 5075495 - DNA, 25 bp, Homo sapien
tgaaataccactgcataccatagaa

SEQ ID NO: 5075496 - DNA, 25 bp, Homo sapien
tataatccctagactataagccaga

SEQ ID NO: 5075497 - DNA, 25 bp, Homo sapien
tagcaagtagaaggttttcaaactc

SEQ ID NO: 5075498 - DNA, 25 bp, Homo sapien
ttttagtttttcctgcaacacatgg

SEQ ID NO: 5075499 - DNA, 25 bp, Homo sapien
caacacatggtctaatggtattcaa

SEQ ID NO: 5075500 - DNA, 25 bp, Homo sapien
gctgtctactatgagcccaacactg

SEQ ID NO: 5075501 - DNA, 25 bp, Homo sapien
actgtgcgttagacaccagagtgct

SEQ ID NO: 5075502 - DNA, 25 bp, Homo sapien
taacacttaattgacccactgtgcg

SEQ ID NO: 5075503 - DNA, 25 bp, Homo sapien
cactgttagagcagattagggtttc

SEQ ID NO: 5075504 - DNA, 25 bp, Homo sapien
aatacagccaggacttctaatcttt

SEQ ID NO: 5075505 - DNA, 25 bp, Homo sapien
ttaatataaagagagctcccaactg

SEQ ID NO: 5075506 - DNA, 25 bp, Homo sapien
actgtgccaagactgtggaggcaaa

SEQ ID NO: 5075507 - DNA, 25 bp, Homo sapien
atataaagagagctcccaactgtgc

SEQ ID NO: 5075508 - DNA, 25 bp, Homo sapien
gtgtatctcgggctgttccaaaaag

SEQ ID NO: 5075509 - DNA, 25 bp, Homo sapien
tctcgggctgttccaaaaagcgttc

SEQ ID NO: 5075510 - DNA, 25 bp, Homo sapien
gtgtgtatctcgggctgttccaaaa

SEQ ID NO: 5075511 - DNA, 25 bp, Homo sapien
tatctcgggctgttccaaaaagcgt

SEQ ID NO: 5075512 - DNA, 25 bp, Homo sapien
gaacaacgataacattcacctttaa

SEQ ID NO: 5075513 - DNA, 25 bp, Homo sapien
tatgtaatttcaatacgtagaggga

SEQ ID NO: 5075514 - DNA, 25 bp, Homo sapien
attatcagtatgtaatttcaatacg

SEQ ID NO: 5075515 - DNA, 25 bp, Homo sapien
ctaaaaagaacaacgataacattca

SEQ ID NO: 5075516 - DNA, 25 bp, Homo sapien
tgaacaggttgaaacaaagagccac

SEQ ID NO: 5075517 - DNA, 25 bp, Homo sapien
gtgaacaggttgaaacaaagagcca

SEQ ID NO: 5075518 - DNA, 25 bp, Homo sapien
cgtgaacaggttgaaacaaagagcc

SEQ ID NO: 5075519 - DNA, 25 bp, Homo sapien
aaggtttattccgaatagaaagcat

SEQ ID NO: 5075520 - DNA, 25 bp, Homo sapien
gatctgcaacatgctcttgaagcca

SEQ ID NO: 5075521 - DNA, 25 bp, Homo sapien
gactaagatctgcaacatgctcttg

SEQ ID NO: 5075522 - DNA, 25 bp, Homo sapien
taagatctgcaacatgctcttgaag

SEQ ID NO: 5075523 - DNA, 25 bp, Homo sapien
cttcgactaagatctgcaacatgct

SEQ ID NO: 5075524 - DNA, 25 bp, Homo sapien
ggaaggaagatactgctaagtcccg

SEQ ID NO: 5075525 - DNA, 25 bp, Homo sapien
gattcattcggggaaggaagatact

SEQ ID NO: 5075526 - DNA, 25 bp, Homo sapien
aagtcccggaataattccacacaag

SEQ ID NO: 5075527 - DNA, 25 bp, Homo sapien
gaagatactgctaagtcccggaata

SEQ ID NO: 5075528 - DNA, 25 bp, Homo sapien
tatacccacacgaactgaaaggaag

SEQ ID NO: 5075529 - DNA, 25 bp, Homo sapien
gaattatcatatcacatgacccagt

SEQ ID NO: 5075530 - DNA, 25 bp, Homo sapien
aaaaatacatccttgaggtgatgga

SEQ ID NO: 5075531 - DNA, 25 bp, Homo sapien
tttgtacactcgtgttcacagtggt

SEQ ID NO: 5075532 - DNA, 25 bp, Homo sapien
ttttcctaggcagagtgtttgtgtc

SEQ ID NO: 5075533 - DNA, 25 bp, Homo sapien
tttcctaggcagagtgtttgtgtcc

SEQ ID NO: 5075534 - DNA, 25 bp, Homo sapien
tcctaggcagagtgtttgtgtccct

SEQ ID NO: 5075535 - DNA, 25 bp, Homo sapien
ttcctaggcagagtgtttgtgtccc

SEQ ID NO: 5075536 - DNA, 25 bp, Homo sapien
ccagcactgtgtaatgtattttcag

SEQ ID NO: 5075537 - DNA, 25 bp, Homo sapien
taatgtattttcagcttatcttgtt

SEQ ID NO: 5075538 - DNA, 25 bp, Homo sapien
gtcactccagcactgtgtaatgtat

SEQ ID NO: 5075539 - DNA, 25 bp, Homo sapien
tgtaatgtattttcagcttatcttg

SEQ ID NO: 5075540 - DNA, 25 bp, Homo sapien
gagtcataatggtggcttgacttcc

SEQ ID NO: 5075541 - DNA, 25 bp, Homo sapien
agtcataatggtggcttgacttcct

SEQ ID NO: 5075542 - DNA, 25 bp, Homo sapien
gtcataatggtggcttgacttcctt

SEQ ID NO: 5075543 - DNA, 25 bp, Homo sapien
ctgagtcataatggtggcttgactt

SEQ ID NO: 5075544 - DNA, 25 bp, Homo sapien
gaactatctaaggatgatacttgct

SEQ ID NO: 5075545 - DNA, 25 bp, Homo sapien
catgagtagaactatctaaggatga

SEQ ID NO: 5075546 - DNA, 25 bp, Homo sapien
tcatattcatcaatatctcattcag

SEQ ID NO: 5075547 - DNA, 25 bp, Homo sapien
tgattcatgagtagaactatctaag

SEQ ID NO: 5075548 - DNA, 25 bp, Homo sapien
ttcagcaaaacctaactctaacatt

SEQ ID NO: 5075549 - DNA, 25 bp, Homo sapien
cactgtgggcgagctgcagaaaaaa

SEQ ID NO: 5075550 - DNA, 25 bp, Homo sapien
aaagtaaagtctgaggactgtcttc

SEQ ID NO: 5075551 - DNA, 25 bp, Homo sapien
aatcagttttgtagaattcatgaat

SEQ ID NO: 5075552 - DNA, 25 bp, Homo sapien
ctcatttttttgcaactttgcatac

SEQ ID NO: 5075553 - DNA, 25 bp, Homo sapien
ttcactcatttttttgcaactttgc

SEQ ID NO: 5075554 - DNA, 25 bp, Homo sapien
ctgttcgtatctggatttcactcat

SEQ ID NO: 5075555 - DNA, 25 bp, Homo sapien
tgttcgtatctggatttcactcatt

SEQ ID NO: 5075556 - DNA, 25 bp, Homo sapien
tccagaacgatggatatagactcaa

SEQ ID NO: 5075557 - DNA, 25 bp, Homo sapien
ccagaacgatggatatagactcaac

SEQ ID NO: 5075558 - DNA, 25 bp, Homo sapien
gtccagaacgatggatatagactca

SEQ ID NO: 5075559 - DNA, 25 bp, Homo sapien
acatatacaaatccctgtctgtcca

SEQ ID NO: 5075560 - DNA, 25 bp, Homo sapien
aaaacatatacaaatccctgtctgt

SEQ ID NO: 5075561 - DNA, 25 bp, Homo sapien
ctttctcttggttgataaaaacata

SEQ ID NO: 5075562 - DNA, 25 bp, Homo sapien
tctttctcttggttgataaaaacat

SEQ ID NO: 5075563 - DNA, 25 bp, Homo sapien
gaccttatggcatccgtgcttttag

SEQ ID NO: 5075564 - DNA, 25 bp, Homo sapien
cagagaccttatggcatccgtgctt

SEQ ID NO: 5075565 - DNA, 25 bp, Homo sapien
gagaccttatggcatccgtgctttt

SEQ ID NO: 5075566 - DNA, 25 bp, Homo sapien
gccagagaccttatggcatccgtgc

SEQ ID NO: 5075567 - DNA, 25 bp, Homo sapien
tgagacactgcattactactcagct

SEQ ID NO: 5075568 - DNA, 25 bp, Homo sapien
tctgagacactgcattactactcag

SEQ ID NO: 5075569 - DNA, 25 bp, Homo sapien
gagacactgcattactactcagctt

SEQ ID NO: 5075570 - DNA, 25 bp, Homo sapien
aatctgagacactgcattactactc

SEQ ID NO: 5075571 - DNA, 25 bp, Homo sapien
ctgtctggaattagaagatgtgttt

SEQ ID NO: 5075572 - DNA, 25 bp, Homo sapien
tgtctggaattagaagatgtgtttc

SEQ ID NO: 5075573 - DNA, 25 bp, Homo sapien
cgactcccttgtggactctgtctaa

SEQ ID NO: 5075574 - DNA, 25 bp, Homo sapien
cccttgtggactctgtctaactgac

SEQ ID NO: 5075575 - DNA, 25 bp, Homo sapien
ggcagtgtctacggcaaaataatta

SEQ ID NO: 5075576 - DNA, 25 bp, Homo sapien
aggcagtgtctacggcaaaataatt

SEQ ID NO: 5075577 - DNA, 25 bp, Homo sapien
gtaagactttcccactgtacacact

SEQ ID NO: 5075578 - DNA, 25 bp, Homo sapien
gagtaagactttcccactgtacaca

SEQ ID NO: 5075579 - DNA, 25 bp, Homo sapien
tggagtaagactttcccactgtaca

SEQ ID NO: 5075580 - DNA, 25 bp, Homo sapien
aagactttcccactgtacacactca

SEQ ID NO: 5075581 - DNA, 25 bp, Homo sapien
caactgaccaataacatggggtggt

SEQ ID NO: 5075582 - DNA, 25 bp, Homo sapien
tccaactgaccaataacatggggtg

SEQ ID NO: 5075583 - DNA, 25 bp, Homo sapien
ccaactgaccaataacatggggtgg

SEQ ID NO: 5075584 - DNA, 25 bp, Homo sapien
gtccaactgaccaataacatggggt

SEQ ID NO: 5075585 - DNA, 25 bp, Homo sapien
ttctaaaactccatctaaggtagat

SEQ ID NO: 5075586 - DNA, 25 bp, Homo sapien
tgttcatttcggacttctaaaactc

SEQ ID NO: 5075587 - DNA, 25 bp, Homo sapien
cttctaaaactccatctaaggtaga

SEQ ID NO: 5075588 - DNA, 25 bp, Homo sapien
caaaaatgttcatttcggacttcta

SEQ ID NO: 5075589 - DNA, 25 bp, Homo sapien
taaaagaggcattgggattacgtga

SEQ ID NO: 5075590 - DNA, 25 bp, Homo sapien
gaattcttacatgcactgatccagc

SEQ ID NO: 5075591 - DNA, 25 bp, Homo sapien
taaggcaggcctaatccagtcatcc

SEQ ID NO: 5075592 - DNA, 25 bp, Homo sapien
catttgttcattggcatctcgtcga

SEQ ID NO: 5075593 - DNA, 25 bp, Homo sapien
ttgtaaaaccagtcctcaatccttg

SEQ ID NO: 5075594 - DNA, 25 bp, Homo sapien
ccttgagttgctccaattcctggaa

SEQ ID NO: 5075595 - DNA, 25 bp, Homo sapien
ccaagtccttgattaagcatgctgc

SEQ ID NO: 5075596 - DNA, 25 bp, Homo sapien
gctgctgtaaggtgtgtgtccatga

SEQ ID NO: 5075597 - DNA, 25 bp, Homo sapien
catcaagtggctcttataaaggtaa

SEQ ID NO: 5075598 - DNA, 25 bp, Homo sapien
taacatttacgaggatttcactgtc

SEQ ID NO: 5075599 - DNA, 25 bp, Homo sapien
tgcagtcaactacaaaaccaaagat

SEQ ID NO: 5075600 - DNA, 25 bp, Homo sapien
taaaggtaaggtcacatcacactgc

SEQ ID NO: 5075601 - DNA, 25 bp, Homo sapien
tcattttccccagtagtcaaggtag

SEQ ID NO: 5075602 - DNA, 25 bp, Homo sapien
cacctttggtgggacagatgcacag

SEQ ID NO: 5075603 - DNA, 25 bp, Homo sapien
ttaaccataactcaggacacggcag

SEQ ID NO: 5075604 - DNA, 25 bp, Homo sapien
tcttacatgcaggacgtagggccaa

SEQ ID NO: 5075605 - DNA, 25 bp, Homo sapien
taaataaagtgtactcgaagccagt

SEQ ID NO: 5075606 - DNA, 25 bp, Homo sapien
tacctttggtctgggtcacaccaac

SEQ ID NO: 5075607 - DNA, 25 bp, Homo sapien
tatcggcgccttgaaggaattctca

SEQ ID NO: 5075608 - DNA, 25 bp, Homo sapien
caccaactggtatactgaatgcata

SEQ ID NO: 5075609 - DNA, 25 bp, Homo sapien
tgagggacttctacacaaaactgac

SEQ ID NO: 5075610 - DNA, 25 bp, Homo sapien
gacactaccttggtcaggtgaacaa

SEQ ID NO: 5075611 - DNA, 25 bp, Homo sapien
tgaacaaggtcaacattaacagtgg

SEQ ID NO: 5075612 - DNA, 25 bp, Homo sapien
tatcaaaacttgtagcatgcagcaa

SEQ ID NO: 5075613 - DNA, 25 bp, Homo sapien
ccataatgacctctattcatctgtt

SEQ ID NO: 5075614 - DNA, 25 bp, Homo sapien
cataatgacctctattcatctgttt

SEQ ID NO: 5075615 - DNA, 25 bp, Homo sapien
accataatgacctctattcatctgt

SEQ ID NO: 5075616 - DNA, 25 bp, Homo sapien
taccataatgacctctattcatctg

SEQ ID NO: 5075617 - DNA, 25 bp, Homo sapien
acactccgggatttcagcaagttga

SEQ ID NO: 5075618 - DNA, 25 bp, Homo sapien
gccagtcccctcaccatagaagatg

SEQ ID NO: 5075619 - DNA, 25 bp, Homo sapien
cttcaactggaagcaggaattcagg

SEQ ID NO: 5075620 - DNA, 25 bp, Homo sapien
cagtttggtcctcagcacctgtaag

SEQ ID NO: 5075621 - DNA, 25 bp, Homo sapien
gaaaccctctgtgatcaactcctgg

SEQ ID NO: 5075622 - DNA, 25 bp, Homo sapien
cactgtggagacctagctctggagg

SEQ ID NO: 5075623 - DNA, 25 bp, Homo sapien
caagtgacttcattcggagcctgga

SEQ ID NO: 5075624 - DNA, 25 bp, Homo sapien
tatacctggcacaatcaggaagcag

SEQ ID NO: 5075625 - DNA, 25 bp, Homo sapien
taaggtcatgacagattttactcag

SEQ ID NO: 5075626 - DNA, 25 bp, Homo sapien
gctcagaactgggaaaggacattac

SEQ ID NO: 5075627 - DNA, 25 bp, Homo sapien
gacagaaccctttgtgccagctcag

SEQ ID NO: 5075628 - DNA, 25 bp, Homo sapien
gagacttggacgatttggctcagga

SEQ ID NO: 5075629 - DNA, 25 bp, Homo sapien
ggtatattaggaggccaacttggag

SEQ ID NO: 5075630 - DNA, 25 bp, Homo sapien
taagcttgccgaagttaacaaactc

SEQ ID NO: 5075631 - DNA, 25 bp, Homo sapien
tggaaggccctgtctactgataagc

SEQ ID NO: 5075632 - DNA, 25 bp, Homo sapien
tgtagatacattcctttatgaggga

SEQ ID NO: 5075633 - DNA, 25 bp, Homo sapien
tcttgactaagttatatgtaatgtc

SEQ ID NO: 5075634 - DNA, 25 bp, Homo sapien
taatgtctggatggcagtttcctca

SEQ ID NO: 5075635 - DNA, 25 bp, Homo sapien
tatgtaatgtctggatggcagtttc

SEQ ID NO: 5075636 - DNA, 25 bp, Homo sapien
agttatatgtaatgtctggatggca

SEQ ID NO: 5075637 - DNA, 25 bp, Homo sapien
tgattccggaagtttacccaggaca

SEQ ID NO: 5075638 - DNA, 25 bp, Homo sapien
aagtgcgatctttcctggcgttttg

SEQ ID NO: 5075639 - DNA, 25 bp, Homo sapien
tgttcctttaagtgcgatctttcct

SEQ ID NO: 5075640 - DNA, 25 bp, Homo sapien
taattcgtggaaatctcaggcctct

SEQ ID NO: 5075641 - DNA, 25 bp, Homo sapien
ctctttgtaatgtgctctcccattg

SEQ ID NO: 5075642 - DNA, 25 bp, Homo sapien
cctgacaggaccataacagtgacag

SEQ ID NO: 5075643 - DNA, 25 bp, Homo sapien
cggcgctgggattggctctttgtaa

SEQ ID NO: 5075644 - DNA, 25 bp, Homo sapien
caaagtcttcttggtggcgaccacc

SEQ ID NO: 5075645 - DNA, 25 bp, Homo sapien
tgcaagctgcgagcgaggccagaaa

SEQ ID NO: 5075646 - DNA, 25 bp, Homo sapien
gggccgctgagctgccccgagacta

SEQ ID NO: 5075647 - DNA, 25 bp, Homo sapien
ccagaaacgggcacagcgggccgct

SEQ ID NO: 5075648 - DNA, 25 bp, Homo sapien
tcgccctacggtgcggcctacgagt

SEQ ID NO: 5075649 - DNA, 25 bp, Homo sapien
ctgaggagacaaaggtgaagtcccc

SEQ ID NO: 5075650 - DNA, 25 bp, Homo sapien
tgaagtccccgttagtgggggcata

SEQ ID NO: 5075651 - DNA, 25 bp, Homo sapien
cttccgcgtctgctgaggagacaaa

SEQ ID NO: 5075652 - DNA, 25 bp, Homo sapien
ccgggggcgggcccggaggctgcat

SEQ ID NO: 5075653 - DNA, 25 bp, Homo sapien
taaagttgatattcctccctaagca

SEQ ID NO: 5075654 - DNA, 25 bp, Homo sapien
cctagtgagatctacaaaatgttca

SEQ ID NO: 5075655 - DNA, 25 bp, Homo sapien
taagcaccatgctaccaaatgtaga

SEQ ID NO: 5075656 - DNA, 25 bp, Homo sapien
aatttacggcttggctggtagctca

SEQ ID NO: 5075657 - DNA, 25 bp, Homo sapien
gagtcacatcctggtcggcttatga

SEQ ID NO: 5075658 - DNA, 25 bp, Homo sapien
agtttttataaaggcgctcactcag

SEQ ID NO: 5075659 - DNA, 25 bp, Homo sapien
tacattctgaagctaagtcccagct

SEQ ID NO: 5075660 - DNA, 25 bp, Homo sapien
tcattcatgttttccgggccctagt

SEQ ID NO: 5075661 - DNA, 25 bp, Homo sapien
tagctgtagattctttgataaaatc

SEQ ID NO: 5075662 - DNA, 25 bp, Homo sapien
gataaaatctccaccaagatttaat

SEQ ID NO: 5075663 - DNA, 25 bp, Homo sapien
acatctggggatgctattgaaccac

SEQ ID NO: 5075664 - DNA, 25 bp, Homo sapien
tccagaagccagccataacctcttt

SEQ ID NO: 5075665 - DNA, 25 bp, Homo sapien
tgtgtgagatacaggattaccattc

SEQ ID NO: 5075666 - DNA, 25 bp, Homo sapien
taatcatcccacagactagctcaaa

SEQ ID NO: 5075667 - DNA, 25 bp, Homo sapien
agctgacagacccaggtaagctgga

SEQ ID NO: 5075668 - DNA, 25 bp, Homo sapien
aagctggagtagacacacatgtgtg

SEQ ID NO: 5075669 - DNA, 25 bp, Homo sapien
accaagtgatggcattggcatcaaa

SEQ ID NO: 5075670 - DNA, 25 bp, Homo sapien
gcattggcatcaaaacacatcggat

SEQ ID NO: 5075671 - DNA, 25 bp, Homo sapien
tatcctttagatcaatgtccaattc

SEQ ID NO: 5075672 - DNA, 25 bp, Homo sapien
caaaacacatcggattttgtagtaa

SEQ ID NO: 5075673 - DNA, 25 bp, Homo sapien
aactgtccatataatgatatcatgg

SEQ ID NO: 5075674 - DNA, 25 bp, Homo sapien
ccatataatgatatcatggaaaaga

SEQ ID NO: 5075675 - DNA, 25 bp, Homo sapien
tataatgatatcatggaaaagaaaa

SEQ ID NO: 5075676 - DNA, 25 bp, Homo sapien
cctaaactgtccatataatgatatc

SEQ ID NO: 5075677 - DNA, 25 bp, Homo sapien
gccgccacgcctgactggtttttgt

SEQ ID NO: 5075678 - DNA, 25 bp, Homo sapien
gagtgcctgccattgcaggcgcacg

SEQ ID NO: 5075679 - DNA, 25 bp, Homo sapien
cgggattgcagacggtgtctggttc

SEQ ID NO: 5075680 - DNA, 25 bp, Homo sapien
acgccgccacgcctgactggttttt

SEQ ID NO: 5075681 - DNA, 25 bp, Homo sapien
ggaaccagccctgtagacattttga

SEQ ID NO: 5075682 - DNA, 25 bp, Homo sapien
atcatagtgacgcagccagaagcca

SEQ ID NO: 5075683 - DNA, 25 bp, Homo sapien
gacattttgatcttagtcctttaag

SEQ ID NO: 5075684 - DNA, 25 bp, Homo sapien
tcatggaaacagagatcatagtgac

SEQ ID NO: 5075685 - DNA, 25 bp, Homo sapien
tctgtaatcccagctatgtaggagg

SEQ ID NO: 5075686 - DNA, 25 bp, Homo sapien
tgggggtggtggggcatgtctgtaa

SEQ ID NO: 5075687 - DNA, 25 bp, Homo sapien
agctgggggtggtggggcatgtctg

SEQ ID NO: 5075688 - DNA, 25 bp, Homo sapien
gctgggggtggtggggcatgtctgt

SEQ ID NO: 5075689 - DNA, 25 bp, Homo sapien
acccgcctcggtctgtaggcatgag

SEQ ID NO: 5075690 - DNA, 25 bp, Homo sapien
tacaaaacagatacaattagagatg

SEQ ID NO: 5075691 - DNA, 25 bp, Homo sapien
ggagaccagagtccccattcacctt

SEQ ID NO: 5075692 - DNA, 25 bp, Homo sapien
agaaccagtggtaggtaggagacca

SEQ ID NO: 5075693 - DNA, 25 bp, Homo sapien
aaattgttagtgaaccaaatatcca

SEQ ID NO: 5075694 - DNA, 25 bp, Homo sapien
tccaaatggttataatccatgagac

SEQ ID NO: 5075695 - DNA, 25 bp, Homo sapien
tctccaccaagaactctggccagta

SEQ ID NO: 5075696 - DNA, 25 bp, Homo sapien
tatccaaatggttataatccatgag

SEQ ID NO: 5075697 - DNA, 25 bp, Homo sapien
taactccaaggacttggccatatgc

SEQ ID NO: 5075698 - DNA, 25 bp, Homo sapien
gggctattacaatgagaggaagtaa

SEQ ID NO: 5075699 - DNA, 25 bp, Homo sapien
ttttataagtgtagacaccacttca

SEQ ID NO: 5075700 - DNA, 25 bp, Homo sapien
gaagtaatgaatatcctataactcc

SEQ ID NO: 5075701 - DNA, 25 bp, Homo sapien
cacacaccagtatataacgacaaaa

SEQ ID NO: 5075702 - DNA, 25 bp, Homo sapien
acccactaacaatgaagcagcactg

SEQ ID NO: 5075703 - DNA, 25 bp, Homo sapien
ctgtaggcagcccaaaacacaccaa

SEQ ID NO: 5075704 - DNA, 25 bp, Homo sapien
tggtcttgaattcttcacccactaa

SEQ ID NO: 5075705 - DNA, 25 bp, Homo sapien
agaattcccagcctacacacaaatt

SEQ ID NO: 5075706 - DNA, 25 bp, Homo sapien
ttcccagcctacacacaaatttaac

SEQ ID NO: 5075707 - DNA, 25 bp, Homo sapien
tttgcagcaacaggttttctccaat

SEQ ID NO: 5075708 - DNA, 25 bp, Homo sapien
cccagataactgcaattgcttaatt

SEQ ID NO: 5075709 - DNA, 25 bp, Homo sapien
gacggctgggcttgataacacactc

SEQ ID NO: 5075710 - DNA, 25 bp, Homo sapien
gaaatacataccaagaggtcgccat

SEQ ID NO: 5075711 - DNA, 25 bp, Homo sapien
tcttccaggtgagaccagaaaggat

SEQ ID NO: 5075712 - DNA, 25 bp, Homo sapien
ccaatccaggtgcttttggcacaag

SEQ ID NO: 5075713 - DNA, 25 bp, Homo sapien
cattataacaaagtattaacctcag

SEQ ID NO: 5075714 - DNA, 25 bp, Homo sapien
tctgtgaaagattccagggtcaaca

SEQ ID NO: 5075715 - DNA, 25 bp, Homo sapien
caaatgtttatcttacggttgctgc

SEQ ID NO: 5075716 - DNA, 25 bp, Homo sapien
cctcagcaatttcttaagtgtaaca

SEQ ID NO: 5075717 - DNA, 25 bp, Homo sapien
cattagcacacgaaaatgatactgg

SEQ ID NO: 5075718 - DNA, 25 bp, Homo sapien
caaggagaggacattattagggtca

SEQ ID NO: 5075719 - DNA, 25 bp, Homo sapien
cattattagccatagcagtactgtg

SEQ ID NO: 5075720 - DNA, 25 bp, Homo sapien
ccctaagtaagatagttcccaagat

SEQ ID NO: 5075721 - DNA, 25 bp, Homo sapien
tacagattgagtataccctttccaa

SEQ ID NO: 5075722 - DNA, 25 bp, Homo sapien
tagaagtctatgttaatacagattg

SEQ ID NO: 5075723 - DNA, 25 bp, Homo sapien
aaaactggataaaatgtgcactaac

SEQ ID NO: 5075724 - DNA, 25 bp, Homo sapien
tgtgcagaaatacagtggttgagtt

SEQ ID NO: 5075725 - DNA, 25 bp, Homo sapien
caggtatgatactgtacccaggcat

SEQ ID NO: 5075726 - DNA, 25 bp, Homo sapien
tctcactacgtcgaccaggctgatt

SEQ ID NO: 5075727 - DNA, 25 bp, Homo sapien
gaatagtgcgggtcaacttacatgc

SEQ ID NO: 5075728 - DNA, 25 bp, Homo sapien
tccccttcgtatatagaggaacagc

SEQ ID NO: 5075729 - DNA, 25 bp, Homo sapien
caggcacgatcccacaaccgatcag

SEQ ID NO: 5075730 - DNA, 25 bp, Homo sapien
cacgatcccacaaccgatcagcatg

SEQ ID NO: 5075731 - DNA, 25 bp, Homo sapien
acgatcccacaaccgatcagcatgg

SEQ ID NO: 5075732 - DNA, 25 bp, Homo sapien
tcacaggcacgatcccacaaccgat

SEQ ID NO: 5075733 - DNA, 25 bp, Homo sapien
gggaaatgttttaccactgccatct

SEQ ID NO: 5075734 - DNA, 25 bp, Homo sapien
tgtaacctccaaactgtaacctcag

SEQ ID NO: 5075735 - DNA, 25 bp, Homo sapien
taacatatgccttgtatagggaaca

SEQ ID NO: 5075736 - DNA, 25 bp, Homo sapien
tacaacccagaaagacatggtttgg

SEQ ID NO: 5075737 - DNA, 25 bp, Homo sapien
cctttatcaccagatgagaaatttc

SEQ ID NO: 5075738 - DNA, 25 bp, Homo sapien
gcttattatgcaaatagcagcaatc

SEQ ID NO: 5075739 - DNA, 25 bp, Homo sapien
ctttttccctttatcaccagatgag

SEQ ID NO: 5075740 - DNA, 25 bp, Homo sapien
tattcttcaacaagtgcttattatg

SEQ ID NO: 5075741 - DNA, 25 bp, Homo sapien
catgaagtaattctccataaggatt

SEQ ID NO: 5075742 - DNA, 25 bp, Homo sapien
ggaatttagtacctaggcccatcat

SEQ ID NO: 5075743 - DNA, 25 bp, Homo sapien
taattccaccaaagtgagtaggtat

SEQ ID NO: 5075744 - DNA, 25 bp, Homo sapien
ctttacatggagaactaattccacc

SEQ ID NO: 5075745 - DNA, 25 bp, Homo sapien
agcacatttctgataccgtatttct

SEQ ID NO: 5075746 - DNA, 25 bp, Homo sapien
gataccgtatttctactcaaaagct

SEQ ID NO: 5075747 - DNA, 25 bp, Homo sapien
tatttctactcaaaagctctgacag

SEQ ID NO: 5075748 - DNA, 25 bp, Homo sapien
ctcaaaagctctgacaggctgggca

SEQ ID NO: 5075749 - DNA, 25 bp, Homo sapien
tatttgaataatgttaactgtgcac

SEQ ID NO: 5075750 - DNA, 25 bp, Homo sapien
catgttcccgtttttggctatttga

SEQ ID NO: 5075751 - DNA, 25 bp, Homo sapien
tatgcatccctaaacactatagctt

SEQ ID NO: 5075752 - DNA, 25 bp, Homo sapien
gtctattctgtgttgatggacatgt

SEQ ID NO: 5075753 - DNA, 25 bp, Homo sapien
taaccctcacaacagcgcttggagc

SEQ ID NO: 5075754 - DNA, 25 bp, Homo sapien
taaggacacctttgactgacatgct

SEQ ID NO: 5075755 - DNA, 25 bp, Homo sapien
gacatggatggaagccactaagtgg

SEQ ID NO: 5075756 - DNA, 25 bp, Homo sapien
taaggagtgaggtatagatccagct

SEQ ID NO: 5075757 - DNA, 25 bp, Homo sapien
gaattgctgatttatatccctagcc

SEQ ID NO: 5075758 - DNA, 25 bp, Homo sapien
gacagtcatgctggtctctatcagt

SEQ ID NO: 5075759 - DNA, 25 bp, Homo sapien
gcttataatcccaaccaatactgga

SEQ ID NO: 5075760 - DNA, 25 bp, Homo sapien
tgggaatccgagaggccaacgttgt

SEQ ID NO: 5075761 - DNA, 25 bp, Homo sapien
cccattcagaaaggtgtacatgtta

SEQ ID NO: 5075762 - DNA, 25 bp, Homo sapien
tgcacccatgtaattagctctcaga

SEQ ID NO: 5075763 - DNA, 25 bp, Homo sapien
taattcaagcacaatacccattcag

SEQ ID NO: 5075764 - DNA, 25 bp, Homo sapien
caagacatgatccaagctatggttc

SEQ ID NO: 5075765 - DNA, 25 bp, Homo sapien
tattatacggaattggcttacttga

SEQ ID NO: 5075766 - DNA, 25 bp, Homo sapien
gtgaatctgaagaccaacaggtcca

SEQ ID NO: 5075767 - DNA, 25 bp, Homo sapien
gcttacttgaatatagaggctgaca

SEQ ID NO: 5075768 - DNA, 25 bp, Homo sapien
aattggcttacttgaatatagaggc

SEQ ID NO: 5075769 - DNA, 25 bp, Homo sapien
cctggttgagaatcattgtgatcac

SEQ ID NO: 5075770 - DNA, 25 bp, Homo sapien
attttagagatactactgctatgcc

SEQ ID NO: 5075771 - DNA, 25 bp, Homo sapien
tactgctatgccaaccttgcctatt

SEQ ID NO: 5075772 - DNA, 25 bp, Homo sapien
gaatttgtcttatatgtcattgaac

SEQ ID NO: 5075773 - DNA, 25 bp, Homo sapien
caacctcatcctcctaaggtcaagc

SEQ ID NO: 5075774 - DNA, 25 bp, Homo sapien
aacctcatcctcctaaggtcaagca

SEQ ID NO: 5075775 - DNA, 25 bp, Homo sapien
tcatcctcctaaggtcaagcaatct

SEQ ID NO: 5075776 - DNA, 25 bp, Homo sapien
ctcatcctcctaaggtcaagcaatc

SEQ ID NO: 5075777 - DNA, 25 bp, Homo sapien
ggtgagcaccttaagggaagtagaa

SEQ ID NO: 5075778 - DNA, 25 bp, Homo sapien
tattgacactcattccgcaaagagg

SEQ ID NO: 5075779 - DNA, 25 bp, Homo sapien
aaattccttcatattgacactcatt

SEQ ID NO: 5075780 - DNA, 25 bp, Homo sapien
cactcattccgcaaagaggaatttg

SEQ ID NO: 5075781 - DNA, 25 bp, Homo sapien
cagatacgaggtgctggaagcgcat

SEQ ID NO: 5075782 - DNA, 25 bp, Homo sapien
aaacaatcagaagcctctcgtttgg

SEQ ID NO: 5075783 - DNA, 25 bp, Homo sapien
ttggattggaaggaaccgagcgacc

SEQ ID NO: 5075784 - DNA, 25 bp, Homo sapien
tctgttgaacagaagtaccagatac

SEQ ID NO: 5075785 - DNA, 25 bp, Homo sapien
tggccggaagcggacctctgggtct

SEQ ID NO: 5075786 - DNA, 25 bp, Homo sapien
cggtacgcccggaggccttttgcag

SEQ ID NO: 5075787 - DNA, 25 bp, Homo sapien
accgttcccggtacgcacggtgcag

SEQ ID NO: 5075788 - DNA, 25 bp, Homo sapien
cttttgcagcggttccagctgcgcc

SEQ ID NO: 5075789 - DNA, 25 bp, Homo sapien
tgacgggagagggggagaagcaggg

SEQ ID NO: 5075790 - DNA, 25 bp, Homo sapien
acgggagagggggagaagcagggag

SEQ ID NO: 5075791 - DNA, 25 bp, Homo sapien
ctgacgggagagggggagaagcagg

SEQ ID NO: 5075792 - DNA, 25 bp, Homo sapien
cgggagagggggagaagcagggagg

SEQ ID NO: 5075793 - DNA, 25 bp, Homo sapien
cgcccgcacgcacgcggaacgtcga

SEQ ID NO: 5075794 - DNA, 25 bp, Homo sapien
acgcacgcggaacgtcgatcgcccg

SEQ ID NO: 5075795 - DNA, 25 bp, Homo sapien
cggaacgtcgatcgcccggccggag

SEQ ID NO: 5075796 - DNA, 25 bp, Homo sapien
gaagtgaagtcaggcgcccgcacgc

SEQ ID NO: 5075797 - DNA, 25 bp, Homo sapien
ccggggccagggggcaagccgagcg

SEQ ID NO: 5075798 - DNA, 25 bp, Homo sapien
cggggccagggggcaagccgagcgc

SEQ ID NO: 5075799 - DNA, 25 bp, Homo sapien
ggggccagggggcaagccgagcgcg

SEQ ID NO: 5075800 - DNA, 25 bp, Homo sapien
tcagcacaatcacactgggaagcgg

SEQ ID NO: 5075801 - DNA, 25 bp, Homo sapien
agcacaatcacactgggaagcggct

SEQ ID NO: 5075802 - DNA, 25 bp, Homo sapien
ctcagcacaatcacactgggaagcg

SEQ ID NO: 5075803 - DNA, 25 bp, Homo sapien
cacaatcacactgggaagcggctca

SEQ ID NO: 5075804 - DNA, 25 bp, Homo sapien
cagccggggcccgaggccgccgcag

SEQ ID NO: 5075805 - DNA, 25 bp, Homo sapien
cccccgccgccgaggagcagccggg

SEQ ID NO: 5075806 - DNA, 25 bp, Homo sapien
ccggggcccgaggccgccgcagccg

SEQ ID NO: 5075807 - DNA, 25 bp, Homo sapien
ccccgccgccgaggagcagccgggg

SEQ ID NO: 5075808 - DNA, 25 bp, Homo sapien
acaggctgtgcagcccgtcggcgtc

SEQ ID NO: 5075809 - DNA, 25 bp, Homo sapien
ttgagcgcagggtggtaggacaggc

SEQ ID NO: 5075810 - DNA, 25 bp, Homo sapien
cccgaggtgccgtcgatgactttga

SEQ ID NO: 5075811 - DNA, 25 bp, Homo sapien
tcccgcggctagtgacggccaggat

SEQ ID NO: 5075812 - DNA, 25 bp, Homo sapien
gcgtagaagttggaagccccgagca

SEQ ID NO: 5075813 - DNA, 25 bp, Homo sapien
gaccaggtctagtcgtcttcggcgt

SEQ ID NO: 5075814 - DNA, 25 bp, Homo sapien
gagacagcctgaagttacaaaccca

SEQ ID NO: 5075815 - DNA, 25 bp, Homo sapien
tatttcatacaccacaggtcctgac

SEQ ID NO: 5075816 - DNA, 25 bp, Homo sapien
gaagtgctctcctccaatggtgaga

SEQ ID NO: 5075817 - DNA, 25 bp, Homo sapien
acgcatctgaaagtcccgtccctgg

SEQ ID NO: 5075818 - DNA, 25 bp, Homo sapien
caaggtttacgccacccagaagtgc

SEQ ID NO: 5075819 - DNA, 25 bp, Homo sapien
ctggaccaaggtttacgccacccag

SEQ ID NO: 5075820 - DNA, 25 bp, Homo sapien
tctctctactctatttatagggctg

SEQ ID NO: 5075821 - DNA, 25 bp, Homo sapien
tacctgcagattctaagtaaaacat

SEQ ID NO: 5075822 - DNA, 25 bp, Homo sapien
gggctgtcaccctctattaatcatt

SEQ ID NO: 5075823 - DNA, 25 bp, Homo sapien
taatcattaaaagcaaacttactaa

SEQ ID NO: 5075824 - DNA, 25 bp, Homo sapien
tactaaaatggacactaataggacc

SEQ ID NO: 5075825 - DNA, 25 bp, Homo sapien
tggacactaataggaccatatgtgc

SEQ ID NO: 5075826 - DNA, 25 bp, Homo sapien
taggaccatatgtgcttagggcttc

SEQ ID NO: 5075827 - DNA, 25 bp, Homo sapien
ctgccagattactaaaatggacact

SEQ ID NO: 5075828 - DNA, 25 bp, Homo sapien
taaaaagagacaaataagcatatga

SEQ ID NO: 5075829 - DNA, 25 bp, Homo sapien
aacaaagtcagcaaataaacatata

SEQ ID NO: 5075830 - DNA, 25 bp, Homo sapien
acatataaaaagagacaaataagca

SEQ ID NO: 5075831 - DNA, 25 bp, Homo sapien
aaacaaagtcagcaaataaacatat

SEQ ID NO: 5075832 - DNA, 25 bp, Homo sapien
tctggtaagtacactgctgcaaaca

SEQ ID NO: 5075833 - DNA, 25 bp, Homo sapien
tacatgcataatcacttaattctca

SEQ ID NO: 5075834 - DNA, 25 bp, Homo sapien
attctcacaattagtacaattatcc

SEQ ID NO: 5075835 - DNA, 25 bp, Homo sapien
gggcacttgtctggtaagtacactg

SEQ ID NO: 5075836 - DNA, 25 bp, Homo sapien
tgcacacatataccttcacttacat

SEQ ID NO: 5075837 - DNA, 25 bp, Homo sapien
tgacatttagccacaccaatacact

SEQ ID NO: 5075838 - DNA, 25 bp, Homo sapien
caaatctgtatacacacagaactag

SEQ ID NO: 5075839 - DNA, 25 bp, Homo sapien
atacaactatcttaacttcattctg

SEQ ID NO: 5075840 - DNA, 25 bp, Homo sapien
cagagaggtcactcctgcttgcgtc

SEQ ID NO: 5075841 - DNA, 25 bp, Homo sapien
tcccaagatcccactgaaaagacag

SEQ ID NO: 5075842 - DNA, 25 bp, Homo sapien
tatagccaacattcctaaggacaga

SEQ ID NO: 5075843 - DNA, 25 bp, Homo sapien
ggcacccttttcatgaagccatcag

SEQ ID NO: 5075844 - DNA, 25 bp, Homo sapien
gaaatgtcccctggatatctgtact

SEQ ID NO: 5075845 - DNA, 25 bp, Homo sapien
ttaagtcagcccaactcgaattcca

SEQ ID NO: 5075846 - DNA, 25 bp, Homo sapien
atcatgcagatctttactcaaacac

SEQ ID NO: 5075847 - DNA, 25 bp, Homo sapien
cttcatcactccttatagagcctac

SEQ ID NO: 5075848 - DNA, 25 bp, Homo sapien
tcaaactgacaatacactgtaaaac

SEQ ID NO: 5075849 - DNA, 25 bp, Homo sapien
catcagacttcaacgctattttaaa

SEQ ID NO: 5075850 - DNA, 25 bp, Homo sapien
caaaatgagtattcctatgaagcag

SEQ ID NO: 5075851 - DNA, 25 bp, Homo sapien
ggtactatatgcaaagatcattcaa

SEQ ID NO: 5075852 - DNA, 25 bp, Homo sapien
gaatatagtggcgaaatcactgctc

SEQ ID NO: 5075853 - DNA, 25 bp, Homo sapien
tactcagaagtttatagtcgctcta

SEQ ID NO: 5075854 - DNA, 25 bp, Homo sapien
cacttctgtgtatttaccctggaga

SEQ ID NO: 5075855 - DNA, 25 bp, Homo sapien
caaacttaccaaatggccctgtaat

SEQ ID NO: 5075856 - DNA, 25 bp, Homo sapien
ccacagcagagatatactgacattt

SEQ ID NO: 5075857 - DNA, 25 bp, Homo sapien
cctgctttgaaactggagtttgcag

SEQ ID NO: 5075858 - DNA, 25 bp, Homo sapien
taacaacaagattccattaaggtcc

SEQ ID NO: 5075859 - DNA, 25 bp, Homo sapien
ctgtaacgggtaattcaagctgaac

SEQ ID NO: 5075860 - DNA, 25 bp, Homo sapien
tctttgagctgtgtgatgaacaaat

SEQ ID NO: 5075861 - DNA, 25 bp, Homo sapien
cttagcaactttgtggtttgctgca

SEQ ID NO: 5075862 - DNA, 25 bp, Homo sapien
tagcaactttgtggtttgctgcagt

SEQ ID NO: 5075863 - DNA, 25 bp, Homo sapien
tcataaccctctgtactagaaatat

SEQ ID NO: 5075864 - DNA, 25 bp, Homo sapien
agaaaagctcaatggcctactaaag

SEQ ID NO: 5075865 - DNA, 25 bp, Homo sapien
tttccactggtcttactgtgtatca

SEQ ID NO: 5075866 - DNA, 25 bp, Homo sapien
gcctgtggactgacagaatgtcatg

SEQ ID NO: 5075867 - DNA, 25 bp, Homo sapien
tgtgtatcatcctgatgaagctggc

SEQ ID NO: 5075868 - DNA, 25 bp, Homo sapien
aatcataacttaaccattatcaaat

SEQ ID NO: 5075869 - DNA, 25 bp, Homo sapien
tcaacagttttaaccaaaatcataa

SEQ ID NO: 5075870 - DNA, 25 bp, Homo sapien
ttatcaaataaagaacactcatcag

SEQ ID NO: 5075871 - DNA, 25 bp, Homo sapien
tactcaacagttttaaccaaaatca

SEQ ID NO: 5075872 - DNA, 25 bp, Homo sapien
tctggacgtgcactaggtaagaggt

SEQ ID NO: 5075873 - DNA, 25 bp, Homo sapien
gaagatgaaatgtaactgtggccca

SEQ ID NO: 5075874 - DNA, 25 bp, Homo sapien
ggccccactccgagttctggacgtg

SEQ ID NO: 5075875 - DNA, 25 bp, Homo sapien
gtaagacaatctgtccatcactgag

SEQ ID NO: 5075876 - DNA, 25 bp, Homo sapien
ttaggcaaaatttatctcaaaggtc

SEQ ID NO: 5075877 - DNA, 25 bp, Homo sapien
caaaatgtggctttataatcccttc

SEQ ID NO: 5075878 - DNA, 25 bp, Homo sapien
tctcactgtcacctttgttagcaag

SEQ ID NO: 5075879 - DNA, 25 bp, Homo sapien
cattagggcatggtaagttaggcaa

SEQ ID NO: 5075880 - DNA, 25 bp, Homo sapien
gaggtaaatgtctcccgtctgttag

SEQ ID NO: 5075881 - DNA, 25 bp, Homo sapien
gttagcttcactatacatcagtgat

SEQ ID NO: 5075882 - DNA, 25 bp, Homo sapien
tgtgcccacctatagcctacatgag

SEQ ID NO: 5075883 - DNA, 25 bp, Homo sapien
cctacatgaggccatgaggtaaatg

SEQ ID NO: 5075884 - DNA, 25 bp, Homo sapien
aggttcatcagtaggttcccaacaa

SEQ ID NO: 5075885 - DNA, 25 bp, Homo sapien
cactacaagtaaaacacatggctct

SEQ ID NO: 5075886 - DNA, 25 bp, Homo sapien
caacaaacgaggcatacactacaag

SEQ ID NO: 5075887 - DNA, 25 bp, Homo sapien
taggttcccaacaaacgaggcatac

SEQ ID NO: 5075888 - DNA, 25 bp, Homo sapien
attgttcaattttaggccgggcgca

SEQ ID NO: 5075889 - DNA, 25 bp, Homo sapien
cagtatattgttaaaattgttcaat

SEQ ID NO: 5075890 - DNA, 25 bp, Homo sapien
tggtggcccacgcacacctgtactc

SEQ ID NO: 5075891 - DNA, 25 bp, Homo sapien
gccgggtgtggtggcccacgcacac

SEQ ID NO: 5075892 - DNA, 25 bp, Homo sapien
tggaccacagtctattatatgaaca

SEQ ID NO: 5075893 - DNA, 25 bp, Homo sapien
tactgagggtgattaacagagatct

SEQ ID NO: 5075894 - DNA, 25 bp, Homo sapien
taaacaattggtgtcactgtacatg

SEQ ID NO: 5075895 - DNA, 25 bp, Homo sapien
gagatcttactgttcattcccctta

SEQ ID NO: 5075896 - DNA, 25 bp, Homo sapien
ctttgcatagatttagaaaggaaaa

SEQ ID NO: 5075897 - DNA, 25 bp, Homo sapien
tttgcatagatttagaaaggaaaag

SEQ ID NO: 5075898 - DNA, 25 bp, Homo sapien
ttgcatagatttagaaaggaaaagt

SEQ ID NO: 5075899 - DNA, 25 bp, Homo sapien
tgcatagatttagaaaggaaaagtt

SEQ ID NO: 5075900 - DNA, 25 bp, Homo sapien
tccatccgtacaaggaaactgtgca

SEQ ID NO: 5075901 - DNA, 25 bp, Homo sapien
tgttgcaagagtgactgacaatggc

SEQ ID NO: 5075902 - DNA, 25 bp, Homo sapien
cctcgtttagttgcagcagctagaa

SEQ ID NO: 5075903 - DNA, 25 bp, Homo sapien
acctttcacaaatgggcagtttggg

SEQ ID NO: 5075904 - DNA, 25 bp, Homo sapien
gccacgccaaagttggtctccttga

SEQ ID NO: 5075905 - DNA, 25 bp, Homo sapien
ttgggtctcctgatagaataagctg

SEQ ID NO: 5075906 - DNA, 25 bp, Homo sapien
tggtatatctgagcaactagaggag

SEQ ID NO: 5075907 - DNA, 25 bp, Homo sapien
gaataagctgttgtacaattgctgg

SEQ ID NO: 5075908 - DNA, 25 bp, Homo sapien
cactgtctgaatcctccagtaaatc

SEQ ID NO: 5075909 - DNA, 25 bp, Homo sapien
tctggaatgctcttcactgtctgaa

SEQ ID NO: 5075910 - DNA, 25 bp, Homo sapien
gtctgaatcctccagtaaatcatca

SEQ ID NO: 5075911 - DNA, 25 bp, Homo sapien
tgtcacagaatctgatctggaatgc

SEQ ID NO: 5075912 - DNA, 25 bp, Homo sapien
tgcttaaaccatccagtgacctgtg

SEQ ID NO: 5075913 - DNA, 25 bp, Homo sapien
cactcaaggattcaacagggcatgt

SEQ ID NO: 5075914 - DNA, 25 bp, Homo sapien
tatatcgggtggaagcaaaatgagc

SEQ ID NO: 5075915 - DNA, 25 bp, Homo sapien
tgaatgtaagtcacaggaggatcct

SEQ ID NO: 5075916 - DNA, 25 bp, Homo sapien
gccaagattgcgtaactgcacccca

SEQ ID NO: 5075917 - DNA, 25 bp, Homo sapien
gcaccccagcctgttgacagggtga

SEQ ID NO: 5075918 - DNA, 25 bp, Homo sapien
gagccaagattgcgtaactgcaccc

SEQ ID NO: 5075919 - DNA, 25 bp, Homo sapien
ctgcaccccagcctgttgacagggt

SEQ ID NO: 5075920 - DNA, 25 bp, Homo sapien
gaaaagacttgattctccacaagaa

SEQ ID NO: 5075921 - DNA, 25 bp, Homo sapien
gatcatgttctaggaattccggact

SEQ ID NO: 5075922 - DNA, 25 bp, Homo sapien
gatggaatcttgctcggtagcctag

SEQ ID NO: 5075923 - DNA, 25 bp, Homo sapien
caatccctgaagaattaggagctca

SEQ ID NO: 5075924 - DNA, 25 bp, Homo sapien
tatatgcatctaagagacccacttc

SEQ ID NO: 5075925 - DNA, 25 bp, Homo sapien
gtatgacacaaaatagagacagagg

SEQ ID NO: 5075926 - DNA, 25 bp, Homo sapien
taacaaaagagccaaaagtcaagtg

SEQ ID NO: 5075927 - DNA, 25 bp, Homo sapien
gaatgcagtgaaggagtaacaaagg

SEQ ID NO: 5075928 - DNA, 25 bp, Homo sapien
cagacaggtagtgtatacagcatgg

SEQ ID NO: 5075929 - DNA, 25 bp, Homo sapien
cctggatgggacaagaagagatttt

SEQ ID NO: 5075930 - DNA, 25 bp, Homo sapien
gaccaaagctgaccacagataactg

SEQ ID NO: 5075931 - DNA, 25 bp, Homo sapien
tggatgggccctactgtaatggaat

SEQ ID NO: 5075932 - DNA, 25 bp, Homo sapien
aaggtttggaaccttctgaagatgg

SEQ ID NO: 5075933 - DNA, 25 bp, Homo sapien
ctgaaatgccaggacttgaaggatt

SEQ ID NO: 5075934 - DNA, 25 bp, Homo sapien
catcacaggttcctccaatttggag

SEQ ID NO: 5075935 - DNA, 25 bp, Homo sapien
tcctttagaaagagatccatccact

SEQ ID NO: 5075936 - DNA, 25 bp, Homo sapien
ggctggtccaccaataaatcaactc

SEQ ID NO: 5075937 - DNA, 25 bp, Homo sapien
gatttcaagggtgaatggctggtcc

SEQ ID NO: 5075938 - DNA, 25 bp, Homo sapien
ggtgaatggctggtccaccaataaa

SEQ ID NO: 5075939 - DNA, 25 bp, Homo sapien
ctagggatgtcaagatttcaagggt

SEQ ID NO: 5075940 - DNA, 25 bp, Homo sapien
tgttgaacttctacccagcatggag

SEQ ID NO: 5075941 - DNA, 25 bp, Homo sapien
gaacagtcgctgaaaaccttggagt

SEQ ID NO: 5075942 - DNA, 25 bp, Homo sapien
ccaagttcgagtatgctgagcagca

SEQ ID NO: 5075943 - DNA, 25 bp, Homo sapien
tcaccatggtgttgctgatgcaaat

SEQ ID NO: 5075944 - DNA, 25 bp, Homo sapien
tcatgatccagctcccaggtacctc

SEQ ID NO: 5075945 - DNA, 25 bp, Homo sapien
aaggcattcatgatccagctcccag

SEQ ID NO: 5075946 - DNA, 25 bp, Homo sapien
gcctgaccttttataaaggcattca

SEQ ID NO: 5075947 - DNA, 25 bp, Homo sapien
caggtacctctacctctgtttttct

SEQ ID NO: 5075948 - DNA, 25 bp, Homo sapien
tgtccaaccatacaagctttaggta

SEQ ID NO: 5075949 - DNA, 25 bp, Homo sapien
gactttccctaatcctggagcttta

SEQ ID NO: 5075950 - DNA, 25 bp, Homo sapien
cagcagtgtcacttgtatctgtgga

SEQ ID NO: 5075951 - DNA, 25 bp, Homo sapien
taggtagtactaattcaaatacatg

SEQ ID NO: 5075952 - DNA, 25 bp, Homo sapien
tctgtcaaaagactgcacacatatg

SEQ ID NO: 5075953 - DNA, 25 bp, Homo sapien
gaaacaatctgctggcaactaaact

SEQ ID NO: 5075954 - DNA, 25 bp, Homo sapien
tgcctggtacaagcacttgcagagc

SEQ ID NO: 5075955 - DNA, 25 bp, Homo sapien
aaagttcttaccctaggctgcctgg

SEQ ID NO: 5075956 - DNA, 25 bp, Homo sapien
ggagacaaaggaaaggtgatctgcc

SEQ ID NO: 5075957 - DNA, 25 bp, Homo sapien
gtgatctgcctatctactgctgttt

SEQ ID NO: 5075958 - DNA, 25 bp, Homo sapien
gaaaggtgatctgcctatctactgc

SEQ ID NO: 5075959 - DNA, 25 bp, Homo sapien
gacaaaggaaaggtgatctgcctat

SEQ ID NO: 5075960 - DNA, 25 bp, Homo sapien
cattcaaatcaaccagggacggttt

SEQ ID NO: 5075961 - DNA, 25 bp, Homo sapien
ctctacatccatgtgctgcatttct

SEQ ID NO: 5075962 - DNA, 25 bp, Homo sapien
cttcattcaaatcaaccagggacgg

SEQ ID NO: 5075963 - DNA, 25 bp, Homo sapien
tcctctacatccatgtgctgcattt

SEQ ID NO: 5075964 - DNA, 25 bp, Homo sapien
tggacaacagctctataatttaact

SEQ ID NO: 5075965 - DNA, 25 bp, Homo sapien
gacaacagctctataatttaactca

SEQ ID NO: 5075966 - DNA, 25 bp, Homo sapien
catggacaacagctctataatttaa

SEQ ID NO: 5075967 - DNA, 25 bp, Homo sapien
tgtcatggacaacagctctataatt

SEQ ID NO: 5075968 - DNA, 25 bp, Homo sapien
ggggcttgttaacgtcaacattcca

SEQ ID NO: 5075969 - DNA, 25 bp, Homo sapien
cagcatgccctgatagatcaaggcc

SEQ ID NO: 5075970 - DNA, 25 bp, Homo sapien
actggcccacatagaatgtcttctt

SEQ ID NO: 5075971 - DNA, 25 bp, Homo sapien
caaggccactagcaagccatactgg

SEQ ID NO: 5075972 - DNA, 25 bp, Homo sapien
actgaatcaccaataaattccactg

SEQ ID NO: 5075973 - DNA, 25 bp, Homo sapien
ccttgacatggattaaaaacgaacg

SEQ ID NO: 5075974 - DNA, 25 bp, Homo sapien
ctctggtgttttagggatggaagcc

SEQ ID NO: 5075975 - DNA, 25 bp, Homo sapien
gatggaagccttactacaggacgca

SEQ ID NO: 5075976 - DNA, 25 bp, Homo sapien
caaaagtgaagcaagtgaataaccc

SEQ ID NO: 5075977 - DNA, 25 bp, Homo sapien
ctcttgaagtaaatcacagccccgg

SEQ ID NO: 5075978 - DNA, 25 bp, Homo sapien
ttttcagatttacgggtgccacttg

SEQ ID NO: 5075979 - DNA, 25 bp, Homo sapien
gactgagacctcttgaagtaaatca

SEQ ID NO: 5075980 - DNA, 25 bp, Homo sapien
tcttaaatcttcgaatggtgactga

SEQ ID NO: 5075981 - DNA, 25 bp, Homo sapien
aagagtattaacaagcttctcatga

SEQ ID NO: 5075982 - DNA, 25 bp, Homo sapien
tgaaaactgtaacatggcacatcgt

SEQ ID NO: 5075983 - DNA, 25 bp, Homo sapien
ctgtaacatggcacatcgttgcact

SEQ ID NO: 5075984 - DNA, 25 bp, Homo sapien
taacaagcttctcatgaaattctga

SEQ ID NO: 5075985 - DNA, 25 bp, Homo sapien
ttccgggtccatttgaatgaactcc

SEQ ID NO: 5075986 - DNA, 25 bp, Homo sapien
cttccgggtccatttgaatgaactc

SEQ ID NO: 5075987 - DNA, 25 bp, Homo sapien
aaacacgtacgatgtctgacagaaa

SEQ ID NO: 5075988 - DNA, 25 bp, Homo sapien
cgtacgatgtctgacagaaattttc

SEQ ID NO: 5075989 - DNA, 25 bp, Homo sapien
cgatgtctgacagaaattttcgtgt

SEQ ID NO: 5075990 - DNA, 25 bp, Homo sapien
agaagcaaacacgtacgatgtctga

SEQ ID NO: 5075991 - DNA, 25 bp, Homo sapien
gaaatcgggcacacttatgggctat

SEQ ID NO: 5075992 - DNA, 25 bp, Homo sapien
tgggctatacttcgtcctgcctcaa

SEQ ID NO: 5075993 - DNA, 25 bp, Homo sapien
cacttatgggctatacttcgtcctg

SEQ ID NO: 5075994 - DNA, 25 bp, Homo sapien
taatgcacaaggctagaaatcgggc

SEQ ID NO: 5075995 - DNA, 25 bp, Homo sapien
aaaattgtaaagacattactcaagg

SEQ ID NO: 5075996 - DNA, 25 bp, Homo sapien
aaaatgacatattatcaagtaaagc

SEQ ID NO: 5075997 - DNA, 25 bp, Homo sapien
ggttgacatgggtcacatttgccat

SEQ ID NO: 5075998 - DNA, 25 bp, Homo sapien
tcaacagaacaggtccaaatgctgg

SEQ ID NO: 5075999 - DNA, 25 bp, Homo sapien
caccagttgttgctgcaggtaaaaa

SEQ ID NO: 5076000 - DNA, 25 bp, Homo sapien
ttgtctgaagtaaagcctccattgg

SEQ ID NO: 5076001 - DNA, 25 bp, Homo sapien
ccattggtgttagcctgtcctgtaa

SEQ ID NO: 5076002 - DNA, 25 bp, Homo sapien
aagacaaaataccaatagacagaac

SEQ ID NO: 5076003 - DNA, 25 bp, Homo sapien
taagcaaagatgcacaagctgtact

SEQ ID NO: 5076004 - DNA, 25 bp, Homo sapien
tgccgagtgcctgccattgcaggcg

SEQ ID NO: 5076005 - DNA, 25 bp, Homo sapien
agtgcctgccattgcaggcgcgcgt

SEQ ID NO: 5076006 - DNA, 25 bp, Homo sapien
cgagtgcctgccattgcaggcgcgc

SEQ ID NO: 5076007 - DNA, 25 bp, Homo sapien
tgcctgccattgcaggcgcgcgtcg

SEQ ID NO: 5076008 - DNA, 25 bp, Homo sapien
actggatcaaatggtgagctatata

SEQ ID NO: 5076009 - DNA, 25 bp, Homo sapien
gactggatcaaatggtgagctatat

SEQ ID NO: 5076010 - DNA, 25 bp, Homo sapien
ggactggatcaaatggtgagctata

SEQ ID NO: 5076011 - DNA, 25 bp, Homo sapien
ctggatcaaatggtgagctatataa

SEQ ID NO: 5076012 - DNA, 25 bp, Homo sapien
aacatcatgactataatctattaag

SEQ ID NO: 5076013 - DNA, 25 bp, Homo sapien
aaacatcatgactataatctattaa

SEQ ID NO: 5076014 - DNA, 25 bp, Homo sapien
aaaacatcatgactataatctatta

SEQ ID NO: 5076015 - DNA, 25 bp, Homo sapien
acaaaacatcatgactataatctat

SEQ ID NO: 5076016 - DNA, 25 bp, Homo sapien
cactctctaatatcagactccatga

SEQ ID NO: 5076017 - DNA, 25 bp, Homo sapien
agctcactatgggagatgtttctca

SEQ ID NO: 5076018 - DNA, 25 bp, Homo sapien
tccagtattggaaaattacactctc

SEQ ID NO: 5076019 - DNA, 25 bp, Homo sapien
aaagtctacatactgggaagctatc

SEQ ID NO: 5076020 - DNA, 25 bp, Homo sapien
taagatccctctacatatctttaaa

SEQ ID NO: 5076021 - DNA, 25 bp, Homo sapien
tattaagcaccctgaagagcttttg

SEQ ID NO: 5076022 - DNA, 25 bp, Homo sapien
catgagtgaaatccccatagcaaag

SEQ ID NO: 5076023 - DNA, 25 bp, Homo sapien
caatatgcctagaggaacagttctc

SEQ ID NO: 5076024 - DNA, 25 bp, Homo sapien
tcagcatagggcctgacacatgctc

SEQ ID NO: 5076025 - DNA, 25 bp, Homo sapien
aagtcccagtcctcacgaagactat

SEQ ID NO: 5076026 - DNA, 25 bp, Homo sapien
gggcaatcagtcctaagttatggga

SEQ ID NO: 5076027 - DNA, 25 bp, Homo sapien
taacagctgaaggactatcaaacac

SEQ ID NO: 5076028 - DNA, 25 bp, Homo sapien
tgtgaaactaccctcagcagctgtg

SEQ ID NO: 5076029 - DNA, 25 bp, Homo sapien
ccaaaagtccagtgagagatgtgaa

SEQ ID NO: 5076030 - DNA, 25 bp, Homo sapien
agtgcagaggttcaacttccaaaag

SEQ ID NO: 5076031 - DNA, 25 bp, Homo sapien
agctgtgcaactactgacctttcca

SEQ ID NO: 5076032 - DNA, 25 bp, Homo sapien
cttagtagctacctccacaattgga

SEQ ID NO: 5076033 - DNA, 25 bp, Homo sapien
gaagaatcacgttaagacaacagtc

SEQ ID NO: 5076034 - DNA, 25 bp, Homo sapien
caatacagttccacgaaaggtcctg

SEQ ID NO: 5076035 - DNA, 25 bp, Homo sapien
gagactaagatggtacccaatgaca

SEQ ID NO: 5076036 - DNA, 25 bp, Homo sapien
aactcacagtagaactaggatcaga

SEQ ID NO: 5076037 - DNA, 25 bp, Homo sapien
gttaagcatggaagctacatcagct

SEQ ID NO: 5076038 - DNA, 25 bp, Homo sapien
cagaaccaaagcgtatgtgaagcca

SEQ ID NO: 5076039 - DNA, 25 bp, Homo sapien
caagggctatattgtgccagaattc

SEQ ID NO: 5076040 - DNA, 25 bp, Homo sapien
acaacacaccccacttcacctacca

SEQ ID NO: 5076041 - DNA, 25 bp, Homo sapien
gctttactaagttttcttattgcaa

SEQ ID NO: 5076042 - DNA, 25 bp, Homo sapien
tattacacaatttgagggtaagaaa

SEQ ID NO: 5076043 - DNA, 25 bp, Homo sapien
ttacacaatttgagggtaagaaata

SEQ ID NO: 5076044 - DNA, 25 bp, Homo sapien
gagactgcaaagctacctgggctgc

SEQ ID NO: 5076045 - DNA, 25 bp, Homo sapien
tgtagctgttgctcggctgaagcca

SEQ ID NO: 5076046 - DNA, 25 bp, Homo sapien
cagggctgtcgaggcttccccaact

SEQ ID NO: 5076047 - DNA, 25 bp, Homo sapien
tgatagtccacctactgcaggagta

SEQ ID NO: 5076048 - DNA, 25 bp, Homo sapien
tgtctgatgtaacttggcttccagc

SEQ ID NO: 5076049 - DNA, 25 bp, Homo sapien
tgttgtctgatgtaacttggcttcc

SEQ ID NO: 5076050 - DNA, 25 bp, Homo sapien
gctgttgtctgatgtaacttggctt

SEQ ID NO: 5076051 - DNA, 25 bp, Homo sapien
gtctgatgtaacttggcttccagct

SEQ ID NO: 5076052 - DNA, 25 bp, Homo sapien
ctgggttggaaggcacagagttgtg

SEQ ID NO: 5076053 - DNA, 25 bp, Homo sapien
gttggaaggcacagagttgtgaaca

SEQ ID NO: 5076054 - DNA, 25 bp, Homo sapien
gaaggcacagagttgtgaacaggac

SEQ ID NO: 5076055 - DNA, 25 bp, Homo sapien
tgggttggaaggcacagagttgtga

SEQ ID NO: 5076056 - DNA, 25 bp, Homo sapien
agtgggtggaataacatcagatgga

SEQ ID NO: 5076057 - DNA, 25 bp, Homo sapien
gctgtgcaagttcggcattaatcac

SEQ ID NO: 5076058 - DNA, 25 bp, Homo sapien
gaaactgcttcattgggtggagtga

SEQ ID NO: 5076059 - DNA, 25 bp, Homo sapien
tgttatgtgcagcaagattgactgc

SEQ ID NO: 5076060 - DNA, 25 bp, Homo sapien
gcaagggctagaccagaaccaagtg

SEQ ID NO: 5076061 - DNA, 25 bp, Homo sapien
tgagaaattgcaagggctagaccag

SEQ ID NO: 5076062 - DNA, 25 bp, Homo sapien
ttgcaagggctagaccagaaccaag

SEQ ID NO: 5076063 - DNA, 25 bp, Homo sapien
aaattgcaagggctagaccagaacc

SEQ ID NO: 5076064 - DNA, 25 bp, Homo sapien
aatgcattcgctctataataatgga

SEQ ID NO: 5076065 - DNA, 25 bp, Homo sapien
gaatgcattcgctctataataatgg

SEQ ID NO: 5076066 - DNA, 25 bp, Homo sapien
tgaatgcattcgctctataataatg

SEQ ID NO: 5076067 - DNA, 25 bp, Homo sapien
ctgaatgcattcgctctataataat

SEQ ID NO: 5076068 - DNA, 25 bp, Homo sapien
gtgggaatcaatacatcagtcaaca

SEQ ID NO: 5076069 - DNA, 25 bp, Homo sapien
cacacgggaggtggtattaagtcat

SEQ ID NO: 5076070 - DNA, 25 bp, Homo sapien
gaatgagtgcttatatcagttgcca

SEQ ID NO: 5076071 - DNA, 25 bp, Homo sapien
caattgacaaagaggccaagtctcc

SEQ ID NO: 5076072 - DNA, 25 bp, Homo sapien
tcctaatgggattttggctctggca

SEQ ID NO: 5076073 - DNA, 25 bp, Homo sapien
tcccgtaacgtccaataacagtgat

SEQ ID NO: 5076074 - DNA, 25 bp, Homo sapien
tgtatatcctcctgcaaagcaacca

SEQ ID NO: 5076075 - DNA, 25 bp, Homo sapien
ggctctggcatttgtactcccgtaa

SEQ ID NO: 5076076 - DNA, 25 bp, Homo sapien
gcctctgcactgcattatgagccaa

SEQ ID NO: 5076077 - DNA, 25 bp, Homo sapien
tagaggaggaagatcaatactttgc

SEQ ID NO: 5076078 - DNA, 25 bp, Homo sapien
gcaaaagggtttccagacgatgaca

SEQ ID NO: 5076079 - DNA, 25 bp, Homo sapien
ggcttgcacctagcgccactttgag

SEQ ID NO: 5076080 - DNA, 25 bp, Homo sapien
catgaagcaggctgagcaaagtgtc

SEQ ID NO: 5076081 - DNA, 25 bp, Homo sapien
tgagcaaagtgtccagtaaatatct

SEQ ID NO: 5076082 - DNA, 25 bp, Homo sapien
gcaggctgagcaaagtgtccagtaa

SEQ ID NO: 5076083 - DNA, 25 bp, Homo sapien
caaagtgtccagtaaatatctgatg

SEQ ID NO: 5076084 - DNA, 25 bp, Homo sapien
gacattagaaagaaattgaccccac

SEQ ID NO: 5076085 - DNA, 25 bp, Homo sapien
gatgagaagctgttccgaattgtac

SEQ ID NO: 5076086 - DNA, 25 bp, Homo sapien
gaagaagaccagtatgtaaccgtat

SEQ ID NO: 5076087 - DNA, 25 bp, Homo sapien
acaggcctgggcatgaaatgtgctc

SEQ ID NO: 5076088 - DNA, 25 bp, Homo sapien
aatgcaggaaagtaacatgaagacc

SEQ ID NO: 5076089 - DNA, 25 bp, Homo sapien
caatgcaggaaagtaacatgaagac

SEQ ID NO: 5076090 - DNA, 25 bp, Homo sapien
cctatgcatgggtaactgtggctga

SEQ ID NO: 5076091 - DNA, 25 bp, Homo sapien
ctaatactccactattactaagtga

SEQ ID NO: 5076092 - DNA, 25 bp, Homo sapien
taagtaagctttctaatactccact

SEQ ID NO: 5076093 - DNA, 25 bp, Homo sapien
tgtcctcctatgcatgggtaactgt

SEQ ID NO: 5076094 - DNA, 25 bp, Homo sapien
agcataacaacccaactgatcatgg

SEQ ID NO: 5076095 - DNA, 25 bp, Homo sapien
taacaacccaactgatcatgggaat

SEQ ID NO: 5076096 - DNA, 25 bp, Homo sapien
acccaactgatcatgggaatatcta

SEQ ID NO: 5076097 - DNA, 25 bp, Homo sapien
caacagttgccacataatccagcaa

SEQ ID NO: 5076098 - DNA, 25 bp, Homo sapien
tgtcagaaacctctccctgtcttta

SEQ ID NO: 5076099 - DNA, 25 bp, Homo sapien
ctgtcagaaacctctccctgtcttt

SEQ ID NO: 5076100 - DNA, 25 bp, Homo sapien
gtcagaaacctctccctgtctttac

SEQ ID NO: 5076101 - DNA, 25 bp, Homo sapien
tagtagataccaataatgctaaatg

SEQ ID NO: 5076102 - DNA, 25 bp, Homo sapien
aaagcttacaactcaaaatctgaga

SEQ ID NO: 5076103 - DNA, 25 bp, Homo sapien
aaatacaggccatttgtagttaatt

SEQ ID NO: 5076104 - DNA, 25 bp, Homo sapien
aaatgacacatcatactaagaaaaa

SEQ ID NO: 5076105 - DNA, 25 bp, Homo sapien
tattccaagattacattacagttta

SEQ ID NO: 5076106 - DNA, 25 bp, Homo sapien
catgtataaacacaatcccaatact

SEQ ID NO: 5076107 - DNA, 25 bp, Homo sapien
tagccacatgtataaacacaatccc

SEQ ID NO: 5076108 - DNA, 25 bp, Homo sapien
gtttccatagtagccacatgtataa

SEQ ID NO: 5076109 - DNA, 25 bp, Homo sapien
aagatctatttaagctctgagtgtg

SEQ ID NO: 5076110 - DNA, 25 bp, Homo sapien
ctggaatataatctatcaaggctac

SEQ ID NO: 5076111 - DNA, 25 bp, Homo sapien
ctatttaagctctgagtgtgtagat

SEQ ID NO: 5076112 - DNA, 25 bp, Homo sapien
gatgaacaagctgctttctgatttt

SEQ ID NO: 5076113 - DNA, 25 bp, Homo sapien
aagttctaccattaacgtatgcaag

SEQ ID NO: 5076114 - DNA, 25 bp, Homo sapien
aatacaactagttttcactaagcca

SEQ ID NO: 5076115 - DNA, 25 bp, Homo sapien
tagtaacctgatgactaatcgccct

SEQ ID NO: 5076116 - DNA, 25 bp, Homo sapien
ttggctgttatctccatagatgaaa

SEQ ID NO: 5076117 - DNA, 25 bp, Homo sapien
tacccatgggagtaagaaataactg

SEQ ID NO: 5076118 - DNA, 25 bp, Homo sapien
taaagaccttacaatctggtgactg

SEQ ID NO: 5076119 - DNA, 25 bp, Homo sapien
tataagccactaacataatcgagcg

SEQ ID NO: 5076120 - DNA, 25 bp, Homo sapien
taaagtactagaaaggtatagccac

SEQ ID NO: 5076121 - DNA, 25 bp, Homo sapien
ttccatctgttctaccaatgccttc

SEQ ID NO: 5076122 - DNA, 25 bp, Homo sapien
ttttccatctgttctaccaatgcct

SEQ ID NO: 5076123 - DNA, 25 bp, Homo sapien
ttctaccaggagtttatatgatgat

SEQ ID NO: 5076124 - DNA, 25 bp, Homo sapien
tttttccatctgttctaccaatgcc

SEQ ID NO: 5076125 - DNA, 25 bp, Homo sapien
taagtttctcgatcgtaattaaaga

SEQ ID NO: 5076126 - DNA, 25 bp, Homo sapien
taggttggcttctctgttaagcaga

SEQ ID NO: 5076127 - DNA, 25 bp, Homo sapien
taaaatggaaataaactgctctatc

SEQ ID NO: 5076128 - DNA, 25 bp, Homo sapien
ctggaactcaatccacaatgaaggt

SEQ ID NO: 5076129 - DNA, 25 bp, Homo sapien
gcacacaaaaatgtatagtgtttaa

SEQ ID NO: 5076130 - DNA, 25 bp, Homo sapien
aaatgtatagtgtttaaatcaatgt

SEQ ID NO: 5076131 - DNA, 25 bp, Homo sapien
aaaaatgtatagtgtttaaatcaat

SEQ ID NO: 5076132 - DNA, 25 bp, Homo sapien
ctgcacacaaaaatgtatagtgttt

SEQ ID NO: 5076133 - DNA, 25 bp, Homo sapien
tagaacgggaccattctgctgtccg

SEQ ID NO: 5076134 - DNA, 25 bp, Homo sapien
caataagagatctgcatgacatgta

SEQ ID NO: 5076135 - DNA, 25 bp, Homo sapien
aatggaagtggttctatctcaggac

SEQ ID NO: 5076136 - DNA, 25 bp, Homo sapien
gatacaacgctcatgggccagagta

SEQ ID NO: 5076137 - DNA, 25 bp, Homo sapien
aagtctacacttatagtttacatac

SEQ ID NO: 5076138 - DNA, 25 bp, Homo sapien
tagtctggaactcctagactcagat

SEQ ID NO: 5076139 - DNA, 25 bp, Homo sapien
agtctggaactcctagactcagata

SEQ ID NO: 5076140 - DNA, 25 bp, Homo sapien
cggccaaccctgtaagtctacactt

SEQ ID NO: 5076141 - DNA, 25 bp, Homo sapien
cagctggggttcgttcacaatctca

SEQ ID NO: 5076142 - DNA, 25 bp, Homo sapien
gatatatctcctctattgaagtcag

SEQ ID NO: 5076143 - DNA, 25 bp, Homo sapien
cagatgaatagttggcctcgtggca

SEQ ID NO: 5076144 - DNA, 25 bp, Homo sapien
cctcgtggcatttgcaatgcgtgca

SEQ ID NO: 5076145 - DNA, 25 bp, Homo sapien
tatgtcatgtgtcaaaggttcatct

SEQ ID NO: 5076146 - DNA, 25 bp, Homo sapien
tccatggcttctgcggctactggag

SEQ ID NO: 5076147 - DNA, 25 bp, Homo sapien
tagtttccagcaactgaactgagga

SEQ ID NO: 5076148 - DNA, 25 bp, Homo sapien
tcatcagagtcaccagctgtcgcac

SEQ ID NO: 5076149 - DNA, 25 bp, Homo sapien
ggctgcaagagggtccttttccaaa

SEQ ID NO: 5076150 - DNA, 25 bp, Homo sapien
gatcctgaagtaactcaaggtcaat

SEQ ID NO: 5076151 - DNA, 25 bp, Homo sapien
aaaggatcaatgtcaacttccatta

SEQ ID NO: 5076152 - DNA, 25 bp, Homo sapien
tccaaatcaatatctaaaggatcaa

SEQ ID NO: 5076153 - DNA, 25 bp, Homo sapien
tgtgatccgttcttctccgtgtttg

SEQ ID NO: 5076154 - DNA, 25 bp, Homo sapien
tttgctacaggaattcccagacctc

SEQ ID NO: 5076155 - DNA, 25 bp, Homo sapien
tgaaacgctaactgtctgtgatccg

SEQ ID NO: 5076156 - DNA, 25 bp, Homo sapien
ccagacctccaatgtaagggttgta

SEQ ID NO: 5076157 - DNA, 25 bp, Homo sapien
aaaatgatgacatctgaacccaaga

SEQ ID NO: 5076158 - DNA, 25 bp, Homo sapien
aatgatgacatctgaacccaagaga

SEQ ID NO: 5076159 - DNA, 25 bp, Homo sapien
catgcagtatcggagccacagcagg

SEQ ID NO: 5076160 - DNA, 25 bp, Homo sapien
acatgcagtatcggagccacagcag

SEQ ID NO: 5076161 - DNA, 25 bp, Homo sapien
tcaagtccaacttctaggcgagcat

SEQ ID NO: 5076162 - DNA, 25 bp, Homo sapien
taggagatgtatttgttaatgcctg

SEQ ID NO: 5076163 - DNA, 25 bp, Homo sapien
tgtaggagatgtatttgttaatgcc

SEQ ID NO: 5076164 - DNA, 25 bp, Homo sapien
agtccaacttctaggcgagcatcca

SEQ ID NO: 5076165 - DNA, 25 bp, Homo sapien
tgttttcctgcaaccaagtcagagt

SEQ ID NO: 5076166 - DNA, 25 bp, Homo sapien
caattctggctttcaactaacaggc

SEQ ID NO: 5076167 - DNA, 25 bp, Homo sapien
ggtgaagcaatatgcaggcctaaga

SEQ ID NO: 5076168 - DNA, 25 bp, Homo sapien
caatgaactcacaggcaggtatgaa

SEQ ID NO: 5076169 - DNA, 25 bp, Homo sapien
ttattcggttctacctactatctct

SEQ ID NO: 5076170 - DNA, 25 bp, Homo sapien
tattcggttctacctactatctcta

SEQ ID NO: 5076171 - DNA, 25 bp, Homo sapien
tcggttctacctactatctctaccc

SEQ ID NO: 5076172 - DNA, 25 bp, Homo sapien
ttcggttctacctactatctctacc

SEQ ID NO: 5076173 - DNA, 25 bp, Homo sapien
aaagggatccccatattgcctggga

SEQ ID NO: 5076174 - DNA, 25 bp, Homo sapien
gacactggaccctacaaaagggatc

SEQ ID NO: 5076175 - DNA, 25 bp, Homo sapien
actttgggcagtaccgagttatctc

SEQ ID NO: 5076176 - DNA, 25 bp, Homo sapien
tatctctaatcatgcagacactgga

SEQ ID NO: 5076177 - DNA, 25 bp, Homo sapien
ctgtataataagctggctggtttgg

SEQ ID NO: 5076178 - DNA, 25 bp, Homo sapien
tgggacagatgataactgtataata

SEQ ID NO: 5076179 - DNA, 25 bp, Homo sapien
gctgcttgtaaaccccctagaagtg

SEQ ID NO: 5076180 - DNA, 25 bp, Homo sapien
tggtttgctgcttgtaaacccccta

SEQ ID NO: 5076181 - DNA, 25 bp, Homo sapien
ccatcattgagaaactgtgattact

SEQ ID NO: 5076182 - DNA, 25 bp, Homo sapien
gacaaggtctgctatatcttgaact

SEQ ID NO: 5076183 - DNA, 25 bp, Homo sapien
tttaccaggctaacaataatatgta

SEQ ID NO: 5076184 - DNA, 25 bp, Homo sapien
aataaagaaatcatccctgacagga

SEQ ID NO: 5076185 - DNA, 25 bp, Homo sapien
tagaattcaggctcagtgtgagcca

SEQ ID NO: 5076186 - DNA, 25 bp, Homo sapien
aattcaggctcagtgtgagccacaa

SEQ ID NO: 5076187 - DNA, 25 bp, Homo sapien
agtgtgagccacaattggagaagtg

SEQ ID NO: 5076188 - DNA, 25 bp, Homo sapien
ctagaattcaggctcagtgtgagcc

SEQ ID NO: 5076189 - DNA, 25 bp, Homo sapien
taacaggtatcctattagcattata

SEQ ID NO: 5076190 - DNA, 25 bp, Homo sapien
aatgaaataacaggtatcctattag

SEQ ID NO: 5076191 - DNA, 25 bp, Homo sapien
gaaataacaggtatcctattagcat

SEQ ID NO: 5076192 - DNA, 25 bp, Homo sapien
acaggtatcctattagcattatata

SEQ ID NO: 5076193 - DNA, 25 bp, Homo sapien
cactgtgagaaagctagttattgat

SEQ ID NO: 5076194 - DNA, 25 bp, Homo sapien
aaggcaccatgtccggagcaaagta

SEQ ID NO: 5076195 - DNA, 25 bp, Homo sapien
tgggataccaagctaacactgtgag

SEQ ID NO: 5076196 - DNA, 25 bp, Homo sapien
ttaggctatgaagcacaaggcacca

SEQ ID NO: 5076197 - DNA, 25 bp, Homo sapien
catgaattaggtttggatctgaaac

SEQ ID NO: 5076198 - DNA, 25 bp, Homo sapien
gaaaccaacaaatgagcagtactct

SEQ ID NO: 5076199 - DNA, 25 bp, Homo sapien
actctcctgagttccaatggcactg

SEQ ID NO: 5076200 - DNA, 25 bp, Homo sapien
gactgtgttgatttgttccatgtgg

SEQ ID NO: 5076201 - DNA, 25 bp, Homo sapien
tgaggacatgttgaagaaagatgca

SEQ ID NO: 5076202 - DNA, 25 bp, Homo sapien
gaaagatgcacttgtaatcgagtaa

SEQ ID NO: 5076203 - DNA, 25 bp, Homo sapien
gaattagcttgagcaaaaattcact

SEQ ID NO: 5076204 - DNA, 25 bp, Homo sapien
catagcttgtgtagctgtaggacca

SEQ ID NO: 5076205 - DNA, 25 bp, Homo sapien
aatagtactaactgaaacgacttca

SEQ ID NO: 5076206 - DNA, 25 bp, Homo sapien
cgagaggtccttggcctgtctggaa

SEQ ID NO: 5076207 - DNA, 25 bp, Homo sapien
aaaatgtaaccgattctatcacggc

SEQ ID NO: 5076208 - DNA, 25 bp, Homo sapien
agagcttcacttgggcatcgagagg

SEQ ID NO: 5076209 - DNA, 25 bp, Homo sapien
tactttgtctgagcaagtgatatag

SEQ ID NO: 5076210 - DNA, 25 bp, Homo sapien
ctttgtctgagcaagtgatatagtg

SEQ ID NO: 5076211 - DNA, 25 bp, Homo sapien
tctgagcaagtgatatagtggtgca

SEQ ID NO: 5076212 - DNA, 25 bp, Homo sapien
tgtctgagcaagtgatatagtggtg

SEQ ID NO: 5076213 - DNA, 25 bp, Homo sapien
actaagtcagcaacatatgcaggcg

SEQ ID NO: 5076214 - DNA, 25 bp, Homo sapien
tcacccggacgaataagattggcaa

SEQ ID NO: 5076215 - DNA, 25 bp, Homo sapien
tatgcaggcgatccttgaacactgg

SEQ ID NO: 5076216 - DNA, 25 bp, Homo sapien
tgtattccctattgcctgaaagagg

SEQ ID NO: 5076217 - DNA, 25 bp, Homo sapien
tgcagcatcatgtggactgtagaag

SEQ ID NO: 5076218 - DNA, 25 bp, Homo sapien
aactgatatggcatccaacccacca

SEQ ID NO: 5076219 - DNA, 25 bp, Homo sapien
taaataatccatccccaactgatat

SEQ ID NO: 5076220 - DNA, 25 bp, Homo sapien
gttgtcagtatggtaaataatccat

SEQ ID NO: 5076221 - DNA, 25 bp, Homo sapien
aaatgctttcaaggcatcactagta

SEQ ID NO: 5076222 - DNA, 25 bp, Homo sapien
caaaatgaaccacaataatggctca

SEQ ID NO: 5076223 - DNA, 25 bp, Homo sapien
cacaataatggctcagataactggc

SEQ ID NO: 5076224 - DNA, 25 bp, Homo sapien
gcatcactagtatccaatactctca

SEQ ID NO: 5076225 - DNA, 25 bp, Homo sapien
taccatacttcttgcagtgttcaca

SEQ ID NO: 5076226 - DNA, 25 bp, Homo sapien
gggtgcaaagttatgaatcccttca

SEQ ID NO: 5076227 - DNA, 25 bp, Homo sapien
cagctttatttggaccagagtcaag

SEQ ID NO: 5076228 - DNA, 25 bp, Homo sapien
gcattgtcaggctcagaagctagta

SEQ ID NO: 5076229 - DNA, 25 bp, Homo sapien
caatagcacttcagctggttgggca

SEQ ID NO: 5076230 - DNA, 25 bp, Homo sapien
caagatgaggctggatatgtatctc

SEQ ID NO: 5076231 - DNA, 25 bp, Homo sapien
tggtaaggtcacaccaagcctcctc

SEQ ID NO: 5076232 - DNA, 25 bp, Homo sapien
aagaaagatgtaggaccaagcagca

SEQ ID NO: 5076233 - DNA, 25 bp, Homo sapien
tccaattttagaggtagcctaagtc

SEQ ID NO: 5076234 - DNA, 25 bp, Homo sapien
aacaccgtgtactagcatattttcc

SEQ ID NO: 5076235 - DNA, 25 bp, Homo sapien
tgtggatgccacaagtaattaagct

SEQ ID NO: 5076236 - DNA, 25 bp, Homo sapien
gatgccaggaatctacaacatttcc

SEQ ID NO: 5076237 - DNA, 25 bp, Homo sapien
tatgaataaaaccagccaaataggt

SEQ ID NO: 5076238 - DNA, 25 bp, Homo sapien
gactttcaccataattaatgttgga

SEQ ID NO: 5076239 - DNA, 25 bp, Homo sapien
tattcatcatgaacttgtaaaagga

SEQ ID NO: 5076240 - DNA, 25 bp, Homo sapien
actacctttgattaatatgctatgg

SEQ ID NO: 5076241 - DNA, 25 bp, Homo sapien
taatgtgctggcatcccgtggacga

SEQ ID NO: 5076242 - DNA, 25 bp, Homo sapien
tgaatttttatgtaggtgaggccac

SEQ ID NO: 5076243 - DNA, 25 bp, Homo sapien
taactgttgcagaagaggtggtacc

SEQ ID NO: 5076244 - DNA, 25 bp, Homo sapien
caacaggagtggacaaaggtagcat

SEQ ID NO: 5076245 - DNA, 25 bp, Homo sapien
ggcaatgatgtaataaccgtaacca

SEQ ID NO: 5076246 - DNA, 25 bp, Homo sapien
tctatgagcttcaggccaattctag

SEQ ID NO: 5076247 - DNA, 25 bp, Homo sapien
tcaataaggccgcacaagtctgcag

SEQ ID NO: 5076248 - DNA, 25 bp, Homo sapien
tcgatgttgggtgaatgcattccac

SEQ ID NO: 5076249 - DNA, 25 bp, Homo sapien
ctatcgtagagtcagaagagagtcc

SEQ ID NO: 5076250 - DNA, 25 bp, Homo sapien
tatcgtagagtcagaagagagtcca

SEQ ID NO: 5076251 - DNA, 25 bp, Homo sapien
agagtccatttagtcttccaaaaag

SEQ ID NO: 5076252 - DNA, 25 bp, Homo sapien
agaagagagtccatttagtcttcca

SEQ ID NO: 5076253 - DNA, 25 bp, Homo sapien
tttgtaccaggatcctgagttgttc

SEQ ID NO: 5076254 - DNA, 25 bp, Homo sapien
ctgtcttttgtaccaggatcctgag

SEQ ID NO: 5076255 - DNA, 25 bp, Homo sapien
tcttttgtaccaggatcctgagttg

SEQ ID NO: 5076256 - DNA, 25 bp, Homo sapien
tgtcttttgtaccaggatcctgagt

SEQ ID NO: 5076257 - DNA, 25 bp, Homo sapien
tcataactatgccacagaatggctg

SEQ ID NO: 5076258 - DNA, 25 bp, Homo sapien
gaagaccatactctactgttgagga

SEQ ID NO: 5076259 - DNA, 25 bp, Homo sapien
gacacatgtagttcatcctgccact

SEQ ID NO: 5076260 - DNA, 25 bp, Homo sapien
ggctgctacacagtgcaaatgagaa

SEQ ID NO: 5076261 - DNA, 25 bp, Homo sapien
aaggccaaatatgatgacctaccag

SEQ ID NO: 5076262 - DNA, 25 bp, Homo sapien
tagttagggatagaggaacatgcca

SEQ ID NO: 5076263 - DNA, 25 bp, Homo sapien
gccagtctggcattaaacgcctcgt

SEQ ID NO: 5076264 - DNA, 25 bp, Homo sapien
gattatgccaatcgctaaggccaaa

SEQ ID NO: 5076265 - DNA, 25 bp, Homo sapien
agagacatggaccaattaaaaagta

SEQ ID NO: 5076266 - DNA, 25 bp, Homo sapien
tgagcaaagtagactgtcaacagct

SEQ ID NO: 5076267 - DNA, 25 bp, Homo sapien
caaaaccatattgcagggaagagac

SEQ ID NO: 5076268 - DNA, 25 bp, Homo sapien
aaatagtttgggtgtacgtgacaca

SEQ ID NO: 5076269 - DNA, 25 bp, Homo sapien
taagaataggagcaactaggtcggc

SEQ ID NO: 5076270 - DNA, 25 bp, Homo sapien
gagtagtcagtcctgttgtagcagc

SEQ ID NO: 5076271 - DNA, 25 bp, Homo sapien
catgatggcgcctgagtttgtcctg

SEQ ID NO: 5076272 - DNA, 25 bp, Homo sapien
cagttaatgcgagaggtgcttgtgc

SEQ ID NO: 5076273 - DNA, 25 bp, Homo sapien
tcactgcaacctccacctctctgat

SEQ ID NO: 5076274 - DNA, 25 bp, Homo sapien
acctctctgattcaagcaattcccc

SEQ ID NO: 5076275 - DNA, 25 bp, Homo sapien
tggagtgcagtagtaagatttcagc

SEQ ID NO: 5076276 - DNA, 25 bp, Homo sapien
caggcaatctgcccgcctcagcctc

SEQ ID NO: 5076277 - DNA, 25 bp, Homo sapien
cagatgttggaaggttccctctttg

SEQ ID NO: 5076278 - DNA, 25 bp, Homo sapien
tctcatcttccagcatcaactgtaa

SEQ ID NO: 5076279 - DNA, 25 bp, Homo sapien
ataatcttcgtataaaccctgaaat

SEQ ID NO: 5076280 - DNA, 25 bp, Homo sapien
tggaaggttccctctttgaggagat

SEQ ID NO: 5076281 - DNA, 25 bp, Homo sapien
gctggatgacgtggctagtagcatt

SEQ ID NO: 5076282 - DNA, 25 bp, Homo sapien
aagagtacggaatttgtggcctgct

SEQ ID NO: 5076283 - DNA, 25 bp, Homo sapien
tgagactggcaaatgaagagtacgg

SEQ ID NO: 5076284 - DNA, 25 bp, Homo sapien
ggcctgctccatacattggatgctg

SEQ ID NO: 5076285 - DNA, 25 bp, Homo sapien
tcctagtcatcaatggttgcaaagt

SEQ ID NO: 5076286 - DNA, 25 bp, Homo sapien
gactggcttcttatgcttcaaacta

SEQ ID NO: 5076287 - DNA, 25 bp, Homo sapien
gtattttacattttgtccacttgac

SEQ ID NO: 5076288 - DNA, 25 bp, Homo sapien
aagatgtcttgaactttcctagtca

SEQ ID NO: 5076289 - DNA, 25 bp, Homo sapien
tctctgtaacagataaggcagtcat

SEQ ID NO: 5076290 - DNA, 25 bp, Homo sapien
catattagacacagcgattgtgaag

SEQ ID NO: 5076291 - DNA, 25 bp, Homo sapien
gaattacgattttatgcacatgcat

SEQ ID NO: 5076292 - DNA, 25 bp, Homo sapien
ccatctatgtgtggtaacaactccc

SEQ ID NO: 5076293 - DNA, 25 bp, Homo sapien
taacttttgaggtcgtgtacttcca

SEQ ID NO: 5076294 - DNA, 25 bp, Homo sapien
cgctaagtaggttacattcagcaca

SEQ ID NO: 5076295 - DNA, 25 bp, Homo sapien
tatggctaaagagtataaatccact

SEQ ID NO: 5076296 - DNA, 25 bp, Homo sapien
gaaagtatactgtcaaaagctacag

SEQ ID NO: 5076297 - DNA, 25 bp, Homo sapien
tcttgccttagattaaaagctgctc

SEQ ID NO: 5076298 - DNA, 25 bp, Homo sapien
gctgctctgatcctacttacaaaga

SEQ ID NO: 5076299 - DNA, 25 bp, Homo sapien
aaatttacattgtctggcatccaag

SEQ ID NO: 5076300 - DNA, 25 bp, Homo sapien
taaagaagcgagaacatacaatcca

SEQ ID NO: 5076301 - DNA, 25 bp, Homo sapien
catgtactgacgaacctatgtgagc

SEQ ID NO: 5076302 - DNA, 25 bp, Homo sapien
tgaacgtatgcaaaaagctgctctg

SEQ ID NO: 5076303 - DNA, 25 bp, Homo sapien
tatgtgagcaaaccactgaaggcca

SEQ ID NO: 5076304 - DNA, 25 bp, Homo sapien
ggatcaggttcatctcccacgtgaa

SEQ ID NO: 5076305 - DNA, 25 bp, Homo sapien
ctgcttttccaaatcattaagaaga

SEQ ID NO: 5076306 - DNA, 25 bp, Homo sapien
gagattatgcaagataatattatcc

SEQ ID NO: 5076307 - DNA, 25 bp, Homo sapien
gcttttccaaatcattaagaagaga

SEQ ID NO: 5076308 - DNA, 25 bp, Homo sapien
tatccttaatactaaggcaatataa

SEQ ID NO: 5076309 - DNA, 25 bp, Homo sapien
aacaacaacactgtaattgtcttga

SEQ ID NO: 5076310 - DNA, 25 bp, Homo sapien
gttcactaattaatttagctgtgat

SEQ ID NO: 5076311 - DNA, 25 bp, Homo sapien
cagaggcaacaacaacactgtaatt

SEQ ID NO: 5076312 - DNA, 25 bp, Homo sapien
aacactgtaattgtcttgaaatcca

SEQ ID NO: 5076313 - DNA, 25 bp, Homo sapien
aacactgggacagtaattattttgt

SEQ ID NO: 5076314 - DNA, 25 bp, Homo sapien
tttatcaggtattgtcctccccctc

SEQ ID NO: 5076315 - DNA, 25 bp, Homo sapien
ctgacacagcacgtttagattgaga

SEQ ID NO: 5076316 - DNA, 25 bp, Homo sapien
aggtggtgtagctgacacagcacgt

SEQ ID NO: 5076317 - DNA, 25 bp, Homo sapien
tcttccagcttactgctgaactctg

SEQ ID NO: 5076318 - DNA, 25 bp, Homo sapien
ctgttgttaatgcacgctgccgtaa

SEQ ID NO: 5076319 - DNA, 25 bp, Homo sapien
gctgccgtaatccttcaatatgccc

SEQ ID NO: 5076320 - DNA, 25 bp, Homo sapien
tattttaccaccagtcaatgaatga

SEQ ID NO: 5076321 - DNA, 25 bp, Homo sapien
tgtgtcaggacaactaagcagcata

SEQ ID NO: 5076322 - DNA, 25 bp, Homo sapien
gatatgtcacaaggacctctctgga

SEQ ID NO: 5076323 - DNA, 25 bp, Homo sapien
tacactagtaaatgggcatagctgc

SEQ ID NO: 5076324 - DNA, 25 bp, Homo sapien
gagaagcagctatggacaatacact

SEQ ID NO: 5076325 - DNA, 25 bp, Homo sapien
tgtcatttcagctggcaatggctgg

SEQ ID NO: 5076326 - DNA, 25 bp, Homo sapien
ttaaaagctgggcaagtgtcatttc

SEQ ID NO: 5076327 - DNA, 25 bp, Homo sapien
tttaacagtcagatctattgagcgg

SEQ ID NO: 5076328 - DNA, 25 bp, Homo sapien
tattgagcggtaaccctgaggaagt

SEQ ID NO: 5076329 - DNA, 25 bp, Homo sapien
tatcagaaattaaagtacatgcgct

SEQ ID NO: 5076330 - DNA, 25 bp, Homo sapien
gcctctttgtatgacagtctgtaat

SEQ ID NO: 5076331 - DNA, 25 bp, Homo sapien
cacaagtcaattaagtcattagcta

SEQ ID NO: 5076332 - DNA, 25 bp, Homo sapien
gtcattagctatagaaatctctgcc

SEQ ID NO: 5076333 - DNA, 25 bp, Homo sapien
agcaataagagccagtccacccatt

SEQ ID NO: 5076334 - DNA, 25 bp, Homo sapien
tgcaaaaacttgtaatggtgactga

SEQ ID NO: 5076335 - DNA, 25 bp, Homo sapien
gattcatccagtatcccatccatgc

SEQ ID NO: 5076336 - DNA, 25 bp, Homo sapien
tggtgactgaattggacaggtttca

SEQ ID NO: 5076337 - DNA, 25 bp, Homo sapien
cagacagtgtctcttattaaacaca

SEQ ID NO: 5076338 - DNA, 25 bp, Homo sapien
tcaacccatcccatatagctagtag

SEQ ID NO: 5076339 - DNA, 25 bp, Homo sapien
ttacaagtgtgattacaggattaca

SEQ ID NO: 5076340 - DNA, 25 bp, Homo sapien
tagctagtagtatcctgacaccaaa

SEQ ID NO: 5076341 - DNA, 25 bp, Homo sapien
ccttcggcttttcctgagtggtaga

SEQ ID NO: 5076342 - DNA, 25 bp, Homo sapien
tcagtagcacttccgcatagcccgg

SEQ ID NO: 5076343 - DNA, 25 bp, Homo sapien
aataccaatcgaagaaggcactggg

SEQ ID NO: 5076344 - DNA, 25 bp, Homo sapien
tgataggtggaggttcagccgcaac

SEQ ID NO: 5076345 - DNA, 25 bp, Homo sapien
gaatggtggctcaaagcagagagac

SEQ ID NO: 5076346 - DNA, 25 bp, Homo sapien
ggtgtaaggctccaatttccaatgc

SEQ ID NO: 5076347 - DNA, 25 bp, Homo sapien
aatgccatccgccttagaagtacac

SEQ ID NO: 5076348 - DNA, 25 bp, Homo sapien
tgctaaacaagctacgaaggacgtg

SEQ ID NO: 5076349 - DNA, 25 bp, Homo sapien
tctgcttttcaagtagataggtttc

SEQ ID NO: 5076350 - DNA, 25 bp, Homo sapien
acctcacctagcctattctggtatg

SEQ ID NO: 5076351 - DNA, 25 bp, Homo sapien
tgggaaagcttattaagcgcttaaa

SEQ ID NO: 5076352 - DNA, 25 bp, Homo sapien
tcagtgtatcttggtaaatgggaaa

SEQ ID NO: 5076353 - DNA, 25 bp, Homo sapien
cccagaagctgtagagcctgttcca

SEQ ID NO: 5076354 - DNA, 25 bp, Homo sapien
ggtaacatgttcctcttccagcctt

SEQ ID NO: 5076355 - DNA, 25 bp, Homo sapien
tcttctgttgatgtagggttatgag

SEQ ID NO: 5076356 - DNA, 25 bp, Homo sapien
gcttagttaaggcttgttccacatc

SEQ ID NO: 5076357 - DNA, 25 bp, Homo sapien
actttatactagaaggagcattcta

SEQ ID NO: 5076358 - DNA, 25 bp, Homo sapien
cgaacttcaattagctgatgcagga

SEQ ID NO: 5076359 - DNA, 25 bp, Homo sapien
cattcaaagcactgacgaacttcaa

SEQ ID NO: 5076360 - DNA, 25 bp, Homo sapien
cattctagagttgcagaagacacat

SEQ ID NO: 5076361 - DNA, 25 bp, Homo sapien
gaaggaagggcattactgttctgcc

SEQ ID NO: 5076362 - DNA, 25 bp, Homo sapien
gaagctcgagaagtacagaaggaag

SEQ ID NO: 5076363 - DNA, 25 bp, Homo sapien
taccgcactactgacgggatttatg

SEQ ID NO: 5076364 - DNA, 25 bp, Homo sapien
catttcgtagataagatgacatggc

SEQ ID NO: 5076365 - DNA, 25 bp, Homo sapien
caactgaaacttactattagacaat

SEQ ID NO: 5076366 - DNA, 25 bp, Homo sapien
aatccatcaactatttcaactgaaa

SEQ ID NO: 5076367 - DNA, 25 bp, Homo sapien
tctgtgttctatggtaagtgatgac

SEQ ID NO: 5076368 - DNA, 25 bp, Homo sapien
caaagtatcaaattaagggcaccaa

SEQ ID NO: 5076369 - DNA, 25 bp, Homo sapien
gaaacaggatctccatctagtggcc

SEQ ID NO: 5076370 - DNA, 25 bp, Homo sapien
aagtatcatgttacgacagctcgac

SEQ ID NO: 5076371 - DNA, 25 bp, Homo sapien
gggtaactccatactatacaagggc

SEQ ID NO: 5076372 - DNA, 25 bp, Homo sapien
gattgtggcctacaaaacgcaactt

SEQ ID NO: 5076373 - DNA, 25 bp, Homo sapien
acctggcctgctactctaattagta

SEQ ID NO: 5076374 - DNA, 25 bp, Homo sapien
gactacaggcgagtgttgatttttt

SEQ ID NO: 5076375 - DNA, 25 bp, Homo sapien
tctaattagtagaataatctgatag

SEQ ID NO: 5076376 - DNA, 25 bp, Homo sapien
caggcgagtgttgattttttgttct

SEQ ID NO: 5076377 - DNA, 25 bp, Homo sapien
gggtaactcccttgctctaagagca

SEQ ID NO: 5076378 - DNA, 25 bp, Homo sapien
taggactgcacactgaaaaactacg

SEQ ID NO: 5076379 - DNA, 25 bp, Homo sapien
tattaagacatacatcccagggtaa

SEQ ID NO: 5076380 - DNA, 25 bp, Homo sapien
cgttcaagggactgcattcagggca

SEQ ID NO: 5076381 - DNA, 25 bp, Homo sapien
gtgacttacttgcagaggctagcaa

SEQ ID NO: 5076382 - DNA, 25 bp, Homo sapien
ccatctttgatatgaagcttgttca

SEQ ID NO: 5076383 - DNA, 25 bp, Homo sapien
tactaacagcgaagatacatccctt

SEQ ID NO: 5076384 - DNA, 25 bp, Homo sapien
gcttttgttcacaagccctccgtga

SEQ ID NO: 5076385 - DNA, 25 bp, Homo sapien
taccggtggtcagcaagcaacaaga

SEQ ID NO: 5076386 - DNA, 25 bp, Homo sapien
tgtgcgcctgcctgacaaagaacag

SEQ ID NO: 5076387 - DNA, 25 bp, Homo sapien
tgtcatcaacagctacagatgcggg

SEQ ID NO: 5076388 - DNA, 25 bp, Homo sapien
cagtgttacagcttacaaccaggca

SEQ ID NO: 5076389 - DNA, 25 bp, Homo sapien
gcatgctaaagttcaataaggaaga

SEQ ID NO: 5076390 - DNA, 25 bp, Homo sapien
aatgaagacagtctagcatgctaaa

SEQ ID NO: 5076391 - DNA, 25 bp, Homo sapien
cccacaaatttgcaagcacaaatat

SEQ ID NO: 5076392 - DNA, 25 bp, Homo sapien
gacagtctagcatgctaaagttcaa

SEQ ID NO: 5076393 - DNA, 25 bp, Homo sapien
acactaatacgaggaaaagcaccca

SEQ ID NO: 5076394 - DNA, 25 bp, Homo sapien
ttgaccacctgactataatgctgcg

SEQ ID NO: 5076395 - DNA, 25 bp, Homo sapien
tacatctgctggaatggaatccaca

SEQ ID NO: 5076396 - DNA, 25 bp, Homo sapien
gaatgatttccctgtctacatcgaa

SEQ ID NO: 5076397 - DNA, 25 bp, Homo sapien
ggagcaaattcgcaagtactataat

SEQ ID NO: 5076398 - DNA, 25 bp, Homo sapien
gaatatgctttatgctgtactggag

SEQ ID NO: 5076399 - DNA, 25 bp, Homo sapien
ctaaatgcccattatgtagccataa

SEQ ID NO: 5076400 - DNA, 25 bp, Homo sapien
ggcatgggaagctgcagttagtcat

SEQ ID NO: 5076401 - DNA, 25 bp, Homo sapien
cctaacgtgttacgattacagtgat

SEQ ID NO: 5076402 - DNA, 25 bp, Homo sapien
agtttcttttgactatttctctcct

SEQ ID NO: 5076403 - DNA, 25 bp, Homo sapien
tacgattacagtgattaatatttca

SEQ ID NO: 5076404 - DNA, 25 bp, Homo sapien
tggcctcctaacgtgttacgattac

SEQ ID NO: 5076405 - DNA, 25 bp, Homo sapien
gttggtataggtatcaacacaggtc

SEQ ID NO: 5076406 - DNA, 25 bp, Homo sapien
cagcacaagaagcaatggcccgaag

SEQ ID NO: 5076407 - DNA, 25 bp, Homo sapien
cagcagtgcccgatagagtggcaca

SEQ ID NO: 5076408 - DNA, 25 bp, Homo sapien
tggcccgaagcaattccagcagtgc

SEQ ID NO: 5076409 - DNA, 25 bp, Homo sapien
gaataaactgacaaccactgaacag

SEQ ID NO: 5076410 - DNA, 25 bp, Homo sapien
ggaataaactgacaaccactgaaca

SEQ ID NO: 5076411 - DNA, 25 bp, Homo sapien
taatgcaaacctgatgagagctgct

SEQ ID NO: 5076412 - DNA, 25 bp, Homo sapien
tatgctcaggcacaccaaacttttc

SEQ ID NO: 5076413 - DNA, 25 bp, Homo sapien
tccataatatgagagcaagagtgct

SEQ ID NO: 5076414 - DNA, 25 bp, Homo sapien
caaggtcccctgaatatgtgatgct

SEQ ID NO: 5076415 - DNA, 25 bp, Homo sapien
cgtatatgagaacaaaggaagccat

SEQ ID NO: 5076416 - DNA, 25 bp, Homo sapien
ctaacattgtagacgtcggattcgt

SEQ ID NO: 5076417 - DNA, 25 bp, Homo sapien
tcggattcgtatatgagaacaaagg

SEQ ID NO: 5076418 - DNA, 25 bp, Homo sapien
tgtagacgtcggattcgtatatgag

SEQ ID NO: 5076419 - DNA, 25 bp, Homo sapien
tgcctgagtccgtcaaataaccaag

SEQ ID NO: 5076420 - DNA, 25 bp, Homo sapien
gacttagcttctatcaatcgacgga

SEQ ID NO: 5076421 - DNA, 25 bp, Homo sapien
gatgctttttgacttaacgacttag

SEQ ID NO: 5076422 - DNA, 25 bp, Homo sapien
aggattagtgttggaaaatttctgc

SEQ ID NO: 5076423 - DNA, 25 bp, Homo sapien
gaactgagaacaaataacagtctgt

SEQ ID NO: 5076424 - DNA, 25 bp, Homo sapien
gagacattaggaggtatgagttctt

SEQ ID NO: 5076425 - DNA, 25 bp, Homo sapien
tgagttcttatcatagctatgtcac

SEQ ID NO: 5076426 - DNA, 25 bp, Homo sapien
gctatgtcactaaccatcagagaac

SEQ ID NO: 5076427 - DNA, 25 bp, Homo sapien
caaacattttccactatgctgtgaa

SEQ ID NO: 5076428 - DNA, 25 bp, Homo sapien
tttccactattgcacagaattatct

SEQ ID NO: 5076429 - DNA, 25 bp, Homo sapien
tgcaaacattttccactatgctgtg

SEQ ID NO: 5076430 - DNA, 25 bp, Homo sapien
aagtttccactattgcacagaatta

SEQ ID NO: 5076431 - DNA, 25 bp, Homo sapien
gactgacaatggatccaacatggta

SEQ ID NO: 5076432 - DNA, 25 bp, Homo sapien
catggtaaaagcaatcagcgacggc

SEQ ID NO: 5076433 - DNA, 25 bp, Homo sapien
tccgctgctttgtgcatacgttgaa

SEQ ID NO: 5076434 - DNA, 25 bp, Homo sapien
cagcgacggccgctaccatggtatc

SEQ ID NO: 5076435 - DNA, 25 bp, Homo sapien
gaaaagctatttgagttcaaggcac

SEQ ID NO: 5076436 - DNA, 25 bp, Homo sapien
tgaagtctgtgtgaaaagctatttg

SEQ ID NO: 5076437 - DNA, 25 bp, Homo sapien
ttagctcacatcctgaagtctgtgt

SEQ ID NO: 5076438 - DNA, 25 bp, Homo sapien
cttagctcacatcctgaagtctgtg

SEQ ID NO: 5076439 - DNA, 25 bp, Homo sapien
cctgatttgcttgccgcaaactggt

SEQ ID NO: 5076440 - DNA, 25 bp, Homo sapien
ttgcttgccgcaaactggtggtggc

SEQ ID NO: 5076441 - DNA, 25 bp, Homo sapien
tctggttcttgatcagacgcatctg

SEQ ID NO: 5076442 - DNA, 25 bp, Homo sapien
cttgatcagacgcatctggttttac

SEQ ID NO: 5076443 - DNA, 25 bp, Homo sapien
tgaaaagtggcataataggaaaagt

SEQ ID NO: 5076444 - DNA, 25 bp, Homo sapien
catgattgaaatcagataaagaaca

SEQ ID NO: 5076445 - DNA, 25 bp, Homo sapien
cagcctactaaatttagcaatcata

SEQ ID NO: 5076446 - DNA, 25 bp, Homo sapien
taaaaattagactatacatgattga

SEQ ID NO: 5076447 - DNA, 25 bp, Homo sapien
caattatcttattacaaccgctctg

SEQ ID NO: 5076448 - DNA, 25 bp, Homo sapien
tattacaaccgctctgagaataaaa

SEQ ID NO: 5076449 - DNA, 25 bp, Homo sapien
aattgtgaattccaaaaaattgtca

SEQ ID NO: 5076450 - DNA, 25 bp, Homo sapien
taggaaaatatctatccatccgtcc

SEQ ID NO: 5076451 - DNA, 25 bp, Homo sapien
cgccttcttggagtattcacccagt

SEQ ID NO: 5076452 - DNA, 25 bp, Homo sapien
ccttcttggagtattcacccagttt

SEQ ID NO: 5076453 - DNA, 25 bp, Homo sapien
gccgccttcttggagtattcaccca

SEQ ID NO: 5076454 - DNA, 25 bp, Homo sapien
agccgccttcttggagtattcaccc

SEQ ID NO: 5076455 - DNA, 25 bp, Homo sapien
tcttcaagtgactttaatactgaca

SEQ ID NO: 5076456 - DNA, 25 bp, Homo sapien
gtaatttcttcataacagccacata

SEQ ID NO: 5076457 - DNA, 25 bp, Homo sapien
tcaagtgactttaatactgacaaag

SEQ ID NO: 5076458 - DNA, 25 bp, Homo sapien
ctgtaatttcttcataacagccaca

SEQ ID NO: 5076459 - DNA, 25 bp, Homo sapien
caaggtcataacaggcactatggct

SEQ ID NO: 5076460 - DNA, 25 bp, Homo sapien
gaagcggaacgaaatctaaagccca

SEQ ID NO: 5076461 - DNA, 25 bp, Homo sapien
gccttcaagtacaagaacactgcca

SEQ ID NO: 5076462 - DNA, 25 bp, Homo sapien
gaatctctcacacataaggatccat

SEQ ID NO: 5076463 - DNA, 25 bp, Homo sapien
cagtgaggttgaaagcgtcacagct

SEQ ID NO: 5076464 - DNA, 25 bp, Homo sapien
tcacagcgtacaaacacactagagg

SEQ ID NO: 5076465 - DNA, 25 bp, Homo sapien
cttcctgggcaaggcggcgagctct

SEQ ID NO: 5076466 - DNA, 25 bp, Homo sapien
ggcagcactgttcgcatcattagca

SEQ ID NO: 5076467 - DNA, 25 bp, Homo sapien
gccatttgcataaggggtgtccgct

SEQ ID NO: 5076468 - DNA, 25 bp, Homo sapien
ttgaatcgcacgctatgaccaccag

SEQ ID NO: 5076469 - DNA, 25 bp, Homo sapien
ggtgaactgggataatcttgaggaa

SEQ ID NO: 5076470 - DNA, 25 bp, Homo sapien
ggtgtccgctggaccagttattaga

SEQ ID NO: 5076471 - DNA, 25 bp, Homo sapien
aaaactgggccaatcacatgtgttc

SEQ ID NO: 5076472 - DNA, 25 bp, Homo sapien
tatggatcaaatctagcctcacgca

SEQ ID NO: 5076473 - DNA, 25 bp, Homo sapien
gggacacttaatctgcacctgtaac

SEQ ID NO: 5076474 - DNA, 25 bp, Homo sapien
tacttactcacttagcaggaagaga

SEQ ID NO: 5076475 - DNA, 25 bp, Homo sapien
tcacctgttgatggccgctaagttg

SEQ ID NO: 5076476 - DNA, 25 bp, Homo sapien
tattctactctctacgttgattgag

SEQ ID NO: 5076477 - DNA, 25 bp, Homo sapien
gctattctgtatggtgctgcaataa

SEQ ID NO: 5076478 - DNA, 25 bp, Homo sapien
ggctcatctatgttgctatgaaaga

SEQ ID NO: 5076479 - DNA, 25 bp, Homo sapien
taaaaacaaactgtcataacgagaa

SEQ ID NO: 5076480 - DNA, 25 bp, Homo sapien
cagaattgaaaaaagagtgcttaaa

SEQ ID NO: 5076481 - DNA, 25 bp, Homo sapien
ctgacgaacgaaaaaagcataaaca

SEQ ID NO: 5076482 - DNA, 25 bp, Homo sapien
taaacagaattgaaaaaagagtgct

SEQ ID NO: 5076483 - DNA, 25 bp, Homo sapien
ccatgccacgtgtttaagatgctta

SEQ ID NO: 5076484 - DNA, 25 bp, Homo sapien
gcttgaggtctgaggattccacttc

SEQ ID NO: 5076485 - DNA, 25 bp, Homo sapien
cttccatgccacgtgtttaagatgc

SEQ ID NO: 5076486 - DNA, 25 bp, Homo sapien
ctggtcttccatgccacgtgtttaa

SEQ ID NO: 5076487 - DNA, 25 bp, Homo sapien
aactgttcttaaggagcataaaact

SEQ ID NO: 5076488 - DNA, 25 bp, Homo sapien
gcactcttaacaatactcacttata

SEQ ID NO: 5076489 - DNA, 25 bp, Homo sapien
gcctggcctagccatgcactcttaa

SEQ ID NO: 5076490 - DNA, 25 bp, Homo sapien
cttaaggagcataaaactagccatg

SEQ ID NO: 5076491 - DNA, 25 bp, Homo sapien
tctgatttgttctagcattgcccac

SEQ ID NO: 5076492 - DNA, 25 bp, Homo sapien
tgggagtgcctctagaccgttcata

SEQ ID NO: 5076493 - DNA, 25 bp, Homo sapien
ctaatataagggactggacagacac

SEQ ID NO: 5076494 - DNA, 25 bp, Homo sapien
tattctcgagaactctgtgtgccac

SEQ ID NO: 5076495 - DNA, 25 bp, Homo sapien
ccagacttattaatgatctttggga

SEQ ID NO: 5076496 - DNA, 25 bp, Homo sapien
ttgggattaactctaaaacctgcag

SEQ ID NO: 5076497 - DNA, 25 bp, Homo sapien
cctgcagtttcatatactagataca

SEQ ID NO: 5076498 - DNA, 25 bp, Homo sapien
ggttcaacctcacgttccaagtagc

SEQ ID NO: 5076499 - DNA, 25 bp, Homo sapien
tatctcaactcttttcaagtaaaaa

SEQ ID NO: 5076500 - DNA, 25 bp, Homo sapien
aatccactcctcacattgggccatt

SEQ ID NO: 5076501 - DNA, 25 bp, Homo sapien
tgcctacccgcttatcactgctgta

SEQ ID NO: 5076502 - DNA, 25 bp, Homo sapien
tactgctggatatccgcaatccact

SEQ ID NO: 5076503 - DNA, 25 bp, Homo sapien
caactcttcgcggagctgagcagtg

SEQ ID NO: 5076504 - DNA, 25 bp, Homo sapien
cagggcagggaagtttcagcaactc

SEQ ID NO: 5076505 - DNA, 25 bp, Homo sapien
tcttcgcggagctgagcagtgtgac

SEQ ID NO: 5076506 - DNA, 25 bp, Homo sapien
tttcagcaactcttcgcggagctga

SEQ ID NO: 5076507 - DNA, 25 bp, Homo sapien
gatcatgcattagagtctcctcagc

SEQ ID NO: 5076508 - DNA, 25 bp, Homo sapien
tgctgggtttaacctgatcatgcat

SEQ ID NO: 5076509 - DNA, 25 bp, Homo sapien
gctgggtttaacctgatcatgcatt

SEQ ID NO: 5076510 - DNA, 25 bp, Homo sapien
ctgatcatgcattagagtctcctca

SEQ ID NO: 5076511 - DNA, 25 bp, Homo sapien
taaactggatctccttaagggcata

SEQ ID NO: 5076512 - DNA, 25 bp, Homo sapien
tgttaacaacccctcactctatagt

SEQ ID NO: 5076513 - DNA, 25 bp, Homo sapien
gaagcctttgtgtctatgaagtcca

SEQ ID NO: 5076514 - DNA, 25 bp, Homo sapien
caaatgtgagcatgaagatatggcc

SEQ ID NO: 5076515 - DNA, 25 bp, Homo sapien
aatgtaccagtaaatcaaaaaagag

SEQ ID NO: 5076516 - DNA, 25 bp, Homo sapien
atgtaccagtaaatcaaaaaagagg

SEQ ID NO: 5076517 - DNA, 25 bp, Homo sapien
taaattcatccatacaagtgcaagt

SEQ ID NO: 5076518 - DNA, 25 bp, Homo sapien
catccatacaagtgcaagtctccag

SEQ ID NO: 5076519 - DNA, 25 bp, Homo sapien
tctgcatcttagaattagaaggcat

SEQ ID NO: 5076520 - DNA, 25 bp, Homo sapien
gcatcttagaattagaaggcataaa

SEQ ID NO: 5076521 - DNA, 25 bp, Homo sapien
tacagagcctcaatgtttaatacat

SEQ ID NO: 5076522 - DNA, 25 bp, Homo sapien
agaatgtactgtaacagcaccagag

SEQ ID NO: 5076523 - DNA, 25 bp, Homo sapien
tagtcataaaaccacatagtccagg

SEQ ID NO: 5076524 - DNA, 25 bp, Homo sapien
acagatacattcagaggcccaaatg

SEQ ID NO: 5076525 - DNA, 25 bp, Homo sapien
cacctaagtctttatttatttggct

SEQ ID NO: 5076526 - DNA, 25 bp, Homo sapien
ggaagaatttgcatgaaaatgagcc

SEQ ID NO: 5076527 - DNA, 25 bp, Homo sapien
tatttatttggctctaggaagaatt

SEQ ID NO: 5076528 - DNA, 25 bp, Homo sapien
ggctctaggaagaatttgcatgaaa

SEQ ID NO: 5076529 - DNA, 25 bp, Homo sapien
tgtgcggatactacctcaaggaggc

SEQ ID NO: 5076530 - DNA, 25 bp, Homo sapien
gcggccctagaattccatgtgcgga

SEQ ID NO: 5076531 - DNA, 25 bp, Homo sapien
gggaaaaacacgcacgctctctggt

SEQ ID NO: 5076532 - DNA, 25 bp, Homo sapien
aatctagtggcgacagttaccgtaa

SEQ ID NO: 5076533 - DNA, 25 bp, Homo sapien
tcagaattgccagctccggggtcca

SEQ ID NO: 5076534 - DNA, 25 bp, Homo sapien
agcctcagtggggaatcccctcaga

SEQ ID NO: 5076535 - DNA, 25 bp, Homo sapien
cattgctgccgctcagcctcagtgg

SEQ ID NO: 5076536 - DNA, 25 bp, Homo sapien
tcctgtttccattgctgccgctcag

SEQ ID NO: 5076537 - DNA, 25 bp, Homo sapien
cacgatagcctaaggcccggtaggt

SEQ ID NO: 5076538 - DNA, 25 bp, Homo sapien
agttcccacgatagcctaaggcccg

SEQ ID NO: 5076539 - DNA, 25 bp, Homo sapien
taaggcccggtaggtgcgcctctca

SEQ ID NO: 5076540 - DNA, 25 bp, Homo sapien
gcctaaggcccggtaggtgcgcctc

SEQ ID NO: 5076541 - DNA, 25 bp, Homo sapien
tccaggtagctatcaatcttttctt

SEQ ID NO: 5076542 - DNA, 25 bp, Homo sapien
tccagtagcaattgtaggaaagatc

SEQ ID NO: 5076543 - DNA, 25 bp, Homo sapien
atcttttcttcagcggttgttgttg

SEQ ID NO: 5076544 - DNA, 25 bp, Homo sapien
ttcttcagcggttgttgttgaatta

SEQ ID NO: 5076545 - DNA, 25 bp, Homo sapien
ctttccgttgtgtccaaatctgttg

SEQ ID NO: 5076546 - DNA, 25 bp, Homo sapien
ttgagtaatccaggaatgttactac

SEQ ID NO: 5076547 - DNA, 25 bp, Homo sapien
ccgttgtgtccaaatctgttgagta

SEQ ID NO: 5076548 - DNA, 25 bp, Homo sapien
gtccaaatctgttgagtaatccagg

SEQ ID NO: 5076549 - DNA, 25 bp, Homo sapien
caacagggggccccgtccagttgct

SEQ ID NO: 5076550 - DNA, 25 bp, Homo sapien
actgctcacaccaagtagaaatatc

SEQ ID NO: 5076551 - DNA, 25 bp, Homo sapien
aacagatgacaaaaagtcctgaggg

SEQ ID NO: 5076552 - DNA, 25 bp, Homo sapien
aagtcctgagggtgtaagtcaacag

SEQ ID NO: 5076553 - DNA, 25 bp, Homo sapien
caggtcattatcttctacatgaatc

SEQ ID NO: 5076554 - DNA, 25 bp, Homo sapien
cacaaatttcaggtcattatcttct

SEQ ID NO: 5076555 - DNA, 25 bp, Homo sapien
tttcaggtcattatcttctacatga

SEQ ID NO: 5076556 - DNA, 25 bp, Homo sapien
aaatttcaggtcattatcttctaca

SEQ ID NO: 5076557 - DNA, 25 bp, Homo sapien
tgactggcactacaccatggtggcg

SEQ ID NO: 5076558 - DNA, 25 bp, Homo sapien
gaagggctagggctatgctaagcat

SEQ ID NO: 5076559 - DNA, 25 bp, Homo sapien
gagcctcaaggacatggccaggatg

SEQ ID NO: 5076560 - DNA, 25 bp, Homo sapien
tgctaagcatttggagagcctcaag

SEQ ID NO: 5076561 - DNA, 25 bp, Homo sapien
tcaggctgtagattgattcaccatc

SEQ ID NO: 5076562 - DNA, 25 bp, Homo sapien
gaatagctgtcagtttatgtcttac

SEQ ID NO: 5076563 - DNA, 25 bp, Homo sapien
taataacagtagtataggcttcgag

SEQ ID NO: 5076564 - DNA, 25 bp, Homo sapien
tacattcactaggataatgcgtgct

SEQ ID NO: 5076565 - DNA, 25 bp, Homo sapien
agaggtgagcgttcctcaagcaaat

SEQ ID NO: 5076566 - DNA, 25 bp, Homo sapien
caatacagttttcggcaagagtaaa

SEQ ID NO: 5076567 - DNA, 25 bp, Homo sapien
agcagaggtgagcgttcctcaagca

SEQ ID NO: 5076568 - DNA, 25 bp, Homo sapien
aatgctgatgaatattcacacatct

SEQ ID NO: 5076569 - DNA, 25 bp, Homo sapien
gatggaattgaatagccaaatatcg

SEQ ID NO: 5076570 - DNA, 25 bp, Homo sapien
tacaaacagattctgtagtttcatc

SEQ ID NO: 5076571 - DNA, 25 bp, Homo sapien
tcgacctgaatcatctacaaacaga

SEQ ID NO: 5076572 - DNA, 25 bp, Homo sapien
tcaatttgtaattggctgatgtcct

SEQ ID NO: 5076573 - DNA, 25 bp, Homo sapien
gaatcagttgtgccacataattttc

SEQ ID NO: 5076574 - DNA, 25 bp, Homo sapien
atctagaatcagttgtgccacataa

SEQ ID NO: 5076575 - DNA, 25 bp, Homo sapien
tagaatcagttgtgccacataattt

SEQ ID NO: 5076576 - DNA, 25 bp, Homo sapien
tctagaatcagttgtgccacataat

SEQ ID NO: 5076577 - DNA, 25 bp, Homo sapien
cacaatttgaaaggacatccccttc

SEQ ID NO: 5076578 - DNA, 25 bp, Homo sapien
gggtgctggagtgaattcacaattt

SEQ ID NO: 5076579 - DNA, 25 bp, Homo sapien
agtgggtgctggagtgaattcacaa

SEQ ID NO: 5076580 - DNA, 25 bp, Homo sapien
cttggttaaatgttcctgaggagtg

SEQ ID NO: 5076581 - DNA, 25 bp, Homo sapien
tggtgtcatcattgagctcaagatt

SEQ ID NO: 5076582 - DNA, 25 bp, Homo sapien
cacagatccggcatctggaactgtt

SEQ ID NO: 5076583 - DNA, 25 bp, Homo sapien
gaataatagcgatctcttcagcaca

SEQ ID NO: 5076584 - DNA, 25 bp, Homo sapien
attccaagaataatagcgatctctt

SEQ ID NO: 5076585 - DNA, 25 bp, Homo sapien
ccccatatctaccaaatacataaaa

SEQ ID NO: 5076586 - DNA, 25 bp, Homo sapien
aaccccatatctaccaaatacataa

SEQ ID NO: 5076587 - DNA, 25 bp, Homo sapien
ccatatctaccaaatacataaaaca

SEQ ID NO: 5076588 - DNA, 25 bp, Homo sapien
aaaccccatatctaccaaatacata

SEQ ID NO: 5076589 - DNA, 25 bp, Homo sapien
cacttcagttaatgtgtgcactggg

SEQ ID NO: 5076590 - DNA, 25 bp, Homo sapien
aagctccacttcagttaatgtgtgc

SEQ ID NO: 5076591 - DNA, 25 bp, Homo sapien
tcagttaatgtgtgcactgggttat

SEQ ID NO: 5076592 - DNA, 25 bp, Homo sapien
gttaatgtgtgcactgggttattct

SEQ ID NO: 5076593 - DNA, 25 bp, Homo sapien
tgtttcatgtactgtggagccatta

SEQ ID NO: 5076594 - DNA, 25 bp, Homo sapien
ttgttctaacaattgctgacagagg

SEQ ID NO: 5076595 - DNA, 25 bp, Homo sapien
ggtcttgctgcacttaccataagca

SEQ ID NO: 5076596 - DNA, 25 bp, Homo sapien
ggagccattattagatacatacaca

SEQ ID NO: 5076597 - DNA, 25 bp, Homo sapien
tacaactctttgtgaggacatatac

SEQ ID NO: 5076598 - DNA, 25 bp, Homo sapien
tatttcatgagagggatacatggca

SEQ ID NO: 5076599 - DNA, 25 bp, Homo sapien
tcatggctaaatacctggagaagca

SEQ ID NO: 5076600 - DNA, 25 bp, Homo sapien
tgccaacctgtgttccaaagcagtt

SEQ ID NO: 5076601 - DNA, 25 bp, Homo sapien
agaaattgttcatcatcctaaaata

SEQ ID NO: 5076602 - DNA, 25 bp, Homo sapien
aaattgttcatcatcctaaaatatt

SEQ ID NO: 5076603 - DNA, 25 bp, Homo sapien
gaaattgttcatcatcctaaaatat

SEQ ID NO: 5076604 - DNA, 25 bp, Homo sapien
tcccaaacgcttgcacagcaaaggg

SEQ ID NO: 5076605 - DNA, 25 bp, Homo sapien
ggttgtcccaaacgcttgcacagca

SEQ ID NO: 5076606 - DNA, 25 bp, Homo sapien
aaaggttgtcccaaacgcttgcaca

SEQ ID NO: 5076607 - DNA, 25 bp, Homo sapien
tgtcccaaacgcttgcacagcaaag

SEQ ID NO: 5076608 - DNA, 25 bp, Homo sapien
ttttgtccggaggatcaaggctgat

SEQ ID NO: 5076609 - DNA, 25 bp, Homo sapien
gctgatgtctgaatggcccagaact

SEQ ID NO: 5076610 - DNA, 25 bp, Homo sapien
tttctcaagttttgtccggaggatc

SEQ ID NO: 5076611 - DNA, 25 bp, Homo sapien
tcggcgagtacttcctttctcaagt

SEQ ID NO: 5076612 - DNA, 25 bp, Homo sapien
tgtgtctgcctcattgcccgttcca

SEQ ID NO: 5076613 - DNA, 25 bp, Homo sapien
gtgtctgcctcattgcccgttccac

SEQ ID NO: 5076614 - DNA, 25 bp, Homo sapien
ctgtgtctgcctcattgcccgttcc

SEQ ID NO: 5076615 - DNA, 25 bp, Homo sapien
tctcacaaacacaagcttactgaat

SEQ ID NO: 5076616 - DNA, 25 bp, Homo sapien
caggataagtgaacatcatgtgcca

SEQ ID NO: 5076617 - DNA, 25 bp, Homo sapien
tactgaatgatcaaataacatcccc

SEQ ID NO: 5076618 - DNA, 25 bp, Homo sapien
tgacaggataagtgaacatcatgtg

SEQ ID NO: 5076619 - DNA, 25 bp, Homo sapien
tggtgtataatcaataatcagtaca

SEQ ID NO: 5076620 - DNA, 25 bp, Homo sapien
tcagtacactcacagcatcatcatt

SEQ ID NO: 5076621 - DNA, 25 bp, Homo sapien
tgggtccaatcacaccatttggtgt

SEQ ID NO: 5076622 - DNA, 25 bp, Homo sapien
caaacacttagacacggagcactgc

SEQ ID NO: 5076623 - DNA, 25 bp, Homo sapien
caacggaactctagcctattttcac

SEQ ID NO: 5076624 - DNA, 25 bp, Homo sapien
gcatgacaaccatctacataaaatt

SEQ ID NO: 5076625 - DNA, 25 bp, Homo sapien
cacatacacacgcaacggaactcta

SEQ ID NO: 5076626 - DNA, 25 bp, Homo sapien
atatttcttcctgccttatgcatga

SEQ ID NO: 5076627 - DNA, 25 bp, Homo sapien
tccaatacagatgtagttttatctt

SEQ ID NO: 5076628 - DNA, 25 bp, Homo sapien
ttcaggcgttccaatacagatgtag

SEQ ID NO: 5076629 - DNA, 25 bp, Homo sapien
ggcgttccaatacagatgtagtttt

SEQ ID NO: 5076630 - DNA, 25 bp, Homo sapien
aatagaaaatcttcaggcgttccaa

SEQ ID NO: 5076631 - DNA, 25 bp, Homo sapien
ccatacccaatgacaaacaacagaa

SEQ ID NO: 5076632 - DNA, 25 bp, Homo sapien
atgccaagtaatttccatacccaat

SEQ ID NO: 5076633 - DNA, 25 bp, Homo sapien
ttccatacccaatgacaaacaacag

SEQ ID NO: 5076634 - DNA, 25 bp, Homo sapien
caagtaatttccatacccaatgaca

SEQ ID NO: 5076635 - DNA, 25 bp, Homo sapien
gctgcccggctctttcataacaaat

SEQ ID NO: 5076636 - DNA, 25 bp, Homo sapien
ctgaactggtacatcccaactcaaa

SEQ ID NO: 5076637 - DNA, 25 bp, Homo sapien
gtgctgcccggctctttcataacaa

SEQ ID NO: 5076638 - DNA, 25 bp, Homo sapien
caaagagcaaacttgcaagttggcg

SEQ ID NO: 5076639 - DNA, 25 bp, Homo sapien
ttttagagcagtacctttcattcac

SEQ ID NO: 5076640 - DNA, 25 bp, Homo sapien
tacccaaaggcaatgaaaagcatgt

SEQ ID NO: 5076641 - DNA, 25 bp, Homo sapien
ctgctccaggtgtcgccactgtgac

SEQ ID NO: 5076642 - DNA, 25 bp, Homo sapien
caggtgtcgccactgtgaccatttt

SEQ ID NO: 5076643 - DNA, 25 bp, Homo sapien
cttgttccgaagatgaaggagggct

SEQ ID NO: 5076644 - DNA, 25 bp, Homo sapien
ggattaatcttaaccgagcgttcga

SEQ ID NO: 5076645 - DNA, 25 bp, Homo sapien
ggtctccgaggacatctccaagcaa

SEQ ID NO: 5076646 - DNA, 25 bp, Homo sapien
tgtcatagcaagaatggtctccgag

SEQ ID NO: 5076647 - DNA, 25 bp, Homo sapien
tgctccactgaccagctactctcct

SEQ ID NO: 5076648 - DNA, 25 bp, Homo sapien
tccactgaccagctactctcctatc

SEQ ID NO: 5076649 - DNA, 25 bp, Homo sapien
cactgaccagctactctcctatctt

SEQ ID NO: 5076650 - DNA, 25 bp, Homo sapien
actgaccagctactctcctatcttc

SEQ ID NO: 5076651 - DNA, 25 bp, Homo sapien
tctgagtacaacactctacatttgt

SEQ ID NO: 5076652 - DNA, 25 bp, Homo sapien
ctctctgacgtgctcctaaaaggaa

SEQ ID NO: 5076653 - DNA, 25 bp, Homo sapien
cataagagcttagaatatagatgct

SEQ ID NO: 5076654 - DNA, 25 bp, Homo sapien
aaagagttcatacttacataagagc

SEQ ID NO: 5076655 - DNA, 25 bp, Homo sapien
ttacatccgctagtctccttccttg

SEQ ID NO: 5076656 - DNA, 25 bp, Homo sapien
cagggttggtttttacatccgctag

SEQ ID NO: 5076657 - DNA, 25 bp, Homo sapien
catccttatttacaaggccacccaa

SEQ ID NO: 5076658 - DNA, 25 bp, Homo sapien
cttccttgaaacatattttcccaat

SEQ ID NO: 5076659 - DNA, 25 bp, Homo sapien
tgagactaaatcaagaacaatgaga

SEQ ID NO: 5076660 - DNA, 25 bp, Homo sapien
aaggtacttcttacaaccgatggca

SEQ ID NO: 5076661 - DNA, 25 bp, Homo sapien
gaaccacatgtgtggccgggcaaag

SEQ ID NO: 5076662 - DNA, 25 bp, Homo sapien
ccgatggcatcttagatacaaagaa

SEQ ID NO: 5076663 - DNA, 25 bp, Homo sapien
taggcacaaccgagagaaaaccaca

SEQ ID NO: 5076664 - DNA, 25 bp, Homo sapien
tcgggttctagagtcacacagcgct

SEQ ID NO: 5076665 - DNA, 25 bp, Homo sapien
tgaaatgcctttgctgaaccttgat

SEQ ID NO: 5076666 - DNA, 25 bp, Homo sapien
tgaaccttgatagtcttccaaggcc

SEQ ID NO: 5076667 - DNA, 25 bp, Homo sapien
aagtttctgtaaacaagacagtgga

SEQ ID NO: 5076668 - DNA, 25 bp, Homo sapien
gtaaacaagacagtggaatatgcac

SEQ ID NO: 5076669 - DNA, 25 bp, Homo sapien
tactacaaagtttctgtaaacaaga

SEQ ID NO: 5076670 - DNA, 25 bp, Homo sapien
acaagacagtggaatatgcacagac

SEQ ID NO: 5076671 - DNA, 25 bp, Homo sapien
ggaagttgacaaattgttccaagct

SEQ ID NO: 5076672 - DNA, 25 bp, Homo sapien
aagttgacaaattgttccaagcttc

SEQ ID NO: 5076673 - DNA, 25 bp, Homo sapien
gaagttgacaaattgttccaagctt

SEQ ID NO: 5076674 - DNA, 25 bp, Homo sapien
aggaagttgacaaattgttccaagc

SEQ ID NO: 5076675 - DNA, 25 bp, Homo sapien
tccaagagccggtgataagctttaa

SEQ ID NO: 5076676 - DNA, 25 bp, Homo sapien
ggtgaggatgtagttttcccaaatc

SEQ ID NO: 5076677 - DNA, 25 bp, Homo sapien
tgaaaattccccaacgtcagtgctg

SEQ ID NO: 5076678 - DNA, 25 bp, Homo sapien
tatttgtcacgtaagtccaagagcc

SEQ ID NO: 5076679 - DNA, 25 bp, Homo sapien
ttagggaaggctcctgaaagacttc

SEQ ID NO: 5076680 - DNA, 25 bp, Homo sapien
tcccgagtagccacaggtacatatt

SEQ ID NO: 5076681 - DNA, 25 bp, Homo sapien
tcttagggaaggctcctgaaagact

SEQ ID NO: 5076682 - DNA, 25 bp, Homo sapien
cacaggtacatattaccaagcccag

SEQ ID NO: 5076683 - DNA, 25 bp, Homo sapien
tgctcgctagctataagaaatcaac

SEQ ID NO: 5076684 - DNA, 25 bp, Homo sapien
aatcagaaagtagttgcctcatggg

SEQ ID NO: 5076685 - DNA, 25 bp, Homo sapien
aatacgccagatgtcaagccttagc

SEQ ID NO: 5076686 - DNA, 25 bp, Homo sapien
tggttcctactagccaaatgactgc

SEQ ID NO: 5076687 - DNA, 25 bp, Homo sapien
cagtgaggtattggatctactcccc

SEQ ID NO: 5076688 - DNA, 25 bp, Homo sapien
ggtggtgttcactaaaggcaagact

SEQ ID NO: 5076689 - DNA, 25 bp, Homo sapien
ccttggtgtaactctgtgcctgtca

SEQ ID NO: 5076690 - DNA, 25 bp, Homo sapien
tgaacaccgctgttctcaatgctac

SEQ ID NO: 5076691 - DNA, 25 bp, Homo sapien
ctagtctcatcagctctttcgtcac

SEQ ID NO: 5076692 - DNA, 25 bp, Homo sapien
tcctagtctcatcagctctttcgtc

SEQ ID NO: 5076693 - DNA, 25 bp, Homo sapien
cttcctagtctcatcagctctttcg

SEQ ID NO: 5076694 - DNA, 25 bp, Homo sapien
cctagtctcatcagctctttcgtca

SEQ ID NO: 5076695 - DNA, 25 bp, Homo sapien
tagataactactcaggaagatgggc

SEQ ID NO: 5076696 - DNA, 25 bp, Homo sapien
cagggaccatatgtgcacatcaagg

SEQ ID NO: 5076697 - DNA, 25 bp, Homo sapien
ctcaggtggaaaagtgctaggtgct

SEQ ID NO: 5076698 - DNA, 25 bp, Homo sapien
taggtgctaaggttcacagatgggc

SEQ ID NO: 5076699 - DNA, 25 bp, Homo sapien
tacaaggaaagtcgatctacaaagg

SEQ ID NO: 5076700 - DNA, 25 bp, Homo sapien
aatgtgcaagtagcagaagagacgc

SEQ ID NO: 5076701 - DNA, 25 bp, Homo sapien
caatcattaagggtgagtgaccata

SEQ ID NO: 5076702 - DNA, 25 bp, Homo sapien
ggaagtgccggtatgacagttctca

SEQ ID NO: 5076703 - DNA, 25 bp, Homo sapien
cccatcaatcactgccctgactaga

SEQ ID NO: 5076704 - DNA, 25 bp, Homo sapien
ccatcaatcactgccctgactagaa

SEQ ID NO: 5076705 - DNA, 25 bp, Homo sapien
catcaatcactgccctgactagaat

SEQ ID NO: 5076706 - DNA, 25 bp, Homo sapien
tcaatcactgccctgactagaattt

SEQ ID NO: 5076707 - DNA, 25 bp, Homo sapien
ttgaagtcactctgccaaataactc

SEQ ID NO: 5076708 - DNA, 25 bp, Homo sapien
actcttgaagtcactctgccaaata

SEQ ID NO: 5076709 - DNA, 25 bp, Homo sapien
cctttgaggccagttgcaacatctc

SEQ ID NO: 5076710 - DNA, 25 bp, Homo sapien
gcaacatctccacttcgatcagtca

SEQ ID NO: 5076711 - DNA, 25 bp, Homo sapien
attttcatcaggcttttcactctgc

SEQ ID NO: 5076712 - DNA, 25 bp, Homo sapien
ggcttttcactctgcccatttccat

SEQ ID NO: 5076713 - DNA, 25 bp, Homo sapien
ttttcattttcatcaggcttttcac

SEQ ID NO: 5076714 - DNA, 25 bp, Homo sapien
ttcatcaggcttttcactctgccca

SEQ ID NO: 5076715 - DNA, 25 bp, Homo sapien
caacaattggactgggtgtcacact

SEQ ID NO: 5076716 - DNA, 25 bp, Homo sapien
cttgtatgcctttgagaggcactgg

SEQ ID NO: 5076717 - DNA, 25 bp, Homo sapien
gaacaacttccttaaatgatgtaat

SEQ ID NO: 5076718 - DNA, 25 bp, Homo sapien
tccttaaatgatgtaatatctttct

SEQ ID NO: 5076719 - DNA, 25 bp, Homo sapien
gaagcactgacagcaacccatgtgt

SEQ ID NO: 5076720 - DNA, 25 bp, Homo sapien
gttacggatcactgggaagagaccc

SEQ ID NO: 5076721 - DNA, 25 bp, Homo sapien
tgctgatgacacaagcccaaggaag

SEQ ID NO: 5076722 - DNA, 25 bp, Homo sapien
gcaaggcttggcatcagcagggaat

SEQ ID NO: 5076723 - DNA, 25 bp, Homo sapien
taacaagccccgtaaattgagtcga

SEQ ID NO: 5076724 - DNA, 25 bp, Homo sapien
ttgagtcgaacagaagaaagcattt

SEQ ID NO: 5076725 - DNA, 25 bp, Homo sapien
ctttgctttagataacaagccccgt

SEQ ID NO: 5076726 - DNA, 25 bp, Homo sapien
gccccgtaaattgagtcgaacagaa

SEQ ID NO: 5076727 - DNA, 25 bp, Homo sapien
cctggcctggcaagaaaagacctga

SEQ ID NO: 5076728 - DNA, 25 bp, Homo sapien
taggtgagtctctaggtactaggag

SEQ ID NO: 5076729 - DNA, 25 bp, Homo sapien
taagatctacgaaaccagagactcc

SEQ ID NO: 5076730 - DNA, 25 bp, Homo sapien
ctatttaacataggctgcaagcaat

SEQ ID NO: 5076731 - DNA, 25 bp, Homo sapien
ccatagctgttatgtcatcagctaa

SEQ ID NO: 5076732 - DNA, 25 bp, Homo sapien
tccagttgccacatctgtaaaaagt

SEQ ID NO: 5076733 - DNA, 25 bp, Homo sapien
actggttgcttaggtcttggagctc

SEQ ID NO: 5076734 - DNA, 25 bp, Homo sapien
gctctgtcactaaggtgtccatagc

SEQ ID NO: 5076735 - DNA, 25 bp, Homo sapien
agatatacagatgtatcttttacca

SEQ ID NO: 5076736 - DNA, 25 bp, Homo sapien
taccagcaggtgaaagcaccttttc

SEQ ID NO: 5076737 - DNA, 25 bp, Homo sapien
tatacagatgtatcttttaccagca

SEQ ID NO: 5076738 - DNA, 25 bp, Homo sapien
gatatacagatgtatcttttaccag

SEQ ID NO: 5076739 - DNA, 25 bp, Homo sapien
catttccaatttcgccaagtctgta

SEQ ID NO: 5076740 - DNA, 25 bp, Homo sapien
cacatttccaatttcgccaagtctg

SEQ ID NO: 5076741 - DNA, 25 bp, Homo sapien
ccaatttcgccaagtctgtatcttt

SEQ ID NO: 5076742 - DNA, 25 bp, Homo sapien
ttccaatttcgccaagtctgtatct

SEQ ID NO: 5076743 - DNA, 25 bp, Homo sapien
taataatatcagttttctgcctcgt

SEQ ID NO: 5076744 - DNA, 25 bp, Homo sapien
cgttcagaagaccactttaataata

SEQ ID NO: 5076745 - DNA, 25 bp, Homo sapien
aatatcagttttctgcctcgtagcc

SEQ ID NO: 5076746 - DNA, 25 bp, Homo sapien
tcagaagaccactttaataatatca

SEQ ID NO: 5076747 - DNA, 25 bp, Homo sapien
tagatactgatgtgcatctgagccc

SEQ ID NO: 5076748 - DNA, 25 bp, Homo sapien
tctgagccctcgatctggaaaaagt

SEQ ID NO: 5076749 - DNA, 25 bp, Homo sapien
caatatggatcactaacaggctaca

SEQ ID NO: 5076750 - DNA, 25 bp, Homo sapien
gaagcacatctgtctgtgaacagcg

SEQ ID NO: 5076751 - DNA, 25 bp, Homo sapien
cacctctctgagttatcgccttctg

SEQ ID NO: 5076752 - DNA, 25 bp, Homo sapien
gggcctgtgcccactcactccacct

SEQ ID NO: 5076753 - DNA, 25 bp, Homo sapien
tctctgagttatcgccttctgatcc

SEQ ID NO: 5076754 - DNA, 25 bp, Homo sapien
gagttatcgccttctgatccttgca

SEQ ID NO: 5076755 - DNA, 25 bp, Homo sapien
ccccctcagtcctctctgcacagtt

SEQ ID NO: 5076756 - DNA, 25 bp, Homo sapien
accaccagccaggctggttctgctg

SEQ ID NO: 5076757 - DNA, 25 bp, Homo sapien
cctcagtcctctctgcacagttcat

SEQ ID NO: 5076758 - DNA, 25 bp, Homo sapien
tgccccctcagtcctctctgcacag

SEQ ID NO: 5076759 - DNA, 25 bp, Homo sapien
cactcttccgcaagtcacccccatt

SEQ ID NO: 5076760 - DNA, 25 bp, Homo sapien
tccactcttccgcaagtcaccccca

SEQ ID NO: 5076761 - DNA, 25 bp, Homo sapien
actcttccgcaagtcacccccattg

SEQ ID NO: 5076762 - DNA, 25 bp, Homo sapien
ccactcttccgcaagtcacccccat

SEQ ID NO: 5076763 - DNA, 25 bp, Homo sapien
tgctgatcccaactgtctgaaacac

SEQ ID NO: 5076764 - DNA, 25 bp, Homo sapien
tctgcacaaacactgctagggttgc

SEQ ID NO: 5076765 - DNA, 25 bp, Homo sapien
tctgaaacacttcaggggacatgtg

SEQ ID NO: 5076766 - DNA, 25 bp, Homo sapien
ggacatgtgtttaggattcaaaaga

SEQ ID NO: 5076767 - DNA, 25 bp, Homo sapien
aaccggtctgctggtcactcgactg

SEQ ID NO: 5076768 - DNA, 25 bp, Homo sapien
agagccaggctacccggttccaagc

SEQ ID NO: 5076769 - DNA, 25 bp, Homo sapien
tgctggtcactcgactgggtcccag

SEQ ID NO: 5076770 - DNA, 25 bp, Homo sapien
taacccacacaaccggtctgctggt

SEQ ID NO: 5076771 - DNA, 25 bp, Homo sapien
agatggagtaagtgtcctctgtgct

SEQ ID NO: 5076772 - DNA, 25 bp, Homo sapien
gagatggagtaagtgtcctctgtgc

SEQ ID NO: 5076773 - DNA, 25 bp, Homo sapien
agagatggagtaagtgtcctctgtg

SEQ ID NO: 5076774 - DNA, 25 bp, Homo sapien
cacacggaaaggtttatcattaaga

SEQ ID NO: 5076775 - DNA, 25 bp, Homo sapien
aaatgcagttgaagcagagagacac

SEQ ID NO: 5076776 - DNA, 25 bp, Homo sapien
gttctggtccgtagcaagtggcaca

SEQ ID NO: 5076777 - DNA, 25 bp, Homo sapien
tacgggtcattcgtggtggcttttg

SEQ ID NO: 5076778 - DNA, 25 bp, Homo sapien
ggatctgcttctctgtccgctccag

SEQ ID NO: 5076779 - DNA, 25 bp, Homo sapien
ctgtgtctgctcagtccttcttgct

SEQ ID NO: 5076780 - DNA, 25 bp, Homo sapien
tgggatctgcttctctgtccgctcc

SEQ ID NO: 5076781 - DNA, 25 bp, Homo sapien
ggctgtgtctgctcagtccttcttg

SEQ ID NO: 5076782 - DNA, 25 bp, Homo sapien
gctagaactacctgacgcagggatc

SEQ ID NO: 5076783 - DNA, 25 bp, Homo sapien
tagaactacctgacgcagggatcat

SEQ ID NO: 5076784 - DNA, 25 bp, Homo sapien
ctagaactacctgacgcagggatca

SEQ ID NO: 5076785 - DNA, 25 bp, Homo sapien
ttagaacggttggtatatacacctc

SEQ ID NO: 5076786 - DNA, 25 bp, Homo sapien
ctattagaacggttggtatatacac

SEQ ID NO: 5076787 - DNA, 25 bp, Homo sapien
agaacggttggtatatacacctcct

SEQ ID NO: 5076788 - DNA, 25 bp, Homo sapien
tattagaacggttggtatatacacc

SEQ ID NO: 5076789 - DNA, 25 bp, Homo sapien
ggcagtgcccgtgttttcttccttg

SEQ ID NO: 5076790 - DNA, 25 bp, Homo sapien
catctctgctattgcaaagcttttg

SEQ ID NO: 5076791 - DNA, 25 bp, Homo sapien
cctttccggcagaaggtaatgtcct

SEQ ID NO: 5076792 - DNA, 25 bp, Homo sapien
gtaatgtccttctcggcagtgcccg

SEQ ID NO: 5076793 - DNA, 25 bp, Homo sapien
ttttgccagactgacaccaaaggct

SEQ ID NO: 5076794 - DNA, 25 bp, Homo sapien
tgttcccggccagagtgttttgcca

SEQ ID NO: 5076795 - DNA, 25 bp, Homo sapien
gagtgttttgccagactgacaccaa

SEQ ID NO: 5076796 - DNA, 25 bp, Homo sapien
agcatcccttgttcccggccagagt

SEQ ID NO: 5076797 - DNA, 25 bp, Homo sapien
tacacccagaaaggctgtccacaca

SEQ ID NO: 5076798 - DNA, 25 bp, Homo sapien
cctataggccccctaatacagaagg

SEQ ID NO: 5076799 - DNA, 25 bp, Homo sapien
tctgcagggtcccgaagctgctcct

SEQ ID NO: 5076800 - DNA, 25 bp, Homo sapien
tgggctcgaggatccatcacttctg

SEQ ID NO: 5076801 - DNA, 25 bp, Homo sapien
cattggtattaggaggaggactgcc

SEQ ID NO: 5076802 - DNA, 25 bp, Homo sapien
gaagtgcagaatagtaactagaggg

SEQ ID NO: 5076803 - DNA, 25 bp, Homo sapien
gaagatcgtggatggtatggcattg

SEQ ID NO: 5076804 - DNA, 25 bp, Homo sapien
gggtgaagtgcagaatagtaactag

SEQ ID NO: 5076805 - DNA, 25 bp, Homo sapien
cagatacgacactatgtgctaatga

SEQ ID NO: 5076806 - DNA, 25 bp, Homo sapien
ctttgtcacagatacgacactatgt

SEQ ID NO: 5076807 - DNA, 25 bp, Homo sapien
tgtcacagatacgacactatgtgct

SEQ ID NO: 5076808 - DNA, 25 bp, Homo sapien
cgacactatgtgctaatgaagacat

SEQ ID NO: 5076809 - DNA, 25 bp, Homo sapien
tgtgcaagtccctgtggggttacaa

SEQ ID NO: 5076810 - DNA, 25 bp, Homo sapien
ggtgacatgtgccacttaagtcccc

SEQ ID NO: 5076811 - DNA, 25 bp, Homo sapien
aaagggacaacagatcttgctcctg

SEQ ID NO: 5076812 - DNA, 25 bp, Homo sapien
gaagtaagtggtgacatgtgccact

SEQ ID NO: 5076813 - DNA, 25 bp, Homo sapien
ttccatatgaattttgtggtagttt

SEQ ID NO: 5076814 - DNA, 25 bp, Homo sapien
ttgataggaatagtgttgaatgtgt

SEQ ID NO: 5076815 - DNA, 25 bp, Homo sapien
gataggaatagtgttgaatgtgtag

SEQ ID NO: 5076816 - DNA, 25 bp, Homo sapien
aggaatagtgttgaatgtgtagatt

SEQ ID NO: 5076817 - DNA, 25 bp, Homo sapien
ttgtagtttttctccactatgagtt

SEQ ID NO: 5076818 - DNA, 25 bp, Homo sapien
gtttttctccactatgagttctttc

SEQ ID NO: 5076819 - DNA, 25 bp, Homo sapien
atttgtagtttttctccactatgag

SEQ ID NO: 5076820 - DNA, 25 bp, Homo sapien
ttttctccactatgagttctttcat

SEQ ID NO: 5076821 - DNA, 25 bp, Homo sapien
cttctatgagctctaggcagcaatt

SEQ ID NO: 5076822 - DNA, 25 bp, Homo sapien
actgtaagcttcagtgccctggagc

SEQ ID NO: 5076823 - DNA, 25 bp, Homo sapien
gccaacgtggagacaatcttcagta

SEQ ID NO: 5076824 - DNA, 25 bp, Homo sapien
cacagtttcaaaccagccaacgtgg

SEQ ID NO: 5076825 - DNA, 25 bp, Homo sapien
tgagtgccaaaatgcttctgggagc

SEQ ID NO: 5076826 - DNA, 25 bp, Homo sapien
gtgagtgccaaaatgcttctgggag

SEQ ID NO: 5076827 - DNA, 25 bp, Homo sapien
agtgccaaaatgcttctgggagctt

SEQ ID NO: 5076828 - DNA, 25 bp, Homo sapien
tgccaaaatgcttctgggagctttc

SEQ ID NO: 5076829 - DNA, 25 bp, Homo sapien
tagccatctatccccactgtgttat

SEQ ID NO: 5076830 - DNA, 25 bp, Homo sapien
ttagccatctatccccactgtgtta

SEQ ID NO: 5076831 - DNA, 25 bp, Homo sapien
agtccaagaggggccggcatccgga

SEQ ID NO: 5076832 - DNA, 25 bp, Homo sapien
gaagtccaagaggggccggcatccg

SEQ ID NO: 5076833 - DNA, 25 bp, Homo sapien
tccaagaggggccggcatccggaga

SEQ ID NO: 5076834 - DNA, 25 bp, Homo sapien
aagaggggccggcatccggagaggg

SEQ ID NO: 5076835 - DNA, 25 bp, Homo sapien
gacacacgagacaccatccaagtga

SEQ ID NO: 5076836 - DNA, 25 bp, Homo sapien
cagacacacgagacaccatccaagt

SEQ ID NO: 5076837 - DNA, 25 bp, Homo sapien
tgactttcagtgatccttttccagc

SEQ ID NO: 5076838 - DNA, 25 bp, Homo sapien
aagaaagcaacagcaagctcatcac

SEQ ID NO: 5076839 - DNA, 25 bp, Homo sapien
gctgtgcaatcgaagacaagttgtt

SEQ ID NO: 5076840 - DNA, 25 bp, Homo sapien
ctgtgcaatcgaagacaagttgttt

SEQ ID NO: 5076841 - DNA, 25 bp, Homo sapien
tgtgcaatcgaagacaagttgttta

SEQ ID NO: 5076842 - DNA, 25 bp, Homo sapien
agttgtttaacctttgaagccactg

SEQ ID NO: 5076843 - DNA, 25 bp, Homo sapien
gaaccgccttctcccttgctcacag

SEQ ID NO: 5076844 - DNA, 25 bp, Homo sapien
tttgtaccacaaagggcattgcttt

SEQ ID NO: 5076845 - DNA, 25 bp, Homo sapien
tgcttccaagaaccgccttctccct

SEQ ID NO: 5076846 - DNA, 25 bp, Homo sapien
aaagggcattgctttgcagtctgca

SEQ ID NO: 5076847 - DNA, 25 bp, Homo sapien
acaaggcaacagaagtgactcctgg

SEQ ID NO: 5076848 - DNA, 25 bp, Homo sapien
ccaaagggctggattttgtgccttc

SEQ ID NO: 5076849 - DNA, 25 bp, Homo sapien
gattcttttgctcattgtcctcctc

SEQ ID NO: 5076850 - DNA, 25 bp, Homo sapien
ttccccacaaggcaacagaagtgac

SEQ ID NO: 5076851 - DNA, 25 bp, Homo sapien
ccgtatcatgtagaaagggtggctc

SEQ ID NO: 5076852 - DNA, 25 bp, Homo sapien
gcaagtcatggaaatgcccctggga

SEQ ID NO: 5076853 - DNA, 25 bp, Homo sapien
tcaaacaagcgtgtctggattccag

SEQ ID NO: 5076854 - DNA, 25 bp, Homo sapien
tgcagcgttgcccaagagtcagtgg

SEQ ID NO: 5076855 - DNA, 25 bp, Homo sapien
tagtctggtagcatctgacggtgcc

SEQ ID NO: 5076856 - DNA, 25 bp, Homo sapien
cctccagggcccatatcaagtatca

SEQ ID NO: 5076857 - DNA, 25 bp, Homo sapien
tcaggattgagggtgctctcctctg

SEQ ID NO: 5076858 - DNA, 25 bp, Homo sapien
tttcccaaaccttcagtcaggattg

SEQ ID NO: 5076859 - DNA, 25 bp, Homo sapien
ctgtacttttgtcctggatgacctc

SEQ ID NO: 5076860 - DNA, 25 bp, Homo sapien
ccaagatttcgtgcttagttgcttt

SEQ ID NO: 5076861 - DNA, 25 bp, Homo sapien
tcattctgtacttttgtcctggatg

SEQ ID NO: 5076862 - DNA, 25 bp, Homo sapien
ctccaagatttcgtgcttagttgct

SEQ ID NO: 5076863 - DNA, 25 bp, Homo sapien
atgagtgaatgaagacaattcctca

SEQ ID NO: 5076864 - DNA, 25 bp, Homo sapien
tccatgggaggtgccaaaaaatatt

SEQ ID NO: 5076865 - DNA, 25 bp, Homo sapien
gaatgaagacaattcctcagtctct

SEQ ID NO: 5076866 - DNA, 25 bp, Homo sapien
tgttgaccaaatgaatacatgcatg

SEQ ID NO: 5076867 - DNA, 25 bp, Homo sapien
ttcctcaccagaagttctggagggc

SEQ ID NO: 5076868 - DNA, 25 bp, Homo sapien
atttctggattcatcatttctgact

SEQ ID NO: 5076869 - DNA, 25 bp, Homo sapien
tcttagcctccgctgcacttgacac

SEQ ID NO: 5076870 - DNA, 25 bp, Homo sapien
gattcatcatttctgactgtaccct

SEQ ID NO: 5076871 - DNA, 25 bp, Homo sapien
ccagaatcccagtgaatgaagatgt

SEQ ID NO: 5076872 - DNA, 25 bp, Homo sapien
tacatatattatggtccagaatccc

SEQ ID NO: 5076873 - DNA, 25 bp, Homo sapien
taaaagacagagaaatcgctagcct

SEQ ID NO: 5076874 - DNA, 25 bp, Homo sapien
aaaatgaattctagaaagatgaaac

SEQ ID NO: 5076875 - DNA, 25 bp, Homo sapien
tattcctgactaaatccaaggattc

SEQ ID NO: 5076876 - DNA, 25 bp, Homo sapien
ggataggtagaatctcttcctacaa

SEQ ID NO: 5076877 - DNA, 25 bp, Homo sapien
aatcctcttgcagctaattgccaga

SEQ ID NO: 5076878 - DNA, 25 bp, Homo sapien
gccagacaatttacatgagcacata

SEQ ID NO: 5076879 - DNA, 25 bp, Homo sapien
aagccccaggtgaagcttcctgtgg

SEQ ID NO: 5076880 - DNA, 25 bp, Homo sapien
caaagccccaggtgaagcttcctgt

SEQ ID NO: 5076881 - DNA, 25 bp, Homo sapien
ctctcaggtagggataatgtaacag

SEQ ID NO: 5076882 - DNA, 25 bp, Homo sapien
gaggagggtgattagcatagctaca

SEQ ID NO: 5076883 - DNA, 25 bp, Homo sapien
caggtagggataatgtaacagcaga

SEQ ID NO: 5076884 - DNA, 25 bp, Homo sapien
gggtgattagcatagctacaacatt

SEQ ID NO: 5076885 - DNA, 25 bp, Homo sapien
catggaataaatagcgccggactgg

SEQ ID NO: 5076886 - DNA, 25 bp, Homo sapien
gacaggatcattctaggtcagcccc

SEQ ID NO: 5076887 - DNA, 25 bp, Homo sapien
caatatttgatttggcaggcagggc

SEQ ID NO: 5076888 - DNA, 25 bp, Homo sapien
tatccaccgcatctctgaaggaggc

SEQ ID NO: 5076889 - DNA, 25 bp, Homo sapien
cagaagccccatgcgtttgatattg

SEQ ID NO: 5076890 - DNA, 25 bp, Homo sapien
tgtcccgggagaggacaaagcgctc

SEQ ID NO: 5076891 - DNA, 25 bp, Homo sapien
caaagttactgaacgatcctgtcct

SEQ ID NO: 5076892 - DNA, 25 bp, Homo sapien
tggaagccccggcattttcttatcc

SEQ ID NO: 5076893 - DNA, 25 bp, Homo sapien
gagcgggccgcgcaaggtgagggtc

SEQ ID NO: 5076894 - DNA, 25 bp, Homo sapien
caaggtgagggtccgcgcgtccggc

SEQ ID NO: 5076895 - DNA, 25 bp, Homo sapien
gccgcgcaaggtgagggtccgcgcg

SEQ ID NO: 5076896 - DNA, 25 bp, Homo sapien
gggccgcgcaaggtgagggtccgcg

SEQ ID NO: 5076897 - DNA, 25 bp, Homo sapien
agagctgccgagagcccgggaaagg

SEQ ID NO: 5076898 - DNA, 25 bp, Homo sapien
tgcggctcgcctttccccgcgcgtt

SEQ ID NO: 5076899 - DNA, 25 bp, Homo sapien
cgggaggagaccaagtcggtggcga

SEQ ID NO: 5076900 - DNA, 25 bp, Homo sapien
agaccccggccgattgtggctggga

SEQ ID NO: 5076901 - DNA, 25 bp, Homo sapien
cccacctgagccaggcccccgccat

SEQ ID NO: 5076902 - DNA, 25 bp, Homo sapien
ctgcccagagcaggagcccccacct

SEQ ID NO: 5076903 - DNA, 25 bp, Homo sapien
agagcaggagcccccacctgagcca

SEQ ID NO: 5076904 - DNA, 25 bp, Homo sapien
gagcccccacctgagccaggccccc

SEQ ID NO: 5076905 - DNA, 25 bp, Homo sapien
gcgttgagcgcgacgttgaatgtcc

SEQ ID NO: 5076906 - DNA, 25 bp, Homo sapien
gcccgggtgcaccacgtaggtgatc

SEQ ID NO: 5076907 - DNA, 25 bp, Homo sapien
cacgtaggtgatcctccgcagccgg

SEQ ID NO: 5076908 - DNA, 25 bp, Homo sapien
ggccgtgcgccgaggacgcgaggag

SEQ ID NO: 5076909 - DNA, 25 bp, Homo sapien
gggaggcacggctgggggcgccggc

SEQ ID NO: 5076910 - DNA, 25 bp, Homo sapien
gggcgccggcagccgccgagctgcg

SEQ ID NO: 5076911 - DNA, 25 bp, Homo sapien
ccggcagccgccgagctgcggctgt

SEQ ID NO: 5076912 - DNA, 25 bp, Homo sapien
ggcagccgccgagctgcggctgtac

SEQ ID NO: 5076913 - DNA, 25 bp, Homo sapien
gcggcggtctgagcccctgcagggc

SEQ ID NO: 5076914 - DNA, 25 bp, Homo sapien
ggcggcggcggtctgagcccctgca

SEQ ID NO: 5076915 - DNA, 25 bp, Homo sapien
tcgtgcgccgggtcctctccgaggg

SEQ ID NO: 5076916 - DNA, 25 bp, Homo sapien
ccggcttgctcgtgcgccgggtcct

SEQ ID NO: 5076917 - DNA, 25 bp, Homo sapien
tgcttctggtgaacctgcagcctag

SEQ ID NO: 5076918 - DNA, 25 bp, Homo sapien
gcacaacttgcctgccttgtttggt

SEQ ID NO: 5076919 - DNA, 25 bp, Homo sapien
ctccgccgctctgggtctcctgcgg

SEQ ID NO: 5076920 - DNA, 25 bp, Homo sapien
tcctgcggcaccttggagcgcacaa

SEQ ID NO: 5076921 - DNA, 25 bp, Homo sapien
tatgagcgcccagtaacagaaacat

SEQ ID NO: 5076922 - DNA, 25 bp, Homo sapien
tgaattcccacaacgggaaggcact

SEQ ID NO: 5076923 - DNA, 25 bp, Homo sapien
aagtccaagcccatgatttctctga

SEQ ID NO: 5076924 - DNA, 25 bp, Homo sapien
ttttatcaataccaagacaccccac

SEQ ID NO: 5076925 - DNA, 25 bp, Homo sapien
agcaagatcgctgagtccagcagca

SEQ ID NO: 5076926 - DNA, 25 bp, Homo sapien
aagcaagatcgctgagtccagcagc

SEQ ID NO: 5076927 - DNA, 25 bp, Homo sapien
caaagcaagatcgctgagtccagca

SEQ ID NO: 5076928 - DNA, 25 bp, Homo sapien
aaagcaagatcgctgagtccagcag

SEQ ID NO: 5076929 - DNA, 25 bp, Homo sapien
agccaggggccttactccagccatg

SEQ ID NO: 5076930 - DNA, 25 bp, Homo sapien
aggggccttactccagccatgacag

SEQ ID NO: 5076931 - DNA, 25 bp, Homo sapien
gctgctggcattgatactaacatta

SEQ ID NO: 5076932 - DNA, 25 bp, Homo sapien
tctgtacaatgtattgctgctggca

SEQ ID NO: 5076933 - DNA, 25 bp, Homo sapien
tcctgattcacagatgtgccagaat

SEQ ID NO: 5076934 - DNA, 25 bp, Homo sapien
catatggcatatcctcaaatggaaa

SEQ ID NO: 5076935 - DNA, 25 bp, Homo sapien
aaagcaatggaatatcgattttctg

SEQ ID NO: 5076936 - DNA, 25 bp, Homo sapien
aagtagcatgggctgaatgccaatg

SEQ ID NO: 5076937 - DNA, 25 bp, Homo sapien
gggctgaatgccaatggaaaagcaa

SEQ ID NO: 5076938 - DNA, 25 bp, Homo sapien
accaagggtgcatgtgactctgtct

SEQ ID NO: 5076939 - DNA, 25 bp, Homo sapien
ccacaagatctgcagtggcatctga

SEQ ID NO: 5076940 - DNA, 25 bp, Homo sapien
tctctcctaacaccccctggagcag

SEQ ID NO: 5076941 - DNA, 25 bp, Homo sapien
tcatctctcctaacaccccctggag

SEQ ID NO: 5076942 - DNA, 25 bp, Homo sapien
gtggccaattcctcatctctcctaa

SEQ ID NO: 5076943 - DNA, 25 bp, Homo sapien
tgtggccaattcctcatctctccta

SEQ ID NO: 5076944 - DNA, 25 bp, Homo sapien
gcctcatttgacttgatctttacca

SEQ ID NO: 5076945 - DNA, 25 bp, Homo sapien
cttttgtgaagcactgtgatgagcc

SEQ ID NO: 5076946 - DNA, 25 bp, Homo sapien
tcaatgactaattcaacgtgtaaat

SEQ ID NO: 5076947 - DNA, 25 bp, Homo sapien
acgtgtaaattagatgttgaggtgg

SEQ ID NO: 5076948 - DNA, 25 bp, Homo sapien
caaagggccctagtcttataatagg

SEQ ID NO: 5076949 - DNA, 25 bp, Homo sapien
tcttgatcttgacgcgaggaagcac

SEQ ID NO: 5076950 - DNA, 25 bp, Homo sapien
ccaattccaagagtatgctctagac

SEQ ID NO: 5076951 - DNA, 25 bp, Homo sapien
gaggaagcacaatccctgccaattc

SEQ ID NO: 5076952 - DNA, 25 bp, Homo sapien
gaaaacataaccaatccttaatgtg

SEQ ID NO: 5076953 - DNA, 25 bp, Homo sapien
ggcaaaaaccgatagataatcaggc

SEQ ID NO: 5076954 - DNA, 25 bp, Homo sapien
agagctggcgtcagagcaaggaaaa

SEQ ID NO: 5076955 - DNA, 25 bp, Homo sapien
tgtacgcacctaatgacagagcacc

SEQ ID NO: 5076956 - DNA, 25 bp, Homo sapien
ggctgcctctgcattcacctctagt

SEQ ID NO: 5076957 - DNA, 25 bp, Homo sapien
cttgcacacatccattcccctcagc

SEQ ID NO: 5076958 - DNA, 25 bp, Homo sapien
ctgcattcacctctagtccatccat

SEQ ID NO: 5076959 - DNA, 25 bp, Homo sapien
ttgcacacatccattcccctcagcc

SEQ ID NO: 5076960 - DNA, 25 bp, Homo sapien
ccagaaaactgtagcaggtgcaata

SEQ ID NO: 5076961 - DNA, 25 bp, Homo sapien
aaactgtagcaggtgcaatatcatg

SEQ ID NO: 5076962 - DNA, 25 bp, Homo sapien
cagaaaactgtagcaggtgcaatat

SEQ ID NO: 5076963 - DNA, 25 bp, Homo sapien
agaaaactgtagcaggtgcaatatc

SEQ ID NO: 5076964 - DNA, 25 bp, Homo sapien
tgccgaagctctgtggcaatacttg

SEQ ID NO: 5076965 - DNA, 25 bp, Homo sapien
tttcagactaagatgccgaagctct

SEQ ID NO: 5076966 - DNA, 25 bp, Homo sapien
atgtcctggaatccttagaatggac

SEQ ID NO: 5076967 - DNA, 25 bp, Homo sapien
gctctgtggcaatacttggatccaa

SEQ ID NO: 5076968 - DNA, 25 bp, Homo sapien
taagctggtctgcacatctgctggg

SEQ ID NO: 5076969 - DNA, 25 bp, Homo sapien
cctgagggtgtcacagctttggagt

SEQ ID NO: 5076970 - DNA, 25 bp, Homo sapien
ccagctacgtcctgagggtgtcaca

SEQ ID NO: 5076971 - DNA, 25 bp, Homo sapien
catctgctgggtccagctacgtcct

SEQ ID NO: 5076972 - DNA, 25 bp, Homo sapien
cagccctatcacgacctttgtacca

SEQ ID NO: 5076973 - DNA, 25 bp, Homo sapien
agccctatcacgacctttgtaccat

SEQ ID NO: 5076974 - DNA, 25 bp, Homo sapien
gccctatcacgacctttgtaccatc

SEQ ID NO: 5076975 - DNA, 25 bp, Homo sapien
ccctatcacgacctttgtaccatct

SEQ ID NO: 5076976 - DNA, 25 bp, Homo sapien
tgcagaaagaaaacagaaggcacag

SEQ ID NO: 5076977 - DNA, 25 bp, Homo sapien
ctgcagaaagaaaacagaaggcaca

SEQ ID NO: 5076978 - DNA, 25 bp, Homo sapien
tccattctgacatggcggaacacag

SEQ ID NO: 5076979 - DNA, 25 bp, Homo sapien
cacacagagttgtggccggagacac

SEQ ID NO: 5076980 - DNA, 25 bp, Homo sapien
tccaaagactggtgacgaggtgtcc

SEQ ID NO: 5076981 - DNA, 25 bp, Homo sapien
tggtccctggtttacacacacagag

SEQ ID NO: 5076982 - DNA, 25 bp, Homo sapien
ccttgttaacatgccttatgtctat

SEQ ID NO: 5076983 - DNA, 25 bp, Homo sapien
tccttgttaacatgccttatgtcta

SEQ ID NO: 5076984 - DNA, 25 bp, Homo sapien
ttccttgttaacatgccttatgtct

SEQ ID NO: 5076985 - DNA, 25 bp, Homo sapien
ttgttaacatgccttatgtctatca

SEQ ID NO: 5076986 - DNA, 25 bp, Homo sapien
ccaactgtttagactcacaggtcac

SEQ ID NO: 5076987 - DNA, 25 bp, Homo sapien
ctcatttgacagaagccgcatttag

SEQ ID NO: 5076988 - DNA, 25 bp, Homo sapien
caaagaaattaatcaaggagactgt

SEQ ID NO: 5076989 - DNA, 25 bp, Homo sapien
tacaaagcagcacggcaacaaagaa

SEQ ID NO: 5076990 - DNA, 25 bp, Homo sapien
tttttcctaaacactagaggcagcg

SEQ ID NO: 5076991 - DNA, 25 bp, Homo sapien
gaaactgtccatacgcaaaatagca

SEQ ID NO: 5076992 - DNA, 25 bp, Homo sapien
tcacatcgataactcctgaggcgct

SEQ ID NO: 5076993 - DNA, 25 bp, Homo sapien
gagaaagatgccctaacagccagtc

SEQ ID NO: 5076994 - DNA, 25 bp, Homo sapien
gacatattccagtggagttaaaccc

SEQ ID NO: 5076995 - DNA, 25 bp, Homo sapien
aagggtcggctacggcatccaaaga

SEQ ID NO: 5076996 - DNA, 25 bp, Homo sapien
aattcctatccatcggcaacaaggg

SEQ ID NO: 5076997 - DNA, 25 bp, Homo sapien
caaagaaggtggttcgaggttgcac

SEQ ID NO: 5076998 - DNA, 25 bp, Homo sapien
aaaatactcatgtacacaaactgtg

SEQ ID NO: 5076999 - DNA, 25 bp, Homo sapien
tgcccagaaggccttaaaccatagg

SEQ ID NO: 5077000 - DNA, 25 bp, Homo sapien
ggtgcaggtagtcagatgcccagaa

SEQ ID NO: 5077001 - DNA, 25 bp, Homo sapien
tgagaagagctctgtaaccattccc

SEQ ID NO: 5077002 - DNA, 25 bp, Homo sapien
aagtcaccatcgcccagggcggcat

SEQ ID NO: 5077003 - DNA, 25 bp, Homo sapien
tgggcaaagtcaccatcgcccaggg

SEQ ID NO: 5077004 - DNA, 25 bp, Homo sapien
aagctgctgggcaaagtcaccatcg

SEQ ID NO: 5077005 - DNA, 25 bp, Homo sapien
taaacaagctgctgggcaaagtcac

SEQ ID NO: 5077006 - DNA, 25 bp, Homo sapien
ctccagctggcaatttgcaacaaca

SEQ ID NO: 5077007 - DNA, 25 bp, Homo sapien
ctctcggaagtctggctttgagtgg

SEQ ID NO: 5077008 - DNA, 25 bp, Homo sapien
tttgagtggggccatcatctcaggg

SEQ ID NO: 5077009 - DNA, 25 bp, Homo sapien
agtggggccatcatctcagggtacc

SEQ ID NO: 5077010 - DNA, 25 bp, Homo sapien
aggctctcggaagtctggctttgag

SEQ ID NO: 5077011 - DNA, 25 bp, Homo sapien
tcatgcccatctaacgtgctttttt

SEQ ID NO: 5077012 - DNA, 25 bp, Homo sapien
atcatgcccatctaacgtgcttttt

SEQ ID NO: 5077013 - DNA, 25 bp, Homo sapien
tcgaacttccaacctcgtgatccac

SEQ ID NO: 5077014 - DNA, 25 bp, Homo sapien
gctggtctcgaacttccaacctcgt

SEQ ID NO: 5077015 - DNA, 25 bp, Homo sapien
ggtctcgaacttccaacctcgtgat

SEQ ID NO: 5077016 - DNA, 25 bp, Homo sapien
caagctggtctcgaacttccaacct

SEQ ID NO: 5077017 - DNA, 25 bp, Homo sapien
taaatgatatattcttgtcatcttg

SEQ ID NO: 5077018 - DNA, 25 bp, Homo sapien
cagcctgtcacgcattttcaatgca

SEQ ID NO: 5077019 - DNA, 25 bp, Homo sapien
tcaatgcacaactacttttaaatta

SEQ ID NO: 5077020 - DNA, 25 bp, Homo sapien
gatcaaatagcatacaagtccccaa

SEQ ID NO: 5077021 - DNA, 25 bp, Homo sapien
tcatatgtgatctacctacacccat

SEQ ID NO: 5077022 - DNA, 25 bp, Homo sapien
aaaattgccaccaatgatcctgttg

SEQ ID NO: 5077023 - DNA, 25 bp, Homo sapien
aaatcatgcactttcctgtgctcag

SEQ ID NO: 5077024 - DNA, 25 bp, Homo sapien
tcccaaataatcctgtgagaatgac

SEQ ID NO: 5077025 - DNA, 25 bp, Homo sapien
taaagcactatgagaggcacccaca

SEQ ID NO: 5077026 - DNA, 25 bp, Homo sapien
tccaatgggtaggaggacccaagca

SEQ ID NO: 5077027 - DNA, 25 bp, Homo sapien
ttctccaggacaggcatccacgtgg

SEQ ID NO: 5077028 - DNA, 25 bp, Homo sapien
gaagctgttcgttcacaattttccc

SEQ ID NO: 5077029 - DNA, 25 bp, Homo sapien
ccttcgtggttggtgtccactgttt

SEQ ID NO: 5077030 - DNA, 25 bp, Homo sapien
tccttcgtggttggtgtccactgtt

SEQ ID NO: 5077031 - DNA, 25 bp, Homo sapien
tctccttcgtggttggtgtccactg

SEQ ID NO: 5077032 - DNA, 25 bp, Homo sapien
tttctccttcgtggttggtgtccac

SEQ ID NO: 5077033 - DNA, 25 bp, Homo sapien
aggacccctgctgaggcaagtagag

SEQ ID NO: 5077034 - DNA, 25 bp, Homo sapien
gtaccccacaggctgatgcccctct

SEQ ID NO: 5077035 - DNA, 25 bp, Homo sapien
ggacaggacccctgctgaggcaagt

SEQ ID NO: 5077036 - DNA, 25 bp, Homo sapien
aggccacggacaggacccctgctga

SEQ ID NO: 5077037 - DNA, 25 bp, Homo sapien
aaaggtgccgcaacttgatcctgca

SEQ ID NO: 5077038 - DNA, 25 bp, Homo sapien
ggtctggccatggtgaatcaccaca

SEQ ID NO: 5077039 - DNA, 25 bp, Homo sapien
gggaaagaaccttcagtggactgct

SEQ ID NO: 5077040 - DNA, 25 bp, Homo sapien
gtacttgggcttgagcacgtattcc

SEQ ID NO: 5077041 - DNA, 25 bp, Homo sapien
tctgttccatgtaaggcttctttgg

SEQ ID NO: 5077042 - DNA, 25 bp, Homo sapien
tgtaaggcttctttggagcctcctc

SEQ ID NO: 5077043 - DNA, 25 bp, Homo sapien
tcagacttctctgactaactgttcc

SEQ ID NO: 5077044 - DNA, 25 bp, Homo sapien
cagacttctctgactaactgttcct

SEQ ID NO: 5077045 - DNA, 25 bp, Homo sapien
aacctaagcccatcttgagagaacg

SEQ ID NO: 5077046 - DNA, 25 bp, Homo sapien
tgagagaacgacaactggaattagc

SEQ ID NO: 5077047 - DNA, 25 bp, Homo sapien
gacatctgccatgcctaaaacgtaa

SEQ ID NO: 5077048 - DNA, 25 bp, Homo sapien
cccacgttagcacatcaggagataa

SEQ ID NO: 5077049 - DNA, 25 bp, Homo sapien
ttctatctgcaaatggaggtgccag

SEQ ID NO: 5077050 - DNA, 25 bp, Homo sapien
tgcaaagactgagagagggcagcac

SEQ ID NO: 5077051 - DNA, 25 bp, Homo sapien
tagggaccctgtgcgtgcttcttca

SEQ ID NO: 5077052 - DNA, 25 bp, Homo sapien
ggtgccagatttcagtcagcccgtg

SEQ ID NO: 5077053 - DNA, 25 bp, Homo sapien
tgtcaggacctatcagcgaggatgt

SEQ ID NO: 5077054 - DNA, 25 bp, Homo sapien
aaagctctgccctgtaaggctccca

SEQ ID NO: 5077055 - DNA, 25 bp, Homo sapien
cataatgggtgctctcaactacgcc

SEQ ID NO: 5077056 - DNA, 25 bp, Homo sapien
tagtctccatgtagggagggctttc

SEQ ID NO: 5077057 - DNA, 25 bp, Homo sapien
taatattcctcttaaatgcttaagc

SEQ ID NO: 5077058 - DNA, 25 bp, Homo sapien
atattcctcttaaatgcttaagcag

SEQ ID NO: 5077059 - DNA, 25 bp, Homo sapien
aatattcctcttaaatgcttaagca

SEQ ID NO: 5077060 - DNA, 25 bp, Homo sapien
tattcctcttaaatgcttaagcagt

SEQ ID NO: 5077061 - DNA, 25 bp, Homo sapien
tgctctccggatgcttttctttctc

SEQ ID NO: 5077062 - DNA, 25 bp, Homo sapien
tctttctctcgccaaagctttctaa

SEQ ID NO: 5077063 - DNA, 25 bp, Homo sapien
tttctttctctcgccaaagctttct

SEQ ID NO: 5077064 - DNA, 25 bp, Homo sapien
tttctctcgccaaagctttctaaat

SEQ ID NO: 5077065 - DNA, 25 bp, Homo sapien
aatgtaagctgaaagcgtgggagga

SEQ ID NO: 5077066 - DNA, 25 bp, Homo sapien
aaagtaaagcagatgcgcgctccag

SEQ ID NO: 5077067 - DNA, 25 bp, Homo sapien
aagtaaagcagatgcgcgctccagc

SEQ ID NO: 5077068 - DNA, 25 bp, Homo sapien
ccatggaatgtaagctgaaagcgtg

SEQ ID NO: 5077069 - DNA, 25 bp, Homo sapien
tacacatgacaatcatgtaagctgc

SEQ ID NO: 5077070 - DNA, 25 bp, Homo sapien
tgtaagctgcagtcatatccattct

SEQ ID NO: 5077071 - DNA, 25 bp, Homo sapien
cattctgccagcaaggaaaccagag

SEQ ID NO: 5077072 - DNA, 25 bp, Homo sapien
gagatgttcaccagaagcttgacca

SEQ ID NO: 5077073 - DNA, 25 bp, Homo sapien
actgagctaacagttcattctccca

SEQ ID NO: 5077074 - DNA, 25 bp, Homo sapien
ctcttcagggtgtgagagagactga

SEQ ID NO: 5077075 - DNA, 25 bp, Homo sapien
gtacactcttcagggtgtgagagag

SEQ ID NO: 5077076 - DNA, 25 bp, Homo sapien
ctgagctaacagttcattctcccac

SEQ ID NO: 5077077 - DNA, 25 bp, Homo sapien
gcacagttgccttgtttggtcatca

SEQ ID NO: 5077078 - DNA, 25 bp, Homo sapien
gaagcaacctctctgtggtttaaag

SEQ ID NO: 5077079 - DNA, 25 bp, Homo sapien
gcgtgcatccaacttaaacaatggg

SEQ ID NO: 5077080 - DNA, 25 bp, Homo sapien
gaatgccgcaacagcacattagcgt

SEQ ID NO: 5077081 - DNA, 25 bp, Homo sapien
tagacaaagtaacccgaagcatggg

SEQ ID NO: 5077082 - DNA, 25 bp, Homo sapien
cacttgtattctaagcgggtcctcc

SEQ ID NO: 5077083 - DNA, 25 bp, Homo sapien
ggcactggcactcggtttaaaacaa

SEQ ID NO: 5077084 - DNA, 25 bp, Homo sapien
catgtgacacgctgaaggcaatacc

SEQ ID NO: 5077085 - DNA, 25 bp, Homo sapien
tgttcaagtgtgtgaaacccaagaa

SEQ ID NO: 5077086 - DNA, 25 bp, Homo sapien
tgaaattagaatccgtgtgccaact

SEQ ID NO: 5077087 - DNA, 25 bp, Homo sapien
tggcattaacttgtagcaccagcag

SEQ ID NO: 5077088 - DNA, 25 bp, Homo sapien
tataatctaagttgtcggaaaatgc

SEQ ID NO: 5077089 - DNA, 25 bp, Homo sapien
gcggtgaataaactcttgtgtcctc

SEQ ID NO: 5077090 - DNA, 25 bp, Homo sapien
gaataaactcttgtgtcctcaactt

SEQ ID NO: 5077091 - DNA, 25 bp, Homo sapien
taaactcttgtgtcctcaacttgca

SEQ ID NO: 5077092 - DNA, 25 bp, Homo sapien
ctagcggtgaataaactcttgtgtc

SEQ ID NO: 5077093 - DNA, 25 bp, Homo sapien
gggaagccttcagtgctcgctgctc

SEQ ID NO: 5077094 - DNA, 25 bp, Homo sapien
gaagcttagcaaacagaactctggg

SEQ ID NO: 5077095 - DNA, 25 bp, Homo sapien
gagagcccacaacccgacaggttta

SEQ ID NO: 5077096 - DNA, 25 bp, Homo sapien
cagtggtgtctctgaaacaggagta

SEQ ID NO: 5077097 - DNA, 25 bp, Homo sapien
aacaaacacatcagcttagtatcca

SEQ ID NO: 5077098 - DNA, 25 bp, Homo sapien
caacaaacacatcagcttagtatcc

SEQ ID NO: 5077099 - DNA, 25 bp, Homo sapien
acaacaaacacatcagcttagtatc

SEQ ID NO: 5077100 - DNA, 25 bp, Homo sapien
acaaacacatcagcttagtatccat

SEQ ID NO: 5077101 - DNA, 25 bp, Homo sapien
cagatgctcggagtaaagaccacct

SEQ ID NO: 5077102 - DNA, 25 bp, Homo sapien
cactcggaagttcgtggccgtcagg

SEQ ID NO: 5077103 - DNA, 25 bp, Homo sapien
gagtggtggtgttccccttctcaca

SEQ ID NO: 5077104 - DNA, 25 bp, Homo sapien
aagaccaccttgatgcggccagtgt

SEQ ID NO: 5077105 - DNA, 25 bp, Homo sapien
gcagacagcaactactacttcatat

SEQ ID NO: 5077106 - DNA, 25 bp, Homo sapien
aaatgaaccaacaaggctttcttgc

SEQ ID NO: 5077107 - DNA, 25 bp, Homo sapien
taacttaaaggagtactgagagtaa

SEQ ID NO: 5077108 - DNA, 25 bp, Homo sapien
caacatgacagcattccgtggacca

SEQ ID NO: 5077109 - DNA, 25 bp, Homo sapien
tcatcacagaccagaagaccaacac

SEQ ID NO: 5077110 - DNA, 25 bp, Homo sapien
ggaaggaaggaattatcccacaagc

SEQ ID NO: 5077111 - DNA, 25 bp, Homo sapien
aggaaggaaggaattatcccacaag

SEQ ID NO: 5077112 - DNA, 25 bp, Homo sapien
ccaacacagaagcagcatgaaggaa

SEQ ID NO: 5077113 - DNA, 25 bp, Homo sapien
aaaattctttggagggcttgacaca

SEQ ID NO: 5077114 - DNA, 25 bp, Homo sapien
tcacagagtgatccacaggtgggca

SEQ ID NO: 5077115 - DNA, 25 bp, Homo sapien
tgcttaacatcaatcccaagtaggg

SEQ ID NO: 5077116 - DNA, 25 bp, Homo sapien
gataagaccaccacactattggcag

SEQ ID NO: 5077117 - DNA, 25 bp, Homo sapien
tgtgcttccttcaggccaccaagga

SEQ ID NO: 5077118 - DNA, 25 bp, Homo sapien
gctccaaacaagctgtgcttccttc

SEQ ID NO: 5077119 - DNA, 25 bp, Homo sapien
atcctttcatcctgctccaaacaag

SEQ ID NO: 5077120 - DNA, 25 bp, Homo sapien
tcctgctccaaacaagctgtgcttc

SEQ ID NO: 5077121 - DNA, 25 bp, Homo sapien
gaatgaatgagatgctctccaagct

SEQ ID NO: 5077122 - DNA, 25 bp, Homo sapien
tggaaatgcaatgggagtcagaagc

SEQ ID NO: 5077123 - DNA, 25 bp, Homo sapien
ttagaaatctccagtacagcaccat

SEQ ID NO: 5077124 - DNA, 25 bp, Homo sapien
gttgccaccaactatgaccttgaag

SEQ ID NO: 5077125 - DNA, 25 bp, Homo sapien
tgtccatcattatcaggccctgcag

SEQ ID NO: 5077126 - DNA, 25 bp, Homo sapien
cagaactgtgatgtccatcattatc

SEQ ID NO: 5077127 - DNA, 25 bp, Homo sapien
cctgcagaagctccggtgggcagta

SEQ ID NO: 5077128 - DNA, 25 bp, Homo sapien
ccctgcagaagctccggtgggcagt

SEQ ID NO: 5077129 - DNA, 25 bp, Homo sapien
tccatacttttaatctgggaattct

SEQ ID NO: 5077130 - DNA, 25 bp, Homo sapien
tacttttaatctgggaattcttctc

SEQ ID NO: 5077131 - DNA, 25 bp, Homo sapien
catacttttaatctgggaattcttc

SEQ ID NO: 5077132 - DNA, 25 bp, Homo sapien
ctccatacttttaatctgggaattc

SEQ ID NO: 5077133 - DNA, 25 bp, Homo sapien
gaagcttctactatcactggataag

SEQ ID NO: 5077134 - DNA, 25 bp, Homo sapien
cacacacccgtgcaatgtctgctgg

SEQ ID NO: 5077135 - DNA, 25 bp, Homo sapien
tgagctgatcaataaccaggcaggt

SEQ ID NO: 5077136 - DNA, 25 bp, Homo sapien
tgcccagagattgagaggatttcct

SEQ ID NO: 5077137 - DNA, 25 bp, Homo sapien
atgtcaatcgttggaatgaacctca

SEQ ID NO: 5077138 - DNA, 25 bp, Homo sapien
cttctttcgattttgaggcccacca

SEQ ID NO: 5077139 - DNA, 25 bp, Homo sapien
tttgcacaaatatgcatcataagga

SEQ ID NO: 5077140 - DNA, 25 bp, Homo sapien
cttatgtacttgctttaagtgaagc

SEQ ID NO: 5077141 - DNA, 25 bp, Homo sapien
gcaattctcctaaataaaccaagta

SEQ ID NO: 5077142 - DNA, 25 bp, Homo sapien
gagaaactacttgggtatacaaaga

SEQ ID NO: 5077143 - DNA, 25 bp, Homo sapien
taaataaaccaagtatcatcagaga

SEQ ID NO: 5077144 - DNA, 25 bp, Homo sapien
catcagagaaactacttgggtatac

SEQ ID NO: 5077145 - DNA, 25 bp, Homo sapien
aatgctaacgctattcagggccacg

SEQ ID NO: 5077146 - DNA, 25 bp, Homo sapien
aaccccggagtagctatcagccagg

SEQ ID NO: 5077147 - DNA, 25 bp, Homo sapien
cagggccacgtgattcattactgac

SEQ ID NO: 5077148 - DNA, 25 bp, Homo sapien
tattcggcacaccatgggcatcagt

SEQ ID NO: 5077149 - DNA, 25 bp, Homo sapien
gagatgaggccattcatcatctcaa

SEQ ID NO: 5077150 - DNA, 25 bp, Homo sapien
tgagatgaggccattcatcatctca

SEQ ID NO: 5077151 - DNA, 25 bp, Homo sapien
tgttgaatggatgacatgcgtcccc

SEQ ID NO: 5077152 - DNA, 25 bp, Homo sapien
tccttgctggctagtcacggtcaga

SEQ ID NO: 5077153 - DNA, 25 bp, Homo sapien
tttaggcacgctggcaccatggact

SEQ ID NO: 5077154 - DNA, 25 bp, Homo sapien
gacatttgtcccttgaactgcactg

SEQ ID NO: 5077155 - DNA, 25 bp, Homo sapien
cagattgggaggaaaacttgttagt

SEQ ID NO: 5077156 - DNA, 25 bp, Homo sapien
caacagattgggaggaaaacttgtt

SEQ ID NO: 5077157 - DNA, 25 bp, Homo sapien
acagattgggaggaaaacttgttag

SEQ ID NO: 5077158 - DNA, 25 bp, Homo sapien
ctacaacagattgggaggaaaactt

SEQ ID NO: 5077159 - DNA, 25 bp, Homo sapien
gaagcccttggtacgagacttggga

SEQ ID NO: 5077160 - DNA, 25 bp, Homo sapien
tgtgacccaatggtttcctggaagc

SEQ ID NO: 5077161 - DNA, 25 bp, Homo sapien
aaacctgatgtatctggacggaagc

SEQ ID NO: 5077162 - DNA, 25 bp, Homo sapien
gaagcaccggccaagctgtgtctta

SEQ ID NO: 5077163 - DNA, 25 bp, Homo sapien
gctaaagcaggctcggtgatgatgt

SEQ ID NO: 5077164 - DNA, 25 bp, Homo sapien
tgctaaagcaggctcggtgatgatg

SEQ ID NO: 5077165 - DNA, 25 bp, Homo sapien
taattctgcagtcatcgcatgaaaa

SEQ ID NO: 5077166 - DNA, 25 bp, Homo sapien
tatggccacaagtcatagtttgtca

SEQ ID NO: 5077167 - DNA, 25 bp, Homo sapien
agtcatcgcatgaaaatgggcatag

SEQ ID NO: 5077168 - DNA, 25 bp, Homo sapien
taagtgtggctatgagtgtggcaat

SEQ ID NO: 5077169 - DNA, 25 bp, Homo sapien
gcaaagctgtgaagtgtataaagtt

SEQ ID NO: 5077170 - DNA, 25 bp, Homo sapien
agtgcaaagctgtgaagtgtataaa

SEQ ID NO: 5077171 - DNA, 25 bp, Homo sapien
gctgtgaagtgtataaagtttatct

SEQ ID NO: 5077172 - DNA, 25 bp, Homo sapien
ctagttcagtgcaaagctgtgaagt

SEQ ID NO: 5077173 - DNA, 25 bp, Homo sapien
gataatcttgttctccaatggtcca

SEQ ID NO: 5077174 - DNA, 25 bp, Homo sapien
ggaacaacttctggcatctctaaca

SEQ ID NO: 5077175 - DNA, 25 bp, Homo sapien
tttcctgtccaaacagaactgctgg

SEQ ID NO: 5077176 - DNA, 25 bp, Homo sapien
cagccatgcaattaggatactttcc

SEQ ID NO: 5077177 - DNA, 25 bp, Homo sapien
ccgggcaggtggacccttaaagctg

SEQ ID NO: 5077178 - DNA, 25 bp, Homo sapien
gcttctcttaaacaggtccgggcag

SEQ ID NO: 5077179 - DNA, 25 bp, Homo sapien
ttaaagctgacagcctctttggttc

SEQ ID NO: 5077180 - DNA, 25 bp, Homo sapien
tctttggttcccagaagacatctac

SEQ ID NO: 5077181 - DNA, 25 bp, Homo sapien
gagaccactgaacaccatagggtct

SEQ ID NO: 5077182 - DNA, 25 bp, Homo sapien
gaccactgaacaccatagggtctca

SEQ ID NO: 5077183 - DNA, 25 bp, Homo sapien
ctgaacaccatagggtctcacctgg

SEQ ID NO: 5077184 - DNA, 25 bp, Homo sapien
ggtctcacctggatgtaggaaatgc

SEQ ID NO: 5077185 - DNA, 25 bp, Homo sapien
ccatactccttgagcttaatcacaa

SEQ ID NO: 5077186 - DNA, 25 bp, Homo sapien
gaaccttagagaagacaggcacata

SEQ ID NO: 5077187 - DNA, 25 bp, Homo sapien
caaaacgtgtaaccctgaaatatga

SEQ ID NO: 5077188 - DNA, 25 bp, Homo sapien
gagagacagatccaacgtgagaaca

SEQ ID NO: 5077189 - DNA, 25 bp, Homo sapien
taaccacgtgcagtgagggaaagtc

SEQ ID NO: 5077190 - DNA, 25 bp, Homo sapien
gagtgacgttgtgtgccagatacca

SEQ ID NO: 5077191 - DNA, 25 bp, Homo sapien
cagtaactcctgcagacacgtgaca

SEQ ID NO: 5077192 - DNA, 25 bp, Homo sapien
agtccccgaggttggaacagcggca

SEQ ID NO: 5077193 - DNA, 25 bp, Homo sapien
aaggcactgaaaaaagccctagtgt

SEQ ID NO: 5077194 - DNA, 25 bp, Homo sapien
tgaaaaaagccctagtgtaagtcag

SEQ ID NO: 5077195 - DNA, 25 bp, Homo sapien
gcactgaaaaaagccctagtgtaag

SEQ ID NO: 5077196 - DNA, 25 bp, Homo sapien
aagccctagtgtaagtcagtaaagc

SEQ ID NO: 5077197 - DNA, 25 bp, Homo sapien
gctttgaaaggccagggagcgcttt

SEQ ID NO: 5077198 - DNA, 25 bp, Homo sapien
tttgaaaggccagggagcgctttgc

SEQ ID NO: 5077199 - DNA, 25 bp, Homo sapien
tgaaaggccagggagcgctttgcca

SEQ ID NO: 5077200 - DNA, 25 bp, Homo sapien
ttgctttgaaaggccagggagcgct

SEQ ID NO: 5077201 - DNA, 25 bp, Homo sapien
cctctcttcagattcccccgaatgc

SEQ ID NO: 5077202 - DNA, 25 bp, Homo sapien
aaaggaacagggtgaatatgtactg

SEQ ID NO: 5077203 - DNA, 25 bp, Homo sapien
ccctctcttcagattcccccgaatg

SEQ ID NO: 5077204 - DNA, 25 bp, Homo sapien
cgcttataacccggtaggcattcca

SEQ ID NO: 5077205 - DNA, 25 bp, Homo sapien
ataacccggtaggcattccatcatt

SEQ ID NO: 5077206 - DNA, 25 bp, Homo sapien
ttataacccggtaggcattccatca

SEQ ID NO: 5077207 - DNA, 25 bp, Homo sapien
gcttataacccggtaggcattccat

SEQ ID NO: 5077208 - DNA, 25 bp, Homo sapien
agactgggtccttgatgtctgagaa

SEQ ID NO: 5077209 - DNA, 25 bp, Homo sapien
gagtaagactgggtccttgatgtct

SEQ ID NO: 5077210 - DNA, 25 bp, Homo sapien
aagtgagtaagactgggtccttgat

SEQ ID NO: 5077211 - DNA, 25 bp, Homo sapien
acaaaagtgagtaagactgggtcct

SEQ ID NO: 5077212 - DNA, 25 bp, Homo sapien
tcacagctggttttgcggaaggagt

SEQ ID NO: 5077213 - DNA, 25 bp, Homo sapien
tagaaatacccagtagcagcagaag

SEQ ID NO: 5077214 - DNA, 25 bp, Homo sapien
tgggaggctcctaatctaagaaaaa

SEQ ID NO: 5077215 - DNA, 25 bp, Homo sapien
tcaaggtcacattgggatacccaag

SEQ ID NO: 5077216 - DNA, 25 bp, Homo sapien
ttagggcatacaccttgtagctgac

SEQ ID NO: 5077217 - DNA, 25 bp, Homo sapien
attagggcatacaccttgtagctga

SEQ ID NO: 5077218 - DNA, 25 bp, Homo sapien
tagggcatacaccttgtagctgaca

SEQ ID NO: 5077219 - DNA, 25 bp, Homo sapien
cattagggcatacaccttgtagctg

SEQ ID NO: 5077220 - DNA, 25 bp, Homo sapien
cctattttgcaggtacatcgatagc

SEQ ID NO: 5077221 - DNA, 25 bp, Homo sapien
acatcgatagctgcccatggtattc

SEQ ID NO: 5077222 - DNA, 25 bp, Homo sapien
tgcaggtacatcgatagctgcccat

SEQ ID NO: 5077223 - DNA, 25 bp, Homo sapien
aggtaggatccggcccaaatcctat

SEQ ID NO: 5077224 - DNA, 25 bp, Homo sapien
tctgagaggcagcttacctagggca

SEQ ID NO: 5077225 - DNA, 25 bp, Homo sapien
tagctaaccttactagtctgcaatc

SEQ ID NO: 5077226 - DNA, 25 bp, Homo sapien
tccctttacagcttagtatctatgg

SEQ ID NO: 5077227 - DNA, 25 bp, Homo sapien
gatacaggtctaggaagcaggtaaa

SEQ ID NO: 5077228 - DNA, 25 bp, Homo sapien
ggccctttctcttccgagatcacag

SEQ ID NO: 5077229 - DNA, 25 bp, Homo sapien
ctgacaagtcggtaacagggccctt

SEQ ID NO: 5077230 - DNA, 25 bp, Homo sapien
ttggtgaggtgaacagacagagggt

SEQ ID NO: 5077231 - DNA, 25 bp, Homo sapien
acagagggtgcatacactgtcttcc

SEQ ID NO: 5077232 - DNA, 25 bp, Homo sapien
gattggcctgcgtctatgaacgcca

SEQ ID NO: 5077233 - DNA, 25 bp, Homo sapien
catggtgatggattggcctgcgtct

SEQ ID NO: 5077234 - DNA, 25 bp, Homo sapien
tgaacgccagaaaccgtataaccca

SEQ ID NO: 5077235 - DNA, 25 bp, Homo sapien
tgcgtctatgaacgccagaaaccgt

SEQ ID NO: 5077236 - DNA, 25 bp, Homo sapien
tagcaacaggttgagtgttctttgg

SEQ ID NO: 5077237 - DNA, 25 bp, Homo sapien
ggcttgacaaatacaggtcctttac

SEQ ID NO: 5077238 - DNA, 25 bp, Homo sapien
gggagaggtggaggatgagtacttt

SEQ ID NO: 5077239 - DNA, 25 bp, Homo sapien
tggcttgacaaatacaggtccttta

SEQ ID NO: 5077240 - DNA, 25 bp, Homo sapien
aaggtcagggcctccactggctctt

SEQ ID NO: 5077241 - DNA, 25 bp, Homo sapien
tctcttgatccaatgaaggtatttc

SEQ ID NO: 5077242 - DNA, 25 bp, Homo sapien
aaactgtggatgcagatgaatagtg

SEQ ID NO: 5077243 - DNA, 25 bp, Homo sapien
gagacagctggggttgaccaggctc

SEQ ID NO: 5077244 - DNA, 25 bp, Homo sapien
ggttttctcttgatccaatgaaggt

SEQ ID NO: 5077245 - DNA, 25 bp, Homo sapien
cacttggctggcactagacgtagaa

SEQ ID NO: 5077246 - DNA, 25 bp, Homo sapien
ggcacaggaggtgatgttttttcaa

SEQ ID NO: 5077247 - DNA, 25 bp, Homo sapien
tacttcaacaggcacaggaggtgat

SEQ ID NO: 5077248 - DNA, 25 bp, Homo sapien
tcacttgagtaggagcaatcacttg

SEQ ID NO: 5077249 - DNA, 25 bp, Homo sapien
tatacaggtatatctcactggtagg

SEQ ID NO: 5077250 - DNA, 25 bp, Homo sapien
ctggtaggttaatgcagtgtcctgc

SEQ ID NO: 5077251 - DNA, 25 bp, Homo sapien
gtagccctcgtagcatatacaggta

SEQ ID NO: 5077252 - DNA, 25 bp, Homo sapien
ctgttgttcactgaacctgtagccc

SEQ ID NO: 5077253 - DNA, 25 bp, Homo sapien
aatattagttctgtgtagcaagaac

SEQ ID NO: 5077254 - DNA, 25 bp, Homo sapien
ttctgtgtagcaagaacttagtttc

SEQ ID NO: 5077255 - DNA, 25 bp, Homo sapien
aaaatattagttctgtgtagcaaga

SEQ ID NO: 5077256 - DNA, 25 bp, Homo sapien
tagttctgtgtagcaagaacttagt

SEQ ID NO: 5077257 - DNA, 25 bp, Homo sapien
aatgcacaagaaacttccctcggtg

SEQ ID NO: 5077258 - DNA, 25 bp, Homo sapien
tatgcagttagtaccctcctcactg

SEQ ID NO: 5077259 - DNA, 25 bp, Homo sapien
tggacctgagtacactcatcaatat

SEQ ID NO: 5077260 - DNA, 25 bp, Homo sapien
ggccataaatcctgctgggcaaatg

SEQ ID NO: 5077261 - DNA, 25 bp, Homo sapien
tcacagtattcacaccggaaggccc

SEQ ID NO: 5077262 - DNA, 25 bp, Homo sapien
aaggcccccacagtattgacacagt

SEQ ID NO: 5077263 - DNA, 25 bp, Homo sapien
gagtcatgcggtacccgctgtcaca

SEQ ID NO: 5077264 - DNA, 25 bp, Homo sapien
ctcacaacggcctctctgagtcatg

SEQ ID NO: 5077265 - DNA, 25 bp, Homo sapien
caaagagcctgtgaatctaggaagc

SEQ ID NO: 5077266 - DNA, 25 bp, Homo sapien
gcttggataaactggtgtcacgcac

SEQ ID NO: 5077267 - DNA, 25 bp, Homo sapien
cagagcaacttggacacaaacgtga

SEQ ID NO: 5077268 - DNA, 25 bp, Homo sapien
gttcccagatgaatggtccggactc

SEQ ID NO: 5077269 - DNA, 25 bp, Homo sapien
aaagtcagtggctacaggtcaggca

SEQ ID NO: 5077270 - DNA, 25 bp, Homo sapien
tgcttgttctgtagcctcgtggccc

SEQ ID NO: 5077271 - DNA, 25 bp, Homo sapien
gatctattaggctctgctgacagcc

SEQ ID NO: 5077272 - DNA, 25 bp, Homo sapien
gagcagcgtggagacactttacacc

SEQ ID NO: 5077273 - DNA, 25 bp, Homo sapien
ggaatccttctgtgcagggaacgca

SEQ ID NO: 5077274 - DNA, 25 bp, Homo sapien
aacgcactggtaagatccaggagaa

SEQ ID NO: 5077275 - DNA, 25 bp, Homo sapien
tgcagggaacgcactggtaagatcc

SEQ ID NO: 5077276 - DNA, 25 bp, Homo sapien
attccagcctcggaatccttctgtg

SEQ ID NO: 5077277 - DNA, 25 bp, Homo sapien
cattaacggtttcaccaagttcatc

SEQ ID NO: 5077278 - DNA, 25 bp, Homo sapien
ccattaacggtttcaccaagttcat

SEQ ID NO: 5077279 - DNA, 25 bp, Homo sapien
gccattaacggtttcaccaagttca

SEQ ID NO: 5077280 - DNA, 25 bp, Homo sapien
tacagtgccgaatgacgaacgtgac

SEQ ID NO: 5077281 - DNA, 25 bp, Homo sapien
ggacttggttgaaatagccatttgg

SEQ ID NO: 5077282 - DNA, 25 bp, Homo sapien
tttggaactggccagaacccagagt

SEQ ID NO: 5077283 - DNA, 25 bp, Homo sapien
aactccaggctgaatgtcaggtcca

SEQ ID NO: 5077284 - DNA, 25 bp, Homo sapien
tgaaagtaactcggaaccaaatatg

SEQ ID NO: 5077285 - DNA, 25 bp, Homo sapien
gaaagtaactcggaaccaaatatgc

SEQ ID NO: 5077286 - DNA, 25 bp, Homo sapien
aaagtaactcggaaccaaatatgct

SEQ ID NO: 5077287 - DNA, 25 bp, Homo sapien
gcatgaacacatgtaggagccttca

SEQ ID NO: 5077288 - DNA, 25 bp, Homo sapien
gagtccgggtatagcctttgtggca

SEQ ID NO: 5077289 - DNA, 25 bp, Homo sapien
tacagtgcttgtggtccggagtccg

SEQ ID NO: 5077290 - DNA, 25 bp, Homo sapien
gccttcaaggttggaacaatcacca

SEQ ID NO: 5077291 - DNA, 25 bp, Homo sapien
taagcaaagtatcaggttatccctc

SEQ ID NO: 5077292 - DNA, 25 bp, Homo sapien
gatttataaataattcctggctgcc

SEQ ID NO: 5077293 - DNA, 25 bp, Homo sapien
agttgaaattgctactgaaatactg

SEQ ID NO: 5077294 - DNA, 25 bp, Homo sapien
cacacctagccgcaaagtttcattt

SEQ ID NO: 5077295 - DNA, 25 bp, Homo sapien
ctgcaaacacaacaacggcaatttt

SEQ ID NO: 5077296 - DNA, 25 bp, Homo sapien
tgcaaacacaacaacggcaattttt

SEQ ID NO: 5077297 - DNA, 25 bp, Homo sapien
cacactggtctttagctgccgacag

SEQ ID NO: 5077298 - DNA, 25 bp, Homo sapien
tttgcactgcccgtttacacataga

SEQ ID NO: 5077299 - DNA, 25 bp, Homo sapien
cagctggtacccctgtccacaggtg

SEQ ID NO: 5077300 - DNA, 25 bp, Homo sapien
ggagccctcggtatttttgcactgc

SEQ ID NO: 5077301 - DNA, 25 bp, Homo sapien
acattttcaatcagtctcaattgga

SEQ ID NO: 5077302 - DNA, 25 bp, Homo sapien
cagtctcaattggatcagtgtaaat

SEQ ID NO: 5077303 - DNA, 25 bp, Homo sapien
aatcagtctcaattggatcagtgta

SEQ ID NO: 5077304 - DNA, 25 bp, Homo sapien
tttcaatcagtctcaattggatcag

SEQ ID NO: 5077305 - DNA, 25 bp, Homo sapien
acagagatgacggtgctggcattca

SEQ ID NO: 5077306 - DNA, 25 bp, Homo sapien
gatgacggtgctggcattcatcaat

SEQ ID NO: 5077307 - DNA, 25 bp, Homo sapien
gcacagagatgacggtgctggcatt

SEQ ID NO: 5077308 - DNA, 25 bp, Homo sapien
catgagcacagagatgacggtgctg

SEQ ID NO: 5077309 - DNA, 25 bp, Homo sapien
ccacatagctggttcctcgggcatc

SEQ ID NO: 5077310 - DNA, 25 bp, Homo sapien
cttgggcatcaaaagtggaaagtgc

SEQ ID NO: 5077311 - DNA, 25 bp, Homo sapien
taagtgttatcatcccagcgaggcc

SEQ ID NO: 5077312 - DNA, 25 bp, Homo sapien
gaactgaatgctctacccataaatg

SEQ ID NO: 5077313 - DNA, 25 bp, Homo sapien
tattgtcatctagctgaaatccatc

SEQ ID NO: 5077314 - DNA, 25 bp, Homo sapien
cttgtcctccaagcattcattgata

SEQ ID NO: 5077315 - DNA, 25 bp, Homo sapien
acaagtacaatcataggaccctgca

SEQ ID NO: 5077316 - DNA, 25 bp, Homo sapien
gctgaaatccatccggacaagtaca

SEQ ID NO: 5077317 - DNA, 25 bp, Homo sapien
cacagagccctggatgttcacattc

SEQ ID NO: 5077318 - DNA, 25 bp, Homo sapien
cacgtacggccatctgcagagattg

SEQ ID NO: 5077319 - DNA, 25 bp, Homo sapien
tgtgtttaggcactccccttgcgga

SEQ ID NO: 5077320 - DNA, 25 bp, Homo sapien
ccctgctggcagacacaatggaaag

SEQ ID NO: 5077321 - DNA, 25 bp, Homo sapien
tgtcaacgaggcttcagctcctcaa

SEQ ID NO: 5077322 - DNA, 25 bp, Homo sapien
tagccctgcttagagccgggcaggt

SEQ ID NO: 5077323 - DNA, 25 bp, Homo sapien
gaagctgccatgctacacttaaaga

SEQ ID NO: 5077324 - DNA, 25 bp, Homo sapien
gaccagatgctgacacttctccaag

SEQ ID NO: 5077325 - DNA, 25 bp, Homo sapien
ggatggcacacaggtagacacttaa

SEQ ID NO: 5077326 - DNA, 25 bp, Homo sapien
gctgttcttcactgacaaggcccca

SEQ ID NO: 5077327 - DNA, 25 bp, Homo sapien
tggccaacaccagagggaaaagtgc

SEQ ID NO: 5077328 - DNA, 25 bp, Homo sapien
aagtgccaggtcctataagctgctg

SEQ ID NO: 5077329 - DNA, 25 bp, Homo sapien
gaaaacaatcccgatctcactggcc

SEQ ID NO: 5077330 - DNA, 25 bp, Homo sapien
catttaaatacggacctacaggagg

SEQ ID NO: 5077331 - DNA, 25 bp, Homo sapien
tacaggaggcaagaggtaacaatct

SEQ ID NO: 5077332 - DNA, 25 bp, Homo sapien
gagtagcatctgtattcccaatggc

SEQ ID NO: 5077333 - DNA, 25 bp, Homo sapien
taataccattcacaaccacatgcaa

SEQ ID NO: 5077334 - DNA, 25 bp, Homo sapien
tttgtaaaaattgatcacctgatta

SEQ ID NO: 5077335 - DNA, 25 bp, Homo sapien
cacagattagatgactaaatactgt

SEQ ID NO: 5077336 - DNA, 25 bp, Homo sapien
aaataagctgtgaaagactttatac

SEQ ID NO: 5077337 - DNA, 25 bp, Homo sapien
tattatcagccctagattactgaag

SEQ ID NO: 5077338 - DNA, 25 bp, Homo sapien
cattagcaaactagatatataaggg

SEQ ID NO: 5077339 - DNA, 25 bp, Homo sapien
cctagattactgaagcttagactgc

SEQ ID NO: 5077340 - DNA, 25 bp, Homo sapien
ctgggtccctgtattatagacctgt

SEQ ID NO: 5077341 - DNA, 25 bp, Homo sapien
atttacggtgggattgctgtagact

SEQ ID NO: 5077342 - DNA, 25 bp, Homo sapien
tatttacggtgggattgctgtagac

SEQ ID NO: 5077343 - DNA, 25 bp, Homo sapien
tcagatgagaggtgtatttacggtg

SEQ ID NO: 5077344 - DNA, 25 bp, Homo sapien
agatcagatgagaggtgtatttacg

SEQ ID NO: 5077345 - DNA, 25 bp, Homo sapien
gacaagcctcaatcctatattccag

SEQ ID NO: 5077346 - DNA, 25 bp, Homo sapien
tcatcctagttacccaaaaatgtgg

SEQ ID NO: 5077347 - DNA, 25 bp, Homo sapien
tgtcaaccactatgtagacaacagg

SEQ ID NO: 5077348 - DNA, 25 bp, Homo sapien
gatatcctgttggaaaccatcctaa

SEQ ID NO: 5077349 - DNA, 25 bp, Homo sapien
tgcagcacctcctttaactactcca

SEQ ID NO: 5077350 - DNA, 25 bp, Homo sapien
gcctcttggcccttcaggagtcagc

SEQ ID NO: 5077351 - DNA, 25 bp, Homo sapien
ctcctttaactactccacaagcaga

SEQ ID NO: 5077352 - DNA, 25 bp, Homo sapien
taactactccacaagcagatctcag

SEQ ID NO: 5077353 - DNA, 25 bp, Homo sapien
gtgaccagctcatcactaaatctca

SEQ ID NO: 5077354 - DNA, 25 bp, Homo sapien
tcttgttctgccttgagcttgtcct

SEQ ID NO: 5077355 - DNA, 25 bp, Homo sapien
cagtgacggaatattcttcttgttc

SEQ ID NO: 5077356 - DNA, 25 bp, Homo sapien
gaacactctcttcccacgttcagtg

SEQ ID NO: 5077357 - DNA, 25 bp, Homo sapien
tatgccactgagactcctatgagaa

SEQ ID NO: 5077358 - DNA, 25 bp, Homo sapien
ctttatgccactgagactcctatga

SEQ ID NO: 5077359 - DNA, 25 bp, Homo sapien
tttatgccactgagactcctatgag

SEQ ID NO: 5077360 - DNA, 25 bp, Homo sapien
acctggtactctgctctctctgccc

SEQ ID NO: 5077361 - DNA, 25 bp, Homo sapien
cacctggtactctgctctctctgcc

SEQ ID NO: 5077362 - DNA, 25 bp, Homo sapien
tgggcactgccacatctataccacc

SEQ ID NO: 5077363 - DNA, 25 bp, Homo sapien
gggcactgccacatctataccaccc

SEQ ID NO: 5077364 - DNA, 25 bp, Homo sapien
ttgggcactgccacatctataccac

SEQ ID NO: 5077365 - DNA, 25 bp, Homo sapien
ggcactgccacatctataccaccca

SEQ ID NO: 5077366 - DNA, 25 bp, Homo sapien
agaggcactcaacacatcctgatta

SEQ ID NO: 5077367 - DNA, 25 bp, Homo sapien
aacagaggcactcaacacatcctga

SEQ ID NO: 5077368 - DNA, 25 bp, Homo sapien
caaacaccagatattaatggataaa

SEQ ID NO: 5077369 - DNA, 25 bp, Homo sapien
acacaggctgacaaacaccagatat

SEQ ID NO: 5077370 - DNA, 25 bp, Homo sapien
aaggagccagctgtattgtcacaaa

SEQ ID NO: 5077371 - DNA, 25 bp, Homo sapien
tattgtcacaaaacccgtgactgtc

SEQ ID NO: 5077372 - DNA, 25 bp, Homo sapien
gactgtcacaaacagtgttgtttac

SEQ ID NO: 5077373 - DNA, 25 bp, Homo sapien
tgaaagccctgataacagaggcagc

SEQ ID NO: 5077374 - DNA, 25 bp, Homo sapien
gtggaggtccgggagcggcactgcc

SEQ ID NO: 5077375 - DNA, 25 bp, Homo sapien
ccagtcatggggctgtactcttggt

SEQ ID NO: 5077376 - DNA, 25 bp, Homo sapien
tggttttcatcagcacacacgcaca

SEQ ID NO: 5077377 - DNA, 25 bp, Homo sapien
accccactgagcagttcacattcat

SEQ ID NO: 5077378 - DNA, 25 bp, Homo sapien
ccatttgcttgtagggccgtttcca

SEQ ID NO: 5077379 - DNA, 25 bp, Homo sapien
aaatagtgcaatcatgtcccctggc

SEQ ID NO: 5077380 - DNA, 25 bp, Homo sapien
aactaatgtcggttccaagtggcct

SEQ ID NO: 5077381 - DNA, 25 bp, Homo sapien
ggttcttatctcacatagcatgggt

SEQ ID NO: 5077382 - DNA, 25 bp, Homo sapien
cagcttggactgtaagtcagcatta

SEQ ID NO: 5077383 - DNA, 25 bp, Homo sapien
ttaatagctgatgacaaatgcaaac

SEQ ID NO: 5077384 - DNA, 25 bp, Homo sapien
tcagtgagaatataaagatccctca

SEQ ID NO: 5077385 - DNA, 25 bp, Homo sapien
gatccctcatccagttgattctggc

SEQ ID NO: 5077386 - DNA, 25 bp, Homo sapien
tcccaaatacttgaccacgggtctg

SEQ ID NO: 5077387 - DNA, 25 bp, Homo sapien
aatacttgaccacgggtctgagccc

SEQ ID NO: 5077388 - DNA, 25 bp, Homo sapien
cttaggtagttattggaatcaacca

SEQ ID NO: 5077389 - DNA, 25 bp, Homo sapien
ggtctgagcccacacataatattta

SEQ ID NO: 5077390 - DNA, 25 bp, Homo sapien
cagcattcttgtttcgtgacattgg

SEQ ID NO: 5077391 - DNA, 25 bp, Homo sapien
tatcacagagactggcgtcattgag

SEQ ID NO: 5077392 - DNA, 25 bp, Homo sapien
ggaagatttcgcagttatctcccca

SEQ ID NO: 5077393 - DNA, 25 bp, Homo sapien
cattgggggccaacacattatcaca

SEQ ID NO: 5077394 - DNA, 25 bp, Homo sapien
agatgattctccagcaggcacaaaa

SEQ ID NO: 5077395 - DNA, 25 bp, Homo sapien
cctttccctttgggacacatttcag

SEQ ID NO: 5077396 - DNA, 25 bp, Homo sapien
ttgggacacatttcagtgaactcag

SEQ ID NO: 5077397 - DNA, 25 bp, Homo sapien
agcaggcacaaaacctttccctttg

SEQ ID NO: 5077398 - DNA, 25 bp, Homo sapien
tcttgtccaaaaagtaggcattcat

SEQ ID NO: 5077399 - DNA, 25 bp, Homo sapien
gtttcacaggatcatagtacgtccc

SEQ ID NO: 5077400 - DNA, 25 bp, Homo sapien
tacagtagcattcatacccaggccg

SEQ ID NO: 5077401 - DNA, 25 bp, Homo sapien
tacccaggccgagtgttcaaacaga

SEQ ID NO: 5077402 - DNA, 25 bp, Homo sapien
tttttctgacgcatccaggaccatg

SEQ ID NO: 5077403 - DNA, 25 bp, Homo sapien
actggccatcaatacaactactggg

SEQ ID NO: 5077404 - DNA, 25 bp, Homo sapien
tgactcagccggtcgtatacatctt

SEQ ID NO: 5077405 - DNA, 25 bp, Homo sapien
agagccctctgtattaacacactgg

SEQ ID NO: 5077406 - DNA, 25 bp, Homo sapien
gcacaaatcttggtagacatcagtt

SEQ ID NO: 5077407 - DNA, 25 bp, Homo sapien
tgtacgttgtctgcttgcccacaag

SEQ ID NO: 5077408 - DNA, 25 bp, Homo sapien
acaagaggccggctacacacgtatt

SEQ ID NO: 5077409 - DNA, 25 bp, Homo sapien
tcactcagatgttcccagcacaaat

SEQ ID NO: 5077410 - DNA, 25 bp, Homo sapien
ttaagagtgggcaggatcagcgggt

SEQ ID NO: 5077411 - DNA, 25 bp, Homo sapien
taagagtgggcaggatcagcgggta

SEQ ID NO: 5077412 - DNA, 25 bp, Homo sapien
gggatcccgttagcacggaagcaag

SEQ ID NO: 5077413 - DNA, 25 bp, Homo sapien
ccgttagcacggaagcaagaaggtg

SEQ ID NO: 5077414 - DNA, 25 bp, Homo sapien
ctgggatcccgttagcacggaagca

SEQ ID NO: 5077415 - DNA, 25 bp, Homo sapien
gatcccgttagcacggaagcaagaa

SEQ ID NO: 5077416 - DNA, 25 bp, Homo sapien
tgttccaggacactcctccagagct

SEQ ID NO: 5077417 - DNA, 25 bp, Homo sapien
tgtcttcagcagtttagcaagaaat

SEQ ID NO: 5077418 - DNA, 25 bp, Homo sapien
gtttgggaatggcagcttgttccag

SEQ ID NO: 5077419 - DNA, 25 bp, Homo sapien
tagcaagaaatgaaggagtaagttt

SEQ ID NO: 5077420 - DNA, 25 bp, Homo sapien
tgctacagtgcagtctagcaaggtc

SEQ ID NO: 5077421 - DNA, 25 bp, Homo sapien
agtgcagtctagcaaggtccactgg

SEQ ID NO: 5077422 - DNA, 25 bp, Homo sapien
cctggtcggcgttccaaatacttgc

SEQ ID NO: 5077423 - DNA, 25 bp, Homo sapien
aaggtccactggtcctccctggtcg

SEQ ID NO: 5077424 - DNA, 25 bp, Homo sapien
gggccatagaccaaccacgttctcc

SEQ ID NO: 5077425 - DNA, 25 bp, Homo sapien
catagaccaaccacgttctccccac

SEQ ID NO: 5077426 - DNA, 25 bp, Homo sapien
cccactcccaaccttcacctaatgt

SEQ ID NO: 5077427 - DNA, 25 bp, Homo sapien
ccttcacctaatgttaccctcctca

SEQ ID NO: 5077428 - DNA, 25 bp, Homo sapien
gaggcaatcccatttgagaccccat

SEQ ID NO: 5077429 - DNA, 25 bp, Homo sapien
gaacccattacagcttggaggtgct

SEQ ID NO: 5077430 - DNA, 25 bp, Homo sapien
gggacgccgtcgctaagtagtctaa

SEQ ID NO: 5077431 - DNA, 25 bp, Homo sapien
tacataagggatgctatgggacgcc

SEQ ID NO: 5077432 - DNA, 25 bp, Homo sapien
taacagtgggtagaccacatcccag

SEQ ID NO: 5077433 - DNA, 25 bp, Homo sapien
tcccagagcagtaaagggctgacaa

SEQ ID NO: 5077434 - DNA, 25 bp, Homo sapien
gaggtgctttttcgctctctagaga

SEQ ID NO: 5077435 - DNA, 25 bp, Homo sapien
gaattttatgcatccacgtacaacg

SEQ ID NO: 5077436 - DNA, 25 bp, Homo sapien
agagcaacgggaatctgccagcaca

SEQ ID NO: 5077437 - DNA, 25 bp, Homo sapien
tgccagcacacccttccacgtgtgt

SEQ ID NO: 5077438 - DNA, 25 bp, Homo sapien
cagctcagagcaacgggaatctgcc

SEQ ID NO: 5077439 - DNA, 25 bp, Homo sapien
tcagagcaacgggaatctgccagca

SEQ ID NO: 5077440 - DNA, 25 bp, Homo sapien
gtccatatggctgccggcgtcccgt

SEQ ID NO: 5077441 - DNA, 25 bp, Homo sapien
tgaagtcaaccaaggcgtcccgtcc

SEQ ID NO: 5077442 - DNA, 25 bp, Homo sapien
tcggcttctggagtatactgttcac

SEQ ID NO: 5077443 - DNA, 25 bp, Homo sapien
atgttacacagctgagcatagtcat

SEQ ID NO: 5077444 - DNA, 25 bp, Homo sapien
cattctaagattaggtgccctgagg

SEQ ID NO: 5077445 - DNA, 25 bp, Homo sapien
tctcacgtatgaagtaaaagcactg

SEQ ID NO: 5077446 - DNA, 25 bp, Homo sapien
ttagagcatgcccttcagagaagaa

SEQ ID NO: 5077447 - DNA, 25 bp, Homo sapien
tcaacaatgactaaagtgcctgagg

SEQ ID NO: 5077448 - DNA, 25 bp, Homo sapien
ttttcacatccattgaggatgccgc

SEQ ID NO: 5077449 - DNA, 25 bp, Homo sapien
acaggtcatcttggccgtatccaag

SEQ ID NO: 5077450 - DNA, 25 bp, Homo sapien
tcaaagcaatcgcaggtgtaacctt

SEQ ID NO: 5077451 - DNA, 25 bp, Homo sapien
tatccaagtgatacccatcaaagca

SEQ ID NO: 5077452 - DNA, 25 bp, Homo sapien
cacaaacacttgtaggaaccatcgg

SEQ ID NO: 5077453 - DNA, 25 bp, Homo sapien
gaaccatcggtgttaatgcacttgg

SEQ ID NO: 5077454 - DNA, 25 bp, Homo sapien
gcattcttgcagagagacatccggt

SEQ ID NO: 5077455 - DNA, 25 bp, Homo sapien
ttcaaggcggtattcaacggagtgc

SEQ ID NO: 5077456 - DNA, 25 bp, Homo sapien
tttacacagtgcagagtatatgggc

SEQ ID NO: 5077457 - DNA, 25 bp, Homo sapien
tcagaggacttgcaattccatgctg

SEQ ID NO: 5077458 - DNA, 25 bp, Homo sapien
ggtaggtgcaatgtctcaagtataa

SEQ ID NO: 5077459 - DNA, 25 bp, Homo sapien
gggctcatcctaaatcctctcattg

SEQ ID NO: 5077460 - DNA, 25 bp, Homo sapien
caaaacaacataataatacaacctt

SEQ ID NO: 5077461 - DNA, 25 bp, Homo sapien
aaacaacataataatacaaccttct

SEQ ID NO: 5077462 - DNA, 25 bp, Homo sapien
ttaatcaagcaatagtaaaaaaaca

SEQ ID NO: 5077463 - DNA, 25 bp, Homo sapien
acaaaacaacataataatacaacct

SEQ ID NO: 5077464 - DNA, 25 bp, Homo sapien
gccgggaattgcataaccctgtgta

SEQ ID NO: 5077465 - DNA, 25 bp, Homo sapien
tataaagtacttttctccaaatgtg

SEQ ID NO: 5077466 - DNA, 25 bp, Homo sapien
gcagcttggctaagaacggacatta

SEQ ID NO: 5077467 - DNA, 25 bp, Homo sapien
ggaaagggatccaattaacacctgc

SEQ ID NO: 5077468 - DNA, 25 bp, Homo sapien
actacattaacagaagaccactgga

SEQ ID NO: 5077469 - DNA, 25 bp, Homo sapien
gattaacttgtaaaagacactacat

SEQ ID NO: 5077470 - DNA, 25 bp, Homo sapien
tacacatgtactcattgacaattac

SEQ ID NO: 5077471 - DNA, 25 bp, Homo sapien
tacattaacagaagaccactggaaa

SEQ ID NO: 5077472 - DNA, 25 bp, Homo sapien
aaattcccacatatgaatgttaggg

SEQ ID NO: 5077473 - DNA, 25 bp, Homo sapien
tagggccattccaatgacctcatta

SEQ ID NO: 5077474 - DNA, 25 bp, Homo sapien
gatccgatctccaaatctagtcact

SEQ ID NO: 5077475 - DNA, 25 bp, Homo sapien
cactttctgaagtatcagaggttaa

SEQ ID NO: 5077476 - DNA, 25 bp, Homo sapien
tccagcagctgtatgtacgtcttag

SEQ ID NO: 5077477 - DNA, 25 bp, Homo sapien
catacgtcattagcgagttgcaaat

SEQ ID NO: 5077478 - DNA, 25 bp, Homo sapien
tatacagatggcagataagcaatga

SEQ ID NO: 5077479 - DNA, 25 bp, Homo sapien
aagagacagtacttcaccaaggaag

SEQ ID NO: 5077480 - DNA, 25 bp, Homo sapien
tctgcagctgcttgtaaggcagatc

SEQ ID NO: 5077481 - DNA, 25 bp, Homo sapien
agatctgcagctgcttgtaaggcag

SEQ ID NO: 5077482 - DNA, 25 bp, Homo sapien
aggattcgaggtaaggaaaagatct

SEQ ID NO: 5077483 - DNA, 25 bp, Homo sapien
tctctgaagaaaggattcgaggtaa

SEQ ID NO: 5077484 - DNA, 25 bp, Homo sapien
tttgaggtcctttcagtgctaagct

SEQ ID NO: 5077485 - DNA, 25 bp, Homo sapien
taaccagtgtgtcactgttgacatc

SEQ ID NO: 5077486 - DNA, 25 bp, Homo sapien
caaattctggctgtattcatacaaa

SEQ ID NO: 5077487 - DNA, 25 bp, Homo sapien
aatgtcctcatgctctatctttgag

SEQ ID NO: 5077488 - DNA, 25 bp, Homo sapien
tgaaatttgcaagctgtttatgcct

SEQ ID NO: 5077489 - DNA, 25 bp, Homo sapien
tagcaagtttctcttcaacgtgcct

SEQ ID NO: 5077490 - DNA, 25 bp, Homo sapien
tgcccaaatctagttcaaaagtgag

SEQ ID NO: 5077491 - DNA, 25 bp, Homo sapien
gctgctaagctttgagctcaatgaa

SEQ ID NO: 5077492 - DNA, 25 bp, Homo sapien
cgcaggttcaggtagattgggtgta

SEQ ID NO: 5077493 - DNA, 25 bp, Homo sapien
gtagattgggtgtagtttccatggc

SEQ ID NO: 5077494 - DNA, 25 bp, Homo sapien
gggtgccgcaggttcaggtagattg

SEQ ID NO: 5077495 - DNA, 25 bp, Homo sapien
tcatcagaggggtgccgcaggttca

SEQ ID NO: 5077496 - DNA, 25 bp, Homo sapien
aagtgggcaagcagttcctagctgc

SEQ ID NO: 5077497 - DNA, 25 bp, Homo sapien
aaaaaagtgggcaagcagttcctag

SEQ ID NO: 5077498 - DNA, 25 bp, Homo sapien
tggcccagatggtctgtatcctttc

SEQ ID NO: 5077499 - DNA, 25 bp, Homo sapien
gcccagatggtctgtatcctttctt

SEQ ID NO: 5077500 - DNA, 25 bp, Homo sapien
ggtaactgaagagcccgctcttcca

SEQ ID NO: 5077501 - DNA, 25 bp, Homo sapien
tggccttggtaactgaagagcccgc

SEQ ID NO: 5077502 - DNA, 25 bp, Homo sapien
ccttggtaactgaagagcccgctct

SEQ ID NO: 5077503 - DNA, 25 bp, Homo sapien
actgtggccttggtaactgaagagc

SEQ ID NO: 5077504 - DNA, 25 bp, Homo sapien
cctgggaatccatagcagagtaaga

SEQ ID NO: 5077505 - DNA, 25 bp, Homo sapien
gataaaatattcttacggcttcctg

SEQ ID NO: 5077506 - DNA, 25 bp, Homo sapien
tcttggttataacctcgtgaggcct

SEQ ID NO: 5077507 - DNA, 25 bp, Homo sapien
gctaactgcaagtcctgttttccag

SEQ ID NO: 5077508 - DNA, 25 bp, Homo sapien
aattatcaccaagttgacaacgcgc

SEQ ID NO: 5077509 - DNA, 25 bp, Homo sapien
tgtgctgctcgcaaacgtggcaaac

SEQ ID NO: 5077510 - DNA, 25 bp, Homo sapien
tcagccggcgagtgtgaatgcaaac

SEQ ID NO: 5077511 - DNA, 25 bp, Homo sapien
tgttgaattgcatcgagcagctgag

SEQ ID NO: 5077512 - DNA, 25 bp, Homo sapien
tgtacctcctgataaataccgcccg

SEQ ID NO: 5077513 - DNA, 25 bp, Homo sapien
catgcagagcgggatattccacaat

SEQ ID NO: 5077514 - DNA, 25 bp, Homo sapien
caaaagccaaacagctgataagtca

SEQ ID NO: 5077515 - DNA, 25 bp, Homo sapien
gggctctgagtcttaaccagtcaca

SEQ ID NO: 5077516 - DNA, 25 bp, Homo sapien
aagatagcataactaggccaggcgc

SEQ ID NO: 5077517 - DNA, 25 bp, Homo sapien
tagaatgcactatacctccacagga

SEQ ID NO: 5077518 - DNA, 25 bp, Homo sapien
gaagcgtccccattattctagcaag

SEQ ID NO: 5077519 - DNA, 25 bp, Homo sapien
taagactctctcagttgtgggcaga

SEQ ID NO: 5077520 - DNA, 25 bp, Homo sapien
agagaaatctccagcaccaccattc

SEQ ID NO: 5077521 - DNA, 25 bp, Homo sapien
ctgggtgctgtccttaccataaaaa

SEQ ID NO: 5077522 - DNA, 25 bp, Homo sapien
tctctaaagcatcgtgtcaactcat

SEQ ID NO: 5077523 - DNA, 25 bp, Homo sapien
gaacggcaagcattccatgcataag

SEQ ID NO: 5077524 - DNA, 25 bp, Homo sapien
tttgggtgttgccaaaggcttagct

SEQ ID NO: 5077525 - DNA, 25 bp, Homo sapien
tcaccatctgagatagcataatgat

SEQ ID NO: 5077526 - DNA, 25 bp, Homo sapien
ttgccaaaggcttagctctgcagta

SEQ ID NO: 5077527 - DNA, 25 bp, Homo sapien
ccatctgagatagcataatgatttt

SEQ ID NO: 5077528 - DNA, 25 bp, Homo sapien
aatcctttccctatataggttaatg

SEQ ID NO: 5077529 - DNA, 25 bp, Homo sapien
tgctgaaccaggctaactgcttttc

SEQ ID NO: 5077530 - DNA, 25 bp, Homo sapien
gactacaggtggaaatctcaaactt

SEQ ID NO: 5077531 - DNA, 25 bp, Homo sapien
gatttgtttcctgtagtctctgtat

SEQ ID NO: 5077532 - DNA, 25 bp, Homo sapien
cttggccagatgccagaaagtccat

SEQ ID NO: 5077533 - DNA, 25 bp, Homo sapien
gcaccttggccagatgccagaaagt

SEQ ID NO: 5077534 - DNA, 25 bp, Homo sapien
accttggccagatgccagaaagtcc

SEQ ID NO: 5077535 - DNA, 25 bp, Homo sapien
cagcaccttggccagatgccagaaa

SEQ ID NO: 5077536 - DNA, 25 bp, Homo sapien
aagcaggtctgtaataaaagtttca

SEQ ID NO: 5077537 - DNA, 25 bp, Homo sapien
gggctcgaagcaggtctgtaataaa

SEQ ID NO: 5077538 - DNA, 25 bp, Homo sapien
gtttcataacctttactcaaacaca

SEQ ID NO: 5077539 - DNA, 25 bp, Homo sapien
caaaggtcaattgccccagaggatt

SEQ ID NO: 5077540 - DNA, 25 bp, Homo sapien
gatagcagggatttcaataaaaagc

SEQ ID NO: 5077541 - DNA, 25 bp, Homo sapien
ataaaaagctctaatccctggctgt

SEQ ID NO: 5077542 - DNA, 25 bp, Homo sapien
tgttgggtgccgggcatctcaagca

SEQ ID NO: 5077543 - DNA, 25 bp, Homo sapien
tctcaagcaggtctggatgtctgtg

SEQ ID NO: 5077544 - DNA, 25 bp, Homo sapien
actaaactctgaccctaaatcacta

SEQ ID NO: 5077545 - DNA, 25 bp, Homo sapien
tacacatagtataaactactgtttc

SEQ ID NO: 5077546 - DNA, 25 bp, Homo sapien
cacatagtataaactactgtttcat

SEQ ID NO: 5077547 - DNA, 25 bp, Homo sapien
catgatcactaaactctgaccctaa

SEQ ID NO: 5077548 - DNA, 25 bp, Homo sapien
agaagcagtctgtagaactggttta

SEQ ID NO: 5077549 - DNA, 25 bp, Homo sapien
agcagtctgtagaactggtttattc

SEQ ID NO: 5077550 - DNA, 25 bp, Homo sapien
gaagcagtctgtagaactggtttat

SEQ ID NO: 5077551 - DNA, 25 bp, Homo sapien
tcaacctgaatgataagtattttgg

SEQ ID NO: 5077552 - DNA, 25 bp, Homo sapien
aatctgaaagaattttaagggcagc

SEQ ID NO: 5077553 - DNA, 25 bp, Homo sapien
aaagaattttaagggcagctagcat

SEQ ID NO: 5077554 - DNA, 25 bp, Homo sapien
tgaaagaattttaagggcagctagc

SEQ ID NO: 5077555 - DNA, 25 bp, Homo sapien
tctgaaagaattttaagggcagcta

SEQ ID NO: 5077556 - DNA, 25 bp, Homo sapien
gaaggtgttcacatccccataaggg

SEQ ID NO: 5077557 - DNA, 25 bp, Homo sapien
aaagaaactggcacacgacgggcca

SEQ ID NO: 5077558 - DNA, 25 bp, Homo sapien
ttttagcctgttactcacggaagag

SEQ ID NO: 5077559 - DNA, 25 bp, Homo sapien
tgggccgggctatcaggttacaatc

SEQ ID NO: 5077560 - DNA, 25 bp, Homo sapien
atagttttgcctgctaatctagtgt

SEQ ID NO: 5077561 - DNA, 25 bp, Homo sapien
gcatggatatcacaaaccatcatag

SEQ ID NO: 5077562 - DNA, 25 bp, Homo sapien
tattaaggcctagagtcaggactcc

SEQ ID NO: 5077563 - DNA, 25 bp, Homo sapien
tattacttctacaagcatggatatc

SEQ ID NO: 5077564 - DNA, 25 bp, Homo sapien
attcaacaactgtaacagattctac

SEQ ID NO: 5077565 - DNA, 25 bp, Homo sapien
tttataaacatcctcaatgattaca

SEQ ID NO: 5077566 - DNA, 25 bp, Homo sapien
tcctcatgttcttaagtgataagat

SEQ ID NO: 5077567 - DNA, 25 bp, Homo sapien
cagattctacttgcctgagagtaag

SEQ ID NO: 5077568 - DNA, 25 bp, Homo sapien
ccataatcatgcaagtcagcgatgt

SEQ ID NO: 5077569 - DNA, 25 bp, Homo sapien
tcagcatcagatagaccatctccat

SEQ ID NO: 5077570 - DNA, 25 bp, Homo sapien
gacctgtccttagttgtacttcaag

SEQ ID NO: 5077571 - DNA, 25 bp, Homo sapien
caagtcagcgatgttagtgcctagt

SEQ ID NO: 5077572 - DNA, 25 bp, Homo sapien
aagtgcacagcagttcatctaatgt

SEQ ID NO: 5077573 - DNA, 25 bp, Homo sapien
atgcaagtgcacagcagttcatcta

SEQ ID NO: 5077574 - DNA, 25 bp, Homo sapien
gcacagcagttcatctaatgttgct

SEQ ID NO: 5077575 - DNA, 25 bp, Homo sapien
tgcaagtgcacagcagttcatctaa

SEQ ID NO: 5077576 - DNA, 25 bp, Homo sapien
aaataactattatccagctctccat

SEQ ID NO: 5077577 - DNA, 25 bp, Homo sapien
tcagtagaactattcttggcaaata

SEQ ID NO: 5077578 - DNA, 25 bp, Homo sapien
atcagtagaactattcttggcaaat

SEQ ID NO: 5077579 - DNA, 25 bp, Homo sapien
ctattatccagctctccattgtcat

SEQ ID NO: 5077580 - DNA, 25 bp, Homo sapien
tctgccaattcagtggaagataaat

SEQ ID NO: 5077581 - DNA, 25 bp, Homo sapien
tttctgccaattcagtggaagataa

SEQ ID NO: 5077582 - DNA, 25 bp, Homo sapien
ttctgccaattcagtggaagataaa

SEQ ID NO: 5077583 - DNA, 25 bp, Homo sapien
aattacacagtagttgaaaagatat

SEQ ID NO: 5077584 - DNA, 25 bp, Homo sapien
aaattacacagtagttgaaaagata

SEQ ID NO: 5077585 - DNA, 25 bp, Homo sapien
ttcatcttaatttactggctttgga

SEQ ID NO: 5077586 - DNA, 25 bp, Homo sapien
catcttaatttactggctttggata

SEQ ID NO: 5077587 - DNA, 25 bp, Homo sapien
attcatcttaatttactggctttgg

SEQ ID NO: 5077588 - DNA, 25 bp, Homo sapien
tcttaatttactggctttggataga

SEQ ID NO: 5077589 - DNA, 25 bp, Homo sapien
ggcaggccctaataacacttgatgg

SEQ ID NO: 5077590 - DNA, 25 bp, Homo sapien
tcatatgacccttggaccactggga

SEQ ID NO: 5077591 - DNA, 25 bp, Homo sapien
gaagcttgaactgaacaggtggaca

SEQ ID NO: 5077592 - DNA, 25 bp, Homo sapien
tagaaatgtcgattcacaggcagtc

SEQ ID NO: 5077593 - DNA, 25 bp, Homo sapien
cacacttattaaccaataactgcca

SEQ ID NO: 5077594 - DNA, 25 bp, Homo sapien
ctccacacttattaaccaataactg

SEQ ID NO: 5077595 - DNA, 25 bp, Homo sapien
acacttattaaccaataactgccaa

SEQ ID NO: 5077596 - DNA, 25 bp, Homo sapien
tccacacttattaaccaataactgc

SEQ ID NO: 5077597 - DNA, 25 bp, Homo sapien
gctgtgccctcaatgtataccaatt

SEQ ID NO: 5077598 - DNA, 25 bp, Homo sapien
tgcagctgtgccctcaatgtatacc

SEQ ID NO: 5077599 - DNA, 25 bp, Homo sapien
ctgtgccctcaatgtataccaattc

SEQ ID NO: 5077600 - DNA, 25 bp, Homo sapien
cagctgtgccctcaatgtataccaa

SEQ ID NO: 5077601 - DNA, 25 bp, Homo sapien
tctttaatcgaaattcattgcagct

SEQ ID NO: 5077602 - DNA, 25 bp, Homo sapien
gcagatctttaatcgaaattcattg

SEQ ID NO: 5077603 - DNA, 25 bp, Homo sapien
gtagcagatctttaatcgaaattca

SEQ ID NO: 5077604 - DNA, 25 bp, Homo sapien
catgaagtagcagatctttaatcga

SEQ ID NO: 5077605 - DNA, 25 bp, Homo sapien
cctagttgactagctacttcccgaa

SEQ ID NO: 5077606 - DNA, 25 bp, Homo sapien
tctgcaggaaacttcagaatccagt

SEQ ID NO: 5077607 - DNA, 25 bp, Homo sapien
cctcagtcatacgaatcaaaccaag

SEQ ID NO: 5077608 - DNA, 25 bp, Homo sapien
ctggatatgtcgatgaggctgacgt

SEQ ID NO: 5077609 - DNA, 25 bp, Homo sapien
cagcagacaggcttttcccttcttg

SEQ ID NO: 5077610 - DNA, 25 bp, Homo sapien
tgagatccttctaaaagatttatgc

SEQ ID NO: 5077611 - DNA, 25 bp, Homo sapien
tatgctccagaaaagtgaggtgctc

SEQ ID NO: 5077612 - DNA, 25 bp, Homo sapien
gtcaaacagcagacaggcttttccc

SEQ ID NO: 5077613 - DNA, 25 bp, Homo sapien
gctcctgagccataaaataaagaca

SEQ ID NO: 5077614 - DNA, 25 bp, Homo sapien
gctgccaacacttcagagtatgaaa

SEQ ID NO: 5077615 - DNA, 25 bp, Homo sapien
gctttaatcctatgaaaggagacat

SEQ ID NO: 5077616 - DNA, 25 bp, Homo sapien
tgaaaatagcgacagaaatatagct

SEQ ID NO: 5077617 - DNA, 25 bp, Homo sapien
aataaagcaatcgatctttccaagg

SEQ ID NO: 5077618 - DNA, 25 bp, Homo sapien
aggttggattattctccaggcagcc

SEQ ID NO: 5077619 - DNA, 25 bp, Homo sapien
tcaactggacccacttagagattcc

SEQ ID NO: 5077620 - DNA, 25 bp, Homo sapien
gggttggtttgctaagaaccatcaa

SEQ ID NO: 5077621 - DNA, 25 bp, Homo sapien
gaatgggtctctttgaggcgtgaaa

SEQ ID NO: 5077622 - DNA, 25 bp, Homo sapien
tctctttgaggcgtgaaatggaact

SEQ ID NO: 5077623 - DNA, 25 bp, Homo sapien
ctttgaggcgtgaaatggaactatg

SEQ ID NO: 5077624 - DNA, 25 bp, Homo sapien
aaagatgagaatgggtctctttgag

SEQ ID NO: 5077625 - DNA, 25 bp, Homo sapien
cagtaattgccgttggaggagacca

SEQ ID NO: 5077626 - DNA, 25 bp, Homo sapien
cattctgcagggagactagttcact

SEQ ID NO: 5077627 - DNA, 25 bp, Homo sapien
gattttgaagccatcgcagtcggca

SEQ ID NO: 5077628 - DNA, 25 bp, Homo sapien
taacggagagctggtgcattttcac

SEQ ID NO: 5077629 - DNA, 25 bp, Homo sapien
aactcctggttacgtgaattgggat

SEQ ID NO: 5077630 - DNA, 25 bp, Homo sapien
tacgtgaattgggatgtaaggcaaa

SEQ ID NO: 5077631 - DNA, 25 bp, Homo sapien
gaattgggatgtaaggcaaatgtcc

SEQ ID NO: 5077632 - DNA, 25 bp, Homo sapien
cctggttacgtgaattgggatgtaa

SEQ ID NO: 5077633 - DNA, 25 bp, Homo sapien
ccatgaacataaccagtgcgggctc

SEQ ID NO: 5077634 - DNA, 25 bp, Homo sapien
caagtcctgtgatgactggcaccag

SEQ ID NO: 5077635 - DNA, 25 bp, Homo sapien
taaaaagacggcacgcagagatgga

SEQ ID NO: 5077636 - DNA, 25 bp, Homo sapien
caaataaaatacatcagccgtgggc

SEQ ID NO: 5077637 - DNA, 25 bp, Homo sapien
cgatttagaatttctaggctccagc

SEQ ID NO: 5077638 - DNA, 25 bp, Homo sapien
agaatttctaggctccagcaccagt

SEQ ID NO: 5077639 - DNA, 25 bp, Homo sapien
tatcatcttcagtgtgatagaggtc

SEQ ID NO: 5077640 - DNA, 25 bp, Homo sapien
tcagtgtgatagaggtccagggaaa

SEQ ID NO: 5077641 - DNA, 25 bp, Homo sapien
tcagctgactcaggctcaagtgcat

SEQ ID NO: 5077642 - DNA, 25 bp, Homo sapien
tagtcactgccaatatgttacagag

SEQ ID NO: 5077643 - DNA, 25 bp, Homo sapien
gaggacggctctcactgccattctg

SEQ ID NO: 5077644 - DNA, 25 bp, Homo sapien
cattctgtctctttcggtctgaggg

SEQ ID NO: 5077645 - DNA, 25 bp, Homo sapien
gtggttattcacaggcaccatctca

SEQ ID NO: 5077646 - DNA, 25 bp, Homo sapien
cagtggttattcacaggcaccatct

SEQ ID NO: 5077647 - DNA, 25 bp, Homo sapien
ttattcacaggcaccatctcactac

SEQ ID NO: 5077648 - DNA, 25 bp, Homo sapien
gttattcacaggcaccatctcacta

SEQ ID NO: 5077649 - DNA, 25 bp, Homo sapien
cacaggcttgttgggcgtcgtaggg

SEQ ID NO: 5077650 - DNA, 25 bp, Homo sapien
accgtggggtctggctttggcatca

SEQ ID NO: 5077651 - DNA, 25 bp, Homo sapien
taatgcccactccaggggtaccaca

SEQ ID NO: 5077652 - DNA, 25 bp, Homo sapien
tccttatgtgcttgttgatgaccgt

SEQ ID NO: 5077653 - DNA, 25 bp, Homo sapien
ggtcttctagtgccctctctttatt

SEQ ID NO: 5077654 - DNA, 25 bp, Homo sapien
cctctctttattctccctcaaccac

SEQ ID NO: 5077655 - DNA, 25 bp, Homo sapien
catcagattcctggacaatcgcaga

SEQ ID NO: 5077656 - DNA, 25 bp, Homo sapien
ttttcaggggttccatcagattcct

SEQ ID NO: 5077657 - DNA, 25 bp, Homo sapien
ggttccatcagattcctggacaatc

SEQ ID NO: 5077658 - DNA, 25 bp, Homo sapien
gattcctggacaatcgcagaacatt

SEQ ID NO: 5077659 - DNA, 25 bp, Homo sapien
ctaagtgcctgctaaattgttccta

SEQ ID NO: 5077660 - DNA, 25 bp, Homo sapien
taagtgcctgctaaattgttcctac

SEQ ID NO: 5077661 - DNA, 25 bp, Homo sapien
gactcaattctgttgcaccagcaga

SEQ ID NO: 5077662 - DNA, 25 bp, Homo sapien
gacaatgacagaggtggcaaatgcc

SEQ ID NO: 5077663 - DNA, 25 bp, Homo sapien
taatctcagtaacatcgggctgctg

SEQ ID NO: 5077664 - DNA, 25 bp, Homo sapien
tcctgtacccgagatgtttccgtgt

SEQ ID NO: 5077665 - DNA, 25 bp, Homo sapien
ttcaaagtcctcttgggaaatgtac

SEQ ID NO: 5077666 - DNA, 25 bp, Homo sapien
gaagggaaaattggcagctatactt

SEQ ID NO: 5077667 - DNA, 25 bp, Homo sapien
cgtgatcatagtttctaaatacaga

SEQ ID NO: 5077668 - DNA, 25 bp, Homo sapien
ggaaatgtacccatcatggtcgtga

SEQ ID NO: 5077669 - DNA, 25 bp, Homo sapien
taggaggcgagtccctgaaggctca

SEQ ID NO: 5077670 - DNA, 25 bp, Homo sapien
cagggccctctgactcctttcaatg

SEQ ID NO: 5077671 - DNA, 25 bp, Homo sapien
ctgcatgtaggaggcgagtccctga

SEQ ID NO: 5077672 - DNA, 25 bp, Homo sapien
agggccctctgactcctttcaatgc

SEQ ID NO: 5077673 - DNA, 25 bp, Homo sapien
aaattatggataaatcctggtccca

SEQ ID NO: 5077674 - DNA, 25 bp, Homo sapien
cagaaggttggcttgagataggtca

SEQ ID NO: 5077675 - DNA, 25 bp, Homo sapien
cagtgtagttgggatttagctctca

SEQ ID NO: 5077676 - DNA, 25 bp, Homo sapien
cccgcacagtgttcgcagaaggttg

SEQ ID NO: 5077677 - DNA, 25 bp, Homo sapien
tgacactagctgctcttagcgccca

SEQ ID NO: 5077678 - DNA, 25 bp, Homo sapien
atgacactagctgctcttagcgccc

SEQ ID NO: 5077679 - DNA, 25 bp, Homo sapien
actttggcctgatgcgctctcagca

SEQ ID NO: 5077680 - DNA, 25 bp, Homo sapien
ggcctgatgcgctctcagcaaaatg

SEQ ID NO: 5077681 - DNA, 25 bp, Homo sapien
atccttgcttgattatgccccagag

SEQ ID NO: 5077682 - DNA, 25 bp, Homo sapien
accactgctcaaggagggcgcccgg

SEQ ID NO: 5077683 - DNA, 25 bp, Homo sapien
tgaccactgctcaaggagggcgccc

SEQ ID NO: 5077684 - DNA, 25 bp, Homo sapien
aggaggtctttgcactgtttgtgac

SEQ ID NO: 5077685 - DNA, 25 bp, Homo sapien
aaccaggaggtctttgcactgtttg

SEQ ID NO: 5077686 - DNA, 25 bp, Homo sapien
tgctgctttgtcatggaacttggat

SEQ ID NO: 5077687 - DNA, 25 bp, Homo sapien
gaagagcctgtaaccagtgtgatgg

SEQ ID NO: 5077688 - DNA, 25 bp, Homo sapien
tgtctaaatccctgtgtccagcagt

SEQ ID NO: 5077689 - DNA, 25 bp, Homo sapien
tcacagagatcttgcgagaagagcc

SEQ ID NO: 5077690 - DNA, 25 bp, Homo sapien
ccagtaggatctctgcctaacccaa

SEQ ID NO: 5077691 - DNA, 25 bp, Homo sapien
cacccataagactaaagagcactgg

SEQ ID NO: 5077692 - DNA, 25 bp, Homo sapien
taggtctcctgaagagtggaatgtg

SEQ ID NO: 5077693 - DNA, 25 bp, Homo sapien
tggaatgtggaggaccacccataag

SEQ ID NO: 5077694 - DNA, 25 bp, Homo sapien
ctaaagccattaaatagacctcggg

SEQ ID NO: 5077695 - DNA, 25 bp, Homo sapien
tcccagaagtgaccatatgtccatg

SEQ ID NO: 5077696 - DNA, 25 bp, Homo sapien
tattcccagcttgaactgtgctagg

SEQ ID NO: 5077697 - DNA, 25 bp, Homo sapien
gacctcgggttaagagctgttgaca

SEQ ID NO: 5077698 - DNA, 25 bp, Homo sapien
agcacccacggaaacagcctctgca

SEQ ID NO: 5077699 - DNA, 25 bp, Homo sapien
ctctgcaggctgagttagtgtatgg

SEQ ID NO: 5077700 - DNA, 25 bp, Homo sapien
acattccaggggcagctacagcacc

SEQ ID NO: 5077701 - DNA, 25 bp, Homo sapien
ctacagcacccacggaaacagcctc

SEQ ID NO: 5077702 - DNA, 25 bp, Homo sapien
gaggccaatagtaatgagctcatgg

SEQ ID NO: 5077703 - DNA, 25 bp, Homo sapien
caatagtaatgagctcatggccaat

SEQ ID NO: 5077704 - DNA, 25 bp, Homo sapien
ctgtgagaggccaatagtaatgagc

SEQ ID NO: 5077705 - DNA, 25 bp, Homo sapien
gagaggccaatagtaatgagctcat

SEQ ID NO: 5077706 - DNA, 25 bp, Homo sapien
cacccaacaggctgtgaatttctcc

SEQ ID NO: 5077707 - DNA, 25 bp, Homo sapien
gattgtcttacacccaacaggctgt

SEQ ID NO: 5077708 - DNA, 25 bp, Homo sapien
tatttgattgtcttacacccaacag

SEQ ID NO: 5077709 - DNA, 25 bp, Homo sapien
gtcttacacccaacaggctgtgaat

SEQ ID NO: 5077710 - DNA, 25 bp, Homo sapien
tctttaactacaggactcacaaaca

SEQ ID NO: 5077711 - DNA, 25 bp, Homo sapien
taactacaggactcacaaacatcat

SEQ ID NO: 5077712 - DNA, 25 bp, Homo sapien
ctacaggactcacaaacatcatctg

SEQ ID NO: 5077713 - DNA, 25 bp, Homo sapien
tctaaagtctttaactacaggactc

SEQ ID NO: 5077714 - DNA, 25 bp, Homo sapien
ggctggatctcatataacaaaataa

SEQ ID NO: 5077715 - DNA, 25 bp, Homo sapien
tgatcagtaccttgtagtctcagga

SEQ ID NO: 5077716 - DNA, 25 bp, Homo sapien
tctcaggatttagtgggaattagga

SEQ ID NO: 5077717 - DNA, 25 bp, Homo sapien
aaataagagtgttcctagaaagcag

SEQ ID NO: 5077718 - DNA, 25 bp, Homo sapien
gttagttagggtcaattctctgtcc

SEQ ID NO: 5077719 - DNA, 25 bp, Homo sapien
cagataacttcctgagagtcagagc

SEQ ID NO: 5077720 - DNA, 25 bp, Homo sapien
catggagatcccacagtgtcccaag

SEQ ID NO: 5077721 - DNA, 25 bp, Homo sapien
tgtcccaaggcagtaaacatccagg

SEQ ID NO: 5077722 - DNA, 25 bp, Homo sapien
cctagtgacgcagaattggtaagac

SEQ ID NO: 5077723 - DNA, 25 bp, Homo sapien
tgttaagttctggtcccatccaaaa

SEQ ID NO: 5077724 - DNA, 25 bp, Homo sapien
gaccatcattagaagaatcactgca

SEQ ID NO: 5077725 - DNA, 25 bp, Homo sapien
gaaagatggcttaacccagtcagaa

SEQ ID NO: 5077726 - DNA, 25 bp, Homo sapien
tagtttccgactagtcacctggtaa

SEQ ID NO: 5077727 - DNA, 25 bp, Homo sapien
aactttgtgcatatagcgtgggacc

SEQ ID NO: 5077728 - DNA, 25 bp, Homo sapien
actactttgccttaatgcccatggg

SEQ ID NO: 5077729 - DNA, 25 bp, Homo sapien
aaaccaacatctagggatggctgcc

SEQ ID NO: 5077730 - DNA, 25 bp, Homo sapien
taaacacacaaaaagcttttctgta

SEQ ID NO: 5077731 - DNA, 25 bp, Homo sapien
aacagtacaatgtttattaacacgt

SEQ ID NO: 5077732 - DNA, 25 bp, Homo sapien
tgtttattaacacgtttcttcctga

SEQ ID NO: 5077733 - DNA, 25 bp, Homo sapien
cagtacaatgtttattaacacgttt

SEQ ID NO: 5077734 - DNA, 25 bp, Homo sapien
tcctatgtacgaaaactcaaaaata

SEQ ID NO: 5077735 - DNA, 25 bp, Homo sapien
atccagacagtgtgtcgctctgttg

SEQ ID NO: 5077736 - DNA, 25 bp, Homo sapien
aatccagacagtgtgtcgctctgtt

SEQ ID NO: 5077737 - DNA, 25 bp, Homo sapien
tttcatatgctctgtagcaattttg

SEQ ID NO: 5077738 - DNA, 25 bp, Homo sapien
tatgctctgtagcaattttgttttc

SEQ ID NO: 5077739 - DNA, 25 bp, Homo sapien
ttttcatatgctctgtagcaatttt

SEQ ID NO: 5077740 - DNA, 25 bp, Homo sapien
tcatatgctctgtagcaattttgtt

SEQ ID NO: 5077741 - DNA, 25 bp, Homo sapien
attattaccatgatttctgtgagtc

SEQ ID NO: 5077742 - DNA, 25 bp, Homo sapien
tattaccatgatttctgtgagtcag

SEQ ID NO: 5077743 - DNA, 25 bp, Homo sapien
attaccatgatttctgtgagtcagg

SEQ ID NO: 5077744 - DNA, 25 bp, Homo sapien
ttattattaccatgatttctgtgag

SEQ ID NO: 5077745 - DNA, 25 bp, Homo sapien
tctcttgtggcctaatctgtggtca

SEQ ID NO: 5077746 - DNA, 25 bp, Homo sapien
ttgtggctgtcttactgaagatgga

SEQ ID NO: 5077747 - DNA, 25 bp, Homo sapien
gcttggatttgagaagtttagccat

SEQ ID NO: 5077748 - DNA, 25 bp, Homo sapien
tttctctgagtagtgctgaggctga

SEQ ID NO: 5077749 - DNA, 25 bp, Homo sapien
ttcaaacaggtatgcatgtcagtgt

SEQ ID NO: 5077750 - DNA, 25 bp, Homo sapien
gcaaattcttgctgagggaaggcat

SEQ ID NO: 5077751 - DNA, 25 bp, Homo sapien
caactgtggtagacatagaataggc

SEQ ID NO: 5077752 - DNA, 25 bp, Homo sapien
tttagtcacctgcagatgtgcggtt

SEQ ID NO: 5077753 - DNA, 25 bp, Homo sapien
gcagatagcacattcagtagcctta

SEQ ID NO: 5077754 - DNA, 25 bp, Homo sapien
cggttgacttttatgccacgtgtgc

SEQ ID NO: 5077755 - DNA, 25 bp, Homo sapien
gaggattcacctagacttttttaga

SEQ ID NO: 5077756 - DNA, 25 bp, Homo sapien
gttaataccactggctcagcaaata

SEQ ID NO: 5077757 - DNA, 25 bp, Homo sapien
tatcgagattcaggtttccagccag

SEQ ID NO: 5077758 - DNA, 25 bp, Homo sapien
tgcctgacagaggtggtagacccaa

SEQ ID NO: 5077759 - DNA, 25 bp, Homo sapien
catatacaggaagtggataccaggg

SEQ ID NO: 5077760 - DNA, 25 bp, Homo sapien
cacagcagtggtggctatcaaggcg

SEQ ID NO: 5077761 - DNA, 25 bp, Homo sapien
tgaatcagctttttgtcacctatca

SEQ ID NO: 5077762 - DNA, 25 bp, Homo sapien
tgaaattaagtatggtgcatgtttc

SEQ ID NO: 5077763 - DNA, 25 bp, Homo sapien
ttgtgaatcagctttttgtcaccta

SEQ ID NO: 5077764 - DNA, 25 bp, Homo sapien
catgtttctcgttgccaaatggatt

SEQ ID NO: 5077765 - DNA, 25 bp, Homo sapien
ctcaccctctaacccgcaacaggcc

SEQ ID NO: 5077766 - DNA, 25 bp, Homo sapien
ctatccagagattgaagccacattc

SEQ ID NO: 5077767 - DNA, 25 bp, Homo sapien
gccacattcttaagacacgggtaaa

SEQ ID NO: 5077768 - DNA, 25 bp, Homo sapien
caacttttttgtggagcagtgaagc

SEQ ID NO: 5077769 - DNA, 25 bp, Homo sapien
aataatgagcgaaatctaacagggc

SEQ ID NO: 5077770 - DNA, 25 bp, Homo sapien
tgtgcagctaagtgcccgggttcat

SEQ ID NO: 5077771 - DNA, 25 bp, Homo sapien
ctgtgcagctaagtgcccgggttca

SEQ ID NO: 5077772 - DNA, 25 bp, Homo sapien
ctaagtgcccgggttcatcctaatc

SEQ ID NO: 5077773 - DNA, 25 bp, Homo sapien
agtgcccgggttcatcctaatcgag

SEQ ID NO: 5077774 - DNA, 25 bp, Homo sapien
gatggccctgttcactgtgccatag

SEQ ID NO: 5077775 - DNA, 25 bp, Homo sapien
tcaattatgcaagatgctgcctgat

SEQ ID NO: 5077776 - DNA, 25 bp, Homo sapien
gcgaccaagccccattacaaaagaa

SEQ ID NO: 5077777 - DNA, 25 bp, Homo sapien
tgtgccatagctgtcggcgaccaag

SEQ ID NO: 5077778 - DNA, 25 bp, Homo sapien
gcccaggctgttagtaattatctta

SEQ ID NO: 5077779 - DNA, 25 bp, Homo sapien
ccaggctgttagtaattatcttatg

SEQ ID NO: 5077780 - DNA, 25 bp, Homo sapien
gcagcccaggctgttagtaattatc

SEQ ID NO: 5077781 - DNA, 25 bp, Homo sapien
cagcccaggctgttagtaattatct

SEQ ID NO: 5077782 - DNA, 25 bp, Homo sapien
tatggcagcaattgtacagatgagg

SEQ ID NO: 5077783 - DNA, 25 bp, Homo sapien
cagataatagatgagacagccaggg

SEQ ID NO: 5077784 - DNA, 25 bp, Homo sapien
tgactgcacttgagcgtaggtgaca

SEQ ID NO: 5077785 - DNA, 25 bp, Homo sapien
gataaaatcatgaccacctaccaga

SEQ ID NO: 5077786 - DNA, 25 bp, Homo sapien
tgtccaagatattcagtagcgtaac

SEQ ID NO: 5077787 - DNA, 25 bp, Homo sapien
tattcagtagcgtaactgagtgaca

SEQ ID NO: 5077788 - DNA, 25 bp, Homo sapien
aatggacaagagttcatccggctgt

SEQ ID NO: 5077789 - DNA, 25 bp, Homo sapien
caactccaggtcatcaatagcagct

SEQ ID NO: 5077790 - DNA, 25 bp, Homo sapien
ttagtgatgcaggtataaggcagac

SEQ ID NO: 5077791 - DNA, 25 bp, Homo sapien
tggcagctcctttagtgatgcaggt

SEQ ID NO: 5077792 - DNA, 25 bp, Homo sapien
tatgtgagctatctcttgaatggca

SEQ ID NO: 5077793 - DNA, 25 bp, Homo sapien
gaatagattgtcttgttatgtgagc

SEQ ID NO: 5077794 - DNA, 25 bp, Homo sapien
ttgaccctattgtcaccatggacag

SEQ ID NO: 5077795 - DNA, 25 bp, Homo sapien
cttttatcccttcaaaggattcctg

SEQ ID NO: 5077796 - DNA, 25 bp, Homo sapien
catggacaggtctctgattacttct

SEQ ID NO: 5077797 - DNA, 25 bp, Homo sapien
tttatcccttcaaaggattcctgcc

SEQ ID NO: 5077798 - DNA, 25 bp, Homo sapien
ttctggaatcagcacgcacttcggg

SEQ ID NO: 5077799 - DNA, 25 bp, Homo sapien
cataagcaagagttgggaggttttt

SEQ ID NO: 5077800 - DNA, 25 bp, Homo sapien
gcctctcttctggaatcagcacgca

SEQ ID NO: 5077801 - DNA, 25 bp, Homo sapien
gagataggaccagagatcataagca

SEQ ID NO: 5077802 - DNA, 25 bp, Homo sapien
ctttaatgatgcttcctcggtggtg

SEQ ID NO: 5077803 - DNA, 25 bp, Homo sapien
ttaatgatgcttcctcggtggtgtc

SEQ ID NO: 5077804 - DNA, 25 bp, Homo sapien
tttaatgatgcttcctcggtggtgt

SEQ ID NO: 5077805 - DNA, 25 bp, Homo sapien
agctctccaataaagagcttctgca

SEQ ID NO: 5077806 - DNA, 25 bp, Homo sapien
cagctctccaataaagagcttctgc

SEQ ID NO: 5077807 - DNA, 25 bp, Homo sapien
gaatcttctcttgagacagctcttt

SEQ ID NO: 5077808 - DNA, 25 bp, Homo sapien
tcttctcttgagacagctctttggt

SEQ ID NO: 5077809 - DNA, 25 bp, Homo sapien
cagctctttggttccacaactcttc

SEQ ID NO: 5077810 - DNA, 25 bp, Homo sapien
ttctcttgagacagctctttggttc

SEQ ID NO: 5077811 - DNA, 25 bp, Homo sapien
atctttttcacagttaagtgggcac

SEQ ID NO: 5077812 - DNA, 25 bp, Homo sapien
tcagcatatatctttttcacagtta

SEQ ID NO: 5077813 - DNA, 25 bp, Homo sapien
atatctttttcacagttaagtgggc

SEQ ID NO: 5077814 - DNA, 25 bp, Homo sapien
atatatctttttcacagttaagtgg

SEQ ID NO: 5077815 - DNA, 25 bp, Homo sapien
gccaatcttatctacggactcatgg

SEQ ID NO: 5077816 - DNA, 25 bp, Homo sapien
caatcttatctacggactcatggtt

SEQ ID NO: 5077817 - DNA, 25 bp, Homo sapien
atcttatctacggactcatggttgt

SEQ ID NO: 5077818 - DNA, 25 bp, Homo sapien
ccaatcttatctacggactcatggt

SEQ ID NO: 5077819 - DNA, 25 bp, Homo sapien
caattccgtggtatatgggaatgga

SEQ ID NO: 5077820 - DNA, 25 bp, Homo sapien
tacttaattggcattgggagcacaa

SEQ ID NO: 5077821 - DNA, 25 bp, Homo sapien
ggaatggaatgtcctcaaattcaga

SEQ ID NO: 5077822 - DNA, 25 bp, Homo sapien
tcagaatacgtgatgctgtatttcc

SEQ ID NO: 5077823 - DNA, 25 bp, Homo sapien
cctgataaccttgtaatgaagttaa

SEQ ID NO: 5077824 - DNA, 25 bp, Homo sapien
ctcttttcaaaggaatcccagtgat

SEQ ID NO: 5077825 - DNA, 25 bp, Homo sapien
cattggagagacatacagactgaag

SEQ ID NO: 5077826 - DNA, 25 bp, Homo sapien
gagacatgattattcatccatgaag

SEQ ID NO: 5077827 - DNA, 25 bp, Homo sapien
tattcatccatgaagagaggacaga

SEQ ID NO: 5077828 - DNA, 25 bp, Homo sapien
tttaatgcagaaattaaacttttca

SEQ ID NO: 5077829 - DNA, 25 bp, Homo sapien
attaaacttttcacagagggaaatg

SEQ ID NO: 5077830 - DNA, 25 bp, Homo sapien
tttttaagccaagtggtttaatgca

SEQ ID NO: 5077831 - DNA, 25 bp, Homo sapien
acttttcacagagggaaatgtcctg

SEQ ID NO: 5077832 - DNA, 25 bp, Homo sapien
agctgcaatagattggcacctcctt

SEQ ID NO: 5077833 - DNA, 25 bp, Homo sapien
gctgcaatagattggcacctccttt

SEQ ID NO: 5077834 - DNA, 25 bp, Homo sapien
ctgcaatagattggcacctcctttt

SEQ ID NO: 5077835 - DNA, 25 bp, Homo sapien
tgcaatagattggcacctccttttt

SEQ ID NO: 5077836 - DNA, 25 bp, Homo sapien
ctgaggaggcctcagaataatggtg

SEQ ID NO: 5077837 - DNA, 25 bp, Homo sapien
ctcagaataatggtgggaggcaaaa

SEQ ID NO: 5077838 - DNA, 25 bp, Homo sapien
tcagaataatggtgggaggcaaaag

SEQ ID NO: 5077839 - DNA, 25 bp, Homo sapien
aggaggcctcagaataatggtggga

SEQ ID NO: 5077840 - DNA, 25 bp, Homo sapien
aacagagagatgcagatacttgatc

SEQ ID NO: 5077841 - DNA, 25 bp, Homo sapien
cagtaaatcccggagaggaacagag

SEQ ID NO: 5077842 - DNA, 25 bp, Homo sapien
gcgatactgtgaccgggcaagcatg

SEQ ID NO: 5077843 - DNA, 25 bp, Homo sapien
tttgacagtaaatcccggagaggaa

SEQ ID NO: 5077844 - DNA, 25 bp, Homo sapien
caacttgctggcctatgtgggcgac

SEQ ID NO: 5077845 - DNA, 25 bp, Homo sapien
ccctggcagacgagagatgtgagct

SEQ ID NO: 5077846 - DNA, 25 bp, Homo sapien
gcttacgccaccgaagtaacctgga

SEQ ID NO: 5077847 - DNA, 25 bp, Homo sapien
cagttcaacgagaagtatggtgtcc

SEQ ID NO: 5077848 - DNA, 25 bp, Homo sapien
cggtgctatgttcctgttccacggg

SEQ ID NO: 5077849 - DNA, 25 bp, Homo sapien
ttctccgtgagttcctcagccagga

SEQ ID NO: 5077850 - DNA, 25 bp, Homo sapien
ttttccaggcgtgtgacttaatccg

SEQ ID NO: 5077851 - DNA, 25 bp, Homo sapien
ggtctcttccctgctcggtgctatg

SEQ ID NO: 5077852 - DNA, 25 bp, Homo sapien
caatgggaagttgagtggtttgctc

SEQ ID NO: 5077853 - DNA, 25 bp, Homo sapien
taaactcctgtggataagttgcttc

SEQ ID NO: 5077854 - DNA, 25 bp, Homo sapien
attagagcaaagcattcctggtacc

SEQ ID NO: 5077855 - DNA, 25 bp, Homo sapien
ttgctccaattgtgtaaccccccag

SEQ ID NO: 5077856 - DNA, 25 bp, Homo sapien
gagtatttgctccatccatgtggga

SEQ ID NO: 5077857 - DNA, 25 bp, Homo sapien
cagtcatagactgagttacagcagg

SEQ ID NO: 5077858 - DNA, 25 bp, Homo sapien
aaataacgcagagctcttgtgagga

SEQ ID NO: 5077859 - DNA, 25 bp, Homo sapien
gctgatgctatgtacgggctctgga

SEQ ID NO: 5077860 - DNA, 25 bp, Homo sapien
gactcctgccagagtgaaccacaga

SEQ ID NO: 5077861 - DNA, 25 bp, Homo sapien
ccagactcctgccagagtgaaccac

SEQ ID NO: 5077862 - DNA, 25 bp, Homo sapien
agactcctgccagagtgaaccacag

SEQ ID NO: 5077863 - DNA, 25 bp, Homo sapien
actcctgccagagtgaaccacagac

SEQ ID NO: 5077864 - DNA, 25 bp, Homo sapien
ccagggaatacctagcacaggacgg

SEQ ID NO: 5077865 - DNA, 25 bp, Homo sapien
gggctcgctaaggtctgagtgacaa

SEQ ID NO: 5077866 - DNA, 25 bp, Homo sapien
tgatcctgagcattccagggaatac

SEQ ID NO: 5077867 - DNA, 25 bp, Homo sapien
tctgagtgacaataaggagcagcca

SEQ ID NO: 5077868 - DNA, 25 bp, Homo sapien
ggaattgagttaagccacggccaga

SEQ ID NO: 5077869 - DNA, 25 bp, Homo sapien
cagcgaggacctgaggtatgccaac

SEQ ID NO: 5077870 - DNA, 25 bp, Homo sapien
tctgagctggcctatggagaaacca

SEQ ID NO: 5077871 - DNA, 25 bp, Homo sapien
tgtggcaaggaccaggtatctccgg

SEQ ID NO: 5077872 - DNA, 25 bp, Homo sapien
ttgatttaataagggatccgtatct

SEQ ID NO: 5077873 - DNA, 25 bp, Homo sapien
tacaccattattgatcttccagagc

SEQ ID NO: 5077874 - DNA, 25 bp, Homo sapien
tttctcaagtcctttatggaagcaa

SEQ ID NO: 5077875 - DNA, 25 bp, Homo sapien
gatatttaacgtatactcccttgtg

SEQ ID NO: 5077876 - DNA, 25 bp, Homo sapien
gtgagggtcttctagatgtgtcatc

SEQ ID NO: 5077877 - DNA, 25 bp, Homo sapien
ggtgagggtcttctagatgtgtcat

SEQ ID NO: 5077878 - DNA, 25 bp, Homo sapien
taaccgcctgctttctgttgaccaa

SEQ ID NO: 5077879 - DNA, 25 bp, Homo sapien
tagtcattatgaagccagcccaatt

SEQ ID NO: 5077880 - DNA, 25 bp, Homo sapien
tctggacagtaagacataagacccc

SEQ ID NO: 5077881 - DNA, 25 bp, Homo sapien
tcatgattgcctatctaaccgcctg

SEQ ID NO: 5077882 - DNA, 25 bp, Homo sapien
cccagcacaacgatgcatatgccaa

SEQ ID NO: 5077883 - DNA, 25 bp, Homo sapien
tgcatatgccaatcttgcatggtcc

SEQ ID NO: 5077884 - DNA, 25 bp, Homo sapien
taataacccacccacatggccacac

SEQ ID NO: 5077885 - DNA, 25 bp, Homo sapien
tgcaccagcaggaaacacacatcaa

SEQ ID NO: 5077886 - DNA, 25 bp, Homo sapien
tggcttttaagatgaacacacagtt

SEQ ID NO: 5077887 - DNA, 25 bp, Homo sapien
ttggcttttaagatgaacacacagt

SEQ ID NO: 5077888 - DNA, 25 bp, Homo sapien
gcttttaagatgaacacacagttca

SEQ ID NO: 5077889 - DNA, 25 bp, Homo sapien
ggcttttaagatgaacacacagttc

SEQ ID NO: 5077890 - DNA, 25 bp, Homo sapien
cagtagacccactttacactttgag

SEQ ID NO: 5077891 - DNA, 25 bp, Homo sapien
tatattgctttggttcaccagacct

SEQ ID NO: 5077892 - DNA, 25 bp, Homo sapien
ggttcaccagacctcagtagaccca

SEQ ID NO: 5077893 - DNA, 25 bp, Homo sapien
gtagacccactttacactttgagaa

SEQ ID NO: 5077894 - DNA, 25 bp, Homo sapien
cattctggccaggtaagttaagaac

SEQ ID NO: 5077895 - DNA, 25 bp, Homo sapien
gattctaggatctgagatagctctc

SEQ ID NO: 5077896 - DNA, 25 bp, Homo sapien
tcttaaccagaaggactccaaagat

SEQ ID NO: 5077897 - DNA, 25 bp, Homo sapien
caaagattttctcaagggtgatgat

SEQ ID NO: 5077898 - DNA, 25 bp, Homo sapien
ggcccactttggtaatccaggagga

SEQ ID NO: 5077899 - DNA, 25 bp, Homo sapien
tacatcccatgggtctcagcgtcaa

SEQ ID NO: 5077900 - DNA, 25 bp, Homo sapien
tgtgctggaatacttcattgcctca

SEQ ID NO: 5077901 - DNA, 25 bp, Homo sapien
caggaggtaactgagtattttcact

SEQ ID NO: 5077902 - DNA, 25 bp, Homo sapien
tttatgtcttgcaaatgtgctcagc

SEQ ID NO: 5077903 - DNA, 25 bp, Homo sapien
aaagcagggtctaatcaggaaatgc

SEQ ID NO: 5077904 - DNA, 25 bp, Homo sapien
agcagggtctaatcaggaaatgcat

SEQ ID NO: 5077905 - DNA, 25 bp, Homo sapien
gaaaagcagggtctaatcaggaaat

SEQ ID NO: 5077906 - DNA, 25 bp, Homo sapien
tgaaaagcagggtctaatcaggaaa

SEQ ID NO: 5077907 - DNA, 25 bp, Homo sapien
tcctcactgtaggtgatatccatac

SEQ ID NO: 5077908 - DNA, 25 bp, Homo sapien
tatgcctaacagttgatatggagaa

SEQ ID NO: 5077909 - DNA, 25 bp, Homo sapien
aacccgttctgctgcagtcagacct

SEQ ID NO: 5077910 - DNA, 25 bp, Homo sapien
tatccatactgattatgcctaacag

SEQ ID NO: 5077911 - DNA, 25 bp, Homo sapien
tgtacactgatgactcacaaggtga

SEQ ID NO: 5077912 - DNA, 25 bp, Homo sapien
gattatcacactggcctcatcctga

SEQ ID NO: 5077913 - DNA, 25 bp, Homo sapien
gtctcctcaagggatcactttcact

SEQ ID NO: 5077914 - DNA, 25 bp, Homo sapien
tacaggcagcttaatatctttccac

SEQ ID NO: 5077915 - DNA, 25 bp, Homo sapien
ccctgcatttcagggcctcttccat

SEQ ID NO: 5077916 - DNA, 25 bp, Homo sapien
tcccctgcatttcagggcctcttcc

SEQ ID NO: 5077917 - DNA, 25 bp, Homo sapien
cccctgcatttcagggcctcttcca

SEQ ID NO: 5077918 - DNA, 25 bp, Homo sapien
gttgatctccctgcaaactaaaggg

SEQ ID NO: 5077919 - DNA, 25 bp, Homo sapien
tgtccagggtattttctgaatatag

SEQ ID NO: 5077920 - DNA, 25 bp, Homo sapien
aatatagcttatgggctcaggaatc

SEQ ID NO: 5077921 - DNA, 25 bp, Homo sapien
tcaggaatcatcccttccttcttgc

SEQ ID NO: 5077922 - DNA, 25 bp, Homo sapien
catacactgggacctatcagaggtt

SEQ ID NO: 5077923 - DNA, 25 bp, Homo sapien
acctaaaggcagaaccattactggg

SEQ ID NO: 5077924 - DNA, 25 bp, Homo sapien
gcaaactaatgtagaaacagccaaa

SEQ ID NO: 5077925 - DNA, 25 bp, Homo sapien
tcagaaaggctattacgaaaagcca

SEQ ID NO: 5077926 - DNA, 25 bp, Homo sapien
aattcacttggtaactccgtagttg

SEQ ID NO: 5077927 - DNA, 25 bp, Homo sapien
taatctgctaattaagccagctaat

SEQ ID NO: 5077928 - DNA, 25 bp, Homo sapien
gatactgaaaccagatctaatctgc

SEQ ID NO: 5077929 - DNA, 25 bp, Homo sapien
acagccagtgtgtccgatactgaaa

SEQ ID NO: 5077930 - DNA, 25 bp, Homo sapien
cctatcttgggcctcctcatcactc

SEQ ID NO: 5077931 - DNA, 25 bp, Homo sapien
ttcagtgttcccaaacctatcttgg

SEQ ID NO: 5077932 - DNA, 25 bp, Homo sapien
aaacctatcttgggcctcctcatca

SEQ ID NO: 5077933 - DNA, 25 bp, Homo sapien
tgttcccaaacctatcttgggcctc

SEQ ID NO: 5077934 - DNA, 25 bp, Homo sapien
tttctcaccgagatttgaatcccag

SEQ ID NO: 5077935 - DNA, 25 bp, Homo sapien
tccactcaaagtcagactggtccag

SEQ ID NO: 5077936 - DNA, 25 bp, Homo sapien
aactcccttgtatctctttctcatg

SEQ ID NO: 5077937 - DNA, 25 bp, Homo sapien
ctacacccagtatatctctcaggat

SEQ ID NO: 5077938 - DNA, 25 bp, Homo sapien
caatcatgacttgatctctctttct

SEQ ID NO: 5077939 - DNA, 25 bp, Homo sapien
aagtctctcatacctggcctagcta

SEQ ID NO: 5077940 - DNA, 25 bp, Homo sapien
cctggcctagctacaatcatgactt

SEQ ID NO: 5077941 - DNA, 25 bp, Homo sapien
aatttctccaagtctctcatacctg

SEQ ID NO: 5077942 - DNA, 25 bp, Homo sapien
agccagttgaatttactgcctagta

SEQ ID NO: 5077943 - DNA, 25 bp, Homo sapien
tataggctatgtggcatacctaaaa

SEQ ID NO: 5077944 - DNA, 25 bp, Homo sapien
tgtctctgttactacatcaagcaaa

SEQ ID NO: 5077945 - DNA, 25 bp, Homo sapien
tcagcctgacagatttttatcaaat

SEQ ID NO: 5077946 - DNA, 25 bp, Homo sapien
ttcacctaagttggagcaatcctca

SEQ ID NO: 5077947 - DNA, 25 bp, Homo sapien
gagaaatcagcttcacctaagttgg

SEQ ID NO: 5077948 - DNA, 25 bp, Homo sapien
agggagaaatcagcttcacctaagt

SEQ ID NO: 5077949 - DNA, 25 bp, Homo sapien
tcagcttcacctaagttggagcaat

SEQ ID NO: 5077950 - DNA, 25 bp, Homo sapien
tagaccaacaggaatgcatcccttt

SEQ ID NO: 5077951 - DNA, 25 bp, Homo sapien
tgtataatgacttctgcgtaaccag

SEQ ID NO: 5077952 - DNA, 25 bp, Homo sapien
ttctgcgtaaccaggacatggccaa

SEQ ID NO: 5077953 - DNA, 25 bp, Homo sapien
ggacatggccaattttggaaatgtg

SEQ ID NO: 5077954 - DNA, 25 bp, Homo sapien
aacacagtgttaagctcaaggtagg

SEQ ID NO: 5077955 - DNA, 25 bp, Homo sapien
gaggcccagttgctatacttgccag

SEQ ID NO: 5077956 - DNA, 25 bp, Homo sapien
aatctgatggctaggtttgaggccc

SEQ ID NO: 5077957 - DNA, 25 bp, Homo sapien
gataagcaacctgtagactatgact

SEQ ID NO: 5077958 - DNA, 25 bp, Homo sapien
aactaaagcctctaagccaaatcta

SEQ ID NO: 5077959 - DNA, 25 bp, Homo sapien
aaatctagcccgcagctggtttttg

SEQ ID NO: 5077960 - DNA, 25 bp, Homo sapien
caagattcaattgcaaagagggaag

SEQ ID NO: 5077961 - DNA, 25 bp, Homo sapien
gcttctttcaagattcaattgcaaa

SEQ ID NO: 5077962 - DNA, 25 bp, Homo sapien
ccttcactaagttcatgaagtagtt

SEQ ID NO: 5077963 - DNA, 25 bp, Homo sapien
tttttcatcatgacagtaaacccac

SEQ ID NO: 5077964 - DNA, 25 bp, Homo sapien
tcatgacagtaaacccacagcacac

SEQ ID NO: 5077965 - DNA, 25 bp, Homo sapien
tgaagtagtttttcatcatgacagt

SEQ ID NO: 5077966 - DNA, 25 bp, Homo sapien
catgatacgaagctcacacagagtc

SEQ ID NO: 5077967 - DNA, 25 bp, Homo sapien
tcccacatgatacgaagctcacaca

SEQ ID NO: 5077968 - DNA, 25 bp, Homo sapien
caaagccgctgtctccttgatctgc

SEQ ID NO: 5077969 - DNA, 25 bp, Homo sapien
tgctgtagaacacacgctgccataa

SEQ ID NO: 5077970 - DNA, 25 bp, Homo sapien
acttcgtcccttttatggccgatgt

SEQ ID NO: 5077971 - DNA, 25 bp, Homo sapien
cgtcccttttatggccgatgttttg

SEQ ID NO: 5077972 - DNA, 25 bp, Homo sapien
cttcgtcccttttatggccgatgtt

SEQ ID NO: 5077973 - DNA, 25 bp, Homo sapien
aacttcgtcccttttatggccgatg

SEQ ID NO: 5077974 - DNA, 25 bp, Homo sapien
ctccaattcccaatcagacacttga

SEQ ID NO: 5077975 - DNA, 25 bp, Homo sapien
caattcccaatcagacacttgagca

SEQ ID NO: 5077976 - DNA, 25 bp, Homo sapien
gtaacagtgcattatttgacctaaa

SEQ ID NO: 5077977 - DNA, 25 bp, Homo sapien
taagggtaacagtgcattatttgac

SEQ ID NO: 5077978 - DNA, 25 bp, Homo sapien
tgttgtaatgaatgatcacgggtca

SEQ ID NO: 5077979 - DNA, 25 bp, Homo sapien
tttcttcttggtaataatagcagag

SEQ ID NO: 5077980 - DNA, 25 bp, Homo sapien
ggagtaggcccactccgccaggaag

SEQ ID NO: 5077981 - DNA, 25 bp, Homo sapien
tcacgggtcagacaggagtaggccc

SEQ ID NO: 5077982 - DNA, 25 bp, Homo sapien
caggctagggcaaagcaaggattac

SEQ ID NO: 5077983 - DNA, 25 bp, Homo sapien
tatcagtaggccacctcctttaggg

SEQ ID NO: 5077984 - DNA, 25 bp, Homo sapien
aatgccttctaaactatgagctgag

SEQ ID NO: 5077985 - DNA, 25 bp, Homo sapien
ggttcccctaggtggcaagatggcc

SEQ ID NO: 5077986 - DNA, 25 bp, Homo sapien
acattcaccagtgccacaccaaagt

SEQ ID NO: 5077987 - DNA, 25 bp, Homo sapien
acagtcatcggtcaccagttcagtc

SEQ ID NO: 5077988 - DNA, 25 bp, Homo sapien
attcaccaagtcacagtcatcggtc

SEQ ID NO: 5077989 - DNA, 25 bp, Homo sapien
attcaccagtgccacaccaaagtct

SEQ ID NO: 5077990 - DNA, 25 bp, Homo sapien
ggtattaagcccctcagttttgcag

SEQ ID NO: 5077991 - DNA, 25 bp, Homo sapien
taaacattcacaggacaaaacagcc

SEQ ID NO: 5077992 - DNA, 25 bp, Homo sapien
tgtcagatctagtgggagcccatcg

SEQ ID NO: 5077993 - DNA, 25 bp, Homo sapien
tagtgggagcccatcgctgattgtg

SEQ ID NO: 5077994 - DNA, 25 bp, Homo sapien
tgagatgctgccagggtgctcctgc

SEQ ID NO: 5077995 - DNA, 25 bp, Homo sapien
gagacatgcactgggcagtcctgag

SEQ ID NO: 5077996 - DNA, 25 bp, Homo sapien
tgaacaagaagctgcaggtcagcca

SEQ ID NO: 5077997 - DNA, 25 bp, Homo sapien
ggtcagccagccagagacatgcact

SEQ ID NO: 5077998 - DNA, 25 bp, Homo sapien
gtccactatcgtcattctgattcca

SEQ ID NO: 5077999 - DNA, 25 bp, Homo sapien
gctcgtgagctaccttctgataatc

SEQ ID NO: 5078000 - DNA, 25 bp, Homo sapien
gaaacatacgagttatccagtccac

SEQ ID NO: 5078001 - DNA, 25 bp, Homo sapien
tctgataatcgaacttcccaggatg

SEQ ID NO: 5078002 - DNA, 25 bp, Homo sapien
gagtcttcccctagtatccctggag

SEQ ID NO: 5078003 - DNA, 25 bp, Homo sapien
tgggttctgggtctagtactgtcac

SEQ ID NO: 5078004 - DNA, 25 bp, Homo sapien
gagacagccagtgcagcatgaaaag

SEQ ID NO: 5078005 - DNA, 25 bp, Homo sapien
caaataatgttgtgacagagtgtga

SEQ ID NO: 5078006 - DNA, 25 bp, Homo sapien
catctcttccaccttaatgctaaac

SEQ ID NO: 5078007 - DNA, 25 bp, Homo sapien
tcgccacagggaataacatctcttc

SEQ ID NO: 5078008 - DNA, 25 bp, Homo sapien
cagatgaaaacccacgcgtgcaaga

SEQ ID NO: 5078009 - DNA, 25 bp, Homo sapien
gtctccagctgaactatcgccacag

SEQ ID NO: 5078010 - DNA, 25 bp, Homo sapien
ccctcattcctagtaggataatctt

SEQ ID NO: 5078011 - DNA, 25 bp, Homo sapien
gaattccctcattcctagtaggata

SEQ ID NO: 5078012 - DNA, 25 bp, Homo sapien
gataatctttccaatagcccccaca

SEQ ID NO: 5078013 - DNA, 25 bp, Homo sapien
ttaaatagaattccctcattcctag

SEQ ID NO: 5078014 - DNA, 25 bp, Homo sapien
aacaatggcagcaagatgtctggcc

SEQ ID NO: 5078015 - DNA, 25 bp, Homo sapien
gaaaacaatggcagcaagatgtctg

SEQ ID NO: 5078016 - DNA, 25 bp, Homo sapien
tggcagcaagatgtctggccagcat

SEQ ID NO: 5078017 - DNA, 25 bp, Homo sapien
aatggcagcaagatgtctggccagc

SEQ ID NO: 5078018 - DNA, 25 bp, Homo sapien
gcataactccttttaagatctggaa

SEQ ID NO: 5078019 - DNA, 25 bp, Homo sapien
cataactccttttaagatctggaaa

SEQ ID NO: 5078020 - DNA, 25 bp, Homo sapien
tagcataactccttttaagatctgg

SEQ ID NO: 5078021 - DNA, 25 bp, Homo sapien
ttatagcataactccttttaagatc

SEQ ID NO: 5078022 - DNA, 25 bp, Homo sapien
ttgattccgtgacgttcctcataaa

SEQ ID NO: 5078023 - DNA, 25 bp, Homo sapien
tcttgattccgtgacgttcctcata

SEQ ID NO: 5078024 - DNA, 25 bp, Homo sapien
tccgtgacgttcctcataaaagaaa

SEQ ID NO: 5078025 - DNA, 25 bp, Homo sapien
gattccgtgacgttcctcataaaag

SEQ ID NO: 5078026 - DNA, 25 bp, Homo sapien
catttcgtgaacactcaggaatata

SEQ ID NO: 5078027 - DNA, 25 bp, Homo sapien
gattgaggtgagtataaaacattgc

SEQ ID NO: 5078028 - DNA, 25 bp, Homo sapien
gatagcagagcctagagcatcatgg

SEQ ID NO: 5078029 - DNA, 25 bp, Homo sapien
gattcaatctcagcgttttttaaaa

SEQ ID NO: 5078030 - DNA, 25 bp, Homo sapien
caaaggcattaactgtggttaccat

SEQ ID NO: 5078031 - DNA, 25 bp, Homo sapien
tagattcttgtcaatcccagtttgt

SEQ ID NO: 5078032 - DNA, 25 bp, Homo sapien
tttacactaatttggatcctccatg

SEQ ID NO: 5078033 - DNA, 25 bp, Homo sapien
tacttgattctctaacagtaaatga

SEQ ID NO: 5078034 - DNA, 25 bp, Homo sapien
gtttgtaaatggatggcatgcgaaa

SEQ ID NO: 5078035 - DNA, 25 bp, Homo sapien
ataaaggccttattttgccgatcta

SEQ ID NO: 5078036 - DNA, 25 bp, Homo sapien
aaggccttattttgccgatctacta

SEQ ID NO: 5078037 - DNA, 25 bp, Homo sapien
tgccgatctactatatttggtgatg

SEQ ID NO: 5078038 - DNA, 25 bp, Homo sapien
tattttgccgatctactatatttgg

SEQ ID NO: 5078039 - DNA, 25 bp, Homo sapien
ttttccgtatataatgccaagatca

SEQ ID NO: 5078040 - DNA, 25 bp, Homo sapien
gccaagatcattatcctggtaagac

SEQ ID NO: 5078041 - DNA, 25 bp, Homo sapien
aagtttcagctgtggtacaaacaca

SEQ ID NO: 5078042 - DNA, 25 bp, Homo sapien
ggtaattctgcagacctcttgtggc

SEQ ID NO: 5078043 - DNA, 25 bp, Homo sapien
tctacacactttcttatgacagcac

SEQ ID NO: 5078044 - DNA, 25 bp, Homo sapien
agacatgctcctgttcagatctaca

SEQ ID NO: 5078045 - DNA, 25 bp, Homo sapien
gaagtcctatcacccaccgagccat

SEQ ID NO: 5078046 - DNA, 25 bp, Homo sapien
cttaacggagtgagtctcctggcat

SEQ ID NO: 5078047 - DNA, 25 bp, Homo sapien
accttaacggagtgagtctcctggc

SEQ ID NO: 5078048 - DNA, 25 bp, Homo sapien
ctgaagtcctatcacccaccgagcc

SEQ ID NO: 5078049 - DNA, 25 bp, Homo sapien
ccacctttacactatcagattgtct

SEQ ID NO: 5078050 - DNA, 25 bp, Homo sapien
cactatcagattgtctgtacttctt

SEQ ID NO: 5078051 - DNA, 25 bp, Homo sapien
ggtactttctacttcagagccttgc

SEQ ID NO: 5078052 - DNA, 25 bp, Homo sapien
ttatctgtctataaagggtactttc

SEQ ID NO: 5078053 - DNA, 25 bp, Homo sapien
ccttccgtaggtctttgtcagctag

SEQ ID NO: 5078054 - DNA, 25 bp, Homo sapien
tgctagtcttaaaaatgcttgcctt

SEQ ID NO: 5078055 - DNA, 25 bp, Homo sapien
tggaacatataaacaccttccgtag

SEQ ID NO: 5078056 - DNA, 25 bp, Homo sapien
tgtcagctagattattaattttcgc

SEQ ID NO: 5078057 - DNA, 25 bp, Homo sapien
ccaacaggatgcactgacaaacagc

SEQ ID NO: 5078058 - DNA, 25 bp, Homo sapien
aatcaaaagagcttcaccaacagga

SEQ ID NO: 5078059 - DNA, 25 bp, Homo sapien
gaccaagtgagttctgctagtgtag

SEQ ID NO: 5078060 - DNA, 25 bp, Homo sapien
caaacagcgttgagaacaatactcc

SEQ ID NO: 5078061 - DNA, 25 bp, Homo sapien
tattggtgaaacacatgatgcactt

SEQ ID NO: 5078062 - DNA, 25 bp, Homo sapien
agtggtgctatctcgctaactgaag

SEQ ID NO: 5078063 - DNA, 25 bp, Homo sapien
gatatacgatagtggcaagatggtt

SEQ ID NO: 5078064 - DNA, 25 bp, Homo sapien
gctcctccaaagctaaaatagagaa

SEQ ID NO: 5078065 - DNA, 25 bp, Homo sapien
tatgcaaggctattaggagactcag

SEQ ID NO: 5078066 - DNA, 25 bp, Homo sapien
gacttgaccaagagtagccctttaa

SEQ ID NO: 5078067 - DNA, 25 bp, Homo sapien
cagtggccttacctagacttgacca

SEQ ID NO: 5078068 - DNA, 25 bp, Homo sapien
gattccatgtctggctagtaccaaa

SEQ ID NO: 5078069 - DNA, 25 bp, Homo sapien
ctcccggtggaggttgattctcctg

SEQ ID NO: 5078070 - DNA, 25 bp, Homo sapien
gcctcccggtggaggttgattctcc

SEQ ID NO: 5078071 - DNA, 25 bp, Homo sapien
tcagccctttttccagattcacaag

SEQ ID NO: 5078072 - DNA, 25 bp, Homo sapien
gccctttttccagattcacaagctt

SEQ ID NO: 5078073 - DNA, 25 bp, Homo sapien
tttttccagattcacaagctttcat

SEQ ID NO: 5078074 - DNA, 25 bp, Homo sapien
cctttttccagattcacaagctttc

SEQ ID NO: 5078075 - DNA, 25 bp, Homo sapien
ctactgtagtgttagattgtgccaa

SEQ ID NO: 5078076 - DNA, 25 bp, Homo sapien
tttgcgctcattagcaggtgcaggc

SEQ ID NO: 5078077 - DNA, 25 bp, Homo sapien
agtgttagattgtgccaatgtgggc

SEQ ID NO: 5078078 - DNA, 25 bp, Homo sapien
tgagcaatgttttgcgctcattagc

SEQ ID NO: 5078079 - DNA, 25 bp, Homo sapien
ttgccggacactgaaaattttgttc

SEQ ID NO: 5078080 - DNA, 25 bp, Homo sapien
tgtgagtgctgtgagctatcactac

SEQ ID NO: 5078081 - DNA, 25 bp, Homo sapien
taatgtttccatctgtaagagttgc

SEQ ID NO: 5078082 - DNA, 25 bp, Homo sapien
tcatcgtggtattgattaaatgatg

SEQ ID NO: 5078083 - DNA, 25 bp, Homo sapien
cccatctgaaatgtcttcacctcct

SEQ ID NO: 5078084 - DNA, 25 bp, Homo sapien
atgtcttcacctcctctttcataat

SEQ ID NO: 5078085 - DNA, 25 bp, Homo sapien
gtcttcacctcctctttcataatcc

SEQ ID NO: 5078086 - DNA, 25 bp, Homo sapien
cttcacctcctctttcataatccat

SEQ ID NO: 5078087 - DNA, 25 bp, Homo sapien
atgtaaggggctctggatgtcacta

SEQ ID NO: 5078088 - DNA, 25 bp, Homo sapien
ggttcaaggccagcatgtaaggggc

SEQ ID NO: 5078089 - DNA, 25 bp, Homo sapien
gggttcaaggccagcatgtaagggg

SEQ ID NO: 5078090 - DNA, 25 bp, Homo sapien
cagcatgtaaggggctctggatgtc

SEQ ID NO: 5078091 - DNA, 25 bp, Homo sapien
aagataatcaagaagcagactgtcc

SEQ ID NO: 5078092 - DNA, 25 bp, Homo sapien
cagactgtccactgacgatggtgat

SEQ ID NO: 5078093 - DNA, 25 bp, Homo sapien
gttctgatatccacccaactcctgt

SEQ ID NO: 5078094 - DNA, 25 bp, Homo sapien
acagcagcagggcacgtatttacag

SEQ ID NO: 5078095 - DNA, 25 bp, Homo sapien
aaagcctctttgctaaaagtaggtg

SEQ ID NO: 5078096 - DNA, 25 bp, Homo sapien
ctcaaaagcctctttgctaaaagta

SEQ ID NO: 5078097 - DNA, 25 bp, Homo sapien
agcctctttgctaaaagtaggtgtc

SEQ ID NO: 5078098 - DNA, 25 bp, Homo sapien
gcctctttgctaaaagtaggtgtca

SEQ ID NO: 5078099 - DNA, 25 bp, Homo sapien
tcctagagcagtcgaagaactttca

SEQ ID NO: 5078100 - DNA, 25 bp, Homo sapien
ttttagaaagaagcttcgaagtgcc

SEQ ID NO: 5078101 - DNA, 25 bp, Homo sapien
gagaaatgttcaaagggtcctccag

SEQ ID NO: 5078102 - DNA, 25 bp, Homo sapien
tttacatgtgagttgagagtcacga

SEQ ID NO: 5078103 - DNA, 25 bp, Homo sapien
tgactccaggatgcctatagtagat

SEQ ID NO: 5078104 - DNA, 25 bp, Homo sapien
gagaggcttgttgacctttgactcc

SEQ ID NO: 5078105 - DNA, 25 bp, Homo sapien
ggtggcaaatgctacggcgatagaa

SEQ ID NO: 5078106 - DNA, 25 bp, Homo sapien
tccacatcaataggataaagcaggg

SEQ ID NO: 5078107 - DNA, 25 bp, Homo sapien
gtagttcccatctatgacatgttca

SEQ ID NO: 5078108 - DNA, 25 bp, Homo sapien
ttatgtgtagttcccatctatgaca

SEQ ID NO: 5078109 - DNA, 25 bp, Homo sapien
tagttcccatctatgacatgttcac

SEQ ID NO: 5078110 - DNA, 25 bp, Homo sapien
tgtgtagttcccatctatgacatgt

SEQ ID NO: 5078111 - DNA, 25 bp, Homo sapien
ctcggccatccctcagttacctcga

SEQ ID NO: 5078112 - DNA, 25 bp, Homo sapien
caggcaattttctacccaggagtgc

SEQ ID NO: 5078113 - DNA, 25 bp, Homo sapien
aggcaattttctacccaggagtgct

SEQ ID NO: 5078114 - DNA, 25 bp, Homo sapien
ctcagttacctcgattcccggtcag

SEQ ID NO: 5078115 - DNA, 25 bp, Homo sapien
tatgaatacatttagaaacaacatc

SEQ ID NO: 5078116 - DNA, 25 bp, Homo sapien
tgtgtatgatcccttttatctaagc

SEQ ID NO: 5078117 - DNA, 25 bp, Homo sapien
ttatctaagcatccatatttactgg

SEQ ID NO: 5078118 - DNA, 25 bp, Homo sapien
ttagcactttcagtctatgaacatg

SEQ ID NO: 5078119 - DNA, 25 bp, Homo sapien
tgcatgtgtggaaagaatacaggtc

SEQ ID NO: 5078120 - DNA, 25 bp, Homo sapien
caagataagatgttgactctgagtc

SEQ ID NO: 5078121 - DNA, 25 bp, Homo sapien
tcttgtgccaagataagatgttgac

SEQ ID NO: 5078122 - DNA, 25 bp, Homo sapien
gaatacaggtctcctacaaccacca

SEQ ID NO: 5078123 - DNA, 25 bp, Homo sapien
tgctctgtggagaaaaacgtactga

SEQ ID NO: 5078124 - DNA, 25 bp, Homo sapien
ggtgctattttgttctcaattcata

SEQ ID NO: 5078125 - DNA, 25 bp, Homo sapien
atattagttattgaccttgatctcc

SEQ ID NO: 5078126 - DNA, 25 bp, Homo sapien
tataggtgtctttgttgctctgtgg

SEQ ID NO: 5078127 - DNA, 25 bp, Homo sapien
ccaattactcaaaatcatggagcag

SEQ ID NO: 5078128 - DNA, 25 bp, Homo sapien
ggttgaccttttctcaaaccatgcc

SEQ ID NO: 5078129 - DNA, 25 bp, Homo sapien
tactctgggctacctgtgctgacta

SEQ ID NO: 5078130 - DNA, 25 bp, Homo sapien
tgctgactatgctcacaaaatgcct

SEQ ID NO: 5078131 - DNA, 25 bp, Homo sapien
tagaatttaatagccaagtagcctg

SEQ ID NO: 5078132 - DNA, 25 bp, Homo sapien
aatacacttggctgagaacatttcc

SEQ ID NO: 5078133 - DNA, 25 bp, Homo sapien
ggcttgagtagtagataacacatga

SEQ ID NO: 5078134 - DNA, 25 bp, Homo sapien
taaaaggattagacccacttgatac

SEQ ID NO: 5078135 - DNA, 25 bp, Homo sapien
attgttacacaagagctgggaccgc

SEQ ID NO: 5078136 - DNA, 25 bp, Homo sapien
aggctcagcaaattagctgcaagtc

SEQ ID NO: 5078137 - DNA, 25 bp, Homo sapien
aattgttacacaagagctgggaccg

SEQ ID NO: 5078138 - DNA, 25 bp, Homo sapien
aatctcccaaaatccaatcccttct

SEQ ID NO: 5078139 - DNA, 25 bp, Homo sapien
aatgtcaagcttccgaaaaccctct

SEQ ID NO: 5078140 - DNA, 25 bp, Homo sapien
ccctcataaatgtcaagcttccgaa

SEQ ID NO: 5078141 - DNA, 25 bp, Homo sapien
cataaatgtcaagcttccgaaaacc

SEQ ID NO: 5078142 - DNA, 25 bp, Homo sapien
aaaccctctttttcacgggctgcat

SEQ ID NO: 5078143 - DNA, 25 bp, Homo sapien
ctaatatagtggagatgaatcaaag

SEQ ID NO: 5078144 - DNA, 25 bp, Homo sapien
ggaaattgtactaatatagtggaga

SEQ ID NO: 5078145 - DNA, 25 bp, Homo sapien
tgtactaatatagtggagatgaatc

SEQ ID NO: 5078146 - DNA, 25 bp, Homo sapien
caggggggaaattgtactaatatag

SEQ ID NO: 5078147 - DNA, 25 bp, Homo sapien
aaatgtcttgggtccactccttgga

SEQ ID NO: 5078148 - DNA, 25 bp, Homo sapien
ttcactctggagactgatgtcggct

SEQ ID NO: 5078149 - DNA, 25 bp, Homo sapien
gactagttggccttggagaacatct

SEQ ID NO: 5078150 - DNA, 25 bp, Homo sapien
cactttaggagttatgcatcggaga

SEQ ID NO: 5078151 - DNA, 25 bp, Homo sapien
gaaggcaacccttttacaagcaata

SEQ ID NO: 5078152 - DNA, 25 bp, Homo sapien
caagcaatagccacaaatctcatat

SEQ ID NO: 5078153 - DNA, 25 bp, Homo sapien
ctctgctctaaggctatttgtgaag

SEQ ID NO: 5078154 - DNA, 25 bp, Homo sapien
tgctttgttcaaattcaggccactt

SEQ ID NO: 5078155 - DNA, 25 bp, Homo sapien
tcgccattgtaccttgaaccagttg

SEQ ID NO: 5078156 - DNA, 25 bp, Homo sapien
tgagtgtctgctggtaacattgacc

SEQ ID NO: 5078157 - DNA, 25 bp, Homo sapien
cactaaactgcttgatgaaaactgg

SEQ ID NO: 5078158 - DNA, 25 bp, Homo sapien
gagaaatcgtgaagtcatgaccact

SEQ ID NO: 5078159 - DNA, 25 bp, Homo sapien
caaacaggtcagcatatgcaaggac

SEQ ID NO: 5078160 - DNA, 25 bp, Homo sapien
tcagtgcacaataaccttgtctggg

SEQ ID NO: 5078161 - DNA, 25 bp, Homo sapien
tgatagtaatcaagacccaaggaag

SEQ ID NO: 5078162 - DNA, 25 bp, Homo sapien
tgtacccacatcgtgagatccccag

SEQ ID NO: 5078163 - DNA, 25 bp, Homo sapien
tcagtgctcaatgcctctactttag

SEQ ID NO: 5078164 - DNA, 25 bp, Homo sapien
taacagcagcggaaatgacagacgc

SEQ ID NO: 5078165 - DNA, 25 bp, Homo sapien
taagttaatccattctgtatactcc

SEQ ID NO: 5078166 - DNA, 25 bp, Homo sapien
cctgccatagctctggaaagattta

SEQ ID NO: 5078167 - DNA, 25 bp, Homo sapien
gactttatcattgcagtccttgact

SEQ ID NO: 5078168 - DNA, 25 bp, Homo sapien
catttgaagcaactgaactgaacac

SEQ ID NO: 5078169 - DNA, 25 bp, Homo sapien
taaatcttggactgacataggaagc

SEQ ID NO: 5078170 - DNA, 25 bp, Homo sapien
tctaaaatcaacgagctaaggctta

SEQ ID NO: 5078171 - DNA, 25 bp, Homo sapien
ggtcagagaatacgactcttgccac

SEQ ID NO: 5078172 - DNA, 25 bp, Homo sapien
agaatacgactcttgccaccatctt

SEQ ID NO: 5078173 - DNA, 25 bp, Homo sapien
gaatacgactcttgccaccatcttg

SEQ ID NO: 5078174 - DNA, 25 bp, Homo sapien
ccccaggtcagagaatacgactctt

SEQ ID NO: 5078175 - DNA, 25 bp, Homo sapien
ttgacaaaggtaatctaaccagcct

SEQ ID NO: 5078176 - DNA, 25 bp, Homo sapien
ccccattagggtgtagcataagctt

SEQ ID NO: 5078177 - DNA, 25 bp, Homo sapien
taggtggatcctgctctcagagaac

SEQ ID NO: 5078178 - DNA, 25 bp, Homo sapien
tatcaaacttggttgcataaggcaa

SEQ ID NO: 5078179 - DNA, 25 bp, Homo sapien
ggtcagtatgatcagcccctctgtg

SEQ ID NO: 5078180 - DNA, 25 bp, Homo sapien
ggagtctagttgaagccatggccat

SEQ ID NO: 5078181 - DNA, 25 bp, Homo sapien
tcctggactgtaaaccttgcaagag

SEQ ID NO: 5078182 - DNA, 25 bp, Homo sapien
tggactgctgcctaattatctgacg

SEQ ID NO: 5078183 - DNA, 25 bp, Homo sapien
catctgctttgattactttggctga

SEQ ID NO: 5078184 - DNA, 25 bp, Homo sapien
tataccaaaaacgtcaaagcacagc

SEQ ID NO: 5078185 - DNA, 25 bp, Homo sapien
gatagactagctcaccacggtattt

SEQ ID NO: 5078186 - DNA, 25 bp, Homo sapien
gataatatggtaagctctgtgactc

SEQ ID NO: 5078187 - DNA, 25 bp, Homo sapien
gaagcattagatcacctgttgtctg

SEQ ID NO: 5078188 - DNA, 25 bp, Homo sapien
taggacctctgatcgtataggaaca

SEQ ID NO: 5078189 - DNA, 25 bp, Homo sapien
ttcaacggaatgaaaggtcaggagt

SEQ ID NO: 5078190 - DNA, 25 bp, Homo sapien
tctccaaactcgctgtaaggtgcta

SEQ ID NO: 5078191 - DNA, 25 bp, Homo sapien
tgaactgtttcgctggctgcaagtg

SEQ ID NO: 5078192 - DNA, 25 bp, Homo sapien
cggatgaagtcatggacctgaactg

SEQ ID NO: 5078193 - DNA, 25 bp, Homo sapien
tactgggtaatcagtgggtatcgga

SEQ ID NO: 5078194 - DNA, 25 bp, Homo sapien
taatcagtgggtatcggatgaagtc

SEQ ID NO: 5078195 - DNA, 25 bp, Homo sapien
caacaattgtgacatcatagactaa

SEQ ID NO: 5078196 - DNA, 25 bp, Homo sapien
tttgatcctcaaagcaagactgact

SEQ ID NO: 5078197 - DNA, 25 bp, Homo sapien
gaatgtcctaggttatcatccaggg

SEQ ID NO: 5078198 - DNA, 25 bp, Homo sapien
tgtttataacaagctaaggtacaaa

SEQ ID NO: 5078199 - DNA, 25 bp, Homo sapien
ccaatcttattttgatagtcttttg

SEQ ID NO: 5078200 - DNA, 25 bp, Homo sapien
ctccaatcttattttgatagtcttt

SEQ ID NO: 5078201 - DNA, 25 bp, Homo sapien
aatcttattttgatagtcttttgtc

SEQ ID NO: 5078202 - DNA, 25 bp, Homo sapien
tccaatcttattttgatagtctttt

SEQ ID NO: 5078203 - DNA, 25 bp, Homo sapien
ccctcacccaccaataggccctggt

SEQ ID NO: 5078204 - DNA, 25 bp, Homo sapien
ccttgtagtggaatgacgtataatc

SEQ ID NO: 5078205 - DNA, 25 bp, Homo sapien
tgaacatgcagattcgttacacaag

SEQ ID NO: 5078206 - DNA, 25 bp, Homo sapien
ttatatgcatatgtccttgtagtgg

SEQ ID NO: 5078207 - DNA, 25 bp, Homo sapien
cagccaaattggttagtagtttata

SEQ ID NO: 5078208 - DNA, 25 bp, Homo sapien
ctacttcaactttggcagccaaatt

SEQ ID NO: 5078209 - DNA, 25 bp, Homo sapien
cgttaccaacgtgattctctacttc

SEQ ID NO: 5078210 - DNA, 25 bp, Homo sapien
taattgagagttggatcagtgttga

SEQ ID NO: 5078211 - DNA, 25 bp, Homo sapien
ttgtatcgatagggtagtatatttc

SEQ ID NO: 5078212 - DNA, 25 bp, Homo sapien
cttgtatcgatagggtagtatattt

SEQ ID NO: 5078213 - DNA, 25 bp, Homo sapien
tatatttccattgccctcactgtct

SEQ ID NO: 5078214 - DNA, 25 bp, Homo sapien
gattctgggtattaggacacggaca

SEQ ID NO: 5078215 - DNA, 25 bp, Homo sapien
catctttgaagacccattggccatg

SEQ ID NO: 5078216 - DNA, 25 bp, Homo sapien
gagcccttagattcagccaatgtag

SEQ ID NO: 5078217 - DNA, 25 bp, Homo sapien
gacacggacattttgcagggccatt

SEQ ID NO: 5078218 - DNA, 25 bp, Homo sapien
tgtaaactaaggttagggcatctct

SEQ ID NO: 5078219 - DNA, 25 bp, Homo sapien
tggccaccattagcatcaaataaag

SEQ ID NO: 5078220 - DNA, 25 bp, Homo sapien
taggcaatctggaacttcaaagcat

SEQ ID NO: 5078221 - DNA, 25 bp, Homo sapien
gctccttggccaccattagcatcaa

SEQ ID NO: 5078222 - DNA, 25 bp, Homo sapien
ggattgtgaagtcaataaccattac

SEQ ID NO: 5078223 - DNA, 25 bp, Homo sapien
tagaacttcattcatcccagcatgt

SEQ ID NO: 5078224 - DNA, 25 bp, Homo sapien
tgactctatagttccatatccagaa

SEQ ID NO: 5078225 - DNA, 25 bp, Homo sapien
tccacatacttccataagcatacag

SEQ ID NO: 5078226 - DNA, 25 bp, Homo sapien
tcttctgctcctatacgccatcctc

SEQ ID NO: 5078227 - DNA, 25 bp, Homo sapien
gctcctatacgccatcctccatcgc

SEQ ID NO: 5078228 - DNA, 25 bp, Homo sapien
tctgctcctatacgccatcctccat

SEQ ID NO: 5078229 - DNA, 25 bp, Homo sapien
ctatacgccatcctccatcgcccat

SEQ ID NO: 5078230 - DNA, 25 bp, Homo sapien
tgcaaacgagggtccatggcacagc

SEQ ID NO: 5078231 - DNA, 25 bp, Homo sapien
cttccaggccacaggagctttcgtg

SEQ ID NO: 5078232 - DNA, 25 bp, Homo sapien
ggagctttcgtgatgaacctatcag

SEQ ID NO: 5078233 - DNA, 25 bp, Homo sapien
tgaacctatcagtttgttgactgaa

SEQ ID NO: 5078234 - DNA, 25 bp, Homo sapien
tcctggtcagaactctggcttagaa

SEQ ID NO: 5078235 - DNA, 25 bp, Homo sapien
tcagcccagacagcaaacaatgggt

SEQ ID NO: 5078236 - DNA, 25 bp, Homo sapien
tagaattggtgctattcagcccaga

SEQ ID NO: 5078237 - DNA, 25 bp, Homo sapien
gagatgcttcctacctttgcttaac

SEQ ID NO: 5078238 - DNA, 25 bp, Homo sapien
ggatcctaagctttctaggacccag

SEQ ID NO: 5078239 - DNA, 25 bp, Homo sapien
ggcatgtactacatttccagacact

SEQ ID NO: 5078240 - DNA, 25 bp, Homo sapien
aaatgagttagagtagggttttgca

SEQ ID NO: 5078241 - DNA, 25 bp, Homo sapien
tagagtagggttttgcataggatcc

SEQ ID NO: 5078242 - DNA, 25 bp, Homo sapien
ctttgcatagtagaggtggagaggc

SEQ ID NO: 5078243 - DNA, 25 bp, Homo sapien
ctcagtcttggagtgttttcatggg

SEQ ID NO: 5078244 - DNA, 25 bp, Homo sapien
gggaaacgcagaccttcttaatgca

SEQ ID NO: 5078245 - DNA, 25 bp, Homo sapien
gaccttcttaatgcaagtagaactc

SEQ ID NO: 5078246 - DNA, 25 bp, Homo sapien
agcagaggcactctcacattttttt

SEQ ID NO: 5078247 - DNA, 25 bp, Homo sapien
ttcatataaccaaaagcagaggcac

SEQ ID NO: 5078248 - DNA, 25 bp, Homo sapien
cattttttttcagtccactggaaca

SEQ ID NO: 5078249 - DNA, 25 bp, Homo sapien
tccttcatataaccaaaagcagagg

SEQ ID NO: 5078250 - DNA, 25 bp, Homo sapien
gggcagggtactccacatcaactgc

SEQ ID NO: 5078251 - DNA, 25 bp, Homo sapien
catcaactgctacaaagggagaaat

SEQ ID NO: 5078252 - DNA, 25 bp, Homo sapien
gggtactccacatcaactgctacaa

SEQ ID NO: 5078253 - DNA, 25 bp, Homo sapien
tccacatcaactgctacaaagggag

SEQ ID NO: 5078254 - DNA, 25 bp, Homo sapien
gatactacagattagagctgctgga

SEQ ID NO: 5078255 - DNA, 25 bp, Homo sapien
caacaagagacatgcgctgctgagt

SEQ ID NO: 5078256 - DNA, 25 bp, Homo sapien
taggacacactgtaacgccacatgc

SEQ ID NO: 5078257 - DNA, 25 bp, Homo sapien
cacttgaggagggttgtcaggccaa

SEQ ID NO: 5078258 - DNA, 25 bp, Homo sapien
gcattaggcaggattatattcagtt

SEQ ID NO: 5078259 - DNA, 25 bp, Homo sapien
ttccaaggttatcaagcaaattagt

SEQ ID NO: 5078260 - DNA, 25 bp, Homo sapien
cagtttatgtgcctatgtactgagg

SEQ ID NO: 5078261 - DNA, 25 bp, Homo sapien
taacagtaaagcacactcagaaatt

SEQ ID NO: 5078262 - DNA, 25 bp, Homo sapien
catggtattagtagcaaaggcaaca

SEQ ID NO: 5078263 - DNA, 25 bp, Homo sapien
tctcatggtagatatagggtatgcc

SEQ ID NO: 5078264 - DNA, 25 bp, Homo sapien
catgaaggaattttgggtgtcacca

SEQ ID NO: 5078265 - DNA, 25 bp, Homo sapien
gctgcaacacagatggacctcaaat

SEQ ID NO: 5078266 - DNA, 25 bp, Homo sapien
ttttttcctgcaaatgtgtttgagt

SEQ ID NO: 5078267 - DNA, 25 bp, Homo sapien
gtttttttcctgcaaatgtgtttga

SEQ ID NO: 5078268 - DNA, 25 bp, Homo sapien
cctgcaaatgtgtttgagttcattg

SEQ ID NO: 5078269 - DNA, 25 bp, Homo sapien
tttcctgcaaatgtgtttgagttca

SEQ ID NO: 5078270 - DNA, 25 bp, Homo sapien
tatcccctagtatattgctttgcac

SEQ ID NO: 5078271 - DNA, 25 bp, Homo sapien
tataattgaattatggctattgccc

SEQ ID NO: 5078272 - DNA, 25 bp, Homo sapien
tttgcttacaaaataccactgctac

SEQ ID NO: 5078273 - DNA, 25 bp, Homo sapien
tttcaagctgcatacttcaaggcac

SEQ ID NO: 5078274 - DNA, 25 bp, Homo sapien
ttattttatgtagcagaggttctta

SEQ ID NO: 5078275 - DNA, 25 bp, Homo sapien
gaatttaggattcattaaagccagt

SEQ ID NO: 5078276 - DNA, 25 bp, Homo sapien
aattctgttggtgtggtgtgtacta

SEQ ID NO: 5078277 - DNA, 25 bp, Homo sapien
cccagtctatgatttgtcttcacat

SEQ ID NO: 5078278 - DNA, 25 bp, Homo sapien
gtcctgtctcctccccgttcttctc

SEQ ID NO: 5078279 - DNA, 25 bp, Homo sapien
atgcatttctagccctctccacctg

SEQ ID NO: 5078280 - DNA, 25 bp, Homo sapien
catgcatttctagccctctccacct

SEQ ID NO: 5078281 - DNA, 25 bp, Homo sapien
caacagctatttctgagactccagg

SEQ ID NO: 5078282 - DNA, 25 bp, Homo sapien
agactccaggtccaagaatctccat

SEQ ID NO: 5078283 - DNA, 25 bp, Homo sapien
ctctctcagcttcaacagctatttc

SEQ ID NO: 5078284 - DNA, 25 bp, Homo sapien
agcagcttgccacagtctctctcag

SEQ ID NO: 5078285 - DNA, 25 bp, Homo sapien
caaactttttggcaatgacccacag

SEQ ID NO: 5078286 - DNA, 25 bp, Homo sapien
cattgatatttattcaccacagagg

SEQ ID NO: 5078287 - DNA, 25 bp, Homo sapien
cagcaacttttggaactgtgtcagg

SEQ ID NO: 5078288 - DNA, 25 bp, Homo sapien
tgacccacagtagaacgcatttgat

SEQ ID NO: 5078289 - DNA, 25 bp, Homo sapien
ttaattatcaatttcatacacataa

SEQ ID NO: 5078290 - DNA, 25 bp, Homo sapien
ttatcaatttcatacacataatttc

SEQ ID NO: 5078291 - DNA, 25 bp, Homo sapien
taattatcaatttcatacacataat

SEQ ID NO: 5078292 - DNA, 25 bp, Homo sapien
gtcacattgatcattgagctctcta

SEQ ID NO: 5078293 - DNA, 25 bp, Homo sapien
aagctcagtcacattgatcattgag

SEQ ID NO: 5078294 - DNA, 25 bp, Homo sapien
cattgatcattgagctctctaacat

SEQ ID NO: 5078295 - DNA, 25 bp, Homo sapien
cttcttcaataagctcagtcacatt

SEQ ID NO: 5078296 - DNA, 25 bp, Homo sapien
ggaatcaaatatcaacatggcagat

SEQ ID NO: 5078297 - DNA, 25 bp, Homo sapien
aaaattcatcgctaatagactagcc

SEQ ID NO: 5078298 - DNA, 25 bp, Homo sapien
catgaatgtgtaaaactcacagggc

SEQ ID NO: 5078299 - DNA, 25 bp, Homo sapien
cacaatgtagggagataaaggaatc

SEQ ID NO: 5078300 - DNA, 25 bp, Homo sapien
cttcataggtatttcactgtctttc

SEQ ID NO: 5078301 - DNA, 25 bp, Homo sapien
tgtatcctgaaacctcgctaaattt

SEQ ID NO: 5078302 - DNA, 25 bp, Homo sapien
cacctgcttgtttaaatgtcttcat

SEQ ID NO: 5078303 - DNA, 25 bp, Homo sapien
tgaaattgtgctcttgatttgactc

SEQ ID NO: 5078304 - DNA, 25 bp, Homo sapien
ttttctggatccacgtggctatcca

SEQ ID NO: 5078305 - DNA, 25 bp, Homo sapien
attttctggatccacgtggctatcc

SEQ ID NO: 5078306 - DNA, 25 bp, Homo sapien
tttctggatccacgtggctatccat

SEQ ID NO: 5078307 - DNA, 25 bp, Homo sapien
ccaaattctgagtacaacagaggat

SEQ ID NO: 5078308 - DNA, 25 bp, Homo sapien
gatatagttatgactattaatcagc

SEQ ID NO: 5078309 - DNA, 25 bp, Homo sapien
gtacaacagaggatgtagaatattg

SEQ ID NO: 5078310 - DNA, 25 bp, Homo sapien
tatgactattaatcagcatactggg

SEQ ID NO: 5078311 - DNA, 25 bp, Homo sapien
cttcagtttgctgtcaacacttttt

SEQ ID NO: 5078312 - DNA, 25 bp, Homo sapien
tatcaatatgctgaataagcagtaa

SEQ ID NO: 5078313 - DNA, 25 bp, Homo sapien
cagtttgctgtcaacactttttgtt

SEQ ID NO: 5078314 - DNA, 25 bp, Homo sapien
tagagaagactctatcaatatgctg

SEQ ID NO: 5078315 - DNA, 25 bp, Homo sapien
tttttgagacggagtcttgctctgt

SEQ ID NO: 5078316 - DNA, 25 bp, Homo sapien
ttttttgagacggagtcttgctctg

SEQ ID NO: 5078317 - DNA, 25 bp, Homo sapien
aaaaaagaaactaccaatctgatct

SEQ ID NO: 5078318 - DNA, 25 bp, Homo sapien
aagaaactaccaatctgatcttttt

SEQ ID NO: 5078319 - DNA, 25 bp, Homo sapien
tttattatagccataggccttattt

SEQ ID NO: 5078320 - DNA, 25 bp, Homo sapien
gctgaagctaggacattagtatttc

SEQ ID NO: 5078321 - DNA, 25 bp, Homo sapien
agatttcattacattgccagttatt

SEQ ID NO: 5078322 - DNA, 25 bp, Homo sapien
aagcttaatcaacactacagttgta

SEQ ID NO: 5078323 - DNA, 25 bp, Homo sapien
tacggttcacttgatagcactcggt

SEQ ID NO: 5078324 - DNA, 25 bp, Homo sapien
atagcactcggtgggccaacaggtc

SEQ ID NO: 5078325 - DNA, 25 bp, Homo sapien
tcacttgatagcactcggtgggcca

SEQ ID NO: 5078326 - DNA, 25 bp, Homo sapien
cttgctgctacggttcacttgatag

SEQ ID NO: 5078327 - DNA, 25 bp, Homo sapien
tcctgagtcccagatacggaaccag

SEQ ID NO: 5078328 - DNA, 25 bp, Homo sapien
cccagatacggaaccaggaactcat

SEQ ID NO: 5078329 - DNA, 25 bp, Homo sapien
gaacgtcttcatcatgtgctgcatg

SEQ ID NO: 5078330 - DNA, 25 bp, Homo sapien
ctgcatgattgtgctgtttggctcc

SEQ ID NO: 5078331 - DNA, 25 bp, Homo sapien
gctatttgggacattgctgatgaat

SEQ ID NO: 5078332 - DNA, 25 bp, Homo sapien
cttggtgtgctttggctataaagat

SEQ ID NO: 5078333 - DNA, 25 bp, Homo sapien
aagatgattggagacatcctgctat

SEQ ID NO: 5078334 - DNA, 25 bp, Homo sapien
gatgattggagacatcctgctattt

SEQ ID NO: 5078335 - DNA, 25 bp, Homo sapien
tcaggatgtaattggggccttagag

SEQ ID NO: 5078336 - DNA, 25 bp, Homo sapien
ggatgtaattggggccttagagtga

SEQ ID NO: 5078337 - DNA, 25 bp, Homo sapien
gatgtaattggggccttagagtgag

SEQ ID NO: 5078338 - DNA, 25 bp, Homo sapien
caggatgtaattggggccttagagt

SEQ ID NO: 5078339 - DNA, 25 bp, Homo sapien
tcactggcctgtttagatattcgat

SEQ ID NO: 5078340 - DNA, 25 bp, Homo sapien
ttagagaagagtccctatttcctta

SEQ ID NO: 5078341 - DNA, 25 bp, Homo sapien
tacatttagtgaaattcggtgtgaa

SEQ ID NO: 5078342 - DNA, 25 bp, Homo sapien
tccagcaggtatgatacagcctttc

SEQ ID NO: 5078343 - DNA, 25 bp, Homo sapien
gagtttttaacaggaagcattgtcg

SEQ ID NO: 5078344 - DNA, 25 bp, Homo sapien
tccagcttttatctattgtgtgatg

SEQ ID NO: 5078345 - DNA, 25 bp, Homo sapien
gaatttgatcaaaagtcgttactgc

SEQ ID NO: 5078346 - DNA, 25 bp, Homo sapien
ttgatttctatatgctgaagcagct

SEQ ID NO: 5078347 - DNA, 25 bp, Homo sapien
ggcaccaatatttgaaagagagctt

SEQ ID NO: 5078348 - DNA, 25 bp, Homo sapien
tcatgagcaaaccttggcatcttta

SEQ ID NO: 5078349 - DNA, 25 bp, Homo sapien
taatctcataaaggtgatagactgc

SEQ ID NO: 5078350 - DNA, 25 bp, Homo sapien
cctaattggcatctcaccctcaggg

SEQ ID NO: 5078351 - DNA, 25 bp, Homo sapien
cccagaagcataggatgatactccc

SEQ ID NO: 5078352 - DNA, 25 bp, Homo sapien
cagaagcataggatgatactcccag

SEQ ID NO: 5078353 - DNA, 25 bp, Homo sapien
cccaggttttcagcgcattttgcca

SEQ ID NO: 5078354 - DNA, 25 bp, Homo sapien
gatgatactcccaggttttcagcgc

SEQ ID NO: 5078355 - DNA, 25 bp, Homo sapien
aagacgattggtgaagctgattcta

SEQ ID NO: 5078356 - DNA, 25 bp, Homo sapien
cgattggtgaagctgattctaagag

SEQ ID NO: 5078357 - DNA, 25 bp, Homo sapien
tcaaagacgattggtgaagctgatt

SEQ ID NO: 5078358 - DNA, 25 bp, Homo sapien
ttggtgaagctgattctaagagtca

SEQ ID NO: 5078359 - DNA, 25 bp, Homo sapien
atgactagtaattatggggagacgt

SEQ ID NO: 5078360 - DNA, 25 bp, Homo sapien
tgactagtaattatggggagacgtg

SEQ ID NO: 5078361 - DNA, 25 bp, Homo sapien
actagtaattatggggagacgtggg

SEQ ID NO: 5078362 - DNA, 25 bp, Homo sapien
gactagtaattatggggagacgtgg

SEQ ID NO: 5078363 - DNA, 25 bp, Homo sapien
gatgtgagcacatgtctgctgttgt

SEQ ID NO: 5078364 - DNA, 25 bp, Homo sapien
tgagcacatgtctgctgttgtctgc

SEQ ID NO: 5078365 - DNA, 25 bp, Homo sapien
tgtgagcacatgtctgctgttgtct

SEQ ID NO: 5078366 - DNA, 25 bp, Homo sapien
tcagatgtgagcacatgtctgctgt

SEQ ID NO: 5078367 - DNA, 25 bp, Homo sapien
gtgacctgaagtcaacgaatagctc

SEQ ID NO: 5078368 - DNA, 25 bp, Homo sapien
cctgaagtcaacgaatagctcctgt

SEQ ID NO: 5078369 - DNA, 25 bp, Homo sapien
tgaagtcaacgaatagctcctgttt

SEQ ID NO: 5078370 - DNA, 25 bp, Homo sapien
gacctgaagtcaacgaatagctcct

SEQ ID NO: 5078371 - DNA, 25 bp, Homo sapien
agaacctgttggaattgtgcaaagg

SEQ ID NO: 5078372 - DNA, 25 bp, Homo sapien
gaacctgttggaattgtgcaaaggg

SEQ ID NO: 5078373 - DNA, 25 bp, Homo sapien
aattgtgcaaagggtggctcccagt

SEQ ID NO: 5078374 - DNA, 25 bp, Homo sapien
aagaacctgttggaattgtgcaaag

SEQ ID NO: 5078375 - DNA, 25 bp, Homo sapien
gaatcatcatatgcaataattgtgt

SEQ ID NO: 5078376 - DNA, 25 bp, Homo sapien
gctgactttcaaaacttccacaatt

SEQ ID NO: 5078377 - DNA, 25 bp, Homo sapien
tataatctggatatctgaatcatca

SEQ ID NO: 5078378 - DNA, 25 bp, Homo sapien
ggcgattggcacaagctgatggaaa

SEQ ID NO: 5078379 - DNA, 25 bp, Homo sapien
agcaatgggttggagttggactccc

SEQ ID NO: 5078380 - DNA, 25 bp, Homo sapien
agcttggccaagaagcaatgggttg

SEQ ID NO: 5078381 - DNA, 25 bp, Homo sapien
cagagctttcttcaggtcctttgtt

SEQ ID NO: 5078382 - DNA, 25 bp, Homo sapien
cttggccaagaagcaatgggttgga

SEQ ID NO: 5078383 - DNA, 25 bp, Homo sapien
tcttagggacaaatagaaggtcgaa

SEQ ID NO: 5078384 - DNA, 25 bp, Homo sapien
tagaaggtcgaactatttggcttgc

SEQ ID NO: 5078385 - DNA, 25 bp, Homo sapien
aatttactgctgaatttcttaggga

SEQ ID NO: 5078386 - DNA, 25 bp, Homo sapien
tttggcttgcctacatccttcatcc

SEQ ID NO: 5078387 - DNA, 25 bp, Homo sapien
tatatatgctgctgaagcaagcacc

SEQ ID NO: 5078388 - DNA, 25 bp, Homo sapien
catgctaatctctatattattccaa

SEQ ID NO: 5078389 - DNA, 25 bp, Homo sapien
gccatgctaatctctatattattcc

SEQ ID NO: 5078390 - DNA, 25 bp, Homo sapien
ttttagtatatatgctgctgaagca

SEQ ID NO: 5078391 - DNA, 25 bp, Homo sapien
gaactccctctactgattaaatgaa

SEQ ID NO: 5078392 - DNA, 25 bp, Homo sapien
taaagactcaccttaccaaatgtag

SEQ ID NO: 5078393 - DNA, 25 bp, Homo sapien
tttttggctgggatctaagctctca

SEQ ID NO: 5078394 - DNA, 25 bp, Homo sapien
gaggcatatgataccagaactccct

SEQ ID NO: 5078395 - DNA, 25 bp, Homo sapien
gccactttgagaaagacagttcttg

SEQ ID NO: 5078396 - DNA, 25 bp, Homo sapien
gattgtcgtaagtcactagatttgc

SEQ ID NO: 5078397 - DNA, 25 bp, Homo sapien
tgacattcgtggaatgacattcctg

SEQ ID NO: 5078398 - DNA, 25 bp, Homo sapien
ttggttggtacagttgtcccctgca

SEQ ID NO: 5078399 - DNA, 25 bp, Homo sapien
ttgctgttcggaagtcactctgcca

SEQ ID NO: 5078400 - DNA, 25 bp, Homo sapien
tcttcgcctgtcattgaaaggacat

SEQ ID NO: 5078401 - DNA, 25 bp, Homo sapien
aaatctatacttggaattgctccag

SEQ ID NO: 5078402 - DNA, 25 bp, Homo sapien
ccagtgagaacttttaagtgtagtt

SEQ ID NO: 5078403 - DNA, 25 bp, Homo sapien
gaacaaaatcaacgtgtcagctggg

SEQ ID NO: 5078404 - DNA, 25 bp, Homo sapien
gaatttctaggcttgtggctccatc

SEQ ID NO: 5078405 - DNA, 25 bp, Homo sapien
catgaacctgaattagacttgcaca

SEQ ID NO: 5078406 - DNA, 25 bp, Homo sapien
gtgattactatttggcctgctacag

SEQ ID NO: 5078407 - DNA, 25 bp, Homo sapien
tcatcacatttgagtacaattagac

SEQ ID NO: 5078408 - DNA, 25 bp, Homo sapien
atcttctacatgcagtaaaatgagt

SEQ ID NO: 5078409 - DNA, 25 bp, Homo sapien
ttctacatgcagtaaaatgagttca

SEQ ID NO: 5078410 - DNA, 25 bp, Homo sapien
cacatttgagtacaattagacctaa

SEQ ID NO: 5078411 - DNA, 25 bp, Homo sapien
ccctgacataggctgcgaatctgtt

SEQ ID NO: 5078412 - DNA, 25 bp, Homo sapien
ctgacataggctgcgaatctgttcc

SEQ ID NO: 5078413 - DNA, 25 bp, Homo sapien
acataggctgcgaatctgttccgct

SEQ ID NO: 5078414 - DNA, 25 bp, Homo sapien
ggctgcgaatctgttccgcttccat

SEQ ID NO: 5078415 - DNA, 25 bp, Homo sapien
tcaagaaacagcacggtctgacata

SEQ ID NO: 5078416 - DNA, 25 bp, Homo sapien
caagaaacagcacggtctgacatat

SEQ ID NO: 5078417 - DNA, 25 bp, Homo sapien
ccccaggaatgagaacaagtctcct

SEQ ID NO: 5078418 - DNA, 25 bp, Homo sapien
ttaacatcatcgcttgctgagctta

SEQ ID NO: 5078419 - DNA, 25 bp, Homo sapien
gtctcctgcaaatcgaaaaatgaat

SEQ ID NO: 5078420 - DNA, 25 bp, Homo sapien
gcttgctgagcttatgtactttcta

SEQ ID NO: 5078421 - DNA, 25 bp, Homo sapien
ttcaccttgcttaactacccgatca

SEQ ID NO: 5078422 - DNA, 25 bp, Homo sapien
accttgcttaactacccgatcatca

SEQ ID NO: 5078423 - DNA, 25 bp, Homo sapien
gcttaactacccgatcatcaagtcc

SEQ ID NO: 5078424 - DNA, 25 bp, Homo sapien
aactacccgatcatcaagtccaggg

SEQ ID NO: 5078425 - DNA, 25 bp, Homo sapien
cacaggctggatgggtcaaagtctt

SEQ ID NO: 5078426 - DNA, 25 bp, Homo sapien
gatgaaacgtaaaaagagtatgcct

SEQ ID NO: 5078427 - DNA, 25 bp, Homo sapien
gtcttttgaagagtagaactttgcc

SEQ ID NO: 5078428 - DNA, 25 bp, Homo sapien
tcaaagtctttcctagcgtggcagc

SEQ ID NO: 5078429 - DNA, 25 bp, Homo sapien
tccctgtttgtacaattaatctact

SEQ ID NO: 5078430 - DNA, 25 bp, Homo sapien
tgcttccctgtttgtacaattaatc

SEQ ID NO: 5078431 - DNA, 25 bp, Homo sapien
gcttccctgtttgtacaattaatct

SEQ ID NO: 5078432 - DNA, 25 bp, Homo sapien
cctgtttgtacaattaatctacttc

SEQ ID NO: 5078433 - DNA, 25 bp, Homo sapien
cagaggcagaataaagctcacatca

SEQ ID NO: 5078434 - DNA, 25 bp, Homo sapien
tgctcaagtagtatggaacttaagt

SEQ ID NO: 5078435 - DNA, 25 bp, Homo sapien
ttccacttggtagaactaaatgctc

SEQ ID NO: 5078436 - DNA, 25 bp, Homo sapien
gaacttaagtataaggtcatcctca

SEQ ID NO: 5078437 - DNA, 25 bp, Homo sapien
ctccttgacccttgcatttggactc

SEQ ID NO: 5078438 - DNA, 25 bp, Homo sapien
actccttgacccttgcatttggact

SEQ ID NO: 5078439 - DNA, 25 bp, Homo sapien
tagtgaaagaccattgcctgcatgt

SEQ ID NO: 5078440 - DNA, 25 bp, Homo sapien
tcgtgtctcccttatttctttgtgc

SEQ ID NO: 5078441 - DNA, 25 bp, Homo sapien
aagcatgaaggtaaaggatttccct

SEQ ID NO: 5078442 - DNA, 25 bp, Homo sapien
ttctttgtgcttctatagtcctctt

SEQ ID NO: 5078443 - DNA, 25 bp, Homo sapien
catgaaggtaaaggatttcccttgg

SEQ ID NO: 5078444 - DNA, 25 bp, Homo sapien
tttctgcacgataatcttcataata

SEQ ID NO: 5078445 - DNA, 25 bp, Homo sapien
cacgataatcttcataatatacagc

SEQ ID NO: 5078446 - DNA, 25 bp, Homo sapien
tatgatttagtctggatctgttttt

SEQ ID NO: 5078447 - DNA, 25 bp, Homo sapien
aactgtatagttgcaattagatgtc

SEQ ID NO: 5078448 - DNA, 25 bp, Homo sapien
tatgcacatttccgtaagtatggca

SEQ ID NO: 5078449 - DNA, 25 bp, Homo sapien
atgcacatttccgtaagtatggcat

SEQ ID NO: 5078450 - DNA, 25 bp, Homo sapien
cttatgcacatttccgtaagtatgg

SEQ ID NO: 5078451 - DNA, 25 bp, Homo sapien
ttatgcacatttccgtaagtatggc

SEQ ID NO: 5078452 - DNA, 25 bp, Homo sapien
ggaatactacttccagtgtgagcca

SEQ ID NO: 5078453 - DNA, 25 bp, Homo sapien
ctggaatactacttccagtgtgagc

SEQ ID NO: 5078454 - DNA, 25 bp, Homo sapien
gaatactacttccagtgtgagccat

SEQ ID NO: 5078455 - DNA, 25 bp, Homo sapien
atctggaatactacttccagtgtga

SEQ ID NO: 5078456 - DNA, 25 bp, Homo sapien
tatatccagattaccaatcgtgtct

SEQ ID NO: 5078457 - DNA, 25 bp, Homo sapien
gagtctagctttatatccagattac

SEQ ID NO: 5078458 - DNA, 25 bp, Homo sapien
gcgtttcttcaaaattggctttctg

SEQ ID NO: 5078459 - DNA, 25 bp, Homo sapien
gattaccaatcgtgtctttagacat

SEQ ID NO: 5078460 - DNA, 25 bp, Homo sapien
ccaagttttggatggcagaaatggt

SEQ ID NO: 5078461 - DNA, 25 bp, Homo sapien
gctgttgctttaccactattcttgc

SEQ ID NO: 5078462 - DNA, 25 bp, Homo sapien
taacagtctgcactgccaagttttg

SEQ ID NO: 5078463 - DNA, 25 bp, Homo sapien
gggcaacgcacagtccagttcctct

SEQ ID NO: 5078464 - DNA, 25 bp, Homo sapien
cagctcccggtttgtgtcatttgta

SEQ ID NO: 5078465 - DNA, 25 bp, Homo sapien
gtcttacaattgctatcagctagga

SEQ ID NO: 5078466 - DNA, 25 bp, Homo sapien
tggaacaggccatataatgaaaaac

SEQ ID NO: 5078467 - DNA, 25 bp, Homo sapien
cagctaggaataacttgtggtcaaa

SEQ ID NO: 5078468 - DNA, 25 bp, Homo sapien
gagctgtgcagcgttagagatgttc

SEQ ID NO: 5078469 - DNA, 25 bp, Homo sapien
cccggtaattgagaggacagatccc

SEQ ID NO: 5078470 - DNA, 25 bp, Homo sapien
taactccaggcttcacgagctgtgc

SEQ ID NO: 5078471 - DNA, 25 bp, Homo sapien
tctgaagttcagtctcggcatggcc

SEQ ID NO: 5078472 - DNA, 25 bp, Homo sapien
tgaagagagttgctttggaccacat

SEQ ID NO: 5078473 - DNA, 25 bp, Homo sapien
cacatagctgactaaaggccacatt

SEQ ID NO: 5078474 - DNA, 25 bp, Homo sapien
gctttggaccacatagctgactaaa

SEQ ID NO: 5078475 - DNA, 25 bp, Homo sapien
aactgacattaattttggaacctga

SEQ ID NO: 5078476 - DNA, 25 bp, Homo sapien
cttgggactctgacgtataattacc

SEQ ID NO: 5078477 - DNA, 25 bp, Homo sapien
gggactctgacgtataattaccatt

SEQ ID NO: 5078478 - DNA, 25 bp, Homo sapien
cttccacttgggactctgacgtata

SEQ ID NO: 5078479 - DNA, 25 bp, Homo sapien
gacgtataattaccattccagtcat

SEQ ID NO: 5078480 - DNA, 25 bp, Homo sapien
acaagtttacaaggtttgagaagag

SEQ ID NO: 5078481 - DNA, 25 bp, Homo sapien
gtttacaaggtttgagaagagctga

SEQ ID NO: 5078482 - DNA, 25 bp, Homo sapien
gggcagtaattggatgctgttccaa

SEQ ID NO: 5078483 - DNA, 25 bp, Homo sapien
aaggggcagtaattggatgctgttc

SEQ ID NO: 5078484 - DNA, 25 bp, Homo sapien
ttggcgctgaatctgggccccggtt

SEQ ID NO: 5078485 - DNA, 25 bp, Homo sapien
cttccctgtatttggcgctgaatct

SEQ ID NO: 5078486 - DNA, 25 bp, Homo sapien
tgggccccggttctattcacagcca

SEQ ID NO: 5078487 - DNA, 25 bp, Homo sapien
atctgggccccggttctattcacag

SEQ ID NO: 5078488 - DNA, 25 bp, Homo sapien
tcttcagatttaaccaaagttacca

SEQ ID NO: 5078489 - DNA, 25 bp, Homo sapien
tttcttagttttttattatcattca

SEQ ID NO: 5078490 - DNA, 25 bp, Homo sapien
caaagttaccacttcatttcttagt

SEQ ID NO: 5078491 - DNA, 25 bp, Homo sapien
ccaaagttaccacttcatttcttag

SEQ ID NO: 5078492 - DNA, 25 bp, Homo sapien
tgtagagaccacggaaggttggaaa

SEQ ID NO: 5078493 - DNA, 25 bp, Homo sapien
tacagctttatagatatccttgtct

SEQ ID NO: 5078494 - DNA, 25 bp, Homo sapien
ttcccttggagtgtacttgtaactg

SEQ ID NO: 5078495 - DNA, 25 bp, Homo sapien
tatagatatccttgtctcctaaaat

SEQ ID NO: 5078496 - DNA, 25 bp, Homo sapien
tgtaactggaattattacagcttta

SEQ ID NO: 5078497 - DNA, 25 bp, Homo sapien
ctgacttttttgacctaactgattt

SEQ ID NO: 5078498 - DNA, 25 bp, Homo sapien
tcctgccagattccggccacttctg

SEQ ID NO: 5078499 - DNA, 25 bp, Homo sapien
tctgctctgacttttttgacctaac

SEQ ID NO: 5078500 - DNA, 25 bp, Homo sapien
ttctgatttaatccacactcttgac

SEQ ID NO: 5078501 - DNA, 25 bp, Homo sapien
ctcatattcatacgggccattgtgt

SEQ ID NO: 5078502 - DNA, 25 bp, Homo sapien
tacgggccattgtgtgcaaatgcct

SEQ ID NO: 5078503 - DNA, 25 bp, Homo sapien
caaatgcctgctttggagagttgat

SEQ ID NO: 5078504 - DNA, 25 bp, Homo sapien
gcaaatgcctgctttggagagttga

SEQ ID NO: 5078505 - DNA, 25 bp, Homo sapien
caaatgcaaccattccttgaaagcc

SEQ ID NO: 5078506 - DNA, 25 bp, Homo sapien
cttagggagcctatcacacctttga

SEQ ID NO: 5078507 - DNA, 25 bp, Homo sapien
tgtcaaaatataagaagcccttttc

SEQ ID NO: 5078508 - DNA, 25 bp, Homo sapien
tctggatatgttgtcttagggagcc

SEQ ID NO: 5078509 - DNA, 25 bp, Homo sapien
aaatttgaccttcaatcctagaatt

SEQ ID NO: 5078510 - DNA, 25 bp, Homo sapien
atttgaccttcaatcctagaatttc

SEQ ID NO: 5078511 - DNA, 25 bp, Homo sapien
tttgaccttcaatcctagaatttct

SEQ ID NO: 5078512 - DNA, 25 bp, Homo sapien
cattcctgaaggtatagcaacaaag

SEQ ID NO: 5078513 - DNA, 25 bp, Homo sapien
tttgcattcctgaaggtatagcaac

SEQ ID NO: 5078514 - DNA, 25 bp, Homo sapien
cctgaaggtatagcaacaaagaagt

SEQ ID NO: 5078515 - DNA, 25 bp, Homo sapien
tcctgaaggtatagcaacaaagaag

SEQ ID NO: 5078516 - DNA, 25 bp, Homo sapien
tagcactagtcccactctgaatcct

SEQ ID NO: 5078517 - DNA, 25 bp, Homo sapien
tgtcttccctagcactagtcccact

SEQ ID NO: 5078518 - DNA, 25 bp, Homo sapien
cttttagtcccttcttgtcttgctg

SEQ ID NO: 5078519 - DNA, 25 bp, Homo sapien
tccttttagtcccttcttgtcttgc

SEQ ID NO: 5078520 - DNA, 25 bp, Homo sapien
aacgacatacgcgttctgtgctctg

SEQ ID NO: 5078521 - DNA, 25 bp, Homo sapien
tacgcgttctgtgctctgtctccct

SEQ ID NO: 5078522 - DNA, 25 bp, Homo sapien
tacaacgacatacgcgttctgtgct

SEQ ID NO: 5078523 - DNA, 25 bp, Homo sapien
gatgctacaacgacatacgcgttct

SEQ ID NO: 5078524 - DNA, 25 bp, Homo sapien
cactcaaagtgaagttccagggaat

SEQ ID NO: 5078525 - DNA, 25 bp, Homo sapien
tcactcaaagtgaagttccagggaa

SEQ ID NO: 5078526 - DNA, 25 bp, Homo sapien
actcaaagtgaagttccagggaatc

SEQ ID NO: 5078527 - DNA, 25 bp, Homo sapien
tcagtgcagacacagtagtggtggc

SEQ ID NO: 5078528 - DNA, 25 bp, Homo sapien
ttgcctgatgcagaagtgacttccc

SEQ ID NO: 5078529 - DNA, 25 bp, Homo sapien
tagctgaatcatgggtacggttttc

SEQ ID NO: 5078530 - DNA, 25 bp, Homo sapien
ctaagatcgtcaaggcagtgcctcc

SEQ ID NO: 5078531 - DNA, 25 bp, Homo sapien
cttcccagtaccctctggtttctgg

SEQ ID NO: 5078532 - DNA, 25 bp, Homo sapien
gaggtgctgggtgaacttggttgac

SEQ ID NO: 5078533 - DNA, 25 bp, Homo sapien
caaggcttcttaaataaagaggtgc

SEQ ID NO: 5078534 - DNA, 25 bp, Homo sapien
tgggtgaacttggttgacacctgag

SEQ ID NO: 5078535 - DNA, 25 bp, Homo sapien
tcactgtaatgttccctcatgaccc

SEQ ID NO: 5078536 - DNA, 25 bp, Homo sapien
atgacccattatgatatagcttgga

SEQ ID NO: 5078537 - DNA, 25 bp, Homo sapien
gatatagcttggatttgttatagac

SEQ ID NO: 5078538 - DNA, 25 bp, Homo sapien
tgttatagacttcatttgtccatca

SEQ ID NO: 5078539 - DNA, 25 bp, Homo sapien
cagaggtctatggaaccgaccagag

SEQ ID NO: 5078540 - DNA, 25 bp, Homo sapien
tgcagaggtctatggaaccgaccag

SEQ ID NO: 5078541 - DNA, 25 bp, Homo sapien
agaggtctatggaaccgaccagagc

SEQ ID NO: 5078542 - DNA, 25 bp, Homo sapien
gcagaggtctatggaaccgaccaga

SEQ ID NO: 5078543 - DNA, 25 bp, Homo sapien
tgtatatagctcataatcaatttgc

SEQ ID NO: 5078544 - DNA, 25 bp, Homo sapien
ctgtaaatgccaggtatttattatc

SEQ ID NO: 5078545 - DNA, 25 bp, Homo sapien
gatgaaagaaactctgtaaatgcca

SEQ ID NO: 5078546 - DNA, 25 bp, Homo sapien
taaagttgtttgagctctatgggaa

SEQ ID NO: 5078547 - DNA, 25 bp, Homo sapien
ctcttcacttgaatgtgctcttctc

SEQ ID NO: 5078548 - DNA, 25 bp, Homo sapien
ggagacaagcatgtccctgaagcac

SEQ ID NO: 5078549 - DNA, 25 bp, Homo sapien
caggaatgttcatgactggattgcc

SEQ ID NO: 5078550 - DNA, 25 bp, Homo sapien
cactacttctagagagagcaggaga

SEQ ID NO: 5078551 - DNA, 25 bp, Homo sapien
tggattgcctctgactccggccagg

SEQ ID NO: 5078552 - DNA, 25 bp, Homo sapien
gactccttcctctccagtattcccc

SEQ ID NO: 5078553 - DNA, 25 bp, Homo sapien
gtattcccctataacacccagccag

SEQ ID NO: 5078554 - DNA, 25 bp, Homo sapien
gatgtagcctactcttgactccttc

SEQ ID NO: 5078555 - DNA, 25 bp, Homo sapien
catatattgtaaagtagatgtagcc

SEQ ID NO: 5078556 - DNA, 25 bp, Homo sapien
gaacaatatcgagtgacaggtcgta

SEQ ID NO: 5078557 - DNA, 25 bp, Homo sapien
tccaaggctttgcatgctcatgagt

SEQ ID NO: 5078558 - DNA, 25 bp, Homo sapien
caaggtccttagctggcgagttggc

SEQ ID NO: 5078559 - DNA, 25 bp, Homo sapien
gcgagttggcacatattcctcagaa

SEQ ID NO: 5078560 - DNA, 25 bp, Homo sapien
ccatggaaggcaccatatgctgcca

SEQ ID NO: 5078561 - DNA, 25 bp, Homo sapien
caggcaaagcacagttgagtgtaac

SEQ ID NO: 5078562 - DNA, 25 bp, Homo sapien
tcaagcaatgtgtccttataggcac

SEQ ID NO: 5078563 - DNA, 25 bp, Homo sapien
aaatcttaagagctacaggcaaagc

SEQ ID NO: 5078564 - DNA, 25 bp, Homo sapien
taaacagaaagttggactgggcaga

SEQ ID NO: 5078565 - DNA, 25 bp, Homo sapien
tcaagttgacccagacactaagcct

SEQ ID NO: 5078566 - DNA, 25 bp, Homo sapien
ggcagaactgttgttgcaatcagca

SEQ ID NO: 5078567 - DNA, 25 bp, Homo sapien
aatattttgcccagggctaaacaga

SEQ ID NO: 5078568 - DNA, 25 bp, Homo sapien
gttgcttgctacattactcaatgta

SEQ ID NO: 5078569 - DNA, 25 bp, Homo sapien
tgttgcttgctacattactcaatgt

SEQ ID NO: 5078570 - DNA, 25 bp, Homo sapien
ctgttgcttgctacattactcaatg

SEQ ID NO: 5078571 - DNA, 25 bp, Homo sapien
tgcttgctacattactcaatgtagc

SEQ ID NO: 5078572 - DNA, 25 bp, Homo sapien
gttgactgtctttcccgccaaaagc

SEQ ID NO: 5078573 - DNA, 25 bp, Homo sapien
tcaatattaccttcctcaggagccc

SEQ ID NO: 5078574 - DNA, 25 bp, Homo sapien
ttttgaagtagaccatgcttgtttg

SEQ ID NO: 5078575 - DNA, 25 bp, Homo sapien
ttgtttgtcaaatctacttgctgtc

SEQ ID NO: 5078576 - DNA, 25 bp, Homo sapien
caagtctgtaggtggattgttcccc

SEQ ID NO: 5078577 - DNA, 25 bp, Homo sapien
gtgacaattaggatcaggcccagga

SEQ ID NO: 5078578 - DNA, 25 bp, Homo sapien
tgcatcccatatggccaagtctgta

SEQ ID NO: 5078579 - DNA, 25 bp, Homo sapien
catcttatgaatgcccaagagcacc

SEQ ID NO: 5078580 - DNA, 25 bp, Homo sapien
gtaagggagctagtcctttcttagc

SEQ ID NO: 5078581 - DNA, 25 bp, Homo sapien
tcgtaagggagctagtcctttctta

SEQ ID NO: 5078582 - DNA, 25 bp, Homo sapien
ctctcgtaagggagctagtcctttc

SEQ ID NO: 5078583 - DNA, 25 bp, Homo sapien
aagggagctagtcctttcttagcta

SEQ ID NO: 5078584 - DNA, 25 bp, Homo sapien
ctcacactcatagcgcaagttaaca

SEQ ID NO: 5078585 - DNA, 25 bp, Homo sapien
ttctcacactcatagcgcaagttaa

SEQ ID NO: 5078586 - DNA, 25 bp, Homo sapien
gttaacaggaacttgtcgctgtctt

SEQ ID NO: 5078587 - DNA, 25 bp, Homo sapien
agcgcaagttaacaggaacttgtcg

SEQ ID NO: 5078588 - DNA, 25 bp, Homo sapien
tgtgtgttgaaattttctccaacaa

SEQ ID NO: 5078589 - DNA, 25 bp, Homo sapien
ctgaaaacagggtgagggtaacagg

SEQ ID NO: 5078590 - DNA, 25 bp, Homo sapien
caacttgaaacacgttagtgttaat

SEQ ID NO: 5078591 - DNA, 25 bp, Homo sapien
cagggtgagggtaacaggtaattat

SEQ ID NO: 5078592 - DNA, 25 bp, Homo sapien
aatggccgagtcttactgaggccat

SEQ ID NO: 5078593 - DNA, 25 bp, Homo sapien
taaactgacaccaaggaaggtacag

SEQ ID NO: 5078594 - DNA, 25 bp, Homo sapien
gagcctggctgtaaagggaggagga

SEQ ID NO: 5078595 - DNA, 25 bp, Homo sapien
ccatagaggggatcagcaaaaggtg

SEQ ID NO: 5078596 - DNA, 25 bp, Homo sapien
atcataatcattataaagcactttg

SEQ ID NO: 5078597 - DNA, 25 bp, Homo sapien
tcaaggatgattaatcataatcatt

SEQ ID NO: 5078598 - DNA, 25 bp, Homo sapien
atggatacggcagccagccatcacg

SEQ ID NO: 5078599 - DNA, 25 bp, Homo sapien
tttccatggatacggcagccagcca

SEQ ID NO: 5078600 - DNA, 25 bp, Homo sapien
ctggctttggcagcacaaggcttca

SEQ ID NO: 5078601 - DNA, 25 bp, Homo sapien
cacaaggcttcaatctcgtcagaat

SEQ ID NO: 5078602 - DNA, 25 bp, Homo sapien
ctcgtcagaattccactgttctttg

SEQ ID NO: 5078603 - DNA, 25 bp, Homo sapien
ggcttcaatctcgtcagaattccac

SEQ ID NO: 5078604 - DNA, 25 bp, Homo sapien
gatccattgttgagtagacagctct

SEQ ID NO: 5078605 - DNA, 25 bp, Homo sapien
ggatcagatccattgttgagtagac

SEQ ID NO: 5078606 - DNA, 25 bp, Homo sapien
cattgttgagtagacagctctcctt

SEQ ID NO: 5078607 - DNA, 25 bp, Homo sapien
ttagggatcagatccattgttgagt

SEQ ID NO: 5078608 - DNA, 25 bp, Homo sapien
caagctgccacgctcagtgccttat

SEQ ID NO: 5078609 - DNA, 25 bp, Homo sapien
ccttatacgaaggagattcattggc

SEQ ID NO: 5078610 - DNA, 25 bp, Homo sapien
tattcacaggatagcccttgtatag

SEQ ID NO: 5078611 - DNA, 25 bp, Homo sapien
gccacgctcagtgccttatacgaag

SEQ ID NO: 5078612 - DNA, 25 bp, Homo sapien
tcagctatttctacatcattttcct

SEQ ID NO: 5078613 - DNA, 25 bp, Homo sapien
ctgacttcagctatttctacatcat

SEQ ID NO: 5078614 - DNA, 25 bp, Homo sapien
ctatttctacatcattttcctccat

SEQ ID NO: 5078615 - DNA, 25 bp, Homo sapien
gctatttctacatcattttcctcca

SEQ ID NO: 5078616 - DNA, 25 bp, Homo sapien
aaacttggtctcctgatcaatttgt

SEQ ID NO: 5078617 - DNA, 25 bp, Homo sapien
tcctgatcaatttgttgccatttgg

SEQ ID NO: 5078618 - DNA, 25 bp, Homo sapien
tagggcaccagggtcctgaaacttg

SEQ ID NO: 5078619 - DNA, 25 bp, Homo sapien
gcaccagggtcctgaaacttggtct

SEQ ID NO: 5078620 - DNA, 25 bp, Homo sapien
caatagtaccaacagaggggctggc

SEQ ID NO: 5078621 - DNA, 25 bp, Homo sapien
ggcaatagtaccaacagaggggctg

SEQ ID NO: 5078622 - DNA, 25 bp, Homo sapien
tggcaatagtaccaacagaggggct

SEQ ID NO: 5078623 - DNA, 25 bp, Homo sapien
cttggcaatagtaccaacagagggg

SEQ ID NO: 5078624 - DNA, 25 bp, Homo sapien
tctttgtgttcttcatgatcggcat

SEQ ID NO: 5078625 - DNA, 25 bp, Homo sapien
caccctgggagtgacttccttttgg

SEQ ID NO: 5078626 - DNA, 25 bp, Homo sapien
tctctgcatgctgtctttgtgttct

SEQ ID NO: 5078627 - DNA, 25 bp, Homo sapien
tgggttttcagatcttgaagctctg

SEQ ID NO: 5078628 - DNA, 25 bp, Homo sapien
cagagtatgggctttcaaataactg

SEQ ID NO: 5078629 - DNA, 25 bp, Homo sapien
agagtatgggctttcaaataactgc

SEQ ID NO: 5078630 - DNA, 25 bp, Homo sapien
gagtatgggctttcaaataactgca

SEQ ID NO: 5078631 - DNA, 25 bp, Homo sapien
agtatgggctttcaaataactgcat

SEQ ID NO: 5078632 - DNA, 25 bp, Homo sapien
gtcttcttagttctaacttctgcaa

SEQ ID NO: 5078633 - DNA, 25 bp, Homo sapien
cttagttctaacttctgcaagaaac

SEQ ID NO: 5078634 - DNA, 25 bp, Homo sapien
tcaatcattttcatccagtcgttca

SEQ ID NO: 5078635 - DNA, 25 bp, Homo sapien
tcattttcatccagtcgttcaaact

SEQ ID NO: 5078636 - DNA, 25 bp, Homo sapien
cgctcataggctgttgcctgaccat

SEQ ID NO: 5078637 - DNA, 25 bp, Homo sapien
gccgctcataggctgttgcctgacc

SEQ ID NO: 5078638 - DNA, 25 bp, Homo sapien
aatgccgctcataggctgttgcctg

SEQ ID NO: 5078639 - DNA, 25 bp, Homo sapien
ttaatgccgctcataggctgttgcc

SEQ ID NO: 5078640 - DNA, 25 bp, Homo sapien
cagcctgctccattagagaacactg

SEQ ID NO: 5078641 - DNA, 25 bp, Homo sapien
ccagcctgctccattagagaacact

SEQ ID NO: 5078642 - DNA, 25 bp, Homo sapien
gaccccgagcccacgagccttggcg

SEQ ID NO: 5078643 - DNA, 25 bp, Homo sapien
gtttcctcccggcagctccggttca

SEQ ID NO: 5078644 - DNA, 25 bp, Homo sapien
cagctccggttcaacccaaacttct

SEQ ID NO: 5078645 - DNA, 25 bp, Homo sapien
ccgagcccacgagccttggcgccgg

SEQ ID NO: 5078646 - DNA, 25 bp, Homo sapien
tcccctgcgcggggcacacgcgccg

SEQ ID NO: 5078647 - DNA, 25 bp, Homo sapien
tcctcgcagccgggccgggagcggg

SEQ ID NO: 5078648 - DNA, 25 bp, Homo sapien
ggcgccctcccctgcgcggggcaca

SEQ ID NO: 5078649 - DNA, 25 bp, Homo sapien
gccgccgcaccagcagcccgcggtc

SEQ ID NO: 5078650 - DNA, 25 bp, Homo sapien
tctggctggcgcacgtgtagcagca

SEQ ID NO: 5078651 - DNA, 25 bp, Homo sapien
tactcggtgagggagtcgccattga

SEQ ID NO: 5078652 - DNA, 25 bp, Homo sapien
caaacgcccgcttcgtactcggtga

SEQ ID NO: 5078653 - DNA, 25 bp, Homo sapien
gcacttggactcgtcacagggcagg

SEQ ID NO: 5078654 - DNA, 25 bp, Homo sapien
ttgttcggcacaaccagcgccgagg

SEQ ID NO: 5078655 - DNA, 25 bp, Homo sapien
tccagaaagtctcgcccaaactttg

SEQ ID NO: 5078656 - DNA, 25 bp, Homo sapien
aacaaggagagggaacgcagggccg

SEQ ID NO: 5078657 - DNA, 25 bp, Homo sapien
tcgcccgcgactgcctaagcgtcgg

SEQ ID NO: 5078658 - DNA, 25 bp, Homo sapien
acggccacacgtgtgcgcgtctgcg

SEQ ID NO: 5078659 - DNA, 25 bp, Homo sapien
ggaacggccacacgtgtgcgcgtct

SEQ ID NO: 5078660 - DNA, 25 bp, Homo sapien
agtcccagcaggaacggccacacgt

SEQ ID NO: 5078661 - DNA, 25 bp, Homo sapien
agcaggaacggccacacgtgtgcgc

SEQ ID NO: 5078662 - DNA, 25 bp, Homo sapien
ccctgggctgacatattccgcggct

SEQ ID NO: 5078663 - DNA, 25 bp, Homo sapien
ttcccctgggctgacatattccgcg

SEQ ID NO: 5078664 - DNA, 25 bp, Homo sapien
ggctgacatattccgcggctgaaac

SEQ ID NO: 5078665 - DNA, 25 bp, Homo sapien
catattccgcggctgaaactgattt

SEQ ID NO: 5078666 - DNA, 25 bp, Homo sapien
caatgggcaaataaatgagtaacca

SEQ ID NO: 5078667 - DNA, 25 bp, Homo sapien
aatgggcaaataaatgagtaaccac

SEQ ID NO: 5078668 - DNA, 25 bp, Homo sapien
acaatgggcaaataaatgagtaacc

SEQ ID NO: 5078669 - DNA, 25 bp, Homo sapien
ttacaatgggcaaataaatgagtaa

SEQ ID NO: 5078670 - DNA, 25 bp, Homo sapien
ctcgacaccgcggagcacaatgcgt

SEQ ID NO: 5078671 - DNA, 25 bp, Homo sapien
gacaccgcggagcacaatgcgtgct

SEQ ID NO: 5078672 - DNA, 25 bp, Homo sapien
accgcggagcacaatgcgtgctgga

SEQ ID NO: 5078673 - DNA, 25 bp, Homo sapien
gtcaatctcgacaccgcggagcaca

SEQ ID NO: 5078674 - DNA, 25 bp, Homo sapien
caagcgggcagggattaaagccaac

SEQ ID NO: 5078675 - DNA, 25 bp, Homo sapien
cattggctccccaacgagaaagact

SEQ ID NO: 5078676 - DNA, 25 bp, Homo sapien
taactgatgcttaccgaaccgtgcc

SEQ ID NO: 5078677 - DNA, 25 bp, Homo sapien
gagcagggatcccacttttaactga

SEQ ID NO: 5078678 - DNA, 25 bp, Homo sapien
gttggggtatcacttatcccatgct

SEQ ID NO: 5078679 - DNA, 25 bp, Homo sapien
taaatcttgtcgttaagtgaaaaca

SEQ ID NO: 5078680 - DNA, 25 bp, Homo sapien
tccataaatcttgtcgttaagtgaa

SEQ ID NO: 5078681 - DNA, 25 bp, Homo sapien
ggtatcacttatcccatgctttcca

SEQ ID NO: 5078682 - DNA, 25 bp, Homo sapien
caaagaaacctgtaccaagtcacca

SEQ ID NO: 5078683 - DNA, 25 bp, Homo sapien
gctgttcactcattcatcccggtca

SEQ ID NO: 5078684 - DNA, 25 bp, Homo sapien
tgcctacacagattaaggactgttc

SEQ ID NO: 5078685 - DNA, 25 bp, Homo sapien
tagcctgggagatgttaagcacacc

SEQ ID NO: 5078686 - DNA, 25 bp, Homo sapien
catgtgggcccaagataaaacacgt

SEQ ID NO: 5078687 - DNA, 25 bp, Homo sapien
gacttaggaagtcttgactaaacag

SEQ ID NO: 5078688 - DNA, 25 bp, Homo sapien
tgctgataaagggacacctcccagt

SEQ ID NO: 5078689 - DNA, 25 bp, Homo sapien
ccttgagggtattcttacatagagg

SEQ ID NO: 5078690 - DNA, 25 bp, Homo sapien
tagactccctcttacttgctcctga

SEQ ID NO: 5078691 - DNA, 25 bp, Homo sapien
atctcatggcttactgaactgattg

SEQ ID NO: 5078692 - DNA, 25 bp, Homo sapien
cttggcatttccgttatctcatggc

SEQ ID NO: 5078693 - DNA, 25 bp, Homo sapien
tgcatcctccactaaacttttcctg

SEQ ID NO: 5078694 - DNA, 25 bp, Homo sapien
caaagatggctagaatgactgggag

SEQ ID NO: 5078695 - DNA, 25 bp, Homo sapien
tgctgaaatgccaaaggcgctggga

SEQ ID NO: 5078696 - DNA, 25 bp, Homo sapien
cagtggtctctgaatcggctaggct

SEQ ID NO: 5078697 - DNA, 25 bp, Homo sapien
tgagatatatcaacctggcctggct

SEQ ID NO: 5078698 - DNA, 25 bp, Homo sapien
cattactgccgcagaggtttaaaag

SEQ ID NO: 5078699 - DNA, 25 bp, Homo sapien
taacatagacccttcactacagcaa

SEQ ID NO: 5078700 - DNA, 25 bp, Homo sapien
tagagaaatgctgggcccttggcat

SEQ ID NO: 5078701 - DNA, 25 bp, Homo sapien
cacacatgcactcatgggctgcttt

SEQ ID NO: 5078702 - DNA, 25 bp, Homo sapien
tcagtgccaaacatagctgtaatta

SEQ ID NO: 5078703 - DNA, 25 bp, Homo sapien
gcatgtaaatactttatctccctca

SEQ ID NO: 5078704 - DNA, 25 bp, Homo sapien
gtatttcttttggacatgctttatg

SEQ ID NO: 5078705 - DNA, 25 bp, Homo sapien
tcagttggcagaaagtcttttcttt

SEQ ID NO: 5078706 - DNA, 25 bp, Homo sapien
ccggctccgcaaatgatgacttcat

SEQ ID NO: 5078707 - DNA, 25 bp, Homo sapien
ggtccaccggctccgcaaatgatga

SEQ ID NO: 5078708 - DNA, 25 bp, Homo sapien
tggtccaccggctccgcaaatgatg

SEQ ID NO: 5078709 - DNA, 25 bp, Homo sapien
ccaccggctccgcaaatgatgactt

SEQ ID NO: 5078710 - DNA, 25 bp, Homo sapien
ataaacccagggctctcaaaactga

SEQ ID NO: 5078711 - DNA, 25 bp, Homo sapien
tctcgtatccccacagccagaaata

SEQ ID NO: 5078712 - DNA, 25 bp, Homo sapien
tctacgacctccctcaaactatgtt

SEQ ID NO: 5078713 - DNA, 25 bp, Homo sapien
tcctcctcccgctcatgcgagttgg

SEQ ID NO: 5078714 - DNA, 25 bp, Homo sapien
ccagacaatgagcatcaccccttgg

SEQ ID NO: 5078715 - DNA, 25 bp, Homo sapien
ccttggaagcaccaactccagaggt

SEQ ID NO: 5078716 - DNA, 25 bp, Homo sapien
aagcgtgaagcagctataatcaaat

SEQ ID NO: 5078717 - DNA, 25 bp, Homo sapien
ggagatccagacaatgagcatcacc

SEQ ID NO: 5078718 - DNA, 25 bp, Homo sapien
gagcttcatccagagtatggcccag

SEQ ID NO: 5078719 - DNA, 25 bp, Homo sapien
ggtggcactcctttccctactgttg

SEQ ID NO: 5078720 - DNA, 25 bp, Homo sapien
tatggcccaggcacctcagaatgaa

SEQ ID NO: 5078721 - DNA, 25 bp, Homo sapien
cgccttacgttagagctgtgagctt

SEQ ID NO: 5078722 - DNA, 25 bp, Homo sapien
gaggtcagaggactgttgccacacg

SEQ ID NO: 5078723 - DNA, 25 bp, Homo sapien
tcttttacctttaggacagcagtcc

SEQ ID NO: 5078724 - DNA, 25 bp, Homo sapien
ccaccaagagaacacaaggacgtat

SEQ ID NO: 5078725 - DNA, 25 bp, Homo sapien
tgccacacgaggaacaatccaacct

SEQ ID NO: 5078726 - DNA, 25 bp, Homo sapien
aatgctgataacaggactgcaggtt

SEQ ID NO: 5078727 - DNA, 25 bp, Homo sapien
tcttgtcacctttgtagatatgatc

SEQ ID NO: 5078728 - DNA, 25 bp, Homo sapien
cctttgtagatatgatcacctgcac

SEQ ID NO: 5078729 - DNA, 25 bp, Homo sapien
actgcaggttcatgttcttgtcacc

SEQ ID NO: 5078730 - DNA, 25 bp, Homo sapien
atttgtacaatggacaacagaaata

SEQ ID NO: 5078731 - DNA, 25 bp, Homo sapien
taaaatttgtacaatggacaacaga

SEQ ID NO: 5078732 - DNA, 25 bp, Homo sapien
tttgtacaatggacaacagaaatat

SEQ ID NO: 5078733 - DNA, 25 bp, Homo sapien
ttgtacaatggacaacagaaatatt

SEQ ID NO: 5078734 - DNA, 25 bp, Homo sapien
caaggcaaggatttcatagttacaa

SEQ ID NO: 5078735 - DNA, 25 bp, Homo sapien
attttaagttgactacaaggcaagg

SEQ ID NO: 5078736 - DNA, 25 bp, Homo sapien
taagttgactacaaggcaaggattt

SEQ ID NO: 5078737 - DNA, 25 bp, Homo sapien
aggcaaggatttcatagttacaaaa

SEQ ID NO: 5078738 - DNA, 25 bp, Homo sapien
cagggcctgatccactgattttaaa

SEQ ID NO: 5078739 - DNA, 25 bp, Homo sapien
aaagcaggactcttgccttaggcca

SEQ ID NO: 5078740 - DNA, 25 bp, Homo sapien
taagaaatctcgcaacacagggcct

SEQ ID NO: 5078741 - DNA, 25 bp, Homo sapien
taaacagtgcttcatatgtacggca

SEQ ID NO: 5078742 - DNA, 25 bp, Homo sapien
cactgaaaaacaagcagtactgatc

SEQ ID NO: 5078743 - DNA, 25 bp, Homo sapien
gccgcaatcagtgcaaagcaggaag

SEQ ID NO: 5078744 - DNA, 25 bp, Homo sapien
agtggacaaagcctgaatctttcaa

SEQ ID NO: 5078745 - DNA, 25 bp, Homo sapien
tattatgtccaagtgaggaaatcac

SEQ ID NO: 5078746 - DNA, 25 bp, Homo sapien
gaaatttctgccagcctgaaggtgg

SEQ ID NO: 5078747 - DNA, 25 bp, Homo sapien
tacaggaacgagctgtggcaacact

SEQ ID NO: 5078748 - DNA, 25 bp, Homo sapien
tgtggaggcataacgaacaccagat

SEQ ID NO: 5078749 - DNA, 25 bp, Homo sapien
caccagatatgtgaagaagcagctc

SEQ ID NO: 5078750 - DNA, 25 bp, Homo sapien
ctttcaatattctcggtgatgcctg

SEQ ID NO: 5078751 - DNA, 25 bp, Homo sapien
gattttcaatgcaaaggctagttgg

SEQ ID NO: 5078752 - DNA, 25 bp, Homo sapien
tggacttagtctttctcctctaaga

SEQ ID NO: 5078753 - DNA, 25 bp, Homo sapien
gaaacacctgtacttccaatagcta

SEQ ID NO: 5078754 - DNA, 25 bp, Homo sapien
gctggcatcaacagtccttccaagc

SEQ ID NO: 5078755 - DNA, 25 bp, Homo sapien
ggctggcatcaacagtccttccaag

SEQ ID NO: 5078756 - DNA, 25 bp, Homo sapien
tggcatcaacagtccttccaagcag

SEQ ID NO: 5078757 - DNA, 25 bp, Homo sapien
ctggctggcatcaacagtccttcca

SEQ ID NO: 5078758 - DNA, 25 bp, Homo sapien
aaaacaattaacaaccagataatgt

SEQ ID NO: 5078759 - DNA, 25 bp, Homo sapien
acaattaacaaccagataatgtgtg

SEQ ID NO: 5078760 - DNA, 25 bp, Homo sapien
caattaacaaccagataatgtgtgt

SEQ ID NO: 5078761 - DNA, 25 bp, Homo sapien
taacaaccagataatgtgtgtttgc

SEQ ID NO: 5078762 - DNA, 25 bp, Homo sapien
catggtttaaaaccaagcagttggt

SEQ ID NO: 5078763 - DNA, 25 bp, Homo sapien
gctgcaggttcgaatggtgttacat

SEQ ID NO: 5078764 - DNA, 25 bp, Homo sapien
cagttggtcatcagtccagttctca

SEQ ID NO: 5078765 - DNA, 25 bp, Homo sapien
aaggcacatatcctgacttggaaac

SEQ ID NO: 5078766 - DNA, 25 bp, Homo sapien
tgtcttccctgtacttatgcaatgg

SEQ ID NO: 5078767 - DNA, 25 bp, Homo sapien
tcagctccgtatgggacagcgggta

SEQ ID NO: 5078768 - DNA, 25 bp, Homo sapien
gaaacttaggagacaccctcagtgc

SEQ ID NO: 5078769 - DNA, 25 bp, Homo sapien
tacttatgcaatggcagcaggtttc

SEQ ID NO: 5078770 - DNA, 25 bp, Homo sapien
agcttcccaagtgccatcaaaggtc

SEQ ID NO: 5078771 - DNA, 25 bp, Homo sapien
tagcttcccaagtgccatcaaaggt

SEQ ID NO: 5078772 - DNA, 25 bp, Homo sapien
ttcccaagtgccatcaaaggtcata

SEQ ID NO: 5078773 - DNA, 25 bp, Homo sapien
tttagcttcccaagtgccatcaaag

SEQ ID NO: 5078774 - DNA, 25 bp, Homo sapien
aggccaagttccctgagtttcctgt

SEQ ID NO: 5078775 - DNA, 25 bp, Homo sapien
gacttccaacagttaaaatgcaggt

SEQ ID NO: 5078776 - DNA, 25 bp, Homo sapien
aatcacaacaaccagaaggtcgctg

SEQ ID NO: 5078777 - DNA, 25 bp, Homo sapien
tggtaccagttatcaagacatcaga

SEQ ID NO: 5078778 - DNA, 25 bp, Homo sapien
ctgtggacacagaagggacagctcc

SEQ ID NO: 5078779 - DNA, 25 bp, Homo sapien
gacacagaagggacagctccagctc

SEQ ID NO: 5078780 - DNA, 25 bp, Homo sapien
ggacacagaagggacagctccagct

SEQ ID NO: 5078781 - DNA, 25 bp, Homo sapien
gtggacacagaagggacagctccag

SEQ ID NO: 5078782 - DNA, 25 bp, Homo sapien
tatgcaaaccctctggttgatggag

SEQ ID NO: 5078783 - DNA, 25 bp, Homo sapien
tgcaaaccctctggttgatggagac

SEQ ID NO: 5078784 - DNA, 25 bp, Homo sapien
gcaaaccctctggttgatggagaca

SEQ ID NO: 5078785 - DNA, 25 bp, Homo sapien
ttatgcaaaccctctggttgatgga

SEQ ID NO: 5078786 - DNA, 25 bp, Homo sapien
ctttttcctggggatattcatttat

SEQ ID NO: 5078787 - DNA, 25 bp, Homo sapien
tggggatattcatttatttttgatg

SEQ ID NO: 5078788 - DNA, 25 bp, Homo sapien
ctcaatgtgtctaggtgttgtaatt

SEQ ID NO: 5078789 - DNA, 25 bp, Homo sapien
tgtctaggtgttgtaattttataac

SEQ ID NO: 5078790 - DNA, 25 bp, Homo sapien
caaccgtcctttcccgcttgtgtga

SEQ ID NO: 5078791 - DNA, 25 bp, Homo sapien
gtacatatccattgatacgcacgtg

SEQ ID NO: 5078792 - DNA, 25 bp, Homo sapien
ttgcttttggcctcacaaccgtcct

SEQ ID NO: 5078793 - DNA, 25 bp, Homo sapien
tacgcacgtgtgtaggtatctaatt

SEQ ID NO: 5078794 - DNA, 25 bp, Homo sapien
agaatcagaaacagagccctggcaa

SEQ ID NO: 5078795 - DNA, 25 bp, Homo sapien
ttccccgtccaacacctccaacatg

SEQ ID NO: 5078796 - DNA, 25 bp, Homo sapien
gtccaacacctccaacatgctgagg

SEQ ID NO: 5078797 - DNA, 25 bp, Homo sapien
atcagaaacagagccctggcaatgg

SEQ ID NO: 5078798 - DNA, 25 bp, Homo sapien
tcagtgtaaaggggaaaatgcaata

SEQ ID NO: 5078799 - DNA, 25 bp, Homo sapien
cagtgtaaaggggaaaatgcaatag

SEQ ID NO: 5078800 - DNA, 25 bp, Homo sapien
cacggggtttccagatctccagtgg

SEQ ID NO: 5078801 - DNA, 25 bp, Homo sapien
acggggtttccagatctccagtggc

SEQ ID NO: 5078802 - DNA, 25 bp, Homo sapien
ggggtttccagatctccagtggcct

SEQ ID NO: 5078803 - DNA, 25 bp, Homo sapien
cggggtttccagatctccagtggcc

SEQ ID NO: 5078804 - DNA, 25 bp, Homo sapien
tacatgacatggatcctctgggtca

SEQ ID NO: 5078805 - DNA, 25 bp, Homo sapien
gcatgccggctttttaattggtccc

SEQ ID NO: 5078806 - DNA, 25 bp, Homo sapien
tacactggccagtacactcactgag

SEQ ID NO: 5078807 - DNA, 25 bp, Homo sapien
caagatatcattactgggcctccta

SEQ ID NO: 5078808 - DNA, 25 bp, Homo sapien
ctttccatcctgaactacaacttga

SEQ ID NO: 5078809 - DNA, 25 bp, Homo sapien
tttccatcctgaactacaacttgac

SEQ ID NO: 5078810 - DNA, 25 bp, Homo sapien
actttccatcctgaactacaacttg

SEQ ID NO: 5078811 - DNA, 25 bp, Homo sapien
ttactttccatcctgaactacaact

SEQ ID NO: 5078812 - DNA, 25 bp, Homo sapien
tttctctttataaatcgtctccact

SEQ ID NO: 5078813 - DNA, 25 bp, Homo sapien
aacatcaggaattgtttttctgaaa

SEQ ID NO: 5078814 - DNA, 25 bp, Homo sapien
atcaggaattgtttttctgaaacct

SEQ ID NO: 5078815 - DNA, 25 bp, Homo sapien
ttttcagccttttctataaattctc

SEQ ID NO: 5078816 - DNA, 25 bp, Homo sapien
tcagccttttctataaattctccca

SEQ ID NO: 5078817 - DNA, 25 bp, Homo sapien
ccccgaactagtcatcagcttgtca

SEQ ID NO: 5078818 - DNA, 25 bp, Homo sapien
tctgccccgaactagtcatcagctt

SEQ ID NO: 5078819 - DNA, 25 bp, Homo sapien
tagtcatcagcttgtcacttaaatg

SEQ ID NO: 5078820 - DNA, 25 bp, Homo sapien
gaactagtcatcagcttgtcactta

SEQ ID NO: 5078821 - DNA, 25 bp, Homo sapien
tttttaacttcatgactagcaggca

SEQ ID NO: 5078822 - DNA, 25 bp, Homo sapien
tccaagagggatctgtaaaatctac

SEQ ID NO: 5078823 - DNA, 25 bp, Homo sapien
taaaatctactacgagccagtaact

SEQ ID NO: 5078824 - DNA, 25 bp, Homo sapien
tactgcctggttgccagagaatgga

SEQ ID NO: 5078825 - DNA, 25 bp, Homo sapien
gacgtgtgttttgcagttcgagcct

SEQ ID NO: 5078826 - DNA, 25 bp, Homo sapien
ggtaggctaccaaagacacagtctt

SEQ ID NO: 5078827 - DNA, 25 bp, Homo sapien
tcgatcagagtttgacggctagaag

SEQ ID NO: 5078828 - DNA, 25 bp, Homo sapien
ttcaagatgatcaatcacactggct

SEQ ID NO: 5078829 - DNA, 25 bp, Homo sapien
tttcttgtctacctaagacataata

SEQ ID NO: 5078830 - DNA, 25 bp, Homo sapien
tatttcttgtctacctaagacataa

SEQ ID NO: 5078831 - DNA, 25 bp, Homo sapien
tctatttcttgtctacctaagacat

SEQ ID NO: 5078832 - DNA, 25 bp, Homo sapien
ttcttgtctacctaagacataatat

SEQ ID NO: 5078833 - DNA, 25 bp, Homo sapien
cactagtatgttcaggtttcccggc

SEQ ID NO: 5078834 - DNA, 25 bp, Homo sapien
ggagcataaccctcgatcagaacag

SEQ ID NO: 5078835 - DNA, 25 bp, Homo sapien
gaactggacttcacagcgggccttg

SEQ ID NO: 5078836 - DNA, 25 bp, Homo sapien
cagaatcttcaggacaacgtggaga

SEQ ID NO: 5078837 - DNA, 25 bp, Homo sapien
acagtcctgcagtccacgccgaaaa

SEQ ID NO: 5078838 - DNA, 25 bp, Homo sapien
aaccatctgcagttagtctgacttg

SEQ ID NO: 5078839 - DNA, 25 bp, Homo sapien
ttggcaaagtacagcaaccatctgc

SEQ ID NO: 5078840 - DNA, 25 bp, Homo sapien
tctgacttgagtttcatagctgtcc

SEQ ID NO: 5078841 - DNA, 25 bp, Homo sapien
ttagtcataaagatggcttgttgac

SEQ ID NO: 5078842 - DNA, 25 bp, Homo sapien
ctagtacaggaaacacagcacgcac

SEQ ID NO: 5078843 - DNA, 25 bp, Homo sapien
cacgcacgcatctgaagagaattat

SEQ ID NO: 5078844 - DNA, 25 bp, Homo sapien
tgacaaatcaaacactctactaggg

SEQ ID NO: 5078845 - DNA, 25 bp, Homo sapien
cactcggattaaactggaagccact

SEQ ID NO: 5078846 - DNA, 25 bp, Homo sapien
gtggattccgctttcaactttactg

SEQ ID NO: 5078847 - DNA, 25 bp, Homo sapien
tctgagtttcaatattatcacgctg

SEQ ID NO: 5078848 - DNA, 25 bp, Homo sapien
ctgaaaggcttacggaattcagtta

SEQ ID NO: 5078849 - DNA, 25 bp, Homo sapien
aatattatcacgctgtggattccgc

SEQ ID NO: 5078850 - DNA, 25 bp, Homo sapien
ccccatagtaggctccttctgcaga

SEQ ID NO: 5078851 - DNA, 25 bp, Homo sapien
tccccatagtaggctccttctgcag

SEQ ID NO: 5078852 - DNA, 25 bp, Homo sapien
cccatagtaggctccttctgcagag

SEQ ID NO: 5078853 - DNA, 25 bp, Homo sapien
ttccccatagtaggctccttctgca

SEQ ID NO: 5078854 - DNA, 25 bp, Homo sapien
cattcccgtcactgctgcaaactga

SEQ ID NO: 5078855 - DNA, 25 bp, Homo sapien
cccagctcaagatagggcctttgca

SEQ ID NO: 5078856 - DNA, 25 bp, Homo sapien
tgtccttcaggaacatcagtcacct

SEQ ID NO: 5078857 - DNA, 25 bp, Homo sapien
cctactaaagaactctaagcaaggc

SEQ ID NO: 5078858 - DNA, 25 bp, Homo sapien
ccagttttgcagttcgaaatggtca

SEQ ID NO: 5078859 - DNA, 25 bp, Homo sapien
tgggcttaggtcagatatctattgg

SEQ ID NO: 5078860 - DNA, 25 bp, Homo sapien
tcccctgaacgtgaaattagcatct

SEQ ID NO: 5078861 - DNA, 25 bp, Homo sapien
gctgaagttgcacccaaccacctat

SEQ ID NO: 5078862 - DNA, 25 bp, Homo sapien
cgatctctctgcacgcatgaatggg

SEQ ID NO: 5078863 - DNA, 25 bp, Homo sapien
ctgagcatcgatctctctgcacgca

SEQ ID NO: 5078864 - DNA, 25 bp, Homo sapien
tgcaaaaattgctaaacgcagaagc

SEQ ID NO: 5078865 - DNA, 25 bp, Homo sapien
acccctaacttcgatgctgctgcaa

SEQ ID NO: 5078866 - DNA, 25 bp, Homo sapien
agactatgcggggagtggatcccac

SEQ ID NO: 5078867 - DNA, 25 bp, Homo sapien
caggtgtcccatcgccacgagagac

SEQ ID NO: 5078868 - DNA, 25 bp, Homo sapien
tcacacacggggaaaccacataagc

SEQ ID NO: 5078869 - DNA, 25 bp, Homo sapien
cggggagtggatcccacctcacaca

SEQ ID NO: 5078870 - DNA, 25 bp, Homo sapien
tatggtagggtgtgcagaagcttaa

SEQ ID NO: 5078871 - DNA, 25 bp, Homo sapien
gagttgatcaaccacagctaccatc

SEQ ID NO: 5078872 - DNA, 25 bp, Homo sapien
gctgtagagcgaggcaaaatactgt

SEQ ID NO: 5078873 - DNA, 25 bp, Homo sapien
gagggcaggttctggttatgaataa

SEQ ID NO: 5078874 - DNA, 25 bp, Homo sapien
tggcatcgacagaaccgacagttgt

SEQ ID NO: 5078875 - DNA, 25 bp, Homo sapien
cagtttatctcaccacactgggcgg

SEQ ID NO: 5078876 - DNA, 25 bp, Homo sapien
cacattgttaaatacgcaggctggc

SEQ ID NO: 5078877 - DNA, 25 bp, Homo sapien
ggcacgtagtacctctcgcagttta

SEQ ID NO: 5078878 - DNA, 25 bp, Homo sapien
gacagaagtagccaaagctactgta

SEQ ID NO: 5078879 - DNA, 25 bp, Homo sapien
ggcttcaacaaacaactactgctgt

SEQ ID NO: 5078880 - DNA, 25 bp, Homo sapien
tatccctctattgagagcaaccaga

SEQ ID NO: 5078881 - DNA, 25 bp, Homo sapien
gcatatgaaaccctctcttatccct

SEQ ID NO: 5078882 - DNA, 25 bp, Homo sapien
agaatgtgcagtcgtcttcccgcca

SEQ ID NO: 5078883 - DNA, 25 bp, Homo sapien
gcatagcagccagcgggattattaa

SEQ ID NO: 5078884 - DNA, 25 bp, Homo sapien
tctccgtgggcaaggatcaggccat

SEQ ID NO: 5078885 - DNA, 25 bp, Homo sapien
caccgttgacgcactggcagaatgt

SEQ ID NO: 5078886 - DNA, 25 bp, Homo sapien
ttaataagtctagcccctcagaggc

SEQ ID NO: 5078887 - DNA, 25 bp, Homo sapien
gaattgcaaagccacagccattggt

SEQ ID NO: 5078888 - DNA, 25 bp, Homo sapien
tagaacagatactcggtgacggcac

SEQ ID NO: 5078889 - DNA, 25 bp, Homo sapien
gatagcaaatgcaggtaaccacgac

SEQ ID NO: 5078890 - DNA, 25 bp, Homo sapien
taatcagctaatccaatgtgggtcg

SEQ ID NO: 5078891 - DNA, 25 bp, Homo sapien
ggtcaaaattccagtcagaggctca

SEQ ID NO: 5078892 - DNA, 25 bp, Homo sapien
ttagtgaccagccagtgacgccttt

SEQ ID NO: 5078893 - DNA, 25 bp, Homo sapien
taagctttggagcacgttagtgacc

SEQ ID NO: 5078894 - DNA, 25 bp, Homo sapien
tggaaggcatacacagccatccctg

SEQ ID NO: 5078895 - DNA, 25 bp, Homo sapien
tgtattactccactgaactgctggt

SEQ ID NO: 5078896 - DNA, 25 bp, Homo sapien
tcttttcagacttacttcaggcgct

SEQ ID NO: 5078897 - DNA, 25 bp, Homo sapien
ctggccaaggaagtaagaagctgaa

SEQ ID NO: 5078898 - DNA, 25 bp, Homo sapien
tatctactcaatggcgaaattaagc

SEQ ID NO: 5078899 - DNA, 25 bp, Homo sapien
taaaaagcctaacagatgtcttgtc

SEQ ID NO: 5078900 - DNA, 25 bp, Homo sapien
catgaatctaacttcaaggccacgg

SEQ ID NO: 5078901 - DNA, 25 bp, Homo sapien
aattagagagcttcagacactgtta

SEQ ID NO: 5078902 - DNA, 25 bp, Homo sapien
tattgaatcagctgaggaatcaaag

SEQ ID NO: 5078903 - DNA, 25 bp, Homo sapien
tggctacaactatttctaaagggaa

SEQ ID NO: 5078904 - DNA, 25 bp, Homo sapien
tatctcatcttgtattgaatcagct

SEQ ID NO: 5078905 - DNA, 25 bp, Homo sapien
aattcactgtctttggctacaacta

SEQ ID NO: 5078906 - DNA, 25 bp, Homo sapien
tatgcactgacaggtccgacaacca

SEQ ID NO: 5078907 - DNA, 25 bp, Homo sapien
tgataactccccacatgcaggtgga

SEQ ID NO: 5078908 - DNA, 25 bp, Homo sapien
aaccattgtgatcgcgtttgaaacc

SEQ ID NO: 5078909 - DNA, 25 bp, Homo sapien
agtccttccctgtcagagtgcagtt

SEQ ID NO: 5078910 - DNA, 25 bp, Homo sapien
atattaggcctcagaaaaaacatac

SEQ ID NO: 5078911 - DNA, 25 bp, Homo sapien
tcatattaggcctcagaaaaaacat

SEQ ID NO: 5078912 - DNA, 25 bp, Homo sapien
aacatacagtcttctgtctactcac

SEQ ID NO: 5078913 - DNA, 25 bp, Homo sapien
gaaaaaacatacagtcttctgtcta

SEQ ID NO: 5078914 - DNA, 25 bp, Homo sapien
caaagtgaagcacagtctaaggatt

SEQ ID NO: 5078915 - DNA, 25 bp, Homo sapien
attggaatctgcatggaggcaaagc

SEQ ID NO: 5078916 - DNA, 25 bp, Homo sapien
gacactgtatgcgtgggtgacctcc

SEQ ID NO: 5078917 - DNA, 25 bp, Homo sapien
tatggctgtcatatgcggaatgtga

SEQ ID NO: 5078918 - DNA, 25 bp, Homo sapien
cgcataccaccatgcttagctattt

SEQ ID NO: 5078919 - DNA, 25 bp, Homo sapien
tttggtagaggctgggatctcgcca

SEQ ID NO: 5078920 - DNA, 25 bp, Homo sapien
aggctgggatctcgccatgtcgtcc

SEQ ID NO: 5078921 - DNA, 25 bp, Homo sapien
tgggatctcgccatgtcgtccaggc

SEQ ID NO: 5078922 - DNA, 25 bp, Homo sapien
ggtaattacaaccacaggcccacag

SEQ ID NO: 5078923 - DNA, 25 bp, Homo sapien
ccactgtagatagtgtgatggtcac

SEQ ID NO: 5078924 - DNA, 25 bp, Homo sapien
gttttagcactaacgccactgtaga

SEQ ID NO: 5078925 - DNA, 25 bp, Homo sapien
gttaagtccaagtctctgagccatg

SEQ ID NO: 5078926 - DNA, 25 bp, Homo sapien
catggcactggttatcattaaaaag

SEQ ID NO: 5078927 - DNA, 25 bp, Homo sapien
atggcactggttatcattaaaaagc

SEQ ID NO: 5078928 - DNA, 25 bp, Homo sapien
gtgaagacacagagacggcatgttt

SEQ ID NO: 5078929 - DNA, 25 bp, Homo sapien
ctgtgaagacacagagacggcatgt

SEQ ID NO: 5078930 - DNA, 25 bp, Homo sapien
tgtgaagacacagagacggcatgtt

SEQ ID NO: 5078931 - DNA, 25 bp, Homo sapien
ggccttgggcggcactcacagatct

SEQ ID NO: 5078932 - DNA, 25 bp, Homo sapien
ccgaagggacagttcaaggtgcagc

SEQ ID NO: 5078933 - DNA, 25 bp, Homo sapien
tctcacagttttgggcatcagtaag

SEQ ID NO: 5078934 - DNA, 25 bp, Homo sapien
gattatgggtctgcacttcttgggc

SEQ ID NO: 5078935 - DNA, 25 bp, Homo sapien
gcacttgcagataagacagccgtga

SEQ ID NO: 5078936 - DNA, 25 bp, Homo sapien
tggacatttcttacagcgacagatg

SEQ ID NO: 5078937 - DNA, 25 bp, Homo sapien
gatgtcacagccgtgcttattcttc

SEQ ID NO: 5078938 - DNA, 25 bp, Homo sapien
agatcttactgcatgagagctctgg

SEQ ID NO: 5078939 - DNA, 25 bp, Homo sapien
caattacgtctaacacaggacagtt

SEQ ID NO: 5078940 - DNA, 25 bp, Homo sapien
cctggtaaagaagtggctactgcac

SEQ ID NO: 5078941 - DNA, 25 bp, Homo sapien
aatagtttctctccaattcgtggga

SEQ ID NO: 5078942 - DNA, 25 bp, Homo sapien
caggacagtttgtgacatgggacat

SEQ ID NO: 5078943 - DNA, 25 bp, Homo sapien
tgatgatgaccatccacggtgagac

SEQ ID NO: 5078944 - DNA, 25 bp, Homo sapien
ttgagacagtagcattcccggcacc

SEQ ID NO: 5078945 - DNA, 25 bp, Homo sapien
gggcacacatttcccgtccattgag

SEQ ID NO: 5078946 - DNA, 25 bp, Homo sapien
cggtgagacaagtgcccgacaggat

SEQ ID NO: 5078947 - DNA, 25 bp, Homo sapien
gcaaatggagggagtactgagctct

SEQ ID NO: 5078948 - DNA, 25 bp, Homo sapien
gtctcacacagcacccgtccgctgt

SEQ ID NO: 5078949 - DNA, 25 bp, Homo sapien
cagcggtgggcacacctctgtctca

SEQ ID NO: 5078950 - DNA, 25 bp, Homo sapien
caggagtcaatgttccacgtttctc

SEQ ID NO: 5078951 - DNA, 25 bp, Homo sapien
ccctcgctcttctctgccatgcttt

SEQ ID NO: 5078952 - DNA, 25 bp, Homo sapien
tcttctctgccatgcttttttccaa

SEQ ID NO: 5078953 - DNA, 25 bp, Homo sapien
ctccctcgctcttctctgccatgct

SEQ ID NO: 5078954 - DNA, 25 bp, Homo sapien
ttctctgccatgcttttttccaact

SEQ ID NO: 5078955 - DNA, 25 bp, Homo sapien
gaagggacagccgtgctgaagctat

SEQ ID NO: 5078956 - DNA, 25 bp, Homo sapien
tggaatgacagtgaaacgaacagcc

SEQ ID NO: 5078957 - DNA, 25 bp, Homo sapien
acagtgaaacgaacagcctggaatc

SEQ ID NO: 5078958 - DNA, 25 bp, Homo sapien
gccgtgctgaagctatggaatgaca

SEQ ID NO: 5078959 - DNA, 25 bp, Homo sapien
gaggaccaaggcagttacttcattg

SEQ ID NO: 5078960 - DNA, 25 bp, Homo sapien
cagccagtaagcaggatgtgacaag

SEQ ID NO: 5078961 - DNA, 25 bp, Homo sapien
gagttgtcgtatgttcttcccagaa

SEQ ID NO: 5078962 - DNA, 25 bp, Homo sapien
tgccatatgatccagaagctctaca

SEQ ID NO: 5078963 - DNA, 25 bp, Homo sapien
gggtggccccatcatctagccgtag

SEQ ID NO: 5078964 - DNA, 25 bp, Homo sapien
taggctcccttgaaactagggtggc

SEQ ID NO: 5078965 - DNA, 25 bp, Homo sapien
taatggctaacgaagggatttctgg

SEQ ID NO: 5078966 - DNA, 25 bp, Homo sapien
gctgtgacacccctatcagaagaga

SEQ ID NO: 5078967 - DNA, 25 bp, Homo sapien
gcaacatagtgtgtttcaaagcaca

SEQ ID NO: 5078968 - DNA, 25 bp, Homo sapien
gtcatgatggctttcggtgcctcct

SEQ ID NO: 5078969 - DNA, 25 bp, Homo sapien
ggtgcctccttaaatacatgacgca

SEQ ID NO: 5078970 - DNA, 25 bp, Homo sapien
gttggccagcaactatgcaacatag

SEQ ID NO: 5078971 - DNA, 25 bp, Homo sapien
tgcagatgcagctggtacaaacgtc

SEQ ID NO: 5078972 - DNA, 25 bp, Homo sapien
ttattgcgggacaaggaaggccgaa

SEQ ID NO: 5078973 - DNA, 25 bp, Homo sapien
ggtacaaacgtcaggcttccaggac

SEQ ID NO: 5078974 - DNA, 25 bp, Homo sapien
taattaggtacgctgttattgcggg

SEQ ID NO: 5078975 - DNA, 25 bp, Homo sapien
ttctcaagacaggtctttcacagga

SEQ ID NO: 5078976 - DNA, 25 bp, Homo sapien
ctatgcagtagggacaacactggcc

SEQ ID NO: 5078977 - DNA, 25 bp, Homo sapien
tgcagtagggacaacactggccttt

SEQ ID NO: 5078978 - DNA, 25 bp, Homo sapien
gatacagaagggcaggactcagaga

SEQ ID NO: 5078979 - DNA, 25 bp, Homo sapien
tttggacctcggaacagcatctggc

SEQ ID NO: 5078980 - DNA, 25 bp, Homo sapien
tcatgagcttgagttatggccacca

SEQ ID NO: 5078981 - DNA, 25 bp, Homo sapien
tgtccttgatagaactgccagctgt

SEQ ID NO: 5078982 - DNA, 25 bp, Homo sapien
tcaccaccacgggtcacaagaaggt

SEQ ID NO: 5078983 - DNA, 25 bp, Homo sapien
catgcaattctcagacctcctgggc

SEQ ID NO: 5078984 - DNA, 25 bp, Homo sapien
cagagaagccggtgctaaaatgcag

SEQ ID NO: 5078985 - DNA, 25 bp, Homo sapien
tatgacataagtatccctggttgac

SEQ ID NO: 5078986 - DNA, 25 bp, Homo sapien
ttttcaacacacgagagatctgctg

SEQ ID NO: 5078987 - DNA, 25 bp, Homo sapien
tgctttaagacatgccgcctgatgg

SEQ ID NO: 5078988 - DNA, 25 bp, Homo sapien
taaaccaggaaacaatgcgagcact

SEQ ID NO: 5078989 - DNA, 25 bp, Homo sapien
tggaagagccctacagccaaggtga

SEQ ID NO: 5078990 - DNA, 25 bp, Homo sapien
gactaattagggagaacattcatcc

SEQ ID NO: 5078991 - DNA, 25 bp, Homo sapien
gccagacgctacatttaacagtgag

SEQ ID NO: 5078992 - DNA, 25 bp, Homo sapien
tagggttacatcatatcaccgagac

SEQ ID NO: 5078993 - DNA, 25 bp, Homo sapien
tgcaatctgtgttacgagagcagca

SEQ ID NO: 5078994 - DNA, 25 bp, Homo sapien
gaaaatacactggagaagcagcggt

SEQ ID NO: 5078995 - DNA, 25 bp, Homo sapien
caagatcagttgcttcctagggcat

SEQ ID NO: 5078996 - DNA, 25 bp, Homo sapien
tagcactaactgtgacaacctgggc

SEQ ID NO: 5078997 - DNA, 25 bp, Homo sapien
gggtgcgccctgatgataaatgcca

SEQ ID NO: 5078998 - DNA, 25 bp, Homo sapien
aaatgccacgtactctgttcccagg

SEQ ID NO: 5078999 - DNA, 25 bp, Homo sapien
ccttaacgtagaagccattggacct

SEQ ID NO: 5079000 - DNA, 25 bp, Homo sapien
tctccagagggttcttatcaggtgg

SEQ ID NO: 5079001 - DNA, 25 bp, Homo sapien
agaagcaatccatgtaaaagtcggg

SEQ ID NO: 5079002 - DNA, 25 bp, Homo sapien
ccactagagggtacaaaatcaggtt

SEQ ID NO: 5079003 - DNA, 25 bp, Homo sapien
actgattttcaatgcgctgactcac

SEQ ID NO: 5079004 - DNA, 25 bp, Homo sapien
ctgattttcaatgcgctgactcacc

SEQ ID NO: 5079005 - DNA, 25 bp, Homo sapien
tgtaatgatgcagggatctgagaaa

SEQ ID NO: 5079006 - DNA, 25 bp, Homo sapien
aattgtaatgatgcagggatctgag

SEQ ID NO: 5079007 - DNA, 25 bp, Homo sapien
gaaattgtaatgatgcagggatctg

SEQ ID NO: 5079008 - DNA, 25 bp, Homo sapien
atggaaattgtaatgatgcagggat

SEQ ID NO: 5079009 - DNA, 25 bp, Homo sapien
gggctgcttacctcatgggatgctc

SEQ ID NO: 5079010 - DNA, 25 bp, Homo sapien
cgtcaactacgtcagggacctggag

SEQ ID NO: 5079011 - DNA, 25 bp, Homo sapien
tgggatgctcagacaaacatcttct

SEQ ID NO: 5079012 - DNA, 25 bp, Homo sapien
tcaactacgtcagggacctggagcc

SEQ ID NO: 5079013 - DNA, 25 bp, Homo sapien
tgaaacgtgcaaagaagatggttac

SEQ ID NO: 5079014 - DNA, 25 bp, Homo sapien
tatggcccctatcttatccgtcaga

SEQ ID NO: 5079015 - DNA, 25 bp, Homo sapien
tacaccttggtttagatcggcttcg

SEQ ID NO: 5079016 - DNA, 25 bp, Homo sapien
gatggttactatttcacagttacac

SEQ ID NO: 5079017 - DNA, 25 bp, Homo sapien
ccaatcaggggttatatatccaaat

SEQ ID NO: 5079018 - DNA, 25 bp, Homo sapien
aaacatgatccccttctaagtagtc

SEQ ID NO: 5079019 - DNA, 25 bp, Homo sapien
tccaaataaacatgatccccttcta

SEQ ID NO: 5079020 - DNA, 25 bp, Homo sapien
caatcaggggttatatatccaaata

SEQ ID NO: 5079021 - DNA, 25 bp, Homo sapien
gttgtgtgccaagccggataacctg

SEQ ID NO: 5079022 - DNA, 25 bp, Homo sapien
catagggacccatttgcgaaaacgc

SEQ ID NO: 5079023 - DNA, 25 bp, Homo sapien
ttgcccggacaaggatcaatcagtg

SEQ ID NO: 5079024 - DNA, 25 bp, Homo sapien
ggtagctattccatgcaattcgagg

SEQ ID NO: 5079025 - DNA, 25 bp, Homo sapien
aatccaaagacgctcatgtgccaag

SEQ ID NO: 5079026 - DNA, 25 bp, Homo sapien
gagactggttctaggaccccatgga

SEQ ID NO: 5079027 - DNA, 25 bp, Homo sapien
tgagcagcccgaagctttgcagcga

SEQ ID NO: 5079028 - DNA, 25 bp, Homo sapien
tgttcagattctacaagcagcgcca

SEQ ID NO: 5079029 - DNA, 25 bp, Homo sapien
tgaagtggcacaccaccttctttgg

SEQ ID NO: 5079030 - DNA, 25 bp, Homo sapien
cgttgatgggctcaacacagggcag

SEQ ID NO: 5079031 - DNA, 25 bp, Homo sapien
agcaacttccttccacgttgatggg

SEQ ID NO: 5079032 - DNA, 25 bp, Homo sapien
cagtagcagtgggtgcagctgtcaa

SEQ ID NO: 5079033 - DNA, 25 bp, Homo sapien
acaaatggaaggatggtggcttaga

SEQ ID NO: 5079034 - DNA, 25 bp, Homo sapien
atcaacattacagcttgacaaatgg

SEQ ID NO: 5079035 - DNA, 25 bp, Homo sapien
agcttgacaaatggaaggatggtgg

SEQ ID NO: 5079036 - DNA, 25 bp, Homo sapien
cttgacaaatggaaggatggtggct

SEQ ID NO: 5079037 - DNA, 25 bp, Homo sapien
aggcaccggccttgacttttcccat

SEQ ID NO: 5079038 - DNA, 25 bp, Homo sapien
ggccttgaccttagaggcaccggcc

SEQ ID NO: 5079039 - DNA, 25 bp, Homo sapien
gaggcaccggccttgacttttccca

SEQ ID NO: 5079040 - DNA, 25 bp, Homo sapien
gaccttagaggcaccggccttgact

SEQ ID NO: 5079041 - DNA, 25 bp, Homo sapien
acaccgaggacatttgcagtgcctg

SEQ ID NO: 5079042 - DNA, 25 bp, Homo sapien
tgggtccttgttatcacaccgagga

SEQ ID NO: 5079043 - DNA, 25 bp, Homo sapien
gttatcacaccgaggacatttgcag

SEQ ID NO: 5079044 - DNA, 25 bp, Homo sapien
aatttgggtccttgttatcacaccg

SEQ ID NO: 5079045 - DNA, 25 bp, Homo sapien
cctgagcacaaaccagtgactctca

SEQ ID NO: 5079046 - DNA, 25 bp, Homo sapien
tcggtaggtctggactaggtgattc

SEQ ID NO: 5079047 - DNA, 25 bp, Homo sapien
gactaggtgattccgggaggtgtgt

SEQ ID NO: 5079048 - DNA, 25 bp, Homo sapien
ttagaaaatgtgctgactctcacag

SEQ ID NO: 5079049 - DNA, 25 bp, Homo sapien
ctctagggagatggacgatatcatt

SEQ ID NO: 5079050 - DNA, 25 bp, Homo sapien
tcttctcaatgggtatattggttgg

SEQ ID NO: 5079051 - DNA, 25 bp, Homo sapien
tatattggttggttctgggacatac

SEQ ID NO: 5079052 - DNA, 25 bp, Homo sapien
ttttcactaggcgtgggccacaggg

SEQ ID NO: 5079053 - DNA, 25 bp, Homo sapien
gttatctctgtaatctacctggagg

SEQ ID NO: 5079054 - DNA, 25 bp, Homo sapien
ctgttatctctgtaatctacctgga

SEQ ID NO: 5079055 - DNA, 25 bp, Homo sapien
tgttatctctgtaatctacctggag

SEQ ID NO: 5079056 - DNA, 25 bp, Homo sapien
ctattataatagagaggcatataat

SEQ ID NO: 5079057 - DNA, 25 bp, Homo sapien
tgggaaccacaactgaggcaatgga

SEQ ID NO: 5079058 - DNA, 25 bp, Homo sapien
taatagagaggcatataattatggg

SEQ ID NO: 5079059 - DNA, 25 bp, Homo sapien
tgaagaatcttcacttgggtgcagc

SEQ ID NO: 5079060 - DNA, 25 bp, Homo sapien
agcagtggtatccactgtttcttct

SEQ ID NO: 5079061 - DNA, 25 bp, Homo sapien
cagcaaagcagtggtatccactgtt

SEQ ID NO: 5079062 - DNA, 25 bp, Homo sapien
caaagcagtggtatccactgtttct

SEQ ID NO: 5079063 - DNA, 25 bp, Homo sapien
ttcttctgattgatgaataggaatg

SEQ ID NO: 5079064 - DNA, 25 bp, Homo sapien
gacctttccacttggtgcttgcctt

SEQ ID NO: 5079065 - DNA, 25 bp, Homo sapien
tgtataccctcatgatcttccagcc

SEQ ID NO: 5079066 - DNA, 25 bp, Homo sapien
catcttttgcgacctttccacttgg

SEQ ID NO: 5079067 - DNA, 25 bp, Homo sapien
cttgcctttggtgcactgacctgtt

SEQ ID NO: 5079068 - DNA, 25 bp, Homo sapien
gggatgacttctaaccactcagact

SEQ ID NO: 5079069 - DNA, 25 bp, Homo sapien
gactgtacaacactatcataggctg

SEQ ID NO: 5079070 - DNA, 25 bp, Homo sapien
gagtggaaggtaggcagattttaaa

SEQ ID NO: 5079071 - DNA, 25 bp, Homo sapien
gaccttgtgtttcaagggggctgaa

SEQ ID NO: 5079072 - DNA, 25 bp, Homo sapien
tcacactgtttggtagaaattgtct

SEQ ID NO: 5079073 - DNA, 25 bp, Homo sapien
gtttttgcatgctgtagaagccact

SEQ ID NO: 5079074 - DNA, 25 bp, Homo sapien
agccactgaatcttgcatctggttc

SEQ ID NO: 5079075 - DNA, 25 bp, Homo sapien
cactgtttggtagaaattgtctgcc

SEQ ID NO: 5079076 - DNA, 25 bp, Homo sapien
taagaactgccatcaatgtctctgg

SEQ ID NO: 5079077 - DNA, 25 bp, Homo sapien
caaagggttctgatgtgctcgtctg

SEQ ID NO: 5079078 - DNA, 25 bp, Homo sapien
aatgctgactgctcaaggcgtgcgt

SEQ ID NO: 5079079 - DNA, 25 bp, Homo sapien
taacccgctttagagaaatgccgct

SEQ ID NO: 5079080 - DNA, 25 bp, Homo sapien
atgtttatttcctgccaagaatcaa

SEQ ID NO: 5079081 - DNA, 25 bp, Homo sapien
agaatcaagttgcagataattctct

SEQ ID NO: 5079082 - DNA, 25 bp, Homo sapien
aagaatcaagttgcagataattctc

SEQ ID NO: 5079083 - DNA, 25 bp, Homo sapien
tatttcctgccaagaatcaagttgc

SEQ ID NO: 5079084 - DNA, 25 bp, Homo sapien
cagtcctcctgtgcgtagcaagtta

SEQ ID NO: 5079085 - DNA, 25 bp, Homo sapien
tcccctgatcgtgctcggtaaagtc

SEQ ID NO: 5079086 - DNA, 25 bp, Homo sapien
gcatcgctattctctgtactctggg

SEQ ID NO: 5079087 - DNA, 25 bp, Homo sapien
aattttgataccagctatgagcacg

SEQ ID NO: 5079088 - DNA, 25 bp, Homo sapien
tcagcaactgagacaccatgactgc

SEQ ID NO: 5079089 - DNA, 25 bp, Homo sapien
gacgccttgtactgaagaaatgtag

SEQ ID NO: 5079090 - DNA, 25 bp, Homo sapien
tatataggacctgctacaggcggct

SEQ ID NO: 5079091 - DNA, 25 bp, Homo sapien
cacttaaacacctgtgagcaaaaca

SEQ ID NO: 5079092 - DNA, 25 bp, Homo sapien
tgtgagcagatgaaaccctgattag

SEQ ID NO: 5079093 - DNA, 25 bp, Homo sapien
gattagtcccagaatgctacgaagg

SEQ ID NO: 5079094 - DNA, 25 bp, Homo sapien
tgctggttccagtcaaatcaatggc

SEQ ID NO: 5079095 - DNA, 25 bp, Homo sapien
gaacccatcgctacaatatgtgagc

SEQ ID NO: 5079096 - DNA, 25 bp, Homo sapien
gaaacgatcataggctctaaggctc

SEQ ID NO: 5079097 - DNA, 25 bp, Homo sapien
tgttaggagtgtcacagcctcagct

SEQ ID NO: 5079098 - DNA, 25 bp, Homo sapien
aaaaatgactgctatggcccaggca

SEQ ID NO: 5079099 - DNA, 25 bp, Homo sapien
gaagtcaagacacctcatgatatgg

SEQ ID NO: 5079100 - DNA, 25 bp, Homo sapien
ccgacccttggcacttcatttaact

SEQ ID NO: 5079101 - DNA, 25 bp, Homo sapien
taaagtacaccgtaaatgtaatgtg

SEQ ID NO: 5079102 - DNA, 25 bp, Homo sapien
ccttgcaaaagagctgtcctgaccg

SEQ ID NO: 5079103 - DNA, 25 bp, Homo sapien
tattctgcaggattcgatgttggca

SEQ ID NO: 5079104 - DNA, 25 bp, Homo sapien
caacagcacaatgtaggcacttggg

SEQ ID NO: 5079105 - DNA, 25 bp, Homo sapien
cacagacctgcgtacatcaacagca

SEQ ID NO: 5079106 - DNA, 25 bp, Homo sapien
gacctgcgtacatcaacagcacaat

SEQ ID NO: 5079107 - DNA, 25 bp, Homo sapien
cgtacatcaacagcacaatgtaggc

SEQ ID NO: 5079108 - DNA, 25 bp, Homo sapien
caagtctgtgggtcgtttctgtggt

SEQ ID NO: 5079109 - DNA, 25 bp, Homo sapien
attcaagtctgtgggtcgtttctgt

SEQ ID NO: 5079110 - DNA, 25 bp, Homo sapien
caggtcaccgtcattcaagtctgtg

SEQ ID NO: 5079111 - DNA, 25 bp, Homo sapien
agtcaggtcaccgtcattcaagtct

SEQ ID NO: 5079112 - DNA, 25 bp, Homo sapien
tctaggctctggttttgaggccatg

SEQ ID NO: 5079113 - DNA, 25 bp, Homo sapien
tgagacctctactatatgatggcca

SEQ ID NO: 5079114 - DNA, 25 bp, Homo sapien
taagacagggtatatcccagagaat

SEQ ID NO: 5079115 - DNA, 25 bp, Homo sapien
gatggccagttgtatgctctgtgac

SEQ ID NO: 5079116 - DNA, 25 bp, Homo sapien
catacttttgggtttgtcctaggca

SEQ ID NO: 5079117 - DNA, 25 bp, Homo sapien
cttttgggtttgtcctaggcagtct

SEQ ID NO: 5079118 - DNA, 25 bp, Homo sapien
gggtttgtcctaggcagtctttgac

SEQ ID NO: 5079119 - DNA, 25 bp, Homo sapien
ttgtcctaggcagtctttgaccttg

SEQ ID NO: 5079120 - DNA, 25 bp, Homo sapien
ttccttgcctgttgaaggccatggg

SEQ ID NO: 5079121 - DNA, 25 bp, Homo sapien
tccttgcctgttgaaggccatgggt

SEQ ID NO: 5079122 - DNA, 25 bp, Homo sapien
tcttccttgcctgttgaaggccatg

SEQ ID NO: 5079123 - DNA, 25 bp, Homo sapien
ccttgcctgttgaaggccatgggtt

SEQ ID NO: 5079124 - DNA, 25 bp, Homo sapien
ccccagttgtcattggcagagtgga

SEQ ID NO: 5079125 - DNA, 25 bp, Homo sapien
ctctaaggtgctgggttgtgcccca

SEQ ID NO: 5079126 - DNA, 25 bp, Homo sapien
ccttggtcacagagcaccctgttgg

SEQ ID NO: 5079127 - DNA, 25 bp, Homo sapien
gagcatgacctattgtcctttcggt

SEQ ID NO: 5079128 - DNA, 25 bp, Homo sapien
cagtacaatgcccagaacttctgtt

SEQ ID NO: 5079129 - DNA, 25 bp, Homo sapien
tgtttggaagggcaaaatctgagag

SEQ ID NO: 5079130 - DNA, 25 bp, Homo sapien
ggaggctggctctatgggttcccac

SEQ ID NO: 5079131 - DNA, 25 bp, Homo sapien
tttggaaaggtgagtgtaggtgaca

SEQ ID NO: 5079132 - DNA, 25 bp, Homo sapien
ggagctaatcgaacagtcccatcaa

SEQ ID NO: 5079133 - DNA, 25 bp, Homo sapien
tcaacctctcagtactttgaaaaac

SEQ ID NO: 5079134 - DNA, 25 bp, Homo sapien
gtcccatcaacctctcagtactttg

SEQ ID NO: 5079135 - DNA, 25 bp, Homo sapien
tcttctcagaggagctaatcgaaca

SEQ ID NO: 5079136 - DNA, 25 bp, Homo sapien
aggctttcctgcatcacaaatccca

SEQ ID NO: 5079137 - DNA, 25 bp, Homo sapien
ttcccttaggctttcctgcatcaca

SEQ ID NO: 5079138 - DNA, 25 bp, Homo sapien
tgcatcacaaatcccatccaaatta

SEQ ID NO: 5079139 - DNA, 25 bp, Homo sapien
cttaggctttcctgcatcacaaatc

SEQ ID NO: 5079140 - DNA, 25 bp, Homo sapien
cccaatttgaagtggctgagtagtt

SEQ ID NO: 5079141 - DNA, 25 bp, Homo sapien
gagatcttggttctcaatcagctcc

SEQ ID NO: 5079142 - DNA, 25 bp, Homo sapien
ttgaaaagagagcttggatgcccag

SEQ ID NO: 5079143 - DNA, 25 bp, Homo sapien
ttggatgcccagtaacccaatttga

SEQ ID NO: 5079144 - DNA, 25 bp, Homo sapien
ttaagaagtttttgctctctgatct

SEQ ID NO: 5079145 - DNA, 25 bp, Homo sapien
tctggctgaggtctgaaacactgca

SEQ ID NO: 5079146 - DNA, 25 bp, Homo sapien
aaacactgcatttcccgttgccaca

SEQ ID NO: 5079147 - DNA, 25 bp, Homo sapien
accagcagccaccttagggtcatca

SEQ ID NO: 5079148 - DNA, 25 bp, Homo sapien
tcatacagatgtattcctctggctg

SEQ ID NO: 5079149 - DNA, 25 bp, Homo sapien
tactctttgtccatgaggtagaaag

SEQ ID NO: 5079150 - DNA, 25 bp, Homo sapien
tacgagttataagaggcttgtgctg

SEQ ID NO: 5079151 - DNA, 25 bp, Homo sapien
gggagcacccaaccatactctttgt

SEQ ID NO: 5079152 - DNA, 25 bp, Homo sapien
ggtagaaagagccagtatccatctg

SEQ ID NO: 5079153 - DNA, 25 bp, Homo sapien
tctgcccacagttagaagagagcaa

SEQ ID NO: 5079154 - DNA, 25 bp, Homo sapien
ctaattcctcatgggctcacccggg

SEQ ID NO: 5079155 - DNA, 25 bp, Homo sapien
cactgttcagtttctagagcctgga

SEQ ID NO: 5079156 - DNA, 25 bp, Homo sapien
ggtagtgggcacaacgatacacgtt

SEQ ID NO: 5079157 - DNA, 25 bp, Homo sapien
caaggaacatttcaataacagatgc

SEQ ID NO: 5079158 - DNA, 25 bp, Homo sapien
tcaataacagatgccttcatagtga

SEQ ID NO: 5079159 - DNA, 25 bp, Homo sapien
aacagatgccttcatagtgagaaca

SEQ ID NO: 5079160 - DNA, 25 bp, Homo sapien
ggaacatttcaataacagatgcctt

SEQ ID NO: 5079161 - DNA, 25 bp, Homo sapien
ctgagagacaagtagcttggacaga

SEQ ID NO: 5079162 - DNA, 25 bp, Homo sapien
acagagctgccctaggtctctggca

SEQ ID NO: 5079163 - DNA, 25 bp, Homo sapien
gacaagtagcttggacagagctgcc

SEQ ID NO: 5079164 - DNA, 25 bp, Homo sapien
gctgccctaggtctctggcagccat

SEQ ID NO: 5079165 - DNA, 25 bp, Homo sapien
cagagcaccagaatggatggctgat

SEQ ID NO: 5079166 - DNA, 25 bp, Homo sapien
tgctacactggaaatggtaaattgc

SEQ ID NO: 5079167 - DNA, 25 bp, Homo sapien
tcctaggacgcctagcagagcacca

SEQ ID NO: 5079168 - DNA, 25 bp, Homo sapien
tcagtcttgtgttcgttttcctagg

SEQ ID NO: 5079169 - DNA, 25 bp, Homo sapien
tctccaattctgactgttagcacta

SEQ ID NO: 5079170 - DNA, 25 bp, Homo sapien
gactgttagcactagctgaggcctg

SEQ ID NO: 5079171 - DNA, 25 bp, Homo sapien
ttagcactagctgaggcctgagtaa

SEQ ID NO: 5079172 - DNA, 25 bp, Homo sapien
gcctgagtaattgacgtaccatatc

SEQ ID NO: 5079173 - DNA, 25 bp, Homo sapien
tttgtttgaatgtactccagtcacc

SEQ ID NO: 5079174 - DNA, 25 bp, Homo sapien
gaatgtactccagtcaccagcaaaa

SEQ ID NO: 5079175 - DNA, 25 bp, Homo sapien
tttctttgtttgaatgtactccagt

SEQ ID NO: 5079176 - DNA, 25 bp, Homo sapien
tttgaatgtactccagtcaccagca

SEQ ID NO: 5079177 - DNA, 25 bp, Homo sapien
gccagtaacacgttgcatggaatca

SEQ ID NO: 5079178 - DNA, 25 bp, Homo sapien
ggcagccagtaacacgttgcatgga

SEQ ID NO: 5079179 - DNA, 25 bp, Homo sapien
tgggcagccagtaacacgttgcatg

SEQ ID NO: 5079180 - DNA, 25 bp, Homo sapien
cagtaacacgttgcatggaatcatc

SEQ ID NO: 5079181 - DNA, 25 bp, Homo sapien
aactgggttcctgagatggtctcag

SEQ ID NO: 5079182 - DNA, 25 bp, Homo sapien
tctaactgggttcctgagatggtct

SEQ ID NO: 5079183 - DNA, 25 bp, Homo sapien
taactgggttcctgagatggtctca

SEQ ID NO: 5079184 - DNA, 25 bp, Homo sapien
cctctaactgggttcctgagatggt

SEQ ID NO: 5079185 - DNA, 25 bp, Homo sapien
gacatcgcagttgatctgaggcaca

SEQ ID NO: 5079186 - DNA, 25 bp, Homo sapien
gatctttccggctttgacatcgcag

SEQ ID NO: 5079187 - DNA, 25 bp, Homo sapien
gccacacacactggagtaggatgca

SEQ ID NO: 5079188 - DNA, 25 bp, Homo sapien
taggatgcatacacgtcagtgccat

SEQ ID NO: 5079189 - DNA, 25 bp, Homo sapien
ctcctccctgattgcagtgccaggg

SEQ ID NO: 5079190 - DNA, 25 bp, Homo sapien
ataactgagggtcagtcccttggct

SEQ ID NO: 5079191 - DNA, 25 bp, Homo sapien
ggataactgagggtcagtcccttgg

SEQ ID NO: 5079192 - DNA, 25 bp, Homo sapien
ggccaggtgtcgaatggctgctgtt

SEQ ID NO: 5079193 - DNA, 25 bp, Homo sapien
tgacatgaagcccaacccacaagaa

SEQ ID NO: 5079194 - DNA, 25 bp, Homo sapien
gagctcccagggtcaatgtccttct

SEQ ID NO: 5079195 - DNA, 25 bp, Homo sapien
tgattgttctgtcagggatttcttt

SEQ ID NO: 5079196 - DNA, 25 bp, Homo sapien
aagaatggtgcctccaccagcagac

SEQ ID NO: 5079197 - DNA, 25 bp, Homo sapien
gattggacaccgttggaataactcc

SEQ ID NO: 5079198 - DNA, 25 bp, Homo sapien
aggattctctccatcgtggtaggga

SEQ ID NO: 5079199 - DNA, 25 bp, Homo sapien
tgtccagcaaccttccgaacaagta

SEQ ID NO: 5079200 - DNA, 25 bp, Homo sapien
aataactccctttgtaaccagactg

SEQ ID NO: 5079201 - DNA, 25 bp, Homo sapien
tgtgggccacactttatctgcagaa

SEQ ID NO: 5079202 - DNA, 25 bp, Homo sapien
ggtgttacctataaatgccacgtgt

SEQ ID NO: 5079203 - DNA, 25 bp, Homo sapien
cacgtgtttgggcttacttgcatta

SEQ ID NO: 5079204 - DNA, 25 bp, Homo sapien
aatgactgaggttattttaggccca

SEQ ID NO: 5079205 - DNA, 25 bp, Homo sapien
ggtgaacgggaaagccctccacatg

SEQ ID NO: 5079206 - DNA, 25 bp, Homo sapien
taattgtatcagtaggtgaacggga

SEQ ID NO: 5079207 - DNA, 25 bp, Homo sapien
ctgtgtggcttcgaatgtttaattg

SEQ ID NO: 5079208 - DNA, 25 bp, Homo sapien
tccatgattcagagttgcttaacat

SEQ ID NO: 5079209 - DNA, 25 bp, Homo sapien
cgatgatgagtatgtaagagctgat

SEQ ID NO: 5079210 - DNA, 25 bp, Homo sapien
cagctggacttttcgatgatgagta

SEQ ID NO: 5079211 - DNA, 25 bp, Homo sapien
aagagctgatgggtaggttacaccc

SEQ ID NO: 5079212 - DNA, 25 bp, Homo sapien
gagctgatgggtaggttacaccctt

SEQ ID NO: 5079213 - DNA, 25 bp, Homo sapien
gatgttaatttctccgctatctccc

SEQ ID NO: 5079214 - DNA, 25 bp, Homo sapien
aacacgtcgcgtgttcatggactca

SEQ ID NO: 5079215 - DNA, 25 bp, Homo sapien
cgtgttcatggactcagaaggttta

SEQ ID NO: 5079216 - DNA, 25 bp, Homo sapien
gctatctcccaaaacacgtcgcgtg

SEQ ID NO: 5079217 - DNA, 25 bp, Homo sapien
attgccagagccagtggagcttgac

SEQ ID NO: 5079218 - DNA, 25 bp, Homo sapien
aatattgccagagccagtggagctt

SEQ ID NO: 5079219 - DNA, 25 bp, Homo sapien
aaaatattgccagagccagtggagc

SEQ ID NO: 5079220 - DNA, 25 bp, Homo sapien
ttaaaatattgccagagccagtgga

SEQ ID NO: 5079221 - DNA, 25 bp, Homo sapien
gagttggcacaaccttgtagacagt

SEQ ID NO: 5079222 - DNA, 25 bp, Homo sapien
tcttggcctgaggtctaccgatact

SEQ ID NO: 5079223 - DNA, 25 bp, Homo sapien
catttccggacagaatgtcatgtca

SEQ ID NO: 5079224 - DNA, 25 bp, Homo sapien
ggttcacatgaaagctgagttggca

SEQ ID NO: 5079225 - DNA, 25 bp, Homo sapien
cctgagggtgccaaagagaagcctg

SEQ ID NO: 5079226 - DNA, 25 bp, Homo sapien
ggctgctggaaccaggcatccgtat

SEQ ID NO: 5079227 - DNA, 25 bp, Homo sapien
tcagacctgagggtgccaaagagaa

SEQ ID NO: 5079228 - DNA, 25 bp, Homo sapien
agagaagcctggctgttcccatggc

SEQ ID NO: 5079229 - DNA, 25 bp, Homo sapien
gaagtgctcttccactcatggtaaa

SEQ ID NO: 5079230 - DNA, 25 bp, Homo sapien
cgtgtgcaatacagcaacagagctc

SEQ ID NO: 5079231 - DNA, 25 bp, Homo sapien
gctttatgtgaacctggggactgtt

SEQ ID NO: 5079232 - DNA, 25 bp, Homo sapien
tttccaaccaatctttctgcagatc

SEQ ID NO: 5079233 - DNA, 25 bp, Homo sapien
gaaagtactggacagacgactacag

SEQ ID NO: 5079234 - DNA, 25 bp, Homo sapien
tgctgtccagatacggcccaaagct

SEQ ID NO: 5079235 - DNA, 25 bp, Homo sapien
gaagatactggcactctacctcggg

SEQ ID NO: 5079236 - DNA, 25 bp, Homo sapien
tgcttagaactatggccttgggtga

SEQ ID NO: 5079237 - DNA, 25 bp, Homo sapien
tcagggtcttgcacgtaggagatgc

SEQ ID NO: 5079238 - DNA, 25 bp, Homo sapien
tagaaattgtctctgctgcggagaa

SEQ ID NO: 5079239 - DNA, 25 bp, Homo sapien
aatgctggtagtttagctcagggtc

SEQ ID NO: 5079240 - DNA, 25 bp, Homo sapien
cacactccttgtggatgtcaatgac

SEQ ID NO: 5079241 - DNA, 25 bp, Homo sapien
ggtgcttctgtcttggtgggaacca

SEQ ID NO: 5079242 - DNA, 25 bp, Homo sapien
tattgcctccttacggagatgcagg

SEQ ID NO: 5079243 - DNA, 25 bp, Homo sapien
aaatcactaaagagctcacagcagc

SEQ ID NO: 5079244 - DNA, 25 bp, Homo sapien
gcaggcccgggtttgacctacttca

SEQ ID NO: 5079245 - DNA, 25 bp, Homo sapien
tttctcaggaggctatagggtagac

SEQ ID NO: 5079246 - DNA, 25 bp, Homo sapien
tatagggtagactctgtgtcttgcc

SEQ ID NO: 5079247 - DNA, 25 bp, Homo sapien
tctgctccgtcgtcatatgacctct

SEQ ID NO: 5079248 - DNA, 25 bp, Homo sapien
cccacctgtcaagggagggatgagg

SEQ ID NO: 5079249 - DNA, 25 bp, Homo sapien
tgactagtcaactcttctgggcccc

SEQ ID NO: 5079250 - DNA, 25 bp, Homo sapien
ggtgaaacccaggtaacagccacat

SEQ ID NO: 5079251 - DNA, 25 bp, Homo sapien
tagagaatacgttttagatgcgctg

SEQ ID NO: 5079252 - DNA, 25 bp, Homo sapien
gctgaattaatttgcctggcaccac

SEQ ID NO: 5079253 - DNA, 25 bp, Homo sapien
taggtggcctctgataggcttttgt

SEQ ID NO: 5079254 - DNA, 25 bp, Homo sapien
ggaataggtggcctctgataggctt

SEQ ID NO: 5079255 - DNA, 25 bp, Homo sapien
ctctgataggcttttgtggtctcac

SEQ ID NO: 5079256 - DNA, 25 bp, Homo sapien
tggcctctgataggcttttgtggtc

SEQ ID NO: 5079257 - DNA, 25 bp, Homo sapien
gcagaaggggatggccttggcaagg

SEQ ID NO: 5079258 - DNA, 25 bp, Homo sapien
ggccacagctacagtgacagccaga

SEQ ID NO: 5079259 - DNA, 25 bp, Homo sapien
gggatgctggtggtagaagcagcag

SEQ ID NO: 5079260 - DNA, 25 bp, Homo sapien
cagccagaagctgcatcagagtgac

SEQ ID NO: 5079261 - DNA, 25 bp, Homo sapien
ccatctcctggctcctgtggcccac

SEQ ID NO: 5079262 - DNA, 25 bp, Homo sapien
taggccctatttgatgtagtacgag

SEQ ID NO: 5079263 - DNA, 25 bp, Homo sapien
ctatcttcagaagtacggtgacagc

SEQ ID NO: 5079264 - DNA, 25 bp, Homo sapien
cctagcacaaagcaacacatggtct

SEQ ID NO: 5079265 - DNA, 25 bp, Homo sapien
gaaatctaccatcccttcaactgag

SEQ ID NO: 5079266 - DNA, 25 bp, Homo sapien
gaagctttgccaggttaggagccac

SEQ ID NO: 5079267 - DNA, 25 bp, Homo sapien
cccagcgtagccaaataaatatgcc

SEQ ID NO: 5079268 - DNA, 25 bp, Homo sapien
tcatggcttgcttgctccgagcgtt

SEQ ID NO: 5079269 - DNA, 25 bp, Homo sapien
tatcctagccattgtggtgcatgct

SEQ ID NO: 5079270 - DNA, 25 bp, Homo sapien
gggcctgttttggctgcttgtgtag

SEQ ID NO: 5079271 - DNA, 25 bp, Homo sapien
ggcctgttttggctgcttgtgtagg

SEQ ID NO: 5079272 - DNA, 25 bp, Homo sapien
gcctgttttggctgcttgtgtaggt

SEQ ID NO: 5079273 - DNA, 25 bp, Homo sapien
ctgacatccgctccaacaggtttct

SEQ ID NO: 5079274 - DNA, 25 bp, Homo sapien
ggctgacatccgctccaacaggttt

SEQ ID NO: 5079275 - DNA, 25 bp, Homo sapien
aggctgacatccgctccaacaggtt

SEQ ID NO: 5079276 - DNA, 25 bp, Homo sapien
ccaggctgacatccgctccaacagg

SEQ ID NO: 5079277 - DNA, 25 bp, Homo sapien
tatttgtgctttatcctggaggact

SEQ ID NO: 5079278 - DNA, 25 bp, Homo sapien
atcaggttatgtgcctccttgccaa

SEQ ID NO: 5079279 - DNA, 25 bp, Homo sapien
cataaagtaatgacagcccttggat

SEQ ID NO: 5079280 - DNA, 25 bp, Homo sapien
gccatatccgaaccatgtgctgtat

SEQ ID NO: 5079281 - DNA, 25 bp, Homo sapien
ctggtagcgcatcacacaaggactc

SEQ ID NO: 5079282 - DNA, 25 bp, Homo sapien
gctggtagcgcatcacacaaggact

SEQ ID NO: 5079283 - DNA, 25 bp, Homo sapien
tggtagcgcatcacacaaggactct

SEQ ID NO: 5079284 - DNA, 25 bp, Homo sapien
gtagcgcatcacacaaggactctca

SEQ ID NO: 5079285 - DNA, 25 bp, Homo sapien
gctgtaccgaagtggggagcactaa

SEQ ID NO: 5079286 - DNA, 25 bp, Homo sapien
agctgcttcttgctgtaccgaagtg

SEQ ID NO: 5079287 - DNA, 25 bp, Homo sapien
tggggagcactaagagggtgggctg

SEQ ID NO: 5079288 - DNA, 25 bp, Homo sapien
aagagggtgggctgttgcagctgtg

SEQ ID NO: 5079289 - DNA, 25 bp, Homo sapien
acgggacccaagcaagagctgcaaa

SEQ ID NO: 5079290 - DNA, 25 bp, Homo sapien
gcatgcctgctcctaagactgtggt

SEQ ID NO: 5079291 - DNA, 25 bp, Homo sapien
tccatctagaagtcaccaacacggg

SEQ ID NO: 5079292 - DNA, 25 bp, Homo sapien
tataagacagaagcccgagtgtccc

SEQ ID NO: 5079293 - DNA, 25 bp, Homo sapien
aaaaggaccgatccaggtttccatg

SEQ ID NO: 5079294 - DNA, 25 bp, Homo sapien
tcatctaaaaggaccgatccaggtt

SEQ ID NO: 5079295 - DNA, 25 bp, Homo sapien
aaaggaccgatccaggtttccatga

SEQ ID NO: 5079296 - DNA, 25 bp, Homo sapien
catctaaaaggaccgatccaggttt

SEQ ID NO: 5079297 - DNA, 25 bp, Homo sapien
tttaggcttggtaacacgaatgggc

SEQ ID NO: 5079298 - DNA, 25 bp, Homo sapien
aagtacaagtccagaggcggagtcc

SEQ ID NO: 5079299 - DNA, 25 bp, Homo sapien
agagcacgcttgcagcactggaagt

SEQ ID NO: 5079300 - DNA, 25 bp, Homo sapien
gtggaaacgccccaagactctgcgt

SEQ ID NO: 5079301 - DNA, 25 bp, Homo sapien
ccaaagactgtgtgctcaattcttc

SEQ ID NO: 5079302 - DNA, 25 bp, Homo sapien
tactggctccaaagactgtgtgctc

SEQ ID NO: 5079303 - DNA, 25 bp, Homo sapien
cagggatactggctccaaagactgt

SEQ ID NO: 5079304 - DNA, 25 bp, Homo sapien
ttggatctcccagggatactggctc

SEQ ID NO: 5079305 - DNA, 25 bp, Homo sapien
ctgcctatacccaagcatgatcttg

SEQ ID NO: 5079306 - DNA, 25 bp, Homo sapien
tgtccccaaactgcctatacccaag

SEQ ID NO: 5079307 - DNA, 25 bp, Homo sapien
ccaaactgcctatacccaagcatga

SEQ ID NO: 5079308 - DNA, 25 bp, Homo sapien
tgctgtccccaaactgcctataccc

SEQ ID NO: 5079309 - DNA, 25 bp, Homo sapien
ctcctgtctgcctgggcgttcagtg

SEQ ID NO: 5079310 - DNA, 25 bp, Homo sapien
tcctgtctgcctgggcgttcagtgc

SEQ ID NO: 5079311 - DNA, 25 bp, Homo sapien
ctgtctgcctgggcgttcagtgcct

SEQ ID NO: 5079312 - DNA, 25 bp, Homo sapien
gtctgcctgggcgttcagtgcctac

SEQ ID NO: 5079313 - DNA, 25 bp, Homo sapien
ctgggcatcctcttgttcctctttc

SEQ ID NO: 5079314 - DNA, 25 bp, Homo sapien
gttcctctttctccatcagagcccc

SEQ ID NO: 5079315 - DNA, 25 bp, Homo sapien
tcttgttcctctttctccatcagag

SEQ ID NO: 5079316 - DNA, 25 bp, Homo sapien
ttgttcctctttctccatcagagcc

SEQ ID NO: 5079317 - DNA, 25 bp, Homo sapien
tgcggaacggaaaaagactctatta

SEQ ID NO: 5079318 - DNA, 25 bp, Homo sapien
ctgcggaacggaaaaagactctatt

SEQ ID NO: 5079319 - DNA, 25 bp, Homo sapien
agtggaccggcagggccaatgtcaa

SEQ ID NO: 5079320 - DNA, 25 bp, Homo sapien
gagctgcttctggattcggaatcgc

SEQ ID NO: 5079321 - DNA, 25 bp, Homo sapien
tggacaacacccatcagtggaccgg

SEQ ID NO: 5079322 - DNA, 25 bp, Homo sapien
gaatcgccgtttgccaatgctggtg

SEQ ID NO: 5079323 - DNA, 25 bp, Homo sapien
tggcgaaagtcatctaggtgctcag

SEQ ID NO: 5079324 - DNA, 25 bp, Homo sapien
tattaccgccaaatgaaagattgag

SEQ ID NO: 5079325 - DNA, 25 bp, Homo sapien
taagagtgatttattaccgccaaat

SEQ ID NO: 5079326 - DNA, 25 bp, Homo sapien
ggatgtcaacacgagccctccattt

SEQ ID NO: 5079327 - DNA, 25 bp, Homo sapien
tgcctgtctctcagagaggagagaa

SEQ ID NO: 5079328 - DNA, 25 bp, Homo sapien
ctgcctgtctctcagagaggagaga

SEQ ID NO: 5079329 - DNA, 25 bp, Homo sapien
gggctcggagatccaggtgattctt

SEQ ID NO: 5079330 - DNA, 25 bp, Homo sapien
aaatccatggggctcggagatccag

SEQ ID NO: 5079331 - DNA, 25 bp, Homo sapien
tcaggaaagtttgtaaagctctgga

SEQ ID NO: 5079332 - DNA, 25 bp, Homo sapien
aagtttgtaaagctctggattctag

SEQ ID NO: 5079333 - DNA, 25 bp, Homo sapien
tgagtccatgcggaccgggacaagt

SEQ ID NO: 5079334 - DNA, 25 bp, Homo sapien
catgggttgattcttagtgagtcca

SEQ ID NO: 5079335 - DNA, 25 bp, Homo sapien
gatctatgctatccccagagggtgg

SEQ ID NO: 5079336 - DNA, 25 bp, Homo sapien
caagtggtgcagtcacgaggaaacc

SEQ ID NO: 5079337 - DNA, 25 bp, Homo sapien
tgtcttcagatctcgagaattcgtg

SEQ ID NO: 5079338 - DNA, 25 bp, Homo sapien
ctctgagtaattttctctatggctg

SEQ ID NO: 5079339 - DNA, 25 bp, Homo sapien
tacattagaaagtcctcctctctga

SEQ ID NO: 5079340 - DNA, 25 bp, Homo sapien
aattcgtgtgtgtcttgaggttaaa

SEQ ID NO: 5079341 - DNA, 25 bp, Homo sapien
tctctcgcaagtcttgaagcctcct

SEQ ID NO: 5079342 - DNA, 25 bp, Homo sapien
aagaaaatgttgattcctgactctc

SEQ ID NO: 5079343 - DNA, 25 bp, Homo sapien
cattgggagccccgcttctgtttcc

SEQ ID NO: 5079344 - DNA, 25 bp, Homo sapien
tgtttgcaaagttgggctccaccac

SEQ ID NO: 5079345 - DNA, 25 bp, Homo sapien
tcacaaactggaggacggtgcggaa

SEQ ID NO: 5079346 - DNA, 25 bp, Homo sapien
tctgcacgtggagcgagtagaagcc

SEQ ID NO: 5079347 - DNA, 25 bp, Homo sapien
caatgtcagccgagttcaagcaggt

SEQ ID NO: 5079348 - DNA, 25 bp, Homo sapien
tgttcgtaggtgtactgcacggccc

SEQ ID NO: 5079349 - DNA, 25 bp, Homo sapien
gacatactgatggaggttgtcaaac

SEQ ID NO: 5079350 - DNA, 25 bp, Homo sapien
aactcgtccacaaagaaggagtggt

SEQ ID NO: 5079351 - DNA, 25 bp, Homo sapien
caggcaacgcctatcgcataggtga

SEQ ID NO: 5079352 - DNA, 25 bp, Homo sapien
aatgacttctagctcctcttgggca

SEQ ID NO: 5079353 - DNA, 25 bp, Homo sapien
tacgtaagcctgtcgtaagggctgc

SEQ ID NO: 5079354 - DNA, 25 bp, Homo sapien
gcccaagacttgatgcaccgtgcgt

SEQ ID NO: 5079355 - DNA, 25 bp, Homo sapien
gggtggtccaacacgtcagttagta

SEQ ID NO: 5079356 - DNA, 25 bp, Homo sapien
taagggctgcactgtattccgaaca

SEQ ID NO: 5079357 - DNA, 25 bp, Homo sapien
ccgacaaaagtggtcacatgagcca

SEQ ID NO: 5079358 - DNA, 25 bp, Homo sapien
acatgagccagtaggtcagcagaca

SEQ ID NO: 5079359 - DNA, 25 bp, Homo sapien
tttgcaaaggccagtcgagagccca

SEQ ID NO: 5079360 - DNA, 25 bp, Homo sapien
gactgatggcccttgtgtgcttgtg

SEQ ID NO: 5079361 - DNA, 25 bp, Homo sapien
tcctttcagccacgtcagcttggat

SEQ ID NO: 5079362 - DNA, 25 bp, Homo sapien
ctcctttcagccacgtcagcttgga

SEQ ID NO: 5079363 - DNA, 25 bp, Homo sapien
tgggcaaatccctgctgaggctgac

SEQ ID NO: 5079364 - DNA, 25 bp, Homo sapien
tgctcatgaacaagcctgcaggccc

SEQ ID NO: 5079365 - DNA, 25 bp, Homo sapien
gggatgcccctaatctgctcatgaa

SEQ ID NO: 5079366 - DNA, 25 bp, Homo sapien
gactgtccaggattagaaagtctcc

SEQ ID NO: 5079367 - DNA, 25 bp, Homo sapien
tctatataagctccctaaggcacag

SEQ ID NO: 5079368 - DNA, 25 bp, Homo sapien
tgttggctgagtaatcagagagccc

SEQ ID NO: 5079369 - DNA, 25 bp, Homo sapien
tgcccttgaggtgtccaattgatag

SEQ ID NO: 5079370 - DNA, 25 bp, Homo sapien
acttgaaggttgtagttccaggcaa

SEQ ID NO: 5079371 - DNA, 25 bp, Homo sapien
gaaaaactcggtggtctcatatctt

SEQ ID NO: 5079372 - DNA, 25 bp, Homo sapien
tcaggatgaagaccaggcatgtaag

SEQ ID NO: 5079373 - DNA, 25 bp, Homo sapien
tcagggtcagaaggaatcaggcttt

SEQ ID NO: 5079374 - DNA, 25 bp, Homo sapien
cagttgtttgtgaataataccctcc

SEQ ID NO: 5079375 - DNA, 25 bp, Homo sapien
tgtggcctgagccacattgtcttcc

SEQ ID NO: 5079376 - DNA, 25 bp, Homo sapien
aggagaagcaactgaccctgtggcc

SEQ ID NO: 5079377 - DNA, 25 bp, Homo sapien
caaaaaggagaagcaactgaccctg

SEQ ID NO: 5079378 - DNA, 25 bp, Homo sapien
cctgtggcctgagccacattgtctt

SEQ ID NO: 5079379 - DNA, 25 bp, Homo sapien
ccagtgatgtaaaggagagcccaca

SEQ ID NO: 5079380 - DNA, 25 bp, Homo sapien
tctttaggtaattaacccagtgatg

SEQ ID NO: 5079381 - DNA, 25 bp, Homo sapien
tctgtgtccctctttaggtaattaa

SEQ ID NO: 5079382 - DNA, 25 bp, Homo sapien
taattaacccagtgatgtaaaggag

SEQ ID NO: 5079383 - DNA, 25 bp, Homo sapien
ctttggtggctctaagtgtattatt

SEQ ID NO: 5079384 - DNA, 25 bp, Homo sapien
tcttatgtaaattcagggtatggat

SEQ ID NO: 5079385 - DNA, 25 bp, Homo sapien
gggtatggataagctaattaagata

SEQ ID NO: 5079386 - DNA, 25 bp, Homo sapien
taatttttgtggtgcaagaagtttc

SEQ ID NO: 5079387 - DNA, 25 bp, Homo sapien
aagagatacagaagacgagggcaag

SEQ ID NO: 5079388 - DNA, 25 bp, Homo sapien
cagctgaatctgtgagcctgaggtc

SEQ ID NO: 5079389 - DNA, 25 bp, Homo sapien
caggcctgagcgaatacaagtttag

SEQ ID NO: 5079390 - DNA, 25 bp, Homo sapien
ttctaattcgctaggcaggcctgag

SEQ ID NO: 5079391 - DNA, 25 bp, Homo sapien
tggcatgatccagtggagacaaggt

SEQ ID NO: 5079392 - DNA, 25 bp, Homo sapien
gattagcaaggcctcagtacaagga

SEQ ID NO: 5079393 - DNA, 25 bp, Homo sapien
caagtgcctcctttggtagtagata

SEQ ID NO: 5079394 - DNA, 25 bp, Homo sapien
gataccctacaattggaaagataca

SEQ ID NO: 5079395 - DNA, 25 bp, Homo sapien
tgacttaatgttttctagatgaagg

SEQ ID NO: 5079396 - DNA, 25 bp, Homo sapien
cctctaatacgtaaaacaagtcagt

SEQ ID NO: 5079397 - DNA, 25 bp, Homo sapien
cgttattaatgaattaagatgccct

SEQ ID NO: 5079398 - DNA, 25 bp, Homo sapien
agtgtctcatggtgaaacttataaa

SEQ ID NO: 5079399 - DNA, 25 bp, Homo sapien
ccaggactactgaattcttgtgact

SEQ ID NO: 5079400 - DNA, 25 bp, Homo sapien
cagcaacaacgaaaaggcaagcact

SEQ ID NO: 5079401 - DNA, 25 bp, Homo sapien
caccatggaaagctatgagcctttg

SEQ ID NO: 5079402 - DNA, 25 bp, Homo sapien
aaagttctaggagtgttcagccagg

SEQ ID NO: 5079403 - DNA, 25 bp, Homo sapien
gcatccaggtttcaattctgggcca

SEQ ID NO: 5079404 - DNA, 25 bp, Homo sapien
tgaccatcataattggacagttgaa

SEQ ID NO: 5079405 - DNA, 25 bp, Homo sapien
gacagttgaaagtatgggcctcaga

SEQ ID NO: 5079406 - DNA, 25 bp, Homo sapien
gtggccaatctgacaaaacaatctg

SEQ ID NO: 5079407 - DNA, 25 bp, Homo sapien
tctacctgtagaagttggggaattc

SEQ ID NO: 5079408 - DNA, 25 bp, Homo sapien
tacctgtagaagttggggaattcca

SEQ ID NO: 5079409 - DNA, 25 bp, Homo sapien
ctccccgggtatctgcggccgccat

SEQ ID NO: 5079410 - DNA, 25 bp, Homo sapien
catttcccggcccgtcacgggctcg

SEQ ID NO: 5079411 - DNA, 25 bp, Homo sapien
cgcagttgacccatttcccggcccg

SEQ ID NO: 5079412 - DNA, 25 bp, Homo sapien
gcgccgcagttgacccatttcccgg

SEQ ID NO: 5079413 - DNA, 25 bp, Homo sapien
gccagcgcgccgcagttgacccatt

SEQ ID NO: 5079414 - DNA, 25 bp, Homo sapien
cttaaaagatgtgcagctcgggcag

SEQ ID NO: 5079415 - DNA, 25 bp, Homo sapien
taaaagatgtgcagctcgggcaggt

SEQ ID NO: 5079416 - DNA, 25 bp, Homo sapien
aaagatgtgcagctcgggcaggtat

SEQ ID NO: 5079417 - DNA, 25 bp, Homo sapien
ttaaaagatgtgcagctcgggcagg

SEQ ID NO: 5079418 - DNA, 25 bp, Homo sapien
tcttagaaaggtgatcggcgttcct

SEQ ID NO: 5079419 - DNA, 25 bp, Homo sapien
gcgtctagggtgagagaaactccga

SEQ ID NO: 5079420 - DNA, 25 bp, Homo sapien
tggtcaggtaacaggtttgagcccc

SEQ ID NO: 5079421 - DNA, 25 bp, Homo sapien
tgagcccctcgagtcaaaagagaaa

SEQ ID NO: 5079422 - DNA, 25 bp, Homo sapien
tatcttaatattcccagcgcaagag

SEQ ID NO: 5079423 - DNA, 25 bp, Homo sapien
ttaagtagagtaaaaatcagcggga

SEQ ID NO: 5079424 - DNA, 25 bp, Homo sapien
tacaggatttactgcaggaggactg

SEQ ID NO: 5079425 - DNA, 25 bp, Homo sapien
tcagcgggaataagataggaaaaat

SEQ ID NO: 5079426 - DNA, 25 bp, Homo sapien
cctgcatgaccaaggttataagcta

SEQ ID NO: 5079427 - DNA, 25 bp, Homo sapien
cagtatccggtataagaatgggcag

SEQ ID NO: 5079428 - DNA, 25 bp, Homo sapien
cagcttttgaatttaagtcgttcaa

SEQ ID NO: 5079429 - DNA, 25 bp, Homo sapien
gattccaagagggtaaattttcagc

SEQ ID NO: 5079430 - DNA, 25 bp, Homo sapien
aatgaggtgtagcaatgatcagcac

SEQ ID NO: 5079431 - DNA, 25 bp, Homo sapien
ccagaccaatttgtagcattattaa

SEQ ID NO: 5079432 - DNA, 25 bp, Homo sapien
taatttcaactatcaaccagaccaa

SEQ ID NO: 5079433 - DNA, 25 bp, Homo sapien
tagcattattaatgaggtgtagcaa

SEQ ID NO: 5079434 - DNA, 25 bp, Homo sapien
tgacagctctctgctcgccccggtt

SEQ ID NO: 5079435 - DNA, 25 bp, Homo sapien
ttcagcgccgtagagcgcgcgctgc

SEQ ID NO: 5079436 - DNA, 25 bp, Homo sapien
agcgtcggacttccggacctcggct

SEQ ID NO: 5079437 - DNA, 25 bp, Homo sapien
caccgaccagcgtcggacttccgga

SEQ ID NO: 5079438 - DNA, 25 bp, Homo sapien
gataacgctaagtttttggcctgaa

SEQ ID NO: 5079439 - DNA, 25 bp, Homo sapien
cacccacggatggaaaagtggctga

SEQ ID NO: 5079440 - DNA, 25 bp, Homo sapien
tcaatactacgctcaggaaccgctg

SEQ ID NO: 5079441 - DNA, 25 bp, Homo sapien
tataaatgtgacaagaaacgtccca

SEQ ID NO: 5079442 - DNA, 25 bp, Homo sapien
gttcaacttcatatggctatagtat

SEQ ID NO: 5079443 - DNA, 25 bp, Homo sapien
aggaatcagacatatagtcctcttc

SEQ ID NO: 5079444 - DNA, 25 bp, Homo sapien
atcagacatatagtcctcttcttct

SEQ ID NO: 5079445 - DNA, 25 bp, Homo sapien
atgaaggaatcagacatatagtcct

SEQ ID NO: 5079446 - DNA, 25 bp, Homo sapien
taatgaaggaatcagacatatagtc

SEQ ID NO: 5079447 - DNA, 25 bp, Homo sapien
taggatgttggcaataataaagaac

SEQ ID NO: 5079448 - DNA, 25 bp, Homo sapien
aataaagaacaaagttgtatagcag

SEQ ID NO: 5079449 - DNA, 25 bp, Homo sapien
tatgtttctaggatgttggcaataa

SEQ ID NO: 5079450 - DNA, 25 bp, Homo sapien
tgtttctaggatgttggcaataata

SEQ ID NO: 5079451 - DNA, 25 bp, Homo sapien
caagtgcctgaccacttttatagcc

SEQ ID NO: 5079452 - DNA, 25 bp, Homo sapien
gccaagtgcctgaccacttttatag

SEQ ID NO: 5079453 - DNA, 25 bp, Homo sapien
cttgccaagtgcctgaccactttta

SEQ ID NO: 5079454 - DNA, 25 bp, Homo sapien
aagtgcctgaccacttttatagccc

SEQ ID NO: 5079455 - DNA, 25 bp, Homo sapien
ttgagaggaattggttcaacaatac

SEQ ID NO: 5079456 - DNA, 25 bp, Homo sapien
gatattgagaggaattggttcaaca

SEQ ID NO: 5079457 - DNA, 25 bp, Homo sapien
tgttttgatattgagaggaattggt

SEQ ID NO: 5079458 - DNA, 25 bp, Homo sapien
gaggaattggttcaacaataccacc

SEQ ID NO: 5079459 - DNA, 25 bp, Homo sapien
taatgatgcctcatgaccaatgcca

SEQ ID NO: 5079460 - DNA, 25 bp, Homo sapien
gatgcctcatgaccaatgccacttt

SEQ ID NO: 5079461 - DNA, 25 bp, Homo sapien
tgatgcctcatgaccaatgccactt

SEQ ID NO: 5079462 - DNA, 25 bp, Homo sapien
aatgatgcctcatgaccaatgccac

SEQ ID NO: 5079463 - DNA, 25 bp, Homo sapien
gttgttgacaggctcgctggcttct

SEQ ID NO: 5079464 - DNA, 25 bp, Homo sapien
cagttgttgacaggctcgctggctt

SEQ ID NO: 5079465 - DNA, 25 bp, Homo sapien
agttgttgacaggctcgctggcttc

SEQ ID NO: 5079466 - DNA, 25 bp, Homo sapien
ccagttgttgacaggctcgctggct

SEQ ID NO: 5079467 - DNA, 25 bp, Homo sapien
tcaagcctcaaccagtaccatgctt

SEQ ID NO: 5079468 - DNA, 25 bp, Homo sapien
aaatcttcactcttatattcatctt

SEQ ID NO: 5079469 - DNA, 25 bp, Homo sapien
tcttatattcatcttcatcctgttc

SEQ ID NO: 5079470 - DNA, 25 bp, Homo sapien
ttcaagcctcaaccagtaccatgct

SEQ ID NO: 5079471 - DNA, 25 bp, Homo sapien
gcaatgcagtacctctcaaccaggg

SEQ ID NO: 5079472 - DNA, 25 bp, Homo sapien
ggctgagacaccctatgaaggaaat

SEQ ID NO: 5079473 - DNA, 25 bp, Homo sapien
caaaagtgcaactggtatctggtgg

SEQ ID NO: 5079474 - DNA, 25 bp, Homo sapien
ggacagctctccacaacaacggatt

SEQ ID NO: 5079475 - DNA, 25 bp, Homo sapien
acatttgttgctaattcatcatcca

SEQ ID NO: 5079476 - DNA, 25 bp, Homo sapien
tacatttgttgctaattcatcatcc

SEQ ID NO: 5079477 - DNA, 25 bp, Homo sapien
tcttctcttaaataactagtcaata

SEQ ID NO: 5079478 - DNA, 25 bp, Homo sapien
ccacaccaaatacaatatagatgtt

SEQ ID NO: 5079479 - DNA, 25 bp, Homo sapien
ttcataggctgttccacaccaaata

SEQ ID NO: 5079480 - DNA, 25 bp, Homo sapien
caatatagatgttcttctcttaaat

SEQ ID NO: 5079481 - DNA, 25 bp, Homo sapien
aagttggtcctggacaatttgaaga

SEQ ID NO: 5079482 - DNA, 25 bp, Homo sapien
caatttgaagataggtcttctttat

SEQ ID NO: 5079483 - DNA, 25 bp, Homo sapien
gaagttggtcctggacaatttgaag

SEQ ID NO: 5079484 - DNA, 25 bp, Homo sapien
ggacaatttgaagataggtcttctt

SEQ ID NO: 5079485 - DNA, 25 bp, Homo sapien
tgggtgatacaagaaggaactgagc

SEQ ID NO: 5079486 - DNA, 25 bp, Homo sapien
agaactgtcttatcccatgggtgat

SEQ ID NO: 5079487 - DNA, 25 bp, Homo sapien
tgaaagctaactggtctcagaatgc

SEQ ID NO: 5079488 - DNA, 25 bp, Homo sapien
tggtggtttccctgaccttgaaagc

SEQ ID NO: 5079489 - DNA, 25 bp, Homo sapien
gatatctcccactctctaagccggt

SEQ ID NO: 5079490 - DNA, 25 bp, Homo sapien
tatgttggctgaaatgacaccacag

SEQ ID NO: 5079491 - DNA, 25 bp, Homo sapien
ttagtagtactggtcgaacattgcc

SEQ ID NO: 5079492 - DNA, 25 bp, Homo sapien
tcttgctcaatctaactaacaggtg

SEQ ID NO: 5079493 - DNA, 25 bp, Homo sapien
tattcagtgtttcccgagtaagccc

SEQ ID NO: 5079494 - DNA, 25 bp, Homo sapien
caacaggcttttgcactcagtggct

SEQ ID NO: 5079495 - DNA, 25 bp, Homo sapien
tagagctcagtcattcctacacagc

SEQ ID NO: 5079496 - DNA, 25 bp, Homo sapien
tctgcagttttacctcaacaggctt

SEQ ID NO: 5079497 - DNA, 25 bp, Homo sapien
tctcaggtgtgataatagtatatgt

SEQ ID NO: 5079498 - DNA, 25 bp, Homo sapien
aaagctggacgcagtagctaatgcc

SEQ ID NO: 5079499 - DNA, 25 bp, Homo sapien
agaaagcaacaacccagcaaacagc

SEQ ID NO: 5079500 - DNA, 25 bp, Homo sapien
tcttcgggacaattgagaacatttg

SEQ ID NO: 5079501 - DNA, 25 bp, Homo sapien
gccccctcagtagcaggactacagg

SEQ ID NO: 5079502 - DNA, 25 bp, Homo sapien
caggctcaaaccaccaacacctggc

SEQ ID NO: 5079503 - DNA, 25 bp, Homo sapien
tacaggctcaaaccaccaacacctg

SEQ ID NO: 5079504 - DNA, 25 bp, Homo sapien
atagctcaccactgcgcagcctcga

SEQ ID NO: 5079505 - DNA, 25 bp, Homo sapien
gagctttagccctagactatgagga

SEQ ID NO: 5079506 - DNA, 25 bp, Homo sapien
cagggtgccactgctcgaagaatac

SEQ ID NO: 5079507 - DNA, 25 bp, Homo sapien
gatcagggagctctttgtccaggta

SEQ ID NO: 5079508 - DNA, 25 bp, Homo sapien
tagtctgtggaacacccaagagagt

SEQ ID NO: 5079509 - DNA, 25 bp, Homo sapien
ttaaaattatcctgggcaatatggc

SEQ ID NO: 5079510 - DNA, 25 bp, Homo sapien
gaaatttagccattacagtggctat

SEQ ID NO: 5079511 - DNA, 25 bp, Homo sapien
tttataagactgtagaacagtagat

SEQ ID NO: 5079512 - DNA, 25 bp, Homo sapien
aaccagtaagttacttatcattatc

SEQ ID NO: 5079513 - DNA, 25 bp, Homo sapien
cagggagtagtacttaaatatcaag

SEQ ID NO: 5079514 - DNA, 25 bp, Homo sapien
tataaaaaatgatatggcagccata

SEQ ID NO: 5079515 - DNA, 25 bp, Homo sapien
tacttaaatatcaagaactgcctaa

SEQ ID NO: 5079516 - DNA, 25 bp, Homo sapien
gtagtacttaaatatcaagaactgc

SEQ ID NO: 5079517 - DNA, 25 bp, Homo sapien
gcggtcttccgaattttgcactcag

SEQ ID NO: 5079518 - DNA, 25 bp, Homo sapien
gtacaagcggtcttccgaattttgc

SEQ ID NO: 5079519 - DNA, 25 bp, Homo sapien
ttacatgcaaattctggggggctag

SEQ ID NO: 5079520 - DNA, 25 bp, Homo sapien
catgcaaattctggggggctagttt

SEQ ID NO: 5079521 - DNA, 25 bp, Homo sapien
ctggagcaaattcagtttgccttcc

SEQ ID NO: 5079522 - DNA, 25 bp, Homo sapien
gcaaattcagtttgccttcctggat

SEQ ID NO: 5079523 - DNA, 25 bp, Homo sapien
gagcaaattcagtttgccttcctgg

SEQ ID NO: 5079524 - DNA, 25 bp, Homo sapien
ggagcaaattcagtttgccttcctg

SEQ ID NO: 5079525 - DNA, 25 bp, Homo sapien
tggccaggctaacttccgacctcaa

SEQ ID NO: 5079526 - DNA, 25 bp, Homo sapien
ggtgtttactccattcacttccgac

SEQ ID NO: 5079527 - DNA, 25 bp, Homo sapien
gcctccttataacctcaaagtccag

SEQ ID NO: 5079528 - DNA, 25 bp, Homo sapien
ccaagtttttagtcagcctccttat

SEQ ID NO: 5079529 - DNA, 25 bp, Homo sapien
tgttctcaatcccagctcgctgctg

SEQ ID NO: 5079530 - DNA, 25 bp, Homo sapien
gcttgtgtgcatcttgctaaacaaa

SEQ ID NO: 5079531 - DNA, 25 bp, Homo sapien
aaaatatgctccaaaaacgcctaca

SEQ ID NO: 5079532 - DNA, 25 bp, Homo sapien
ggcttgtgtgcatcttgctaaacaa

SEQ ID NO: 5079533 - DNA, 25 bp, Homo sapien
tatgctccaaaaacgcctacaagtt

SEQ ID NO: 5079534 - DNA, 25 bp, Homo sapien
ttaaagcactttcggccatagcatg

SEQ ID NO: 5079535 - DNA, 25 bp, Homo sapien
cagtagcatcttggtacagcgttcc

SEQ ID NO: 5079536 - DNA, 25 bp, Homo sapien
ccaaccaagtatgctgaggaagact

SEQ ID NO: 5079537 - DNA, 25 bp, Homo sapien
ttgttatgtttagcccagactgagc

SEQ ID NO: 5079538 - DNA, 25 bp, Homo sapien
gatgaagggatatttcttgctcatt

SEQ ID NO: 5079539 - DNA, 25 bp, Homo sapien
tgaagggatatttcttgctcattgt

SEQ ID NO: 5079540 - DNA, 25 bp, Homo sapien
agatgaagggatatttcttgctcat

SEQ ID NO: 5079541 - DNA, 25 bp, Homo sapien
aagggatatttcttgctcattgttt

SEQ ID NO: 5079542 - DNA, 25 bp, Homo sapien
aagagacagctccaagaagttagca

SEQ ID NO: 5079543 - DNA, 25 bp, Homo sapien
gaagttagcaaacctgagatgaaac

SEQ ID NO: 5079544 - DNA, 25 bp, Homo sapien
tatttcgtctaactacatgatgtca

SEQ ID NO: 5079545 - DNA, 25 bp, Homo sapien
ttcagtctttatctacttgacagag

SEQ ID NO: 5079546 - DNA, 25 bp, Homo sapien
ccatacattccagacttctcagtgg

SEQ ID NO: 5079547 - DNA, 25 bp, Homo sapien
gacttctcagtggatttgtaataaa

SEQ ID NO: 5079548 - DNA, 25 bp, Homo sapien
tccatacattccagacttctcagtg

SEQ ID NO: 5079549 - DNA, 25 bp, Homo sapien
agacttctcagtggatttgtaataa

SEQ ID NO: 5079550 - DNA, 25 bp, Homo sapien
tacacaacagagatgcaaaaagtat

SEQ ID NO: 5079551 - DNA, 25 bp, Homo sapien
caacagagatgcaaaaagtatcatc

SEQ ID NO: 5079552 - DNA, 25 bp, Homo sapien
agagatgcaaaaagtatcatcaaga

SEQ ID NO: 5079553 - DNA, 25 bp, Homo sapien
cagagatgcaaaaagtatcatcaag

SEQ ID NO: 5079554 - DNA, 25 bp, Homo sapien
tttgtatagtgggtgggaaaccaca

SEQ ID NO: 5079555 - DNA, 25 bp, Homo sapien
tgggaccaccaagagtctacagtgt

SEQ ID NO: 5079556 - DNA, 25 bp, Homo sapien
tatttcaccagtaaaagtgcttggg

SEQ ID NO: 5079557 - DNA, 25 bp, Homo sapien
tctcaaacagcttagatgggaggct

SEQ ID NO: 5079558 - DNA, 25 bp, Homo sapien
aacatgtaagattaacaagtattta

SEQ ID NO: 5079559 - DNA, 25 bp, Homo sapien
acatgtaagattaacaagtatttag

SEQ ID NO: 5079560 - DNA, 25 bp, Homo sapien
cctggctgataggaatatttttgaa

SEQ ID NO: 5079561 - DNA, 25 bp, Homo sapien
caacctgaaaggaatggctttttct

SEQ ID NO: 5079562 - DNA, 25 bp, Homo sapien
tgaaagaccttttcatggtacttta

SEQ ID NO: 5079563 - DNA, 25 bp, Homo sapien
ttttcatggtactttacaacctgaa

SEQ ID NO: 5079564 - DNA, 25 bp, Homo sapien
tttgtatctgctgaagaggtaaggc

SEQ ID NO: 5079565 - DNA, 25 bp, Homo sapien
ccaagtttgataacattggcatgaa

SEQ ID NO: 5079566 - DNA, 25 bp, Homo sapien
gaggtaaggctaatgtactgtttta

SEQ ID NO: 5079567 - DNA, 25 bp, Homo sapien
tgccatggctaacaaagataatgca

SEQ ID NO: 5079568 - DNA, 25 bp, Homo sapien
acagttctattaggatgttgttagc

SEQ ID NO: 5079569 - DNA, 25 bp, Homo sapien
tggtgccagaagattattgcaattg

SEQ ID NO: 5079570 - DNA, 25 bp, Homo sapien
actcttgtcatctgaacagttctat

SEQ ID NO: 5079571 - DNA, 25 bp, Homo sapien
aaataaaatcatgttgcattgcatt

SEQ ID NO: 5079572 - DNA, 25 bp, Homo sapien
gggtaaaacttcgatcagtggccaa

SEQ ID NO: 5079573 - DNA, 25 bp, Homo sapien
tatgtagcccacaacatggcatgga

SEQ ID NO: 5079574 - DNA, 25 bp, Homo sapien
ggttggaggactacaaatggcacca

SEQ ID NO: 5079575 - DNA, 25 bp, Homo sapien
cagaagtgcctactcgttgaggtca

SEQ ID NO: 5079576 - DNA, 25 bp, Homo sapien
ctccagcctggcgacaaagcgagac

SEQ ID NO: 5079577 - DNA, 25 bp, Homo sapien
gaatcgcttgaacccagaaggcaga

SEQ ID NO: 5079578 - DNA, 25 bp, Homo sapien
cgtggtggcatgcacttgtaggccc

SEQ ID NO: 5079579 - DNA, 25 bp, Homo sapien
agctacttgggaggctgaggcagga

SEQ ID NO: 5079580 - DNA, 25 bp, Homo sapien
taattgatcaccctacatttacagg

SEQ ID NO: 5079581 - DNA, 25 bp, Homo sapien
ttatagaaactttaatcagcctggg

SEQ ID NO: 5079582 - DNA, 25 bp, Homo sapien
gagtagatatccttaagaataaaca

SEQ ID NO: 5079583 - DNA, 25 bp, Homo sapien
ttacaggtgttagagtagatatcct

SEQ ID NO: 5079584 - DNA, 25 bp, Homo sapien
tgggagctgcacgttagtcctgtcc

SEQ ID NO: 5079585 - DNA, 25 bp, Homo sapien
tgcacgttagtcctgtccccttatc

SEQ ID NO: 5079586 - DNA, 25 bp, Homo sapien
gactaaacacgttgccacacgctgt

SEQ ID NO: 5079587 - DNA, 25 bp, Homo sapien
tttaaggagactaaacacgttgcca

SEQ ID NO: 5079588 - DNA, 25 bp, Homo sapien
gaagctctggtggtaggtgcatata

SEQ ID NO: 5079589 - DNA, 25 bp, Homo sapien
ggccatttacatccaacgtagtatt

SEQ ID NO: 5079590 - DNA, 25 bp, Homo sapien
gcatgttggtaagcccctataatcc

SEQ ID NO: 5079591 - DNA, 25 bp, Homo sapien
tgtataggccctgtaagatttaggt

SEQ ID NO: 5079592 - DNA, 25 bp, Homo sapien
aactttgctggatttatttatcaga

SEQ ID NO: 5079593 - DNA, 25 bp, Homo sapien
gtgtatagcaatgctactggtttgc

SEQ ID NO: 5079594 - DNA, 25 bp, Homo sapien
tagcaatgctactggtttgcgcaca

SEQ ID NO: 5079595 - DNA, 25 bp, Homo sapien
aatgctactggtttgcgcacattga

SEQ ID NO: 5079596 - DNA, 25 bp, Homo sapien
aatgtgtactcttatcccccactgc

SEQ ID NO: 5079597 - DNA, 25 bp, Homo sapien
acccaatgtgtactcttatccccca

SEQ ID NO: 5079598 - DNA, 25 bp, Homo sapien
tgcacccaatgtgtactcttatccc

SEQ ID NO: 5079599 - DNA, 25 bp, Homo sapien
ccaatgtgtactcttatcccccact

SEQ ID NO: 5079600 - DNA, 25 bp, Homo sapien
caggtacatgccatgatgtccggct

SEQ ID NO: 5079601 - DNA, 25 bp, Homo sapien
catgccatgatgtccggctcgtttt

SEQ ID NO: 5079602 - DNA, 25 bp, Homo sapien
tggtaaattggaaagacttacactg

SEQ ID NO: 5079603 - DNA, 25 bp, Homo sapien
cactgatttcacgttacatattttt

SEQ ID NO: 5079604 - DNA, 25 bp, Homo sapien
tcgagaagcagaggcacgagaatcg

SEQ ID NO: 5079605 - DNA, 25 bp, Homo sapien
ctactcgagaagcagaggcacgaga

SEQ ID NO: 5079606 - DNA, 25 bp, Homo sapien
actcgagaagcagaggcacgagaat

SEQ ID NO: 5079607 - DNA, 25 bp, Homo sapien
agctactcgagaagcagaggcacga

SEQ ID NO: 5079608 - DNA, 25 bp, Homo sapien
aatcacttagctaagaatatcatgc

SEQ ID NO: 5079609 - DNA, 25 bp, Homo sapien
aaatcacttagctaagaatatcatg

SEQ ID NO: 5079610 - DNA, 25 bp, Homo sapien
tgtattacacttaaaagattccagc

SEQ ID NO: 5079611 - DNA, 25 bp, Homo sapien
tggtttgccactggtcataggtgct

SEQ ID NO: 5079612 - DNA, 25 bp, Homo sapien
agtatcataacctaatgccttaggg

SEQ ID NO: 5079613 - DNA, 25 bp, Homo sapien
tcatctggttgactggttaattagg

SEQ ID NO: 5079614 - DNA, 25 bp, Homo sapien
gcacgcattaatggcaagcttgtca

SEQ ID NO: 5079615 - DNA, 25 bp, Homo sapien
gccaaatctccttttactcaggatg

SEQ ID NO: 5079616 - DNA, 25 bp, Homo sapien
tttattcccagaatggcacgcatta

SEQ ID NO: 5079617 - DNA, 25 bp, Homo sapien
ccttttactcaggatgagtcagcaa

SEQ ID NO: 5079618 - DNA, 25 bp, Homo sapien
ctactgtatctgactgggccttttt

SEQ ID NO: 5079619 - DNA, 25 bp, Homo sapien
caaagatgcataaattgtattattc

SEQ ID NO: 5079620 - DNA, 25 bp, Homo sapien
tatcagaataaaacctgagcatcaa

SEQ ID NO: 5079621 - DNA, 25 bp, Homo sapien
caaaatagtatgatgaaccccctcc

SEQ ID NO: 5079622 - DNA, 25 bp, Homo sapien
cattttattaaggatattcgtcatc

SEQ ID NO: 5079623 - DNA, 25 bp, Homo sapien
gtcatcttcctggtaagtataaacc

SEQ ID NO: 5079624 - DNA, 25 bp, Homo sapien
taagtataaaccttagacagttgaa

SEQ ID NO: 5079625 - DNA, 25 bp, Homo sapien
tttattaaggatattcgtcatcttc

SEQ ID NO: 5079626 - DNA, 25 bp, Homo sapien
cactgcaggatttcactctaatgag

SEQ ID NO: 5079627 - DNA, 25 bp, Homo sapien
gatttttggatcgatttgtataccg

SEQ ID NO: 5079628 - DNA, 25 bp, Homo sapien
tatattcagtattcaggggacccac

SEQ ID NO: 5079629 - DNA, 25 bp, Homo sapien
aaaggtatgcttctatttagtgaat

SEQ ID NO: 5079630 - DNA, 25 bp, Homo sapien
tgtgtttgccacttcagggtttggt

SEQ ID NO: 5079631 - DNA, 25 bp, Homo sapien
taagacattgaaagccacgcagtta

SEQ ID NO: 5079632 - DNA, 25 bp, Homo sapien
tctcctggagaaatactgcctcact

SEQ ID NO: 5079633 - DNA, 25 bp, Homo sapien
cctgattaatggttagatggcctgc

SEQ ID NO: 5079634 - DNA, 25 bp, Homo sapien
aattctgggtgtcctaatatctgca

SEQ ID NO: 5079635 - DNA, 25 bp, Homo sapien
ttccaggtgttaatagagctaatct

SEQ ID NO: 5079636 - DNA, 25 bp, Homo sapien
gaaaattgaataatccagaatatcc

SEQ ID NO: 5079637 - DNA, 25 bp, Homo sapien
ggtgatatttcccagagtattcaga

SEQ ID NO: 5079638 - DNA, 25 bp, Homo sapien
tgttgatgtgagatgtaatttatgc

SEQ ID NO: 5079639 - DNA, 25 bp, Homo sapien
ttgatgtgagatgtaatttatgcct

SEQ ID NO: 5079640 - DNA, 25 bp, Homo sapien
tttctgttgatgtgagatgtaattt

SEQ ID NO: 5079641 - DNA, 25 bp, Homo sapien
tctgttgatgtgagatgtaatttat

SEQ ID NO: 5079642 - DNA, 25 bp, Homo sapien
gaaattcgcaggctagctcgctccg

SEQ ID NO: 5079643 - DNA, 25 bp, Homo sapien
ggctagctcgctccgccaggagctg

SEQ ID NO: 5079644 - DNA, 25 bp, Homo sapien
gctgaaattcgcaggctagctcgct

SEQ ID NO: 5079645 - DNA, 25 bp, Homo sapien
aggagctggggcttagaccatttcc

SEQ ID NO: 5079646 - DNA, 25 bp, Homo sapien
gcgccacggcacacaacggccccaa

SEQ ID NO: 5079647 - DNA, 25 bp, Homo sapien
cccaaacctgacctcagcagtacac

SEQ ID NO: 5079648 - DNA, 25 bp, Homo sapien
aacctgacctcagcagtacactcat

SEQ ID NO: 5079649 - DNA, 25 bp, Homo sapien
cgcgcgccacggcacacaacggccc

SEQ ID NO: 5079650 - DNA, 25 bp, Homo sapien
ctgaggaaggcgccccacgcggctt

SEQ ID NO: 5079651 - DNA, 25 bp, Homo sapien
cccggtaccctcaactgaagagctg

SEQ ID NO: 5079652 - DNA, 25 bp, Homo sapien
ttgatcccccggtaccctcaactga

SEQ ID NO: 5079653 - DNA, 25 bp, Homo sapien
cgccccacgcggcttccacggcaac

SEQ ID NO: 5079654 - DNA, 25 bp, Homo sapien
ctgaagtatttccctctccaaataa

SEQ ID NO: 5079655 - DNA, 25 bp, Homo sapien
tgaagtatttccctctccaaataaa

SEQ ID NO: 5079656 - DNA, 25 bp, Homo sapien
tattttgtacataagatgccgcagc

SEQ ID NO: 5079657 - DNA, 25 bp, Homo sapien
cttggctggattagtcaacacctcc

SEQ ID NO: 5079658 - DNA, 25 bp, Homo sapien
gcatcggcgtcaccgggttttctgc

SEQ ID NO: 5079659 - DNA, 25 bp, Homo sapien
tccttcatgtactcggccacagtga

SEQ ID NO: 5079660 - DNA, 25 bp, Homo sapien
gcatgtcacggtacacataataacc

SEQ ID NO: 5079661 - DNA, 25 bp, Homo sapien
tcgcctagcatgtcacggtacacat

SEQ ID NO: 5079662 - DNA, 25 bp, Homo sapien
taatgaaatctcctttttcgcctag

SEQ ID NO: 5079663 - DNA, 25 bp, Homo sapien
tcctttttcgcctagcatgtcacgg

SEQ ID NO: 5079664 - DNA, 25 bp, Homo sapien
gctgtgctttttccagtggccatcc

SEQ ID NO: 5079665 - DNA, 25 bp, Homo sapien
tccagtggccatccattcactaatg

SEQ ID NO: 5079666 - DNA, 25 bp, Homo sapien
cactaatgaaccatatacctagtag

SEQ ID NO: 5079667 - DNA, 25 bp, Homo sapien
ggccatccattcactaatgaaccat

SEQ ID NO: 5079668 - DNA, 25 bp, Homo sapien
ctcaaaatatctcccacgagggttc

SEQ ID NO: 5079669 - DNA, 25 bp, Homo sapien
tcaaaatatctcccacgagggttcc

SEQ ID NO: 5079670 - DNA, 25 bp, Homo sapien
cctcaaaatatctcccacgagggtt

SEQ ID NO: 5079671 - DNA, 25 bp, Homo sapien
aactagcttcgaccacagacgcatg

SEQ ID NO: 5079672 - DNA, 25 bp, Homo sapien
cttgaactttgggagcctcgaactc

SEQ ID NO: 5079673 - DNA, 25 bp, Homo sapien
atctcagcccctcaactagcttcga

SEQ ID NO: 5079674 - DNA, 25 bp, Homo sapien
cgcatgctaccacgactgggtaatt

SEQ ID NO: 5079675 - DNA, 25 bp, Homo sapien
gagaatatgatttgaggtccttatt

SEQ ID NO: 5079676 - DNA, 25 bp, Homo sapien
ggcttttaggacttcttatgactca

SEQ ID NO: 5079677 - DNA, 25 bp, Homo sapien
cattttaagggctctggaatcaact

SEQ ID NO: 5079678 - DNA, 25 bp, Homo sapien
tatattcaaatgaccttgctgaaaa

SEQ ID NO: 5079679 - DNA, 25 bp, Homo sapien
aatttttcagcacagatccaagttg

SEQ ID NO: 5079680 - DNA, 25 bp, Homo sapien
tcagcacagatccaagttgagtgaa

SEQ ID NO: 5079681 - DNA, 25 bp, Homo sapien
ctctaccagatgtactgaaatgtca

SEQ ID NO: 5079682 - DNA, 25 bp, Homo sapien
ctaccagatgtactgaaatgtcaca

SEQ ID NO: 5079683 - DNA, 25 bp, Homo sapien
attggaatcccagacttagtgacac

SEQ ID NO: 5079684 - DNA, 25 bp, Homo sapien
aacgggaccttctctttagtcagtg

SEQ ID NO: 5079685 - DNA, 25 bp, Homo sapien
ggatccagcatttcgctctaacggg

SEQ ID NO: 5079686 - DNA, 25 bp, Homo sapien
tggaacatcgtgcagatctcggtac

SEQ ID NO: 5079687 - DNA, 25 bp, Homo sapien
ggctactctctatggataagggact

SEQ ID NO: 5079688 - DNA, 25 bp, Homo sapien
gtaggctactctctatggataaggg

SEQ ID NO: 5079689 - DNA, 25 bp, Homo sapien
gacttggcagcagtaactcaatcta

SEQ ID NO: 5079690 - DNA, 25 bp, Homo sapien
ctactctctatggataagggacttg

SEQ ID NO: 5079691 - DNA, 25 bp, Homo sapien
gatttcataaaatcgggcttctcag

SEQ ID NO: 5079692 - DNA, 25 bp, Homo sapien
gcttgagatcccttacccaagatcg

SEQ ID NO: 5079693 - DNA, 25 bp, Homo sapien
ccttgggctgctccgtcatcggtac

SEQ ID NO: 5079694 - DNA, 25 bp, Homo sapien
tcagtattcctgactagtacaggga

SEQ ID NO: 5079695 - DNA, 25 bp, Homo sapien
ctgaaatagcagttaaagcttttat

SEQ ID NO: 5079696 - DNA, 25 bp, Homo sapien
tctacctcttcatggaaaacttaca

SEQ ID NO: 5079697 - DNA, 25 bp, Homo sapien
catcactaccacagaattatctacc

SEQ ID NO: 5079698 - DNA, 25 bp, Homo sapien
taatcatcactaccacagaattatc

SEQ ID NO: 5079699 - DNA, 25 bp, Homo sapien
tacactgcagaacatagaacaatta

SEQ ID NO: 5079700 - DNA, 25 bp, Homo sapien
ttatgcacaggaagaacatcaaaaa

SEQ ID NO: 5079701 - DNA, 25 bp, Homo sapien
atgcacaggaagaacatcaaaaaat

SEQ ID NO: 5079702 - DNA, 25 bp, Homo sapien
catcaaaaaattcatgtgcaagata

SEQ ID NO: 5079703 - DNA, 25 bp, Homo sapien
aaaaaattcatgtgcaagataaaag

SEQ ID NO: 5079704 - DNA, 25 bp, Homo sapien
gaattatttgtgtaccaaaattcca

SEQ ID NO: 5079705 - DNA, 25 bp, Homo sapien
ttatcccaggagaactaacaattct

SEQ ID NO: 5079706 - DNA, 25 bp, Homo sapien
gccagttaccatcttaccatttttc

SEQ ID NO: 5079707 - DNA, 25 bp, Homo sapien
caattatagacatgacttttttccc

SEQ ID NO: 5079708 - DNA, 25 bp, Homo sapien
tatcagaaacctgtggatcaatgtc

SEQ ID NO: 5079709 - DNA, 25 bp, Homo sapien
acaaatacttctcgccatccctgtg

SEQ ID NO: 5079710 - DNA, 25 bp, Homo sapien
tgtggatcaatgtcaacaaatactt

SEQ ID NO: 5079711 - DNA, 25 bp, Homo sapien
aatacttctcgccatccctgtggtg

SEQ ID NO: 5079712 - DNA, 25 bp, Homo sapien
tgtatgaaggcttctgctggggtgg

SEQ ID NO: 5079713 - DNA, 25 bp, Homo sapien
tggggtggcagaaggtgccaaaaca

SEQ ID NO: 5079714 - DNA, 25 bp, Homo sapien
gtggcagaaggtgccaaaacaaacc

SEQ ID NO: 5079715 - DNA, 25 bp, Homo sapien
tgctggggtggcagaaggtgccaaa

SEQ ID NO: 5079716 - DNA, 25 bp, Homo sapien
agtaaagggatcattgcaagagtca

SEQ ID NO: 5079717 - DNA, 25 bp, Homo sapien
taaagggatcattgcaagagtcaaa

SEQ ID NO: 5079718 - DNA, 25 bp, Homo sapien
tagtaaagggatcattgcaagagtc

SEQ ID NO: 5079719 - DNA, 25 bp, Homo sapien
ctagtaaagggatcattgcaagagt

SEQ ID NO: 5079720 - DNA, 25 bp, Homo sapien
ggacacacttcaacatgatcccttg

SEQ ID NO: 5079721 - DNA, 25 bp, Homo sapien
tccagttaatgcaatgcgttgagaa

SEQ ID NO: 5079722 - DNA, 25 bp, Homo sapien
gataacaccagcatcaggacacact

SEQ ID NO: 5079723 - DNA, 25 bp, Homo sapien
gaaagttcctcgatgataacaccag

SEQ ID NO: 5079724 - DNA, 25 bp, Homo sapien
aggtatctgtctttgttccatcatg

SEQ ID NO: 5079725 - DNA, 25 bp, Homo sapien
tctgaaggtatctgtctttgttcca

SEQ ID NO: 5079726 - DNA, 25 bp, Homo sapien
gaaggtatctgtctttgttccatca

SEQ ID NO: 5079727 - DNA, 25 bp, Homo sapien
gtatctgtctttgttccatcatgac

SEQ ID NO: 5079728 - DNA, 25 bp, Homo sapien
caataacatgaattaatgttaacta

SEQ ID NO: 5079729 - DNA, 25 bp, Homo sapien
tcaatgggcttcagatctaacactg

SEQ ID NO: 5079730 - DNA, 25 bp, Homo sapien
cttcaatgggcttcagatctaacac

SEQ ID NO: 5079731 - DNA, 25 bp, Homo sapien
acaataacatgaattaatgttaact

SEQ ID NO: 5079732 - DNA, 25 bp, Homo sapien
tgctgttcctggggcaattaagaca

SEQ ID NO: 5079733 - DNA, 25 bp, Homo sapien
ctgttcctggggcaattaagacatc

SEQ ID NO: 5079734 - DNA, 25 bp, Homo sapien
ttcctggggcaattaagacatcatg

SEQ ID NO: 5079735 - DNA, 25 bp, Homo sapien
tcatgaagcttgtggtcgcaaaacc

SEQ ID NO: 5079736 - DNA, 25 bp, Homo sapien
cagccggacatcaatacccatattt

SEQ ID NO: 5079737 - DNA, 25 bp, Homo sapien
cttcagccggacatcaatacccata

SEQ ID NO: 5079738 - DNA, 25 bp, Homo sapien
tttattgggcccagagaggctactt

SEQ ID NO: 5079739 - DNA, 25 bp, Homo sapien
gccggacatcaatacccatattttt

SEQ ID NO: 5079740 - DNA, 25 bp, Homo sapien
atgaggtagcaaggcaaaaaagtta

SEQ ID NO: 5079741 - DNA, 25 bp, Homo sapien
tgaggtagcaaggcaaaaaagttaa

SEQ ID NO: 5079742 - DNA, 25 bp, Homo sapien
tcctctgatatcttccaccttgaag

SEQ ID NO: 5079743 - DNA, 25 bp, Homo sapien
aagggttttgactgacgtgcattcc

SEQ ID NO: 5079744 - DNA, 25 bp, Homo sapien
gctacaacggatgcaaagggttttg

SEQ ID NO: 5079745 - DNA, 25 bp, Homo sapien
aagcaagttcactaaacccagctac

SEQ ID NO: 5079746 - DNA, 25 bp, Homo sapien
gactgaagggtaaaatgtccaagct

SEQ ID NO: 5079747 - DNA, 25 bp, Homo sapien
ctgaagggtaaaatgtccaagctga

SEQ ID NO: 5079748 - DNA, 25 bp, Homo sapien
gaagggtaaaatgtccaagctgaaa

SEQ ID NO: 5079749 - DNA, 25 bp, Homo sapien
gccgactgaagggtaaaatgtccaa

SEQ ID NO: 5079750 - DNA, 25 bp, Homo sapien
tatacaacatggactgttcttgctg

SEQ ID NO: 5079751 - DNA, 25 bp, Homo sapien
tcttatcagtttcctgtgaatagcc

SEQ ID NO: 5079752 - DNA, 25 bp, Homo sapien
catttgcaccaaagccagtcacaac

SEQ ID NO: 5079753 - DNA, 25 bp, Homo sapien
gaaatatggcaactagctttgtaag

SEQ ID NO: 5079754 - DNA, 25 bp, Homo sapien
tctgagaggagccaactatggacgt

SEQ ID NO: 5079755 - DNA, 25 bp, Homo sapien
tgagaacaactaggagtggcccgag

SEQ ID NO: 5079756 - DNA, 25 bp, Homo sapien
taaggcattgcctgactctagcccc

SEQ ID NO: 5079757 - DNA, 25 bp, Homo sapien
agcatctgaaaagcaaggcctccgt

SEQ ID NO: 5079758 - DNA, 25 bp, Homo sapien
cgttgcccaccgaatttgaggtagc

SEQ ID NO: 5079759 - DNA, 25 bp, Homo sapien
tagtttaccctcacagcagccatag

SEQ ID NO: 5079760 - DNA, 25 bp, Homo sapien
caaaacttttgctgaggtcttggac

SEQ ID NO: 5079761 - DNA, 25 bp, Homo sapien
ggcctttcgacatccctgaagctag

SEQ ID NO: 5079762 - DNA, 25 bp, Homo sapien
ccatagaggcattgaagggtttttc

SEQ ID NO: 5079763 - DNA, 25 bp, Homo sapien
tctatacagcataaggattgtcacc

SEQ ID NO: 5079764 - DNA, 25 bp, Homo sapien
tacaaaaggaagagtactgctggtc

SEQ ID NO: 5079765 - DNA, 25 bp, Homo sapien
gatgcctagaaaaagcgcactgggc

SEQ ID NO: 5079766 - DNA, 25 bp, Homo sapien
gcattggagaacgttacattacaca

SEQ ID NO: 5079767 - DNA, 25 bp, Homo sapien
gagaatttgaaactcgcattggaga

SEQ ID NO: 5079768 - DNA, 25 bp, Homo sapien
gatgatgctcgctgggaaatacatg

SEQ ID NO: 5079769 - DNA, 25 bp, Homo sapien
gatacttatgagtagcgcctgtcaa

SEQ ID NO: 5079770 - DNA, 25 bp, Homo sapien
ttcagaacaagactgtgagctccgt

SEQ ID NO: 5079771 - DNA, 25 bp, Homo sapien
tgagctccgtgaatgaatacctagc

SEQ ID NO: 5079772 - DNA, 25 bp, Homo sapien
tctcctgtggacctctgctgggaag

SEQ ID NO: 5079773 - DNA, 25 bp, Homo sapien
tgtacccgtcaagaataagttggct

SEQ ID NO: 5079774 - DNA, 25 bp, Homo sapien
gcaagactaaggacaacagataggt

SEQ ID NO: 5079775 - DNA, 25 bp, Homo sapien
gctcaaatatctgttgccaaactat

SEQ ID NO: 5079776 - DNA, 25 bp, Homo sapien
tcattttgaggtcgaaagggttgcc

SEQ ID NO: 5079777 - DNA, 25 bp, Homo sapien
gatgattcctccgatcagctcaaat

SEQ ID NO: 5079778 - DNA, 25 bp, Homo sapien
tgaacacaacttagccccgtgtagc

SEQ ID NO: 5079779 - DNA, 25 bp, Homo sapien
tattgcagtagtcccaaagagagag

SEQ ID NO: 5079780 - DNA, 25 bp, Homo sapien
catcttagacatggaactcagcctc

SEQ ID NO: 5079781 - DNA, 25 bp, Homo sapien
tgtagcctaccttaagcacagtcgc

SEQ ID NO: 5079782 - DNA, 25 bp, Homo sapien
tgcatccctagaggcgtccatagct

SEQ ID NO: 5079783 - DNA, 25 bp, Homo sapien
tacagctttggcctttccggtggca

SEQ ID NO: 5079784 - DNA, 25 bp, Homo sapien
tgtctccgtcaggattttgcccaaa

SEQ ID NO: 5079785 - DNA, 25 bp, Homo sapien
cacttgaaaaagatcccactgcaga

SEQ ID NO: 5079786 - DNA, 25 bp, Homo sapien
gtataatagctcattctggccaggt

SEQ ID NO: 5079787 - DNA, 25 bp, Homo sapien
tcatctagcatttttaccccttggg

SEQ ID NO: 5079788 - DNA, 25 bp, Homo sapien
taaaatttagcttgatccttggatc

SEQ ID NO: 5079789 - DNA, 25 bp, Homo sapien
taatataggcattatagggactgcc

SEQ ID NO: 5079790 - DNA, 25 bp, Homo sapien
agaactgtccgaggtacctttggct

SEQ ID NO: 5079791 - DNA, 25 bp, Homo sapien
cactgaactttattggagcgttggc

SEQ ID NO: 5079792 - DNA, 25 bp, Homo sapien
gacttacgattgtgccattgagaca

SEQ ID NO: 5079793 - DNA, 25 bp, Homo sapien
gtattgtgacataaagcagtcgcct

SEQ ID NO: 5079794 - DNA, 25 bp, Homo sapien
ttgcttttatagatcactacttaat

SEQ ID NO: 5079795 - DNA, 25 bp, Homo sapien
aatcaatgagagcaaatctccttaa

SEQ ID NO: 5079796 - DNA, 25 bp, Homo sapien
ggaactgaggatatctccatccatg

SEQ ID NO: 5079797 - DNA, 25 bp, Homo sapien
cctgttgagaggtagaatagacagc

SEQ ID NO: 5079798 - DNA, 25 bp, Homo sapien
ttgctaacccctggactagagagaa

SEQ ID NO: 5079799 - DNA, 25 bp, Homo sapien
aggctggattttgcccacaagctgg

SEQ ID NO: 5079800 - DNA, 25 bp, Homo sapien
tagagatagggtatcctgtagccca

SEQ ID NO: 5079801 - DNA, 25 bp, Homo sapien
taggctagactttgcggttggtaac

SEQ ID NO: 5079802 - DNA, 25 bp, Homo sapien
ggttcatcgcccaaagtactaggct

SEQ ID NO: 5079803 - DNA, 25 bp, Homo sapien
gataagactggttcaaagagaaggc

SEQ ID NO: 5079804 - DNA, 25 bp, Homo sapien
tacagtaggcagatctcagtgggag

SEQ ID NO: 5079805 - DNA, 25 bp, Homo sapien
caagtgtgatgaggatcatgacaac

SEQ ID NO: 5079806 - DNA, 25 bp, Homo sapien
acaactattatgctaggccctgagc

SEQ ID NO: 5079807 - DNA, 25 bp, Homo sapien
tggtagcataaagcagtacagtgca

SEQ ID NO: 5079808 - DNA, 25 bp, Homo sapien
tagggactctcatacgttgctgaag

SEQ ID NO: 5079809 - DNA, 25 bp, Homo sapien
gatggtccattacaccagcagggat

SEQ ID NO: 5079810 - DNA, 25 bp, Homo sapien
gattgctacaggttactccagtgga

SEQ ID NO: 5079811 - DNA, 25 bp, Homo sapien
ccgctaatgagggttgtacaatcca

SEQ ID NO: 5079812 - DNA, 25 bp, Homo sapien
tcagtgctgatttgacttgttacat

SEQ ID NO: 5079813 - DNA, 25 bp, Homo sapien
gttacattttcttaattagtatctg

SEQ ID NO: 5079814 - DNA, 25 bp, Homo sapien
ccttctagtagaagtacattttgct

SEQ ID NO: 5079815 - DNA, 25 bp, Homo sapien
actgcgcccggtgaacctagctagt

SEQ ID NO: 5079816 - DNA, 25 bp, Homo sapien
gcacatagtaggtctgcagtacttt

SEQ ID NO: 5079817 - DNA, 25 bp, Homo sapien
caatgtgggcaagataataaggagt

SEQ ID NO: 5079818 - DNA, 25 bp, Homo sapien
gagatcctctctgtccttattagtc

SEQ ID NO: 5079819 - DNA, 25 bp, Homo sapien
gccatctcatcctgcagcaatgtgg

SEQ ID NO: 5079820 - DNA, 25 bp, Homo sapien
gctggcgcctcgtccggtactcaga

SEQ ID NO: 5079821 - DNA, 25 bp, Homo sapien
ggaggcgggcgggatcctgcgaggc

SEQ ID NO: 5079822 - DNA, 25 bp, Homo sapien
gcgcgtgaagcctcgctggcgcctc

SEQ ID NO: 5079823 - DNA, 25 bp, Homo sapien
cctgcgaggcgcgtgaagcctcgct

SEQ ID NO: 5079824 - DNA, 25 bp, Homo sapien
gattctggactgcactccactttgg

SEQ ID NO: 5079825 - DNA, 25 bp, Homo sapien
aagcccaggtttggtgattctggac

SEQ ID NO: 5079826 - DNA, 25 bp, Homo sapien
cacggtcatactttgttttggagca

SEQ ID NO: 5079827 - DNA, 25 bp, Homo sapien
tccactttggtggtagggtcacatt

SEQ ID NO: 5079828 - DNA, 25 bp, Homo sapien
tgtcactttaagtactacagcagaa

SEQ ID NO: 5079829 - DNA, 25 bp, Homo sapien
tgtaaactgctccaatgaggtcctg

SEQ ID NO: 5079830 - DNA, 25 bp, Homo sapien
catatctctgttttcacacatgcac

SEQ ID NO: 5079831 - DNA, 25 bp, Homo sapien
cccaaagtggaggagaccgctttat

SEQ ID NO: 5079832 - DNA, 25 bp, Homo sapien
aactccatgggagtcctgaagctga

SEQ ID NO: 5079833 - DNA, 25 bp, Homo sapien
gacggtcaaagttgtcccatactgg

SEQ ID NO: 5079834 - DNA, 25 bp, Homo sapien
cctgaagctgaaaaagacggtcaaa

SEQ ID NO: 5079835 - DNA, 25 bp, Homo sapien
cccatactgggccaaaatgtctggg

SEQ ID NO: 5079836 - DNA, 25 bp, Homo sapien
gctggcggtcacgagcccgggaacg

SEQ ID NO: 5079837 - DNA, 25 bp, Homo sapien
acgcgcgtccttcgccttccctctt

SEQ ID NO: 5079838 - DNA, 25 bp, Homo sapien
ttctccacccttgggtcgactgcgc

SEQ ID NO: 5079839 - DNA, 25 bp, Homo sapien
ccgagtctgtctgggagcgggttcc

SEQ ID NO: 5079840 - DNA, 25 bp, Homo sapien
gtggagggtgcccacgacgcgccgg

SEQ ID NO: 5079841 - DNA, 25 bp, Homo sapien
ggtgcccacgacgcgccggtgtctt

SEQ ID NO: 5079842 - DNA, 25 bp, Homo sapien
gcactcggactgacccccctggatg

SEQ ID NO: 5079843 - DNA, 25 bp, Homo sapien
cgcgccggtgtcttccgcctgccat

SEQ ID NO: 5079844 - DNA, 25 bp, Homo sapien
ggctccttgtctgcttactgtccaa

SEQ ID NO: 5079845 - DNA, 25 bp, Homo sapien
tgtctgcttactgtccaatactcta

SEQ ID NO: 5079846 - DNA, 25 bp, Homo sapien
cagtggctccttgtctgcttactgt

SEQ ID NO: 5079847 - DNA, 25 bp, Homo sapien
tactgtccaatactctatcccaaag

SEQ ID NO: 5079848 - DNA, 25 bp, Homo sapien
tgctgtggttcaatgttattgggct

SEQ ID NO: 5079849 - DNA, 25 bp, Homo sapien
gaatttctgacattcgatgcttctg

SEQ ID NO: 5079850 - DNA, 25 bp, Homo sapien
cattcgatgcttctgacgatgaaga

SEQ ID NO: 5079851 - DNA, 25 bp, Homo sapien
ctgctgcaatggccaggaagtgctg

SEQ ID NO: 5079852 - DNA, 25 bp, Homo sapien
ctgacgagcagcatagcttccaggg

SEQ ID NO: 5079853 - DNA, 25 bp, Homo sapien
ccttctgcaatttgccgaagagccg

SEQ ID NO: 5079854 - DNA, 25 bp, Homo sapien
cgaagagccgatgaattcaaaatgg

SEQ ID NO: 5079855 - DNA, 25 bp, Homo sapien
gggatcccgggtatcgctctatcag

SEQ ID NO: 5079856 - DNA, 25 bp, Homo sapien
ggatgtgaagggccagtcccattcc

SEQ ID NO: 5079857 - DNA, 25 bp, Homo sapien
cctgaggagtttcagaagaggatgt

SEQ ID NO: 5079858 - DNA, 25 bp, Homo sapien
tgaggagtttcagaagaggatgtga

SEQ ID NO: 5079859 - DNA, 25 bp, Homo sapien
tgcagattgcaagctcacaaaatga

SEQ ID NO: 5079860 - DNA, 25 bp, Homo sapien
gaaaatgagttatccctagactgta

SEQ ID NO: 5079861 - DNA, 25 bp, Homo sapien
gaaatcactatgcacctaacatgag

SEQ ID NO: 5079862 - DNA, 25 bp, Homo sapien
tgctttgctcacagtaggctatcag

SEQ ID NO: 5079863 - DNA, 25 bp, Homo sapien
taataagcaaccctgaaccataata

SEQ ID NO: 5079864 - DNA, 25 bp, Homo sapien
caaggcaggttgagacgcactgcaa

SEQ ID NO: 5079865 - DNA, 25 bp, Homo sapien
taataacatatcaagcagctttccc

SEQ ID NO: 5079866 - DNA, 25 bp, Homo sapien
ctgtaagaattaataagcaaccctg

SEQ ID NO: 5079867 - DNA, 25 bp, Homo sapien
ctcccatagctagggggtggttcag

SEQ ID NO: 5079868 - DNA, 25 bp, Homo sapien
gtagaaagctcccatagctaggggg

SEQ ID NO: 5079869 - DNA, 25 bp, Homo sapien
aaagctcccatagctagggggtggt

SEQ ID NO: 5079870 - DNA, 25 bp, Homo sapien
gctaaggataacgtagaaagctccc

SEQ ID NO: 5079871 - DNA, 25 bp, Homo sapien
catcattgcacatggcacggctgaa

SEQ ID NO: 5079872 - DNA, 25 bp, Homo sapien
tagtggcaggcgaggaccaaatgtc

SEQ ID NO: 5079873 - DNA, 25 bp, Homo sapien
gatatttgagaaagaccggtaccca

SEQ ID NO: 5079874 - DNA, 25 bp, Homo sapien
tgtctaaggcacgagcaagttccaa

SEQ ID NO: 5079875 - DNA, 25 bp, Homo sapien
tcactctgagttactgttaatgtac

SEQ ID NO: 5079876 - DNA, 25 bp, Homo sapien
tactttatcctaggaatcaataagc

SEQ ID NO: 5079877 - DNA, 25 bp, Homo sapien
gaatcaataagcagaaaacagatac

SEQ ID NO: 5079878 - DNA, 25 bp, Homo sapien
gttaatgtactttatcctaggaatc

SEQ ID NO: 5079879 - DNA, 25 bp, Homo sapien
ctcctggagagcattaagcagagga

SEQ ID NO: 5079880 - DNA, 25 bp, Homo sapien
tattccttagacagacttagaaaca

SEQ ID NO: 5079881 - DNA, 25 bp, Homo sapien
ggattctatcaaggaaaccactggc

SEQ ID NO: 5079882 - DNA, 25 bp, Homo sapien
cactcacttacctgcctggtgtggg

SEQ ID NO: 5079883 - DNA, 25 bp, Homo sapien
tttctattaattgggcaaaaagata

SEQ ID NO: 5079884 - DNA, 25 bp, Homo sapien
agcatgattttctattaattgggca

SEQ ID NO: 5079885 - DNA, 25 bp, Homo sapien
tgtgatgatgaaaaatagcatgatt

SEQ ID NO: 5079886 - DNA, 25 bp, Homo sapien
aaatactgtgatgatgaaaaatagc

SEQ ID NO: 5079887 - DNA, 25 bp, Homo sapien
cagctggagtgacaaatctggcttg

SEQ ID NO: 5079888 - DNA, 25 bp, Homo sapien
tgtcgagacccatagagagaatctt

SEQ ID NO: 5079889 - DNA, 25 bp, Homo sapien
catgccatgcagttggctggtgcct

SEQ ID NO: 5079890 - DNA, 25 bp, Homo sapien
ggtcgatgccatctttgcagctaag

SEQ ID NO: 5079891 - DNA, 25 bp, Homo sapien
gagcctacagctacagtgctaggga

SEQ ID NO: 5079892 - DNA, 25 bp, Homo sapien
tggaagcggagcctacagctacagt

SEQ ID NO: 5079893 - DNA, 25 bp, Homo sapien
tgcaaccttttccttggaagcggag

SEQ ID NO: 5079894 - DNA, 25 bp, Homo sapien
tgctagggaaattgcccagactaac

SEQ ID NO: 5079895 - DNA, 25 bp, Homo sapien
gctccaatcaaatccaataagacca

SEQ ID NO: 5079896 - DNA, 25 bp, Homo sapien
aattgcttgaagtctttcgaaccac

SEQ ID NO: 5079897 - DNA, 25 bp, Homo sapien
tgggtttggagctccaatcaaatcc

SEQ ID NO: 5079898 - DNA, 25 bp, Homo sapien
tgaagtctttcgaaccacctggctg

SEQ ID NO: 5079899 - DNA, 25 bp, Homo sapien
tgtaattctggaaataccgcccctc

SEQ ID NO: 5079900 - DNA, 25 bp, Homo sapien
caaagagtgatccttgagcaaaccc

SEQ ID NO: 5079901 - DNA, 25 bp, Homo sapien
aaataccgcccctccaaagagtgat

SEQ ID NO: 5079902 - DNA, 25 bp, Homo sapien
acctccataactgtaattctggaaa

SEQ ID NO: 5079903 - DNA, 25 bp, Homo sapien
gagacggtatcagatgcagaactgg

SEQ ID NO: 5079904 - DNA, 25 bp, Homo sapien
gacggtatcagatgcagaactggaa

SEQ ID NO: 5079905 - DNA, 25 bp, Homo sapien
aggagacggtatcagatgcagaact

SEQ ID NO: 5079906 - DNA, 25 bp, Homo sapien
agggaaaggagacggtatcagatgc

SEQ ID NO: 5079907 - DNA, 25 bp, Homo sapien
tcattgtcatccatggtgtgccaga

SEQ ID NO: 5079908 - DNA, 25 bp, Homo sapien
cttgtaggattttgtttagattgtc

SEQ ID NO: 5079909 - DNA, 25 bp, Homo sapien
cacaaagacttgtaggattttgttt

SEQ ID NO: 5079910 - DNA, 25 bp, Homo sapien
cttcattgtcatccatggtgtgcca

SEQ ID NO: 5079911 - DNA, 25 bp, Homo sapien
ttcaattctagaaccaattatccta

SEQ ID NO: 5079912 - DNA, 25 bp, Homo sapien
acttttgaattcaattctagaacca

SEQ ID NO: 5079913 - DNA, 25 bp, Homo sapien
aattcaattctagaaccaattatcc

SEQ ID NO: 5079914 - DNA, 25 bp, Homo sapien
tttgaattcaattctagaaccaatt

SEQ ID NO: 5079915 - DNA, 25 bp, Homo sapien
tgagcaatttaggacacaatatcac

SEQ ID NO: 5079916 - DNA, 25 bp, Homo sapien
taagaataggatgatctataggata

SEQ ID NO: 5079917 - DNA, 25 bp, Homo sapien
cacaacacaattattctgtaattga

SEQ ID NO: 5079918 - DNA, 25 bp, Homo sapien
tataggatagatgtttccacacagc

SEQ ID NO: 5079919 - DNA, 25 bp, Homo sapien
tgcctcatcgtgtttatctaaaaga

SEQ ID NO: 5079920 - DNA, 25 bp, Homo sapien
aatgaatgaacctgattttgcctca

SEQ ID NO: 5079921 - DNA, 25 bp, Homo sapien
tttgcctcatcgtgtttatctaaaa

SEQ ID NO: 5079922 - DNA, 25 bp, Homo sapien
cctcatcgtgtttatctaaaagagt

SEQ ID NO: 5079923 - DNA, 25 bp, Homo sapien
tgaaggctacgttttccaaccgcta

SEQ ID NO: 5079924 - DNA, 25 bp, Homo sapien
tcaaagaaatctgaccgccttcaaa

SEQ ID NO: 5079925 - DNA, 25 bp, Homo sapien
ccgctatttaagtactgttgagaaa

SEQ ID NO: 5079926 - DNA, 25 bp, Homo sapien
acatgtaatagatttccacatatga

SEQ ID NO: 5079927 - DNA, 25 bp, Homo sapien
tttttctagacctctcaataacatc

SEQ ID NO: 5079928 - DNA, 25 bp, Homo sapien
aatttattctgttcttggccttcaa

SEQ ID NO: 5079929 - DNA, 25 bp, Homo sapien
attctgttcttggccttcaaaaagg

SEQ ID NO: 5079930 - DNA, 25 bp, Homo sapien
aaatttattctgttcttggccttca

SEQ ID NO: 5079931 - DNA, 25 bp, Homo sapien
ctgttcttggccttcaaaaaggatc

SEQ ID NO: 5079932 - DNA, 25 bp, Homo sapien
ctttcttgtagcctctagcagacac

SEQ ID NO: 5079933 - DNA, 25 bp, Homo sapien
ttcttgtagcctctagcagacactg

SEQ ID NO: 5079934 - DNA, 25 bp, Homo sapien
ttgtagcctctagcagacactgcgc

SEQ ID NO: 5079935 - DNA, 25 bp, Homo sapien
cttgtagcctctagcagacactgcg

SEQ ID NO: 5079936 - DNA, 25 bp, Homo sapien
ctgccatgccaagctttgaagtcct

SEQ ID NO: 5079937 - DNA, 25 bp, Homo sapien
tgaataagtataaaggttgcatgag

SEQ ID NO: 5079938 - DNA, 25 bp, Homo sapien
gacagtgtcttaacccacagcagga

SEQ ID NO: 5079939 - DNA, 25 bp, Homo sapien
ggatcattgcaagggtgaagtctcc

SEQ ID NO: 5079940 - DNA, 25 bp, Homo sapien
tgtaagttctagcaaacaccttgct

SEQ ID NO: 5079941 - DNA, 25 bp, Homo sapien
gatgagtttgcagcagcctgatagc

SEQ ID NO: 5079942 - DNA, 25 bp, Homo sapien
tgatagcgaacctccagggaaaaac

SEQ ID NO: 5079943 - DNA, 25 bp, Homo sapien
aagggtcagcaatgtaagttctagc

SEQ ID NO: 5079944 - DNA, 25 bp, Homo sapien
tgccaactgattatgtatagcaagt

SEQ ID NO: 5079945 - DNA, 25 bp, Homo sapien
cattattcacgactcttgggttatc

SEQ ID NO: 5079946 - DNA, 25 bp, Homo sapien
ttcacgactcttgggttatcagtca

SEQ ID NO: 5079947 - DNA, 25 bp, Homo sapien
tcatttttccattattcacgactct

SEQ ID NO: 5079948 - DNA, 25 bp, Homo sapien
ctgggttcagctggcattacattag

SEQ ID NO: 5079949 - DNA, 25 bp, Homo sapien
tacattagaggatctgggaccctga

SEQ ID NO: 5079950 - DNA, 25 bp, Homo sapien
cattacattagaggatctgggaccc

SEQ ID NO: 5079951 - DNA, 25 bp, Homo sapien
tcagctggcattacattagaggatc

SEQ ID NO: 5079952 - DNA, 25 bp, Homo sapien
ccaaaataagggattgtgagtgagg

SEQ ID NO: 5079953 - DNA, 25 bp, Homo sapien
ctctgcgtgaggaggtccaatgcct

SEQ ID NO: 5079954 - DNA, 25 bp, Homo sapien
gcctcatcggatttcagccatgaga

SEQ ID NO: 5079955 - DNA, 25 bp, Homo sapien
tgaggcagaccgatagtccatctgg

SEQ ID NO: 5079956 - DNA, 25 bp, Homo sapien
gaagcatccaaagactctgcgtgag

SEQ ID NO: 5079957 - DNA, 25 bp, Homo sapien
ggaaaggtggcttgtccttgcccca

SEQ ID NO: 5079958 - DNA, 25 bp, Homo sapien
gatagattcaggtctaattgaaacc

SEQ ID NO: 5079959 - DNA, 25 bp, Homo sapien
tctaattgaaaccataagaaacacc

SEQ ID NO: 5079960 - DNA, 25 bp, Homo sapien
ccccattctgggcatttgcaatgca

SEQ ID NO: 5079961 - DNA, 25 bp, Homo sapien
tcagcttcattgtctgctatgcaaa

SEQ ID NO: 5079962 - DNA, 25 bp, Homo sapien
ggaacaccagaattcatggactcaa

SEQ ID NO: 5079963 - DNA, 25 bp, Homo sapien
ttctcaggtctcctactccatctgt

SEQ ID NO: 5079964 - DNA, 25 bp, Homo sapien
cattgtctgctatgcaaacaggctt

SEQ ID NO: 5079965 - DNA, 25 bp, Homo sapien
cctctagggtatacagagaggcaga

SEQ ID NO: 5079966 - DNA, 25 bp, Homo sapien
acagagaggcagatcggccccacct

SEQ ID NO: 5079967 - DNA, 25 bp, Homo sapien
tcaactttgaaggtccagattcatc

SEQ ID NO: 5079968 - DNA, 25 bp, Homo sapien
tgaaggtccagattcatcctctagg

SEQ ID NO: 5079969 - DNA, 25 bp, Homo sapien
ccggcacacagctgccgtccagggt

SEQ ID NO: 5079970 - DNA, 25 bp, Homo sapien
cggcacacagctgccgtccagggtg

SEQ ID NO: 5079971 - DNA, 25 bp, Homo sapien
ggcacacagctgccgtccagggtgg

SEQ ID NO: 5079972 - DNA, 25 bp, Homo sapien
aaccacttggtctatacatttttct

SEQ ID NO: 5079973 - DNA, 25 bp, Homo sapien
aagcagccggacaccaagagtggcc

SEQ ID NO: 5079974 - DNA, 25 bp, Homo sapien
aagagtggccctaaacaagttcttg

SEQ ID NO: 5079975 - DNA, 25 bp, Homo sapien
ggttgatgcaaagctccacacgtat

SEQ ID NO: 5079976 - DNA, 25 bp, Homo sapien
tttgacttttgcaagcagccggaca

SEQ ID NO: 5079977 - DNA, 25 bp, Homo sapien
agcccctggtaactgtcagccttgc

SEQ ID NO: 5079978 - DNA, 25 bp, Homo sapien
tgactgacaagagtagaaagtaaaa

SEQ ID NO: 5079979 - DNA, 25 bp, Homo sapien
agccttgcagatatgactgacaaga

SEQ ID NO: 5079980 - DNA, 25 bp, Homo sapien
gcagatatgactgacaagagtagaa

SEQ ID NO: 5079981 - DNA, 25 bp, Homo sapien
gttgctatgaccaacgcagccagca

SEQ ID NO: 5079982 - DNA, 25 bp, Homo sapien
tgctatgaccaacgcagccagcaat

SEQ ID NO: 5079983 - DNA, 25 bp, Homo sapien
gcagacacgttgctatgaccaacgc

SEQ ID NO: 5079984 - DNA, 25 bp, Homo sapien
gacacgttgctatgaccaacgcagc

SEQ ID NO: 5079985 - DNA, 25 bp, Homo sapien
tggtctgtttcagtcacaagccttc

SEQ ID NO: 5079986 - DNA, 25 bp, Homo sapien
ccttggtctgtttcagtcacaagcc

SEQ ID NO: 5079987 - DNA, 25 bp, Homo sapien
cttggtctgtttcagtcacaagcct

SEQ ID NO: 5079988 - DNA, 25 bp, Homo sapien
ttggtctgtttcagtcacaagcctt

SEQ ID NO: 5079989 - DNA, 25 bp, Homo sapien
aaccttggcctgactgacttggaac

SEQ ID NO: 5079990 - DNA, 25 bp, Homo sapien
gaccaatgcattcacctatgggacc

SEQ ID NO: 5079991 - DNA, 25 bp, Homo sapien
tgtggaccaatgcattcacctatgg

SEQ ID NO: 5079992 - DNA, 25 bp, Homo sapien
tgaaccttggcctgactgacttgga

SEQ ID NO: 5079993 - DNA, 25 bp, Homo sapien
tctgccgctaatgaccatagaaact

SEQ ID NO: 5079994 - DNA, 25 bp, Homo sapien
tggagtgaagtctccctggtcttct

SEQ ID NO: 5079995 - DNA, 25 bp, Homo sapien
gctaatgaccatagaaactgcttca

SEQ ID NO: 5079996 - DNA, 25 bp, Homo sapien
aagtctccctggtcttctgggctgg

SEQ ID NO: 5079997 - DNA, 25 bp, Homo sapien
tcagagacaattggcaaaaatcaag

SEQ ID NO: 5079998 - DNA, 25 bp, Homo sapien
gcaaaaatcaaggatgaggcttgtc

SEQ ID NO: 5079999 - DNA, 25 bp, Homo sapien
tgagtcagagacaattggcaaaaat

SEQ ID NO: 5080000 - DNA, 25 bp, Homo sapien
agagacaattggcaaaaatcaagga

SEQ ID NO: 5080001 - DNA, 25 bp, Homo sapien
gcagtacccctgaatgaagaacaaa

SEQ ID NO: 5080002 - DNA, 25 bp, Homo sapien
ggagagtctgaacgctagtgctgca

SEQ ID NO: 5080003 - DNA, 25 bp, Homo sapien
gagtatggaacgaaatcctgctgcc

SEQ ID NO: 5080004 - DNA, 25 bp, Homo sapien
ccaggtttcctgtatgatcccaagt

SEQ ID NO: 5080005 - DNA, 25 bp, Homo sapien
tctgcagttctcagcgtgattgacg

SEQ ID NO: 5080006 - DNA, 25 bp, Homo sapien
taaaacagactcagaccggttccaa

SEQ ID NO: 5080007 - DNA, 25 bp, Homo sapien
aaaacagactcagaccggttccaag

SEQ ID NO: 5080008 - DNA, 25 bp, Homo sapien
tctggtctgcagttctcagcgtgat

SEQ ID NO: 5080009 - DNA, 25 bp, Homo sapien
ggactgatgcctgatgagcgctgct

SEQ ID NO: 5080010 - DNA, 25 bp, Homo sapien
agaaggactgatgcctgatgagcgc

SEQ ID NO: 5080011 - DNA, 25 bp, Homo sapien
gatgcctgatgagcgctgctctctg

SEQ ID NO: 5080012 - DNA, 25 bp, Homo sapien
ccagaaggactgatgcctgatgagc

SEQ ID NO: 5080013 - DNA, 25 bp, Homo sapien
catcactcagctgtttgaccagctc

SEQ ID NO: 5080014 - DNA, 25 bp, Homo sapien
acatcactcagctgtttgaccagct

SEQ ID NO: 5080015 - DNA, 25 bp, Homo sapien
atcactcagctgtttgaccagctct

SEQ ID NO: 5080016 - DNA, 25 bp, Homo sapien
ctttagaacgagagcacatcaacat

SEQ ID NO: 5080017 - DNA, 25 bp, Homo sapien
tgaatatcatccaagacgcacatct

SEQ ID NO: 5080018 - DNA, 25 bp, Homo sapien
aagacgcacatctctttagaacgag

SEQ ID NO: 5080019 - DNA, 25 bp, Homo sapien
ctctttagaacgagagcacatcaac

SEQ ID NO: 5080020 - DNA, 25 bp, Homo sapien
agggtaccagccaggagatcacaag

SEQ ID NO: 5080021 - DNA, 25 bp, Homo sapien
aacaggacttcagggtaccagccag

SEQ ID NO: 5080022 - DNA, 25 bp, Homo sapien
tgctggtccattggcataacaggac

SEQ ID NO: 5080023 - DNA, 25 bp, Homo sapien
taccagccaggagatcacaagaaag

SEQ ID NO: 5080024 - DNA, 25 bp, Homo sapien
gctctgtgccgcttaccctatggtg

SEQ ID NO: 5080025 - DNA, 25 bp, Homo sapien
ctgtgccgcttaccctatggtgcat

SEQ ID NO: 5080026 - DNA, 25 bp, Homo sapien
gtgctctgtgccgcttaccctatgg

SEQ ID NO: 5080027 - DNA, 25 bp, Homo sapien
tctgtgccgcttaccctatggtgca

SEQ ID NO: 5080028 - DNA, 25 bp, Homo sapien
attaagcagatcattgctgtacttc

SEQ ID NO: 5080029 - DNA, 25 bp, Homo sapien
tattaagcagatcattgctgtactt

SEQ ID NO: 5080030 - DNA, 25 bp, Homo sapien
tctctgagtgatttggaaacttttt

SEQ ID NO: 5080031 - DNA, 25 bp, Homo sapien
accactgctggcagcataagcctgc

SEQ ID NO: 5080032 - DNA, 25 bp, Homo sapien
ctctgagtgatttggaaactttttg

SEQ ID NO: 5080033 - DNA, 25 bp, Homo sapien
ttaccactgctggcagcataagcct

SEQ ID NO: 5080034 - DNA, 25 bp, Homo sapien
cataaaccgcaaacatctgttccat

SEQ ID NO: 5080035 - DNA, 25 bp, Homo sapien
tcataaaccgcaaacatctgttcca

SEQ ID NO: 5080036 - DNA, 25 bp, Homo sapien
gagagatttggttaaacctggccca

SEQ ID NO: 5080037 - DNA, 25 bp, Homo sapien
cccaaatctatctctttgaaccctg

SEQ ID NO: 5080038 - DNA, 25 bp, Homo sapien
ctttgctcctcagctgcaatcctga

SEQ ID NO: 5080039 - DNA, 25 bp, Homo sapien
tctgaatagctgtgccttggttccc

SEQ ID NO: 5080040 - DNA, 25 bp, Homo sapien
tcagggccagctgcggtctgccaag

SEQ ID NO: 5080041 - DNA, 25 bp, Homo sapien
tggctgagatccatctcaccacagc

SEQ ID NO: 5080042 - DNA, 25 bp, Homo sapien
cacctgacccagagaattagtaggc

SEQ ID NO: 5080043 - DNA, 25 bp, Homo sapien
ccagagaattagtaggccatgctca

SEQ ID NO: 5080044 - DNA, 25 bp, Homo sapien
cttttgtgagcagcatttctcgtct

SEQ ID NO: 5080045 - DNA, 25 bp, Homo sapien
tttctcgtctttggaagatgatttt

SEQ ID NO: 5080046 - DNA, 25 bp, Homo sapien
gtggtttaaaacagctactatcagt

SEQ ID NO: 5080047 - DNA, 25 bp, Homo sapien
taaaacagctactatcagtgtcagc

SEQ ID NO: 5080048 - DNA, 25 bp, Homo sapien
tccataggccagtaaagaatcaagt

SEQ ID NO: 5080049 - DNA, 25 bp, Homo sapien
gttatctcatccaatgctgcagctg

SEQ ID NO: 5080050 - DNA, 25 bp, Homo sapien
actcaagagcgcacaacaaggcatc

SEQ ID NO: 5080051 - DNA, 25 bp, Homo sapien
tgcagctgtcacaaaccacaggaca

SEQ ID NO: 5080052 - DNA, 25 bp, Homo sapien
tcagcaagatggtcattatcagcat

SEQ ID NO: 5080053 - DNA, 25 bp, Homo sapien
gcaagatggtcattatcagcataac

SEQ ID NO: 5080054 - DNA, 25 bp, Homo sapien
gatggtcattatcagcataacacat

SEQ ID NO: 5080055 - DNA, 25 bp, Homo sapien
acatcagcaagatggtcattatcag

SEQ ID NO: 5080056 - DNA, 25 bp, Homo sapien
gattcattgccaaaagggtcactgg

SEQ ID NO: 5080057 - DNA, 25 bp, Homo sapien
catgaagtgattattggagtgtgtc

SEQ ID NO: 5080058 - DNA, 25 bp, Homo sapien
gtgtcacaaaatatgcacgtgattc

SEQ ID NO: 5080059 - DNA, 25 bp, Homo sapien
gaagtgattattggagtgtgtcaca

SEQ ID NO: 5080060 - DNA, 25 bp, Homo sapien
taggcaagtcagtaagccacccact

SEQ ID NO: 5080061 - DNA, 25 bp, Homo sapien
tcatgtggaagaatgggaactatgc

SEQ ID NO: 5080062 - DNA, 25 bp, Homo sapien
tccagatgccaaatgataagccacc

SEQ ID NO: 5080063 - DNA, 25 bp, Homo sapien
tggtgcactatttcatccagcaagc

SEQ ID NO: 5080064 - DNA, 25 bp, Homo sapien
aaacccgggtctccagaatcacagt

SEQ ID NO: 5080065 - DNA, 25 bp, Homo sapien
tttctgaaggctccccgcaaatgaa

SEQ ID NO: 5080066 - DNA, 25 bp, Homo sapien
gaagtcattatcacatttcactgag

SEQ ID NO: 5080067 - DNA, 25 bp, Homo sapien
caaaagactacactggttgaacagc

SEQ ID NO: 5080068 - DNA, 25 bp, Homo sapien
caatattttagcttccctggaccgc

SEQ ID NO: 5080069 - DNA, 25 bp, Homo sapien
tagacgaaacaagttcccctaggca

SEQ ID NO: 5080070 - DNA, 25 bp, Homo sapien
tctaaaataacctttggactgcagg

SEQ ID NO: 5080071 - DNA, 25 bp, Homo sapien
ttaggacaactaaccaagtagacga

SEQ ID NO: 5080072 - DNA, 25 bp, Homo sapien
ggcagtagagagcacttacccgacc

SEQ ID NO: 5080073 - DNA, 25 bp, Homo sapien
aacgagggcagtagagagcacttac

SEQ ID NO: 5080074 - DNA, 25 bp, Homo sapien
agagagcacttacccgaccccaagg

SEQ ID NO: 5080075 - DNA, 25 bp, Homo sapien
ctaaaacgagggcagtagagagcac

SEQ ID NO: 5080076 - DNA, 25 bp, Homo sapien
ggcaaatgtcttttcacgcagaaag

SEQ ID NO: 5080077 - DNA, 25 bp, Homo sapien
gcagaaagtgccatatagacgagat

SEQ ID NO: 5080078 - DNA, 25 bp, Homo sapien
tctacagcaaactcttgcaagtcca

SEQ ID NO: 5080079 - DNA, 25 bp, Homo sapien
tgccatatagacgagataaaggcag

SEQ ID NO: 5080080 - DNA, 25 bp, Homo sapien
agcactgatgccaccctctcagtgg

SEQ ID NO: 5080081 - DNA, 25 bp, Homo sapien
cagcactgatgccaccctctcagtg

SEQ ID NO: 5080082 - DNA, 25 bp, Homo sapien
tcagcactgatgccaccctctcagt

SEQ ID NO: 5080083 - DNA, 25 bp, Homo sapien
gaaagactaagtcagaggagtccct

SEQ ID NO: 5080084 - DNA, 25 bp, Homo sapien
catgcgagctcatcaagggaaagac

SEQ ID NO: 5080085 - DNA, 25 bp, Homo sapien
gccagccgaggacatgtttgaccat

SEQ ID NO: 5080086 - DNA, 25 bp, Homo sapien
aagggcttccggagctgtatttgca

SEQ ID NO: 5080087 - DNA, 25 bp, Homo sapien
tgcatgaatgcaaacctcctcgtac

SEQ ID NO: 5080088 - DNA, 25 bp, Homo sapien
gatcatgtcattgctggcagcccca

SEQ ID NO: 5080089 - DNA, 25 bp, Homo sapien
tatgagaacgagtgtcaggacccac

SEQ ID NO: 5080090 - DNA, 25 bp, Homo sapien
cacaacaagacccaaattagagcta

SEQ ID NO: 5080091 - DNA, 25 bp, Homo sapien
aacaggaagaacatgggcttcaact

SEQ ID NO: 5080092 - DNA, 25 bp, Homo sapien
caggaagaacatgggcttcaacttt

SEQ ID NO: 5080093 - DNA, 25 bp, Homo sapien
gaagaacatgggcttcaacttttgt

SEQ ID NO: 5080094 - DNA, 25 bp, Homo sapien
gaacatgggcttcaacttttgttac

SEQ ID NO: 5080095 - DNA, 25 bp, Homo sapien
caggactaggcattgtacactcata

SEQ ID NO: 5080096 - DNA, 25 bp, Homo sapien
gggggcccgaggccaggactaggca

SEQ ID NO: 5080097 - DNA, 25 bp, Homo sapien
aggactaggcattgtacactcatac

SEQ ID NO: 5080098 - DNA, 25 bp, Homo sapien
gtggacacgctgtatctttccatgg

SEQ ID NO: 5080099 - DNA, 25 bp, Homo sapien
tggacacgctgtatctttccatggc

SEQ ID NO: 5080100 - DNA, 25 bp, Homo sapien
gtggtggacacgctgtatctttcca

SEQ ID NO: 5080101 - DNA, 25 bp, Homo sapien
ggtggacacgctgtatctttccatg

SEQ ID NO: 5080102 - DNA, 25 bp, Homo sapien
ttgcataaccctgcctccatcagct

SEQ ID NO: 5080103 - DNA, 25 bp, Homo sapien
ggccttgcataaccctgcctccatc

SEQ ID NO: 5080104 - DNA, 25 bp, Homo sapien
ccttgcataaccctgcctccatcag

SEQ ID NO: 5080105 - DNA, 25 bp, Homo sapien
ctggccttgcataaccctgcctcca

SEQ ID NO: 5080106 - DNA, 25 bp, Homo sapien
gaacaaaccatgatccaagaactag

SEQ ID NO: 5080107 - DNA, 25 bp, Homo sapien
aaatcttttctctctagtgccccag

SEQ ID NO: 5080108 - DNA, 25 bp, Homo sapien
cccaggaactagagcatttgttttt

SEQ ID NO: 5080109 - DNA, 25 bp, Homo sapien
tgaatgttatctccagtgttatcta

SEQ ID NO: 5080110 - DNA, 25 bp, Homo sapien
cggtccttttgtgtattgaaactct

SEQ ID NO: 5080111 - DNA, 25 bp, Homo sapien
cttcctctccggtccttttgtgtat

SEQ ID NO: 5080112 - DNA, 25 bp, Homo sapien
tctccggtccttttgtgtattgaaa

SEQ ID NO: 5080113 - DNA, 25 bp, Homo sapien
ccttttgtgtattgaaactcttgga

SEQ ID NO: 5080114 - DNA, 25 bp, Homo sapien
tgtcatttacgcttcagtcagtcac

SEQ ID NO: 5080115 - DNA, 25 bp, Homo sapien
gcttcagtcagtcacaagaaactag

SEQ ID NO: 5080116 - DNA, 25 bp, Homo sapien
tattactgctgtgattatttctatc

SEQ ID NO: 5080117 - DNA, 25 bp, Homo sapien
tcactgtcatttacgcttcagtcag

SEQ ID NO: 5080118 - DNA, 25 bp, Homo sapien
tggttcttttcagagtcctgtaagt

SEQ ID NO: 5080119 - DNA, 25 bp, Homo sapien
cagtgcatcaactctaagtaactta

SEQ ID NO: 5080120 - DNA, 25 bp, Homo sapien
gtaacttaggagctgatttttctgt

SEQ ID NO: 5080121 - DNA, 25 bp, Homo sapien
acaattagtaggcaaaccaaacatt

SEQ ID NO: 5080122 - DNA, 25 bp, Homo sapien
ggcaaagcgaaaagtgatcagaagc

SEQ ID NO: 5080123 - DNA, 25 bp, Homo sapien
gaggagtcgctggatactctggcat

SEQ ID NO: 5080124 - DNA, 25 bp, Homo sapien
cagtggtgccgtgactggccgcata

SEQ ID NO: 5080125 - DNA, 25 bp, Homo sapien
tagtgcgactgtgctgaggcaaagc

SEQ ID NO: 5080126 - DNA, 25 bp, Homo sapien
cataagataaagtaagtgggtcaac

SEQ ID NO: 5080127 - DNA, 25 bp, Homo sapien
gctactgtaagagatcccaagttgg

SEQ ID NO: 5080128 - DNA, 25 bp, Homo sapien
tgtgaatgagaagatagccccagcc

SEQ ID NO: 5080129 - DNA, 25 bp, Homo sapien
gagccccaactgaagataaccgatg

SEQ ID NO: 5080130 - DNA, 25 bp, Homo sapien
ggctcacagataagaactttagagg

SEQ ID NO: 5080131 - DNA, 25 bp, Homo sapien
gctcacagataagaactttagagga

SEQ ID NO: 5080132 - DNA, 25 bp, Homo sapien
cacagataagaactttagaggagaa

SEQ ID NO: 5080133 - DNA, 25 bp, Homo sapien
tcacagataagaactttagaggaga

SEQ ID NO: 5080134 - DNA, 25 bp, Homo sapien
cagggccgcacatgggtgcatcgca

SEQ ID NO: 5080135 - DNA, 25 bp, Homo sapien
gtgcatcgcacagctctgccgtggc

SEQ ID NO: 5080136 - DNA, 25 bp, Homo sapien
gccctcctctttcttaatggaggac

SEQ ID NO: 5080137 - DNA, 25 bp, Homo sapien
cacatgggtgcatcgcacagctctg

SEQ ID NO: 5080138 - DNA, 25 bp, Homo sapien
cgcgcccctcgcatcatggattggt

SEQ ID NO: 5080139 - DNA, 25 bp, Homo sapien
tctgggcgcgtatagcatttttcca

SEQ ID NO: 5080140 - DNA, 25 bp, Homo sapien
ttggcagagccattctgggcgcgta

SEQ ID NO: 5080141 - DNA, 25 bp, Homo sapien
ttccatctgagaacaagccgcgctt

SEQ ID NO: 5080142 - DNA, 25 bp, Homo sapien
gaaaccagcagggagtcgggatacc

SEQ ID NO: 5080143 - DNA, 25 bp, Homo sapien
gatacccagggcatcgctttcccat

SEQ ID NO: 5080144 - DNA, 25 bp, Homo sapien
agtcgggatacccagggcatcgctt

SEQ ID NO: 5080145 - DNA, 25 bp, Homo sapien
aaccagcagggagtcgggataccca

SEQ ID NO: 5080146 - DNA, 25 bp, Homo sapien
gccgcttccggcgtgcgctggtgtt

SEQ ID NO: 5080147 - DNA, 25 bp, Homo sapien
ccgcttccggcgtgcgctggtgtta

SEQ ID NO: 5080148 - DNA, 25 bp, Homo sapien
gtggccgcttccggcgtgcgctggt

SEQ ID NO: 5080149 - DNA, 25 bp, Homo sapien
ctgtgagtctgtcccgcccgcggcc

SEQ ID NO: 5080150 - DNA, 25 bp, Homo sapien
tcggctggatctgcgcacagcggca

SEQ ID NO: 5080151 - DNA, 25 bp, Homo sapien
gataatgcggtgagcaggcaccacg

SEQ ID NO: 5080152 - DNA, 25 bp, Homo sapien
cacagcggcagggattgcgtgcgcc

SEQ ID NO: 5080153 - DNA, 25 bp, Homo sapien
cacgccgtctcggagcggataatgc

SEQ ID NO: 5080154 - DNA, 25 bp, Homo sapien
gagcgtccggcgacctttctttgtg

SEQ ID NO: 5080155 - DNA, 25 bp, Homo sapien
agtcgaaagcggcatcttctccgag

SEQ ID NO: 5080156 - DNA, 25 bp, Homo sapien
tgcttagggagtcgaaagcggcatc

SEQ ID NO: 5080157 - DNA, 25 bp, Homo sapien
tctccgagagaagtcgcctactggg

SEQ ID NO: 5080158 - DNA, 25 bp, Homo sapien
gcggagtcctattgtccccgtgcac

SEQ ID NO: 5080159 - DNA, 25 bp, Homo sapien
cgggcggagtcctattgtccccgtg

SEQ ID NO: 5080160 - DNA, 25 bp, Homo sapien
gtgcgggcggagtcctattgtcccc

SEQ ID NO: 5080161 - DNA, 25 bp, Homo sapien
ggcggagtcctattgtccccgtgca

SEQ ID NO: 5080162 - DNA, 25 bp, Homo sapien
agggcgcttattccactctccgggt

SEQ ID NO: 5080163 - DNA, 25 bp, Homo sapien
cactctccgggttttggctgcagct

SEQ ID NO: 5080164 - DNA, 25 bp, Homo sapien
tgttcgtcgcgtgtccagttgctca

SEQ ID NO: 5080165 - DNA, 25 bp, Homo sapien
tcagccgggagctccggcatcttca

SEQ ID NO: 5080166 - DNA, 25 bp, Homo sapien
tgaaagaccctgagggagaagaaac

SEQ ID NO: 5080167 - DNA, 25 bp, Homo sapien
aggcaaatccttttgaaagaccctg

SEQ ID NO: 5080168 - DNA, 25 bp, Homo sapien
gaaacgcctccctctgggtaggaga

SEQ ID NO: 5080169 - DNA, 25 bp, Homo sapien
gaccctgagggagaagaaacgcctc

SEQ ID NO: 5080170 - DNA, 25 bp, Homo sapien
ggcaccgcggtgatgacctgaagct

SEQ ID NO: 5080171 - DNA, 25 bp, Homo sapien
ttacaacatcggcttaaggcgcacc

SEQ ID NO: 5080172 - DNA, 25 bp, Homo sapien
tgaattttactctctcgggccggca

SEQ ID NO: 5080173 - DNA, 25 bp, Homo sapien
gaggttctccgcgttgtgccaggat

SEQ ID NO: 5080174 - DNA, 25 bp, Homo sapien
ctcatttaaaaacggcagagggaga

SEQ ID NO: 5080175 - DNA, 25 bp, Homo sapien
aaaatgccgtttcagacaaactgcc

SEQ ID NO: 5080176 - DNA, 25 bp, Homo sapien
caagataaatcaaaccaccaggccc

SEQ ID NO: 5080177 - DNA, 25 bp, Homo sapien
taacagcagctaacaatagatcacg

SEQ ID NO: 5080178 - DNA, 25 bp, Homo sapien
cagtacaaagaaataacgtgaggca

SEQ ID NO: 5080179 - DNA, 25 bp, Homo sapien
gataccaggcttctaaggttaccac

SEQ ID NO: 5080180 - DNA, 25 bp, Homo sapien
catagttagcacaggaaatgcactc

SEQ ID NO: 5080181 - DNA, 25 bp, Homo sapien
tccggtagtagactcccataacatg

SEQ ID NO: 5080182 - DNA, 25 bp, Homo sapien
tgactactgagtccacagtctggct

SEQ ID NO: 5080183 - DNA, 25 bp, Homo sapien
ccatgtcatagggttcttgcacacc

SEQ ID NO: 5080184 - DNA, 25 bp, Homo sapien
ccctattctaggcacaggagataca

SEQ ID NO: 5080185 - DNA, 25 bp, Homo sapien
tctgttgtcgggagtgcctggaaca

SEQ ID NO: 5080186 - DNA, 25 bp, Homo sapien
tgttaggctccactatgagtactgc

SEQ ID NO: 5080187 - DNA, 25 bp, Homo sapien
attcatccaacattgcattgcccag

SEQ ID NO: 5080188 - DNA, 25 bp, Homo sapien
ccagggtgtgtacttctgggatcca

SEQ ID NO: 5080189 - DNA, 25 bp, Homo sapien
tatgagtactgctgctggcaaaaga

SEQ ID NO: 5080190 - DNA, 25 bp, Homo sapien
acatcagtgccattcgcttgattgc

SEQ ID NO: 5080191 - DNA, 25 bp, Homo sapien
cttgattgccaatcttagcttttct

SEQ ID NO: 5080192 - DNA, 25 bp, Homo sapien
tcctttagaccaaatcctattctat

SEQ ID NO: 5080193 - DNA, 25 bp, Homo sapien
gccattcgcttgattgccaatctta

SEQ ID NO: 5080194 - DNA, 25 bp, Homo sapien
ctctagaacaagtgtagtaaaaaat

SEQ ID NO: 5080195 - DNA, 25 bp, Homo sapien
tctctagaacaagtgtagtaaaaaa

SEQ ID NO: 5080196 - DNA, 25 bp, Homo sapien
tctagaacaagtgtagtaaaaaatc

SEQ ID NO: 5080197 - DNA, 25 bp, Homo sapien
ctctctagaacaagtgtagtaaaaa

SEQ ID NO: 5080198 - DNA, 25 bp, Homo sapien
tattttcaggcccatactcataggc

SEQ ID NO: 5080199 - DNA, 25 bp, Homo sapien
gattcccaaaggaggcacatggttg

SEQ ID NO: 5080200 - DNA, 25 bp, Homo sapien
aaattcatggactaagtttagatgc

SEQ ID NO: 5080201 - DNA, 25 bp, Homo sapien
aaacatctagttattttcaggccca

SEQ ID NO: 5080202 - DNA, 25 bp, Homo sapien
tagtggcaggagtttcccgggagga

SEQ ID NO: 5080203 - DNA, 25 bp, Homo sapien
cattctgtgataggaagaaagctgg

SEQ ID NO: 5080204 - DNA, 25 bp, Homo sapien
tctgggtcattctgtgataggaaga

SEQ ID NO: 5080205 - DNA, 25 bp, Homo sapien
agatggacgtttgcactctgggtca

SEQ ID NO: 5080206 - DNA, 25 bp, Homo sapien
acgtcagcgaactcaagaccttcta

SEQ ID NO: 5080207 - DNA, 25 bp, Homo sapien
tattttgagagtaacgtcagcgaac

SEQ ID NO: 5080208 - DNA, 25 bp, Homo sapien
gaaagtattttgagagtaacgtcag

SEQ ID NO: 5080209 - DNA, 25 bp, Homo sapien
gagagtaacgtcagcgaactcaaga

SEQ ID NO: 5080210 - DNA, 25 bp, Homo sapien
gataacgagcataaaaaagacaagc

SEQ ID NO: 5080211 - DNA, 25 bp, Homo sapien
ccctcacaatatgccagttaccaga

SEQ ID NO: 5080212 - DNA, 25 bp, Homo sapien
cacaatatgccagttaccagatttg

SEQ ID NO: 5080213 - DNA, 25 bp, Homo sapien
taaaaacaagccgataacgagcata

SEQ ID NO: 5080214 - DNA, 25 bp, Homo sapien
ctaaaggaagagtcctcttctgcca

SEQ ID NO: 5080215 - DNA, 25 bp, Homo sapien
atgttctgtggtatcaagttgagcc

SEQ ID NO: 5080216 - DNA, 25 bp, Homo sapien
gttctgtggtatcaagttgagccta

SEQ ID NO: 5080217 - DNA, 25 bp, Homo sapien
tgtggtatcaagttgagcctaaagg

SEQ ID NO: 5080218 - DNA, 25 bp, Homo sapien
gtgagtggatatgaccccaccagct

SEQ ID NO: 5080219 - DNA, 25 bp, Homo sapien
tctgtgagtggatatgaccccacca

SEQ ID NO: 5080220 - DNA, 25 bp, Homo sapien
acatctgtgagtggatatgacccca

SEQ ID NO: 5080221 - DNA, 25 bp, Homo sapien
tgtcatggagactccttaacatctg

SEQ ID NO: 5080222 - DNA, 25 bp, Homo sapien
gacacagaggaggtatatgtgacat

SEQ ID NO: 5080223 - DNA, 25 bp, Homo sapien
atcctctcctagagtgtttgcctca

SEQ ID NO: 5080224 - DNA, 25 bp, Homo sapien
ctggaacctgctcatccgcatgaca

SEQ ID NO: 5080225 - DNA, 25 bp, Homo sapien
ttttccgtgggtacttctgtccaca

SEQ ID NO: 5080226 - DNA, 25 bp, Homo sapien
gggccctgcaatgggaggcaccttc

SEQ ID NO: 5080227 - DNA, 25 bp, Homo sapien
cctgcaatgggaggcaccttctcac

SEQ ID NO: 5080228 - DNA, 25 bp, Homo sapien
ctagggccctgcaatgggaggcacc

SEQ ID NO: 5080229 - DNA, 25 bp, Homo sapien
gccctgcaatgggaggcaccttctc

SEQ ID NO: 5080230 - DNA, 25 bp, Homo sapien
gccccagtgtccacaagaaaatgag

SEQ ID NO: 5080231 - DNA, 25 bp, Homo sapien
ctcttcacggcatcatcagccaggg

SEQ ID NO: 5080232 - DNA, 25 bp, Homo sapien
acaagaaaatgagggtggtgccacc

SEQ ID NO: 5080233 - DNA, 25 bp, Homo sapien
agggtggtgccaccacatttaactc

SEQ ID NO: 5080234 - DNA, 25 bp, Homo sapien
tcatctgttcctggaatgccgtatg

SEQ ID NO: 5080235 - DNA, 25 bp, Homo sapien
ccatctgtacccactttgctcctca

SEQ ID NO: 5080236 - DNA, 25 bp, Homo sapien
gctcagaggttccaggtccatcaac

SEQ ID NO: 5080237 - DNA, 25 bp, Homo sapien
aatgccgtatgaagaggtaggaaca

SEQ ID NO: 5080238 - DNA, 25 bp, Homo sapien
aagggctatggtgacaggtgagatg

SEQ ID NO: 5080239 - DNA, 25 bp, Homo sapien
gcaagggctatggtgacaggtgaga

SEQ ID NO: 5080240 - DNA, 25 bp, Homo sapien
gggctatggtgacaggtgagatggg

SEQ ID NO: 5080241 - DNA, 25 bp, Homo sapien
ctggcaagggctatggtgacaggtg

SEQ ID NO: 5080242 - DNA, 25 bp, Homo sapien
gttgtatgaaaccagacatcttctg

SEQ ID NO: 5080243 - DNA, 25 bp, Homo sapien
tctgaattctgcagaaaatgctacg

SEQ ID NO: 5080244 - DNA, 25 bp, Homo sapien
tacggccagattcaccgtacagagt

SEQ ID NO: 5080245 - DNA, 25 bp, Homo sapien
taaagatggaacttcatggaaatga

SEQ ID NO: 5080246 - DNA, 25 bp, Homo sapien
cattccagtgctcagtctgaggtgc

SEQ ID NO: 5080247 - DNA, 25 bp, Homo sapien
ccattccagtgctcagtctgaggtg

SEQ ID NO: 5080248 - DNA, 25 bp, Homo sapien
tcacaagacccctcatcagtagggc

SEQ ID NO: 5080249 - DNA, 25 bp, Homo sapien
ccagatctcacaagacccctcatca

SEQ ID NO: 5080250 - DNA, 25 bp, Homo sapien
gatctcacaagacccctcatcagta

SEQ ID NO: 5080251 - DNA, 25 bp, Homo sapien
ctcacaagacccctcatcagtaggg

SEQ ID NO: 5080252 - DNA, 25 bp, Homo sapien
tcctgggatgggtgagcctgggctt

SEQ ID NO: 5080253 - DNA, 25 bp, Homo sapien
cctgggcttttaatttgctgtgatg

SEQ ID NO: 5080254 - DNA, 25 bp, Homo sapien
tgctgtgatgggagataattgttgc

SEQ ID NO: 5080255 - DNA, 25 bp, Homo sapien
gataattgttgcttgagtttccacc

SEQ ID NO: 5080256 - DNA, 25 bp, Homo sapien
ccagcagcatttatggaggctccaa

SEQ ID NO: 5080257 - DNA, 25 bp, Homo sapien
caaaggcattgcatgaaggatttgg

SEQ ID NO: 5080258 - DNA, 25 bp, Homo sapien
ttttccaatggaagcgtgtctgtct

SEQ ID NO: 5080259 - DNA, 25 bp, Homo sapien
gtctgtgaccgccaaaggcattgca

SEQ ID NO: 5080260 - DNA, 25 bp, Homo sapien
ttcctttttccaatggaagcgtgtc

SEQ ID NO: 5080261 - DNA, 25 bp, Homo sapien
taaacaacttaatgtcatacctcag

SEQ ID NO: 5080262 - DNA, 25 bp, Homo sapien
caacattctgagacttataggatgc

SEQ ID NO: 5080263 - DNA, 25 bp, Homo sapien
tgacaaaactttagctagattaaca

SEQ ID NO: 5080264 - DNA, 25 bp, Homo sapien
cacagcagcaaattcgataacctag

SEQ ID NO: 5080265 - DNA, 25 bp, Homo sapien
cttaacagcagggatatatctgaga

SEQ ID NO: 5080266 - DNA, 25 bp, Homo sapien
cataggactggaatgtacatataca

SEQ ID NO: 5080267 - DNA, 25 bp, Homo sapien
tacgggaccatcatgatatatgcag

SEQ ID NO: 5080268 - DNA, 25 bp, Homo sapien
caggcattataatcctacgggacca

SEQ ID NO: 5080269 - DNA, 25 bp, Homo sapien
accaatgggatgatttgtagctaaa

SEQ ID NO: 5080270 - DNA, 25 bp, Homo sapien
ctcttttaccaatgggatgatttgt

SEQ ID NO: 5080271 - DNA, 25 bp, Homo sapien
ttaccaatgggatgatttgtagcta

SEQ ID NO: 5080272 - DNA, 25 bp, Homo sapien
ttttaccaatgggatgatttgtagc

SEQ ID NO: 5080273 - DNA, 25 bp, Homo sapien
aacagaggggtactgatggctgagt

SEQ ID NO: 5080274 - DNA, 25 bp, Homo sapien
gtactgatggctgagtagacggtgc

SEQ ID NO: 5080275 - DNA, 25 bp, Homo sapien
gggtactgatggctgagtagacggt

SEQ ID NO: 5080276 - DNA, 25 bp, Homo sapien
actgatggctgagtagacggtgcct

SEQ ID NO: 5080277 - DNA, 25 bp, Homo sapien
tgcacatatcagtcaccccaaaggt

SEQ ID NO: 5080278 - DNA, 25 bp, Homo sapien
gtcactatgggctgtattttctaaa

SEQ ID NO: 5080279 - DNA, 25 bp, Homo sapien
gaatcatgcagtatggccccttttt

SEQ ID NO: 5080280 - DNA, 25 bp, Homo sapien
tctgacgaccctttttgatccttcc

SEQ ID NO: 5080281 - DNA, 25 bp, Homo sapien
tcaaggggctgattgatactaaact

SEQ ID NO: 5080282 - DNA, 25 bp, Homo sapien
gattgatactaaactgaaacaattc

SEQ ID NO: 5080283 - DNA, 25 bp, Homo sapien
attcttcagtctggacaaggtgaga

SEQ ID NO: 5080284 - DNA, 25 bp, Homo sapien
ttttagaatcaaggggctgattgat

SEQ ID NO: 5080285 - DNA, 25 bp, Homo sapien
gacttcctggagtctgaataggcac

SEQ ID NO: 5080286 - DNA, 25 bp, Homo sapien
tggagacaggtcaatccctcatcct

SEQ ID NO: 5080287 - DNA, 25 bp, Homo sapien
gaataggcactgattccaagtgtga

SEQ ID NO: 5080288 - DNA, 25 bp, Homo sapien
caagtgtgacatgcagttgtaggtg

SEQ ID NO: 5080289 - DNA, 25 bp, Homo sapien
acaggaaaaggaggacaatctggtg

SEQ ID NO: 5080290 - DNA, 25 bp, Homo sapien
ggaaaaggaggacaatctggtggca

SEQ ID NO: 5080291 - DNA, 25 bp, Homo sapien
aggaaaaggaggacaatctggtggc

SEQ ID NO: 5080292 - DNA, 25 bp, Homo sapien
aaacaggaaaaggaggacaatctgg

SEQ ID NO: 5080293 - DNA, 25 bp, Homo sapien
accagactggcgagctgagtgttgt

SEQ ID NO: 5080294 - DNA, 25 bp, Homo sapien
ccagactggcgagctgagtgttgtc

SEQ ID NO: 5080295 - DNA, 25 bp, Homo sapien
tggcagtgaacccagcgaccagact

SEQ ID NO: 5080296 - DNA, 25 bp, Homo sapien
gtgaacccagcgaccagactggcga

SEQ ID NO: 5080297 - DNA, 25 bp, Homo sapien
ccacgtgtggccaaagtaggtgagc

SEQ ID NO: 5080298 - DNA, 25 bp, Homo sapien
caaagtaggtgagcagcgtctgtct

SEQ ID NO: 5080299 - DNA, 25 bp, Homo sapien
ccatctttgtaagcgctggttaaga

SEQ ID NO: 5080300 - DNA, 25 bp, Homo sapien
caaatcaaccatgggccacgtgtgg

SEQ ID NO: 5080301 - DNA, 25 bp, Homo sapien
tgcaccataggagccttttttttat

SEQ ID NO: 5080302 - DNA, 25 bp, Homo sapien
gcaccataggagccttttttttata

SEQ ID NO: 5080303 - DNA, 25 bp, Homo sapien
ctgcaccataggagcctttttttta

SEQ ID NO: 5080304 - DNA, 25 bp, Homo sapien
tcaggaatgtattttgtactactaa

SEQ ID NO: 5080305 - DNA, 25 bp, Homo sapien
ggaatgtattttgtactactaacag

SEQ ID NO: 5080306 - DNA, 25 bp, Homo sapien
caggaatgtattttgtactactaac

SEQ ID NO: 5080307 - DNA, 25 bp, Homo sapien
aatgtattttgtactactaacagac

SEQ ID NO: 5080308 - DNA, 25 bp, Homo sapien
aggattcgaattcttctccatggtt

SEQ ID NO: 5080309 - DNA, 25 bp, Homo sapien
gattcgaattcttctccatggttaa

SEQ ID NO: 5080310 - DNA, 25 bp, Homo sapien
tatcccttgtaggattcgaattctt

SEQ ID NO: 5080311 - DNA, 25 bp, Homo sapien
ccaaagtatcccttgtaggattcga

SEQ ID NO: 5080312 - DNA, 25 bp, Homo sapien
taacatcaggagttgaagaatagat

SEQ ID NO: 5080313 - DNA, 25 bp, Homo sapien
gaatagatgcaatctgaatcctctg

SEQ ID NO: 5080314 - DNA, 25 bp, Homo sapien
cacagtttgccctagtctcaatgtt

SEQ ID NO: 5080315 - DNA, 25 bp, Homo sapien
tctgttgtctctggaaagccaatct

SEQ ID NO: 5080316 - DNA, 25 bp, Homo sapien
ccatcagttggatactaactgcagc

SEQ ID NO: 5080317 - DNA, 25 bp, Homo sapien
ctctgcttgctcgttttagtccatc

SEQ ID NO: 5080318 - DNA, 25 bp, Homo sapien
caagaggataactctacctctcttc

SEQ ID NO: 5080319 - DNA, 25 bp, Homo sapien
catctgatactcttgagttttcact

SEQ ID NO: 5080320 - DNA, 25 bp, Homo sapien
tggtgttgccatatatggaacatga

SEQ ID NO: 5080321 - DNA, 25 bp, Homo sapien
ttccaaaggatttggtgttgccata

SEQ ID NO: 5080322 - DNA, 25 bp, Homo sapien
tccaaaggatttggtgttgccatat

SEQ ID NO: 5080323 - DNA, 25 bp, Homo sapien
attccaaaggatttggtgttgccat

SEQ ID NO: 5080324 - DNA, 25 bp, Homo sapien
tttgattgatcctgagccacactgg

SEQ ID NO: 5080325 - DNA, 25 bp, Homo sapien
actggactctctggcatgggcataa

SEQ ID NO: 5080326 - DNA, 25 bp, Homo sapien
tccttttacggatggccttggtcac

SEQ ID NO: 5080327 - DNA, 25 bp, Homo sapien
catttgcaacagacacgaagggtgg

SEQ ID NO: 5080328 - DNA, 25 bp, Homo sapien
tggacaaactcttgttctgcccatt

SEQ ID NO: 5080329 - DNA, 25 bp, Homo sapien
tcctgttcagttgttggacaaactc

SEQ ID NO: 5080330 - DNA, 25 bp, Homo sapien
caaactcttgttctgcccattccac

SEQ ID NO: 5080331 - DNA, 25 bp, Homo sapien
ctgttcagttgttggacaaactctt

SEQ ID NO: 5080332 - DNA, 25 bp, Homo sapien
tctaaaccttcctgttcttgccaaa

SEQ ID NO: 5080333 - DNA, 25 bp, Homo sapien
tcacggggtggaaaaggataatcta

SEQ ID NO: 5080334 - DNA, 25 bp, Homo sapien
aggataatctaaaccttcctgttct

SEQ ID NO: 5080335 - DNA, 25 bp, Homo sapien
ataaccatgtgtaggtctttgttct

SEQ ID NO: 5080336 - DNA, 25 bp, Homo sapien
tgcagctttcttattgcttgtgcta

SEQ ID NO: 5080337 - DNA, 25 bp, Homo sapien
aactgtgtgtgcatccgacagctgc

SEQ ID NO: 5080338 - DNA, 25 bp, Homo sapien
gctgcagctttcttattgcttgtgc

SEQ ID NO: 5080339 - DNA, 25 bp, Homo sapien
gcagctttcttattgcttgtgctat

SEQ ID NO: 5080340 - DNA, 25 bp, Homo sapien
ccattggagaacacgcggtgctcac

SEQ ID NO: 5080341 - DNA, 25 bp, Homo sapien
agagcccattggagaacacgcggtg

SEQ ID NO: 5080342 - DNA, 25 bp, Homo sapien
agcagagcccattggagaacacgcg

SEQ ID NO: 5080343 - DNA, 25 bp, Homo sapien
gcccattggagaacacgcggtgctc

SEQ ID NO: 5080344 - DNA, 25 bp, Homo sapien
ctggagccagcaaagagcagaccat

SEQ ID NO: 5080345 - DNA, 25 bp, Homo sapien
ttctgtagtaccaggaagctctgcg

SEQ ID NO: 5080346 - DNA, 25 bp, Homo sapien
gacaacggcctgaagtagaccctat

SEQ ID NO: 5080347 - DNA, 25 bp, Homo sapien
gacagaccatttgaagtgaccggca

SEQ ID NO: 5080348 - DNA, 25 bp, Homo sapien
tagagccagcaattagatgccacca

SEQ ID NO: 5080349 - DNA, 25 bp, Homo sapien
ctcgttacacttgtgtatttggtcg

SEQ ID NO: 5080350 - DNA, 25 bp, Homo sapien
acttgtgtatttggtcgttgacgca

SEQ ID NO: 5080351 - DNA, 25 bp, Homo sapien
ggctggccatgtggagtctgtcttg

SEQ ID NO: 5080352 - DNA, 25 bp, Homo sapien
ccccatctcgttacacttgtgtatt

SEQ ID NO: 5080353 - DNA, 25 bp, Homo sapien
gaaactcttcaaggcgaggtagctt

SEQ ID NO: 5080354 - DNA, 25 bp, Homo sapien
aggcgaggtagcttctcgtggttac

SEQ ID NO: 5080355 - DNA, 25 bp, Homo sapien
actcttcaaggcgaggtagcttctc

SEQ ID NO: 5080356 - DNA, 25 bp, Homo sapien
ttcaaggcgaggtagcttctcgtgg

SEQ ID NO: 5080357 - DNA, 25 bp, Homo sapien
ccatcgtaactatgaactaatgtct

SEQ ID NO: 5080358 - DNA, 25 bp, Homo sapien
agttccctgaacttgaccttgttca

SEQ ID NO: 5080359 - DNA, 25 bp, Homo sapien
attcagttccctgaacttgaccttg

SEQ ID NO: 5080360 - DNA, 25 bp, Homo sapien
cccagatgatcagggaatcctttcc

SEQ ID NO: 5080361 - DNA, 25 bp, Homo sapien
gtaacatgaattgagagcgggaagc

SEQ ID NO: 5080362 - DNA, 25 bp, Homo sapien
ctgcagtgaacagaatggacagagg

SEQ ID NO: 5080363 - DNA, 25 bp, Homo sapien
tgagacacaacataggagaggaagt

SEQ ID NO: 5080364 - DNA, 25 bp, Homo sapien
cagcccaaaggccaagagataggca

SEQ ID NO: 5080365 - DNA, 25 bp, Homo sapien
aaagagtcatcatcgctgttaccgt

SEQ ID NO: 5080366 - DNA, 25 bp, Homo sapien
aaaagagtcatcatcgctgttaccg

SEQ ID NO: 5080367 - DNA, 25 bp, Homo sapien
aagataatcttatgtgactcactcc

SEQ ID NO: 5080368 - DNA, 25 bp, Homo sapien
taatggtagcgtgtagccaggtact

SEQ ID NO: 5080369 - DNA, 25 bp, Homo sapien
ctggctaatggtagcgtgtagccag

SEQ ID NO: 5080370 - DNA, 25 bp, Homo sapien
tagcgtgtagccaggtacttttcta

SEQ ID NO: 5080371 - DNA, 25 bp, Homo sapien
cacagaaaatgtgctacctcttggt

SEQ ID NO: 5080372 - DNA, 25 bp, Homo sapien
gggcagattgtcttggctcagtctc

SEQ ID NO: 5080373 - DNA, 25 bp, Homo sapien
tcttggttgcataggtgggctttcc

SEQ ID NO: 5080374 - DNA, 25 bp, Homo sapien
cttctgttgtttgacccacagaaaa

SEQ ID NO: 5080375 - DNA, 25 bp, Homo sapien
ctggaggatgcttctaaagggacca

SEQ ID NO: 5080376 - DNA, 25 bp, Homo sapien
gcttctaaagggaccaatgccatga

SEQ ID NO: 5080377 - DNA, 25 bp, Homo sapien
ttctgagaaaccatcttggactaga

SEQ ID NO: 5080378 - DNA, 25 bp, Homo sapien
tgcttactaaatggccttctggatt

SEQ ID NO: 5080379 - DNA, 25 bp, Homo sapien
ctgtgtagcaggaatggtgtgcact

SEQ ID NO: 5080380 - DNA, 25 bp, Homo sapien
ggctgtgtagcaggaatggtgtgca

SEQ ID NO: 5080381 - DNA, 25 bp, Homo sapien
gctgtgtagcaggaatggtgtgcac

SEQ ID NO: 5080382 - DNA, 25 bp, Homo sapien
gtgtagcaggaatggtgtgcactgg

SEQ ID NO: 5080383 - DNA, 25 bp, Homo sapien
aggcagttgctctgcactgtggcga

SEQ ID NO: 5080384 - DNA, 25 bp, Homo sapien
acagagctgagcaccaggcagttgc

SEQ ID NO: 5080385 - DNA, 25 bp, Homo sapien
gccttgccttcgcttggcttggtgg

SEQ ID NO: 5080386 - DNA, 25 bp, Homo sapien
tctgggcactgtcagaggggcgcct

SEQ ID NO: 5080387 - DNA, 25 bp, Homo sapien
caggctgttttctagaccatatttt

SEQ ID NO: 5080388 - DNA, 25 bp, Homo sapien
ggtgaccgcggccaggctgttttct

SEQ ID NO: 5080389 - DNA, 25 bp, Homo sapien
tcttccttgactgacctgctgcaca

SEQ ID NO: 5080390 - DNA, 25 bp, Homo sapien
gcacacccaccagactcagacctcc

SEQ ID NO: 5080391 - DNA, 25 bp, Homo sapien
gactgccccagtgtgagatttcaga

SEQ ID NO: 5080392 - DNA, 25 bp, Homo sapien
tgccccagtgtgagatttcagaaac

SEQ ID NO: 5080393 - DNA, 25 bp, Homo sapien
ttcctggactgccccagtgtgagat

SEQ ID NO: 5080394 - DNA, 25 bp, Homo sapien
ccagtgtgagatttcagaaactgcc

SEQ ID NO: 5080395 - DNA, 25 bp, Homo sapien
gtatcacgacagttgcaaagaaaat

SEQ ID NO: 5080396 - DNA, 25 bp, Homo sapien
tgtattggtatcacgacagttgcaa

SEQ ID NO: 5080397 - DNA, 25 bp, Homo sapien
gcagtgtattggtatcacgacagtt

SEQ ID NO: 5080398 - DNA, 25 bp, Homo sapien
tggtatcacgacagttgcaaagaaa

SEQ ID NO: 5080399 - DNA, 25 bp, Homo sapien
tcaggagggaatgttagagatgtct

SEQ ID NO: 5080400 - DNA, 25 bp, Homo sapien
gcgactgttctcctcagtgtttggc

SEQ ID NO: 5080401 - DNA, 25 bp, Homo sapien
gctgatgcagtggaggtcaaggtca

SEQ ID NO: 5080402 - DNA, 25 bp, Homo sapien
tcatctgcaggctcgatagcccgtg

SEQ ID NO: 5080403 - DNA, 25 bp, Homo sapien
ctctctgctaaagtaaatgttagtg

SEQ ID NO: 5080404 - DNA, 25 bp, Homo sapien
ggacactctgatggtttcaataggc

SEQ ID NO: 5080405 - DNA, 25 bp, Homo sapien
tagtgtaaccattgacatttgataa

SEQ ID NO: 5080406 - DNA, 25 bp, Homo sapien
gctcttgtaattatctctctgctaa

SEQ ID NO: 5080407 - DNA, 25 bp, Homo sapien
tacgtgtggaggttgtggacacaca

SEQ ID NO: 5080408 - DNA, 25 bp, Homo sapien
tcaaccatcaaaggagtgtttagct

SEQ ID NO: 5080409 - DNA, 25 bp, Homo sapien
gcaccgaagtgaactgaagcggcct

SEQ ID NO: 5080410 - DNA, 25 bp, Homo sapien
ttagattcgtgcaagaaaagggact

SEQ ID NO: 5080411 - DNA, 25 bp, Homo sapien
tgtccgtcatgatcagggtttccct

SEQ ID NO: 5080412 - DNA, 25 bp, Homo sapien
tctgtctgggttgtccgtcatgatc

SEQ ID NO: 5080413 - DNA, 25 bp, Homo sapien
gcggctctccgaggactctgtctgg

SEQ ID NO: 5080414 - DNA, 25 bp, Homo sapien
cggcactagccggagagctggcggc

SEQ ID NO: 5080415 - DNA, 25 bp, Homo sapien
gctgaatgtttctgaaacacccaac

SEQ ID NO: 5080416 - DNA, 25 bp, Homo sapien
tggctgaatgtttctgaaacaccca

SEQ ID NO: 5080417 - DNA, 25 bp, Homo sapien
gaatgtttctgaaacacccaacctc

SEQ ID NO: 5080418 - DNA, 25 bp, Homo sapien
tgaatgtttctgaaacacccaacct

SEQ ID NO: 5080419 - DNA, 25 bp, Homo sapien
tgaagagggtattatcggccagcca

SEQ ID NO: 5080420 - DNA, 25 bp, Homo sapien
ctagtggccctattgaggatttttc

SEQ ID NO: 5080421 - DNA, 25 bp, Homo sapien
gctctagtggccctattgaggattt

SEQ ID NO: 5080422 - DNA, 25 bp, Homo sapien
tttccaacaagtatgagattcctgt

SEQ ID NO: 5080423 - DNA, 25 bp, Homo sapien
cacaagagggcagtaggaagccacc

SEQ ID NO: 5080424 - DNA, 25 bp, Homo sapien
tcaactatgcaggtcctcggagcca

SEQ ID NO: 5080425 - DNA, 25 bp, Homo sapien
aacacattctgtctactccctggcg

SEQ ID NO: 5080426 - DNA, 25 bp, Homo sapien
cagactctgcccagtttgggtagaa

SEQ ID NO: 5080427 - DNA, 25 bp, Homo sapien
cctgagacctggtctaggctcttct

SEQ ID NO: 5080428 - DNA, 25 bp, Homo sapien
tctctgagtaaacctgaccatttca

SEQ ID NO: 5080429 - DNA, 25 bp, Homo sapien
gaccatttcaagctcattgtcagga

SEQ ID NO: 5080430 - DNA, 25 bp, Homo sapien
tctttgagtgataccaattgcctgt

SEQ ID NO: 5080431 - DNA, 25 bp, Homo sapien
tgtataacacatgcagcttctaaaa

SEQ ID NO: 5080432 - DNA, 25 bp, Homo sapien
gaagagctgccaattactaaccacc

SEQ ID NO: 5080433 - DNA, 25 bp, Homo sapien
gcttctaaaatgaagagctgccaat

SEQ ID NO: 5080434 - DNA, 25 bp, Homo sapien
aattactaaccaccccacactgaat

SEQ ID NO: 5080435 - DNA, 25 bp, Homo sapien
ttcatgctctggcttttgctacaga

SEQ ID NO: 5080436 - DNA, 25 bp, Homo sapien
tctttgggttcatgctctggctttt

SEQ ID NO: 5080437 - DNA, 25 bp, Homo sapien
gctctggcttttgctacagatgtct

SEQ ID NO: 5080438 - DNA, 25 bp, Homo sapien
ttcgcctctgtctttgggttcatgc

SEQ ID NO: 5080439 - DNA, 25 bp, Homo sapien
gggtgtgctaagctcttaagctctt

SEQ ID NO: 5080440 - DNA, 25 bp, Homo sapien
tcctgggggtgtgctaagctcttaa

SEQ ID NO: 5080441 - DNA, 25 bp, Homo sapien
aagctcttggggaggctcatccacc

SEQ ID NO: 5080442 - DNA, 25 bp, Homo sapien
tgtgctaagctcttaagctcttggg

SEQ ID NO: 5080443 - DNA, 25 bp, Homo sapien
tagcagaaagggaactgtttcagga

SEQ ID NO: 5080444 - DNA, 25 bp, Homo sapien
tgtagcagaaagggaactgtttcag

SEQ ID NO: 5080445 - DNA, 25 bp, Homo sapien
cagaaagggaactgtttcaggaaag

SEQ ID NO: 5080446 - DNA, 25 bp, Homo sapien
gcagaaagggaactgtttcaggaaa

SEQ ID NO: 5080447 - DNA, 25 bp, Homo sapien
tggtggctgtaactggtcatacctg

SEQ ID NO: 5080448 - DNA, 25 bp, Homo sapien
ctttccttatgtcttggtggctgta

SEQ ID NO: 5080449 - DNA, 25 bp, Homo sapien
gtggctgtaactggtcatacctgtg

SEQ ID NO: 5080450 - DNA, 25 bp, Homo sapien
cacactttccttatgtcttggtggc

SEQ ID NO: 5080451 - DNA, 25 bp, Homo sapien
tcatttgccagattcttcctgtcca

SEQ ID NO: 5080452 - DNA, 25 bp, Homo sapien
gccagattcttcctgtccaatattt

SEQ ID NO: 5080453 - DNA, 25 bp, Homo sapien
tttgccagattcttcctgtccaata

SEQ ID NO: 5080454 - DNA, 25 bp, Homo sapien
catttgccagattcttcctgtccaa

SEQ ID NO: 5080455 - DNA, 25 bp, Homo sapien
gactgggctacatttccatacattt

SEQ ID NO: 5080456 - DNA, 25 bp, Homo sapien
ttgagatgattgagatgctgactgg

SEQ ID NO: 5080457 - DNA, 25 bp, Homo sapien
cctgactggagtcaggctgacacat

SEQ ID NO: 5080458 - DNA, 25 bp, Homo sapien
ctgctgaactggagattgagatgat

SEQ ID NO: 5080459 - DNA, 25 bp, Homo sapien
aggagtgatggagaatatggctaac

SEQ ID NO: 5080460 - DNA, 25 bp, Homo sapien
agtgaagatggagaggagtgatgga

SEQ ID NO: 5080461 - DNA, 25 bp, Homo sapien
ggagaaggtgaagacagtgaagatg

SEQ ID NO: 5080462 - DNA, 25 bp, Homo sapien
gatggagaggagtgatggagaatat

SEQ ID NO: 5080463 - DNA, 25 bp, Homo sapien
gggagcatcgcaaccaaccagaaac

SEQ ID NO: 5080464 - DNA, 25 bp, Homo sapien
gcagccacctgaggaaccgtctttt

SEQ ID NO: 5080465 - DNA, 25 bp, Homo sapien
agaaacagggcacccggcatgccct

SEQ ID NO: 5080466 - DNA, 25 bp, Homo sapien
catccccaactcttcaggttaaggg

SEQ ID NO: 5080467 - DNA, 25 bp, Homo sapien
tattaaatctcttatgcggcattcg

SEQ ID NO: 5080468 - DNA, 25 bp, Homo sapien
tatcactggttttgctttgcaaggc

SEQ ID NO: 5080469 - DNA, 25 bp, Homo sapien
tgggagcatggaatcgtagagaaac

SEQ ID NO: 5080470 - DNA, 25 bp, Homo sapien
gcggcattcgtaattaagattgcag

SEQ ID NO: 5080471 - DNA, 25 bp, Homo sapien
cacatgaggcaaagcaacccttaag

SEQ ID NO: 5080472 - DNA, 25 bp, Homo sapien
ctttctcacatgaggcaaagcaacc

SEQ ID NO: 5080473 - DNA, 25 bp, Homo sapien
tctcacatgaggcaaagcaaccctt

SEQ ID NO: 5080474 - DNA, 25 bp, Homo sapien
gaggcaaagcaacccttaagaaaca

SEQ ID NO: 5080475 - DNA, 25 bp, Homo sapien
tctgccaggcttccaacaagaagag

SEQ ID NO: 5080476 - DNA, 25 bp, Homo sapien
gccaggcttccaacaagaagagaat

SEQ ID NO: 5080477 - DNA, 25 bp, Homo sapien
ctctgccaggcttccaacaagaaga

SEQ ID NO: 5080478 - DNA, 25 bp, Homo sapien
gagcaaaaagaatccttcctaccac

SEQ ID NO: 5080479 - DNA, 25 bp, Homo sapien
cttggatacaatccaaagtggaact

SEQ ID NO: 5080480 - DNA, 25 bp, Homo sapien
gcagtatttcggtgatgattcaaga

SEQ ID NO: 5080481 - DNA, 25 bp, Homo sapien
ttgctcagtggttttccgcagtatt

SEQ ID NO: 5080482 - DNA, 25 bp, Homo sapien
agtggttttccgcagtatttcggtg

SEQ ID NO: 5080483 - DNA, 25 bp, Homo sapien
tccgcagtatttcggtgatgattca

SEQ ID NO: 5080484 - DNA, 25 bp, Homo sapien
cacgactgaattaaaggcagacgcc

SEQ ID NO: 5080485 - DNA, 25 bp, Homo sapien
ggcagacgccttgcactaattactg

SEQ ID NO: 5080486 - DNA, 25 bp, Homo sapien
cctttctaggcacaaccttgcactt

SEQ ID NO: 5080487 - DNA, 25 bp, Homo sapien
cttgcactttactcctcacgactga

SEQ ID NO: 5080488 - DNA, 25 bp, Homo sapien
tctcgcgttgctgccactccgcacg

SEQ ID NO: 5080489 - DNA, 25 bp, Homo sapien
ccccagcgcgttccctctcgcgttg

SEQ ID NO: 5080490 - DNA, 25 bp, Homo sapien
ggaccgtgtgtctcggccgtcgcct

SEQ ID NO: 5080491 - DNA, 25 bp, Homo sapien
cgtcgcctcccttcgaagccggtcg

SEQ ID NO: 5080492 - DNA, 25 bp, Homo sapien
ttcactgcgccggcctttcagctgt

SEQ ID NO: 5080493 - DNA, 25 bp, Homo sapien
ctgtgttcactgcgccggcctttca

SEQ ID NO: 5080494 - DNA, 25 bp, Homo sapien
agtggcggacggacagtagccctgg

SEQ ID NO: 5080495 - DNA, 25 bp, Homo sapien
cgcgcagtggcggacggacagtagc

SEQ ID NO: 5080496 - DNA, 25 bp, Homo sapien
cgggaacgcagagcaccgctggcta

SEQ ID NO: 5080497 - DNA, 25 bp, Homo sapien
acacaccgacccggaagtgcagtcg

SEQ ID NO: 5080498 - DNA, 25 bp, Homo sapien
aagccactatgggccgctgctccag

SEQ ID NO: 5080499 - DNA, 25 bp, Homo sapien
aggctcaagcttcgccagggacaca

SEQ ID NO: 5080500 - DNA, 25 bp, Homo sapien
ccagaagggtccgcgtgcgaggaaa

SEQ ID NO: 5080501 - DNA, 25 bp, Homo sapien
gaagggtccgcgtgcgaggaaatac

SEQ ID NO: 5080502 - DNA, 25 bp, Homo sapien
agaagggtccgcgtgcgaggaaata

SEQ ID NO: 5080503 - DNA, 25 bp, Homo sapien
cagaagggtccgcgtgcgaggaaat

SEQ ID NO: 5080504 - DNA, 25 bp, Homo sapien
ctagcacagatattcattaacttca

SEQ ID NO: 5080505 - DNA, 25 bp, Homo sapien
gaaattacgccattattaagtgcga

SEQ ID NO: 5080506 - DNA, 25 bp, Homo sapien
attattaagtgcgaaaatggtgcca

SEQ ID NO: 5080507 - DNA, 25 bp, Homo sapien
aaatagaagagaaattacgccatta

SEQ ID NO: 5080508 - DNA, 25 bp, Homo sapien
tgcgaaaatggtgccaaaagatcaa

SEQ ID NO: 5080509 - DNA, 25 bp, Homo sapien
tcaactctttgtttgtggaataagg

SEQ ID NO: 5080510 - DNA, 25 bp, Homo sapien
caactctttgtttgtggaataaggc

SEQ ID NO: 5080511 - DNA, 25 bp, Homo sapien
gatgccaagtatcaactctttgttt

SEQ ID NO: 5080512 - DNA, 25 bp, Homo sapien
aagtatcaactctttgtttgtggaa

SEQ ID NO: 5080513 - DNA, 25 bp, Homo sapien
ttacggaccttgtggtaccacaaga

SEQ ID NO: 5080514 - DNA, 25 bp, Homo sapien
gtatttcatcttgcaaagttattga

SEQ ID NO: 5080515 - DNA, 25 bp, Homo sapien
aagattactgttgttccttggtcat

SEQ ID NO: 5080516 - DNA, 25 bp, Homo sapien
catcatgtatttcatcttgcaaagt

SEQ ID NO: 5080517 - DNA, 25 bp, Homo sapien
aaagattactgttgttccttggtca

SEQ ID NO: 5080518 - DNA, 25 bp, Homo sapien
cagtaattcgtttaacttctccagt

SEQ ID NO: 5080519 - DNA, 25 bp, Homo sapien
ctgtgctgagggcttatcttatgaa

SEQ ID NO: 5080520 - DNA, 25 bp, Homo sapien
ttgtcagtaattcgtttaacttctc

SEQ ID NO: 5080521 - DNA, 25 bp, Homo sapien
tgtgctgagggcttatcttatgaac

SEQ ID NO: 5080522 - DNA, 25 bp, Homo sapien
cacctgaaagtgacagcgagaatcg

SEQ ID NO: 5080523 - DNA, 25 bp, Homo sapien
tttggtgcacctgaaagtgacagcg

SEQ ID NO: 5080524 - DNA, 25 bp, Homo sapien
gcgagaatcgaaccaaggtggaaaa

SEQ ID NO: 5080525 - DNA, 25 bp, Homo sapien
gactccaggaaacatgggactatct

SEQ ID NO: 5080526 - DNA, 25 bp, Homo sapien
tcttcccatgctacacattgtgctt

SEQ ID NO: 5080527 - DNA, 25 bp, Homo sapien
cacagcatccagcttcataaacata

SEQ ID NO: 5080528 - DNA, 25 bp, Homo sapien
tacacattgtgcttgagcaatggca

SEQ ID NO: 5080529 - DNA, 25 bp, Homo sapien
tccacttcttcagtactggttccag

SEQ ID NO: 5080530 - DNA, 25 bp, Homo sapien
caacggcctcatctccaggttatga

SEQ ID NO: 5080531 - DNA, 25 bp, Homo sapien
cacctgttggcatgaccatatgacc

SEQ ID NO: 5080532 - DNA, 25 bp, Homo sapien
caaggtgaccgtgcagagcaaagat

SEQ ID NO: 5080533 - DNA, 25 bp, Homo sapien
catatgaccatcgttttttcttagg

SEQ ID NO: 5080534 - DNA, 25 bp, Homo sapien
cccctaggatactgttgtagagcat

SEQ ID NO: 5080535 - DNA, 25 bp, Homo sapien
tgtagagcattctgacaccgtgtac

SEQ ID NO: 5080536 - DNA, 25 bp, Homo sapien
attcagcaggtatttcatatgcacc

SEQ ID NO: 5080537 - DNA, 25 bp, Homo sapien
gagaggtcaagtctgaattcagcag

SEQ ID NO: 5080538 - DNA, 25 bp, Homo sapien
cacccctgtactactaactccttct

SEQ ID NO: 5080539 - DNA, 25 bp, Homo sapien
cacacccctgtactactaactcctt

SEQ ID NO: 5080540 - DNA, 25 bp, Homo sapien
cctgtactactaactccttcttctt

SEQ ID NO: 5080541 - DNA, 25 bp, Homo sapien
gccttccacacccctgtactactaa

SEQ ID NO: 5080542 - DNA, 25 bp, Homo sapien
aacatatatgacagctgtacaatcc

SEQ ID NO: 5080543 - DNA, 25 bp, Homo sapien
tatgacagctgtacaatcctttacc

SEQ ID NO: 5080544 - DNA, 25 bp, Homo sapien
tgtacaatcctttaccttggaccat

SEQ ID NO: 5080545 - DNA, 25 bp, Homo sapien
gacagctgtacaatcctttaccttg

SEQ ID NO: 5080546 - DNA, 25 bp, Homo sapien
tctccgaagttggaattcacatggc

SEQ ID NO: 5080547 - DNA, 25 bp, Homo sapien
gaggagtcatccaacaaatccaggg

SEQ ID NO: 5080548 - DNA, 25 bp, Homo sapien
ctgtggaatgtgtttctaccttcac

SEQ ID NO: 5080549 - DNA, 25 bp, Homo sapien
tgtgtttctaccttcactgttggag

SEQ ID NO: 5080550 - DNA, 25 bp, Homo sapien
tgtagaggtggaacaggtcagaaga

SEQ ID NO: 5080551 - DNA, 25 bp, Homo sapien
gtcagaagactgaatgctcaagctg

SEQ ID NO: 5080552 - DNA, 25 bp, Homo sapien
cagaagactgaatgctcaagctgca

SEQ ID NO: 5080553 - DNA, 25 bp, Homo sapien
agactgaatgctcaagctgcatgtg

SEQ ID NO: 5080554 - DNA, 25 bp, Homo sapien
taatccaaagtaagtctctcccttc

SEQ ID NO: 5080555 - DNA, 25 bp, Homo sapien
ctaggccgtcatccttaagccataa

SEQ ID NO: 5080556 - DNA, 25 bp, Homo sapien
tctaggccgtcatccttaagccata

SEQ ID NO: 5080557 - DNA, 25 bp, Homo sapien
ttctaggccgtcatccttaagccat

SEQ ID NO: 5080558 - DNA, 25 bp, Homo sapien
tggaagctctggtcctctttgcagc

SEQ ID NO: 5080559 - DNA, 25 bp, Homo sapien
ttctggagaacatcgttggaagctc

SEQ ID NO: 5080560 - DNA, 25 bp, Homo sapien
gaacatcgttggaagctctggtcct

SEQ ID NO: 5080561 - DNA, 25 bp, Homo sapien
ttgatcttctggagaacatcgttgg

SEQ ID NO: 5080562 - DNA, 25 bp, Homo sapien
aagctaccacaatggtctgaggaag

SEQ ID NO: 5080563 - DNA, 25 bp, Homo sapien
caagagatatacttggttgtgaaat

SEQ ID NO: 5080564 - DNA, 25 bp, Homo sapien
gatggacttgatacagataataacc

SEQ ID NO: 5080565 - DNA, 25 bp, Homo sapien
taagatgttttatgaccaagagata

SEQ ID NO: 5080566 - DNA, 25 bp, Homo sapien
gaggctgtatcaatagtgttcccaa

SEQ ID NO: 5080567 - DNA, 25 bp, Homo sapien
tctggccacttgcttgaggatcaaa

SEQ ID NO: 5080568 - DNA, 25 bp, Homo sapien
gctgtaactttcaggacgaggatga

SEQ ID NO: 5080569 - DNA, 25 bp, Homo sapien
catgattggagaatgacctgtgctg

SEQ ID NO: 5080570 - DNA, 25 bp, Homo sapien
gtcttcatcttgaaacaagacagca

SEQ ID NO: 5080571 - DNA, 25 bp, Homo sapien
tcttcatcttgaaacaagacagcaa

SEQ ID NO: 5080572 - DNA, 25 bp, Homo sapien
ccttctaagagagggtaaagtctga

SEQ ID NO: 5080573 - DNA, 25 bp, Homo sapien
aactatttgaggtgcccttctaaga

SEQ ID NO: 5080574 - DNA, 25 bp, Homo sapien
atgcagtgaagctttgtgaggaaag

SEQ ID NO: 5080575 - DNA, 25 bp, Homo sapien
caatgtaggaatcttcttcagaaaa

SEQ ID NO: 5080576 - DNA, 25 bp, Homo sapien
agaaatctgagattagcccatcttt

SEQ ID NO: 5080577 - DNA, 25 bp, Homo sapien
ggataacagagattgcagattaact

SEQ ID NO: 5080578 - DNA, 25 bp, Homo sapien
gataacagagattgcagattaactt

SEQ ID NO: 5080579 - DNA, 25 bp, Homo sapien
aataaccatatcaatcaagcagaag

SEQ ID NO: 5080580 - DNA, 25 bp, Homo sapien
acaagtatcaataaccatatcaatc

SEQ ID NO: 5080581 - DNA, 25 bp, Homo sapien
gattggactggtaaggccatatttc

SEQ ID NO: 5080582 - DNA, 25 bp, Homo sapien
catctcctgttatgattccttaaag

SEQ ID NO: 5080583 - DNA, 25 bp, Homo sapien
aaatgaggactctaaggtggaagcc

SEQ ID NO: 5080584 - DNA, 25 bp, Homo sapien
tcaggattggactggtaaggccata

SEQ ID NO: 5080585 - DNA, 25 bp, Homo sapien
ttgtggtcacgaagtagttcaaaac

SEQ ID NO: 5080586 - DNA, 25 bp, Homo sapien
gacttgccagactcactcatacgta

SEQ ID NO: 5080587 - DNA, 25 bp, Homo sapien
agttcaaaactctccgacttgccag

SEQ ID NO: 5080588 - DNA, 25 bp, Homo sapien
tcctctacacgtgtgttaaatgcct

SEQ ID NO: 5080589 - DNA, 25 bp, Homo sapien
tcttgtgtgtttgtagatagttcat

SEQ ID NO: 5080590 - DNA, 25 bp, Homo sapien
gagcaaatcgccacataaactctat

SEQ ID NO: 5080591 - DNA, 25 bp, Homo sapien
gatagttcatacatgtctccataag

SEQ ID NO: 5080592 - DNA, 25 bp, Homo sapien
tacatgtctccataagcacgagcaa

SEQ ID NO: 5080593 - DNA, 25 bp, Homo sapien
tcatgggtgctctattaatagctct

SEQ ID NO: 5080594 - DNA, 25 bp, Homo sapien
attcatgggtgctctattaatagct

SEQ ID NO: 5080595 - DNA, 25 bp, Homo sapien
catgggtgctctattaatagctctt

SEQ ID NO: 5080596 - DNA, 25 bp, Homo sapien
ttcatgggtgctctattaatagctc

SEQ ID NO: 5080597 - DNA, 25 bp, Homo sapien
tacatagccacacaaaactgcatac

SEQ ID NO: 5080598 - DNA, 25 bp, Homo sapien
ccctcaaactcagatacatagccac

SEQ ID NO: 5080599 - DNA, 25 bp, Homo sapien
aaccctcaaactcagatacatagcc

SEQ ID NO: 5080600 - DNA, 25 bp, Homo sapien
aaaccctcaaactcagatacatagc

SEQ ID NO: 5080601 - DNA, 25 bp, Homo sapien
taatatagaaagggttcctctggta

SEQ ID NO: 5080602 - DNA, 25 bp, Homo sapien
aggtaatatagaaagggttcctctg

SEQ ID NO: 5080603 - DNA, 25 bp, Homo sapien
aaagtttgattgctatatctagatg

SEQ ID NO: 5080604 - DNA, 25 bp, Homo sapien
gtttgattgctatatctagatgttc

SEQ ID NO: 5080605 - DNA, 25 bp, Homo sapien
ggaactggtattcttgctttgtttc

SEQ ID NO: 5080606 - DNA, 25 bp, Homo sapien
cagtacttggaactggtattcttgc

SEQ ID NO: 5080607 - DNA, 25 bp, Homo sapien
ctttggctgttccccttattgttat

SEQ ID NO: 5080608 - DNA, 25 bp, Homo sapien
acttggaactggtattcttgctttg

SEQ ID NO: 5080609 - DNA, 25 bp, Homo sapien
caattgctctatatcctcgctggta

SEQ ID NO: 5080610 - DNA, 25 bp, Homo sapien
tgctcatgctgctcatctatccgat

SEQ ID NO: 5080611 - DNA, 25 bp, Homo sapien
tatgcttgcttaccactcacagact

SEQ ID NO: 5080612 - DNA, 25 bp, Homo sapien
gttataaagactgcctgacatcatg

SEQ ID NO: 5080613 - DNA, 25 bp, Homo sapien
tgtgaggctccaatgttttacaaac

SEQ ID NO: 5080614 - DNA, 25 bp, Homo sapien
tagtagtagtagtcatcccctcttc

SEQ ID NO: 5080615 - DNA, 25 bp, Homo sapien
tttcacagcctcatatatggtccat

SEQ ID NO: 5080616 - DNA, 25 bp, Homo sapien
tctccaatggttagccacatggctt

SEQ ID NO: 5080617 - DNA, 25 bp, Homo sapien
tggatcataccgtacagcggcacga

SEQ ID NO: 5080618 - DNA, 25 bp, Homo sapien
ggttcccaaggtagtcgcgctgatt

SEQ ID NO: 5080619 - DNA, 25 bp, Homo sapien
ctctgtagggtaggcacgatcacat

SEQ ID NO: 5080620 - DNA, 25 bp, Homo sapien
tatccttgaaacacctcatactgag

SEQ ID NO: 5080621 - DNA, 25 bp, Homo sapien
tctcaatccagctcagttttgagac

SEQ ID NO: 5080622 - DNA, 25 bp, Homo sapien
tttttctcaatccagctcagttttg

SEQ ID NO: 5080623 - DNA, 25 bp, Homo sapien
tttctcaatccagctcagttttgag

SEQ ID NO: 5080624 - DNA, 25 bp, Homo sapien
ttttttctcaatccagctcagtttt

SEQ ID NO: 5080625 - DNA, 25 bp, Homo sapien
ttgtgtaaagcttcttgtacagttg

SEQ ID NO: 5080626 - DNA, 25 bp, Homo sapien
tgtaaagcttcttgtacagttgaag

SEQ ID NO: 5080627 - DNA, 25 bp, Homo sapien
aagcttcttgtacagttgaagatgg

SEQ ID NO: 5080628 - DNA, 25 bp, Homo sapien
gcttcttgtacagttgaagatggta

SEQ ID NO: 5080629 - DNA, 25 bp, Homo sapien
aagatttccttgacaacggcagcag

SEQ ID NO: 5080630 - DNA, 25 bp, Homo sapien
ttaggctaatcaggaggactgggac

SEQ ID NO: 5080631 - DNA, 25 bp, Homo sapien
gaatactgatttggtctgatacccc

SEQ ID NO: 5080632 - DNA, 25 bp, Homo sapien
catcagggcgtgactgtttctgcac

SEQ ID NO: 5080633 - DNA, 25 bp, Homo sapien
cagagccttgaccatcctacagtgg

SEQ ID NO: 5080634 - DNA, 25 bp, Homo sapien
tgtctgggcgtggaatgaaacctgc

SEQ ID NO: 5080635 - DNA, 25 bp, Homo sapien
taagaccaggtaggttaacagtgtc

SEQ ID NO: 5080636 - DNA, 25 bp, Homo sapien
aatcagggtgctaagaagtggtcca

SEQ ID NO: 5080637 - DNA, 25 bp, Homo sapien
tgctaagtacatgtaattgggatta

SEQ ID NO: 5080638 - DNA, 25 bp, Homo sapien
aataaccagggcatagttcttcagc

SEQ ID NO: 5080639 - DNA, 25 bp, Homo sapien
taagtacatgtaattgggattagaa

SEQ ID NO: 5080640 - DNA, 25 bp, Homo sapien
tagaataaccagggcatagttcttc

SEQ ID NO: 5080641 - DNA, 25 bp, Homo sapien
cattctggttttcctcaagatcagt

SEQ ID NO: 5080642 - DNA, 25 bp, Homo sapien
ctctttggtaacagtaggaagcaat

SEQ ID NO: 5080643 - DNA, 25 bp, Homo sapien
taacagtaggaagcaataaagccaa

SEQ ID NO: 5080644 - DNA, 25 bp, Homo sapien
ggttttcctcaagatcagtataaca

SEQ ID NO: 5080645 - DNA, 25 bp, Homo sapien
tagcaccatgccacacttattccaa

SEQ ID NO: 5080646 - DNA, 25 bp, Homo sapien
ttagcaccatgccacacttattcca

SEQ ID NO: 5080647 - DNA, 25 bp, Homo sapien
cttagcaccatgccacacttattcc

SEQ ID NO: 5080648 - DNA, 25 bp, Homo sapien
tcttagcaccatgccacacttattc

SEQ ID NO: 5080649 - DNA, 25 bp, Homo sapien
tttgctgctcacgaatatccactgt

SEQ ID NO: 5080650 - DNA, 25 bp, Homo sapien
caacatttgctgctcacgaatatcc

SEQ ID NO: 5080651 - DNA, 25 bp, Homo sapien
ctgacacctcagatgcccgggtact

SEQ ID NO: 5080652 - DNA, 25 bp, Homo sapien
catttgctgctcacgaatatccact

SEQ ID NO: 5080653 - DNA, 25 bp, Homo sapien
aataggggacagaagacatgtccac

SEQ ID NO: 5080654 - DNA, 25 bp, Homo sapien
ctaataggggacagaagacatgtcc

SEQ ID NO: 5080655 - DNA, 25 bp, Homo sapien
ggacagaagacatgtccacaaatgc

SEQ ID NO: 5080656 - DNA, 25 bp, Homo sapien
taggggacagaagacatgtccacaa

SEQ ID NO: 5080657 - DNA, 25 bp, Homo sapien
tactaagagcagttaccaatgagag

SEQ ID NO: 5080658 - DNA, 25 bp, Homo sapien
taggaataattctccaggcacggat

SEQ ID NO: 5080659 - DNA, 25 bp, Homo sapien
gagacccatttattaccctgagctg

SEQ ID NO: 5080660 - DNA, 25 bp, Homo sapien
tacaggattttgacaagagacccat

SEQ ID NO: 5080661 - DNA, 25 bp, Homo sapien
tcctggaaaaagctcgccactttct

SEQ ID NO: 5080662 - DNA, 25 bp, Homo sapien
ccctaattcaggacattgacagtgt

SEQ ID NO: 5080663 - DNA, 25 bp, Homo sapien
tctagcatgctgaaacagacttaca

SEQ ID NO: 5080664 - DNA, 25 bp, Homo sapien
catgagggtacgtgcaatcaccaaa

SEQ ID NO: 5080665 - DNA, 25 bp, Homo sapien
agtcattattttttgcatctctttc

SEQ ID NO: 5080666 - DNA, 25 bp, Homo sapien
tattttttgcatctctttctgtgcc

SEQ ID NO: 5080667 - DNA, 25 bp, Homo sapien
tttttgcatctctttctgtgcctct

SEQ ID NO: 5080668 - DNA, 25 bp, Homo sapien
gcatctctttctgtgcctctttatc

SEQ ID NO: 5080669 - DNA, 25 bp, Homo sapien
gctactagtggaatgcattctgcag

SEQ ID NO: 5080670 - DNA, 25 bp, Homo sapien
tattcttaaggctgcagtttattga

SEQ ID NO: 5080671 - DNA, 25 bp, Homo sapien
gcacaatacccttacatcaaaaatg

SEQ ID NO: 5080672 - DNA, 25 bp, Homo sapien
agaccacatctgatttgttgaagag

SEQ ID NO: 5080673 - DNA, 25 bp, Homo sapien
tcacatcttttgattaccagttaca

SEQ ID NO: 5080674 - DNA, 25 bp, Homo sapien
ttgtcttacgaagtctccattgaaa

SEQ ID NO: 5080675 - DNA, 25 bp, Homo sapien
attattttgtcttacgaagtctcca

SEQ ID NO: 5080676 - DNA, 25 bp, Homo sapien
tattttgtcttacgaagtctccatt

SEQ ID NO: 5080677 - DNA, 25 bp, Homo sapien
tccacgagagaacctgcaagactct

SEQ ID NO: 5080678 - DNA, 25 bp, Homo sapien
catagcctctcagcatatccacgag

SEQ ID NO: 5080679 - DNA, 25 bp, Homo sapien
ctgtttagagatagccagaggtatc

SEQ ID NO: 5080680 - DNA, 25 bp, Homo sapien
tagagatagccagaggtatccatag

SEQ ID NO: 5080681 - DNA, 25 bp, Homo sapien
tcatccaatgaagggtgtaacagta

SEQ ID NO: 5080682 - DNA, 25 bp, Homo sapien
catatgtggtctgtacttcatccaa

SEQ ID NO: 5080683 - DNA, 25 bp, Homo sapien
gactcattgtctgatactgcttggc

SEQ ID NO: 5080684 - DNA, 25 bp, Homo sapien
gagtatcatgaatttggtctaaggc

SEQ ID NO: 5080685 - DNA, 25 bp, Homo sapien
taatttaagacattgtatggctctg

SEQ ID NO: 5080686 - DNA, 25 bp, Homo sapien
agccacctgggcttagtcttcacag

SEQ ID NO: 5080687 - DNA, 25 bp, Homo sapien
gtggttattttctcgctgtgcaggc

SEQ ID NO: 5080688 - DNA, 25 bp, Homo sapien
caagaattccctaaggacattacat

SEQ ID NO: 5080689 - DNA, 25 bp, Homo sapien
gatgctcttctcagcagaagtggga

SEQ ID NO: 5080690 - DNA, 25 bp, Homo sapien
ttctcagcagaagtgggataagagc

SEQ ID NO: 5080691 - DNA, 25 bp, Homo sapien
cagaagtgggataagagctgacaca

SEQ ID NO: 5080692 - DNA, 25 bp, Homo sapien
tcacggctgaaggatgctcttctca

SEQ ID NO: 5080693 - DNA, 25 bp, Homo sapien
gtcatttcgtgtcattcttacataa

SEQ ID NO: 5080694 - DNA, 25 bp, Homo sapien
gggcacagtaggaagaagcattctc

SEQ ID NO: 5080695 - DNA, 25 bp, Homo sapien
gcacagtaggaagaagcattctcat

SEQ ID NO: 5080696 - DNA, 25 bp, Homo sapien
atctgtcatttcgtgtcattcttac

SEQ ID NO: 5080697 - DNA, 25 bp, Homo sapien
gaaatagacaataaagccaccagga

SEQ ID NO: 5080698 - DNA, 25 bp, Homo sapien
aaagccaccaggatacctgagacag

SEQ ID NO: 5080699 - DNA, 25 bp, Homo sapien
aagccaccaggatacctgagacagc

SEQ ID NO: 5080700 - DNA, 25 bp, Homo sapien
agacaataaagccaccaggatacct

SEQ ID NO: 5080701 - DNA, 25 bp, Homo sapien
taagtagcctgaagagtctctgtcc

SEQ ID NO: 5080702 - DNA, 25 bp, Homo sapien
ccagggtatgaggataaagagcaac

SEQ ID NO: 5080703 - DNA, 25 bp, Homo sapien
gcccattgctgagcctgtctctgca

SEQ ID NO: 5080704 - DNA, 25 bp, Homo sapien
accaagttcttctatgtgggcagct

SEQ ID NO: 5080705 - DNA, 25 bp, Homo sapien
gccacaggtaatcctgaaagcttcc

SEQ ID NO: 5080706 - DNA, 25 bp, Homo sapien
tcagggaatggggacaaggataaat

SEQ ID NO: 5080707 - DNA, 25 bp, Homo sapien
cacaatagctctcctgtgcccctct

SEQ ID NO: 5080708 - DNA, 25 bp, Homo sapien
ggtaatttctaggacacaatagctc

SEQ ID NO: 5080709 - DNA, 25 bp, Homo sapien
tccagatgtgttgactccaactctg

SEQ ID NO: 5080710 - DNA, 25 bp, Homo sapien
tgactccaactctgagtcttcaggt

SEQ ID NO: 5080711 - DNA, 25 bp, Homo sapien
tttacagaggtagtctagatccaca

SEQ ID NO: 5080712 - DNA, 25 bp, Homo sapien
ggttctgttgtttgtcggaggtcat

SEQ ID NO: 5080713 - DNA, 25 bp, Homo sapien
tgcttcttctgcagatcagtcccaa

SEQ ID NO: 5080714 - DNA, 25 bp, Homo sapien
cagatcagtcccaaaggtagcagat

SEQ ID NO: 5080715 - DNA, 25 bp, Homo sapien
ttgcttcttctgcagatcagtccca

SEQ ID NO: 5080716 - DNA, 25 bp, Homo sapien
caaaggtagcagatttcactgggaa

SEQ ID NO: 5080717 - DNA, 25 bp, Homo sapien
ggtttgccaactcatagatttgtag

SEQ ID NO: 5080718 - DNA, 25 bp, Homo sapien
gacagtgctaataatctccacccct

SEQ ID NO: 5080719 - DNA, 25 bp, Homo sapien
tccctgcctctaagttgcgacagtg

SEQ ID NO: 5080720 - DNA, 25 bp, Homo sapien
ccatgtgggatggtgcagtccagat

SEQ ID NO: 5080721 - DNA, 25 bp, Homo sapien
tgtattctatattaagtgtgggctt

SEQ ID NO: 5080722 - DNA, 25 bp, Homo sapien
tgtccagagtcgtgcactgggtagt

SEQ ID NO: 5080723 - DNA, 25 bp, Homo sapien
atggtccagtagtgaggtgtccaga

SEQ ID NO: 5080724 - DNA, 25 bp, Homo sapien
ctatattaagtgtgggcttgaagag

SEQ ID NO: 5080725 - DNA, 25 bp, Homo sapien
gatgacagggcttgcggtaccaaag

SEQ ID NO: 5080726 - DNA, 25 bp, Homo sapien
acactcacagatgacagggcttgcg

SEQ ID NO: 5080727 - DNA, 25 bp, Homo sapien
tcacagatgacagggcttgcggtac

SEQ ID NO: 5080728 - DNA, 25 bp, Homo sapien
ggcttgcggtaccaaaggctcttta

SEQ ID NO: 5080729 - DNA, 25 bp, Homo sapien
tctcattacttatactgggacacca

SEQ ID NO: 5080730 - DNA, 25 bp, Homo sapien
cagtgcatagttgtagacaaagtac

SEQ ID NO: 5080731 - DNA, 25 bp, Homo sapien
tagcctttactgtttgatataccaa

SEQ ID NO: 5080732 - DNA, 25 bp, Homo sapien
agtgtgtgcataatagctacagtgc

SEQ ID NO: 5080733 - DNA, 25 bp, Homo sapien
tatgtcaaccaggtccagatgtgct

SEQ ID NO: 5080734 - DNA, 25 bp, Homo sapien
tgtaggcccagtcgtcatcagatgc

SEQ ID NO: 5080735 - DNA, 25 bp, Homo sapien
tcattgtgtttctaccggagagaga

SEQ ID NO: 5080736 - DNA, 25 bp, Homo sapien
catcagatgcttgcggcaaaaggaa

SEQ ID NO: 5080737 - DNA, 25 bp, Homo sapien
gaagcagtattttggtaaccaggcc

SEQ ID NO: 5080738 - DNA, 25 bp, Homo sapien
taaaactccaaggtgatgttgtacc

SEQ ID NO: 5080739 - DNA, 25 bp, Homo sapien
caagattggtctcccatatgcagaa

SEQ ID NO: 5080740 - DNA, 25 bp, Homo sapien
tacaactaacgcaaccaagtgtgct

SEQ ID NO: 5080741 - DNA, 25 bp, Homo sapien
tgctcagccacaacgaagagttcgg

SEQ ID NO: 5080742 - DNA, 25 bp, Homo sapien
gttttccgcgaattcgagcagctca

SEQ ID NO: 5080743 - DNA, 25 bp, Homo sapien
ttgaggcactgcgaaagccttcggc

SEQ ID NO: 5080744 - DNA, 25 bp, Homo sapien
gatttggagaacgtaccggccacta

SEQ ID NO: 5080745 - DNA, 25 bp, Homo sapien
tttccgggaagcaagctcaagtcgc

SEQ ID NO: 5080746 - DNA, 25 bp, Homo sapien
gcacaatggaaacgtgggcacctcc

SEQ ID NO: 5080747 - DNA, 25 bp, Homo sapien
cccagattgcaggaaccgttacgcg

SEQ ID NO: 5080748 - DNA, 25 bp, Homo sapien
gagttaaagcttccagtgagggcag

SEQ ID NO: 5080749 - DNA, 25 bp, Homo sapien
ctttgtgtgcccaagcactgtcggg

SEQ ID NO: 5080750 - DNA, 25 bp, Homo sapien
cctctacgcgggaaatctcagggcc

SEQ ID NO: 5080751 - DNA, 25 bp, Homo sapien
aatttagcatgccaaagagcctcca

SEQ ID NO: 5080752 - DNA, 25 bp, Homo sapien
taaagttcgccggagcgcggagatt

SEQ ID NO: 5080753 - DNA, 25 bp, Homo sapien
ctccgcacgcaaaggggaggcgaca

SEQ ID NO: 5080754 - DNA, 25 bp, Homo sapien
gccgactttccagaagcggcgcacg

SEQ ID NO: 5080755 - DNA, 25 bp, Homo sapien
tccgcgtgtcaggtgccgtgagaag

SEQ ID NO: 5080756 - DNA, 25 bp, Homo sapien
agggatatgactggagccgactttc

SEQ ID NO: 5080757 - DNA, 25 bp, Homo sapien
cgccaagggtggtggtggccggcac

SEQ ID NO: 5080758 - DNA, 25 bp, Homo sapien
aggaagaccacagagccgccggtgc

SEQ ID NO: 5080759 - DNA, 25 bp, Homo sapien
gcctcgtgaagtccttgttctctta

SEQ ID NO: 5080760 - DNA, 25 bp, Homo sapien
tacaattcctacctggttaaccaga

SEQ ID NO: 5080761 - DNA, 25 bp, Homo sapien
tcttgaaaatcctatgcatcagcat

SEQ ID NO: 5080762 - DNA, 25 bp, Homo sapien
tattcatctgtaaacaggtcaataa

SEQ ID NO: 5080763 - DNA, 25 bp, Homo sapien
ccctagtttattcatctgtaaacag

SEQ ID NO: 5080764 - DNA, 25 bp, Homo sapien
accctagtttattcatctgtaaaca

SEQ ID NO: 5080765 - DNA, 25 bp, Homo sapien
gtttattcatctgtaaacaggtcaa

SEQ ID NO: 5080766 - DNA, 25 bp, Homo sapien
agctccaaatcataccctcaacttt

SEQ ID NO: 5080767 - DNA, 25 bp, Homo sapien
cattttacatctccgaaatctggat

SEQ ID NO: 5080768 - DNA, 25 bp, Homo sapien
gatgtatcttagagtcgatgatgca

SEQ ID NO: 5080769 - DNA, 25 bp, Homo sapien
tgtataatgctttgtcagctccaaa

SEQ ID NO: 5080770 - DNA, 25 bp, Homo sapien
ggctatacttagagaccatttagca

SEQ ID NO: 5080771 - DNA, 25 bp, Homo sapien
gaggaaacagccttgaaatgtaggc

SEQ ID NO: 5080772 - DNA, 25 bp, Homo sapien
cagacacagaatgtctaccccaaat

SEQ ID NO: 5080773 - DNA, 25 bp, Homo sapien
catttagcagtctggcgtggctagg

SEQ ID NO: 5080774 - DNA, 25 bp, Homo sapien
ttgcagatattttaacacatgcttg

SEQ ID NO: 5080775 - DNA, 25 bp, Homo sapien
tgtatatttaagattgtcctctcta

SEQ ID NO: 5080776 - DNA, 25 bp, Homo sapien
tctctaaacatttggatatccatgt

SEQ ID NO: 5080777 - DNA, 25 bp, Homo sapien
tggatatccatgtaacactgccttt

SEQ ID NO: 5080778 - DNA, 25 bp, Homo sapien
acaactagttggagaatagcctcac

SEQ ID NO: 5080779 - DNA, 25 bp, Homo sapien
tcactctgacgttggaggcaaagcc

SEQ ID NO: 5080780 - DNA, 25 bp, Homo sapien
tagtgctgaaactgcatgtggagcc

SEQ ID NO: 5080781 - DNA, 25 bp, Homo sapien
tacttgtcaggatcccttagtgctg

SEQ ID NO: 5080782 - DNA, 25 bp, Homo sapien
tagaatgtaggcaccacctgggacc

SEQ ID NO: 5080783 - DNA, 25 bp, Homo sapien
ggagctcatcagtttttgggttcag

SEQ ID NO: 5080784 - DNA, 25 bp, Homo sapien
taagggtgctcgtctggcagggtct

SEQ ID NO: 5080785 - DNA, 25 bp, Homo sapien
ctttttcacgtctttggagctcatc

SEQ ID NO: 5080786 - DNA, 25 bp, Homo sapien
taaaaaagctgcaacatcaggcggg

SEQ ID NO: 5080787 - DNA, 25 bp, Homo sapien
tgccctggcagctaagaatgtacgg

SEQ ID NO: 5080788 - DNA, 25 bp, Homo sapien
gatggcacgatcctttgatgaaagg

SEQ ID NO: 5080789 - DNA, 25 bp, Homo sapien
gaaaagctaagctgaccctgtgtca

SEQ ID NO: 5080790 - DNA, 25 bp, Homo sapien
aattattatttcttcgtactccttg

SEQ ID NO: 5080791 - DNA, 25 bp, Homo sapien
tatctctgctcagccggtgagccat

SEQ ID NO: 5080792 - DNA, 25 bp, Homo sapien
gtactccttgctcacaatccaggct

SEQ ID NO: 5080793 - DNA, 25 bp, Homo sapien
ccagtgcaactctatctctgctcag

SEQ ID NO: 5080794 - DNA, 25 bp, Homo sapien
tccgtgtctactaaaggtctgattc

SEQ ID NO: 5080795 - DNA, 25 bp, Homo sapien
tgtatttgaagagctccgtgtctac

SEQ ID NO: 5080796 - DNA, 25 bp, Homo sapien
tgtctactaaaggtctgattcccta

SEQ ID NO: 5080797 - DNA, 25 bp, Homo sapien
ctctgtatttgaagagctccgtgtc

SEQ ID NO: 5080798 - DNA, 25 bp, Homo sapien
ggagacgaactaaaccatcatggag

SEQ ID NO: 5080799 - DNA, 25 bp, Homo sapien
catggagactaactaaaccagatgc

SEQ ID NO: 5080800 - DNA, 25 bp, Homo sapien
cagatgcatctagcccctcatgtta

SEQ ID NO: 5080801 - DNA, 25 bp, Homo sapien
aattcacaggatcatggagacgaac

SEQ ID NO: 5080802 - DNA, 25 bp, Homo sapien
agtggccacataaacagtccctacg

SEQ ID NO: 5080803 - DNA, 25 bp, Homo sapien
gcctgcatgatggtgagtggccaca

SEQ ID NO: 5080804 - DNA, 25 bp, Homo sapien
tggtgagtggccacataaacagtcc

SEQ ID NO: 5080805 - DNA, 25 bp, Homo sapien
taaacagtccctacgtctccaggag

SEQ ID NO: 5080806 - DNA, 25 bp, Homo sapien
gctcaaaagtcaccagtgccgattc

SEQ ID NO: 5080807 - DNA, 25 bp, Homo sapien
tgttaggaaaggatgattgatggct

SEQ ID NO: 5080808 - DNA, 25 bp, Homo sapien
tcatgtgttaggaaaggatgattga

SEQ ID NO: 5080809 - DNA, 25 bp, Homo sapien
ccgattcttgtgttagcaaccatag

SEQ ID NO: 5080810 - DNA, 25 bp, Homo sapien
caggcatctggcatgcccatttctt

SEQ ID NO: 5080811 - DNA, 25 bp, Homo sapien
gcagggggtcttgactatttgagac

SEQ ID NO: 5080812 - DNA, 25 bp, Homo sapien
agagcaggatagaagctcctcccag

SEQ ID NO: 5080813 - DNA, 25 bp, Homo sapien
ttccacagagcaggatagaagctcc

SEQ ID NO: 5080814 - DNA, 25 bp, Homo sapien
gaaggggctctctgccacaacttgg

SEQ ID NO: 5080815 - DNA, 25 bp, Homo sapien
ggtaggccacatagcctgagttatg

SEQ ID NO: 5080816 - DNA, 25 bp, Homo sapien
gaatctaactccagtctgtcttcca

SEQ ID NO: 5080817 - DNA, 25 bp, Homo sapien
tagcctgagaggcatattctgaagc

SEQ ID NO: 5080818 - DNA, 25 bp, Homo sapien
taagaaatgctctacgcaatttgga

SEQ ID NO: 5080819 - DNA, 25 bp, Homo sapien
tttggaacttggcagttcacaccac

SEQ ID NO: 5080820 - DNA, 25 bp, Homo sapien
aagcccaactacgttaagaaatgct

SEQ ID NO: 5080821 - DNA, 25 bp, Homo sapien
taaggtatgcacactctcaaaagaa

SEQ ID NO: 5080822 - DNA, 25 bp, Homo sapien
ccccagactatttactggattttca

SEQ ID NO: 5080823 - DNA, 25 bp, Homo sapien
cagactatttactggattttcacct

SEQ ID NO: 5080824 - DNA, 25 bp, Homo sapien
tttcacctttataagctatcaccat

SEQ ID NO: 5080825 - DNA, 25 bp, Homo sapien
ttttcacctttataagctatcacca

SEQ ID NO: 5080826 - DNA, 25 bp, Homo sapien
ccttgtgaaggggccgtgctaatgt

SEQ ID NO: 5080827 - DNA, 25 bp, Homo sapien
tgaaggggccgtgctaatgttctct

SEQ ID NO: 5080828 - DNA, 25 bp, Homo sapien
aaattatggaatgctgcataaattt

SEQ ID NO: 5080829 - DNA, 25 bp, Homo sapien
aattatggaatgctgcataaatttg

SEQ ID NO: 5080830 - DNA, 25 bp, Homo sapien
gggaataagtataggacgcaacagg

SEQ ID NO: 5080831 - DNA, 25 bp, Homo sapien
tataggacgcaacaggtggcactcc

SEQ ID NO: 5080832 - DNA, 25 bp, Homo sapien
tctagtgatccccagtgcctattgt

SEQ ID NO: 5080833 - DNA, 25 bp, Homo sapien
gtaaattgcatcaccctgaggcttg

SEQ ID NO: 5080834 - DNA, 25 bp, Homo sapien
aacaagatgatccactctgcagcac

SEQ ID NO: 5080835 - DNA, 25 bp, Homo sapien
cacgggctgctgttggactggtcta

SEQ ID NO: 5080836 - DNA, 25 bp, Homo sapien
ccatttgtatagcagacaggagccc

SEQ ID NO: 5080837 - DNA, 25 bp, Homo sapien
aaatcactgtggcaaccagcttcag

SEQ ID NO: 5080838 - DNA, 25 bp, Homo sapien
gttagttccctcttggatgccaaag

SEQ ID NO: 5080839 - DNA, 25 bp, Homo sapien
tgggcagttagttccctcttggatg

SEQ ID NO: 5080840 - DNA, 25 bp, Homo sapien
gccatgccacgttcagacttgcttg

SEQ ID NO: 5080841 - DNA, 25 bp, Homo sapien
attcagccatgccacgttcagactt

SEQ ID NO: 5080842 - DNA, 25 bp, Homo sapien
caccaaagatgtgctcaggaagatc

SEQ ID NO: 5080843 - DNA, 25 bp, Homo sapien
tgagtctggctgcaaggaccatgac

SEQ ID NO: 5080844 - DNA, 25 bp, Homo sapien
tgccctctgagaaagttgccagcct

SEQ ID NO: 5080845 - DNA, 25 bp, Homo sapien
gcctgcaaagaggtctgcattctgt

SEQ ID NO: 5080846 - DNA, 25 bp, Homo sapien
ggagaattcattccacgcccttctc

SEQ ID NO: 5080847 - DNA, 25 bp, Homo sapien
ctccagacttctgcggggtgctggc

SEQ ID NO: 5080848 - DNA, 25 bp, Homo sapien
cacagttgagaaggtcaaaagtcta

SEQ ID NO: 5080849 - DNA, 25 bp, Homo sapien
ggcttgaaggagaattcattccacg

SEQ ID NO: 5080850 - DNA, 25 bp, Homo sapien
tgtccacataaccatctccaggagg

SEQ ID NO: 5080851 - DNA, 25 bp, Homo sapien
aagttggcaattccatatgcttggc

SEQ ID NO: 5080852 - DNA, 25 bp, Homo sapien
gaaaacccatcatctgtgtccacat

SEQ ID NO: 5080853 - DNA, 25 bp, Homo sapien
cacaagtaagttctcctgacttgaa

SEQ ID NO: 5080854 - DNA, 25 bp, Homo sapien
gcatgattgtcttgaggccttctaa

SEQ ID NO: 5080855 - DNA, 25 bp, Homo sapien
aaagtgccaccggatttattgcttg

SEQ ID NO: 5080856 - DNA, 25 bp, Homo sapien
tccaatatcacgataggcatgattg

SEQ ID NO: 5080857 - DNA, 25 bp, Homo sapien
tcctctctggagttaatacgatata

SEQ ID NO: 5080858 - DNA, 25 bp, Homo sapien
caggttttggtctgccctccaaaca

SEQ ID NO: 5080859 - DNA, 25 bp, Homo sapien
tttggtctgccctccaaacagcgaa

SEQ ID NO: 5080860 - DNA, 25 bp, Homo sapien
gttttggtctgccctccaaacagcg

SEQ ID NO: 5080861 - DNA, 25 bp, Homo sapien
ttggtctgccctccaaacagcgaac

SEQ ID NO: 5080862 - DNA, 25 bp, Homo sapien
ggcttcccatgcttctcacctaggt

SEQ ID NO: 5080863 - DNA, 25 bp, Homo sapien
ctttattctcatggcaacccctggc

SEQ ID NO: 5080864 - DNA, 25 bp, Homo sapien
ttcccatgcttctcacctaggttct

SEQ ID NO: 5080865 - DNA, 25 bp, Homo sapien
catgcttctcacctaggttcttagg

SEQ ID NO: 5080866 - DNA, 25 bp, Homo sapien
gcactggcggtggtaccctgggata

SEQ ID NO: 5080867 - DNA, 25 bp, Homo sapien
accaggcctcggcattcttgtctta

SEQ ID NO: 5080868 - DNA, 25 bp, Homo sapien
agcactggcggtggtaccctgggat

SEQ ID NO: 5080869 - DNA, 25 bp, Homo sapien
gaggttccaagttcatagcacaggg

SEQ ID NO: 5080870 - DNA, 25 bp, Homo sapien
taggaatctgcccatcaaagaagag

SEQ ID NO: 5080871 - DNA, 25 bp, Homo sapien
cacaagaatgcacattggatggagc

SEQ ID NO: 5080872 - DNA, 25 bp, Homo sapien
tagtaatctcgtcagtcagggtcca

SEQ ID NO: 5080873 - DNA, 25 bp, Homo sapien
gatctcgggtggtcataccagtaca

SEQ ID NO: 5080874 - DNA, 25 bp, Homo sapien
tcttcctagagcaagaacgctgtgc

SEQ ID NO: 5080875 - DNA, 25 bp, Homo sapien
tctttctcagcgatgggatctcggg

SEQ ID NO: 5080876 - DNA, 25 bp, Homo sapien
catagtgagtgcaaccatgccgcat

SEQ ID NO: 5080877 - DNA, 25 bp, Homo sapien
tcctttgaagcctcaagctcagctt

SEQ ID NO: 5080878 - DNA, 25 bp, Homo sapien
aagctcagcttattaacagcctcca

SEQ ID NO: 5080879 - DNA, 25 bp, Homo sapien
ctagatccagcacaggctacaagag

SEQ ID NO: 5080880 - DNA, 25 bp, Homo sapien
tagatccagcacaggctacaagagt

SEQ ID NO: 5080881 - DNA, 25 bp, Homo sapien
tattgcttctgctgctagcacctgc

SEQ ID NO: 5080882 - DNA, 25 bp, Homo sapien
tatttagtccaaagagggtcagaga

SEQ ID NO: 5080883 - DNA, 25 bp, Homo sapien
acctgcttcactactgaacatgggc

SEQ ID NO: 5080884 - DNA, 25 bp, Homo sapien
tctgttggtcaagaatactgggagt

SEQ ID NO: 5080885 - DNA, 25 bp, Homo sapien
gtaggaagtctaatgatgacttttg

SEQ ID NO: 5080886 - DNA, 25 bp, Homo sapien
cgcttgaacttccaatgccctatta

SEQ ID NO: 5080887 - DNA, 25 bp, Homo sapien
ctgtttcctagttagtcgcttgaac

SEQ ID NO: 5080888 - DNA, 25 bp, Homo sapien
cctattagtaggaagtctaatgatg

SEQ ID NO: 5080889 - DNA, 25 bp, Homo sapien
cacagtgtaggggtacaaatactaa

SEQ ID NO: 5080890 - DNA, 25 bp, Homo sapien
ttctgggaatctagcctaaggaaag

SEQ ID NO: 5080891 - DNA, 25 bp, Homo sapien
tatgtaatctgttgcacagtgtagg

SEQ ID NO: 5080892 - DNA, 25 bp, Homo sapien
gaaaggatgccaaatagagcaaatg

SEQ ID NO: 5080893 - DNA, 25 bp, Homo sapien
gacactttgatttagagccacacga

SEQ ID NO: 5080894 - DNA, 25 bp, Homo sapien
cagggctactggcaatgaatgggct

SEQ ID NO: 5080895 - DNA, 25 bp, Homo sapien
tccgtattcccctggtagagcagag

SEQ ID NO: 5080896 - DNA, 25 bp, Homo sapien
ttgggaatgctcatctcagggctac

SEQ ID NO: 5080897 - DNA, 25 bp, Homo sapien
catgccaaaccaaacagagactgtg

SEQ ID NO: 5080898 - DNA, 25 bp, Homo sapien
tcatgccaaaccaaacagagactgt

SEQ ID NO: 5080899 - DNA, 25 bp, Homo sapien
tgtaaatagctttccgcgtaaagga

SEQ ID NO: 5080900 - DNA, 25 bp, Homo sapien
tggctgctgtaaatagctttccgcg

SEQ ID NO: 5080901 - DNA, 25 bp, Homo sapien
tagagaattccctccccataagagc

SEQ ID NO: 5080902 - DNA, 25 bp, Homo sapien
gattgattgtgctacacccacttag

SEQ ID NO: 5080903 - DNA, 25 bp, Homo sapien
tggcctcaaaagcatacctgttggg

SEQ ID NO: 5080904 - DNA, 25 bp, Homo sapien
taaggcatcttgtgctaccctggta

SEQ ID NO: 5080905 - DNA, 25 bp, Homo sapien
caagggaggccaaaccctcaggata

SEQ ID NO: 5080906 - DNA, 25 bp, Homo sapien
tcaccatttatagaggcaggaacag

SEQ ID NO: 5080907 - DNA, 25 bp, Homo sapien
tcccaggtgattgtgtcaggcgtca

SEQ ID NO: 5080908 - DNA, 25 bp, Homo sapien
tctggtggcctaggaatgttgccta

SEQ ID NO: 5080909 - DNA, 25 bp, Homo sapien
tttcctctgtacacttctccttgca

SEQ ID NO: 5080910 - DNA, 25 bp, Homo sapien
tgaggcccagtttctgagtgtggat

SEQ ID NO: 5080911 - DNA, 25 bp, Homo sapien
gatctaccaactaccttccacagag

SEQ ID NO: 5080912 - DNA, 25 bp, Homo sapien
ccagtttctgagtgtggatttacaa

SEQ ID NO: 5080913 - DNA, 25 bp, Homo sapien
caagagggagagagtttgcaggtaa

SEQ ID NO: 5080914 - DNA, 25 bp, Homo sapien
tgtggaacgcgaaggacctgtgatc

SEQ ID NO: 5080915 - DNA, 25 bp, Homo sapien
gaaataactgattgtggaacgcgaa

SEQ ID NO: 5080916 - DNA, 25 bp, Homo sapien
ctggtacggaaataactgattgtgg

SEQ ID NO: 5080917 - DNA, 25 bp, Homo sapien
tcctggcaatggagcagtatggcct

SEQ ID NO: 5080918 - DNA, 25 bp, Homo sapien
ccgtcttgggtggttcacaggctca

SEQ ID NO: 5080919 - DNA, 25 bp, Homo sapien
catttcagctaggttggtcacagta

SEQ ID NO: 5080920 - DNA, 25 bp, Homo sapien
gacactgatgaccagccgtcttggg

SEQ ID NO: 5080921 - DNA, 25 bp, Homo sapien
gggtcagcccgccataatgagccac

SEQ ID NO: 5080922 - DNA, 25 bp, Homo sapien
caccaactgaggtgccctttgcact

SEQ ID NO: 5080923 - DNA, 25 bp, Homo sapien
cacaggcaagtccttatcttttgta

SEQ ID NO: 5080924 - DNA, 25 bp, Homo sapien
gaatgacactttccctatgggtcag

SEQ ID NO: 5080925 - DNA, 25 bp, Homo sapien
cagtaatttgccagacatgtgagcg

SEQ ID NO: 5080926 - DNA, 25 bp, Homo sapien
aagctagctcccatgtcgtgaggat

SEQ ID NO: 5080927 - DNA, 25 bp, Homo sapien
tctgtagagaagctgatgtggcaac

SEQ ID NO: 5080928 - DNA, 25 bp, Homo sapien
accaaattgagagggatcatccagc

SEQ ID NO: 5080929 - DNA, 25 bp, Homo sapien
tgcatgtagaggtagtttgttcact

SEQ ID NO: 5080930 - DNA, 25 bp, Homo sapien
ttgttcactgtataacagcagtccc

SEQ ID NO: 5080931 - DNA, 25 bp, Homo sapien
cagcacttcagacacacctcttgtg

SEQ ID NO: 5080932 - DNA, 25 bp, Homo sapien
gaacacactcttgtagccagcacca

SEQ ID NO: 5080933 - DNA, 25 bp, Homo sapien
tgtgatgaggtggtatgaggatgtg

SEQ ID NO: 5080934 - DNA, 25 bp, Homo sapien
tgaaatgtgatgaggtggtatgagg

SEQ ID NO: 5080935 - DNA, 25 bp, Homo sapien
ggtggtatgaggatgtgtacaggaa

SEQ ID NO: 5080936 - DNA, 25 bp, Homo sapien
gatgaggtggtatgaggatgtgtac

SEQ ID NO: 5080937 - DNA, 25 bp, Homo sapien
agagtgatacagcatgcctttggca

SEQ ID NO: 5080938 - DNA, 25 bp, Homo sapien
tactgaggcacggattgtagcagcc

SEQ ID NO: 5080939 - DNA, 25 bp, Homo sapien
tctgtgtctagtagctctggaggaa

SEQ ID NO: 5080940 - DNA, 25 bp, Homo sapien
cactgtggttctcactgatcaggag

SEQ ID NO: 5080941 - DNA, 25 bp, Homo sapien
tgggccagtgcaaaaccactcccat

SEQ ID NO: 5080942 - DNA, 25 bp, Homo sapien
tcctcgtgaatagtcctgcctgctg

SEQ ID NO: 5080943 - DNA, 25 bp, Homo sapien
aggagaggttcctccaagccccagg

SEQ ID NO: 5080944 - DNA, 25 bp, Homo sapien
aagcagccacctttatgacagtctc

SEQ ID NO: 5080945 - DNA, 25 bp, Homo sapien
ttatgacagtctccccatgaggagg

SEQ ID NO: 5080946 - DNA, 25 bp, Homo sapien
gaaaaatgagtccttgtgtacagcc

SEQ ID NO: 5080947 - DNA, 25 bp, Homo sapien
tagatgcgctgccaaatacatgtgc

SEQ ID NO: 5080948 - DNA, 25 bp, Homo sapien
tacatgtgcgcttctggagttcttc

SEQ ID NO: 5080949 - DNA, 25 bp, Homo sapien
cagatgctggcgaatagtagatgcg

SEQ ID NO: 5080950 - DNA, 25 bp, Homo sapien
aggatccttttcagttcattaacaa

SEQ ID NO: 5080951 - DNA, 25 bp, Homo sapien
caggatccttttcagttcattaaca

SEQ ID NO: 5080952 - DNA, 25 bp, Homo sapien
agcaggatccttttcagttcattaa

SEQ ID NO: 5080953 - DNA, 25 bp, Homo sapien
gcaggatccttttcagttcattaac

SEQ ID NO: 5080954 - DNA, 25 bp, Homo sapien
ttcaaaggcacttgatcttcagctc

SEQ ID NO: 5080955 - DNA, 25 bp, Homo sapien
ctttcaaaggcacttgatcttcagc

SEQ ID NO: 5080956 - DNA, 25 bp, Homo sapien
tctttcaaaggcacttgatcttcag

SEQ ID NO: 5080957 - DNA, 25 bp, Homo sapien
tttcaaaggcacttgatcttcagct

SEQ ID NO: 5080958 - DNA, 25 bp, Homo sapien
tgaaactttgttgagtttcacaaag

SEQ ID NO: 5080959 - DNA, 25 bp, Homo sapien
gccataagcacgcttgtagattagt

SEQ ID NO: 5080960 - DNA, 25 bp, Homo sapien
tgattttgccataagcacgcttgta

SEQ ID NO: 5080961 - DNA, 25 bp, Homo sapien
ttttgccataagcacgcttgtagat

SEQ ID NO: 5080962 - DNA, 25 bp, Homo sapien
ttgccataagcacgcttgtagatta

SEQ ID NO: 5080963 - DNA, 25 bp, Homo sapien
tcaaagaaagcaattcgcttcttac

SEQ ID NO: 5080964 - DNA, 25 bp, Homo sapien
gtcaaagaaagcaattcgcttctta

SEQ ID NO: 5080965 - DNA, 25 bp, Homo sapien
tgtcaaagaaagcaattcgcttctt

SEQ ID NO: 5080966 - DNA, 25 bp, Homo sapien
ctgtcaaagaaagcaattcgcttct

SEQ ID NO: 5080967 - DNA, 25 bp, Homo sapien
tctttccacctcatgcagaagataa

SEQ ID NO: 5080968 - DNA, 25 bp, Homo sapien
cttctttccacctcatgcagaagat

SEQ ID NO: 5080969 - DNA, 25 bp, Homo sapien
tttccacctcatgcagaagataatt

SEQ ID NO: 5080970 - DNA, 25 bp, Homo sapien
ttcttctttccacctcatgcagaag

SEQ ID NO: 5080971 - DNA, 25 bp, Homo sapien
ccaagttgggctgctcattgtgaac

SEQ ID NO: 5080972 - DNA, 25 bp, Homo sapien
gagagtcctggtgagaagatctaga

SEQ ID NO: 5080973 - DNA, 25 bp, Homo sapien
gcctgactctcctctgggaggatga

SEQ ID NO: 5080974 - DNA, 25 bp, Homo sapien
tctctgtaggaaagtgcaagtcaaa

SEQ ID NO: 5080975 - DNA, 25 bp, Homo sapien
aattttggctgcattgagtcttcct

SEQ ID NO: 5080976 - DNA, 25 bp, Homo sapien
aggggctaaagagctccttcagttc

SEQ ID NO: 5080977 - DNA, 25 bp, Homo sapien
gcattgagtcttcctttgatgtatt

SEQ ID NO: 5080978 - DNA, 25 bp, Homo sapien
tattttgaggggctaaagagctcct

SEQ ID NO: 5080979 - DNA, 25 bp, Homo sapien
ggccaccaccaacagtcatagagac

SEQ ID NO: 5080980 - DNA, 25 bp, Homo sapien
ttcgatgctgagctttccagtggcc

SEQ ID NO: 5080981 - DNA, 25 bp, Homo sapien
tcacccaaggagtgtacgctgtact

SEQ ID NO: 5080982 - DNA, 25 bp, Homo sapien
cacccaaggagtgtacgctgtactc

SEQ ID NO: 5080983 - DNA, 25 bp, Homo sapien
aaggagtgtacgctgtactcaatat

SEQ ID NO: 5080984 - DNA, 25 bp, Homo sapien
cccaaggagtgtacgctgtactcaa

SEQ ID NO: 5080985 - DNA, 25 bp, Homo sapien
gccccttctgcatgtagtaggcaga

SEQ ID NO: 5080986 - DNA, 25 bp, Homo sapien
cttaaaggtggaccatcaagatcag

SEQ ID NO: 5080987 - DNA, 25 bp, Homo sapien
taaaggtggaccatcaagatcagca

SEQ ID NO: 5080988 - DNA, 25 bp, Homo sapien
ttaaaggtggaccatcaagatcagc

SEQ ID NO: 5080989 - DNA, 25 bp, Homo sapien
gtcttaaaggtggaccatcaagatc

SEQ ID NO: 5080990 - DNA, 25 bp, Homo sapien
ctataagccatcagcagctgacatt

SEQ ID NO: 5080991 - DNA, 25 bp, Homo sapien
tataagccatcagcagctgacattc

SEQ ID NO: 5080992 - DNA, 25 bp, Homo sapien
ggctggcgggactctcttggtggtg

SEQ ID NO: 5080993 - DNA, 25 bp, Homo sapien
aagtccccgtaggtgcccagggctg

SEQ ID NO: 5080994 - DNA, 25 bp, Homo sapien
gctgcaaaggatctgggtacttggc

SEQ ID NO: 5080995 - DNA, 25 bp, Homo sapien
tgttgaatgtgtgggaaggacaccc

SEQ ID NO: 5080996 - DNA, 25 bp, Homo sapien
gcttcagaggcactgctgtacccat

SEQ ID NO: 5080997 - DNA, 25 bp, Homo sapien
ctgttgccaaataggtgaagaccat

SEQ ID NO: 5080998 - DNA, 25 bp, Homo sapien
ttctgttgccaaataggtgaagacc

SEQ ID NO: 5080999 - DNA, 25 bp, Homo sapien
tctgttgccaaataggtgaagacca

SEQ ID NO: 5081000 - DNA, 25 bp, Homo sapien
tttctgttgccaaataggtgaagac

SEQ ID NO: 5081001 - DNA, 25 bp, Homo sapien
tactgggtaggccttatcatatgag

SEQ ID NO: 5081002 - DNA, 25 bp, Homo sapien
taggcagatcctaaagctttcaagg

SEQ ID NO: 5081003 - DNA, 25 bp, Homo sapien
caggtctgctttcacggtgtactgg

SEQ ID NO: 5081004 - DNA, 25 bp, Homo sapien
cactgtgggcacacattctaggcag

SEQ ID NO: 5081005 - DNA, 25 bp, Homo sapien
tcaagtcctggaacaggtatcactg

SEQ ID NO: 5081006 - DNA, 25 bp, Homo sapien
tggaacaggtatcactgcactaggc

SEQ ID NO: 5081007 - DNA, 25 bp, Homo sapien
acatttcttgagcacgtcctatatc

SEQ ID NO: 5081008 - DNA, 25 bp, Homo sapien
gagcacgtcctatatcaagtcctgg

SEQ ID NO: 5081009 - DNA, 25 bp, Homo sapien
gccttgggattcagtttgccctggg

SEQ ID NO: 5081010 - DNA, 25 bp, Homo sapien
ttgggattcagtttgccctgggcca

SEQ ID NO: 5081011 - DNA, 25 bp, Homo sapien
atatttactcctgcctccgatgagt

SEQ ID NO: 5081012 - DNA, 25 bp, Homo sapien
tccgatgagtacatgtgcctcagcc

SEQ ID NO: 5081013 - DNA, 25 bp, Homo sapien
ttgccccagccatcaaattcaatat

SEQ ID NO: 5081014 - DNA, 25 bp, Homo sapien
tgccccagccatcaaattcaatatt

SEQ ID NO: 5081015 - DNA, 25 bp, Homo sapien
cttgccccagccatcaaattcaata

SEQ ID NO: 5081016 - DNA, 25 bp, Homo sapien
gccccagccatcaaattcaatattc

SEQ ID NO: 5081017 - DNA, 25 bp, Homo sapien
ctcattagcaaatctttcgtctgtt

SEQ ID NO: 5081018 - DNA, 25 bp, Homo sapien
ctttcgtctgtttcagcaataagag

SEQ ID NO: 5081019 - DNA, 25 bp, Homo sapien
tgctaagagtatggataaagaaacc

SEQ ID NO: 5081020 - DNA, 25 bp, Homo sapien
ggtgttcgcttaaattgaactgcag

SEQ ID NO: 5081021 - DNA, 25 bp, Homo sapien
ctatcttccaatctgtgccttcact

SEQ ID NO: 5081022 - DNA, 25 bp, Homo sapien
ttcactaatcctagagagatggaga

SEQ ID NO: 5081023 - DNA, 25 bp, Homo sapien
ccttcactaatcctagagagatgga

SEQ ID NO: 5081024 - DNA, 25 bp, Homo sapien
ttccaatctgtgccttcactaatcc

SEQ ID NO: 5081025 - DNA, 25 bp, Homo sapien
cggtggacacccaaatgtactcagc

SEQ ID NO: 5081026 - DNA, 25 bp, Homo sapien
ggtgcccaatgtggccaaatctgtt

SEQ ID NO: 5081027 - DNA, 25 bp, Homo sapien
tgtactcagcgtcaacattgtccca

SEQ ID NO: 5081028 - DNA, 25 bp, Homo sapien
tgagatttccgttaatgacaagctt

SEQ ID NO: 5081029 - DNA, 25 bp, Homo sapien
cttttggctccctgctgcaagtgag

SEQ ID NO: 5081030 - DNA, 25 bp, Homo sapien
ccttttggctccctgctgcaagtga

SEQ ID NO: 5081031 - DNA, 25 bp, Homo sapien
gccccagccttctctgtggtggtga

SEQ ID NO: 5081032 - DNA, 25 bp, Homo sapien
gccttctctgtggtggtgaagacac

SEQ ID NO: 5081033 - DNA, 25 bp, Homo sapien
ggcgtcagcagagggagtagagatt

SEQ ID NO: 5081034 - DNA, 25 bp, Homo sapien
cgtcagcagagggagtagagattat

SEQ ID NO: 5081035 - DNA, 25 bp, Homo sapien
atgggggcgtcagcagagggagtag

SEQ ID NO: 5081036 - DNA, 25 bp, Homo sapien
gggggcgtcagcagagggagtagag

SEQ ID NO: 5081037 - DNA, 25 bp, Homo sapien
ttcatatttcttatggttcacgccc

SEQ ID NO: 5081038 - DNA, 25 bp, Homo sapien
tttcatatttcttatggttcacgcc

SEQ ID NO: 5081039 - DNA, 25 bp, Homo sapien
cttatggttcacgcccatcatgaac

SEQ ID NO: 5081040 - DNA, 25 bp, Homo sapien
tttcttatggttcacgcccatcatg

SEQ ID NO: 5081041 - DNA, 25 bp, Homo sapien
tggtacaggaggcaattgctgatga

SEQ ID NO: 5081042 - DNA, 25 bp, Homo sapien
agttggtggtacaggaggcaattgc

SEQ ID NO: 5081043 - DNA, 25 bp, Homo sapien
ttggtggtacaggaggcaattgctg

SEQ ID NO: 5081044 - DNA, 25 bp, Homo sapien
gaagttggtggtacaggaggcaatt

SEQ ID NO: 5081045 - DNA, 25 bp, Homo sapien
ggccatgctagtaatcttcccattc

SEQ ID NO: 5081046 - DNA, 25 bp, Homo sapien
gatgcatgaccgacacattggtggt

SEQ ID NO: 5081047 - DNA, 25 bp, Homo sapien
tggtgtgggtcgtggtcatgagtcc

SEQ ID NO: 5081048 - DNA, 25 bp, Homo sapien
ggtcagatgcatgaccgacacattg

SEQ ID NO: 5081049 - DNA, 25 bp, Homo sapien
cttgaggggcctctgatgcctgttt

SEQ ID NO: 5081050 - DNA, 25 bp, Homo sapien
ttgaggggcctctgatgcctgtttc

SEQ ID NO: 5081051 - DNA, 25 bp, Homo sapien
tgaggggcctctgatgcctgtttca

SEQ ID NO: 5081052 - DNA, 25 bp, Homo sapien
gaggggcctctgatgcctgtttcac

SEQ ID NO: 5081053 - DNA, 25 bp, Homo sapien
tcattgagggcaataccagccccat

SEQ ID NO: 5081054 - DNA, 25 bp, Homo sapien
gtccactgccctgttgttgtagcca

SEQ ID NO: 5081055 - DNA, 25 bp, Homo sapien
cactgccctgttgttgtagccaaat

SEQ ID NO: 5081056 - DNA, 25 bp, Homo sapien
attgagggcaataccagccccatca

SEQ ID NO: 5081057 - DNA, 25 bp, Homo sapien
tgaagcctttattgagccactacat

SEQ ID NO: 5081058 - DNA, 25 bp, Homo sapien
tagtttatggcaaaatctggtcctg

SEQ ID NO: 5081059 - DNA, 25 bp, Homo sapien
aaataagtactgtccctgtgaaagg

SEQ ID NO: 5081060 - DNA, 25 bp, Homo sapien
tgcatatctgggaaactgaactgtc

SEQ ID NO: 5081061 - DNA, 25 bp, Homo sapien
cacaccttgtagtttcagccacttg

SEQ ID NO: 5081062 - DNA, 25 bp, Homo sapien
aatattgagaatagggttaactttg

SEQ ID NO: 5081063 - DNA, 25 bp, Homo sapien
aacactggcaatagggggtaattgt

SEQ ID NO: 5081064 - DNA, 25 bp, Homo sapien
tcagtgtcagtgtgagaccccatct

SEQ ID NO: 5081065 - DNA, 25 bp, Homo sapien
ttagagtaaatagggtgtccatcac

SEQ ID NO: 5081066 - DNA, 25 bp, Homo sapien
tgcctgccagaacaagaccgctgtg

SEQ ID NO: 5081067 - DNA, 25 bp, Homo sapien
tctgactacctttcctagactctag

SEQ ID NO: 5081068 - DNA, 25 bp, Homo sapien
agtactctctatcgcatgagttcag

SEQ ID NO: 5081069 - DNA, 25 bp, Homo sapien
ttaaagaggaaatgaaggcagtatg

SEQ ID NO: 5081070 - DNA, 25 bp, Homo sapien
aaagaggaaatgaaggcagtatgaa

SEQ ID NO: 5081071 - DNA, 25 bp, Homo sapien
ttttaaagaggaaatgaaggcagta

SEQ ID NO: 5081072 - DNA, 25 bp, Homo sapien
cacccagcctaaaattgattatttt

SEQ ID NO: 5081073 - DNA, 25 bp, Homo sapien
tgtgaggtctcccagtataatagtg

SEQ ID NO: 5081074 - DNA, 25 bp, Homo sapien
tgttattggatttctacttgctggg

SEQ ID NO: 5081075 - DNA, 25 bp, Homo sapien
ggtgtgtcagctacctataaagagg

SEQ ID NO: 5081076 - DNA, 25 bp, Homo sapien
tgttcagctcgactatgttattgga

SEQ ID NO: 5081077 - DNA, 25 bp, Homo sapien
gtttcagactgccaagtacctcccg

SEQ ID NO: 5081078 - DNA, 25 bp, Homo sapien
gagccctatgggatgttgaacttga

SEQ ID NO: 5081079 - DNA, 25 bp, Homo sapien
gctatgcactggtatctaagctcaa

SEQ ID NO: 5081080 - DNA, 25 bp, Homo sapien
tatctttaagaatcatacgcactgc

SEQ ID NO: 5081081 - DNA, 25 bp, Homo sapien
taatgtaagtttgagctcttgattc

SEQ ID NO: 5081082 - DNA, 25 bp, Homo sapien
cttcctggtcaatacagtaatgtaa

SEQ ID NO: 5081083 - DNA, 25 bp, Homo sapien
caatacagtaatgtaagtttgagct

SEQ ID NO: 5081084 - DNA, 25 bp, Homo sapien
tcctggtcaatacagtaatgtaagt

SEQ ID NO: 5081085 - DNA, 25 bp, Homo sapien
tcttgacttgaggtgagattttctt

SEQ ID NO: 5081086 - DNA, 25 bp, Homo sapien
tgttgattatagagttccccgaggc

SEQ ID NO: 5081087 - DNA, 25 bp, Homo sapien
ttttttggtcttgacttgaggtgag

SEQ ID NO: 5081088 - DNA, 25 bp, Homo sapien
ttgattatagagttccccgaggctg

SEQ ID NO: 5081089 - DNA, 25 bp, Homo sapien
aaaagcctgtttgcatgcaggaaat

SEQ ID NO: 5081090 - DNA, 25 bp, Homo sapien
taaaagcctgtttgcatgcaggaaa

SEQ ID NO: 5081091 - DNA, 25 bp, Homo sapien
gcctgtttgcatgcaggaaattatt

SEQ ID NO: 5081092 - DNA, 25 bp, Homo sapien
aagcctgtttgcatgcaggaaatta

SEQ ID NO: 5081093 - DNA, 25 bp, Homo sapien
aggtctacaggcttgcactaccctg

SEQ ID NO: 5081094 - DNA, 25 bp, Homo sapien
cttgcactaccctgctgggccaggg

SEQ ID NO: 5081095 - DNA, 25 bp, Homo sapien
tacaggcttgcactaccctgctggg

SEQ ID NO: 5081096 - DNA, 25 bp, Homo sapien
aggcttgcactaccctgctgggcca

SEQ ID NO: 5081097 - DNA, 25 bp, Homo sapien
agataggggctagccttgttgcaca

SEQ ID NO: 5081098 - DNA, 25 bp, Homo sapien
aatttcacctttatcagaatggggg

SEQ ID NO: 5081099 - DNA, 25 bp, Homo sapien
tggcatggtaaatggagagcttttt

SEQ ID NO: 5081100 - DNA, 25 bp, Homo sapien
cagtgaatgaatttgtgggatgcca

SEQ ID NO: 5081101 - DNA, 25 bp, Homo sapien
tggtccttcctttgaaggatgaaaa

SEQ ID NO: 5081102 - DNA, 25 bp, Homo sapien
ccggccagctttatcgtttttatca

SEQ ID NO: 5081103 - DNA, 25 bp, Homo sapien
taaagctacatgtttcgtattttct

SEQ ID NO: 5081104 - DNA, 25 bp, Homo sapien
gggcagcatatatgtaaatacctat

SEQ ID NO: 5081105 - DNA, 25 bp, Homo sapien
aaagcttggcttggtgatcatctca

SEQ ID NO: 5081106 - DNA, 25 bp, Homo sapien
gggtgccgataccaaaatgatacag

SEQ ID NO: 5081107 - DNA, 25 bp, Homo sapien
catccgtaagtatccatttaactcc

SEQ ID NO: 5081108 - DNA, 25 bp, Homo sapien
tttttctgcagggtgccgataccaa

SEQ ID NO: 5081109 - DNA, 25 bp, Homo sapien
cttgcaagcggagaaggccatcgct

SEQ ID NO: 5081110 - DNA, 25 bp, Homo sapien
cgacgccgacgctgaggaatgttca

SEQ ID NO: 5081111 - DNA, 25 bp, Homo sapien
catggacgccgacgccgacgctgag

SEQ ID NO: 5081112 - DNA, 25 bp, Homo sapien
ttcaccagcctaacggagcctctga

SEQ ID NO: 5081113 - DNA, 25 bp, Homo sapien
tagcctgccttaggcagcgagtccg

SEQ ID NO: 5081114 - DNA, 25 bp, Homo sapien
ttaggcagcgagtccggctcaaaga

SEQ ID NO: 5081115 - DNA, 25 bp, Homo sapien
cctgccttaggcagcgagtccggct

SEQ ID NO: 5081116 - DNA, 25 bp, Homo sapien
cgagtccggctcaaagaccaatgac

SEQ ID NO: 5081117 - DNA, 25 bp, Homo sapien
acttgggctctcaacagggggtgcc

SEQ ID NO: 5081118 - DNA, 25 bp, Homo sapien
aatctgctgaacttgggctctcaac

SEQ ID NO: 5081119 - DNA, 25 bp, Homo sapien
cccatggccgcaatctgctgaactt

SEQ ID NO: 5081120 - DNA, 25 bp, Homo sapien
ccccatggccgcaatctgctgaact

SEQ ID NO: 5081121 - DNA, 25 bp, Homo sapien
tccagaccaactaaacacagtgtgc

SEQ ID NO: 5081122 - DNA, 25 bp, Homo sapien
gaggttgagaacctccacgccgagg

SEQ ID NO: 5081123 - DNA, 25 bp, Homo sapien
gaaagcatgggttggtattcacagc

SEQ ID NO: 5081124 - DNA, 25 bp, Homo sapien
tatactgatgcctagatctcgctcc

SEQ ID NO: 5081125 - DNA, 25 bp, Homo sapien
gcttctttctgacgctgtatcaggc

SEQ ID NO: 5081126 - DNA, 25 bp, Homo sapien
ttctttctgacgctgtatcaggcat

SEQ ID NO: 5081127 - DNA, 25 bp, Homo sapien
gtgcttctttctgacgctgtatcag

SEQ ID NO: 5081128 - DNA, 25 bp, Homo sapien
tgcttctttctgacgctgtatcagg

SEQ ID NO: 5081129 - DNA, 25 bp, Homo sapien
tattacaaggtggaccaatggctcc

SEQ ID NO: 5081130 - DNA, 25 bp, Homo sapien
gaggtcctctctccggtggatgaac

SEQ ID NO: 5081131 - DNA, 25 bp, Homo sapien
tcaagggactgcagtagaagcagtc

SEQ ID NO: 5081132 - DNA, 25 bp, Homo sapien
tctgagggtttaggatggctgacta

SEQ ID NO: 5081133 - DNA, 25 bp, Homo sapien
gtggccttgtcccacagcatagcct

SEQ ID NO: 5081134 - DNA, 25 bp, Homo sapien
caggaagagctcattatagttttgc

SEQ ID NO: 5081135 - DNA, 25 bp, Homo sapien
cagagatctttgtaaggacagattc

SEQ ID NO: 5081136 - DNA, 25 bp, Homo sapien
gacagattcgttgaccttatccaag

SEQ ID NO: 5081137 - DNA, 25 bp, Homo sapien
ctaagccaccctcgccaggaggtag

SEQ ID NO: 5081138 - DNA, 25 bp, Homo sapien
caagcagcctccgactgattgttgg

SEQ ID NO: 5081139 - DNA, 25 bp, Homo sapien
gaggttggggattttctctaagcca

SEQ ID NO: 5081140 - DNA, 25 bp, Homo sapien
gggacaatcactgcttgccttttag

SEQ ID NO: 5081141 - DNA, 25 bp, Homo sapien
tgctggacagttaaatccgaggtgc

SEQ ID NO: 5081142 - DNA, 25 bp, Homo sapien
tcggtataatcctccgccctgtgct

SEQ ID NO: 5081143 - DNA, 25 bp, Homo sapien
tgcagccttgtgatggtcctggaaa

SEQ ID NO: 5081144 - DNA, 25 bp, Homo sapien
gacatgggtgtggttcctcggtata

SEQ ID NO: 5081145 - DNA, 25 bp, Homo sapien
agcaaacgcatctcctgaaaaatag

SEQ ID NO: 5081146 - DNA, 25 bp, Homo sapien
tgaaaaatagccagaagcttcctgc

SEQ ID NO: 5081147 - DNA, 25 bp, Homo sapien
cagcctgttcggaaggtgttcatcc

SEQ ID NO: 5081148 - DNA, 25 bp, Homo sapien
tttcctcgggaggaatgcagcctgt

SEQ ID NO: 5081149 - DNA, 25 bp, Homo sapien
gcaaagctttggtaatagcctttgg

SEQ ID NO: 5081150 - DNA, 25 bp, Homo sapien
caaagctttggtaatagcctttggg

SEQ ID NO: 5081151 - DNA, 25 bp, Homo sapien
ggcaaagctttggtaatagcctttg

SEQ ID NO: 5081152 - DNA, 25 bp, Homo sapien
catcaggagtcgtggagaatgatgt

SEQ ID NO: 5081153 - DNA, 25 bp, Homo sapien
cctggagtgtgcctaatggctttga

SEQ ID NO: 5081154 - DNA, 25 bp, Homo sapien
gaattgcttgaaaggcgagtgatgt

SEQ ID NO: 5081155 - DNA, 25 bp, Homo sapien
gccgggatgcgagcaggagctgagg

SEQ ID NO: 5081156 - DNA, 25 bp, Homo sapien
gaaagtgaagtggttggcagctctt

SEQ ID NO: 5081157 - DNA, 25 bp, Homo sapien
tttcatggtttgcaatactttggaa

SEQ ID NO: 5081158 - DNA, 25 bp, Homo sapien
tttggaaagtgaagtggttggcagc

SEQ ID NO: 5081159 - DNA, 25 bp, Homo sapien
catggtttgcaatactttggaaagt

SEQ ID NO: 5081160 - DNA, 25 bp, Homo sapien
tctctaggcgctttaattgccacct

SEQ ID NO: 5081161 - DNA, 25 bp, Homo sapien
taacagagtgtcctctctaggcgct

SEQ ID NO: 5081162 - DNA, 25 bp, Homo sapien
caggttgggccagtaggacctgcaa

SEQ ID NO: 5081163 - DNA, 25 bp, Homo sapien
tactccagttgtggaagttaacaga

SEQ ID NO: 5081164 - DNA, 25 bp, Homo sapien
cacagctatctgcttaggttccaaa

SEQ ID NO: 5081165 - DNA, 25 bp, Homo sapien
atttccgcagggcgtcagggagaca

SEQ ID NO: 5081166 - DNA, 25 bp, Homo sapien
catttccgcagggcgtcagggagac

SEQ ID NO: 5081167 - DNA, 25 bp, Homo sapien
cagcagggaaggactaaaggagcca

SEQ ID NO: 5081168 - DNA, 25 bp, Homo sapien
atgtggatgtggtgaaatagccttc

SEQ ID NO: 5081169 - DNA, 25 bp, Homo sapien
tgtggtgaaatagccttcccagtgg

SEQ ID NO: 5081170 - DNA, 25 bp, Homo sapien
tgacatggagtgatggaccacagtg

SEQ ID NO: 5081171 - DNA, 25 bp, Homo sapien
cccagtggtgtaaagtgacatggag

SEQ ID NO: 5081172 - DNA, 25 bp, Homo sapien
tgtgtgccgtttggctgttttcccg

SEQ ID NO: 5081173 - DNA, 25 bp, Homo sapien
tcttcatggagttgtgtgccgtttg

SEQ ID NO: 5081174 - DNA, 25 bp, Homo sapien
ctttttcctgtatgagttagatccc

SEQ ID NO: 5081175 - DNA, 25 bp, Homo sapien
ttagatccctagctgtccctgctgg

SEQ ID NO: 5081176 - DNA, 25 bp, Homo sapien
cattcttactgcaatcgtagcctga

SEQ ID NO: 5081177 - DNA, 25 bp, Homo sapien
gtagcctgaccagcgtggacagtca

SEQ ID NO: 5081178 - DNA, 25 bp, Homo sapien
aatcgtagcctgaccagcgtggaca

SEQ ID NO: 5081179 - DNA, 25 bp, Homo sapien
tactgcaatcgtagcctgaccagcg

SEQ ID NO: 5081180 - DNA, 25 bp, Homo sapien
catggtgccgctggatacctttagc

SEQ ID NO: 5081181 - DNA, 25 bp, Homo sapien
tggatacctttagctctccccgttg

SEQ ID NO: 5081182 - DNA, 25 bp, Homo sapien
agttcaggcccccagtggtactttg

SEQ ID NO: 5081183 - DNA, 25 bp, Homo sapien
tgccgctggatacctttagctctcc

SEQ ID NO: 5081184 - DNA, 25 bp, Homo sapien
ggattgccacgcagggtttaaagac

SEQ ID NO: 5081185 - DNA, 25 bp, Homo sapien
gggattgccacgcagggtttaaaga

SEQ ID NO: 5081186 - DNA, 25 bp, Homo sapien
accttcccgcgaagggacatgcgga

SEQ ID NO: 5081187 - DNA, 25 bp, Homo sapien
gtgttcttgcccatcagcaccacga

SEQ ID NO: 5081188 - DNA, 25 bp, Homo sapien
agcaccacgaccttcccgcgaaggg

SEQ ID NO: 5081189 - DNA, 25 bp, Homo sapien
tcatccaatagttggatgatcttaa

SEQ ID NO: 5081190 - DNA, 25 bp, Homo sapien
cagtgaggtcctccttggtgaacac

SEQ ID NO: 5081191 - DNA, 25 bp, Homo sapien
gatctcagtgaggtcctccttggtg

SEQ ID NO: 5081192 - DNA, 25 bp, Homo sapien
gtccctgatctcagtgaggtcctcc

SEQ ID NO: 5081193 - DNA, 25 bp, Homo sapien
ctgatctcagtgaggtcctccttgg

SEQ ID NO: 5081194 - DNA, 25 bp, Homo sapien
atggggcaatggcaccagcacgggc

SEQ ID NO: 5081195 - DNA, 25 bp, Homo sapien
ctggcaccttattggccagcaacat

SEQ ID NO: 5081196 - DNA, 25 bp, Homo sapien
ggcaatggcaccagcacgggcagca

SEQ ID NO: 5081197 - DNA, 25 bp, Homo sapien
gggcaatggcaccagcacgggcagc

SEQ ID NO: 5081198 - DNA, 25 bp, Homo sapien
gttctgggctggcacagtgacttca

SEQ ID NO: 5081199 - DNA, 25 bp, Homo sapien
gtgttctgggctggcacagtgactt

SEQ ID NO: 5081200 - DNA, 25 bp, Homo sapien
cagtgttctgggctggcacagtgac

SEQ ID NO: 5081201 - DNA, 25 bp, Homo sapien
ttctgggctggcacagtgacttcac

SEQ ID NO: 5081202 - DNA, 25 bp, Homo sapien
agcctggaaaaaggaggtcttctcg

SEQ ID NO: 5081203 - DNA, 25 bp, Homo sapien
tgtctccagtcttgatcagctgcac

SEQ ID NO: 5081204 - DNA, 25 bp, Homo sapien
tttgtctccagtcttgatcagctgc

SEQ ID NO: 5081205 - DNA, 25 bp, Homo sapien
tccagtcttgatcagctgcacatca

SEQ ID NO: 5081206 - DNA, 25 bp, Homo sapien
cagtcttgatcagctgcacatcact

SEQ ID NO: 5081207 - DNA, 25 bp, Homo sapien
agaagggggagatgttgagcatgtt

SEQ ID NO: 5081208 - DNA, 25 bp, Homo sapien
agatgttgagcatgttcagcagcgt

SEQ ID NO: 5081209 - DNA, 25 bp, Homo sapien
agcagcgtggcttcgctggctccca

SEQ ID NO: 5081210 - DNA, 25 bp, Homo sapien
atgttgagcatgttcagcagcgtgg

SEQ ID NO: 5081211 - DNA, 25 bp, Homo sapien
ggttgtagatgctgccattgtcgaa

SEQ ID NO: 5081212 - DNA, 25 bp, Homo sapien
ttcagggttgtagatgctgccattg

SEQ ID NO: 5081213 - DNA, 25 bp, Homo sapien
tgtagatgctgccattgtcgaatac

SEQ ID NO: 5081214 - DNA, 25 bp, Homo sapien
cagggttgtagatgctgccattgtc

SEQ ID NO: 5081215 - DNA, 25 bp, Homo sapien
tccaggaagcgagaatgcagagttt

SEQ ID NO: 5081216 - DNA, 25 bp, Homo sapien
ctccaggaagcgagaatgcagagtt

SEQ ID NO: 5081217 - DNA, 25 bp, Homo sapien
ccaggaagcgagaatgcagagtttc

SEQ ID NO: 5081218 - DNA, 25 bp, Homo sapien
aggaagcgagaatgcagagtttcct

SEQ ID NO: 5081219 - DNA, 25 bp, Homo sapien
cagttgggtagccagtctgcagaca

SEQ ID NO: 5081220 - DNA, 25 bp, Homo sapien
ggtagccagtctgcagacagacact

SEQ ID NO: 5081221 - DNA, 25 bp, Homo sapien
gacagacactggcaacattgcggac

SEQ ID NO: 5081222 - DNA, 25 bp, Homo sapien
ccgttgatgatagaatggggtactg

SEQ ID NO: 5081223 - DNA, 25 bp, Homo sapien
aggtgtaatccgtctccacagacaa

SEQ ID NO: 5081224 - DNA, 25 bp, Homo sapien
tgtaatccgtctccacagacaaggc

SEQ ID NO: 5081225 - DNA, 25 bp, Homo sapien
gcaagtgggaaggtgtaatccgtct

SEQ ID NO: 5081226 - DNA, 25 bp, Homo sapien
cagacaaggccaggactcgtttgta

SEQ ID NO: 5081227 - DNA, 25 bp, Homo sapien
cacaaaggcagatggatcagccaag

SEQ ID NO: 5081228 - DNA, 25 bp, Homo sapien
ggcagatggatcagccaagaaggcc

SEQ ID NO: 5081229 - DNA, 25 bp, Homo sapien
gggcagcagccacaaaggcagatgg

SEQ ID NO: 5081230 - DNA, 25 bp, Homo sapien
ggcagcagccacaaaggcagatgga

SEQ ID NO: 5081231 - DNA, 25 bp, Homo sapien
atatcctcgtccgactcctccgact

SEQ ID NO: 5081232 - DNA, 25 bp, Homo sapien
aaagagaccaaatcccatatcctcg

SEQ ID NO: 5081233 - DNA, 25 bp, Homo sapien
gagcagctgtggtgtcagcagccac

SEQ ID NO: 5081234 - DNA, 25 bp, Homo sapien
tccgactcctccgactcttccttgg

SEQ ID NO: 5081235 - DNA, 25 bp, Homo sapien
aaataaagctggctaagttggttgc

SEQ ID NO: 5081236 - DNA, 25 bp, Homo sapien
ggctaagttggttgctttttggtga

SEQ ID NO: 5081237 - DNA, 25 bp, Homo sapien
gctggctaagttggttgctttttgg

SEQ ID NO: 5081238 - DNA, 25 bp, Homo sapien
ttttgcaaataaagctggctaagtt

SEQ ID NO: 5081239 - DNA, 25 bp, Homo sapien
tgagtcctttgtctcttcaaagccc

SEQ ID NO: 5081240 - DNA, 25 bp, Homo sapien
gtgtgagtcctttgtctcttcaaag

SEQ ID NO: 5081241 - DNA, 25 bp, Homo sapien
gagtcctttgtctcttcaaagccca

SEQ ID NO: 5081242 - DNA, 25 bp, Homo sapien
tgtgagtcctttgtctcttcaaagc

SEQ ID NO: 5081243 - DNA, 25 bp, Homo sapien
tccccagtggagcactgaatgtggg

SEQ ID NO: 5081244 - DNA, 25 bp, Homo sapien
gaaggcaaatcgtgatgaggtcccc

SEQ ID NO: 5081245 - DNA, 25 bp, Homo sapien
gttggagatttgaaggcaaatcgtg

SEQ ID NO: 5081246 - DNA, 25 bp, Homo sapien
tgatgaggtccccagtggagcactg

SEQ ID NO: 5081247 - DNA, 25 bp, Homo sapien
tcatttttcccttgagagccactga

SEQ ID NO: 5081248 - DNA, 25 bp, Homo sapien
tgataaacgcagtgtggcttcggtg

SEQ ID NO: 5081249 - DNA, 25 bp, Homo sapien
taaacgcagtgtggcttcggtgctg

SEQ ID NO: 5081250 - DNA, 25 bp, Homo sapien
tttcccttgagagccactgagtgtc

SEQ ID NO: 5081251 - DNA, 25 bp, Homo sapien
gcctcagtttgctcgcttggtggaa

SEQ ID NO: 5081252 - DNA, 25 bp, Homo sapien
gaagagcctgatctagaatctggac

SEQ ID NO: 5081253 - DNA, 25 bp, Homo sapien
ccaggcagttggcactttcagacaa

SEQ ID NO: 5081254 - DNA, 25 bp, Homo sapien
tgcatctgaacctagcccatggcct

SEQ ID NO: 5081255 - DNA, 25 bp, Homo sapien
agatacctatgggtgggctgactcc

SEQ ID NO: 5081256 - DNA, 25 bp, Homo sapien
gggcccctccatgagagaatgaggc

SEQ ID NO: 5081257 - DNA, 25 bp, Homo sapien
cagaggaccctggattggataatga

SEQ ID NO: 5081258 - DNA, 25 bp, Homo sapien
ctcccataaactcgagatacctatg

SEQ ID NO: 5081259 - DNA, 25 bp, Homo sapien
ggagatagagcctatagatgcatga

SEQ ID NO: 5081260 - DNA, 25 bp, Homo sapien
cagaggagatagagcctatagatgc

SEQ ID NO: 5081261 - DNA, 25 bp, Homo sapien
tgcagaggagatagagcctatagat

SEQ ID NO: 5081262 - DNA, 25 bp, Homo sapien
tagagcctatagatgcatgaagcca

SEQ ID NO: 5081263 - DNA, 25 bp, Homo sapien
ctcgcatggcgttcactgcatttac

SEQ ID NO: 5081264 - DNA, 25 bp, Homo sapien
agcatcttgtctccaaccggggatt

SEQ ID NO: 5081265 - DNA, 25 bp, Homo sapien
ttctcgcatggcgttcactgcattt

SEQ ID NO: 5081266 - DNA, 25 bp, Homo sapien
caaccggggatttctcgcatggcgt

SEQ ID NO: 5081267 - DNA, 25 bp, Homo sapien
tccacatgtcccagtatctactgta

SEQ ID NO: 5081268 - DNA, 25 bp, Homo sapien
ctgtagctggcagtaatttgcatgc

SEQ ID NO: 5081269 - DNA, 25 bp, Homo sapien
ccaaatgcctgctgcactatttgga

SEQ ID NO: 5081270 - DNA, 25 bp, Homo sapien
tctggaatttcttgggctgtatctc

SEQ ID NO: 5081271 - DNA, 25 bp, Homo sapien
tgcattcccgaaatgactccctctg

SEQ ID NO: 5081272 - DNA, 25 bp, Homo sapien
ttgtgcattcccgaaatgactccct

SEQ ID NO: 5081273 - DNA, 25 bp, Homo sapien
tcattgtgcattcccgaaatgactc

SEQ ID NO: 5081274 - DNA, 25 bp, Homo sapien
cattcccgaaatgactccctctgga

SEQ ID NO: 5081275 - DNA, 25 bp, Homo sapien
tcactgaatgcaaactgcagcaggt

SEQ ID NO: 5081276 - DNA, 25 bp, Homo sapien
cataacgcttgctgttctgtgcagt

SEQ ID NO: 5081277 - DNA, 25 bp, Homo sapien
ttcaactgaagactgacaggtctcc

SEQ ID NO: 5081278 - DNA, 25 bp, Homo sapien
caaattccatgacgagcataacgct

SEQ ID NO: 5081279 - DNA, 25 bp, Homo sapien
ctgcaaggaagatttgcgtgggctc

SEQ ID NO: 5081280 - DNA, 25 bp, Homo sapien
aggaagatttgcgtgggctctgtcc

SEQ ID NO: 5081281 - DNA, 25 bp, Homo sapien
gaagatttgcgtgggctctgtcctg

SEQ ID NO: 5081282 - DNA, 25 bp, Homo sapien
caaggaagatttgcgtgggctctgt

SEQ ID NO: 5081283 - DNA, 25 bp, Homo sapien
tgccaacagcttctgagtgaccttc

SEQ ID NO: 5081284 - DNA, 25 bp, Homo sapien
aagagccagacttcggtcatctcca

SEQ ID NO: 5081285 - DNA, 25 bp, Homo sapien
tcatcaaagctacgcatcccaagag

SEQ ID NO: 5081286 - DNA, 25 bp, Homo sapien
tgagtgaccttcatcaaagctacgc

SEQ ID NO: 5081287 - DNA, 25 bp, Homo sapien
ctaaaggaggctgcgtggtctgggg

SEQ ID NO: 5081288 - DNA, 25 bp, Homo sapien
gctaaaggaggctgcgtggtctggg

SEQ ID NO: 5081289 - DNA, 25 bp, Homo sapien
tgccaggcagtaagctatcagtggc

SEQ ID NO: 5081290 - DNA, 25 bp, Homo sapien
tgttgaccataaggccacatgagaa

SEQ ID NO: 5081291 - DNA, 25 bp, Homo sapien
tgctcccggaactggcctatgggtg

SEQ ID NO: 5081292 - DNA, 25 bp, Homo sapien
tgatgggtgttgaccataaggccac

SEQ ID NO: 5081293 - DNA, 25 bp, Homo sapien
tgagaaactgagtgctaggtcacag

SEQ ID NO: 5081294 - DNA, 25 bp, Homo sapien
ctttccgctttgtggctcctacagt

SEQ ID NO: 5081295 - DNA, 25 bp, Homo sapien
gctttgtggctcctacagtgcccct

SEQ ID NO: 5081296 - DNA, 25 bp, Homo sapien
ctgcatccaaactcttggtacacag

SEQ ID NO: 5081297 - DNA, 25 bp, Homo sapien
agtgcctactgcatccaaactcttg

SEQ ID NO: 5081298 - DNA, 25 bp, Homo sapien
cacagctcaggggaagtcaaatgca

SEQ ID NO: 5081299 - DNA, 25 bp, Homo sapien
tctctgtgtactgttttgcactccc

SEQ ID NO: 5081300 - DNA, 25 bp, Homo sapien
tgtactgttttgcactcccctcaac

SEQ ID NO: 5081301 - DNA, 25 bp, Homo sapien
tgtgtactgttttgcactcccctca

SEQ ID NO: 5081302 - DNA, 25 bp, Homo sapien
tctgtcctggaatgtcttggcaggt

SEQ ID NO: 5081303 - DNA, 25 bp, Homo sapien
caggtctggaatccagttagggaga

SEQ ID NO: 5081304 - DNA, 25 bp, Homo sapien
gccagcaggaaggaatcgcctctgt

SEQ ID NO: 5081305 - DNA, 25 bp, Homo sapien
tggcctcacatatctggctcgacaa

SEQ ID NO: 5081306 - DNA, 25 bp, Homo sapien
aagctttgcacaagccccggttgcc

SEQ ID NO: 5081307 - DNA, 25 bp, Homo sapien
tttgcacaagccccggttgcctgct

SEQ ID NO: 5081308 - DNA, 25 bp, Homo sapien
ccaagctttgcacaagccccggttg

SEQ ID NO: 5081309 - DNA, 25 bp, Homo sapien
gctttgcacaagccccggttgcctg

SEQ ID NO: 5081310 - DNA, 25 bp, Homo sapien
tttcttcccatgagcctttcttgcc

SEQ ID NO: 5081311 - DNA, 25 bp, Homo sapien
tggacattacacaaaatggcagttc

SEQ ID NO: 5081312 - DNA, 25 bp, Homo sapien
ttgcctcttcaatgttatctgattg

SEQ ID NO: 5081313 - DNA, 25 bp, Homo sapien
tatctgattgtactttccagctcat

SEQ ID NO: 5081314 - DNA, 25 bp, Homo sapien
tctcctacgtaacctccctcttctc

SEQ ID NO: 5081315 - DNA, 25 bp, Homo sapien
aggagatgtcagcttctttggtcct

SEQ ID NO: 5081316 - DNA, 25 bp, Homo sapien
tgctctctcctacgtaacctccctc

SEQ ID NO: 5081317 - DNA, 25 bp, Homo sapien
cttgctgctctctcctacgtaacct

SEQ ID NO: 5081318 - DNA, 25 bp, Homo sapien
tggtctccctcccatgggtccaagg

SEQ ID NO: 5081319 - DNA, 25 bp, Homo sapien
ctcccatgggtccaaggagccagat

SEQ ID NO: 5081320 - DNA, 25 bp, Homo sapien
ttggtactaacccatcaagctggtc

SEQ ID NO: 5081321 - DNA, 25 bp, Homo sapien
ggtactaacccatcaagctggtctc

SEQ ID NO: 5081322 - DNA, 25 bp, Homo sapien
gaatcataatagttcccgtggactg

SEQ ID NO: 5081323 - DNA, 25 bp, Homo sapien
tcttgctagctatagctgtgtggcc

SEQ ID NO: 5081324 - DNA, 25 bp, Homo sapien
ccgtggactgcgtgcttcttgctag

SEQ ID NO: 5081325 - DNA, 25 bp, Homo sapien
gggacagcctttccgttgactaaga

SEQ ID NO: 5081326 - DNA, 25 bp, Homo sapien
ttgagagcccatttactagagcagc

SEQ ID NO: 5081327 - DNA, 25 bp, Homo sapien
ggcagagaagtcctacaccacgtgt

SEQ ID NO: 5081328 - DNA, 25 bp, Homo sapien
tcaaactcggaacacaaagaatcac

SEQ ID NO: 5081329 - DNA, 25 bp, Homo sapien
gagcagctctgtttgtgcttaatga

SEQ ID NO: 5081330 - DNA, 25 bp, Homo sapien
tctattgtctggattatggtcatac

SEQ ID NO: 5081331 - DNA, 25 bp, Homo sapien
tactattatcaactagaaatcctga

SEQ ID NO: 5081332 - DNA, 25 bp, Homo sapien
gatttgaccatgtatacatctcgcc

SEQ ID NO: 5081333 - DNA, 25 bp, Homo sapien
tacatctcgccagctcccaaagatt

SEQ ID NO: 5081334 - DNA, 25 bp, Homo sapien
cagtaaatggcctgaaagactttcg

SEQ ID NO: 5081335 - DNA, 25 bp, Homo sapien
ggtatagcttgggagtgtgaaactt

SEQ ID NO: 5081336 - DNA, 25 bp, Homo sapien
tgagagcccggaaaacagtaaatgg

SEQ ID NO: 5081337 - DNA, 25 bp, Homo sapien
cttgattacaacttaacgattgtga

SEQ ID NO: 5081338 - DNA, 25 bp, Homo sapien
aactcttggatccatcagtaatatg

SEQ ID NO: 5081339 - DNA, 25 bp, Homo sapien
ctatatggtacaagatttaaggatc

SEQ ID NO: 5081340 - DNA, 25 bp, Homo sapien
tcttatagataataatctgggatcc

SEQ ID NO: 5081341 - DNA, 25 bp, Homo sapien
cagatagctatttgtctcaatacca

SEQ ID NO: 5081342 - DNA, 25 bp, Homo sapien
tccctatacattgaagctttgcttt

SEQ ID NO: 5081343 - DNA, 25 bp, Homo sapien
tactttttacagatggttccaatcc

SEQ ID NO: 5081344 - DNA, 25 bp, Homo sapien
gagcatgttagaatttatgttcacc

SEQ ID NO: 5081345 - DNA, 25 bp, Homo sapien
taatttactctgatacttcaaggtg

SEQ ID NO: 5081346 - DNA, 25 bp, Homo sapien
agttatatgaaataccttagagaca

SEQ ID NO: 5081347 - DNA, 25 bp, Homo sapien
gtagtcaggcttaatttttgagaga

SEQ ID NO: 5081348 - DNA, 25 bp, Homo sapien
ccacagtgtcggctttcttctcatt

SEQ ID NO: 5081349 - DNA, 25 bp, Homo sapien
tggagatagggacagttatgtatgt

SEQ ID NO: 5081350 - DNA, 25 bp, Homo sapien
gacatttgctgcagatgaacccgtg

SEQ ID NO: 5081351 - DNA, 25 bp, Homo sapien
tgatgatgccatttaaacgacaggc

SEQ ID NO: 5081352 - DNA, 25 bp, Homo sapien
tagatagtgccaaagaatgtgtgac

SEQ ID NO: 5081353 - DNA, 25 bp, Homo sapien
cgtgtacattgctggtcaacaggct

SEQ ID NO: 5081354 - DNA, 25 bp, Homo sapien
agtttctgtttcacccgtcgtccat

SEQ ID NO: 5081355 - DNA, 25 bp, Homo sapien
gcagacctcgtggaagcgctggaaa

SEQ ID NO: 5081356 - DNA, 25 bp, Homo sapien
tgttcgaggactctgtgaatctgtg

SEQ ID NO: 5081357 - DNA, 25 bp, Homo sapien
ctcgtggaagcgctggaaaaatttg

SEQ ID NO: 5081358 - DNA, 25 bp, Homo sapien
gaaggcgagaaccgccgggaagcga

SEQ ID NO: 5081359 - DNA, 25 bp, Homo sapien
gcgagaaccgccgggaagcgacgcc

SEQ ID NO: 5081360 - DNA, 25 bp, Homo sapien
ctactcggccgaggaaggcgagaac

SEQ ID NO: 5081361 - DNA, 25 bp, Homo sapien
tactcggccgaggaaggcgagaacc

SEQ ID NO: 5081362 - DNA, 25 bp, Homo sapien
ccaagcgtctcaagaccgaggaggg

SEQ ID NO: 5081363 - DNA, 25 bp, Homo sapien
gccaggccaagcgtctcaagaccga

SEQ ID NO: 5081364 - DNA, 25 bp, Homo sapien
gaggaggaccgggagtacgagagcc

SEQ ID NO: 5081365 - DNA, 25 bp, Homo sapien
accgggagtacgagagccaggccaa

SEQ ID NO: 5081366 - DNA, 25 bp, Homo sapien
tcctcctcttcctcccccagggaga

SEQ ID NO: 5081367 - DNA, 25 bp, Homo sapien
ctcctcttcctcccccagggagacg

SEQ ID NO: 5081368 - DNA, 25 bp, Homo sapien
cctgccagccggtccctccggccgc

SEQ ID NO: 5081369 - DNA, 25 bp, Homo sapien
ccgaggcgcgcgccccaccgccacc

SEQ ID NO: 5081370 - DNA, 25 bp, Homo sapien
acccgcctgccagccggtccctccg

SEQ ID NO: 5081371 - DNA, 25 bp, Homo sapien
ccgcctgccagccggtccctccggc

SEQ ID NO: 5081372 - DNA, 25 bp, Homo sapien
cgccagtctcctggccgcgcagtcc

SEQ ID NO: 5081373 - DNA, 25 bp, Homo sapien
cgcagaagaggcgctgccggcggcg

SEQ ID NO: 5081374 - DNA, 25 bp, Homo sapien
accctcgcagaagaggcgctgccgg

SEQ ID NO: 5081375 - DNA, 25 bp, Homo sapien
agaagaggcgctgccggcggcgagg

SEQ ID NO: 5081376 - DNA, 25 bp, Homo sapien
ttagattcgctcctccgggcaggga

SEQ ID NO: 5081377 - DNA, 25 bp, Homo sapien
cctgccaatagggagcagaacccgg

SEQ ID NO: 5081378 - DNA, 25 bp, Homo sapien
ggttgcgtccccatccttagattcg

SEQ ID NO: 5081379 - DNA, 25 bp, Homo sapien
gcaggctgcggctggattcgatcct

SEQ ID NO: 5081380 - DNA, 25 bp, Homo sapien
gcatttaaattagcggcagggcggt

SEQ ID NO: 5081381 - DNA, 25 bp, Homo sapien
acttacagggacaggcaagtcagta

SEQ ID NO: 5081382 - DNA, 25 bp, Homo sapien
ttataaccgatcagaccgacgagcg

SEQ ID NO: 5081383 - DNA, 25 bp, Homo sapien
gaaagaccattctcatggctccaag

SEQ ID NO: 5081384 - DNA, 25 bp, Homo sapien
cttaatctcccctagactgtttctt

SEQ ID NO: 5081385 - DNA, 25 bp, Homo sapien
gcctaaggcaggtttcttaatctcc

SEQ ID NO: 5081386 - DNA, 25 bp, Homo sapien
tgcccagcctaaggcaggtttctta

SEQ ID NO: 5081387 - DNA, 25 bp, Homo sapien
ccagcctaaggcaggtttcttaatc

SEQ ID NO: 5081388 - DNA, 25 bp, Homo sapien
gtgttacccactgtgtctgaaatct

SEQ ID NO: 5081389 - DNA, 25 bp, Homo sapien
tctttaccctcatttgtgttaccca

SEQ ID NO: 5081390 - DNA, 25 bp, Homo sapien
ttgcagggaggatatctctttaccc

SEQ ID NO: 5081391 - DNA, 25 bp, Homo sapien
gaataatgatgtcgtttcacattgc

SEQ ID NO: 5081392 - DNA, 25 bp, Homo sapien
caatggtgccaaggttgggaagccc

SEQ ID NO: 5081393 - DNA, 25 bp, Homo sapien
gtacagctccctctcagcaaagaat

SEQ ID NO: 5081394 - DNA, 25 bp, Homo sapien
caagggtgctggtaaacattctaca

SEQ ID NO: 5081395 - DNA, 25 bp, Homo sapien
tagctgtgatcatagagtataaccc

SEQ ID NO: 5081396 - DNA, 25 bp, Homo sapien
tgttcctatgaaggtccagtctcct

SEQ ID NO: 5081397 - DNA, 25 bp, Homo sapien
ccaaatctgttggatggaggcgctg

SEQ ID NO: 5081398 - DNA, 25 bp, Homo sapien
cacttggtggactgctttgctccca

SEQ ID NO: 5081399 - DNA, 25 bp, Homo sapien
tgtccttaggaacaagtctgctcat

SEQ ID NO: 5081400 - DNA, 25 bp, Homo sapien
cttgcccttgtgtgctggctagcat

SEQ ID NO: 5081401 - DNA, 25 bp, Homo sapien
gaatcttgcccttgtgtgctggcta

SEQ ID NO: 5081402 - DNA, 25 bp, Homo sapien
atcttgcccttgtgtgctggctagc

SEQ ID NO: 5081403 - DNA, 25 bp, Homo sapien
aatcttgcccttgtgtgctggctag

SEQ ID NO: 5081404 - DNA, 25 bp, Homo sapien
ggccaccctaagctctcagctctat

SEQ ID NO: 5081405 - DNA, 25 bp, Homo sapien
tggccaccctaagctctcagctcta

SEQ ID NO: 5081406 - DNA, 25 bp, Homo sapien
gcatgtggtcgtgaactgaaggtcc

SEQ ID NO: 5081407 - DNA, 25 bp, Homo sapien
gtcgtgaactgaaggtcctgcaggt

SEQ ID NO: 5081408 - DNA, 25 bp, Homo sapien
gcaggaagagccacgggccccttct

SEQ ID NO: 5081409 - DNA, 25 bp, Homo sapien
cagcctgtagcagttagcatgtggt

SEQ ID NO: 5081410 - DNA, 25 bp, Homo sapien
ggctgggtaggagaacagcccttct

SEQ ID NO: 5081411 - DNA, 25 bp, Homo sapien
ttctgttcagggctggtatagaggg

SEQ ID NO: 5081412 - DNA, 25 bp, Homo sapien
cccttctgttcagggctggtataga

SEQ ID NO: 5081413 - DNA, 25 bp, Homo sapien
tgggtaggagaacagcccttctgtt

SEQ ID NO: 5081414 - DNA, 25 bp, Homo sapien
tcccctggacggctctgtggtccta

SEQ ID NO: 5081415 - DNA, 25 bp, Homo sapien
ggaacctccacatctaatgctgaat

SEQ ID NO: 5081416 - DNA, 25 bp, Homo sapien
tagattatgctgctctcagatccct

SEQ ID NO: 5081417 - DNA, 25 bp, Homo sapien
tagcttggttgatgccaatttgacc

SEQ ID NO: 5081418 - DNA, 25 bp, Homo sapien
tcaggtatgtacagttggagaggaa

SEQ ID NO: 5081419 - DNA, 25 bp, Homo sapien
tggagaggaaagacactaaggttat

SEQ ID NO: 5081420 - DNA, 25 bp, Homo sapien
tctacaagtaggatggagtcttcag

SEQ ID NO: 5081421 - DNA, 25 bp, Homo sapien
gattgaggtccttgtaaatgccagg

SEQ ID NO: 5081422 - DNA, 25 bp, Homo sapien
gaggcgacccaagtttacaggagaa

SEQ ID NO: 5081423 - DNA, 25 bp, Homo sapien
gaaagtttggcgtgtgcagccactg

SEQ ID NO: 5081424 - DNA, 25 bp, Homo sapien
gatttagggagtgaccgttcctgca

SEQ ID NO: 5081425 - DNA, 25 bp, Homo sapien
tccagcgctcgctaagctagaggcg

SEQ ID NO: 5081426 - DNA, 25 bp, Homo sapien
atgatgtccactctcaagaggtctg

SEQ ID NO: 5081427 - DNA, 25 bp, Homo sapien
tagggctgtgatcgtgcagccccag

SEQ ID NO: 5081428 - DNA, 25 bp, Homo sapien
gaagccaagcaccacgtccgaggct

SEQ ID NO: 5081429 - DNA, 25 bp, Homo sapien
tctttgacctctagggctgtgatcg

SEQ ID NO: 5081430 - DNA, 25 bp, Homo sapien
catgcgcttgcaagtcagacggtcc

SEQ ID NO: 5081431 - DNA, 25 bp, Homo sapien
tcccaaatgctggatggccacacgg

SEQ ID NO: 5081432 - DNA, 25 bp, Homo sapien
cacacggccctctatgatgcatgcg

SEQ ID NO: 5081433 - DNA, 25 bp, Homo sapien
tcgcattgcaagtggcccgctagat

SEQ ID NO: 5081434 - DNA, 25 bp, Homo sapien
tggtaacatcttgggcatgtcaaag

SEQ ID NO: 5081435 - DNA, 25 bp, Homo sapien
ttcagacgaatgctgcacatggtaa

SEQ ID NO: 5081436 - DNA, 25 bp, Homo sapien
caaagtcctcactgaatcacagaaa

SEQ ID NO: 5081437 - DNA, 25 bp, Homo sapien
cttcttcagacgaatgctgcacatg

SEQ ID NO: 5081438 - DNA, 25 bp, Homo sapien
cttgttaatggccaggtgatactcc

SEQ ID NO: 5081439 - DNA, 25 bp, Homo sapien
catccaccttgaaggttcctttggc

SEQ ID NO: 5081440 - DNA, 25 bp, Homo sapien
tcctttggcgattcggttggccacc

SEQ ID NO: 5081441 - DNA, 25 bp, Homo sapien
tgactcctccatgcagactgttggg

SEQ ID NO: 5081442 - DNA, 25 bp, Homo sapien
caccatctggactgatgcgcgagaa

SEQ ID NO: 5081443 - DNA, 25 bp, Homo sapien
tgcgcgagaactggacgccatttga

SEQ ID NO: 5081444 - DNA, 25 bp, Homo sapien
tgtagttgactatgagctctccgcc

SEQ ID NO: 5081445 - DNA, 25 bp, Homo sapien
gctctccgccatccagggtgtatgt

SEQ ID NO: 5081446 - DNA, 25 bp, Homo sapien
ctaccatgcccagcttatgttgtat

SEQ ID NO: 5081447 - DNA, 25 bp, Homo sapien
taccatgcccagcttatgttgtatt

SEQ ID NO: 5081448 - DNA, 25 bp, Homo sapien
aactgatgagcctgagatttaggaa

SEQ ID NO: 5081449 - DNA, 25 bp, Homo sapien
caacatgaaaatcacactccaaata

SEQ ID NO: 5081450 - DNA, 25 bp, Homo sapien
atttaggaagaagcctaggaggaga

SEQ ID NO: 5081451 - DNA, 25 bp, Homo sapien
ttttaagcactagagaaatgaatca

SEQ ID NO: 5081452 - DNA, 25 bp, Homo sapien
ggtctgaaagactggcccacacaat

SEQ ID NO: 5081453 - DNA, 25 bp, Homo sapien
tgtctaaacacgacagaaactggtt

SEQ ID NO: 5081454 - DNA, 25 bp, Homo sapien
tttgagacagggttaggacaggtta

SEQ ID NO: 5081455 - DNA, 25 bp, Homo sapien
tttagagaccatgagaatgcatgtc

SEQ ID NO: 5081456 - DNA, 25 bp, Homo sapien
tatccgcttctatggtgacttcatg

SEQ ID NO: 5081457 - DNA, 25 bp, Homo sapien
cgcttctatggtgacttcatggtca

SEQ ID NO: 5081458 - DNA, 25 bp, Homo sapien
acaggcaaataagtatccgcttcta

SEQ ID NO: 5081459 - DNA, 25 bp, Homo sapien
aataagtatccgcttctatggtgac

SEQ ID NO: 5081460 - DNA, 25 bp, Homo sapien
attgcagttccacagagcctggtac

SEQ ID NO: 5081461 - DNA, 25 bp, Homo sapien
ggtacagatctgacatggccccaat

SEQ ID NO: 5081462 - DNA, 25 bp, Homo sapien
tgatcaaatgatgggcaagcctttt

SEQ ID NO: 5081463 - DNA, 25 bp, Homo sapien
agggccaccctagggattgcagttc

SEQ ID NO: 5081464 - DNA, 25 bp, Homo sapien
gatctgtcaggaacaccatatgctg

SEQ ID NO: 5081465 - DNA, 25 bp, Homo sapien
gaaccagaaagacaagggatctgtc

SEQ ID NO: 5081466 - DNA, 25 bp, Homo sapien
tttcaacagagatgaccaacataca

SEQ ID NO: 5081467 - DNA, 25 bp, Homo sapien
cttgggctcaaaaatccaaccgcct

SEQ ID NO: 5081468 - DNA, 25 bp, Homo sapien
aatgagaaatctcatgaccctaaga

SEQ ID NO: 5081469 - DNA, 25 bp, Homo sapien
ctctccaggagctctaagtgaaatt

SEQ ID NO: 5081470 - DNA, 25 bp, Homo sapien
catgttgagacattttcgtgtaaaa

SEQ ID NO: 5081471 - DNA, 25 bp, Homo sapien
atgaccctaagaagagagatttaaa

SEQ ID NO: 5081472 - DNA, 25 bp, Homo sapien
tccatgggtaaaaggagctctcagc

SEQ ID NO: 5081473 - DNA, 25 bp, Homo sapien
ctcaacagcgaggtgaacttttgaa

SEQ ID NO: 5081474 - DNA, 25 bp, Homo sapien
catctgttatcctagtacgttggga

SEQ ID NO: 5081475 - DNA, 25 bp, Homo sapien
tgcattttagactaacaaagagaca

SEQ ID NO: 5081476 - DNA, 25 bp, Homo sapien
taaaactagaactcaacagcgaggt

SEQ ID NO: 5081477 - DNA, 25 bp, Homo sapien
taagaaatgctcaagggagtcccac

SEQ ID NO: 5081478 - DNA, 25 bp, Homo sapien
ggcccaactacggttgcctacaaga

SEQ ID NO: 5081479 - DNA, 25 bp, Homo sapien
tggagcgcccagatacataatataa

SEQ ID NO: 5081480 - DNA, 25 bp, Homo sapien
gatctaaagggagacatagacacca

SEQ ID NO: 5081481 - DNA, 25 bp, Homo sapien
ggcaaaagacctagtcaaagcactc

SEQ ID NO: 5081482 - DNA, 25 bp, Homo sapien
tcaggagctccagaaagattaacac

SEQ ID NO: 5081483 - DNA, 25 bp, Homo sapien
gcaagaacagcaagtgaacacagat

SEQ ID NO: 5081484 - DNA, 25 bp, Homo sapien
ggcaagcgtttcctaccagaattct

SEQ ID NO: 5081485 - DNA, 25 bp, Homo sapien
ctactttggatctgtgactaaatcc

SEQ ID NO: 5081486 - DNA, 25 bp, Homo sapien
atcctgatggattatctgagcaagc

SEQ ID NO: 5081487 - DNA, 25 bp, Homo sapien
tgactaaatcctgatggattatctg

SEQ ID NO: 5081488 - DNA, 25 bp, Homo sapien
ggatctgtgactaaatcctgatgga

SEQ ID NO: 5081489 - DNA, 25 bp, Homo sapien
tcttgccgtgtcaccaaagctaagt

SEQ ID NO: 5081490 - DNA, 25 bp, Homo sapien
atgatgggggcatgcctgtgatcct

SEQ ID NO: 5081491 - DNA, 25 bp, Homo sapien
aaagctaagtgcagtgcccaatcat

SEQ ID NO: 5081492 - DNA, 25 bp, Homo sapien
agctcaatttgccttgaacccctgg

SEQ ID NO: 5081493 - DNA, 25 bp, Homo sapien
cacaagggcattcctgctagacctg

SEQ ID NO: 5081494 - DNA, 25 bp, Homo sapien
taggacctgagacccttagtaacac

SEQ ID NO: 5081495 - DNA, 25 bp, Homo sapien
tttacgcttcatggttgggaccacg

SEQ ID NO: 5081496 - DNA, 25 bp, Homo sapien
aaccaagctgcaggtcgttttcagg

SEQ ID NO: 5081497 - DNA, 25 bp, Homo sapien
tttgtgtagtacaccagggcctcct

SEQ ID NO: 5081498 - DNA, 25 bp, Homo sapien
caagcaacacagattcctcccatag

SEQ ID NO: 5081499 - DNA, 25 bp, Homo sapien
tgattcctccatactcttgaacacg

SEQ ID NO: 5081500 - DNA, 25 bp, Homo sapien
gattcctcccatagcaatgtggcaa

SEQ ID NO: 5081501 - DNA, 25 bp, Homo sapien
ttcatgcaaaaaggaaggtgcattt

SEQ ID NO: 5081502 - DNA, 25 bp, Homo sapien
cccatagcgtaaatctttcatgcaa

SEQ ID NO: 5081503 - DNA, 25 bp, Homo sapien
gtgcccggccccatagcgtaaatct

SEQ ID NO: 5081504 - DNA, 25 bp, Homo sapien
caaaaaggaaggtgcatttctgcct

SEQ ID NO: 5081505 - DNA, 25 bp, Homo sapien
gagtcgttgactcttgacgttcatt

SEQ ID NO: 5081506 - DNA, 25 bp, Homo sapien
gaagaggaacagacggtaatgatgc

SEQ ID NO: 5081507 - DNA, 25 bp, Homo sapien
gaaatctgacatagacttcctagaa

SEQ ID NO: 5081508 - DNA, 25 bp, Homo sapien
gcacaggtccatcctgtttataata

SEQ ID NO: 5081509 - DNA, 25 bp, Homo sapien
tgcactctgaaagtgaaggaaaaac

SEQ ID NO: 5081510 - DNA, 25 bp, Homo sapien
ctctgaaagtgaaggaaaaactcac

SEQ ID NO: 5081511 - DNA, 25 bp, Homo sapien
ctgcactctgaaagtgaaggaaaaa

SEQ ID NO: 5081512 - DNA, 25 bp, Homo sapien
cactctgaaagtgaaggaaaaactc

SEQ ID NO: 5081513 - DNA, 25 bp, Homo sapien
catcctccaactttagttctgaagc

SEQ ID NO: 5081514 - DNA, 25 bp, Homo sapien
gtgtcggcagggagaagcagtttct

SEQ ID NO: 5081515 - DNA, 25 bp, Homo sapien
ctccaactttagttctgaagccacc

SEQ ID NO: 5081516 - DNA, 25 bp, Homo sapien
atgtcacatcctccaactttagttc

SEQ ID NO: 5081517 - DNA, 25 bp, Homo sapien
ttctcaggtcgaatgcagtgccttg

SEQ ID NO: 5081518 - DNA, 25 bp, Homo sapien
aaaccattgagatggaagtcctgca

SEQ ID NO: 5081519 - DNA, 25 bp, Homo sapien
ggtcaaaaccattgagatggaagtc

SEQ ID NO: 5081520 - DNA, 25 bp, Homo sapien
ttagatcccttcagacagaaattgt

SEQ ID NO: 5081521 - DNA, 25 bp, Homo sapien
tgtatacttctagtacccgcccgct

SEQ ID NO: 5081522 - DNA, 25 bp, Homo sapien
gattgactgcatcaggccagttctg

SEQ ID NO: 5081523 - DNA, 25 bp, Homo sapien
aatgtgccatccaggaagttgcccg

SEQ ID NO: 5081524 - DNA, 25 bp, Homo sapien
tctccaggcagaaaccggagtgctt

SEQ ID NO: 5081525 - DNA, 25 bp, Homo sapien
caggtggtgtggtcatactcctcac

SEQ ID NO: 5081526 - DNA, 25 bp, Homo sapien
ttaagccacagaaaacttgaaccag

SEQ ID NO: 5081527 - DNA, 25 bp, Homo sapien
taagccacagaaaacttgaaccagg

SEQ ID NO: 5081528 - DNA, 25 bp, Homo sapien
aaacttgaaccaggtggtgtggtca

SEQ ID NO: 5081529 - DNA, 25 bp, Homo sapien
ccttttttctggacaggagacaggt

SEQ ID NO: 5081530 - DNA, 25 bp, Homo sapien
ccctggactggatcatatcttcaca

SEQ ID NO: 5081531 - DNA, 25 bp, Homo sapien
gccctggactggatcatatcttcac

SEQ ID NO: 5081532 - DNA, 25 bp, Homo sapien
tttttctggacaggagacaggtggc

SEQ ID NO: 5081533 - DNA, 25 bp, Homo sapien
gtcattagacatggcctggagccag

SEQ ID NO: 5081534 - DNA, 25 bp, Homo sapien
gaaaaggaaatcaatacccagactg

SEQ ID NO: 5081535 - DNA, 25 bp, Homo sapien
agctggtcattagacatggcctgga

SEQ ID NO: 5081536 - DNA, 25 bp, Homo sapien
ctgcacagggaatcgagctggtcat

SEQ ID NO: 5081537 - DNA, 25 bp, Homo sapien
gacgacattgttggttgggttcact

SEQ ID NO: 5081538 - DNA, 25 bp, Homo sapien
ttgttggttgggttcacttgccctc

SEQ ID NO: 5081539 - DNA, 25 bp, Homo sapien
ttggttgggttcacttgccctctga

SEQ ID NO: 5081540 - DNA, 25 bp, Homo sapien
atgacgacattgttggttgggttca

SEQ ID NO: 5081541 - DNA, 25 bp, Homo sapien
tcttcccaagcgttggccgggctgt

SEQ ID NO: 5081542 - DNA, 25 bp, Homo sapien
tctactgctgtatagagacaggtcc

SEQ ID NO: 5081543 - DNA, 25 bp, Homo sapien
tctgtccctggtgcaatgtcatcct

SEQ ID NO: 5081544 - DNA, 25 bp, Homo sapien
tgtgctttctcagttaacccaaagg

SEQ ID NO: 5081545 - DNA, 25 bp, Homo sapien
ctggagtgcaatgagagtcttgctg

SEQ ID NO: 5081546 - DNA, 25 bp, Homo sapien
gcttcagcttcccgactaactgaga

SEQ ID NO: 5081547 - DNA, 25 bp, Homo sapien
caatgagagtcttgctgtgacccag

SEQ ID NO: 5081548 - DNA, 25 bp, Homo sapien
gagtgcaatgagagtcttgctgtga

SEQ ID NO: 5081549 - DNA, 25 bp, Homo sapien
tgctattgtcctctaggtttctctg

SEQ ID NO: 5081550 - DNA, 25 bp, Homo sapien
tcaaaggattctgctattgtcctct

SEQ ID NO: 5081551 - DNA, 25 bp, Homo sapien
cactcacatgtgaatcaaaggattc

SEQ ID NO: 5081552 - DNA, 25 bp, Homo sapien
tcacatgtgaatcaaaggattctgc

SEQ ID NO: 5081553 - DNA, 25 bp, Homo sapien
ttagtagagatctcgccttgttgcc

SEQ ID NO: 5081554 - DNA, 25 bp, Homo sapien
gacttgcaccaccacagtcggctat

SEQ ID NO: 5081555 - DNA, 25 bp, Homo sapien
gtgccatggtacaatcagcttactg

SEQ ID NO: 5081556 - DNA, 25 bp, Homo sapien
gccttgaaccctgacctttggtgat

SEQ ID NO: 5081557 - DNA, 25 bp, Homo sapien
gtgcggtggctcgcgcctgtaatcc

SEQ ID NO: 5081558 - DNA, 25 bp, Homo sapien
tgcggtggctcgcgcctgtaatccc

SEQ ID NO: 5081559 - DNA, 25 bp, Homo sapien
ttttttgcttggtgcggtggctcgc

SEQ ID NO: 5081560 - DNA, 25 bp, Homo sapien
aatttttttgcttggtgcggtggct

SEQ ID NO: 5081561 - DNA, 25 bp, Homo sapien
gaaattgggacaaaacaccttcatg

SEQ ID NO: 5081562 - DNA, 25 bp, Homo sapien
gcgcagatacctaggcttgtccatt

SEQ ID NO: 5081563 - DNA, 25 bp, Homo sapien
caggcattctctagccttggtacaa

SEQ ID NO: 5081564 - DNA, 25 bp, Homo sapien
aaaaacctgctggttgcgcagatac

SEQ ID NO: 5081565 - DNA, 25 bp, Homo sapien
ctctgggtaagatgacctgagtccc

SEQ ID NO: 5081566 - DNA, 25 bp, Homo sapien
gctctgggtaagatgacctgagtcc

SEQ ID NO: 5081567 - DNA, 25 bp, Homo sapien
agctctgggtaagatgacctgagtc

SEQ ID NO: 5081568 - DNA, 25 bp, Homo sapien
cccttatgatacagcctgaatgcat

SEQ ID NO: 5081569 - DNA, 25 bp, Homo sapien
tacaaagtgtggagaaaagtcttgg

SEQ ID NO: 5081570 - DNA, 25 bp, Homo sapien
gatgtgattggtcctgtgagtactt

SEQ ID NO: 5081571 - DNA, 25 bp, Homo sapien
caaatcttgcctgtcaagtgtggcc

SEQ ID NO: 5081572 - DNA, 25 bp, Homo sapien
ggtaagatagatgccttttccccac

SEQ ID NO: 5081573 - DNA, 25 bp, Homo sapien
gacagaataaggcaagtgttgcatc

SEQ ID NO: 5081574 - DNA, 25 bp, Homo sapien
gatccccgtcgaggtcaagatcaag

SEQ ID NO: 5081575 - DNA, 25 bp, Homo sapien
tctatttcacgaccaagaagcaggt

SEQ ID NO: 5081576 - DNA, 25 bp, Homo sapien
tgcctgaccaacctaatacagtgtt

SEQ ID NO: 5081577 - DNA, 25 bp, Homo sapien
ggtcagcatctcctcgacgatcaag

SEQ ID NO: 5081578 - DNA, 25 bp, Homo sapien
gacgatcaagatctatctctcttcg

SEQ ID NO: 5081579 - DNA, 25 bp, Homo sapien
gcttcactcagaagatctaggtctg

SEQ ID NO: 5081580 - DNA, 25 bp, Homo sapien
tctctcttcgtagatcaagatcagc

SEQ ID NO: 5081581 - DNA, 25 bp, Homo sapien
cagaaaatttgagacggtgatcgcc

SEQ ID NO: 5081582 - DNA, 25 bp, Homo sapien
tatgatatcatgctgaggcgccttg

SEQ ID NO: 5081583 - DNA, 25 bp, Homo sapien
tatgattgtcatcgttacagccggc

SEQ ID NO: 5081584 - DNA, 25 bp, Homo sapien
tacagccggcgaagaagaagcaggt

SEQ ID NO: 5081585 - DNA, 25 bp, Homo sapien
ttcataggccggtctaatgcatccg

SEQ ID NO: 5081586 - DNA, 25 bp, Homo sapien
agagtagctgactaggccaggtccc

SEQ ID NO: 5081587 - DNA, 25 bp, Homo sapien
tgagccccaaagatcagagtagctg

SEQ ID NO: 5081588 - DNA, 25 bp, Homo sapien
taagattgttaaggctgagggtccc

SEQ ID NO: 5081589 - DNA, 25 bp, Homo sapien
gttgccatagggatactttcacagg

SEQ ID NO: 5081590 - DNA, 25 bp, Homo sapien
tcaggacggccttgacaaccataag

SEQ ID NO: 5081591 - DNA, 25 bp, Homo sapien
ggcatcttcaaactcgtcctcctga

SEQ ID NO: 5081592 - DNA, 25 bp, Homo sapien
taaggataccatacattagggaatg

SEQ ID NO: 5081593 - DNA, 25 bp, Homo sapien
tgtgatagctgttattccctgtcta

SEQ ID NO: 5081594 - DNA, 25 bp, Homo sapien
ctgtgatagctgttattccctgtct

SEQ ID NO: 5081595 - DNA, 25 bp, Homo sapien
ttgctttggttgtcaggtatctgtg

SEQ ID NO: 5081596 - DNA, 25 bp, Homo sapien
tatacatgacgtaaaggatttcaag

SEQ ID NO: 5081597 - DNA, 25 bp, Homo sapien
caagcatgctttcatcctgtataca

SEQ ID NO: 5081598 - DNA, 25 bp, Homo sapien
caagatcaaacactcagcataacag

SEQ ID NO: 5081599 - DNA, 25 bp, Homo sapien
taacagaggtgatgaacctgcttcc

SEQ ID NO: 5081600 - DNA, 25 bp, Homo sapien
tatgggtttcagatgcactctcatg

SEQ ID NO: 5081601 - DNA, 25 bp, Homo sapien
ccttggtggcataagtgataacatc

SEQ ID NO: 5081602 - DNA, 25 bp, Homo sapien
ggtaagcctgcctccaatcctgcag

SEQ ID NO: 5081603 - DNA, 25 bp, Homo sapien
tttaagaagagagagttcatattct

SEQ ID NO: 5081604 - DNA, 25 bp, Homo sapien
taagaagagagagttcatattctca

SEQ ID NO: 5081605 - DNA, 25 bp, Homo sapien
aagaagagagagttcatattctcac

SEQ ID NO: 5081606 - DNA, 25 bp, Homo sapien
ttaagaagagagagttcatattctc

SEQ ID NO: 5081607 - DNA, 25 bp, Homo sapien
tccaggcataaatgaactccagaag

SEQ ID NO: 5081608 - DNA, 25 bp, Homo sapien
ttgctcatgactcggaaaccactcc

SEQ ID NO: 5081609 - DNA, 25 bp, Homo sapien
tgtagtaccatagcgctgacccttc

SEQ ID NO: 5081610 - DNA, 25 bp, Homo sapien
caggcataggcctttcagtaaattt

SEQ ID NO: 5081611 - DNA, 25 bp, Homo sapien
tagatagtgcaagattcccagttca

SEQ ID NO: 5081612 - DNA, 25 bp, Homo sapien
catagtctccttttagatagtgcaa

SEQ ID NO: 5081613 - DNA, 25 bp, Homo sapien
ggttttttgttgctctggcatagtc

SEQ ID NO: 5081614 - DNA, 25 bp, Homo sapien
tcccagttcatagtaagtatatggc

SEQ ID NO: 5081615 - DNA, 25 bp, Homo sapien
ttcaagtgctatgtgggtcctaaag

SEQ ID NO: 5081616 - DNA, 25 bp, Homo sapien
gcttccatggaatagtctttgtaat

SEQ ID NO: 5081617 - DNA, 25 bp, Homo sapien
ttgttcaagtgctatgtgggtccta

SEQ ID NO: 5081618 - DNA, 25 bp, Homo sapien
gtcctaaagtgtaatcgggcttcca

SEQ ID NO: 5081619 - DNA, 25 bp, Homo sapien
aaagatatgatttttctactacctg

SEQ ID NO: 5081620 - DNA, 25 bp, Homo sapien
ggcccattcctttctcgttactgat

SEQ ID NO: 5081621 - DNA, 25 bp, Homo sapien
cctgttaatgacttgctcactgtag

SEQ ID NO: 5081622 - DNA, 25 bp, Homo sapien
ggcagccgcctcttggattttttcc

SEQ ID NO: 5081623 - DNA, 25 bp, Homo sapien
tccatcatgaggagacattcatgag

SEQ ID NO: 5081624 - DNA, 25 bp, Homo sapien
tggcttggacataaggcctggaggt

SEQ ID NO: 5081625 - DNA, 25 bp, Homo sapien
tctttccatcatgaggagacattca

SEQ ID NO: 5081626 - DNA, 25 bp, Homo sapien
tcatgaggagacattcatgagaaga

SEQ ID NO: 5081627 - DNA, 25 bp, Homo sapien
aaaactcctcgcaactctgggtact

SEQ ID NO: 5081628 - DNA, 25 bp, Homo sapien
ggtactcagcaaccatgctttgagg

SEQ ID NO: 5081629 - DNA, 25 bp, Homo sapien
gagaccagcatgctttgcgccgatc

SEQ ID NO: 5081630 - DNA, 25 bp, Homo sapien
aaggatcgttgagcggagaccgcct

SEQ ID NO: 5081631 - DNA, 25 bp, Homo sapien
atttgtttgaaggatgcacaaacga

SEQ ID NO: 5081632 - DNA, 25 bp, Homo sapien
tgtttgaaggatgcacaaacgaagg

SEQ ID NO: 5081633 - DNA, 25 bp, Homo sapien
gaaggatgcacaaacgaagggccag

SEQ ID NO: 5081634 - DNA, 25 bp, Homo sapien
aagggccagcggctacagctctaga

SEQ ID NO: 5081635 - DNA, 25 bp, Homo sapien
gctctctggctctgtgtctccgctg

SEQ ID NO: 5081636 - DNA, 25 bp, Homo sapien
gcaaatgtcttatccctaatctcca

SEQ ID NO: 5081637 - DNA, 25 bp, Homo sapien
gaaacaaccaccagtgctggttaat

SEQ ID NO: 5081638 - DNA, 25 bp, Homo sapien
ggttaatatatgttccacgtaagca

SEQ ID NO: 5081639 - DNA, 25 bp, Homo sapien
ctgaaacaaccaccagtgctggtta

SEQ ID NO: 5081640 - DNA, 25 bp, Homo sapien
tcactggctgtcactcggacctctt

SEQ ID NO: 5081641 - DNA, 25 bp, Homo sapien
ggctgtcactcggacctctttgtaa

SEQ ID NO: 5081642 - DNA, 25 bp, Homo sapien
cactcggacctctttgtaaatgtaa

SEQ ID NO: 5081643 - DNA, 25 bp, Homo sapien
tgtcactcggacctctttgtaaatg

SEQ ID NO: 5081644 - DNA, 25 bp, Homo sapien
agagccgagatctcgccactgcatt

SEQ ID NO: 5081645 - DNA, 25 bp, Homo sapien
attccagcctgggtgacagtagaac

SEQ ID NO: 5081646 - DNA, 25 bp, Homo sapien
ctgcgaggtggaggttacaaagagc

SEQ ID NO: 5081647 - DNA, 25 bp, Homo sapien
gcgaggtggaggttacaaagagccg

SEQ ID NO: 5081648 - DNA, 25 bp, Homo sapien
acatggcgaagccccgtctccacaa

SEQ ID NO: 5081649 - DNA, 25 bp, Homo sapien
aacatggcgaagccccgtctccaca

SEQ ID NO: 5081650 - DNA, 25 bp, Homo sapien
aaaatacaaaaattagccagacgtg

SEQ ID NO: 5081651 - DNA, 25 bp, Homo sapien
agccagacgtggtggcaaatgcctg

SEQ ID NO: 5081652 - DNA, 25 bp, Homo sapien
tatgctttgcagtctccagacgtga

SEQ ID NO: 5081653 - DNA, 25 bp, Homo sapien
catatggtgggtctatagtcaggac

SEQ ID NO: 5081654 - DNA, 25 bp, Homo sapien
taagatcctgaacacgcgacagaat

SEQ ID NO: 5081655 - DNA, 25 bp, Homo sapien
tggagcgtctccctgttcagtgatg

SEQ ID NO: 5081656 - DNA, 25 bp, Homo sapien
tatgcatgggatgctatacttgccc

SEQ ID NO: 5081657 - DNA, 25 bp, Homo sapien
tatcagtatgttcacacttcctggc

SEQ ID NO: 5081658 - DNA, 25 bp, Homo sapien
tacaattctgatgtccctgtgctaa

SEQ ID NO: 5081659 - DNA, 25 bp, Homo sapien
ggaaattagcacttataacccactc

SEQ ID NO: 5081660 - DNA, 25 bp, Homo sapien
atgctgacagcccaaaggaggcact

SEQ ID NO: 5081661 - DNA, 25 bp, Homo sapien
catgaaggtttctatggcagatcag

SEQ ID NO: 5081662 - DNA, 25 bp, Homo sapien
taccctttcaagcactcaggttttg

SEQ ID NO: 5081663 - DNA, 25 bp, Homo sapien
aatatcaaggcaccgggcctggtcc

SEQ ID NO: 5081664 - DNA, 25 bp, Homo sapien
tttcattttaggctattggctactg

SEQ ID NO: 5081665 - DNA, 25 bp, Homo sapien
gccaaggctcgactgagagaagtca

SEQ ID NO: 5081666 - DNA, 25 bp, Homo sapien
tcctgtcgccaaggctcgactgaga

SEQ ID NO: 5081667 - DNA, 25 bp, Homo sapien
aaaatttcattttaggctattggct

SEQ ID NO: 5081668 - DNA, 25 bp, Homo sapien
tcctttcatgataagcaatctgcct

SEQ ID NO: 5081669 - DNA, 25 bp, Homo sapien
tgtcatcgaattataaactcacaga

SEQ ID NO: 5081670 - DNA, 25 bp, Homo sapien
ggcttattttatatagttcggagaa

SEQ ID NO: 5081671 - DNA, 25 bp, Homo sapien
ccagctccctgacttaacaacaaat

SEQ ID NO: 5081672 - DNA, 25 bp, Homo sapien
gtcagtactgattctattgtggcca

SEQ ID NO: 5081673 - DNA, 25 bp, Homo sapien
gcttgtcatgactgtctgcctaaga

SEQ ID NO: 5081674 - DNA, 25 bp, Homo sapien
actggcagtgtgaaggtcctgtgca

SEQ ID NO: 5081675 - DNA, 25 bp, Homo sapien
caaatattgactcggtcaggtgcag

SEQ ID NO: 5081676 - DNA, 25 bp, Homo sapien
ggagtggtcgggatctgacgagcat

SEQ ID NO: 5081677 - DNA, 25 bp, Homo sapien
caggagtggtcgggatctgacgagc

SEQ ID NO: 5081678 - DNA, 25 bp, Homo sapien
aggagtggtcgggatctgacgagca

SEQ ID NO: 5081679 - DNA, 25 bp, Homo sapien
gatgcgcgttgtgcgcacggtgtgc

SEQ ID NO: 5081680 - DNA, 25 bp, Homo sapien
gttgtgcgcacggtgtgcgcgtcac

SEQ ID NO: 5081681 - DNA, 25 bp, Homo sapien
caagtgatgcgcgttgtgcgcacgg

SEQ ID NO: 5081682 - DNA, 25 bp, Homo sapien
ctgcggacaagtgatgcgcgttgtg

SEQ ID NO: 5081683 - DNA, 25 bp, Homo sapien
acccaactctgcgagccaggtacgt

SEQ ID NO: 5081684 - DNA, 25 bp, Homo sapien
ctctgcgagccaggtacgtcttcca

SEQ ID NO: 5081685 - DNA, 25 bp, Homo sapien
tgcgagccaggtacgtcttccactt

SEQ ID NO: 5081686 - DNA, 25 bp, Homo sapien
tcgggacccaactctgcgagccagg

SEQ ID NO: 5081687 - DNA, 25 bp, Homo sapien
ctgagccaatcagaaggcgccggga

SEQ ID NO: 5081688 - DNA, 25 bp, Homo sapien
gactgtgccgctgcagctgggccac

SEQ ID NO: 5081689 - DNA, 25 bp, Homo sapien
gtccagtttggacctctgacccttg

SEQ ID NO: 5081690 - DNA, 25 bp, Homo sapien
agaatcgtgagggtggccaagtcca

SEQ ID NO: 5081691 - DNA, 25 bp, Homo sapien
agctccaggtgcgacttggttgctg

SEQ ID NO: 5081692 - DNA, 25 bp, Homo sapien
gcgacttggttgctggggcgaccgg

SEQ ID NO: 5081693 - DNA, 25 bp, Homo sapien
ggacagctccaggtgcgacttggtt

SEQ ID NO: 5081694 - DNA, 25 bp, Homo sapien
acagctccaggtgcgacttggttgc

SEQ ID NO: 5081695 - DNA, 25 bp, Homo sapien
ttggccgagaggtgttagagagatc

SEQ ID NO: 5081696 - DNA, 25 bp, Homo sapien
atcttccaaactctgcgactccccc

SEQ ID NO: 5081697 - DNA, 25 bp, Homo sapien
ccgagaggtgttagagagatcttcc

SEQ ID NO: 5081698 - DNA, 25 bp, Homo sapien
aactctgcgactccccctgggcggc

SEQ ID NO: 5081699 - DNA, 25 bp, Homo sapien
gaaagataaagctgatcttatacac

SEQ ID NO: 5081700 - DNA, 25 bp, Homo sapien
ggaaagataaagctgatcttataca

SEQ ID NO: 5081701 - DNA, 25 bp, Homo sapien
tggaaagataaagctgatcttatac

SEQ ID NO: 5081702 - DNA, 25 bp, Homo sapien
aagataaagctgatcttatacactt

SEQ ID NO: 5081703 - DNA, 25 bp, Homo sapien
catttctctcgtagattccagaaga

SEQ ID NO: 5081704 - DNA, 25 bp, Homo sapien
tagacaatcccattaggagtggtat

SEQ ID NO: 5081705 - DNA, 25 bp, Homo sapien
tattccatttctctcgtagattcca

SEQ ID NO: 5081706 - DNA, 25 bp, Homo sapien
cctgtgtagacaatcccattaggag

SEQ ID NO: 5081707 - DNA, 25 bp, Homo sapien
gaaatttccagtatactttgcccca

SEQ ID NO: 5081708 - DNA, 25 bp, Homo sapien
taaattgtccttcatatactgctcc

SEQ ID NO: 5081709 - DNA, 25 bp, Homo sapien
gaaacatattatccttaaattgtcc

SEQ ID NO: 5081710 - DNA, 25 bp, Homo sapien
gccccatttgggaatgtgtaagtcc

SEQ ID NO: 5081711 - DNA, 25 bp, Homo sapien
taaatatagtatttaagcagctggg

SEQ ID NO: 5081712 - DNA, 25 bp, Homo sapien
caaacaattatttggtgtccaagat

SEQ ID NO: 5081713 - DNA, 25 bp, Homo sapien
gatcacataatctaggttcacacaa

SEQ ID NO: 5081714 - DNA, 25 bp, Homo sapien
gaaaagtttatatcggttatctagc

SEQ ID NO: 5081715 - DNA, 25 bp, Homo sapien
tggatatcagtatattccccttcac

SEQ ID NO: 5081716 - DNA, 25 bp, Homo sapien
gtccttggatatcagtatattcccc

SEQ ID NO: 5081717 - DNA, 25 bp, Homo sapien
gatatcagtatattccccttcacct

SEQ ID NO: 5081718 - DNA, 25 bp, Homo sapien
cttggatatcagtatattccccttc

SEQ ID NO: 5081719 - DNA, 25 bp, Homo sapien
gctttaatttcaggtctggagcagc

SEQ ID NO: 5081720 - DNA, 25 bp, Homo sapien
aagctttaatttcaggtctggagca

SEQ ID NO: 5081721 - DNA, 25 bp, Homo sapien
agctttaatttcaggtctggagcag

SEQ ID NO: 5081722 - DNA, 25 bp, Homo sapien
gcttcaattactacatttcaacttt

SEQ ID NO: 5081723 - DNA, 25 bp, Homo sapien
agcaggtgatggttttattggcaaa

SEQ ID NO: 5081724 - DNA, 25 bp, Homo sapien
gatggttttattggcaaacttatag

SEQ ID NO: 5081725 - DNA, 25 bp, Homo sapien
gctttccttacaactaaaagcttca

SEQ ID NO: 5081726 - DNA, 25 bp, Homo sapien
tttaaactaattgtaagacaatgaa

SEQ ID NO: 5081727 - DNA, 25 bp, Homo sapien
ttttaaactaattgtaagacaatga

SEQ ID NO: 5081728 - DNA, 25 bp, Homo sapien
gttgaccaggacacacaagcacaaa

SEQ ID NO: 5081729 - DNA, 25 bp, Homo sapien
aagtggtatctcacggtgggtttgt

SEQ ID NO: 5081730 - DNA, 25 bp, Homo sapien
tggtatctcacggtgggtttgtagg

SEQ ID NO: 5081731 - DNA, 25 bp, Homo sapien
agtggtatctcacggtgggtttgta

SEQ ID NO: 5081732 - DNA, 25 bp, Homo sapien
ataataatagctatcccagttggtg

SEQ ID NO: 5081733 - DNA, 25 bp, Homo sapien
cgtgccctgtctccactgggagaca

SEQ ID NO: 5081734 - DNA, 25 bp, Homo sapien
ctcgtgccctgtctccactgggaga

SEQ ID NO: 5081735 - DNA, 25 bp, Homo sapien
tcgtgccctgtctccactgggagac

SEQ ID NO: 5081736 - DNA, 25 bp, Homo sapien
gtgccctgtctccactgggagacat

SEQ ID NO: 5081737 - DNA, 25 bp, Homo sapien
aatgggaagtcacgtggcccatctg

SEQ ID NO: 5081738 - DNA, 25 bp, Homo sapien
tgggaagtcacgtggcccatctgga

SEQ ID NO: 5081739 - DNA, 25 bp, Homo sapien
ttgtaggtggaagggtcaatgggaa

SEQ ID NO: 5081740 - DNA, 25 bp, Homo sapien
ttctctttcctgctagttgtaggtg

SEQ ID NO: 5081741 - DNA, 25 bp, Homo sapien
tagagatgttaaaaacctgacccac

SEQ ID NO: 5081742 - DNA, 25 bp, Homo sapien
ttataaaagcaatacgtgcttaata

SEQ ID NO: 5081743 - DNA, 25 bp, Homo sapien
aaagcaatacgtgcttaatatagag

SEQ ID NO: 5081744 - DNA, 25 bp, Homo sapien
caatacgtgcttaatatagagatgt

SEQ ID NO: 5081745 - DNA, 25 bp, Homo sapien
agtcttccttgctaaggtgtctttc

SEQ ID NO: 5081746 - DNA, 25 bp, Homo sapien
ttccttgctaaggtgtctttcattt

SEQ ID NO: 5081747 - DNA, 25 bp, Homo sapien
tcttccttgctaaggtgtctttcat

SEQ ID NO: 5081748 - DNA, 25 bp, Homo sapien
gagtcttccttgctaaggtgtcttt

SEQ ID NO: 5081749 - DNA, 25 bp, Homo sapien
gaggggaaaccaggttactgctgcc

SEQ ID NO: 5081750 - DNA, 25 bp, Homo sapien
tgcatcctcatcgtcctggctcagg

SEQ ID NO: 5081751 - DNA, 25 bp, Homo sapien
tcctcatcgtcctggctcaggccac

SEQ ID NO: 5081752 - DNA, 25 bp, Homo sapien
atcctcatcgtcctggctcaggcca

SEQ ID NO: 5081753 - DNA, 25 bp, Homo sapien
gcatcctcatcgtcctggctcaggc

SEQ ID NO: 5081754 - DNA, 25 bp, Homo sapien
ttttccatagtgccggttacttctc

SEQ ID NO: 5081755 - DNA, 25 bp, Homo sapien
catagtgccggttacttctcttctc

SEQ ID NO: 5081756 - DNA, 25 bp, Homo sapien
agtgccggttacttctcttctccag

SEQ ID NO: 5081757 - DNA, 25 bp, Homo sapien
tccatagtgccggttacttctcttc

SEQ ID NO: 5081758 - DNA, 25 bp, Homo sapien
gctaagggaatcttgctgtcctcct

SEQ ID NO: 5081759 - DNA, 25 bp, Homo sapien
ttcagctaagggaatcttgctgtcc

SEQ ID NO: 5081760 - DNA, 25 bp, Homo sapien
gccaaattcagctaagggaatcttg

SEQ ID NO: 5081761 - DNA, 25 bp, Homo sapien
ctgataaaaggaattgtcaacggaa

SEQ ID NO: 5081762 - DNA, 25 bp, Homo sapien
tggtaaatctgcgtggaaggattat

SEQ ID NO: 5081763 - DNA, 25 bp, Homo sapien
gaaggattattcaccggcatatgtt

SEQ ID NO: 5081764 - DNA, 25 bp, Homo sapien
tattcaccggcatatgttcattctc

SEQ ID NO: 5081765 - DNA, 25 bp, Homo sapien
aatctgcgtggaaggattattcacc

SEQ ID NO: 5081766 - DNA, 25 bp, Homo sapien
catctcgttgattttttcatgaagc

SEQ ID NO: 5081767 - DNA, 25 bp, Homo sapien
ttctccagcgagttgaacacgttcc

SEQ ID NO: 5081768 - DNA, 25 bp, Homo sapien
tcagggaagacttgtacttcgaagc

SEQ ID NO: 5081769 - DNA, 25 bp, Homo sapien
tagagaggttatgatccctccatcc

SEQ ID NO: 5081770 - DNA, 25 bp, Homo sapien
gcatattctccatgttgaattcttg

SEQ ID NO: 5081771 - DNA, 25 bp, Homo sapien
cttccaaagcatattctccatgttg

SEQ ID NO: 5081772 - DNA, 25 bp, Homo sapien
accagttttgagttcggaggctagg

SEQ ID NO: 5081773 - DNA, 25 bp, Homo sapien
aaccagttttgagttcggaggctag

SEQ ID NO: 5081774 - DNA, 25 bp, Homo sapien
aattgctatgttttaacgtggtaca

SEQ ID NO: 5081775 - DNA, 25 bp, Homo sapien
gctatgttttaacgtggtacatggg

SEQ ID NO: 5081776 - DNA, 25 bp, Homo sapien
agaattgctatgttttaacgtggta

SEQ ID NO: 5081777 - DNA, 25 bp, Homo sapien
gtacatggggtaaaagtatataaca

SEQ ID NO: 5081778 - DNA, 25 bp, Homo sapien
tttcttcttgtttggaagtgatggc

SEQ ID NO: 5081779 - DNA, 25 bp, Homo sapien
ttttcgagattctcttcgcttctcc

SEQ ID NO: 5081780 - DNA, 25 bp, Homo sapien
tcatcgacatggcattgctcagctc

SEQ ID NO: 5081781 - DNA, 25 bp, Homo sapien
gatggcttggatcatcgacatggca

SEQ ID NO: 5081782 - DNA, 25 bp, Homo sapien
gcctgtgagctgtgctcttcttttt

SEQ ID NO: 5081783 - DNA, 25 bp, Homo sapien
caggcccggcctgtgagctgtgctc

SEQ ID NO: 5081784 - DNA, 25 bp, Homo sapien
cttccttgtgcttgggcaggcccgg

SEQ ID NO: 5081785 - DNA, 25 bp, Homo sapien
ttccttgtgcttgggcaggcccggc

SEQ ID NO: 5081786 - DNA, 25 bp, Homo sapien
gtaaagtcttcgcttggaagaacag

SEQ ID NO: 5081787 - DNA, 25 bp, Homo sapien
cttcgcttggaagaacaggctcagg

SEQ ID NO: 5081788 - DNA, 25 bp, Homo sapien
cagggatattgatagaacgaaaagg

SEQ ID NO: 5081789 - DNA, 25 bp, Homo sapien
ctcagggatattgatagaacgaaaa

SEQ ID NO: 5081790 - DNA, 25 bp, Homo sapien
cattccttttacattactgtctcct

SEQ ID NO: 5081791 - DNA, 25 bp, Homo sapien
ttttacattactgtctcctacatga

SEQ ID NO: 5081792 - DNA, 25 bp, Homo sapien
cattactgtctcctacatgaacaga

SEQ ID NO: 5081793 - DNA, 25 bp, Homo sapien
acatgaacagatctggactcttggg

SEQ ID NO: 5081794 - DNA, 25 bp, Homo sapien
tttatctgggtggtcttttgtgacg

SEQ ID NO: 5081795 - DNA, 25 bp, Homo sapien
cattctttaccatccttaggctgcc

SEQ ID NO: 5081796 - DNA, 25 bp, Homo sapien
gcccttggactggatatcagccgag

SEQ ID NO: 5081797 - DNA, 25 bp, Homo sapien
cctccacatgccagatgggagatgg

SEQ ID NO: 5081798 - DNA, 25 bp, Homo sapien
tccatctgacccctggaatgtggct

SEQ ID NO: 5081799 - DNA, 25 bp, Homo sapien
ttccatctgacccctggaatgtggc

SEQ ID NO: 5081800 - DNA, 25 bp, Homo sapien
tctctctttggaattcctctttcca

SEQ ID NO: 5081801 - DNA, 25 bp, Homo sapien
ctttccatctgacccctggaatgtg

SEQ ID NO: 5081802 - DNA, 25 bp, Homo sapien
ttgcatggagaaaaatgccgatagt

SEQ ID NO: 5081803 - DNA, 25 bp, Homo sapien
ttgcatggagaaaaatgccgataga

SEQ ID NO: 5081804 - DNA, 25 bp, Homo sapien
aaaatgccgatagagaaaaggaaca

SEQ ID NO: 5081805 - DNA, 25 bp, Homo sapien
gaaaaatgccgatagtaaatgttaa

SEQ ID NO: 5081806 - DNA, 25 bp, Homo sapien
tcgtggacaactggggtgctttccc

SEQ ID NO: 5081807 - DNA, 25 bp, Homo sapien
taaactcgtggacaactggggtgct

SEQ ID NO: 5081808 - DNA, 25 bp, Homo sapien
tcaaatgagagtaaactcgtggaca

SEQ ID NO: 5081809 - DNA, 25 bp, Homo sapien
gggtcaaatgagagtaaactcgtgg

SEQ ID NO: 5081810 - DNA, 25 bp, Homo sapien
ctgcagtgcgtgaagcagatccagg

SEQ ID NO: 5081811 - DNA, 25 bp, Homo sapien
taaggaataaatctccaagaacgcc

SEQ ID NO: 5081812 - DNA, 25 bp, Homo sapien
ttggcgtggccacttcaggaccctt

SEQ ID NO: 5081813 - DNA, 25 bp, Homo sapien
tgctgctggacgaggtaccgtaaag

SEQ ID NO: 5081814 - DNA, 25 bp, Homo sapien
ctctttcaggactacaacatgaacc

SEQ ID NO: 5081815 - DNA, 25 bp, Homo sapien
tacaacatgaaccaatgagatgcac

SEQ ID NO: 5081816 - DNA, 25 bp, Homo sapien
aggtcccttaggtaggcaacataat

SEQ ID NO: 5081817 - DNA, 25 bp, Homo sapien
gtcccttaggtaggcaacataataa

SEQ ID NO: 5081818 - DNA, 25 bp, Homo sapien
gggatgcgctggactatgtgaaaaa

SEQ ID NO: 5081819 - DNA, 25 bp, Homo sapien
tgcagatgtatcagatattcaggga

SEQ ID NO: 5081820 - DNA, 25 bp, Homo sapien
gtgaaaaaacaacgtgtagatgtca

SEQ ID NO: 5081821 - DNA, 25 bp, Homo sapien
caacgtgtagatgtcagatttaatc

SEQ ID NO: 5081822 - DNA, 25 bp, Homo sapien
actcggaggcgctggacacacacca

SEQ ID NO: 5081823 - DNA, 25 bp, Homo sapien
tagtagataatagtcagggtgctcc

SEQ ID NO: 5081824 - DNA, 25 bp, Homo sapien
gggtgtagtgtgagataaatactcg

SEQ ID NO: 5081825 - DNA, 25 bp, Homo sapien
cacaccagtagtagataatagtcag

SEQ ID NO: 5081826 - DNA, 25 bp, Homo sapien
cagcattggcacactgggaagccag

SEQ ID NO: 5081827 - DNA, 25 bp, Homo sapien
cagccctttgtacagcttcgccatg

SEQ ID NO: 5081828 - DNA, 25 bp, Homo sapien
tttgtacagcttcgccatggatgac

SEQ ID NO: 5081829 - DNA, 25 bp, Homo sapien
ctttgtacagcttcgccatggatga

SEQ ID NO: 5081830 - DNA, 25 bp, Homo sapien
atcccagtgtcacggacagcctcag

SEQ ID NO: 5081831 - DNA, 25 bp, Homo sapien
tgagtggatcccagtgtcacggaca

SEQ ID NO: 5081832 - DNA, 25 bp, Homo sapien
cccagtgtcacggacagcctcagga

SEQ ID NO: 5081833 - DNA, 25 bp, Homo sapien
tggatcccagtgtcacggacagcct

SEQ ID NO: 5081834 - DNA, 25 bp, Homo sapien
gcatgatcttgataactgttgaatc

SEQ ID NO: 5081835 - DNA, 25 bp, Homo sapien
tctggatgagggcatgtggagttca

SEQ ID NO: 5081836 - DNA, 25 bp, Homo sapien
tgataactgttgaatctggatgagg

SEQ ID NO: 5081837 - DNA, 25 bp, Homo sapien
ctagataaagtaaacgtggcatgat

SEQ ID NO: 5081838 - DNA, 25 bp, Homo sapien
ggatcttcacactcagaaacaaatt

SEQ ID NO: 5081839 - DNA, 25 bp, Homo sapien
ttctgttcgacttgtggatcttcac

SEQ ID NO: 5081840 - DNA, 25 bp, Homo sapien
cccttgcttgccctagcagagtcat

SEQ ID NO: 5081841 - DNA, 25 bp, Homo sapien
catacggaataatggaaaactcaac

SEQ ID NO: 5081842 - DNA, 25 bp, Homo sapien
agctccacaaacttccactaaggcg

SEQ ID NO: 5081843 - DNA, 25 bp, Homo sapien
gcctgcgggccagggactgtcatca

SEQ ID NO: 5081844 - DNA, 25 bp, Homo sapien
aaagagctgtgcttacggccggtta

SEQ ID NO: 5081845 - DNA, 25 bp, Homo sapien
gaggcccgaaggtattgtctgagct

SEQ ID NO: 5081846 - DNA, 25 bp, Homo sapien
gcgcagaactgcgtcggtgccagaa

SEQ ID NO: 5081847 - DNA, 25 bp, Homo sapien
cccgggctgcatgctctccatcagg

SEQ ID NO: 5081848 - DNA, 25 bp, Homo sapien
aactgcgtcggtgccagaaggctct

SEQ ID NO: 5081849 - DNA, 25 bp, Homo sapien
tgctcggccgcgcagaactgcgtcg

SEQ ID NO: 5081850 - DNA, 25 bp, Homo sapien
tgcaggggcccggccagcgccttca

SEQ ID NO: 5081851 - DNA, 25 bp, Homo sapien
gcaggggcccggccagcgccttcac

SEQ ID NO: 5081852 - DNA, 25 bp, Homo sapien
ctgcaggggcccggccagcgccttc

SEQ ID NO: 5081853 - DNA, 25 bp, Homo sapien
tactcgaactcttcgtaggccgcgg

SEQ ID NO: 5081854 - DNA, 25 bp, Homo sapien
cagttctcgaagagggccggagcct

SEQ ID NO: 5081855 - DNA, 25 bp, Homo sapien
ctggaacggctcctcgtcgtagggc

SEQ ID NO: 5081856 - DNA, 25 bp, Homo sapien
cctccagtttgtaggcgctgctgct

SEQ ID NO: 5081857 - DNA, 25 bp, Homo sapien
cgcggcgcgctcggccttgatgggc

SEQ ID NO: 5081858 - DNA, 25 bp, Homo sapien
ctcggccttgatgggcgcgcggccg

SEQ ID NO: 5081859 - DNA, 25 bp, Homo sapien
tgctgcgcgtgctgtagaggcgtgg

SEQ ID NO: 5081860 - DNA, 25 bp, Homo sapien
ctgctgcgcgtgctgtagaggcgtg

SEQ ID NO: 5081861 - DNA, 25 bp, Homo sapien
caaataggtctgtttttcgctttgg

SEQ ID NO: 5081862 - DNA, 25 bp, Homo sapien
ccaaataggtctgtttttcgctttg

SEQ ID NO: 5081863 - DNA, 25 bp, Homo sapien
ctaggcctggggccgtcgacgctgt

SEQ ID NO: 5081864 - DNA, 25 bp, Homo sapien
cgtcgacgctgtgggtttcggttcg

SEQ ID NO: 5081865 - DNA, 25 bp, Homo sapien
tggggccgtcgacgctgtgggtttc

SEQ ID NO: 5081866 - DNA, 25 bp, Homo sapien
cctggggccgtcgacgctgtgggtt

SEQ ID NO: 5081867 - DNA, 25 bp, Homo sapien
taccttgagctagggcaacttgcct

SEQ ID NO: 5081868 - DNA, 25 bp, Homo sapien
aattgcgcagcgagtctaccttgag

SEQ ID NO: 5081869 - DNA, 25 bp, Homo sapien
tcgtgtaccatatgaggcaagctct

SEQ ID NO: 5081870 - DNA, 25 bp, Homo sapien
ggcgcaccgtgttccatattctcaa

SEQ ID NO: 5081871 - DNA, 25 bp, Homo sapien
aaggctcttcatgatcccgcccctt

SEQ ID NO: 5081872 - DNA, 25 bp, Homo sapien
gacatggcacagtatgccagagaaa

SEQ ID NO: 5081873 - DNA, 25 bp, Homo sapien
ccagacacagactttcactgctgga

SEQ ID NO: 5081874 - DNA, 25 bp, Homo sapien
ctttagctgagcacactattacatg

SEQ ID NO: 5081875 - DNA, 25 bp, Homo sapien
tctggtagtatcttctaaatgcatc

SEQ ID NO: 5081876 - DNA, 25 bp, Homo sapien
ctggtagtatcttctaaatgcatct

SEQ ID NO: 5081877 - DNA, 25 bp, Homo sapien
tggtagtatcttctaaatgcatctc

SEQ ID NO: 5081878 - DNA, 25 bp, Homo sapien
ttttaaagagcttgcggaaggagct

SEQ ID NO: 5081879 - DNA, 25 bp, Homo sapien
ttgcggaaggagctgcgaaagcccc

SEQ ID NO: 5081880 - DNA, 25 bp, Homo sapien
ttgcctgggattttgatcgctgaaa

SEQ ID NO: 5081881 - DNA, 25 bp, Homo sapien
ctggtcttgcctgggattttgatcg

SEQ ID NO: 5081882 - DNA, 25 bp, Homo sapien
caagcatgcactgggttccttagca

SEQ ID NO: 5081883 - DNA, 25 bp, Homo sapien
gcagggctatggctacatgcagagc

SEQ ID NO: 5081884 - DNA, 25 bp, Homo sapien
tcaacttgacagatgttggcgctgg

SEQ ID NO: 5081885 - DNA, 25 bp, Homo sapien
gttgaggatccagcaaagcagcatg

SEQ ID NO: 5081886 - DNA, 25 bp, Homo sapien
gtcaacttgactctcccttttgaat

SEQ ID NO: 5081887 - DNA, 25 bp, Homo sapien
gcctagcttcatcccgaagcagcat

SEQ ID NO: 5081888 - DNA, 25 bp, Homo sapien
ttttttaatgatgtcaacttgactc

SEQ ID NO: 5081889 - DNA, 25 bp, Homo sapien
catgcctagcttcatcccgaagcag

SEQ ID NO: 5081890 - DNA, 25 bp, Homo sapien
ttgatgtcaccaccagccccaagga

SEQ ID NO: 5081891 - DNA, 25 bp, Homo sapien
aaatcttcaccagttgcgttcccat

SEQ ID NO: 5081892 - DNA, 25 bp, Homo sapien
aaggaccacagaaatcttcaccagt

SEQ ID NO: 5081893 - DNA, 25 bp, Homo sapien
ctgaaaataggaaagctttgatgtc

SEQ ID NO: 5081894 - DNA, 25 bp, Homo sapien
tccctgatgagtgcagttgtgcccc

SEQ ID NO: 5081895 - DNA, 25 bp, Homo sapien
tctacttctggttggtaaggaacac

SEQ ID NO: 5081896 - DNA, 25 bp, Homo sapien
gccctttggctagcttaaactctga

SEQ ID NO: 5081897 - DNA, 25 bp, Homo sapien
tatcacagatgaagccatagccgcc

SEQ ID NO: 5081898 - DNA, 25 bp, Homo sapien
gtccccagtcgagggtgcattcttc

SEQ ID NO: 5081899 - DNA, 25 bp, Homo sapien
tgcttaagccacttgggtaatccat

SEQ ID NO: 5081900 - DNA, 25 bp, Homo sapien
atttgagtccccagtcgagggtgca

SEQ ID NO: 5081901 - DNA, 25 bp, Homo sapien
cttgcttaagccacttgggtaatcc

SEQ ID NO: 5081902 - DNA, 25 bp, Homo sapien
gaatgcagaaattcgtacagtaatc

SEQ ID NO: 5081903 - DNA, 25 bp, Homo sapien
tattgaagccaaccacacatatatg

SEQ ID NO: 5081904 - DNA, 25 bp, Homo sapien
cagattgcagagatactataatctc

SEQ ID NO: 5081905 - DNA, 25 bp, Homo sapien
gccaatcaatagtcaacaactcaga

SEQ ID NO: 5081906 - DNA, 25 bp, Homo sapien
aaaatctcagcacacagataaagta

SEQ ID NO: 5081907 - DNA, 25 bp, Homo sapien
ctaaaatctcagcacacagataaag

SEQ ID NO: 5081908 - DNA, 25 bp, Homo sapien
taaaatctcagcacacagataaagt

SEQ ID NO: 5081909 - DNA, 25 bp, Homo sapien
gaaggatccattgagggattctcat

SEQ ID NO: 5081910 - DNA, 25 bp, Homo sapien
atcttgtttggtgggtgaaggatcc

SEQ ID NO: 5081911 - DNA, 25 bp, Homo sapien
tatgttttacacagctgttccttgg

SEQ ID NO: 5081912 - DNA, 25 bp, Homo sapien
ggtcatttgcaagagcaagtcggtt

SEQ ID NO: 5081913 - DNA, 25 bp, Homo sapien
gttgaggttcaaaaagccagatctt

SEQ ID NO: 5081914 - DNA, 25 bp, Homo sapien
tatatacaagctttttatcctcatc

SEQ ID NO: 5081915 - DNA, 25 bp, Homo sapien
cctcagggatttatacatcgatata

SEQ ID NO: 5081916 - DNA, 25 bp, Homo sapien
tcttaaccagaaactaatcttcatc

SEQ ID NO: 5081917 - DNA, 25 bp, Homo sapien
ttcaaaacgcagtaggtgagttcct

SEQ ID NO: 5081918 - DNA, 25 bp, Homo sapien
taccgaactgcctgggaataaagac

SEQ ID NO: 5081919 - DNA, 25 bp, Homo sapien
cagaactggcccctaacatagtgta

SEQ ID NO: 5081920 - DNA, 25 bp, Homo sapien
gaagacaccagtttgagtaccaaga

SEQ ID NO: 5081921 - DNA, 25 bp, Homo sapien
gagtaggcaagtacgtagcagcgtt

SEQ ID NO: 5081922 - DNA, 25 bp, Homo sapien
ggtatcaagtgatgggaactcacct

SEQ ID NO: 5081923 - DNA, 25 bp, Homo sapien
cactttccacgtccagtcgatttgg

SEQ ID NO: 5081924 - DNA, 25 bp, Homo sapien
cgatttggcgttgtgcttgcaagca

SEQ ID NO: 5081925 - DNA, 25 bp, Homo sapien
tactgggaagacacaacaaacacat

SEQ ID NO: 5081926 - DNA, 25 bp, Homo sapien
taaacaagttacaccacaagaagtc

SEQ ID NO: 5081927 - DNA, 25 bp, Homo sapien
tcttaagatcggcagagaggaagga

SEQ ID NO: 5081928 - DNA, 25 bp, Homo sapien
tgaggtaagtcagtccacctaggac

SEQ ID NO: 5081929 - DNA, 25 bp, Homo sapien
cagggaggtagagtgataactgaat

SEQ ID NO: 5081930 - DNA, 25 bp, Homo sapien
gttttctaatgctagatgttgtgaa

SEQ ID NO: 5081931 - DNA, 25 bp, Homo sapien
gtggctttaactgcttctgaaggca

SEQ ID NO: 5081932 - DNA, 25 bp, Homo sapien
actgaattctctgtcaaattaagag

SEQ ID NO: 5081933 - DNA, 25 bp, Homo sapien
tggaggtcacagatgtagtcattgt

SEQ ID NO: 5081934 - DNA, 25 bp, Homo sapien
tactaggccataatgcaacattaca

SEQ ID NO: 5081935 - DNA, 25 bp, Homo sapien
cacagatgtagtcattgtcaagttc

SEQ ID NO: 5081936 - DNA, 25 bp, Homo sapien
taatgcaacagtacattactaggcc

SEQ ID NO: 5081937 - DNA, 25 bp, Homo sapien
atacagtgggactgcaatggtgccc

SEQ ID NO: 5081938 - DNA, 25 bp, Homo sapien
ttttctacaagtgccctcatggagg

SEQ ID NO: 5081939 - DNA, 25 bp, Homo sapien
gaaagggcctattgcgactcctagc

SEQ ID NO: 5081940 - DNA, 25 bp, Homo sapien
tctcgcaagcctgtagaaagggcct

SEQ ID NO: 5081941 - DNA, 25 bp, Homo sapien
gaaaatgactcgcaggactgcatta

SEQ ID NO: 5081942 - DNA, 25 bp, Homo sapien
gtgggaaaatgactcgcaggactgc

SEQ ID NO: 5081943 - DNA, 25 bp, Homo sapien
aatgactcgcaggactgcattaaaa

SEQ ID NO: 5081944 - DNA, 25 bp, Homo sapien
gactcgcaggactgcattaaaatgc

SEQ ID NO: 5081945 - DNA, 25 bp, Homo sapien
atttttctggcattactaagataaa

SEQ ID NO: 5081946 - DNA, 25 bp, Homo sapien
tatttttctggcattactaagataa

SEQ ID NO: 5081947 - DNA, 25 bp, Homo sapien
agggaactattcttctaccccatgg

SEQ ID NO: 5081948 - DNA, 25 bp, Homo sapien
tctaggagaccacttcactgtgcaa

SEQ ID NO: 5081949 - DNA, 25 bp, Homo sapien
ttagaaaaatgccaattggatgccc

SEQ ID NO: 5081950 - DNA, 25 bp, Homo sapien
tctaatcctatttctcccaaaggga

SEQ ID NO: 5081951 - DNA, 25 bp, Homo sapien
gcatgcaccttgttgaagagaaaac

SEQ ID NO: 5081952 - DNA, 25 bp, Homo sapien
taaagaatgatctaaagtcacagct

SEQ ID NO: 5081953 - DNA, 25 bp, Homo sapien
aaagcacgttttgtggtacgccttg

SEQ ID NO: 5081954 - DNA, 25 bp, Homo sapien
cttctgagtctaacaaatactgtga

SEQ ID NO: 5081955 - DNA, 25 bp, Homo sapien
tttttgcttgaattgggtttctaca

SEQ ID NO: 5081956 - DNA, 25 bp, Homo sapien
aaaaagtctttcagtaatatacgat

SEQ ID NO: 5081957 - DNA, 25 bp, Homo sapien
ttattacttgtttcacaagtttgag

SEQ ID NO: 5081958 - DNA, 25 bp, Homo sapien
tatgaaatcaagtaaagctaaaagg

SEQ ID NO: 5081959 - DNA, 25 bp, Homo sapien
tataacttcaattgtctagttagcc

SEQ ID NO: 5081960 - DNA, 25 bp, Homo sapien
tgtggctagtggttgccggactgta

SEQ ID NO: 5081961 - DNA, 25 bp, Homo sapien
ctttaaaatccagcgtgcattttac

SEQ ID NO: 5081962 - DNA, 25 bp, Homo sapien
aattgtctagttagcctcattagga

SEQ ID NO: 5081963 - DNA, 25 bp, Homo sapien
cagatacgtgactttgggcaaaatc

SEQ ID NO: 5081964 - DNA, 25 bp, Homo sapien
ggccacaggcaaatagaatcagaga

SEQ ID NO: 5081965 - DNA, 25 bp, Homo sapien
tgtaataaaagtaccaacacggtga

SEQ ID NO: 5081966 - DNA, 25 bp, Homo sapien
tataacaccactgatggaggtcgag

SEQ ID NO: 5081967 - DNA, 25 bp, Homo sapien
tcatgtacccaaacaaagagcagtc

SEQ ID NO: 5081968 - DNA, 25 bp, Homo sapien
gatttagagtaattccacagaccaa

SEQ ID NO: 5081969 - DNA, 25 bp, Homo sapien
tatcagtcccgtaactttatagtca

SEQ ID NO: 5081970 - DNA, 25 bp, Homo sapien
ggaattacccttaacagtgattatg

SEQ ID NO: 5081971 - DNA, 25 bp, Homo sapien
taagtgcttgcttgaatcatagcca

SEQ ID NO: 5081972 - DNA, 25 bp, Homo sapien
catagccaccttactgtattgacaa

SEQ ID NO: 5081973 - DNA, 25 bp, Homo sapien
tcttgttaagtagagacgttctgtc

SEQ ID NO: 5081974 - DNA, 25 bp, Homo sapien
tgtctgacacagatatttgccagta

SEQ ID NO: 5081975 - DNA, 25 bp, Homo sapien
cctggtatatagctttcaatgttag

SEQ ID NO: 5081976 - DNA, 25 bp, Homo sapien
ctttcaatgttagattatctgctgc

SEQ ID NO: 5081977 - DNA, 25 bp, Homo sapien
aacttgataatgtttaatggtaaca

SEQ ID NO: 5081978 - DNA, 25 bp, Homo sapien
ttggatacccctggtatatagcttt

SEQ ID NO: 5081979 - DNA, 25 bp, Homo sapien
tagatgccatcactcccgtctttgc

SEQ ID NO: 5081980 - DNA, 25 bp, Homo sapien
atagatgccatcactcccgtctttg

SEQ ID NO: 5081981 - DNA, 25 bp, Homo sapien
cccagcgattcttggtggtccttgg

SEQ ID NO: 5081982 - DNA, 25 bp, Homo sapien
tctggtggaccccagcgattcttgg

SEQ ID NO: 5081983 - DNA, 25 bp, Homo sapien
tagcttataatgtacagatagggaa

SEQ ID NO: 5081984 - DNA, 25 bp, Homo sapien
ttaaaaacatgtacgaaaatcacca

SEQ ID NO: 5081985 - DNA, 25 bp, Homo sapien
gaacagaaatactacctgtagctta

SEQ ID NO: 5081986 - DNA, 25 bp, Homo sapien
tgaaactcagcctatttaaagagag

SEQ ID NO: 5081987 - DNA, 25 bp, Homo sapien
ttgggttgggtccagtggctgatgc

SEQ ID NO: 5081988 - DNA, 25 bp, Homo sapien
cagtgaaactatagaacatcaaaga

SEQ ID NO: 5081989 - DNA, 25 bp, Homo sapien
agagaaaatcttgggttgggtccag

SEQ ID NO: 5081990 - DNA, 25 bp, Homo sapien
ctatagaacatcaaagataaagaga

SEQ ID NO: 5081991 - DNA, 25 bp, Homo sapien
aactctggtatctgggtgttcaggc

SEQ ID NO: 5081992 - DNA, 25 bp, Homo sapien
aacaagatcaggaatggaatagaca

SEQ ID NO: 5081993 - DNA, 25 bp, Homo sapien
tcaggctgttaaggacaatgaattg

SEQ ID NO: 5081994 - DNA, 25 bp, Homo sapien
gctgggaaaatctgccaacctggta

SEQ ID NO: 5081995 - DNA, 25 bp, Homo sapien
taatgtgtcacaacagattgtatgc

SEQ ID NO: 5081996 - DNA, 25 bp, Homo sapien
aatttgatactggtgatgactgcac

SEQ ID NO: 5081997 - DNA, 25 bp, Homo sapien
gctgtcttctagtacgctatgttag

SEQ ID NO: 5081998 - DNA, 25 bp, Homo sapien
tgcacaaccaatattgaaaaccatt

SEQ ID NO: 5081999 - DNA, 25 bp, Homo sapien
ttttgcagcactcaagtgtgagcac

SEQ ID NO: 5082000 - DNA, 25 bp, Homo sapien
gaagtaatctctagcaacctcaggc

SEQ ID NO: 5082001 - DNA, 25 bp, Homo sapien
catggatgtatagcaggagaacagc

SEQ ID NO: 5082002 - DNA, 25 bp, Homo sapien
ggcagtgctttgcaaccttttcagg

SEQ ID NO: 5082003 - DNA, 25 bp, Homo sapien
ctgtatcgtttcgttttcagtatac

SEQ ID NO: 5082004 - DNA, 25 bp, Homo sapien
tgtatcgtttcgttttcagtatacg

SEQ ID NO: 5082005 - DNA, 25 bp, Homo sapien
tctgtatcgtttcgttttcagtata

SEQ ID NO: 5082006 - DNA, 25 bp, Homo sapien
tatcgtttcgttttcagtatacgtg

SEQ ID NO: 5082007 - DNA, 25 bp, Homo sapien
gtattaccctaataactgatgatga

SEQ ID NO: 5082008 - DNA, 25 bp, Homo sapien
tctacgactaaatagtattgtgttg

SEQ ID NO: 5082009 - DNA, 25 bp, Homo sapien
tttgtattaccctaataactgatga

SEQ ID NO: 5082010 - DNA, 25 bp, Homo sapien
tgtgttgcattgatgtatactacat

SEQ ID NO: 5082011 - DNA, 25 bp, Homo sapien
tggttttatggaccctgaattactc

SEQ ID NO: 5082012 - DNA, 25 bp, Homo sapien
ggagtggagatatacatgggaaaat

SEQ ID NO: 5082013 - DNA, 25 bp, Homo sapien
agatttggttttatggaccctgaat

SEQ ID NO: 5082014 - DNA, 25 bp, Homo sapien
tatggaccctgaattactcagatgt

SEQ ID NO: 5082015 - DNA, 25 bp, Homo sapien
gtccaggacctcttagaagcagatg

SEQ ID NO: 5082016 - DNA, 25 bp, Homo sapien
tgaaagtctgactccaagttaaaag

SEQ ID NO: 5082017 - DNA, 25 bp, Homo sapien
gagttgtcagactgatgaaagtctg

SEQ ID NO: 5082018 - DNA, 25 bp, Homo sapien
tttgttaggtgaaatgcttgtgagg

SEQ ID NO: 5082019 - DNA, 25 bp, Homo sapien
ccggggcggtggtgcgggatgccgc

SEQ ID NO: 5082020 - DNA, 25 bp, Homo sapien
gcggtggtgcgggatgccgccgcct

SEQ ID NO: 5082021 - DNA, 25 bp, Homo sapien
gggcggtggtgcgggatgccgccgc

SEQ ID NO: 5082022 - DNA, 25 bp, Homo sapien
gtggtgcgggatgccgccgcctccg

SEQ ID NO: 5082023 - DNA, 25 bp, Homo sapien
tgggatgtgagatgctcaaaaactg

SEQ ID NO: 5082024 - DNA, 25 bp, Homo sapien
ggatgtgagatgctcaaaaactgct

SEQ ID NO: 5082025 - DNA, 25 bp, Homo sapien
gatgtgagatgctcaaaaactgcta

SEQ ID NO: 5082026 - DNA, 25 bp, Homo sapien
tgtgagatgctcaaaaactgctaat

SEQ ID NO: 5082027 - DNA, 25 bp, Homo sapien
cgctgagccgcagccgctccaaaag

SEQ ID NO: 5082028 - DNA, 25 bp, Homo sapien
agtgcatgcgctgagccgcagccgc

SEQ ID NO: 5082029 - DNA, 25 bp, Homo sapien
tgagccgcagccgctccaaaaggca

SEQ ID NO: 5082030 - DNA, 25 bp, Homo sapien
gagccgcagccgctccaaaaggcat

SEQ ID NO: 5082031 - DNA, 25 bp, Homo sapien
cacacccaactttctgggtagtagg

SEQ ID NO: 5082032 - DNA, 25 bp, Homo sapien
ccaactttctgggtagtagggcaga

SEQ ID NO: 5082033 - DNA, 25 bp, Homo sapien
caactttctgggtagtagggcagag

SEQ ID NO: 5082034 - DNA, 25 bp, Homo sapien
tgtcccatgtaggatgacagtcacc

SEQ ID NO: 5082035 - DNA, 25 bp, Homo sapien
acctcactctgtggggacctgactt

SEQ ID NO: 5082036 - DNA, 25 bp, Homo sapien
ctgggcgtatgtcccatgtaggatg

SEQ ID NO: 5082037 - DNA, 25 bp, Homo sapien
ctctgtggggacctgacttgcttat

SEQ ID NO: 5082038 - DNA, 25 bp, Homo sapien
ctccctcaggaagatgttcaattgc

SEQ ID NO: 5082039 - DNA, 25 bp, Homo sapien
tccctcaggaagatgttcaattgct

SEQ ID NO: 5082040 - DNA, 25 bp, Homo sapien
tcctccctcaggaagatgttcaatt

SEQ ID NO: 5082041 - DNA, 25 bp, Homo sapien
cctccctcaggaagatgttcaattg

SEQ ID NO: 5082042 - DNA, 25 bp, Homo sapien
tctcctctacaaacagctcatagtg

SEQ ID NO: 5082043 - DNA, 25 bp, Homo sapien
ctttactatctatggagagtttgcc

SEQ ID NO: 5082044 - DNA, 25 bp, Homo sapien
cctgcggcatgggtcccctttacta

SEQ ID NO: 5082045 - DNA, 25 bp, Homo sapien
ctatggagagtttgccttgggaata

SEQ ID NO: 5082046 - DNA, 25 bp, Homo sapien
cacgactacaccctactagctccat

SEQ ID NO: 5082047 - DNA, 25 bp, Homo sapien
ttgctttcacactcacgcaaacaca

SEQ ID NO: 5082048 - DNA, 25 bp, Homo sapien
aacacacacacgactacaccctact

SEQ ID NO: 5082049 - DNA, 25 bp, Homo sapien
cacacacgactacaccctactagct

SEQ ID NO: 5082050 - DNA, 25 bp, Homo sapien
cgttcaggtttatctctagattcca

SEQ ID NO: 5082051 - DNA, 25 bp, Homo sapien
tattggtgtagaaagggaaccttga

SEQ ID NO: 5082052 - DNA, 25 bp, Homo sapien
cttgaaaggtcgttcaggtttatct

SEQ ID NO: 5082053 - DNA, 25 bp, Homo sapien
atattggtgtagaaagggaaccttg

SEQ ID NO: 5082054 - DNA, 25 bp, Homo sapien
caaaaccaagtctccggtctacctg

SEQ ID NO: 5082055 - DNA, 25 bp, Homo sapien
aagtctccggtctacctgaatttca

SEQ ID NO: 5082056 - DNA, 25 bp, Homo sapien
cctgcaaaaccaagtctccggtcta

SEQ ID NO: 5082057 - DNA, 25 bp, Homo sapien
tccggtctacctgaatttcatccat

SEQ ID NO: 5082058 - DNA, 25 bp, Homo sapien
ccgccttttgggctatctgcttaca

SEQ ID NO: 5082059 - DNA, 25 bp, Homo sapien
cattcttatgggatccttattctcc

SEQ ID NO: 5082060 - DNA, 25 bp, Homo sapien
tgagtgtctaccaccatgaattaga

SEQ ID NO: 5082061 - DNA, 25 bp, Homo sapien
tctgcttacagggacaagtaactat

SEQ ID NO: 5082062 - DNA, 25 bp, Homo sapien
aagagagtttggaaagttgatttgt

SEQ ID NO: 5082063 - DNA, 25 bp, Homo sapien
aattttctactgggcctgttatttg

SEQ ID NO: 5082064 - DNA, 25 bp, Homo sapien
ttggaaagttgatttgtctactata

SEQ ID NO: 5082065 - DNA, 25 bp, Homo sapien
gagtttggaaagttgatttgtctac

SEQ ID NO: 5082066 - DNA, 25 bp, Homo sapien
ttaatagatactgaggtagaggcat

SEQ ID NO: 5082067 - DNA, 25 bp, Homo sapien
gttaatagatactgaggtagaggca

SEQ ID NO: 5082068 - DNA, 25 bp, Homo sapien
tggcagcactgacccggtgagggtc

SEQ ID NO: 5082069 - DNA, 25 bp, Homo sapien
cactgacccggtgagggtccctcgg

SEQ ID NO: 5082070 - DNA, 25 bp, Homo sapien
ggcggattcgaggtggcagcactga

SEQ ID NO: 5082071 - DNA, 25 bp, Homo sapien
gggaaggggcggattcgaggtggca

SEQ ID NO: 5082072 - DNA, 25 bp, Homo sapien
gcttcgtcaccgtcgccctgtgggt

SEQ ID NO: 5082073 - DNA, 25 bp, Homo sapien
tgttcggcgctgctcgaagcttcgt

SEQ ID NO: 5082074 - DNA, 25 bp, Homo sapien
cgcgaggtctagactgcggatccca

SEQ ID NO: 5082075 - DNA, 25 bp, Homo sapien
gctggctccgaagtcgctgggtaca

SEQ ID NO: 5082076 - DNA, 25 bp, Homo sapien
gtgctgtttttcagtgctctcgatg

SEQ ID NO: 5082077 - DNA, 25 bp, Homo sapien
tgctgtttttcagtgctctcgatgc

SEQ ID NO: 5082078 - DNA, 25 bp, Homo sapien
tgtgctgtttttcagtgctctcgat

SEQ ID NO: 5082079 - DNA, 25 bp, Homo sapien
gtgtgctgtttttcagtgctctcga

SEQ ID NO: 5082080 - DNA, 25 bp, Homo sapien
tataatggttactacacatcacagg

SEQ ID NO: 5082081 - DNA, 25 bp, Homo sapien
gacttagagtattaatacatggcca

SEQ ID NO: 5082082 - DNA, 25 bp, Homo sapien
ttttgaatcacagaatagcggtacc

SEQ ID NO: 5082083 - DNA, 25 bp, Homo sapien
gatagaatactgcaattgtggtcag

SEQ ID NO: 5082084 - DNA, 25 bp, Homo sapien
tgcaacattaatggatgcttgaagc

SEQ ID NO: 5082085 - DNA, 25 bp, Homo sapien
gatgcttgaagctgtacaaaagctg

SEQ ID NO: 5082086 - DNA, 25 bp, Homo sapien
aagaacactaccactgcaacattaa

SEQ ID NO: 5082087 - DNA, 25 bp, Homo sapien
tttgtaatttattgtggcatgagat

SEQ ID NO: 5082088 - DNA, 25 bp, Homo sapien
gttttggaaagtaggccaactgata

SEQ ID NO: 5082089 - DNA, 25 bp, Homo sapien
ggccaactgataaccccacagcaaa

SEQ ID NO: 5082090 - DNA, 25 bp, Homo sapien
tcctggcgggtcatgaaaacagtta

SEQ ID NO: 5082091 - DNA, 25 bp, Homo sapien
gaattgttgtgctttgacagttaac

SEQ ID NO: 5082092 - DNA, 25 bp, Homo sapien
gccaggatttcaaggctgcagggag

SEQ ID NO: 5082093 - DNA, 25 bp, Homo sapien
ggccaggatttcaaggctgcaggga

SEQ ID NO: 5082094 - DNA, 25 bp, Homo sapien
tactcacaaggctaagtcaggaggg

SEQ ID NO: 5082095 - DNA, 25 bp, Homo sapien
tcacaaggctaagtcaggagggtca

SEQ ID NO: 5082096 - DNA, 25 bp, Homo sapien
catataatgtagtgatctgatcagg

SEQ ID NO: 5082097 - DNA, 25 bp, Homo sapien
tctgtggtacatagtaacgttttga

SEQ ID NO: 5082098 - DNA, 25 bp, Homo sapien
gttaaccacgatggtaggatggtct

SEQ ID NO: 5082099 - DNA, 25 bp, Homo sapien
agctctctgcatgcaggctctacct

SEQ ID NO: 5082100 - DNA, 25 bp, Homo sapien
cagtgtgtggttgatggtagcatta

SEQ ID NO: 5082101 - DNA, 25 bp, Homo sapien
caacctatatgtgtatcaatgggtg

SEQ ID NO: 5082102 - DNA, 25 bp, Homo sapien
tcctcattcatatgtggtagctaaa

SEQ ID NO: 5082103 - DNA, 25 bp, Homo sapien
tcaaaatatcgcatataccaccatg

SEQ ID NO: 5082104 - DNA, 25 bp, Homo sapien
ttgctttcagcttatgtgcaaccac

SEQ ID NO: 5082105 - DNA, 25 bp, Homo sapien
gcttatgtgcaaccactcccctgat

SEQ ID NO: 5082106 - DNA, 25 bp, Homo sapien
ttatgtgcaaccactcccctgatgc

SEQ ID NO: 5082107 - DNA, 25 bp, Homo sapien
ttcagcttatgtgcaaccactcccc

SEQ ID NO: 5082108 - DNA, 25 bp, Homo sapien
gagcccacaatacctttgggatata

SEQ ID NO: 5082109 - DNA, 25 bp, Homo sapien
tgattgatggcaccttggaccaaag

SEQ ID NO: 5082110 - DNA, 25 bp, Homo sapien
ctttgagcttattgaagatgaagtc

SEQ ID NO: 5082111 - DNA, 25 bp, Homo sapien
tagtattgctatctcttccaaaagc

SEQ ID NO: 5082112 - DNA, 25 bp, Homo sapien
catctggtaatccagtactgcttga

SEQ ID NO: 5082113 - DNA, 25 bp, Homo sapien
caaatacaggataagcctgtgaatg

SEQ ID NO: 5082114 - DNA, 25 bp, Homo sapien
gagtgtaggcctctcagctctacaa

SEQ ID NO: 5082115 - DNA, 25 bp, Homo sapien
taacacagttggaacaaggcactca

SEQ ID NO: 5082116 - DNA, 25 bp, Homo sapien
ttcccttaaaatctacaccgtgctc

SEQ ID NO: 5082117 - DNA, 25 bp, Homo sapien
ctcactactggttggtattaacagg

SEQ ID NO: 5082118 - DNA, 25 bp, Homo sapien
tacttactttacatatagaaactgt

SEQ ID NO: 5082119 - DNA, 25 bp, Homo sapien
aactgtagggttgctgccataattt

SEQ ID NO: 5082120 - DNA, 25 bp, Homo sapien
tgaaatccagccacttattggtatg

SEQ ID NO: 5082121 - DNA, 25 bp, Homo sapien
tatgtgttacaacttagctaagtcc

SEQ ID NO: 5082122 - DNA, 25 bp, Homo sapien
gcaaatggtcttttagatcaagtaa

SEQ ID NO: 5082123 - DNA, 25 bp, Homo sapien
gctaagtccagtaatagtcagtaca

SEQ ID NO: 5082124 - DNA, 25 bp, Homo sapien
tccagtctggccgatgagagcatga

SEQ ID NO: 5082125 - DNA, 25 bp, Homo sapien
aagccgggacaattgtaaaactctg

SEQ ID NO: 5082126 - DNA, 25 bp, Homo sapien
cttagggtgaccatcaggctccatc

SEQ ID NO: 5082127 - DNA, 25 bp, Homo sapien
gagagcatgaactattcccaaccct

SEQ ID NO: 5082128 - DNA, 25 bp, Homo sapien
actttctcaccagtggtcatcagag

SEQ ID NO: 5082129 - DNA, 25 bp, Homo sapien
agaaatggatttccagaattgtaac

SEQ ID NO: 5082130 - DNA, 25 bp, Homo sapien
ccactttctcaccagtggtcatcag

SEQ ID NO: 5082131 - DNA, 25 bp, Homo sapien
tcagagaaatggatttccagaattg

SEQ ID NO: 5082132 - DNA, 25 bp, Homo sapien
tttggcttttgatggagaggttggt

SEQ ID NO: 5082133 - DNA, 25 bp, Homo sapien
ttttggcttttgatggagaggttgg

SEQ ID NO: 5082134 - DNA, 25 bp, Homo sapien
gaggttggtgagtgtttctgttttc

SEQ ID NO: 5082135 - DNA, 25 bp, Homo sapien
agaggttggtgagtgtttctgtttt

SEQ ID NO: 5082136 - DNA, 25 bp, Homo sapien
gacttttacaagtgtaggctgtcat

SEQ ID NO: 5082137 - DNA, 25 bp, Homo sapien
tgagagctataacatttaaataaca

SEQ ID NO: 5082138 - DNA, 25 bp, Homo sapien
caagtgtaggctgtcattttgcaga

SEQ ID NO: 5082139 - DNA, 25 bp, Homo sapien
gatgcttgttcagttgtagtacata

SEQ ID NO: 5082140 - DNA, 25 bp, Homo sapien
gatctgctaatcatagaagatgttt

SEQ ID NO: 5082141 - DNA, 25 bp, Homo sapien
ggtctcttatttctggttagtgctg

SEQ ID NO: 5082142 - DNA, 25 bp, Homo sapien
gttagtgctgtgatgttaattcacc

SEQ ID NO: 5082143 - DNA, 25 bp, Homo sapien
tgttaattcaccaatactactagga

SEQ ID NO: 5082144 - DNA, 25 bp, Homo sapien
cagtggaaagaagagaccattgaaa

SEQ ID NO: 5082145 - DNA, 25 bp, Homo sapien
ttcattctcaggaggtgacacagtg

SEQ ID NO: 5082146 - DNA, 25 bp, Homo sapien
cagaggaataggtgacttagaatct

SEQ ID NO: 5082147 - DNA, 25 bp, Homo sapien
atctctctctgaccctaggccaggg

SEQ ID NO: 5082148 - DNA, 25 bp, Homo sapien
aagggcactgtagttgaggtgaaaa

SEQ ID NO: 5082149 - DNA, 25 bp, Homo sapien
gaggtgaaaatcgaagaatgaagtc

SEQ ID NO: 5082150 - DNA, 25 bp, Homo sapien
gtggaagggcactgtagttgaggtg

SEQ ID NO: 5082151 - DNA, 25 bp, Homo sapien
tggaagggcactgtagttgaggtga

SEQ ID NO: 5082152 - DNA, 25 bp, Homo sapien
gagttgtagccacactctgagtcag

SEQ ID NO: 5082153 - DNA, 25 bp, Homo sapien
tgccagactcttccaataccagtga

SEQ ID NO: 5082154 - DNA, 25 bp, Homo sapien
tcttaaccaattggcagtgctgcct

SEQ ID NO: 5082155 - DNA, 25 bp, Homo sapien
agataatagatgcttggtccctgcc

SEQ ID NO: 5082156 - DNA, 25 bp, Homo sapien
cccccggtggacatgatttttgcca

SEQ ID NO: 5082157 - DNA, 25 bp, Homo sapien
catgaaccccggcttcgatttgtcc

SEQ ID NO: 5082158 - DNA, 25 bp, Homo sapien
aacccgcaggaggacttcgagctga

SEQ ID NO: 5082159 - DNA, 25 bp, Homo sapien
cgagctgattcagcgcatcggcagc

SEQ ID NO: 5082160 - DNA, 25 bp, Homo sapien
ctacggcgacgtctacaaggtaaag

SEQ ID NO: 5082161 - DNA, 25 bp, Homo sapien
cttttcaagcgtccggcggcagcgg

SEQ ID NO: 5082162 - DNA, 25 bp, Homo sapien
gtccgcagaaaagccgaggcgtttc

SEQ ID NO: 5082163 - DNA, 25 bp, Homo sapien
aggagcggcgaaagcggaagccatg

SEQ ID NO: 5082164 - DNA, 25 bp, Homo sapien
atcgcggctgcgcagtcgggcggga

SEQ ID NO: 5082165 - DNA, 25 bp, Homo sapien
ctatgctacctgcttggaactggga

SEQ ID NO: 5082166 - DNA, 25 bp, Homo sapien
gatagaccaaggtccaactttgtcg

SEQ ID NO: 5082167 - DNA, 25 bp, Homo sapien
tcacggtgtgtttagtgacccctcc

SEQ ID NO: 5082168 - DNA, 25 bp, Homo sapien
gaaaggctgcagcactccatggtat

SEQ ID NO: 5082169 - DNA, 25 bp, Homo sapien
gcaggccaactccaagggtccgagt

SEQ ID NO: 5082170 - DNA, 25 bp, Homo sapien
ccctggcaggccaactccaagggtc

SEQ ID NO: 5082171 - DNA, 25 bp, Homo sapien
tggcaggccaactccaagggtccga

SEQ ID NO: 5082172 - DNA, 25 bp, Homo sapien
ctggcaggccaactccaagggtccg

SEQ ID NO: 5082173 - DNA, 25 bp, Homo sapien
catagctcagatgtaagacgcgcaa

SEQ ID NO: 5082174 - DNA, 25 bp, Homo sapien
ttctgaagcaaaactccaacgtggt

SEQ ID NO: 5082175 - DNA, 25 bp, Homo sapien
gctaaagagcttccggatcgtcacg

SEQ ID NO: 5082176 - DNA, 25 bp, Homo sapien
tcttcgaagagggaggtcaatcact

SEQ ID NO: 5082177 - DNA, 25 bp, Homo sapien
gagcagacctggcttccatttggga

SEQ ID NO: 5082178 - DNA, 25 bp, Homo sapien
tcctgggcaagtaccttaaacaagc

SEQ ID NO: 5082179 - DNA, 25 bp, Homo sapien
gaaggaaggcctgtaatctgggtcc

SEQ ID NO: 5082180 - DNA, 25 bp, Homo sapien
gagcctgaaggtagatccatcgaga

SEQ ID NO: 5082181 - DNA, 25 bp, Homo sapien
catacaggtactgggtgctcggttt

SEQ ID NO: 5082182 - DNA, 25 bp, Homo sapien
caggtactgggtgctcggttttgtt

SEQ ID NO: 5082183 - DNA, 25 bp, Homo sapien
atataacatacaggtactgggtgct

SEQ ID NO: 5082184 - DNA, 25 bp, Homo sapien
taacatacaggtactgggtgctcgg

SEQ ID NO: 5082185 - DNA, 25 bp, Homo sapien
ggaagcatgtttattggccaggtgt

SEQ ID NO: 5082186 - DNA, 25 bp, Homo sapien
tggaagcatgtttattggccaggtg

SEQ ID NO: 5082187 - DNA, 25 bp, Homo sapien
tctggaagcatgtttattggccagg

SEQ ID NO: 5082188 - DNA, 25 bp, Homo sapien
gaagcatgtttattggccaggtgtg

SEQ ID NO: 5082189 - DNA, 25 bp, Homo sapien
atttagcttcacctcggaacttcca

SEQ ID NO: 5082190 - DNA, 25 bp, Homo sapien
caaatttagcttcacctcggaactt

SEQ ID NO: 5082191 - DNA, 25 bp, Homo sapien
tggacaacaaagcaagactctgcct

SEQ ID NO: 5082192 - DNA, 25 bp, Homo sapien
cctggacaacaaagcaagactctgc

SEQ ID NO: 5082193 - DNA, 25 bp, Homo sapien
ctggacaacaaagcaagactctgcc

SEQ ID NO: 5082194 - DNA, 25 bp, Homo sapien
ttggtcatttcacagctcgttagca

SEQ ID NO: 5082195 - DNA, 25 bp, Homo sapien
ggtcatttcacagctcgttagcatt

SEQ ID NO: 5082196 - DNA, 25 bp, Homo sapien
ttcacagctcgttagcattctctct

SEQ ID NO: 5082197 - DNA, 25 bp, Homo sapien
catttcacagctcgttagcattctc

SEQ ID NO: 5082198 - DNA, 25 bp, Homo sapien
atctgcttttccccgtaagacgtat

SEQ ID NO: 5082199 - DNA, 25 bp, Homo sapien
tccacacttaatcattcaagagctg

SEQ ID NO: 5082200 - DNA, 25 bp, Homo sapien
caccgcgccgggacaaaatgagtat

SEQ ID NO: 5082201 - DNA, 25 bp, Homo sapien
caagagctgattatccagaatgtat

SEQ ID NO: 5082202 - DNA, 25 bp, Homo sapien
tagttatacgacatatcataagaga

SEQ ID NO: 5082203 - DNA, 25 bp, Homo sapien
aatcataaggtacatttgtatatag

SEQ ID NO: 5082204 - DNA, 25 bp, Homo sapien
caataaatattgatgtgaaggcaga

SEQ ID NO: 5082205 - DNA, 25 bp, Homo sapien
tacgacatatcataagagaattctg

SEQ ID NO: 5082206 - DNA, 25 bp, Homo sapien
tcccaaggtgactatgctatttaca

SEQ ID NO: 5082207 - DNA, 25 bp, Homo sapien
catcaccagtatgtgagtgtcccag

SEQ ID NO: 5082208 - DNA, 25 bp, Homo sapien
gctccacatcttagttagcactcgg

SEQ ID NO: 5082209 - DNA, 25 bp, Homo sapien
cactcggcattgtcagtcttgtcaa

SEQ ID NO: 5082210 - DNA, 25 bp, Homo sapien
aatgggcatctgatacactgcaagt

SEQ ID NO: 5082211 - DNA, 25 bp, Homo sapien
gaacaagtctcaagatgtgtaagcc

SEQ ID NO: 5082212 - DNA, 25 bp, Homo sapien
agtggtgtccactaaacctatgaga

SEQ ID NO: 5082213 - DNA, 25 bp, Homo sapien
aaataatactggaggctagcaaggg

SEQ ID NO: 5082214 - DNA, 25 bp, Homo sapien
aagtttcttaacagagctggacagg

SEQ ID NO: 5082215 - DNA, 25 bp, Homo sapien
tcagaggcacataccctaatcaagg

SEQ ID NO: 5082216 - DNA, 25 bp, Homo sapien
gctggacaggccaatgagatctgat

SEQ ID NO: 5082217 - DNA, 25 bp, Homo sapien
tctgttccactaggtcaggccatcc

SEQ ID NO: 5082218 - DNA, 25 bp, Homo sapien
taagttatatctgtcggccttgcgg

SEQ ID NO: 5082219 - DNA, 25 bp, Homo sapien
tgaaactcatagatccctccaggct

SEQ ID NO: 5082220 - DNA, 25 bp, Homo sapien
aacacaggtggtgtaaatcctggca

SEQ ID NO: 5082221 - DNA, 25 bp, Homo sapien
tctcagggaaggtggaatgacctat

SEQ ID NO: 5082222 - DNA, 25 bp, Homo sapien
ttcacccactatagacagtgtccgt

SEQ ID NO: 5082223 - DNA, 25 bp, Homo sapien
taaagttccatgctcatatgccacc

SEQ ID NO: 5082224 - DNA, 25 bp, Homo sapien
tgtaatcacatgtccctttgtaaac

SEQ ID NO: 5082225 - DNA, 25 bp, Homo sapien
actctcaaccattcactgctacgtg

SEQ ID NO: 5082226 - DNA, 25 bp, Homo sapien
cacaatgggatgagaacgaggatgc

SEQ ID NO: 5082227 - DNA, 25 bp, Homo sapien
ccgtgtggaggtggacacttcaggg

SEQ ID NO: 5082228 - DNA, 25 bp, Homo sapien
ccaagccagtcttggccgtgtggag

SEQ ID NO: 5082229 - DNA, 25 bp, Homo sapien
aaagtattctataagctgcctcctc

SEQ ID NO: 5082230 - DNA, 25 bp, Homo sapien
tatcaataaatatcaggcccaagtg

SEQ ID NO: 5082231 - DNA, 25 bp, Homo sapien
attagatggttgtggtggcaagcat

SEQ ID NO: 5082232 - DNA, 25 bp, Homo sapien
tagggagcctgaatagatttaaaaa

SEQ ID NO: 5082233 - DNA, 25 bp, Homo sapien
gaagaaatagggagcctgaatagat

SEQ ID NO: 5082234 - DNA, 25 bp, Homo sapien
cacagattcaaccaattgtagacag

SEQ ID NO: 5082235 - DNA, 25 bp, Homo sapien
acaaaaagctagtatagtcggctct

SEQ ID NO: 5082236 - DNA, 25 bp, Homo sapien
cacacacaccagaagtgaaaaatga

SEQ ID NO: 5082237 - DNA, 25 bp, Homo sapien
gtatagtcggctctccatctgtatc

SEQ ID NO: 5082238 - DNA, 25 bp, Homo sapien
gagccaccacgcctggcccatttat

SEQ ID NO: 5082239 - DNA, 25 bp, Homo sapien
ggtctcaaacacctgaccttgtgat

SEQ ID NO: 5082240 - DNA, 25 bp, Homo sapien
gatggagtttcaccagctttggcca

SEQ ID NO: 5082241 - DNA, 25 bp, Homo sapien
ccacccatcttggcctcccaaagtg

SEQ ID NO: 5082242 - DNA, 25 bp, Homo sapien
gctgggataaggctacccccttgaa

SEQ ID NO: 5082243 - DNA, 25 bp, Homo sapien
gaaaggaattgcctagggctacagg

SEQ ID NO: 5082244 - DNA, 25 bp, Homo sapien
aattgcctagggctacaggcttgta

SEQ ID NO: 5082245 - DNA, 25 bp, Homo sapien
cctagggctacaggcttgtaaacat

SEQ ID NO: 5082246 - DNA, 25 bp, Homo sapien
tcaaggaagggtatgattctgagcc

SEQ ID NO: 5082247 - DNA, 25 bp, Homo sapien
tgtataattaactgactctggagaa

SEQ ID NO: 5082248 - DNA, 25 bp, Homo sapien
tgtgagccgtgcaatggcaaaaaga

SEQ ID NO: 5082249 - DNA, 25 bp, Homo sapien
taacaagggaccatagcaggtgtgt

SEQ ID NO: 5082250 - DNA, 25 bp, Homo sapien
gatgggccctgaagaactaaaatga

SEQ ID NO: 5082251 - DNA, 25 bp, Homo sapien
gcagagatcctacacacagcagaga

SEQ ID NO: 5082252 - DNA, 25 bp, Homo sapien
agttagaaacctggcgacgaacgtg

SEQ ID NO: 5082253 - DNA, 25 bp, Homo sapien
tcctgcgtggtgaaagatgccatcc

SEQ ID NO: 5082254 - DNA, 25 bp, Homo sapien
ttgcatgaattattcaggctttata

SEQ ID NO: 5082255 - DNA, 25 bp, Homo sapien
ggctttatatggatagagctttgaa

SEQ ID NO: 5082256 - DNA, 25 bp, Homo sapien
tattcaggctttatatggatagagc

SEQ ID NO: 5082257 - DNA, 25 bp, Homo sapien
gaattattcaggctttatatggata

SEQ ID NO: 5082258 - DNA, 25 bp, Homo sapien
atctttggacccctaacacttggca

SEQ ID NO: 5082259 - DNA, 25 bp, Homo sapien
ggaattttaggcaacaggcccctca

SEQ ID NO: 5082260 - DNA, 25 bp, Homo sapien
tacaaatttcttatggccactagca

SEQ ID NO: 5082261 - DNA, 25 bp, Homo sapien
catttagctctatagggttccaggc

SEQ ID NO: 5082262 - DNA, 25 bp, Homo sapien
tttaaaaagctataaccagccaggc

SEQ ID NO: 5082263 - DNA, 25 bp, Homo sapien
cacaggcaattgtacgtagatgtac

SEQ ID NO: 5082264 - DNA, 25 bp, Homo sapien
gcatctggtatgtggttcttcgaat

SEQ ID NO: 5082265 - DNA, 25 bp, Homo sapien
cactaggccaacaggaagtaacaac

SEQ ID NO: 5082266 - DNA, 25 bp, Homo sapien
gaattccactaatttccattatcgt

SEQ ID NO: 5082267 - DNA, 25 bp, Homo sapien
ggtaacatatcaagatccccatgtg

SEQ ID NO: 5082268 - DNA, 25 bp, Homo sapien
aaatttcttcactctcgaattccac

SEQ ID NO: 5082269 - DNA, 25 bp, Homo sapien
catttgtaggtatagatgtgtgtag

SEQ ID NO: 5082270 - DNA, 25 bp, Homo sapien
actcccacaatcagtgacccactct

SEQ ID NO: 5082271 - DNA, 25 bp, Homo sapien
aactcatcattttatcaggacccac

SEQ ID NO: 5082272 - DNA, 25 bp, Homo sapien
cagtgacccactctggagacaatgg

SEQ ID NO: 5082273 - DNA, 25 bp, Homo sapien
gctgaactcatcagaggctgaactc

SEQ ID NO: 5082274 - DNA, 25 bp, Homo sapien
tgtcaatcaagcagcaaagatcctt

SEQ ID NO: 5082275 - DNA, 25 bp, Homo sapien
atcttaacacaggaaggcagtaggc

SEQ ID NO: 5082276 - DNA, 25 bp, Homo sapien
gcaaagcctgattgaatagccggaa

SEQ ID NO: 5082277 - DNA, 25 bp, Homo sapien
cacatctgaaacgaaggtaggaggc

SEQ ID NO: 5082278 - DNA, 25 bp, Homo sapien
taaggaggtcatgactagtctgggc

SEQ ID NO: 5082279 - DNA, 25 bp, Homo sapien
gaagatgtgtattggcctgacgcag

SEQ ID NO: 5082280 - DNA, 25 bp, Homo sapien
tccaaagacttgtgatagaacccag

SEQ ID NO: 5082281 - DNA, 25 bp, Homo sapien
tatcatgcattgtttgtaagggaaa

SEQ ID NO: 5082282 - DNA, 25 bp, Homo sapien
tataagctatgtaataaccttgggc

SEQ ID NO: 5082283 - DNA, 25 bp, Homo sapien
gcatcactcacattccaagctgggt

SEQ ID NO: 5082284 - DNA, 25 bp, Homo sapien
taattaccatgcaacaaccttcctg

SEQ ID NO: 5082285 - DNA, 25 bp, Homo sapien
cagcttggtgccagatttcctctcg

SEQ ID NO: 5082286 - DNA, 25 bp, Homo sapien
taaccagcacttttctacaagtgag

SEQ ID NO: 5082287 - DNA, 25 bp, Homo sapien
tcaagcacctatatgaggtagcagg

SEQ ID NO: 5082288 - DNA, 25 bp, Homo sapien
tattgcaaggctataagaacccaaa

SEQ ID NO: 5082289 - DNA, 25 bp, Homo sapien
ggcagtacaaacaacaatccacaca

SEQ ID NO: 5082290 - DNA, 25 bp, Homo sapien
gcagcaaagcgagctcctgtctcta

SEQ ID NO: 5082291 - DNA, 25 bp, Homo sapien
aaacttctcaagtagccagacgtgg

SEQ ID NO: 5082292 - DNA, 25 bp, Homo sapien
gcttgacaaattggtctccatggca

SEQ ID NO: 5082293 - DNA, 25 bp, Homo sapien
ttaatacggagatggctcaagccct

SEQ ID NO: 5082294 - DNA, 25 bp, Homo sapien
gtgtccctataaacgacattaactc

SEQ ID NO: 5082295 - DNA, 25 bp, Homo sapien
tccgtgtccctataaacgacattaa

SEQ ID NO: 5082296 - DNA, 25 bp, Homo sapien
cgtgtccctataaacgacattaact

SEQ ID NO: 5082297 - DNA, 25 bp, Homo sapien
catccgtgtccctataaacgacatt

SEQ ID NO: 5082298 - DNA, 25 bp, Homo sapien
agataaagaaactacctgccaggca

SEQ ID NO: 5082299 - DNA, 25 bp, Homo sapien
tatgaggtgaactaatgacctccca

SEQ ID NO: 5082300 - DNA, 25 bp, Homo sapien
tcactatcaccttacatggaagaag

SEQ ID NO: 5082301 - DNA, 25 bp, Homo sapien
aacattcactctatagcaaagctgc

SEQ ID NO: 5082302 - DNA, 25 bp, Homo sapien
ggctactctgggaaaagatatatta

SEQ ID NO: 5082303 - DNA, 25 bp, Homo sapien
gtttgcacccactccgagacctaaa

SEQ ID NO: 5082304 - DNA, 25 bp, Homo sapien
cggaatgttagtttgactgagatgt

SEQ ID NO: 5082305 - DNA, 25 bp, Homo sapien
ctctctcggaatgttagtttgactg

SEQ ID NO: 5082306 - DNA, 25 bp, Homo sapien
ttctggattcccatgaatcttcaaa

SEQ ID NO: 5082307 - DNA, 25 bp, Homo sapien
ctctgccaaaacttctggattccca

SEQ ID NO: 5082308 - DNA, 25 bp, Homo sapien
catgaatcttcaaatatatcgacca

SEQ ID NO: 5082309 - DNA, 25 bp, Homo sapien
ctgccaaaacttctggattcccatg

SEQ ID NO: 5082310 - DNA, 25 bp, Homo sapien
tgtttaagcaatcctgttactgctg

SEQ ID NO: 5082311 - DNA, 25 bp, Homo sapien
tctggagcaggagattaatcattat

SEQ ID NO: 5082312 - DNA, 25 bp, Homo sapien
cattctagaaaggaacggaatttgt

SEQ ID NO: 5082313 - DNA, 25 bp, Homo sapien
aacagctgttgtgatttgtcctgca

SEQ ID NO: 5082314 - DNA, 25 bp, Homo sapien
ggcaaactcctactgaagcctaggg

SEQ ID NO: 5082315 - DNA, 25 bp, Homo sapien
cattagccaccatacgaggctggga

SEQ ID NO: 5082316 - DNA, 25 bp, Homo sapien
gcagccaaaagcttctcagaggccc

SEQ ID NO: 5082317 - DNA, 25 bp, Homo sapien
agccaggttaaagcccattgatcca

SEQ ID NO: 5082318 - DNA, 25 bp, Homo sapien
gagccagcatgagccttcaaggcag

SEQ ID NO: 5082319 - DNA, 25 bp, Homo sapien
gccagcgaagcagggtgtctaacac

SEQ ID NO: 5082320 - DNA, 25 bp, Homo sapien
ggtctgagcttcctgccagtgccta

SEQ ID NO: 5082321 - DNA, 25 bp, Homo sapien
gaaagacaggtagctctcagatgaa

SEQ ID NO: 5082322 - DNA, 25 bp, Homo sapien
aaggaccagggttctgcaggcatgc

SEQ ID NO: 5082323 - DNA, 25 bp, Homo sapien
cagtctgtatgaccgaccctgggta

SEQ ID NO: 5082324 - DNA, 25 bp, Homo sapien
tacagaatctgatagcacgggactg

SEQ ID NO: 5082325 - DNA, 25 bp, Homo sapien
ttcctccatgaaaaagcgctctgtc

SEQ ID NO: 5082326 - DNA, 25 bp, Homo sapien
gaagggagccatctccagttgagtc

SEQ ID NO: 5082327 - DNA, 25 bp, Homo sapien
gggaagcttcaggatgcaacaataa

SEQ ID NO: 5082328 - DNA, 25 bp, Homo sapien
cattctcccgcgctgtttgttcaca

SEQ ID NO: 5082329 - DNA, 25 bp, Homo sapien
tttgttcacactgagcccagcatgg

SEQ ID NO: 5082330 - DNA, 25 bp, Homo sapien
tatctgcggtgaatatagtagacga

SEQ ID NO: 5082331 - DNA, 25 bp, Homo sapien
tagacgagatgacctccagtggcca

SEQ ID NO: 5082332 - DNA, 25 bp, Homo sapien
tgttatgtcataactctgagctttc

SEQ ID NO: 5082333 - DNA, 25 bp, Homo sapien
tcactgctagcaatcacaaggttgt

SEQ ID NO: 5082334 - DNA, 25 bp, Homo sapien
gaactatggaaaagacactcaccac

SEQ ID NO: 5082335 - DNA, 25 bp, Homo sapien
tatggaaaagacactcaccactgat

SEQ ID NO: 5082336 - DNA, 25 bp, Homo sapien
cctccaatcaactttgaatccaggg

SEQ ID NO: 5082337 - DNA, 25 bp, Homo sapien
gaaaagacactcaccactgatcctc

SEQ ID NO: 5082338 - DNA, 25 bp, Homo sapien
ggggagtatgcagctttcctggaca

SEQ ID NO: 5082339 - DNA, 25 bp, Homo sapien
gagtatgcagctttcctggacactt

SEQ ID NO: 5082340 - DNA, 25 bp, Homo sapien
catcaggggagtatgcagctttcct

SEQ ID NO: 5082341 - DNA, 25 bp, Homo sapien
tggccatcaggggagtatgcagctt

SEQ ID NO: 5082342 - DNA, 25 bp, Homo sapien
ccataatgtttagtccacagattaa

SEQ ID NO: 5082343 - DNA, 25 bp, Homo sapien
tatggaggacggtcagtgcactttc

SEQ ID NO: 5082344 - DNA, 25 bp, Homo sapien
tgtttagtccacagattaatgtctg

SEQ ID NO: 5082345 - DNA, 25 bp, Homo sapien
ggtcagtgcactttccataatgttt

SEQ ID NO: 5082346 - DNA, 25 bp, Homo sapien
acatctcagcctccatagtcacatg

SEQ ID NO: 5082347 - DNA, 25 bp, Homo sapien
tctcctgggtatccagctcttggga

SEQ ID NO: 5082348 - DNA, 25 bp, Homo sapien
tatccagctcttgggacatctcagc

SEQ ID NO: 5082349 - DNA, 25 bp, Homo sapien
ctttgcttctcctgggtatccagct

SEQ ID NO: 5082350 - DNA, 25 bp, Homo sapien
tcagatatatccatgctagtgggcc

SEQ ID NO: 5082351 - DNA, 25 bp, Homo sapien
cgagtcattcccctctatcatgaaa

SEQ ID NO: 5082352 - DNA, 25 bp, Homo sapien
tgggcctggtccttagaggtgaact

SEQ ID NO: 5082353 - DNA, 25 bp, Homo sapien
tgggaatatgtccactgcatgaaca

SEQ ID NO: 5082354 - DNA, 25 bp, Homo sapien
cagttctggctctctgacaaatcaa

SEQ ID NO: 5082355 - DNA, 25 bp, Homo sapien
gttacagcccactttggaatgctct

SEQ ID NO: 5082356 - DNA, 25 bp, Homo sapien
aagtcatttagccagccgacaggag

SEQ ID NO: 5082357 - DNA, 25 bp, Homo sapien
gagcgtctcctccagatacaagtca

SEQ ID NO: 5082358 - DNA, 25 bp, Homo sapien
ctgaactgcaccagagatttagata

SEQ ID NO: 5082359 - DNA, 25 bp, Homo sapien
tatgtttgaaggtacgagggttcag

SEQ ID NO: 5082360 - DNA, 25 bp, Homo sapien
tagatatgtttgaaggtacgagggt

SEQ ID NO: 5082361 - DNA, 25 bp, Homo sapien
gaaggtacgagggttcagtcctatc

SEQ ID NO: 5082362 - DNA, 25 bp, Homo sapien
tgcacagatctgttctccagtcaaa

SEQ ID NO: 5082363 - DNA, 25 bp, Homo sapien
gtcaaaacaaggctggtgtcttcat

SEQ ID NO: 5082364 - DNA, 25 bp, Homo sapien
ggtgtcttcatgtgcttttgttgct

SEQ ID NO: 5082365 - DNA, 25 bp, Homo sapien
tcttctttacatgcacagatctgtt

SEQ ID NO: 5082366 - DNA, 25 bp, Homo sapien
ttgttttctgttttgggatgaagtc

SEQ ID NO: 5082367 - DNA, 25 bp, Homo sapien
gacaggatggtgaactagataacac

SEQ ID NO: 5082368 - DNA, 25 bp, Homo sapien
tctcttcaaacgtgatcctgtgtgt

SEQ ID NO: 5082369 - DNA, 25 bp, Homo sapien
tagataatcaaaatagacaggatgg

SEQ ID NO: 5082370 - DNA, 25 bp, Homo sapien
ttcttccactgtaacccaaccacga

SEQ ID NO: 5082371 - DNA, 25 bp, Homo sapien
actgtaacccaaccacgacttagct

SEQ ID NO: 5082372 - DNA, 25 bp, Homo sapien
accacgacttagctttcctggagtc

SEQ ID NO: 5082373 - DNA, 25 bp, Homo sapien
ccagtgccccgggcaagtaacttct

SEQ ID NO: 5082374 - DNA, 25 bp, Homo sapien
tccaaattcagcgttcactagtata

SEQ ID NO: 5082375 - DNA, 25 bp, Homo sapien
gcctccaaattcagcgttcactagt

SEQ ID NO: 5082376 - DNA, 25 bp, Homo sapien
caaattcagcgttcactagtataag

SEQ ID NO: 5082377 - DNA, 25 bp, Homo sapien
aagcctccaaattcagcgttcacta

SEQ ID NO: 5082378 - DNA, 25 bp, Homo sapien
tgttctgtgccccagagtgtcccaa

SEQ ID NO: 5082379 - DNA, 25 bp, Homo sapien
tattcatgagctgcctaatgcacgt

SEQ ID NO: 5082380 - DNA, 25 bp, Homo sapien
ttcagtttccagtaggttccagcct

SEQ ID NO: 5082381 - DNA, 25 bp, Homo sapien
ccaatgtctttcatgggagctgtaa

SEQ ID NO: 5082382 - DNA, 25 bp, Homo sapien
cctcgggtgggaatcagtaaactgc

SEQ ID NO: 5082383 - DNA, 25 bp, Homo sapien
gaaaggatacagcaacaggcctaga

SEQ ID NO: 5082384 - DNA, 25 bp, Homo sapien
cctactgagaactgggtgggacctg

SEQ ID NO: 5082385 - DNA, 25 bp, Homo sapien
tctatacctgctttgtgaccctcgg

SEQ ID NO: 5082386 - DNA, 25 bp, Homo sapien
tgtagggacatctatgggtcatctc

SEQ ID NO: 5082387 - DNA, 25 bp, Homo sapien
agaatgactactcttttgaccactg

SEQ ID NO: 5082388 - DNA, 25 bp, Homo sapien
ttggtacaagtaaaaggcctggaca

SEQ ID NO: 5082389 - DNA, 25 bp, Homo sapien
gcctggacaaagtgcactggacgat

SEQ ID NO: 5082390 - DNA, 25 bp, Homo sapien
gttacacaatgtgggcattactcaa

SEQ ID NO: 5082391 - DNA, 25 bp, Homo sapien
gcaaaaatcagaacaagcccacata

SEQ ID NO: 5082392 - DNA, 25 bp, Homo sapien
gagggaagtgtactgacgtcagcaa

SEQ ID NO: 5082393 - DNA, 25 bp, Homo sapien
caatcaacaaatcttaagctagggt

SEQ ID NO: 5082394 - DNA, 25 bp, Homo sapien
caatcgaggttagcatcaccagtgg

SEQ ID NO: 5082395 - DNA, 25 bp, Homo sapien
cagacaatgtggttgagcaatcgag

SEQ ID NO: 5082396 - DNA, 25 bp, Homo sapien
tggaaacttacacaaaggcacttga

SEQ ID NO: 5082397 - DNA, 25 bp, Homo sapien
cagcttgaaagggtcaaacttgcag

SEQ ID NO: 5082398 - DNA, 25 bp, Homo sapien
gccatgcctggatgagcacaagtga

SEQ ID NO: 5082399 - DNA, 25 bp, Homo sapien
tcagagccttctcgggatggctgcc

SEQ ID NO: 5082400 - DNA, 25 bp, Homo sapien
tctgcctgcagtgaaaatgctcctg

SEQ ID NO: 5082401 - DNA, 25 bp, Homo sapien
tgttaaccagcccactcttcagagc

SEQ ID NO: 5082402 - DNA, 25 bp, Homo sapien
tgtctccttttgatgtatttaaggg

SEQ ID NO: 5082403 - DNA, 25 bp, Homo sapien
ttttgatgtatttaagggcaggcac

SEQ ID NO: 5082404 - DNA, 25 bp, Homo sapien
tctccttttgatgtatttaagggca

SEQ ID NO: 5082405 - DNA, 25 bp, Homo sapien
tccttttgatgtatttaagggcagg

SEQ ID NO: 5082406 - DNA, 25 bp, Homo sapien
gatgatttgtgaggcacttcagacc

SEQ ID NO: 5082407 - DNA, 25 bp, Homo sapien
ttttggctttggtgagtaagggaca

SEQ ID NO: 5082408 - DNA, 25 bp, Homo sapien
ttcagacccttgcaatgcctcaggt

SEQ ID NO: 5082409 - DNA, 25 bp, Homo sapien
cctcaggtcattatttagaacattc

SEQ ID NO: 5082410 - DNA, 25 bp, Homo sapien
tcaaatcaggggtggcgtggccctt

SEQ ID NO: 5082411 - DNA, 25 bp, Homo sapien
ttttcatccacaagcaagcagagga

SEQ ID NO: 5082412 - DNA, 25 bp, Homo sapien
agcagaggagtaagcggagagagcc

SEQ ID NO: 5082413 - DNA, 25 bp, Homo sapien
agatgtgaacttaaaggatactgtc

SEQ ID NO: 5082414 - DNA, 25 bp, Homo sapien
tacgatgagggaagcttgggaaacc

SEQ ID NO: 5082415 - DNA, 25 bp, Homo sapien
tgaggagactcaatattacccatcc

SEQ ID NO: 5082416 - DNA, 25 bp, Homo sapien
tcaactttagtaggagacgtatcgg

SEQ ID NO: 5082417 - DNA, 25 bp, Homo sapien
ggcctgtgattctcaatgagcctcc

SEQ ID NO: 5082418 - DNA, 25 bp, Homo sapien
ctctgttccatgatcacctgagttg

SEQ ID NO: 5082419 - DNA, 25 bp, Homo sapien
cacccgcaccacctgaggaagaggc

SEQ ID NO: 5082420 - DNA, 25 bp, Homo sapien
gatcacctgagttgctccatgtctg

SEQ ID NO: 5082421 - DNA, 25 bp, Homo sapien
tccatgatcacctgagttgctccat

SEQ ID NO: 5082422 - DNA, 25 bp, Homo sapien
ctctgctgtgtctgctcaaaggcac

SEQ ID NO: 5082423 - DNA, 25 bp, Homo sapien
ctctctgctgtgtctgctcaaaggc

SEQ ID NO: 5082424 - DNA, 25 bp, Homo sapien
ctgctgtgtctgctcaaaggcacca

SEQ ID NO: 5082425 - DNA, 25 bp, Homo sapien
gctgtgtctgctcaaaggcaccagg

SEQ ID NO: 5082426 - DNA, 25 bp, Homo sapien
agcaatgctacacaccaaagtcaac

SEQ ID NO: 5082427 - DNA, 25 bp, Homo sapien
cccccagtaataaatcaaagtaatg

SEQ ID NO: 5082428 - DNA, 25 bp, Homo sapien
cccagtaataaatcaaagtaatgat

SEQ ID NO: 5082429 - DNA, 25 bp, Homo sapien
aaagcaatgctacacaccaaagtca

SEQ ID NO: 5082430 - DNA, 25 bp, Homo sapien
tcttgatctggagtccgaaggtccc

SEQ ID NO: 5082431 - DNA, 25 bp, Homo sapien
aaatcccatccaggtcgggctgcgt

SEQ ID NO: 5082432 - DNA, 25 bp, Homo sapien
cagtgtcccgttttgtacccaggag

SEQ ID NO: 5082433 - DNA, 25 bp, Homo sapien
taggcagccagctctatctgtcgcg

SEQ ID NO: 5082434 - DNA, 25 bp, Homo sapien
ttttaatctctcctcgccgccctca

SEQ ID NO: 5082435 - DNA, 25 bp, Homo sapien
ttaatctctcctcgccgccctcatc

SEQ ID NO: 5082436 - DNA, 25 bp, Homo sapien
ctccgatccacagtccgccctcctc

SEQ ID NO: 5082437 - DNA, 25 bp, Homo sapien
ccgatccacagtccgccctcctctc

SEQ ID NO: 5082438 - DNA, 25 bp, Homo sapien
ctcgcgcgccgccgccagacacaat

SEQ ID NO: 5082439 - DNA, 25 bp, Homo sapien
ggcttcccgccccgccgcagccgcc

SEQ ID NO: 5082440 - DNA, 25 bp, Homo sapien
ccgccccgccgcagccgccggtggg

SEQ ID NO: 5082441 - DNA, 25 bp, Homo sapien
tcccgccccgccgcagccgccggtg

SEQ ID NO: 5082442 - DNA, 25 bp, Homo sapien
cttcccgccccgccgcagccgccgg

SEQ ID NO: 5082443 - DNA, 25 bp, Homo sapien
tgagcgccgtgacgagcgcccgcgg

SEQ ID NO: 5082444 - DNA, 25 bp, Homo sapien
gaagatggccgtgacgagcagcccc

SEQ ID NO: 5082445 - DNA, 25 bp, Homo sapien
tgaagatggccgtgacgagcagccc

SEQ ID NO: 5082446 - DNA, 25 bp, Homo sapien
aggccgaggctgagcgccgtgacga

SEQ ID NO: 5082447 - DNA, 25 bp, Homo sapien
tgcgacagcggcatcaggcggttct

SEQ ID NO: 5082448 - DNA, 25 bp, Homo sapien
catcaggcggttcttctggtccggg

SEQ ID NO: 5082449 - DNA, 25 bp, Homo sapien
gacagcggcatcaggcggttcttct

SEQ ID NO: 5082450 - DNA, 25 bp, Homo sapien
cagctctccttgtggcgccgggggt

SEQ ID NO: 5082451 - DNA, 25 bp, Homo sapien
cgccccagcgggggcgagtcccgca

SEQ ID NO: 5082452 - DNA, 25 bp, Homo sapien
gccccagcgggggcgagtcccgcag

SEQ ID NO: 5082453 - DNA, 25 bp, Homo sapien
gcgccccagcgggggcgagtcccgc

SEQ ID NO: 5082454 - DNA, 25 bp, Homo sapien
gcgaagaggggccggccgcactcgg

SEQ ID NO: 5082455 - DNA, 25 bp, Homo sapien
tggcgaagaggggccggccgcactc

SEQ ID NO: 5082456 - DNA, 25 bp, Homo sapien
gtggcgaagaggggccggccgcact

SEQ ID NO: 5082457 - DNA, 25 bp, Homo sapien
ggcgaagaggggccggccgcactcg

SEQ ID NO: 5082458 - DNA, 25 bp, Homo sapien
tgagggtgtcgatgtcccggtcgat

SEQ ID NO: 5082459 - DNA, 25 bp, Homo sapien
gagggtgtcgatgtcccggtcgatg

SEQ ID NO: 5082460 - DNA, 25 bp, Homo sapien
ctcttcggaggtcggcaccactttt

SEQ ID NO: 5082461 - DNA, 25 bp, Homo sapien
gcatccgcacaatacaggcaaagcc

SEQ ID NO: 5082462 - DNA, 25 bp, Homo sapien
ctctcttcggaggtcggcaccactt

SEQ ID NO: 5082463 - DNA, 25 bp, Homo sapien
cacatcagttccgtctgacaccagc

SEQ ID NO: 5082464 - DNA, 25 bp, Homo sapien
tcaaatcgctgggtgaaggctgatt

SEQ ID NO: 5082465 - DNA, 25 bp, Homo sapien
tcagcaaagcttcctcagcatcaaa

SEQ ID NO: 5082466 - DNA, 25 bp, Homo sapien
caagtcagtccttacttggatcagc

SEQ ID NO: 5082467 - DNA, 25 bp, Homo sapien
tcatttgcatacttttccaagtcag

SEQ ID NO: 5082468 - DNA, 25 bp, Homo sapien
gggttcgagggctctttttgctatc

SEQ ID NO: 5082469 - DNA, 25 bp, Homo sapien
gctctttttgctatctgaagaagaa

SEQ ID NO: 5082470 - DNA, 25 bp, Homo sapien
tcgagggctctttttgctatctgaa

SEQ ID NO: 5082471 - DNA, 25 bp, Homo sapien
cctgatggggttcgagggctctttt

SEQ ID NO: 5082472 - DNA, 25 bp, Homo sapien
ccggtgcctgtgcaaaattgacaag

SEQ ID NO: 5082473 - DNA, 25 bp, Homo sapien
gttgataagaaatggggctgttcca

SEQ ID NO: 5082474 - DNA, 25 bp, Homo sapien
gacaaggaatatgttgataagaaat

SEQ ID NO: 5082475 - DNA, 25 bp, Homo sapien
ctcggcaccagaagccggtgcctgt

SEQ ID NO: 5082476 - DNA, 25 bp, Homo sapien
ggcatctctaaatcacgacccaagt

SEQ ID NO: 5082477 - DNA, 25 bp, Homo sapien
gcagcctttatcactatttcccatg

SEQ ID NO: 5082478 - DNA, 25 bp, Homo sapien
cagctccacaggcatctctaaatca

SEQ ID NO: 5082479 - DNA, 25 bp, Homo sapien
gtctttagcagcctttatcactatt

SEQ ID NO: 5082480 - DNA, 25 bp, Homo sapien
gagtctgttattgaggctctctgta

SEQ ID NO: 5082481 - DNA, 25 bp, Homo sapien
ggcagttcatagatattcacctctt

SEQ ID NO: 5082482 - DNA, 25 bp, Homo sapien
ttcactttagcacagtatcttctgc

SEQ ID NO: 5082483 - DNA, 25 bp, Homo sapien
tactgactggtatagggagagaatg

SEQ ID NO: 5082484 - DNA, 25 bp, Homo sapien
ttgtcccctggcaacatcatgtcca

SEQ ID NO: 5082485 - DNA, 25 bp, Homo sapien
ccaaattgtcccctggcaacatcat

SEQ ID NO: 5082486 - DNA, 25 bp, Homo sapien
aaattgtcccctggcaacatcatgt

SEQ ID NO: 5082487 - DNA, 25 bp, Homo sapien
tccctccccaaattgtcccctggca

SEQ ID NO: 5082488 - DNA, 25 bp, Homo sapien
tgaagaatttgctaactgacctcct

SEQ ID NO: 5082489 - DNA, 25 bp, Homo sapien
tatcaatcaataatgaggcgggcag

SEQ ID NO: 5082490 - DNA, 25 bp, Homo sapien
gaataatggcagatacctcactgag

SEQ ID NO: 5082491 - DNA, 25 bp, Homo sapien
caggagtctgcaccttaaatggtca

SEQ ID NO: 5082492 - DNA, 25 bp, Homo sapien
aataagaaacgcgatttacgagtct

SEQ ID NO: 5082493 - DNA, 25 bp, Homo sapien
gaaacgcgatttacgagtctgctta

SEQ ID NO: 5082494 - DNA, 25 bp, Homo sapien
cgcgatttacgagtctgcttatttg

SEQ ID NO: 5082495 - DNA, 25 bp, Homo sapien
cgagtctgcttatttgtaacagaat

SEQ ID NO: 5082496 - DNA, 25 bp, Homo sapien
aatgtttcgcaagcggatgggctga

SEQ ID NO: 5082497 - DNA, 25 bp, Homo sapien
taaaaggaatgtttcgcaagcggat

SEQ ID NO: 5082498 - DNA, 25 bp, Homo sapien
gctgagaaaagtggtacttgatggc

SEQ ID NO: 5082499 - DNA, 25 bp, Homo sapien
ttcgcaagcggatgggctgagaaaa

SEQ ID NO: 5082500 - DNA, 25 bp, Homo sapien
gcaggtgccactcatcttgctgtat

SEQ ID NO: 5082501 - DNA, 25 bp, Homo sapien
ggtgccactcatcttgctgtatggt

SEQ ID NO: 5082502 - DNA, 25 bp, Homo sapien
gaagcaggtgccactcatcttgctg

SEQ ID NO: 5082503 - DNA, 25 bp, Homo sapien
cactcatcttgctgtatggtcttgg

SEQ ID NO: 5082504 - DNA, 25 bp, Homo sapien
gataagaacaacatccttctgtcca

SEQ ID NO: 5082505 - DNA, 25 bp, Homo sapien
gaccttataccaggtttccacacat

SEQ ID NO: 5082506 - DNA, 25 bp, Homo sapien
tcacaagaccttataccaggtttcc

SEQ ID NO: 5082507 - DNA, 25 bp, Homo sapien
ctgaccacatctgattgggcccaga

SEQ ID NO: 5082508 - DNA, 25 bp, Homo sapien
cttcttaaaacaacacatcccaagc

SEQ ID NO: 5082509 - DNA, 25 bp, Homo sapien
ccttcttaaaacaacacatcccaag

SEQ ID NO: 5082510 - DNA, 25 bp, Homo sapien
gccgaggaagccagcagtgattctt

SEQ ID NO: 5082511 - DNA, 25 bp, Homo sapien
cgcagagaaggacggctacggccat

SEQ ID NO: 5082512 - DNA, 25 bp, Homo sapien
tggccacaatgcagccgcagagaag

SEQ ID NO: 5082513 - DNA, 25 bp, Homo sapien
gaaactgactgtggccacaatgcag

SEQ ID NO: 5082514 - DNA, 25 bp, Homo sapien
actgtggccacaatgcagccgcaga

SEQ ID NO: 5082515 - DNA, 25 bp, Homo sapien
atccacacatggatccaaaataagg

SEQ ID NO: 5082516 - DNA, 25 bp, Homo sapien
gcttcccgtgctcgatcctgaggac

SEQ ID NO: 5082517 - DNA, 25 bp, Homo sapien
gagcttcccgtgctcgatcctgagg

SEQ ID NO: 5082518 - DNA, 25 bp, Homo sapien
ttcccgtgctcgatcctgaggacct

SEQ ID NO: 5082519 - DNA, 25 bp, Homo sapien
gcttcaccctgtttagcctgcttga

SEQ ID NO: 5082520 - DNA, 25 bp, Homo sapien
gctggtaagatgtaattagggtaac

SEQ ID NO: 5082521 - DNA, 25 bp, Homo sapien
aatcttcatgatgccggctggtaag

SEQ ID NO: 5082522 - DNA, 25 bp, Homo sapien
aggagtggaagttgcttcaccctgt

SEQ ID NO: 5082523 - DNA, 25 bp, Homo sapien
agttcaaaatctaatggtccttcct

SEQ ID NO: 5082524 - DNA, 25 bp, Homo sapien
agggatctcttagacttcccgtaag

SEQ ID NO: 5082525 - DNA, 25 bp, Homo sapien
gtcaggaacttcaagcattctctcc

SEQ ID NO: 5082526 - DNA, 25 bp, Homo sapien
tcaggaaaaggtcatagggatctct

SEQ ID NO: 5082527 - DNA, 25 bp, Homo sapien
cagttcaacattgatgtggtcagga

SEQ ID NO: 5082528 - DNA, 25 bp, Homo sapien
ttctttatccaagttgccagagcac

SEQ ID NO: 5082529 - DNA, 25 bp, Homo sapien
gagcactgaagctccctaaagctaa

SEQ ID NO: 5082530 - DNA, 25 bp, Homo sapien
agcactgaagctccctaaagctaaa

SEQ ID NO: 5082531 - DNA, 25 bp, Homo sapien
gcactgaagctccctaaagctaaat

SEQ ID NO: 5082532 - DNA, 25 bp, Homo sapien
tgggagccggttcaaatcatacgag

SEQ ID NO: 5082533 - DNA, 25 bp, Homo sapien
aacggataagcgatgcagagacctc

SEQ ID NO: 5082534 - DNA, 25 bp, Homo sapien
tgcaccaggcgcaaaagatggacca

SEQ ID NO: 5082535 - DNA, 25 bp, Homo sapien
tcatacgagatactggcggcataag

SEQ ID NO: 5082536 - DNA, 25 bp, Homo sapien
ctgaactccgcgctgttcccctcag

SEQ ID NO: 5082537 - DNA, 25 bp, Homo sapien
ctcaggagtcgctcgcactgtggac

SEQ ID NO: 5082538 - DNA, 25 bp, Homo sapien
cgcgctgttcccctcaggagtcgct

SEQ ID NO: 5082539 - DNA, 25 bp, Homo sapien
ctgttcccctcaggagtcgctcgca

SEQ ID NO: 5082540 - DNA, 25 bp, Homo sapien
tctatcagtaatccagaaagggctg

SEQ ID NO: 5082541 - DNA, 25 bp, Homo sapien
taagacaccatcaggacaagttctg

SEQ ID NO: 5082542 - DNA, 25 bp, Homo sapien
tacacctagaaatgtcccatggcac

SEQ ID NO: 5082543 - DNA, 25 bp, Homo sapien
gatttcgattccagtacaaagacag

SEQ ID NO: 5082544 - DNA, 25 bp, Homo sapien
tatgggctccctaaaattggtgcta

SEQ ID NO: 5082545 - DNA, 25 bp, Homo sapien
ttcatgtgcggagcgtaactggtca

SEQ ID NO: 5082546 - DNA, 25 bp, Homo sapien
catttagcctcatcacacgactgta

SEQ ID NO: 5082547 - DNA, 25 bp, Homo sapien
ttaagagcacctacggtctaccagg

SEQ ID NO: 5082548 - DNA, 25 bp, Homo sapien
actgacatcccaaacaagttacttt

SEQ ID NO: 5082549 - DNA, 25 bp, Homo sapien
ccactgacatcccaaacaagttact

SEQ ID NO: 5082550 - DNA, 25 bp, Homo sapien
cactgacatcccaaacaagttactt

SEQ ID NO: 5082551 - DNA, 25 bp, Homo sapien
ctgacatcccaaacaagttactttt

SEQ ID NO: 5082552 - DNA, 25 bp, Homo sapien
gagtacttgctccatgtcaggttct

SEQ ID NO: 5082553 - DNA, 25 bp, Homo sapien
caggcagttagtgagtacttgctcc

SEQ ID NO: 5082554 - DNA, 25 bp, Homo sapien
aggcagttagtgagtacttgctcca

SEQ ID NO: 5082555 - DNA, 25 bp, Homo sapien
cctgaatggctgctgtgacagctat

SEQ ID NO: 5082556 - DNA, 25 bp, Homo sapien
caccttgttcgttcaactcattcca

SEQ ID NO: 5082557 - DNA, 25 bp, Homo sapien
ttccgcaccttgttcgttcaactca

SEQ ID NO: 5082558 - DNA, 25 bp, Homo sapien
cttgttcgttcaactcattccattg

SEQ ID NO: 5082559 - DNA, 25 bp, Homo sapien
ttattccgcaccttgttcgttcaac

SEQ ID NO: 5082560 - DNA, 25 bp, Homo sapien
ttttctgcttgataatatgtagcca

SEQ ID NO: 5082561 - DNA, 25 bp, Homo sapien
gttgcttttacccacatgatacatt

SEQ ID NO: 5082562 - DNA, 25 bp, Homo sapien
ctgtaagtaaaggtatggcatattc

SEQ ID NO: 5082563 - DNA, 25 bp, Homo sapien
tgatacattgtactccaacattttc

SEQ ID NO: 5082564 - DNA, 25 bp, Homo sapien
ccccgaggttgactggcaggcgctt

SEQ ID NO: 5082565 - DNA, 25 bp, Homo sapien
ggcgcttccgctccggccgagagaa

SEQ ID NO: 5082566 - DNA, 25 bp, Homo sapien
cccagtcgtggacgcgggaaagcgt

SEQ ID NO: 5082567 - DNA, 25 bp, Homo sapien
gggaaagcgtcgctggcgcccctct

SEQ ID NO: 5082568 - DNA, 25 bp, Homo sapien
gcttctcctgaatgtactccattga

SEQ ID NO: 5082569 - DNA, 25 bp, Homo sapien
tctcctgaatgtactccattgaaag

SEQ ID NO: 5082570 - DNA, 25 bp, Homo sapien
ccattgaaagacctccacaacccat

SEQ ID NO: 5082571 - DNA, 25 bp, Homo sapien
cctgcttctcctgaatgtactccat

SEQ ID NO: 5082572 - DNA, 25 bp, Homo sapien
tgccaacttaagagtgtgtgtgccc

SEQ ID NO: 5082573 - DNA, 25 bp, Homo sapien
cagtagcaaagttgtcttccaggaa

SEQ ID NO: 5082574 - DNA, 25 bp, Homo sapien
gactctgcttgacataactgggcta

SEQ ID NO: 5082575 - DNA, 25 bp, Homo sapien
catctttccaaaaccgtagcgggct

SEQ ID NO: 5082576 - DNA, 25 bp, Homo sapien
tgctaaaggacccatctgaggctgt

SEQ ID NO: 5082577 - DNA, 25 bp, Homo sapien
ctgctaaaggacccatctgaggctg

SEQ ID NO: 5082578 - DNA, 25 bp, Homo sapien
cctgctaaaggacccatctgaggct

SEQ ID NO: 5082579 - DNA, 25 bp, Homo sapien
taatcaaggactaagactaaagagc

SEQ ID NO: 5082580 - DNA, 25 bp, Homo sapien
ctaatcaaggactaagactaaagag

SEQ ID NO: 5082581 - DNA, 25 bp, Homo sapien
gaatgcctactactggttgtatcct

SEQ ID NO: 5082582 - DNA, 25 bp, Homo sapien
tactactggttgtatccttttcctg

SEQ ID NO: 5082583 - DNA, 25 bp, Homo sapien
tccccggaatgcctactactggttg

SEQ ID NO: 5082584 - DNA, 25 bp, Homo sapien
gcctactactggttgtatccttttc

SEQ ID NO: 5082585 - DNA, 25 bp, Homo sapien
ctttgcatgcccctaacagtgaaat

SEQ ID NO: 5082586 - DNA, 25 bp, Homo sapien
tttgcatgcccctaacagtgaaatc

SEQ ID NO: 5082587 - DNA, 25 bp, Homo sapien
tgcatgcccctaacagtgaaatcca

SEQ ID NO: 5082588 - DNA, 25 bp, Homo sapien
ttgcatgcccctaacagtgaaatcc

SEQ ID NO: 5082589 - DNA, 25 bp, Homo sapien
tgttcctctgagaacccaactcccg

SEQ ID NO: 5082590 - DNA, 25 bp, Homo sapien
tgagaggcgctttgcagtcaccagt

SEQ ID NO: 5082591 - DNA, 25 bp, Homo sapien
cccggaagtcactgagaggcgcttt

SEQ ID NO: 5082592 - DNA, 25 bp, Homo sapien
ctgagaacccaactcccggaagtca

SEQ ID NO: 5082593 - DNA, 25 bp, Homo sapien
tcttccggttcttctaaagtcctca

SEQ ID NO: 5082594 - DNA, 25 bp, Homo sapien
cctgaagcccactttttctgcatct

SEQ ID NO: 5082595 - DNA, 25 bp, Homo sapien
ctgaggtgtagctggttcttccggt

SEQ ID NO: 5082596 - DNA, 25 bp, Homo sapien
taaagtcctcaccattaaagactct

SEQ ID NO: 5082597 - DNA, 25 bp, Homo sapien
aacatcaaaaggcttgcaaagatat

SEQ ID NO: 5082598 - DNA, 25 bp, Homo sapien
acatcaaaaggcttgcaaagatatt

SEQ ID NO: 5082599 - DNA, 25 bp, Homo sapien
gcaacatcaaaaggcttgcaaagat

SEQ ID NO: 5082600 - DNA, 25 bp, Homo sapien
catcaaaaggcttgcaaagatattt

SEQ ID NO: 5082601 - DNA, 25 bp, Homo sapien
gcttactttccctgttgagcaaaac

SEQ ID NO: 5082602 - DNA, 25 bp, Homo sapien
gaaaatagcatctggttcttggcaa

SEQ ID NO: 5082603 - DNA, 25 bp, Homo sapien
aacttgctgcaataagcttactttc

SEQ ID NO: 5082604 - DNA, 25 bp, Homo sapien
gaagggtggcatcttgtggcaccaa

SEQ ID NO: 5082605 - DNA, 25 bp, Homo sapien
tttaagaagcaatcacatggcctag

SEQ ID NO: 5082606 - DNA, 25 bp, Homo sapien
gcagctatggggtctctcatgatca

SEQ ID NO: 5082607 - DNA, 25 bp, Homo sapien
tcacatggcctaggagcagctatgg

SEQ ID NO: 5082608 - DNA, 25 bp, Homo sapien
gaagcaatcacatggcctaggagca

SEQ ID NO: 5082609 - DNA, 25 bp, Homo sapien
acattgcaggagacgtggatgatga

SEQ ID NO: 5082610 - DNA, 25 bp, Homo sapien
ttctgagcaggtacacgctgcagct

SEQ ID NO: 5082611 - DNA, 25 bp, Homo sapien
tctccaacacattgcaggagacgtg

SEQ ID NO: 5082612 - DNA, 25 bp, Homo sapien
gcaggtacacgctgcagcttcttct

SEQ ID NO: 5082613 - DNA, 25 bp, Homo sapien
aaatagttctgcctggtttgttgtg

SEQ ID NO: 5082614 - DNA, 25 bp, Homo sapien
gatacgattattaatcaattgcgca

SEQ ID NO: 5082615 - DNA, 25 bp, Homo sapien
gcgcattgttgaggcacttatcact

SEQ ID NO: 5082616 - DNA, 25 bp, Homo sapien
tcccctttctggatacgattattaa

SEQ ID NO: 5082617 - DNA, 25 bp, Homo sapien
catatctgtgtgcaggctggttcct

SEQ ID NO: 5082618 - DNA, 25 bp, Homo sapien
gccacatatctgtgtgcaggctggt

SEQ ID NO: 5082619 - DNA, 25 bp, Homo sapien
cctggctgccacatatctgtgtgca

SEQ ID NO: 5082620 - DNA, 25 bp, Homo sapien
tccctggctgccacatatctgtgtg

SEQ ID NO: 5082621 - DNA, 25 bp, Homo sapien
ctgcagagccctctccaatgcacca

SEQ ID NO: 5082622 - DNA, 25 bp, Homo sapien
aagctgcagagccctctccaatgca

SEQ ID NO: 5082623 - DNA, 25 bp, Homo sapien
gcaagctgcagagccctctccaatg

SEQ ID NO: 5082624 - DNA, 25 bp, Homo sapien
tcatttggctgcaagctgcagagcc

SEQ ID NO: 5082625 - DNA, 25 bp, Homo sapien
tccttatcattgtgctcagcaggta

SEQ ID NO: 5082626 - DNA, 25 bp, Homo sapien
ctgtgatgaactgtatatttcaaag

SEQ ID NO: 5082627 - DNA, 25 bp, Homo sapien
tagatgtactttaggacatgtcaaa

SEQ ID NO: 5082628 - DNA, 25 bp, Homo sapien
tgacggcattcaagatactttttcc

SEQ ID NO: 5082629 - DNA, 25 bp, Homo sapien
agaaggctgcttggcactgtccata

SEQ ID NO: 5082630 - DNA, 25 bp, Homo sapien
tgctctcattcaattttattcgacc

SEQ ID NO: 5082631 - DNA, 25 bp, Homo sapien
gtccataattcagcttgctctcatt

SEQ ID NO: 5082632 - DNA, 25 bp, Homo sapien
aaggctgcttggcactgtccataat

SEQ ID NO: 5082633 - DNA, 25 bp, Homo sapien
catgtgggagatgaaaatatacttg

SEQ ID NO: 5082634 - DNA, 25 bp, Homo sapien
aatatacttgataattggctttcaa

SEQ ID NO: 5082635 - DNA, 25 bp, Homo sapien
cttacttgcatgtgggagatgaaaa

SEQ ID NO: 5082636 - DNA, 25 bp, Homo sapien
ttgataattggctttcaaatatgat

SEQ ID NO: 5082637 - DNA, 25 bp, Homo sapien
gggacaatggcctgagtcttcctgg

SEQ ID NO: 5082638 - DNA, 25 bp, Homo sapien
gctctgctggccttacacaccaaag

SEQ ID NO: 5082639 - DNA, 25 bp, Homo sapien
tgtgcactggctgacatgggcttgt

SEQ ID NO: 5082640 - DNA, 25 bp, Homo sapien
gacaccatcgtttgattcctacagg

SEQ ID NO: 5082641 - DNA, 25 bp, Homo sapien
ttggcattgaagtgtatgacagttc

SEQ ID NO: 5082642 - DNA, 25 bp, Homo sapien
tgcctctctccctaacttggcattg

SEQ ID NO: 5082643 - DNA, 25 bp, Homo sapien
tctctccctaacttggcattgaagt

SEQ ID NO: 5082644 - DNA, 25 bp, Homo sapien
tatgacagttcttggtgagatcaag

SEQ ID NO: 5082645 - DNA, 25 bp, Homo sapien
gatgtaattgaagagaatttgcact

SEQ ID NO: 5082646 - DNA, 25 bp, Homo sapien
tgcactaaactattaatccacggct

SEQ ID NO: 5082647 - DNA, 25 bp, Homo sapien
gggttcataatggttttctagagat

SEQ ID NO: 5082648 - DNA, 25 bp, Homo sapien
cagtttggttgatgagattgacaaa

SEQ ID NO: 5082649 - DNA, 25 bp, Homo sapien
tatggtaagtacggctttaggttga

SEQ ID NO: 5082650 - DNA, 25 bp, Homo sapien
ctatggtaagtacggctttaggttg

SEQ ID NO: 5082651 - DNA, 25 bp, Homo sapien
tcagatttgtctatcttaaagtgtc

SEQ ID NO: 5082652 - DNA, 25 bp, Homo sapien
tcattcagatttgtctatcttaaag

SEQ ID NO: 5082653 - DNA, 25 bp, Homo sapien
cattcagatttgtctatcttaaagt

SEQ ID NO: 5082654 - DNA, 25 bp, Homo sapien
ttcagatttgtctatcttaaagtgt

SEQ ID NO: 5082655 - DNA, 25 bp, Homo sapien
aatatgctgagtcgtcattcctctt

SEQ ID NO: 5082656 - DNA, 25 bp, Homo sapien
tgctgagtcgtcattcctcttttgt

SEQ ID NO: 5082657 - DNA, 25 bp, Homo sapien
tatgctgagtcgtcattcctctttt

SEQ ID NO: 5082658 - DNA, 25 bp, Homo sapien
gctgagtcgtcattcctcttttgtc

SEQ ID NO: 5082659 - DNA, 25 bp, Homo sapien
ggaaatgctctcatgttctccaaag

SEQ ID NO: 5082660 - DNA, 25 bp, Homo sapien
gggaaatgctctcatgttctccaaa

SEQ ID NO: 5082661 - DNA, 25 bp, Homo sapien
gaagttgacaagcttccaaactctg

SEQ ID NO: 5082662 - DNA, 25 bp, Homo sapien
taattccatctgctctctagaggat

SEQ ID NO: 5082663 - DNA, 25 bp, Homo sapien
tagtgtactttgacctcgaaggaga

SEQ ID NO: 5082664 - DNA, 25 bp, Homo sapien
ccaaactctgtgataaagcagtgag

SEQ ID NO: 5082665 - DNA, 25 bp, Homo sapien
tccccgtgattaatccacaggattc

SEQ ID NO: 5082666 - DNA, 25 bp, Homo sapien
ccccgtgattaatccacaggattcc

SEQ ID NO: 5082667 - DNA, 25 bp, Homo sapien
ccagtggcaagtggccagaaaataa

SEQ ID NO: 5082668 - DNA, 25 bp, Homo sapien
tgttgtattttgtatgaagtacagc

SEQ ID NO: 5082669 - DNA, 25 bp, Homo sapien
tccagtggcaagtggccagaaaata

SEQ ID NO: 5082670 - DNA, 25 bp, Homo sapien
tgtattttgtatgaagtacagccaa

SEQ ID NO: 5082671 - DNA, 25 bp, Homo sapien
gctttcagggttgacggccatcacc

SEQ ID NO: 5082672 - DNA, 25 bp, Homo sapien
tgagacccgcgcaagtttgcaaact

SEQ ID NO: 5082673 - DNA, 25 bp, Homo sapien
gcatatcccctcctaccagaagtga

SEQ ID NO: 5082674 - DNA, 25 bp, Homo sapien
gttggtctcagcatctttacaggca

SEQ ID NO: 5082675 - DNA, 25 bp, Homo sapien
tggagggcaattgccttagctaatg

SEQ ID NO: 5082676 - DNA, 25 bp, Homo sapien
tgcttccctccttggagggcaattg

SEQ ID NO: 5082677 - DNA, 25 bp, Homo sapien
aaagtcttcagtaaggccatgcagt

SEQ ID NO: 5082678 - DNA, 25 bp, Homo sapien
ctttgttcgatgaaacccaacaaag

SEQ ID NO: 5082679 - DNA, 25 bp, Homo sapien
ggcccacattccaaaataacctgca

SEQ ID NO: 5082680 - DNA, 25 bp, Homo sapien
cagctttagcaagttgctgggaagt

SEQ ID NO: 5082681 - DNA, 25 bp, Homo sapien
gggaagtgcagccaaggcccacatt

SEQ ID NO: 5082682 - DNA, 25 bp, Homo sapien
agttgagacagctttagcaagttgc

SEQ ID NO: 5082683 - DNA, 25 bp, Homo sapien
caaatacagacaaattgtaccagga

SEQ ID NO: 5082684 - DNA, 25 bp, Homo sapien
taccaggacgttcacttctgctgcc

SEQ ID NO: 5082685 - DNA, 25 bp, Homo sapien
gcacgtcaatttcggtaggttcctg

SEQ ID NO: 5082686 - DNA, 25 bp, Homo sapien
caatttcggtaggttcctgtgcagg

SEQ ID NO: 5082687 - DNA, 25 bp, Homo sapien
gagcaccaagaagttgcccttccaa

SEQ ID NO: 5082688 - DNA, 25 bp, Homo sapien
ttctggagcaccaagaagttgccct

SEQ ID NO: 5082689 - DNA, 25 bp, Homo sapien
tcaggtccagtctttctggagcacc

SEQ ID NO: 5082690 - DNA, 25 bp, Homo sapien
ctcaggtccagtctttctggagcac

SEQ ID NO: 5082691 - DNA, 25 bp, Homo sapien
tggacatggctaagccctgcaggct

SEQ ID NO: 5082692 - DNA, 25 bp, Homo sapien
caaggtcctcgatgttcagttgaag

SEQ ID NO: 5082693 - DNA, 25 bp, Homo sapien
tgggatcgacagtgccaaaaccaaa

SEQ ID NO: 5082694 - DNA, 25 bp, Homo sapien
ctgtgtgcagcagcacgtggacatg

SEQ ID NO: 5082695 - DNA, 25 bp, Homo sapien
gctggcagcccaggagagagccacc

SEQ ID NO: 5082696 - DNA, 25 bp, Homo sapien
tggcagcccaggagagagccaccac

SEQ ID NO: 5082697 - DNA, 25 bp, Homo sapien
aggctggcagcccaggagagagcca

SEQ ID NO: 5082698 - DNA, 25 bp, Homo sapien
ctaaaggctggcagcccaggagaga

SEQ ID NO: 5082699 - DNA, 25 bp, Homo sapien
agctgagtgtcttctaagtttgcct

SEQ ID NO: 5082700 - DNA, 25 bp, Homo sapien
gaacctgtaagaagtcagcaagtgc

SEQ ID NO: 5082701 - DNA, 25 bp, Homo sapien
cacacattatctgctcccagccaag

SEQ ID NO: 5082702 - DNA, 25 bp, Homo sapien
tctgtctgctctcgggatgcacaca

SEQ ID NO: 5082703 - DNA, 25 bp, Homo sapien
tcagctgggatcctgtaggactgct

SEQ ID NO: 5082704 - DNA, 25 bp, Homo sapien
tctaatcacctgatggtcagctggg

SEQ ID NO: 5082705 - DNA, 25 bp, Homo sapien
tcagtgctgattggctgaagaatgc

SEQ ID NO: 5082706 - DNA, 25 bp, Homo sapien
tcctgggccatcctaggtatcgggt

SEQ ID NO: 5082707 - DNA, 25 bp, Homo sapien
tgtggactgatctagaatgtgtagc

SEQ ID NO: 5082708 - DNA, 25 bp, Homo sapien
tggaggaaggacactttgcctcata

SEQ ID NO: 5082709 - DNA, 25 bp, Homo sapien
catttgggagctattaacagctgga

SEQ ID NO: 5082710 - DNA, 25 bp, Homo sapien
tagcatctaaatgtggcaggaaaag

SEQ ID NO: 5082711 - DNA, 25 bp, Homo sapien
cttttgttctggctggtgcagggct

SEQ ID NO: 5082712 - DNA, 25 bp, Homo sapien
gctggggccttaactgtgggctgat

SEQ ID NO: 5082713 - DNA, 25 bp, Homo sapien
gctcctgctgttctggtagaaggca

SEQ ID NO: 5082714 - DNA, 25 bp, Homo sapien
ggcagatccctcagtactagagatc

SEQ ID NO: 5082715 - DNA, 25 bp, Homo sapien
catgtaataatgtcggttttctcca

SEQ ID NO: 5082716 - DNA, 25 bp, Homo sapien
tactagagatctgttgctcctgctg

SEQ ID NO: 5082717 - DNA, 25 bp, Homo sapien
ctgagaagaatgatgccggacacaa

SEQ ID NO: 5082718 - DNA, 25 bp, Homo sapien
atgatgccggacacaaagcccaggt

SEQ ID NO: 5082719 - DNA, 25 bp, Homo sapien
aagaatgatgccggacacaaagccc

SEQ ID NO: 5082720 - DNA, 25 bp, Homo sapien
tgagaagaatgatgccggacacaaa

SEQ ID NO: 5082721 - DNA, 25 bp, Homo sapien
cgcagggagatgagtagaaccattc

SEQ ID NO: 5082722 - DNA, 25 bp, Homo sapien
tcttcctggaattggtggatgctgt

SEQ ID NO: 5082723 - DNA, 25 bp, Homo sapien
tgacctgtgccccttcttacggtaa

SEQ ID NO: 5082724 - DNA, 25 bp, Homo sapien
gatgagtagaaccattcatctgctg

SEQ ID NO: 5082725 - DNA, 25 bp, Homo sapien
tcctataattttgttcaaactgatg

SEQ ID NO: 5082726 - DNA, 25 bp, Homo sapien
cagttagcaagaactagccatttca

SEQ ID NO: 5082727 - DNA, 25 bp, Homo sapien
taaattagatgttactttgttgact

SEQ ID NO: 5082728 - DNA, 25 bp, Homo sapien
gactctgtgattcaatgtacactca

SEQ ID NO: 5082729 - DNA, 25 bp, Homo sapien
taatattcccgtagttgatcctaaa

SEQ ID NO: 5082730 - DNA, 25 bp, Homo sapien
aatcctaatattcccgtagttgatc

SEQ ID NO: 5082731 - DNA, 25 bp, Homo sapien
atattcccgtagttgatcctaaagt

SEQ ID NO: 5082732 - DNA, 25 bp, Homo sapien
cctaatattcccgtagttgatccta

SEQ ID NO: 5082733 - DNA, 25 bp, Homo sapien
agataaatatcaactggataattac

SEQ ID NO: 5082734 - DNA, 25 bp, Homo sapien
tgactggaacaagataaatatcaac

SEQ ID NO: 5082735 - DNA, 25 bp, Homo sapien
ctaaaggtgactggaacaagataaa

SEQ ID NO: 5082736 - DNA, 25 bp, Homo sapien
aggtgactggaacaagataaatatc

SEQ ID NO: 5082737 - DNA, 25 bp, Homo sapien
attctgattgtctctatattaacat

SEQ ID NO: 5082738 - DNA, 25 bp, Homo sapien
tctgattgtctctatattaacattg

SEQ ID NO: 5082739 - DNA, 25 bp, Homo sapien
ctgattgtctctatattaacattgt

SEQ ID NO: 5082740 - DNA, 25 bp, Homo sapien
ttctgattgtctctatattaacatt

SEQ ID NO: 5082741 - DNA, 25 bp, Homo sapien
tcattgatggatccacaagttttgt

SEQ ID NO: 5082742 - DNA, 25 bp, Homo sapien
attgatggatccacaagttttgtac

SEQ ID NO: 5082743 - DNA, 25 bp, Homo sapien
gatggatccacaagttttgtacaaa

SEQ ID NO: 5082744 - DNA, 25 bp, Homo sapien
ggatccacaagttttgtacaaaagc

SEQ ID NO: 5082745 - DNA, 25 bp, Homo sapien
tccctagcattttccctccaagatc

SEQ ID NO: 5082746 - DNA, 25 bp, Homo sapien
gtccctagcattttccctccaagat

SEQ ID NO: 5082747 - DNA, 25 bp, Homo sapien
cttgtccctagcattttccctccaa

SEQ ID NO: 5082748 - DNA, 25 bp, Homo sapien
tgtccctagcattttccctccaaga

SEQ ID NO: 5082749 - DNA, 25 bp, Homo sapien
gatgttcttaactgaactaacttcc

SEQ ID NO: 5082750 - DNA, 25 bp, Homo sapien
cgtattttagcttagatgttcttaa

SEQ ID NO: 5082751 - DNA, 25 bp, Homo sapien
cgggacatctttgaccacatgggtc

SEQ ID NO: 5082752 - DNA, 25 bp, Homo sapien
catgggtcctctgccgttcgtattt

SEQ ID NO: 5082753 - DNA, 25 bp, Homo sapien
tggccctccctctaatgtgaagatc

SEQ ID NO: 5082754 - DNA, 25 bp, Homo sapien
ctatgtaaccactttttgacgtaat

SEQ ID NO: 5082755 - DNA, 25 bp, Homo sapien
ccaactatgtaaccactttttgacg

SEQ ID NO: 5082756 - DNA, 25 bp, Homo sapien
tttggccctccctctaatgtgaaga

SEQ ID NO: 5082757 - DNA, 25 bp, Homo sapien
gcgggaaatgcactaattgtgctct

SEQ ID NO: 5082758 - DNA, 25 bp, Homo sapien
gaattgctaaatggaaagctagcct

SEQ ID NO: 5082759 - DNA, 25 bp, Homo sapien
gctagcctagaagcaccaagtaaat

SEQ ID NO: 5082760 - DNA, 25 bp, Homo sapien
ggaatgtcaataatcctgtagcaaa

SEQ ID NO: 5082761 - DNA, 25 bp, Homo sapien
gagaaagcccagtgtatcccatctt

SEQ ID NO: 5082762 - DNA, 25 bp, Homo sapien
caatcatgttggtgatccagatcac

SEQ ID NO: 5082763 - DNA, 25 bp, Homo sapien
tctccattttaaaccaagaagggca

SEQ ID NO: 5082764 - DNA, 25 bp, Homo sapien
ctttaactaagagagcataaggcat

SEQ ID NO: 5082765 - DNA, 25 bp, Homo sapien
taagaagcaataactgtcatgtggg

SEQ ID NO: 5082766 - DNA, 25 bp, Homo sapien
ccttcttcatgtgccgttcggaaat

SEQ ID NO: 5082767 - DNA, 25 bp, Homo sapien
gtacatactgttctcccatttggca

SEQ ID NO: 5082768 - DNA, 25 bp, Homo sapien
gatagcaggcaaactacaaagatct

SEQ ID NO: 5082769 - DNA, 25 bp, Homo sapien
aaaaccatcacctcccattcccagg

SEQ ID NO: 5082770 - DNA, 25 bp, Homo sapien
tcaagagcatactctgtactagggc

SEQ ID NO: 5082771 - DNA, 25 bp, Homo sapien
tggaatccagcttcaagagcatact

SEQ ID NO: 5082772 - DNA, 25 bp, Homo sapien
tactctgtactagggccgaagtaaa

SEQ ID NO: 5082773 - DNA, 25 bp, Homo sapien
aaaaacatcacaacatcgtgatgca

SEQ ID NO: 5082774 - DNA, 25 bp, Homo sapien
aaaacatcacaacatcgtgatgcat

SEQ ID NO: 5082775 - DNA, 25 bp, Homo sapien
tatgcccgaagtcgtgtctctaacg

SEQ ID NO: 5082776 - DNA, 25 bp, Homo sapien
tgcagcctaacccaaagaagtggaa

SEQ ID NO: 5082777 - DNA, 25 bp, Homo sapien
tccccagtcgggagcctttgtatgc

SEQ ID NO: 5082778 - DNA, 25 bp, Homo sapien
cacagcctgctctcttgataaagac

SEQ ID NO: 5082779 - DNA, 25 bp, Homo sapien
tgtgggaaagttccagttcccgaca

SEQ ID NO: 5082780 - DNA, 25 bp, Homo sapien
gcccttcattgacatggctcagagg

SEQ ID NO: 5082781 - DNA, 25 bp, Homo sapien
gaaagttccagttcccgacatggcc

SEQ ID NO: 5082782 - DNA, 25 bp, Homo sapien
agttcccgacatggcccttcattga

SEQ ID NO: 5082783 - DNA, 25 bp, Homo sapien
gcactcctgtccttctgatctatat

SEQ ID NO: 5082784 - DNA, 25 bp, Homo sapien
agctattcccaaggagcatttctgg

SEQ ID NO: 5082785 - DNA, 25 bp, Homo sapien
tggtccattctgatatgcactcctg

SEQ ID NO: 5082786 - DNA, 25 bp, Homo sapien
tattcactttgtcgctatagggagc

SEQ ID NO: 5082787 - DNA, 25 bp, Homo sapien
cattttcgccgagctcttaagaaga

SEQ ID NO: 5082788 - DNA, 25 bp, Homo sapien
gctgaaaattgctcccagtggatgg

SEQ ID NO: 5082789 - DNA, 25 bp, Homo sapien
cacaatgctttcttaccacgtacaa

SEQ ID NO: 5082790 - DNA, 25 bp, Homo sapien
gaaaaaatgcccataagtaaccatg

SEQ ID NO: 5082791 - DNA, 25 bp, Homo sapien
catctgccaactcagatcaatcaat

SEQ ID NO: 5082792 - DNA, 25 bp, Homo sapien
ctcatctgccaactcagatcaatca

SEQ ID NO: 5082793 - DNA, 25 bp, Homo sapien
tctgccaactcagatcaatcaatag

SEQ ID NO: 5082794 - DNA, 25 bp, Homo sapien
tgccaactcatctgccaactcagat

SEQ ID NO: 5082795 - DNA, 25 bp, Homo sapien
ggaagtctgcttttctgtgggcaaa

SEQ ID NO: 5082796 - DNA, 25 bp, Homo sapien
tgggaaggaagtctgcttttctgtg

SEQ ID NO: 5082797 - DNA, 25 bp, Homo sapien
ctgggaaggaagtctgcttttctgt

SEQ ID NO: 5082798 - DNA, 25 bp, Homo sapien
gaaggaagtctgcttttctgtgggc

SEQ ID NO: 5082799 - DNA, 25 bp, Homo sapien
tggcactcccatggaagcccagata

SEQ ID NO: 5082800 - DNA, 25 bp, Homo sapien
agctgtcagagttggcactcccatg

SEQ ID NO: 5082801 - DNA, 25 bp, Homo sapien
taatgacctcctttaaaaatagtgc

SEQ ID NO: 5082802 - DNA, 25 bp, Homo sapien
cttgcacaagaggtgaaagagccaa

SEQ ID NO: 5082803 - DNA, 25 bp, Homo sapien
aacagagcatgagagcctagttgca

SEQ ID NO: 5082804 - DNA, 25 bp, Homo sapien
gagcctagttgcaaattggtctttt

SEQ ID NO: 5082805 - DNA, 25 bp, Homo sapien
cagcatctagtattgtgatattgtg

SEQ ID NO: 5082806 - DNA, 25 bp, Homo sapien
tctgtttgctgtcttgagcccagca

SEQ ID NO: 5082807 - DNA, 25 bp, Homo sapien
aatgtagacagcagcatttccgcag

SEQ ID NO: 5082808 - DNA, 25 bp, Homo sapien
gccaatgtagacagcagcatttccg

SEQ ID NO: 5082809 - DNA, 25 bp, Homo sapien
caatgtagacagcagcatttccgca

SEQ ID NO: 5082810 - DNA, 25 bp, Homo sapien
ccaatgtagacagcagcatttccgc

SEQ ID NO: 5082811 - DNA, 25 bp, Homo sapien
caacacatgactgccaatgccaggt

SEQ ID NO: 5082812 - DNA, 25 bp, Homo sapien
cagccgttggcttctactgttgaat

SEQ ID NO: 5082813 - DNA, 25 bp, Homo sapien
atgccaacacatgactgccaatgcc

SEQ ID NO: 5082814 - DNA, 25 bp, Homo sapien
tactgttgaattccccagatttgtt

SEQ ID NO: 5082815 - DNA, 25 bp, Homo sapien
caaccattgttcttgttagtggatg

SEQ ID NO: 5082816 - DNA, 25 bp, Homo sapien
gacggtatccctgtagagcttcaca

SEQ ID NO: 5082817 - DNA, 25 bp, Homo sapien
tgtagacctttgacattcaagacgg

SEQ ID NO: 5082818 - DNA, 25 bp, Homo sapien
tataattatacccttgtctgctcag

SEQ ID NO: 5082819 - DNA, 25 bp, Homo sapien
gctttatttacaggtgatttactaa

SEQ ID NO: 5082820 - DNA, 25 bp, Homo sapien
ctttttggaagaacgactcttccat

SEQ ID NO: 5082821 - DNA, 25 bp, Homo sapien
tgatttactaagatgtgagccctgg

SEQ ID NO: 5082822 - DNA, 25 bp, Homo sapien
tcacagatggccctttttggaagaa

SEQ ID NO: 5082823 - DNA, 25 bp, Homo sapien
acttattaaatggtggcctccatca

SEQ ID NO: 5082824 - DNA, 25 bp, Homo sapien
cccagcttccagtcactgcccttgc

SEQ ID NO: 5082825 - DNA, 25 bp, Homo sapien
gctgagattcagctgttgaccctct

SEQ ID NO: 5082826 - DNA, 25 bp, Homo sapien
ggtggcctccatcaggctgagattc

SEQ ID NO: 5082827 - DNA, 25 bp, Homo sapien
tctgatgacctgtctgatgcaggat

SEQ ID NO: 5082828 - DNA, 25 bp, Homo sapien
gatgacctgtctgatgcaggatcta

SEQ ID NO: 5082829 - DNA, 25 bp, Homo sapien
gttttctgatgacctgtctgatgca

SEQ ID NO: 5082830 - DNA, 25 bp, Homo sapien
tgacctgtctgatgcaggatctaaa

SEQ ID NO: 5082831 - DNA, 25 bp, Homo sapien
ttttcaagagttcaagagagtaatt

SEQ ID NO: 5082832 - DNA, 25 bp, Homo sapien
gcagacattaaccaacaactaggag

SEQ ID NO: 5082833 - DNA, 25 bp, Homo sapien
ggcagaagttaatctccagagagac

SEQ ID NO: 5082834 - DNA, 25 bp, Homo sapien
tagacagcattagagtggcattacc

SEQ ID NO: 5082835 - DNA, 25 bp, Homo sapien
gactcagtgacagggctcaatccta

SEQ ID NO: 5082836 - DNA, 25 bp, Homo sapien
tcaaatccagattaacccaaatata

SEQ ID NO: 5082837 - DNA, 25 bp, Homo sapien
tccaagacgtgaccaaggttcaaat

SEQ ID NO: 5082838 - DNA, 25 bp, Homo sapien
gttcaaatccagattaacccaaata

SEQ ID NO: 5082839 - DNA, 25 bp, Homo sapien
tggcttcctcctccaagacgtgacc

SEQ ID NO: 5082840 - DNA, 25 bp, Homo sapien
tgctccaaatcgtacttgccagagt

SEQ ID NO: 5082841 - DNA, 25 bp, Homo sapien
gtgctccaaatcgtacttgccagag

SEQ ID NO: 5082842 - DNA, 25 bp, Homo sapien
cagtgctccaaatcgtacttgccag

SEQ ID NO: 5082843 - DNA, 25 bp, Homo sapien
tcagtgctccaaatcgtacttgcca

SEQ ID NO: 5082844 - DNA, 25 bp, Homo sapien
agtcatattttagtcaggtttacac

SEQ ID NO: 5082845 - DNA, 25 bp, Homo sapien
aatgctgtatctacatggtctgcca

SEQ ID NO: 5082846 - DNA, 25 bp, Homo sapien
tattcagtgtactccatagcttgca

SEQ ID NO: 5082847 - DNA, 25 bp, Homo sapien
agaaatctatctaaaaggctagggt

SEQ ID NO: 5082848 - DNA, 25 bp, Homo sapien
cccttagggctacaccgtaaatgtg

SEQ ID NO: 5082849 - DNA, 25 bp, Homo sapien
cgtaaatgtgctgcctgtgaccatg

SEQ ID NO: 5082850 - DNA, 25 bp, Homo sapien
ggactgggtctgcaccaactccata

SEQ ID NO: 5082851 - DNA, 25 bp, Homo sapien
catggcatccaaggctcgtcataag

SEQ ID NO: 5082852 - DNA, 25 bp, Homo sapien
actttctgagacctctatccctgta

SEQ ID NO: 5082853 - DNA, 25 bp, Homo sapien
tattgccatcgtacacactctcttg

SEQ ID NO: 5082854 - DNA, 25 bp, Homo sapien
tactgctgattcattatattgccat

SEQ ID NO: 5082855 - DNA, 25 bp, Homo sapien
gattcattatattgccatcgtacac

SEQ ID NO: 5082856 - DNA, 25 bp, Homo sapien
tttgcattgtctcaggagaaaggag

SEQ ID NO: 5082857 - DNA, 25 bp, Homo sapien
cagctgacctccttattactctaaa

SEQ ID NO: 5082858 - DNA, 25 bp, Homo sapien
caaaaaaatcccaggcaaatagtgc

SEQ ID NO: 5082859 - DNA, 25 bp, Homo sapien
tagttctagtggaatatgtttttca

SEQ ID NO: 5082860 - DNA, 25 bp, Homo sapien
tgacattcgaatgatgacctggagc

SEQ ID NO: 5082861 - DNA, 25 bp, Homo sapien
tggactacaaattaaagcgagctgg

SEQ ID NO: 5082862 - DNA, 25 bp, Homo sapien
gaaacagaactcttgggaccactgg

SEQ ID NO: 5082863 - DNA, 25 bp, Homo sapien
cagtgtttgttacgtgcatggacta

SEQ ID NO: 5082864 - DNA, 25 bp, Homo sapien
catacaccaatttaagagacacagc

SEQ ID NO: 5082865 - DNA, 25 bp, Homo sapien
ggcggtcaagcccacagaatatgga

SEQ ID NO: 5082866 - DNA, 25 bp, Homo sapien
cagcatgacagtgagatttcccaaa

SEQ ID NO: 5082867 - DNA, 25 bp, Homo sapien
aacagatctctgtggtagaacacac

SEQ ID NO: 5082868 - DNA, 25 bp, Homo sapien
cactgttacactggagacgtgagtc

SEQ ID NO: 5082869 - DNA, 25 bp, Homo sapien
tgagtcaaacaacaaaataccgtgg

SEQ ID NO: 5082870 - DNA, 25 bp, Homo sapien
gaaacagtctttctagcctaaaggc

SEQ ID NO: 5082871 - DNA, 25 bp, Homo sapien
aataccgtggtataagcgatggctt

SEQ ID NO: 5082872 - DNA, 25 bp, Homo sapien
cattcaagacagctttgtatattag

SEQ ID NO: 5082873 - DNA, 25 bp, Homo sapien
gacagctttgtatattagtaaagag

SEQ ID NO: 5082874 - DNA, 25 bp, Homo sapien
tgtaaatcattcaagacagctttgt

SEQ ID NO: 5082875 - DNA, 25 bp, Homo sapien
ggaaagtaggtgtaaatcattcaag

SEQ ID NO: 5082876 - DNA, 25 bp, Homo sapien
gaattctgagcctcggatccaactg

SEQ ID NO: 5082877 - DNA, 25 bp, Homo sapien
cactgtcagggaatatggagcacaa

SEQ ID NO: 5082878 - DNA, 25 bp, Homo sapien
gaaattcagtactctcatgccacct

SEQ ID NO: 5082879 - DNA, 25 bp, Homo sapien
tggagggtgcagatacatacaatga

SEQ ID NO: 5082880 - DNA, 25 bp, Homo sapien
agtaccccaagttaatatcctcctg

SEQ ID NO: 5082881 - DNA, 25 bp, Homo sapien
tgcagaaggaataatcaaggtactc

SEQ ID NO: 5082882 - DNA, 25 bp, Homo sapien
cccgctaggcttctcaatgttttgg

SEQ ID NO: 5082883 - DNA, 25 bp, Homo sapien
tatagctataacgtctaggatgccc

SEQ ID NO: 5082884 - DNA, 25 bp, Homo sapien
taaaaggatgctgcttaacaaagat

SEQ ID NO: 5082885 - DNA, 25 bp, Homo sapien
tcattgccaactagtttttccaggt

SEQ ID NO: 5082886 - DNA, 25 bp, Homo sapien
aaaagtgttgtgttgcgtgttatgc

SEQ ID NO: 5082887 - DNA, 25 bp, Homo sapien
tgcactgtgctactagaatagaatg

SEQ ID NO: 5082888 - DNA, 25 bp, Homo sapien
cccactgagtttgccagcaggaaca

SEQ ID NO: 5082889 - DNA, 25 bp, Homo sapien
aaggaggtagttcattccccactga

SEQ ID NO: 5082890 - DNA, 25 bp, Homo sapien
cattccccactgagtttgccagcag

SEQ ID NO: 5082891 - DNA, 25 bp, Homo sapien
ctctgaaggaggtagttcattcccc

SEQ ID NO: 5082892 - DNA, 25 bp, Homo sapien
gaacagacccatataagaagacttg

SEQ ID NO: 5082893 - DNA, 25 bp, Homo sapien
ggaagataacactgcaaagtgcagg

SEQ ID NO: 5082894 - DNA, 25 bp, Homo sapien
tactatgcaaggagctttactaggc

SEQ ID NO: 5082895 - DNA, 25 bp, Homo sapien
cattctaacagtccaagttgggtaa

SEQ ID NO: 5082896 - DNA, 25 bp, Homo sapien
ctagtcaagttgagtagttgaatga

SEQ ID NO: 5082897 - DNA, 25 bp, Homo sapien
tgatggaaaacaagattgggtggaa

SEQ ID NO: 5082898 - DNA, 25 bp, Homo sapien
aaactctgcagaaagacgtggtgaa

SEQ ID NO: 5082899 - DNA, 25 bp, Homo sapien
caagattgggtggaaactctgcaga

SEQ ID NO: 5082900 - DNA, 25 bp, Homo sapien
tcttgtggcaaacgttctgcctgac

SEQ ID NO: 5082901 - DNA, 25 bp, Homo sapien
gaccaaattctactgctccctcttg

SEQ ID NO: 5082902 - DNA, 25 bp, Homo sapien
tccctcttgtggcaaacgttctgcc

SEQ ID NO: 5082903 - DNA, 25 bp, Homo sapien
gtctcccatctgaccaaattctact

SEQ ID NO: 5082904 - DNA, 25 bp, Homo sapien
gattcagggcgcgaagagctaagtc

SEQ ID NO: 5082905 - DNA, 25 bp, Homo sapien
ccagcgggcgttgggtgctcattca

SEQ ID NO: 5082906 - DNA, 25 bp, Homo sapien
cgcggacatccctccttccggtaat

SEQ ID NO: 5082907 - DNA, 25 bp, Homo sapien
agtccaccccgaatgcagagctgct

SEQ ID NO: 5082908 - DNA, 25 bp, Homo sapien
caggtccctgatgtccaaagactgt

SEQ ID NO: 5082909 - DNA, 25 bp, Homo sapien
ccagtctgtggactgttgtgcagta

SEQ ID NO: 5082910 - DNA, 25 bp, Homo sapien
tggttgaccccacggtaatgcagag

SEQ ID NO: 5082911 - DNA, 25 bp, Homo sapien
gacaaattcattggcgactcagagg

SEQ ID NO: 5082912 - DNA, 25 bp, Homo sapien
gccacaaagagatgattgctattaa

SEQ ID NO: 5082913 - DNA, 25 bp, Homo sapien
aagagatgattgctattaagttgca

SEQ ID NO: 5082914 - DNA, 25 bp, Homo sapien
ctgcagccacaaagagatgattgct

SEQ ID NO: 5082915 - DNA, 25 bp, Homo sapien
gcagccacaaagagatgattgctat

SEQ ID NO: 5082916 - DNA, 25 bp, Homo sapien
gaggctcggtcagattgctgtctct

SEQ ID NO: 5082917 - DNA, 25 bp, Homo sapien
tgtgtggttcctcgtcctgcagtgt

SEQ ID NO: 5082918 - DNA, 25 bp, Homo sapien
ggcagaacaccggtgtagatatggt

SEQ ID NO: 5082919 - DNA, 25 bp, Homo sapien
tctgtcatcgcagagcaggtggcca

SEQ ID NO: 5082920 - DNA, 25 bp, Homo sapien
gcttctatagtgttctggcacagct

SEQ ID NO: 5082921 - DNA, 25 bp, Homo sapien
aggagagaacacctcttgtggcaag

SEQ ID NO: 5082922 - DNA, 25 bp, Homo sapien
ctcttgtggcaaggttgcagctcct

SEQ ID NO: 5082923 - DNA, 25 bp, Homo sapien
ctgtgcttctatagtgttctggcac

SEQ ID NO: 5082924 - DNA, 25 bp, Homo sapien
tcccagacttaaagccagagataag

SEQ ID NO: 5082925 - DNA, 25 bp, Homo sapien
taatgctaactaaagggatgaggca

SEQ ID NO: 5082926 - DNA, 25 bp, Homo sapien
gccatagggcaaacacaactagttt

SEQ ID NO: 5082927 - DNA, 25 bp, Homo sapien
cagctgactagcacctcaacaaatg

SEQ ID NO: 5082928 - DNA, 25 bp, Homo sapien
tgggtattactcaaactcttctgtc

SEQ ID NO: 5082929 - DNA, 25 bp, Homo sapien
cttcacagttgccaaacagattctg

SEQ ID NO: 5082930 - DNA, 25 bp, Homo sapien
gattctgtaccatgttgcttcttgg

SEQ ID NO: 5082931 - DNA, 25 bp, Homo sapien
gtctaaatcctacccctgcttcaag

SEQ ID NO: 5082932 - DNA, 25 bp, Homo sapien
tgttatgccaagatccacactagca

SEQ ID NO: 5082933 - DNA, 25 bp, Homo sapien
gccaagatccacactagcaggcagc

SEQ ID NO: 5082934 - DNA, 25 bp, Homo sapien
agtagtgtctgttatgccaagatcc

SEQ ID NO: 5082935 - DNA, 25 bp, Homo sapien
tctgccacttcggaatggctttctt

SEQ ID NO: 5082936 - DNA, 25 bp, Homo sapien
caacaagaatatatgaggcactcag

SEQ ID NO: 5082937 - DNA, 25 bp, Homo sapien
caggccgctgagcaaagtataggaa

SEQ ID NO: 5082938 - DNA, 25 bp, Homo sapien
gcctgtccaagagtagttgtggcca

SEQ ID NO: 5082939 - DNA, 25 bp, Homo sapien
ttgaggtcaatcttccaggccgctg

SEQ ID NO: 5082940 - DNA, 25 bp, Homo sapien
tgataaatgtcctgatctaaccact

SEQ ID NO: 5082941 - DNA, 25 bp, Homo sapien
aatgtcctgatctaaccactctgaa

SEQ ID NO: 5082942 - DNA, 25 bp, Homo sapien
cgcttcttgataaatgtcctgatct

SEQ ID NO: 5082943 - DNA, 25 bp, Homo sapien
cctgatctaaccactctgaattcca

SEQ ID NO: 5082944 - DNA, 25 bp, Homo sapien
gcatcatcaaccatgggcaaagaca

SEQ ID NO: 5082945 - DNA, 25 bp, Homo sapien
atgggcaaagacagagcatgcaggg

SEQ ID NO: 5082946 - DNA, 25 bp, Homo sapien
ggcattcaccataacgggtcactct

SEQ ID NO: 5082947 - DNA, 25 bp, Homo sapien
ggacagcatcatcaaccatgggcaa

SEQ ID NO: 5082948 - DNA, 25 bp, Homo sapien
catttagcttcacaggccttttaac

SEQ ID NO: 5082949 - DNA, 25 bp, Homo sapien
taacagttatagcttctagtttcat

SEQ ID NO: 5082950 - DNA, 25 bp, Homo sapien
ggagagaaatccagtgtcactagct

SEQ ID NO: 5082951 - DNA, 25 bp, Homo sapien
tggataacagttatagcttctagtt

SEQ ID NO: 5082952 - DNA, 25 bp, Homo sapien
tagatctcccgtcatattgccacac

SEQ ID NO: 5082953 - DNA, 25 bp, Homo sapien
attacacaactggtttttgcttctc

SEQ ID NO: 5082954 - DNA, 25 bp, Homo sapien
tctccttgtcaccacacgttgagtt

SEQ ID NO: 5082955 - DNA, 25 bp, Homo sapien
tgccacacttcatattacacaactg

SEQ ID NO: 5082956 - DNA, 25 bp, Homo sapien
ctcaatttgtcttctgtgatttgtg

SEQ ID NO: 5082957 - DNA, 25 bp, Homo sapien
caatgtcaagattggcatgctctgt

SEQ ID NO: 5082958 - DNA, 25 bp, Homo sapien
ctccaatgtcaagattggcatgctc

SEQ ID NO: 5082959 - DNA, 25 bp, Homo sapien
gtcaagattggcatgctctgttaca

SEQ ID NO: 5082960 - DNA, 25 bp, Homo sapien
taaagcccttagaggttcggcacta

SEQ ID NO: 5082961 - DNA, 25 bp, Homo sapien
aaagttcaatgtccaccttcaacag

SEQ ID NO: 5082962 - DNA, 25 bp, Homo sapien
tgatcaggcaagcattggactggaa

SEQ ID NO: 5082963 - DNA, 25 bp, Homo sapien
ttcaacagccggacactgcctcttt

SEQ ID NO: 5082964 - DNA, 25 bp, Homo sapien
cagaatccgaacccccatcaaaggg

SEQ ID NO: 5082965 - DNA, 25 bp, Homo sapien
acactctgttagtcttcgtggaatc

SEQ ID NO: 5082966 - DNA, 25 bp, Homo sapien
tctgttagtcttcgtggaatccaaa

SEQ ID NO: 5082967 - DNA, 25 bp, Homo sapien
ttagtcttcgtggaatccaaaaagc

SEQ ID NO: 5082968 - DNA, 25 bp, Homo sapien
catttagtaacattacttgactgac

SEQ ID NO: 5082969 - DNA, 25 bp, Homo sapien
tcatttagtaacattacttgactga

SEQ ID NO: 5082970 - DNA, 25 bp, Homo sapien
tacgtgtgacacagttcaccaaagt

SEQ ID NO: 5082971 - DNA, 25 bp, Homo sapien
accaaagtaaggacattagcacaga

SEQ ID NO: 5082972 - DNA, 25 bp, Homo sapien
caaagtaaggacattagcacagagt

SEQ ID NO: 5082973 - DNA, 25 bp, Homo sapien
aaatcccatcagtccaagatgggta

SEQ ID NO: 5082974 - DNA, 25 bp, Homo sapien
ttccactaggcagagcatccattta

SEQ ID NO: 5082975 - DNA, 25 bp, Homo sapien
ctaggcagagcatccatttattctc

SEQ ID NO: 5082976 - DNA, 25 bp, Homo sapien
tctctaccatgcacaagtctttggc

SEQ ID NO: 5082977 - DNA, 25 bp, Homo sapien
tttattctctaccatgcacaagtct

SEQ ID NO: 5082978 - DNA, 25 bp, Homo sapien
cacagtaaactgaggagattgatag

SEQ ID NO: 5082979 - DNA, 25 bp, Homo sapien
gacccatagcatacggagatagtaa

SEQ ID NO: 5082980 - DNA, 25 bp, Homo sapien
tttgtcagaatcacagacccatagc

SEQ ID NO: 5082981 - DNA, 25 bp, Homo sapien
gatagtaatatcaacatctgcctgg

SEQ ID NO: 5082982 - DNA, 25 bp, Homo sapien
caacccaaatgcttgcagcctggag

SEQ ID NO: 5082983 - DNA, 25 bp, Homo sapien
tccagaaggatgaagccaacccaaa

SEQ ID NO: 5082984 - DNA, 25 bp, Homo sapien
cagcctggagcaaatggactgcaaa

SEQ ID NO: 5082985 - DNA, 25 bp, Homo sapien
taagcatgcagagtctaactccaga

SEQ ID NO: 5082986 - DNA, 25 bp, Homo sapien
ttttagctttacttcacggtcactc

SEQ ID NO: 5082987 - DNA, 25 bp, Homo sapien
ttagctttacttcacggtcactctc

SEQ ID NO: 5082988 - DNA, 25 bp, Homo sapien
agctttacttcacggtcactctcaa

SEQ ID NO: 5082989 - DNA, 25 bp, Homo sapien
cttttagctttacttcacggtcact

SEQ ID NO: 5082990 - DNA, 25 bp, Homo sapien
tattctgaatgagtcgttttggaag

SEQ ID NO: 5082991 - DNA, 25 bp, Homo sapien
ttattctgaatgagtcgttttggaa

SEQ ID NO: 5082992 - DNA, 25 bp, Homo sapien
tttagttttcacattaggaggccaa

SEQ ID NO: 5082993 - DNA, 25 bp, Homo sapien
tattctgaggtaggctcattccagc

SEQ ID NO: 5082994 - DNA, 25 bp, Homo sapien
gaggcttaacgtgccctgcttcaga

SEQ ID NO: 5082995 - DNA, 25 bp, Homo sapien
cattcaggccattggtccaaatact

SEQ ID NO: 5082996 - DNA, 25 bp, Homo sapien
ttctctgctgaaatctgctctatat

SEQ ID NO: 5082997 - DNA, 25 bp, Homo sapien
ctgctgaaatctgctctatatccat

SEQ ID NO: 5082998 - DNA, 25 bp, Homo sapien
ttgacatgaagatgctttctctgct

SEQ ID NO: 5082999 - DNA, 25 bp, Homo sapien
tttgacatgaagatgctttctctgc

SEQ ID NO: 5083000 - DNA, 25 bp, Homo sapien
aaaataatcaggtaattggtgacct

SEQ ID NO: 5083001 - DNA, 25 bp, Homo sapien
taattggtgaccttctgtttcctac

SEQ ID NO: 5083002 - DNA, 25 bp, Homo sapien
ttctgccaacaggaatatatcaagg

SEQ ID NO: 5083003 - DNA, 25 bp, Homo sapien
ctttttctgccaacaggaatatatc

SEQ ID NO: 5083004 - DNA, 25 bp, Homo sapien
tgtctcttactcttacaaggcagtg

SEQ ID NO: 5083005 - DNA, 25 bp, Homo sapien
taatagccctgagttcaaatctgtc

SEQ ID NO: 5083006 - DNA, 25 bp, Homo sapien
gaaccagaccccgtctcttagagat

SEQ ID NO: 5083007 - DNA, 25 bp, Homo sapien
gagatgttggtacagcaggtctaag

SEQ ID NO: 5083008 - DNA, 25 bp, Homo sapien
aaacatatacactcgtattcttttt

SEQ ID NO: 5083009 - DNA, 25 bp, Homo sapien
gcacatgcacacgcggacacgcaaa

SEQ ID NO: 5083010 - DNA, 25 bp, Homo sapien
tgcacacgcggacacgcaaacacgc

SEQ ID NO: 5083011 - DNA, 25 bp, Homo sapien
catatacactcgtattctttttctt

SEQ ID NO: 5083012 - DNA, 25 bp, Homo sapien
gaccacccctcaatataaagtggtc

SEQ ID NO: 5083013 - DNA, 25 bp, Homo sapien
tcttaagtctgtgaaatggtcacca

SEQ ID NO: 5083014 - DNA, 25 bp, Homo sapien
taaagtggtcttaagtctgtgaaat

SEQ ID NO: 5083015 - DNA, 25 bp, Homo sapien
tgtgaaatggtcaccatagctgtgc

SEQ ID NO: 5083016 - DNA, 25 bp, Homo sapien
ttggttattagagtcaggatccact

SEQ ID NO: 5083017 - DNA, 25 bp, Homo sapien
attgccgtacagcagcaagggtccc

SEQ ID NO: 5083018 - DNA, 25 bp, Homo sapien
tcattgccgtacagcagcaagggtc

SEQ ID NO: 5083019 - DNA, 25 bp, Homo sapien
attggttattagagtcaggatccac

SEQ ID NO: 5083020 - DNA, 25 bp, Homo sapien
gtccatcagcatatctctccctcat

SEQ ID NO: 5083021 - DNA, 25 bp, Homo sapien
atctttcaatttttttgctcgtaca

SEQ ID NO: 5083022 - DNA, 25 bp, Homo sapien
ttttttgctcgtacatgccctctta

SEQ ID NO: 5083023 - DNA, 25 bp, Homo sapien
ttgctcgtacatgccctcttatctc

SEQ ID NO: 5083024 - DNA, 25 bp, Homo sapien
tcaatttttttgctcgtacatgccc

SEQ ID NO: 5083025 - DNA, 25 bp, Homo sapien
ctgattctttcttgcatggattcca

SEQ ID NO: 5083026 - DNA, 25 bp, Homo sapien
actgattctttcttgcatggattcc

SEQ ID NO: 5083027 - DNA, 25 bp, Homo sapien
cactgattctttcttgcatggattc

SEQ ID NO: 5083028 - DNA, 25 bp, Homo sapien
tgattctttcttgcatggattccat

SEQ ID NO: 5083029 - DNA, 25 bp, Homo sapien
ccctcataatgtgcttggttgccat

SEQ ID NO: 5083030 - DNA, 25 bp, Homo sapien
caaatcctagtacacaaatcttagt

SEQ ID NO: 5083031 - DNA, 25 bp, Homo sapien
ctggccctcataatgtgcttggttg

SEQ ID NO: 5083032 - DNA, 25 bp, Homo sapien
gctttgaaactcaaatcctagtaca

SEQ ID NO: 5083033 - DNA, 25 bp, Homo sapien
gaagcagtatttctagcacattgag

SEQ ID NO: 5083034 - DNA, 25 bp, Homo sapien
caacagtctcagataggccaattct

SEQ ID NO: 5083035 - DNA, 25 bp, Homo sapien
aagtgtgaagtaaaggaccaaagct

SEQ ID NO: 5083036 - DNA, 25 bp, Homo sapien
tctatgaagtctgcagcacactcag

SEQ ID NO: 5083037 - DNA, 25 bp, Homo sapien
aacctccggatctagggattctcct

SEQ ID NO: 5083038 - DNA, 25 bp, Homo sapien
ctgcaacctccggatctagggattc

SEQ ID NO: 5083039 - DNA, 25 bp, Homo sapien
tgcaacctccggatctagggattct

SEQ ID NO: 5083040 - DNA, 25 bp, Homo sapien
tctctgcaacctccggatctaggga

SEQ ID NO: 5083041 - DNA, 25 bp, Homo sapien
ccttcggaaccactttatctttgtg

SEQ ID NO: 5083042 - DNA, 25 bp, Homo sapien
cattaccgctcaatttccccttcgg

SEQ ID NO: 5083043 - DNA, 25 bp, Homo sapien
tttatctttgtgtagtggctcagtg

SEQ ID NO: 5083044 - DNA, 25 bp, Homo sapien
gtgagggatttagcttcattaccgc

SEQ ID NO: 5083045 - DNA, 25 bp, Homo sapien
tgagcaaaggacacgaacagacaat

SEQ ID NO: 5083046 - DNA, 25 bp, Homo sapien
aatgtttgcagtctatccatctgat

SEQ ID NO: 5083047 - DNA, 25 bp, Homo sapien
gatctaatatccagagtccacaagg

SEQ ID NO: 5083048 - DNA, 25 bp, Homo sapien
gtctatccatctgatgaagatctaa

SEQ ID NO: 5083049 - DNA, 25 bp, Homo sapien
tcctgatgtgacagacccttctttg

SEQ ID NO: 5083050 - DNA, 25 bp, Homo sapien
ataaacaagcttatgtcactaaaac

SEQ ID NO: 5083051 - DNA, 25 bp, Homo sapien
tgtgtaaaggacaaggacataaaca

SEQ ID NO: 5083052 - DNA, 25 bp, Homo sapien
ttccttcagtaagatgctgggtctc

SEQ ID NO: 5083053 - DNA, 25 bp, Homo sapien
tgatttcagaggtaacaaagacaaa

SEQ ID NO: 5083054 - DNA, 25 bp, Homo sapien
gacaaattctaacgtgtaagtcctg

SEQ ID NO: 5083055 - DNA, 25 bp, Homo sapien
ccaagagtctaaagagagtttatct

SEQ ID NO: 5083056 - DNA, 25 bp, Homo sapien
ttatttcaagaagctaatgatttca

SEQ ID NO: 5083057 - DNA, 25 bp, Homo sapien
gggatatgggttggatgttccattt

SEQ ID NO: 5083058 - DNA, 25 bp, Homo sapien
gatatgggttggatgttccatttca

SEQ ID NO: 5083059 - DNA, 25 bp, Homo sapien
tccatttcagttgcaattccctgtt

SEQ ID NO: 5083060 - DNA, 25 bp, Homo sapien
caattccctgtttgagggttacagt

SEQ ID NO: 5083061 - DNA, 25 bp, Homo sapien
ctgaattctctcgaatgctcacatc

SEQ ID NO: 5083062 - DNA, 25 bp, Homo sapien
ttctctcgaatgctcacatcctttg

SEQ ID NO: 5083063 - DNA, 25 bp, Homo sapien
aattctctcgaatgctcacatcctt

SEQ ID NO: 5083064 - DNA, 25 bp, Homo sapien
gaattctctcgaatgctcacatcct

SEQ ID NO: 5083065 - DNA, 25 bp, Homo sapien
acagttccttactccatttctgcca

SEQ ID NO: 5083066 - DNA, 25 bp, Homo sapien
cctgacttgcttaccataaatgaga

SEQ ID NO: 5083067 - DNA, 25 bp, Homo sapien
tgccacatgcctttattcctacttt

SEQ ID NO: 5083068 - DNA, 25 bp, Homo sapien
tagagaaagggcttacagttcctta

SEQ ID NO: 5083069 - DNA, 25 bp, Homo sapien
tggaggaatcatttaatgcatcttg

SEQ ID NO: 5083070 - DNA, 25 bp, Homo sapien
gaggaatcatttaatgcatcttgct

SEQ ID NO: 5083071 - DNA, 25 bp, Homo sapien
tcacttatccgtttgatcttgaccc

SEQ ID NO: 5083072 - DNA, 25 bp, Homo sapien
gatcttgaccctttttggaggaatc

SEQ ID NO: 5083073 - DNA, 25 bp, Homo sapien
ttttaccttgtttgatccaatggat

SEQ ID NO: 5083074 - DNA, 25 bp, Homo sapien
tcttttaccttgtttgatccaatgg

SEQ ID NO: 5083075 - DNA, 25 bp, Homo sapien
tcactcttttaccttgtttgatcca

SEQ ID NO: 5083076 - DNA, 25 bp, Homo sapien
cactcttttaccttgtttgatccaa

SEQ ID NO: 5083077 - DNA, 25 bp, Homo sapien
tcggcggcatccatggacagaaagg

SEQ ID NO: 5083078 - DNA, 25 bp, Homo sapien
cttcttcggcggcatccatggacag

SEQ ID NO: 5083079 - DNA, 25 bp, Homo sapien
cttcggcggcatccatggacagaaa

SEQ ID NO: 5083080 - DNA, 25 bp, Homo sapien
tcttcggcggcatccatggacagaa

SEQ ID NO: 5083081 - DNA, 25 bp, Homo sapien
cagagagaagagagattttaaccat

SEQ ID NO: 5083082 - DNA, 25 bp, Homo sapien
gcagagagaagagagattttaacca

SEQ ID NO: 5083083 - DNA, 25 bp, Homo sapien
catcagctgtttcaaagcttaactc

SEQ ID NO: 5083084 - DNA, 25 bp, Homo sapien
tcagctgtttcaaagcttaactctc

SEQ ID NO: 5083085 - DNA, 25 bp, Homo sapien
cagctgtttcaaagcttaactctcc

SEQ ID NO: 5083086 - DNA, 25 bp, Homo sapien
tcatcagctgtttcaaagcttaact

SEQ ID NO: 5083087 - DNA, 25 bp, Homo sapien
cttgagatcgctctttggttccaca

SEQ ID NO: 5083088 - DNA, 25 bp, Homo sapien
ttctcttgagatcgctctttggttc

SEQ ID NO: 5083089 - DNA, 25 bp, Homo sapien
aatcttctcttgagatcgctctttg

SEQ ID NO: 5083090 - DNA, 25 bp, Homo sapien
gagaatcttctcttgagatcgctct

SEQ ID NO: 5083091 - DNA, 25 bp, Homo sapien
tatctttttcatagttaaatgggca

SEQ ID NO: 5083092 - DNA, 25 bp, Homo sapien
caaatatctttttcatagttaaatg

SEQ ID NO: 5083093 - DNA, 25 bp, Homo sapien
aatatctttttcatagttaaatggg

SEQ ID NO: 5083094 - DNA, 25 bp, Homo sapien
atctttttcatagttaaatgggcac

SEQ ID NO: 5083095 - DNA, 25 bp, Homo sapien
atttcagtcacttcaatatttccaa

SEQ ID NO: 5083096 - DNA, 25 bp, Homo sapien
tatgatttcagtcacttcaatattt

SEQ ID NO: 5083097 - DNA, 25 bp, Homo sapien
agttatgatttcagtcacttcaata

SEQ ID NO: 5083098 - DNA, 25 bp, Homo sapien
ttcagtcacttcaatatttccaaac

SEQ ID NO: 5083099 - DNA, 25 bp, Homo sapien
agtcttatccatggagtcatggtca

SEQ ID NO: 5083100 - DNA, 25 bp, Homo sapien
gacagtcttatccatggagtcatgg

SEQ ID NO: 5083101 - DNA, 25 bp, Homo sapien
tgacagtcttatccatggagtcatg

SEQ ID NO: 5083102 - DNA, 25 bp, Homo sapien
tcactttgacagggctttcctaact

SEQ ID NO: 5083103 - DNA, 25 bp, Homo sapien
catcaccacctttgtttcatggttt

SEQ ID NO: 5083104 - DNA, 25 bp, Homo sapien
tactggaaccgccatcaccaccttt

SEQ ID NO: 5083105 - DNA, 25 bp, Homo sapien
tggaaccgccatcaccacctttgtt

SEQ ID NO: 5083106 - DNA, 25 bp, Homo sapien
cgccatcaccacctttgtttcatgg

SEQ ID NO: 5083107 - DNA, 25 bp, Homo sapien
ggattacgctgttgcaaattttaca

SEQ ID NO: 5083108 - DNA, 25 bp, Homo sapien
tatttagaagacgtaagaagagcac

SEQ ID NO: 5083109 - DNA, 25 bp, Homo sapien
catacagtaatctctagggaagtca

SEQ ID NO: 5083110 - DNA, 25 bp, Homo sapien
taggcggaagggaagattacacaca

SEQ ID NO: 5083111 - DNA, 25 bp, Homo sapien
tattgataataagactggtgaaatc

SEQ ID NO: 5083112 - DNA, 25 bp, Homo sapien
tctatattgataataagactggtga

SEQ ID NO: 5083113 - DNA, 25 bp, Homo sapien
tgctgacatctatattgataataag

SEQ ID NO: 5083114 - DNA, 25 bp, Homo sapien
ctggtttgctgacatctatattgat

SEQ ID NO: 5083115 - DNA, 25 bp, Homo sapien
tgaccccacttttgggatgtacttc

SEQ ID NO: 5083116 - DNA, 25 bp, Homo sapien
tgggatgtacttccttttccattat

SEQ ID NO: 5083117 - DNA, 25 bp, Homo sapien
tccattgctctctctagcttttgac

SEQ ID NO: 5083118 - DNA, 25 bp, Homo sapien
acctgaggatggtacccaagtccat

SEQ ID NO: 5083119 - DNA, 25 bp, Homo sapien
gcaaatgccataattggcccattca

SEQ ID NO: 5083120 - DNA, 25 bp, Homo sapien
tggcaaatgccataattggcccatt

SEQ ID NO: 5083121 - DNA, 25 bp, Homo sapien
tgtggcaaatgccataattggccca

SEQ ID NO: 5083122 - DNA, 25 bp, Homo sapien
agtgtggcaaatgccataattggcc

SEQ ID NO: 5083123 - DNA, 25 bp, Homo sapien
gagatggcaagaggtatctttcccc

SEQ ID NO: 5083124 - DNA, 25 bp, Homo sapien
tccacgatgccactatgttcatagc

SEQ ID NO: 5083125 - DNA, 25 bp, Homo sapien
agcttgtgactcttcaaatcttggg

SEQ ID NO: 5083126 - DNA, 25 bp, Homo sapien
atttcctgagacatccaaccaacac

SEQ ID NO: 5083127 - DNA, 25 bp, Homo sapien
tcaaattaacgtaaggcaatggcat

SEQ ID NO: 5083128 - DNA, 25 bp, Homo sapien
tgtttcaaattaacgtaaggcaatg

SEQ ID NO: 5083129 - DNA, 25 bp, Homo sapien
tttcaaattaacgtaaggcaatggc

SEQ ID NO: 5083130 - DNA, 25 bp, Homo sapien
ttcaaattaacgtaaggcaatggca

SEQ ID NO: 5083131 - DNA, 25 bp, Homo sapien
ctcagaagcttctgggaacaatcca

SEQ ID NO: 5083132 - DNA, 25 bp, Homo sapien
gcttctgggaacaatccaagagcca

SEQ ID NO: 5083133 - DNA, 25 bp, Homo sapien
cttctgggaacaatccaagagccac

SEQ ID NO: 5083134 - DNA, 25 bp, Homo sapien
agaagcttctgggaacaatccaaga

SEQ ID NO: 5083135 - DNA, 25 bp, Homo sapien
tgtcactgaaatcctcatatccact

SEQ ID NO: 5083136 - DNA, 25 bp, Homo sapien
agtttttgcatggttgggtggcaat

SEQ ID NO: 5083137 - DNA, 25 bp, Homo sapien
ggacaggccagattgtttatcatga

SEQ ID NO: 5083138 - DNA, 25 bp, Homo sapien
gattattactcttgttgtcactgaa

SEQ ID NO: 5083139 - DNA, 25 bp, Homo sapien
atgagtcagtgttatctttaggaat

SEQ ID NO: 5083140 - DNA, 25 bp, Homo sapien
aatgagtcagtgttatctttaggaa

SEQ ID NO: 5083141 - DNA, 25 bp, Homo sapien
aaatgagtcagtgttatctttagga

SEQ ID NO: 5083142 - DNA, 25 bp, Homo sapien
atgaggtccacaggagcaccgacat

SEQ ID NO: 5083143 - DNA, 25 bp, Homo sapien
ttaaatgaggtccacaggagcaccg

SEQ ID NO: 5083144 - DNA, 25 bp, Homo sapien
aaatgaggtccacaggagcaccgac

SEQ ID NO: 5083145 - DNA, 25 bp, Homo sapien
tgaggtccacaggagcaccgacata

SEQ ID NO: 5083146 - DNA, 25 bp, Homo sapien
agtaagatccacaggggcaccgaca

SEQ ID NO: 5083147 - DNA, 25 bp, Homo sapien
taagatccacaggggcaccgacata

SEQ ID NO: 5083148 - DNA, 25 bp, Homo sapien
ttaagtaagatccacaggggcaccg

SEQ ID NO: 5083149 - DNA, 25 bp, Homo sapien
taagtaagatccacaggggcaccga

SEQ ID NO: 5083150 - DNA, 25 bp, Homo sapien
taactcttgggtacctgtattgggc

SEQ ID NO: 5083151 - DNA, 25 bp, Homo sapien
aagcagccttaggtgctcccagaca

SEQ ID NO: 5083152 - DNA, 25 bp, Homo sapien
ttgtttacatgtgccagcagccgtg

SEQ ID NO: 5083153 - DNA, 25 bp, Homo sapien
tgggcattcacgacattcagcatct

SEQ ID NO: 5083154 - DNA, 25 bp, Homo sapien
tcagcaaagagcttgaccaagacaa

SEQ ID NO: 5083155 - DNA, 25 bp, Homo sapien
tagggagggcaaggatacccgttca

SEQ ID NO: 5083156 - DNA, 25 bp, Homo sapien
accaagacaaaatagggagggcaag

SEQ ID NO: 5083157 - DNA, 25 bp, Homo sapien
gacaggaacacttaacatcttcagc

SEQ ID NO: 5083158 - DNA, 25 bp, Homo sapien
gctggctgatccagcaacaatgtct

SEQ ID NO: 5083159 - DNA, 25 bp, Homo sapien
ctggctgatccagcaacaatgtctg

SEQ ID NO: 5083160 - DNA, 25 bp, Homo sapien
agcaacaatgtctgtaggatgggca

SEQ ID NO: 5083161 - DNA, 25 bp, Homo sapien
cactgtgatgtttcactactggaaa

SEQ ID NO: 5083162 - DNA, 25 bp, Homo sapien
tgcagttctcttggagataggtcct

SEQ ID NO: 5083163 - DNA, 25 bp, Homo sapien
ctgccatcgaagatgcaaaccaggg

SEQ ID NO: 5083164 - DNA, 25 bp, Homo sapien
tccttgttcctgatccaccacactg

SEQ ID NO: 5083165 - DNA, 25 bp, Homo sapien
gagtgccagcttagttgcagcagaa

SEQ ID NO: 5083166 - DNA, 25 bp, Homo sapien
taaccactgatcatagagacctagg

SEQ ID NO: 5083167 - DNA, 25 bp, Homo sapien
tccctggctttcagataggatcttc

SEQ ID NO: 5083168 - DNA, 25 bp, Homo sapien
gacttgggcgaacttgctaccctaa

SEQ ID NO: 5083169 - DNA, 25 bp, Homo sapien
gattttcccactacacatccatgct

SEQ ID NO: 5083170 - DNA, 25 bp, Homo sapien
gcaaatgctcagaacatcctctagt

SEQ ID NO: 5083171 - DNA, 25 bp, Homo sapien
cacattctaccaggattctgcagca

SEQ ID NO: 5083172 - DNA, 25 bp, Homo sapien
tgcctttatatgcaggactctcagc

SEQ ID NO: 5083173 - DNA, 25 bp, Homo sapien
atgccaaatccatcatagaaatgat

SEQ ID NO: 5083174 - DNA, 25 bp, Homo sapien
tctgatgccaaatccatcatagaaa

SEQ ID NO: 5083175 - DNA, 25 bp, Homo sapien
gatgccaaatccatcatagaaatga

SEQ ID NO: 5083176 - DNA, 25 bp, Homo sapien
tgatgccaaatccatcatagaaatg

SEQ ID NO: 5083177 - DNA, 25 bp, Homo sapien
gtgagcagtaattcttcctcattgc

SEQ ID NO: 5083178 - DNA, 25 bp, Homo sapien
attgctgcctgaaccattagctgcc

SEQ ID NO: 5083179 - DNA, 25 bp, Homo sapien
tgaaccattagctgccatgaagagt

SEQ ID NO: 5083180 - DNA, 25 bp, Homo sapien
cctctgaaattcagggtaacggtgt

SEQ ID NO: 5083181 - DNA, 25 bp, Homo sapien
taggcttatctatgccataggctcc

SEQ ID NO: 5083182 - DNA, 25 bp, Homo sapien
gtttctagaggtatgggaaataggc

SEQ ID NO: 5083183 - DNA, 25 bp, Homo sapien
tgggaaataggcttatctatgccat

SEQ ID NO: 5083184 - DNA, 25 bp, Homo sapien
gaggtatgggaaataggcttatcta

SEQ ID NO: 5083185 - DNA, 25 bp, Homo sapien
gagtggggcactcaacttgttgctt

SEQ ID NO: 5083186 - DNA, 25 bp, Homo sapien
ggtagtaagctggtatgccttttgc

SEQ ID NO: 5083187 - DNA, 25 bp, Homo sapien
tttgcagggagtgcattcttcatga

SEQ ID NO: 5083188 - DNA, 25 bp, Homo sapien
ccctcttggttgatgttagagaaag

SEQ ID NO: 5083189 - DNA, 25 bp, Homo sapien
aactctagttgcttattgctgttgt

SEQ ID NO: 5083190 - DNA, 25 bp, Homo sapien
tcagatagtcaagtggatctgaagg

SEQ ID NO: 5083191 - DNA, 25 bp, Homo sapien
taaaccactaatttcggtcagatag

SEQ ID NO: 5083192 - DNA, 25 bp, Homo sapien
gacagctatccttttcatgtgttga

SEQ ID NO: 5083193 - DNA, 25 bp, Homo sapien
ttactttccggtactgaagtatata

SEQ ID NO: 5083194 - DNA, 25 bp, Homo sapien
caccaaaccttttaagctgttcaag

SEQ ID NO: 5083195 - DNA, 25 bp, Homo sapien
ttccggtactgaagtatatagcata

SEQ ID NO: 5083196 - DNA, 25 bp, Homo sapien
tcaccaaaccttttaagctgttcaa

SEQ ID NO: 5083197 - DNA, 25 bp, Homo sapien
tggacgccctgccactgcagaaatg

SEQ ID NO: 5083198 - DNA, 25 bp, Homo sapien
gggtgcttgttgataggtatcactg

SEQ ID NO: 5083199 - DNA, 25 bp, Homo sapien
gataggtatcactggtggacgccct

SEQ ID NO: 5083200 - DNA, 25 bp, Homo sapien
tggtggacgccctgccactgcagaa

SEQ ID NO: 5083201 - DNA, 25 bp, Homo sapien
atgttcttgaccacaacgtggtcat

SEQ ID NO: 5083202 - DNA, 25 bp, Homo sapien
agctgatgttcttgaccacaacgtg

SEQ ID NO: 5083203 - DNA, 25 bp, Homo sapien
ctcttggtgtaggactgggctccac

SEQ ID NO: 5083204 - DNA, 25 bp, Homo sapien
tggtgtaggactgggctccacaaac

SEQ ID NO: 5083205 - DNA, 25 bp, Homo sapien
taggactgggctccacaaacttcat

SEQ ID NO: 5083206 - DNA, 25 bp, Homo sapien
tgtaggactgggctccacaaacttc

SEQ ID NO: 5083207 - DNA, 25 bp, Homo sapien
gcagagcttcctgcagacattgttt

SEQ ID NO: 5083208 - DNA, 25 bp, Homo sapien
cttaatagaaatatgtttggtgcta

SEQ ID NO: 5083209 - DNA, 25 bp, Homo sapien
tatgtttggtgctaggaattattcc

SEQ ID NO: 5083210 - DNA, 25 bp, Homo sapien
gacattgtttactcaacttaataga

SEQ ID NO: 5083211 - DNA, 25 bp, Homo sapien
catttcgttatctgactttttgtgt

SEQ ID NO: 5083212 - DNA, 25 bp, Homo sapien
tggcttaattctttcagaccacgtc

SEQ ID NO: 5083213 - DNA, 25 bp, Homo sapien
tttgtgttttggcttaattctttca

SEQ ID NO: 5083214 - DNA, 25 bp, Homo sapien
gatactctttgttagcatttcgtta

SEQ ID NO: 5083215 - DNA, 25 bp, Homo sapien
atctgaacagttagtgctattaatt

SEQ ID NO: 5083216 - DNA, 25 bp, Homo sapien
gctttttgatctgaacagttagtgc

SEQ ID NO: 5083217 - DNA, 25 bp, Homo sapien
tttactgtctagcaagcagtctatc

SEQ ID NO: 5083218 - DNA, 25 bp, Homo sapien
cagcatcccagagattccggtatat

SEQ ID NO: 5083219 - DNA, 25 bp, Homo sapien
tcctctgaccttacattaggagaca

SEQ ID NO: 5083220 - DNA, 25 bp, Homo sapien
cctctgaccttacattaggagacat

SEQ ID NO: 5083221 - DNA, 25 bp, Homo sapien
ggagccacagaggaccagaagcaat

SEQ ID NO: 5083222 - DNA, 25 bp, Homo sapien
ggaccagaagcaatgtgaaggtgct

SEQ ID NO: 5083223 - DNA, 25 bp, Homo sapien
ggtgctgaaccttttggggagcaag

SEQ ID NO: 5083224 - DNA, 25 bp, Homo sapien
tggtcctgggtaaggagccacagag

SEQ ID NO: 5083225 - DNA, 25 bp, Homo sapien
cagcttttcacccatctttcccacg

SEQ ID NO: 5083226 - DNA, 25 bp, Homo sapien
catctttcccacgatgtctcttaaa

SEQ ID NO: 5083227 - DNA, 25 bp, Homo sapien
tctttcccacgatgtctcttaaaag

SEQ ID NO: 5083228 - DNA, 25 bp, Homo sapien
tttcccacgatgtctcttaaaagaa

SEQ ID NO: 5083229 - DNA, 25 bp, Homo sapien
gcatcttgatatgtaagtggagcac

SEQ ID NO: 5083230 - DNA, 25 bp, Homo sapien
tagggttgctgctgtggacgtacat

SEQ ID NO: 5083231 - DNA, 25 bp, Homo sapien
taggctccaaactgaagatcccagg

SEQ ID NO: 5083232 - DNA, 25 bp, Homo sapien
gacgtacatgcaagttcagggcaca

SEQ ID NO: 5083233 - DNA, 25 bp, Homo sapien
tctccaaggtttagtcctggtgttg

SEQ ID NO: 5083234 - DNA, 25 bp, Homo sapien
gttttcccaaattccggctgagaca

SEQ ID NO: 5083235 - DNA, 25 bp, Homo sapien
ctttggcgtagtcaagatgtaatga

SEQ ID NO: 5083236 - DNA, 25 bp, Homo sapien
tgtcatccctcctgatgcccgatga

SEQ ID NO: 5083237 - DNA, 25 bp, Homo sapien
tgacccttctcttggttgactctgt

SEQ ID NO: 5083238 - DNA, 25 bp, Homo sapien
tctctgttcttagcagcaatcctgc

SEQ ID NO: 5083239 - DNA, 25 bp, Homo sapien
tcctggtgccttgaaataattgagt

SEQ ID NO: 5083240 - DNA, 25 bp, Homo sapien
tcatttgcagggtgtgggtcaatgc

SEQ ID NO: 5083241 - DNA, 25 bp, Homo sapien
agttagctgaaatttgggctttgaa

SEQ ID NO: 5083242 - DNA, 25 bp, Homo sapien
tcctgaagacctgcacggtgcctca

SEQ ID NO: 5083243 - DNA, 25 bp, Homo sapien
cctgcacggtgcctcatgaagacct

SEQ ID NO: 5083244 - DNA, 25 bp, Homo sapien
ccccgtgaagacctgcacgccgcct

SEQ ID NO: 5083245 - DNA, 25 bp, Homo sapien
cacggtgcctcatgaagacctgcat

SEQ ID NO: 5083246 - DNA, 25 bp, Homo sapien
ccatgaagacctgcacggtgcctct

SEQ ID NO: 5083247 - DNA, 25 bp, Homo sapien
tgtgattgattccatgctgccccat

SEQ ID NO: 5083248 - DNA, 25 bp, Homo sapien
gacctgcacggtgcctctcaaagac

SEQ ID NO: 5083249 - DNA, 25 bp, Homo sapien
cttgtgattgattccatgctgcccc

SEQ ID NO: 5083250 - DNA, 25 bp, Homo sapien
tggtcgaatgccgtaaaagcttttc

SEQ ID NO: 5083251 - DNA, 25 bp, Homo sapien
agcttttccactggataatttatag

SEQ ID NO: 5083252 - DNA, 25 bp, Homo sapien
caagtcctggtcgaatgccgtaaaa

SEQ ID NO: 5083253 - DNA, 25 bp, Homo sapien
cacatttcaagtcctggtcgaatgc

SEQ ID NO: 5083254 - DNA, 25 bp, Homo sapien
tccatgacagggctataccatgcat

SEQ ID NO: 5083255 - DNA, 25 bp, Homo sapien
caatccctttcctaacttgggcctg

SEQ ID NO: 5083256 - DNA, 25 bp, Homo sapien
gggatccatgacagggctataccat

SEQ ID NO: 5083257 - DNA, 25 bp, Homo sapien
gatccatgacagggctataccatgc

SEQ ID NO: 5083258 - DNA, 25 bp, Homo sapien
ctcccttgttgcaattttactgcat

SEQ ID NO: 5083259 - DNA, 25 bp, Homo sapien
cttgtgagaaaaagccaaagtagaa

SEQ ID NO: 5083260 - DNA, 25 bp, Homo sapien
cccttgtgagaaaaagccaaagtag

SEQ ID NO: 5083261 - DNA, 25 bp, Homo sapien
ccttgtgagaaaaagccaaagtaga

SEQ ID NO: 5083262 - DNA, 25 bp, Homo sapien
tgtgagaaaaagccaaagtagaaaa

SEQ ID NO: 5083263 - DNA, 25 bp, Homo sapien
agggtaccttgtgtgcgctctctgc

SEQ ID NO: 5083264 - DNA, 25 bp, Homo sapien
taagaggcttgtttgcattgcatgc

SEQ ID NO: 5083265 - DNA, 25 bp, Homo sapien
tgcatgcttggctttgtagggtacc

SEQ ID NO: 5083266 - DNA, 25 bp, Homo sapien
cttgtgtgcgctctctgccatcctt

SEQ ID NO: 5083267 - DNA, 25 bp, Homo sapien
cggtgattgatctcggataaatgaa

SEQ ID NO: 5083268 - DNA, 25 bp, Homo sapien
gctcggtgattgatctcggataaat

SEQ ID NO: 5083269 - DNA, 25 bp, Homo sapien
gggctcggtgattgatctcggataa

SEQ ID NO: 5083270 - DNA, 25 bp, Homo sapien
tcaagggctcggtgattgatctcgg

SEQ ID NO: 5083271 - DNA, 25 bp, Homo sapien
agtactcccagtactgccagtgctc

SEQ ID NO: 5083272 - DNA, 25 bp, Homo sapien
tactgccagtgctctgcattccctg

SEQ ID NO: 5083273 - DNA, 25 bp, Homo sapien
taccccactgtgaatctcccatggc

SEQ ID NO: 5083274 - DNA, 25 bp, Homo sapien
gctgttggtggtctaatttccaccc

SEQ ID NO: 5083275 - DNA, 25 bp, Homo sapien
cgtggatgatgtccatcacagccat

SEQ ID NO: 5083276 - DNA, 25 bp, Homo sapien
tgtgattctgtcctgcacgtggatg

SEQ ID NO: 5083277 - DNA, 25 bp, Homo sapien
agggtggcctctgtgattctgtcct

SEQ ID NO: 5083278 - DNA, 25 bp, Homo sapien
cacgtggatgatgtccatcacagcc

SEQ ID NO: 5083279 - DNA, 25 bp, Homo sapien
gctacaacaaatgactcctgaaggg

SEQ ID NO: 5083280 - DNA, 25 bp, Homo sapien
ttcaatacagcttaaaatcaacggg

SEQ ID NO: 5083281 - DNA, 25 bp, Homo sapien
cagtggcaatgcttcaacagagttg

SEQ ID NO: 5083282 - DNA, 25 bp, Homo sapien
gatgcatggagacttaatccttggg

SEQ ID NO: 5083283 - DNA, 25 bp, Homo sapien
tgctaagtgaatccagggatatgat

SEQ ID NO: 5083284 - DNA, 25 bp, Homo sapien
ttttcctagatgttccaattggcct

SEQ ID NO: 5083285 - DNA, 25 bp, Homo sapien
ttggtaccaggttgtgctgcctctg

SEQ ID NO: 5083286 - DNA, 25 bp, Homo sapien
cagcagcataggtgaacattgagga

SEQ ID NO: 5083287 - DNA, 25 bp, Homo sapien
cttgtactttcagttttcatttcca

SEQ ID NO: 5083288 - DNA, 25 bp, Homo sapien
cacacttgtactttcagttttcatt

SEQ ID NO: 5083289 - DNA, 25 bp, Homo sapien
cacttgtactttcagttttcatttc

SEQ ID NO: 5083290 - DNA, 25 bp, Homo sapien
ttgtactttcagttttcatttccat

SEQ ID NO: 5083291 - DNA, 25 bp, Homo sapien
tggacaaagagcaagtaacattttg

SEQ ID NO: 5083292 - DNA, 25 bp, Homo sapien
cactacccagagatgattttgctgc

SEQ ID NO: 5083293 - DNA, 25 bp, Homo sapien
catgtggtctttgccccatacctta

SEQ ID NO: 5083294 - DNA, 25 bp, Homo sapien
tttgtggcaagctggtctggtgcac

SEQ ID NO: 5083295 - DNA, 25 bp, Homo sapien
gagtccttggccataaatcctcatg

SEQ ID NO: 5083296 - DNA, 25 bp, Homo sapien
cttgtcggatgatgagtatgtcagg

SEQ ID NO: 5083297 - DNA, 25 bp, Homo sapien
tgatgagtatgtcagggaagacatc

SEQ ID NO: 5083298 - DNA, 25 bp, Homo sapien
atgagtatgtcagggaagacatcaa

SEQ ID NO: 5083299 - DNA, 25 bp, Homo sapien
ggatgatgagtatgtcagggaagac

SEQ ID NO: 5083300 - DNA, 25 bp, Homo sapien
gagagttgcgtccacacgctcagta

SEQ ID NO: 5083301 - DNA, 25 bp, Homo sapien
cagtatgatacaagttatcctgtac

SEQ ID NO: 5083302 - DNA, 25 bp, Homo sapien
tccctttgcccatgagagttgcgtc

SEQ ID NO: 5083303 - DNA, 25 bp, Homo sapien
tatcctgtacaaacccaaccttctc

SEQ ID NO: 5083304 - DNA, 25 bp, Homo sapien
gagagaggagcttcttgaccagggc

SEQ ID NO: 5083305 - DNA, 25 bp, Homo sapien
ggatgagcttaaaaacaagctggca

SEQ ID NO: 5083306 - DNA, 25 bp, Homo sapien
tgaggggaactgcaaataaactagg

SEQ ID NO: 5083307 - DNA, 25 bp, Homo sapien
actaggggatgagcttaaaaacaag

SEQ ID NO: 5083308 - DNA, 25 bp, Homo sapien
caaggcatgccatagaatacagaag

SEQ ID NO: 5083309 - DNA, 25 bp, Homo sapien
tcttcccactgtagctccttgagag

SEQ ID NO: 5083310 - DNA, 25 bp, Homo sapien
tcctgctgttgatgccaattgagtc

SEQ ID NO: 5083311 - DNA, 25 bp, Homo sapien
tttgctttttgaagtttccaaggca

SEQ ID NO: 5083312 - DNA, 25 bp, Homo sapien
gtaagctcctttctctagttgagaa

SEQ ID NO: 5083313 - DNA, 25 bp, Homo sapien
aagtaacattgttgattcagggaaa

SEQ ID NO: 5083314 - DNA, 25 bp, Homo sapien
caggaattgactctaggtaagctcc

SEQ ID NO: 5083315 - DNA, 25 bp, Homo sapien
tgcggaagccagttgttgacaccag

SEQ ID NO: 5083316 - DNA, 25 bp, Homo sapien
aaccatcagatggagtgagctggca

SEQ ID NO: 5083317 - DNA, 25 bp, Homo sapien
ctggagaaagggggcagaaccatca

SEQ ID NO: 5083318 - DNA, 25 bp, Homo sapien
ggcagaaccatcagatggagtgagc

SEQ ID NO: 5083319 - DNA, 25 bp, Homo sapien
cagaaccatcagatggagtgagctg

SEQ ID NO: 5083320 - DNA, 25 bp, Homo sapien
ctcattttcaaaggcatgcactgtg

SEQ ID NO: 5083321 - DNA, 25 bp, Homo sapien
tattgggattgcagcagcgtttgct

SEQ ID NO: 5083322 - DNA, 25 bp, Homo sapien
ttccctgggtgccaatacactgtca

SEQ ID NO: 5083323 - DNA, 25 bp, Homo sapien
catcaggatgatttatggaggcttc

SEQ ID NO: 5083324 - DNA, 25 bp, Homo sapien
taggatagtctgtattgatggaact

SEQ ID NO: 5083325 - DNA, 25 bp, Homo sapien
gcatctttgtctgtataggatagtc

SEQ ID NO: 5083326 - DNA, 25 bp, Homo sapien
ctttgtctgtataggatagtctgta

SEQ ID NO: 5083327 - DNA, 25 bp, Homo sapien
tctgtattgatggaactggacaact

SEQ ID NO: 5083328 - DNA, 25 bp, Homo sapien
catctgagacagaccaagtaattgc

SEQ ID NO: 5083329 - DNA, 25 bp, Homo sapien
tggatccggtgtctctcaggcgagc

SEQ ID NO: 5083330 - DNA, 25 bp, Homo sapien
tcaggcgagccagcggaagctttct

SEQ ID NO: 5083331 - DNA, 25 bp, Homo sapien
ttctcagctttaaaaactctgtcat

SEQ ID NO: 5083332 - DNA, 25 bp, Homo sapien
taattgaaccactcatagcccccat

SEQ ID NO: 5083333 - DNA, 25 bp, Homo sapien
ctccaattgcttaattgaaccactc

SEQ ID NO: 5083334 - DNA, 25 bp, Homo sapien
gcctccaattgcttaattgaaccac

SEQ ID NO: 5083335 - DNA, 25 bp, Homo sapien
ctcagcctccaattgcttaattgaa

SEQ ID NO: 5083336 - DNA, 25 bp, Homo sapien
tctctgttgctttcgtggggatagt

SEQ ID NO: 5083337 - DNA, 25 bp, Homo sapien
gtgtccgtaaaacgctggcccactc

SEQ ID NO: 5083338 - DNA, 25 bp, Homo sapien
tgttggaagtgtccgtaaaacgctg

SEQ ID NO: 5083339 - DNA, 25 bp, Homo sapien
aagaagtgcctctatacggccactg

SEQ ID NO: 5083340 - DNA, 25 bp, Homo sapien
acgacatcagcaagggcaagttcat

SEQ ID NO: 5083341 - DNA, 25 bp, Homo sapien
gttggagatccgttatctctccttt

SEQ ID NO: 5083342 - DNA, 25 bp, Homo sapien
ggagatccgttatctctcctttcaa

SEQ ID NO: 5083343 - DNA, 25 bp, Homo sapien
tccacgacatcagcaagggcaagtt

SEQ ID NO: 5083344 - DNA, 25 bp, Homo sapien
gccccagacatgataatgaccagct

SEQ ID NO: 5083345 - DNA, 25 bp, Homo sapien
tgaccagcttggagtttgcagttac

SEQ ID NO: 5083346 - DNA, 25 bp, Homo sapien
aatgaccagcttggagtttgcagtt

SEQ ID NO: 5083347 - DNA, 25 bp, Homo sapien
ctgccccagacatgataatgaccag

SEQ ID NO: 5083348 - DNA, 25 bp, Homo sapien
aagatgttcacgttatgctggtcct

SEQ ID NO: 5083349 - DNA, 25 bp, Homo sapien
cacgttatgctggtcctatttaaga

SEQ ID NO: 5083350 - DNA, 25 bp, Homo sapien
gatgttcacgttatgctggtcctat

SEQ ID NO: 5083351 - DNA, 25 bp, Homo sapien
gctggtcctatttaagatggctttc

SEQ ID NO: 5083352 - DNA, 25 bp, Homo sapien
caagccacataggtcaagatatcca

SEQ ID NO: 5083353 - DNA, 25 bp, Homo sapien
ttttgggaaagccacttatcttcca

SEQ ID NO: 5083354 - DNA, 25 bp, Homo sapien
cgaattgggctgaatccagattgca

SEQ ID NO: 5083355 - DNA, 25 bp, Homo sapien
tgggctgaatccagattgcaaccac

SEQ ID NO: 5083356 - DNA, 25 bp, Homo sapien
tcccagctttcccccatcaggtaac

SEQ ID NO: 5083357 - DNA, 25 bp, Homo sapien
taatgggtgaactcccagctttccc

SEQ ID NO: 5083358 - DNA, 25 bp, Homo sapien
actcccagctttcccccatcaggta

SEQ ID NO: 5083359 - DNA, 25 bp, Homo sapien
cttaatgggtgaactcccagctttc

SEQ ID NO: 5083360 - DNA, 25 bp, Homo sapien
cagggaaacaccagcaacattcact

SEQ ID NO: 5083361 - DNA, 25 bp, Homo sapien
taaatgtgagtgcagagtcttcagg

SEQ ID NO: 5083362 - DNA, 25 bp, Homo sapien
actccactccataaaggcacactag

SEQ ID NO: 5083363 - DNA, 25 bp, Homo sapien
taaaggcacactagaatctccatgt

SEQ ID NO: 5083364 - DNA, 25 bp, Homo sapien
ttgtaaggactctgaactacctgct

SEQ ID NO: 5083365 - DNA, 25 bp, Homo sapien
ggactctgaactacctgcttgtgaa

SEQ ID NO: 5083366 - DNA, 25 bp, Homo sapien
caccttgtaaggactctgaactacc

SEQ ID NO: 5083367 - DNA, 25 bp, Homo sapien
gtttgatcaccttgtaaggactctg

SEQ ID NO: 5083368 - DNA, 25 bp, Homo sapien
gccacacagagtccaatggtgagag

SEQ ID NO: 5083369 - DNA, 25 bp, Homo sapien
cacagagtccaatggtgagagtcca

SEQ ID NO: 5083370 - DNA, 25 bp, Homo sapien
tgccacacagagtccaatggtgaga

SEQ ID NO: 5083371 - DNA, 25 bp, Homo sapien
cacacagagtccaatggtgagagtc

SEQ ID NO: 5083372 - DNA, 25 bp, Homo sapien
atggtggaaattgggtgcacccgcc

SEQ ID NO: 5083373 - DNA, 25 bp, Homo sapien
ggtggaaattgggtgcacccgccta

SEQ ID NO: 5083374 - DNA, 25 bp, Homo sapien
tggaaattgggtgcacccgcctaag

SEQ ID NO: 5083375 - DNA, 25 bp, Homo sapien
gaaattgggtgcacccgcctaagat

SEQ ID NO: 5083376 - DNA, 25 bp, Homo sapien
ctaaggaagacatcatcctttattc

SEQ ID NO: 5083377 - DNA, 25 bp, Homo sapien
gaagacatcatcctttattccacag

SEQ ID NO: 5083378 - DNA, 25 bp, Homo sapien
taaggaagacatcatcctttattcc

SEQ ID NO: 5083379 - DNA, 25 bp, Homo sapien
aggaagacatcatcctttattccac

SEQ ID NO: 5083380 - DNA, 25 bp, Homo sapien
tcacaaggtctgagattccattctg

SEQ ID NO: 5083381 - DNA, 25 bp, Homo sapien
tccattctgtcccaagatgcaagca

SEQ ID NO: 5083382 - DNA, 25 bp, Homo sapien
attctgtcccaagatgcaagcaaca

SEQ ID NO: 5083383 - DNA, 25 bp, Homo sapien
caaggtctgagattccattctgtcc

SEQ ID NO: 5083384 - DNA, 25 bp, Homo sapien
tgtatctgcgctcttcctcaaaagg

SEQ ID NO: 5083385 - DNA, 25 bp, Homo sapien
tatctgcgctcttcctcaaaagggc

SEQ ID NO: 5083386 - DNA, 25 bp, Homo sapien
tgcgctcttcctcaaaagggcctct

SEQ ID NO: 5083387 - DNA, 25 bp, Homo sapien
agtgtatctgcgctcttcctcaaaa

SEQ ID NO: 5083388 - DNA, 25 bp, Homo sapien
tccttcaagtcacacaagtgaccca

SEQ ID NO: 5083389 - DNA, 25 bp, Homo sapien
ttaaaagtctatccttcaagtcaca

SEQ ID NO: 5083390 - DNA, 25 bp, Homo sapien
tccattttgtagttcttatcttctc

SEQ ID NO: 5083391 - DNA, 25 bp, Homo sapien
gtctatccttcaagtcacacaagtg

SEQ ID NO: 5083392 - DNA, 25 bp, Homo sapien
acggcgccgccaagtggtctgtagg

SEQ ID NO: 5083393 - DNA, 25 bp, Homo sapien
agcgtgcggaaggagccctacttgc

SEQ ID NO: 5083394 - DNA, 25 bp, Homo sapien
gagagcctagcgctgtcagcgagtt

SEQ ID NO: 5083395 - DNA, 25 bp, Homo sapien
atgcctcgtgctgttgccccgcaga

SEQ ID NO: 5083396 - DNA, 25 bp, Homo sapien
tagccaattatcatccacggccatt

SEQ ID NO: 5083397 - DNA, 25 bp, Homo sapien
ttagccaattatcatccacggccat

SEQ ID NO: 5083398 - DNA, 25 bp, Homo sapien
gccaattatcatccacggccattac

SEQ ID NO: 5083399 - DNA, 25 bp, Homo sapien
cttagccaattatcatccacggcca

SEQ ID NO: 5083400 - DNA, 25 bp, Homo sapien
ttctgggtcagaaccgagctccatc

SEQ ID NO: 5083401 - DNA, 25 bp, Homo sapien
gactgtagcaattggctgccgcctt

SEQ ID NO: 5083402 - DNA, 25 bp, Homo sapien
tttccaccgtaggaggatcgggctg

SEQ ID NO: 5083403 - DNA, 25 bp, Homo sapien
gactgcagcgcaagccaaagaaatg

SEQ ID NO: 5083404 - DNA, 25 bp, Homo sapien
tcagaatcctcaggaaggggtccca

SEQ ID NO: 5083405 - DNA, 25 bp, Homo sapien
ggtgggtgttattgccatattgcac

SEQ ID NO: 5083406 - DNA, 25 bp, Homo sapien
cctgaaaatttctttccgcaagagt

SEQ ID NO: 5083407 - DNA, 25 bp, Homo sapien
ttatagtcggatcccgatggcctca

SEQ ID NO: 5083408 - DNA, 25 bp, Homo sapien
tgtgtgtaagacagtcttgccacgt

SEQ ID NO: 5083409 - DNA, 25 bp, Homo sapien
tgtgtaagacagtcttgccacgtcg

SEQ ID NO: 5083410 - DNA, 25 bp, Homo sapien
gacagtcttgccacgtcgctcaggc

SEQ ID NO: 5083411 - DNA, 25 bp, Homo sapien
gtaagacagtcttgccacgtcgctc

SEQ ID NO: 5083412 - DNA, 25 bp, Homo sapien
gctcgttctgtgcagtgcgtttgaa

SEQ ID NO: 5083413 - DNA, 25 bp, Homo sapien
cctgtgagaatgactaaggataaat

SEQ ID NO: 5083414 - DNA, 25 bp, Homo sapien
ttctttctaccagaaggttcctgca

SEQ ID NO: 5083415 - DNA, 25 bp, Homo sapien
gagactgtctctcaagtctaatgaa

SEQ ID NO: 5083416 - DNA, 25 bp, Homo sapien
gaacttgcacacgtcctcctcaaga

SEQ ID NO: 5083417 - DNA, 25 bp, Homo sapien
ttcatttttgatttctgccctccct

SEQ ID NO: 5083418 - DNA, 25 bp, Homo sapien
taggaacttgcacacgtcctcctca

SEQ ID NO: 5083419 - DNA, 25 bp, Homo sapien
catttttgatttctgccctccctag

SEQ ID NO: 5083420 - DNA, 25 bp, Homo sapien
tatgtaataagatgtcaaggctggg

SEQ ID NO: 5083421 - DNA, 25 bp, Homo sapien
tatcacacgatatagtccgggcatg

SEQ ID NO: 5083422 - DNA, 25 bp, Homo sapien
tccgggcatgtcatttgagccaagg

SEQ ID NO: 5083423 - DNA, 25 bp, Homo sapien
ggcaatgtgcaagttcaggaagaac

SEQ ID NO: 5083424 - DNA, 25 bp, Homo sapien
attttcggttccgagaccttgagtg

SEQ ID NO: 5083425 - DNA, 25 bp, Homo sapien
ggttcacttcctacatctctccacg

SEQ ID NO: 5083426 - DNA, 25 bp, Homo sapien
tctccacgttgcccggatctgcaag

SEQ ID NO: 5083427 - DNA, 25 bp, Homo sapien
gcttcaggttcacttcctacatctc

SEQ ID NO: 5083428 - DNA, 25 bp, Homo sapien
gtaaagaggcgtgcccatctctgtg

SEQ ID NO: 5083429 - DNA, 25 bp, Homo sapien
tgttgccatctctctttgcggtggt

SEQ ID NO: 5083430 - DNA, 25 bp, Homo sapien
taagcaaagggtaaggcacagttct

SEQ ID NO: 5083431 - DNA, 25 bp, Homo sapien
gaatctttggttctgtaaagaggcg

SEQ ID NO: 5083432 - DNA, 25 bp, Homo sapien
gtgggatcggctgcccggccttcat

SEQ ID NO: 5083433 - DNA, 25 bp, Homo sapien
aagggctgggcttcgagacctgatc

SEQ ID NO: 5083434 - DNA, 25 bp, Homo sapien
aagcaaaggacgagattcagcggga

SEQ ID NO: 5083435 - DNA, 25 bp, Homo sapien
tcattttaatgctgctccctcactg

SEQ ID NO: 5083436 - DNA, 25 bp, Homo sapien
ggattcccagacgagctgagcctct

SEQ ID NO: 5083437 - DNA, 25 bp, Homo sapien
ggccaaagcccttgacatggatggg

SEQ ID NO: 5083438 - DNA, 25 bp, Homo sapien
tgactcgctggacccattatgtgct

SEQ ID NO: 5083439 - DNA, 25 bp, Homo sapien
cgcctccgggagagactgtgactcg

SEQ ID NO: 5083440 - DNA, 25 bp, Homo sapien
cttccagacggcctgtgtcctgcct

SEQ ID NO: 5083441 - DNA, 25 bp, Homo sapien
ctcttccagacggcctgtgtcctgc

SEQ ID NO: 5083442 - DNA, 25 bp, Homo sapien
ggaaagcctgctccgaaaagccact

SEQ ID NO: 5083443 - DNA, 25 bp, Homo sapien
gacctcttccagacggcctgtgtcc

SEQ ID NO: 5083444 - DNA, 25 bp, Homo sapien
gggtgtctgttgctcctccaagcat

SEQ ID NO: 5083445 - DNA, 25 bp, Homo sapien
tcttagtgtgtgacttcgtcctgtc

SEQ ID NO: 5083446 - DNA, 25 bp, Homo sapien
agtgtgtgacttcgtcctgtcttca

SEQ ID NO: 5083447 - DNA, 25 bp, Homo sapien
cgtcctgtcttcatggtctcagggt

SEQ ID NO: 5083448 - DNA, 25 bp, Homo sapien
tggcctcatgtctcccgggtttgtg

SEQ ID NO: 5083449 - DNA, 25 bp, Homo sapien
catgtctcccgggtttgtggtgacc

SEQ ID NO: 5083450 - DNA, 25 bp, Homo sapien
ctcatgtctcccgggtttgtggtga

SEQ ID NO: 5083451 - DNA, 25 bp, Homo sapien
agctctttgcagagttggctttcat

SEQ ID NO: 5083452 - DNA, 25 bp, Homo sapien
ctctcctggcccagggccagggcca

SEQ ID NO: 5083453 - DNA, 25 bp, Homo sapien
tctcctggcccagggccagggccat

SEQ ID NO: 5083454 - DNA, 25 bp, Homo sapien
tctctcctggcccagggccagggcc

SEQ ID NO: 5083455 - DNA, 25 bp, Homo sapien
ctctctcctggcccagggccagggc

SEQ ID NO: 5083456 - DNA, 25 bp, Homo sapien
attgccatgagcagctcgtcgccac

SEQ ID NO: 5083457 - DNA, 25 bp, Homo sapien
tgtatcttcccatcagactggaggg

SEQ ID NO: 5083458 - DNA, 25 bp, Homo sapien
ggaacaccactatgtatgccccagg

SEQ ID NO: 5083459 - DNA, 25 bp, Homo sapien
cattccagtgggtaaggcatcgtgc

SEQ ID NO: 5083460 - DNA, 25 bp, Homo sapien
cattgagtctggtctccccgggatg

SEQ ID NO: 5083461 - DNA, 25 bp, Homo sapien
gacttccagtctgatgtcctttcga

SEQ ID NO: 5083462 - DNA, 25 bp, Homo sapien
gctcttgttcaggactttggacttc

SEQ ID NO: 5083463 - DNA, 25 bp, Homo sapien
tagatgggtgttgaaatcccagccc

SEQ ID NO: 5083464 - DNA, 25 bp, Homo sapien
ggacaagcaggtactggttttttca

SEQ ID NO: 5083465 - DNA, 25 bp, Homo sapien
gttcaacaagaagtatggtgaggcc

SEQ ID NO: 5083466 - DNA, 25 bp, Homo sapien
ccagtgagtcgttcatgaaggagac

SEQ ID NO: 5083467 - DNA, 25 bp, Homo sapien
tgaatgcaggatggtagaagtccag

SEQ ID NO: 5083468 - DNA, 25 bp, Homo sapien
gagacagggataaggttcaacaaga

SEQ ID NO: 5083469 - DNA, 25 bp, Homo sapien
tataggacaactagatgaacacggc

SEQ ID NO: 5083470 - DNA, 25 bp, Homo sapien
ccagtgatatatgttgccacagcag

SEQ ID NO: 5083471 - DNA, 25 bp, Homo sapien
tcttgtcatctcctaatcgaggcag

SEQ ID NO: 5083472 - DNA, 25 bp, Homo sapien
cagtcgtagcacagacagggtgttt

SEQ ID NO: 5083473 - DNA, 25 bp, Homo sapien
catcggtggatctagttgtgaggat

SEQ ID NO: 5083474 - DNA, 25 bp, Homo sapien
gactcaggagctgtgagcatcggtg

SEQ ID NO: 5083475 - DNA, 25 bp, Homo sapien
ttacatactctccagcttggttagc

SEQ ID NO: 5083476 - DNA, 25 bp, Homo sapien
tacatactctccagcttggttagca

SEQ ID NO: 5083477 - DNA, 25 bp, Homo sapien
aagacgctgaaatttccttggagga

SEQ ID NO: 5083478 - DNA, 25 bp, Homo sapien
ttttctctctttgcggctcccttct

SEQ ID NO: 5083479 - DNA, 25 bp, Homo sapien
ggattcagagcctggttgcaaacca

SEQ ID NO: 5083480 - DNA, 25 bp, Homo sapien
tttctttactctggtgtaccaccaa

SEQ ID NO: 5083481 - DNA, 25 bp, Homo sapien
tatgctcttgtctatcccggttcaa

SEQ ID NO: 5083482 - DNA, 25 bp, Homo sapien
gcaaagctgcttagggtgttttctg

SEQ ID NO: 5083483 - DNA, 25 bp, Homo sapien
tttgttatgctcttgtctatcccgg

SEQ ID NO: 5083484 - DNA, 25 bp, Homo sapien
gctcttgtctatcccggttcaacat

SEQ ID NO: 5083485 - DNA, 25 bp, Homo sapien
ttgagtttccgatccctgggctggg

SEQ ID NO: 5083486 - DNA, 25 bp, Homo sapien
cattgagtttccgatccctgggctg

SEQ ID NO: 5083487 - DNA, 25 bp, Homo sapien
tttccgatccctgggctgggtgaag

SEQ ID NO: 5083488 - DNA, 25 bp, Homo sapien
ctccattgagtttccgatccctggg

SEQ ID NO: 5083489 - DNA, 25 bp, Homo sapien
aaatcctcatccgtatcaaacaggg

SEQ ID NO: 5083490 - DNA, 25 bp, Homo sapien
gggaaatcctcatccgtatcaaaca

SEQ ID NO: 5083491 - DNA, 25 bp, Homo sapien
ggaaatcctcatccgtatcaaacag

SEQ ID NO: 5083492 - DNA, 25 bp, Homo sapien
aatcctcatccgtatcaaacaggga

SEQ ID NO: 5083493 - DNA, 25 bp, Homo sapien
tctgaatggagagcttgacggcacc

SEQ ID NO: 5083494 - DNA, 25 bp, Homo sapien
tgtggccctaaccaggtcatgagca

SEQ ID NO: 5083495 - DNA, 25 bp, Homo sapien
tcatgagcactcttgggccgaaggc

SEQ ID NO: 5083496 - DNA, 25 bp, Homo sapien
gcagatccattaatctccctgaaaa

SEQ ID NO: 5083497 - DNA, 25 bp, Homo sapien
gaaaagtagtaatctctgtgaagac

SEQ ID NO: 5083498 - DNA, 25 bp, Homo sapien
caggtgagtggccacaggaaaagta

SEQ ID NO: 5083499 - DNA, 25 bp, Homo sapien
aggtccaactttgcaatttaccagg

SEQ ID NO: 5083500 - DNA, 25 bp, Homo sapien
aagatgggcaaggtctaacagtggt

SEQ ID NO: 5083501 - DNA, 25 bp, Homo sapien
cctgggcagagttgtgcaacccaac

SEQ ID NO: 5083502 - DNA, 25 bp, Homo sapien
atcctggggcattttataaccttgg

SEQ ID NO: 5083503 - DNA, 25 bp, Homo sapien
tccgtgaggtcaagtgatgaggtcc

SEQ ID NO: 5083504 - DNA, 25 bp, Homo sapien
gtgatgaggtccaaacaacctgctt

SEQ ID NO: 5083505 - DNA, 25 bp, Homo sapien
ctgggacaaatgtccgtgaggtcaa

SEQ ID NO: 5083506 - DNA, 25 bp, Homo sapien
ggtccaaacaacctgcttcactgtc

SEQ ID NO: 5083507 - DNA, 25 bp, Homo sapien
cagaaggaaagacgaaacctgaagg

SEQ ID NO: 5083508 - DNA, 25 bp, Homo sapien
tactaggtgtgagctcgaatgtctt

SEQ ID NO: 5083509 - DNA, 25 bp, Homo sapien
caattatcgtattggccataggaca

SEQ ID NO: 5083510 - DNA, 25 bp, Homo sapien
aaacctgaagggcatctttactagg

SEQ ID NO: 5083511 - DNA, 25 bp, Homo sapien
cccaggagagactgataggtgaatc

SEQ ID NO: 5083512 - DNA, 25 bp, Homo sapien
tgcctggtggagacattcatgtgga

SEQ ID NO: 5083513 - DNA, 25 bp, Homo sapien
tcctgacaggattgtgatgtatgca

SEQ ID NO: 5083514 - DNA, 25 bp, Homo sapien
tatgcattacttcccgtgaagctga

SEQ ID NO: 5083515 - DNA, 25 bp, Homo sapien
gggtttagcttgtaggttctcagcc

SEQ ID NO: 5083516 - DNA, 25 bp, Homo sapien
ttagcttgtaggttctcagccaggg

SEQ ID NO: 5083517 - DNA, 25 bp, Homo sapien
aggtgaggcatcctgactggtaatg

SEQ ID NO: 5083518 - DNA, 25 bp, Homo sapien
catcctgactggtaatgggtctggg

SEQ ID NO: 5083519 - DNA, 25 bp, Homo sapien
gactcttatttgcagggtcccctag

SEQ ID NO: 5083520 - DNA, 25 bp, Homo sapien
catgcagattttgcttagggctggg

SEQ ID NO: 5083521 - DNA, 25 bp, Homo sapien
cctagtccaagagggttggttctca

SEQ ID NO: 5083522 - DNA, 25 bp, Homo sapien
ttctagctcgggaaatccaggctct

SEQ ID NO: 5083523 - DNA, 25 bp, Homo sapien
tcttgctgtcttccgaacagcctct

SEQ ID NO: 5083524 - DNA, 25 bp, Homo sapien
ttccgaacagcctcttcatgaccat

SEQ ID NO: 5083525 - DNA, 25 bp, Homo sapien
ctgtcttccgaacagcctcttcatg

SEQ ID NO: 5083526 - DNA, 25 bp, Homo sapien
actcttgctgtcttccgaacagcct

SEQ ID NO: 5083527 - DNA, 25 bp, Homo sapien
ccagggaagggctatggtatgcggg

SEQ ID NO: 5083528 - DNA, 25 bp, Homo sapien
gcaggaaatgtttgtgataagaggc

SEQ ID NO: 5083529 - DNA, 25 bp, Homo sapien
ctcttgcaagctcctctggtttcca

SEQ ID NO: 5083530 - DNA, 25 bp, Homo sapien
gaggcttcgcctcttgcaagctcct

SEQ ID NO: 5083531 - DNA, 25 bp, Homo sapien
ctgcctttcaagtcgtttgtgtgag

SEQ ID NO: 5083532 - DNA, 25 bp, Homo sapien
ttcaagtcgtttgtgtgagggctgc

SEQ ID NO: 5083533 - DNA, 25 bp, Homo sapien
tgtgtgagggctgcgttggtggccc

SEQ ID NO: 5083534 - DNA, 25 bp, Homo sapien
aagaatctggagtagagaggagtct

SEQ ID NO: 5083535 - DNA, 25 bp, Homo sapien
tccttccatgcttttcagcgactga

SEQ ID NO: 5083536 - DNA, 25 bp, Homo sapien
tccatgcttttcagcgactgaacca

SEQ ID NO: 5083537 - DNA, 25 bp, Homo sapien
gcttttcagcgactgaaccatttgg

SEQ ID NO: 5083538 - DNA, 25 bp, Homo sapien
gcgactgaaccatttgggtggcctg

SEQ ID NO: 5083539 - DNA, 25 bp, Homo sapien
tcagggagacagatgggcaaaagta

SEQ ID NO: 5083540 - DNA, 25 bp, Homo sapien
ggagacagatgggcaaaagtaagtc

SEQ ID NO: 5083541 - DNA, 25 bp, Homo sapien
cattgctggccccattcagggagac

SEQ ID NO: 5083542 - DNA, 25 bp, Homo sapien
agggagacagatgggcaaaagtaag

SEQ ID NO: 5083543 - DNA, 25 bp, Homo sapien
ctgggtgccatgaaaatggatcgtt

SEQ ID NO: 5083544 - DNA, 25 bp, Homo sapien
tgccatgaaaatggatcgttttgca

SEQ ID NO: 5083545 - DNA, 25 bp, Homo sapien
gaaaatggatcgttttgcagaaaga

SEQ ID NO: 5083546 - DNA, 25 bp, Homo sapien
gaataccattggatgtttatttaac

SEQ ID NO: 5083547 - DNA, 25 bp, Homo sapien
gacccagagacccttggacgaactc

SEQ ID NO: 5083548 - DNA, 25 bp, Homo sapien
gtatatggagccaaaacacacggaa

SEQ ID NO: 5083549 - DNA, 25 bp, Homo sapien
gaattagctctttgtggccaataga

SEQ ID NO: 5083550 - DNA, 25 bp, Homo sapien
ggccaatagaagtatatggagccaa

SEQ ID NO: 5083551 - DNA, 25 bp, Homo sapien
gaggtggtggccaacatcccggcca

SEQ ID NO: 5083552 - DNA, 25 bp, Homo sapien
agcccattgataggcagcccttcca

SEQ ID NO: 5083553 - DNA, 25 bp, Homo sapien
caacatcccggccaccgtgaatgac

SEQ ID NO: 5083554 - DNA, 25 bp, Homo sapien
ccattgataggcagcccttccacac

SEQ ID NO: 5083555 - DNA, 25 bp, Homo sapien
atcagggagtcctaaatgctgaata

SEQ ID NO: 5083556 - DNA, 25 bp, Homo sapien
ctgaataggcccttcagaccaggcc

SEQ ID NO: 5083557 - DNA, 25 bp, Homo sapien
gagtcctaaatgctgaataggccct

SEQ ID NO: 5083558 - DNA, 25 bp, Homo sapien
taaatgctgaataggcccttcagac

SEQ ID NO: 5083559 - DNA, 25 bp, Homo sapien
ttcacgattggcagatctgcttggg

SEQ ID NO: 5083560 - DNA, 25 bp, Homo sapien
ctttttcacgattggcagatctgct

SEQ ID NO: 5083561 - DNA, 25 bp, Homo sapien
tcactttttcacgattggcagatct

SEQ ID NO: 5083562 - DNA, 25 bp, Homo sapien
gatctgcttggggaatgaaaaatgc

SEQ ID NO: 5083563 - DNA, 25 bp, Homo sapien
tcttaaagctaagacaatgcagggg

SEQ ID NO: 5083564 - DNA, 25 bp, Homo sapien
tggaaggagctttgcactgaataat

SEQ ID NO: 5083565 - DNA, 25 bp, Homo sapien
ccaaacaagtgactttacttgtctt

SEQ ID NO: 5083566 - DNA, 25 bp, Homo sapien
ctttttctatcagggtggaaggagc

SEQ ID NO: 5083567 - DNA, 25 bp, Homo sapien
gtagatcacattcccacttgccgga

SEQ ID NO: 5083568 - DNA, 25 bp, Homo sapien
catgtagatcacattcccacttgcc

SEQ ID NO: 5083569 - DNA, 25 bp, Homo sapien
ggaagagcaggtgtcttctcagaga

SEQ ID NO: 5083570 - DNA, 25 bp, Homo sapien
tggaagagcaggtgtcttctcagag

SEQ ID NO: 5083571 - DNA, 25 bp, Homo sapien
tgccccagtttccaacaagaagcca

SEQ ID NO: 5083572 - DNA, 25 bp, Homo sapien
cccagtttccaacaagaagccactc

SEQ ID NO: 5083573 - DNA, 25 bp, Homo sapien
tttgccccagtttccaacaagaagc

SEQ ID NO: 5083574 - DNA, 25 bp, Homo sapien
tgctgtgctttttttgccccagttt

SEQ ID NO: 5083575 - DNA, 25 bp, Homo sapien
cagactcccaagctctcagtgttct

SEQ ID NO: 5083576 - DNA, 25 bp, Homo sapien
gagaggctctgagcgctctcgtttc

SEQ ID NO: 5083577 - DNA, 25 bp, Homo sapien
atagggccgcgctgggagaggctct

SEQ ID NO: 5083578 - DNA, 25 bp, Homo sapien
cagtgttctcattaccttctaaggg

SEQ ID NO: 5083579 - DNA, 25 bp, Homo sapien
gagggactggctgactgctctgggc

SEQ ID NO: 5083580 - DNA, 25 bp, Homo sapien
cattcccctggtaggttcctgctgc

SEQ ID NO: 5083581 - DNA, 25 bp, Homo sapien
tcgtttaagtgagcttggtagggtc

SEQ ID NO: 5083582 - DNA, 25 bp, Homo sapien
cagcagctctggacaagcacggatg

SEQ ID NO: 5083583 - DNA, 25 bp, Homo sapien
gcatgcaaagagttccgagtcactt

SEQ ID NO: 5083584 - DNA, 25 bp, Homo sapien
gagtcactttcaagtctgcccgtag

SEQ ID NO: 5083585 - DNA, 25 bp, Homo sapien
tttcctggcaaccagacaactagaa

SEQ ID NO: 5083586 - DNA, 25 bp, Homo sapien
tctgggatcatttgaagccgggcat

SEQ ID NO: 5083587 - DNA, 25 bp, Homo sapien
tgatgcatccatttgtctcctgtta

SEQ ID NO: 5083588 - DNA, 25 bp, Homo sapien
tttattagttcaatgtgatgcatcc

SEQ ID NO: 5083589 - DNA, 25 bp, Homo sapien
tcctgttaggtggaagatggcctga

SEQ ID NO: 5083590 - DNA, 25 bp, Homo sapien
ctgagaaaggggaggtttgtgctgt

SEQ ID NO: 5083591 - DNA, 25 bp, Homo sapien
agctcatggggagaatgttggtgcc

SEQ ID NO: 5083592 - DNA, 25 bp, Homo sapien
gctgttcattagcagagctcatggg

SEQ ID NO: 5083593 - DNA, 25 bp, Homo sapien
tcatggggagaatgttggtgccact

SEQ ID NO: 5083594 - DNA, 25 bp, Homo sapien
tgcctgcttcttggattgccccttc

SEQ ID NO: 5083595 - DNA, 25 bp, Homo sapien
tctaatgtcctctgcacttgggttt

SEQ ID NO: 5083596 - DNA, 25 bp, Homo sapien
tctctccccagtctcgctaatgtgg

SEQ ID NO: 5083597 - DNA, 25 bp, Homo sapien
gccagtgtgcgttgatctaatgtcc

SEQ ID NO: 5083598 - DNA, 25 bp, Homo sapien
ggcaaagggaagatgacagttaact

SEQ ID NO: 5083599 - DNA, 25 bp, Homo sapien
tgtttggacaaatgtctgggtacct

SEQ ID NO: 5083600 - DNA, 25 bp, Homo sapien
tctaccaattctaatgttaatcttg

SEQ ID NO: 5083601 - DNA, 25 bp, Homo sapien
taatgtttggacaaatgtctgggta

SEQ ID NO: 5083602 - DNA, 25 bp, Homo sapien
tccagatatcccctcacagacacac

SEQ ID NO: 5083603 - DNA, 25 bp, Homo sapien
ttgggttgaccagcgtgcaatggtt

SEQ ID NO: 5083604 - DNA, 25 bp, Homo sapien
tttgtcaggttgggttgaccagcgt

SEQ ID NO: 5083605 - DNA, 25 bp, Homo sapien
cgtgcaatggttcgctcactcctca

SEQ ID NO: 5083606 - DNA, 25 bp, Homo sapien
gaccagcgtgcaatggttcgctcac

SEQ ID NO: 5083607 - DNA, 25 bp, Homo sapien
tgatgaagagtgaaaagcgttttgg

SEQ ID NO: 5083608 - DNA, 25 bp, Homo sapien
cttttgatgaagagtgaaaagcgtt

SEQ ID NO: 5083609 - DNA, 25 bp, Homo sapien
tttgatgaagagtgaaaagcgtttt

SEQ ID NO: 5083610 - DNA, 25 bp, Homo sapien
gatgaagagtgaaaagcgttttgga

SEQ ID NO: 5083611 - DNA, 25 bp, Homo sapien
taaatcgagagggattccttttggc

SEQ ID NO: 5083612 - DNA, 25 bp, Homo sapien
atgaatcacaccctgctcccatggg

SEQ ID NO: 5083613 - DNA, 25 bp, Homo sapien
gaatctgtcagacccttctcaggaa

SEQ ID NO: 5083614 - DNA, 25 bp, Homo sapien
aatgggacagctgtgcacgaagagc

SEQ ID NO: 5083615 - DNA, 25 bp, Homo sapien
gacgtgcctccgacaggaagagatg

SEQ ID NO: 5083616 - DNA, 25 bp, Homo sapien
gaagagatgggccgtgaaacatgct

SEQ ID NO: 5083617 - DNA, 25 bp, Homo sapien
gaagtgtgacatggcctctaggctc

SEQ ID NO: 5083618 - DNA, 25 bp, Homo sapien
cactgtgtggattgaaggctgaccc

SEQ ID NO: 5083619 - DNA, 25 bp, Homo sapien
ggctgtcacttagggctccgaggaa

SEQ ID NO: 5083620 - DNA, 25 bp, Homo sapien
taggcttcgcccaatagctctgctg

SEQ ID NO: 5083621 - DNA, 25 bp, Homo sapien
gggctgtcacttagggctccgagga

SEQ ID NO: 5083622 - DNA, 25 bp, Homo sapien
gcataattaggcttcgcccaatagc

SEQ ID NO: 5083623 - DNA, 25 bp, Homo sapien
tctgcgtggactccgtggactttat

SEQ ID NO: 5083624 - DNA, 25 bp, Homo sapien
gaccatgtctgcgtggactccgtgg

SEQ ID NO: 5083625 - DNA, 25 bp, Homo sapien
ctattgaccatgtctgcgtggactc

SEQ ID NO: 5083626 - DNA, 25 bp, Homo sapien
tggactccgtggactttatcgtcat

SEQ ID NO: 5083627 - DNA, 25 bp, Homo sapien
cgacctccgactgagggaagggaca

SEQ ID NO: 5083628 - DNA, 25 bp, Homo sapien
gtctcttggtggctacgacctccga

SEQ ID NO: 5083629 - DNA, 25 bp, Homo sapien
tctgcacgagctgggatcattccct

SEQ ID NO: 5083630 - DNA, 25 bp, Homo sapien
tccgaccaggacttcagaggcctgt

SEQ ID NO: 5083631 - DNA, 25 bp, Homo sapien
ggatccctcctatttccctcttgat

SEQ ID NO: 5083632 - DNA, 25 bp, Homo sapien
ccacagtgtcaaagtggatccctcc

SEQ ID NO: 5083633 - DNA, 25 bp, Homo sapien
aagtggatccctcctatttccctct

SEQ ID NO: 5083634 - DNA, 25 bp, Homo sapien
agccacagtgtcaaagtggatccct

SEQ ID NO: 5083635 - DNA, 25 bp, Homo sapien
attttcaaatcccagatggttgaac

SEQ ID NO: 5083636 - DNA, 25 bp, Homo sapien
ctaattttcaaatcccagatggttg

SEQ ID NO: 5083637 - DNA, 25 bp, Homo sapien
taattttcaaatcccagatggttga

SEQ ID NO: 5083638 - DNA, 25 bp, Homo sapien
ttttcaaatcccagatggttgaact

SEQ ID NO: 5083639 - DNA, 25 bp, Homo sapien
agggagtttccaagcggactttgct

SEQ ID NO: 5083640 - DNA, 25 bp, Homo sapien
gaaacttcaaagacctgttttcagc

SEQ ID NO: 5083641 - DNA, 25 bp, Homo sapien
gaatataagggaagctgtggccgat

SEQ ID NO: 5083642 - DNA, 25 bp, Homo sapien
acagcaaggatattcaacacgtggg

SEQ ID NO: 5083643 - DNA, 25 bp, Homo sapien
cccagtgatctaaggctcttaggtc

SEQ ID NO: 5083644 - DNA, 25 bp, Homo sapien
gacctctagggtaaagcctctgcag

SEQ ID NO: 5083645 - DNA, 25 bp, Homo sapien
tggccggctgatggagccactttgt

SEQ ID NO: 5083646 - DNA, 25 bp, Homo sapien
ggtcatgctgacctctagggtaaag

SEQ ID NO: 5083647 - DNA, 25 bp, Homo sapien
tgcttactaggactgtgggaagacg

SEQ ID NO: 5083648 - DNA, 25 bp, Homo sapien
gagaatgcttactaggactgtggga

SEQ ID NO: 5083649 - DNA, 25 bp, Homo sapien
tactaggactgtgggaagacgctgc

SEQ ID NO: 5083650 - DNA, 25 bp, Homo sapien
gtggagagagaatgcttactaggac

SEQ ID NO: 5083651 - DNA, 25 bp, Homo sapien
gtcgggcacgtaggatgatggtggg

SEQ ID NO: 5083652 - DNA, 25 bp, Homo sapien
ggtaaaggaggacagatagctgcta

SEQ ID NO: 5083653 - DNA, 25 bp, Homo sapien
ttccttgggagtgtcgggcacgtag

SEQ ID NO: 5083654 - DNA, 25 bp, Homo sapien
cattccaaggctgtttagcccagtc

SEQ ID NO: 5083655 - DNA, 25 bp, Homo sapien
gcagggagaaaccttggcctggcct

SEQ ID NO: 5083656 - DNA, 25 bp, Homo sapien
taacagactccacattctccctgga

SEQ ID NO: 5083657 - DNA, 25 bp, Homo sapien
tctgacacaactccgatctgatagc

SEQ ID NO: 5083658 - DNA, 25 bp, Homo sapien
gatagctcccttccatgctttacag

SEQ ID NO: 5083659 - DNA, 25 bp, Homo sapien
gtggaatcgggaggggatctgggca

SEQ ID NO: 5083660 - DNA, 25 bp, Homo sapien
ctgtggaatcgggaggggatctggg

SEQ ID NO: 5083661 - DNA, 25 bp, Homo sapien
tgtggaatcgggaggggatctgggc

SEQ ID NO: 5083662 - DNA, 25 bp, Homo sapien
tggaatcgggaggggatctgggcat

SEQ ID NO: 5083663 - DNA, 25 bp, Homo sapien
ggagctggttacttctattctttta

SEQ ID NO: 5083664 - DNA, 25 bp, Homo sapien
ctgggagctggttacttctattctt

SEQ ID NO: 5083665 - DNA, 25 bp, Homo sapien
cagccctggcggcgaccatggctga

SEQ ID NO: 5083666 - DNA, 25 bp, Homo sapien
cggcgaccatggctgagccacatct

SEQ ID NO: 5083667 - DNA, 25 bp, Homo sapien
ctgccaggccgaaactgacatttcc

SEQ ID NO: 5083668 - DNA, 25 bp, Homo sapien
cctcccttccgtggcaggaagtggc

SEQ ID NO: 5083669 - DNA, 25 bp, Homo sapien
gatggaggcagttgttgctgccctc

SEQ ID NO: 5083670 - DNA, 25 bp, Homo sapien
gccaggccgaaactgacatttccct

SEQ ID NO: 5083671 - DNA, 25 bp, Homo sapien
gagccccacatcgtgtgcgtgtcca

SEQ ID NO: 5083672 - DNA, 25 bp, Homo sapien
tgatttggtccgttctctgctctgg

SEQ ID NO: 5083673 - DNA, 25 bp, Homo sapien
attccaggtggaagtctaaaagcga

SEQ ID NO: 5083674 - DNA, 25 bp, Homo sapien
atgggagaactgcagatggcccgct

SEQ ID NO: 5083675 - DNA, 25 bp, Homo sapien
gattgttgtttctgtaccaccagct

SEQ ID NO: 5083676 - DNA, 25 bp, Homo sapien
gtgattgttgtttctgtaccaccag

SEQ ID NO: 5083677 - DNA, 25 bp, Homo sapien
tgattgttgtttctgtaccaccagc

SEQ ID NO: 5083678 - DNA, 25 bp, Homo sapien
tggtgtgtaaaggctctcttagatc

SEQ ID NO: 5083679 - DNA, 25 bp, Homo sapien
gtgtaaaggctctcttagatcccac

SEQ ID NO: 5083680 - DNA, 25 bp, Homo sapien
gtggtgtgtaaaggctctcttagat

SEQ ID NO: 5083681 - DNA, 25 bp, Homo sapien
tgtaaaggctctcttagatcccaca

SEQ ID NO: 5083682 - DNA, 25 bp, Homo sapien
tgtttctcggagactccagagggcg

SEQ ID NO: 5083683 - DNA, 25 bp, Homo sapien
gtgtttctcggagactccagagggc

SEQ ID NO: 5083684 - DNA, 25 bp, Homo sapien
tgaagtgtttctcggagactccaga

SEQ ID NO: 5083685 - DNA, 25 bp, Homo sapien
ctatgaagtgtttctcggagactcc

SEQ ID NO: 5083686 - DNA, 25 bp, Homo sapien
aagagatgctctgtgacactttgtc

SEQ ID NO: 5083687 - DNA, 25 bp, Homo sapien
ccttcactgtttcttgagattggag

SEQ ID NO: 5083688 - DNA, 25 bp, Homo sapien
ccgccagtcaaagagatgctctgtg

SEQ ID NO: 5083689 - DNA, 25 bp, Homo sapien
gctctgtgacactttgtctttctgt

SEQ ID NO: 5083690 - DNA, 25 bp, Homo sapien
agagggaagaccatgaatcaggacc

SEQ ID NO: 5083691 - DNA, 25 bp, Homo sapien
tcctgatgccagagtctgagagcag

SEQ ID NO: 5083692 - DNA, 25 bp, Homo sapien
ccagagtctgagagcagggacagcc

SEQ ID NO: 5083693 - DNA, 25 bp, Homo sapien
ccagcttgtcctccctggagcaagg

SEQ ID NO: 5083694 - DNA, 25 bp, Homo sapien
tgaaggaagccatgattcctccgag

SEQ ID NO: 5083695 - DNA, 25 bp, Homo sapien
tccagcccggactccttgttctcta

SEQ ID NO: 5083696 - DNA, 25 bp, Homo sapien
ggtctgtaccgatagagctgttctg

SEQ ID NO: 5083697 - DNA, 25 bp, Homo sapien
attcctccgagaacactgggtctgg

SEQ ID NO: 5083698 - DNA, 25 bp, Homo sapien
tccgagcccggagcgaagagcacgt

SEQ ID NO: 5083699 - DNA, 25 bp, Homo sapien
aagagcacgttgaggacggagccca

SEQ ID NO: 5083700 - DNA, 25 bp, Homo sapien
tagcgcgcccggatctgccgggcca

SEQ ID NO: 5083701 - DNA, 25 bp, Homo sapien
aatagcgctgcacctcctcgtagcg

SEQ ID NO: 5083702 - DNA, 25 bp, Homo sapien
gcgccggacacgttgcgaagcgcgg

SEQ ID NO: 5083703 - DNA, 25 bp, Homo sapien
acacgttgcgaagcgcggcgcagcc

SEQ ID NO: 5083704 - DNA, 25 bp, Homo sapien
ggacacgttgcgaagcgcggcgcag

SEQ ID NO: 5083705 - DNA, 25 bp, Homo sapien
ctgcgcgccggacacgttgcgaagc

SEQ ID NO: 5083706 - DNA, 25 bp, Homo sapien
gtggccgctaaagtccaccgccttg

SEQ ID NO: 5083707 - DNA, 25 bp, Homo sapien
ttgtgggccgccagccgatagcagc

SEQ ID NO: 5083708 - DNA, 25 bp, Homo sapien
gcgcacgcagctgcccagatcgtgg

SEQ ID NO: 5083709 - DNA, 25 bp, Homo sapien
caggcggacccggtacacggccttg

SEQ ID NO: 5083710 - DNA, 25 bp, Homo sapien
gggtgccatctcactcctaaggaaa

SEQ ID NO: 5083711 - DNA, 25 bp, Homo sapien
tacacgcaagtgttggttctgcccg

SEQ ID NO: 5083712 - DNA, 25 bp, Homo sapien
caggatctggctgacaccctagagt

SEQ ID NO: 5083713 - DNA, 25 bp, Homo sapien
gaaggtgtgtgcaagatttcatccg

SEQ ID NO: 5083714 - DNA, 25 bp, Homo sapien
gcaagttcccttagactggtaacaa

SEQ ID NO: 5083715 - DNA, 25 bp, Homo sapien
tggtaatacacaagcgagcatacgg

SEQ ID NO: 5083716 - DNA, 25 bp, Homo sapien
ggaactgcccactctatgtcatctg

SEQ ID NO: 5083717 - DNA, 25 bp, Homo sapien
gagtgtcactaccaccttaacagca

SEQ ID NO: 5083718 - DNA, 25 bp, Homo sapien
tctgggatgtcctcgctgtcctggt

SEQ ID NO: 5083719 - DNA, 25 bp, Homo sapien
cagggtgtctgggatgtcctcgctg

SEQ ID NO: 5083720 - DNA, 25 bp, Homo sapien
ggatcatttctacaggggcgcccag

SEQ ID NO: 5083721 - DNA, 25 bp, Homo sapien
tcggaatcgatcctcccaggaagtt

SEQ ID NO: 5083722 - DNA, 25 bp, Homo sapien
cccagggcccgagccctcctctgag

SEQ ID NO: 5083723 - DNA, 25 bp, Homo sapien
agggcccgagccctcctctgagctc

SEQ ID NO: 5083724 - DNA, 25 bp, Homo sapien
catcctagcaaggagcccagggccc

SEQ ID NO: 5083725 - DNA, 25 bp, Homo sapien
tcctagcaaggagcccagggcccga

SEQ ID NO: 5083726 - DNA, 25 bp, Homo sapien
tcctagttctaggacactggccctc

SEQ ID NO: 5083727 - DNA, 25 bp, Homo sapien
ttctcttctataggccccagggctc

SEQ ID NO: 5083728 - DNA, 25 bp, Homo sapien
gattttctattaactctcggctggc

SEQ ID NO: 5083729 - DNA, 25 bp, Homo sapien
cggctggcctgaccctggaaatgat

SEQ ID NO: 5083730 - DNA, 25 bp, Homo sapien
ctgccgagggcggaagtccagcaga

SEQ ID NO: 5083731 - DNA, 25 bp, Homo sapien
gagggcggaagtccagcagagtgac

SEQ ID NO: 5083732 - DNA, 25 bp, Homo sapien
gaagtccagcagagtgacggagccc

SEQ ID NO: 5083733 - DNA, 25 bp, Homo sapien
ggcggaagtccagcagagtgacgga

SEQ ID NO: 5083734 - DNA, 25 bp, Homo sapien
agttcctggccggaaactcgagtat

SEQ ID NO: 5083735 - DNA, 25 bp, Homo sapien
catccaggtccgtcactttgagctc

SEQ ID NO: 5083736 - DNA, 25 bp, Homo sapien
tcctccacacgtgcgtcatccaggt

SEQ ID NO: 5083737 - DNA, 25 bp, Homo sapien
tatgcagtcggtgctgcctgcacac

SEQ ID NO: 5083738 - DNA, 25 bp, Homo sapien
attctccttcgatggagttcccgag

SEQ ID NO: 5083739 - DNA, 25 bp, Homo sapien
ggcccattctccttcgatggagttc

SEQ ID NO: 5083740 - DNA, 25 bp, Homo sapien
cttcgatggagttcccgagtcaggg

SEQ ID NO: 5083741 - DNA, 25 bp, Homo sapien
tccttcgatggagttcccgagtcag

SEQ ID NO: 5083742 - DNA, 25 bp, Homo sapien
gaacgcagtgaagtctactcagcct

SEQ ID NO: 5083743 - DNA, 25 bp, Homo sapien
ggagacacatccttcctctattcca

SEQ ID NO: 5083744 - DNA, 25 bp, Homo sapien
tctattccaacctggggcagaacgc

SEQ ID NO: 5083745 - DNA, 25 bp, Homo sapien
gcagaacgctaacctggccagggag

SEQ ID NO: 5083746 - DNA, 25 bp, Homo sapien
ctgtgaggcaggaggtatgtgaaga

SEQ ID NO: 5083747 - DNA, 25 bp, Homo sapien
gaggcaggaggtatgtgaagaaaaa

SEQ ID NO: 5083748 - DNA, 25 bp, Homo sapien
aggcaggaggtatgtgaagaaaaac

SEQ ID NO: 5083749 - DNA, 25 bp, Homo sapien
tgtgaggcaggaggtatgtgaagaa

SEQ ID NO: 5083750 - DNA, 25 bp, Homo sapien
cagaggacgcagtgaaggcggggca

SEQ ID NO: 5083751 - DNA, 25 bp, Homo sapien
ctgtggcgttgacgatgctgtccag

SEQ ID NO: 5083752 - DNA, 25 bp, Homo sapien
acgatgctgtccagcagaggacgca

SEQ ID NO: 5083753 - DNA, 25 bp, Homo sapien
gcgttgacgatgctgtccagcagag

SEQ ID NO: 5083754 - DNA, 25 bp, Homo sapien
agtgtggctaagacaggatgcctgg

SEQ ID NO: 5083755 - DNA, 25 bp, Homo sapien
gcagtgtggctaagacaggatgcct

SEQ ID NO: 5083756 - DNA, 25 bp, Homo sapien
tgcagtgtggctaagacaggatgcc

SEQ ID NO: 5083757 - DNA, 25 bp, Homo sapien
agtgcagtgtggctaagacaggatg

SEQ ID NO: 5083758 - DNA, 25 bp, Homo sapien
gttctgcagatactgcccgctccgg

SEQ ID NO: 5083759 - DNA, 25 bp, Homo sapien
tgccgtggagttctgcagatactgc

SEQ ID NO: 5083760 - DNA, 25 bp, Homo sapien
agatactgcccgctccggtacaggt

SEQ ID NO: 5083761 - DNA, 25 bp, Homo sapien
atactgcccgctccggtacaggtgc

SEQ ID NO: 5083762 - DNA, 25 bp, Homo sapien
gcaaaaaatccatggctagagtggg

SEQ ID NO: 5083763 - DNA, 25 bp, Homo sapien
tggcctgcaagggttcagagcaacc

SEQ ID NO: 5083764 - DNA, 25 bp, Homo sapien
gaagttaggcaagttcctcagaagg

SEQ ID NO: 5083765 - DNA, 25 bp, Homo sapien
tgagaatctgtacttctaaccagca

SEQ ID NO: 5083766 - DNA, 25 bp, Homo sapien
tggtcaggcagtacaagatagcagg

SEQ ID NO: 5083767 - DNA, 25 bp, Homo sapien
taagggcacatagcttggtcaggca

SEQ ID NO: 5083768 - DNA, 25 bp, Homo sapien
ctctagcacgcagatgaaggcagct

SEQ ID NO: 5083769 - DNA, 25 bp, Homo sapien
ggcagctaccactgttgaaacaggg

SEQ ID NO: 5083770 - DNA, 25 bp, Homo sapien
gcctcagccaggttgaacactgaaa

SEQ ID NO: 5083771 - DNA, 25 bp, Homo sapien
caaaggcccgacactgggcatggct

SEQ ID NO: 5083772 - DNA, 25 bp, Homo sapien
taggatggccagcagcggtagtctt

SEQ ID NO: 5083773 - DNA, 25 bp, Homo sapien
ggtgctgtctgggatacactggtac

SEQ ID NO: 5083774 - DNA, 25 bp, Homo sapien
gaccacttggctccatccagtcttg

SEQ ID NO: 5083775 - DNA, 25 bp, Homo sapien
catccagtcttgaaaaagaccagct

SEQ ID NO: 5083776 - DNA, 25 bp, Homo sapien
ggccttcacatatgtggtcttgttg

SEQ ID NO: 5083777 - DNA, 25 bp, Homo sapien
ttgttgggatcagggaccacttggc

SEQ ID NO: 5083778 - DNA, 25 bp, Homo sapien
ccctgtcgggaggtcagagatagcc

SEQ ID NO: 5083779 - DNA, 25 bp, Homo sapien
tgagcttgcttacagcccacagggt

SEQ ID NO: 5083780 - DNA, 25 bp, Homo sapien
gctgagagaacactccacgatggat

SEQ ID NO: 5083781 - DNA, 25 bp, Homo sapien
tcctgtccagacctaagctgagaga

SEQ ID NO: 5083782 - DNA, 25 bp, Homo sapien
ggttgttcgggtgctccttgtgacc

SEQ ID NO: 5083783 - DNA, 25 bp, Homo sapien
ctgcaggttgttcgggtgctccttg

SEQ ID NO: 5083784 - DNA, 25 bp, Homo sapien
caggttgttcgggtgctccttgtga

SEQ ID NO: 5083785 - DNA, 25 bp, Homo sapien
tgttcgggtgctccttgtgacccct

SEQ ID NO: 5083786 - DNA, 25 bp, Homo sapien
ctgcattgtcatggtgtgaggcttt

SEQ ID NO: 5083787 - DNA, 25 bp, Homo sapien
tagaggattgtgtaaagtccagtac

SEQ ID NO: 5083788 - DNA, 25 bp, Homo sapien
tctcctggttattactgggtccttg

SEQ ID NO: 5083789 - DNA, 25 bp, Homo sapien
cacaggccatatgactgttggaggg

SEQ ID NO: 5083790 - DNA, 25 bp, Homo sapien
cactcactcccagagaggcgggcat

SEQ ID NO: 5083791 - DNA, 25 bp, Homo sapien
ggcacactcactcccagagaggcgg

SEQ ID NO: 5083792 - DNA, 25 bp, Homo sapien
agagaggcgggcatcctctctctgg

SEQ ID NO: 5083793 - DNA, 25 bp, Homo sapien
tcccagagaggcgggcatcctctct

SEQ ID NO: 5083794 - DNA, 25 bp, Homo sapien
cacatctggttgaatacagagctgg

SEQ ID NO: 5083795 - DNA, 25 bp, Homo sapien
ttgaatacagagctggggtagcctg

SEQ ID NO: 5083796 - DNA, 25 bp, Homo sapien
acatctggttgaatacagagctggg

SEQ ID NO: 5083797 - DNA, 25 bp, Homo sapien
tggttgaatacagagctggggtagc

SEQ ID NO: 5083798 - DNA, 25 bp, Homo sapien
gcagctgaggccgtcctgccagcac

SEQ ID NO: 5083799 - DNA, 25 bp, Homo sapien
tgcagctgaggccgtcctgccagca

SEQ ID NO: 5083800 - DNA, 25 bp, Homo sapien
ctgcagctgaggccgtcctgccagc

SEQ ID NO: 5083801 - DNA, 25 bp, Homo sapien
acccttgtacactgcattctgcctg

SEQ ID NO: 5083802 - DNA, 25 bp, Homo sapien
tgcagccgccaactggtgctgagct

SEQ ID NO: 5083803 - DNA, 25 bp, Homo sapien
tgctgagctgccacctgttgtctgt

SEQ ID NO: 5083804 - DNA, 25 bp, Homo sapien
cctgctggtagcaacgccctgttac

SEQ ID NO: 5083805 - DNA, 25 bp, Homo sapien
cgatgacctccaacttccctttctg

SEQ ID NO: 5083806 - DNA, 25 bp, Homo sapien
tgacctccaacttccctttctgcac

SEQ ID NO: 5083807 - DNA, 25 bp, Homo sapien
ccccacgatgacctccaacttccct

SEQ ID NO: 5083808 - DNA, 25 bp, Homo sapien
acgatgacctccaacttccctttct

SEQ ID NO: 5083809 - DNA, 25 bp, Homo sapien
tttgagagttgattctatttcttca

SEQ ID NO: 5083810 - DNA, 25 bp, Homo sapien
actgttggagggctgtttaggttct

SEQ ID NO: 5083811 - DNA, 25 bp, Homo sapien
tgggcttttcattttgagagttgat

SEQ ID NO: 5083812 - DNA, 25 bp, Homo sapien
taggttctgatagagtgggcttttc

SEQ ID NO: 5083813 - DNA, 25 bp, Homo sapien
aggagctccatgcacgctcaggcca

SEQ ID NO: 5083814 - DNA, 25 bp, Homo sapien
ctccatgcacgctcaggccaaaagt

SEQ ID NO: 5083815 - DNA, 25 bp, Homo sapien
gaggggcttccaatatcaggactgg

SEQ ID NO: 5083816 - DNA, 25 bp, Homo sapien
tgtaagaatgtaagtggagcttgca

SEQ ID NO: 5083817 - DNA, 25 bp, Homo sapien
tgcactatacagatctgactcctgc

SEQ ID NO: 5083818 - DNA, 25 bp, Homo sapien
atctgcagaactctgcactatacag

SEQ ID NO: 5083819 - DNA, 25 bp, Homo sapien
cttggatttgtgcagcgtgatgagg

SEQ ID NO: 5083820 - DNA, 25 bp, Homo sapien
cgtgaaggtactgcttggatttgtg

SEQ ID NO: 5083821 - DNA, 25 bp, Homo sapien
ggaaaggatgttgtgaccagcaact

SEQ ID NO: 5083822 - DNA, 25 bp, Homo sapien
tcagggctgggctttaggtgggaaa

SEQ ID NO: 5083823 - DNA, 25 bp, Homo sapien
accagcaactgggagagggattcct

SEQ ID NO: 5083824 - DNA, 25 bp, Homo sapien
cacaggaggatttctgggaggcaaa

SEQ ID NO: 5083825 - DNA, 25 bp, Homo sapien
cctcacttagcaggcaagggctgaa

SEQ ID NO: 5083826 - DNA, 25 bp, Homo sapien
tcaggaaggcacgtccaatgcgaac

SEQ ID NO: 5083827 - DNA, 25 bp, Homo sapien
aatgcgaaccattccagagactgca

SEQ ID NO: 5083828 - DNA, 25 bp, Homo sapien
caagcaatgctacttccatcaggaa

SEQ ID NO: 5083829 - DNA, 25 bp, Homo sapien
ctgattatgggcctgccaatggggc

SEQ ID NO: 5083830 - DNA, 25 bp, Homo sapien
tgattatgggcctgccaatggggcc

SEQ ID NO: 5083831 - DNA, 25 bp, Homo sapien
gaagatgggactgatttctgtgcag

SEQ ID NO: 5083832 - DNA, 25 bp, Homo sapien
gctgcctgacttcccgaggcagtgg

SEQ ID NO: 5083833 - DNA, 25 bp, Homo sapien
gagaagatgggactgatttctgtgc

SEQ ID NO: 5083834 - DNA, 25 bp, Homo sapien
gcctgacttcccgaggcagtgggag

SEQ ID NO: 5083835 - DNA, 25 bp, Homo sapien
gcccatgatgacctgagagctgact

SEQ ID NO: 5083836 - DNA, 25 bp, Homo sapien
tgagggtgcgcccatgatgacctga

SEQ ID NO: 5083837 - DNA, 25 bp, Homo sapien
gaaggagtgagggtgcgcccatgat

SEQ ID NO: 5083838 - DNA, 25 bp, Homo sapien
ggtgcgcccatgatgacctgagagc

SEQ ID NO: 5083839 - DNA, 25 bp, Homo sapien
gaatcaaagcttcatttgtggctcc

SEQ ID NO: 5083840 - DNA, 25 bp, Homo sapien
tgccaatgacaggatatgatataga

SEQ ID NO: 5083841 - DNA, 25 bp, Homo sapien
tccagagcgggtcaactggattgac

SEQ ID NO: 5083842 - DNA, 25 bp, Homo sapien
catatgttaattgtggaatcaaagc

SEQ ID NO: 5083843 - DNA, 25 bp, Homo sapien
ttagactttgttctctccggtgcct

SEQ ID NO: 5083844 - DNA, 25 bp, Homo sapien
tctttagactttgttctctccggtg

SEQ ID NO: 5083845 - DNA, 25 bp, Homo sapien
tttagactttgttctctccggtgcc

SEQ ID NO: 5083846 - DNA, 25 bp, Homo sapien
tcttctttagactttgttctctccg

SEQ ID NO: 5083847 - DNA, 25 bp, Homo sapien
taactcggtttgtgctgagtgcaga

SEQ ID NO: 5083848 - DNA, 25 bp, Homo sapien
ccttgcacagcattggcatcttgga

SEQ ID NO: 5083849 - DNA, 25 bp, Homo sapien
gaagaaagatatgttggcagtcagc

SEQ ID NO: 5083850 - DNA, 25 bp, Homo sapien
aggagctcctttaactcggtttgtg

SEQ ID NO: 5083851 - DNA, 25 bp, Homo sapien
aaaagcatagctgatttggtttgag

SEQ ID NO: 5083852 - DNA, 25 bp, Homo sapien
gtttgagtccttcttatgagctggg

SEQ ID NO: 5083853 - DNA, 25 bp, Homo sapien
tttggcaaaaggcagtgcgatttgg

SEQ ID NO: 5083854 - DNA, 25 bp, Homo sapien
tgaaaaggcacaccgtaaatgaaaa

SEQ ID NO: 5083855 - DNA, 25 bp, Homo sapien
aatacctaagaagagccaaggcttg

SEQ ID NO: 5083856 - DNA, 25 bp, Homo sapien
tagtccaggtcagctggtctgctgc

SEQ ID NO: 5083857 - DNA, 25 bp, Homo sapien
gataatacctaagaagagccaaggc

SEQ ID NO: 5083858 - DNA, 25 bp, Homo sapien
gactactgcctaagaaatagtccag

SEQ ID NO: 5083859 - DNA, 25 bp, Homo sapien
agtcactgtgactggcctcatttct

SEQ ID NO: 5083860 - DNA, 25 bp, Homo sapien
tgacttcaggtaatcttcccaccct

SEQ ID NO: 5083861 - DNA, 25 bp, Homo sapien
tgtgactggcctcatttctgatttt

SEQ ID NO: 5083862 - DNA, 25 bp, Homo sapien
tcctgtatcggcctcccaaataact

SEQ ID NO: 5083863 - DNA, 25 bp, Homo sapien
tggtaggaacaggatcaaaatcctc

SEQ ID NO: 5083864 - DNA, 25 bp, Homo sapien
ggcttgtagcctctcccgggattct

SEQ ID NO: 5083865 - DNA, 25 bp, Homo sapien
cttctctggaagcaatggtaggaac

SEQ ID NO: 5083866 - DNA, 25 bp, Homo sapien
tgcttctgtgcgtggtaacttggga

SEQ ID NO: 5083867 - DNA, 25 bp, Homo sapien
ctaaccaataccagcagcacgttca

SEQ ID NO: 5083868 - DNA, 25 bp, Homo sapien
agagcccaggctgctcacacgcatg

SEQ ID NO: 5083869 - DNA, 25 bp, Homo sapien
ccaggctgctcacacgcatggcctt

SEQ ID NO: 5083870 - DNA, 25 bp, Homo sapien
gaggctgccctctcgctccgtgtag

SEQ ID NO: 5083871 - DNA, 25 bp, Homo sapien
agtcggctgccgtttcgtctctcct

SEQ ID NO: 5083872 - DNA, 25 bp, Homo sapien
ggcagctgagctctcaagtcggctg

SEQ ID NO: 5083873 - DNA, 25 bp, Homo sapien
cctgggctcctttatgcagagcaat

SEQ ID NO: 5083874 - DNA, 25 bp, Homo sapien
gcatcagattttggctggcagctga

SEQ ID NO: 5083875 - DNA, 25 bp, Homo sapien
ggctgatgggtgtggcttttgcaat

SEQ ID NO: 5083876 - DNA, 25 bp, Homo sapien
gtgggctgatgggtgtggcttttgc

SEQ ID NO: 5083877 - DNA, 25 bp, Homo sapien
ctgtgggctgatgggtgtggctttt

SEQ ID NO: 5083878 - DNA, 25 bp, Homo sapien
gggctgatgggtgtggcttttgcaa

SEQ ID NO: 5083879 - DNA, 25 bp, Homo sapien
gaaagcagcttttacacagatatct

SEQ ID NO: 5083880 - DNA, 25 bp, Homo sapien
gcagcttttacacagatatctccag

SEQ ID NO: 5083881 - DNA, 25 bp, Homo sapien
aggaaagcagcttttacacagatat

SEQ ID NO: 5083882 - DNA, 25 bp, Homo sapien
aagcagcttttacacagatatctcc

SEQ ID NO: 5083883 - DNA, 25 bp, Homo sapien
tctctccacaatttgaagtatccca

SEQ ID NO: 5083884 - DNA, 25 bp, Homo sapien
tccacaatttgaagtatcccagaaa

SEQ ID NO: 5083885 - DNA, 25 bp, Homo sapien
aaagaactctctccacaatttgaag

SEQ ID NO: 5083886 - DNA, 25 bp, Homo sapien
acaggaaaagaactctctccacaat

SEQ ID NO: 5083887 - DNA, 25 bp, Homo sapien
cctctggaggaacgtgctggtatca

SEQ ID NO: 5083888 - DNA, 25 bp, Homo sapien
gcacagaagcacagttgagagacca

SEQ ID NO: 5083889 - DNA, 25 bp, Homo sapien
cattgtgagtttgctcagtgggcca

SEQ ID NO: 5083890 - DNA, 25 bp, Homo sapien
ctgaagagctttctcaatgctggct

SEQ ID NO: 5083891 - DNA, 25 bp, Homo sapien
gtgagtgaacgaatgcctattgagg

SEQ ID NO: 5083892 - DNA, 25 bp, Homo sapien
gaacgaatgcctattgaggttaatt

SEQ ID NO: 5083893 - DNA, 25 bp, Homo sapien
gagtgaacgaatgcctattgaggtt

SEQ ID NO: 5083894 - DNA, 25 bp, Homo sapien
gagtgagtgaacgaatgcctattga

SEQ ID NO: 5083895 - DNA, 25 bp, Homo sapien
taggtcgcccggctcggctaccggc

SEQ ID NO: 5083896 - DNA, 25 bp, Homo sapien
tagtaagccgcggccgcccgaacca

SEQ ID NO: 5083897 - DNA, 25 bp, Homo sapien
gaaccacttccccgtcacgttgaga

SEQ ID NO: 5083898 - DNA, 25 bp, Homo sapien
gtcacgttgagagccgcgccgctca

SEQ ID NO: 5083899 - DNA, 25 bp, Homo sapien
agtggccgacgctgagcctgacccg

SEQ ID NO: 5083900 - DNA, 25 bp, Homo sapien
acagagtggccgacgctgagcctga

SEQ ID NO: 5083901 - DNA, 25 bp, Homo sapien
gggcgggcacttcattcagcggacc

SEQ ID NO: 5083902 - DNA, 25 bp, Homo sapien
attcagcggaccgacagagtggccg

SEQ ID NO: 5083903 - DNA, 25 bp, Homo sapien
cgagactgccggcgaaaccgtccat

SEQ ID NO: 5083904 - DNA, 25 bp, Homo sapien
gaagacgcaggactccccagccgta

SEQ ID NO: 5083905 - DNA, 25 bp, Homo sapien
ccttcgcagaagacgcaggactccc

SEQ ID NO: 5083906 - DNA, 25 bp, Homo sapien
tcgcagaagacgcaggactccccag

SEQ ID NO: 5083907 - DNA, 25 bp, Homo sapien
agaagacgcaggactccccagccgt

SEQ ID NO: 5083908 - DNA, 25 bp, Homo sapien
agtggagggagccgtgagtgtacgg

SEQ ID NO: 5083909 - DNA, 25 bp, Homo sapien
ggggtgtgccagctatcggggggcc

SEQ ID NO: 5083910 - DNA, 25 bp, Homo sapien
cgagggccccgcactgaaaggggct

SEQ ID NO: 5083911 - DNA, 25 bp, Homo sapien
tgagtgtacggggaggggtgtgcca

SEQ ID NO: 5083912 - DNA, 25 bp, Homo sapien
gaaagtcgccttcaaatctaaagtg

SEQ ID NO: 5083913 - DNA, 25 bp, Homo sapien
gatgctccgatgcttctaggtctct

SEQ ID NO: 5083914 - DNA, 25 bp, Homo sapien
caccctgaaagagaggcgtgtatgt

SEQ ID NO: 5083915 - DNA, 25 bp, Homo sapien
cctctgttcgggtgaaggcgatccc

SEQ ID NO: 5083916 - DNA, 25 bp, Homo sapien
gggtgatagggcatccatttagcaa

SEQ ID NO: 5083917 - DNA, 25 bp, Homo sapien
tcatcacctcttgggctaggtaaag

SEQ ID NO: 5083918 - DNA, 25 bp, Homo sapien
caaagacaggtctatagaggccagg

SEQ ID NO: 5083919 - DNA, 25 bp, Homo sapien
aacaagctgcatgtaaggtagggac

SEQ ID NO: 5083920 - DNA, 25 bp, Homo sapien
tacaaaatagctatcaactaccagc

SEQ ID NO: 5083921 - DNA, 25 bp, Homo sapien
aaaataagaaacctgagtccataca

SEQ ID NO: 5083922 - DNA, 25 bp, Homo sapien
taaactgaaggtctgatgaagaact

SEQ ID NO: 5083923 - DNA, 25 bp, Homo sapien
tatcaactaccagctaaaacaagta

SEQ ID NO: 5083924 - DNA, 25 bp, Homo sapien
gaactttgggaagctgaagcaggca

SEQ ID NO: 5083925 - DNA, 25 bp, Homo sapien
ccagcctgggcaacatggcaaaacc

SEQ ID NO: 5083926 - DNA, 25 bp, Homo sapien
gatcacttgagcccagagttcaaga

SEQ ID NO: 5083927 - DNA, 25 bp, Homo sapien
tgggcaacatggcaaaaccccattt

SEQ ID NO: 5083928 - DNA, 25 bp, Homo sapien
caggaagtcaggatcataagtaatt

SEQ ID NO: 5083929 - DNA, 25 bp, Homo sapien
tgctacaacagagttaagaagctgc

SEQ ID NO: 5083930 - DNA, 25 bp, Homo sapien
gatttcccatcattcactgtatagc

SEQ ID NO: 5083931 - DNA, 25 bp, Homo sapien
gttgatcaagctgaaaaactaggag

SEQ ID NO: 5083932 - DNA, 25 bp, Homo sapien
tgaggatgttgttccagagctaccg

SEQ ID NO: 5083933 - DNA, 25 bp, Homo sapien
gaataaagccaacatatagagagaa

SEQ ID NO: 5083934 - DNA, 25 bp, Homo sapien
agagctaccggtagccatgaccact

SEQ ID NO: 5083935 - DNA, 25 bp, Homo sapien
taatgataatgtataacttaccctc

SEQ ID NO: 5083936 - DNA, 25 bp, Homo sapien
caggttcaaatgtttctcctgcctc

SEQ ID NO: 5083937 - DNA, 25 bp, Homo sapien
tctcggatcactgcaacctcgcctc

SEQ ID NO: 5083938 - DNA, 25 bp, Homo sapien
gttcaaatgtttctcctgcctcagc

SEQ ID NO: 5083939 - DNA, 25 bp, Homo sapien
ggagtttcaccgtgttggcctggct

SEQ ID NO: 5083940 - DNA, 25 bp, Homo sapien
tttccatccaggcttcctgtagtaa

SEQ ID NO: 5083941 - DNA, 25 bp, Homo sapien
aataaagctccttgaaaaatgagtc

SEQ ID NO: 5083942 - DNA, 25 bp, Homo sapien
tcctgtagtaaatatgtagtgttgc

SEQ ID NO: 5083943 - DNA, 25 bp, Homo sapien
tatgtagtgttgcaataaagctcct

SEQ ID NO: 5083944 - DNA, 25 bp, Homo sapien
tctatgggcctacaaaaacactgaa

SEQ ID NO: 5083945 - DNA, 25 bp, Homo sapien
ccagccactcgggaatctgagatgg

SEQ ID NO: 5083946 - DNA, 25 bp, Homo sapien
tactttgattcctagcatggctttt

SEQ ID NO: 5083947 - DNA, 25 bp, Homo sapien
acctcctgccaatagatgacttgtg

SEQ ID NO: 5083948 - DNA, 25 bp, Homo sapien
cccatggtcatcaaacccatcttgg

SEQ ID NO: 5083949 - DNA, 25 bp, Homo sapien
ccaccacaaaaacccatggtcatca

SEQ ID NO: 5083950 - DNA, 25 bp, Homo sapien
accaccacaaaaacccatggtcatc

SEQ ID NO: 5083951 - DNA, 25 bp, Homo sapien
atggtcatcaaacccatcttggtct

SEQ ID NO: 5083952 - DNA, 25 bp, Homo sapien
acattttgactgcccagcttttctg

SEQ ID NO: 5083953 - DNA, 25 bp, Homo sapien
gaacattttgactgcccagcttttc

SEQ ID NO: 5083954 - DNA, 25 bp, Homo sapien
aacattttgactgcccagcttttct

SEQ ID NO: 5083955 - DNA, 25 bp, Homo sapien
agaacattttgactgcccagctttt

SEQ ID NO: 5083956 - DNA, 25 bp, Homo sapien
caaggtgttccctctccagcctaaa

SEQ ID NO: 5083957 - DNA, 25 bp, Homo sapien
cacttcaccctttagcttcatggaa

SEQ ID NO: 5083958 - DNA, 25 bp, Homo sapien
cactcgctttattacccacaacaat

SEQ ID NO: 5083959 - DNA, 25 bp, Homo sapien
cctatcaaccttgtcttggcttcaa

SEQ ID NO: 5083960 - DNA, 25 bp, Homo sapien
tatttacccggccactgttcatctc

SEQ ID NO: 5083961 - DNA, 25 bp, Homo sapien
tgtgacgcttcggttccttctcttg

SEQ ID NO: 5083962 - DNA, 25 bp, Homo sapien
tatggcctcggatttctgtgacgct

SEQ ID NO: 5083963 - DNA, 25 bp, Homo sapien
tacagaacctcagtctaccttttgc

SEQ ID NO: 5083964 - DNA, 25 bp, Homo sapien
ctgatgtccgactttcagaaagtgt

SEQ ID NO: 5083965 - DNA, 25 bp, Homo sapien
gctgctatcacgaagtacgctctcg

SEQ ID NO: 5083966 - DNA, 25 bp, Homo sapien
caatactgtagcatactcatatcca

SEQ ID NO: 5083967 - DNA, 25 bp, Homo sapien
gaaattgaaagtgtgagctgctatc

SEQ ID NO: 5083968 - DNA, 25 bp, Homo sapien
tgtgtggaaactctgtatgatctac

SEQ ID NO: 5083969 - DNA, 25 bp, Homo sapien
ctgggaaaatcatgaaggcagtact

SEQ ID NO: 5083970 - DNA, 25 bp, Homo sapien
gatatgacaactggatgggaccctg

SEQ ID NO: 5083971 - DNA, 25 bp, Homo sapien
aatggtcatagccaagagcctacgg

SEQ ID NO: 5083972 - DNA, 25 bp, Homo sapien
gatctacgatgggtttaacctctaa

SEQ ID NO: 5083973 - DNA, 25 bp, Homo sapien
tctacgatgggtttaacctctaaga

SEQ ID NO: 5083974 - DNA, 25 bp, Homo sapien
cttcaggatctacgatgggtttaac

SEQ ID NO: 5083975 - DNA, 25 bp, Homo sapien
caggatctacgatgggtttaacctc

SEQ ID NO: 5083976 - DNA, 25 bp, Homo sapien
catatatattgcaatatgtcacaca

SEQ ID NO: 5083977 - DNA, 25 bp, Homo sapien
caaaattgagttgctggaccagaag

SEQ ID NO: 5083978 - DNA, 25 bp, Homo sapien
aaaattgagttgctggaccagaagc

SEQ ID NO: 5083979 - DNA, 25 bp, Homo sapien
aaccccacactgaagcgagacaagg

SEQ ID NO: 5083980 - DNA, 25 bp, Homo sapien
cccaccaccgatgttgtaagcaata

SEQ ID NO: 5083981 - DNA, 25 bp, Homo sapien
gagacaggtctgaactcacaggaat

SEQ ID NO: 5083982 - DNA, 25 bp, Homo sapien
ggagagatagtttacctggtcagaa

SEQ ID NO: 5083983 - DNA, 25 bp, Homo sapien
cagtgcccggcctagataattgttt

SEQ ID NO: 5083984 - DNA, 25 bp, Homo sapien
ttagagttcacaaaagtaaaagtca

SEQ ID NO: 5083985 - DNA, 25 bp, Homo sapien
gtaaaagtcaagcttaattatacaa

SEQ ID NO: 5083986 - DNA, 25 bp, Homo sapien
caatttctgatgtattattaagaca

SEQ ID NO: 5083987 - DNA, 25 bp, Homo sapien
gggattacaagcacctgcaagcaca

SEQ ID NO: 5083988 - DNA, 25 bp, Homo sapien
gattacaagcacctgcaagcacacc

SEQ ID NO: 5083989 - DNA, 25 bp, Homo sapien
ttacaagcacctgcaagcacacccg

SEQ ID NO: 5083990 - DNA, 25 bp, Homo sapien
cacccagactgagtgcggtggtgcg

SEQ ID NO: 5083991 - DNA, 25 bp, Homo sapien
tccaaaagttggcaatccagtatca

SEQ ID NO: 5083992 - DNA, 25 bp, Homo sapien
aaagttggcaatccagtatcatatc

SEQ ID NO: 5083993 - DNA, 25 bp, Homo sapien
atatccaaaagttggcaatccagta

SEQ ID NO: 5083994 - DNA, 25 bp, Homo sapien
caaaagttggcaatccagtatcata

SEQ ID NO: 5083995 - DNA, 25 bp, Homo sapien
ttttattacactgaatcacagttaa

SEQ ID NO: 5083996 - DNA, 25 bp, Homo sapien
aatgatagctattcattatgctttt

SEQ ID NO: 5083997 - DNA, 25 bp, Homo sapien
caatgatagctattcattatgcttt

SEQ ID NO: 5083998 - DNA, 25 bp, Homo sapien
tacaatgatagctattcattatgct

SEQ ID NO: 5083999 - DNA, 25 bp, Homo sapien
ttttctgagggctattaacattccc

SEQ ID NO: 5084000 - DNA, 25 bp, Homo sapien
taaactaagggatataactgttcag

SEQ ID NO: 5084001 - DNA, 25 bp, Homo sapien
tattatagagtaggagtataagcta

SEQ ID NO: 5084002 - DNA, 25 bp, Homo sapien
ctcaagcatttttgaactcattaag

SEQ ID NO: 5084003 - DNA, 25 bp, Homo sapien
ttgcaagacgcctcaaaacatcagc

SEQ ID NO: 5084004 - DNA, 25 bp, Homo sapien
gccaaagccgcctttagcacagtga

SEQ ID NO: 5084005 - DNA, 25 bp, Homo sapien
gagctgacaggcgatcttgaacatc

SEQ ID NO: 5084006 - DNA, 25 bp, Homo sapien
tgttgctgaactcgtgactcaagag

SEQ ID NO: 5084007 - DNA, 25 bp, Homo sapien
tatacaggacatgggaataactgct

SEQ ID NO: 5084008 - DNA, 25 bp, Homo sapien
tttctgtttgcaccacttccattgg

SEQ ID NO: 5084009 - DNA, 25 bp, Homo sapien
cagcactggtatgacttggttttct

SEQ ID NO: 5084010 - DNA, 25 bp, Homo sapien
tttcctgcaattgagacagcactgg

SEQ ID NO: 5084011 - DNA, 25 bp, Homo sapien
gtagctgatcacctatggtctctcc

SEQ ID NO: 5084012 - DNA, 25 bp, Homo sapien
ttaagattttgtagctgatcaccta

SEQ ID NO: 5084013 - DNA, 25 bp, Homo sapien
gattttgtagctgatcacctatggt

SEQ ID NO: 5084014 - DNA, 25 bp, Homo sapien
tccaaactctacatcgaataatttg

SEQ ID NO: 5084015 - DNA, 25 bp, Homo sapien
tcccagctactccgggtgctgcagc

SEQ ID NO: 5084016 - DNA, 25 bp, Homo sapien
atctcttgaacacgggaggtgcagg

SEQ ID NO: 5084017 - DNA, 25 bp, Homo sapien
ctcttgaacacgggaggtgcaggtt

SEQ ID NO: 5084018 - DNA, 25 bp, Homo sapien
cagctactccgggtgctgcagcagg

SEQ ID NO: 5084019 - DNA, 25 bp, Homo sapien
gagcccaggagttcaagaccagcct

SEQ ID NO: 5084020 - DNA, 25 bp, Homo sapien
tcacacctgtaatcccagtactttg

SEQ ID NO: 5084021 - DNA, 25 bp, Homo sapien
aatcacagagcccgggtgtggtggc

SEQ ID NO: 5084022 - DNA, 25 bp, Homo sapien
cgaggccaaggcaggaggattactt

SEQ ID NO: 5084023 - DNA, 25 bp, Homo sapien
aaatgagttatcaaaaaaattgctg

SEQ ID NO: 5084024 - DNA, 25 bp, Homo sapien
aaaatgagttatcaaaaaaattgct

SEQ ID NO: 5084025 - DNA, 25 bp, Homo sapien
atttagtgtgagtgacacaatttaa

SEQ ID NO: 5084026 - DNA, 25 bp, Homo sapien
ttaaatttagtgtgagtgacacaat

SEQ ID NO: 5084027 - DNA, 25 bp, Homo sapien
tcatacagctaatacaatttgcact

SEQ ID NO: 5084028 - DNA, 25 bp, Homo sapien
ttcaaaaccctaagtcatacagcta

SEQ ID NO: 5084029 - DNA, 25 bp, Homo sapien
aattcaaaaccctaagtcatacagc

SEQ ID NO: 5084030 - DNA, 25 bp, Homo sapien
aaaaatcaaacgatagaaaagtgat

SEQ ID NO: 5084031 - DNA, 25 bp, Homo sapien
ctggagtttgtctgtgtatttggag

SEQ ID NO: 5084032 - DNA, 25 bp, Homo sapien
gaaggtgatgctcgaatttgtggac

SEQ ID NO: 5084033 - DNA, 25 bp, Homo sapien
tttgatcattagaatgagattcctc

SEQ ID NO: 5084034 - DNA, 25 bp, Homo sapien
cttttggtgggagtagcattcttgc

SEQ ID NO: 5084035 - DNA, 25 bp, Homo sapien
ccagcatgcaggtttagattctcaa

SEQ ID NO: 5084036 - DNA, 25 bp, Homo sapien
taaacatgcatcgatcaagtgaagg

SEQ ID NO: 5084037 - DNA, 25 bp, Homo sapien
tccacaggagaccaggcagataaac

SEQ ID NO: 5084038 - DNA, 25 bp, Homo sapien
taattattacggacacagaagccct

SEQ ID NO: 5084039 - DNA, 25 bp, Homo sapien
aagaatgtggttattggcaatcctg

SEQ ID NO: 5084040 - DNA, 25 bp, Homo sapien
gaaggattagttgaaagactgcctg

SEQ ID NO: 5084041 - DNA, 25 bp, Homo sapien
aatttaggagggcaagcacatttcc

SEQ ID NO: 5084042 - DNA, 25 bp, Homo sapien
cttgcaacagtatatccaaagagca

SEQ ID NO: 5084043 - DNA, 25 bp, Homo sapien
tttattacggctatcatctgaattt

SEQ ID NO: 5084044 - DNA, 25 bp, Homo sapien
gaattttcccaagaattatgtgact

SEQ ID NO: 5084045 - DNA, 25 bp, Homo sapien
tattttcgacaatttattacggcta

SEQ ID NO: 5084046 - DNA, 25 bp, Homo sapien
tgttgaaggtattttcgacaattta

SEQ ID NO: 5084047 - DNA, 25 bp, Homo sapien
ccagacatacataactgtacatgca

SEQ ID NO: 5084048 - DNA, 25 bp, Homo sapien
cagacatacataactgtacatgcaa

SEQ ID NO: 5084049 - DNA, 25 bp, Homo sapien
aaccagacatacataactgtacatg

SEQ ID NO: 5084050 - DNA, 25 bp, Homo sapien
tataatgaagaaagtgcaatactta

SEQ ID NO: 5084051 - DNA, 25 bp, Homo sapien
gaagtataaattataatacagagtt

SEQ ID NO: 5084052 - DNA, 25 bp, Homo sapien
agtataaattataatacagagtttt

SEQ ID NO: 5084053 - DNA, 25 bp, Homo sapien
aagtataaattataatacagagttt

SEQ ID NO: 5084054 - DNA, 25 bp, Homo sapien
agaagtataaattataatacagagt

SEQ ID NO: 5084055 - DNA, 25 bp, Homo sapien
gatacaactttttgtagaagacttg

SEQ ID NO: 5084056 - DNA, 25 bp, Homo sapien
aaacaatgaatatcccacaagagca

SEQ ID NO: 5084057 - DNA, 25 bp, Homo sapien
gataaatctctggaagtgaaagtaa

SEQ ID NO: 5084058 - DNA, 25 bp, Homo sapien
aaatcacctcaagaaactgtaaaag

SEQ ID NO: 5084059 - DNA, 25 bp, Homo sapien
caagagcatctaaacagtgaaagca

SEQ ID NO: 5084060 - DNA, 25 bp, Homo sapien
cttggttgatgatgacatctttatg

SEQ ID NO: 5084061 - DNA, 25 bp, Homo sapien
ttggttgatgatgacatctttatgc

SEQ ID NO: 5084062 - DNA, 25 bp, Homo sapien
actacagtaacgcacttttctttga

SEQ ID NO: 5084063 - DNA, 25 bp, Homo sapien
gaactgataaagtgcactggatgaa

SEQ ID NO: 5084064 - DNA, 25 bp, Homo sapien
ttttctttgattactatgaactgat

SEQ ID NO: 5084065 - DNA, 25 bp, Homo sapien
ttttcctaaatgactacagtaacgc

SEQ ID NO: 5084066 - DNA, 25 bp, Homo sapien
tggctgtttttttcgcgagttgaca

SEQ ID NO: 5084067 - DNA, 25 bp, Homo sapien
ctgtttttttcgcgagttgacattt

SEQ ID NO: 5084068 - DNA, 25 bp, Homo sapien
ggctgtttttttcgcgagttgacat

SEQ ID NO: 5084069 - DNA, 25 bp, Homo sapien
ttggctgtttttttcgcgagttgac

SEQ ID NO: 5084070 - DNA, 25 bp, Homo sapien
aaattcacttagaaggcaaccaact

SEQ ID NO: 5084071 - DNA, 25 bp, Homo sapien
caaccaactgcgtagcttattctta

SEQ ID NO: 5084072 - DNA, 25 bp, Homo sapien
gattcatctagctcaaatcactgta

SEQ ID NO: 5084073 - DNA, 25 bp, Homo sapien
gtaaaatgtagctggattcatctag

SEQ ID NO: 5084074 - DNA, 25 bp, Homo sapien
taaatacgcattcgccaaaagtctg

SEQ ID NO: 5084075 - DNA, 25 bp, Homo sapien
aaggacgtgctttcattaagaacag

SEQ ID NO: 5084076 - DNA, 25 bp, Homo sapien
aaagctttaaccacgttgcagctgg

SEQ ID NO: 5084077 - DNA, 25 bp, Homo sapien
tttgcaggcaatctaaagagaatgt

SEQ ID NO: 5084078 - DNA, 25 bp, Homo sapien
cgtataagattagaacgttctctaa

SEQ ID NO: 5084079 - DNA, 25 bp, Homo sapien
gaagtcatatacttgatgtccagag

SEQ ID NO: 5084080 - DNA, 25 bp, Homo sapien
cacaataaatacgtataagattaga

SEQ ID NO: 5084081 - DNA, 25 bp, Homo sapien
cgttctctaatgaagtcatatactt

SEQ ID NO: 5084082 - DNA, 25 bp, Homo sapien
caacttgtctggcatgatatgaaaa

SEQ ID NO: 5084083 - DNA, 25 bp, Homo sapien
acatgggaaatgtctagcacttgcc

SEQ ID NO: 5084084 - DNA, 25 bp, Homo sapien
gcattagaaccagactgaaaatgtg

SEQ ID NO: 5084085 - DNA, 25 bp, Homo sapien
taaacgacctaaggagaagagtatg

SEQ ID NO: 5084086 - DNA, 25 bp, Homo sapien
cacaagacaaaagttaagtcatacg

SEQ ID NO: 5084087 - DNA, 25 bp, Homo sapien
taggaacaccttcctcagataccca

SEQ ID NO: 5084088 - DNA, 25 bp, Homo sapien
ggcatagtattcacatataacctgt

SEQ ID NO: 5084089 - DNA, 25 bp, Homo sapien
tatatagttgtcctgtatccacggg

SEQ ID NO: 5084090 - DNA, 25 bp, Homo sapien
gcagttccgttctgatgtcatcata

SEQ ID NO: 5084091 - DNA, 25 bp, Homo sapien
ggccgaccgcgcataaacattttaa

SEQ ID NO: 5084092 - DNA, 25 bp, Homo sapien
gaatgaacatggtaattggccgacc

SEQ ID NO: 5084093 - DNA, 25 bp, Homo sapien
tagttgtcaacatcggaaggaatga

SEQ ID NO: 5084094 - DNA, 25 bp, Homo sapien
taactgatttgttaactagagacaa

SEQ ID NO: 5084095 - DNA, 25 bp, Homo sapien
attttgacagagaatacgttaactg

SEQ ID NO: 5084096 - DNA, 25 bp, Homo sapien
gatttgttaactagagacaaagcaa

SEQ ID NO: 5084097 - DNA, 25 bp, Homo sapien
gacagagaatacgttaactgatttg

SEQ ID NO: 5084098 - DNA, 25 bp, Homo sapien
cacagtctgtatggcccaggtagtg

SEQ ID NO: 5084099 - DNA, 25 bp, Homo sapien
tacagtcctttcctcgataaccata

SEQ ID NO: 5084100 - DNA, 25 bp, Homo sapien
ggtaaacattagctctacagtcctt

SEQ ID NO: 5084101 - DNA, 25 bp, Homo sapien
cgctgagttctctcctcataattaa

SEQ ID NO: 5084102 - DNA, 25 bp, Homo sapien
gaaggactgtacgacatgagaaagc

SEQ ID NO: 5084103 - DNA, 25 bp, Homo sapien
tttgttgctgctgataccacaccac

SEQ ID NO: 5084104 - DNA, 25 bp, Homo sapien
aaagcagaagaggttccaatcatga

SEQ ID NO: 5084105 - DNA, 25 bp, Homo sapien
cagtcagtccttggatctaagtggg

SEQ ID NO: 5084106 - DNA, 25 bp, Homo sapien
ttccatctttatccacgccagctat

SEQ ID NO: 5084107 - DNA, 25 bp, Homo sapien
ccagttgcaatcctaattttgtcag

SEQ ID NO: 5084108 - DNA, 25 bp, Homo sapien
aattttgtcaggatgtatagcaagg

SEQ ID NO: 5084109 - DNA, 25 bp, Homo sapien
cacgccagctatctgtccagttgca

SEQ ID NO: 5084110 - DNA, 25 bp, Homo sapien
taaaaaattagccaggcatggtagt

SEQ ID NO: 5084111 - DNA, 25 bp, Homo sapien
gcatggtagtacgcgcctgtagtca

SEQ ID NO: 5084112 - DNA, 25 bp, Homo sapien
tgaaaacccatctctattaaaaata

SEQ ID NO: 5084113 - DNA, 25 bp, Homo sapien
cctggctaacaagagtgaaaaccca

SEQ ID NO: 5084114 - DNA, 25 bp, Homo sapien
cacaagacagcagagcaactggaca

SEQ ID NO: 5084115 - DNA, 25 bp, Homo sapien
gacaggtggatgcaaataaacacca

SEQ ID NO: 5084116 - DNA, 25 bp, Homo sapien
taatcctatgcactacaggtacact

SEQ ID NO: 5084117 - DNA, 25 bp, Homo sapien
aattactagatttagacatgcctcc

SEQ ID NO: 5084118 - DNA, 25 bp, Homo sapien
aagtgccaagtccaataatctgcag

SEQ ID NO: 5084119 - DNA, 25 bp, Homo sapien
cagtgtggatagagtaacagaatcc

SEQ ID NO: 5084120 - DNA, 25 bp, Homo sapien
aaaaatccaggcatcctactccacg

SEQ ID NO: 5084121 - DNA, 25 bp, Homo sapien
tactccacgctcaaaagtgccaagt

SEQ ID NO: 5084122 - DNA, 25 bp, Homo sapien
tcaggattatcacttcatggccaca

SEQ ID NO: 5084123 - DNA, 25 bp, Homo sapien
tatgttagcaatagctagcatctca

SEQ ID NO: 5084124 - DNA, 25 bp, Homo sapien
tgcatcctaactaaaccaaagtact

SEQ ID NO: 5084125 - DNA, 25 bp, Homo sapien
taggacttaggtcaaaatgctagcc

SEQ ID NO: 5084126 - DNA, 25 bp, Homo sapien
ttgaggctatcctagtcccttctgc

SEQ ID NO: 5084127 - DNA, 25 bp, Homo sapien
caaaatcctttaaactcatcgctct

SEQ ID NO: 5084128 - DNA, 25 bp, Homo sapien
tcatcgctctctgaaacataatgaa

SEQ ID NO: 5084129 - DNA, 25 bp, Homo sapien
tctagtcactcctattattcagaga

SEQ ID NO: 5084130 - DNA, 25 bp, Homo sapien
aagcatatgctcattggagtcatca

SEQ ID NO: 5084131 - DNA, 25 bp, Homo sapien
cagtaagcatatgctcattggagtc

SEQ ID NO: 5084132 - DNA, 25 bp, Homo sapien
taatacataaatgaacacctgaatc

SEQ ID NO: 5084133 - DNA, 25 bp, Homo sapien
gtaagcatatgctcattggagtcat

SEQ ID NO: 5084134 - DNA, 25 bp, Homo sapien
gaaatgcggagtcaatcactaaggg

SEQ ID NO: 5084135 - DNA, 25 bp, Homo sapien
taatgcagatatttgggacacggtg

SEQ ID NO: 5084136 - DNA, 25 bp, Homo sapien
gctggagataactgatacgggactc

SEQ ID NO: 5084137 - DNA, 25 bp, Homo sapien
gaaatcgccagtaggaggaaaacca

SEQ ID NO: 5084138 - DNA, 25 bp, Homo sapien
agagacagtcaacccgtaatccggc

SEQ ID NO: 5084139 - DNA, 25 bp, Homo sapien
ccacaagctcgggtcatctgggctg

SEQ ID NO: 5084140 - DNA, 25 bp, Homo sapien
tgtgacttaagcaaggatggagctc

SEQ ID NO: 5084141 - DNA, 25 bp, Homo sapien
tttttcatgagaggtcccacaagct

SEQ ID NO: 5084142 - DNA, 25 bp, Homo sapien
tgaggttgtgtacctttacatatgc

SEQ ID NO: 5084143 - DNA, 25 bp, Homo sapien
tgcatagtggtattgcacttgggtt

SEQ ID NO: 5084144 - DNA, 25 bp, Homo sapien
gcttattaatcacctggacaccctg

SEQ ID NO: 5084145 - DNA, 25 bp, Homo sapien
gacaccctgttttatgtagtgccgg

SEQ ID NO: 5084146 - DNA, 25 bp, Homo sapien
agaaaatatgagatttaccgcatgt

SEQ ID NO: 5084147 - DNA, 25 bp, Homo sapien
gatttaccgcatgtaattatggtat

SEQ ID NO: 5084148 - DNA, 25 bp, Homo sapien
ccgctccaggtccagaagaaaatat

SEQ ID NO: 5084149 - DNA, 25 bp, Homo sapien
tgagatttaccgcatgtaattatgg

SEQ ID NO: 5084150 - DNA, 25 bp, Homo sapien
ccatataagcatgactccacctgag

SEQ ID NO: 5084151 - DNA, 25 bp, Homo sapien
tacagtagttttgctccatataagc

SEQ ID NO: 5084152 - DNA, 25 bp, Homo sapien
taagcatgactccacctgagtctcc

SEQ ID NO: 5084153 - DNA, 25 bp, Homo sapien
tccccaagaatgctaaacactgcac

SEQ ID NO: 5084154 - DNA, 25 bp, Homo sapien
gtttgtgcatatgtagagaggttga

SEQ ID NO: 5084155 - DNA, 25 bp, Homo sapien
gagaggttgagccacaaatttttca

SEQ ID NO: 5084156 - DNA, 25 bp, Homo sapien
gcatatgtagagaggttgagccaca

SEQ ID NO: 5084157 - DNA, 25 bp, Homo sapien
ggttgagccacaaatttttcaaaga

SEQ ID NO: 5084158 - DNA, 25 bp, Homo sapien
tgtggcaaagtacaacacaggccat

SEQ ID NO: 5084159 - DNA, 25 bp, Homo sapien
ggccatttcatgtgcccagcaattt

SEQ ID NO: 5084160 - DNA, 25 bp, Homo sapien
cataatagggttagtcatgtggcaa

SEQ ID NO: 5084161 - DNA, 25 bp, Homo sapien
catttatttcactgcgctcaccaaa

SEQ ID NO: 5084162 - DNA, 25 bp, Homo sapien
tccctcctccagttaataacatccc

SEQ ID NO: 5084163 - DNA, 25 bp, Homo sapien
aataacatcccatttctcatctgac

SEQ ID NO: 5084164 - DNA, 25 bp, Homo sapien
tcatctgacaaagtgtgaacacact

SEQ ID NO: 5084165 - DNA, 25 bp, Homo sapien
cctcctccagttaataacatcccat

SEQ ID NO: 5084166 - DNA, 25 bp, Homo sapien
tcattaaatgttcctcgtaaaataa

SEQ ID NO: 5084167 - DNA, 25 bp, Homo sapien
taaagtttcgtgatgtgcctactaa

SEQ ID NO: 5084168 - DNA, 25 bp, Homo sapien
gtaaaataaagtttcgtgatgtgcc

SEQ ID NO: 5084169 - DNA, 25 bp, Homo sapien
tgtgcctactaaaaattgatctgcc

SEQ ID NO: 5084170 - DNA, 25 bp, Homo sapien
gatgtgtggcaagaccccaaagctc

SEQ ID NO: 5084171 - DNA, 25 bp, Homo sapien
tgtgtggcaagaccccaaagctcat

SEQ ID NO: 5084172 - DNA, 25 bp, Homo sapien
tgcctgtcctgagcacatgtcaaga

SEQ ID NO: 5084173 - DNA, 25 bp, Homo sapien
gagcaaatctttgaagggatgtgtg

SEQ ID NO: 5084174 - DNA, 25 bp, Homo sapien
agcctggtccattccagcctgtgtt

SEQ ID NO: 5084175 - DNA, 25 bp, Homo sapien
gttccattgagttccacaggcacac

SEQ ID NO: 5084176 - DNA, 25 bp, Homo sapien
ccagcctgtgttccattgagttcca

SEQ ID NO: 5084177 - DNA, 25 bp, Homo sapien
gtccattccagcctgtgttccattg

SEQ ID NO: 5084178 - DNA, 25 bp, Homo sapien
tgaatccaactgcaatgccacccga

SEQ ID NO: 5084179 - DNA, 25 bp, Homo sapien
tactactgaagctgatggacaaatt

SEQ ID NO: 5084180 - DNA, 25 bp, Homo sapien
cagtagagcctgttagtgagcagca

SEQ ID NO: 5084181 - DNA, 25 bp, Homo sapien
gacaaattgagcttttacgctgcta

SEQ ID NO: 5084182 - DNA, 25 bp, Homo sapien
ctgcctgagtgcgttcctatggcca

SEQ ID NO: 5084183 - DNA, 25 bp, Homo sapien
gtgcgttcctatggccaccactgtg

SEQ ID NO: 5084184 - DNA, 25 bp, Homo sapien
cctgagtgcgttcctatggccacca

SEQ ID NO: 5084185 - DNA, 25 bp, Homo sapien
gagtgcgttcctatggccaccactg

SEQ ID NO: 5084186 - DNA, 25 bp, Homo sapien
tcccatacacgctaaaatgtaggct

SEQ ID NO: 5084187 - DNA, 25 bp, Homo sapien
catgtagcatgtcgcaaaaggcagg

SEQ ID NO: 5084188 - DNA, 25 bp, Homo sapien
gcgtgggctactgcaactcgcctta

SEQ ID NO: 5084189 - DNA, 25 bp, Homo sapien
tccttcccctgcataaaagatgagg

SEQ ID NO: 5084190 - DNA, 25 bp, Homo sapien
tagattctaatcaatccccaaatgg

SEQ ID NO: 5084191 - DNA, 25 bp, Homo sapien
aggcttgaggctaaagaatcgcttg

SEQ ID NO: 5084192 - DNA, 25 bp, Homo sapien
caggcctagggtcagtgatagtaat

SEQ ID NO: 5084193 - DNA, 25 bp, Homo sapien
gaaagttccccaaggatcaacagaa

SEQ ID NO: 5084194 - DNA, 25 bp, Homo sapien
tactcttttatatcccagagagctg

SEQ ID NO: 5084195 - DNA, 25 bp, Homo sapien
ggatagctgcataaccctgtgaact

SEQ ID NO: 5084196 - DNA, 25 bp, Homo sapien
cagaaagtgggtcagttgcctagag

SEQ ID NO: 5084197 - DNA, 25 bp, Homo sapien
gaaattagactgtgaggatagctgc

SEQ ID NO: 5084198 - DNA, 25 bp, Homo sapien
gctctcagagaacatgtggccaagg

SEQ ID NO: 5084199 - DNA, 25 bp, Homo sapien
gtgcattcaaggtagaattgaagac

SEQ ID NO: 5084200 - DNA, 25 bp, Homo sapien
gtatggtttaacgtggcttagtgca

SEQ ID NO: 5084201 - DNA, 25 bp, Homo sapien
cgtggcttagtgcattcaaggtaga

SEQ ID NO: 5084202 - DNA, 25 bp, Homo sapien
gctttgtcataacgctggtgtgcat

SEQ ID NO: 5084203 - DNA, 25 bp, Homo sapien
tttgtcataacgctggtgtgcatgg

SEQ ID NO: 5084204 - DNA, 25 bp, Homo sapien
ttgctttgtcataacgctggtgtgc

SEQ ID NO: 5084205 - DNA, 25 bp, Homo sapien
tgtcataacgctggtgtgcatggag

SEQ ID NO: 5084206 - DNA, 25 bp, Homo sapien
gaaactagatctctggtttctgcat

SEQ ID NO: 5084207 - DNA, 25 bp, Homo sapien
cacagagagctgttcattcccgtct

SEQ ID NO: 5084208 - DNA, 25 bp, Homo sapien
ctgtgtggatagaaactagatctct

SEQ ID NO: 5084209 - DNA, 25 bp, Homo sapien
tattgagtagcgcatcacagagagc

SEQ ID NO: 5084210 - DNA, 25 bp, Homo sapien
ttaaacttcagcagatcttttgcag

SEQ ID NO: 5084211 - DNA, 25 bp, Homo sapien
gcagatcttttgcagtttctggcag

SEQ ID NO: 5084212 - DNA, 25 bp, Homo sapien
ttaatttgatgttgggggaaacaga

SEQ ID NO: 5084213 - DNA, 25 bp, Homo sapien
ttctggcagcagaatttaatttgat

SEQ ID NO: 5084214 - DNA, 25 bp, Homo sapien
tcagagactacatagaggtaaataa

SEQ ID NO: 5084215 - DNA, 25 bp, Homo sapien
ttttcagagactacatagaggtaaa

SEQ ID NO: 5084216 - DNA, 25 bp, Homo sapien
agtgcaccttccatatctgctatat

SEQ ID NO: 5084217 - DNA, 25 bp, Homo sapien
gcaccttccatatctgctatatttt

SEQ ID NO: 5084218 - DNA, 25 bp, Homo sapien
acaacttgttctacttcactactta

SEQ ID NO: 5084219 - DNA, 25 bp, Homo sapien
caacttgttctacttcactacttac

SEQ ID NO: 5084220 - DNA, 25 bp, Homo sapien
taagcagcagagacagtgttgaccc

SEQ ID NO: 5084221 - DNA, 25 bp, Homo sapien
tgggctaagtgctacagggctacct

SEQ ID NO: 5084222 - DNA, 25 bp, Homo sapien
ctgactataagaccagccggtggaa

SEQ ID NO: 5084223 - DNA, 25 bp, Homo sapien
tactgtacattggaaagtcggctct

SEQ ID NO: 5084224 - DNA, 25 bp, Homo sapien
tcatcacatctaaatctcatggcaa

SEQ ID NO: 5084225 - DNA, 25 bp, Homo sapien
catggcaaccttaatgaggatgtcc

SEQ ID NO: 5084226 - DNA, 25 bp, Homo sapien
gatggttaggatgcatagataggtt

SEQ ID NO: 5084227 - DNA, 25 bp, Homo sapien
tgtccacttagtaggtgagatggtt

SEQ ID NO: 5084228 - DNA, 25 bp, Homo sapien
acagcacccggcctggtactacaca

SEQ ID NO: 5084229 - DNA, 25 bp, Homo sapien
gctattgtgaatgcattttttctcc

SEQ ID NO: 5084230 - DNA, 25 bp, Homo sapien
tgcgtttgctggtttgaggaaaagt

SEQ ID NO: 5084231 - DNA, 25 bp, Homo sapien
cacatttttgatatgcgtttgctgg

SEQ ID NO: 5084232 - DNA, 25 bp, Homo sapien
gttgctatgtttattctcaaagcat

SEQ ID NO: 5084233 - DNA, 25 bp, Homo sapien
tggtcatggcaaagtacaggcctct

SEQ ID NO: 5084234 - DNA, 25 bp, Homo sapien
tcatagtgcacatgagcctggctct

SEQ ID NO: 5084235 - DNA, 25 bp, Homo sapien
gaagtctaccgatgtgtccccaaac

SEQ ID NO: 5084236 - DNA, 25 bp, Homo sapien
cacgttgggaatcacttgctaggca

SEQ ID NO: 5084237 - DNA, 25 bp, Homo sapien
ggagaaactttctggcctatctaga

SEQ ID NO: 5084238 - DNA, 25 bp, Homo sapien
gtcacaccctctaaaactgagcagg

SEQ ID NO: 5084239 - DNA, 25 bp, Homo sapien
tctggccttatttcacgtcactggt

SEQ ID NO: 5084240 - DNA, 25 bp, Homo sapien
gtatcttacaggacattgcaacaca

SEQ ID NO: 5084241 - DNA, 25 bp, Homo sapien
agtacaatatttcatagtctcccga

SEQ ID NO: 5084242 - DNA, 25 bp, Homo sapien
tcccgagttagacattatatacttg

SEQ ID NO: 5084243 - DNA, 25 bp, Homo sapien
tatttcatagtctcccgagttagac

SEQ ID NO: 5084244 - DNA, 25 bp, Homo sapien
tatatacttgttgtctggggaccag

SEQ ID NO: 5084245 - DNA, 25 bp, Homo sapien
tgtacaaatgtatttgaaagtgcat

SEQ ID NO: 5084246 - DNA, 25 bp, Homo sapien
agtgcttgtgtacaaatgtatttga

SEQ ID NO: 5084247 - DNA, 25 bp, Homo sapien
tgtgtacaaatgtatttgaaagtgc

SEQ ID NO: 5084248 - DNA, 25 bp, Homo sapien
cttgtgtacaaatgtatttgaaagt

SEQ ID NO: 5084249 - DNA, 25 bp, Homo sapien
aatttagaaacaggaagtataatca

SEQ ID NO: 5084250 - DNA, 25 bp, Homo sapien
atttagaaacaggaagtataatcat

SEQ ID NO: 5084251 - DNA, 25 bp, Homo sapien
tagtttgcagccatttggaatgtcc

SEQ ID NO: 5084252 - DNA, 25 bp, Homo sapien
agtttgcagccatttggaatgtccc

SEQ ID NO: 5084253 - DNA, 25 bp, Homo sapien
ctgattagtttgcagccatttggaa

SEQ ID NO: 5084254 - DNA, 25 bp, Homo sapien
ttagtttgcagccatttggaatgtc

SEQ ID NO: 5084255 - DNA, 25 bp, Homo sapien
cctagcacacaggtatatgtcgtcc

SEQ ID NO: 5084256 - DNA, 25 bp, Homo sapien
aatcaatgtccttacaatccgatcg

SEQ ID NO: 5084257 - DNA, 25 bp, Homo sapien
tcaatgtccttacaatccgatcgat

SEQ ID NO: 5084258 - DNA, 25 bp, Homo sapien
ggtatatgtcgtccaatcaatgtcc

SEQ ID NO: 5084259 - DNA, 25 bp, Homo sapien
tctggatggagggaatcagttactt

SEQ ID NO: 5084260 - DNA, 25 bp, Homo sapien
caccaagtcttcgaagtggagtcta

SEQ ID NO: 5084261 - DNA, 25 bp, Homo sapien
taaagactcaatggtactcaatggt

SEQ ID NO: 5084262 - DNA, 25 bp, Homo sapien
ctcaatggtaaccagcaggtggtgc

SEQ ID NO: 5084263 - DNA, 25 bp, Homo sapien
tgatatggaaacacagggatgcaga

SEQ ID NO: 5084264 - DNA, 25 bp, Homo sapien
gatatggaaacacagggatgcagaa

SEQ ID NO: 5084265 - DNA, 25 bp, Homo sapien
tttacaaaagtcatcggcaacagct

SEQ ID NO: 5084266 - DNA, 25 bp, Homo sapien
tctattgtgggatcgcaccagtgca

SEQ ID NO: 5084267 - DNA, 25 bp, Homo sapien
gcagggatactgaaacagatggact

SEQ ID NO: 5084268 - DNA, 25 bp, Homo sapien
acagctatcacctttctattgtggg

SEQ ID NO: 5084269 - DNA, 25 bp, Homo sapien
gtgactgtcattgtgagtaaaactg

SEQ ID NO: 5084270 - DNA, 25 bp, Homo sapien
tgggcactgtacttgtgactgggag

SEQ ID NO: 5084271 - DNA, 25 bp, Homo sapien
caccagttgatatcaggtgactgtc

SEQ ID NO: 5084272 - DNA, 25 bp, Homo sapien
cttttccaccagttgatatcaggtg

SEQ ID NO: 5084273 - DNA, 25 bp, Homo sapien
gggctttggttagagtagtatccgc

SEQ ID NO: 5084274 - DNA, 25 bp, Homo sapien
gagtattagattggatgacactttc

SEQ ID NO: 5084275 - DNA, 25 bp, Homo sapien
tagtatccgctacagtctcattctg

SEQ ID NO: 5084276 - DNA, 25 bp, Homo sapien
cacttggctccacagtttgttccag

SEQ ID NO: 5084277 - DNA, 25 bp, Homo sapien
taggacgagggcgaagggtcttgct

SEQ ID NO: 5084278 - DNA, 25 bp, Homo sapien
cgttgcatggctcttcataaagagg

SEQ ID NO: 5084279 - DNA, 25 bp, Homo sapien
tgctccttgcttatctcgttgcatg

SEQ ID NO: 5084280 - DNA, 25 bp, Homo sapien
tatctcgttgcatggctcttcataa

SEQ ID NO: 5084281 - DNA, 25 bp, Homo sapien
cattgcccaaaagagtaggatagcc

SEQ ID NO: 5084282 - DNA, 25 bp, Homo sapien
ctggcgcgctccgataagtatgtac

SEQ ID NO: 5084283 - DNA, 25 bp, Homo sapien
tggaatggcacaatcacgtaaacgc

SEQ ID NO: 5084284 - DNA, 25 bp, Homo sapien
ccactggtagtgtaagaaaacggca

SEQ ID NO: 5084285 - DNA, 25 bp, Homo sapien
tctcattgtacatggcaaccccaaa

SEQ ID NO: 5084286 - DNA, 25 bp, Homo sapien
actgagagctgtattccccaggtac

SEQ ID NO: 5084287 - DNA, 25 bp, Homo sapien
aataaactccctgctgatcactgag

SEQ ID NO: 5084288 - DNA, 25 bp, Homo sapien
ctgcctgttcatgtcagtatatttc

SEQ ID NO: 5084289 - DNA, 25 bp, Homo sapien
cacttccaaccattatcacagattt

SEQ ID NO: 5084290 - DNA, 25 bp, Homo sapien
ccatgagacaggaatgcatgatagc

SEQ ID NO: 5084291 - DNA, 25 bp, Homo sapien
gatagcaatggctcaacatcttcac

SEQ ID NO: 5084292 - DNA, 25 bp, Homo sapien
taaatagctggaacgcttcctgcgt

SEQ ID NO: 5084293 - DNA, 25 bp, Homo sapien
tcacaaaggctaacactgcgaggca

SEQ ID NO: 5084294 - DNA, 25 bp, Homo sapien
gcagcctagtcggatgggtaacgaa

SEQ ID NO: 5084295 - DNA, 25 bp, Homo sapien
gaatgccatggcctactgagttcaa

SEQ ID NO: 5084296 - DNA, 25 bp, Homo sapien
cagtcaccagggacgagtaaggcaa

SEQ ID NO: 5084297 - DNA, 25 bp, Homo sapien
gtttgttttggtgcccactagccat

SEQ ID NO: 5084298 - DNA, 25 bp, Homo sapien
tgggtttgttttggtgcccactagc

SEQ ID NO: 5084299 - DNA, 25 bp, Homo sapien
ttgtgaagaaaaatcacattgttga

SEQ ID NO: 5084300 - DNA, 25 bp, Homo sapien
aagaaaaatcacattgttgagtggg

SEQ ID NO: 5084301 - DNA, 25 bp, Homo sapien
tgggcccacagtaggtactcctcca

SEQ ID NO: 5084302 - DNA, 25 bp, Homo sapien
tgctcttcagccttcgtggtcctaa

SEQ ID NO: 5084303 - DNA, 25 bp, Homo sapien
catttcgccatagaagtagttttgg

SEQ ID NO: 5084304 - DNA, 25 bp, Homo sapien
taatacaacacctcaatgtgcccaa

SEQ ID NO: 5084305 - DNA, 25 bp, Homo sapien
tgtagtggaggaagtacaaattttg

SEQ ID NO: 5084306 - DNA, 25 bp, Homo sapien
agtgtagtggaggaagtacaaattt

SEQ ID NO: 5084307 - DNA, 25 bp, Homo sapien
gtagtggaggaagtacaaattttga

SEQ ID NO: 5084308 - DNA, 25 bp, Homo sapien
ctagtgtagtggaggaagtacaaat

SEQ ID NO: 5084309 - DNA, 25 bp, Homo sapien
aagtaagtctgtgaatctaccctgg

SEQ ID NO: 5084310 - DNA, 25 bp, Homo sapien
tggtgatacagatgtgcggcactgc

SEQ ID NO: 5084311 - DNA, 25 bp, Homo sapien
ggcactgctgtgtcgtggactcacc

SEQ ID NO: 5084312 - DNA, 25 bp, Homo sapien
ggagactccagtcgtgggcatcttg

SEQ ID NO: 5084313 - DNA, 25 bp, Homo sapien
cctgaggccctttcttcgggcactc

SEQ ID NO: 5084314 - DNA, 25 bp, Homo sapien
cagtcaagcatgagatgggatgacc

SEQ ID NO: 5084315 - DNA, 25 bp, Homo sapien
aggcacaagggcttggttactgtga

SEQ ID NO: 5084316 - DNA, 25 bp, Homo sapien
tactgtgatcagtcaagcatgagat

SEQ ID NO: 5084317 - DNA, 25 bp, Homo sapien
tcaaaaggcttcgtggtagtaaggc

SEQ ID NO: 5084318 - DNA, 25 bp, Homo sapien
ttcgtggtagtaaggctcattttct

SEQ ID NO: 5084319 - DNA, 25 bp, Homo sapien
gcagagcgggcgctagaaagccagt

SEQ ID NO: 5084320 - DNA, 25 bp, Homo sapien
aaagccagtgggcaccgcttggtcc

SEQ ID NO: 5084321 - DNA, 25 bp, Homo sapien
tcatggccacgccatgctaggggtt

SEQ ID NO: 5084322 - DNA, 25 bp, Homo sapien
gccacgccatgctaggggttctccc

SEQ ID NO: 5084323 - DNA, 25 bp, Homo sapien
atggccacgccatgctaggggttct

SEQ ID NO: 5084324 - DNA, 25 bp, Homo sapien
tggccacgccatgctaggggttctc

SEQ ID NO: 5084325 - DNA, 25 bp, Homo sapien
agaaacacggaacggctgtctctgc

SEQ ID NO: 5084326 - DNA, 25 bp, Homo sapien
aagcaagacgaggagcggctccctg

SEQ ID NO: 5084327 - DNA, 25 bp, Homo sapien
ggcatccgaggaggagtaccaacga

SEQ ID NO: 5084328 - DNA, 25 bp, Homo sapien
gtaccaacgacacatcaaccggaag

SEQ ID NO: 5084329 - DNA, 25 bp, Homo sapien
gagatggtacctctgccgcacagat

SEQ ID NO: 5084330 - DNA, 25 bp, Homo sapien
tgatgcagggacagctaatctctcg

SEQ ID NO: 5084331 - DNA, 25 bp, Homo sapien
gaacggcagctttattaacggagcc

SEQ ID NO: 5084332 - DNA, 25 bp, Homo sapien
caaacacgggtgactgtgatgcagg

SEQ ID NO: 5084333 - DNA, 25 bp, Homo sapien
gtcaggacctgttctttgagctgaa

SEQ ID NO: 5084334 - DNA, 25 bp, Homo sapien
gagcactgctggctagattgaacca

SEQ ID NO: 5084335 - DNA, 25 bp, Homo sapien
tgaaccacatgacttgcaaaaagca

SEQ ID NO: 5084336 - DNA, 25 bp, Homo sapien
catcactctgagtcaggacctgttc

SEQ ID NO: 5084337 - DNA, 25 bp, Homo sapien
tgtttgattagagccgtccagagac

SEQ ID NO: 5084338 - DNA, 25 bp, Homo sapien
tagaatcagttcatacctgggaggg

SEQ ID NO: 5084339 - DNA, 25 bp, Homo sapien
gtccagagactagacttgctcccag

SEQ ID NO: 5084340 - DNA, 25 bp, Homo sapien
gaagtgcctcgccactagagagggt

SEQ ID NO: 5084341 - DNA, 25 bp, Homo sapien
ccaagcagagagctcaagtccctcg

SEQ ID NO: 5084342 - DNA, 25 bp, Homo sapien
caagcagagagctcaagtccctcgt

SEQ ID NO: 5084343 - DNA, 25 bp, Homo sapien
gccaagcagagagctcaagtccctc

SEQ ID NO: 5084344 - DNA, 25 bp, Homo sapien
caaggaataagtgggtgcagaaatt

SEQ ID NO: 5084345 - DNA, 25 bp, Homo sapien
tgtgtattagccagattggaatctt

SEQ ID NO: 5084346 - DNA, 25 bp, Homo sapien
tcagggccaaagcacaggtctctac

SEQ ID NO: 5084347 - DNA, 25 bp, Homo sapien
aatggtggcgttgcctcccctttgg

SEQ ID NO: 5084348 - DNA, 25 bp, Homo sapien
gcacaggtctctacactgcctaatg

SEQ ID NO: 5084349 - DNA, 25 bp, Homo sapien
ggctcccctggcttgtctgacattg

SEQ ID NO: 5084350 - DNA, 25 bp, Homo sapien
cttgtctgacattgaggtctgttca

SEQ ID NO: 5084351 - DNA, 25 bp, Homo sapien
cctggcttgtctgacattgaggtct

SEQ ID NO: 5084352 - DNA, 25 bp, Homo sapien
gcaggctcccctggcttgtctgaca

SEQ ID NO: 5084353 - DNA, 25 bp, Homo sapien
tggctttgataacactggccagctt

SEQ ID NO: 5084354 - DNA, 25 bp, Homo sapien
gataacactggccagctttcgttta

SEQ ID NO: 5084355 - DNA, 25 bp, Homo sapien
ggccagctttcgtttatttatctgc

SEQ ID NO: 5084356 - DNA, 25 bp, Homo sapien
tgggtaaggtgaaggttggtgtggc

SEQ ID NO: 5084357 - DNA, 25 bp, Homo sapien
ttacacttgtccttgtaaagcagtg

SEQ ID NO: 5084358 - DNA, 25 bp, Homo sapien
tttcagggtctgactagctttcgct

SEQ ID NO: 5084359 - DNA, 25 bp, Homo sapien
taaagcagtgcccacttatccctgg

SEQ ID NO: 5084360 - DNA, 25 bp, Homo sapien
ttctcggccccttcatccagtgtga

SEQ ID NO: 5084361 - DNA, 25 bp, Homo sapien
gatttggaaggaaattgttgtccag

SEQ ID NO: 5084362 - DNA, 25 bp, Homo sapien
tgggtgaggtgtcctccactgggcc

SEQ ID NO: 5084363 - DNA, 25 bp, Homo sapien
tcctccactgggccagtcagctgtt

SEQ ID NO: 5084364 - DNA, 25 bp, Homo sapien
agagaatgttattgtcccatttggg

SEQ ID NO: 5084365 - DNA, 25 bp, Homo sapien
agaacctgagcgaagctgggcctca

SEQ ID NO: 5084366 - DNA, 25 bp, Homo sapien
gatttttcagaacctgagcgaagct

SEQ ID NO: 5084367 - DNA, 25 bp, Homo sapien
tttttcagaacctgagcgaagctgg

SEQ ID NO: 5084368 - DNA, 25 bp, Homo sapien
tttcagaacctgagcgaagctgggc

SEQ ID NO: 5084369 - DNA, 25 bp, Homo sapien
aacctcttctgattgcaagctccag

SEQ ID NO: 5084370 - DNA, 25 bp, Homo sapien
cctcaggaatagtctctagtgactc

SEQ ID NO: 5084371 - DNA, 25 bp, Homo sapien
ctaaatgtattggtctattgggctg

SEQ ID NO: 5084372 - DNA, 25 bp, Homo sapien
tgtattggtctattgggctgacttc

SEQ ID NO: 5084373 - DNA, 25 bp, Homo sapien
gaagttgtgtctgccggatttctcc

SEQ ID NO: 5084374 - DNA, 25 bp, Homo sapien
tatgtcaggtggcacttgataccag

SEQ ID NO: 5084375 - DNA, 25 bp, Homo sapien
tagtgacctatttgaagagtccagg

SEQ ID NO: 5084376 - DNA, 25 bp, Homo sapien
tatccagaatagtcagtccccagtg

SEQ ID NO: 5084377 - DNA, 25 bp, Homo sapien
aggagtttgagttagtcacctcggg

SEQ ID NO: 5084378 - DNA, 25 bp, Homo sapien
gaacacaggcttgttaatgtcagtc

SEQ ID NO: 5084379 - DNA, 25 bp, Homo sapien
tgttaaattaatgtagcctgcctct

SEQ ID NO: 5084380 - DNA, 25 bp, Homo sapien
tccaccgtgggaacagagaatacct

SEQ ID NO: 5084381 - DNA, 25 bp, Homo sapien
cctccgattccacagtgtatgatta

SEQ ID NO: 5084382 - DNA, 25 bp, Homo sapien
acaccaactaaactgacctccgatt

SEQ ID NO: 5084383 - DNA, 25 bp, Homo sapien
gaagcaccacctatcatatttgcca

SEQ ID NO: 5084384 - DNA, 25 bp, Homo sapien
cacagtgtatgattatgctgggaaa

SEQ ID NO: 5084385 - DNA, 25 bp, Homo sapien
ttcctggaaacatacgatgaagatg

SEQ ID NO: 5084386 - DNA, 25 bp, Homo sapien
ggttctgtaacaattgcacaggtag

SEQ ID NO: 5084387 - DNA, 25 bp, Homo sapien
gaggtaccatttagtatccaccaga

SEQ ID NO: 5084388 - DNA, 25 bp, Homo sapien
gaatgcctagaatcaaaaagacaga

SEQ ID NO: 5084389 - DNA, 25 bp, Homo sapien
tgtttaaagaatagtccggatgaga

SEQ ID NO: 5084390 - DNA, 25 bp, Homo sapien
ggtctcactgaaaccgaattggtaa

SEQ ID NO: 5084391 - DNA, 25 bp, Homo sapien
gaaggaatagtcagcagtgttgcac

SEQ ID NO: 5084392 - DNA, 25 bp, Homo sapien
cagcccataggtggtaatttgtagg

SEQ ID NO: 5084393 - DNA, 25 bp, Homo sapien
gctataaaggcgtttagagaaacca

SEQ ID NO: 5084394 - DNA, 25 bp, Homo sapien
gaagacatctggctttcggcctcct

SEQ ID NO: 5084395 - DNA, 25 bp, Homo sapien
cacttgagctcgagattagagagcg

SEQ ID NO: 5084396 - DNA, 25 bp, Homo sapien
ccttgtcgtttgtcatctgccagag

SEQ ID NO: 5084397 - DNA, 25 bp, Homo sapien
ggtctggctcactgcaggggtcaag

SEQ ID NO: 5084398 - DNA, 25 bp, Homo sapien
tggtctggctcactgcaggggtcaa

SEQ ID NO: 5084399 - DNA, 25 bp, Homo sapien
ggcctggcgtggaagtttggtctgg

SEQ ID NO: 5084400 - DNA, 25 bp, Homo sapien
gcctggcgtggaagtttggtctggc

SEQ ID NO: 5084401 - DNA, 25 bp, Homo sapien
tagcccgcaggtacgagtggcgcct

SEQ ID NO: 5084402 - DNA, 25 bp, Homo sapien
agctcggacatgagaagtggcggcc

SEQ ID NO: 5084403 - DNA, 25 bp, Homo sapien
ctatagcccgcaggtacgagtggcg

SEQ ID NO: 5084404 - DNA, 25 bp, Homo sapien
tggcgcctggccagctcggacatga

SEQ ID NO: 5084405 - DNA, 25 bp, Homo sapien
taagttaggcgatcttcgggcagcc

SEQ ID NO: 5084406 - DNA, 25 bp, Homo sapien
tacaagtttagtggcttcacgcaga

SEQ ID NO: 5084407 - DNA, 25 bp, Homo sapien
tccttgcgctgagtctcgggaccac

SEQ ID NO: 5084408 - DNA, 25 bp, Homo sapien
aagccggactctgggcgtcatgtac

SEQ ID NO: 5084409 - DNA, 25 bp, Homo sapien
gggtactaaacagccttcagcaggt

SEQ ID NO: 5084410 - DNA, 25 bp, Homo sapien
ggcttctggataagaggtgctctag

SEQ ID NO: 5084411 - DNA, 25 bp, Homo sapien
tggccgacaagtctatactcctggg

SEQ ID NO: 5084412 - DNA, 25 bp, Homo sapien
taaagttcggtaaagcaagagacgc

SEQ ID NO: 5084413 - DNA, 25 bp, Homo sapien
cgctaagaagtgctgcagtgtgcat

SEQ ID NO: 5084414 - DNA, 25 bp, Homo sapien
ggactggagatccaatggactccca

SEQ ID NO: 5084415 - DNA, 25 bp, Homo sapien
agttgttgttcatatattcgagcgc

SEQ ID NO: 5084416 - DNA, 25 bp, Homo sapien
ttaaagtaaacccacacagctgctc

SEQ ID NO: 5084417 - DNA, 25 bp, Homo sapien
tcaaaggcagcgctggcaacattca

SEQ ID NO: 5084418 - DNA, 25 bp, Homo sapien
ttggctcggcctgctgtcacagcag

SEQ ID NO: 5084419 - DNA, 25 bp, Homo sapien
ggtgtcctcccatgagtctctgagg

SEQ ID NO: 5084420 - DNA, 25 bp, Homo sapien
tcttccatcggcgtctcaaaggcag

SEQ ID NO: 5084421 - DNA, 25 bp, Homo sapien
cttctttctcctgaaatcttaggca

SEQ ID NO: 5084422 - DNA, 25 bp, Homo sapien
ttctttctcctgaaatcttaggcac

SEQ ID NO: 5084423 - DNA, 25 bp, Homo sapien
gaactgttgcagacatcggcactct

SEQ ID NO: 5084424 - DNA, 25 bp, Homo sapien
cattagcgaataagaactgttgcag

SEQ ID NO: 5084425 - DNA, 25 bp, Homo sapien
ttttgcattagcgaataagaactgt

SEQ ID NO: 5084426 - DNA, 25 bp, Homo sapien
tcggcactctttgctagatttctta

SEQ ID NO: 5084427 - DNA, 25 bp, Homo sapien
tatgaatttgttctgcattgacaag

SEQ ID NO: 5084428 - DNA, 25 bp, Homo sapien
cattgacaagtatgagcttggataa

SEQ ID NO: 5084429 - DNA, 25 bp, Homo sapien
acaagtatgagcttggataaacatc

SEQ ID NO: 5084430 - DNA, 25 bp, Homo sapien
tgcattgacaagtatgagcttggat

SEQ ID NO: 5084431 - DNA, 25 bp, Homo sapien
tttcatgggattcccagggctcttc

SEQ ID NO: 5084432 - DNA, 25 bp, Homo sapien
cttagatttttcatgggattcccag

SEQ ID NO: 5084433 - DNA, 25 bp, Homo sapien
agggctcttcctgggacactgtcat

SEQ ID NO: 5084434 - DNA, 25 bp, Homo sapien
ctgcttagatttttcatgggattcc

SEQ ID NO: 5084435 - DNA, 25 bp, Homo sapien
tggtacttgagtttctaaggcagga

SEQ ID NO: 5084436 - DNA, 25 bp, Homo sapien
ctcaaagagtggaaggttgctggta

SEQ ID NO: 5084437 - DNA, 25 bp, Homo sapien
gcaggagtcagaccctggtccatgg

SEQ ID NO: 5084438 - DNA, 25 bp, Homo sapien
aaggcaggagtcagaccctggtcca

SEQ ID NO: 5084439 - DNA, 25 bp, Homo sapien
gtttccttccaattgggcttcatct

SEQ ID NO: 5084440 - DNA, 25 bp, Homo sapien
cagatgggttttattgtgagtggtt

SEQ ID NO: 5084441 - DNA, 25 bp, Homo sapien
tttattgtgagtggttgcttgtgtt

SEQ ID NO: 5084442 - DNA, 25 bp, Homo sapien
tccaattgggcttcatctctagctt

SEQ ID NO: 5084443 - DNA, 25 bp, Homo sapien
aacagcagctggaatcagcagtgcc

SEQ ID NO: 5084444 - DNA, 25 bp, Homo sapien
tggggagttgtttgtagcagcagca

SEQ ID NO: 5084445 - DNA, 25 bp, Homo sapien
tcagagtccaggatccggctttggg

SEQ ID NO: 5084446 - DNA, 25 bp, Homo sapien
tttttttgctgccaaactcagagtc

SEQ ID NO: 5084447 - DNA, 25 bp, Homo sapien
catgtccacaaaggtagtgactaga

SEQ ID NO: 5084448 - DNA, 25 bp, Homo sapien
gctgccaccacaatcttctcatgtc

SEQ ID NO: 5084449 - DNA, 25 bp, Homo sapien
gactagacactggaatattgagtcc

SEQ ID NO: 5084450 - DNA, 25 bp, Homo sapien
tagtcagttcaacctggcttgccag

SEQ ID NO: 5084451 - DNA, 25 bp, Homo sapien
gaggagcctgggaagtatccaaatg

SEQ ID NO: 5084452 - DNA, 25 bp, Homo sapien
tggaggaagtaacctaggcttggtc

SEQ ID NO: 5084453 - DNA, 25 bp, Homo sapien
gagaggttctgtctagagtggtcca

SEQ ID NO: 5084454 - DNA, 25 bp, Homo sapien
tggaaatatcaagccgactgttggc

SEQ ID NO: 5084455 - DNA, 25 bp, Homo sapien
gataccttcctggatagctgtggag

SEQ ID NO: 5084456 - DNA, 25 bp, Homo sapien
tctgagggcggagaagtagatacct

SEQ ID NO: 5084457 - DNA, 25 bp, Homo sapien
ccctgtcgatggacttaactgtgaa

SEQ ID NO: 5084458 - DNA, 25 bp, Homo sapien
agaggcccttgtcctgattgtcgca

SEQ ID NO: 5084459 - DNA, 25 bp, Homo sapien
agttttatacttgcaagaagttgca

SEQ ID NO: 5084460 - DNA, 25 bp, Homo sapien
gagttctgttttacccttcatctgg

SEQ ID NO: 5084461 - DNA, 25 bp, Homo sapien
aatagttttatacttgcaagaagtt

SEQ ID NO: 5084462 - DNA, 25 bp, Homo sapien
agagagttctgttttacccttcatc

SEQ ID NO: 5084463 - DNA, 25 bp, Homo sapien
tgccttttgttttcttcacttgcct

SEQ ID NO: 5084464 - DNA, 25 bp, Homo sapien
ggtgccttttgttttcttcacttgc

SEQ ID NO: 5084465 - DNA, 25 bp, Homo sapien
tttgttttcttcacttgcctttcca

SEQ ID NO: 5084466 - DNA, 25 bp, Homo sapien
ttgttttcttcacttgcctttccat

SEQ ID NO: 5084467 - DNA, 25 bp, Homo sapien
aaatcaaaggaatagtcagagtagc

SEQ ID NO: 5084468 - DNA, 25 bp, Homo sapien
gaaaatcaaaggaatagtcagagta

SEQ ID NO: 5084469 - DNA, 25 bp, Homo sapien
aatcaaaggaatagtcagagtagcc

SEQ ID NO: 5084470 - DNA, 25 bp, Homo sapien
tcaaaggaatagtcagagtagccat

SEQ ID NO: 5084471 - DNA, 25 bp, Homo sapien
ccacgttagccagggtggtcttaat

SEQ ID NO: 5084472 - DNA, 25 bp, Homo sapien
gactacagacgcatgctgccacgcc

SEQ ID NO: 5084473 - DNA, 25 bp, Homo sapien
tgtgatctgcccacctcggcctccc

SEQ ID NO: 5084474 - DNA, 25 bp, Homo sapien
ctcctgaccttgtgatctgcccacc

SEQ ID NO: 5084475 - DNA, 25 bp, Homo sapien
tggtgaatctgacgctctatcagaa

SEQ ID NO: 5084476 - DNA, 25 bp, Homo sapien
caaatggtgaatctgacgctctatc

SEQ ID NO: 5084477 - DNA, 25 bp, Homo sapien
aatggtgaatctgacgctctatcag

SEQ ID NO: 5084478 - DNA, 25 bp, Homo sapien
aaatggtgaatctgacgctctatca

SEQ ID NO: 5084479 - DNA, 25 bp, Homo sapien
taagggcagcatctcgagagggtcc

SEQ ID NO: 5084480 - DNA, 25 bp, Homo sapien
cgagtccacactgggctttgaacca

SEQ ID NO: 5084481 - DNA, 25 bp, Homo sapien
aaaagccgtggctgggatgccttcc

SEQ ID NO: 5084482 - DNA, 25 bp, Homo sapien
tggaaaaagctctccaaacgccgtc

SEQ ID NO: 5084483 - DNA, 25 bp, Homo sapien
gcagacgaagaccaagagaaaggct

SEQ ID NO: 5084484 - DNA, 25 bp, Homo sapien
tttgaaaaggaggatgcagacgaag

SEQ ID NO: 5084485 - DNA, 25 bp, Homo sapien
tgcgcgggggaaatcaagatatttt

SEQ ID NO: 5084486 - DNA, 25 bp, Homo sapien
gaaaggctgtttttgccggtgacaa

SEQ ID NO: 5084487 - DNA, 25 bp, Homo sapien
aacccgctttctgggcacggacaag

SEQ ID NO: 5084488 - DNA, 25 bp, Homo sapien
aataatccctgccaagtggaacccg

SEQ ID NO: 5084489 - DNA, 25 bp, Homo sapien
gaatgaattgctggtagcagtttaa

SEQ ID NO: 5084490 - DNA, 25 bp, Homo sapien
gctgggctgccggtgtcgggtgtca

SEQ ID NO: 5084491 - DNA, 25 bp, Homo sapien
ctttaaccagccaggttaccctgtg

SEQ ID NO: 5084492 - DNA, 25 bp, Homo sapien
tgtggtcagatgaccgcatctcacc

SEQ ID NO: 5084493 - DNA, 25 bp, Homo sapien
gttttgcatctaacacggttcgcct

SEQ ID NO: 5084494 - DNA, 25 bp, Homo sapien
tagagggcaatgaaaaactcttccc

SEQ ID NO: 5084495 - DNA, 25 bp, Homo sapien
aggactccgtttggcgacctctagc

SEQ ID NO: 5084496 - DNA, 25 bp, Homo sapien
tttcactaggaatccacttaagaac

SEQ ID NO: 5084497 - DNA, 25 bp, Homo sapien
ttggcgacctctagcgggcaccgga

SEQ ID NO: 5084498 - DNA, 25 bp, Homo sapien
aagaaccagcgcaaaaggactccgt

SEQ ID NO: 5084499 - DNA, 25 bp, Homo sapien
gattttacttaaaagacagcactca

SEQ ID NO: 5084500 - DNA, 25 bp, Homo sapien
ttaagataaattatccaagtctggg

SEQ ID NO: 5084501 - DNA, 25 bp, Homo sapien
caagtctggggataaacaactcaca

SEQ ID NO: 5084502 - DNA, 25 bp, Homo sapien
tcacatttagtgctcttaagataaa

SEQ ID NO: 5084503 - DNA, 25 bp, Homo sapien
cattcctgggttgcgaaatgacctt

SEQ ID NO: 5084504 - DNA, 25 bp, Homo sapien
taccatcccgagtctaggagagaat

SEQ ID NO: 5084505 - DNA, 25 bp, Homo sapien
tgctgcagttgagatccccattgtt

SEQ ID NO: 5084506 - DNA, 25 bp, Homo sapien
gcatgaaaatatacctaggaggcac

SEQ ID NO: 5084507 - DNA, 25 bp, Homo sapien
cattcattcattgtctcaggtccaa

SEQ ID NO: 5084508 - DNA, 25 bp, Homo sapien
ctactgcttgaaatatgggattcta

SEQ ID NO: 5084509 - DNA, 25 bp, Homo sapien
tagataacaagccaatgacagctcc

SEQ ID NO: 5084510 - DNA, 25 bp, Homo sapien
tagaaatccatgcaacaggccaggt

SEQ ID NO: 5084511 - DNA, 25 bp, Homo sapien
acatggtatttctgggtagtctcct

SEQ ID NO: 5084512 - DNA, 25 bp, Homo sapien
tgacaggtcaacacttacccaaggg

SEQ ID NO: 5084513 - DNA, 25 bp, Homo sapien
gatataccatctgaccaacttctag

SEQ ID NO: 5084514 - DNA, 25 bp, Homo sapien
caggatcctttcagagtgacaggtc

SEQ ID NO: 5084515 - DNA, 25 bp, Homo sapien
cacattgtatcgttatttgcctgca

SEQ ID NO: 5084516 - DNA, 25 bp, Homo sapien
tgtaaagctctagcaataagatccc

SEQ ID NO: 5084517 - DNA, 25 bp, Homo sapien
tgtgacaagtgtctcattctgccac

SEQ ID NO: 5084518 - DNA, 25 bp, Homo sapien
cacctctgtaaagctctagcaataa

SEQ ID NO: 5084519 - DNA, 25 bp, Homo sapien
gatgagctcagattcacttgtatta

SEQ ID NO: 5084520 - DNA, 25 bp, Homo sapien
agtctgctctaaatttgctgatgag

SEQ ID NO: 5084521 - DNA, 25 bp, Homo sapien
ttttaagacaagcatcttcatagtc

SEQ ID NO: 5084522 - DNA, 25 bp, Homo sapien
tcatagtctgctctaaatttgctga

SEQ ID NO: 5084523 - DNA, 25 bp, Homo sapien
ggaatgcagcggcactgtgtcggct

SEQ ID NO: 5084524 - DNA, 25 bp, Homo sapien
tggaatgcagcggcactgtgtcggc

SEQ ID NO: 5084525 - DNA, 25 bp, Homo sapien
gaatgcagcggcactgtgtcggctc

SEQ ID NO: 5084526 - DNA, 25 bp, Homo sapien
gagaaacaagaagacttgataggag

SEQ ID NO: 5084527 - DNA, 25 bp, Homo sapien
gtgcagagtatgaaccctcaggaag

SEQ ID NO: 5084528 - DNA, 25 bp, Homo sapien
agagaaacaagaagacttgatagga

SEQ ID NO: 5084529 - DNA, 25 bp, Homo sapien
tgctgtgcagagtatgaaccctcag

SEQ ID NO: 5084530 - DNA, 25 bp, Homo sapien
taggcaagcgccagtctcaatgcaa

SEQ ID NO: 5084531 - DNA, 25 bp, Homo sapien
tcttggatgcaaataagtgcaggca

SEQ ID NO: 5084532 - DNA, 25 bp, Homo sapien
cctgtggctgccctagtaggcaagc

SEQ ID NO: 5084533 - DNA, 25 bp, Homo sapien
cagggtgccttcctcgcggtgagat

SEQ ID NO: 5084534 - DNA, 25 bp, Homo sapien
tcagcctcagccgcgaccgccgctg

SEQ ID NO: 5084535 - DNA, 25 bp, Homo sapien
ctcagcctcagccgcgaccgccgct

SEQ ID NO: 5084536 - DNA, 25 bp, Homo sapien
tcgctgctgcctcgccacggggggg

SEQ ID NO: 5084537 - DNA, 25 bp, Homo sapien
ctgctgcctcgccacgggggggaag

SEQ ID NO: 5084538 - DNA, 25 bp, Homo sapien
ctccgacccggtacatgttggccgc

SEQ ID NO: 5084539 - DNA, 25 bp, Homo sapien
cgacccggtacatgttggccgccat

SEQ ID NO: 5084540 - DNA, 25 bp, Homo sapien
ccgacccggtacatgttggccgcca

SEQ ID NO: 5084541 - DNA, 25 bp, Homo sapien
tccgacccggtacatgttggccgcc

SEQ ID NO: 5084542 - DNA, 25 bp, Homo sapien
cagagcaaacgtccaggcagagctc

SEQ ID NO: 5084543 - DNA, 25 bp, Homo sapien
aaacgtccaggcagagctcaactcc

SEQ ID NO: 5084544 - DNA, 25 bp, Homo sapien
agcaaacgtccaggcagagctcaac

SEQ ID NO: 5084545 - DNA, 25 bp, Homo sapien
cagctcccacgaagccccattcgtg

SEQ ID NO: 5084546 - DNA, 25 bp, Homo sapien
ggaggagggcgtcgtgagtagggag

SEQ ID NO: 5084547 - DNA, 25 bp, Homo sapien
ggagggcgtcgtgagtagggagaaa

SEQ ID NO: 5084548 - DNA, 25 bp, Homo sapien
gggaggagggcgtcgtgagtaggga

SEQ ID NO: 5084549 - DNA, 25 bp, Homo sapien
gaggagggcgtcgtgagtagggaga

SEQ ID NO: 5084550 - DNA, 25 bp, Homo sapien
taatgtcttgtgattaagaaattgc

SEQ ID NO: 5084551 - DNA, 25 bp, Homo sapien
tccatttaatgtcttgtgattaaga

SEQ ID NO: 5084552 - DNA, 25 bp, Homo sapien
catttaatgtcttgtgattaagaaa

SEQ ID NO: 5084553 - DNA, 25 bp, Homo sapien
tttaatgtcttgtgattaagaaatt

SEQ ID NO: 5084554 - DNA, 25 bp, Homo sapien
ctgtaattaaaggaagtacagaact

SEQ ID NO: 5084555 - DNA, 25 bp, Homo sapien
gttcttctatccttcttattaggta

SEQ ID NO: 5084556 - DNA, 25 bp, Homo sapien
tatccttcttattaggtatgggttg

SEQ ID NO: 5084557 - DNA, 25 bp, Homo sapien
cttctatccttcttattaggtatgg

SEQ ID NO: 5084558 - DNA, 25 bp, Homo sapien
ccttcttattaggtatgggttgctg

SEQ ID NO: 5084559 - DNA, 25 bp, Homo sapien
cctctacaaacacaccctctccagc

SEQ ID NO: 5084560 - DNA, 25 bp, Homo sapien
acaccctctccagcattcttctgaa

SEQ ID NO: 5084561 - DNA, 25 bp, Homo sapien
cctctccagcattcttctgaagcat

SEQ ID NO: 5084562 - DNA, 25 bp, Homo sapien
ccatattcctcttcccctctacaaa

SEQ ID NO: 5084563 - DNA, 25 bp, Homo sapien
tatcacgtcgtctataaaagcatac

SEQ ID NO: 5084564 - DNA, 25 bp, Homo sapien
tgtgttggaaatatcacgtcgtcta

SEQ ID NO: 5084565 - DNA, 25 bp, Homo sapien
tagcatgcttatctgcgagcattat

SEQ ID NO: 5084566 - DNA, 25 bp, Homo sapien
gcgagcattataagtgtgttggaaa

SEQ ID NO: 5084567 - DNA, 25 bp, Homo sapien
ttactgaactcaacttacaatgttt

SEQ ID NO: 5084568 - DNA, 25 bp, Homo sapien
tactgaactcaacttacaatgtttt

SEQ ID NO: 5084569 - DNA, 25 bp, Homo sapien
gttactgaactcaacttacaatgtt

SEQ ID NO: 5084570 - DNA, 25 bp, Homo sapien
actgaactcaacttacaatgttttt

SEQ ID NO: 5084571 - DNA, 25 bp, Homo sapien
cactgcccctggcctaaattttctt

SEQ ID NO: 5084572 - DNA, 25 bp, Homo sapien
tggagtttcactcctgttgtccggg

SEQ ID NO: 5084573 - DNA, 25 bp, Homo sapien
agtttcactcctgttgtccgggctg

SEQ ID NO: 5084574 - DNA, 25 bp, Homo sapien
ccactgcccctggcctaaattttct

SEQ ID NO: 5084575 - DNA, 25 bp, Homo sapien
tacctcaaggcagcggtttcagtga

SEQ ID NO: 5084576 - DNA, 25 bp, Homo sapien
tcaaggcagcggtttcagtgagctg

SEQ ID NO: 5084577 - DNA, 25 bp, Homo sapien
ctacctcaaggcagcggtttcagtg

SEQ ID NO: 5084578 - DNA, 25 bp, Homo sapien
cctcaaggcagcggtttcagtgagc

SEQ ID NO: 5084579 - DNA, 25 bp, Homo sapien
tgtgttgcgggcagagattcatact

SEQ ID NO: 5084580 - DNA, 25 bp, Homo sapien
cctatgtttcaactgatgtttctgc

SEQ ID NO: 5084581 - DNA, 25 bp, Homo sapien
tctgcttatcggtcaagtcagcctc

SEQ ID NO: 5084582 - DNA, 25 bp, Homo sapien
tactggcgtgacaaaaagagttccc

SEQ ID NO: 5084583 - DNA, 25 bp, Homo sapien
ggaccattatgaccagcagaggtgg

SEQ ID NO: 5084584 - DNA, 25 bp, Homo sapien
tccttaccctggtcacaagctgctg

SEQ ID NO: 5084585 - DNA, 25 bp, Homo sapien
gaaagtctacaaacctcagctgggc

SEQ ID NO: 5084586 - DNA, 25 bp, Homo sapien
cttgaagctttcctgaccgagggta

SEQ ID NO: 5084587 - DNA, 25 bp, Homo sapien
atctttatcacatacttcctgccat

SEQ ID NO: 5084588 - DNA, 25 bp, Homo sapien
ttatcacatacttcctgccatggaa

SEQ ID NO: 5084589 - DNA, 25 bp, Homo sapien
attatttctgacaagatttggagac

SEQ ID NO: 5084590 - DNA, 25 bp, Homo sapien
ttatttctgacaagatttggagaca

SEQ ID NO: 5084591 - DNA, 25 bp, Homo sapien
taaatagcaggccatagcagaaagc

SEQ ID NO: 5084592 - DNA, 25 bp, Homo sapien
tgctggagctcatgaccaatctggg

SEQ ID NO: 5084593 - DNA, 25 bp, Homo sapien
gactattcccatattacccggccta

SEQ ID NO: 5084594 - DNA, 25 bp, Homo sapien
tggtggtataactgtggctcacagc

SEQ ID NO: 5084595 - DNA, 25 bp, Homo sapien
catgtgggctggttagcacagctcc

SEQ ID NO: 5084596 - DNA, 25 bp, Homo sapien
taattgtgaggagttgtgttgccca

SEQ ID NO: 5084597 - DNA, 25 bp, Homo sapien
tataatgagtacaacagcccgagca

SEQ ID NO: 5084598 - DNA, 25 bp, Homo sapien
taaaatgagaaaactcggctctgcc

SEQ ID NO: 5084599 - DNA, 25 bp, Homo sapien
caatcctgctgagattttatttgga

SEQ ID NO: 5084600 - DNA, 25 bp, Homo sapien
ctgactaagatacaaaaagtggaac

SEQ ID NO: 5084601 - DNA, 25 bp, Homo sapien
tttggaactacattgaatcactggg

SEQ ID NO: 5084602 - DNA, 25 bp, Homo sapien
gagtttcctaactgacctggcctca

SEQ ID NO: 5084603 - DNA, 25 bp, Homo sapien
tcaactgaaacagtgatagtggaga

SEQ ID NO: 5084604 - DNA, 25 bp, Homo sapien
ggctagtcaactgaaacagtgatag

SEQ ID NO: 5084605 - DNA, 25 bp, Homo sapien
tagtcaactgaaacagtgatagtgg

SEQ ID NO: 5084606 - DNA, 25 bp, Homo sapien
actgaaacagtgatagtggagaaga

SEQ ID NO: 5084607 - DNA, 25 bp, Homo sapien
agatatgacaatactgattctgtct

SEQ ID NO: 5084608 - DNA, 25 bp, Homo sapien
gatatgacaatactgattctgtctc

SEQ ID NO: 5084609 - DNA, 25 bp, Homo sapien
aagatatgacaatactgattctgtc

SEQ ID NO: 5084610 - DNA, 25 bp, Homo sapien
accactagagattatctgaaccaga

SEQ ID NO: 5084611 - DNA, 25 bp, Homo sapien
gctgaattccgtataaccactagag

SEQ ID NO: 5084612 - DNA, 25 bp, Homo sapien
tataaccactagagattatctgaac

SEQ ID NO: 5084613 - DNA, 25 bp, Homo sapien
gtcctttgctgaattccgtataacc

SEQ ID NO: 5084614 - DNA, 25 bp, Homo sapien
tgttttcaatgaggggtcatagacc

SEQ ID NO: 5084615 - DNA, 25 bp, Homo sapien
caatgaggggtcatagaccaatgag

SEQ ID NO: 5084616 - DNA, 25 bp, Homo sapien
agaccaatgagtagaagaaggtatc

SEQ ID NO: 5084617 - DNA, 25 bp, Homo sapien
tttcaatgaggggtcatagaccaat

SEQ ID NO: 5084618 - DNA, 25 bp, Homo sapien
aaagaggcgtggcttttagcctatc

SEQ ID NO: 5084619 - DNA, 25 bp, Homo sapien
tatcttggcttctgacacgccttcc

SEQ ID NO: 5084620 - DNA, 25 bp, Homo sapien
tagttacctctaagatcactgatca

SEQ ID NO: 5084621 - DNA, 25 bp, Homo sapien
catatgggtacggttcgtggcccca

SEQ ID NO: 5084622 - DNA, 25 bp, Homo sapien
tgtcctttgaagcttctagctatga

SEQ ID NO: 5084623 - DNA, 25 bp, Homo sapien
catcagtgaccttagctagttttgg

SEQ ID NO: 5084624 - DNA, 25 bp, Homo sapien
tagttttggataacgtgctgcagct

SEQ ID NO: 5084625 - DNA, 25 bp, Homo sapien
tagtcactaatcagagagtcaggct

SEQ ID NO: 5084626 - DNA, 25 bp, Homo sapien
gcatctagaacggagaattctttcc

SEQ ID NO: 5084627 - DNA, 25 bp, Homo sapien
gaaggttttcgattgactactcaga

SEQ ID NO: 5084628 - DNA, 25 bp, Homo sapien
cgtgctcagccagtagacttctttc

SEQ ID NO: 5084629 - DNA, 25 bp, Homo sapien
ccaagttttaccacaagattgcagc

SEQ ID NO: 5084630 - DNA, 25 bp, Homo sapien
tgctcatcgcaacgatataatgtat

SEQ ID NO: 5084631 - DNA, 25 bp, Homo sapien
aatcatttccccaaggttactcaat

SEQ ID NO: 5084632 - DNA, 25 bp, Homo sapien
aaacatagtatagtcaggattaccc

SEQ ID NO: 5084633 - DNA, 25 bp, Homo sapien
actatcattccctgtttaaagagaa

SEQ ID NO: 5084634 - DNA, 25 bp, Homo sapien
taaaaactggtcaatctgtcgatcc

SEQ ID NO: 5084635 - DNA, 25 bp, Homo sapien
ccaattttgattgttccctctcatc

SEQ ID NO: 5084636 - DNA, 25 bp, Homo sapien
caatctgtcgatccgtaagtgggct

SEQ ID NO: 5084637 - DNA, 25 bp, Homo sapien
tgggctatttggatcccaaacttta

SEQ ID NO: 5084638 - DNA, 25 bp, Homo sapien
tgcggtgagcgaattccaggtgcac

SEQ ID NO: 5084639 - DNA, 25 bp, Homo sapien
aagccagccaggtagccaggttgaa

SEQ ID NO: 5084640 - DNA, 25 bp, Homo sapien
taggaagcagcataacgtattaagc

SEQ ID NO: 5084641 - DNA, 25 bp, Homo sapien
tgcttagcaacaggccttacccaca

SEQ ID NO: 5084642 - DNA, 25 bp, Homo sapien
taagatataataattgacaagccaa

SEQ ID NO: 5084643 - DNA, 25 bp, Homo sapien
cacaataaggaagaattaagtatct

SEQ ID NO: 5084644 - DNA, 25 bp, Homo sapien
gacaagccaatttactataaacagg

SEQ ID NO: 5084645 - DNA, 25 bp, Homo sapien
tataaacaggtcgttatcatgaaat

SEQ ID NO: 5084646 - DNA, 25 bp, Homo sapien
cagggctctggcgaatgtcccaaca

SEQ ID NO: 5084647 - DNA, 25 bp, Homo sapien
gaactgctgcaatccagggctctgg

SEQ ID NO: 5084648 - DNA, 25 bp, Homo sapien
ggctctggcgaatgtcccaacagca

SEQ ID NO: 5084649 - DNA, 25 bp, Homo sapien
agaactgctgcaatccagggctctg

SEQ ID NO: 5084650 - DNA, 25 bp, Homo sapien
cagcagcactcatatgcaaactagg

SEQ ID NO: 5084651 - DNA, 25 bp, Homo sapien
gcagcactcatatgcaaactaggct

SEQ ID NO: 5084652 - DNA, 25 bp, Homo sapien
cactcatatgcaaactaggctgcct

SEQ ID NO: 5084653 - DNA, 25 bp, Homo sapien
ctcatatgcaaactaggctgcctca

SEQ ID NO: 5084654 - DNA, 25 bp, Homo sapien
gctgtgaaccaagagcccacacagg

SEQ ID NO: 5084655 - DNA, 25 bp, Homo sapien
acacaggccctctctacctcaggca

SEQ ID NO: 5084656 - DNA, 25 bp, Homo sapien
cagcccagctgccacgagaactctc

SEQ ID NO: 5084657 - DNA, 25 bp, Homo sapien
ggccctctctacctcaggcaagtca

SEQ ID NO: 5084658 - DNA, 25 bp, Homo sapien
actttggcaggtctaaggcttcgat

SEQ ID NO: 5084659 - DNA, 25 bp, Homo sapien
gctccctcacaatgctcatgacatt

SEQ ID NO: 5084660 - DNA, 25 bp, Homo sapien
ttcttcaagccaggggagtgcagac

SEQ ID NO: 5084661 - DNA, 25 bp, Homo sapien
tgctcatgacattctgttcttcaag

SEQ ID NO: 5084662 - DNA, 25 bp, Homo sapien
taactatgtggggctatgagagcat

SEQ ID NO: 5084663 - DNA, 25 bp, Homo sapien
aactatgtggggctatgagagcatc

SEQ ID NO: 5084664 - DNA, 25 bp, Homo sapien
actatgtggggctatgagagcatca

SEQ ID NO: 5084665 - DNA, 25 bp, Homo sapien
tctatggggccttaagagccagaag

SEQ ID NO: 5084666 - DNA, 25 bp, Homo sapien
tttttccgaggctggaaggtcgcag

SEQ ID NO: 5084667 - DNA, 25 bp, Homo sapien
ggcagcctttttccgaggctggaag

SEQ ID NO: 5084668 - DNA, 25 bp, Homo sapien
tcagcggcagcctttttccgaggct

SEQ ID NO: 5084669 - DNA, 25 bp, Homo sapien
ccaattatcctagacaaagttgcta

SEQ ID NO: 5084670 - DNA, 25 bp, Homo sapien
taagaaattataaccacaagccttc

SEQ ID NO: 5084671 - DNA, 25 bp, Homo sapien
gccttccactaactcatacttgtaa

SEQ ID NO: 5084672 - DNA, 25 bp, Homo sapien
tagacaaagttgctaaaacaattct

SEQ ID NO: 5084673 - DNA, 25 bp, Homo sapien
cttaagagctttacatgaatacagt

SEQ ID NO: 5084674 - DNA, 25 bp, Homo sapien
ccttaagagctttacatgaatacag

SEQ ID NO: 5084675 - DNA, 25 bp, Homo sapien
taagagctttacatgaatacagttt

SEQ ID NO: 5084676 - DNA, 25 bp, Homo sapien
ttaagagctttacatgaatacagtt

SEQ ID NO: 5084677 - DNA, 25 bp, Homo sapien
tgaggaactatggtgctggttgtat

SEQ ID NO: 5084678 - DNA, 25 bp, Homo sapien
tttgtctgatgaggaactatggtgc

SEQ ID NO: 5084679 - DNA, 25 bp, Homo sapien
gaggaactatggtgctggttgtatt

SEQ ID NO: 5084680 - DNA, 25 bp, Homo sapien
tctgatgaggaactatggtgctggt

SEQ ID NO: 5084681 - DNA, 25 bp, Homo sapien
tgaaagtctagccaggccacacatc

SEQ ID NO: 5084682 - DNA, 25 bp, Homo sapien
taaccctgaaagtctagccaggcca

SEQ ID NO: 5084683 - DNA, 25 bp, Homo sapien
gccaggccacacatcgtggctcatg

SEQ ID NO: 5084684 - DNA, 25 bp, Homo sapien
cactgtaaccctgaaagtctagcca

SEQ ID NO: 5084685 - DNA, 25 bp, Homo sapien
gcctcttcaaataagctagcttcag

SEQ ID NO: 5084686 - DNA, 25 bp, Homo sapien
aaaatcttgccgtatgtcattgaag

SEQ ID NO: 5084687 - DNA, 25 bp, Homo sapien
cgagtggtactaagacactaatggc

SEQ ID NO: 5084688 - DNA, 25 bp, Homo sapien
cataaaacaggtcctccgagtggta

SEQ ID NO: 5084689 - DNA, 25 bp, Homo sapien
taccagatttctaaaacagaatatt

SEQ ID NO: 5084690 - DNA, 25 bp, Homo sapien
aatgaatactgtaaggtttaccaga

SEQ ID NO: 5084691 - DNA, 25 bp, Homo sapien
cacaaacttgctaaatgaatactgt

SEQ ID NO: 5084692 - DNA, 25 bp, Homo sapien
acagaatattcccatctcaacattt

SEQ ID NO: 5084693 - DNA, 25 bp, Homo sapien
tctgcagggttaagatccacatttc

SEQ ID NO: 5084694 - DNA, 25 bp, Homo sapien
caaatctaatatggactggcccttc

SEQ ID NO: 5084695 - DNA, 25 bp, Homo sapien
taagggtttgacacaagtagccaat

SEQ ID NO: 5084696 - DNA, 25 bp, Homo sapien
gaggcccaggagactttttgttgca

SEQ ID NO: 5084697 - DNA, 25 bp, Homo sapien
atcaatgatcacttttgggtagtgg

SEQ ID NO: 5084698 - DNA, 25 bp, Homo sapien
gaaaataatcaatgatcacttttgg

SEQ ID NO: 5084699 - DNA, 25 bp, Homo sapien
aataatcaatgatcacttttgggta

SEQ ID NO: 5084700 - DNA, 25 bp, Homo sapien
tgggtagtgggatgaaaccacttta

SEQ ID NO: 5084701 - DNA, 25 bp, Homo sapien
ctgttgcacatatctgtcagtagtt

SEQ ID NO: 5084702 - DNA, 25 bp, Homo sapien
tcaatgatgctagtcaatgatttcc

SEQ ID NO: 5084703 - DNA, 25 bp, Homo sapien
gatgctagtcaatgatttccaagga

SEQ ID NO: 5084704 - DNA, 25 bp, Homo sapien
gtaataatattcaatgatgctagtc

SEQ ID NO: 5084705 - DNA, 25 bp, Homo sapien
aggtttgtgttagcatcacatcttt

SEQ ID NO: 5084706 - DNA, 25 bp, Homo sapien
aagaggtttgtgttagcatcacatc

SEQ ID NO: 5084707 - DNA, 25 bp, Homo sapien
ttgtgttagcatcacatctttgatc

SEQ ID NO: 5084708 - DNA, 25 bp, Homo sapien
agcatcacatctttgatcattgcca

SEQ ID NO: 5084709 - DNA, 25 bp, Homo sapien
tattctactggaaccaattaggagc

SEQ ID NO: 5084710 - DNA, 25 bp, Homo sapien
aaataggttcccagactacatggtc

SEQ ID NO: 5084711 - DNA, 25 bp, Homo sapien
ttccaaaatccaggcaagaggagtg

SEQ ID NO: 5084712 - DNA, 25 bp, Homo sapien
gacactgaccaacatgataatgcag

SEQ ID NO: 5084713 - DNA, 25 bp, Homo sapien
ggttgggatatatacttgtttcagt

SEQ ID NO: 5084714 - DNA, 25 bp, Homo sapien
ttcagtttactctcagcttctgctg

SEQ ID NO: 5084715 - DNA, 25 bp, Homo sapien
taggttgggatatatacttgtttca

SEQ ID NO: 5084716 - DNA, 25 bp, Homo sapien
ttgtttcagtttactctcagcttct

SEQ ID NO: 5084717 - DNA, 25 bp, Homo sapien
tataggcgtgaactaccatgctcag

SEQ ID NO: 5084718 - DNA, 25 bp, Homo sapien
gcagaaacgaggttccccaaagtgc

SEQ ID NO: 5084719 - DNA, 25 bp, Homo sapien
tgggattataggcgtgaactaccat

SEQ ID NO: 5084720 - DNA, 25 bp, Homo sapien
tgcagaaacgaggttccccaaagtg

SEQ ID NO: 5084721 - DNA, 25 bp, Homo sapien
tctaagacacatgagttgcaacagt

SEQ ID NO: 5084722 - DNA, 25 bp, Homo sapien
caattatctgggttacttggtcaaa

SEQ ID NO: 5084723 - DNA, 25 bp, Homo sapien
gcgactatagtttgttgatccctga

SEQ ID NO: 5084724 - DNA, 25 bp, Homo sapien
gactccaaagtcagcgtaaagccaa

SEQ ID NO: 5084725 - DNA, 25 bp, Homo sapien
gccaagactgcatatagacatgtga

SEQ ID NO: 5084726 - DNA, 25 bp, Homo sapien
gacaatctgtgactgtaagcaaaca

SEQ ID NO: 5084727 - DNA, 25 bp, Homo sapien
tacaaatgtacagttgagctgcctt

SEQ ID NO: 5084728 - DNA, 25 bp, Homo sapien
tggctcatatgcagcagtgctcacc

SEQ ID NO: 5084729 - DNA, 25 bp, Homo sapien
aagtggcgatttagaatgaccagca

SEQ ID NO: 5084730 - DNA, 25 bp, Homo sapien
taaatcagatggaaggtgtttctct

SEQ ID NO: 5084731 - DNA, 25 bp, Homo sapien
tcttcttacggttttcagctgacac

SEQ ID NO: 5084732 - DNA, 25 bp, Homo sapien
caaatgactggccagaggtttacca

SEQ ID NO: 5084733 - DNA, 25 bp, Homo sapien
ccatgcctggttataaaatagataa

SEQ ID NO: 5084734 - DNA, 25 bp, Homo sapien
accatgcctggttataaaatagata

SEQ ID NO: 5084735 - DNA, 25 bp, Homo sapien
gggatcattccacctcaacttctca

SEQ ID NO: 5084736 - DNA, 25 bp, Homo sapien
aagggatcattccacctcaacttct

SEQ ID NO: 5084737 - DNA, 25 bp, Homo sapien
tcaagggatcattccacctcaactt

SEQ ID NO: 5084738 - DNA, 25 bp, Homo sapien
ctcaacttctcaacaggtgtgagcc

SEQ ID NO: 5084739 - DNA, 25 bp, Homo sapien
tcacttaggacttcaggagcttctg

SEQ ID NO: 5084740 - DNA, 25 bp, Homo sapien
tctactgatgcaatgagacctcaca

SEQ ID NO: 5084741 - DNA, 25 bp, Homo sapien
tggtatttcccaggcaaacaaggct

SEQ ID NO: 5084742 - DNA, 25 bp, Homo sapien
gctgcttataaaccgtgccccagaa

SEQ ID NO: 5084743 - DNA, 25 bp, Homo sapien
ctagtggatatttggttgggatttg

SEQ ID NO: 5084744 - DNA, 25 bp, Homo sapien
agtggatatttggttgggatttggt

SEQ ID NO: 5084745 - DNA, 25 bp, Homo sapien
tagtggatatttggttgggatttgg

SEQ ID NO: 5084746 - DNA, 25 bp, Homo sapien
aggctggaacgtggtccccacagct

SEQ ID NO: 5084747 - DNA, 25 bp, Homo sapien
tccctaagagaggattctgaggctg

SEQ ID NO: 5084748 - DNA, 25 bp, Homo sapien
attcacagcaccaggcttcccatta

SEQ ID NO: 5084749 - DNA, 25 bp, Homo sapien
agctctcacaggctctccctaagag

SEQ ID NO: 5084750 - DNA, 25 bp, Homo sapien
gcacataatctacactgcatattag

SEQ ID NO: 5084751 - DNA, 25 bp, Homo sapien
caaattgcacataatctacactgca

SEQ ID NO: 5084752 - DNA, 25 bp, Homo sapien
atctacactgcatattaggtgggcc

SEQ ID NO: 5084753 - DNA, 25 bp, Homo sapien
tgcatattaggtgggccccaagaat

SEQ ID NO: 5084754 - DNA, 25 bp, Homo sapien
ggctaggagataacttctcttcttc

SEQ ID NO: 5084755 - DNA, 25 bp, Homo sapien
tcagcactgaaaaagggtagtcgcc

SEQ ID NO: 5084756 - DNA, 25 bp, Homo sapien
ttggtgcactacctctaaaagagag

SEQ ID NO: 5084757 - DNA, 25 bp, Homo sapien
tagtcgcccactggtaaacacaggc

SEQ ID NO: 5084758 - DNA, 25 bp, Homo sapien
gaagcatctataacgtcacttggtg

SEQ ID NO: 5084759 - DNA, 25 bp, Homo sapien
ctttggactcccagtgtttcggact

SEQ ID NO: 5084760 - DNA, 25 bp, Homo sapien
aaagcttggcgggtcttcactgcag

SEQ ID NO: 5084761 - DNA, 25 bp, Homo sapien
ccctgcatggcctggcgggacacgt

SEQ ID NO: 5084762 - DNA, 25 bp, Homo sapien
gacacgtgacttctaacacgagggt

SEQ ID NO: 5084763 - DNA, 25 bp, Homo sapien
ttaatagcaacaaacggccgtcttg

SEQ ID NO: 5084764 - DNA, 25 bp, Homo sapien
aacaaacggccgtcttgctgcctgc

SEQ ID NO: 5084765 - DNA, 25 bp, Homo sapien
ttctgccctaatggcagcataatta

SEQ ID NO: 5084766 - DNA, 25 bp, Homo sapien
tgccgcagccggagggtatttttgc

SEQ ID NO: 5084767 - DNA, 25 bp, Homo sapien
aatggtcagaagcacaacatataag

SEQ ID NO: 5084768 - DNA, 25 bp, Homo sapien
aaaatggtcagaagcacaacatata

SEQ ID NO: 5084769 - DNA, 25 bp, Homo sapien
gaaaatggtcagaagcacaacatat

SEQ ID NO: 5084770 - DNA, 25 bp, Homo sapien
atggtcagaagcacaacatataagg

SEQ ID NO: 5084771 - DNA, 25 bp, Homo sapien
cacaaaaccccatggaataggatca

SEQ ID NO: 5084772 - DNA, 25 bp, Homo sapien
cttcaataagggctctgcaggcaat

SEQ ID NO: 5084773 - DNA, 25 bp, Homo sapien
tgcaggcaattccatcacaaaaccc

SEQ ID NO: 5084774 - DNA, 25 bp, Homo sapien
ttttgctaagcactactctctggta

SEQ ID NO: 5084775 - DNA, 25 bp, Homo sapien
ttatttaaacctaatgaatccatgt

SEQ ID NO: 5084776 - DNA, 25 bp, Homo sapien
cgattatggagtctcattataacag

SEQ ID NO: 5084777 - DNA, 25 bp, Homo sapien
tccttaggggttacattgtggcact

SEQ ID NO: 5084778 - DNA, 25 bp, Homo sapien
tccatgtaagactggactgtactgt

SEQ ID NO: 5084779 - DNA, 25 bp, Homo sapien
catgctagcctggaatgtgactcca

SEQ ID NO: 5084780 - DNA, 25 bp, Homo sapien
cagcaagttttgtcaccccttaagg

SEQ ID NO: 5084781 - DNA, 25 bp, Homo sapien
ggacaaacaggctgctcaaccatat

SEQ ID NO: 5084782 - DNA, 25 bp, Homo sapien
taaggaacaaaagctgcacggctct

SEQ ID NO: 5084783 - DNA, 25 bp, Homo sapien
ggctcaggcattttaccaatgttag

SEQ ID NO: 5084784 - DNA, 25 bp, Homo sapien
gctgttgggccacaaatcttaagaa

SEQ ID NO: 5084785 - DNA, 25 bp, Homo sapien
gcaatgaagaattttggtctaccaa

SEQ ID NO: 5084786 - DNA, 25 bp, Homo sapien
tctacgtggtagaactggctcaggc

SEQ ID NO: 5084787 - DNA, 25 bp, Homo sapien
tcactaatttgtgttgtcatccttg

SEQ ID NO: 5084788 - DNA, 25 bp, Homo sapien
cacttcactaatttgtgttgtcatc

SEQ ID NO: 5084789 - DNA, 25 bp, Homo sapien
ggccatgattatcttccccatatca

SEQ ID NO: 5084790 - DNA, 25 bp, Homo sapien
gctcagggccatgattatcttcccc

SEQ ID NO: 5084791 - DNA, 25 bp, Homo sapien
ccagatagttcagcatgtctgtctg

SEQ ID NO: 5084792 - DNA, 25 bp, Homo sapien
aggcttcctagtgcttttgcttttc

SEQ ID NO: 5084793 - DNA, 25 bp, Homo sapien
gccaaaggcttcctagtgcttttgc

SEQ ID NO: 5084794 - DNA, 25 bp, Homo sapien
atacccaatgatacatgccaaaggc

SEQ ID NO: 5084795 - DNA, 25 bp, Homo sapien
cattgtgatgactgtagtttctttt

SEQ ID NO: 5084796 - DNA, 25 bp, Homo sapien
ttccccagaatgctcagagatgtgt

SEQ ID NO: 5084797 - DNA, 25 bp, Homo sapien
gcaggcttggtgtagatcgaattac

SEQ ID NO: 5084798 - DNA, 25 bp, Homo sapien
tgttagcatccgcttggtagttggg

SEQ ID NO: 5084799 - DNA, 25 bp, Homo sapien
tgtatttaggacatcacccaggcaa

SEQ ID NO: 5084800 - DNA, 25 bp, Homo sapien
catgacatgtagcactcttgagcaa

SEQ ID NO: 5084801 - DNA, 25 bp, Homo sapien
tggccaagcccaagagaagtacttt

SEQ ID NO: 5084802 - DNA, 25 bp, Homo sapien
caaatgccaaatttagaatgaccca

SEQ ID NO: 5084803 - DNA, 25 bp, Homo sapien
tgctagcagtaaaaatgtccacagt

SEQ ID NO: 5084804 - DNA, 25 bp, Homo sapien
tggtttgctagcagtaaaaatgtcc

SEQ ID NO: 5084805 - DNA, 25 bp, Homo sapien
tacggcacactgctggaccgacatc

SEQ ID NO: 5084806 - DNA, 25 bp, Homo sapien
ccacaatgacagcatacggcacact

SEQ ID NO: 5084807 - DNA, 25 bp, Homo sapien
agccacttggagttaaccaagtagg

SEQ ID NO: 5084808 - DNA, 25 bp, Homo sapien
gagttaaccaagtagggcaaacata

SEQ ID NO: 5084809 - DNA, 25 bp, Homo sapien
aaccaagtagggcaaacatagtagg

SEQ ID NO: 5084810 - DNA, 25 bp, Homo sapien
gtagggcaaacatagtaggtgatac

SEQ ID NO: 5084811 - DNA, 25 bp, Homo sapien
gtggtatccaggcagtacttgttgt

SEQ ID NO: 5084812 - DNA, 25 bp, Homo sapien
cagtacttgttgtgtgccttggatg

SEQ ID NO: 5084813 - DNA, 25 bp, Homo sapien
tccaggcagtacttgttgtgtgcct

SEQ ID NO: 5084814 - DNA, 25 bp, Homo sapien
tatccaggcagtacttgttgtgtgc

SEQ ID NO: 5084815 - DNA, 25 bp, Homo sapien
ttatcacatagtcctgaggcaacat

SEQ ID NO: 5084816 - DNA, 25 bp, Homo sapien
taatgcaattatcacatagtcctga

SEQ ID NO: 5084817 - DNA, 25 bp, Homo sapien
agttaatgcaattatcacatagtcc

SEQ ID NO: 5084818 - DNA, 25 bp, Homo sapien
caattatcacatagtcctgaggcaa

SEQ ID NO: 5084819 - DNA, 25 bp, Homo sapien
aggtctcactcttactgggggacct

SEQ ID NO: 5084820 - DNA, 25 bp, Homo sapien
gtctcactcttactgggggacctgc

SEQ ID NO: 5084821 - DNA, 25 bp, Homo sapien
caaggtctcactcttactgggggac

SEQ ID NO: 5084822 - DNA, 25 bp, Homo sapien
ggtctcactcttactgggggacctg

SEQ ID NO: 5084823 - DNA, 25 bp, Homo sapien
ccaggcacggctgtgaacatcagca

SEQ ID NO: 5084824 - DNA, 25 bp, Homo sapien
tccatggatgcacgcagaggtctcc

SEQ ID NO: 5084825 - DNA, 25 bp, Homo sapien
cagcaagtcttggattgtagaatga

SEQ ID NO: 5084826 - DNA, 25 bp, Homo sapien
gatttggaacgtgcactcccacagt

SEQ ID NO: 5084827 - DNA, 25 bp, Homo sapien
gcgaggtctctgacaagaaagcgag

SEQ ID NO: 5084828 - DNA, 25 bp, Homo sapien
cgctccgtaacagcgaggtctctga

SEQ ID NO: 5084829 - DNA, 25 bp, Homo sapien
tcaattctcagcaggtctcgctccg

SEQ ID NO: 5084830 - DNA, 25 bp, Homo sapien
caagaaagcgaggtgctgctgatcc

SEQ ID NO: 5084831 - DNA, 25 bp, Homo sapien
gaaagatgccatggccctcctgtac

SEQ ID NO: 5084832 - DNA, 25 bp, Homo sapien
ctatacagcataagaccgagctgag

SEQ ID NO: 5084833 - DNA, 25 bp, Homo sapien
tgaacctcataaacactggcgcatt

SEQ ID NO: 5084834 - DNA, 25 bp, Homo sapien
actgccaagtggccgctgttgctgg

SEQ ID NO: 5084835 - DNA, 25 bp, Homo sapien
cctatcgagaaaaagctgagtgacg

SEQ ID NO: 5084836 - DNA, 25 bp, Homo sapien
tacaggcttatcttttgtcagaacc

SEQ ID NO: 5084837 - DNA, 25 bp, Homo sapien
agcagagccgggcagaacaccagtt

SEQ ID NO: 5084838 - DNA, 25 bp, Homo sapien
tgagtgacggtaacagcaaggacag

SEQ ID NO: 5084839 - DNA, 25 bp, Homo sapien
gcaagggaacagggcagtaagcaaa

SEQ ID NO: 5084840 - DNA, 25 bp, Homo sapien
tgtcacagtgatacacacgcttggc

SEQ ID NO: 5084841 - DNA, 25 bp, Homo sapien
gggcagtaagcaaacggcttgtcac

SEQ ID NO: 5084842 - DNA, 25 bp, Homo sapien
gcttggcacttttaacaactgctct

SEQ ID NO: 5084843 - DNA, 25 bp, Homo sapien
ctggcagcagttcttcatcagctgg

SEQ ID NO: 5084844 - DNA, 25 bp, Homo sapien
tggcagcagttcttcatcagctggt

SEQ ID NO: 5084845 - DNA, 25 bp, Homo sapien
agcagttcttcatcagctggtttgg

SEQ ID NO: 5084846 - DNA, 25 bp, Homo sapien
gcagcagttcttcatcagctggttt

SEQ ID NO: 5084847 - DNA, 25 bp, Homo sapien
ggcctaggtcacatgtgctcacaag

SEQ ID NO: 5084848 - DNA, 25 bp, Homo sapien
tcatcgggcgctgagctattcctat

SEQ ID NO: 5084849 - DNA, 25 bp, Homo sapien
gcaggtgggaaacacgaagagccca

SEQ ID NO: 5084850 - DNA, 25 bp, Homo sapien
catctgctcagggagctcatcgggc

SEQ ID NO: 5084851 - DNA, 25 bp, Homo sapien
gctgggagatcagactccagttgtc

SEQ ID NO: 5084852 - DNA, 25 bp, Homo sapien
tgggagatcagactccagttgtctt

SEQ ID NO: 5084853 - DNA, 25 bp, Homo sapien
tggctgggagatcagactccagttg

SEQ ID NO: 5084854 - DNA, 25 bp, Homo sapien
atggctgggagatcagactccagtt

SEQ ID NO: 5084855 - DNA, 25 bp, Homo sapien
ttgggcctctcgtatctgccatcca

SEQ ID NO: 5084856 - DNA, 25 bp, Homo sapien
cactctgtcttgcaacagcttggct

SEQ ID NO: 5084857 - DNA, 25 bp, Homo sapien
ccagggtgtcaattcaattgtagcc

SEQ ID NO: 5084858 - DNA, 25 bp, Homo sapien
ggctatttgggcctctcgtatctgc

SEQ ID NO: 5084859 - DNA, 25 bp, Homo sapien
ttatcctgcggaaacactcatgagc

SEQ ID NO: 5084860 - DNA, 25 bp, Homo sapien
gaaacatccacgtgatgcggcacct

SEQ ID NO: 5084861 - DNA, 25 bp, Homo sapien
tggcacacgtggctcgaacaagctg

SEQ ID NO: 5084862 - DNA, 25 bp, Homo sapien
cacgggcagctaattgtttccagaa

SEQ ID NO: 5084863 - DNA, 25 bp, Homo sapien
ccaggcaaacatgtacagtagcaca

SEQ ID NO: 5084864 - DNA, 25 bp, Homo sapien
gaagcaagggtcttccactcaccag

SEQ ID NO: 5084865 - DNA, 25 bp, Homo sapien
tagcacacttcggactggagataga

SEQ ID NO: 5084866 - DNA, 25 bp, Homo sapien
ctggagatagaagcaagggtcttcc

SEQ ID NO: 5084867 - DNA, 25 bp, Homo sapien
agaagggccctggtgccaagcccag

SEQ ID NO: 5084868 - DNA, 25 bp, Homo sapien
gatccagaagggccctggtgccaag

SEQ ID NO: 5084869 - DNA, 25 bp, Homo sapien
caggaaggaccagatccagaagggc

SEQ ID NO: 5084870 - DNA, 25 bp, Homo sapien
ggaaaggcaggaaggaccagatcca

SEQ ID NO: 5084871 - DNA, 25 bp, Homo sapien
tgcttactgggcacctgccgtgggc

SEQ ID NO: 5084872 - DNA, 25 bp, Homo sapien
attaacttgccagtgcttactgggc

SEQ ID NO: 5084873 - DNA, 25 bp, Homo sapien
caaaggcagacaactgtactctcac

SEQ ID NO: 5084874 - DNA, 25 bp, Homo sapien
tgggtgacaggccagcagtcattaa

SEQ ID NO: 5084875 - DNA, 25 bp, Homo sapien
tcaggctgccgccacatggaggtag

SEQ ID NO: 5084876 - DNA, 25 bp, Homo sapien
actgcttcctcactgacagtctggg

SEQ ID NO: 5084877 - DNA, 25 bp, Homo sapien
catcttgaccctgaggactgcttcc

SEQ ID NO: 5084878 - DNA, 25 bp, Homo sapien
tgactccctggtccgaactatggcc

SEQ ID NO: 5084879 - DNA, 25 bp, Homo sapien
tggacagatactcccatggtttgca

SEQ ID NO: 5084880 - DNA, 25 bp, Homo sapien
gaaatggacagatactcccatggtt

SEQ ID NO: 5084881 - DNA, 25 bp, Homo sapien
atggacagatactcccatggtttgc

SEQ ID NO: 5084882 - DNA, 25 bp, Homo sapien
aatggacagatactcccatggtttg

SEQ ID NO: 5084883 - DNA, 25 bp, Homo sapien
ggcaaggtgccgttggcacaccagc

SEQ ID NO: 5084884 - DNA, 25 bp, Homo sapien
tgccgttggcacaccagctcagaca

SEQ ID NO: 5084885 - DNA, 25 bp, Homo sapien
gcaggatgccgggtggaggagacag

SEQ ID NO: 5084886 - DNA, 25 bp, Homo sapien
agacaggcaaggtgccgttggcaca

SEQ ID NO: 5084887 - DNA, 25 bp, Homo sapien
cagtgagcgacgagagctcctacca

SEQ ID NO: 5084888 - DNA, 25 bp, Homo sapien
tgcagggcgaggtctctctggaaaa

SEQ ID NO: 5084889 - DNA, 25 bp, Homo sapien
gcctcagctacagggtgggcacgaa

SEQ ID NO: 5084890 - DNA, 25 bp, Homo sapien
gcactcaaccgctacctgaaggtgg

SEQ ID NO: 5084891 - DNA, 25 bp, Homo sapien
tcactcagtaccccgaggcggaggg

SEQ ID NO: 5084892 - DNA, 25 bp, Homo sapien
tgatagtgccaatcatcccactttg

SEQ ID NO: 5084893 - DNA, 25 bp, Homo sapien
gaatgctgatgaaaaccccaggatg

SEQ ID NO: 5084894 - DNA, 25 bp, Homo sapien
cacagggtgtttctcagtggctgcg

SEQ ID NO: 5084895 - DNA, 25 bp, Homo sapien
tgtacccggacttgggaccatcaca

SEQ ID NO: 5084896 - DNA, 25 bp, Homo sapien
ctacttcaccgtgtacccggacttg

SEQ ID NO: 5084897 - DNA, 25 bp, Homo sapien
cagacttcggaaccatcaggaacct

SEQ ID NO: 5084898 - DNA, 25 bp, Homo sapien
gacttgggaccatcacagacttcgg

SEQ ID NO: 5084899 - DNA, 25 bp, Homo sapien
gcctggcctataagtttttacataa

SEQ ID NO: 5084900 - DNA, 25 bp, Homo sapien
tagcaatgcactgctccgtgcagga

SEQ ID NO: 5084901 - DNA, 25 bp, Homo sapien
cacgcggctcgttcctggcctgtag

SEQ ID NO: 5084902 - DNA, 25 bp, Homo sapien
tcaggctccttcaaacacaaatggt

SEQ ID NO: 5084903 - DNA, 25 bp, Homo sapien
gctccttcaaacacaaatggtccag

SEQ ID NO: 5084904 - DNA, 25 bp, Homo sapien
taagtgtccgtgcactcaggcctag

SEQ ID NO: 5084905 - DNA, 25 bp, Homo sapien
tggttctactgcaaggacctcggca

SEQ ID NO: 5084906 - DNA, 25 bp, Homo sapien
caaggtgttaagtgaccagtgacca

SEQ ID NO: 5084907 - DNA, 25 bp, Homo sapien
tatgtgggcgacaccatggacgttc

SEQ ID NO: 5084908 - DNA, 25 bp, Homo sapien
ttttatcaggattataggagtttcc

SEQ ID NO: 5084909 - DNA, 25 bp, Homo sapien
cacctgtgttctagagctgattata

SEQ ID NO: 5084910 - DNA, 25 bp, Homo sapien
caaagacgcagttggcaaggaaatt

SEQ ID NO: 5084911 - DNA, 25 bp, Homo sapien
gcagccatagtcaaagacgcagttg

SEQ ID NO: 5084912 - DNA, 25 bp, Homo sapien
tgttctcaggtgctgggacttccaa

SEQ ID NO: 5084913 - DNA, 25 bp, Homo sapien
gattctttgtcctccgccgggagca

SEQ ID NO: 5084914 - DNA, 25 bp, Homo sapien
gaaagccaaatcttgagcccagcgc

SEQ ID NO: 5084915 - DNA, 25 bp, Homo sapien
aacccgcgatctcctcactgtagta

SEQ ID NO: 5084916 - DNA, 25 bp, Homo sapien
acctgcggggaccgccgtgcggctt

SEQ ID NO: 5084917 - DNA, 25 bp, Homo sapien
ggacctgcggggaccgccgtgcggc

SEQ ID NO: 5084918 - DNA, 25 bp, Homo sapien
tgcggggaccgccgtgcggcttccc

SEQ ID NO: 5084919 - DNA, 25 bp, Homo sapien
gcagccctgagtggcggggcagtca

SEQ ID NO: 5084920 - DNA, 25 bp, Homo sapien
cccgagattcccgagggctaggaca

SEQ ID NO: 5084921 - DNA, 25 bp, Homo sapien
gaactgagtatgttcctaagacgcc

SEQ ID NO: 5084922 - DNA, 25 bp, Homo sapien
acactgaggccggtgtccacatctg

SEQ ID NO: 5084923 - DNA, 25 bp, Homo sapien
ggctgtcatcattaacaccccgaga

SEQ ID NO: 5084924 - DNA, 25 bp, Homo sapien
acttgggtgcaaaacgatattctag

SEQ ID NO: 5084925 - DNA, 25 bp, Homo sapien
gagtctttatgtctggaatgctgag

SEQ ID NO: 5084926 - DNA, 25 bp, Homo sapien
aattcggcttcctgtcgtctgggtt

SEQ ID NO: 5084927 - DNA, 25 bp, Homo sapien
aaactctatagtctggattccggtg

SEQ ID NO: 5084928 - DNA, 25 bp, Homo sapien
tagagggttactcgggatatttcag

SEQ ID NO: 5084929 - DNA, 25 bp, Homo sapien
cagttaaaatacagagtacctatca

SEQ ID NO: 5084930 - DNA, 25 bp, Homo sapien
caaatcagagggcatatttgatagt

SEQ ID NO: 5084931 - DNA, 25 bp, Homo sapien
tagtgataacatagcagtcatttag

SEQ ID NO: 5084932 - DNA, 25 bp, Homo sapien
gaggcttgccaattcagtagaccag

SEQ ID NO: 5084933 - DNA, 25 bp, Homo sapien
tattaccagccaggttcagcaaagc

SEQ ID NO: 5084934 - DNA, 25 bp, Homo sapien
gaaagggattcactggagcaacgag

SEQ ID NO: 5084935 - DNA, 25 bp, Homo sapien
tggctcctagaagcgggtaaattcc

SEQ ID NO: 5084936 - DNA, 25 bp, Homo sapien
taacccaggcttctacacatggtgg

SEQ ID NO: 5084937 - DNA, 25 bp, Homo sapien
aagtctctgcatgtctcccctgggt

SEQ ID NO: 5084938 - DNA, 25 bp, Homo sapien
tcatatgttagttttggagcccgga

SEQ ID NO: 5084939 - DNA, 25 bp, Homo sapien
cagatggtcttacacagctggtgca

SEQ ID NO: 5084940 - DNA, 25 bp, Homo sapien
gaggacgactctcatcttgaaggca

SEQ ID NO: 5084941 - DNA, 25 bp, Homo sapien
catcttgaaggcagagatcttgata

SEQ ID NO: 5084942 - DNA, 25 bp, Homo sapien
aagaggaaagtgaggacgactctca

SEQ ID NO: 5084943 - DNA, 25 bp, Homo sapien
gctgaaaatctggtggacaggcccc

SEQ ID NO: 5084944 - DNA, 25 bp, Homo sapien
gcggaaaatggcagtgcgctggcat

SEQ ID NO: 5084945 - DNA, 25 bp, Homo sapien
tttggcatgcggaaaatggcagtgc

SEQ ID NO: 5084946 - DNA, 25 bp, Homo sapien
tattttggcatgcggaaaatggcag

SEQ ID NO: 5084947 - DNA, 25 bp, Homo sapien
catgcggaaaatggcagtgcgctgg

SEQ ID NO: 5084948 - DNA, 25 bp, Homo sapien
gagtagagcagcatacaacgtaact

SEQ ID NO: 5084949 - DNA, 25 bp, Homo sapien
tttgctgaattcatggatcctccga

SEQ ID NO: 5084950 - DNA, 25 bp, Homo sapien
catccggtgatggacaagaagatga

SEQ ID NO: 5084951 - DNA, 25 bp, Homo sapien
gccagtgtgtttggctgcagatttc

SEQ ID NO: 5084952 - DNA, 25 bp, Homo sapien
tctcccatcctcattggtaatccag

SEQ ID NO: 5084953 - DNA, 25 bp, Homo sapien
tcctcattggtaatccaggttgcac

SEQ ID NO: 5084954 - DNA, 25 bp, Homo sapien
cctggttaggatccaaggcaaagat

SEQ ID NO: 5084955 - DNA, 25 bp, Homo sapien
actgcacaagcatggctgcttattt

SEQ ID NO: 5084956 - DNA, 25 bp, Homo sapien
aaaaatctcctgtcctgatccccgg

SEQ ID NO: 5084957 - DNA, 25 bp, Homo sapien
cagcctcgggatgaagctaatgcta

SEQ ID NO: 5084958 - DNA, 25 bp, Homo sapien
tgatccccggaatctgagtatgtca

SEQ ID NO: 5084959 - DNA, 25 bp, Homo sapien
aagaaccagggtccatgatggcgat

SEQ ID NO: 5084960 - DNA, 25 bp, Homo sapien
aaatctgcagtatcacttaagttag

SEQ ID NO: 5084961 - DNA, 25 bp, Homo sapien
ttaagttagtaactgcaagaagcag

SEQ ID NO: 5084962 - DNA, 25 bp, Homo sapien
gatcttagaacctaaccctcccaga

SEQ ID NO: 5084963 - DNA, 25 bp, Homo sapien
tacagagaactgttaactaggttta

SEQ ID NO: 5084964 - DNA, 25 bp, Homo sapien
taagacatgcgggatccatgccagg

SEQ ID NO: 5084965 - DNA, 25 bp, Homo sapien
cagtacccgggactcataagaatcc

SEQ ID NO: 5084966 - DNA, 25 bp, Homo sapien
tggctaaatgcctcgggtaagtcat

SEQ ID NO: 5084967 - DNA, 25 bp, Homo sapien
ggtagcattcaatggcccctggcaa

SEQ ID NO: 5084968 - DNA, 25 bp, Homo sapien
tttgataaaggtcctatgtttggtg

SEQ ID NO: 5084969 - DNA, 25 bp, Homo sapien
ataaaggtcctatgtttggtggttg

SEQ ID NO: 5084970 - DNA, 25 bp, Homo sapien
aattttgataaaggtcctatgtttg

SEQ ID NO: 5084971 - DNA, 25 bp, Homo sapien
tggctattaacccgttatcagatac

SEQ ID NO: 5084972 - DNA, 25 bp, Homo sapien
tattcatctccgcaacttttttctc

SEQ ID NO: 5084973 - DNA, 25 bp, Homo sapien
tgtcctttgtgcatggtttgtttca

SEQ ID NO: 5084974 - DNA, 25 bp, Homo sapien
aggcttatttatgttgtaacatcta

SEQ ID NO: 5084975 - DNA, 25 bp, Homo sapien
tttagtacattatgacgcccggcta

SEQ ID NO: 5084976 - DNA, 25 bp, Homo sapien
ggctgttccgcagccgatcgagccg

SEQ ID NO: 5084977 - DNA, 25 bp, Homo sapien
gagccttctgcgacttcgcgccgag

SEQ ID NO: 5084978 - DNA, 25 bp, Homo sapien
gcctcggcagagcatgcgcgttcgc

SEQ ID NO: 5084979 - DNA, 25 bp, Homo sapien
cgtgatggctctatcagggtgcgct

SEQ ID NO: 5084980 - DNA, 25 bp, Homo sapien
attgctctgcatgtactgctgtata

SEQ ID NO: 5084981 - DNA, 25 bp, Homo sapien
tgctctgcatgtactgctgtataag

SEQ ID NO: 5084982 - DNA, 25 bp, Homo sapien
gcatgtactgctgtataagtaccgc

SEQ ID NO: 5084983 - DNA, 25 bp, Homo sapien
tctgcatgtactgctgtataagtac

SEQ ID NO: 5084984 - DNA, 25 bp, Homo sapien
tgtagaatattcgatccccacggcc

SEQ ID NO: 5084985 - DNA, 25 bp, Homo sapien
gactaggtgcagttacaggacccgc

SEQ ID NO: 5084986 - DNA, 25 bp, Homo sapien
tattgagagtccactgcgagctgct

SEQ ID NO: 5084987 - DNA, 25 bp, Homo sapien
gagagactccttacttctggcaacg

SEQ ID NO: 5084988 - DNA, 25 bp, Homo sapien
tatgccggctggaacaagaacatca

SEQ ID NO: 5084989 - DNA, 25 bp, Homo sapien
tttatggacgagacaactgacaccc

SEQ ID NO: 5084990 - DNA, 25 bp, Homo sapien
tacacgctgcatgtctgggagaggc

SEQ ID NO: 5084991 - DNA, 25 bp, Homo sapien
gctcagggcctgatacacgtgtaca

SEQ ID NO: 5084992 - DNA, 25 bp, Homo sapien
gatcctaacaccagcaagatagtga

SEQ ID NO: 5084993 - DNA, 25 bp, Homo sapien
tgaattctccttgtggataaacccc

SEQ ID NO: 5084994 - DNA, 25 bp, Homo sapien
tatgtgttatgtctcctctggttgc

SEQ ID NO: 5084995 - DNA, 25 bp, Homo sapien
tgagtccacgtgttcaagattacag

SEQ ID NO: 5084996 - DNA, 25 bp, Homo sapien
ggctgaatctattgctttctccatg

SEQ ID NO: 5084997 - DNA, 25 bp, Homo sapien
gacacccttggtctagagtcaaacg

SEQ ID NO: 5084998 - DNA, 25 bp, Homo sapien
gctggaacaagtggaatctggctga

SEQ ID NO: 5084999 - DNA, 25 bp, Homo sapien
gactgcacatccaagatggcagcat

SEQ ID NO: 5085000 - DNA, 25 bp, Homo sapien
tgggcgggaacctcgcacattcctt

SEQ ID NO: 5085001 - DNA, 25 bp, Homo sapien
tgtggccatttggaaacccgggtca

SEQ ID NO: 5085002 - DNA, 25 bp, Homo sapien
gaggatcatccggtttgctttctcc

SEQ ID NO: 5085003 - DNA, 25 bp, Homo sapien
atgacctcaacagccgcagggaagg

SEQ ID NO: 5085004 - DNA, 25 bp, Homo sapien
cctggatgctgtaggtccccagctg

SEQ ID NO: 5085005 - DNA, 25 bp, Homo sapien
tggatgctgtaggtccccagctggc

SEQ ID NO: 5085006 - DNA, 25 bp, Homo sapien
ctggatgctgtaggtccccagctgg

SEQ ID NO: 5085007 - DNA, 25 bp, Homo sapien
cttcatttagctggtgtgctcccca

SEQ ID NO: 5085008 - DNA, 25 bp, Homo sapien
tgtggctccaatcccctggactctc

SEQ ID NO: 5085009 - DNA, 25 bp, Homo sapien
tctctccagagactctatccgcttc

SEQ ID NO: 5085010 - DNA, 25 bp, Homo sapien
ctgtgtggctccaatcccctggact

SEQ ID NO: 5085011 - DNA, 25 bp, Homo sapien
tcttgcaataaaggagaactgcctg

SEQ ID NO: 5085012 - DNA, 25 bp, Homo sapien
ttgaagaatgcacaatgctgggccc

SEQ ID NO: 5085013 - DNA, 25 bp, Homo sapien
gaaataatcaggctctcggaatgag

SEQ ID NO: 5085014 - DNA, 25 bp, Homo sapien
gaatggttgatctaaaggacatgcc

SEQ ID NO: 5085015 - DNA, 25 bp, Homo sapien
agggctggggccaatcaagagaaat

SEQ ID NO: 5085016 - DNA, 25 bp, Homo sapien
cagggctggggccaatcaagagaaa

SEQ ID NO: 5085017 - DNA, 25 bp, Homo sapien
ggaaccaggtcccagcgaccactag

SEQ ID NO: 5085018 - DNA, 25 bp, Homo sapien
gcccgcatttcagaggctacagcca

SEQ ID NO: 5085019 - DNA, 25 bp, Homo sapien
agcacaagtcccttgggaccctcct

SEQ ID NO: 5085020 - DNA, 25 bp, Homo sapien
ctctgcccgcatttcagaggctaca

SEQ ID NO: 5085021 - DNA, 25 bp, Homo sapien
tcggcccaaccccactgagctgctg

SEQ ID NO: 5085022 - DNA, 25 bp, Homo sapien
ctggagaacgcgaacctcagggccc

SEQ ID NO: 5085023 - DNA, 25 bp, Homo sapien
gcccgcctcggcccaaccccactga

SEQ ID NO: 5085024 - DNA, 25 bp, Homo sapien
ggagaacgcgaacctcagggcccgc

SEQ ID NO: 5085025 - DNA, 25 bp, Homo sapien
tctcttgtctacttgcctgtggtcc

SEQ ID NO: 5085026 - DNA, 25 bp, Homo sapien
cccgggatgcttaggtatgggtcct

SEQ ID NO: 5085027 - DNA, 25 bp, Homo sapien
gaggaaagcttctcagcccaactcg

SEQ ID NO: 5085028 - DNA, 25 bp, Homo sapien
tctggctgtgcctcgcttgtgatgc

SEQ ID NO: 5085029 - DNA, 25 bp, Homo sapien
atggccacctgtacccgctgtaaaa

SEQ ID NO: 5085030 - DNA, 25 bp, Homo sapien
gtaaaattggcccagtcccatagcc

SEQ ID NO: 5085031 - DNA, 25 bp, Homo sapien
caggaccagggaactctgaaagcag

SEQ ID NO: 5085032 - DNA, 25 bp, Homo sapien
cccaggaccagggaactctgaaagc

SEQ ID NO: 5085033 - DNA, 25 bp, Homo sapien
ctttgtggccagctgaacggatgac

SEQ ID NO: 5085034 - DNA, 25 bp, Homo sapien
gcagcgaggactctggacggcccca

SEQ ID NO: 5085035 - DNA, 25 bp, Homo sapien
gcagggcagcgaggactctggacgg

SEQ ID NO: 5085036 - DNA, 25 bp, Homo sapien
gctctttgtggccagctgaacggat

SEQ ID NO: 5085037 - DNA, 25 bp, Homo sapien
tgatggcctggcctgacagagcagg

SEQ ID NO: 5085038 - DNA, 25 bp, Homo sapien
tctgggcatgtccagagcgattccc

SEQ ID NO: 5085039 - DNA, 25 bp, Homo sapien
attatttctggcgaagaggacagga

SEQ ID NO: 5085040 - DNA, 25 bp, Homo sapien
tggtgttcttgagcgatgatggcct

SEQ ID NO: 5085041 - DNA, 25 bp, Homo sapien
cagaatgttttcacaaccgggaagc

SEQ ID NO: 5085042 - DNA, 25 bp, Homo sapien
cccgggttacaagcaagcgcagatg

SEQ ID NO: 5085043 - DNA, 25 bp, Homo sapien
ttgaagagcgccaagtagaccagca

SEQ ID NO: 5085044 - DNA, 25 bp, Homo sapien
taatctgcggcaaaatcggcatgtg

SEQ ID NO: 5085045 - DNA, 25 bp, Homo sapien
ggaagcttgcatttcacagcaggaa

SEQ ID NO: 5085046 - DNA, 25 bp, Homo sapien
gctctaatgaacatgtcctccagga

SEQ ID NO: 5085047 - DNA, 25 bp, Homo sapien
cagcaggaagaagggtttagccaaa

SEQ ID NO: 5085048 - DNA, 25 bp, Homo sapien
tggtgaacttcgacctggtacaggt

SEQ ID NO: 5085049 - DNA, 25 bp, Homo sapien
tcaaggagcatcaaatcaaactgac

SEQ ID NO: 5085050 - DNA, 25 bp, Homo sapien
ccaggaactcgaggaacgtcgcttc

SEQ ID NO: 5085051 - DNA, 25 bp, Homo sapien
acgataggcgcaccatcaaggagca

SEQ ID NO: 5085052 - DNA, 25 bp, Homo sapien
cagtttgacacctccaaaaattaat

SEQ ID NO: 5085053 - DNA, 25 bp, Homo sapien
agacctgaaacttgtcatccttggg

SEQ ID NO: 5085054 - DNA, 25 bp, Homo sapien
cttgggctcccaacaagagaggttg

SEQ ID NO: 5085055 - DNA, 25 bp, Homo sapien
cagatggtgacccaaggtaaagctc

SEQ ID NO: 5085056 - DNA, 25 bp, Homo sapien
tgggccatggacttattgatactca

SEQ ID NO: 5085057 - DNA, 25 bp, Homo sapien
tctctataagaccagcagatgcagc

SEQ ID NO: 5085058 - DNA, 25 bp, Homo sapien
cagatgcagctggttgattgccctt

SEQ ID NO: 5085059 - DNA, 25 bp, Homo sapien
cagaattccctgaagaaggtccagg

SEQ ID NO: 5085060 - DNA, 25 bp, Homo sapien
tggtgttccactctatcccacgggc

SEQ ID NO: 5085061 - DNA, 25 bp, Homo sapien
tggagtagtttgaacccagatttca

SEQ ID NO: 5085062 - DNA, 25 bp, Homo sapien
ggagtagtttgaacccagatttcaa

SEQ ID NO: 5085063 - DNA, 25 bp, Homo sapien
agtttgaacccagatttcaatgctg

SEQ ID NO: 5085064 - DNA, 25 bp, Homo sapien
gtttgaacccagatttcaatgctgc

SEQ ID NO: 5085065 - DNA, 25 bp, Homo sapien
tggctacaaccagacacggagactc

SEQ ID NO: 5085066 - DNA, 25 bp, Homo sapien
tcgccacgaaggcagatggtccgga

SEQ ID NO: 5085067 - DNA, 25 bp, Homo sapien
taacaaggatttgcaggccccatgc

SEQ ID NO: 5085068 - DNA, 25 bp, Homo sapien
tcagtgaggaaagagtcgccacgaa

SEQ ID NO: 5085069 - DNA, 25 bp, Homo sapien
ctaagaattaaaggccacaggtcag

SEQ ID NO: 5085070 - DNA, 25 bp, Homo sapien
agctcacactaagaattaaaggcca

SEQ ID NO: 5085071 - DNA, 25 bp, Homo sapien
tcacactaagaattaaaggccacag

SEQ ID NO: 5085072 - DNA, 25 bp, Homo sapien
cactaagaattaaaggccacaggtc

SEQ ID NO: 5085073 - DNA, 25 bp, Homo sapien
tttccagcctggtgtttacagcctc

SEQ ID NO: 5085074 - DNA, 25 bp, Homo sapien
tgtacacgtgcctctctcaacaggt

SEQ ID NO: 5085075 - DNA, 25 bp, Homo sapien
tgcctttctaaagcgctccaggtgc

SEQ ID NO: 5085076 - DNA, 25 bp, Homo sapien
caacaggtgcccgtctgtgtgcgtg

SEQ ID NO: 5085077 - DNA, 25 bp, Homo sapien
ccaagtcagtcatgtccgctggaga

SEQ ID NO: 5085078 - DNA, 25 bp, Homo sapien
agaaggtgccccgaggattccactg

SEQ ID NO: 5085079 - DNA, 25 bp, Homo sapien
ccactgggtgctgaatacgggtcct

SEQ ID NO: 5085080 - DNA, 25 bp, Homo sapien
gctgtcctgggccttgtaaacaggc

SEQ ID NO: 5085081 - DNA, 25 bp, Homo sapien
cagatagaggccagatgtgttccag

SEQ ID NO: 5085082 - DNA, 25 bp, Homo sapien
tcattagcctaggtagtgactgcca

SEQ ID NO: 5085083 - DNA, 25 bp, Homo sapien
gctctgtgacaagcgtcattagcct

SEQ ID NO: 5085084 - DNA, 25 bp, Homo sapien
gatgtgccccaaggtagcagctgag

SEQ ID NO: 5085085 - DNA, 25 bp, Homo sapien
aagatgagttctggttggacggcaa

SEQ ID NO: 5085086 - DNA, 25 bp, Homo sapien
gctcaggacgttgggttacacttca

SEQ ID NO: 5085087 - DNA, 25 bp, Homo sapien
tgggaagaaacacactctgggcctg

SEQ ID NO: 5085088 - DNA, 25 bp, Homo sapien
cggcaaaactttgaggtacctctga

SEQ ID NO: 5085089 - DNA, 25 bp, Homo sapien
tgtcgtggctcaaccctcgttaagg

SEQ ID NO: 5085090 - DNA, 25 bp, Homo sapien
cctttaatgtcgctttggccagaac

SEQ ID NO: 5085091 - DNA, 25 bp, Homo sapien
tccagagtccatctagccagaggaa

SEQ ID NO: 5085092 - DNA, 25 bp, Homo sapien
gactaggatttgaactccgccagcc

SEQ ID NO: 5085093 - DNA, 25 bp, Homo sapien
gccctggcagccaacccctcccgca

SEQ ID NO: 5085094 - DNA, 25 bp, Homo sapien
tgtctccactgtggccatctgggga

SEQ ID NO: 5085095 - DNA, 25 bp, Homo sapien
cagccaacccctcccgcatctcagg

SEQ ID NO: 5085096 - DNA, 25 bp, Homo sapien
ccactgtggccatctggggagccag

SEQ ID NO: 5085097 - DNA, 25 bp, Homo sapien
atgctctgtgcagcgggtacaccca

SEQ ID NO: 5085098 - DNA, 25 bp, Homo sapien
catctcccaagtccacgggttggga

SEQ ID NO: 5085099 - DNA, 25 bp, Homo sapien
ctaacagaagagtgtgagaagtcgc

SEQ ID NO: 5085100 - DNA, 25 bp, Homo sapien
tgcttgatagccatccatctcccaa

SEQ ID NO: 5085101 - DNA, 25 bp, Homo sapien
aaggggtagtgtctccaactggtga

SEQ ID NO: 5085102 - DNA, 25 bp, Homo sapien
aggagaaggggtagtgtctccaact

SEQ ID NO: 5085103 - DNA, 25 bp, Homo sapien
gtgtctccaactggtgagggaggca

SEQ ID NO: 5085104 - DNA, 25 bp, Homo sapien
tagtgtctccaactggtgagggagg

SEQ ID NO: 5085105 - DNA, 25 bp, Homo sapien
tgtgctggcccacaccaagcacaca

SEQ ID NO: 5085106 - DNA, 25 bp, Homo sapien
aaggatagccagtgaaacaaggaag

SEQ ID NO: 5085107 - DNA, 25 bp, Homo sapien
gagggcccaaaggatagccagtgaa

SEQ ID NO: 5085108 - DNA, 25 bp, Homo sapien
gcccaaaggatagccagtgaaacaa

SEQ ID NO: 5085109 - DNA, 25 bp, Homo sapien
gccacattttcgcaactttcagaaa

SEQ ID NO: 5085110 - DNA, 25 bp, Homo sapien
aaaagcaacactctgcaaggctgac

SEQ ID NO: 5085111 - DNA, 25 bp, Homo sapien
ctgtgggaggtaccattgatttttt

SEQ ID NO: 5085112 - DNA, 25 bp, Homo sapien
tttaactcgctcagacaaagccaca

SEQ ID NO: 5085113 - DNA, 25 bp, Homo sapien
tgctcggtgaccccacctgcattga

SEQ ID NO: 5085114 - DNA, 25 bp, Homo sapien
gtgaccccacctgcattgatttctg

SEQ ID NO: 5085115 - DNA, 25 bp, Homo sapien
ctcggtgaccccacctgcattgatt

SEQ ID NO: 5085116 - DNA, 25 bp, Homo sapien
gaccccacctgcattgatttctgcc

SEQ ID NO: 5085117 - DNA, 25 bp, Homo sapien
ctgtagtgagagtgatggcaagaca

SEQ ID NO: 5085118 - DNA, 25 bp, Homo sapien
cagagatgcgaaccgggaagaacca

SEQ ID NO: 5085119 - DNA, 25 bp, Homo sapien
gatgcgaaccgggaagaaccaagca

SEQ ID NO: 5085120 - DNA, 25 bp, Homo sapien
tgcaaagtagtgctgaatttaccag

SEQ ID NO: 5085121 - DNA, 25 bp, Homo sapien
agccagagatgcgaaccgggaagaa

SEQ ID NO: 5085122 - DNA, 25 bp, Homo sapien
gactttgccgtccagagttttctaa

SEQ ID NO: 5085123 - DNA, 25 bp, Homo sapien
gaaccacgtcctgtcgggaccagga

SEQ ID NO: 5085124 - DNA, 25 bp, Homo sapien
gccaggccagagacgctagtggcca

SEQ ID NO: 5085125 - DNA, 25 bp, Homo sapien
gctagtggccaacttggtgctcttt

SEQ ID NO: 5085126 - DNA, 25 bp, Homo sapien
catttagcaacgaacacaaagccac

SEQ ID NO: 5085127 - DNA, 25 bp, Homo sapien
gccgcatttagcaacgaacacaaag

SEQ ID NO: 5085128 - DNA, 25 bp, Homo sapien
ttagcaacgaacacaaagccacaca

SEQ ID NO: 5085129 - DNA, 25 bp, Homo sapien
aggccgcatttagcaacgaacacaa

SEQ ID NO: 5085130 - DNA, 25 bp, Homo sapien
tctttaaaccgcttcgaagggcatc

SEQ ID NO: 5085131 - DNA, 25 bp, Homo sapien
tgccttcattaaacgcctcgtctga

SEQ ID NO: 5085132 - DNA, 25 bp, Homo sapien
tctgaagcaggataaatcttcggtg

SEQ ID NO: 5085133 - DNA, 25 bp, Homo sapien
tctgcgtgcacaaaacgggctttct

SEQ ID NO: 5085134 - DNA, 25 bp, Homo sapien
actctgttctacagtcccctccatg

SEQ ID NO: 5085135 - DNA, 25 bp, Homo sapien
tccaactctgttctacagtcccctc

SEQ ID NO: 5085136 - DNA, 25 bp, Homo sapien
ctgtttgtattataagcggctcctc

SEQ ID NO: 5085137 - DNA, 25 bp, Homo sapien
tttgtattataagcggctcctccaa

SEQ ID NO: 5085138 - DNA, 25 bp, Homo sapien
caactctgagtattttcaaacgaaa

SEQ ID NO: 5085139 - DNA, 25 bp, Homo sapien
tacacaaccttgcagcagatacatg

SEQ ID NO: 5085140 - DNA, 25 bp, Homo sapien
tacatggtccctagggagtcaggct

SEQ ID NO: 5085141 - DNA, 25 bp, Homo sapien
tgagagattacacaaccttgcagca

SEQ ID NO: 5085142 - DNA, 25 bp, Homo sapien
aaatagggatatctgggttctgtcc

SEQ ID NO: 5085143 - DNA, 25 bp, Homo sapien
gatcattgaaagatattaggttggt

SEQ ID NO: 5085144 - DNA, 25 bp, Homo sapien
ttcattattgtgtgggcctgtctgg

SEQ ID NO: 5085145 - DNA, 25 bp, Homo sapien
tgtctatgcggcaggccgaaatagg

SEQ ID NO: 5085146 - DNA, 25 bp, Homo sapien
tgactcctggagtggaaagcaggct

SEQ ID NO: 5085147 - DNA, 25 bp, Homo sapien
cctgactcctggagtggaaagcagg

SEQ ID NO: 5085148 - DNA, 25 bp, Homo sapien
ctcctggagtggaaagcaggcttcc

SEQ ID NO: 5085149 - DNA, 25 bp, Homo sapien
gactcctggagtggaaagcaggctt

SEQ ID NO: 5085150 - DNA, 25 bp, Homo sapien
gacacccagtacaggtgtggacacc

SEQ ID NO: 5085151 - DNA, 25 bp, Homo sapien
acaggtgtggacaccccagaggcag

SEQ ID NO: 5085152 - DNA, 25 bp, Homo sapien
aggagcctgacacccagtacaggtg

SEQ ID NO: 5085153 - DNA, 25 bp, Homo sapien
cacggatgaggtggactcgccatga

SEQ ID NO: 5085154 - DNA, 25 bp, Homo sapien
atcctctgacactcctctccagccg

SEQ ID NO: 5085155 - DNA, 25 bp, Homo sapien
tgggtttcatcacattcaacttccc

SEQ ID NO: 5085156 - DNA, 25 bp, Homo sapien
tctgcagctcaagtgcaaaaccaca

SEQ ID NO: 5085157 - DNA, 25 bp, Homo sapien
ggccacccgaattcccatcctctga

SEQ ID NO: 5085158 - DNA, 25 bp, Homo sapien
catctaggagaatctgggtcactca

SEQ ID NO: 5085159 - DNA, 25 bp, Homo sapien
gagaatctgggtcactcagggccct

SEQ ID NO: 5085160 - DNA, 25 bp, Homo sapien
tccacagtggggcatctaggagaat

SEQ ID NO: 5085161 - DNA, 25 bp, Homo sapien
gggcatctaggagaatctgggtcac

SEQ ID NO: 5085162 - DNA, 25 bp, Homo sapien
ctgcttcctcgtaatagggcagggc

SEQ ID NO: 5085163 - DNA, 25 bp, Homo sapien
cacatgggaggctgccccttagctt

SEQ ID NO: 5085164 - DNA, 25 bp, Homo sapien
gggtgaagaagagggcggccacatg

SEQ ID NO: 5085165 - DNA, 25 bp, Homo sapien
cttcctcgtaatagggcagggccct

SEQ ID NO: 5085166 - DNA, 25 bp, Homo sapien
accctctcctcgaggcgctcgggcg

SEQ ID NO: 5085167 - DNA, 25 bp, Homo sapien
ccatttcaccctctcctcgaggcgc

SEQ ID NO: 5085168 - DNA, 25 bp, Homo sapien
tcaccctctcctcgaggcgctcggg

SEQ ID NO: 5085169 - DNA, 25 bp, Homo sapien
tttcaccctctcctcgaggcgctcg

SEQ ID NO: 5085170 - DNA, 25 bp, Homo sapien
agagaggctgcctgaatactgcata

SEQ ID NO: 5085171 - DNA, 25 bp, Homo sapien
tccccttgggtccagttccctctgc

SEQ ID NO: 5085172 - DNA, 25 bp, Homo sapien
taaaacttgatggtttccgagagaa

SEQ ID NO: 5085173 - DNA, 25 bp, Homo sapien
tggttgatattcatctccactccag

SEQ ID NO: 5085174 - DNA, 25 bp, Homo sapien
caagatgattgttctcaccccttct

SEQ ID NO: 5085175 - DNA, 25 bp, Homo sapien
agatgattgttctcaccccttctct

SEQ ID NO: 5085176 - DNA, 25 bp, Homo sapien
ctggagcctccagggggatcccttg

SEQ ID NO: 5085177 - DNA, 25 bp, Homo sapien
cccttgtttactctcaagatgattg

SEQ ID NO: 5085178 - DNA, 25 bp, Homo sapien
gggcaatgaacgtcaccttagcctt

SEQ ID NO: 5085179 - DNA, 25 bp, Homo sapien
aatgaacgtcaccttagccttcacc

SEQ ID NO: 5085180 - DNA, 25 bp, Homo sapien
tccccgggcaatgaacgtcacctta

SEQ ID NO: 5085181 - DNA, 25 bp, Homo sapien
cccgggcaatgaacgtcaccttagc

SEQ ID NO: 5085182 - DNA, 25 bp, Homo sapien
tgggcccgtcccgagctggaatgct

SEQ ID NO: 5085183 - DNA, 25 bp, Homo sapien
ccaaggtccagtaggctgagcattc

SEQ ID NO: 5085184 - DNA, 25 bp, Homo sapien
ccgtgtaggacttgaattagatgct

SEQ ID NO: 5085185 - DNA, 25 bp, Homo sapien
ctgggctccgtgtaggacttgaatt

SEQ ID NO: 5085186 - DNA, 25 bp, Homo sapien
tgggctgagagttcccttatccggt

SEQ ID NO: 5085187 - DNA, 25 bp, Homo sapien
gatgcttcggagtgaaccagctgac

SEQ ID NO: 5085188 - DNA, 25 bp, Homo sapien
agtgaaccagctgaccagaccctgt

SEQ ID NO: 5085189 - DNA, 25 bp, Homo sapien
ccttatccggtagggatgcttcgga

SEQ ID NO: 5085190 - DNA, 25 bp, Homo sapien
cctgggagtcggggctgcttagaga

SEQ ID NO: 5085191 - DNA, 25 bp, Homo sapien
agtcggggctgcttagagaggcccc

SEQ ID NO: 5085192 - DNA, 25 bp, Homo sapien
ggggctgcttagagaggccccccac

SEQ ID NO: 5085193 - DNA, 25 bp, Homo sapien
tcggggctgcttagagaggcccccc

SEQ ID NO: 5085194 - DNA, 25 bp, Homo sapien
ggctgccagtgacggcctcttcttg

SEQ ID NO: 5085195 - DNA, 25 bp, Homo sapien
gagcggctgccagtgacggcctctt

SEQ ID NO: 5085196 - DNA, 25 bp, Homo sapien
agagcggctgccagtgacggcctct

SEQ ID NO: 5085197 - DNA, 25 bp, Homo sapien
gcggctgccagtgacggcctcttct

SEQ ID NO: 5085198 - DNA, 25 bp, Homo sapien
gggcaggcagtcacatgcctgtttc

SEQ ID NO: 5085199 - DNA, 25 bp, Homo sapien
cctgtttcttagctccagcttcatg

SEQ ID NO: 5085200 - DNA, 25 bp, Homo sapien
tccagcttcatgtttgtgagtaagc

SEQ ID NO: 5085201 - DNA, 25 bp, Homo sapien
tagaggaggacaaacaagggtgggc

SEQ ID NO: 5085202 - DNA, 25 bp, Homo sapien
gctgctacccagcaaggcactggtg

SEQ ID NO: 5085203 - DNA, 25 bp, Homo sapien
cccagagtgacaaacagccccatct

SEQ ID NO: 5085204 - DNA, 25 bp, Homo sapien
cagcaaggcactggtgacactaggc

SEQ ID NO: 5085205 - DNA, 25 bp, Homo sapien
gggaactagagcagctgctacccag

SEQ ID NO: 5085206 - DNA, 25 bp, Homo sapien
gggtctaagcatgcagctccacaca

SEQ ID NO: 5085207 - DNA, 25 bp, Homo sapien
tccgggtctaagcatgcagctccac

SEQ ID NO: 5085208 - DNA, 25 bp, Homo sapien
gggactccgggtctaagcatgcagc

SEQ ID NO: 5085209 - DNA, 25 bp, Homo sapien
agggaccctcacaccttcattctgg

SEQ ID NO: 5085210 - DNA, 25 bp, Homo sapien
gaactggaattttcatacacagcta

SEQ ID NO: 5085211 - DNA, 25 bp, Homo sapien
taatgagaacttaaatggtacaacc

SEQ ID NO: 5085212 - DNA, 25 bp, Homo sapien
aagttaaacatacgcatactgtggc

SEQ ID NO: 5085213 - DNA, 25 bp, Homo sapien
aagactgactatacgaagtgctggc

SEQ ID NO: 5085214 - DNA, 25 bp, Homo sapien
gcctgggcgagtctgcaagtacgta

SEQ ID NO: 5085215 - DNA, 25 bp, Homo sapien
cgtgtgttcacaccaggaggtctga

SEQ ID NO: 5085216 - DNA, 25 bp, Homo sapien
caagagcctggccaaaaacggcaga

SEQ ID NO: 5085217 - DNA, 25 bp, Homo sapien
tgcatgtggcgatacacgtgtgcct

SEQ ID NO: 5085218 - DNA, 25 bp, Homo sapien
tgcctccctgtgcataaggtggcag

SEQ ID NO: 5085219 - DNA, 25 bp, Homo sapien
ctgctgtactccctgtgagacctgg

SEQ ID NO: 5085220 - DNA, 25 bp, Homo sapien
aggaagaagaatcgaccgtctgacc

SEQ ID NO: 5085221 - DNA, 25 bp, Homo sapien
atgcctccctgtgcataaggtggca

SEQ ID NO: 5085222 - DNA, 25 bp, Homo sapien
gtatgagacacaagcatcccgggca

SEQ ID NO: 5085223 - DNA, 25 bp, Homo sapien
agaggccccaccgaggtatgagaca

SEQ ID NO: 5085224 - DNA, 25 bp, Homo sapien
ccagggtgccaatgcaaagaggccc

SEQ ID NO: 5085225 - DNA, 25 bp, Homo sapien
caccctgggcatagctttgggaggc

SEQ ID NO: 5085226 - DNA, 25 bp, Homo sapien
ccgtgtcggggagaaaggcagtggc

SEQ ID NO: 5085227 - DNA, 25 bp, Homo sapien
tgtcggggagaaaggcagtggccat

SEQ ID NO: 5085228 - DNA, 25 bp, Homo sapien
gtgtcggggagaaaggcagtggcca

SEQ ID NO: 5085229 - DNA, 25 bp, Homo sapien
cgtgtcggggagaaaggcagtggcc

SEQ ID NO: 5085230 - DNA, 25 bp, Homo sapien
gttgggctttctgtggcgagccgaa

SEQ ID NO: 5085231 - DNA, 25 bp, Homo sapien
ccgaagagagcccatgcatgtggtt

SEQ ID NO: 5085232 - DNA, 25 bp, Homo sapien
ggccgtgacaggacgggaatccaga

SEQ ID NO: 5085233 - DNA, 25 bp, Homo sapien
gcatgtggttttcgcacatgtggag

SEQ ID NO: 5085234 - DNA, 25 bp, Homo sapien
cagaactagccagcggccgatcctg

SEQ ID NO: 5085235 - DNA, 25 bp, Homo sapien
cggccgatcctgctccgggaccctg

SEQ ID NO: 5085236 - DNA, 25 bp, Homo sapien
ctagagacgcagaactagccagcgg

SEQ ID NO: 5085237 - DNA, 25 bp, Homo sapien
gacgcagaactagccagcggccgat

SEQ ID NO: 5085238 - DNA, 25 bp, Homo sapien
tcccagggacaagaagctttgactc

SEQ ID NO: 5085239 - DNA, 25 bp, Homo sapien
ggtgataagagaaggcgatttgacc

SEQ ID NO: 5085240 - DNA, 25 bp, Homo sapien
taggtctgggtcctgtagcagtttg

SEQ ID NO: 5085241 - DNA, 25 bp, Homo sapien
cctgtagcagtttggcagcaacatc

SEQ ID NO: 5085242 - DNA, 25 bp, Homo sapien
ctggtacctcactctgggggtgagg

SEQ ID NO: 5085243 - DNA, 25 bp, Homo sapien
tcactctgggggtgaggtggccacc

SEQ ID NO: 5085244 - DNA, 25 bp, Homo sapien
ctcactctgggggtgaggtggccac

SEQ ID NO: 5085245 - DNA, 25 bp, Homo sapien
ctctgggggtgaggtggccacccac

SEQ ID NO: 5085246 - DNA, 25 bp, Homo sapien
gtctggcatacagggtagacccact

SEQ ID NO: 5085247 - DNA, 25 bp, Homo sapien
ccttcagtctggcatacagggtaga

SEQ ID NO: 5085248 - DNA, 25 bp, Homo sapien
gcatacagggtagacccactggtac

SEQ ID NO: 5085249 - DNA, 25 bp, Homo sapien
tgcacacagctggttccagctttgt

SEQ ID NO: 5085250 - DNA, 25 bp, Homo sapien
gaatgactttcgcagtgatttccac

SEQ ID NO: 5085251 - DNA, 25 bp, Homo sapien
cgcagtgatttccactgggccatgg

SEQ ID NO: 5085252 - DNA, 25 bp, Homo sapien
tttcgcagtgatttccactgggcca

SEQ ID NO: 5085253 - DNA, 25 bp, Homo sapien
gactttcgcagtgatttccactggg

SEQ ID NO: 5085254 - DNA, 25 bp, Homo sapien
catttcctcctcgtcgtggcgcagg

SEQ ID NO: 5085255 - DNA, 25 bp, Homo sapien
tccttggcgaaggactgttctctca

SEQ ID NO: 5085256 - DNA, 25 bp, Homo sapien
tctctcccacgtcaacagtcctgtg

SEQ ID NO: 5085257 - DNA, 25 bp, Homo sapien
ggtccagaggctgcgcccatctctc

SEQ ID NO: 5085258 - DNA, 25 bp, Homo sapien
gctgagggcggctctttgattctcc

SEQ ID NO: 5085259 - DNA, 25 bp, Homo sapien
cgagctgagggcggctctttgattc

SEQ ID NO: 5085260 - DNA, 25 bp, Homo sapien
tgagggcggctctttgattctccag

SEQ ID NO: 5085261 - DNA, 25 bp, Homo sapien
tagaggaagtgttctccgagctgag

SEQ ID NO: 5085262 - DNA, 25 bp, Homo sapien
tggccaaggttcttttagtccaaga

SEQ ID NO: 5085263 - DNA, 25 bp, Homo sapien
gctttggagacttcctgcaaattcc

SEQ ID NO: 5085264 - DNA, 25 bp, Homo sapien
tcaggtcgaagcaggcactgggatc

SEQ ID NO: 5085265 - DNA, 25 bp, Homo sapien
cagggaccagtgttccttggccaag

SEQ ID NO: 5085266 - DNA, 25 bp, Homo sapien
cttctcggtgactccattactgagg

SEQ ID NO: 5085267 - DNA, 25 bp, Homo sapien
cccttctcggtgactccattactga

SEQ ID NO: 5085268 - DNA, 25 bp, Homo sapien
ttcccttctcggtgactccattact

SEQ ID NO: 5085269 - DNA, 25 bp, Homo sapien
agcttcccttctcggtgactccatt

SEQ ID NO: 5085270 - DNA, 25 bp, Homo sapien
caggagggacagcccccctaccctg

SEQ ID NO: 5085271 - DNA, 25 bp, Homo sapien
tgccatggatggcaggagggacagc

SEQ ID NO: 5085272 - DNA, 25 bp, Homo sapien
gatggcaggagggacagccccccta

SEQ ID NO: 5085273 - DNA, 25 bp, Homo sapien
ctgccatggatggcaggagggacag

SEQ ID NO: 5085274 - DNA, 25 bp, Homo sapien
ttccccacagtaccctggcttggtg

SEQ ID NO: 5085275 - DNA, 25 bp, Homo sapien
catggcagaattgctgttcccagga

SEQ ID NO: 5085276 - DNA, 25 bp, Homo sapien
tggagacgcagcagacctttcccca

SEQ ID NO: 5085277 - DNA, 25 bp, Homo sapien
agggtaggtaaacgctggagacgca

SEQ ID NO: 5085278 - DNA, 25 bp, Homo sapien
cttgctttcaaggagtttctgctcc

SEQ ID NO: 5085279 - DNA, 25 bp, Homo sapien
caaggagtttctgctccgtgtcctc

SEQ ID NO: 5085280 - DNA, 25 bp, Homo sapien
ttcatttcgtcggactggctgcgcc

SEQ ID NO: 5085281 - DNA, 25 bp, Homo sapien
ctgctttcatttcgtcggactggct

SEQ ID NO: 5085282 - DNA, 25 bp, Homo sapien
cccatttatgaagaagcttccctgg

SEQ ID NO: 5085283 - DNA, 25 bp, Homo sapien
gggacgcccatttatgaagaagctt

SEQ ID NO: 5085284 - DNA, 25 bp, Homo sapien
gacgcccatttatgaagaagcttcc

SEQ ID NO: 5085285 - DNA, 25 bp, Homo sapien
ctggggacgcccatttatgaagaag

SEQ ID NO: 5085286 - DNA, 25 bp, Homo sapien
aatgtcgatataatgttttgagggc

SEQ ID NO: 5085287 - DNA, 25 bp, Homo sapien
gctttgacagacactagagcctcaa

SEQ ID NO: 5085288 - DNA, 25 bp, Homo sapien
gggtcccacatgtaacctgggaatg

SEQ ID NO: 5085289 - DNA, 25 bp, Homo sapien
tgttttgagggctttgacagacact

SEQ ID NO: 5085290 - DNA, 25 bp, Homo sapien
gccacatccgtgctgggcctgtctg

SEQ ID NO: 5085291 - DNA, 25 bp, Homo sapien
aagcccctgggccatttcccagagg

SEQ ID NO: 5085292 - DNA, 25 bp, Homo sapien
ctccggtggcccagtctttccctct

SEQ ID NO: 5085293 - DNA, 25 bp, Homo sapien
atttcccagaggccacatccgtgct

SEQ ID NO: 5085294 - DNA, 25 bp, Homo sapien
tcagcttctgatgtgtccgggggga

SEQ ID NO: 5085295 - DNA, 25 bp, Homo sapien
gggggactggtgacctcagcccttc

SEQ ID NO: 5085296 - DNA, 25 bp, Homo sapien
tgcagaagtcatggcggcttgctga

SEQ ID NO: 5085297 - DNA, 25 bp, Homo sapien
tcatggcggcttgctgagcctcagc

SEQ ID NO: 5085298 - DNA, 25 bp, Homo sapien
gacagggccttgcccttcccaggca

SEQ ID NO: 5085299 - DNA, 25 bp, Homo sapien
agggccttgcccttcccaggcagga

SEQ ID NO: 5085300 - DNA, 25 bp, Homo sapien
tgcccatctggagacagggccttgc

SEQ ID NO: 5085301 - DNA, 25 bp, Homo sapien
ttgcccatctggagacagggccttg

SEQ ID NO: 5085302 - DNA, 25 bp, Homo sapien
tccccacagcttcatgaggtttcag

SEQ ID NO: 5085303 - DNA, 25 bp, Homo sapien
gcactccccacagcttcatgaggtt

SEQ ID NO: 5085304 - DNA, 25 bp, Homo sapien
aagtcattcggcctggactctggtc

SEQ ID NO: 5085305 - DNA, 25 bp, Homo sapien
gttgaagaccatgctctggatgtga

SEQ ID NO: 5085306 - DNA, 25 bp, Homo sapien
cgacccacttcatgctgggaaagcc

SEQ ID NO: 5085307 - DNA, 25 bp, Homo sapien
cagtgattccctgagtctgccctgc

SEQ ID NO: 5085308 - DNA, 25 bp, Homo sapien
cctggaagaacgacccacttcatgc

SEQ ID NO: 5085309 - DNA, 25 bp, Homo sapien
gtgattccctgagtctgccctgcgg

SEQ ID NO: 5085310 - DNA, 25 bp, Homo sapien
aggcctgccgtggaaagccagagaa

SEQ ID NO: 5085311 - DNA, 25 bp, Homo sapien
cttaggaattgcaatgatagcacgc

SEQ ID NO: 5085312 - DNA, 25 bp, Homo sapien
tgcaatgatagcacgcagcagattc

SEQ ID NO: 5085313 - DNA, 25 bp, Homo sapien
tatgagcaaggcctgccgtggaaag

SEQ ID NO: 5085314 - DNA, 25 bp, Homo sapien
cctgcactgctataattctgacttc

SEQ ID NO: 5085315 - DNA, 25 bp, Homo sapien
tgcactgctataattctgacttcct

SEQ ID NO: 5085316 - DNA, 25 bp, Homo sapien
tccctgcactgctataattctgact

SEQ ID NO: 5085317 - DNA, 25 bp, Homo sapien
ttccctgcactgctataattctgac

SEQ ID NO: 5085318 - DNA, 25 bp, Homo sapien
cccagacttcccaggtgccaccagc

SEQ ID NO: 5085319 - DNA, 25 bp, Homo sapien
ctggccatttgaggccccagacttc

SEQ ID NO: 5085320 - DNA, 25 bp, Homo sapien
gacttcccaggtgccaccagcctac

SEQ ID NO: 5085321 - DNA, 25 bp, Homo sapien
cagacttcccaggtgccaccagcct

SEQ ID NO: 5085322 - DNA, 25 bp, Homo sapien
tgagaagcagacaagtgccacaatt

SEQ ID NO: 5085323 - DNA, 25 bp, Homo sapien
tttgagaagcagacaagtgccacaa

SEQ ID NO: 5085324 - DNA, 25 bp, Homo sapien
ttgagaagcagacaagtgccacaat

SEQ ID NO: 5085325 - DNA, 25 bp, Homo sapien
ctttgagaagcagacaagtgccaca

SEQ ID NO: 5085326 - DNA, 25 bp, Homo sapien
caggtttatgggcccagacaccttc

SEQ ID NO: 5085327 - DNA, 25 bp, Homo sapien
gcagaacctggtcctggctgaacta

SEQ ID NO: 5085328 - DNA, 25 bp, Homo sapien
taccactgagcttatgtgacccctc

SEQ ID NO: 5085329 - DNA, 25 bp, Homo sapien
ggctgaactaccactgagcttatgt

SEQ ID NO: 5085330 - DNA, 25 bp, Homo sapien
ggttggctgaaagacttgtgctgca

SEQ ID NO: 5085331 - DNA, 25 bp, Homo sapien
caatggccgggaagaggttggctga

SEQ ID NO: 5085332 - DNA, 25 bp, Homo sapien
ctgggagacgccgagacccactgag

SEQ ID NO: 5085333 - DNA, 25 bp, Homo sapien
ctgcaggaaaactcctcctgtccct

SEQ ID NO: 5085334 - DNA, 25 bp, Homo sapien
cacagtgtgcagtgactgtcctgtc

SEQ ID NO: 5085335 - DNA, 25 bp, Homo sapien
tcctgtcgacagcaggctttgccac

SEQ ID NO: 5085336 - DNA, 25 bp, Homo sapien
tgcagtgactgtcctgtcgacagca

SEQ ID NO: 5085337 - DNA, 25 bp, Homo sapien
cgcaaggcacacctgtccacttctc

SEQ ID NO: 5085338 - DNA, 25 bp, Homo sapien
tcttgtggatgtggactgtatgggt

SEQ ID NO: 5085339 - DNA, 25 bp, Homo sapien
cctggagagcatcaggtttgccaga

SEQ ID NO: 5085340 - DNA, 25 bp, Homo sapien
ctcatcctggagagcatcaggtttg

SEQ ID NO: 5085341 - DNA, 25 bp, Homo sapien
tggatgtggactgtatgggtacaca

SEQ ID NO: 5085342 - DNA, 25 bp, Homo sapien
ttgcccatgtccagatctggagccg

SEQ ID NO: 5085343 - DNA, 25 bp, Homo sapien
catgtccagatctggagccggacaa

SEQ ID NO: 5085344 - DNA, 25 bp, Homo sapien
tccagatctggagccggacaatcgc

SEQ ID NO: 5085345 - DNA, 25 bp, Homo sapien
gatctggagccggacaatcgcccct

SEQ ID NO: 5085346 - DNA, 25 bp, Homo sapien
ctttgtaaatgcagatggccccaga

SEQ ID NO: 5085347 - DNA, 25 bp, Homo sapien
cactccttggaaccagtgatggaca

SEQ ID NO: 5085348 - DNA, 25 bp, Homo sapien
cctgtgtaaggcctgaacttcctcc

SEQ ID NO: 5085349 - DNA, 25 bp, Homo sapien
aacactcaggagtaagttcgggcct

SEQ ID NO: 5085350 - DNA, 25 bp, Homo sapien
cctggatggtaccttcatgatgcag

SEQ ID NO: 5085351 - DNA, 25 bp, Homo sapien
ggaaggtcctggatggtaccttcat

SEQ ID NO: 5085352 - DNA, 25 bp, Homo sapien
tgggaactgccaacgggcatctcca

SEQ ID NO: 5085353 - DNA, 25 bp, Homo sapien
cctgggaactgccaacgggcatctc

SEQ ID NO: 5085354 - DNA, 25 bp, Homo sapien
caaaggcggccttccgtgaggtagt

SEQ ID NO: 5085355 - DNA, 25 bp, Homo sapien
acatgtggtcgccttgcattgtacc

SEQ ID NO: 5085356 - DNA, 25 bp, Homo sapien
tctggtgcaggaactacatgtggtc

SEQ ID NO: 5085357 - DNA, 25 bp, Homo sapien
tcacaggtgagatccaggaaaatgt

SEQ ID NO: 5085358 - DNA, 25 bp, Homo sapien
cacttgaaacctcggcaagagtctt

SEQ ID NO: 5085359 - DNA, 25 bp, Homo sapien
agttcagtattgcaaagggaggtca

SEQ ID NO: 5085360 - DNA, 25 bp, Homo sapien
ccagtgtgggaatattttcgggcag

SEQ ID NO: 5085361 - DNA, 25 bp, Homo sapien
ggaggatgttgccaaggtccctcaa

SEQ ID NO: 5085362 - DNA, 25 bp, Homo sapien
aagagtcttctgtcagcaaagtttg

SEQ ID NO: 5085363 - DNA, 25 bp, Homo sapien
gcaagagtcttctgtcagcaaagtt

SEQ ID NO: 5085364 - DNA, 25 bp, Homo sapien
cagcaagagtcttctgtcagcaaag

SEQ ID NO: 5085365 - DNA, 25 bp, Homo sapien
agcagcaagagtcttctgtcagcaa

SEQ ID NO: 5085366 - DNA, 25 bp, Homo sapien
attgcttccttacccacgtgcctga

SEQ ID NO: 5085367 - DNA, 25 bp, Homo sapien
gccaacagatatgcacaaggtccct

SEQ ID NO: 5085368 - DNA, 25 bp, Homo sapien
tgcctgagcacaacacaagaactac

SEQ ID NO: 5085369 - DNA, 25 bp, Homo sapien
tctaagatgcaatgagccaacagat

SEQ ID NO: 5085370 - DNA, 25 bp, Homo sapien
tggagcctgcagggtacaaagccat

SEQ ID NO: 5085371 - DNA, 25 bp, Homo sapien
tcagcagatgcaatcctgctggagc

SEQ ID NO: 5085372 - DNA, 25 bp, Homo sapien
ctcagcagatgcaatcctgctggag

SEQ ID NO: 5085373 - DNA, 25 bp, Homo sapien
ctggagcctgcagggtacaaagcca

SEQ ID NO: 5085374 - DNA, 25 bp, Homo sapien
tagaccgccgtcgtagatcccggga

SEQ ID NO: 5085375 - DNA, 25 bp, Homo sapien
aggagtggtacccagagagtatgaa

SEQ ID NO: 5085376 - DNA, 25 bp, Homo sapien
ccaggaaggaacttgcagggggtgt

SEQ ID NO: 5085377 - DNA, 25 bp, Homo sapien
gagatgggagcaggcgagtgtagac

SEQ ID NO: 5085378 - DNA, 25 bp, Homo sapien
gggtgtttggaataagcgagcaaca

SEQ ID NO: 5085379 - DNA, 25 bp, Homo sapien
aataagcgagcaacagcggcacatc

SEQ ID NO: 5085380 - DNA, 25 bp, Homo sapien
gcacatccttggcatgacgggcccg

SEQ ID NO: 5085381 - DNA, 25 bp, Homo sapien
gagcaacagcggcacatccttggca

SEQ ID NO: 5085382 - DNA, 25 bp, Homo sapien
cctgcattgcatgaattggctggca

SEQ ID NO: 5085383 - DNA, 25 bp, Homo sapien
tcttgctcctcatgggctctctgtc

SEQ ID NO: 5085384 - DNA, 25 bp, Homo sapien
caagtctgccctagagcagctttgg

SEQ ID NO: 5085385 - DNA, 25 bp, Homo sapien
tcaggaattctccaattctagggcc

SEQ ID NO: 5085386 - DNA, 25 bp, Homo sapien
gctggctagctactcttgactctaa

SEQ ID NO: 5085387 - DNA, 25 bp, Homo sapien
gccaggtacatatggtgtgtatgcg

SEQ ID NO: 5085388 - DNA, 25 bp, Homo sapien
tgtgtatgcgaacataggaacaggg

SEQ ID NO: 5085389 - DNA, 25 bp, Homo sapien
tccatgggactcaggttgagagact

SEQ ID NO: 5085390 - DNA, 25 bp, Homo sapien
aatgtctcagtaagacgggctcgga

SEQ ID NO: 5085391 - DNA, 25 bp, Homo sapien
cattttccagagtatagccgaggga

SEQ ID NO: 5085392 - DNA, 25 bp, Homo sapien
cttaggctgagggaacattttccag

SEQ ID NO: 5085393 - DNA, 25 bp, Homo sapien
cagtgtcttgcatggcgtggtagca

SEQ ID NO: 5085394 - DNA, 25 bp, Homo sapien
tggtttccagttcctggacggtagc

SEQ ID NO: 5085395 - DNA, 25 bp, Homo sapien
ggctctggctgaggttggtttccag

SEQ ID NO: 5085396 - DNA, 25 bp, Homo sapien
tccagttcctggacggtagccctgg

SEQ ID NO: 5085397 - DNA, 25 bp, Homo sapien
tctggctgaggttggtttccagttc

SEQ ID NO: 5085398 - DNA, 25 bp, Homo sapien
tcctctcccaatagaagcctctctg

SEQ ID NO: 5085399 - DNA, 25 bp, Homo sapien
cttttctattggagttgccatcttc

SEQ ID NO: 5085400 - DNA, 25 bp, Homo sapien
ctcctctcccaatagaagcctctct

SEQ ID NO: 5085401 - DNA, 25 bp, Homo sapien
cacttttctattggagttgccatct

SEQ ID NO: 5085402 - DNA, 25 bp, Homo sapien
ggagtctctctggaccgaggcccac

SEQ ID NO: 5085403 - DNA, 25 bp, Homo sapien
gccactggtgcaggggtttgagatg

SEQ ID NO: 5085404 - DNA, 25 bp, Homo sapien
gacaggagtctctctggaccgaggc

SEQ ID NO: 5085405 - DNA, 25 bp, Homo sapien
gggtttgagatgggctgcccactgt

SEQ ID NO: 5085406 - DNA, 25 bp, Homo sapien
tcttgagcttggttgtggagtgtcc

SEQ ID NO: 5085407 - DNA, 25 bp, Homo sapien
gcagaaacttgggtgcaactgatat

SEQ ID NO: 5085408 - DNA, 25 bp, Homo sapien
tcaggagggacccacaggagtgtct

SEQ ID NO: 5085409 - DNA, 25 bp, Homo sapien
tgatatttacgatccagcaggctct

SEQ ID NO: 5085410 - DNA, 25 bp, Homo sapien
tgagtgtggaggccttctgggtctg

SEQ ID NO: 5085411 - DNA, 25 bp, Homo sapien
gacgtgaatggaggtagcacaggcc

SEQ ID NO: 5085412 - DNA, 25 bp, Homo sapien
ctgcttcaggagggctgagtgtgga

SEQ ID NO: 5085413 - DNA, 25 bp, Homo sapien
tgggtctgcaaacatcctcctcatg

SEQ ID NO: 5085414 - DNA, 25 bp, Homo sapien
cctttctaacagtgccgtggtgggc

SEQ ID NO: 5085415 - DNA, 25 bp, Homo sapien
gcccttgggtcctttctaacagtgc

SEQ ID NO: 5085416 - DNA, 25 bp, Homo sapien
taacagtgccgtggtgggctgattt

SEQ ID NO: 5085417 - DNA, 25 bp, Homo sapien
tgggtcctttctaacagtgccgtgg

SEQ ID NO: 5085418 - DNA, 25 bp, Homo sapien
tgtgcaccatgtaggaatgcttctc

SEQ ID NO: 5085419 - DNA, 25 bp, Homo sapien
tgcagctgagattggctgtgttcct

SEQ ID NO: 5085420 - DNA, 25 bp, Homo sapien
agtgtggtctgcaccgtctgggtgt

SEQ ID NO: 5085421 - DNA, 25 bp, Homo sapien
aatgcttctcggtccgtgtgtgtga

SEQ ID NO: 5085422 - DNA, 25 bp, Homo sapien
tccttcctcctcagtgtcttccctg

SEQ ID NO: 5085423 - DNA, 25 bp, Homo sapien
ctgctccctgggctcagggacctgc

SEQ ID NO: 5085424 - DNA, 25 bp, Homo sapien
cctcctcagtgtcttccctgctccc

SEQ ID NO: 5085425 - DNA, 25 bp, Homo sapien
tgctccctgggctcagggacctgct

SEQ ID NO: 5085426 - DNA, 25 bp, Homo sapien
gagggagggacatcgggcaaggaca

SEQ ID NO: 5085427 - DNA, 25 bp, Homo sapien
ctttgagggagggacatcgggcaag

SEQ ID NO: 5085428 - DNA, 25 bp, Homo sapien
ttgagggagggacatcgggcaagga

SEQ ID NO: 5085429 - DNA, 25 bp, Homo sapien
gagggacatcgggcaaggacagacc

SEQ ID NO: 5085430 - DNA, 25 bp, Homo sapien
gctgaaatccttctgcggaaggtct

SEQ ID NO: 5085431 - DNA, 25 bp, Homo sapien
aatccttctgcggaaggtctaaggc

SEQ ID NO: 5085432 - DNA, 25 bp, Homo sapien
tctgcggaaggtctaaggcctgcca

SEQ ID NO: 5085433 - DNA, 25 bp, Homo sapien
ggagccagtggtcagctccaagtcc

SEQ ID NO: 5085434 - DNA, 25 bp, Homo sapien
gagccgcgtgtctgagtccacagcg

SEQ ID NO: 5085435 - DNA, 25 bp, Homo sapien
tccttggccagagccgcgtgtctga

SEQ ID NO: 5085436 - DNA, 25 bp, Homo sapien
cccctgctggctagccggcccagaa

SEQ ID NO: 5085437 - DNA, 25 bp, Homo sapien
gctagccggcccagaagctccctgt

SEQ ID NO: 5085438 - DNA, 25 bp, Homo sapien
cagtgctttgctcaataaggcccca

SEQ ID NO: 5085439 - DNA, 25 bp, Homo sapien
agtgtcagactcgttctcagccggg

SEQ ID NO: 5085440 - DNA, 25 bp, Homo sapien
gcggcacccgctgttttgatgactt

SEQ ID NO: 5085441 - DNA, 25 bp, Homo sapien
aaggccccaagggttgctgcaacca

SEQ ID NO: 5085442 - DNA, 25 bp, Homo sapien
cccagttacagactcagccccgacc

SEQ ID NO: 5085443 - DNA, 25 bp, Homo sapien
cttcccagttacagactcagccccg

SEQ ID NO: 5085444 - DNA, 25 bp, Homo sapien
ccttcccagttacagactcagcccc

SEQ ID NO: 5085445 - DNA, 25 bp, Homo sapien
ttcccagttacagactcagccccga

SEQ ID NO: 5085446 - DNA, 25 bp, Homo sapien
attcctccacttgaatgctacatct

SEQ ID NO: 5085447 - DNA, 25 bp, Homo sapien
cagtcacactgtaagccatcatcca

SEQ ID NO: 5085448 - DNA, 25 bp, Homo sapien
gctacatcttagctcacagtcacac

SEQ ID NO: 5085449 - DNA, 25 bp, Homo sapien
tgtccagggcatcttattggccctc

SEQ ID NO: 5085450 - DNA, 25 bp, Homo sapien
tagcagtttgccatccggtgttgtc

SEQ ID NO: 5085451 - DNA, 25 bp, Homo sapien
aatcgctagtacctggagcacccag

SEQ ID NO: 5085452 - DNA, 25 bp, Homo sapien
acgccacgtggttgcggttagcagt

SEQ ID NO: 5085453 - DNA, 25 bp, Homo sapien
tgttccctctgtaaggacgccacgt

SEQ ID NO: 5085454 - DNA, 25 bp, Homo sapien
gctgagagggagcaccatggctgga

SEQ ID NO: 5085455 - DNA, 25 bp, Homo sapien
gctggagtctgagtgtggctggccc

SEQ ID NO: 5085456 - DNA, 25 bp, Homo sapien
ttgccttgggctcttggagctgaga

SEQ ID NO: 5085457 - DNA, 25 bp, Homo sapien
cacctccttgccttgggctcttgga

SEQ ID NO: 5085458 - DNA, 25 bp, Homo sapien
gtccagatgcatgcgcggctgacgt

SEQ ID NO: 5085459 - DNA, 25 bp, Homo sapien
ctagtccagatgcatgcgcggctga

SEQ ID NO: 5085460 - DNA, 25 bp, Homo sapien
gagtcagggcgtctgtccttttcgg

SEQ ID NO: 5085461 - DNA, 25 bp, Homo sapien
tgaggccccagaggtacagattaga

SEQ ID NO: 5085462 - DNA, 25 bp, Homo sapien
gatctacctcctagaatgccagctg

SEQ ID NO: 5085463 - DNA, 25 bp, Homo sapien
tcacacactccgtggctttgattgc

SEQ ID NO: 5085464 - DNA, 25 bp, Homo sapien
ggctttgattgctttcgagtggatc

SEQ ID NO: 5085465 - DNA, 25 bp, Homo sapien
gctttcgagtggatctacctcctag

SEQ ID NO: 5085466 - DNA, 25 bp, Homo sapien
ttcccttcgccgctggttcagtggg

SEQ ID NO: 5085467 - DNA, 25 bp, Homo sapien
aattcccttcgccgctggttcagtg

SEQ ID NO: 5085468 - DNA, 25 bp, Homo sapien
gagaattcccttcgccgctggttca

SEQ ID NO: 5085469 - DNA, 25 bp, Homo sapien
ctgagaattcccttcgccgctggtt

SEQ ID NO: 5085470 - DNA, 25 bp, Homo sapien
atggtcctcttgtctctcacctgga

SEQ ID NO: 5085471 - DNA, 25 bp, Homo sapien
cagatggtcctcttgtctctcacct

SEQ ID NO: 5085472 - DNA, 25 bp, Homo sapien
ggtcctcttgtctctcacctggaca

SEQ ID NO: 5085473 - DNA, 25 bp, Homo sapien
gatggtcctcttgtctctcacctgg

SEQ ID NO: 5085474 - DNA, 25 bp, Homo sapien
ctggcccggggatgtgcaggggtgg

SEQ ID NO: 5085475 - DNA, 25 bp, Homo sapien
cccggggatgtgcaggggtgggagt

SEQ ID NO: 5085476 - DNA, 25 bp, Homo sapien
ggcccggggatgtgcaggggtggga

SEQ ID NO: 5085477 - DNA, 25 bp, Homo sapien
ccggggatgtgcaggggtgggagtt

SEQ ID NO: 5085478 - DNA, 25 bp, Homo sapien
catacctggctggaatgtgcatctc

SEQ ID NO: 5085479 - DNA, 25 bp, Homo sapien
ggaggtgattccacatctgggcttg

SEQ ID NO: 5085480 - DNA, 25 bp, Homo sapien
aggtgattccacatctgggcttgca

SEQ ID NO: 5085481 - DNA, 25 bp, Homo sapien
gcagcaggatcatacctggctggaa

SEQ ID NO: 5085482 - DNA, 25 bp, Homo sapien
gagtggcgggtcattcgtttagccc

SEQ ID NO: 5085483 - DNA, 25 bp, Homo sapien
gcgggtcattcgtttagcccagtga

SEQ ID NO: 5085484 - DNA, 25 bp, Homo sapien
ctgagtggcgggtcattcgtttagc

SEQ ID NO: 5085485 - DNA, 25 bp, Homo sapien
gtcattcgtttagcccagtgatggg

SEQ ID NO: 5085486 - DNA, 25 bp, Homo sapien
aggagctgaagggccggccaaggag

SEQ ID NO: 5085487 - DNA, 25 bp, Homo sapien
cagctgacaggcctctgagtcagga

SEQ ID NO: 5085488 - DNA, 25 bp, Homo sapien
ccaaatctgccaggcctcgggggca

SEQ ID NO: 5085489 - DNA, 25 bp, Homo sapien
cggccaaggaggagtaagtcgtcac

SEQ ID NO: 5085490 - DNA, 25 bp, Homo sapien
cactttgtcaggttccagagccggg

SEQ ID NO: 5085491 - DNA, 25 bp, Homo sapien
ctcactttgtcaggttccagagccg

SEQ ID NO: 5085492 - DNA, 25 bp, Homo sapien
tcaggttccagagccggggcattgc

SEQ ID NO: 5085493 - DNA, 25 bp, Homo sapien
gtctcactttgtcaggttccagagc

SEQ ID NO: 5085494 - DNA, 25 bp, Homo sapien
cgtaacctttgtcccggcgagcgag

SEQ ID NO: 5085495 - DNA, 25 bp, Homo sapien
acagtttggagtggctgctagcaca

SEQ ID NO: 5085496 - DNA, 25 bp, Homo sapien
ctgatactatggggggagtgttcca

SEQ ID NO: 5085497 - DNA, 25 bp, Homo sapien
ctctttgccacaagggggctttggg

SEQ ID NO: 5085498 - DNA, 25 bp, Homo sapien
agggtccactctttgccacaagggg

SEQ ID NO: 5085499 - DNA, 25 bp, Homo sapien
caggtcctgtctgacaccagggtct

SEQ ID NO: 5085500 - DNA, 25 bp, Homo sapien
tgtctgacaccagggtctgggggac

SEQ ID NO: 5085501 - DNA, 25 bp, Homo sapien
tcctgtctgacaccagggtctgggg

SEQ ID NO: 5085502 - DNA, 25 bp, Homo sapien
gtcctgtctgacaccagggtctggg

SEQ ID NO: 5085503 - DNA, 25 bp, Homo sapien
gggaaggacccatttgtcaacacag

SEQ ID NO: 5085504 - DNA, 25 bp, Homo sapien
ggggaaggacccatttgtcaacaca

SEQ ID NO: 5085505 - DNA, 25 bp, Homo sapien
ggaaggacccatttgtcaacacagc

SEQ ID NO: 5085506 - DNA, 25 bp, Homo sapien
gcttgctcacttgggtttatctcca

SEQ ID NO: 5085507 - DNA, 25 bp, Homo sapien
gccaccaatgcttgctcacttgggt

SEQ ID NO: 5085508 - DNA, 25 bp, Homo sapien
cactggcctcagtcacaaacctttt

SEQ ID NO: 5085509 - DNA, 25 bp, Homo sapien
cctctgatccgactggagggtgtgc

SEQ ID NO: 5085510 - DNA, 25 bp, Homo sapien
tgtcccactttcactgcggcactgt

SEQ ID NO: 5085511 - DNA, 25 bp, Homo sapien
cactgcggcactgtgtttgcagcag

SEQ ID NO: 5085512 - DNA, 25 bp, Homo sapien
cactgtgtttgcagcagccccggct

SEQ ID NO: 5085513 - DNA, 25 bp, Homo sapien
acaggcgcgtttgtcccactttcac

SEQ ID NO: 5085514 - DNA, 25 bp, Homo sapien
agggcacggcaggaaggaggcccat

SEQ ID NO: 5085515 - DNA, 25 bp, Homo sapien
gcagggcacggcaggaaggaggccc

SEQ ID NO: 5085516 - DNA, 25 bp, Homo sapien
ctggcacgggcagggcacggcagga

SEQ ID NO: 5085517 - DNA, 25 bp, Homo sapien
gggcagggcacggcaggaaggaggc

SEQ ID NO: 5085518 - DNA, 25 bp, Homo sapien
aaccataaacccgaaggctgagcgg

SEQ ID NO: 5085519 - DNA, 25 bp, Homo sapien
gccctgagtggaagcgagcatttca

SEQ ID NO: 5085520 - DNA, 25 bp, Homo sapien
ccctgcactgttgcttggggagccc

SEQ ID NO: 5085521 - DNA, 25 bp, Homo sapien
gccagggacgtggagggagtgcgct

SEQ ID NO: 5085522 - DNA, 25 bp, Homo sapien
tgcccctttagcatgcggcgctggc

SEQ ID NO: 5085523 - DNA, 25 bp, Homo sapien
cctttagcatgcggcgctggccctc

SEQ ID NO: 5085524 - DNA, 25 bp, Homo sapien
tagcatgcggcgctggccctcctac

SEQ ID NO: 5085525 - DNA, 25 bp, Homo sapien
tttagcatgcggcgctggccctcct

SEQ ID NO: 5085526 - DNA, 25 bp, Homo sapien
cctttgctcctccatactgactggt

SEQ ID NO: 5085527 - DNA, 25 bp, Homo sapien
catgtcatggtacacgccagtccct

SEQ ID NO: 5085528 - DNA, 25 bp, Homo sapien
atggtacacgccagtccctttgctc

SEQ ID NO: 5085529 - DNA, 25 bp, Homo sapien
ttgctcctccatactgactggtgca

SEQ ID NO: 5085530 - DNA, 25 bp, Homo sapien
tgcaagcacatttccgcagtaatgt

SEQ ID NO: 5085531 - DNA, 25 bp, Homo sapien
cacatttccgcagtaatgtgaaggg

SEQ ID NO: 5085532 - DNA, 25 bp, Homo sapien
aggggctgcctattgttttgctgat

SEQ ID NO: 5085533 - DNA, 25 bp, Homo sapien
tttgactgcaagcacatttccgcag

SEQ ID NO: 5085534 - DNA, 25 bp, Homo sapien
ttctggaggaccccaaatggaaggc

SEQ ID NO: 5085535 - DNA, 25 bp, Homo sapien
acatcaaaaccctccaccctggtgt

SEQ ID NO: 5085536 - DNA, 25 bp, Homo sapien
ttctgtaaatagcagcttctggagg

SEQ ID NO: 5085537 - DNA, 25 bp, Homo sapien
tggaggaccccaaatggaaggcttc

SEQ ID NO: 5085538 - DNA, 25 bp, Homo sapien
gagacaggcaagttgcatccaaagc

SEQ ID NO: 5085539 - DNA, 25 bp, Homo sapien
gacaggcaagttgcatccaaagcag

SEQ ID NO: 5085540 - DNA, 25 bp, Homo sapien
tgagacaggcaagttgcatccaaag

SEQ ID NO: 5085541 - DNA, 25 bp, Homo sapien
acaggcaagttgcatccaaagcagc

SEQ ID NO: 5085542 - DNA, 25 bp, Homo sapien
ggcacggacggggagatgagagcaa

SEQ ID NO: 5085543 - DNA, 25 bp, Homo sapien
ctaggatgggcacggacggggagat

SEQ ID NO: 5085544 - DNA, 25 bp, Homo sapien
gatgggcacggacggggagatgaga

SEQ ID NO: 5085545 - DNA, 25 bp, Homo sapien
cacggacggggagatgagagcaaga

SEQ ID NO: 5085546 - DNA, 25 bp, Homo sapien
ttgatgctgacacaggaggtgaaaa

SEQ ID NO: 5085547 - DNA, 25 bp, Homo sapien
atgctgacacaggaggtgaaaatcc

SEQ ID NO: 5085548 - DNA, 25 bp, Homo sapien
tgatgctgacacaggaggtgaaaat

SEQ ID NO: 5085549 - DNA, 25 bp, Homo sapien
cagcagctggcgcttcttggaggag

SEQ ID NO: 5085550 - DNA, 25 bp, Homo sapien
attgcaaaccctccctgaccactcc

SEQ ID NO: 5085551 - DNA, 25 bp, Homo sapien
gcagcagctggcgcttcttggagga

SEQ ID NO: 5085552 - DNA, 25 bp, Homo sapien
cattgcaaaccctccctgaccactc

SEQ ID NO: 5085553 - DNA, 25 bp, Homo sapien
tctggcgttccaaagtcttcaggta

SEQ ID NO: 5085554 - DNA, 25 bp, Homo sapien
tcacaggactgaacacttctggcgt

SEQ ID NO: 5085555 - DNA, 25 bp, Homo sapien
ttcaggtacatcaagaagccacggt

SEQ ID NO: 5085556 - DNA, 25 bp, Homo sapien
agaagccacggtatcctctcaaagc

SEQ ID NO: 5085557 - DNA, 25 bp, Homo sapien
gcatatgtgtcccccagtttgtgtg

SEQ ID NO: 5085558 - DNA, 25 bp, Homo sapien
ttctggataacttagcatatgtgtc

SEQ ID NO: 5085559 - DNA, 25 bp, Homo sapien
ctttctggataacttagcatatgtg

SEQ ID NO: 5085560 - DNA, 25 bp, Homo sapien
ttagcatatgtgtcccccagtttgt

SEQ ID NO: 5085561 - DNA, 25 bp, Homo sapien
tccagggctgaacccagcagtgtct

SEQ ID NO: 5085562 - DNA, 25 bp, Homo sapien
ttctctggtgacatatggcctgggc

SEQ ID NO: 5085563 - DNA, 25 bp, Homo sapien
cctgggcccgtgatgtcaaagggtc

SEQ ID NO: 5085564 - DNA, 25 bp, Homo sapien
tccttggactgtagggctggccatc

SEQ ID NO: 5085565 - DNA, 25 bp, Homo sapien
gtagggctggccatcccacgccaga

SEQ ID NO: 5085566 - DNA, 25 bp, Homo sapien
gacggcactgcaggggctgccgcca

SEQ ID NO: 5085567 - DNA, 25 bp, Homo sapien
gccagggagggaggacggcactgca

SEQ ID NO: 5085568 - DNA, 25 bp, Homo sapien
cctggagccagggagggaggacggc

SEQ ID NO: 5085569 - DNA, 25 bp, Homo sapien
gcaggggctgccgccagaggggcat

SEQ ID NO: 5085570 - DNA, 25 bp, Homo sapien
cagcttcctgtttgggttccacaga

SEQ ID NO: 5085571 - DNA, 25 bp, Homo sapien
tgaactgggagccagttgaactggt

SEQ ID NO: 5085572 - DNA, 25 bp, Homo sapien
gaggtttggccgtttctgcagctga

SEQ ID NO: 5085573 - DNA, 25 bp, Homo sapien
ctcaaaggtccttggccgttggctc

SEQ ID NO: 5085574 - DNA, 25 bp, Homo sapien
ctgaggtttgcccacagtttgcatg

SEQ ID NO: 5085575 - DNA, 25 bp, Homo sapien
ttactcagggggcacgaaacaagac

SEQ ID NO: 5085576 - DNA, 25 bp, Homo sapien
gcacgaaacaagacctctgtctgtg

SEQ ID NO: 5085577 - DNA, 25 bp, Homo sapien
ggtttgcccacagtttgcatgtccc

SEQ ID NO: 5085578 - DNA, 25 bp, Homo sapien
tccctgggagcgcacagatgggagg

SEQ ID NO: 5085579 - DNA, 25 bp, Homo sapien
gagcgcacagatgggagggagagag

SEQ ID NO: 5085580 - DNA, 25 bp, Homo sapien
aaaccagagagatagaaggtgagat

SEQ ID NO: 5085581 - DNA, 25 bp, Homo sapien
ggccatccctgagcattcttgaaag

SEQ ID NO: 5085582 - DNA, 25 bp, Homo sapien
agggagcttgggcaggcattacctc

SEQ ID NO: 5085583 - DNA, 25 bp, Homo sapien
cggagggagcttgggcaggcattac

SEQ ID NO: 5085584 - DNA, 25 bp, Homo sapien
ggagcttgggcaggcattacctcca

SEQ ID NO: 5085585 - DNA, 25 bp, Homo sapien
ctgggaccggagggagcttgggcag

SEQ ID NO: 5085586 - DNA, 25 bp, Homo sapien
ctggtccctggatgttccatccagc

SEQ ID NO: 5085587 - DNA, 25 bp, Homo sapien
ccctgtaggtccagagccgctgcag

SEQ ID NO: 5085588 - DNA, 25 bp, Homo sapien
tggtccctggatgttccatccagca

SEQ ID NO: 5085589 - DNA, 25 bp, Homo sapien
gagcttgccaacaatagccctgtag

SEQ ID NO: 5085590 - DNA, 25 bp, Homo sapien
gctgcggggtaattggaaacctgct

SEQ ID NO: 5085591 - DNA, 25 bp, Homo sapien
gctcccgtggtgactgcttgctggt

SEQ ID NO: 5085592 - DNA, 25 bp, Homo sapien
tgactgcttgcaggcgggcagtctg

SEQ ID NO: 5085593 - DNA, 25 bp, Homo sapien
gagtcctgcaccacttgagaagggg

SEQ ID NO: 5085594 - DNA, 25 bp, Homo sapien
cagtgcgctcagtgttggttttatg

SEQ ID NO: 5085595 - DNA, 25 bp, Homo sapien
tttgaaatgcagaccgagggccttg

SEQ ID NO: 5085596 - DNA, 25 bp, Homo sapien
ccctccagtgcgctcagtgttggtt

SEQ ID NO: 5085597 - DNA, 25 bp, Homo sapien
aatgcagaccgagggccttgtctta

SEQ ID NO: 5085598 - DNA, 25 bp, Homo sapien
cagggacatttttagaaagaattca

SEQ ID NO: 5085599 - DNA, 25 bp, Homo sapien
ctgcagggacatttttagaaagaat

SEQ ID NO: 5085600 - DNA, 25 bp, Homo sapien
gcagggacatttttagaaagaattc

SEQ ID NO: 5085601 - DNA, 25 bp, Homo sapien
tgcagggacatttttagaaagaatt

SEQ ID NO: 5085602 - DNA, 25 bp, Homo sapien
cacctgccaaggacaggccttggtg

SEQ ID NO: 5085603 - DNA, 25 bp, Homo sapien
gggcacacctgccaaggacaggcct

SEQ ID NO: 5085604 - DNA, 25 bp, Homo sapien
tgttgctgggcacacctgccaagga

SEQ ID NO: 5085605 - DNA, 25 bp, Homo sapien
gcacacctgccaaggacaggccttg

SEQ ID NO: 5085606 - DNA, 25 bp, Homo sapien
acccggaaatgaccgccaggctggc

SEQ ID NO: 5085607 - DNA, 25 bp, Homo sapien
aacccggaaatgaccgccaggctgg

SEQ ID NO: 5085608 - DNA, 25 bp, Homo sapien
aaacccggaaatgaccgccaggctg

SEQ ID NO: 5085609 - DNA, 25 bp, Homo sapien
ctggcagctggacaggcctccccag

SEQ ID NO: 5085610 - DNA, 25 bp, Homo sapien
gaggaggacagcgggggctgtggcg

SEQ ID NO: 5085611 - DNA, 25 bp, Homo sapien
agctggacaggcctccccaggagga

SEQ ID NO: 5085612 - DNA, 25 bp, Homo sapien
gggcctggcagctggacaggcctcc

SEQ ID NO: 5085613 - DNA, 25 bp, Homo sapien
gggcccattgtcgtgaactctaatt

SEQ ID NO: 5085614 - DNA, 25 bp, Homo sapien
acactcctgggggatatgcagagct

SEQ ID NO: 5085615 - DNA, 25 bp, Homo sapien
agagctgtggccgtccagggcaatt

SEQ ID NO: 5085616 - DNA, 25 bp, Homo sapien
gggcaattccagttctgtgccgctg

SEQ ID NO: 5085617 - DNA, 25 bp, Homo sapien
agatgccagcccctgactgaaggcc

SEQ ID NO: 5085618 - DNA, 25 bp, Homo sapien
agtttcaaggttctcccagatgcca

SEQ ID NO: 5085619 - DNA, 25 bp, Homo sapien
cctgactgaaggcctcagcagcagg

SEQ ID NO: 5085620 - DNA, 25 bp, Homo sapien
ctgccaaaggggatgggaaacagtt

SEQ ID NO: 5085621 - DNA, 25 bp, Homo sapien
tggagcgttttggtgcttgttgctt

SEQ ID NO: 5085622 - DNA, 25 bp, Homo sapien
taactggagcgttttggtgcttgtt

SEQ ID NO: 5085623 - DNA, 25 bp, Homo sapien
actggagcgttttggtgcttgttgc

SEQ ID NO: 5085624 - DNA, 25 bp, Homo sapien
ttaactggagcgttttggtgcttgt

SEQ ID NO: 5085625 - DNA, 25 bp, Homo sapien
cgggcagctgtttcacgttaacgat

SEQ ID NO: 5085626 - DNA, 25 bp, Homo sapien
cggtctggtggatacgccaggcctc

SEQ ID NO: 5085627 - DNA, 25 bp, Homo sapien
caggcctcgggcagctgtttcacgt

SEQ ID NO: 5085628 - DNA, 25 bp, Homo sapien
cacgttaacgatgattgcactggtg

SEQ ID NO: 5085629 - DNA, 25 bp, Homo sapien
ggtaagagatttagcaatagtttgc

SEQ ID NO: 5085630 - DNA, 25 bp, Homo sapien
ccttagccggggtctctggtgactc

SEQ ID NO: 5085631 - DNA, 25 bp, Homo sapien
atcaacaatcctcgcatccccgctc

SEQ ID NO: 5085632 - DNA, 25 bp, Homo sapien
ggccctgccttagccggggtctctg

SEQ ID NO: 5085633 - DNA, 25 bp, Homo sapien
gttctgcctggattttggaaagctt

SEQ ID NO: 5085634 - DNA, 25 bp, Homo sapien
tggattttggaaagcttggtatgtc

SEQ ID NO: 5085635 - DNA, 25 bp, Homo sapien
tggagagtgaggccaggctttttct

SEQ ID NO: 5085636 - DNA, 25 bp, Homo sapien
ttctgggtcggagaactggagttct

SEQ ID NO: 5085637 - DNA, 25 bp, Homo sapien
ggggaggaggatctttctgcagccg

SEQ ID NO: 5085638 - DNA, 25 bp, Homo sapien
atctttctgcagccggtggcctgcc

SEQ ID NO: 5085639 - DNA, 25 bp, Homo sapien
gggaggaggatctttctgcagccgg

SEQ ID NO: 5085640 - DNA, 25 bp, Homo sapien
aggatctttctgcagccggtggcct

SEQ ID NO: 5085641 - DNA, 25 bp, Homo sapien
tagcagctgagggtccgattttttg

SEQ ID NO: 5085642 - DNA, 25 bp, Homo sapien
gtagcagctgagggtccgatttttt

SEQ ID NO: 5085643 - DNA, 25 bp, Homo sapien
cggtagcagctgagggtccgatttt

SEQ ID NO: 5085644 - DNA, 25 bp, Homo sapien
ggtagcagctgagggtccgattttt

SEQ ID NO: 5085645 - DNA, 25 bp, Homo sapien
ggagcactatatgtactctctggac

SEQ ID NO: 5085646 - DNA, 25 bp, Homo sapien
taaagtgaagcaaccgccttagtgc

SEQ ID NO: 5085647 - DNA, 25 bp, Homo sapien
tccatgtagaaaggcaggaatgtct

SEQ ID NO: 5085648 - DNA, 25 bp, Homo sapien
gagttcagaagagcctgcgtcctct

SEQ ID NO: 5085649 - DNA, 25 bp, Homo sapien
tatgccttttgtaacttcacttggt

SEQ ID NO: 5085650 - DNA, 25 bp, Homo sapien
ttattgtaaatgagtacaaaattct

SEQ ID NO: 5085651 - DNA, 25 bp, Homo sapien
tgccttttgtaacttcacttggtta

SEQ ID NO: 5085652 - DNA, 25 bp, Homo sapien
tattttattgtaaatgagtacaaaa

SEQ ID NO: 5085653 - DNA, 25 bp, Homo sapien
tctggaagccttgcgcagagcttac

SEQ ID NO: 5085654 - DNA, 25 bp, Homo sapien
tgatagttagccctcagcccatagg

SEQ ID NO: 5085655 - DNA, 25 bp, Homo sapien
taagtccagatgtgggaacccttct

SEQ ID NO: 5085656 - DNA, 25 bp, Homo sapien
agttcctaattgtgtctcagaccgg

SEQ ID NO: 5085657 - DNA, 25 bp, Homo sapien
tctccgacgactgaggcaagagggc

SEQ ID NO: 5085658 - DNA, 25 bp, Homo sapien
tgttggaggacacccctcgccatct

SEQ ID NO: 5085659 - DNA, 25 bp, Homo sapien
caagagggcgccagtgaggaggaag

SEQ ID NO: 5085660 - DNA, 25 bp, Homo sapien
gaagggaaggcggttcagagatgtt

SEQ ID NO: 5085661 - DNA, 25 bp, Homo sapien
tccgactcgcccgtgttcgacgcgc

SEQ ID NO: 5085662 - DNA, 25 bp, Homo sapien
ccccggactcgctgtcggaccgcga

SEQ ID NO: 5085663 - DNA, 25 bp, Homo sapien
actcgctgtcggaccgcgacagcta

SEQ ID NO: 5085664 - DNA, 25 bp, Homo sapien
ctgccgcgccgcctgtccgactcgc

SEQ ID NO: 5085665 - DNA, 25 bp, Homo sapien
ctcatcacgccgctcgccatccaga

SEQ ID NO: 5085666 - DNA, 25 bp, Homo sapien
ggtccggagctcagcagcctcatca

SEQ ID NO: 5085667 - DNA, 25 bp, Homo sapien
cagacccacaactttgccgccgtgg

SEQ ID NO: 5085668 - DNA, 25 bp, Homo sapien
ttcgccttcggtccggagctcagca

SEQ ID NO: 5085669 - DNA, 25 bp, Homo sapien
cgacatgctgcgcctccgcggcggc

SEQ ID NO: 5085670 - DNA, 25 bp, Homo sapien
ccgtgcgcggcctgctcgtcggcct

SEQ ID NO: 5085671 - DNA, 25 bp, Homo sapien
ctgctcgtcggcctcgtgcgccaac

SEQ ID NO: 5085672 - DNA, 25 bp, Homo sapien
ggccgctctgctgtacggcaccggg

SEQ ID NO: 5085673 - DNA, 25 bp, Homo sapien
cttcatccacaacgcggacgagcgg

SEQ ID NO: 5085674 - DNA, 25 bp, Homo sapien
gcgcgatgcgttgcacctgggcttc

SEQ ID NO: 5085675 - DNA, 25 bp, Homo sapien
tcagcttctcgggcttcccgtcggg

SEQ ID NO: 5085676 - DNA, 25 bp, Homo sapien
acctgcgtgcctttggcacgcgcga

SEQ ID NO: 5085677 - DNA, 25 bp, Homo sapien
gccatccgaagtacaagaccgagct

SEQ ID NO: 5085678 - DNA, 25 bp, Homo sapien
ctcgccatccgaagtacaagaccga

SEQ ID NO: 5085679 - DNA, 25 bp, Homo sapien
ccatccgaagtacaagaccgagctg

SEQ ID NO: 5085680 - DNA, 25 bp, Homo sapien
tcgccatccgaagtacaagaccgag

SEQ ID NO: 5085681 - DNA, 25 bp, Homo sapien
ggcttccacgagctgcgcagcctga

SEQ ID NO: 5085682 - DNA, 25 bp, Homo sapien
tcgtttagcgagaacggcgatcgca

SEQ ID NO: 5085683 - DNA, 25 bp, Homo sapien
tgcaagtacggcgaaaagtgccagt

SEQ ID NO: 5085684 - DNA, 25 bp, Homo sapien
ccttcgaggagagcggcacgtgcaa

SEQ ID NO: 5085685 - DNA, 25 bp, Homo sapien
caacatgctggacaagaaggcggtg

SEQ ID NO: 5085686 - DNA, 25 bp, Homo sapien
ggcggaggatcacgtgtcgaaaccc

SEQ ID NO: 5085687 - DNA, 25 bp, Homo sapien
gatcacgtgtcgaaacccagcgcgg

SEQ ID NO: 5085688 - DNA, 25 bp, Homo sapien
ttttgcgcgtgtataggtggagggt

SEQ ID NO: 5085689 - DNA, 25 bp, Homo sapien
tcccgctccgtccagcaagatcttg

SEQ ID NO: 5085690 - DNA, 25 bp, Homo sapien
ccggtgtcgcggttgagtttctcca

SEQ ID NO: 5085691 - DNA, 25 bp, Homo sapien
ctccactgccgaccgcggccacgct

SEQ ID NO: 5085692 - DNA, 25 bp, Homo sapien
aggagggcgccggtgtcgcggttga

SEQ ID NO: 5085693 - DNA, 25 bp, Homo sapien
ttcccggacaggcttcgcgccgccc

SEQ ID NO: 5085694 - DNA, 25 bp, Homo sapien
tgcgggatccagaaacatgtcgacc

SEQ ID NO: 5085695 - DNA, 25 bp, Homo sapien
gtttgcaaaagagtgtccgagcgcc

SEQ ID NO: 5085696 - DNA, 25 bp, Homo sapien
cgatgtcgacttcttgtgcaaggta

SEQ ID NO: 5085697 - DNA, 25 bp, Homo sapien
gcagcagccgttgtagttcttggac

SEQ ID NO: 5085698 - DNA, 25 bp, Homo sapien
cgcccctcgcccgttattcgtcgtg

SEQ ID NO: 5085699 - DNA, 25 bp, Homo sapien
ccgttattcgtcgtggctcaagccc

SEQ ID NO: 5085700 - DNA, 25 bp, Homo sapien
attcgtcgtggctcaagcccggcca

SEQ ID NO: 5085701 - DNA, 25 bp, Homo sapien
ctcgcccgttattcgtcgtggctca

SEQ ID NO: 5085702 - DNA, 25 bp, Homo sapien
gaaaggtggcgctaagtcgccttca

SEQ ID NO: 5085703 - DNA, 25 bp, Homo sapien
gggttggtctcagccggatcctgca

SEQ ID NO: 5085704 - DNA, 25 bp, Homo sapien
cctcatcgagcaaaggctgggcgcg

SEQ ID NO: 5085705 - DNA, 25 bp, Homo sapien
cggcccgaccagcagacggaaaggt

SEQ ID NO: 5085706 - DNA, 25 bp, Homo sapien
cagcgcaagctgttggggtgcgggg

SEQ ID NO: 5085707 - DNA, 25 bp, Homo sapien
ttccagcgcaagctgttggggtgcg

SEQ ID NO: 5085708 - DNA, 25 bp, Homo sapien
tccagcgcaagctgttggggtgcgg

SEQ ID NO: 5085709 - DNA, 25 bp, Homo sapien
tttccagcgcaagctgttggggtgc

SEQ ID NO: 5085710 - DNA, 25 bp, Homo sapien
cagactccagatcgttcctagtggg

SEQ ID NO: 5085711 - DNA, 25 bp, Homo sapien
tcagcggctttagcctcactgggcg

SEQ ID NO: 5085712 - DNA, 25 bp, Homo sapien
tgtggcaacctgtatgaacgcggag

SEQ ID NO: 5085713 - DNA, 25 bp, Homo sapien
tcaggcccaagctttttgtggcaac

SEQ ID NO: 5085714 - DNA, 25 bp, Homo sapien
cacagttgcccaggtatgtcaaggg

SEQ ID NO: 5085715 - DNA, 25 bp, Homo sapien
ccttgccaaaggtgagagatgaata

SEQ ID NO: 5085716 - DNA, 25 bp, Homo sapien
cagaatcctaatctgcaaagtgggt

SEQ ID NO: 5085717 - DNA, 25 bp, Homo sapien
tcacagctgttgactgggactcacc

SEQ ID NO: 5085718 - DNA, 25 bp, Homo sapien
aaaccatctaacactaaaaatgcag

SEQ ID NO: 5085719 - DNA, 25 bp, Homo sapien
caatcatttcctactgcagaaaagc

SEQ ID NO: 5085720 - DNA, 25 bp, Homo sapien
gttagaggagagtgagtttacaatc

SEQ ID NO: 5085721 - DNA, 25 bp, Homo sapien
caaatgtaattcatcgctcttcgag

SEQ ID NO: 5085722 - DNA, 25 bp, Homo sapien
gtggatgcctccatcgctctggccc

SEQ ID NO: 5085723 - DNA, 25 bp, Homo sapien
ccgtcctgtgtgatctgctccagca

SEQ ID NO: 5085724 - DNA, 25 bp, Homo sapien
ctccagcagtgggaccagttggccc

SEQ ID NO: 5085725 - DNA, 25 bp, Homo sapien
ggccctggccgtcctgtgtgatctg

SEQ ID NO: 5085726 - DNA, 25 bp, Homo sapien
gtcggccctgagcagtatattcatt

SEQ ID NO: 5085727 - DNA, 25 bp, Homo sapien
tcggccctgagcagtatattcattg

SEQ ID NO: 5085728 - DNA, 25 bp, Homo sapien
cggccctgagcagtatattcattgc

SEQ ID NO: 5085729 - DNA, 25 bp, Homo sapien
gccctgagcagtatattcattgctc

SEQ ID NO: 5085730 - DNA, 25 bp, Homo sapien
tgtcttgtgcccaagagatctgctt

SEQ ID NO: 5085731 - DNA, 25 bp, Homo sapien
tgaggaggtataggcttgcaaagtc

SEQ ID NO: 5085732 - DNA, 25 bp, Homo sapien
gtgtcttgtgcccaagagatctgct

SEQ ID NO: 5085733 - DNA, 25 bp, Homo sapien
ccatggctgctttcagccgaggtga

SEQ ID NO: 5085734 - DNA, 25 bp, Homo sapien
tcttttggtaatcctgatgtctaca

SEQ ID NO: 5085735 - DNA, 25 bp, Homo sapien
ccattccatatgagtgagtccagac

SEQ ID NO: 5085736 - DNA, 25 bp, Homo sapien
taacactctcaaatcactaaaggaa

SEQ ID NO: 5085737 - DNA, 25 bp, Homo sapien
agtccagactgattggcaggcccca

SEQ ID NO: 5085738 - DNA, 25 bp, Homo sapien
tctgggcctctctccgtagctggct

SEQ ID NO: 5085739 - DNA, 25 bp, Homo sapien
gaataatccagactcgggtagagag

SEQ ID NO: 5085740 - DNA, 25 bp, Homo sapien
taagtgttctgtgaaaccagccatc

SEQ ID NO: 5085741 - DNA, 25 bp, Homo sapien
gaattgtggtcctaacccactgtga

SEQ ID NO: 5085742 - DNA, 25 bp, Homo sapien
tagaagggctctgcaagtactgact

SEQ ID NO: 5085743 - DNA, 25 bp, Homo sapien
ggctctttcctaatcgactcaggta

SEQ ID NO: 5085744 - DNA, 25 bp, Homo sapien
cacagagtcaggcactagaagggct

SEQ ID NO: 5085745 - DNA, 25 bp, Homo sapien
ggtatatcgccttcaaagtgccctt

SEQ ID NO: 5085746 - DNA, 25 bp, Homo sapien
tccagggtactgtagggttcaacca

SEQ ID NO: 5085747 - DNA, 25 bp, Homo sapien
tgcttatgggagacatctgatggcc

SEQ ID NO: 5085748 - DNA, 25 bp, Homo sapien
gaagtctgaaccttagagggccact

SEQ ID NO: 5085749 - DNA, 25 bp, Homo sapien
gatggcctcacgcagtggattcagt

SEQ ID NO: 5085750 - DNA, 25 bp, Homo sapien
gtcaacagtgtgatgcaactccagt

SEQ ID NO: 5085751 - DNA, 25 bp, Homo sapien
caaagtgggagaaagatgactcacc

SEQ ID NO: 5085752 - DNA, 25 bp, Homo sapien
gaaagtaatagtcctgcgggtcaaa

SEQ ID NO: 5085753 - DNA, 25 bp, Homo sapien
tctcggcaaatgaaaggtagaccat

SEQ ID NO: 5085754 - DNA, 25 bp, Homo sapien
ttgtgccaatatcaatgccatcccc

SEQ ID NO: 5085755 - DNA, 25 bp, Homo sapien
tagccagaacacttgtgccaatatc

SEQ ID NO: 5085756 - DNA, 25 bp, Homo sapien
agccagaacacttgtgccaatatca

SEQ ID NO: 5085757 - DNA, 25 bp, Homo sapien
cattcagtataatgtagggtagctt

SEQ ID NO: 5085758 - DNA, 25 bp, Homo sapien
gcataaccctattgatgccattcag

SEQ ID NO: 5085759 - DNA, 25 bp, Homo sapien
gaatgtgtgctttcaagatatccac

SEQ ID NO: 5085760 - DNA, 25 bp, Homo sapien
cactgccattttggatacaaagcat

SEQ ID NO: 5085761 - DNA, 25 bp, Homo sapien
gagaggttctcattaggacccgtct

SEQ ID NO: 5085762 - DNA, 25 bp, Homo sapien
cagtgggacaaggtgcaaaacattt

SEQ ID NO: 5085763 - DNA, 25 bp, Homo sapien
tccctttcagacgtctcaggaatgt

SEQ ID NO: 5085764 - DNA, 25 bp, Homo sapien
taaggtcatgatatctccggatgag

SEQ ID NO: 5085765 - DNA, 25 bp, Homo sapien
ccctttcatgtgtgcctcgtctgct

SEQ ID NO: 5085766 - DNA, 25 bp, Homo sapien
gccctttcatgtgtgcctcgtctgc

SEQ ID NO: 5085767 - DNA, 25 bp, Homo sapien
catgtgtgcctcgtctgcttctcca

SEQ ID NO: 5085768 - DNA, 25 bp, Homo sapien
catactccgttgtctgggccgccat

SEQ ID NO: 5085769 - DNA, 25 bp, Homo sapien
aatccatactccgttgtctgggccg

SEQ ID NO: 5085770 - DNA, 25 bp, Homo sapien
tatgggaaatccatactccgttgtc

SEQ ID NO: 5085771 - DNA, 25 bp, Homo sapien
ggaaatccatactccgttgtctggg

SEQ ID NO: 5085772 - DNA, 25 bp, Homo sapien
ttgcctcattctcaagggcttgtgg

SEQ ID NO: 5085773 - DNA, 25 bp, Homo sapien
tgagagtagccgtctagtagggatc

SEQ ID NO: 5085774 - DNA, 25 bp, Homo sapien
ctagaccagaaacgaaatgagagta

SEQ ID NO: 5085775 - DNA, 25 bp, Homo sapien
gaaacgaaatgagagtagccgtcta

SEQ ID NO: 5085776 - DNA, 25 bp, Homo sapien
tagccgtctagtagggatctgctgc

SEQ ID NO: 5085777 - DNA, 25 bp, Homo sapien
ccttgcccagaatgtaggacagcca

SEQ ID NO: 5085778 - DNA, 25 bp, Homo sapien
aagtgtgaactttccgctttgtggg

SEQ ID NO: 5085779 - DNA, 25 bp, Homo sapien
ttgtgggtggtctgtaaatggttcc

SEQ ID NO: 5085780 - DNA, 25 bp, Homo sapien
taaatggttcctaacaccaggcttc

SEQ ID NO: 5085781 - DNA, 25 bp, Homo sapien
cattacctcttgttggatgagatgg

SEQ ID NO: 5085782 - DNA, 25 bp, Homo sapien
tcgtagaaagtcattatccactggc

SEQ ID NO: 5085783 - DNA, 25 bp, Homo sapien
gccagccattgagtggaccttcatg

SEQ ID NO: 5085784 - DNA, 25 bp, Homo sapien
gaccttcatgttgtgcagtgcctga

SEQ ID NO: 5085785 - DNA, 25 bp, Homo sapien
tgctcaacataattcaagggtcatt

SEQ ID NO: 5085786 - DNA, 25 bp, Homo sapien
aattgactgaatccctatgcatctg

SEQ ID NO: 5085787 - DNA, 25 bp, Homo sapien
cccactgtttagtggtgacacaaag

SEQ ID NO: 5085788 - DNA, 25 bp, Homo sapien
cagtgaacagtgaaatggtgtccca

SEQ ID NO: 5085789 - DNA, 25 bp, Homo sapien
tcagaacatttaattaatgcaggct

SEQ ID NO: 5085790 - DNA, 25 bp, Homo sapien
tgcaggctcacaataccagttggta

SEQ ID NO: 5085791 - DNA, 25 bp, Homo sapien
cagtttagtaatgttgtgtggtcac

SEQ ID NO: 5085792 - DNA, 25 bp, Homo sapien
taaacgtgtagttcacccacaaggc

SEQ ID NO: 5085793 - DNA, 25 bp, Homo sapien
ttcacctctggccgcaaggtaacta

SEQ ID NO: 5085794 - DNA, 25 bp, Homo sapien
caaggtaactagattctttgccata

SEQ ID NO: 5085795 - DNA, 25 bp, Homo sapien
catatccccgatcagatgatggagc

SEQ ID NO: 5085796 - DNA, 25 bp, Homo sapien
tatccccgatcagatgatggagctt

SEQ ID NO: 5085797 - DNA, 25 bp, Homo sapien
tgctatcacatgctatcaatatgac

SEQ ID NO: 5085798 - DNA, 25 bp, Homo sapien
cgtatccagggtacatgctatcaca

SEQ ID NO: 5085799 - DNA, 25 bp, Homo sapien
tacattactgttaacgccacacgtt

SEQ ID NO: 5085800 - DNA, 25 bp, Homo sapien
caacatttgtcatggctaaggaaga

SEQ ID NO: 5085801 - DNA, 25 bp, Homo sapien
gggctactacctattccgagtgaaa

SEQ ID NO: 5085802 - DNA, 25 bp, Homo sapien
actcccgtgaaatggcagctcgtgc

SEQ ID NO: 5085803 - DNA, 25 bp, Homo sapien
catcatttgggataaggagcagctc

SEQ ID NO: 5085804 - DNA, 25 bp, Homo sapien
aaagtcacctgtagaactagtgcag

SEQ ID NO: 5085805 - DNA, 25 bp, Homo sapien
cagcagcagcagcttgtgtttactt

SEQ ID NO: 5085806 - DNA, 25 bp, Homo sapien
cagcagcagcttgtgtttacttctc

SEQ ID NO: 5085807 - DNA, 25 bp, Homo sapien
gcagcagcagcttgtgtttacttct

SEQ ID NO: 5085808 - DNA, 25 bp, Homo sapien
gcagcagcttgtgtttacttctcat

SEQ ID NO: 5085809 - DNA, 25 bp, Homo sapien
taagtaggggcatctagagcaagtg

SEQ ID NO: 5085810 - DNA, 25 bp, Homo sapien
ggcatctagagcaagtggatggtcc

SEQ ID NO: 5085811 - DNA, 25 bp, Homo sapien
ggggcctctgttttgcatatggtat

SEQ ID NO: 5085812 - DNA, 25 bp, Homo sapien
gcaagtggatggtccttttcatcat

SEQ ID NO: 5085813 - DNA, 25 bp, Homo sapien
tcagaggcaacctaatcttctcagt

SEQ ID NO: 5085814 - DNA, 25 bp, Homo sapien
cagaggcaacctaatcttctcagta

SEQ ID NO: 5085815 - DNA, 25 bp, Homo sapien
gctcagaggcaacctaatcttctca

SEQ ID NO: 5085816 - DNA, 25 bp, Homo sapien
ctcagaggcaacctaatcttctcag

SEQ ID NO: 5085817 - DNA, 25 bp, Homo sapien
gtaatgccatgtggcatgaattccc

SEQ ID NO: 5085818 - DNA, 25 bp, Homo sapien
tggttctggtatgtatcttctgtcc

SEQ ID NO: 5085819 - DNA, 25 bp, Homo sapien
ctagcacggagcaggcttggttctg

SEQ ID NO: 5085820 - DNA, 25 bp, Homo sapien
tgtccacgggttcgagaggatgtca

SEQ ID NO: 5085821 - DNA, 25 bp, Homo sapien
tggagtctagcaatgaacggatcat

SEQ ID NO: 5085822 - DNA, 25 bp, Homo sapien
ctgtgggctctgtggagtctagcaa

SEQ ID NO: 5085823 - DNA, 25 bp, Homo sapien
tctgtggagtctagcaatgaacgga

SEQ ID NO: 5085824 - DNA, 25 bp, Homo sapien
tgggctctgtggagtctagcaatga

SEQ ID NO: 5085825 - DNA, 25 bp, Homo sapien
agtgtgctcaaaacagaggccccga

SEQ ID NO: 5085826 - DNA, 25 bp, Homo sapien
gagccctgatcagtcagtgtgctca

SEQ ID NO: 5085827 - DNA, 25 bp, Homo sapien
cccgaggaggatgctttccttcaaa

SEQ ID NO: 5085828 - DNA, 25 bp, Homo sapien
gaaacaaggatactggttggagccc

SEQ ID NO: 5085829 - DNA, 25 bp, Homo sapien
ctcgtggtggcagttcaggatctgt

SEQ ID NO: 5085830 - DNA, 25 bp, Homo sapien
tctggagctcgtggtggcagttcag

SEQ ID NO: 5085831 - DNA, 25 bp, Homo sapien
aactttgcctctggagctcgtggtg

SEQ ID NO: 5085832 - DNA, 25 bp, Homo sapien
caagctctaaactttgcctctggag

SEQ ID NO: 5085833 - DNA, 25 bp, Homo sapien
acgccaacccttcatttgtggttgg

SEQ ID NO: 5085834 - DNA, 25 bp, Homo sapien
cgccaacccttcatttgtggttggt

SEQ ID NO: 5085835 - DNA, 25 bp, Homo sapien
cacgccaacccttcatttgtggttg

SEQ ID NO: 5085836 - DNA, 25 bp, Homo sapien
acctctaagggatgtgaaactgcca

SEQ ID NO: 5085837 - DNA, 25 bp, Homo sapien
caggcctttgattgcagaacctttg

SEQ ID NO: 5085838 - DNA, 25 bp, Homo sapien
ctaacaccgttgtgttgcctgtgtg

SEQ ID NO: 5085839 - DNA, 25 bp, Homo sapien
tggagccagtgcaaactaacaccgt

SEQ ID NO: 5085840 - DNA, 25 bp, Homo sapien
tatggaggtttctttctctggaaac

SEQ ID NO: 5085841 - DNA, 25 bp, Homo sapien
ttttatggaggtttctttctctgga

SEQ ID NO: 5085842 - DNA, 25 bp, Homo sapien
atggaggtttctttctctggaaact

SEQ ID NO: 5085843 - DNA, 25 bp, Homo sapien
ttatggaggtttctttctctggaaa

SEQ ID NO: 5085844 - DNA, 25 bp, Homo sapien
tggttggctgtcccatgaagatcaa

SEQ ID NO: 5085845 - DNA, 25 bp, Homo sapien
aaactggttggctgtcccatgaaga

SEQ ID NO: 5085846 - DNA, 25 bp, Homo sapien
actggttggctgtcccatgaagatc

SEQ ID NO: 5085847 - DNA, 25 bp, Homo sapien
caaactggttggctgtcccatgaag

SEQ ID NO: 5085848 - DNA, 25 bp, Homo sapien
tcagccttggctaccttcaaaattg

SEQ ID NO: 5085849 - DNA, 25 bp, Homo sapien
gactataagttgtgggctttccatc

SEQ ID NO: 5085850 - DNA, 25 bp, Homo sapien
tgtctgcagtgccaccatttatagc

SEQ ID NO: 5085851 - DNA, 25 bp, Homo sapien
ccatctctggagatatcatacttaa

SEQ ID NO: 5085852 - DNA, 25 bp, Homo sapien
ggagcaaggctcaaggtttctaatg

SEQ ID NO: 5085853 - DNA, 25 bp, Homo sapien
tttctaatgtcaaccgggaatgtcg

SEQ ID NO: 5085854 - DNA, 25 bp, Homo sapien
atttacctcaatgagcccctcgctg

SEQ ID NO: 5085855 - DNA, 25 bp, Homo sapien
tctggacggtaaaagacaataagga

SEQ ID NO: 5085856 - DNA, 25 bp, Homo sapien
ataccagtaagtatgtgttttctgt

SEQ ID NO: 5085857 - DNA, 25 bp, Homo sapien
ggtctgtaataccagtaagtatgtg

SEQ ID NO: 5085858 - DNA, 25 bp, Homo sapien
gagtataaggtctgtaataccagta

SEQ ID NO: 5085859 - DNA, 25 bp, Homo sapien
aattagagtataaggtctgtaatac

SEQ ID NO: 5085860 - DNA, 25 bp, Homo sapien
atggagtctgtgtttctgttttcct

SEQ ID NO: 5085861 - DNA, 25 bp, Homo sapien
tagggcaagatggagtctgtgtttc

SEQ ID NO: 5085862 - DNA, 25 bp, Homo sapien
aagatggagtctgtgtttctgtttt

SEQ ID NO: 5085863 - DNA, 25 bp, Homo sapien
ttagggcaagatggagtctgtgttt

SEQ ID NO: 5085864 - DNA, 25 bp, Homo sapien
gctttatttatagtggatgggaaca

SEQ ID NO: 5085865 - DNA, 25 bp, Homo sapien
ttttagctgtactactgcttaccct

SEQ ID NO: 5085866 - DNA, 25 bp, Homo sapien
ttgtggttcattacagctattatca

SEQ ID NO: 5085867 - DNA, 25 bp, Homo sapien
tgtagtttgttagtcacaacctctt

SEQ ID NO: 5085868 - DNA, 25 bp, Homo sapien
tgtgcctaaagctggctacatctgt

SEQ ID NO: 5085869 - DNA, 25 bp, Homo sapien
tgatttgtacacatcctcttgggaa

SEQ ID NO: 5085870 - DNA, 25 bp, Homo sapien
gatttgcagaactttgatttgtaca

SEQ ID NO: 5085871 - DNA, 25 bp, Homo sapien
ttaatgcatacgaaatacggtttga

SEQ ID NO: 5085872 - DNA, 25 bp, Homo sapien
tacaagaagttagcttaccacaagc

SEQ ID NO: 5085873 - DNA, 25 bp, Homo sapien
caagtgacttgagtgcggtgtttac

SEQ ID NO: 5085874 - DNA, 25 bp, Homo sapien
cacaaagttagttcaccatctggga

SEQ ID NO: 5085875 - DNA, 25 bp, Homo sapien
cactctgtggcttatgttgcatgca

SEQ ID NO: 5085876 - DNA, 25 bp, Homo sapien
ggcgagtccactgtataacaggagc

SEQ ID NO: 5085877 - DNA, 25 bp, Homo sapien
tttctgagctttaacctctggttgg

SEQ ID NO: 5085878 - DNA, 25 bp, Homo sapien
taacaggagctttgcagaagttatc

SEQ ID NO: 5085879 - DNA, 25 bp, Homo sapien
cagcatttccaatgtatgggcgagt

SEQ ID NO: 5085880 - DNA, 25 bp, Homo sapien
tcttagtaaagattgtcacttaccg

SEQ ID NO: 5085881 - DNA, 25 bp, Homo sapien
gataacacaggaatataggcttggt

SEQ ID NO: 5085882 - DNA, 25 bp, Homo sapien
tacatgaataagtggtggtttctga

SEQ ID NO: 5085883 - DNA, 25 bp, Homo sapien
aacgagattatactctacagaatgc

SEQ ID NO: 5085884 - DNA, 25 bp, Homo sapien
ttcggcggctgtgaaactgatttcc

SEQ ID NO: 5085885 - DNA, 25 bp, Homo sapien
cgacgtgcacgaggtttggctccca

SEQ ID NO: 5085886 - DNA, 25 bp, Homo sapien
gatttccggtcgctaaggtctccat

SEQ ID NO: 5085887 - DNA, 25 bp, Homo sapien
tcggagacgccgtagaaggagacct

SEQ ID NO: 5085888 - DNA, 25 bp, Homo sapien
cctctctccctccctttgccctgac

SEQ ID NO: 5085889 - DNA, 25 bp, Homo sapien
ccctctctccctccctttgccctga

SEQ ID NO: 5085890 - DNA, 25 bp, Homo sapien
ctaacgccatgaggaacgcgcggcg

SEQ ID NO: 5085891 - DNA, 25 bp, Homo sapien
tctcctagactctgcactgggccaa

SEQ ID NO: 5085892 - DNA, 25 bp, Homo sapien
ccaggcgtccaagcatgtgaagaga

SEQ ID NO: 5085893 - DNA, 25 bp, Homo sapien
agaccgttgaatgaaggcccctcag

SEQ ID NO: 5085894 - DNA, 25 bp, Homo sapien
atttcatctgcactaaatcgggcat

SEQ ID NO: 5085895 - DNA, 25 bp, Homo sapien
ttaatttcatctgcactaaatcggg

SEQ ID NO: 5085896 - DNA, 25 bp, Homo sapien
aatttcatctgcactaaatcgggca

SEQ ID NO: 5085897 - DNA, 25 bp, Homo sapien
taatttcatctgcactaaatcgggc

SEQ ID NO: 5085898 - DNA, 25 bp, Homo sapien
ttggtgctctaggtgtcatatctaa

SEQ ID NO: 5085899 - DNA, 25 bp, Homo sapien
acccaccccaatcgctcaaagcact

SEQ ID NO: 5085900 - DNA, 25 bp, Homo sapien
ttgacaaattccagtttatcggctt

SEQ ID NO: 5085901 - DNA, 25 bp, Homo sapien
gtcattggtgctctaggtgtcatat

SEQ ID NO: 5085902 - DNA, 25 bp, Homo sapien
catcgaagtattgggaagcaggtcc

SEQ ID NO: 5085903 - DNA, 25 bp, Homo sapien
tactatggagatttcagaacttggc

SEQ ID NO: 5085904 - DNA, 25 bp, Homo sapien
cttctattatatcattgtctgtgga

SEQ ID NO: 5085905 - DNA, 25 bp, Homo sapien
cataatcagaagtgactgttacagt

SEQ ID NO: 5085906 - DNA, 25 bp, Homo sapien
tattcacgagggagattgagccgtc

SEQ ID NO: 5085907 - DNA, 25 bp, Homo sapien
cctgtgagcacgagtgaacggatga

SEQ ID NO: 5085908 - DNA, 25 bp, Homo sapien
tcagaaggatctggttactgcattg

SEQ ID NO: 5085909 - DNA, 25 bp, Homo sapien
cacaacaggaggcactagcctgtga

SEQ ID NO: 5085910 - DNA, 25 bp, Homo sapien
tgtagccaatgggagaccacagccg

SEQ ID NO: 5085911 - DNA, 25 bp, Homo sapien
aactgcgagactccagagcttgctg

SEQ ID NO: 5085912 - DNA, 25 bp, Homo sapien
tctgtcctggagtggtacccctaac

SEQ ID NO: 5085913 - DNA, 25 bp, Homo sapien
tggctataactttggctcctcccag

SEQ ID NO: 5085914 - DNA, 25 bp, Homo sapien
ttctatttccacagcgttacgcaca

SEQ ID NO: 5085915 - DNA, 25 bp, Homo sapien
gcttttccaatgtaagtggttcgac

SEQ ID NO: 5085916 - DNA, 25 bp, Homo sapien
ccaccaccagagcttttccaatgta

SEQ ID NO: 5085917 - DNA, 25 bp, Homo sapien
gttacgcacaacaatatcgacgggt

SEQ ID NO: 5085918 - DNA, 25 bp, Homo sapien
tagtttttgcctcttaagggacagc

SEQ ID NO: 5085919 - DNA, 25 bp, Homo sapien
cctgatgaagcgcagcgttagtctc

SEQ ID NO: 5085920 - DNA, 25 bp, Homo sapien
gcagcgttagtctctatgatattct

SEQ ID NO: 5085921 - DNA, 25 bp, Homo sapien
cctcttaagggacagcttaactggg

SEQ ID NO: 5085922 - DNA, 25 bp, Homo sapien
cacatcgttccttccaatctactgg

SEQ ID NO: 5085923 - DNA, 25 bp, Homo sapien
taaatttcatgagttgggactccag

SEQ ID NO: 5085924 - DNA, 25 bp, Homo sapien
tctgctaaaagctctcgtatcttgc

SEQ ID NO: 5085925 - DNA, 25 bp, Homo sapien
gggactccagagctacacatcgttc

SEQ ID NO: 5085926 - DNA, 25 bp, Homo sapien
aaaccaaagaggtggataggaccag

SEQ ID NO: 5085927 - DNA, 25 bp, Homo sapien
ggtatagagcactattagggagaag

SEQ ID NO: 5085928 - DNA, 25 bp, Homo sapien
gggctgactggtgctaacacaaaac

SEQ ID NO: 5085929 - DNA, 25 bp, Homo sapien
gaggtggataggaccagaccagtct

SEQ ID NO: 5085930 - DNA, 25 bp, Homo sapien
gctcctccttctaagggccaaatgc

SEQ ID NO: 5085931 - DNA, 25 bp, Homo sapien
ctccttctaagggccaaatgccctg

SEQ ID NO: 5085932 - DNA, 25 bp, Homo sapien
ttgagctcctccttctaagggccaa

SEQ ID NO: 5085933 - DNA, 25 bp, Homo sapien
gagctcctccttctaagggccaaat

SEQ ID NO: 5085934 - DNA, 25 bp, Homo sapien
tctggtaatcacacccatgtgtagt

SEQ ID NO: 5085935 - DNA, 25 bp, Homo sapien
ttccttcacaacatagggctgacct

SEQ ID NO: 5085936 - DNA, 25 bp, Homo sapien
gggctgacctttgcaaccaacagga

SEQ ID NO: 5085937 - DNA, 25 bp, Homo sapien
taggtcataagacgcactgcatctt

SEQ ID NO: 5085938 - DNA, 25 bp, Homo sapien
tggcataaagcattactatcagtgt

SEQ ID NO: 5085939 - DNA, 25 bp, Homo sapien
gccagttctgcttaatacgaagtcc

SEQ ID NO: 5085940 - DNA, 25 bp, Homo sapien
tatgccctttatacttgaaagccag

SEQ ID NO: 5085941 - DNA, 25 bp, Homo sapien
caatctccctactctagttgactga

SEQ ID NO: 5085942 - DNA, 25 bp, Homo sapien
cagcatcaataacttgtctctcaag

SEQ ID NO: 5085943 - DNA, 25 bp, Homo sapien
ttctgcttgacgttcagcatcaata

SEQ ID NO: 5085944 - DNA, 25 bp, Homo sapien
taacttgtctctcaagctgttgcat

SEQ ID NO: 5085945 - DNA, 25 bp, Homo sapien
ctgcttgacgttcagcatcaataac

SEQ ID NO: 5085946 - DNA, 25 bp, Homo sapien
cagcctgggccacagagcaagattc

SEQ ID NO: 5085947 - DNA, 25 bp, Homo sapien
ggaggttgcagtaagccaagatcgc

SEQ ID NO: 5085948 - DNA, 25 bp, Homo sapien
cccagttattcaggagattgaggca

SEQ ID NO: 5085949 - DNA, 25 bp, Homo sapien
ggagaatcacttgaacccgggaggc

SEQ ID NO: 5085950 - DNA, 25 bp, Homo sapien
tatgagatacagagggatatttcca

SEQ ID NO: 5085951 - DNA, 25 bp, Homo sapien
taaaagttgtctgagcacagtgagc

SEQ ID NO: 5085952 - DNA, 25 bp, Homo sapien
cccagaaagggttatgtgacttatg

SEQ ID NO: 5085953 - DNA, 25 bp, Homo sapien
tagttaaccatattactccatagtg

SEQ ID NO: 5085954 - DNA, 25 bp, Homo sapien
gcagtgcagcaacggggaaagcctt

SEQ ID NO: 5085955 - DNA, 25 bp, Homo sapien
aacaaacagacactgcaacttccaa

SEQ ID NO: 5085956 - DNA, 25 bp, Homo sapien
aaacaaacagacactgcaacttcca

SEQ ID NO: 5085957 - DNA, 25 bp, Homo sapien
aagccttgttgccagactccttacc

SEQ ID NO: 5085958 - DNA, 25 bp, Homo sapien
taattgcaactaaagtggccctgga

SEQ ID NO: 5085959 - DNA, 25 bp, Homo sapien
ggcatatgaacaacagtaacggaaa

SEQ ID NO: 5085960 - DNA, 25 bp, Homo sapien
tagaaatccagtgtatgtagtaaaa

SEQ ID NO: 5085961 - DNA, 25 bp, Homo sapien
ggacataaatttcaaccaggcagaa

SEQ ID NO: 5085962 - DNA, 25 bp, Homo sapien
aatgctacagagctcctcggatgca

SEQ ID NO: 5085963 - DNA, 25 bp, Homo sapien
aagttgttattgtatgagtgaatgc

SEQ ID NO: 5085964 - DNA, 25 bp, Homo sapien
tatgagtgaatgctacagagctcct

SEQ ID NO: 5085965 - DNA, 25 bp, Homo sapien
tattgtatgagtgaatgctacagag

SEQ ID NO: 5085966 - DNA, 25 bp, Homo sapien
aaatatagtgggctttctgcatgag

SEQ ID NO: 5085967 - DNA, 25 bp, Homo sapien
agtgggctttctgcatgagctgaag

SEQ ID NO: 5085968 - DNA, 25 bp, Homo sapien
ctaagaaatatagtgggctttctgc

SEQ ID NO: 5085969 - DNA, 25 bp, Homo sapien
tatagtgggctttctgcatgagctg

SEQ ID NO: 5085970 - DNA, 25 bp, Homo sapien
attccaagttttgaatgacgtcatc

SEQ ID NO: 5085971 - DNA, 25 bp, Homo sapien
tcactggtttgaatattagctgctt

SEQ ID NO: 5085972 - DNA, 25 bp, Homo sapien
ctgctcttcaagttgcaattccaag

SEQ ID NO: 5085973 - DNA, 25 bp, Homo sapien
gcgactccagatcttgacacttatt

SEQ ID NO: 5085974 - DNA, 25 bp, Homo sapien
cattcttttatcttagctgctttct

SEQ ID NO: 5085975 - DNA, 25 bp, Homo sapien
ccattcttttatcttagctgctttc

SEQ ID NO: 5085976 - DNA, 25 bp, Homo sapien
ctcatttaacttaactgttacccat

SEQ ID NO: 5085977 - DNA, 25 bp, Homo sapien
ttggttttggttgatcaaacgaaga

SEQ ID NO: 5085978 - DNA, 25 bp, Homo sapien
gttttgactgcattgttcttatctc

SEQ ID NO: 5085979 - DNA, 25 bp, Homo sapien
ttggttgatcaaacgaagattctga

SEQ ID NO: 5085980 - DNA, 25 bp, Homo sapien
gactgcattgttcttatctcttcag

SEQ ID NO: 5085981 - DNA, 25 bp, Homo sapien
ttagtgtagagacagtggatgactt

SEQ ID NO: 5085982 - DNA, 25 bp, Homo sapien
tttagtgtagagacagtggatgact

SEQ ID NO: 5085983 - DNA, 25 bp, Homo sapien
tagtgtagagacagtggatgacttc

SEQ ID NO: 5085984 - DNA, 25 bp, Homo sapien
ctttagtgtagagacagtggatgac

SEQ ID NO: 5085985 - DNA, 25 bp, Homo sapien
cacccaaaggtcaaactgctcaggc

SEQ ID NO: 5085986 - DNA, 25 bp, Homo sapien
tcaaactgctcaggcgctggccttc

SEQ ID NO: 5085987 - DNA, 25 bp, Homo sapien
ccaaaggtcaaactgctcaggcgct

SEQ ID NO: 5085988 - DNA, 25 bp, Homo sapien
aggtcaaactgctcaggcgctggcc

SEQ ID NO: 5085989 - DNA, 25 bp, Homo sapien
cagtgaactcaggttctttcgatga

SEQ ID NO: 5085990 - DNA, 25 bp, Homo sapien
tttcctcagattttactacttgagg

SEQ ID NO: 5085991 - DNA, 25 bp, Homo sapien
ggttctttcgatgatatcttgctca

SEQ ID NO: 5085992 - DNA, 25 bp, Homo sapien
tttccttcagtgaactcaggttctt

SEQ ID NO: 5085993 - DNA, 25 bp, Homo sapien
tctttgctgagtcacagtgttcctg

SEQ ID NO: 5085994 - DNA, 25 bp, Homo sapien
caccatctgtggcaaagcttgttct

SEQ ID NO: 5085995 - DNA, 25 bp, Homo sapien
gaggtctcagtggtcgtatcatgct

SEQ ID NO: 5085996 - DNA, 25 bp, Homo sapien
aactgtggctggcttaagtgccttt

SEQ ID NO: 5085997 - DNA, 25 bp, Homo sapien
ggaggagttggaggtttgctgtatg

SEQ ID NO: 5085998 - DNA, 25 bp, Homo sapien
gagttggaggtttgctgtatgccac

SEQ ID NO: 5085999 - DNA, 25 bp, Homo sapien
aggagttggaggtttgctgtatgcc

SEQ ID NO: 5086000 - DNA, 25 bp, Homo sapien
caagaaggaaaacggtgcaggggag

SEQ ID NO: 5086001 - DNA, 25 bp, Homo sapien
cttgatctcccatctgtcttgtcat

SEQ ID NO: 5086002 - DNA, 25 bp, Homo sapien
ttgatctcccatctgtcttgtcatt

SEQ ID NO: 5086003 - DNA, 25 bp, Homo sapien
taagtgtcccggttcagaattcacc

SEQ ID NO: 5086004 - DNA, 25 bp, Homo sapien
ggaggaacctccagtaattgaacac

SEQ ID NO: 5086005 - DNA, 25 bp, Homo sapien
tgggaacaggtgactcaatccagct

SEQ ID NO: 5086006 - DNA, 25 bp, Homo sapien
ggcatgcagagcctggcaacttcct

SEQ ID NO: 5086007 - DNA, 25 bp, Homo sapien
aatacctgatttggctacagcataa

SEQ ID NO: 5086008 - DNA, 25 bp, Homo sapien
tttggctacagcataaattctgctt

SEQ ID NO: 5086009 - DNA, 25 bp, Homo sapien
gatttggctacagcataaattctgc

SEQ ID NO: 5086010 - DNA, 25 bp, Homo sapien
tcgaatacctgatttggctacagca

SEQ ID NO: 5086011 - DNA, 25 bp, Homo sapien
ttttattaacactctccatattgaa

SEQ ID NO: 5086012 - DNA, 25 bp, Homo sapien
tataaagtcctgatgtagtatagga

SEQ ID NO: 5086013 - DNA, 25 bp, Homo sapien
gtcctgatgtagtataggaaagggt

SEQ ID NO: 5086014 - DNA, 25 bp, Homo sapien
caaagttgtatacactggggtggtc

SEQ ID NO: 5086015 - DNA, 25 bp, Homo sapien
atcagagatgtataaagtcctgatg

SEQ ID NO: 5086016 - DNA, 25 bp, Homo sapien
gggtaccctggcactgatacaaaga

SEQ ID NO: 5086017 - DNA, 25 bp, Homo sapien
taaggttgtcaatacctgcaatcct

SEQ ID NO: 5086018 - DNA, 25 bp, Homo sapien
taacattctgataagtgtcttctgc

SEQ ID NO: 5086019 - DNA, 25 bp, Homo sapien
actttctataaagggagagcctgtg

SEQ ID NO: 5086020 - DNA, 25 bp, Homo sapien
agagcaacctccctgtatccatccc

SEQ ID NO: 5086021 - DNA, 25 bp, Homo sapien
ctccctgtatccatccctaaggtta

SEQ ID NO: 5086022 - DNA, 25 bp, Homo sapien
aacctccctgtatccatccctaagg

SEQ ID NO: 5086023 - DNA, 25 bp, Homo sapien
ccctgtatccatccctaaggttatc

SEQ ID NO: 5086024 - DNA, 25 bp, Homo sapien
tctgacccagatgagtcatccagga

SEQ ID NO: 5086025 - DNA, 25 bp, Homo sapien
ggcccactcctactgcgtgagtctg

SEQ ID NO: 5086026 - DNA, 25 bp, Homo sapien
gtctgactctgacgtccgggagctg

SEQ ID NO: 5086027 - DNA, 25 bp, Homo sapien
aaagggctgctacttatttgggtcg

SEQ ID NO: 5086028 - DNA, 25 bp, Homo sapien
aatattcagaatgatctggagttgc

SEQ ID NO: 5086029 - DNA, 25 bp, Homo sapien
ggagttgcctcatatgcctgcgatt

SEQ ID NO: 5086030 - DNA, 25 bp, Homo sapien
cctgtaatggagataaaattcccaa

SEQ ID NO: 5086031 - DNA, 25 bp, Homo sapien
taaaaaataatcctgtaatggagat

SEQ ID NO: 5086032 - DNA, 25 bp, Homo sapien
cagtatttaatactggggagggcca

SEQ ID NO: 5086033 - DNA, 25 bp, Homo sapien
gagtgctcctacagaatgcaattat

SEQ ID NO: 5086034 - DNA, 25 bp, Homo sapien
accagctctgagtgctcctacagaa

SEQ ID NO: 5086035 - DNA, 25 bp, Homo sapien
taatactggggagggccaaacacca

SEQ ID NO: 5086036 - DNA, 25 bp, Homo sapien
caggaggaatagcataatcactttc

SEQ ID NO: 5086037 - DNA, 25 bp, Homo sapien
tctggctgtgagtactccgtgtctg

SEQ ID NO: 5086038 - DNA, 25 bp, Homo sapien
gatgagcaagtttttgggagcttct

SEQ ID NO: 5086039 - DNA, 25 bp, Homo sapien
cgtgtctgtggagtaagcatcagga

SEQ ID NO: 5086040 - DNA, 25 bp, Homo sapien
aaaccaccgccgcttccaagacttg

SEQ ID NO: 5086041 - DNA, 25 bp, Homo sapien
taagaacaaaccaccgccgcttcca

SEQ ID NO: 5086042 - DNA, 25 bp, Homo sapien
accaccgccgcttccaagacttgac

SEQ ID NO: 5086043 - DNA, 25 bp, Homo sapien
acaaaccaccgccgcttccaagact

SEQ ID NO: 5086044 - DNA, 25 bp, Homo sapien
tcaatatggccctggggttttctaa

SEQ ID NO: 5086045 - DNA, 25 bp, Homo sapien
caatatggccctggggttttctaat

SEQ ID NO: 5086046 - DNA, 25 bp, Homo sapien
gatgcactaagttcaatatggccct

SEQ ID NO: 5086047 - DNA, 25 bp, Homo sapien
gcactaagttcaatatggccctggg

SEQ ID NO: 5086048 - DNA, 25 bp, Homo sapien
aattgagtctggcatgatacaaaaa

SEQ ID NO: 5086049 - DNA, 25 bp, Homo sapien
ctatctcctttccattaggttggat

SEQ ID NO: 5086050 - DNA, 25 bp, Homo sapien
ccattaggttggataattgagaatt

SEQ ID NO: 5086051 - DNA, 25 bp, Homo sapien
ttgagaattgagtctggcatgatac

SEQ ID NO: 5086052 - DNA, 25 bp, Homo sapien
gcttcacagttggacagctgaaaat

SEQ ID NO: 5086053 - DNA, 25 bp, Homo sapien
tgattcttaactgccatgcccaaag

SEQ ID NO: 5086054 - DNA, 25 bp, Homo sapien
gagaggttttcaggtacaaatcact

SEQ ID NO: 5086055 - DNA, 25 bp, Homo sapien
tactagaatatctcaacagcctgtg

SEQ ID NO: 5086056 - DNA, 25 bp, Homo sapien
gggttggcagcttgtactcgaagaa

SEQ ID NO: 5086057 - DNA, 25 bp, Homo sapien
ttagtgagcaatcccttcatggtgg

SEQ ID NO: 5086058 - DNA, 25 bp, Homo sapien
gtaacactttaatccactcttccaa

SEQ ID NO: 5086059 - DNA, 25 bp, Homo sapien
catggtgggtttgccctcaggctgc

SEQ ID NO: 5086060 - DNA, 25 bp, Homo sapien
tgggacagtggcctattcatcttag

SEQ ID NO: 5086061 - DNA, 25 bp, Homo sapien
gactctaagccttcattcgcgctgt

SEQ ID NO: 5086062 - DNA, 25 bp, Homo sapien
tccttgaagactcggcacaggtaaa

SEQ ID NO: 5086063 - DNA, 25 bp, Homo sapien
taagccactgcttcaagactctaag

SEQ ID NO: 5086064 - DNA, 25 bp, Homo sapien
catgtgacactagatcagtcacagg

SEQ ID NO: 5086065 - DNA, 25 bp, Homo sapien
gtgacactagatcagtcacaggcat

SEQ ID NO: 5086066 - DNA, 25 bp, Homo sapien
gcacatgtgacactagatcagtcac

SEQ ID NO: 5086067 - DNA, 25 bp, Homo sapien
gagcacatgtgacactagatcagtc

SEQ ID NO: 5086068 - DNA, 25 bp, Homo sapien
cttatcttcttgactccgaaaataa

SEQ ID NO: 5086069 - DNA, 25 bp, Homo sapien
tcctattagtgtacaccagactctc

SEQ ID NO: 5086070 - DNA, 25 bp, Homo sapien
ctctcttggaatatccatgttttac

SEQ ID NO: 5086071 - DNA, 25 bp, Homo sapien
tcttgactccgaaaataatataatg

SEQ ID NO: 5086072 - DNA, 25 bp, Homo sapien
gagccaccgcatcagtataacatac

SEQ ID NO: 5086073 - DNA, 25 bp, Homo sapien
tatgcagtagttcagatgattcagc

SEQ ID NO: 5086074 - DNA, 25 bp, Homo sapien
cagttagggtaaagcaagtccccag

SEQ ID NO: 5086075 - DNA, 25 bp, Homo sapien
ggcgcaatcagtaacctcactgtaa

SEQ ID NO: 5086076 - DNA, 25 bp, Homo sapien
gtctttgggatggataacgatagta

SEQ ID NO: 5086077 - DNA, 25 bp, Homo sapien
caattaggaggtaagttggaccttg

SEQ ID NO: 5086078 - DNA, 25 bp, Homo sapien
ggataacagacttcgtccactggct

SEQ ID NO: 5086079 - DNA, 25 bp, Homo sapien
catctgaatcacaagatctgtcaac

SEQ ID NO: 5086080 - DNA, 25 bp, Homo sapien
cagtcagatgataaagccaagtgtc

SEQ ID NO: 5086081 - DNA, 25 bp, Homo sapien
aaggctccccgtctatatttagcaa

SEQ ID NO: 5086082 - DNA, 25 bp, Homo sapien
tgcaaaccagttgttcaaattcaga

SEQ ID NO: 5086083 - DNA, 25 bp, Homo sapien
aacgtttacattgttgcttccagct

SEQ ID NO: 5086084 - DNA, 25 bp, Homo sapien
gacacaaagtggggtgtctccatat

SEQ ID NO: 5086085 - DNA, 25 bp, Homo sapien
tgcagggcttcggaaggtagagttg

SEQ ID NO: 5086086 - DNA, 25 bp, Homo sapien
ttcggaaggtagagttgtcagaggg

SEQ ID NO: 5086087 - DNA, 25 bp, Homo sapien
ggcttcggaaggtagagttgtcaga

SEQ ID NO: 5086088 - DNA, 25 bp, Homo sapien
tctgtggctgtcttcgtcttgtctg

SEQ ID NO: 5086089 - DNA, 25 bp, Homo sapien
caatggtcctggttgattctgtggc

SEQ ID NO: 5086090 - DNA, 25 bp, Homo sapien
tttgcaaagcactctgggctaaaga

SEQ ID NO: 5086091 - DNA, 25 bp, Homo sapien
tgtggtaatcaattgcaggagagtc

SEQ ID NO: 5086092 - DNA, 25 bp, Homo sapien
ctcttctgaagaacatggtggttaa

SEQ ID NO: 5086093 - DNA, 25 bp, Homo sapien
gaacagtagaaaacacatgccctaa

SEQ ID NO: 5086094 - DNA, 25 bp, Homo sapien
ttgagaaacgcagattgcagaacag

SEQ ID NO: 5086095 - DNA, 25 bp, Homo sapien
cagaggttatctttaggtagcagca

SEQ ID NO: 5086096 - DNA, 25 bp, Homo sapien
gaaggaagagcccaacgcagagtgc

SEQ ID NO: 5086097 - DNA, 25 bp, Homo sapien
agagcccaacgcagagtgccaagag

SEQ ID NO: 5086098 - DNA, 25 bp, Homo sapien
ggaagagcccaacgcagagtgccaa

SEQ ID NO: 5086099 - DNA, 25 bp, Homo sapien
aagagcccaacgcagagtgccaaga

SEQ ID NO: 5086100 - DNA, 25 bp, Homo sapien
ggaatctgcattcctctttaggtga

SEQ ID NO: 5086101 - DNA, 25 bp, Homo sapien
ctggaatctgcattcctctttaggt

SEQ ID NO: 5086102 - DNA, 25 bp, Homo sapien
atctgcattcctctttaggtgaagc

SEQ ID NO: 5086103 - DNA, 25 bp, Homo sapien
gaatctgcattcctctttaggtgaa

SEQ ID NO: 5086104 - DNA, 25 bp, Homo sapien
tatgatttatcgtagactttcagag

SEQ ID NO: 5086105 - DNA, 25 bp, Homo sapien
gatcgttaaatacttatgatttatc

SEQ ID NO: 5086106 - DNA, 25 bp, Homo sapien
taaatacttatgatttatcgtagac

SEQ ID NO: 5086107 - DNA, 25 bp, Homo sapien
tttatcgtagactttcagaggccac

SEQ ID NO: 5086108 - DNA, 25 bp, Homo sapien
atgcaaatgcacttttcacttaaaa

SEQ ID NO: 5086109 - DNA, 25 bp, Homo sapien
cacatcaatgataaccaaaggcttc

SEQ ID NO: 5086110 - DNA, 25 bp, Homo sapien
tgaatgaacacccactaatgctaag

SEQ ID NO: 5086111 - DNA, 25 bp, Homo sapien
ccctaagagatttaacataacaaag

SEQ ID NO: 5086112 - DNA, 25 bp, Homo sapien
caccattttgttgcgttctttctac

SEQ ID NO: 5086113 - DNA, 25 bp, Homo sapien
catgaagtgcacaggtatactaaag

SEQ ID NO: 5086114 - DNA, 25 bp, Homo sapien
tgataagggtttcggagaagagttg

SEQ ID NO: 5086115 - DNA, 25 bp, Homo sapien
acacaacgctggcagtaaatggcat

SEQ ID NO: 5086116 - DNA, 25 bp, Homo sapien
agtgaacaacgcaaatccagactgc

SEQ ID NO: 5086117 - DNA, 25 bp, Homo sapien
gccagaaggatcgtcagtgaacaac

SEQ ID NO: 5086118 - DNA, 25 bp, Homo sapien
tccactgtggtagatgcgtcaaaac

SEQ ID NO: 5086119 - DNA, 25 bp, Homo sapien
tgaagacaatgctctaaatctctgc

SEQ ID NO: 5086120 - DNA, 25 bp, Homo sapien
tcctaatacttagagtatcatttcc

SEQ ID NO: 5086121 - DNA, 25 bp, Homo sapien
tatcgtggagattagattggttaaa

SEQ ID NO: 5086122 - DNA, 25 bp, Homo sapien
cctgaattaaacttcttgcaaagtt

SEQ ID NO: 5086123 - DNA, 25 bp, Homo sapien
tgttcgttgggcttggctcctgaaa

SEQ ID NO: 5086124 - DNA, 25 bp, Homo sapien
gctgctcttccgtaagcaaatttta

SEQ ID NO: 5086125 - DNA, 25 bp, Homo sapien
caaccctagttcaaggttatctgtg

SEQ ID NO: 5086126 - DNA, 25 bp, Homo sapien
actgcacccggacacaggtctgttt

SEQ ID NO: 5086127 - DNA, 25 bp, Homo sapien
ttatctgtgtataaagctgctcttc

SEQ ID NO: 5086128 - DNA, 25 bp, Homo sapien
tcagacgaacagtccttgtaccttc

SEQ ID NO: 5086129 - DNA, 25 bp, Homo sapien
ttttgtatgtcagacgaacagtcct

SEQ ID NO: 5086130 - DNA, 25 bp, Homo sapien
tatgtcagacgaacagtccttgtac

SEQ ID NO: 5086131 - DNA, 25 bp, Homo sapien
gaacagtccttgtaccttcacattt

SEQ ID NO: 5086132 - DNA, 25 bp, Homo sapien
gaatactgccatgacaacacagtgg

SEQ ID NO: 5086133 - DNA, 25 bp, Homo sapien
cagtctctccacgagcttgcactga

SEQ ID NO: 5086134 - DNA, 25 bp, Homo sapien
tgccagatctttgttcagaggaaaa

SEQ ID NO: 5086135 - DNA, 25 bp, Homo sapien
gctgccatttctaatgccagatctt

SEQ ID NO: 5086136 - DNA, 25 bp, Homo sapien
taacagcaacttttctctatcagtc

SEQ ID NO: 5086137 - DNA, 25 bp, Homo sapien
tatgacttgctttagagtttgattc

SEQ ID NO: 5086138 - DNA, 25 bp, Homo sapien
acagccatctctataccttttagga

SEQ ID NO: 5086139 - DNA, 25 bp, Homo sapien
tcagaacagccatctctataccttt

SEQ ID NO: 5086140 - DNA, 25 bp, Homo sapien
tgattggtaacatgccctgctggag

SEQ ID NO: 5086141 - DNA, 25 bp, Homo sapien
ggcaccaaagaatggccacttcctg

SEQ ID NO: 5086142 - DNA, 25 bp, Homo sapien
aataaatgcgcacacagtcagcagc

SEQ ID NO: 5086143 - DNA, 25 bp, Homo sapien
aacaacttggcaccaaagaatggcc

SEQ ID NO: 5086144 - DNA, 25 bp, Homo sapien
gccacttcctggctactgtcaaata

SEQ ID NO: 5086145 - DNA, 25 bp, Homo sapien
agaaagtacttccaagtgatgatgg

SEQ ID NO: 5086146 - DNA, 25 bp, Homo sapien
taaaccatcctcatgtacagccagc

SEQ ID NO: 5086147 - DNA, 25 bp, Homo sapien
agccagccacaagaaagtacttcca

SEQ ID NO: 5086148 - DNA, 25 bp, Homo sapien
gttgtattctaagaggcttaaacca

SEQ ID NO: 5086149 - DNA, 25 bp, Homo sapien
gaagccttagtgaaagtgaacttaa

SEQ ID NO: 5086150 - DNA, 25 bp, Homo sapien
gtgatcttctgattatagccacagg

SEQ ID NO: 5086151 - DNA, 25 bp, Homo sapien
cacaggattagacctgccaggtgaa

SEQ ID NO: 5086152 - DNA, 25 bp, Homo sapien
aatttagtaattcctgctcaccaga

SEQ ID NO: 5086153 - DNA, 25 bp, Homo sapien
tgtattgttaatgactaccataaaa

SEQ ID NO: 5086154 - DNA, 25 bp, Homo sapien
aaaggtcattagactcttgtacaca

SEQ ID NO: 5086155 - DNA, 25 bp, Homo sapien
tgtgtattgttaatgactaccataa

SEQ ID NO: 5086156 - DNA, 25 bp, Homo sapien
cattagactcttgtacacatagctg

SEQ ID NO: 5086157 - DNA, 25 bp, Homo sapien
tggcgatcaaaagagtgatttcaag

SEQ ID NO: 5086158 - DNA, 25 bp, Homo sapien
ggcgatcaaaagagtgatttcaaga

SEQ ID NO: 5086159 - DNA, 25 bp, Homo sapien
ctggcgatcaaaagagtgatttcaa

SEQ ID NO: 5086160 - DNA, 25 bp, Homo sapien
cgatcaaaagagtgatttcaagaat

SEQ ID NO: 5086161 - DNA, 25 bp, Homo sapien
tttggtcggtctgctgcttgacaga

SEQ ID NO: 5086162 - DNA, 25 bp, Homo sapien
aggtggggcctttggtcggtctgct

SEQ ID NO: 5086163 - DNA, 25 bp, Homo sapien
gtcggtctgctgcttgacagaagag

SEQ ID NO: 5086164 - DNA, 25 bp, Homo sapien
gctgcttgacagaagaggctggctt

SEQ ID NO: 5086165 - DNA, 25 bp, Homo sapien
tgccaggtgtaaacgaacttgtagg

SEQ ID NO: 5086166 - DNA, 25 bp, Homo sapien
gtgtaaacgaacttgtagggagctg

SEQ ID NO: 5086167 - DNA, 25 bp, Homo sapien
gtaaacgaacttgtagggagctgat

SEQ ID NO: 5086168 - DNA, 25 bp, Homo sapien
caggtgtaaacgaacttgtagggag

SEQ ID NO: 5086169 - DNA, 25 bp, Homo sapien
tttaagaatcaaataaaagagacta

SEQ ID NO: 5086170 - DNA, 25 bp, Homo sapien
gaatatttaagaatcaaataaaaga

SEQ ID NO: 5086171 - DNA, 25 bp, Homo sapien
tgaatatttaagaatcaaataaaag

SEQ ID NO: 5086172 - DNA, 25 bp, Homo sapien
tatttaagaatcaaataaaagagac

SEQ ID NO: 5086173 - DNA, 25 bp, Homo sapien
caaatttgcttattcgatgggcgac

SEQ ID NO: 5086174 - DNA, 25 bp, Homo sapien
tagagccggaagatgtactgcacct

SEQ ID NO: 5086175 - DNA, 25 bp, Homo sapien
tactttctaataccacacaggaggc

SEQ ID NO: 5086176 - DNA, 25 bp, Homo sapien
aaggctcgggcaacaaattaattca

SEQ ID NO: 5086177 - DNA, 25 bp, Homo sapien
ggcgagctccgcaaggagtctggga

SEQ ID NO: 5086178 - DNA, 25 bp, Homo sapien
gctccgcaaggagtctgggagtgag

SEQ ID NO: 5086179 - DNA, 25 bp, Homo sapien
aatcaggcggcgagctccgcaagga

SEQ ID NO: 5086180 - DNA, 25 bp, Homo sapien
ctagaatcaggcggcgagctccgca

SEQ ID NO: 5086181 - DNA, 25 bp, Homo sapien
tcgacggcctggctgccgcaaacgt

SEQ ID NO: 5086182 - DNA, 25 bp, Homo sapien
tcacaggctcggagtagtgaccagc

SEQ ID NO: 5086183 - DNA, 25 bp, Homo sapien
gcaaacgtcacaggctcggagtagt

SEQ ID NO: 5086184 - DNA, 25 bp, Homo sapien
ctggctgccgcaaacgtcacaggct

SEQ ID NO: 5086185 - DNA, 25 bp, Homo sapien
ctctctccaggaatactctcagtag

SEQ ID NO: 5086186 - DNA, 25 bp, Homo sapien
tgcatatcctggtggcaagtagcca

SEQ ID NO: 5086187 - DNA, 25 bp, Homo sapien
cacgcaagccgggttcagggaatac

SEQ ID NO: 5086188 - DNA, 25 bp, Homo sapien
agtagcctttcccacgcaagccggg

SEQ ID NO: 5086189 - DNA, 25 bp, Homo sapien
tcatcgccgaatgtcctgctccgga

SEQ ID NO: 5086190 - DNA, 25 bp, Homo sapien
agtttcccctcgcttattactgcga

SEQ ID NO: 5086191 - DNA, 25 bp, Homo sapien
tcctgctccggaagtagtctctggc

SEQ ID NO: 5086192 - DNA, 25 bp, Homo sapien
gaggctttgtggtctagctcatcgc

SEQ ID NO: 5086193 - DNA, 25 bp, Homo sapien
agtcagccacgacacctgcggaaat

SEQ ID NO: 5086194 - DNA, 25 bp, Homo sapien
cagaactcagtttcgggctgtttgc

SEQ ID NO: 5086195 - DNA, 25 bp, Homo sapien
tctccccgacgtgcttaagcataaa

SEQ ID NO: 5086196 - DNA, 25 bp, Homo sapien
ccaattatcccttgatggaaagctg

SEQ ID NO: 5086197 - DNA, 25 bp, Homo sapien
aactcaggaggtggatgttgtattg

SEQ ID NO: 5086198 - DNA, 25 bp, Homo sapien
ccaagatcgtgccactgcactccag

SEQ ID NO: 5086199 - DNA, 25 bp, Homo sapien
cctgggcaacagagcgagactctgt

SEQ ID NO: 5086200 - DNA, 25 bp, Homo sapien
tggatgttgtattgagccaagatcg

SEQ ID NO: 5086201 - DNA, 25 bp, Homo sapien
ggtcttcccctacggttcatagctg

SEQ ID NO: 5086202 - DNA, 25 bp, Homo sapien
cagacacatatggaggtacaatgac

SEQ ID NO: 5086203 - DNA, 25 bp, Homo sapien
catttaagtcacctaggaagatggg

SEQ ID NO: 5086204 - DNA, 25 bp, Homo sapien
gaggctgtcacatttgggtcttccc

SEQ ID NO: 5086205 - DNA, 25 bp, Homo sapien
ttttctgcaatttcagctccatcac

SEQ ID NO: 5086206 - DNA, 25 bp, Homo sapien
ttttgcaatttcccagagagtttca

SEQ ID NO: 5086207 - DNA, 25 bp, Homo sapien
cagaaatgagctatggcactacatg

SEQ ID NO: 5086208 - DNA, 25 bp, Homo sapien
tttgtgtcaccagtcattttgcctt

SEQ ID NO: 5086209 - DNA, 25 bp, Homo sapien
gcaaagttgcatgaagatatgatgc

SEQ ID NO: 5086210 - DNA, 25 bp, Homo sapien
gcatcttgcatctggcaagccttga

SEQ ID NO: 5086211 - DNA, 25 bp, Homo sapien
gaacacgtagccctgctgatgcaga

SEQ ID NO: 5086212 - DNA, 25 bp, Homo sapien
atctggagacaagacgggtgctcag

SEQ ID NO: 5086213 - DNA, 25 bp, Homo sapien
ccctgctgatgcagagtgtagtttc

SEQ ID NO: 5086214 - DNA, 25 bp, Homo sapien
gctgacgttgcccagtgaacacgta

SEQ ID NO: 5086215 - DNA, 25 bp, Homo sapien
tatattcttacatcactaaaacctt

SEQ ID NO: 5086216 - DNA, 25 bp, Homo sapien
ttcatggttgtacaggtatttctcc

SEQ ID NO: 5086217 - DNA, 25 bp, Homo sapien
ccaatggagggtgtccggttgtgca

SEQ ID NO: 5086218 - DNA, 25 bp, Homo sapien
taattgggatcatgtcatgtatgac

SEQ ID NO: 5086219 - DNA, 25 bp, Homo sapien
taaaatcacccgagccagggaagtc

SEQ ID NO: 5086220 - DNA, 25 bp, Homo sapien
aagtgggccaatatgaaaactctgg

SEQ ID NO: 5086221 - DNA, 25 bp, Homo sapien
aaaagtgggccaatatgaaaactct

SEQ ID NO: 5086222 - DNA, 25 bp, Homo sapien
cagctacttgaggtaaaatcacccg

SEQ ID NO: 5086223 - DNA, 25 bp, Homo sapien
aggcgtggtcgtgggcacctgcagt

SEQ ID NO: 5086224 - DNA, 25 bp, Homo sapien
acaccactgcactcgaacctaggcg

SEQ ID NO: 5086225 - DNA, 25 bp, Homo sapien
actcgaacctaggcgacagagcgag

SEQ ID NO: 5086226 - DNA, 25 bp, Homo sapien
caggcgtggtcgtgggcacctgcag

SEQ ID NO: 5086227 - DNA, 25 bp, Homo sapien
gtcaagacaccttagaataatagta

SEQ ID NO: 5086228 - DNA, 25 bp, Homo sapien
aagacaccttagaataatagtagtc

SEQ ID NO: 5086229 - DNA, 25 bp, Homo sapien
tcaagacaccttagaataatagtag

SEQ ID NO: 5086230 - DNA, 25 bp, Homo sapien
gacaccttagaataatagtagtctt

SEQ ID NO: 5086231 - DNA, 25 bp, Homo sapien
caggaaacgtctaaatgtggtctaa

SEQ ID NO: 5086232 - DNA, 25 bp, Homo sapien
ggtcccatatctatccttagactgg

SEQ ID NO: 5086233 - DNA, 25 bp, Homo sapien
tcggttatatgtcccaaaagataga

SEQ ID NO: 5086234 - DNA, 25 bp, Homo sapien
ctaaaaagacccatgattcctggat

SEQ ID NO: 5086235 - DNA, 25 bp, Homo sapien
tgtatattccaaagctaaggttggt

SEQ ID NO: 5086236 - DNA, 25 bp, Homo sapien
cttcttccatatgtatattccaaag

SEQ ID NO: 5086237 - DNA, 25 bp, Homo sapien
catatgtatattccaaagctaaggt

SEQ ID NO: 5086238 - DNA, 25 bp, Homo sapien
tccatatgtatattccaaagctaag

SEQ ID NO: 5086239 - DNA, 25 bp, Homo sapien
caccgagttcccaaaagtgagcgat

SEQ ID NO: 5086240 - DNA, 25 bp, Homo sapien
aggtgtcacctgtgatgggtatgct

SEQ ID NO: 5086241 - DNA, 25 bp, Homo sapien
gagttcccaaaagtgagcgatatct

SEQ ID NO: 5086242 - DNA, 25 bp, Homo sapien
gctgattaagtccaataaagaggtt

SEQ ID NO: 5086243 - DNA, 25 bp, Homo sapien
ttctcaaccacaccactaggcacta

SEQ ID NO: 5086244 - DNA, 25 bp, Homo sapien
agctggtactacagaggcttgctat

SEQ ID NO: 5086245 - DNA, 25 bp, Homo sapien
caggcagcttcacttatttgtcacc

SEQ ID NO: 5086246 - DNA, 25 bp, Homo sapien
tacagaggcttgctatgatgcctgg

SEQ ID NO: 5086247 - DNA, 25 bp, Homo sapien
tttatatgaggtactggagtggtca

SEQ ID NO: 5086248 - DNA, 25 bp, Homo sapien
ggcagtagggatgatagttgccagg

SEQ ID NO: 5086249 - DNA, 25 bp, Homo sapien
cagtagggatgatagttgccaggag

SEQ ID NO: 5086250 - DNA, 25 bp, Homo sapien
tatatgaggtactggagtggtcaaa

SEQ ID NO: 5086251 - DNA, 25 bp, Homo sapien
tagaacccctgtacattgcttatgg

SEQ ID NO: 5086252 - DNA, 25 bp, Homo sapien
gattaacggataactgaactgtggt

SEQ ID NO: 5086253 - DNA, 25 bp, Homo sapien
tgggtggaccttgctagggaactac

SEQ ID NO: 5086254 - DNA, 25 bp, Homo sapien
gaagctccaagcatttgcatcgaca

SEQ ID NO: 5086255 - DNA, 25 bp, Homo sapien
gggccagagatcattaggttttgaa

SEQ ID NO: 5086256 - DNA, 25 bp, Homo sapien
agatccagaacgagaacaagagaaa

SEQ ID NO: 5086257 - DNA, 25 bp, Homo sapien
taggttttgaaagatccagaacgag

SEQ ID NO: 5086258 - DNA, 25 bp, Homo sapien
ggtgggccagagatcattaggtttt

SEQ ID NO: 5086259 - DNA, 25 bp, Homo sapien
ccttcggcatattattccagatctt

SEQ ID NO: 5086260 - DNA, 25 bp, Homo sapien
aggatgatccttcggcatattattc

SEQ ID NO: 5086261 - DNA, 25 bp, Homo sapien
ggcatattattccagatcttctgtc

SEQ ID NO: 5086262 - DNA, 25 bp, Homo sapien
cccagtttcattatcactttgtcta

SEQ ID NO: 5086263 - DNA, 25 bp, Homo sapien
tcatgcataaaaatctaaagaagtt

SEQ ID NO: 5086264 - DNA, 25 bp, Homo sapien
actataaatgggactaaggattcca

SEQ ID NO: 5086265 - DNA, 25 bp, Homo sapien
aatgggactaaggattccagtaata

SEQ ID NO: 5086266 - DNA, 25 bp, Homo sapien
tgatgttatcattaactataaatgg

SEQ ID NO: 5086267 - DNA, 25 bp, Homo sapien
cacagaagatgtctaacaagaagat

SEQ ID NO: 5086268 - DNA, 25 bp, Homo sapien
taattttccagtgaacaggttcatc

SEQ ID NO: 5086269 - DNA, 25 bp, Homo sapien
cagagtgatggtgaaggctattaca

SEQ ID NO: 5086270 - DNA, 25 bp, Homo sapien
tcaggtgacttttgtacaatctggc

SEQ ID NO: 5086271 - DNA, 25 bp, Homo sapien
taattctttattgctaggtgcttag

SEQ ID NO: 5086272 - DNA, 25 bp, Homo sapien
ggaacagcatttatccagcatagat

SEQ ID NO: 5086273 - DNA, 25 bp, Homo sapien
ggcaattccctaaattactatgata

SEQ ID NO: 5086274 - DNA, 25 bp, Homo sapien
ttatataacatattaccttcctggt

SEQ ID NO: 5086275 - DNA, 25 bp, Homo sapien
tgaccagaggtaccggaaatgggtc

SEQ ID NO: 5086276 - DNA, 25 bp, Homo sapien
tccaattatgaccagaggtaccgga

SEQ ID NO: 5086277 - DNA, 25 bp, Homo sapien
ccagaggtaccggaaatgggtcaat

SEQ ID NO: 5086278 - DNA, 25 bp, Homo sapien
ttatgaccagaggtaccggaaatgg

SEQ ID NO: 5086279 - DNA, 25 bp, Homo sapien
tgtacctccctcataaaaagcacag

SEQ ID NO: 5086280 - DNA, 25 bp, Homo sapien
tgtacaacaaactcagctagaagcg

SEQ ID NO: 5086281 - DNA, 25 bp, Homo sapien
aagcacagccatatatgtacaacaa

SEQ ID NO: 5086282 - DNA, 25 bp, Homo sapien
gatgcatgacttaaccgattccttc

SEQ ID NO: 5086283 - DNA, 25 bp, Homo sapien
cattaatgatgctccataataatgt

SEQ ID NO: 5086284 - DNA, 25 bp, Homo sapien
taatgtgcaacaaatcgaagtgtct

SEQ ID NO: 5086285 - DNA, 25 bp, Homo sapien
ttaatgatgctccataataatgtgc

SEQ ID NO: 5086286 - DNA, 25 bp, Homo sapien
gcaacaaatcgaagtgtcttgcata

SEQ ID NO: 5086287 - DNA, 25 bp, Homo sapien
agccatgaaagcaagcggctagacc

SEQ ID NO: 5086288 - DNA, 25 bp, Homo sapien
tcagttaaaatattctagccatgaa

SEQ ID NO: 5086289 - DNA, 25 bp, Homo sapien
caagcggctagaccatgttgtctct

SEQ ID NO: 5086290 - DNA, 25 bp, Homo sapien
gaccatgttgtctctaggttcctct

SEQ ID NO: 5086291 - DNA, 25 bp, Homo sapien
aaggacttgtgtttatgtactcatc

SEQ ID NO: 5086292 - DNA, 25 bp, Homo sapien
aacttaatgagtacatgatgtggaa

SEQ ID NO: 5086293 - DNA, 25 bp, Homo sapien
tgttgcccagcaaatacttctgttt

SEQ ID NO: 5086294 - DNA, 25 bp, Homo sapien
caaatcaggagaacaaattacatgc

SEQ ID NO: 5086295 - DNA, 25 bp, Homo sapien
tttagtaatagagcttctgatttac

SEQ ID NO: 5086296 - DNA, 25 bp, Homo sapien
gccaactggttgataactccacgta

SEQ ID NO: 5086297 - DNA, 25 bp, Homo sapien
ctccacgtatttttagtaatagagc

SEQ ID NO: 5086298 - DNA, 25 bp, Homo sapien
tttgtcaatgccaaatgccaactgg

SEQ ID NO: 5086299 - DNA, 25 bp, Homo sapien
taaacagcggtttattctgatccac

SEQ ID NO: 5086300 - DNA, 25 bp, Homo sapien
ctatttgaccgaaagaatccaatcc

SEQ ID NO: 5086301 - DNA, 25 bp, Homo sapien
ttattctgatccacacatattgatt

SEQ ID NO: 5086302 - DNA, 25 bp, Homo sapien
tccaatcctgctgtgataaacagcg

SEQ ID NO: 5086303 - DNA, 25 bp, Homo sapien
aaatagcaagttttaccacaaatga

SEQ ID NO: 5086304 - DNA, 25 bp, Homo sapien
aaaatagcaagttttaccacaaatg

SEQ ID NO: 5086305 - DNA, 25 bp, Homo sapien
ttttttccacaactccataggtgag

SEQ ID NO: 5086306 - DNA, 25 bp, Homo sapien
ggcatgaagctttccaatgtcattt

SEQ ID NO: 5086307 - DNA, 25 bp, Homo sapien
tccataggtgagtgggcatgaagct

SEQ ID NO: 5086308 - DNA, 25 bp, Homo sapien
tgagtgggcatgaagctttccaatg

SEQ ID NO: 5086309 - DNA, 25 bp, Homo sapien
tcatctcatcgacttcattttcagc

SEQ ID NO: 5086310 - DNA, 25 bp, Homo sapien
ttcagcatactgaggatctctcgca

SEQ ID NO: 5086311 - DNA, 25 bp, Homo sapien
ctcgcagggtccttgatatctttca

SEQ ID NO: 5086312 - DNA, 25 bp, Homo sapien
tgatatctttcagcgtgttaatact

SEQ ID NO: 5086313 - DNA, 25 bp, Homo sapien
cagatgaaattaagtaaatgtttag

SEQ ID NO: 5086314 - DNA, 25 bp, Homo sapien
ttcagatgaaattaagtaaatgttt

SEQ ID NO: 5086315 - DNA, 25 bp, Homo sapien
tgaaattaagtaaatgtttaggata

SEQ ID NO: 5086316 - DNA, 25 bp, Homo sapien
gatgaaattaagtaaatgtttagga

SEQ ID NO: 5086317 - DNA, 25 bp, Homo sapien
ttttctacagtatactattagtgtg

SEQ ID NO: 5086318 - DNA, 25 bp, Homo sapien
acactaagtcatgtctgggtggtgg

SEQ ID NO: 5086319 - DNA, 25 bp, Homo sapien
aaaggtttatgtgaacactaagtca

SEQ ID NO: 5086320 - DNA, 25 bp, Homo sapien
taaagaagatactctaagtaaatac

SEQ ID NO: 5086321 - DNA, 25 bp, Homo sapien
ggttaccctcgcaacaacgtgactg

SEQ ID NO: 5086322 - DNA, 25 bp, Homo sapien
taaagagggctaatcacgaaagacc

SEQ ID NO: 5086323 - DNA, 25 bp, Homo sapien
ttctggtgcccatgtgaagtctggc

SEQ ID NO: 5086324 - DNA, 25 bp, Homo sapien
cgtgactgccacctgagaagttgct

SEQ ID NO: 5086325 - DNA, 25 bp, Homo sapien
gactgtgagaaaactagggctatca

SEQ ID NO: 5086326 - DNA, 25 bp, Homo sapien
tcttcaacatgacaatgatacggcc

SEQ ID NO: 5086327 - DNA, 25 bp, Homo sapien
gatacggcctcaaaataatgcattg

SEQ ID NO: 5086328 - DNA, 25 bp, Homo sapien
gattctttgctggtagtatctccct

SEQ ID NO: 5086329 - DNA, 25 bp, Homo sapien
caactaatgaactagacatctgtca

SEQ ID NO: 5086330 - DNA, 25 bp, Homo sapien
tatcatccataacaatagagcaatg

SEQ ID NO: 5086331 - DNA, 25 bp, Homo sapien
gtgtgtatcctttgtcccagtgatt

SEQ ID NO: 5086332 - DNA, 25 bp, Homo sapien
ccttcaagtattcaaaagtgatctt

SEQ ID NO: 5086333 - DNA, 25 bp, Homo sapien
ttactaattcaaggaggcaccttaa

SEQ ID NO: 5086334 - DNA, 25 bp, Homo sapien
tttactaattcaaggaggcacctta

SEQ ID NO: 5086335 - DNA, 25 bp, Homo sapien
tcaagaatcaagctcgatttgtttc

SEQ ID NO: 5086336 - DNA, 25 bp, Homo sapien
gaatcaagctcgatttgtttccaag

SEQ ID NO: 5086337 - DNA, 25 bp, Homo sapien
caagaatcaagctcgatttgtttcc

SEQ ID NO: 5086338 - DNA, 25 bp, Homo sapien
atcaagctcgatttgtttccaagac

SEQ ID NO: 5086339 - DNA, 25 bp, Homo sapien
aaattacacgtggttctacaataat

SEQ ID NO: 5086340 - DNA, 25 bp, Homo sapien
ctagtccaagaaatccagcttgtcc

SEQ ID NO: 5086341 - DNA, 25 bp, Homo sapien
attatacagtttaactttcttcaca

SEQ ID NO: 5086342 - DNA, 25 bp, Homo sapien
cacatattgccacaatagttaattc

SEQ ID NO: 5086343 - DNA, 25 bp, Homo sapien
tgcccaggtgcaacatctagattca

SEQ ID NO: 5086344 - DNA, 25 bp, Homo sapien
tctgaacgtctgaaatgagagtgcc

SEQ ID NO: 5086345 - DNA, 25 bp, Homo sapien
cattagcaggtagtgaaagccatgg

SEQ ID NO: 5086346 - DNA, 25 bp, Homo sapien
gccgactgtgcatgactgctctgaa

SEQ ID NO: 5086347 - DNA, 25 bp, Homo sapien
gaacttgccagagatgactatcaga

SEQ ID NO: 5086348 - DNA, 25 bp, Homo sapien
tctcaaacaaactggcgcactgcta

SEQ ID NO: 5086349 - DNA, 25 bp, Homo sapien
tcagaatgaggtcagggatctctct

SEQ ID NO: 5086350 - DNA, 25 bp, Homo sapien
gaattctcccagacaatcccaatgg

SEQ ID NO: 5086351 - DNA, 25 bp, Homo sapien
caggatcctagtaagtggcacccag

SEQ ID NO: 5086352 - DNA, 25 bp, Homo sapien
tctgagccatgtggcagaccgactg

SEQ ID NO: 5086353 - DNA, 25 bp, Homo sapien
gattcttgggcggtgtgctgcctct

SEQ ID NO: 5086354 - DNA, 25 bp, Homo sapien
gactgattggcaactacagcttggg

SEQ ID NO: 5086355 - DNA, 25 bp, Homo sapien
gggaaaaccacgctgctggacgcca

SEQ ID NO: 5086356 - DNA, 25 bp, Homo sapien
gggccttctgttgtcgccccgcagg

SEQ ID NO: 5086357 - DNA, 25 bp, Homo sapien
caggctccgggaaaaccacgctgct

SEQ ID NO: 5086358 - DNA, 25 bp, Homo sapien
tccgggaaaaccacgctgctggacg

SEQ ID NO: 5086359 - DNA, 25 bp, Homo sapien
tgggctgcagctctcttagacccag

SEQ ID NO: 5086360 - DNA, 25 bp, Homo sapien
gtgtcttcactctgtttcctggagc

SEQ ID NO: 5086361 - DNA, 25 bp, Homo sapien
gaccctgggctgcagctctcttaga

SEQ ID NO: 5086362 - DNA, 25 bp, Homo sapien
ggcccacaggtctgtgaccctgggc

SEQ ID NO: 5086363 - DNA, 25 bp, Homo sapien
ggagtggcccctttcggcagccctc

SEQ ID NO: 5086364 - DNA, 25 bp, Homo sapien
tggggagtggcccctttcggcagcc

SEQ ID NO: 5086365 - DNA, 25 bp, Homo sapien
caaaacatccccaggtcggatttag

SEQ ID NO: 5086366 - DNA, 25 bp, Homo sapien
tgaagtacaggctgttgtcactttc

SEQ ID NO: 5086367 - DNA, 25 bp, Homo sapien
gctggccactgtaggtgaagtacag

SEQ ID NO: 5086368 - DNA, 25 bp, Homo sapien
tgtaggtgaagtacaggctgttgtc

SEQ ID NO: 5086369 - DNA, 25 bp, Homo sapien
ccactgtaggtgaagtacaggctgt

SEQ ID NO: 5086370 - DNA, 25 bp, Homo sapien
tctcactttgaagcttaggttctgg

SEQ ID NO: 5086371 - DNA, 25 bp, Homo sapien
gcccagctcacaagaattctggcag

SEQ ID NO: 5086372 - DNA, 25 bp, Homo sapien
tgaagcttaggttctggatgcccag

SEQ ID NO: 5086373 - DNA, 25 bp, Homo sapien
tgtccagggcatcttgaactgagcc

SEQ ID NO: 5086374 - DNA, 25 bp, Homo sapien
acttgatcttgccgccgtgacctcg

SEQ ID NO: 5086375 - DNA, 25 bp, Homo sapien
ccttttgtcacgctgggcctgggag

SEQ ID NO: 5086376 - DNA, 25 bp, Homo sapien
gccgcatctgggcaatgaaggccaa

SEQ ID NO: 5086377 - DNA, 25 bp, Homo sapien
ccagtgatcacatctagcaaggagg

SEQ ID NO: 5086378 - DNA, 25 bp, Homo sapien
gggtgtcagcgcactgcctaagccg

SEQ ID NO: 5086379 - DNA, 25 bp, Homo sapien
tgtcagcgcactgcctaagccgcag

SEQ ID NO: 5086380 - DNA, 25 bp, Homo sapien
gacaacccccgcacgtacatgttgc

SEQ ID NO: 5086381 - DNA, 25 bp, Homo sapien
cacgcgggtgtcagcgcactgccta

SEQ ID NO: 5086382 - DNA, 25 bp, Homo sapien
agcaccagccggttgcctttggcca

SEQ ID NO: 5086383 - DNA, 25 bp, Homo sapien
ggaggaccagatcaaacagcctgaa

SEQ ID NO: 5086384 - DNA, 25 bp, Homo sapien
ctgtgaagctgtcgagcccagaggt

SEQ ID NO: 5086385 - DNA, 25 bp, Homo sapien
cagcctgaagatgtcagagcgaggc

SEQ ID NO: 5086386 - DNA, 25 bp, Homo sapien
tttcacatctagagattccctggcc

SEQ ID NO: 5086387 - DNA, 25 bp, Homo sapien
gggaaggcaactgtcccctgcagaa

SEQ ID NO: 5086388 - DNA, 25 bp, Homo sapien
aaggaagcggctcatgctccctgag

SEQ ID NO: 5086389 - DNA, 25 bp, Homo sapien
tgagtgttcaggacccaagcaaagg

SEQ ID NO: 5086390 - DNA, 25 bp, Homo sapien
ctggtactataggcaagcgtcacgc

SEQ ID NO: 5086391 - DNA, 25 bp, Homo sapien
tactataggcaagcgtcacgcaccc

SEQ ID NO: 5086392 - DNA, 25 bp, Homo sapien
ctataggcaagcgtcacgcacccag

SEQ ID NO: 5086393 - DNA, 25 bp, Homo sapien
ggtactataggcaagcgtcacgcac

SEQ ID NO: 5086394 - DNA, 25 bp, Homo sapien
caccaggcaaccccacaccacagct

SEQ ID NO: 5086395 - DNA, 25 bp, Homo sapien
gggagcaccaggcaaccccacacca

SEQ ID NO: 5086396 - DNA, 25 bp, Homo sapien
agcaccaggcaaccccacaccacag

SEQ ID NO: 5086397 - DNA, 25 bp, Homo sapien
ggagcaccaggcaaccccacaccac

SEQ ID NO: 5086398 - DNA, 25 bp, Homo sapien
agagtgacagtcctatgcagaggga

SEQ ID NO: 5086399 - DNA, 25 bp, Homo sapien
gagggtgagaactgtatccacaaag

SEQ ID NO: 5086400 - DNA, 25 bp, Homo sapien
gacagtaagagatctatccagagag

SEQ ID NO: 5086401 - DNA, 25 bp, Homo sapien
tccacaaagatagcgagagttctaa

SEQ ID NO: 5086402 - DNA, 25 bp, Homo sapien
tcacaggtggcctgttccctggcac

SEQ ID NO: 5086403 - DNA, 25 bp, Homo sapien
tagaaacagggctgcgagtgactga

SEQ ID NO: 5086404 - DNA, 25 bp, Homo sapien
gatccttcgtctctgctttccatag

SEQ ID NO: 5086405 - DNA, 25 bp, Homo sapien
tctgctgcgcctgtcaatgctggtc

SEQ ID NO: 5086406 - DNA, 25 bp, Homo sapien
caggtgtcctcgtcaagatccttcg

SEQ ID NO: 5086407 - DNA, 25 bp, Homo sapien
tcagcgtcgtaaactgctgcaccgc

SEQ ID NO: 5086408 - DNA, 25 bp, Homo sapien
gccccaggcatcttcgtaggactcg

SEQ ID NO: 5086409 - DNA, 25 bp, Homo sapien
tcgggaggcagttggtgtctagtgg

SEQ ID NO: 5086410 - DNA, 25 bp, Homo sapien
cggatcagcgtcgtaaactgctgca

SEQ ID NO: 5086411 - DNA, 25 bp, Homo sapien
gcaggtctcggaagtcgttggaaat

SEQ ID NO: 5086412 - DNA, 25 bp, Homo sapien
gacatccagaatgacgttgaaaggg

SEQ ID NO: 5086413 - DNA, 25 bp, Homo sapien
tcatgaacaagagggcggctgtatc

SEQ ID NO: 5086414 - DNA, 25 bp, Homo sapien
tcccatggccaaaatagaggaagcc

SEQ ID NO: 5086415 - DNA, 25 bp, Homo sapien
caaagtagttatcatattgcccaag

SEQ ID NO: 5086416 - DNA, 25 bp, Homo sapien
tagaataaatctacagtgcttctgt

SEQ ID NO: 5086417 - DNA, 25 bp, Homo sapien
gaatgaagaagtagaataaatctac

SEQ ID NO: 5086418 - DNA, 25 bp, Homo sapien
ggagactctcttaatacaattcaaa

SEQ ID NO: 5086419 - DNA, 25 bp, Homo sapien
aatatggaccagtggtgtacagccc

SEQ ID NO: 5086420 - DNA, 25 bp, Homo sapien
tatggaccagtggtgtacagcccgt

SEQ ID NO: 5086421 - DNA, 25 bp, Homo sapien
tggaccagtggtgtacagcccgtct

SEQ ID NO: 5086422 - DNA, 25 bp, Homo sapien
ccagtggtgtacagcccgtcttcca

SEQ ID NO: 5086423 - DNA, 25 bp, Homo sapien
tcggtgacttcacatgacccacggc

SEQ ID NO: 5086424 - DNA, 25 bp, Homo sapien
gacccacggccccatggttcagaaa

SEQ ID NO: 5086425 - DNA, 25 bp, Homo sapien
ggtccacagtcctggtgttttggta

SEQ ID NO: 5086426 - DNA, 25 bp, Homo sapien
cagaaaagccttccttgtagcaacg

SEQ ID NO: 5086427 - DNA, 25 bp, Homo sapien
ggcggccagggccataatcctgcaa

SEQ ID NO: 5086428 - DNA, 25 bp, Homo sapien
tgggcatcccgtagatgatgatgta

SEQ ID NO: 5086429 - DNA, 25 bp, Homo sapien
aggctgctcaagtttatcatgaagc

SEQ ID NO: 5086430 - DNA, 25 bp, Homo sapien
gatgtaggcacagtgctccggaagc

SEQ ID NO: 5086431 - DNA, 25 bp, Homo sapien
ggccccacaccagagacaatggagc

SEQ ID NO: 5086432 - DNA, 25 bp, Homo sapien
tgcacgtgctcagcttcatggactg

SEQ ID NO: 5086433 - DNA, 25 bp, Homo sapien
tgtgatgaggcatccctgcacgtgc

SEQ ID NO: 5086434 - DNA, 25 bp, Homo sapien
tccatagcaattctcgagagggatg

SEQ ID NO: 5086435 - DNA, 25 bp, Homo sapien
ggcacatcccactctctgagacagg

SEQ ID NO: 5086436 - DNA, 25 bp, Homo sapien
ccatggtggctctggcccaagttct

SEQ ID NO: 5086437 - DNA, 25 bp, Homo sapien
acaagggcacatcccactctctgag

SEQ ID NO: 5086438 - DNA, 25 bp, Homo sapien
aagggcacatcccactctctgagac

SEQ ID NO: 5086439 - DNA, 25 bp, Homo sapien
cacggtctcctcctattctcatggt

SEQ ID NO: 5086440 - DNA, 25 bp, Homo sapien
ggtctcctcctattctcatggtctc

SEQ ID NO: 5086441 - DNA, 25 bp, Homo sapien
tctcctttatatcgacacagtctcc

SEQ ID NO: 5086442 - DNA, 25 bp, Homo sapien
tggtctccccgtattcccatgatct

SEQ ID NO: 5086443 - DNA, 25 bp, Homo sapien
acagtctcctgcatattcatgtgat

SEQ ID NO: 5086444 - DNA, 25 bp, Homo sapien
tggtctccctatattcttgcagtct

SEQ ID NO: 5086445 - DNA, 25 bp, Homo sapien
tgcatattcatgtgatctccccata

SEQ ID NO: 5086446 - DNA, 25 bp, Homo sapien
tcacggtctccccatattctcacag

SEQ ID NO: 5086447 - DNA, 25 bp, Homo sapien
tcatggtttccccatattcgcatgg

SEQ ID NO: 5086448 - DNA, 25 bp, Homo sapien
tcctttatattgatgtggtctcccc

SEQ ID NO: 5086449 - DNA, 25 bp, Homo sapien
ggtgtccctcatattctcatggttt

SEQ ID NO: 5086450 - DNA, 25 bp, Homo sapien
tctcctttatattgacacggcctcc

SEQ ID NO: 5086451 - DNA, 25 bp, Homo sapien
ttatctcctgagaccgcgatggtga

SEQ ID NO: 5086452 - DNA, 25 bp, Homo sapien
gacactttggaaatccacgcgggca

SEQ ID NO: 5086453 - DNA, 25 bp, Homo sapien
gaatcttcatcagcccttcaaaaca

SEQ ID NO: 5086454 - DNA, 25 bp, Homo sapien
gaggttcccgagaggcattttataa

SEQ ID NO: 5086455 - DNA, 25 bp, Homo sapien
tcttgacttggtttctgtttgatga

SEQ ID NO: 5086456 - DNA, 25 bp, Homo sapien
ggaccatgaagccaccgctgaggcc

SEQ ID NO: 5086457 - DNA, 25 bp, Homo sapien
cgctgaggccaatgacgatgaggta

SEQ ID NO: 5086458 - DNA, 25 bp, Homo sapien
cttaaggacacgtagtacaggacca

SEQ ID NO: 5086459 - DNA, 25 bp, Homo sapien
tagcaacgttgtaggtgccaccgag

SEQ ID NO: 5086460 - DNA, 25 bp, Homo sapien
tgccagtgagcagaaatccctttcg

SEQ ID NO: 5086461 - DNA, 25 bp, Homo sapien
gatggtggcaacatgaccgtgcaag

SEQ ID NO: 5086462 - DNA, 25 bp, Homo sapien
ggtctagatccccttgctatggagg

SEQ ID NO: 5086463 - DNA, 25 bp, Homo sapien
ggagcagagatgttccacaagcaaa

SEQ ID NO: 5086464 - DNA, 25 bp, Homo sapien
tccactaagaggaacccagattctc

SEQ ID NO: 5086465 - DNA, 25 bp, Homo sapien
gaaacatcggattccagggctgaga

SEQ ID NO: 5086466 - DNA, 25 bp, Homo sapien
gagtaaactcatgtgtacttaggtg

SEQ ID NO: 5086467 - DNA, 25 bp, Homo sapien
tgcaggcggttaatcaaatgagtaa

SEQ ID NO: 5086468 - DNA, 25 bp, Homo sapien
gagattacttacctgcaggcggtta

SEQ ID NO: 5086469 - DNA, 25 bp, Homo sapien
tgtagatgggagattacttacctgc

SEQ ID NO: 5086470 - DNA, 25 bp, Homo sapien
tacctgcaggcggttaatcaaatga

SEQ ID NO: 5086471 - DNA, 25 bp, Homo sapien
acttgggagttagagcctgagcagg

SEQ ID NO: 5086472 - DNA, 25 bp, Homo sapien
gacttgggagttagagcctgagcag

SEQ ID NO: 5086473 - DNA, 25 bp, Homo sapien
cttgggagttagagcctgagcaggg

SEQ ID NO: 5086474 - DNA, 25 bp, Homo sapien
ggacttgggagttagagcctgagca

SEQ ID NO: 5086475 - DNA, 25 bp, Homo sapien
attaggggaccacagtgacaaggag

SEQ ID NO: 5086476 - DNA, 25 bp, Homo sapien
ttcattcaggcctaacgccattagg

SEQ ID NO: 5086477 - DNA, 25 bp, Homo sapien
gcctaacgccattaggggaccacag

SEQ ID NO: 5086478 - DNA, 25 bp, Homo sapien
ctaacgccattaggggaccacagtg

SEQ ID NO: 5086479 - DNA, 25 bp, Homo sapien
gcagaccgaatggtgaactcacaaa

SEQ ID NO: 5086480 - DNA, 25 bp, Homo sapien
accaaaacccattgcagaccgaatg

SEQ ID NO: 5086481 - DNA, 25 bp, Homo sapien
aacccattgcagaccgaatggtgaa

SEQ ID NO: 5086482 - DNA, 25 bp, Homo sapien
cattgcagaccgaatggtgaactca

SEQ ID NO: 5086483 - DNA, 25 bp, Homo sapien
gagaaccaccgctgtaggaaaaaca

SEQ ID NO: 5086484 - DNA, 25 bp, Homo sapien
tgggcaaccagggtggagaaccacc

SEQ ID NO: 5086485 - DNA, 25 bp, Homo sapien
tctgggcaatgggtccacattggct

SEQ ID NO: 5086486 - DNA, 25 bp, Homo sapien
ggcttttgttaaagctccagcatgg

SEQ ID NO: 5086487 - DNA, 25 bp, Homo sapien
cagggcagggctcgctgaacagcat

SEQ ID NO: 5086488 - DNA, 25 bp, Homo sapien
ctaccctttcgcaatgcagggcagg

SEQ ID NO: 5086489 - DNA, 25 bp, Homo sapien
ggcagggctcgctgaacagcatgca

SEQ ID NO: 5086490 - DNA, 25 bp, Homo sapien
aacaaatctctaccctttcgcaatg

SEQ ID NO: 5086491 - DNA, 25 bp, Homo sapien
tataaggcccacgaagtcccaaata

SEQ ID NO: 5086492 - DNA, 25 bp, Homo sapien
ggtcaaatctagcaacctgcctgtt

SEQ ID NO: 5086493 - DNA, 25 bp, Homo sapien
taattgcagcagagcctataaggcc

SEQ ID NO: 5086494 - DNA, 25 bp, Homo sapien
gccacaccggctgtacgttactata

SEQ ID NO: 5086495 - DNA, 25 bp, Homo sapien
tcctagtgcaccagcagagaatggg

SEQ ID NO: 5086496 - DNA, 25 bp, Homo sapien
gaaagtggtctgtatgctgtgctaa

SEQ ID NO: 5086497 - DNA, 25 bp, Homo sapien
tcagggcctgtttggtgctccagac

SEQ ID NO: 5086498 - DNA, 25 bp, Homo sapien
gctgctaacaccacacgtgctgctg

SEQ ID NO: 5086499 - DNA, 25 bp, Homo sapien
tcaggcccgtggactttacaaagcc

SEQ ID NO: 5086500 - DNA, 25 bp, Homo sapien
tgtacaatcatgcatgggagtgttt

SEQ ID NO: 5086501 - DNA, 25 bp, Homo sapien
gcatgggagtgtttccattagaaat

SEQ ID NO: 5086502 - DNA, 25 bp, Homo sapien
aaatgtatcgtgctttcaggcccgt

SEQ ID NO: 5086503 - DNA, 25 bp, Homo sapien
gatcctccccctgcgctcgcttcag

SEQ ID NO: 5086504 - DNA, 25 bp, Homo sapien
agtcatgctaaccacaagttagtca

SEQ ID NO: 5086505 - DNA, 25 bp, Homo sapien
actgaagcaggcctcatttttttgc

SEQ ID NO: 5086506 - DNA, 25 bp, Homo sapien
catttttttgcagtcatgctaacca

SEQ ID NO: 5086507 - DNA, 25 bp, Homo sapien
tagtgaccgtgaactttctaacgca

SEQ ID NO: 5086508 - DNA, 25 bp, Homo sapien
gatacagccattccgtacatgtgtg

SEQ ID NO: 5086509 - DNA, 25 bp, Homo sapien
taaatgttggcactaggagtcatca

SEQ ID NO: 5086510 - DNA, 25 bp, Homo sapien
gactgtctgtcatgcctggaggctc

SEQ ID NO: 5086511 - DNA, 25 bp, Homo sapien
aaaacatggaacgctttacacattt

SEQ ID NO: 5086512 - DNA, 25 bp, Homo sapien
cgctttacacatttgcgtgtcatct

SEQ ID NO: 5086513 - DNA, 25 bp, Homo sapien
catggaacgctttacacatttgcgt

SEQ ID NO: 5086514 - DNA, 25 bp, Homo sapien
aacatggaacgctttacacatttgc

SEQ ID NO: 5086515 - DNA, 25 bp, Homo sapien
cagcaggtggcagtcaaacagtcac

SEQ ID NO: 5086516 - DNA, 25 bp, Homo sapien
taaagctatgccaagtgccgacaga

SEQ ID NO: 5086517 - DNA, 25 bp, Homo sapien
gaacagtgggtgatcctagctgcca

SEQ ID NO: 5086518 - DNA, 25 bp, Homo sapien
tggcaatgtacacaaacaggcaccg

SEQ ID NO: 5086519 - DNA, 25 bp, Homo sapien
tgctaaataagaccatgtaactgat

SEQ ID NO: 5086520 - DNA, 25 bp, Homo sapien
gccatatggtaacagtaaagtatcc

SEQ ID NO: 5086521 - DNA, 25 bp, Homo sapien
tatttcgccagatagaacttccctt

SEQ ID NO: 5086522 - DNA, 25 bp, Homo sapien
tactcatctaagaactgggtgaatt

SEQ ID NO: 5086523 - DNA, 25 bp, Homo sapien
aattcaataagatgttaagagataa

SEQ ID NO: 5086524 - DNA, 25 bp, Homo sapien
aaaattcaataagatgttaagagat

SEQ ID NO: 5086525 - DNA, 25 bp, Homo sapien
ttcaataagatgttaagagataagc

SEQ ID NO: 5086526 - DNA, 25 bp, Homo sapien
tcaataagatgttaagagataagcc

SEQ ID NO: 5086527 - DNA, 25 bp, Homo sapien
tctgttaactcaggtctctctccgt

SEQ ID NO: 5086528 - DNA, 25 bp, Homo sapien
catagcatttgagatgactgagtaa

SEQ ID NO: 5086529 - DNA, 25 bp, Homo sapien
ggagattctctatcagatctaagag

SEQ ID NO: 5086530 - DNA, 25 bp, Homo sapien
taagggttcatgacaggagattctc

SEQ ID NO: 5086531 - DNA, 25 bp, Homo sapien
cttagcatgtgcttcaagttcattc

SEQ ID NO: 5086532 - DNA, 25 bp, Homo sapien
tcacttagcatgtgcttcaagttca

SEQ ID NO: 5086533 - DNA, 25 bp, Homo sapien
aagtgggattgttggtaattctact

SEQ ID NO: 5086534 - DNA, 25 bp, Homo sapien
caccactgtctaatcgcttttgact

SEQ ID NO: 5086535 - DNA, 25 bp, Homo sapien
ttgcggctctaccaacagaggagtg

SEQ ID NO: 5086536 - DNA, 25 bp, Homo sapien
tccggcccgcgtttctgagagtgaa

SEQ ID NO: 5086537 - DNA, 25 bp, Homo sapien
cagcgaatgaacacgatgcccagat

SEQ ID NO: 5086538 - DNA, 25 bp, Homo sapien
tcctattggacatggcgtcagggct

SEQ ID NO: 5086539 - DNA, 25 bp, Homo sapien
atcattaatgctgtgcctttgcatt

SEQ ID NO: 5086540 - DNA, 25 bp, Homo sapien
aatgctgtgcctttgcattaaggcc

SEQ ID NO: 5086541 - DNA, 25 bp, Homo sapien
ttaatgctgtgcctttgcattaagg

SEQ ID NO: 5086542 - DNA, 25 bp, Homo sapien
tgctgtgcctttgcattaaggccat

SEQ ID NO: 5086543 - DNA, 25 bp, Homo sapien
gtaccactaggggaatcattgccag

SEQ ID NO: 5086544 - DNA, 25 bp, Homo sapien
ctagtctccaaagaccttagatctt

SEQ ID NO: 5086545 - DNA, 25 bp, Homo sapien
tccaaagaccttagatctttccaaa

SEQ ID NO: 5086546 - DNA, 25 bp, Homo sapien
tgggcagccccttcgtaccactagg

SEQ ID NO: 5086547 - DNA, 25 bp, Homo sapien
ctttcaaaggcttgtaggtcagcct

SEQ ID NO: 5086548 - DNA, 25 bp, Homo sapien
ggtgagcacccagacataaacccag

SEQ ID NO: 5086549 - DNA, 25 bp, Homo sapien
ttacaaacaggatcaattacctcag

SEQ ID NO: 5086550 - DNA, 25 bp, Homo sapien
cctggagatccaaggattttacaaa

SEQ ID NO: 5086551 - DNA, 25 bp, Homo sapien
gtagatgcagtctgtcgctactgcc

SEQ ID NO: 5086552 - DNA, 25 bp, Homo sapien
agtctgtcgctactgcctcgctgtc

SEQ ID NO: 5086553 - DNA, 25 bp, Homo sapien
ctgcctgtagatgcagtctgtcgct

SEQ ID NO: 5086554 - DNA, 25 bp, Homo sapien
gatgcagtctgtcgctactgcctcg

SEQ ID NO: 5086555 - DNA, 25 bp, Homo sapien
tatgaactgataaatcatgggaaat

SEQ ID NO: 5086556 - DNA, 25 bp, Homo sapien
aatggatggaaagcggcaacagtca

SEQ ID NO: 5086557 - DNA, 25 bp, Homo sapien
tgggaaatggatggaaagcggcaac

SEQ ID NO: 5086558 - DNA, 25 bp, Homo sapien
aactgataaatcatgggaaatggga

SEQ ID NO: 5086559 - DNA, 25 bp, Homo sapien
gccactgtaaaccaatcaactgtaa

SEQ ID NO: 5086560 - DNA, 25 bp, Homo sapien
aagtggacccatcatgtggttctga

SEQ ID NO: 5086561 - DNA, 25 bp, Homo sapien
cctcttagcataggaatgaaaatca

SEQ ID NO: 5086562 - DNA, 25 bp, Homo sapien
tctcaaaaacccatccattaagtgg

SEQ ID NO: 5086563 - DNA, 25 bp, Homo sapien
caagatttccatagattcggcaaat

SEQ ID NO: 5086564 - DNA, 25 bp, Homo sapien
aatactgtgcgatcgaattattgct

SEQ ID NO: 5086565 - DNA, 25 bp, Homo sapien
catttcccaagaatagctcagctgt

SEQ ID NO: 5086566 - DNA, 25 bp, Homo sapien
caagaatagctcagctgtcaaagca

SEQ ID NO: 5086567 - DNA, 25 bp, Homo sapien
atgtccctgaatggcaaactgactg

SEQ ID NO: 5086568 - DNA, 25 bp, Homo sapien
tgatgtccctgaatggcaaactgac

SEQ ID NO: 5086569 - DNA, 25 bp, Homo sapien
atgatgtccctgaatggcaaactga

SEQ ID NO: 5086570 - DNA, 25 bp, Homo sapien
aaactgactgaacagcaggcagctt

SEQ ID NO: 5086571 - DNA, 25 bp, Homo sapien
ggtgcctccaaggatgcagttgaaa

SEQ ID NO: 5086572 - DNA, 25 bp, Homo sapien
gattaccacatctctttgtgcccag

SEQ ID NO: 5086573 - DNA, 25 bp, Homo sapien
cctctgtgggttgtagagcacactt

SEQ ID NO: 5086574 - DNA, 25 bp, Homo sapien
caggaatggaagtcagcctctgtgg

SEQ ID NO: 5086575 - DNA, 25 bp, Homo sapien
gtaccacagcactcatggattctgg

SEQ ID NO: 5086576 - DNA, 25 bp, Homo sapien
tatgtgcccagcaaaatggctccca

SEQ ID NO: 5086577 - DNA, 25 bp, Homo sapien
ggaacgtcattgtactcagagcact

SEQ ID NO: 5086578 - DNA, 25 bp, Homo sapien
tgaacagagagcactggaacgtcat

SEQ ID NO: 5086579 - DNA, 25 bp, Homo sapien
tccctctttgaggtgtgcctgccgt

SEQ ID NO: 5086580 - DNA, 25 bp, Homo sapien
taagcagcagcgtcagacattggaa

SEQ ID NO: 5086581 - DNA, 25 bp, Homo sapien
gcctgccgtggtgattggattcata

SEQ ID NO: 5086582 - DNA, 25 bp, Homo sapien
gattcatatggagcaagtgacttct

SEQ ID NO: 5086583 - DNA, 25 bp, Homo sapien
tgtgctccgagctgtagacacaagg

SEQ ID NO: 5086584 - DNA, 25 bp, Homo sapien
gtactgtgctccgagctgtagacac

SEQ ID NO: 5086585 - DNA, 25 bp, Homo sapien
acaaggataagactcagttgctgtc

SEQ ID NO: 5086586 - DNA, 25 bp, Homo sapien
gtagacacaaggataagactcagtt

SEQ ID NO: 5086587 - DNA, 25 bp, Homo sapien
tcaggccaaagtatctaggtctgca

SEQ ID NO: 5086588 - DNA, 25 bp, Homo sapien
tgatttcaggaagcgtcaacctctc

SEQ ID NO: 5086589 - DNA, 25 bp, Homo sapien
taggcctggcaagagttgctgtatg

SEQ ID NO: 5086590 - DNA, 25 bp, Homo sapien
taggtctgcactcctaatccaggaa

SEQ ID NO: 5086591 - DNA, 25 bp, Homo sapien
caagttaggtacacaaagtaccagg

SEQ ID NO: 5086592 - DNA, 25 bp, Homo sapien
agacttgattcttgccatcaaggag

SEQ ID NO: 5086593 - DNA, 25 bp, Homo sapien
aagtaccaggtaatttgtgatatct

SEQ ID NO: 5086594 - DNA, 25 bp, Homo sapien
tataatctcgaactcttagaagcag

SEQ ID NO: 5086595 - DNA, 25 bp, Homo sapien
ggagttaaagttggcaaagcaggca

SEQ ID NO: 5086596 - DNA, 25 bp, Homo sapien
gactggagatcttaaccaaaggagg

SEQ ID NO: 5086597 - DNA, 25 bp, Homo sapien
aatcatttcagctcaagtttgcagg

SEQ ID NO: 5086598 - DNA, 25 bp, Homo sapien
tgagtttaaagtataccctgatgga

SEQ ID NO: 5086599 - DNA, 25 bp, Homo sapien
ggtcagctgggttttatggcgcaca

SEQ ID NO: 5086600 - DNA, 25 bp, Homo sapien
cagccaggcaaagaagcatgtgttg

SEQ ID NO: 5086601 - DNA, 25 bp, Homo sapien
agggtctatccgcagaatatctgga

SEQ ID NO: 5086602 - DNA, 25 bp, Homo sapien
ggctgaggcccctataacaagacag

SEQ ID NO: 5086603 - DNA, 25 bp, Homo sapien
ttaagtccttatcaattaagtgttc

SEQ ID NO: 5086604 - DNA, 25 bp, Homo sapien
taagtccttatcaattaagtgttcc

SEQ ID NO: 5086605 - DNA, 25 bp, Homo sapien
aagtccttatcaattaagtgttcca

SEQ ID NO: 5086606 - DNA, 25 bp, Homo sapien
agtccttatcaattaagtgttccat

SEQ ID NO: 5086607 - DNA, 25 bp, Homo sapien
tgttaagctcttgctaggctttgca

SEQ ID NO: 5086608 - DNA, 25 bp, Homo sapien
caataactcaatgccaatgtctcct

SEQ ID NO: 5086609 - DNA, 25 bp, Homo sapien
cccagtgtttcacaagtctgttctc

SEQ ID NO: 5086610 - DNA, 25 bp, Homo sapien
tatgcgctagggtatccagttgcca

SEQ ID NO: 5086611 - DNA, 25 bp, Homo sapien
aaaggatcggtgatctgtatatttc

SEQ ID NO: 5086612 - DNA, 25 bp, Homo sapien
ttgaaaggatcggtgatctgtatat

SEQ ID NO: 5086613 - DNA, 25 bp, Homo sapien
aggatcggtgatctgtatatttctc

SEQ ID NO: 5086614 - DNA, 25 bp, Homo sapien
ggatcggtgatctgtatatttctca

SEQ ID NO: 5086615 - DNA, 25 bp, Homo sapien
cctgaagttctgttgttgatatgag

SEQ ID NO: 5086616 - DNA, 25 bp, Homo sapien
gagcagttcctttctaatgtcctca

SEQ ID NO: 5086617 - DNA, 25 bp, Homo sapien
tgttgttgatatgagcagttccttt

SEQ ID NO: 5086618 - DNA, 25 bp, Homo sapien
caaagtagtactcagacatttcctg

SEQ ID NO: 5086619 - DNA, 25 bp, Homo sapien
agtgtggatcatttctgcaattaag

SEQ ID NO: 5086620 - DNA, 25 bp, Homo sapien
tcccagcctagtctcttgacatgga

SEQ ID NO: 5086621 - DNA, 25 bp, Homo sapien
gacatttccgtattttgtttctcag

SEQ ID NO: 5086622 - DNA, 25 bp, Homo sapien
catttcgcagttattgagcgcctac

SEQ ID NO: 5086623 - DNA, 25 bp, Homo sapien
tcggcattgatattaaaactcccag

SEQ ID NO: 5086624 - DNA, 25 bp, Homo sapien
agggagaagagtgggcgggaaattg

SEQ ID NO: 5086625 - DNA, 25 bp, Homo sapien
ctgtaccccggagggagaagagtgg

SEQ ID NO: 5086626 - DNA, 25 bp, Homo sapien
cccggagagtctgtacggatccttt

SEQ ID NO: 5086627 - DNA, 25 bp, Homo sapien
tctaagcctcgcgtaaaagaagcgc

SEQ ID NO: 5086628 - DNA, 25 bp, Homo sapien
gatcctttccgttctgtgaggaccg

SEQ ID NO: 5086629 - DNA, 25 bp, Homo sapien
aaagaagcgccataagggaccaacg

SEQ ID NO: 5086630 - DNA, 25 bp, Homo sapien
aagtatctggaaagcgattggttcg

SEQ ID NO: 5086631 - DNA, 25 bp, Homo sapien
ttcaaatgaacgcgcaaaaggcggg

SEQ ID NO: 5086632 - DNA, 25 bp, Homo sapien
ccgtcacaccggcttttttcaaatg

SEQ ID NO: 5086633 - DNA, 25 bp, Homo sapien
agccaatttccaagtccgtcacacc

SEQ ID NO: 5086634 - DNA, 25 bp, Homo sapien
cggcttttccgccattgagcagaag

SEQ ID NO: 5086635 - DNA, 25 bp, Homo sapien
gagcaccggcggcttttccgccatt

SEQ ID NO: 5086636 - DNA, 25 bp, Homo sapien
ccattgagcagaagccgctcggctc

SEQ ID NO: 5086637 - DNA, 25 bp, Homo sapien
aggccgtcagagcaccggcggcttt

SEQ ID NO: 5086638 - DNA, 25 bp, Homo sapien
cttctctccaccctagcgccgttgc

SEQ ID NO: 5086639 - DNA, 25 bp, Homo sapien
ttccaaccaccgaaccctgagaatc

SEQ ID NO: 5086640 - DNA, 25 bp, Homo sapien
accctagcgccgttgccgattcggc

SEQ ID NO: 5086641 - DNA, 25 bp, Homo sapien
ctgagaatcagagactccagccgcg

SEQ ID NO: 5086642 - DNA, 25 bp, Homo sapien
gagaagatgtctagggcgcctcgct

SEQ ID NO: 5086643 - DNA, 25 bp, Homo sapien
cggtactcagcccaagtttccaacg

SEQ ID NO: 5086644 - DNA, 25 bp, Homo sapien
gcccaagtttccaacggaggcgcga

SEQ ID NO: 5086645 - DNA, 25 bp, Homo sapien
agaagatgtctagggcgcctcgctc

SEQ ID NO: 5086646 - DNA, 25 bp, Homo sapien
catagacagcagagaaagacgattt

SEQ ID NO: 5086647 - DNA, 25 bp, Homo sapien
ccccagtgctttcgtgtgaaagaga

SEQ ID NO: 5086648 - DNA, 25 bp, Homo sapien
aaggcgagggtagaacgcatagaca

SEQ ID NO: 5086649 - DNA, 25 bp, Homo sapien
gacgatttaacaaggaagtgaagtg

SEQ ID NO: 5086650 - DNA, 25 bp, Homo sapien
gagaaggtcacctgaaagctcactt

SEQ ID NO: 5086651 - DNA, 25 bp, Homo sapien
tgaagacaaaggaacgtagacccca

SEQ ID NO: 5086652 - DNA, 25 bp, Homo sapien
gaggatttcaacacggtcaggcttc

SEQ ID NO: 5086653 - DNA, 25 bp, Homo sapien
taggaatttagctgagactgtccca

SEQ ID NO: 5086654 - DNA, 25 bp, Homo sapien
aatgaccagtcttccaagccgtgag

SEQ ID NO: 5086655 - DNA, 25 bp, Homo sapien
tacagaacagcacgtgaatcaccac

SEQ ID NO: 5086656 - DNA, 25 bp, Homo sapien
tgtccatcccgtttctgaggtctga

SEQ ID NO: 5086657 - DNA, 25 bp, Homo sapien
tgctgctcaggccataacgtaaacc

SEQ ID NO: 5086658 - DNA, 25 bp, Homo sapien
ccacagtacattttggagtagggag

SEQ ID NO: 5086659 - DNA, 25 bp, Homo sapien
gatacagtggttctaatctagacag

SEQ ID NO: 5086660 - DNA, 25 bp, Homo sapien
cactggccagataactcaaatttta

SEQ ID NO: 5086661 - DNA, 25 bp, Homo sapien
aaactttctggttatgcccatacct

SEQ ID NO: 5086662 - DNA, 25 bp, Homo sapien
taactactgtgcaatcgctaagtgc

SEQ ID NO: 5086663 - DNA, 25 bp, Homo sapien
tcctcttacagcaggtaactactgt

SEQ ID NO: 5086664 - DNA, 25 bp, Homo sapien
tatgaaagtatgacaagtgatggag

SEQ ID NO: 5086665 - DNA, 25 bp, Homo sapien
tagaatagtgtttggcttacagaaa

SEQ ID NO: 5086666 - DNA, 25 bp, Homo sapien
catccagaacgtttatgtttaacac

SEQ ID NO: 5086667 - DNA, 25 bp, Homo sapien
atttaatcatccagaacgtttatgt

SEQ ID NO: 5086668 - DNA, 25 bp, Homo sapien
gaacgtttatgtttaacacattcat

SEQ ID NO: 5086669 - DNA, 25 bp, Homo sapien
tctacaatcaactattatttacttc

SEQ ID NO: 5086670 - DNA, 25 bp, Homo sapien
cttcaacccgtgattccaagtgctt

SEQ ID NO: 5086671 - DNA, 25 bp, Homo sapien
atcttttttcaccgcttcatctgag

SEQ ID NO: 5086672 - DNA, 25 bp, Homo sapien
tcatctgagaccttgggagcatttg

SEQ ID NO: 5086673 - DNA, 25 bp, Homo sapien
caagtgcttatccaactctgaatct

SEQ ID NO: 5086674 - DNA, 25 bp, Homo sapien
tcgcccaggcgacaaaagtgctagg

SEQ ID NO: 5086675 - DNA, 25 bp, Homo sapien
gtcgcccaggcgacaaaagtgctag

SEQ ID NO: 5086676 - DNA, 25 bp, Homo sapien
atggtgtcgatctgacctcatgatc

SEQ ID NO: 5086677 - DNA, 25 bp, Homo sapien
ggatggtgtcgatctgacctcatga

SEQ ID NO: 5086678 - DNA, 25 bp, Homo sapien
accgtgtagccaggatggtgtcgat

SEQ ID NO: 5086679 - DNA, 25 bp, Homo sapien
cgtgtagccaggatggtgtcgatct

SEQ ID NO: 5086680 - DNA, 25 bp, Homo sapien
cgaaaagggagaattagtattagcg

SEQ ID NO: 5086681 - DNA, 25 bp, Homo sapien
tttcatgacactgttaggggaaatt

SEQ ID NO: 5086682 - DNA, 25 bp, Homo sapien
ttagtattagcggaattaagagtac

SEQ ID NO: 5086683 - DNA, 25 bp, Homo sapien
gcggaattaagagtacttgttttca

SEQ ID NO: 5086684 - DNA, 25 bp, Homo sapien
ggaatacatctaaaagaaggcaaga

SEQ ID NO: 5086685 - DNA, 25 bp, Homo sapien
tcctaggatgaactggaatacatct

SEQ ID NO: 5086686 - DNA, 25 bp, Homo sapien
gtgtaactaataagcaaatcctagg

SEQ ID NO: 5086687 - DNA, 25 bp, Homo sapien
accatgactggcctactaaacggaa

SEQ ID NO: 5086688 - DNA, 25 bp, Homo sapien
tgtagctctatgatgccgaggctgg

SEQ ID NO: 5086689 - DNA, 25 bp, Homo sapien
gatttgtagtggctgcctagctaac

SEQ ID NO: 5086690 - DNA, 25 bp, Homo sapien
ctatttgctacaggccctagagatc

SEQ ID NO: 5086691 - DNA, 25 bp, Homo sapien
tcggcatcccaagaattataggtgt

SEQ ID NO: 5086692 - DNA, 25 bp, Homo sapien
tatgcatgacatgtactgtatacca

SEQ ID NO: 5086693 - DNA, 25 bp, Homo sapien
taggtacactgcaatacactcccat

SEQ ID NO: 5086694 - DNA, 25 bp, Homo sapien
ataccataatgctatatactcccac

SEQ ID NO: 5086695 - DNA, 25 bp, Homo sapien
ccttctctgacctaagtctgagtag

SEQ ID NO: 5086696 - DNA, 25 bp, Homo sapien
caggccttactttcaaaacaactgt

SEQ ID NO: 5086697 - DNA, 25 bp, Homo sapien
ccaggccttactttcaaaacaactg

SEQ ID NO: 5086698 - DNA, 25 bp, Homo sapien
gacaagatgcgcatgacatgggcaa

SEQ ID NO: 5086699 - DNA, 25 bp, Homo sapien
gacatgggcaagatcaggcattcct

SEQ ID NO: 5086700 - DNA, 25 bp, Homo sapien
gatattttctgcagacaagatgcgc

SEQ ID NO: 5086701 - DNA, 25 bp, Homo sapien
ggcattccttcctcgccagacttct

SEQ ID NO: 5086702 - DNA, 25 bp, Homo sapien
tatgtggattcagtctactataaac

SEQ ID NO: 5086703 - DNA, 25 bp, Homo sapien
ggattcagtctactataaacagctt

SEQ ID NO: 5086704 - DNA, 25 bp, Homo sapien
catcactttctctatgtggattcag

SEQ ID NO: 5086705 - DNA, 25 bp, Homo sapien
ctttctctatgtggattcagtctac

SEQ ID NO: 5086706 - DNA, 25 bp, Homo sapien
taatttattatagacttcgttaatg

SEQ ID NO: 5086707 - DNA, 25 bp, Homo sapien
gtaatttactacagactataattta

SEQ ID NO: 5086708 - DNA, 25 bp, Homo sapien
tttattatagacttcgttaatgtga

SEQ ID NO: 5086709 - DNA, 25 bp, Homo sapien
attatagacttcgttaatgtgaatg

SEQ ID NO: 5086710 - DNA, 25 bp, Homo sapien
tactgagctttcaccgtatgccagg

SEQ ID NO: 5086711 - DNA, 25 bp, Homo sapien
cacaagtaggagctgggtaaataca

SEQ ID NO: 5086712 - DNA, 25 bp, Homo sapien
ccctggcaatgaagcgagaccctat

SEQ ID NO: 5086713 - DNA, 25 bp, Homo sapien
gaaggagtatgatcccagagccctg

SEQ ID NO: 5086714 - DNA, 25 bp, Homo sapien
aatggtattatggttatacagaaaa

SEQ ID NO: 5086715 - DNA, 25 bp, Homo sapien
gtattatggttatacagaaaaatgt

SEQ ID NO: 5086716 - DNA, 25 bp, Homo sapien
ggtattatggttatacagaaaaatg

SEQ ID NO: 5086717 - DNA, 25 bp, Homo sapien
tggtattatggttatacagaaaaat

SEQ ID NO: 5086718 - DNA, 25 bp, Homo sapien
ttaatgtgcttgattgataaacttg

SEQ ID NO: 5086719 - DNA, 25 bp, Homo sapien
caggtgaggggcttgactgattaaa

SEQ ID NO: 5086720 - DNA, 25 bp, Homo sapien
aaaaaacaggtgaggggcttgactg

SEQ ID NO: 5086721 - DNA, 25 bp, Homo sapien
gattagactgggattcaaaataaca

SEQ ID NO: 5086722 - DNA, 25 bp, Homo sapien
tacttaatactgtacagaacaagct

SEQ ID NO: 5086723 - DNA, 25 bp, Homo sapien
tataattcaacagcaacacaagcat

SEQ ID NO: 5086724 - DNA, 25 bp, Homo sapien
gaacaagctctaatcatccaagctg

SEQ ID NO: 5086725 - DNA, 25 bp, Homo sapien
caagctgatcacagttaagccgaca

SEQ ID NO: 5086726 - DNA, 25 bp, Homo sapien
tttagctagcctgtaactagtcagc

SEQ ID NO: 5086727 - DNA, 25 bp, Homo sapien
tctcctccagaagttgtcggtagtt

SEQ ID NO: 5086728 - DNA, 25 bp, Homo sapien
cagctggttcagcagggctttcttc

SEQ ID NO: 5086729 - DNA, 25 bp, Homo sapien
ccagcatcactgttcgaagaagtag

SEQ ID NO: 5086730 - DNA, 25 bp, Homo sapien
cattttgatgtgtgtagttaggcta

SEQ ID NO: 5086731 - DNA, 25 bp, Homo sapien
aatgcatacattacacttcctaggt

SEQ ID NO: 5086732 - DNA, 25 bp, Homo sapien
taattggtagcctaatttctggcat

SEQ ID NO: 5086733 - DNA, 25 bp, Homo sapien
aaaattacaggccagcatcagccat

SEQ ID NO: 5086734 - DNA, 25 bp, Homo sapien
cttccaatataccaaacttggttgt

SEQ ID NO: 5086735 - DNA, 25 bp, Homo sapien
ccacttccagattggattgaatttc

SEQ ID NO: 5086736 - DNA, 25 bp, Homo sapien
aatattattatttacctatgccact

SEQ ID NO: 5086737 - DNA, 25 bp, Homo sapien
tccagattggattgaatttcaaaag

SEQ ID NO: 5086738 - DNA, 25 bp, Homo sapien
tacctatgccacttccagattggat

SEQ ID NO: 5086739 - DNA, 25 bp, Homo sapien
taccatgggtcttctagatctccag

SEQ ID NO: 5086740 - DNA, 25 bp, Homo sapien
atgggtcttctagatctccagcacc

SEQ ID NO: 5086741 - DNA, 25 bp, Homo sapien
ctaccatgggtcttctagatctcca

SEQ ID NO: 5086742 - DNA, 25 bp, Homo sapien
ccatgggtcttctagatctccagca

SEQ ID NO: 5086743 - DNA, 25 bp, Homo sapien
tcacaaaacgttgggaatccgcaag

SEQ ID NO: 5086744 - DNA, 25 bp, Homo sapien
cacaaaggaccagatgatgactcat

SEQ ID NO: 5086745 - DNA, 25 bp, Homo sapien
tacaggcaatgctacaagtggcaac

SEQ ID NO: 5086746 - DNA, 25 bp, Homo sapien
gctgcaaaaggcttccaacttggtg

SEQ ID NO: 5086747 - DNA, 25 bp, Homo sapien
tcctctttggaattaaattttcaga

SEQ ID NO: 5086748 - DNA, 25 bp, Homo sapien
gaaatatgccaaccatataagaagt

SEQ ID NO: 5086749 - DNA, 25 bp, Homo sapien
ttctgtttcaagcaccagtaacccc

SEQ ID NO: 5086750 - DNA, 25 bp, Homo sapien
cctgtacagtttggttaattcctct

SEQ ID NO: 5086751 - DNA, 25 bp, Homo sapien
aatggattttttgcacaactaggaa

SEQ ID NO: 5086752 - DNA, 25 bp, Homo sapien
gcccattatgaactaaaagcaagta

SEQ ID NO: 5086753 - DNA, 25 bp, Homo sapien
caactaggaattgtctaatatgtga

SEQ ID NO: 5086754 - DNA, 25 bp, Homo sapien
aatttagcataaaaacgacagtgca

SEQ ID NO: 5086755 - DNA, 25 bp, Homo sapien
tgtatgcaactgaaggttgatgaaa

SEQ ID NO: 5086756 - DNA, 25 bp, Homo sapien
tgtccgcgtgcttctgagtgcttgg

SEQ ID NO: 5086757 - DNA, 25 bp, Homo sapien
gcttggaaggtctgccagccactgc

SEQ ID NO: 5086758 - DNA, 25 bp, Homo sapien
aaacctttttgtccgcgtgcttctg

SEQ ID NO: 5086759 - DNA, 25 bp, Homo sapien
caggtttacagatggacgtgcccaa

SEQ ID NO: 5086760 - DNA, 25 bp, Homo sapien
aggtgtttatcacatggacaggaaa

SEQ ID NO: 5086761 - DNA, 25 bp, Homo sapien
gattaaaggttaacagcagtacaaa

SEQ ID NO: 5086762 - DNA, 25 bp, Homo sapien
ttatcacatggacaggaaaaaatat

SEQ ID NO: 5086763 - DNA, 25 bp, Homo sapien
aaatatgattttgaagggcacagtg

SEQ ID NO: 5086764 - DNA, 25 bp, Homo sapien
ccctgtgttagagggaacattcagt

SEQ ID NO: 5086765 - DNA, 25 bp, Homo sapien
aattggttgcaactggcaccaggaa

SEQ ID NO: 5086766 - DNA, 25 bp, Homo sapien
caagtggcgagagcagacagacatt

SEQ ID NO: 5086767 - DNA, 25 bp, Homo sapien
ggctcacatatgtgcactgaaggca

SEQ ID NO: 5086768 - DNA, 25 bp, Homo sapien
tcaactccagtgcacgtgaagtata

SEQ ID NO: 5086769 - DNA, 25 bp, Homo sapien
tccagtgcacgtgaagtatacgact

SEQ ID NO: 5086770 - DNA, 25 bp, Homo sapien
accgacttcaactccagtgcacgtg

SEQ ID NO: 5086771 - DNA, 25 bp, Homo sapien
tgcacgtgaagtatacgactttgat

SEQ ID NO: 5086772 - DNA, 25 bp, Homo sapien
tagttccttttgatgatcagggcgg

SEQ ID NO: 5086773 - DNA, 25 bp, Homo sapien
ccttttgatgatcagggcggaggca

SEQ ID NO: 5086774 - DNA, 25 bp, Homo sapien
agttccttttgatgatcagggcgga

SEQ ID NO: 5086775 - DNA, 25 bp, Homo sapien
ttccttttgatgatcagggcggagg

SEQ ID NO: 5086776 - DNA, 25 bp, Homo sapien
tcctttgtgcttaactggctggtca

SEQ ID NO: 5086777 - DNA, 25 bp, Homo sapien
ttgtgcttaactggctggtcattcc

SEQ ID NO: 5086778 - DNA, 25 bp, Homo sapien
ctttgtgcttaactggctggtcatt

SEQ ID NO: 5086779 - DNA, 25 bp, Homo sapien
tggtcattccacagcaccactgtag

SEQ ID NO: 5086780 - DNA, 25 bp, Homo sapien
tcaccgacttatgtcttcggagtgc

SEQ ID NO: 5086781 - DNA, 25 bp, Homo sapien
gtctcaccgacttatgtcttcggag

SEQ ID NO: 5086782 - DNA, 25 bp, Homo sapien
cagtaagggaggtggaagagtggct

SEQ ID NO: 5086783 - DNA, 25 bp, Homo sapien
gcagtaagggaggtggaagagtggc

SEQ ID NO: 5086784 - DNA, 25 bp, Homo sapien
catactcatctcgatggagtctctc

SEQ ID NO: 5086785 - DNA, 25 bp, Homo sapien
ccttcatactcatctcgatggagtc

SEQ ID NO: 5086786 - DNA, 25 bp, Homo sapien
ccgttgtttgtctggcatcccttca

SEQ ID NO: 5086787 - DNA, 25 bp, Homo sapien
tggcatcccttcatactcatctcga

SEQ ID NO: 5086788 - DNA, 25 bp, Homo sapien
ggatccggggtctgctccagaatgt

SEQ ID NO: 5086789 - DNA, 25 bp, Homo sapien
tggatccggggtctgctccagaatg

SEQ ID NO: 5086790 - DNA, 25 bp, Homo sapien
gggagccaaggatgcccctggtgct

SEQ ID NO: 5086791 - DNA, 25 bp, Homo sapien
ttgaagtcgggctcctgggagccaa

SEQ ID NO: 5086792 - DNA, 25 bp, Homo sapien
cttgaagtcgggctcctgggagcca

SEQ ID NO: 5086793 - DNA, 25 bp, Homo sapien
ggtgctgtgcttcaggttgtctgtt

SEQ ID NO: 5086794 - DNA, 25 bp, Homo sapien
gcatccccgcatagggctggacgcc

SEQ ID NO: 5086795 - DNA, 25 bp, Homo sapien
tgggcatccccgcatagggctggac

SEQ ID NO: 5086796 - DNA, 25 bp, Homo sapien
ccttgggcatccccgcatagggctg

SEQ ID NO: 5086797 - DNA, 25 bp, Homo sapien
ggcatccccgcatagggctggacgc

SEQ ID NO: 5086798 - DNA, 25 bp, Homo sapien
caatgatggctatggtggccgcgat

SEQ ID NO: 5086799 - DNA, 25 bp, Homo sapien
gccagaagaggatctcccgaggtat

SEQ ID NO: 5086800 - DNA, 25 bp, Homo sapien
caccagtctaggcactttggagaga

SEQ ID NO: 5086801 - DNA, 25 bp, Homo sapien
ggtagatctggtacatgggcccctc

SEQ ID NO: 5086802 - DNA, 25 bp, Homo sapien
ccatcgttccaaaaatgggatcaac

SEQ ID NO: 5086803 - DNA, 25 bp, Homo sapien
catgtatggctgcaaccagattctc

SEQ ID NO: 5086804 - DNA, 25 bp, Homo sapien
tgggatcaacttcccggaaatcttc

SEQ ID NO: 5086805 - DNA, 25 bp, Homo sapien
tatatttaaagctgtgatgtagtcc

SEQ ID NO: 5086806 - DNA, 25 bp, Homo sapien
tggtttggtatgaaatcgatgatta

SEQ ID NO: 5086807 - DNA, 25 bp, Homo sapien
tcatgggtacagtcatgccagatat

SEQ ID NO: 5086808 - DNA, 25 bp, Homo sapien
cgtgtccgactcaattgaaaccaaa

SEQ ID NO: 5086809 - DNA, 25 bp, Homo sapien
accaaatatgtttatcactcgtgtg

SEQ ID NO: 5086810 - DNA, 25 bp, Homo sapien
tatggccccatggtatgactctccc

SEQ ID NO: 5086811 - DNA, 25 bp, Homo sapien
gacgtagttacactgagtccacatg

SEQ ID NO: 5086812 - DNA, 25 bp, Homo sapien
tccttaagtcaacgctgtgggccct

SEQ ID NO: 5086813 - DNA, 25 bp, Homo sapien
tgttggtactcagcaatagttgacg

SEQ ID NO: 5086814 - DNA, 25 bp, Homo sapien
aaaataacattggtttcgcacttcg

SEQ ID NO: 5086815 - DNA, 25 bp, Homo sapien
caggattgcggaaatttaaatcagg

SEQ ID NO: 5086816 - DNA, 25 bp, Homo sapien
tcaaagtgccaactggagtttccat

SEQ ID NO: 5086817 - DNA, 25 bp, Homo sapien
tcttgaacatcaggattgcggaaat

SEQ ID NO: 5086818 - DNA, 25 bp, Homo sapien
ctttctctttaaatagctcgctgct

SEQ ID NO: 5086819 - DNA, 25 bp, Homo sapien
tcctttctctttaaatagctcgctg

SEQ ID NO: 5086820 - DNA, 25 bp, Homo sapien
actcctttctctttaaatagctcgc

SEQ ID NO: 5086821 - DNA, 25 bp, Homo sapien
aactcctttctctttaaatagctcg

SEQ ID NO: 5086822 - DNA, 25 bp, Homo sapien
ggaggaatttaacagcatccaaact

SEQ ID NO: 5086823 - DNA, 25 bp, Homo sapien
gatttgggtcttatttacttggatc

SEQ ID NO: 5086824 - DNA, 25 bp, Homo sapien
tcaacaccctttgtgagccagaacc

SEQ ID NO: 5086825 - DNA, 25 bp, Homo sapien
tctcaggtgctttgcttctaggagg

SEQ ID NO: 5086826 - DNA, 25 bp, Homo sapien
aaatgtcctctattttgtggccctt

SEQ ID NO: 5086827 - DNA, 25 bp, Homo sapien
tcttcagaacccttgtcactgaagg

SEQ ID NO: 5086828 - DNA, 25 bp, Homo sapien
tggcccttggtagagcccacactgt

SEQ ID NO: 5086829 - DNA, 25 bp, Homo sapien
tcagatgataaaattgcaggagtaa

SEQ ID NO: 5086830 - DNA, 25 bp, Homo sapien
tattggtccatggtctgccggaagc

SEQ ID NO: 5086831 - DNA, 25 bp, Homo sapien
ggtgaagtcatggtacagctccgag

SEQ ID NO: 5086832 - DNA, 25 bp, Homo sapien
ccgggctccgtgctgtattggtcca

SEQ ID NO: 5086833 - DNA, 25 bp, Homo sapien
aatgtcgtgcattcccacctgcgtg

SEQ ID NO: 5086834 - DNA, 25 bp, Homo sapien
aaatgagagcatatgccgtggtcaa

SEQ ID NO: 5086835 - DNA, 25 bp, Homo sapien
aatgagagcatatgccgtggtcaac

SEQ ID NO: 5086836 - DNA, 25 bp, Homo sapien
gaaatgagagcatatgccgtggtca

SEQ ID NO: 5086837 - DNA, 25 bp, Homo sapien
gccctggtacaaccaaactgtaatc

SEQ ID NO: 5086838 - DNA, 25 bp, Homo sapien
tacacttggttgtgagggatacact

SEQ ID NO: 5086839 - DNA, 25 bp, Homo sapien
aaaggaatatggcaggccctggtac

SEQ ID NO: 5086840 - DNA, 25 bp, Homo sapien
tgtaatcaattagagttatgcaggc

SEQ ID NO: 5086841 - DNA, 25 bp, Homo sapien
tataagagttgacaaggttcagtgt

SEQ ID NO: 5086842 - DNA, 25 bp, Homo sapien
ctataagagttgacaaggttcagtg

SEQ ID NO: 5086843 - DNA, 25 bp, Homo sapien
ataagagttgacaaggttcagtgtc

SEQ ID NO: 5086844 - DNA, 25 bp, Homo sapien
cacggtcctgtcaatactctctgca

SEQ ID NO: 5086845 - DNA, 25 bp, Homo sapien
tctgcataggcttcagtccccatga

SEQ ID NO: 5086846 - DNA, 25 bp, Homo sapien
tggcaatccatagtacatcacggtc

SEQ ID NO: 5086847 - DNA, 25 bp, Homo sapien
tcccagaaacagtgtctagcatgct

SEQ ID NO: 5086848 - DNA, 25 bp, Homo sapien
aagaacacagctgtatacacagttt

SEQ ID NO: 5086849 - DNA, 25 bp, Homo sapien
ttaagaacacagctgtatacacagt

SEQ ID NO: 5086850 - DNA, 25 bp, Homo sapien
tttaagaacacagctgtatacacag

SEQ ID NO: 5086851 - DNA, 25 bp, Homo sapien
tttttaagaacacagctgtatacac

SEQ ID NO: 5086852 - DNA, 25 bp, Homo sapien
tgacatactgattccccaaacgcga

SEQ ID NO: 5086853 - DNA, 25 bp, Homo sapien
catagtaagttataggagttccagg

SEQ ID NO: 5086854 - DNA, 25 bp, Homo sapien
tcagccgtgaactgtctggtccacc

SEQ ID NO: 5086855 - DNA, 25 bp, Homo sapien
catagctttcattgagatttgcggc

SEQ ID NO: 5086856 - DNA, 25 bp, Homo sapien
gaactattgtcccactgcattggtg

SEQ ID NO: 5086857 - DNA, 25 bp, Homo sapien
taggtaaccaggtgttactagcttc

SEQ ID NO: 5086858 - DNA, 25 bp, Homo sapien
gtgttactagcttcagaaaaaccag

SEQ ID NO: 5086859 - DNA, 25 bp, Homo sapien
agtgtggtaatctgaattggtaggt

SEQ ID NO: 5086860 - DNA, 25 bp, Homo sapien
gggtgagtgtgtactttcagtagaa

SEQ ID NO: 5086861 - DNA, 25 bp, Homo sapien
cacaaaggcatgatttacaaactcc

SEQ ID NO: 5086862 - DNA, 25 bp, Homo sapien
taaggtttagacacattcagggtga

SEQ ID NO: 5086863 - DNA, 25 bp, Homo sapien
ttcacaaaggcatgatttacaaact

SEQ ID NO: 5086864 - DNA, 25 bp, Homo sapien
gaattctcagtggtgcttgtagcag

SEQ ID NO: 5086865 - DNA, 25 bp, Homo sapien
taaaacaaagcttatactatccaag

SEQ ID NO: 5086866 - DNA, 25 bp, Homo sapien
ttactcagtagagtgggatgggcat

SEQ ID NO: 5086867 - DNA, 25 bp, Homo sapien
cagagggtgctatgcatttcttaac

SEQ ID NO: 5086868 - DNA, 25 bp, Homo sapien
ccttagggaaattatgccatggcaa

SEQ ID NO: 5086869 - DNA, 25 bp, Homo sapien
tcaggaaattcctacagtgctgtct

SEQ ID NO: 5086870 - DNA, 25 bp, Homo sapien
gccatgcatgtgatcaccaaacagt

SEQ ID NO: 5086871 - DNA, 25 bp, Homo sapien
catggcaaattgcaggagttcagga

SEQ ID NO: 5086872 - DNA, 25 bp, Homo sapien
aaatgtgggtccttgcttttccatc

SEQ ID NO: 5086873 - DNA, 25 bp, Homo sapien
tagtcccttgactattctttcagaa

SEQ ID NO: 5086874 - DNA, 25 bp, Homo sapien
tttcagaaagtggccacacatggta

SEQ ID NO: 5086875 - DNA, 25 bp, Homo sapien
atgttttgttggatagtcccttgac

SEQ ID NO: 5086876 - DNA, 25 bp, Homo sapien
tggctactgaacagctcaaatctag

SEQ ID NO: 5086877 - DNA, 25 bp, Homo sapien
tgtaatagtcacagtggttaatggc

SEQ ID NO: 5086878 - DNA, 25 bp, Homo sapien
cacagtggttaatggctactgaaca

SEQ ID NO: 5086879 - DNA, 25 bp, Homo sapien
cagctcaaatctagagttactcttt

SEQ ID NO: 5086880 - DNA, 25 bp, Homo sapien
taagctttttgttggattgactgta

SEQ ID NO: 5086881 - DNA, 25 bp, Homo sapien
taagtattattgtgcacatgtgcaa

SEQ ID NO: 5086882 - DNA, 25 bp, Homo sapien
tatttagacataattcggaagccct

SEQ ID NO: 5086883 - DNA, 25 bp, Homo sapien
tatagctatagctgggttgcaagct

SEQ ID NO: 5086884 - DNA, 25 bp, Homo sapien
actgcactcgagcatgggtgacgga

SEQ ID NO: 5086885 - DNA, 25 bp, Homo sapien
cactcgagcatgggtgacggagcaa

SEQ ID NO: 5086886 - DNA, 25 bp, Homo sapien
tgcactcgagcatgggtgacggagc

SEQ ID NO: 5086887 - DNA, 25 bp, Homo sapien
cactgcactcgagcatgggtgacgg

SEQ ID NO: 5086888 - DNA, 25 bp, Homo sapien
attacccgggcataatgacgtgcac

SEQ ID NO: 5086889 - DNA, 25 bp, Homo sapien
aaattacccgggcataatgacgtgc

SEQ ID NO: 5086890 - DNA, 25 bp, Homo sapien
agaaattacccgggcataatgacgt

SEQ ID NO: 5086891 - DNA, 25 bp, Homo sapien
aattacccgggcataatgacgtgca

SEQ ID NO: 5086892 - DNA, 25 bp, Homo sapien
gaaatggtctcatatcaatgtatat

SEQ ID NO: 5086893 - DNA, 25 bp, Homo sapien
tacacagttggtgatatgttaccat

SEQ ID NO: 5086894 - DNA, 25 bp, Homo sapien
ccatagttgatagaactggttttct

SEQ ID NO: 5086895 - DNA, 25 bp, Homo sapien
tatcatatgtttgcataggcacaga

SEQ ID NO: 5086896 - DNA, 25 bp, Homo sapien
cggttgtaccatactcagccatgcc

SEQ ID NO: 5086897 - DNA, 25 bp, Homo sapien
gaagctgttagatgcgtagtcatga

SEQ ID NO: 5086898 - DNA, 25 bp, Homo sapien
caatattctgttgaacggttgtacc

SEQ ID NO: 5086899 - DNA, 25 bp, Homo sapien
tcacataagaagtgcccggtaagtg

SEQ ID NO: 5086900 - DNA, 25 bp, Homo sapien
tacgcacagtgctctgctacattgt

SEQ ID NO: 5086901 - DNA, 25 bp, Homo sapien
gctctgctacattgtagagtttctg

SEQ ID NO: 5086902 - DNA, 25 bp, Homo sapien
gtagagatcaaatttgactccactt

SEQ ID NO: 5086903 - DNA, 25 bp, Homo sapien
caaatttgactccactttaggagtc

SEQ ID NO: 5086904 - DNA, 25 bp, Homo sapien
caaattgtaagcatcaataagtagg

SEQ ID NO: 5086905 - DNA, 25 bp, Homo sapien
aattgccaaattgtaagcatcaata

SEQ ID NO: 5086906 - DNA, 25 bp, Homo sapien
taatatattgtaaggagttatttac

SEQ ID NO: 5086907 - DNA, 25 bp, Homo sapien
gtatttacgtaagtgtttgattcta

SEQ ID NO: 5086908 - DNA, 25 bp, Homo sapien
tcagtacactggaatagcatgctcg

SEQ ID NO: 5086909 - DNA, 25 bp, Homo sapien
tattctcattttagcgggaaggccc

SEQ ID NO: 5086910 - DNA, 25 bp, Homo sapien
taaagattctgtcgatgccatccag

SEQ ID NO: 5086911 - DNA, 25 bp, Homo sapien
tgtcggcagaattggtacttaacct

SEQ ID NO: 5086912 - DNA, 25 bp, Homo sapien
taaagcagttacattcaagctacag

SEQ ID NO: 5086913 - DNA, 25 bp, Homo sapien
gctattacaaatgcttacaatccca

SEQ ID NO: 5086914 - DNA, 25 bp, Homo sapien
catgctgtacatgaagctattacaa

SEQ ID NO: 5086915 - DNA, 25 bp, Homo sapien
gaattaatgattgttcaccaagcag

SEQ ID NO: 5086916 - DNA, 25 bp, Homo sapien
gacagcaccagtgttttcgaggatc

SEQ ID NO: 5086917 - DNA, 25 bp, Homo sapien
gatgcacatgcccattaacctagga

SEQ ID NO: 5086918 - DNA, 25 bp, Homo sapien
tcaactgggaattggaaacacactg

SEQ ID NO: 5086919 - DNA, 25 bp, Homo sapien
tcccttccagtcagaacagttgagc

SEQ ID NO: 5086920 - DNA, 25 bp, Homo sapien
aggtatgttatcaaggccctctcag

SEQ ID NO: 5086921 - DNA, 25 bp, Homo sapien
aatgtcctatctatgggtgagaccc

SEQ ID NO: 5086922 - DNA, 25 bp, Homo sapien
gggtttcaaccttgtccgtgtggca

SEQ ID NO: 5086923 - DNA, 25 bp, Homo sapien
tattctagatattcagcctggaggc

SEQ ID NO: 5086924 - DNA, 25 bp, Homo sapien
taggcttatgcagtcaatctccaga

SEQ ID NO: 5086925 - DNA, 25 bp, Homo sapien
caccttgggtattttgcagagtttc

SEQ ID NO: 5086926 - DNA, 25 bp, Homo sapien
gaatagttcagtagtggtaagtgca

SEQ ID NO: 5086927 - DNA, 25 bp, Homo sapien
cactaattataagccaatgggttgt

SEQ ID NO: 5086928 - DNA, 25 bp, Homo sapien
gatggccgcctaactaaaaaactca

SEQ ID NO: 5086929 - DNA, 25 bp, Homo sapien
cattaagacgcttcatggccaaggc

SEQ ID NO: 5086930 - DNA, 25 bp, Homo sapien
tgagttaggcctccagtggcacgct

SEQ ID NO: 5086931 - DNA, 25 bp, Homo sapien
tcaatggccttgctgatttagaggc

SEQ ID NO: 5086932 - DNA, 25 bp, Homo sapien
tgtctccagttattgccccaaagtg

SEQ ID NO: 5086933 - DNA, 25 bp, Homo sapien
tgcaattattggacccgagatggaa

SEQ ID NO: 5086934 - DNA, 25 bp, Homo sapien
taatggttgagaattccgactacag

SEQ ID NO: 5086935 - DNA, 25 bp, Homo sapien
gctgctgaatggaagcgctatacct

SEQ ID NO: 5086936 - DNA, 25 bp, Homo sapien
gatccaagaaagctacatttgaaag

SEQ ID NO: 5086937 - DNA, 25 bp, Homo sapien
tcaaatagattcacataaagcttat

SEQ ID NO: 5086938 - DNA, 25 bp, Homo sapien
gagttagtgacttatatagcttttc

SEQ ID NO: 5086939 - DNA, 25 bp, Homo sapien
tagttgacgtatgaaaagattagct

SEQ ID NO: 5086940 - DNA, 25 bp, Homo sapien
aacagcatttgaatcactataactt

SEQ ID NO: 5086941 - DNA, 25 bp, Homo sapien
catttgaatcactataacttcgctg

SEQ ID NO: 5086942 - DNA, 25 bp, Homo sapien
cagcatttgaatcactataacttcg

SEQ ID NO: 5086943 - DNA, 25 bp, Homo sapien
gaatcactataacttcgctgatcat

SEQ ID NO: 5086944 - DNA, 25 bp, Homo sapien
tgcgtgcgtgtcacctggtccctct

SEQ ID NO: 5086945 - DNA, 25 bp, Homo sapien
ccaggtcctcgctttttgactaatg

SEQ ID NO: 5086946 - DNA, 25 bp, Homo sapien
cctgttgcattcagatcgcctcatc

SEQ ID NO: 5086947 - DNA, 25 bp, Homo sapien
ctttttgactaatgtcccggcactg

SEQ ID NO: 5086948 - DNA, 25 bp, Homo sapien
gaattccgcatttccggtactcgca

SEQ ID NO: 5086949 - DNA, 25 bp, Homo sapien
tggcagggctactggaacgctgtcc

SEQ ID NO: 5086950 - DNA, 25 bp, Homo sapien
attcttgctggtagccatcttgagt

SEQ ID NO: 5086951 - DNA, 25 bp, Homo sapien
tgagtgagggcggaccagaggatga

SEQ ID NO: 5086952 - DNA, 25 bp, Homo sapien
tgccgcaggagcttccaccgggcgg

SEQ ID NO: 5086953 - DNA, 25 bp, Homo sapien
tgctcgcgcggtctcgccggtccca

SEQ ID NO: 5086954 - DNA, 25 bp, Homo sapien
ccgagtggtgcagccaactgccgga

SEQ ID NO: 5086955 - DNA, 25 bp, Homo sapien
cagcgtccgcgactcgcgactccat

SEQ ID NO: 5086956 - DNA, 25 bp, Homo sapien
gtggctcccggcaaactgagaaggg

SEQ ID NO: 5086957 - DNA, 25 bp, Homo sapien
ccaagaggaaagaactgcgaacagt

SEQ ID NO: 5086958 - DNA, 25 bp, Homo sapien
aggcaaaggtgaggcgagcaggttc

SEQ ID NO: 5086959 - DNA, 25 bp, Homo sapien
ccccggtacgtgagagaggagtgac

SEQ ID NO: 5086960 - DNA, 25 bp, Homo sapien
tatagagttggaaagctagaagctg

SEQ ID NO: 5086961 - DNA, 25 bp, Homo sapien
cagatgcactaacatgagatttgaa

SEQ ID NO: 5086962 - DNA, 25 bp, Homo sapien
tatttcctggaatccgtagcagcca

SEQ ID NO: 5086963 - DNA, 25 bp, Homo sapien
ttaacagaggttccagtgttgactc

SEQ ID NO: 5086964 - DNA, 25 bp, Homo sapien
ttgaaataaagccaaatattgcagt

SEQ ID NO: 5086965 - DNA, 25 bp, Homo sapien
aaataaagccaaatattgcagtcat

SEQ ID NO: 5086966 - DNA, 25 bp, Homo sapien
gaaataaagccaaatattgcagtca

SEQ ID NO: 5086967 - DNA, 25 bp, Homo sapien
ctttgaaataaagccaaatattgca

SEQ ID NO: 5086968 - DNA, 25 bp, Homo sapien
gatacatgtcgcaggcaatcatcca

SEQ ID NO: 5086969 - DNA, 25 bp, Homo sapien
tacagatacatgtcgcaggcaatca

SEQ ID NO: 5086970 - DNA, 25 bp, Homo sapien
cttacagatacatgtcgcaggcaat

SEQ ID NO: 5086971 - DNA, 25 bp, Homo sapien
catgtcgcaggcaatcatccaggtg

SEQ ID NO: 5086972 - DNA, 25 bp, Homo sapien
aggagatactgtattcaggacagaa

SEQ ID NO: 5086973 - DNA, 25 bp, Homo sapien
agatgcttgtatattggacccatgc

SEQ ID NO: 5086974 - DNA, 25 bp, Homo sapien
tatattggacccatgcaccaacctc

SEQ ID NO: 5086975 - DNA, 25 bp, Homo sapien
gagatactgtattcaggacagaaga

SEQ ID NO: 5086976 - DNA, 25 bp, Homo sapien
gctgttggaaaggagtcccagttta

SEQ ID NO: 5086977 - DNA, 25 bp, Homo sapien
tctctacaagtggataaccatgact

SEQ ID NO: 5086978 - DNA, 25 bp, Homo sapien
gcttgggctctggatagtactacat

SEQ ID NO: 5086979 - DNA, 25 bp, Homo sapien
tcaccagtggatgcagaagataagt

SEQ ID NO: 5086980 - DNA, 25 bp, Homo sapien
caaagctggtaaggacatcttcaac

SEQ ID NO: 5086981 - DNA, 25 bp, Homo sapien
aacattcaaggatccactattatgc

SEQ ID NO: 5086982 - DNA, 25 bp, Homo sapien
cctgtattgtcaaagctggtaagga

SEQ ID NO: 5086983 - DNA, 25 bp, Homo sapien
cttcaacattcaaggatccactatt

SEQ ID NO: 5086984 - DNA, 25 bp, Homo sapien
tgctgtcagctagtggccctatttc

SEQ ID NO: 5086985 - DNA, 25 bp, Homo sapien
tatgagatacacctaagtgggagag

SEQ ID NO: 5086986 - DNA, 25 bp, Homo sapien
tttgttcatgcaacaacaacacggg

SEQ ID NO: 5086987 - DNA, 25 bp, Homo sapien
tatttcatacggagccaactgggaa

SEQ ID NO: 5086988 - DNA, 25 bp, Homo sapien
caaatgcaggtgagtatcattccaa

SEQ ID NO: 5086989 - DNA, 25 bp, Homo sapien
tcatagagatgatacaaattgctca

SEQ ID NO: 5086990 - DNA, 25 bp, Homo sapien
tattgcatatcaactctcagccatg

SEQ ID NO: 5086991 - DNA, 25 bp, Homo sapien
gccatgcagtatgtacgtactttct

SEQ ID NO: 5086992 - DNA, 25 bp, Homo sapien
tctatcactcagcaatatatccagg

SEQ ID NO: 5086993 - DNA, 25 bp, Homo sapien
gaattatgattgtggcgccctctgc

SEQ ID NO: 5086994 - DNA, 25 bp, Homo sapien
ggaacaggactttaccaatttatca

SEQ ID NO: 5086995 - DNA, 25 bp, Homo sapien
cagtccatggttactttacgtccaa

SEQ ID NO: 5086996 - DNA, 25 bp, Homo sapien
gattcattctgtacgagattcctct

SEQ ID NO: 5086997 - DNA, 25 bp, Homo sapien
ctattcctagttaaaggtaagcact

SEQ ID NO: 5086998 - DNA, 25 bp, Homo sapien
gaaggttgggtcgtatatcacacag

SEQ ID NO: 5086999 - DNA, 25 bp, Homo sapien
cagcaataaatcaatacgcagacgt

SEQ ID NO: 5087000 - DNA, 25 bp, Homo sapien
tgtttgactcgcacttagaaggacc

SEQ ID NO: 5087001 - DNA, 25 bp, Homo sapien
taataacccgcagagctaaaacctg

SEQ ID NO: 5087002 - DNA, 25 bp, Homo sapien
taaattcctaggcaatggtcccaat

SEQ ID NO: 5087003 - DNA, 25 bp, Homo sapien
tatagtatataggagggagtcagct

SEQ ID NO: 5087004 - DNA, 25 bp, Homo sapien
cactggctttcaggtcccctatact

SEQ ID NO: 5087005 - DNA, 25 bp, Homo sapien
ctttcaggtcccctatactctcagg

SEQ ID NO: 5087006 - DNA, 25 bp, Homo sapien
aggtcccctatactctcagggctgc

SEQ ID NO: 5087007 - DNA, 25 bp, Homo sapien
tggctttcaggtcccctatactctc

SEQ ID NO: 5087008 - DNA, 25 bp, Homo sapien
tggcatatcttgtgctaaaacttgg

SEQ ID NO: 5087009 - DNA, 25 bp, Homo sapien
gggacagtacttacaaagctcctga

SEQ ID NO: 5087010 - DNA, 25 bp, Homo sapien
agcaaattaccttgttctggacatc

SEQ ID NO: 5087011 - DNA, 25 bp, Homo sapien
aaattcatttctcgccgttttggag

SEQ ID NO: 5087012 - DNA, 25 bp, Homo sapien
ccaaatcagagcacttttgggagtg

SEQ ID NO: 5087013 - DNA, 25 bp, Homo sapien
tgtttgggtatgacttgggattcaa

SEQ ID NO: 5087014 - DNA, 25 bp, Homo sapien
aataccacttgggtcaggctttgtg

SEQ ID NO: 5087015 - DNA, 25 bp, Homo sapien
gggcttgtggtatatgtcctctaaa

SEQ ID NO: 5087016 - DNA, 25 bp, Homo sapien
aaatacgctttctcgaagatactgg

SEQ ID NO: 5087017 - DNA, 25 bp, Homo sapien
ttcaaaaatacgctttctcgaagat

SEQ ID NO: 5087018 - DNA, 25 bp, Homo sapien
caaaaatacgctttctcgaagatac

SEQ ID NO: 5087019 - DNA, 25 bp, Homo sapien
aaaatacgctttctcgaagatactg

SEQ ID NO: 5087020 - DNA, 25 bp, Homo sapien
tgtacttcaaagttgataaatcatt

SEQ ID NO: 5087021 - DNA, 25 bp, Homo sapien
tacttcaaagttgataaatcatttg

SEQ ID NO: 5087022 - DNA, 25 bp, Homo sapien
tttgtacttcaaagttgataaatca

SEQ ID NO: 5087023 - DNA, 25 bp, Homo sapien
ttgagaattgaaaatgcaggacagc

SEQ ID NO: 5087024 - DNA, 25 bp, Homo sapien
tcagaaaagactccgaaagcaagaa

SEQ ID NO: 5087025 - DNA, 25 bp, Homo sapien
gaagctactggagtttataatcctc

SEQ ID NO: 5087026 - DNA, 25 bp, Homo sapien
ccatggaatttagaacgagatacaa

SEQ ID NO: 5087027 - DNA, 25 bp, Homo sapien
cttgttgctggtgtagaggtcaaac

SEQ ID NO: 5087028 - DNA, 25 bp, Homo sapien
tcacttcctccttccactaagctct

SEQ ID NO: 5087029 - DNA, 25 bp, Homo sapien
ttaatattcacttcctccttccact

SEQ ID NO: 5087030 - DNA, 25 bp, Homo sapien
aatattcacttcctccttccactaa

SEQ ID NO: 5087031 - DNA, 25 bp, Homo sapien
attcacttcctccttccactaagct

SEQ ID NO: 5087032 - DNA, 25 bp, Homo sapien
gctaatgaccaaacactggaatgct

SEQ ID NO: 5087033 - DNA, 25 bp, Homo sapien
gagatttagggatcaggaagctgcc

SEQ ID NO: 5087034 - DNA, 25 bp, Homo sapien
ctgagatttagggatcaggaagctg

SEQ ID NO: 5087035 - DNA, 25 bp, Homo sapien
atttagggatcaggaagctgccatc

SEQ ID NO: 5087036 - DNA, 25 bp, Homo sapien
gatttagggatcaggaagctgccat

SEQ ID NO: 5087037 - DNA, 25 bp, Homo sapien
tatacatacggcttttgatttaaca

SEQ ID NO: 5087038 - DNA, 25 bp, Homo sapien
gagataatacactggtctccctgaa

SEQ ID NO: 5087039 - DNA, 25 bp, Homo sapien
gaaccagagagataatacactggtc

SEQ ID NO: 5087040 - DNA, 25 bp, Homo sapien
cctgaaatactctctaccttataca

SEQ ID NO: 5087041 - DNA, 25 bp, Homo sapien
taccaattatgttgatttacccgcc

SEQ ID NO: 5087042 - DNA, 25 bp, Homo sapien
cagaatgcttgaaacttttgccagt

SEQ ID NO: 5087043 - DNA, 25 bp, Homo sapien
taagtcatgaacaaagctattaagt

SEQ ID NO: 5087044 - DNA, 25 bp, Homo sapien
gcttaaaagatacaatcctggctgg

SEQ ID NO: 5087045 - DNA, 25 bp, Homo sapien
tgattccaggccctaactttacagt

SEQ ID NO: 5087046 - DNA, 25 bp, Homo sapien
tgtgattccaggccctaactttaca

SEQ ID NO: 5087047 - DNA, 25 bp, Homo sapien
gtgattccaggccctaactttacag

SEQ ID NO: 5087048 - DNA, 25 bp, Homo sapien
gtgtgattccaggccctaactttac

SEQ ID NO: 5087049 - DNA, 25 bp, Homo sapien
ctccagtttgcaatttggtgaaaac

SEQ ID NO: 5087050 - DNA, 25 bp, Homo sapien
ccagtttgcaatttggtgaaaactc

SEQ ID NO: 5087051 - DNA, 25 bp, Homo sapien
ctgactccagtttgcaatttggtga

SEQ ID NO: 5087052 - DNA, 25 bp, Homo sapien
tgactccagtttgcaatttggtgaa

SEQ ID NO: 5087053 - DNA, 25 bp, Homo sapien
taccatctattctctgcactgaagg

SEQ ID NO: 5087054 - DNA, 25 bp, Homo sapien
caaatttgcattaacacctagcagc

SEQ ID NO: 5087055 - DNA, 25 bp, Homo sapien
gggtctagtatgcaagtccaattgt

SEQ ID NO: 5087056 - DNA, 25 bp, Homo sapien
caaacaagtagctctgggtctagta

SEQ ID NO: 5087057 - DNA, 25 bp, Homo sapien
ccaaggctggtcaggggttgagagt

SEQ ID NO: 5087058 - DNA, 25 bp, Homo sapien
gtgccttcgtaatcagtgctcccaa

SEQ ID NO: 5087059 - DNA, 25 bp, Homo sapien
gtggggtgccttcgtaatcagtgct

SEQ ID NO: 5087060 - DNA, 25 bp, Homo sapien
ttatgaaggaagtatgtggggtgcc

SEQ ID NO: 5087061 - DNA, 25 bp, Homo sapien
tcttctcccaccagtattctcttct

SEQ ID NO: 5087062 - DNA, 25 bp, Homo sapien
tcccaccagtattctcttctgagac

SEQ ID NO: 5087063 - DNA, 25 bp, Homo sapien
tctcccaccagtattctcttctgag

SEQ ID NO: 5087064 - DNA, 25 bp, Homo sapien
accagtattctcttctgagacccag

SEQ ID NO: 5087065 - DNA, 25 bp, Homo sapien
ttgaaaacccatttgacataatcac

SEQ ID NO: 5087066 - DNA, 25 bp, Homo sapien
gaaaacccatttgacataatcactc

SEQ ID NO: 5087067 - DNA, 25 bp, Homo sapien
cctgtaattacttcgtggctccttg

SEQ ID NO: 5087068 - DNA, 25 bp, Homo sapien
acttcgtggctccttgaaaacccat

SEQ ID NO: 5087069 - DNA, 25 bp, Homo sapien
tctgctgagtcaaacattggaaaat

SEQ ID NO: 5087070 - DNA, 25 bp, Homo sapien
gaagaccagttagtttaggaaatca

SEQ ID NO: 5087071 - DNA, 25 bp, Homo sapien
cacagtctctattagcaaccagaag

SEQ ID NO: 5087072 - DNA, 25 bp, Homo sapien
taagtgaagacttagctctgcctct

SEQ ID NO: 5087073 - DNA, 25 bp, Homo sapien
gcaagccttcttaaatagggcatag

SEQ ID NO: 5087074 - DNA, 25 bp, Homo sapien
gcttactgacacagtcctaaatctg

SEQ ID NO: 5087075 - DNA, 25 bp, Homo sapien
gggcatagagaaccataatttatcc

SEQ ID NO: 5087076 - DNA, 25 bp, Homo sapien
tagtcctgagagaatagatacctat

SEQ ID NO: 5087077 - DNA, 25 bp, Homo sapien
ctttagcctgtcaaaaatagatggt

SEQ ID NO: 5087078 - DNA, 25 bp, Homo sapien
cactactaacggcttatggcttgaa

SEQ ID NO: 5087079 - DNA, 25 bp, Homo sapien
tgttgcctgagccaaagtacagtgg

SEQ ID NO: 5087080 - DNA, 25 bp, Homo sapien
gggcctctttaagcaaagggattga

SEQ ID NO: 5087081 - DNA, 25 bp, Homo sapien
ttctttaaagtgctatcgggcagcc

SEQ ID NO: 5087082 - DNA, 25 bp, Homo sapien
ttaaagtgctatcgggcagcctctt

SEQ ID NO: 5087083 - DNA, 25 bp, Homo sapien
tgtatatagctgcataccgcaggtg

SEQ ID NO: 5087084 - DNA, 25 bp, Homo sapien
agccttgtatatagctgcataccgc

SEQ ID NO: 5087085 - DNA, 25 bp, Homo sapien
acgctaagatcttcaaaactcaatg

SEQ ID NO: 5087086 - DNA, 25 bp, Homo sapien
tttcctgagtactctgaagctgaac

SEQ ID NO: 5087087 - DNA, 25 bp, Homo sapien
tggcataattaacgctaagatcttc

SEQ ID NO: 5087088 - DNA, 25 bp, Homo sapien
caatgtttggcataattaacgctaa

SEQ ID NO: 5087089 - DNA, 25 bp, Homo sapien
tatctagccacgtaaaatagaaagt

SEQ ID NO: 5087090 - DNA, 25 bp, Homo sapien
gtagaagaacaccagcctcttggaa

SEQ ID NO: 5087091 - DNA, 25 bp, Homo sapien
ttacagagaagaccatatacctacc

SEQ ID NO: 5087092 - DNA, 25 bp, Homo sapien
aactgctaaggatagtagttactgc

SEQ ID NO: 5087093 - DNA, 25 bp, Homo sapien
taaggaccaacgtttttgacacaca

SEQ ID NO: 5087094 - DNA, 25 bp, Homo sapien
ggaccaacgtttttgacacacagca

SEQ ID NO: 5087095 - DNA, 25 bp, Homo sapien
cacagcattccaactacaatgaatt

SEQ ID NO: 5087096 - DNA, 25 bp, Homo sapien
tttcaaagttaggattcctgataac

SEQ ID NO: 5087097 - DNA, 25 bp, Homo sapien
tcacagtttatactcttgaggccat

SEQ ID NO: 5087098 - DNA, 25 bp, Homo sapien
taagagttagtatcccagacactag

SEQ ID NO: 5087099 - DNA, 25 bp, Homo sapien
gatatagccgagaagcttgcttgaa

SEQ ID NO: 5087100 - DNA, 25 bp, Homo sapien
ggatagctgattaatgatctcccag

SEQ ID NO: 5087101 - DNA, 25 bp, Homo sapien
cacagttacgtatggcctttagaaa

SEQ ID NO: 5087102 - DNA, 25 bp, Homo sapien
ggcccagatcccacaataagttagt

SEQ ID NO: 5087103 - DNA, 25 bp, Homo sapien
tgagagtccttctatcccaagtagc

SEQ ID NO: 5087104 - DNA, 25 bp, Homo sapien
cgtattactgcaactagaagaggaa

SEQ ID NO: 5087105 - DNA, 25 bp, Homo sapien
gaacgcaaggacttcagcacatttt

SEQ ID NO: 5087106 - DNA, 25 bp, Homo sapien
tactccctaagcaatgaacgcaagg

SEQ ID NO: 5087107 - DNA, 25 bp, Homo sapien
aaggtagcagttcatgttaaatgac

SEQ ID NO: 5087108 - DNA, 25 bp, Homo sapien
tctaaatagctgagacctgaattat

SEQ ID NO: 5087109 - DNA, 25 bp, Homo sapien
ggaagaccttcaccaaacagcacag

SEQ ID NO: 5087110 - DNA, 25 bp, Homo sapien
ctttttcaggtaactaatagatctc

SEQ ID NO: 5087111 - DNA, 25 bp, Homo sapien
cagagaatctgacagcctctcaatc

SEQ ID NO: 5087112 - DNA, 25 bp, Homo sapien
cttcggagtcagttaatggagattt

SEQ ID NO: 5087113 - DNA, 25 bp, Homo sapien
cctaaaaccctgaacatgacaagat

SEQ ID NO: 5087114 - DNA, 25 bp, Homo sapien
tgcaaaactgtagaaggaccacata

SEQ ID NO: 5087115 - DNA, 25 bp, Homo sapien
cagcaagaaaaggactcaggagcta

SEQ ID NO: 5087116 - DNA, 25 bp, Homo sapien
gaatatgttatactatgcaaaactg

SEQ ID NO: 5087117 - DNA, 25 bp, Homo sapien
ttccatgagttcgtgacagctttat

SEQ ID NO: 5087118 - DNA, 25 bp, Homo sapien
taaagattccatgagttcgtgacag

SEQ ID NO: 5087119 - DNA, 25 bp, Homo sapien
gattccatgagttcgtgacagcttt

SEQ ID NO: 5087120 - DNA, 25 bp, Homo sapien
agtataaagattccatgagttcgtg

SEQ ID NO: 5087121 - DNA, 25 bp, Homo sapien
gcttgtatagcaactaggacttcct

SEQ ID NO: 5087122 - DNA, 25 bp, Homo sapien
acttccttctcaagattgcagcagc

SEQ ID NO: 5087123 - DNA, 25 bp, Homo sapien
acaatggatgattcttgtaattggg

SEQ ID NO: 5087124 - DNA, 25 bp, Homo sapien
gcagcagtcaacattaacaatggat

SEQ ID NO: 5087125 - DNA, 25 bp, Homo sapien
tttcacattcagctttattctcccc

SEQ ID NO: 5087126 - DNA, 25 bp, Homo sapien
tatgaaaatctacctgcttgaagca

SEQ ID NO: 5087127 - DNA, 25 bp, Homo sapien
gccttatgggtcttctgactatcca

SEQ ID NO: 5087128 - DNA, 25 bp, Homo sapien
tgacaactcaaactagtggaaagcc

SEQ ID NO: 5087129 - DNA, 25 bp, Homo sapien
gcatttgaaatctggcctgtaggcc

SEQ ID NO: 5087130 - DNA, 25 bp, Homo sapien
tgcttatcattcctaaatgacttca

SEQ ID NO: 5087131 - DNA, 25 bp, Homo sapien
tttgcttatcattcctaaatgactt

SEQ ID NO: 5087132 - DNA, 25 bp, Homo sapien
ttatcattcctaaatgacttcattg

SEQ ID NO: 5087133 - DNA, 25 bp, Homo sapien
gcttatcattcctaaatgacttcat

SEQ ID NO: 5087134 - DNA, 25 bp, Homo sapien
tgttggaaacaagtattgactatca

SEQ ID NO: 5087135 - DNA, 25 bp, Homo sapien
cagtttaatattgtccatgttggaa

SEQ ID NO: 5087136 - DNA, 25 bp, Homo sapien
cacatactggcattctaccaaaaaa

SEQ ID NO: 5087137 - DNA, 25 bp, Homo sapien
tttgagaaacctggagtacttcaga

SEQ ID NO: 5087138 - DNA, 25 bp, Homo sapien
caacaggcaaaaatcaggtggtcaa

SEQ ID NO: 5087139 - DNA, 25 bp, Homo sapien
taaattaccaaagaaggagctctca

SEQ ID NO: 5087140 - DNA, 25 bp, Homo sapien
ggcaacaggcaaaaatcaggtggtc

SEQ ID NO: 5087141 - DNA, 25 bp, Homo sapien
ccaaagaaggagctctcaaagttta

SEQ ID NO: 5087142 - DNA, 25 bp, Homo sapien
cctattcaatggtaagatgatgagg

SEQ ID NO: 5087143 - DNA, 25 bp, Homo sapien
attcaatggtaagatgatgaggatg

SEQ ID NO: 5087144 - DNA, 25 bp, Homo sapien
ctattcaatggtaagatgatgagga

SEQ ID NO: 5087145 - DNA, 25 bp, Homo sapien
tattcaatggtaagatgatgaggat

SEQ ID NO: 5087146 - DNA, 25 bp, Homo sapien
ggcaggcaatgactacccataacgg

SEQ ID NO: 5087147 - DNA, 25 bp, Homo sapien
cacttgcactctggcgaatacagaa

SEQ ID NO: 5087148 - DNA, 25 bp, Homo sapien
ggtacgtctacctagctaagcccca

SEQ ID NO: 5087149 - DNA, 25 bp, Homo sapien
catcatcatcaggtagttaaggaca

SEQ ID NO: 5087150 - DNA, 25 bp, Homo sapien
ggtttgctgcaccaaataatctctc

SEQ ID NO: 5087151 - DNA, 25 bp, Homo sapien
tacaaggaacgaataggtgaagcac

SEQ ID NO: 5087152 - DNA, 25 bp, Homo sapien
gaagagactgggaattttgactaca

SEQ ID NO: 5087153 - DNA, 25 bp, Homo sapien
taccttcccacgacgaatttctgta

SEQ ID NO: 5087154 - DNA, 25 bp, Homo sapien
aaggatgcaccactatgcgcagcta

SEQ ID NO: 5087155 - DNA, 25 bp, Homo sapien
acaaggatgcaccactatgcgcagc

SEQ ID NO: 5087156 - DNA, 25 bp, Homo sapien
caaggatgcaccactatgcgcagct

SEQ ID NO: 5087157 - DNA, 25 bp, Homo sapien
taagcaagagtatcataatcttctg

SEQ ID NO: 5087158 - DNA, 25 bp, Homo sapien
agtctgagactttggggatccttaa

SEQ ID NO: 5087159 - DNA, 25 bp, Homo sapien
tctgccacgaagtgtttcttaaata

SEQ ID NO: 5087160 - DNA, 25 bp, Homo sapien
ccttaagccaataaataagcaagag

SEQ ID NO: 5087161 - DNA, 25 bp, Homo sapien
gacatcatgtaggacataggcttac

SEQ ID NO: 5087162 - DNA, 25 bp, Homo sapien
tcatgtaggacataggcttacttac

SEQ ID NO: 5087163 - DNA, 25 bp, Homo sapien
catcatgtaggacataggcttactt

SEQ ID NO: 5087164 - DNA, 25 bp, Homo sapien
agacatcatgtaggacataggctta

SEQ ID NO: 5087165 - DNA, 25 bp, Homo sapien
gttcagaaaagagtggatagatggt

SEQ ID NO: 5087166 - DNA, 25 bp, Homo sapien
gcttttagagtatgcctttggttca

SEQ ID NO: 5087167 - DNA, 25 bp, Homo sapien
agaatttgactcatccagtcactgc

SEQ ID NO: 5087168 - DNA, 25 bp, Homo sapien
gagtggatagatggtcaatagatct

SEQ ID NO: 5087169 - DNA, 25 bp, Homo sapien
aacagtgagaatttagagtcttcat

SEQ ID NO: 5087170 - DNA, 25 bp, Homo sapien
tgaacagtgagaatttagagtcttc

SEQ ID NO: 5087171 - DNA, 25 bp, Homo sapien
ctgaacagtgagaatttagagtctt

SEQ ID NO: 5087172 - DNA, 25 bp, Homo sapien
gaacagtgagaatttagagtcttca

SEQ ID NO: 5087173 - DNA, 25 bp, Homo sapien
taaatacagatcataggtgaccttg

SEQ ID NO: 5087174 - DNA, 25 bp, Homo sapien
gggaactctcccttgcaaccaaatg

SEQ ID NO: 5087175 - DNA, 25 bp, Homo sapien
cctcaatgctaatggactggctgtg

SEQ ID NO: 5087176 - DNA, 25 bp, Homo sapien
aactccagggagtttcaaggcccag

SEQ ID NO: 5087177 - DNA, 25 bp, Homo sapien
tcctcaaagactcttacagacaatt

SEQ ID NO: 5087178 - DNA, 25 bp, Homo sapien
cctcaaagactcttacagacaattc

SEQ ID NO: 5087179 - DNA, 25 bp, Homo sapien
ctcaaagactcttacagacaattcc

SEQ ID NO: 5087180 - DNA, 25 bp, Homo sapien
gtcctcaaagactcttacagacaat

SEQ ID NO: 5087181 - DNA, 25 bp, Homo sapien
ccttgacttttcctgacccatccat

SEQ ID NO: 5087182 - DNA, 25 bp, Homo sapien
ctggccatcgcctagtgatttcctt

SEQ ID NO: 5087183 - DNA, 25 bp, Homo sapien
cgcctagtgatttccttgacttttc

SEQ ID NO: 5087184 - DNA, 25 bp, Homo sapien
catcgcctagtgatttccttgactt

SEQ ID NO: 5087185 - DNA, 25 bp, Homo sapien
tttgaagaagtgagatgatattatc

SEQ ID NO: 5087186 - DNA, 25 bp, Homo sapien
gatattatcaccagttattaatagt

SEQ ID NO: 5087187 - DNA, 25 bp, Homo sapien
tatcaccagttattaatagttttcc

SEQ ID NO: 5087188 - DNA, 25 bp, Homo sapien
tattttgaagaagtgagatgatatt

SEQ ID NO: 5087189 - DNA, 25 bp, Homo sapien
tatgatgtccagctactaacactgt

SEQ ID NO: 5087190 - DNA, 25 bp, Homo sapien
ggcacccgggactacaaacataggc

SEQ ID NO: 5087191 - DNA, 25 bp, Homo sapien
ccaagatcagatcaaagaaggcctt

SEQ ID NO: 5087192 - DNA, 25 bp, Homo sapien
tggtcatgaataacgtgcaaacaac

SEQ ID NO: 5087193 - DNA, 25 bp, Homo sapien
aattggacctgtacaagagctttgc

SEQ ID NO: 5087194 - DNA, 25 bp, Homo sapien
tgactgacaggtaagcgtttggtgc

SEQ ID NO: 5087195 - DNA, 25 bp, Homo sapien
tacaccagcgcatgaattactgggc

SEQ ID NO: 5087196 - DNA, 25 bp, Homo sapien
tttcatttgctccattacaccagcg

SEQ ID NO: 5087197 - DNA, 25 bp, Homo sapien
cttgggttcctataagcacttagag

SEQ ID NO: 5087198 - DNA, 25 bp, Homo sapien
tcattactggttttcaatagctgct

SEQ ID NO: 5087199 - DNA, 25 bp, Homo sapien
tgcagtcataagtatagggcacctt

SEQ ID NO: 5087200 - DNA, 25 bp, Homo sapien
caaatcatgactcctagaggtaggg

SEQ ID NO: 5087201 - DNA, 25 bp, Homo sapien
aagcagccgataatttgcccaacaa

SEQ ID NO: 5087202 - DNA, 25 bp, Homo sapien
gcaagcagccgataatttgcccaac

SEQ ID NO: 5087203 - DNA, 25 bp, Homo sapien
acaggcaagcagccgataatttgcc

SEQ ID NO: 5087204 - DNA, 25 bp, Homo sapien
gcagccgataatttgcccaacaaca

SEQ ID NO: 5087205 - DNA, 25 bp, Homo sapien
atgtttttctctggaccctctagct

SEQ ID NO: 5087206 - DNA, 25 bp, Homo sapien
tagaatgtttttctctggaccctct

SEQ ID NO: 5087207 - DNA, 25 bp, Homo sapien
tatttatcttcttgtatatttagaa

SEQ ID NO: 5087208 - DNA, 25 bp, Homo sapien
tttatcttcttgtatatttagaatg

SEQ ID NO: 5087209 - DNA, 25 bp, Homo sapien
gctctttcatttaattagatcccac

SEQ ID NO: 5087210 - DNA, 25 bp, Homo sapien
ttcatttaattagatcccacttgtc

SEQ ID NO: 5087211 - DNA, 25 bp, Homo sapien
ctttcatttaattagatcccacttg

SEQ ID NO: 5087212 - DNA, 25 bp, Homo sapien
ctctttcatttaattagatcccact

SEQ ID NO: 5087213 - DNA, 25 bp, Homo sapien
gaggtccttataagttgtattccta

SEQ ID NO: 5087214 - DNA, 25 bp, Homo sapien
catttatccagtctatgattcatgg

SEQ ID NO: 5087215 - DNA, 25 bp, Homo sapien
ccccagccccatgttcatgtgttct

SEQ ID NO: 5087216 - DNA, 25 bp, Homo sapien
gcggtcgggagttcatttataatcc

SEQ ID NO: 5087217 - DNA, 25 bp, Homo sapien
ctggaatgtaaattaggattgacaa

SEQ ID NO: 5087218 - DNA, 25 bp, Homo sapien
ggaatgtaaattaggattgacaaag

SEQ ID NO: 5087219 - DNA, 25 bp, Homo sapien
tggaatgtaaattaggattgacaaa

SEQ ID NO: 5087220 - DNA, 25 bp, Homo sapien
taggattgacaaagagttcagaatg

SEQ ID NO: 5087221 - DNA, 25 bp, Homo sapien
catacgaaataggtgagccctgcac

SEQ ID NO: 5087222 - DNA, 25 bp, Homo sapien
tactggagcccttcaggcaaagaca

SEQ ID NO: 5087223 - DNA, 25 bp, Homo sapien
aattacagctttttaccgacacgtg

SEQ ID NO: 5087224 - DNA, 25 bp, Homo sapien
cagaggttggttcctaagaactgcc

SEQ ID NO: 5087225 - DNA, 25 bp, Homo sapien
ttctcttaaattcagtgataaacac

SEQ ID NO: 5087226 - DNA, 25 bp, Homo sapien
tgtcaagtaattaacatagcctgtc

SEQ ID NO: 5087227 - DNA, 25 bp, Homo sapien
tactgaatacttattagatgtcaag

SEQ ID NO: 5087228 - DNA, 25 bp, Homo sapien
catctagaggactttaactcagagc

SEQ ID NO: 5087229 - DNA, 25 bp, Homo sapien
cacttttatttacggcttcttcatc

SEQ ID NO: 5087230 - DNA, 25 bp, Homo sapien
tatttacggcttcttcatcctcaag

SEQ ID NO: 5087231 - DNA, 25 bp, Homo sapien
tttatttacggcttcttcatcctca

SEQ ID NO: 5087232 - DNA, 25 bp, Homo sapien
cttttatttacggcttcttcatcct

SEQ ID NO: 5087233 - DNA, 25 bp, Homo sapien
ccatgtcagttgaaccctgggatga

SEQ ID NO: 5087234 - DNA, 25 bp, Homo sapien
caaagcagctgcatatagaaacatg

SEQ ID NO: 5087235 - DNA, 25 bp, Homo sapien
gatatggattacatctccaacagcc

SEQ ID NO: 5087236 - DNA, 25 bp, Homo sapien
ggcactatcacgtaggacacatgtg

SEQ ID NO: 5087237 - DNA, 25 bp, Homo sapien
tgctccctggctgtcgtaaaatgac

SEQ ID NO: 5087238 - DNA, 25 bp, Homo sapien
aatctaattggttctgctgacaggc

SEQ ID NO: 5087239 - DNA, 25 bp, Homo sapien
ggaaggctgttcagttaatctccaa

SEQ ID NO: 5087240 - DNA, 25 bp, Homo sapien
taaaatgactctgatggcagtgcaa

SEQ ID NO: 5087241 - DNA, 25 bp, Homo sapien
aaaagactaatcataccaagcgtta

SEQ ID NO: 5087242 - DNA, 25 bp, Homo sapien
caagcgttagtaaggatgtgaagca

SEQ ID NO: 5087243 - DNA, 25 bp, Homo sapien
taagatactattacatagccattgg

SEQ ID NO: 5087244 - DNA, 25 bp, Homo sapien
gatttgaacatgtcccaaaaaatat

SEQ ID NO: 5087245 - DNA, 25 bp, Homo sapien
cacagttgtcccccgagcaacacag

SEQ ID NO: 5087246 - DNA, 25 bp, Homo sapien
gcccggcccatagtttcaatattca

SEQ ID NO: 5087247 - DNA, 25 bp, Homo sapien
cggcccatagtttcaatattcacaa

SEQ ID NO: 5087248 - DNA, 25 bp, Homo sapien
acagttgtcccccgagcaacacagt

SEQ ID NO: 5087249 - DNA, 25 bp, Homo sapien
aggcatgacccactgaactccgccc

SEQ ID NO: 5087250 - DNA, 25 bp, Homo sapien
ggcatgacccactgaactccgccct

SEQ ID NO: 5087251 - DNA, 25 bp, Homo sapien
gcatgacccactgaactccgccctc

SEQ ID NO: 5087252 - DNA, 25 bp, Homo sapien
gatgtccacattgaaatgtccatag

SEQ ID NO: 5087253 - DNA, 25 bp, Homo sapien
ccttagtgggataattggtgagact

SEQ ID NO: 5087254 - DNA, 25 bp, Homo sapien
gcatgatcctagattggattctgga

SEQ ID NO: 5087255 - DNA, 25 bp, Homo sapien
ctatggacaaaggagtgggtaatcc

SEQ ID NO: 5087256 - DNA, 25 bp, Homo sapien
tagaacactatagacaactcaaggt

SEQ ID NO: 5087257 - DNA, 25 bp, Homo sapien
ctggaggtgaggcaatagaacacta

SEQ ID NO: 5087258 - DNA, 25 bp, Homo sapien
cacactattgggaaaggatgcacaa

SEQ ID NO: 5087259 - DNA, 25 bp, Homo sapien
taagcagtggaggtaagggcacact

SEQ ID NO: 5087260 - DNA, 25 bp, Homo sapien
gtctgccgccaaatgccaagatagg

SEQ ID NO: 5087261 - DNA, 25 bp, Homo sapien
ttctcgattgtctctgcactcagga

SEQ ID NO: 5087262 - DNA, 25 bp, Homo sapien
tgtgatagctcggtcgtctgccgcc

SEQ ID NO: 5087263 - DNA, 25 bp, Homo sapien
ccagctgcatgatgggcagttaata

SEQ ID NO: 5087264 - DNA, 25 bp, Homo sapien
tttacattgttgtgtctagggaggg

SEQ ID NO: 5087265 - DNA, 25 bp, Homo sapien
ttacattgttgtgtctagggaggga

SEQ ID NO: 5087266 - DNA, 25 bp, Homo sapien
tgtctagggagggagaatcatgtaa

SEQ ID NO: 5087267 - DNA, 25 bp, Homo sapien
tagggagggagaatcatgtaatata

SEQ ID NO: 5087268 - DNA, 25 bp, Homo sapien
aagaatccacattcaataggccatc

SEQ ID NO: 5087269 - DNA, 25 bp, Homo sapien
agaatccacattcaataggccatct

SEQ ID NO: 5087270 - DNA, 25 bp, Homo sapien
ttttgctttgttcagcagagaccat

SEQ ID NO: 5087271 - DNA, 25 bp, Homo sapien
taagtttcgtttggacagcctctaa

SEQ ID NO: 5087272 - DNA, 25 bp, Homo sapien
caaactgtttactagtgtagccaag

SEQ ID NO: 5087273 - DNA, 25 bp, Homo sapien
ggtgccagtccaagaagtcagctaa

SEQ ID NO: 5087274 - DNA, 25 bp, Homo sapien
caaatgggcatacaacagtggaaac

SEQ ID NO: 5087275 - DNA, 25 bp, Homo sapien
actcggttaataaaaactcaggctg

SEQ ID NO: 5087276 - DNA, 25 bp, Homo sapien
gaagaaatgaacactcggttaataa

SEQ ID NO: 5087277 - DNA, 25 bp, Homo sapien
tgtgtaagaattttggcaatagaag

SEQ ID NO: 5087278 - DNA, 25 bp, Homo sapien
gcagcttagatgcatccatccacag

SEQ ID NO: 5087279 - DNA, 25 bp, Homo sapien
ttgctccatgatgacaacacatcta

SEQ ID NO: 5087280 - DNA, 25 bp, Homo sapien
catgatgacaacacatctagctctc

SEQ ID NO: 5087281 - DNA, 25 bp, Homo sapien
atctagctctcacagcagacataca

SEQ ID NO: 5087282 - DNA, 25 bp, Homo sapien
caactgcttgtacttgctccatgat

SEQ ID NO: 5087283 - DNA, 25 bp, Homo sapien
tcacttctcatagttcgtcctggag

SEQ ID NO: 5087284 - DNA, 25 bp, Homo sapien
agtcctaaggctttgatcgacagca

SEQ ID NO: 5087285 - DNA, 25 bp, Homo sapien
ttcgtcctggaggacagtcctaagg

SEQ ID NO: 5087286 - DNA, 25 bp, Homo sapien
atccaacaagcagcactgctggctc

SEQ ID NO: 5087287 - DNA, 25 bp, Homo sapien
gcaaatcctaaaattcagtaacctg

SEQ ID NO: 5087288 - DNA, 25 bp, Homo sapien
tagttaatctggaaacaaacagcac

SEQ ID NO: 5087289 - DNA, 25 bp, Homo sapien
acctgaagactgagcaaatcctaaa

SEQ ID NO: 5087290 - DNA, 25 bp, Homo sapien
ggatccagctaagcttggggccttc

SEQ ID NO: 5087291 - DNA, 25 bp, Homo sapien
tataagcatcctattcctgtttcat

SEQ ID NO: 5087292 - DNA, 25 bp, Homo sapien
cctgtttcatgaatgcaatgtctta

SEQ ID NO: 5087293 - DNA, 25 bp, Homo sapien
gctattgttattgatggtcattctc

SEQ ID NO: 5087294 - DNA, 25 bp, Homo sapien
cctattcctgtttcatgaatgcaat

SEQ ID NO: 5087295 - DNA, 25 bp, Homo sapien
aggcagtagtaagccaaaacctctt

SEQ ID NO: 5087296 - DNA, 25 bp, Homo sapien
aaaacctcttcagatggccagatgc

SEQ ID NO: 5087297 - DNA, 25 bp, Homo sapien
tgaatatattattgtgcttgaggca

SEQ ID NO: 5087298 - DNA, 25 bp, Homo sapien
tattgtgcttgaggcagtagtaagc

SEQ ID NO: 5087299 - DNA, 25 bp, Homo sapien
aaaaaatatcttaagtgcagctctg

SEQ ID NO: 5087300 - DNA, 25 bp, Homo sapien
tgttgattcaatatccgtgatgggc

SEQ ID NO: 5087301 - DNA, 25 bp, Homo sapien
cagtaaggattgattggagcttcac

SEQ ID NO: 5087302 - DNA, 25 bp, Homo sapien
tgctgtgcaatattagtacccaagg

SEQ ID NO: 5087303 - DNA, 25 bp, Homo sapien
gcatgtcatgccaccccctagctca

SEQ ID NO: 5087304 - DNA, 25 bp, Homo sapien
atgccaccccctagctcacacacag

SEQ ID NO: 5087305 - DNA, 25 bp, Homo sapien
gccaagcatgtcatgccacccccta

SEQ ID NO: 5087306 - DNA, 25 bp, Homo sapien
caccccctagctcacacacagcaag

SEQ ID NO: 5087307 - DNA, 25 bp, Homo sapien
ctgttgacggttctctgacccagca

SEQ ID NO: 5087308 - DNA, 25 bp, Homo sapien
ccctctgaatgggattggaatggag

SEQ ID NO: 5087309 - DNA, 25 bp, Homo sapien
ctccctctgaatgggattggaatgg

SEQ ID NO: 5087310 - DNA, 25 bp, Homo sapien
gctgatgctgttgacggttctctga

SEQ ID NO: 5087311 - DNA, 25 bp, Homo sapien
gctttgacatgctcgcacattgggc

SEQ ID NO: 5087312 - DNA, 25 bp, Homo sapien
cgacacattgtataagagcgacagg

SEQ ID NO: 5087313 - DNA, 25 bp, Homo sapien
cacattgggctgtaacctcgacaca

SEQ ID NO: 5087314 - DNA, 25 bp, Homo sapien
aaaacttgtctaatgcactgtgctg

SEQ ID NO: 5087315 - DNA, 25 bp, Homo sapien
tgttcggtaattgcattgtgacagc

SEQ ID NO: 5087316 - DNA, 25 bp, Homo sapien
gatgatggtattctgagaggctttc

SEQ ID NO: 5087317 - DNA, 25 bp, Homo sapien
ttatcattccatttgcgggagcctc

SEQ ID NO: 5087318 - DNA, 25 bp, Homo sapien
gcgggagcctctatcttgctatcat

SEQ ID NO: 5087319 - DNA, 25 bp, Homo sapien
cccatcagttaacagaacttctttg

SEQ ID NO: 5087320 - DNA, 25 bp, Homo sapien
ccatcagttaacagaacttctttga

SEQ ID NO: 5087321 - DNA, 25 bp, Homo sapien
tcccatcagttaacagaacttcttt

SEQ ID NO: 5087322 - DNA, 25 bp, Homo sapien
ccgttttctatctgaataaggatac

SEQ ID NO: 5087323 - DNA, 25 bp, Homo sapien
gttactcagccaggaaaaaggaatg

SEQ ID NO: 5087324 - DNA, 25 bp, Homo sapien
aattgttactcagccaggaaaaagg

SEQ ID NO: 5087325 - DNA, 25 bp, Homo sapien
ttgttactcagccaggaaaaaggaa

SEQ ID NO: 5087326 - DNA, 25 bp, Homo sapien
tcaattgttactcagccaggaaaaa

SEQ ID NO: 5087327 - DNA, 25 bp, Homo sapien
attttctgggtcttaaacacaccag

SEQ ID NO: 5087328 - DNA, 25 bp, Homo sapien
tattttctgggtcttaaacacacca

SEQ ID NO: 5087329 - DNA, 25 bp, Homo sapien
ttccttgtgatgatgtcttgcacat

SEQ ID NO: 5087330 - DNA, 25 bp, Homo sapien
attccttgtgatgatgtcttgcaca

SEQ ID NO: 5087331 - DNA, 25 bp, Homo sapien
gggtgtgtccaagagaaatcagtct

SEQ ID NO: 5087332 - DNA, 25 bp, Homo sapien
gcattgtagctattttcatgtccga

SEQ ID NO: 5087333 - DNA, 25 bp, Homo sapien
agccagcacaccaagatcactggct

SEQ ID NO: 5087334 - DNA, 25 bp, Homo sapien
agaaatcagtctgtgggctttgtct

SEQ ID NO: 5087335 - DNA, 25 bp, Homo sapien
tgataactaaaagaccaggttgaaa

SEQ ID NO: 5087336 - DNA, 25 bp, Homo sapien
ttgattgataactaaaagaccaggt

SEQ ID NO: 5087337 - DNA, 25 bp, Homo sapien
taaggccgtctgcactgtgaaggaa

SEQ ID NO: 5087338 - DNA, 25 bp, Homo sapien
gggtaaggccgtctgcactgtgaag

SEQ ID NO: 5087339 - DNA, 25 bp, Homo sapien
gacctttcttccaacagtcactgaa

SEQ ID NO: 5087340 - DNA, 25 bp, Homo sapien
ttcagtaatctgcagcagccaacca

SEQ ID NO: 5087341 - DNA, 25 bp, Homo sapien
ggtattataccgtaccaccctgagc

SEQ ID NO: 5087342 - DNA, 25 bp, Homo sapien
caccaacattcttatgggagtggac

SEQ ID NO: 5087343 - DNA, 25 bp, Homo sapien
cattgacttgtccaactcgttccta

SEQ ID NO: 5087344 - DNA, 25 bp, Homo sapien
cagcagttgttcattgacttgtcca

SEQ ID NO: 5087345 - DNA, 25 bp, Homo sapien
tgtccaactcgttcctactgagcca

SEQ ID NO: 5087346 - DNA, 25 bp, Homo sapien
tgttcattgacttgtccaactcgtt

SEQ ID NO: 5087347 - DNA, 25 bp, Homo sapien
ataacaatgtcaaaatgtccttcca

SEQ ID NO: 5087348 - DNA, 25 bp, Homo sapien
gcatgaaacagaggcaattccagaa

SEQ ID NO: 5087349 - DNA, 25 bp, Homo sapien
gcaatttgcctaagtcgtccattta

SEQ ID NO: 5087350 - DNA, 25 bp, Homo sapien
tctctcctaagaagtaagctaattg

SEQ ID NO: 5087351 - DNA, 25 bp, Homo sapien
cagactattcctctccgagccataa

SEQ ID NO: 5087352 - DNA, 25 bp, Homo sapien
gagttgtgatttggagctgtccatg

SEQ ID NO: 5087353 - DNA, 25 bp, Homo sapien
taaacttccgtgagttgtgatttgg

SEQ ID NO: 5087354 - DNA, 25 bp, Homo sapien
ccgtgagttgtgatttggagctgtc

SEQ ID NO: 5087355 - DNA, 25 bp, Homo sapien
tcaggtgtaaacttccgtgagttgt

SEQ ID NO: 5087356 - DNA, 25 bp, Homo sapien
tatgcctgtccttacggaggttaca

SEQ ID NO: 5087357 - DNA, 25 bp, Homo sapien
cataaggcaacttcctgaggtcttc

SEQ ID NO: 5087358 - DNA, 25 bp, Homo sapien
caggtgtacctttgtagcagcgcaa

SEQ ID NO: 5087359 - DNA, 25 bp, Homo sapien
tcttggtgaactccccgtggtaatg

SEQ ID NO: 5087360 - DNA, 25 bp, Homo sapien
tatctgaacttgcaggtcgcagacc

SEQ ID NO: 5087361 - DNA, 25 bp, Homo sapien
tggctgccaaacaccaggagagttg

SEQ ID NO: 5087362 - DNA, 25 bp, Homo sapien
gaagagaccagatgctcaccagaca

SEQ ID NO: 5087363 - DNA, 25 bp, Homo sapien
agttacttaacttggccatgcctga

SEQ ID NO: 5087364 - DNA, 25 bp, Homo sapien
aatctctttattgcatcaacaaggc

SEQ ID NO: 5087365 - DNA, 25 bp, Homo sapien
tggagtaatctctttattgcatcaa

SEQ ID NO: 5087366 - DNA, 25 bp, Homo sapien
gtaatctctttattgcatcaacaag

SEQ ID NO: 5087367 - DNA, 25 bp, Homo sapien
gagtaatctctttattgcatcaaca

SEQ ID NO: 5087368 - DNA, 25 bp, Homo sapien
gaggctcagggaggacaactgccca

SEQ ID NO: 5087369 - DNA, 25 bp, Homo sapien
caacacaggatgtgggactgggctc

SEQ ID NO: 5087370 - DNA, 25 bp, Homo sapien
cacatggtccttctgtggtccattt

SEQ ID NO: 5087371 - DNA, 25 bp, Homo sapien
tcttcactggcaagcccacatggtc

SEQ ID NO: 5087372 - DNA, 25 bp, Homo sapien
tcgcccaggccagaatgcagtgacg

SEQ ID NO: 5087373 - DNA, 25 bp, Homo sapien
gtcgcccaggccagaatgcagtgac

SEQ ID NO: 5087374 - DNA, 25 bp, Homo sapien
cgcccaggccagaatgcagtgacgt

SEQ ID NO: 5087375 - DNA, 25 bp, Homo sapien
cgttacccatacagtagagcctggt

SEQ ID NO: 5087376 - DNA, 25 bp, Homo sapien
ggtcatatctaactctatccccggg

SEQ ID NO: 5087377 - DNA, 25 bp, Homo sapien
cacatcttgggctctagtcaggcca

SEQ ID NO: 5087378 - DNA, 25 bp, Homo sapien
taagcccctccagtgtagagttagg

SEQ ID NO: 5087379 - DNA, 25 bp, Homo sapien
ccacgctgtcagatacaggctccag

SEQ ID NO: 5087380 - DNA, 25 bp, Homo sapien
catagagacaagtaaccacaattcc

SEQ ID NO: 5087381 - DNA, 25 bp, Homo sapien
tagccttttctgtgaccacgctgtc

SEQ ID NO: 5087382 - DNA, 25 bp, Homo sapien
cagtaccaagaaatccttcatagag

SEQ ID NO: 5087383 - DNA, 25 bp, Homo sapien
ttttcagctagattgcaaaactggt

SEQ ID NO: 5087384 - DNA, 25 bp, Homo sapien
cttggagtggaagtttgaaatgtgt

SEQ ID NO: 5087385 - DNA, 25 bp, Homo sapien
taaagtattccctcggcgtggggca

SEQ ID NO: 5087386 - DNA, 25 bp, Homo sapien
cgtggggcaaataccatcgctttcc

SEQ ID NO: 5087387 - DNA, 25 bp, Homo sapien
tcaaaatgcaatgcggattaaagtg

SEQ ID NO: 5087388 - DNA, 25 bp, Homo sapien
tgcggattaaagtgttatctaacac

SEQ ID NO: 5087389 - DNA, 25 bp, Homo sapien
tgcaatgcggattaaagtgttatct

SEQ ID NO: 5087390 - DNA, 25 bp, Homo sapien
gtgttatctaacacaagcagaaaac

SEQ ID NO: 5087391 - DNA, 25 bp, Homo sapien
atatatatatcatgggcgcccgttt

SEQ ID NO: 5087392 - DNA, 25 bp, Homo sapien
gaggcattcttttgctagaagcaga

SEQ ID NO: 5087393 - DNA, 25 bp, Homo sapien
ttagtccaatgtaccaatgtcagca

SEQ ID NO: 5087394 - DNA, 25 bp, Homo sapien
caaaggagcacaactgcacgtgcca

SEQ ID NO: 5087395 - DNA, 25 bp, Homo sapien
taacaagattaagacgggacagcgg

SEQ ID NO: 5087396 - DNA, 25 bp, Homo sapien
ggacagcggaaaagagcggcattat

SEQ ID NO: 5087397 - DNA, 25 bp, Homo sapien
tacgctctattccaacacagtaggg

SEQ ID NO: 5087398 - DNA, 25 bp, Homo sapien
gcggcattatcaggcgtcttacagt

SEQ ID NO: 5087399 - DNA, 25 bp, Homo sapien
ttcttcatatatgtccgggttttcc

SEQ ID NO: 5087400 - DNA, 25 bp, Homo sapien
tcttcatatatgtccgggttttcct

SEQ ID NO: 5087401 - DNA, 25 bp, Homo sapien
cttcatatatgtccgggttttcctt

SEQ ID NO: 5087402 - DNA, 25 bp, Homo sapien
gtcaaaataagcagaagcgggtaat

SEQ ID NO: 5087403 - DNA, 25 bp, Homo sapien
tttagggcaggacgagcaacaagca

SEQ ID NO: 5087404 - DNA, 25 bp, Homo sapien
caacaagcagagtgtaaaaagaggc

SEQ ID NO: 5087405 - DNA, 25 bp, Homo sapien
gtggagtccatagcccacacgtgaa

SEQ ID NO: 5087406 - DNA, 25 bp, Homo sapien
aagggcgcaggcaggcgattatacc

SEQ ID NO: 5087407 - DNA, 25 bp, Homo sapien
gatctaactgcgacttgacctatgc

SEQ ID NO: 5087408 - DNA, 25 bp, Homo sapien
cattactgctaaagtgggcacagat

SEQ ID NO: 5087409 - DNA, 25 bp, Homo sapien
catctcatggatgcactaggcaagg

SEQ ID NO: 5087410 - DNA, 25 bp, Homo sapien
tccacaaaaggcattagagcatctc

SEQ ID NO: 5087411 - DNA, 25 bp, Homo sapien
aaagcttatcaagggccagcgcagg

SEQ ID NO: 5087412 - DNA, 25 bp, Homo sapien
ccctttgtgaggtaacagtgaccct

SEQ ID NO: 5087413 - DNA, 25 bp, Homo sapien
tcagcttcccgacaaagtggttgtg

SEQ ID NO: 5087414 - DNA, 25 bp, Homo sapien
tccgtggttacaagagaggagctct

SEQ ID NO: 5087415 - DNA, 25 bp, Homo sapien
tagtcattaaaaacagcaggtaccc

SEQ ID NO: 5087416 - DNA, 25 bp, Homo sapien
tcttggcgatatagggcacaggcct

SEQ ID NO: 5087417 - DNA, 25 bp, Homo sapien
ttaattccgggagcctaatatctgg

SEQ ID NO: 5087418 - DNA, 25 bp, Homo sapien
taatatctgggattggactgtccgc

SEQ ID NO: 5087419 - DNA, 25 bp, Homo sapien
taagaggtgaccctatcacgcaaat

SEQ ID NO: 5087420 - DNA, 25 bp, Homo sapien
gaaaaaataagtgcaggaaccagag

SEQ ID NO: 5087421 - DNA, 25 bp, Homo sapien
gatgatgaactagtgaccccaacaa

SEQ ID NO: 5087422 - DNA, 25 bp, Homo sapien
gaatgtctccccgtgatcagatggc

SEQ ID NO: 5087423 - DNA, 25 bp, Homo sapien
tgtaatcagggggtgaaatctccat

SEQ ID NO: 5087424 - DNA, 25 bp, Homo sapien
atgtcaggtcttctatataatccga

SEQ ID NO: 5087425 - DNA, 25 bp, Homo sapien
tctatataatccgataagtggttgt

SEQ ID NO: 5087426 - DNA, 25 bp, Homo sapien
ggtcttctatataatccgataagtg

SEQ ID NO: 5087427 - DNA, 25 bp, Homo sapien
gccagaccttctgtcccataggcca

SEQ ID NO: 5087428 - DNA, 25 bp, Homo sapien
ggtggccccccagtcacagacgtgg

SEQ ID NO: 5087429 - DNA, 25 bp, Homo sapien
agtcacagacgtggcttgctcacag

SEQ ID NO: 5087430 - DNA, 25 bp, Homo sapien
gaccttctgtcccataggccaccag

SEQ ID NO: 5087431 - DNA, 25 bp, Homo sapien
gtcaggccggccacccaactgtccc

SEQ ID NO: 5087432 - DNA, 25 bp, Homo sapien
cgaaggcatcgctgtccttctacat

SEQ ID NO: 5087433 - DNA, 25 bp, Homo sapien
catctcaacaacctccgtgtgctgt

SEQ ID NO: 5087434 - DNA, 25 bp, Homo sapien
acaaccgaaggcatcgctgtccttc

SEQ ID NO: 5087435 - DNA, 25 bp, Homo sapien
aggttgcagtgattcaatgtggggc

SEQ ID NO: 5087436 - DNA, 25 bp, Homo sapien
ctctggaaagtttcacttcccattt

SEQ ID NO: 5087437 - DNA, 25 bp, Homo sapien
taaaatagtccacaagaggttgcag

SEQ ID NO: 5087438 - DNA, 25 bp, Homo sapien
ctctggtcctgccaaagcatttgat

SEQ ID NO: 5087439 - DNA, 25 bp, Homo sapien
cagagtgtgaagtgccagatttgca

SEQ ID NO: 5087440 - DNA, 25 bp, Homo sapien
gtgaagtgccagatttgcatcacca

SEQ ID NO: 5087441 - DNA, 25 bp, Homo sapien
aaaagctggctgctaactggctgca

SEQ ID NO: 5087442 - DNA, 25 bp, Homo sapien
gatgacatcaagaggagggtgaggc

SEQ ID NO: 5087443 - DNA, 25 bp, Homo sapien
taggaccctgcctaagattaccgca

SEQ ID NO: 5087444 - DNA, 25 bp, Homo sapien
catatggcaaaccatgtgcccctgg

SEQ ID NO: 5087445 - DNA, 25 bp, Homo sapien
taaagcttccgcctggaagggacac

SEQ ID NO: 5087446 - DNA, 25 bp, Homo sapien
gaagggacacgtactgcattggcca

SEQ ID NO: 5087447 - DNA, 25 bp, Homo sapien
aacttggccaatccagcaaccagga

SEQ ID NO: 5087448 - DNA, 25 bp, Homo sapien
tcttaaggcccagactgaagcatgg

SEQ ID NO: 5087449 - DNA, 25 bp, Homo sapien
tcagcactggcatgctaatgcaggc

SEQ ID NO: 5087450 - DNA, 25 bp, Homo sapien
taatccataaagtgtggctcccagc

SEQ ID NO: 5087451 - DNA, 25 bp, Homo sapien
aactgttagcagtatctgtggggtc

SEQ ID NO: 5087452 - DNA, 25 bp, Homo sapien
gtaaggaagtatctcgttttctagc

SEQ ID NO: 5087453 - DNA, 25 bp, Homo sapien
cccagccatatcttcggaaagtgct

SEQ ID NO: 5087454 - DNA, 25 bp, Homo sapien
tacagagaagttttcaagcttcccc

SEQ ID NO: 5087455 - DNA, 25 bp, Homo sapien
gacaagtgattcagggtccctgccc

SEQ ID NO: 5087456 - DNA, 25 bp, Homo sapien
ctgggagggcttccgggcttcctct

SEQ ID NO: 5087457 - DNA, 25 bp, Homo sapien
gggacaagtgattcagggtccctgc

SEQ ID NO: 5087458 - DNA, 25 bp, Homo sapien
ggcttccgggcttcctctgaaggca

SEQ ID NO: 5087459 - DNA, 25 bp, Homo sapien
tggcttatctgctccactttggagg

SEQ ID NO: 5087460 - DNA, 25 bp, Homo sapien
ctttggaggcatagacaggtttact

SEQ ID NO: 5087461 - DNA, 25 bp, Homo sapien
gtttgggtagcccagctggcttatc

SEQ ID NO: 5087462 - DNA, 25 bp, Homo sapien
ggcctttcctagcaccatatccttg

SEQ ID NO: 5087463 - DNA, 25 bp, Homo sapien
agactggcaaccaaggacgattgtc

SEQ ID NO: 5087464 - DNA, 25 bp, Homo sapien
gacgattgtctctttgagcaagttg

SEQ ID NO: 5087465 - DNA, 25 bp, Homo sapien
cagggagtggctacagagtccctgc

SEQ ID NO: 5087466 - DNA, 25 bp, Homo sapien
ggagtggctacagagtccctgctgc

SEQ ID NO: 5087467 - DNA, 25 bp, Homo sapien
tttccaatctcctctcgcccagcac

SEQ ID NO: 5087468 - DNA, 25 bp, Homo sapien
gttttccaatctcctctcgcccagc

SEQ ID NO: 5087469 - DNA, 25 bp, Homo sapien
aatgttttccaatctcctctcgccc

SEQ ID NO: 5087470 - DNA, 25 bp, Homo sapien
tgttttccaatctcctctcgcccag

SEQ ID NO: 5087471 - DNA, 25 bp, Homo sapien
gtcctccgggatatagatggccaca

SEQ ID NO: 5087472 - DNA, 25 bp, Homo sapien
ttggtaaagtcctccgggatataga

SEQ ID NO: 5087473 - DNA, 25 bp, Homo sapien
ccgggatatagatggccacaggcat

SEQ ID NO: 5087474 - DNA, 25 bp, Homo sapien
aaagtcctccgggatatagatggcc

SEQ ID NO: 5087475 - DNA, 25 bp, Homo sapien
ctaactagatacactcacacaagat

SEQ ID NO: 5087476 - DNA, 25 bp, Homo sapien
tggaattgaattggaccgacttgga

SEQ ID NO: 5087477 - DNA, 25 bp, Homo sapien
tttggaactgatgtattcaccatag

SEQ ID NO: 5087478 - DNA, 25 bp, Homo sapien
ggaattgaattggaccgacttggaa

SEQ ID NO: 5087479 - DNA, 25 bp, Homo sapien
gcttaatgaacttcaatgtctcctc

SEQ ID NO: 5087480 - DNA, 25 bp, Homo sapien
cccctgcctagaagatcaagttcag

SEQ ID NO: 5087481 - DNA, 25 bp, Homo sapien
tcttcaaactcccatgcttaatgaa

SEQ ID NO: 5087482 - DNA, 25 bp, Homo sapien
actcccctgcctagaagatcaagtt

SEQ ID NO: 5087483 - DNA, 25 bp, Homo sapien
gtaccacggctcttgcttggccagg

SEQ ID NO: 5087484 - DNA, 25 bp, Homo sapien
tcttgcttggccagggcctcgtcaa

SEQ ID NO: 5087485 - DNA, 25 bp, Homo sapien
tttacttccactgtaccacggctct

SEQ ID NO: 5087486 - DNA, 25 bp, Homo sapien
tccactgtaccacggctcttgcttg

SEQ ID NO: 5087487 - DNA, 25 bp, Homo sapien
gaagacacatgctcatcccacaggg

SEQ ID NO: 5087488 - DNA, 25 bp, Homo sapien
agacacatgctcatcccacagggaa

SEQ ID NO: 5087489 - DNA, 25 bp, Homo sapien
tgggtagaattcgatttccccagga

SEQ ID NO: 5087490 - DNA, 25 bp, Homo sapien
ttctgggtagaattcgatttcccca

SEQ ID NO: 5087491 - DNA, 25 bp, Homo sapien
tgcaattcacattgaaaggcggcag

SEQ ID NO: 5087492 - DNA, 25 bp, Homo sapien
ggaagttctcttcacgcctggagcg

SEQ ID NO: 5087493 - DNA, 25 bp, Homo sapien
aataaatacgtgctgtgtgctgaac

SEQ ID NO: 5087494 - DNA, 25 bp, Homo sapien
ggctaaggctggtcaaataaatacg

SEQ ID NO: 5087495 - DNA, 25 bp, Homo sapien
actttggaggtgaagacttatcctg

SEQ ID NO: 5087496 - DNA, 25 bp, Homo sapien
gagatggaagctaagaatgggcttc

SEQ ID NO: 5087497 - DNA, 25 bp, Homo sapien
agggagatggaagctaagaatgggc

SEQ ID NO: 5087498 - DNA, 25 bp, Homo sapien
cctgagaatgagaaggcccaatgtc

SEQ ID NO: 5087499 - DNA, 25 bp, Homo sapien
accccagctgccgtaactgtccctc

SEQ ID NO: 5087500 - DNA, 25 bp, Homo sapien
taccccagctgccgtaactgtccct

SEQ ID NO: 5087501 - DNA, 25 bp, Homo sapien
tctaccccagctgccgtaactgtcc

SEQ ID NO: 5087502 - DNA, 25 bp, Homo sapien
cagcagatccatgacattctccatc

SEQ ID NO: 5087503 - DNA, 25 bp, Homo sapien
tggagcggtgataggcactggtgtg

SEQ ID NO: 5087504 - DNA, 25 bp, Homo sapien
ctggagcggtgataggcactggtgt

SEQ ID NO: 5087505 - DNA, 25 bp, Homo sapien
ggagcggtgataggcactggtgtgt

SEQ ID NO: 5087506 - DNA, 25 bp, Homo sapien
tgaaaatacctcttgtgcatcaaag

SEQ ID NO: 5087507 - DNA, 25 bp, Homo sapien
ctatagggtaatgggggacagacat

SEQ ID NO: 5087508 - DNA, 25 bp, Homo sapien
ggtctgaaaatacctcttgtgcatc

SEQ ID NO: 5087509 - DNA, 25 bp, Homo sapien
cttgtgcatcaaagatgccagccac

SEQ ID NO: 5087510 - DNA, 25 bp, Homo sapien
tgggtgcaaagtgccagggctggct

SEQ ID NO: 5087511 - DNA, 25 bp, Homo sapien
ctgtgctgggtgcaaagtgccaggg

SEQ ID NO: 5087512 - DNA, 25 bp, Homo sapien
gagcagccctcccacggcgccgagg

SEQ ID NO: 5087513 - DNA, 25 bp, Homo sapien
ggcgccgaggagatctgcccctctg

SEQ ID NO: 5087514 - DNA, 25 bp, Homo sapien
tagctgggctgtccgcctttctggg

SEQ ID NO: 5087515 - DNA, 25 bp, Homo sapien
gaatcgcattcctgccgtctctggc

SEQ ID NO: 5087516 - DNA, 25 bp, Homo sapien
ttgcatctccttagctgggctgtcc

SEQ ID NO: 5087517 - DNA, 25 bp, Homo sapien
tccagggaagaatcgcattcctgcc

SEQ ID NO: 5087518 - DNA, 25 bp, Homo sapien
tcctgtctcttgggttgagaaacca

SEQ ID NO: 5087519 - DNA, 25 bp, Homo sapien
cccctgtacaggtctttggccacac

SEQ ID NO: 5087520 - DNA, 25 bp, Homo sapien
ccctgtacaggtctttggccacaca

SEQ ID NO: 5087521 - DNA, 25 bp, Homo sapien
gttgagaaaccatcccctctgactc

SEQ ID NO: 5087522 - DNA, 25 bp, Homo sapien
ccagttcattttgcccgtttttgct

SEQ ID NO: 5087523 - DNA, 25 bp, Homo sapien
ttattcatgcggaagcaagacgccc

SEQ ID NO: 5087524 - DNA, 25 bp, Homo sapien
taacttctgagagggctgattgctt

SEQ ID NO: 5087525 - DNA, 25 bp, Homo sapien
aatggcttctcaagtgacatttgct

SEQ ID NO: 5087526 - DNA, 25 bp, Homo sapien
agcgcgccccagagtagtccggttt

SEQ ID NO: 5087527 - DNA, 25 bp, Homo sapien
aaggcccttctctaggaagcaggag

SEQ ID NO: 5087528 - DNA, 25 bp, Homo sapien
gtttcccgacggacaacagcatgga

SEQ ID NO: 5087529 - DNA, 25 bp, Homo sapien
gaagttggtcgcctacttccgtcca

SEQ ID NO: 5087530 - DNA, 25 bp, Homo sapien
tcaacgcgctagagaggccgtctca

SEQ ID NO: 5087531 - DNA, 25 bp, Homo sapien
ctccaaaggtatcttcactcccgga

SEQ ID NO: 5087532 - DNA, 25 bp, Homo sapien
caaaggtatcttcactcccggaggg

SEQ ID NO: 5087533 - DNA, 25 bp, Homo sapien
gctagagaggccgtctcacctccaa

SEQ ID NO: 5087534 - DNA, 25 bp, Homo sapien
tctctccttttaagccgcgcggtgc

SEQ ID NO: 5087535 - DNA, 25 bp, Homo sapien
gagcagcggcggataaatattcatt

SEQ ID NO: 5087536 - DNA, 25 bp, Homo sapien
aatattcattagtaagtctctcctt

SEQ ID NO: 5087537 - DNA, 25 bp, Homo sapien
acggagcagcggcggataaatattc

SEQ ID NO: 5087538 - DNA, 25 bp, Homo sapien
cgagtccgcgagctctgagtccgga

SEQ ID NO: 5087539 - DNA, 25 bp, Homo sapien
acatggattctcaacaggtggccgg

SEQ ID NO: 5087540 - DNA, 25 bp, Homo sapien
gatcttggttgtacagccgcccgat

SEQ ID NO: 5087541 - DNA, 25 bp, Homo sapien
accggccgcgtctggcatggtcaga

SEQ ID NO: 5087542 - DNA, 25 bp, Homo sapien
tgccccggcttaagccgagctgctg

SEQ ID NO: 5087543 - DNA, 25 bp, Homo sapien
ctgagcagggcttagagagcctgcc

SEQ ID NO: 5087544 - DNA, 25 bp, Homo sapien
gaggcagcactgctgctcttgactt

SEQ ID NO: 5087545 - DNA, 25 bp, Homo sapien
gccccggcttaagccgagctgctgg

SEQ ID NO: 5087546 - DNA, 25 bp, Homo sapien
tgggaaagtctcaaccacatctgga

SEQ ID NO: 5087547 - DNA, 25 bp, Homo sapien
ggccgggtcacctgtgcagaacaaa

SEQ ID NO: 5087548 - DNA, 25 bp, Homo sapien
tcagctctaaacagccgaccaggag

SEQ ID NO: 5087549 - DNA, 25 bp, Homo sapien
tacagggaaagccaacgggtctgca

SEQ ID NO: 5087550 - DNA, 25 bp, Homo sapien
ccgcctcctggagcgggtaagttga

SEQ ID NO: 5087551 - DNA, 25 bp, Homo sapien
ctgagtgcgtgtttgggtgggaagc

SEQ ID NO: 5087552 - DNA, 25 bp, Homo sapien
agcgcctttcggctctggcctgaag

SEQ ID NO: 5087553 - DNA, 25 bp, Homo sapien
gtcccagagcggagggccggactgg

SEQ ID NO: 5087554 - DNA, 25 bp, Homo sapien
ttttgaaagcagctcgtgaccccga

SEQ ID NO: 5087555 - DNA, 25 bp, Homo sapien
ggctctgccgaaagcgctgaaataa

SEQ ID NO: 5087556 - DNA, 25 bp, Homo sapien
tagcaggtcttcaacacgacgactg

SEQ ID NO: 5087557 - DNA, 25 bp, Homo sapien
tctgggcggtcattcactgagggcc

SEQ ID NO: 5087558 - DNA, 25 bp, Homo sapien
cacacagtagccaacaatgaccaca

SEQ ID NO: 5087559 - DNA, 25 bp, Homo sapien
tatatttagacaggactcggtttgg

SEQ ID NO: 5087560 - DNA, 25 bp, Homo sapien
tacgcagatttgtcggggtcagaga

SEQ ID NO: 5087561 - DNA, 25 bp, Homo sapien
ttagacaggactcggtttggtgtta

SEQ ID NO: 5087562 - DNA, 25 bp, Homo sapien
caattaggcttctctttactccctc

SEQ ID NO: 5087563 - DNA, 25 bp, Homo sapien
ggatcccggattccgagggtatctg

SEQ ID NO: 5087564 - DNA, 25 bp, Homo sapien
gtatctggcgccagggagcctgagc

SEQ ID NO: 5087565 - DNA, 25 bp, Homo sapien
tcaactccctcttcatcaattaggc

SEQ ID NO: 5087566 - DNA, 25 bp, Homo sapien
gccgagtcaagattcagcgattcca

SEQ ID NO: 5087567 - DNA, 25 bp, Homo sapien
cagccctgccaatcaataccgagaa

SEQ ID NO: 5087568 - DNA, 25 bp, Homo sapien
cccgcgcagccacatagagagggag

SEQ ID NO: 5087569 - DNA, 25 bp, Homo sapien
gcaatcgccctaatgacaacagcct

SEQ ID NO: 5087570 - DNA, 25 bp, Homo sapien
agaatcggcgaagtttggcaacaag

SEQ ID NO: 5087571 - DNA, 25 bp, Homo sapien
tatggagcggtggtgagaatcggcg

SEQ ID NO: 5087572 - DNA, 25 bp, Homo sapien
ccagaagtatggagcggtggtgaga

SEQ ID NO: 5087573 - DNA, 25 bp, Homo sapien
gtgagaatcggcgaagtttggcaac

SEQ ID NO: 5087574 - DNA, 25 bp, Homo sapien
tcccgcaccgttcccgccgccgcta

SEQ ID NO: 5087575 - DNA, 25 bp, Homo sapien
gccgcctgctccgccagcaccgccg

SEQ ID NO: 5087576 - DNA, 25 bp, Homo sapien
gcctgctccgccagcaccgccgcct

SEQ ID NO: 5087577 - DNA, 25 bp, Homo sapien
tcccgcaccgttcccgccgccgctg

SEQ ID NO: 5087578 - DNA, 25 bp, Homo sapien
gaagcaatgcgtcttctgctcgccg

SEQ ID NO: 5087579 - DNA, 25 bp, Homo sapien
ttctcaaggatgtggtagaggtcgc

SEQ ID NO: 5087580 - DNA, 25 bp, Homo sapien
gcagctggaacatggacaactcttc

SEQ ID NO: 5087581 - DNA, 25 bp, Homo sapien
gcgcgcgcaggatcgactcgtgttt

SEQ ID NO: 5087582 - DNA, 25 bp, Homo sapien
tctctaggctccagaggatcgccga

SEQ ID NO: 5087583 - DNA, 25 bp, Homo sapien
tgcagcgcagggctaagtctcccag

SEQ ID NO: 5087584 - DNA, 25 bp, Homo sapien
gacgaaagcccctcttggtcaaagc

SEQ ID NO: 5087585 - DNA, 25 bp, Homo sapien
gaaactttctccgactggccaggag

SEQ ID NO: 5087586 - DNA, 25 bp, Homo sapien
tctgacgctagtggatttctctcgg

SEQ ID NO: 5087587 - DNA, 25 bp, Homo sapien
caaagggattctcctcggctgaaac

SEQ ID NO: 5087588 - DNA, 25 bp, Homo sapien
tgatagggacccaggttcactttcc

SEQ ID NO: 5087589 - DNA, 25 bp, Homo sapien
aaacaggcccgctgcgcagtggcct

SEQ ID NO: 5087590 - DNA, 25 bp, Homo sapien
cccacccacgggcagctgtcagcag

SEQ ID NO: 5087591 - DNA, 25 bp, Homo sapien
ctgctccctgaagtacaccaggccc

SEQ ID NO: 5087592 - DNA, 25 bp, Homo sapien
ccacccacgggcagctgtcagcagc

SEQ ID NO: 5087593 - DNA, 25 bp, Homo sapien
ctccagaaactcacacccagccccc

SEQ ID NO: 5087594 - DNA, 25 bp, Homo sapien
ggccttggcttgaccctgggcgctc

SEQ ID NO: 5087595 - DNA, 25 bp, Homo sapien
gctcccctcatcagacgaaaagtgg

SEQ ID NO: 5087596 - DNA, 25 bp, Homo sapien
cagacgaaaagtgggctccacggca

SEQ ID NO: 5087597 - DNA, 25 bp, Homo sapien
tggaattctctccacaaggaggcct

SEQ ID NO: 5087598 - DNA, 25 bp, Homo sapien
cgcaggaccgagggtagagaaaata

SEQ ID NO: 5087599 - DNA, 25 bp, Homo sapien
cccggccagtctccgggtagaactg

SEQ ID NO: 5087600 - DNA, 25 bp, Homo sapien
tctctggatgccagcgcagagcgca

SEQ ID NO: 5087601 - DNA, 25 bp, Homo sapien
tccgggtagaactgcatactttgct

SEQ ID NO: 5087602 - DNA, 25 bp, Homo sapien
tcatacatcacattccgagtcgctg

SEQ ID NO: 5087603 - DNA, 25 bp, Homo sapien
gtgccggtgtctgcgcgctccgtca

SEQ ID NO: 5087604 - DNA, 25 bp, Homo sapien
ggacacgctggtggtcgggctggcc

SEQ ID NO: 5087605 - DNA, 25 bp, Homo sapien
cgctcggtccaatggcctggtgctg

SEQ ID NO: 5087606 - DNA, 25 bp, Homo sapien
catgggaaccgaaaggagaagccgt

SEQ ID NO: 5087607 - DNA, 25 bp, Homo sapien
ccctacagggagtgagagatacctc

SEQ ID NO: 5087608 - DNA, 25 bp, Homo sapien
ttataaccagtacccacacaggcag

SEQ ID NO: 5087609 - DNA, 25 bp, Homo sapien
gcttttgctagcgacagggtccctc

SEQ ID NO: 5087610 - DNA, 25 bp, Homo sapien
taccacctggtcgatattgcctgaa

SEQ ID NO: 5087611 - DNA, 25 bp, Homo sapien
agagattctgacaccatgtgccagg

SEQ ID NO: 5087612 - DNA, 25 bp, Homo sapien
ggccctccaaagctaaaggctgctg

SEQ ID NO: 5087613 - DNA, 25 bp, Homo sapien
aagttgggtagaatccaggcagtcc

SEQ ID NO: 5087614 - DNA, 25 bp, Homo sapien
caggaggtctaagcacacagggaag

SEQ ID NO: 5087615 - DNA, 25 bp, Homo sapien
aagtgactgaggtacacaggaggtc

SEQ ID NO: 5087616 - DNA, 25 bp, Homo sapien
agaacactccgctgggatgccaggc

SEQ ID NO: 5087617 - DNA, 25 bp, Homo sapien
gactcactggaacgccagaagcaga

SEQ ID NO: 5087618 - DNA, 25 bp, Homo sapien
ggtcaccccagttactcctggagga

SEQ ID NO: 5087619 - DNA, 25 bp, Homo sapien
ggactcgagctttcaccgtcctccc

SEQ ID NO: 5087620 - DNA, 25 bp, Homo sapien
ccccagttactcctggaggatttgg

SEQ ID NO: 5087621 - DNA, 25 bp, Homo sapien
tcgggtcaccccagttactcctgga

SEQ ID NO: 5087622 - DNA, 25 bp, Homo sapien
tccaacacatcagcatttctgcagt

SEQ ID NO: 5087623 - DNA, 25 bp, Homo sapien
ctgtaatccaacacatcagcatttc

SEQ ID NO: 5087624 - DNA, 25 bp, Homo sapien
taatccaacacatcagcatttctgc

SEQ ID NO: 5087625 - DNA, 25 bp, Homo sapien
agcatttctgcagtgaaacatctga

SEQ ID NO: 5087626 - DNA, 25 bp, Homo sapien
agggtcgctgtttcctctgcttctg

SEQ ID NO: 5087627 - DNA, 25 bp, Homo sapien
ggcccatctgcagggtcgctgtttc

SEQ ID NO: 5087628 - DNA, 25 bp, Homo sapien
tgaaaaatcccagctccttctggcc

SEQ ID NO: 5087629 - DNA, 25 bp, Homo sapien
ttctggcccatctgcagggtcgctg

SEQ ID NO: 5087630 - DNA, 25 bp, Homo sapien
tgcatgccccatcagggtcacctgt

SEQ ID NO: 5087631 - DNA, 25 bp, Homo sapien
agggtcacctgtagatttctctagg

SEQ ID NO: 5087632 - DNA, 25 bp, Homo sapien
ccatcagggtcacctgtagatttct

SEQ ID NO: 5087633 - DNA, 25 bp, Homo sapien
cacctgtagatttctctaggcatat

SEQ ID NO: 5087634 - DNA, 25 bp, Homo sapien
agggcaccgcctgttattctcctgc

SEQ ID NO: 5087635 - DNA, 25 bp, Homo sapien
taggtgatttccacggctctgggtt

SEQ ID NO: 5087636 - DNA, 25 bp, Homo sapien
caagtgcttcatggtgacatcatcg

SEQ ID NO: 5087637 - DNA, 25 bp, Homo sapien
ttgctccaggcaacagacagtctgc

SEQ ID NO: 5087638 - DNA, 25 bp, Homo sapien
gagtaactttcagtacgagggtaca

SEQ ID NO: 5087639 - DNA, 25 bp, Homo sapien
ctatatcaagtaccaagagagggca

SEQ ID NO: 5087640 - DNA, 25 bp, Homo sapien
gatgagtacagatagcaccagggag

SEQ ID NO: 5087641 - DNA, 25 bp, Homo sapien
gaagggttactctaaagtgtgtcaa

SEQ ID NO: 5087642 - DNA, 25 bp, Homo sapien
tcctctctagaggcagttgttgagc

SEQ ID NO: 5087643 - DNA, 25 bp, Homo sapien
ttcctctctagaggcagttgttgag

SEQ ID NO: 5087644 - DNA, 25 bp, Homo sapien
tcaaccaaacaaccgaggaggagac

SEQ ID NO: 5087645 - DNA, 25 bp, Homo sapien
gggactccaaggtgaagtctgcaga

SEQ ID NO: 5087646 - DNA, 25 bp, Homo sapien
tgctgggctggcaaccagagagagt

SEQ ID NO: 5087647 - DNA, 25 bp, Homo sapien
aggagactaatgagcagggatgaaa

SEQ ID NO: 5087648 - DNA, 25 bp, Homo sapien
tagaagtgtgggagacatgtggccc

SEQ ID NO: 5087649 - DNA, 25 bp, Homo sapien
gaagctttagcagggccccagggat

SEQ ID NO: 5087650 - DNA, 25 bp, Homo sapien
cccagggatgggaaccttcttcatg

SEQ ID NO: 5087651 - DNA, 25 bp, Homo sapien
gcccccactgggaagctttagcagg

SEQ ID NO: 5087652 - DNA, 25 bp, Homo sapien
gaactgtgaccgtttgacaagagcc

SEQ ID NO: 5087653 - DNA, 25 bp, Homo sapien
cacctggggattccaatgcaataag

SEQ ID NO: 5087654 - DNA, 25 bp, Homo sapien
tcaggtgcccctcatggtcaggtaa

SEQ ID NO: 5087655 - DNA, 25 bp, Homo sapien
tattcataagaatcacctccagcac

SEQ ID NO: 5087656 - DNA, 25 bp, Homo sapien
gcaagagtcgaagagccccactgcg

SEQ ID NO: 5087657 - DNA, 25 bp, Homo sapien
gtcgaagagccccactgcggccggg

SEQ ID NO: 5087658 - DNA, 25 bp, Homo sapien
aagagtcgaagagccccactgcggc

SEQ ID NO: 5087659 - DNA, 25 bp, Homo sapien
ctgcaagagtcgaagagccccactg

SEQ ID NO: 5087660 - DNA, 25 bp, Homo sapien
tttccatgaccagaggtgggggtag

SEQ ID NO: 5087661 - DNA, 25 bp, Homo sapien
catgaccagaggtgggggtaggaag

SEQ ID NO: 5087662 - DNA, 25 bp, Homo sapien
tccatgaccagaggtgggggtagga

SEQ ID NO: 5087663 - DNA, 25 bp, Homo sapien
gtttccatgaccagaggtgggggta

SEQ ID NO: 5087664 - DNA, 25 bp, Homo sapien
aagggggctctgtctgtgattattc

SEQ ID NO: 5087665 - DNA, 25 bp, Homo sapien
aggccagccaatcgtccaaaccatt

SEQ ID NO: 5087666 - DNA, 25 bp, Homo sapien
ggcaatgggtctgtccctctgggaa

SEQ ID NO: 5087667 - DNA, 25 bp, Homo sapien
tggcaatgggtctgtccctctggga

SEQ ID NO: 5087668 - DNA, 25 bp, Homo sapien
tgctcgtcttcaggacagcaaacaa

SEQ ID NO: 5087669 - DNA, 25 bp, Homo sapien
tgcatctgccgaggcggctgagcca

SEQ ID NO: 5087670 - DNA, 25 bp, Homo sapien
cccctaatcggcaggaggagtgcga

SEQ ID NO: 5087671 - DNA, 25 bp, Homo sapien
caattagtgcggcagctgctcgtct

SEQ ID NO: 5087672 - DNA, 25 bp, Homo sapien
gatgaaatcagtgggttctcgggct

SEQ ID NO: 5087673 - DNA, 25 bp, Homo sapien
tgctgctacagttgtcacagtggaa

SEQ ID NO: 5087674 - DNA, 25 bp, Homo sapien
tgggttctcgggcttttgcagccct

SEQ ID NO: 5087675 - DNA, 25 bp, Homo sapien
cagccctcgatctcctgtgacagac

SEQ ID NO: 5087676 - DNA, 25 bp, Homo sapien
tctctgaagactggaagctgctcct

SEQ ID NO: 5087677 - DNA, 25 bp, Homo sapien
tccagctggcttgggatgtaggtgg

SEQ ID NO: 5087678 - DNA, 25 bp, Homo sapien
tggcttgggatgtaggtggccttgt

SEQ ID NO: 5087679 - DNA, 25 bp, Homo sapien
atctctgaagactggaagctgctcc

SEQ ID NO: 5087680 - DNA, 25 bp, Homo sapien
tccccaggagcgtcagcaatggctc

SEQ ID NO: 5087681 - DNA, 25 bp, Homo sapien
atgcttgcaaagaatgttcctcccc

SEQ ID NO: 5087682 - DNA, 25 bp, Homo sapien
catttatcccgtgtatgtggctcaa

SEQ ID NO: 5087683 - DNA, 25 bp, Homo sapien
ggctctggcctctaagtcgtcggat

SEQ ID NO: 5087684 - DNA, 25 bp, Homo sapien
gaggcccagccttatgatcgagact

SEQ ID NO: 5087685 - DNA, 25 bp, Homo sapien
cacatatggttgctagatggagcct

SEQ ID NO: 5087686 - DNA, 25 bp, Homo sapien
tggagctgaagagtggacaaaaccc

SEQ ID NO: 5087687 - DNA, 25 bp, Homo sapien
cagtcgtgagtgtctacagtgggca

SEQ ID NO: 5087688 - DNA, 25 bp, Homo sapien
ggcagacaaccacactcaagccaag

SEQ ID NO: 5087689 - DNA, 25 bp, Homo sapien
gcaaaccgtctgatgatctctccag

SEQ ID NO: 5087690 - DNA, 25 bp, Homo sapien
agttgtctgggctccaaaaatggcc

SEQ ID NO: 5087691 - DNA, 25 bp, Homo sapien
cagtgtctatggctgggtcaccgcc

SEQ ID NO: 5087692 - DNA, 25 bp, Homo sapien
gcacgaagagacctgagccatgcag

SEQ ID NO: 5087693 - DNA, 25 bp, Homo sapien
ccatgcaggccaccctggatggtaa

SEQ ID NO: 5087694 - DNA, 25 bp, Homo sapien
ggagagcacgaagagacctgagcca

SEQ ID NO: 5087695 - DNA, 25 bp, Homo sapien
agagcacgaagagacctgagccatg

SEQ ID NO: 5087696 - DNA, 25 bp, Homo sapien
ccaaccacggagaagatgaagcagg

SEQ ID NO: 5087697 - DNA, 25 bp, Homo sapien
gaatctcagggaaggtctttgcttg

SEQ ID NO: 5087698 - DNA, 25 bp, Homo sapien
ttgatgtagcacagaccaaccacgg

SEQ ID NO: 5087699 - DNA, 25 bp, Homo sapien
ttgggatcctttgccaaacacaaga

SEQ ID NO: 5087700 - DNA, 25 bp, Homo sapien
aacattcaaggtcaatttctcttct

SEQ ID NO: 5087701 - DNA, 25 bp, Homo sapien
ttgctcttgcctgtgaccttggcaa

SEQ ID NO: 5087702 - DNA, 25 bp, Homo sapien
gagccaaggtcctgtgaggactgca

SEQ ID NO: 5087703 - DNA, 25 bp, Homo sapien
tgaccttggcaagagccaaggtcct

SEQ ID NO: 5087704 - DNA, 25 bp, Homo sapien
tctagatttctagcttgccaccgtt

SEQ ID NO: 5087705 - DNA, 25 bp, Homo sapien
tgactggtggtctatctgcccctac

SEQ ID NO: 5087706 - DNA, 25 bp, Homo sapien
tctcctgccagtctcttgtactctg

SEQ ID NO: 5087707 - DNA, 25 bp, Homo sapien
gtgtcctggtccctccgtatgtacc

SEQ ID NO: 5087708 - DNA, 25 bp, Homo sapien
gcaggccccgggtcagataaccgga

SEQ ID NO: 5087709 - DNA, 25 bp, Homo sapien
gactccgactattgtctggcgctgg

SEQ ID NO: 5087710 - DNA, 25 bp, Homo sapien
ataaccggaccaatcagggcgcggg

SEQ ID NO: 5087711 - DNA, 25 bp, Homo sapien
tggcgaataatttgactccgactat

SEQ ID NO: 5087712 - DNA, 25 bp, Homo sapien
gcctgcgccggggtagaatgtgccc

SEQ ID NO: 5087713 - DNA, 25 bp, Homo sapien
tagaatgtgcccggtgaacagagag

SEQ ID NO: 5087714 - DNA, 25 bp, Homo sapien
cggggtagaatgtgcccggtgaaca

SEQ ID NO: 5087715 - DNA, 25 bp, Homo sapien
tgcgccggggtagaatgtgcccggt

SEQ ID NO: 5087716 - DNA, 25 bp, Homo sapien
gatcctccgggaagtcgattctccg

SEQ ID NO: 5087717 - DNA, 25 bp, Homo sapien
gaccgctgagtccagagtttctagg

SEQ ID NO: 5087718 - DNA, 25 bp, Homo sapien
acggaactgcctggcgctcctcggg

SEQ ID NO: 5087719 - DNA, 25 bp, Homo sapien
tcagcttccatagaggccacacgga

SEQ ID NO: 5087720 - DNA, 25 bp, Homo sapien
gggaatcttgcctccgttctcctcc

SEQ ID NO: 5087721 - DNA, 25 bp, Homo sapien
tggccaggagccgagccgatcccca

SEQ ID NO: 5087722 - DNA, 25 bp, Homo sapien
aagcgggaggactgggaatcttgcc

SEQ ID NO: 5087723 - DNA, 25 bp, Homo sapien
agctcagcgagccggttcccaggct

SEQ ID NO: 5087724 - DNA, 25 bp, Homo sapien
tgacaaagaagcaaaaaacaggacc

SEQ ID NO: 5087725 - DNA, 25 bp, Homo sapien
ctgacaaagaagcaaaaaacaggac

SEQ ID NO: 5087726 - DNA, 25 bp, Homo sapien
agcaccacatgtttccattggcacc

SEQ ID NO: 5087727 - DNA, 25 bp, Homo sapien
aggaccagcaccacatgtttccatt

SEQ ID NO: 5087728 - DNA, 25 bp, Homo sapien
ttgtgcgagcccttctcccacagga

SEQ ID NO: 5087729 - DNA, 25 bp, Homo sapien
tttgtgcgagcccttctcccacagg

SEQ ID NO: 5087730 - DNA, 25 bp, Homo sapien
catagaaagcataaaagggtgggaa

SEQ ID NO: 5087731 - DNA, 25 bp, Homo sapien
aactggcctagactcgggttccata

SEQ ID NO: 5087732 - DNA, 25 bp, Homo sapien
ggcactgagtatggccctaggagct

SEQ ID NO: 5087733 - DNA, 25 bp, Homo sapien
catagccctagactggctgagggca

SEQ ID NO: 5087734 - DNA, 25 bp, Homo sapien
gagggaagaaccagcgggccctctc

SEQ ID NO: 5087735 - DNA, 25 bp, Homo sapien
agcgggccctctccgcgtcctctcc

SEQ ID NO: 5087736 - DNA, 25 bp, Homo sapien
gtgaggagggaagaaccagcgggcc

SEQ ID NO: 5087737 - DNA, 25 bp, Homo sapien
cagcgggccctctccgcgtcctctc

SEQ ID NO: 5087738 - DNA, 25 bp, Homo sapien
cctggttgaaggaaagcgtccactc

SEQ ID NO: 5087739 - DNA, 25 bp, Homo sapien
agttcagtctgtagctcctcgggcc

SEQ ID NO: 5087740 - DNA, 25 bp, Homo sapien
cctccaaggaacaggagagtaagag

SEQ ID NO: 5087741 - DNA, 25 bp, Homo sapien
tttctaagggcagtgagttcagtct

SEQ ID NO: 5087742 - DNA, 25 bp, Homo sapien
ttctgctcctgccgaatccaaagca

SEQ ID NO: 5087743 - DNA, 25 bp, Homo sapien
cttctgctcctgccgaatccaaagc

SEQ ID NO: 5087744 - DNA, 25 bp, Homo sapien
ttccagaatgagccagctctgccac

SEQ ID NO: 5087745 - DNA, 25 bp, Homo sapien
ggggacactgggaaatcaatctcca

SEQ ID NO: 5087746 - DNA, 25 bp, Homo sapien
ggacactgggaaatcaatctccatt

SEQ ID NO: 5087747 - DNA, 25 bp, Homo sapien
cattccagaatgagccagctctgcc

SEQ ID NO: 5087748 - DNA, 25 bp, Homo sapien
tcttgcatcccgctggttcctgaga

SEQ ID NO: 5087749 - DNA, 25 bp, Homo sapien
tcatttgaatatgttgggaagcaaa

SEQ ID NO: 5087750 - DNA, 25 bp, Homo sapien
ggaagcaaagggaggtgtacataac

SEQ ID NO: 5087751 - DNA, 25 bp, Homo sapien
gaggtgtacataacaggccctgtga

SEQ ID NO: 5087752 - DNA, 25 bp, Homo sapien
agtttcagagcatgctgtgagcagc

SEQ ID NO: 5087753 - DNA, 25 bp, Homo sapien
agtagaagcaaagccgtcagcctct

SEQ ID NO: 5087754 - DNA, 25 bp, Homo sapien
tctcagctggccacaagcacttgta

SEQ ID NO: 5087755 - DNA, 25 bp, Homo sapien
tcagcctctccggagcccacagttt

SEQ ID NO: 5087756 - DNA, 25 bp, Homo sapien
aactcctgttccatttagctcagat

SEQ ID NO: 5087757 - DNA, 25 bp, Homo sapien
ctcctgttccatttagctcagatgg

SEQ ID NO: 5087758 - DNA, 25 bp, Homo sapien
actcctgttccatttagctcagatg

SEQ ID NO: 5087759 - DNA, 25 bp, Homo sapien
tctcagggagccttcaattaaatac

SEQ ID NO: 5087760 - DNA, 25 bp, Homo sapien
ggccaggtgcccccgatctcaggga

SEQ ID NO: 5087761 - DNA, 25 bp, Homo sapien
ccccgatctcagggagccttcaatt

SEQ ID NO: 5087762 - DNA, 25 bp, Homo sapien
cgatctcagggagccttcaattaaa

SEQ ID NO: 5087763 - DNA, 25 bp, Homo sapien
ttgcaaacaattccctctacactag

SEQ ID NO: 5087764 - DNA, 25 bp, Homo sapien
gaagctgttgcaaacaattccctct

SEQ ID NO: 5087765 - DNA, 25 bp, Homo sapien
ccaaggaagctgttgcaaacaattc

SEQ ID NO: 5087766 - DNA, 25 bp, Homo sapien
ccctctacactaggcagatttgggc

SEQ ID NO: 5087767 - DNA, 25 bp, Homo sapien
tgttgttatttttatcgagtccaag

SEQ ID NO: 5087768 - DNA, 25 bp, Homo sapien
cgagtccaagagagtaggctaagag

SEQ ID NO: 5087769 - DNA, 25 bp, Homo sapien
gactgagaagcaataggccccacat

SEQ ID NO: 5087770 - DNA, 25 bp, Homo sapien
gcaataggccccacatgctggttcc

SEQ ID NO: 5087771 - DNA, 25 bp, Homo sapien
tccttgtgatcttcctagtggagac

SEQ ID NO: 5087772 - DNA, 25 bp, Homo sapien
gggtattaagttcaccgctcagtct

SEQ ID NO: 5087773 - DNA, 25 bp, Homo sapien
tctgttggtcaacactgtactagtg

SEQ ID NO: 5087774 - DNA, 25 bp, Homo sapien
aatggaaaggctaggatggtgtccc

SEQ ID NO: 5087775 - DNA, 25 bp, Homo sapien
tatggatgcccctcctcggtaacta

SEQ ID NO: 5087776 - DNA, 25 bp, Homo sapien
agcagtatggatgcccctcctcggt

SEQ ID NO: 5087777 - DNA, 25 bp, Homo sapien
ctcctgagcagtatggatgcccctc

SEQ ID NO: 5087778 - DNA, 25 bp, Homo sapien
tgcccctcctcggtaactactgtgg

SEQ ID NO: 5087779 - DNA, 25 bp, Homo sapien
taggctcaaccaacttatacctcca

SEQ ID NO: 5087780 - DNA, 25 bp, Homo sapien
tggtttagaataggctcaaccaact

SEQ ID NO: 5087781 - DNA, 25 bp, Homo sapien
tttcatggtttagaataggctcaac

SEQ ID NO: 5087782 - DNA, 25 bp, Homo sapien
agaataggctcaaccaacttatacc

SEQ ID NO: 5087783 - DNA, 25 bp, Homo sapien
tcaccaccctgcctgtgcctaaggg

SEQ ID NO: 5087784 - DNA, 25 bp, Homo sapien
ttcaccaccctgcctgtgcctaagg

SEQ ID NO: 5087785 - DNA, 25 bp, Homo sapien
caccctgcctgtgcctaagggcccc

SEQ ID NO: 5087786 - DNA, 25 bp, Homo sapien
accaccctgcctgtgcctaagggcc

SEQ ID NO: 5087787 - DNA, 25 bp, Homo sapien
gcaagagtaaagtcctgaatacccc

SEQ ID NO: 5087788 - DNA, 25 bp, Homo sapien
gctttgctggttagtccgtagctat

SEQ ID NO: 5087789 - DNA, 25 bp, Homo sapien
gaagcccatcaatcactactacact

SEQ ID NO: 5087790 - DNA, 25 bp, Homo sapien
tagtccgtagctatgaaccaggaag

SEQ ID NO: 5087791 - DNA, 25 bp, Homo sapien
tcgttgggacttcgcggctgtcagc

SEQ ID NO: 5087792 - DNA, 25 bp, Homo sapien
ctaagctttcgttgggacttcgcgg

SEQ ID NO: 5087793 - DNA, 25 bp, Homo sapien
tgtgggcctggattcaactcatgga

SEQ ID NO: 5087794 - DNA, 25 bp, Homo sapien
gctttcgttgggacttcgcggctgt

SEQ ID NO: 5087795 - DNA, 25 bp, Homo sapien
aggaaccaaaactgtctaagtctgg

SEQ ID NO: 5087796 - DNA, 25 bp, Homo sapien
agtctggggcctgaacgtatgcacg

SEQ ID NO: 5087797 - DNA, 25 bp, Homo sapien
ggctgatgcagaaccgaatgaagag

SEQ ID NO: 5087798 - DNA, 25 bp, Homo sapien
tgaacgtatgcacgtgtgcagctgt

SEQ ID NO: 5087799 - DNA, 25 bp, Homo sapien
gggtaaagacactgattgcctctgg

SEQ ID NO: 5087800 - DNA, 25 bp, Homo sapien
ttatgcatcacatacctctggaagg

SEQ ID NO: 5087801 - DNA, 25 bp, Homo sapien
atgcatcacatacctctggaagggt

SEQ ID NO: 5087802 - DNA, 25 bp, Homo sapien
ggtaaagacactgattgcctctggg

SEQ ID NO: 5087803 - DNA, 25 bp, Homo sapien
tgcagggaccctgagcgtatctctc

SEQ ID NO: 5087804 - DNA, 25 bp, Homo sapien
tttgcactttggagcccagtcctga

SEQ ID NO: 5087805 - DNA, 25 bp, Homo sapien
tggaccaaagcagctgtcgatcctt

SEQ ID NO: 5087806 - DNA, 25 bp, Homo sapien
catgtgtgtcctgcaataaatcttc

SEQ ID NO: 5087807 - DNA, 25 bp, Homo sapien
aggaagggtgtttctcattaatagg

SEQ ID NO: 5087808 - DNA, 25 bp, Homo sapien
ggtgtttctcattaataggatcaga

SEQ ID NO: 5087809 - DNA, 25 bp, Homo sapien
aagggtgtttctcattaataggatc

SEQ ID NO: 5087810 - DNA, 25 bp, Homo sapien
gggtgtttctcattaataggatcag

SEQ ID NO: 5087811 - DNA, 25 bp, Homo sapien
aaaccagaacactctcagggggcaa

SEQ ID NO: 5087812 - DNA, 25 bp, Homo sapien
cagaacactctcagggggcaaagaa

SEQ ID NO: 5087813 - DNA, 25 bp, Homo sapien
gtttcaaaccagaacactctcaggg

SEQ ID NO: 5087814 - DNA, 25 bp, Homo sapien
tcttgtttcaaaccagaacactctc

SEQ ID NO: 5087815 - DNA, 25 bp, Homo sapien
caaatggaactgagcataagtatcc

SEQ ID NO: 5087816 - DNA, 25 bp, Homo sapien
cgttcttggacacagtaaaagtttg

SEQ ID NO: 5087817 - DNA, 25 bp, Homo sapien
cctgggtgttcgttctcccattggg

SEQ ID NO: 5087818 - DNA, 25 bp, Homo sapien
cacagtaaaagtttgaaggtcttgg

SEQ ID NO: 5087819 - DNA, 25 bp, Homo sapien
ggtccggtcaagtcctgatgctctt

SEQ ID NO: 5087820 - DNA, 25 bp, Homo sapien
gggtccggtcaagtcctgatgctct

SEQ ID NO: 5087821 - DNA, 25 bp, Homo sapien
aggggtccggtcaagtcctgatgct

SEQ ID NO: 5087822 - DNA, 25 bp, Homo sapien
ggggtccggtcaagtcctgatgctc

SEQ ID NO: 5087823 - DNA, 25 bp, Homo sapien
atctataaaacacctcctgttattc

SEQ ID NO: 5087824 - DNA, 25 bp, Homo sapien
ctataaaacacctcctgttattctc

SEQ ID NO: 5087825 - DNA, 25 bp, Homo sapien
gcatctataaaacacctcctgttat

SEQ ID NO: 5087826 - DNA, 25 bp, Homo sapien
cagcatctataaaacacctcctgtt

SEQ ID NO: 5087827 - DNA, 25 bp, Homo sapien
gcatcatttcgctaaagagctctaa

SEQ ID NO: 5087828 - DNA, 25 bp, Homo sapien
gacaacctgagcatcatttcgctaa

SEQ ID NO: 5087829 - DNA, 25 bp, Homo sapien
ggccctttcgacagtgtgtaccagg

SEQ ID NO: 5087830 - DNA, 25 bp, Homo sapien
tcttccttgagttgcattaccaagg

SEQ ID NO: 5087831 - DNA, 25 bp, Homo sapien
ccagcatctccttttccgctcttct

SEQ ID NO: 5087832 - DNA, 25 bp, Homo sapien
gccagcatctccttttccgctcttc

SEQ ID NO: 5087833 - DNA, 25 bp, Homo sapien
tcgagtcaggatggtaggttctgaa

SEQ ID NO: 5087834 - DNA, 25 bp, Homo sapien
tttgtataaaagtccgtgcattcat

SEQ ID NO: 5087835 - DNA, 25 bp, Homo sapien
ctcgagtcaggatggtaggttctga

SEQ ID NO: 5087836 - DNA, 25 bp, Homo sapien
ctgaaggaagttgaatttgtataaa

SEQ ID NO: 5087837 - DNA, 25 bp, Homo sapien
gactcctggcgtcccttggttcgtc

SEQ ID NO: 5087838 - DNA, 25 bp, Homo sapien
cagttctggagcctgtggtaaccac

SEQ ID NO: 5087839 - DNA, 25 bp, Homo sapien
aatgatctattaaaacagttctgga

SEQ ID NO: 5087840 - DNA, 25 bp, Homo sapien
ttggttcgtcctgacttcctcctta

SEQ ID NO: 5087841 - DNA, 25 bp, Homo sapien
aaaggtatacttgtctggtcctgag

SEQ ID NO: 5087842 - DNA, 25 bp, Homo sapien
ctgaggaaaggtatacttgtctggt

SEQ ID NO: 5087843 - DNA, 25 bp, Homo sapien
ggaaaggtatacttgtctggtcctg

SEQ ID NO: 5087844 - DNA, 25 bp, Homo sapien
gaggaaaggtatacttgtctggtcc

SEQ ID NO: 5087845 - DNA, 25 bp, Homo sapien
tccttctctcttggcgatatgcacc

SEQ ID NO: 5087846 - DNA, 25 bp, Homo sapien
tccgaataaaatcctagttgtcacc

SEQ ID NO: 5087847 - DNA, 25 bp, Homo sapien
tttagggttgtaagccttggccatc

SEQ ID NO: 5087848 - DNA, 25 bp, Homo sapien
tctgtaaccaactggcttccgaata

SEQ ID NO: 5087849 - DNA, 25 bp, Homo sapien
cttctgaactgcctgatggccaaag

SEQ ID NO: 5087850 - DNA, 25 bp, Homo sapien
gtttcggcgcccactcttcgttctg

SEQ ID NO: 5087851 - DNA, 25 bp, Homo sapien
gttctgcgcccctagatgcccatcg

SEQ ID NO: 5087852 - DNA, 25 bp, Homo sapien
agaggctcccggaaagctcggtggg

SEQ ID NO: 5087853 - DNA, 25 bp, Homo sapien
ctagatgcccatcggctgcgggaga

SEQ ID NO: 5087854 - DNA, 25 bp, Homo sapien
tgactgcaaagggaacggaggcccg

SEQ ID NO: 5087855 - DNA, 25 bp, Homo sapien
ggaatggtgtgagccccgtcaccca

SEQ ID NO: 5087856 - DNA, 25 bp, Homo sapien
gaaatgcacctttccggttcccagc

SEQ ID NO: 5087857 - DNA, 25 bp, Homo sapien
gaaagccgggaaggtctggctcatc

SEQ ID NO: 5087858 - DNA, 25 bp, Homo sapien
aggctcaggccggtgcgccgcaggc

SEQ ID NO: 5087859 - DNA, 25 bp, Homo sapien
gcgcccgcgggcagtaatgttgccc

SEQ ID NO: 5087860 - DNA, 25 bp, Homo sapien
ggcagtaatgttgcccgggactggg

SEQ ID NO: 5087861 - DNA, 25 bp, Homo sapien
agccatgcacacaaggcgcccgcgg

SEQ ID NO: 5087862 - DNA, 25 bp, Homo sapien
tcagccattggtgcagcgggaatca

SEQ ID NO: 5087863 - DNA, 25 bp, Homo sapien
cagacgcatccaacatccttcaagt

SEQ ID NO: 5087864 - DNA, 25 bp, Homo sapien
cgcttcagcgctagagcctgcagag

SEQ ID NO: 5087865 - DNA, 25 bp, Homo sapien
gccggcccacaacatactactaagt

SEQ ID NO: 5087866 - DNA, 25 bp, Homo sapien
cgtctgcattgggtggtgctgaaat

SEQ ID NO: 5087867 - DNA, 25 bp, Homo sapien
tgataaactagcagccatgcgtctg

SEQ ID NO: 5087868 - DNA, 25 bp, Homo sapien
tagggcatctcttttgcaggtcaca

SEQ ID NO: 5087869 - DNA, 25 bp, Homo sapien
gcatgtggcattccaaggatcctga

SEQ ID NO: 5087870 - DNA, 25 bp, Homo sapien
tgcagaaacacctctgtgcaaggca

SEQ ID NO: 5087871 - DNA, 25 bp, Homo sapien
ggctgcagaaacacctctgtgcaag

SEQ ID NO: 5087872 - DNA, 25 bp, Homo sapien
cagtacagaagtgagggctgcagaa

SEQ ID NO: 5087873 - DNA, 25 bp, Homo sapien
gtgagggctgcagaaacacctctgt

SEQ ID NO: 5087874 - DNA, 25 bp, Homo sapien
gaacagatgtcaaatccccagccat

SEQ ID NO: 5087875 - DNA, 25 bp, Homo sapien
ccggcaccaattttcatgggaagca

SEQ ID NO: 5087876 - DNA, 25 bp, Homo sapien
catcatcggttgcatctcctgagaa

SEQ ID NO: 5087877 - DNA, 25 bp, Homo sapien
cctttctatcacaagagggctagta

SEQ ID NO: 5087878 - DNA, 25 bp, Homo sapien
catcccatactggtgagtcccagag

SEQ ID NO: 5087879 - DNA, 25 bp, Homo sapien
gcagaaggcactgttaggtcctcca

SEQ ID NO: 5087880 - DNA, 25 bp, Homo sapien
tgcttcctgtatggctccactggat

SEQ ID NO: 5087881 - DNA, 25 bp, Homo sapien
gcactgttaggtcctccaactgact

SEQ ID NO: 5087882 - DNA, 25 bp, Homo sapien
agtgagctccaaggagactgttgcc

SEQ ID NO: 5087883 - DNA, 25 bp, Homo sapien
ctaaggatccagtgagctccaagga

SEQ ID NO: 5087884 - DNA, 25 bp, Homo sapien
tccagtgagctccaaggagactgtt

SEQ ID NO: 5087885 - DNA, 25 bp, Homo sapien
ctccaaggagactgttgccatagca

SEQ ID NO: 5087886 - DNA, 25 bp, Homo sapien
ttgggacaggccagaatcacaggct

SEQ ID NO: 5087887 - DNA, 25 bp, Homo sapien
ccttgggacaggccagaatcacagg

SEQ ID NO: 5087888 - DNA, 25 bp, Homo sapien
aggccagaatcacaggctgtcctcc

SEQ ID NO: 5087889 - DNA, 25 bp, Homo sapien
tcacaggctgtcctcccctccgcat

SEQ ID NO: 5087890 - DNA, 25 bp, Homo sapien
cgggtatgaggtctggagctgactg

SEQ ID NO: 5087891 - DNA, 25 bp, Homo sapien
ggtgtgcgactcagcattttctccc

SEQ ID NO: 5087892 - DNA, 25 bp, Homo sapien
gcccacaaggtgtgcgactcagcat

SEQ ID NO: 5087893 - DNA, 25 bp, Homo sapien
ttcatcaaaggccaagaagcgggta

SEQ ID NO: 5087894 - DNA, 25 bp, Homo sapien
cctttccttatgaagatggaaagct

SEQ ID NO: 5087895 - DNA, 25 bp, Homo sapien
gagactcctttccttatgaagatgg

SEQ ID NO: 5087896 - DNA, 25 bp, Homo sapien
aagatggaaagcttgctgaaggcaa

SEQ ID NO: 5087897 - DNA, 25 bp, Homo sapien
cagtgagactcctttccttatgaag

SEQ ID NO: 5087898 - DNA, 25 bp, Homo sapien
ccaaattcgtaaagacccaaggcag

SEQ ID NO: 5087899 - DNA, 25 bp, Homo sapien
gcttggctgtagcatcagatactgg

SEQ ID NO: 5087900 - DNA, 25 bp, Homo sapien
ttactgcgggtgcattggaagagaa

SEQ ID NO: 5087901 - DNA, 25 bp, Homo sapien
cactgggatcagtgttactgcgggt

SEQ ID NO: 5087902 - DNA, 25 bp, Homo sapien
tcgggtataagtgcttcagccatct

SEQ ID NO: 5087903 - DNA, 25 bp, Homo sapien
tccgtgatcttgcaaacagcattcc

SEQ ID NO: 5087904 - DNA, 25 bp, Homo sapien
tcttacaaccgctctgacctgaagc

SEQ ID NO: 5087905 - DNA, 25 bp, Homo sapien
aaatctgatcttacaaccgctctga

SEQ ID NO: 5087906 - DNA, 25 bp, Homo sapien
cataagccatgggaatctatgggag

SEQ ID NO: 5087907 - DNA, 25 bp, Homo sapien
agggtactgcaatgttgtccctgcc

SEQ ID NO: 5087908 - DNA, 25 bp, Homo sapien
gaatctatgggagggtactgcaatg

SEQ ID NO: 5087909 - DNA, 25 bp, Homo sapien
gcttgtaatatgtcccataagccat

SEQ ID NO: 5087910 - DNA, 25 bp, Homo sapien
aaggccttgatttcctgattattac

SEQ ID NO: 5087911 - DNA, 25 bp, Homo sapien
agatggattagggccaaatttaaag

SEQ ID NO: 5087912 - DNA, 25 bp, Homo sapien
gatctgttgaggatgtgtgggctcc

SEQ ID NO: 5087913 - DNA, 25 bp, Homo sapien
cagcagtgtgatctgttgaggatgt

SEQ ID NO: 5087914 - DNA, 25 bp, Homo sapien
ggctccagatggtcgctcaggtgtt

SEQ ID NO: 5087915 - DNA, 25 bp, Homo sapien
gggctccagatggtcgctcaggtgt

SEQ ID NO: 5087916 - DNA, 25 bp, Homo sapien
agaacctatctgatgcccaagagca

SEQ ID NO: 5087917 - DNA, 25 bp, Homo sapien
catctgggccttctgacaatggtga

SEQ ID NO: 5087918 - DNA, 25 bp, Homo sapien
acaatggtgaagctcgcagaaccta

SEQ ID NO: 5087919 - DNA, 25 bp, Homo sapien
caacactgtggtataagcagcagcc

SEQ ID NO: 5087920 - DNA, 25 bp, Homo sapien
gcagccaagggccagcgtggtagta

SEQ ID NO: 5087921 - DNA, 25 bp, Homo sapien
cagccaagggccagcgtggtagtag

SEQ ID NO: 5087922 - DNA, 25 bp, Homo sapien
caagggccagcgtggtagtaggggg

SEQ ID NO: 5087923 - DNA, 25 bp, Homo sapien
gccaagggccagcgtggtagtaggg

SEQ ID NO: 5087924 - DNA, 25 bp, Homo sapien
agctcagtgtggattagagtgggac

SEQ ID NO: 5087925 - DNA, 25 bp, Homo sapien
aaagaggagtgtttggcctggcatg

SEQ ID NO: 5087926 - DNA, 25 bp, Homo sapien
gtggattagagtgggaccaagcacc

SEQ ID NO: 5087927 - DNA, 25 bp, Homo sapien
tcagtgtggattagagtgggaccaa

SEQ ID NO: 5087928 - DNA, 25 bp, Homo sapien
ccatctggttcactgtaaagaggac

SEQ ID NO: 5087929 - DNA, 25 bp, Homo sapien
ctgtaaagaggactgaggagaactg

SEQ ID NO: 5087930 - DNA, 25 bp, Homo sapien
tggagagacgtttgggtccccatct

SEQ ID NO: 5087931 - DNA, 25 bp, Homo sapien
actggagagacgtttgggtccccat

SEQ ID NO: 5087932 - DNA, 25 bp, Homo sapien
tcgtcgaacctgacgccctgctaag

SEQ ID NO: 5087933 - DNA, 25 bp, Homo sapien
tgacgccctgctaaggttagggcag

SEQ ID NO: 5087934 - DNA, 25 bp, Homo sapien
gaacctgacgccctgctaaggttag

SEQ ID NO: 5087935 - DNA, 25 bp, Homo sapien
gggaatctcgtcgaacctgacgccc

SEQ ID NO: 5087936 - DNA, 25 bp, Homo sapien
tttagaagatgtggggaaatgtctg

SEQ ID NO: 5087937 - DNA, 25 bp, Homo sapien
gagagttggagtccaatttagaaga

SEQ ID NO: 5087938 - DNA, 25 bp, Homo sapien
tcattctggattggaactgggaggt

SEQ ID NO: 5087939 - DNA, 25 bp, Homo sapien
ggacgggagacgttcacatctgcac

SEQ ID NO: 5087940 - DNA, 25 bp, Homo sapien
gagacctcaatctgctggtagcaag

SEQ ID NO: 5087941 - DNA, 25 bp, Homo sapien
caaggactggacagttgtgaccaag

SEQ ID NO: 5087942 - DNA, 25 bp, Homo sapien
ggtgtgttagtcatcaccacagcaa

SEQ ID NO: 5087943 - DNA, 25 bp, Homo sapien
tgccgcatgagtaaaggagtaggac

SEQ ID NO: 5087944 - DNA, 25 bp, Homo sapien
tgttcagctgttcgtattctctttg

SEQ ID NO: 5087945 - DNA, 25 bp, Homo sapien
agctgttcgtattctctttgttcat

SEQ ID NO: 5087946 - DNA, 25 bp, Homo sapien
catttcgttgatttcctgtgaggtt

SEQ ID NO: 5087947 - DNA, 25 bp, Homo sapien
tcagtaagcacgtctgttgttcagc

SEQ ID NO: 5087948 - DNA, 25 bp, Homo sapien
agaacctttcactgtgcttggccat

SEQ ID NO: 5087949 - DNA, 25 bp, Homo sapien
tgaccctggcttggtccttgcatgc

SEQ ID NO: 5087950 - DNA, 25 bp, Homo sapien
tcttccactccttgaccctggcttg

SEQ ID NO: 5087951 - DNA, 25 bp, Homo sapien
ctctaggcttctggaggataagctg

SEQ ID NO: 5087952 - DNA, 25 bp, Homo sapien
ttctggaggataagctgctcttcca

SEQ ID NO: 5087953 - DNA, 25 bp, Homo sapien
tgttgtaacaggaaaatctgttccc

SEQ ID NO: 5087954 - DNA, 25 bp, Homo sapien
ttagagcagtctgatctgccgtccc

SEQ ID NO: 5087955 - DNA, 25 bp, Homo sapien
ccttgccaaacaaacagcactgaaa

SEQ ID NO: 5087956 - DNA, 25 bp, Homo sapien
gagaaagttcccacttagagcctca

SEQ ID NO: 5087957 - DNA, 25 bp, Homo sapien
cccatttctggcacattgatgttca

SEQ ID NO: 5087958 - DNA, 25 bp, Homo sapien
ctgttcccatttctggcacattgat

SEQ ID NO: 5087959 - DNA, 25 bp, Homo sapien
gttcccatttctggcacattgatgt

SEQ ID NO: 5087960 - DNA, 25 bp, Homo sapien
tcccatttctggcacattgatgttc

SEQ ID NO: 5087961 - DNA, 25 bp, Homo sapien
cccagcttgacagcctcgccagctt

SEQ ID NO: 5087962 - DNA, 25 bp, Homo sapien
agcttgacagcctcgccagctttct

SEQ ID NO: 5087963 - DNA, 25 bp, Homo sapien
ttcaagtttatccttatacctggaa

SEQ ID NO: 5087964 - DNA, 25 bp, Homo sapien
gtcctcaggtactccccgccttcaa

SEQ ID NO: 5087965 - DNA, 25 bp, Homo sapien
tcctcccgcttccacagcgggagct

SEQ ID NO: 5087966 - DNA, 25 bp, Homo sapien
atgttcctcccgcttccacagcggg

SEQ ID NO: 5087967 - DNA, 25 bp, Homo sapien
gttcctcccgcttccacagcgggag

SEQ ID NO: 5087968 - DNA, 25 bp, Homo sapien
ccatgttcctcccgcttccacagcg

SEQ ID NO: 5087969 - DNA, 25 bp, Homo sapien
ccagaatctgtttccccagccaggc

SEQ ID NO: 5087970 - DNA, 25 bp, Homo sapien
ggccagaatctgtttccccagccag

SEQ ID NO: 5087971 - DNA, 25 bp, Homo sapien
aggctggacagtgagcggccttctt

SEQ ID NO: 5087972 - DNA, 25 bp, Homo sapien
gctggacagtgagcggccttcttcc

SEQ ID NO: 5087973 - DNA, 25 bp, Homo sapien
gcaaaggctccgagccgggagcctt

SEQ ID NO: 5087974 - DNA, 25 bp, Homo sapien
cacagaaattccaggtatgcgcttc

SEQ ID NO: 5087975 - DNA, 25 bp, Homo sapien
ggtatgcgcttctctgtcagttcct

SEQ ID NO: 5087976 - DNA, 25 bp, Homo sapien
gagtagggatgggagcatcaggcct

SEQ ID NO: 5087977 - DNA, 25 bp, Homo sapien
taaggggagggctatacagagccag

SEQ ID NO: 5087978 - DNA, 25 bp, Homo sapien
ggagggctatacagagccagtgcat

SEQ ID NO: 5087979 - DNA, 25 bp, Homo sapien
ttcagagggaaagcccagggtggta

SEQ ID NO: 5087980 - DNA, 25 bp, Homo sapien
ggtggtaaggggagggctatacaga

SEQ ID NO: 5087981 - DNA, 25 bp, Homo sapien
tccaataccaatctggcacttgctg

SEQ ID NO: 5087982 - DNA, 25 bp, Homo sapien
ccacttcctgtgacacccttccaat

SEQ ID NO: 5087983 - DNA, 25 bp, Homo sapien
tgcagggggctcttcacctctctga

SEQ ID NO: 5087984 - DNA, 25 bp, Homo sapien
tgggctctctctagaacttcagtaa

SEQ ID NO: 5087985 - DNA, 25 bp, Homo sapien
aaatgaagacttgagctttgaatga

SEQ ID NO: 5087986 - DNA, 25 bp, Homo sapien
cctccagcgcttcttgggctctctc

SEQ ID NO: 5087987 - DNA, 25 bp, Homo sapien
caagttcagttcccacaggtgcacg

SEQ ID NO: 5087988 - DNA, 25 bp, Homo sapien
cccacaggtgcacgggcccactctc

SEQ ID NO: 5087989 - DNA, 25 bp, Homo sapien
cagcaaaagacaagttcagttccca

SEQ ID NO: 5087990 - DNA, 25 bp, Homo sapien
ttcagttcccacaggtgcacgggcc

SEQ ID NO: 5087991 - DNA, 25 bp, Homo sapien
tccttcctctgctccatcctgttcc

SEQ ID NO: 5087992 - DNA, 25 bp, Homo sapien
ttcctctgctccatcctgttcccca

SEQ ID NO: 5087993 - DNA, 25 bp, Homo sapien
ctccttcctctgctccatcctgttc

SEQ ID NO: 5087994 - DNA, 25 bp, Homo sapien
tcagttctctccttcctctgctcca

SEQ ID NO: 5087995 - DNA, 25 bp, Homo sapien
actggaaatggagttccactgtagg

SEQ ID NO: 5087996 - DNA, 25 bp, Homo sapien
aatggagttccactgtaggccggca

SEQ ID NO: 5087997 - DNA, 25 bp, Homo sapien
cctgtgagccttttaggatgtaatt

SEQ ID NO: 5087998 - DNA, 25 bp, Homo sapien
aaagccatttgtctagcagtaataa

SEQ ID NO: 5087999 - DNA, 25 bp, Homo sapien
gttgaatgccttatggtttacaaag

SEQ ID NO: 5088000 - DNA, 25 bp, Homo sapien
cccaggttacattcgtaggatgcca

SEQ ID NO: 5088001 - DNA, 25 bp, Homo sapien
tacattcgtaggatgccactaacat

SEQ ID NO: 5088002 - DNA, 25 bp, Homo sapien
tacaaagcccaggttacattcgtag

SEQ ID NO: 5088003 - DNA, 25 bp, Homo sapien
tctggccgctggctgattcgccttt

SEQ ID NO: 5088004 - DNA, 25 bp, Homo sapien
aacacacaaagtgtaagatggagcg

SEQ ID NO: 5088005 - DNA, 25 bp, Homo sapien
aatcaagttgaaggatgtgacccgc

SEQ ID NO: 5088006 - DNA, 25 bp, Homo sapien
ccgatcccgtgtctgagctccatta

SEQ ID NO: 5088007 - DNA, 25 bp, Homo sapien
tgggcgcacagaggcctgccgacgt

SEQ ID NO: 5088008 - DNA, 25 bp, Homo sapien
ggcctgccgacgtctattacatgga

SEQ ID NO: 5088009 - DNA, 25 bp, Homo sapien
gtctattacatggagaaacatctgt

SEQ ID NO: 5088010 - DNA, 25 bp, Homo sapien
aaacatctgttttctgcagaacatc

SEQ ID NO: 5088011 - DNA, 25 bp, Homo sapien
agaggaaaggacagcaagagctgct

SEQ ID NO: 5088012 - DNA, 25 bp, Homo sapien
gaaaggacagcaagagctgcttcgc

SEQ ID NO: 5088013 - DNA, 25 bp, Homo sapien
cctgcctggtggtatttgcatgttt

SEQ ID NO: 5088014 - DNA, 25 bp, Homo sapien
tggtggtatttgcatgtttcagagg

SEQ ID NO: 5088015 - DNA, 25 bp, Homo sapien
ccagcggaaagtaggtgagggcgtt

SEQ ID NO: 5088016 - DNA, 25 bp, Homo sapien
gggttggcggcagctcatttttcca

SEQ ID NO: 5088017 - DNA, 25 bp, Homo sapien
ccagcatgggttggcggcagctcat

SEQ ID NO: 5088018 - DNA, 25 bp, Homo sapien
tggagtcagccagcggaaagtaggt

SEQ ID NO: 5088019 - DNA, 25 bp, Homo sapien
tgccaaacatggacacggttgtcat

SEQ ID NO: 5088020 - DNA, 25 bp, Homo sapien
ctgccaaacatggacacggttgtca

SEQ ID NO: 5088021 - DNA, 25 bp, Homo sapien
cacctccacacgctggcaaagtctg

SEQ ID NO: 5088022 - DNA, 25 bp, Homo sapien
acctccacacgctggcaaagtctgg

SEQ ID NO: 5088023 - DNA, 25 bp, Homo sapien
ctggatgcttggactcagctgctgc

SEQ ID NO: 5088024 - DNA, 25 bp, Homo sapien
ggatgcttggactcagctgctgcag

SEQ ID NO: 5088025 - DNA, 25 bp, Homo sapien
ctcagaggctctggacgagcccttc

SEQ ID NO: 5088026 - DNA, 25 bp, Homo sapien
gcagctcagaggctctggacgagcc

SEQ ID NO: 5088027 - DNA, 25 bp, Homo sapien
cctaggctatgtctgttcttgctcc

SEQ ID NO: 5088028 - DNA, 25 bp, Homo sapien
gctcctcgtctcagattctgggcca

SEQ ID NO: 5088029 - DNA, 25 bp, Homo sapien
ggcatcctgggggtcacctaggcta

SEQ ID NO: 5088030 - DNA, 25 bp, Homo sapien
cttgctcctcgtctcagattctggg

SEQ ID NO: 5088031 - DNA, 25 bp, Homo sapien
gtggtggctgttggtggccttgggt

SEQ ID NO: 5088032 - DNA, 25 bp, Homo sapien
gtggctgttggtggccttgggtata

SEQ ID NO: 5088033 - DNA, 25 bp, Homo sapien
ctgtggtggctgttggtggccttgg

SEQ ID NO: 5088034 - DNA, 25 bp, Homo sapien
ggctgttggtggccttgggtataac

SEQ ID NO: 5088035 - DNA, 25 bp, Homo sapien
ccatgtactgctctagaagagcctt

SEQ ID NO: 5088036 - DNA, 25 bp, Homo sapien
tgctcattcccaggatactccatgt

SEQ ID NO: 5088037 - DNA, 25 bp, Homo sapien
gatactccatgtactgctctagaag

SEQ ID NO: 5088038 - DNA, 25 bp, Homo sapien
cattcccaggatactccatgtactg

SEQ ID NO: 5088039 - DNA, 25 bp, Homo sapien
aggcaacctggacctgtcctcgcgg

SEQ ID NO: 5088040 - DNA, 25 bp, Homo sapien
tgggagagcggacaagaccctgccc

SEQ ID NO: 5088041 - DNA, 25 bp, Homo sapien
tgagcccctagttgcaggcaacctg

SEQ ID NO: 5088042 - DNA, 25 bp, Homo sapien
aatggtggctggtgagcccctagtt

SEQ ID NO: 5088043 - DNA, 25 bp, Homo sapien
gatggactgaggatactcgcggagg

SEQ ID NO: 5088044 - DNA, 25 bp, Homo sapien
ggactgaggatactcgcggaggatg

SEQ ID NO: 5088045 - DNA, 25 bp, Homo sapien
gatactcgcggaggatggactgagg

SEQ ID NO: 5088046 - DNA, 25 bp, Homo sapien
tgaactgaggatactcgcggaggat

SEQ ID NO: 5088047 - DNA, 25 bp, Homo sapien
tgaactgaggatactcgcggaggat

SEQ ID NO: 5088048 - DNA, 25 bp, Homo sapien
aggatgaactgaggatactcgcgga

SEQ ID NO: 5088049 - DNA, 25 bp, Homo sapien
gatgaactgaggatactcgcggagg

SEQ ID NO: 5088050 - DNA, 25 bp, Homo sapien
atgaactgaggatactcgcggagga

SEQ ID NO: 5088051 - DNA, 25 bp, Homo sapien
tacgagtgttttagccccttgggca

SEQ ID NO: 5088052 - DNA, 25 bp, Homo sapien
cccgtggattggagatcaaagagcc

SEQ ID NO: 5088053 - DNA, 25 bp, Homo sapien
cacagacattgtcgcattggagggc

SEQ ID NO: 5088054 - DNA, 25 bp, Homo sapien
gaggagcagcctaaactgggagccc

SEQ ID NO: 5088055 - DNA, 25 bp, Homo sapien
ctgcctggaatgcacagtggtccag

SEQ ID NO: 5088056 - DNA, 25 bp, Homo sapien
catgtctgagacatctgcctggaat

SEQ ID NO: 5088057 - DNA, 25 bp, Homo sapien
tgtctgagacatctgcctggaatgc

SEQ ID NO: 5088058 - DNA, 25 bp, Homo sapien
ctcatgtctgagacatctgcctgga

SEQ ID NO: 5088059 - DNA, 25 bp, Homo sapien
caggatcttggatgttgatgaaatc

SEQ ID NO: 5088060 - DNA, 25 bp, Homo sapien
cttggatgttgatgaaatctgtgtt

SEQ ID NO: 5088061 - DNA, 25 bp, Homo sapien
tgcaggatcttggatgttgatgaaa

SEQ ID NO: 5088062 - DNA, 25 bp, Homo sapien
ggatcttggatgttgatgaaatctg

SEQ ID NO: 5088063 - DNA, 25 bp, Homo sapien
tgtttaactttttgtgctccaaagc

SEQ ID NO: 5088064 - DNA, 25 bp, Homo sapien
taaacacatgggcaggagaacagag

SEQ ID NO: 5088065 - DNA, 25 bp, Homo sapien
gagaacagagcatggttaacatgtt

SEQ ID NO: 5088066 - DNA, 25 bp, Homo sapien
aacacactgacatgtttacaatgtg

SEQ ID NO: 5088067 - DNA, 25 bp, Homo sapien
gggggcacgagagacttgtgagcag

SEQ ID NO: 5088068 - DNA, 25 bp, Homo sapien
cacgagagacttgtgagcagggagc

SEQ ID NO: 5088069 - DNA, 25 bp, Homo sapien
gcacgagagacttgtgagcagggag

SEQ ID NO: 5088070 - DNA, 25 bp, Homo sapien
gcagggggcacgagagacttgtgag

SEQ ID NO: 5088071 - DNA, 25 bp, Homo sapien
tttgggcagagacacttataagagt

SEQ ID NO: 5088072 - DNA, 25 bp, Homo sapien
aggaaccttgatggcggactatgga

SEQ ID NO: 5088073 - DNA, 25 bp, Homo sapien
atggaacaggaaccttgatggcgga

SEQ ID NO: 5088074 - DNA, 25 bp, Homo sapien
gacacttataagagtaacctggtta

SEQ ID NO: 5088075 - DNA, 25 bp, Homo sapien
caaatctgggacaaacagatccaga

SEQ ID NO: 5088076 - DNA, 25 bp, Homo sapien
aaagccagttcctcgcctgcagttc

SEQ ID NO: 5088077 - DNA, 25 bp, Homo sapien
cagatccagaaaagcggtatcctaa

SEQ ID NO: 5088078 - DNA, 25 bp, Homo sapien
aagcggtatcctaagaagctgatcc

SEQ ID NO: 5088079 - DNA, 25 bp, Homo sapien
gaccttagccattgcctctgatgtt

SEQ ID NO: 5088080 - DNA, 25 bp, Homo sapien
gctttgggggaccttagccattgcc

SEQ ID NO: 5088081 - DNA, 25 bp, Homo sapien
tgatgttcagaacctaagacggggt

SEQ ID NO: 5088082 - DNA, 25 bp, Homo sapien
ttgtcctgggaaattgccagcgtgc

SEQ ID NO: 5088083 - DNA, 25 bp, Homo sapien
ccccaagagcaggagagtgcttcaa

SEQ ID NO: 5088084 - DNA, 25 bp, Homo sapien
tgtgttttcagcctggagtttcttc

SEQ ID NO: 5088085 - DNA, 25 bp, Homo sapien
ctgttggccttgcagttgtgttttc

SEQ ID NO: 5088086 - DNA, 25 bp, Homo sapien
tggtgtgtaaagaccagagcctggt

SEQ ID NO: 5088087 - DNA, 25 bp, Homo sapien
ctagagacaggacagactctttctg

SEQ ID NO: 5088088 - DNA, 25 bp, Homo sapien
gacaggacagactctttctggcctc

SEQ ID NO: 5088089 - DNA, 25 bp, Homo sapien
cagactctttctggcctcgtggtga

SEQ ID NO: 5088090 - DNA, 25 bp, Homo sapien
ctctttctggcctcgtggtgaggga

SEQ ID NO: 5088091 - DNA, 25 bp, Homo sapien
tgtcagtggagcagggacagtcgtt

SEQ ID NO: 5088092 - DNA, 25 bp, Homo sapien
tcgttgggactaagaaactcagaag

SEQ ID NO: 5088093 - DNA, 25 bp, Homo sapien
gatgcgcacagctcacaaagctgtg

SEQ ID NO: 5088094 - DNA, 25 bp, Homo sapien
caaagctgtgtatggaaggtgtcag

SEQ ID NO: 5088095 - DNA, 25 bp, Homo sapien
tggaaacgccagaaattagtgtaat

SEQ ID NO: 5088096 - DNA, 25 bp, Homo sapien
cacggatagcttctggtgtaatgaa

SEQ ID NO: 5088097 - DNA, 25 bp, Homo sapien
gataaagttctctctattggtccag

SEQ ID NO: 5088098 - DNA, 25 bp, Homo sapien
ggatagggccttaaacacggatagc

SEQ ID NO: 5088099 - DNA, 25 bp, Homo sapien
aacgaggtttctattgctcttgcca

SEQ ID NO: 5088100 - DNA, 25 bp, Homo sapien
gtgcctgtaacacccataacgaggt

SEQ ID NO: 5088101 - DNA, 25 bp, Homo sapien
cccataacgaggtttctattgctct

SEQ ID NO: 5088102 - DNA, 25 bp, Homo sapien
cacgccccctaggttaattgaggtg

SEQ ID NO: 5088103 - DNA, 25 bp, Homo sapien
gagactggggccccacgtcactgag

SEQ ID NO: 5088104 - DNA, 25 bp, Homo sapien
ggaggagactggggccccacgtcac

SEQ ID NO: 5088105 - DNA, 25 bp, Homo sapien
agactggggccccacgtcactgagc

SEQ ID NO: 5088106 - DNA, 25 bp, Homo sapien
aggagactggggccccacgtcactg

SEQ ID NO: 5088107 - DNA, 25 bp, Homo sapien
gggcgtcagccacgcgaacagagct

SEQ ID NO: 5088108 - DNA, 25 bp, Homo sapien
ggggaggggcgtcagccacgcgaac

SEQ ID NO: 5088109 - DNA, 25 bp, Homo sapien
tgaacagagccaattgagcccccct

SEQ ID NO: 5088110 - DNA, 25 bp, Homo sapien
ccctggtaagtctggggcacagaat

SEQ ID NO: 5088111 - DNA, 25 bp, Homo sapien
aggcagtcgagtggccacgctggct

SEQ ID NO: 5088112 - DNA, 25 bp, Homo sapien
ctgctgattccttctgccaaggggg

SEQ ID NO: 5088113 - DNA, 25 bp, Homo sapien
gtctgggtcaggcagtcgagtggcc

SEQ ID NO: 5088114 - DNA, 25 bp, Homo sapien
tgggtcaggcagtcgagtggccacg

SEQ ID NO: 5088115 - DNA, 25 bp, Homo sapien
gcagaggcagctcggtctttctttt

SEQ ID NO: 5088116 - DNA, 25 bp, Homo sapien
aggctctgaaagccataggcagagg

SEQ ID NO: 5088117 - DNA, 25 bp, Homo sapien
aaaggctctgaaagccataggcaga

SEQ ID NO: 5088118 - DNA, 25 bp, Homo sapien
ggcagctcggtctttcttttcccaa

SEQ ID NO: 5088119 - DNA, 25 bp, Homo sapien
gccatttacaacttccatgaagata

SEQ ID NO: 5088120 - DNA, 25 bp, Homo sapien
tgcaaagccttggaggagaagctct

SEQ ID NO: 5088121 - DNA, 25 bp, Homo sapien
tgtggactgactctgctttctgcaa

SEQ ID NO: 5088122 - DNA, 25 bp, Homo sapien
catttacaacttccatgaagataga

SEQ ID NO: 5088123 - DNA, 25 bp, Homo sapien
ccgggtatgattgaaatgctaaggc

SEQ ID NO: 5088124 - DNA, 25 bp, Homo sapien
gtcactgaaattagtccgggtatga

SEQ ID NO: 5088125 - DNA, 25 bp, Homo sapien
taaaaacgaaatccctgagcagtca

SEQ ID NO: 5088126 - DNA, 25 bp, Homo sapien
agctgacagcccttaagtgatctaa

SEQ ID NO: 5088127 - DNA, 25 bp, Homo sapien
agttgtgtagtcactgtccaaatca

SEQ ID NO: 5088128 - DNA, 25 bp, Homo sapien
ttgagttgtgtagtcactgtccaaa

SEQ ID NO: 5088129 - DNA, 25 bp, Homo sapien
actcgtactgcaggccaactccttg

SEQ ID NO: 5088130 - DNA, 25 bp, Homo sapien
gctgaatactgactcgtactgcagg

SEQ ID NO: 5088131 - DNA, 25 bp, Homo sapien
taaaagactctgaacttcatgagaa

SEQ ID NO: 5088132 - DNA, 25 bp, Homo sapien
gactctgaacttcatgagaagcctt

SEQ ID NO: 5088133 - DNA, 25 bp, Homo sapien
tgatagtaaaagactctgaacttca

SEQ ID NO: 5088134 - DNA, 25 bp, Homo sapien
tgaacttcatgagaagccttcttcc

SEQ ID NO: 5088135 - DNA, 25 bp, Homo sapien
tcagtcaacagaccctcctatcttc

SEQ ID NO: 5088136 - DNA, 25 bp, Homo sapien
tctctgtgatcatgtctttaaggac

SEQ ID NO: 5088137 - DNA, 25 bp, Homo sapien
aacagaccctcctatcttctctgtg

SEQ ID NO: 5088138 - DNA, 25 bp, Homo sapien
tcatgtctttaaggacctgggagca

SEQ ID NO: 5088139 - DNA, 25 bp, Homo sapien
gagaggcctagaacagatcgttccc

SEQ ID NO: 5088140 - DNA, 25 bp, Homo sapien
tatgctgccacaaaccgagaaacta

SEQ ID NO: 5088141 - DNA, 25 bp, Homo sapien
tccctagtgccctcaaaaggaacca

SEQ ID NO: 5088142 - DNA, 25 bp, Homo sapien
gggataaattctgcttggtcaaggg

SEQ ID NO: 5088143 - DNA, 25 bp, Homo sapien
ctttgttgacacagtagggctgggc

SEQ ID NO: 5088144 - DNA, 25 bp, Homo sapien
caaaaggatatacgtattgacccca

SEQ ID NO: 5088145 - DNA, 25 bp, Homo sapien
tcaaatgaatggctcgaaacacttc

SEQ ID NO: 5088146 - DNA, 25 bp, Homo sapien
catctgccttgctggacttgtatgg

SEQ ID NO: 5088147 - DNA, 25 bp, Homo sapien
gctttatcagaggaggaggatttgc

SEQ ID NO: 5088148 - DNA, 25 bp, Homo sapien
ttttttccctcttatgaccactggc

SEQ ID NO: 5088149 - DNA, 25 bp, Homo sapien
atgctttatcagaggaggaggattt

SEQ ID NO: 5088150 - DNA, 25 bp, Homo sapien
ctttatcagaggaggaggatttgca

SEQ ID NO: 5088151 - DNA, 25 bp, Homo sapien
tatcagattgcagtggacaaaaacc

SEQ ID NO: 5088152 - DNA, 25 bp, Homo sapien
gggcaaggcagacatttaggattta

SEQ ID NO: 5088153 - DNA, 25 bp, Homo sapien
ccatatcgacctgtatccactaggg

SEQ ID NO: 5088154 - DNA, 25 bp, Homo sapien
gactacctatgtggtctacagaagc

SEQ ID NO: 5088155 - DNA, 25 bp, Homo sapien
agcaatggaaacattgtctactgtg

SEQ ID NO: 5088156 - DNA, 25 bp, Homo sapien
gaaacattgtctactgtggtcggga

SEQ ID NO: 5088157 - DNA, 25 bp, Homo sapien
tactgtggtcgggatgacttttgtc

SEQ ID NO: 5088158 - DNA, 25 bp, Homo sapien
atgacttttgtcttgccttgagttc

SEQ ID NO: 5088159 - DNA, 25 bp, Homo sapien
tatttcaagtgacagatctgcatca

SEQ ID NO: 5088160 - DNA, 25 bp, Homo sapien
caaatttgtcactagagatgaatgg

SEQ ID NO: 5088161 - DNA, 25 bp, Homo sapien
catgtaagtcttaagccagaatctt

SEQ ID NO: 5088162 - DNA, 25 bp, Homo sapien
gcctcattgtgacccctaacctatg

SEQ ID NO: 5088163 - DNA, 25 bp, Homo sapien
ttgctggacatttgaccacctggga

SEQ ID NO: 5088164 - DNA, 25 bp, Homo sapien
tgctggacatttgaccacctgggat

SEQ ID NO: 5088165 - DNA, 25 bp, Homo sapien
gctggacatttgaccacctgggata

SEQ ID NO: 5088166 - DNA, 25 bp, Homo sapien
ttaggcttgccattaatgaacatag

SEQ ID NO: 5088167 - DNA, 25 bp, Homo sapien
ggtatgtccccatgagaagctctat

SEQ ID NO: 5088168 - DNA, 25 bp, Homo sapien
tgcaggaagggtttgaattaaggac

SEQ ID NO: 5088169 - DNA, 25 bp, Homo sapien
tgtaccacatgttagtaaattcctg

SEQ ID NO: 5088170 - DNA, 25 bp, Homo sapien
cttggttgattcttacaaaggcacc

SEQ ID NO: 5088171 - DNA, 25 bp, Homo sapien
ttccatgtaacaaggtgctgtagat

SEQ ID NO: 5088172 - DNA, 25 bp, Homo sapien
caaaggcaccaaacatgttgtataa

SEQ ID NO: 5088173 - DNA, 25 bp, Homo sapien
tatttgctgcaatacagctgtatcc

SEQ ID NO: 5088174 - DNA, 25 bp, Homo sapien
ttccttgataatctcttcatccact

SEQ ID NO: 5088175 - DNA, 25 bp, Homo sapien
tccttgataatctcttcatccactt

SEQ ID NO: 5088176 - DNA, 25 bp, Homo sapien
tttccttgataatctcttcatccac

SEQ ID NO: 5088177 - DNA, 25 bp, Homo sapien
cccactcttaaacttagacaacact

SEQ ID NO: 5088178 - DNA, 25 bp, Homo sapien
tccccactcttaaacttagacaaca

SEQ ID NO: 5088179 - DNA, 25 bp, Homo sapien
gctgctgccatcattgccattgtca

SEQ ID NO: 5088180 - DNA, 25 bp, Homo sapien
aaaccatgctgctgccatcattgcc

SEQ ID NO: 5088181 - DNA, 25 bp, Homo sapien
tgccatcattgccattgtcatattc

SEQ ID NO: 5088182 - DNA, 25 bp, Homo sapien
atgctgctgccatcattgccattgt

SEQ ID NO: 5088183 - DNA, 25 bp, Homo sapien
tcagttagttgaattaaagactttg

SEQ ID NO: 5088184 - DNA, 25 bp, Homo sapien
cagttagttgaattaaagactttgg

SEQ ID NO: 5088185 - DNA, 25 bp, Homo sapien
tgtaattctagacgtgaccttgggt

SEQ ID NO: 5088186 - DNA, 25 bp, Homo sapien
ggtacatgaaagatagccaacatca

SEQ ID NO: 5088187 - DNA, 25 bp, Homo sapien
gtcttgatttacttcagctccgtct

SEQ ID NO: 5088188 - DNA, 25 bp, Homo sapien
tggttgataggaattccctggtatt

SEQ ID NO: 5088189 - DNA, 25 bp, Homo sapien
tccttttccaaactatagtagaata

SEQ ID NO: 5088190 - DNA, 25 bp, Homo sapien
tccaaactatagtagaatattaagt

SEQ ID NO: 5088191 - DNA, 25 bp, Homo sapien
tagtagaatattaagtcctaaagga

SEQ ID NO: 5088192 - DNA, 25 bp, Homo sapien
caaactatagtagaatattaagtcc

SEQ ID NO: 5088193 - DNA, 25 bp, Homo sapien
gcagttctaatgcttaaaggcagga

SEQ ID NO: 5088194 - DNA, 25 bp, Homo sapien
gtaactctcactgcatggccaaaag

SEQ ID NO: 5088195 - DNA, 25 bp, Homo sapien
aagtccagtgattggccatctgcaa

SEQ ID NO: 5088196 - DNA, 25 bp, Homo sapien
gaagctggcagtagggctcagtcca

SEQ ID NO: 5088197 - DNA, 25 bp, Homo sapien
gaacggagggatgttcagtctatcc

SEQ ID NO: 5088198 - DNA, 25 bp, Homo sapien
gatgcatgtcgagaggaaatggtcc

SEQ ID NO: 5088199 - DNA, 25 bp, Homo sapien
cagtctatccggagggatgcatgtc

SEQ ID NO: 5088200 - DNA, 25 bp, Homo sapien
gatttcaacccggatcctcttcgca

SEQ ID NO: 5088201 - DNA, 25 bp, Homo sapien
tccggctccggactgcgggaaagcg

SEQ ID NO: 5088202 - DNA, 25 bp, Homo sapien
tgtccgtgtttggagcaagtctctc

SEQ ID NO: 5088203 - DNA, 25 bp, Homo sapien
gagctgtcggctccgctgcaagccg

SEQ ID NO: 5088204 - DNA, 25 bp, Homo sapien
agaagacgagctgtcggctccgctg

SEQ ID NO: 5088205 - DNA, 25 bp, Homo sapien
actccctacaccttgtggcgttgcg

SEQ ID NO: 5088206 - DNA, 25 bp, Homo sapien
gggcgattctcagccagtgcatgta

SEQ ID NO: 5088207 - DNA, 25 bp, Homo sapien
gtgcatgtatttcctcgccgggttc

SEQ ID NO: 5088208 - DNA, 25 bp, Homo sapien
ggcaggaatgaagaaccgacggccc

SEQ ID NO: 5088209 - DNA, 25 bp, Homo sapien
taagaaggccattgaacactaccat

SEQ ID NO: 5088210 - DNA, 25 bp, Homo sapien
ggcatcgtgaaagacagccagctcg

SEQ ID NO: 5088211 - DNA, 25 bp, Homo sapien
gcacacatcggtgacgaactcgtcg

SEQ ID NO: 5088212 - DNA, 25 bp, Homo sapien
gatgcgcgagtcgtccacattgagg

SEQ ID NO: 5088213 - DNA, 25 bp, Homo sapien
tggagcttccctgtgaaaccgtaac

SEQ ID NO: 5088214 - DNA, 25 bp, Homo sapien
cactgcatgcttcactaggagggat

SEQ ID NO: 5088215 - DNA, 25 bp, Homo sapien
tacgcatgtggcttgttggagcttc

SEQ ID NO: 5088216 - DNA, 25 bp, Homo sapien
ggtttcaggcagactacatcacagc

SEQ ID NO: 5088217 - DNA, 25 bp, Homo sapien
taagtgtctacatcagggtgtccaa

SEQ ID NO: 5088218 - DNA, 25 bp, Homo sapien
cacctgtgtggaacctaattgctag

SEQ ID NO: 5088219 - DNA, 25 bp, Homo sapien
cctaattgctagttaagtgtctaca

SEQ ID NO: 5088220 - DNA, 25 bp, Homo sapien
tcttaacacactaatggtaccacct

SEQ ID NO: 5088221 - DNA, 25 bp, Homo sapien
ccccatatctaccaacagtgctaga

SEQ ID NO: 5088222 - DNA, 25 bp, Homo sapien
cagtgctagaccatagtaggtacta

SEQ ID NO: 5088223 - DNA, 25 bp, Homo sapien
ttgtgttaccaaaccccatatctac

SEQ ID NO: 5088224 - DNA, 25 bp, Homo sapien
tctaccaacagtgctagaccatagt

SEQ ID NO: 5088225 - DNA, 25 bp, Homo sapien
agacttgacggagattcttcagctt

SEQ ID NO: 5088226 - DNA, 25 bp, Homo sapien
aattcagacttgacggagattcttc

SEQ ID NO: 5088227 - DNA, 25 bp, Homo sapien
gaaattcagacttgacggagattct

SEQ ID NO: 5088228 - DNA, 25 bp, Homo sapien
cagacttgacggagattcttcagct

SEQ ID NO: 5088229 - DNA, 25 bp, Homo sapien
tatgagttcaggcgccggaatttga

SEQ ID NO: 5088230 - DNA, 25 bp, Homo sapien
tcgtttcttgttgctgccaactaca

SEQ ID NO: 5088231 - DNA, 25 bp, Homo sapien
tatctaaagccctgatgagaatttg

SEQ ID NO: 5088232 - DNA, 25 bp, Homo sapien
agggttttgtatctaaagccctgat

SEQ ID NO: 5088233 - DNA, 25 bp, Homo sapien
tgaaacccctggaagctttgtctga

SEQ ID NO: 5088234 - DNA, 25 bp, Homo sapien
tctggagttattttagcctaagtga

SEQ ID NO: 5088235 - DNA, 25 bp, Homo sapien
gaagctttgtctgaacatgcttcaa

SEQ ID NO: 5088236 - DNA, 25 bp, Homo sapien
gcctgctctggagttattttagcct

SEQ ID NO: 5088237 - DNA, 25 bp, Homo sapien
gggagataggttcatacaccttaca

SEQ ID NO: 5088238 - DNA, 25 bp, Homo sapien
aacctctttgatcacagagacctga

SEQ ID NO: 5088239 - DNA, 25 bp, Homo sapien
aagtcaatctggcaaacgctggtca

SEQ ID NO: 5088240 - DNA, 25 bp, Homo sapien
tctctcagctacctaaactggttga

SEQ ID NO: 5088241 - DNA, 25 bp, Homo sapien
caggcgtgagctgtccaacattttc

SEQ ID NO: 5088242 - DNA, 25 bp, Homo sapien
ctggctcaaaatattaccaagaagc

SEQ ID NO: 5088243 - DNA, 25 bp, Homo sapien
gagcgcagtggcgtaacatcggctc

SEQ ID NO: 5088244 - DNA, 25 bp, Homo sapien
tgccaactagcagaacccacattaa

SEQ ID NO: 5088245 - DNA, 25 bp, Homo sapien
cactctcttcagttatggaagaaag

SEQ ID NO: 5088246 - DNA, 25 bp, Homo sapien
tttttaaagttcatacaggtgtgtg

SEQ ID NO: 5088247 - DNA, 25 bp, Homo sapien
aaaatcctcctcatgtgttggcctt

SEQ ID NO: 5088248 - DNA, 25 bp, Homo sapien
gagaataccctagtgcaaataccca

SEQ ID NO: 5088249 - DNA, 25 bp, Homo sapien
tgacccaaaagtccatcttttcctg

SEQ ID NO: 5088250 - DNA, 25 bp, Homo sapien
ctggtttgacagagtcctcttgacc

SEQ ID NO: 5088251 - DNA, 25 bp, Homo sapien
cctcttgacccaaaagtccatcttt

SEQ ID NO: 5088252 - DNA, 25 bp, Homo sapien
gtttgacagagtcctcttgacccaa

SEQ ID NO: 5088253 - DNA, 25 bp, Homo sapien
gagcagtgccagatgacaagcagag

SEQ ID NO: 5088254 - DNA, 25 bp, Homo sapien
cggagacccctgggaattctgagca

SEQ ID NO: 5088255 - DNA, 25 bp, Homo sapien
ccggagacccctgggaattctgagc

SEQ ID NO: 5088256 - DNA, 25 bp, Homo sapien
tgagcagtgccagatgacaagcaga

SEQ ID NO: 5088257 - DNA, 25 bp, Homo sapien
ctccttccttccccaaccagcagtg

SEQ ID NO: 5088258 - DNA, 25 bp, Homo sapien
tccttccttccccaaccagcagtga

SEQ ID NO: 5088259 - DNA, 25 bp, Homo sapien
cttccttccccaaccagcagtgact

SEQ ID NO: 5088260 - DNA, 25 bp, Homo sapien
ttccttccccaaccagcagtgactg

SEQ ID NO: 5088261 - DNA, 25 bp, Homo sapien
caggtctctgctgaaatgtcgcctt

SEQ ID NO: 5088262 - DNA, 25 bp, Homo sapien
attaaactgtctccagtttctcctt

SEQ ID NO: 5088263 - DNA, 25 bp, Homo sapien
gtttctcctttcaggtctctgctga

SEQ ID NO: 5088264 - DNA, 25 bp, Homo sapien
ctcctttcaggtctctgctgaaatg

SEQ ID NO: 5088265 - DNA, 25 bp, Homo sapien
ctaccccttcagaacttccgtggtg

SEQ ID NO: 5088266 - DNA, 25 bp, Homo sapien
ttcactgcccatctgaagcggttgt

SEQ ID NO: 5088267 - DNA, 25 bp, Homo sapien
ctgcccatctgaagcggttgtgtct

SEQ ID NO: 5088268 - DNA, 25 bp, Homo sapien
ccttcagaacttccgtggtgtcctg

SEQ ID NO: 5088269 - DNA, 25 bp, Homo sapien
tgagaaaccttccactcgtctaggc

SEQ ID NO: 5088270 - DNA, 25 bp, Homo sapien
tagccctggtctgtgaatggtagcc

SEQ ID NO: 5088271 - DNA, 25 bp, Homo sapien
tcgtctaggcctcaacaaggatgaa

SEQ ID NO: 5088272 - DNA, 25 bp, Homo sapien
catgactggcttcggatccaaaaga

SEQ ID NO: 5088273 - DNA, 25 bp, Homo sapien
ggttatcagaagtgtaattctcttt

SEQ ID NO: 5088274 - DNA, 25 bp, Homo sapien
ttaggttatcagaagtgtaattctc

SEQ ID NO: 5088275 - DNA, 25 bp, Homo sapien
ttagcgaatatttaggttatcagaa

SEQ ID NO: 5088276 - DNA, 25 bp, Homo sapien
cgaatatttaggttatcagaagtgt

SEQ ID NO: 5088277 - DNA, 25 bp, Homo sapien
ttttagcctactggcagaagtcggc

SEQ ID NO: 5088278 - DNA, 25 bp, Homo sapien
taacctctaacacagggtctggtgg

SEQ ID NO: 5088279 - DNA, 25 bp, Homo sapien
agtcggctggcctttatcaagcctg

SEQ ID NO: 5088280 - DNA, 25 bp, Homo sapien
cgtttggttcaccatgtcgcaagca

SEQ ID NO: 5088281 - DNA, 25 bp, Homo sapien
agaaaatgagtaagaaatcatgtta

SEQ ID NO: 5088282 - DNA, 25 bp, Homo sapien
aaagaaaatgagtaagaaatcatgt

SEQ ID NO: 5088283 - DNA, 25 bp, Homo sapien
aaaaagaaaatgagtaagaaatcat

SEQ ID NO: 5088284 - DNA, 25 bp, Homo sapien
tcaaacatcattttgaaaaagaaaa

SEQ ID NO: 5088285 - DNA, 25 bp, Homo sapien
ctgggagtctaccttctgtttcctc

SEQ ID NO: 5088286 - DNA, 25 bp, Homo sapien
tgggagtctaccttctgtttcctct

SEQ ID NO: 5088287 - DNA, 25 bp, Homo sapien
tcctctttctggtgcacactgccag

SEQ ID NO: 5088288 - DNA, 25 bp, Homo sapien
ctctttctggtgcacactgccagcc

SEQ ID NO: 5088289 - DNA, 25 bp, Homo sapien
tctcttttgtccaagtgcatcagct

SEQ ID NO: 5088290 - DNA, 25 bp, Homo sapien
tcttttgtccaagtgcatcagctag

SEQ ID NO: 5088291 - DNA, 25 bp, Homo sapien
ttctcttttgtccaagtgcatcagc

SEQ ID NO: 5088292 - DNA, 25 bp, Homo sapien
ttttgtccaagtgcatcagctagtg

SEQ ID NO: 5088293 - DNA, 25 bp, Homo sapien
ccatggtttgtgttatacctaggaa

SEQ ID NO: 5088294 - DNA, 25 bp, Homo sapien
taggaagactgtaccaccacaagat

SEQ ID NO: 5088295 - DNA, 25 bp, Homo sapien
tgttggtccatgaagctttcatgga

SEQ ID NO: 5088296 - DNA, 25 bp, Homo sapien
atggactcgggctccatgaaacctg

SEQ ID NO: 5088297 - DNA, 25 bp, Homo sapien
tccaaacagagcacaaaagcaagcg

SEQ ID NO: 5088298 - DNA, 25 bp, Homo sapien
caaagcacagcgcaactaccttata

SEQ ID NO: 5088299 - DNA, 25 bp, Homo sapien
gcaagcgagaacctaatacctgggc

SEQ ID NO: 5088300 - DNA, 25 bp, Homo sapien
tttctgaggtgctcctataccagcc

SEQ ID NO: 5088301 - DNA, 25 bp, Homo sapien
cttttaagcatttactttttcactg

SEQ ID NO: 5088302 - DNA, 25 bp, Homo sapien
ccaaagcattggaattacagaagtg

SEQ ID NO: 5088303 - DNA, 25 bp, Homo sapien
tcaaatgcctgacctccctcggcct

SEQ ID NO: 5088304 - DNA, 25 bp, Homo sapien
ccacacctggctggaaaacaaactt

SEQ ID NO: 5088305 - DNA, 25 bp, Homo sapien
agcacagtgctccggccccttgtag

SEQ ID NO: 5088306 - DNA, 25 bp, Homo sapien
cagagcatttagaatggaccgattc

SEQ ID NO: 5088307 - DNA, 25 bp, Homo sapien
gccccttgtagcactgattccatca

SEQ ID NO: 5088308 - DNA, 25 bp, Homo sapien
gaatggaccgattctacatcatgtg

SEQ ID NO: 5088309 - DNA, 25 bp, Homo sapien
ctctgcaccaaacatgggccttggt

SEQ ID NO: 5088310 - DNA, 25 bp, Homo sapien
taccatggacattaatgtagtcaca

SEQ ID NO: 5088311 - DNA, 25 bp, Homo sapien
ggccttggtggcaagtacaaaagcc

SEQ ID NO: 5088312 - DNA, 25 bp, Homo sapien
aatctttaatattaccatggacatt

SEQ ID NO: 5088313 - DNA, 25 bp, Homo sapien
gtgaagatggcacctgcagggatgt

SEQ ID NO: 5088314 - DNA, 25 bp, Homo sapien
aagatggcacctgcagggatgtcac

SEQ ID NO: 5088315 - DNA, 25 bp, Homo sapien
gaagatggcacctgcagggatgtca

SEQ ID NO: 5088316 - DNA, 25 bp, Homo sapien
aggtgaagatggcacctgcagggat

SEQ ID NO: 5088317 - DNA, 25 bp, Homo sapien
gtctttcttctgtcaaagggctgct

SEQ ID NO: 5088318 - DNA, 25 bp, Homo sapien
caagcagaagcacagacttgaatat

SEQ ID NO: 5088319 - DNA, 25 bp, Homo sapien
tgagagggtgatgacctcaaggtca

SEQ ID NO: 5088320 - DNA, 25 bp, Homo sapien
tcatttcctagatgatcctcagtca

SEQ ID NO: 5088321 - DNA, 25 bp, Homo sapien
caaggtctaggtcgaagccaagttt

SEQ ID NO: 5088322 - DNA, 25 bp, Homo sapien
gtaagtaaaggattctctagggtga

SEQ ID NO: 5088323 - DNA, 25 bp, Homo sapien
tcatcatagggtaactgatgggagc

SEQ ID NO: 5088324 - DNA, 25 bp, Homo sapien
tttttcagcacaggtaagtaaagga

SEQ ID NO: 5088325 - DNA, 25 bp, Homo sapien
tggagacctcatcatagggtaactg

SEQ ID NO: 5088326 - DNA, 25 bp, Homo sapien
tatgtcttcaggtcactgttaccca

SEQ ID NO: 5088327 - DNA, 25 bp, Homo sapien
tgttagtatgtcttcaggtcactgt

SEQ ID NO: 5088328 - DNA, 25 bp, Homo sapien
tagtatgtcttcaggtcactgttac

SEQ ID NO: 5088329 - DNA, 25 bp, Homo sapien
ctgttagtatgtcttcaggtcactg

SEQ ID NO: 5088330 - DNA, 25 bp, Homo sapien
aaaaccaggtagatttccacatctg

SEQ ID NO: 5088331 - DNA, 25 bp, Homo sapien
atctgtatctgagcggaggactccc

SEQ ID NO: 5088332 - DNA, 25 bp, Homo sapien
gctactaaaaccaggtagatttcca

SEQ ID NO: 5088333 - DNA, 25 bp, Homo sapien
tccacatctgtatctgagcggagga

SEQ ID NO: 5088334 - DNA, 25 bp, Homo sapien
gccttagcagctgatctccggaaca

SEQ ID NO: 5088335 - DNA, 25 bp, Homo sapien
tctgccgaggctgttagctatggcc

SEQ ID NO: 5088336 - DNA, 25 bp, Homo sapien
tactcccagagtaaggtgttcaaat

SEQ ID NO: 5088337 - DNA, 25 bp, Homo sapien
tgttcaaatggctccttgtagggta

SEQ ID NO: 5088338 - DNA, 25 bp, Homo sapien
tcacaggaccagcttcgagtctgct

SEQ ID NO: 5088339 - DNA, 25 bp, Homo sapien
tccatgaacagataaagcctctccc

SEQ ID NO: 5088340 - DNA, 25 bp, Homo sapien
ccttggccaagtgacaaatcctttg

SEQ ID NO: 5088341 - DNA, 25 bp, Homo sapien
ccccagtgcagatcctcaaaagcag

SEQ ID NO: 5088342 - DNA, 25 bp, Homo sapien
ggagtgcactggaactccagaagtt

SEQ ID NO: 5088343 - DNA, 25 bp, Homo sapien
cagtctggagtgcactggaactcca

SEQ ID NO: 5088344 - DNA, 25 bp, Homo sapien
tgcactggaactccagaagttggct

SEQ ID NO: 5088345 - DNA, 25 bp, Homo sapien
ggaactccagaagttggctctctgc

SEQ ID NO: 5088346 - DNA, 25 bp, Homo sapien
gagccaccatgtcaactctcatcta

SEQ ID NO: 5088347 - DNA, 25 bp, Homo sapien
gtcttccaccaaatcttgacctagc

SEQ ID NO: 5088348 - DNA, 25 bp, Homo sapien
tatctatcattcaggatctggtacc

SEQ ID NO: 5088349 - DNA, 25 bp, Homo sapien
ctaaattgggactatgctgcttttc

SEQ ID NO: 5088350 - DNA, 25 bp, Homo sapien
cattttgtctcagagaattagagag

SEQ ID NO: 5088351 - DNA, 25 bp, Homo sapien
tatcattttgtctcagagaattaga

SEQ ID NO: 5088352 - DNA, 25 bp, Homo sapien
tcaatatcattttgtctcagagaat

SEQ ID NO: 5088353 - DNA, 25 bp, Homo sapien
agtgagagctctgagacttcctttc

SEQ ID NO: 5088354 - DNA, 25 bp, Homo sapien
attacagatgtgagtgttcttaatg

SEQ ID NO: 5088355 - DNA, 25 bp, Homo sapien
ttacagatgtgagtgttcttaatgg

SEQ ID NO: 5088356 - DNA, 25 bp, Homo sapien
tttcaattgactttgccccaatcca

SEQ ID NO: 5088357 - DNA, 25 bp, Homo sapien
gactttgccccaatccatcagagaa

SEQ ID NO: 5088358 - DNA, 25 bp, Homo sapien
gtgcaccttcagacaagtgcacaaa

SEQ ID NO: 5088359 - DNA, 25 bp, Homo sapien
gcaccttcagacaagtgcacaaaat

SEQ ID NO: 5088360 - DNA, 25 bp, Homo sapien
tgcaccttcagacaagtgcacaaaa

SEQ ID NO: 5088361 - DNA, 25 bp, Homo sapien
gcctggcgtctatgttccccagaat

SEQ ID NO: 5088362 - DNA, 25 bp, Homo sapien
ctgcctggcgtctatgttccccaga

SEQ ID NO: 5088363 - DNA, 25 bp, Homo sapien
ataaggatccggcttgccttcctca

SEQ ID NO: 5088364 - DNA, 25 bp, Homo sapien
ttccccagaataaggatccggcttg

SEQ ID NO: 5088365 - DNA, 25 bp, Homo sapien
ccgcacaaaggctggacaggtagtg

SEQ ID NO: 5088366 - DNA, 25 bp, Homo sapien
ccttgaagagtgtttgggagttcct

SEQ ID NO: 5088367 - DNA, 25 bp, Homo sapien
tgctccgaagaagagcacagcgtgt

SEQ ID NO: 5088368 - DNA, 25 bp, Homo sapien
caggtagtggatgtctgagtgctcc

SEQ ID NO: 5088369 - DNA, 25 bp, Homo sapien
tacaggcaccgatagaagcaatcac

SEQ ID NO: 5088370 - DNA, 25 bp, Homo sapien
tttgggatccccgaagccagcattc

SEQ ID NO: 5088371 - DNA, 25 bp, Homo sapien
gctgaacatacaaaggtccaccctg

SEQ ID NO: 5088372 - DNA, 25 bp, Homo sapien
taattacagactcctttacaggcac

SEQ ID NO: 5088373 - DNA, 25 bp, Homo sapien
gccggcaaaggctccaatctgattg

SEQ ID NO: 5088374 - DNA, 25 bp, Homo sapien
tgtcagcagtaccttacagcctggg

SEQ ID NO: 5088375 - DNA, 25 bp, Homo sapien
catgcccactgagaggactgtgctg

SEQ ID NO: 5088376 - DNA, 25 bp, Homo sapien
tactgcctacaactgacagggtgtt

SEQ ID NO: 5088377 - DNA, 25 bp, Homo sapien
tagttacccttattggatatatggt

SEQ ID NO: 5088378 - DNA, 25 bp, Homo sapien
tggatagttacccttattggatata

SEQ ID NO: 5088379 - DNA, 25 bp, Homo sapien
agttacccttattggatatatggtt

SEQ ID NO: 5088380 - DNA, 25 bp, Homo sapien
gatagttacccttattggatatatg

SEQ ID NO: 5088381 - DNA, 25 bp, Homo sapien
tggcagcggcctgcttgccaggcac

SEQ ID NO: 5088382 - DNA, 25 bp, Homo sapien
aaacgtgcagaaggatcacattttg

SEQ ID NO: 5088383 - DNA, 25 bp, Homo sapien
aacgtgcagaaggatcacattttgc

SEQ ID NO: 5088384 - DNA, 25 bp, Homo sapien
gtgcagaaggatcacattttgcaga

SEQ ID NO: 5088385 - DNA, 25 bp, Homo sapien
cacaggccctccttcagagacttga

SEQ ID NO: 5088386 - DNA, 25 bp, Homo sapien
ggatcagagattaacaagacacggc

SEQ ID NO: 5088387 - DNA, 25 bp, Homo sapien
caaaacctggtgctaaaagctgcgg

SEQ ID NO: 5088388 - DNA, 25 bp, Homo sapien
gaaactttatgcagggtactatgct

SEQ ID NO: 5088389 - DNA, 25 bp, Homo sapien
tgttttccagagagactatacgatc

SEQ ID NO: 5088390 - DNA, 25 bp, Homo sapien
catcctgaggcaaccactgttttac

SEQ ID NO: 5088391 - DNA, 25 bp, Homo sapien
gattatgaacatatccttcagccca

SEQ ID NO: 5088392 - DNA, 25 bp, Homo sapien
gaattaaggcctagagtgaaatggc

SEQ ID NO: 5088393 - DNA, 25 bp, Homo sapien
gaagaattttgcctcccctgaagag

SEQ ID NO: 5088394 - DNA, 25 bp, Homo sapien
gatcaataaagctgtgcgattcacc

SEQ ID NO: 5088395 - DNA, 25 bp, Homo sapien
gccaaattaccttcatcgtgtcacg

SEQ ID NO: 5088396 - DNA, 25 bp, Homo sapien
tcaccgggtataatctcaccaaggc

SEQ ID NO: 5088397 - DNA, 25 bp, Homo sapien
tactctacagcttcaaggcaccggg

SEQ ID NO: 5088398 - DNA, 25 bp, Homo sapien
gaatctctccgatctaacccaaagg

SEQ ID NO: 5088399 - DNA, 25 bp, Homo sapien
gataaacttgggtacctgccagcaa

SEQ ID NO: 5088400 - DNA, 25 bp, Homo sapien
gactatggagtatacggacctgcac

SEQ ID NO: 5088401 - DNA, 25 bp, Homo sapien
tagagggttgggctaattcctctct

SEQ ID NO: 5088402 - DNA, 25 bp, Homo sapien
aacgcaaagaccaaagtagaacatg

SEQ ID NO: 5088403 - DNA, 25 bp, Homo sapien
aactgttgcctgcatcttatatttg

SEQ ID NO: 5088404 - DNA, 25 bp, Homo sapien
agtacatttctacgggaagcaaacg

SEQ ID NO: 5088405 - DNA, 25 bp, Homo sapien
tttcacccttggttaaggagctcat

SEQ ID NO: 5088406 - DNA, 25 bp, Homo sapien
ggaagaaataatccgctgcagatgg

SEQ ID NO: 5088407 - DNA, 25 bp, Homo sapien
aggagctcattgtctccacatggca

SEQ ID NO: 5088408 - DNA, 25 bp, Homo sapien
tccgctgcagatggggccagtactg

SEQ ID NO: 5088409 - DNA, 25 bp, Homo sapien
taatgaaaccccatgaggagccctt

SEQ ID NO: 5088410 - DNA, 25 bp, Homo sapien
ttcaatatcaagtacgcagggtgct

SEQ ID NO: 5088411 - DNA, 25 bp, Homo sapien
aagtcacattagctcgtgggcgcca

SEQ ID NO: 5088412 - DNA, 25 bp, Homo sapien
taaactccacggagctaagcggcca

SEQ ID NO: 5088413 - DNA, 25 bp, Homo sapien
tacctatgctgaaagcgccaagcgc

SEQ ID NO: 5088414 - DNA, 25 bp, Homo sapien
gaaagtacactcattaagcctggcc

SEQ ID NO: 5088415 - DNA, 25 bp, Homo sapien
taccagagttccatgagaaggcctg

SEQ ID NO: 5088416 - DNA, 25 bp, Homo sapien
tttggcgaaggaactcagtaagccc

SEQ ID NO: 5088417 - DNA, 25 bp, Homo sapien
gaataaacttcaggcacccatgagg

SEQ ID NO: 5088418 - DNA, 25 bp, Homo sapien
catggagacttctggcctgacctaa

SEQ ID NO: 5088419 - DNA, 25 bp, Homo sapien
gttaggcccttccatagtgacagtg

SEQ ID NO: 5088420 - DNA, 25 bp, Homo sapien
tgatcatcgaaaaagccagcccgac

SEQ ID NO: 5088421 - DNA, 25 bp, Homo sapien
ctttctccccaagagtccatgattt

SEQ ID NO: 5088422 - DNA, 25 bp, Homo sapien
accactagtgctgaccctcaccagc

SEQ ID NO: 5088423 - DNA, 25 bp, Homo sapien
ttctccccaagagtccatgatttta

SEQ ID NO: 5088424 - DNA, 25 bp, Homo sapien
agaattctcaccactagtgctgacc

SEQ ID NO: 5088425 - DNA, 25 bp, Homo sapien
ttaaatccagatgggaaccaaataa

SEQ ID NO: 5088426 - DNA, 25 bp, Homo sapien
tgggatcttcggttttaaatccaga

SEQ ID NO: 5088427 - DNA, 25 bp, Homo sapien
tcttcggttttaaatccagatggga

SEQ ID NO: 5088428 - DNA, 25 bp, Homo sapien
atccagatgggaaccaaataacaaa

SEQ ID NO: 5088429 - DNA, 25 bp, Homo sapien
ttcacccgacgaccctgagagatcg

SEQ ID NO: 5088430 - DNA, 25 bp, Homo sapien
gagatcgatgatcacatacactctt

SEQ ID NO: 5088431 - DNA, 25 bp, Homo sapien
gaccctgagagatcgatgatcacat

SEQ ID NO: 5088432 - DNA, 25 bp, Homo sapien
cccgacgaccctgagagatcgatga

SEQ ID NO: 5088433 - DNA, 25 bp, Homo sapien
aggttctattctgggcagttcagag

SEQ ID NO: 5088434 - DNA, 25 bp, Homo sapien
ttaaatcctcaaatcttctacaaca

SEQ ID NO: 5088435 - DNA, 25 bp, Homo sapien
tcctcaaatcttctacaacaggttc

SEQ ID NO: 5088436 - DNA, 25 bp, Homo sapien
tacaacaggttctattctgggcagt

SEQ ID NO: 5088437 - DNA, 25 bp, Homo sapien
tacccaccatcgaaagaaaggatcc

SEQ ID NO: 5088438 - DNA, 25 bp, Homo sapien
gattattgaaagtcctacccaccat

SEQ ID NO: 5088439 - DNA, 25 bp, Homo sapien
tccacagtctgtaaatccaggaggg

SEQ ID NO: 5088440 - DNA, 25 bp, Homo sapien
ttttcagactctggcatgtgtcagc

SEQ ID NO: 5088441 - DNA, 25 bp, Homo sapien
cagcagacgtaaacgcccaggcttt

SEQ ID NO: 5088442 - DNA, 25 bp, Homo sapien
gaaaaagaatccttcggcgcatcct

SEQ ID NO: 5088443 - DNA, 25 bp, Homo sapien
ggtgaaacttcagctgtgcctcatt

SEQ ID NO: 5088444 - DNA, 25 bp, Homo sapien
tccctttcacagaatgcagagttag

SEQ ID NO: 5088445 - DNA, 25 bp, Homo sapien
ggatgctagagaatgtccttccagg

SEQ ID NO: 5088446 - DNA, 25 bp, Homo sapien
tgcagaaagcaatcgcacagtccct

SEQ ID NO: 5088447 - DNA, 25 bp, Homo sapien
ttaagtcgcctctttggtacctggc

SEQ ID NO: 5088448 - DNA, 25 bp, Homo sapien
gtttccctgaatagcctgccagatg

SEQ ID NO: 5088449 - DNA, 25 bp, Homo sapien
gtttcagaccaagacttagccatgg

SEQ ID NO: 5088450 - DNA, 25 bp, Homo sapien
gacccagcagggtctcataatcaac

SEQ ID NO: 5088451 - DNA, 25 bp, Homo sapien
gagactctggtcacctttggattca

SEQ ID NO: 5088452 - DNA, 25 bp, Homo sapien
ggatccaaccttgagctcggaccaa

SEQ ID NO: 5088453 - DNA, 25 bp, Homo sapien
ggagcactcagtcctcggtgacagg

SEQ ID NO: 5088454 - DNA, 25 bp, Homo sapien
tcaagcaataaatgaacggagagca

SEQ ID NO: 5088455 - DNA, 25 bp, Homo sapien
gtgacaggcatagcccgagggaatc

SEQ ID NO: 5088456 - DNA, 25 bp, Homo sapien
tgtggagttccctgccattagacgt

SEQ ID NO: 5088457 - DNA, 25 bp, Homo sapien
gcccgtattcggaaagtcttcaatc

SEQ ID NO: 5088458 - DNA, 25 bp, Homo sapien
tattcggaaagtcttcaatctgaga

SEQ ID NO: 5088459 - DNA, 25 bp, Homo sapien
ggaaagtcttcaatctgagaattca

SEQ ID NO: 5088460 - DNA, 25 bp, Homo sapien
aaatcctgagcattggcttaaccat

SEQ ID NO: 5088461 - DNA, 25 bp, Homo sapien
tcaaatttgaaatggccccagcccc

SEQ ID NO: 5088462 - DNA, 25 bp, Homo sapien
taattcagagccaaggtcagagtcc

SEQ ID NO: 5088463 - DNA, 25 bp, Homo sapien
tagaacaaataccttggagccatcc

SEQ ID NO: 5088464 - DNA, 25 bp, Homo sapien
tcatggcagtggctcttaattgacc

SEQ ID NO: 5088465 - DNA, 25 bp, Homo sapien
gactcgtatgcagcttgtaccacaa

SEQ ID NO: 5088466 - DNA, 25 bp, Homo sapien
gaagtggccgtccaatattaagaca

SEQ ID NO: 5088467 - DNA, 25 bp, Homo sapien
taaagaagtatatctgggtaggccc

SEQ ID NO: 5088468 - DNA, 25 bp, Homo sapien
tgtgtatatgtgagagccatcgctc

SEQ ID NO: 5088469 - DNA, 25 bp, Homo sapien
ctaacaagtgtttgctgaaggttca

SEQ ID NO: 5088470 - DNA, 25 bp, Homo sapien
gtctaacaagtgtttgctgaaggtt

SEQ ID NO: 5088471 - DNA, 25 bp, Homo sapien
taacaagtgtttgctgaaggttcat

SEQ ID NO: 5088472 - DNA, 25 bp, Homo sapien
tctaacaagtgtttgctgaaggttc

SEQ ID NO: 5088473 - DNA, 25 bp, Homo sapien
gggatccagcatgttgaccaaatat

SEQ ID NO: 5088474 - DNA, 25 bp, Homo sapien
gacaggcacaagttcagggcaggcc

SEQ ID NO: 5088475 - DNA, 25 bp, Homo sapien
ggcaggccagcgtcatcacgaagcc

SEQ ID NO: 5088476 - DNA, 25 bp, Homo sapien
cagcagctggttcaacaacttggga

SEQ ID NO: 5088477 - DNA, 25 bp, Homo sapien
caagtttcaaaggagctaagcagga

SEQ ID NO: 5088478 - DNA, 25 bp, Homo sapien
tcatgggagataacagtggattggc

SEQ ID NO: 5088479 - DNA, 25 bp, Homo sapien
gaggcatgaggctttccagtggcca

SEQ ID NO: 5088480 - DNA, 25 bp, Homo sapien
ctagaggacaaacccagcgcctttt

SEQ ID NO: 5088481 - DNA, 25 bp, Homo sapien
tatgcctggtgcagttctcatcact

SEQ ID NO: 5088482 - DNA, 25 bp, Homo sapien
ttttggagggcgcttatggaccatt

SEQ ID NO: 5088483 - DNA, 25 bp, Homo sapien
tgcaagtccttataaggtggagtcg

SEQ ID NO: 5088484 - DNA, 25 bp, Homo sapien
tatggaccatttatgcctggtgcag

SEQ ID NO: 5088485 - DNA, 25 bp, Homo sapien
tcagagtctaatcaccaagggagag

SEQ ID NO: 5088486 - DNA, 25 bp, Homo sapien
gctctggaacagacagtaagcactg

SEQ ID NO: 5088487 - DNA, 25 bp, Homo sapien
gactgaccactgaggatttgagcct

SEQ ID NO: 5088488 - DNA, 25 bp, Homo sapien
taactaagctaggaataggtccatg

SEQ ID NO: 5088489 - DNA, 25 bp, Homo sapien
taagggctccgtacaatttgattca

SEQ ID NO: 5088490 - DNA, 25 bp, Homo sapien
cctactgcactgagattgagaccat

SEQ ID NO: 5088491 - DNA, 25 bp, Homo sapien
tctacaaccgacagtggccagaagt

SEQ ID NO: 5088492 - DNA, 25 bp, Homo sapien
gagagtagtctagaaacatgtgcct

SEQ ID NO: 5088493 - DNA, 25 bp, Homo sapien
tgtcccagccaagcgcagggtgtga

SEQ ID NO: 5088494 - DNA, 25 bp, Homo sapien
tccttaaagaagggcggcaggagaa

SEQ ID NO: 5088495 - DNA, 25 bp, Homo sapien
gaagcccatgaaacactgtcccagc

SEQ ID NO: 5088496 - DNA, 25 bp, Homo sapien
cagccaagcgcagggtgtgacccat

SEQ ID NO: 5088497 - DNA, 25 bp, Homo sapien
acatggagcgtgtaccctctgaccg

SEQ ID NO: 5088498 - DNA, 25 bp, Homo sapien
gacgcctaattttggagcaactggg

SEQ ID NO: 5088499 - DNA, 25 bp, Homo sapien
cttccttccgtctataccacttaga

SEQ ID NO: 5088500 - DNA, 25 bp, Homo sapien
tcctcagaaatttaacatggagcgt

SEQ ID NO: 5088501 - DNA, 25 bp, Homo sapien
atgggcagtggcttggaatacctgc

SEQ ID NO: 5088502 - DNA, 25 bp, Homo sapien
catgggcagtggcttggaatacctg

SEQ ID NO: 5088503 - DNA, 25 bp, Homo sapien
tcatgggcagtggcttggaatacct

SEQ ID NO: 5088504 - DNA, 25 bp, Homo sapien
tgtgaccgttgtggggcaatccctc

SEQ ID NO: 5088505 - DNA, 25 bp, Homo sapien
cacctgtgaccgttgtggggcaatc

SEQ ID NO: 5088506 - DNA, 25 bp, Homo sapien
ctttgtcacctgtgaccgttgtggg

SEQ ID NO: 5088507 - DNA, 25 bp, Homo sapien
ccgttgtggggcaatccctccagct

SEQ ID NO: 5088508 - DNA, 25 bp, Homo sapien
cctccttgtacctggagctcaccac

SEQ ID NO: 5088509 - DNA, 25 bp, Homo sapien
ctccttgtacctggagctcaccacc

SEQ ID NO: 5088510 - DNA, 25 bp, Homo sapien
gctcaccaccagggcagtgcccagg

SEQ ID NO: 5088511 - DNA, 25 bp, Homo sapien
ccagggcagtgcccaggccctgcag

SEQ ID NO: 5088512 - DNA, 25 bp, Homo sapien
taagcaggcccgggatgatggcaac

SEQ ID NO: 5088513 - DNA, 25 bp, Homo sapien
ccaccaagtgaaggctaagcaggcc

SEQ ID NO: 5088514 - DNA, 25 bp, Homo sapien
gatgatggcaacgtgtgcttttctt

SEQ ID NO: 5088515 - DNA, 25 bp, Homo sapien
gatggcaacgtgtgcttttcttcct

SEQ ID NO: 5088516 - DNA, 25 bp, Homo sapien
ctgctgggcagagattgggcccaca

SEQ ID NO: 5088517 - DNA, 25 bp, Homo sapien
gctgctgggcagagattgggcccac

SEQ ID NO: 5088518 - DNA, 25 bp, Homo sapien
gtgcagcttgagctgacggcacccc

SEQ ID NO: 5088519 - DNA, 25 bp, Homo sapien
cgtggtaggatgacgagcagatcat

SEQ ID NO: 5088520 - DNA, 25 bp, Homo sapien
gacaagtctgtaaatagcctgccag

SEQ ID NO: 5088521 - DNA, 25 bp, Homo sapien
tatttggcatgccaaggctaaatcc

SEQ ID NO: 5088522 - DNA, 25 bp, Homo sapien
cactggtagattgacccgcgtggta

SEQ ID NO: 5088523 - DNA, 25 bp, Homo sapien
tggatgactccttgcttggcccacg

SEQ ID NO: 5088524 - DNA, 25 bp, Homo sapien
gattcaaaaccacgtgggtgctggc

SEQ ID NO: 5088525 - DNA, 25 bp, Homo sapien
catagcatccttggcgtgaccagag

SEQ ID NO: 5088526 - DNA, 25 bp, Homo sapien
cctagggtgaaggatcagcctcaaa

SEQ ID NO: 5088527 - DNA, 25 bp, Homo sapien
ggtgcgtaacgtaaaggctactctc

SEQ ID NO: 5088528 - DNA, 25 bp, Homo sapien
tcgggaccctctgagtgacattagt

SEQ ID NO: 5088529 - DNA, 25 bp, Homo sapien
acagtaggcgttcgataatggcagc

SEQ ID NO: 5088530 - DNA, 25 bp, Homo sapien
gagtgacctctgtggcagaccaagg

SEQ ID NO: 5088531 - DNA, 25 bp, Homo sapien
ctataactggctatttcccagagca

SEQ ID NO: 5088532 - DNA, 25 bp, Homo sapien
cagggggattctcaccatcgttgac

SEQ ID NO: 5088533 - DNA, 25 bp, Homo sapien
gatttcaccaagattagaggcaatg

SEQ ID NO: 5088534 - DNA, 25 bp, Homo sapien
agctggcagggggattctcaccatc

SEQ ID NO: 5088535 - DNA, 25 bp, Homo sapien
aaaagctatcctcggttctaaacag

SEQ ID NO: 5088536 - DNA, 25 bp, Homo sapien
cctaaagggcctacaagagcatgca

SEQ ID NO: 5088537 - DNA, 25 bp, Homo sapien
gggtaccaaacacactgtaattcat

SEQ ID NO: 5088538 - DNA, 25 bp, Homo sapien
cagtgatgcaagaccctcatgctgg

SEQ ID NO: 5088539 - DNA, 25 bp, Homo sapien
tatgttccactgagactgaccaaaa

SEQ ID NO: 5088540 - DNA, 25 bp, Homo sapien
tttatgttccactgagactgaccaa

SEQ ID NO: 5088541 - DNA, 25 bp, Homo sapien
tttttatgttccactgagactgacc

SEQ ID NO: 5088542 - DNA, 25 bp, Homo sapien
agtttttatgttccactgagactga

SEQ ID NO: 5088543 - DNA, 25 bp, Homo sapien
ctgagcacaatggagctcacgttcc

SEQ ID NO: 5088544 - DNA, 25 bp, Homo sapien
tgagcacaatggagctcacgttcca

SEQ ID NO: 5088545 - DNA, 25 bp, Homo sapien
gaggacccatttggctctttggagg

SEQ ID NO: 5088546 - DNA, 25 bp, Homo sapien
agttcatttgccgtgacctctgagg

SEQ ID NO: 5088547 - DNA, 25 bp, Homo sapien
catcaaggttggctgacctcccaga

SEQ ID NO: 5088548 - DNA, 25 bp, Homo sapien
gaaccgctccaaaagatgctcgctg

SEQ ID NO: 5088549 - DNA, 25 bp, Homo sapien
tacaaaaatccaatccagaaacatc

SEQ ID NO: 5088550 - DNA, 25 bp, Homo sapien
acaaaaatccaatccagaaacatca

SEQ ID NO: 5088551 - DNA, 25 bp, Homo sapien
ctacaaaaatccaatccagaaacat

SEQ ID NO: 5088552 - DNA, 25 bp, Homo sapien
caaaaatccaatccagaaacatcat

SEQ ID NO: 5088553 - DNA, 25 bp, Homo sapien
ctgaagtggaggtcatatgtatgac

SEQ ID NO: 5088554 - DNA, 25 bp, Homo sapien
gaagaagcattgatccctcctggac

SEQ ID NO: 5088555 - DNA, 25 bp, Homo sapien
cataacagggccagtcttcagggga

SEQ ID NO: 5088556 - DNA, 25 bp, Homo sapien
aggggaagaagcattgatccctcct

SEQ ID NO: 5088557 - DNA, 25 bp, Homo sapien
tggacctctctgaatgtaaggttcc

SEQ ID NO: 5088558 - DNA, 25 bp, Homo sapien
cttcctcggccgcatgcgttccctg

SEQ ID NO: 5088559 - DNA, 25 bp, Homo sapien
cggccgcatgcgttccctgaacaca

SEQ ID NO: 5088560 - DNA, 25 bp, Homo sapien
atgcgttccctgaacacacgctctt

SEQ ID NO: 5088561 - DNA, 25 bp, Homo sapien
gttccctgaacacacgctcttcatt

SEQ ID NO: 5088562 - DNA, 25 bp, Homo sapien
tctctgcaatgggagcagtaggtgg

SEQ ID NO: 5088563 - DNA, 25 bp, Homo sapien
tgggctgccgaagataggtggccat

SEQ ID NO: 5088564 - DNA, 25 bp, Homo sapien
gaacttgtggccgttgacctgatgg

SEQ ID NO: 5088565 - DNA, 25 bp, Homo sapien
ttgacctgatggaccctgcgcctga

SEQ ID NO: 5088566 - DNA, 25 bp, Homo sapien
tctgtgggccctctaactgtggaag

SEQ ID NO: 5088567 - DNA, 25 bp, Homo sapien
tgttcccagggcaagacagaaagtc

SEQ ID NO: 5088568 - DNA, 25 bp, Homo sapien
caagaggttgtctaggtgaaggcca

SEQ ID NO: 5088569 - DNA, 25 bp, Homo sapien
tgtaagaccgaccactcagttcatg

SEQ ID NO: 5088570 - DNA, 25 bp, Homo sapien
cactggtatccctgctttcctatga

SEQ ID NO: 5088571 - DNA, 25 bp, Homo sapien
cttgacactggtatccctgctttcc

SEQ ID NO: 5088572 - DNA, 25 bp, Homo sapien
ctggtatccctgctttcctatgaca

SEQ ID NO: 5088573 - DNA, 25 bp, Homo sapien
ggtatccctgctttcctatgacacc

SEQ ID NO: 5088574 - DNA, 25 bp, Homo sapien
gcttctttaacccagcacactttgt

SEQ ID NO: 5088575 - DNA, 25 bp, Homo sapien
aacccagcacactttgtgattatga

SEQ ID NO: 5088576 - DNA, 25 bp, Homo sapien
tcgtggcaccgcttgtggaccacgc

SEQ ID NO: 5088577 - DNA, 25 bp, Homo sapien
accgcttgtggaccacgcaggtgca

SEQ ID NO: 5088578 - DNA, 25 bp, Homo sapien
acttgtggggcatgttgacgctgaa

SEQ ID NO: 5088579 - DNA, 25 bp, Homo sapien
actgcaaaccctgccgcaagagtcc

SEQ ID NO: 5088580 - DNA, 25 bp, Homo sapien
tgttgacgctgaaccgctgggagcc

SEQ ID NO: 5088581 - DNA, 25 bp, Homo sapien
tagttgtggataccgaacttgtggg

SEQ ID NO: 5088582 - DNA, 25 bp, Homo sapien
caactgcaggctccgtcaggaggtc

SEQ ID NO: 5088583 - DNA, 25 bp, Homo sapien
cagagcagttattaagatgtgtgtc

SEQ ID NO: 5088584 - DNA, 25 bp, Homo sapien
tgaaaacagccgcagatcagagcag

SEQ ID NO: 5088585 - DNA, 25 bp, Homo sapien
ttggtgcccgatgacttcagagcag

SEQ ID NO: 5088586 - DNA, 25 bp, Homo sapien
cagctaggcagtacccaaaccagga

SEQ ID NO: 5088587 - DNA, 25 bp, Homo sapien
gctcctccaaatcctagcctgtgat

SEQ ID NO: 5088588 - DNA, 25 bp, Homo sapien
gtatgtggctaagatcactccattt

SEQ ID NO: 5088589 - DNA, 25 bp, Homo sapien
tctttcatctttatggctctgcaca

SEQ ID NO: 5088590 - DNA, 25 bp, Homo sapien
gccacgttggtctcacatcgacggt

SEQ ID NO: 5088591 - DNA, 25 bp, Homo sapien
tactttggcgattcctctggcatcc

SEQ ID NO: 5088592 - DNA, 25 bp, Homo sapien
gcccaggtcggccagtactttggcg

SEQ ID NO: 5088593 - DNA, 25 bp, Homo sapien
tccactccacagttgggagccacgt

SEQ ID NO: 5088594 - DNA, 25 bp, Homo sapien
acaccataaaggttagcaagctgga

SEQ ID NO: 5088595 - DNA, 25 bp, Homo sapien
caatgtttgatccaaccccatccaa

SEQ ID NO: 5088596 - DNA, 25 bp, Homo sapien
gcaagctggaaaagtagtccaggtt

SEQ ID NO: 5088597 - DNA, 25 bp, Homo sapien
gtagttcgggttgtgcgaggacacc

SEQ ID NO: 5088598 - DNA, 25 bp, Homo sapien
cttggatcgatcttcctcagatggt

SEQ ID NO: 5088599 - DNA, 25 bp, Homo sapien
ttcctcagatggtgagcttccagaa

SEQ ID NO: 5088600 - DNA, 25 bp, Homo sapien
gggtgctgacttggatcgatcttcc

SEQ ID NO: 5088601 - DNA, 25 bp, Homo sapien
cctcagatggtgagcttccagaagc

SEQ ID NO: 5088602 - DNA, 25 bp, Homo sapien
tgaagttgaactcatccaggcccag

SEQ ID NO: 5088603 - DNA, 25 bp, Homo sapien
tgctcctctcctcggttgtcaaatg

SEQ ID NO: 5088604 - DNA, 25 bp, Homo sapien
tggccttgccggacttcgccattct

SEQ ID NO: 5088605 - DNA, 25 bp, Homo sapien
atcaggagacgatgctgcccggtgc

SEQ ID NO: 5088606 - DNA, 25 bp, Homo sapien
cttgccaaagctgcctttgcccaac

SEQ ID NO: 5088607 - DNA, 25 bp, Homo sapien
ttgccaaagctgcctttgcccaaca

SEQ ID NO: 5088608 - DNA, 25 bp, Homo sapien
tgccaaagctgcctttgcccaacac

SEQ ID NO: 5088609 - DNA, 25 bp, Homo sapien
tgctttaaaccctaggtttgctgag

SEQ ID NO: 5088610 - DNA, 25 bp, Homo sapien
ctgagggcagagattcattctcaaa

SEQ ID NO: 5088611 - DNA, 25 bp, Homo sapien
gtaatgcatgctaaatttgctttaa

SEQ ID NO: 5088612 - DNA, 25 bp, Homo sapien
tgctgagggcagagattcattctca

SEQ ID NO: 5088613 - DNA, 25 bp, Homo sapien
aactctgaagctggaaacgtgattc

SEQ ID NO: 5088614 - DNA, 25 bp, Homo sapien
gcagccatcagaaacttaatgaggg

SEQ ID NO: 5088615 - DNA, 25 bp, Homo sapien
tgtcgcccgcgtattttacagactc

SEQ ID NO: 5088616 - DNA, 25 bp, Homo sapien
tatatgaaaacctagaatctcggag

SEQ ID NO: 5088617 - DNA, 25 bp, Homo sapien
ctgcaatcaatcaattgcctccatc

SEQ ID NO: 5088618 - DNA, 25 bp, Homo sapien
tgcaatcaatcaattgcctccatca

SEQ ID NO: 5088619 - DNA, 25 bp, Homo sapien
caatcaatcaattgcctccatcaat

SEQ ID NO: 5088620 - DNA, 25 bp, Homo sapien
gcaatcaatcaattgcctccatcaa

SEQ ID NO: 5088621 - DNA, 25 bp, Homo sapien
ttaagaccttcacagcatatacttc

SEQ ID NO: 5088622 - DNA, 25 bp, Homo sapien
gtttccgtgccagagccaaaatcct

SEQ ID NO: 5088623 - DNA, 25 bp, Homo sapien
gaaggatgacgtccttctttaagac

SEQ ID NO: 5088624 - DNA, 25 bp, Homo sapien
ctctgtcattgtgcagtccacgtca

SEQ ID NO: 5088625 - DNA, 25 bp, Homo sapien
tttttccaatgagcaaacagtgagt

SEQ ID NO: 5088626 - DNA, 25 bp, Homo sapien
caactctggctgcaaagaattctac

SEQ ID NO: 5088627 - DNA, 25 bp, Homo sapien
gagcaaggactaaccacacttgttg

SEQ ID NO: 5088628 - DNA, 25 bp, Homo sapien
cttcacaagcacaaccttgaatgga

SEQ ID NO: 5088629 - DNA, 25 bp, Homo sapien
ttcccatgatccaccacgtacaggg

SEQ ID NO: 5088630 - DNA, 25 bp, Homo sapien
tccatagagccctcacaactaaact

SEQ ID NO: 5088631 - DNA, 25 bp, Homo sapien
actaaactggacccctcctaggatg

SEQ ID NO: 5088632 - DNA, 25 bp, Homo sapien
gtggcttcccatgatccaccacgta

SEQ ID NO: 5088633 - DNA, 25 bp, Homo sapien
aacatccatgttagcttgatcactg

SEQ ID NO: 5088634 - DNA, 25 bp, Homo sapien
catccatgacaacatccatgttagc

SEQ ID NO: 5088635 - DNA, 25 bp, Homo sapien
cctacagccatccatgacaacatcc

SEQ ID NO: 5088636 - DNA, 25 bp, Homo sapien
gacaacatccatgttagcttgatca

SEQ ID NO: 5088637 - DNA, 25 bp, Homo sapien
ggcttgatcgcacttcttccactag

SEQ ID NO: 5088638 - DNA, 25 bp, Homo sapien
tccactagatcgtagggaagacccc

SEQ ID NO: 5088639 - DNA, 25 bp, Homo sapien
gaatccttccacgtgagaactgtct

SEQ ID NO: 5088640 - DNA, 25 bp, Homo sapien
caatcaagactgaattctgtggcta

SEQ ID NO: 5088641 - DNA, 25 bp, Homo sapien
taggcatctgatcttgtagatgcag

SEQ ID NO: 5088642 - DNA, 25 bp, Homo sapien
cctcctctaccgataggcatctgat

SEQ ID NO: 5088643 - DNA, 25 bp, Homo sapien
tccctcctctaccgataggcatctg

SEQ ID NO: 5088644 - DNA, 25 bp, Homo sapien
tcctctaccgataggcatctgatct

SEQ ID NO: 5088645 - DNA, 25 bp, Homo sapien
gcagcaagggagattggctaaggga

SEQ ID NO: 5088646 - DNA, 25 bp, Homo sapien
tgggtagaattgtgtagagatgaaa

SEQ ID NO: 5088647 - DNA, 25 bp, Homo sapien
ggagattggctaagggagattctct

SEQ ID NO: 5088648 - DNA, 25 bp, Homo sapien
ctaagggagattctctagttcaccc

SEQ ID NO: 5088649 - DNA, 25 bp, Homo sapien
catttgaaaaacgtctcccgttgct

SEQ ID NO: 5088650 - DNA, 25 bp, Homo sapien
cgtctcccgttgctttgtaaggatg

SEQ ID NO: 5088651 - DNA, 25 bp, Homo sapien
ccgttgctttgtaaggatgtttcca

SEQ ID NO: 5088652 - DNA, 25 bp, Homo sapien
tgattcaaacgcatttgaaaaacgt

SEQ ID NO: 5088653 - DNA, 25 bp, Homo sapien
cacttttgctcctacgttgttaaca

SEQ ID NO: 5088654 - DNA, 25 bp, Homo sapien
gaaatgacacttttgctcctacgtt

SEQ ID NO: 5088655 - DNA, 25 bp, Homo sapien
tgctcctacgttgttaacactcctt

SEQ ID NO: 5088656 - DNA, 25 bp, Homo sapien
gacacttttgctcctacgttgttaa

SEQ ID NO: 5088657 - DNA, 25 bp, Homo sapien
ccttcggagtagtagtggtgcctca

SEQ ID NO: 5088658 - DNA, 25 bp, Homo sapien
acactctccaactccttcggagtag

SEQ ID NO: 5088659 - DNA, 25 bp, Homo sapien
tagtagtggtgcctcaggtagacag

SEQ ID NO: 5088660 - DNA, 25 bp, Homo sapien
tggtgcctcaggtagacagtatggt

SEQ ID NO: 5088661 - DNA, 25 bp, Homo sapien
gaaaccagtgacgatctttctctga

SEQ ID NO: 5088662 - DNA, 25 bp, Homo sapien
tcacacagaatgaatcctgttatgc

SEQ ID NO: 5088663 - DNA, 25 bp, Homo sapien
gaagccttgcttgatcgtggaaacc

SEQ ID NO: 5088664 - DNA, 25 bp, Homo sapien
gacctgggtgaagttgtcttgctcc

SEQ ID NO: 5088665 - DNA, 25 bp, Homo sapien
ggttacacgaagctgcagcagttag

SEQ ID NO: 5088666 - DNA, 25 bp, Homo sapien
cagcagttagattaagagccaacac

SEQ ID NO: 5088667 - DNA, 25 bp, Homo sapien
cctagccagtcagggcacttttaaa

SEQ ID NO: 5088668 - DNA, 25 bp, Homo sapien
aaggtttccttatatgcaaagaggt

SEQ ID NO: 5088669 - DNA, 25 bp, Homo sapien
ttagtgacaaggaaaatagctctac

SEQ ID NO: 5088670 - DNA, 25 bp, Homo sapien
gcatgcggtccattcactgctaaca

SEQ ID NO: 5088671 - DNA, 25 bp, Homo sapien
ccgatgcagaatgtctacgagacgc

SEQ ID NO: 5088672 - DNA, 25 bp, Homo sapien
tacgagacgccctcagatactgtag

SEQ ID NO: 5088673 - DNA, 25 bp, Homo sapien
tcaatagactaggtagaagctccct

SEQ ID NO: 5088674 - DNA, 25 bp, Homo sapien
cacagaggctttgatcaaggtagaa

SEQ ID NO: 5088675 - DNA, 25 bp, Homo sapien
tgtagttgaaactcccctctctgtg

SEQ ID NO: 5088676 - DNA, 25 bp, Homo sapien
gccccatgtgactttccctgtagaa

SEQ ID NO: 5088677 - DNA, 25 bp, Homo sapien
cttggtttatcaatcctcaggaggc

SEQ ID NO: 5088678 - DNA, 25 bp, Homo sapien
ggtgccctgggcaactcacgtaagt

SEQ ID NO: 5088679 - DNA, 25 bp, Homo sapien
aaagaattactccagggtgccctgg

SEQ ID NO: 5088680 - DNA, 25 bp, Homo sapien
cacgtaagtagttcagtcaccccag

SEQ ID NO: 5088681 - DNA, 25 bp, Homo sapien
aactctgggcaaattggatggtaga

SEQ ID NO: 5088682 - DNA, 25 bp, Homo sapien
cttcctagatctttaagaagctctc

SEQ ID NO: 5088683 - DNA, 25 bp, Homo sapien
gctctcccaagggaataaaactctg

SEQ ID NO: 5088684 - DNA, 25 bp, Homo sapien
tggagcctacctatactttgtgaag

SEQ ID NO: 5088685 - DNA, 25 bp, Homo sapien
tagataaccccctggtcttgagccc

SEQ ID NO: 5088686 - DNA, 25 bp, Homo sapien
ttctgtagataaccccctggtcttg

SEQ ID NO: 5088687 - DNA, 25 bp, Homo sapien
tctgtagataaccccctggtcttga

SEQ ID NO: 5088688 - DNA, 25 bp, Homo sapien
tgtagataaccccctggtcttgagc

SEQ ID NO: 5088689 - DNA, 25 bp, Homo sapien
gattttgctgagccagagcaaagga

SEQ ID NO: 5088690 - DNA, 25 bp, Homo sapien
gggaatgtgctctgcttgaaagccc

SEQ ID NO: 5088691 - DNA, 25 bp, Homo sapien
tgtcatgagctatgggcaggcctgt

SEQ ID NO: 5088692 - DNA, 25 bp, Homo sapien
cacctggacgatggaagctgggaat

SEQ ID NO: 5088693 - DNA, 25 bp, Homo sapien
tttcataagaatagctgtccacccc

SEQ ID NO: 5088694 - DNA, 25 bp, Homo sapien
ccagtacgcctgtttagtccagaaa

SEQ ID NO: 5088695 - DNA, 25 bp, Homo sapien
gatccttatcttcagcgccagtacg

SEQ ID NO: 5088696 - DNA, 25 bp, Homo sapien
tctcacacagggctaatgactgatg

SEQ ID NO: 5088697 - DNA, 25 bp, Homo sapien
cactttgccaagacctgacatttgc

SEQ ID NO: 5088698 - DNA, 25 bp, Homo sapien
gaagataactatagaggaagggccc

SEQ ID NO: 5088699 - DNA, 25 bp, Homo sapien
tcttccctaactgcaatagtgtggc

SEQ ID NO: 5088700 - DNA, 25 bp, Homo sapien
tttaaatgcaaagtagcgccttgat

SEQ ID NO: 5088701 - DNA, 25 bp, Homo sapien
tgctcgagtcttggcagcagtgcct

SEQ ID NO: 5088702 - DNA, 25 bp, Homo sapien
ctttttcttgtgaacggtaaatgtg

SEQ ID NO: 5088703 - DNA, 25 bp, Homo sapien
gaacggtaaatgtgatttcagggaa

SEQ ID NO: 5088704 - DNA, 25 bp, Homo sapien
cagtgctcgagtcttggcagcagtg

SEQ ID NO: 5088705 - DNA, 25 bp, Homo sapien
aactctaccatcacaaagggctcat

SEQ ID NO: 5088706 - DNA, 25 bp, Homo sapien
taaactctaccatcacaaagggctc

SEQ ID NO: 5088707 - DNA, 25 bp, Homo sapien
aaactctaccatcacaaagggctca

SEQ ID NO: 5088708 - DNA, 25 bp, Homo sapien
gtgggcactgagaaagaccatgatt

SEQ ID NO: 5088709 - DNA, 25 bp, Homo sapien
ggcttcagagatgtttctgcccatt

SEQ ID NO: 5088710 - DNA, 25 bp, Homo sapien
gcttcagagatgtttctgcccattg

SEQ ID NO: 5088711 - DNA, 25 bp, Homo sapien
cactgagaaagaccatgatttcttt

SEQ ID NO: 5088712 - DNA, 25 bp, Homo sapien
gacaatttttatcttaatcaacgca

SEQ ID NO: 5088713 - DNA, 25 bp, Homo sapien
tgctgacaatttttatcttaatcaa

SEQ ID NO: 5088714 - DNA, 25 bp, Homo sapien
taattgctgacaatttttatcttaa

SEQ ID NO: 5088715 - DNA, 25 bp, Homo sapien
ctgacaatttttatcttaatcaacg

SEQ ID NO: 5088716 - DNA, 25 bp, Homo sapien
gaaaccatctgggagtctgtgctca

SEQ ID NO: 5088717 - DNA, 25 bp, Homo sapien
taggacatatctgcccagggagcac

SEQ ID NO: 5088718 - DNA, 25 bp, Homo sapien
ggtcttcaggaaagcaaacaccgtg

SEQ ID NO: 5088719 - DNA, 25 bp, Homo sapien
gatgatagtcaacaactcttcgggc

SEQ ID NO: 5088720 - DNA, 25 bp, Homo sapien
gaaggtgctgaattcccgcgtgtgt

SEQ ID NO: 5088721 - DNA, 25 bp, Homo sapien
tgtagtccgcattaagcaggcatag

SEQ ID NO: 5088722 - DNA, 25 bp, Homo sapien
gaaccattgttgtgctgtcggagga

SEQ ID NO: 5088723 - DNA, 25 bp, Homo sapien
tgtttaaaatacacgagcgcagact

SEQ ID NO: 5088724 - DNA, 25 bp, Homo sapien
gcagcagttactcaggtatccagtg

SEQ ID NO: 5088725 - DNA, 25 bp, Homo sapien
gaatactggaaggacggtgtctctc

SEQ ID NO: 5088726 - DNA, 25 bp, Homo sapien
cagtttgggtccctgattagtctca

SEQ ID NO: 5088727 - DNA, 25 bp, Homo sapien
atttaccaggacgtgactcatgcct

SEQ ID NO: 5088728 - DNA, 25 bp, Homo sapien
gcttgagtatagcagccaggactga

SEQ ID NO: 5088729 - DNA, 25 bp, Homo sapien
tattaaaatgaccagccgattcagg

SEQ ID NO: 5088730 - DNA, 25 bp, Homo sapien
aagaaatctcgctgactaaccaggg

SEQ ID NO: 5088731 - DNA, 25 bp, Homo sapien
tcaattgtgggaaggaaccataacc

SEQ ID NO: 5088732 - DNA, 25 bp, Homo sapien
tgtgtgtgcacgagaaagagacaga

SEQ ID NO: 5088733 - DNA, 25 bp, Homo sapien
tattattattttgggtgtgcgcgtg

SEQ ID NO: 5088734 - DNA, 25 bp, Homo sapien
taagcttggagatgagtatacaccc

SEQ ID NO: 5088735 - DNA, 25 bp, Homo sapien
actactttttgaggtctggttgaca

SEQ ID NO: 5088736 - DNA, 25 bp, Homo sapien
ggactttccagctctaaagtagaca

SEQ ID NO: 5088737 - DNA, 25 bp, Homo sapien
ggagaacttcaccaaatcaaattta

SEQ ID NO: 5088738 - DNA, 25 bp, Homo sapien
catttctgaatgttaagccacaaag

SEQ ID NO: 5088739 - DNA, 25 bp, Homo sapien
cactactacacttccttggtagaaa

SEQ ID NO: 5088740 - DNA, 25 bp, Homo sapien
gaagaaccacatcgtgtgtttgaaa

SEQ ID NO: 5088741 - DNA, 25 bp, Homo sapien
ctggaagaaccacatcgtgtgtttg

SEQ ID NO: 5088742 - DNA, 25 bp, Homo sapien
cacatcgtgtgtttgaaattcccat

SEQ ID NO: 5088743 - DNA, 25 bp, Homo sapien
gaaccacatcgtgtgtttgaaattc

SEQ ID NO: 5088744 - DNA, 25 bp, Homo sapien
tctgcagcatagaaccgtgaacgag

SEQ ID NO: 5088745 - DNA, 25 bp, Homo sapien
catgagggccgatgtgacctctgca

SEQ ID NO: 5088746 - DNA, 25 bp, Homo sapien
ttcgggagcgctgaatctgaaacat

SEQ ID NO: 5088747 - DNA, 25 bp, Homo sapien
tgaacgaggctcgtcgaattttcgg

SEQ ID NO: 5088748 - DNA, 25 bp, Homo sapien
attttcttcactttcaggaaagagg

SEQ ID NO: 5088749 - DNA, 25 bp, Homo sapien
tcttcactttcaggaaagaggagga

SEQ ID NO: 5088750 - DNA, 25 bp, Homo sapien
tcaggaaagaggaggagagaagagg

SEQ ID NO: 5088751 - DNA, 25 bp, Homo sapien
tttcttcactttcaggaaagaggag

SEQ ID NO: 5088752 - DNA, 25 bp, Homo sapien
atgcaatctgggaaccactgatgca

SEQ ID NO: 5088753 - DNA, 25 bp, Homo sapien
gatgcaatctgggaaccactgatgc

SEQ ID NO: 5088754 - DNA, 25 bp, Homo sapien
gattccagagattaaggcacacact

SEQ ID NO: 5088755 - DNA, 25 bp, Homo sapien
tatgcattttccatacggaggcctg

SEQ ID NO: 5088756 - DNA, 25 bp, Homo sapien
ggcactaaggcaagactgactctca

SEQ ID NO: 5088757 - DNA, 25 bp, Homo sapien
tacagaagaatctaggcttggccaa

SEQ ID NO: 5088758 - DNA, 25 bp, Homo sapien
ccgtcatgcacgtttatcagtgtca

SEQ ID NO: 5088759 - DNA, 25 bp, Homo sapien
tctgggcccttagcctgtaaaagag

SEQ ID NO: 5088760 - DNA, 25 bp, Homo sapien
ccagcccattggttaccgtcatgca

SEQ ID NO: 5088761 - DNA, 25 bp, Homo sapien
cacctggttgtgagatctgggccct

SEQ ID NO: 5088762 - DNA, 25 bp, Homo sapien
ccagtgaacttcagttaggtcaaga

SEQ ID NO: 5088763 - DNA, 25 bp, Homo sapien
catattcatcgattaagtggaggtt

SEQ ID NO: 5088764 - DNA, 25 bp, Homo sapien
atattcatcgattaagtggaggttg

SEQ ID NO: 5088765 - DNA, 25 bp, Homo sapien
tgttggagtattagggctctggctt

SEQ ID NO: 5088766 - DNA, 25 bp, Homo sapien
ctgttggagtattagggctctggct

SEQ ID NO: 5088767 - DNA, 25 bp, Homo sapien
gggctctggcttggcggtccaagcc

SEQ ID NO: 5088768 - DNA, 25 bp, Homo sapien
ctctggcttggcggtccaagcctgc

SEQ ID NO: 5088769 - DNA, 25 bp, Homo sapien
catagacccggttctgtgttaggtc

SEQ ID NO: 5088770 - DNA, 25 bp, Homo sapien
ctcagtgtgtgaacatggaacacca

SEQ ID NO: 5088771 - DNA, 25 bp, Homo sapien
gcttggccttcctgatactcctgtg

SEQ ID NO: 5088772 - DNA, 25 bp, Homo sapien
gctgtgagctgacccactgtgtttt

SEQ ID NO: 5088773 - DNA, 25 bp, Homo sapien
gtgacttttgaggcagtggcatgaa

SEQ ID NO: 5088774 - DNA, 25 bp, Homo sapien
caaatcagctcagtgttcctgggcc

SEQ ID NO: 5088775 - DNA, 25 bp, Homo sapien
actacttgcaaatctgctcagtgtc

SEQ ID NO: 5088776 - DNA, 25 bp, Homo sapien
ttatggcttgatatgtaacttcccc

SEQ ID NO: 5088777 - DNA, 25 bp, Homo sapien
tgtgatcccttctgaactacttgca

SEQ ID NO: 5088778 - DNA, 25 bp, Homo sapien
agcttctcctttgccaatcctaggc

SEQ ID NO: 5088779 - DNA, 25 bp, Homo sapien
ctcctttgccaatcctaggctgtcc

SEQ ID NO: 5088780 - DNA, 25 bp, Homo sapien
tctcctttgccaatcctaggctgtc

SEQ ID NO: 5088781 - DNA, 25 bp, Homo sapien
cttctcctttgccaatcctaggctg

SEQ ID NO: 5088782 - DNA, 25 bp, Homo sapien
gagtgacactgggagacatgccctt

SEQ ID NO: 5088783 - DNA, 25 bp, Homo sapien
tgtaaacctcaaacctgccaatggg

SEQ ID NO: 5088784 - DNA, 25 bp, Homo sapien
caagcaataactcttggagtgacac

SEQ ID NO: 5088785 - DNA, 25 bp, Homo sapien
gggtctgcccagtgaatagctttag

SEQ ID NO: 5088786 - DNA, 25 bp, Homo sapien
gggatgtagggaaggcacgtcttcc

SEQ ID NO: 5088787 - DNA, 25 bp, Homo sapien
gcctcattcaaggttaggaggctga

SEQ ID NO: 5088788 - DNA, 25 bp, Homo sapien
agttacttggaggatatcagaggcc

SEQ ID NO: 5088789 - DNA, 25 bp, Homo sapien
cttcctgcaaagtgggggtcaccca

SEQ ID NO: 5088790 - DNA, 25 bp, Homo sapien
acagtgcctgatccatgatatccca

SEQ ID NO: 5088791 - DNA, 25 bp, Homo sapien
tcttcccgatgtcagacaagaagtg

SEQ ID NO: 5088792 - DNA, 25 bp, Homo sapien
gatgtaacctctgcgaaagtgctag

SEQ ID NO: 5088793 - DNA, 25 bp, Homo sapien
tcccaggtttggctatgcatgtatc

SEQ ID NO: 5088794 - DNA, 25 bp, Homo sapien
tgaagggtcttgcaaagaaggccca

SEQ ID NO: 5088795 - DNA, 25 bp, Homo sapien
cagggtgaagggtcttgcaaagaag

SEQ ID NO: 5088796 - DNA, 25 bp, Homo sapien
gcgtcaagatgtgaactccggccat

SEQ ID NO: 5088797 - DNA, 25 bp, Homo sapien
ggtctgctggcgtcaagatgtgaac

SEQ ID NO: 5088798 - DNA, 25 bp, Homo sapien
agaatcccttccttgcacatcccga

SEQ ID NO: 5088799 - DNA, 25 bp, Homo sapien
cacagaacgtggtggtcgtcacacc

SEQ ID NO: 5088800 - DNA, 25 bp, Homo sapien
gtggtggtcgtcacaccattcagaa

SEQ ID NO: 5088801 - DNA, 25 bp, Homo sapien
aggagctatgtagtcaggagtccca

SEQ ID NO: 5088802 - DNA, 25 bp, Homo sapien
ggaggaggtgaacctttgcacacag

SEQ ID NO: 5088803 - DNA, 25 bp, Homo sapien
gaggaggtgaacctttgcacacagg

SEQ ID NO: 5088804 - DNA, 25 bp, Homo sapien
gagccaacccctcaagtgcgtcaga

SEQ ID NO: 5088805 - DNA, 25 bp, Homo sapien
agccaacccctcaagtgcgtcagag

SEQ ID NO: 5088806 - DNA, 25 bp, Homo sapien
cagcacgtcgtcatggaggatggac

SEQ ID NO: 5088807 - DNA, 25 bp, Homo sapien
ggactcaaataggtcgtcctcattg

SEQ ID NO: 5088808 - DNA, 25 bp, Homo sapien
gagccagactgggtacagcacgtcg

SEQ ID NO: 5088809 - DNA, 25 bp, Homo sapien
gtccagccatcatctcgtacatcag

SEQ ID NO: 5088810 - DNA, 25 bp, Homo sapien
aatgcgtggtttgaagggtggcttg

SEQ ID NO: 5088811 - DNA, 25 bp, Homo sapien
ggcgcttgtggggattcttcgtcat

SEQ ID NO: 5088812 - DNA, 25 bp, Homo sapien
ggtgctgcttgatggcgtcctcgcc

SEQ ID NO: 5088813 - DNA, 25 bp, Homo sapien
tcgccattctgcgatgccacacagc

SEQ ID NO: 5088814 - DNA, 25 bp, Homo sapien
gggcccgacccatggtgctgaacgt

SEQ ID NO: 5088815 - DNA, 25 bp, Homo sapien
tgggcccgacccatggtgctgaacg

SEQ ID NO: 5088816 - DNA, 25 bp, Homo sapien
tgaacgtgcacggggaccaacttac

SEQ ID NO: 5088817 - DNA, 25 bp, Homo sapien
gtgctgaacgtgcacggggaccaac

SEQ ID NO: 5088818 - DNA, 25 bp, Homo sapien
tccaactggcatcacagcaggcctg

SEQ ID NO: 5088819 - DNA, 25 bp, Homo sapien
ctccaactggcatcacagcaggcct

SEQ ID NO: 5088820 - DNA, 25 bp, Homo sapien
cccctccaactggcatcacagcagg

SEQ ID NO: 5088821 - DNA, 25 bp, Homo sapien
ttacatgccccctccaactggcatc

SEQ ID NO: 5088822 - DNA, 25 bp, Homo sapien
agcaatggggcaggctggcatgtgc

SEQ ID NO: 5088823 - DNA, 25 bp, Homo sapien
ctctgtggggtacgcctcagcttcc

SEQ ID NO: 5088824 - DNA, 25 bp, Homo sapien
tctgtggggtacgcctcagcttccc

SEQ ID NO: 5088825 - DNA, 25 bp, Homo sapien
ggcctctgtggggtacgcctcagct

SEQ ID NO: 5088826 - DNA, 25 bp, Homo sapien
cctctgtggggtacgcctcagcttc

SEQ ID NO: 5088827 - DNA, 25 bp, Homo sapien
ccagccctggatcagagtcctggct

SEQ ID NO: 5088828 - DNA, 25 bp, Homo sapien
gggctgcagaactcagccttgctcc

SEQ ID NO: 5088829 - DNA, 25 bp, Homo sapien
gctcttggagggctcttgtagcctc

SEQ ID NO: 5088830 - DNA, 25 bp, Homo sapien
tgtagcctcttggatggtaagccgc

SEQ ID NO: 5088831 - DNA, 25 bp, Homo sapien
gaaacactagtctgatgaacccagg

SEQ ID NO: 5088832 - DNA, 25 bp, Homo sapien
gttacttcaagtgcaggtgggtctg

SEQ ID NO: 5088833 - DNA, 25 bp, Homo sapien
cagagggctcaaaggacatgttcaa

SEQ ID NO: 5088834 - DNA, 25 bp, Homo sapien
taggagtcaggtgccggattttacc

SEQ ID NO: 5088835 - DNA, 25 bp, Homo sapien
tccctatagtctgagtctgccacgc

SEQ ID NO: 5088836 - DNA, 25 bp, Homo sapien
cggctaaagtcctaggtcagggtct

SEQ ID NO: 5088837 - DNA, 25 bp, Homo sapien
tatatttcatagttccctggcctag

SEQ ID NO: 5088838 - DNA, 25 bp, Homo sapien
gctgttaaggcgaaataggtccaga

SEQ ID NO: 5088839 - DNA, 25 bp, Homo sapien
gagaactctcatggaatcagactgg

SEQ ID NO: 5088840 - DNA, 25 bp, Homo sapien
taagaccatactagatttggcctcc

SEQ ID NO: 5088841 - DNA, 25 bp, Homo sapien
taaatgccgatctgtgagaggtagc

SEQ ID NO: 5088842 - DNA, 25 bp, Homo sapien
caattatgtaatctctgtgccgcca

SEQ ID NO: 5088843 - DNA, 25 bp, Homo sapien
tctgaggcccttcaggagcttgtcc

SEQ ID NO: 5088844 - DNA, 25 bp, Homo sapien
tgaggcccttcaggagcttgtcctt

SEQ ID NO: 5088845 - DNA, 25 bp, Homo sapien
gcttctgaggcccttcaggagcttg

SEQ ID NO: 5088846 - DNA, 25 bp, Homo sapien
ctgcttctgaggcccttcaggagct

SEQ ID NO: 5088847 - DNA, 25 bp, Homo sapien
taaagtcctgagttctttcgctcac

SEQ ID NO: 5088848 - DNA, 25 bp, Homo sapien
ggtaaagtcctgagttctttcgctc

SEQ ID NO: 5088849 - DNA, 25 bp, Homo sapien
gtaaagtcctgagttctttcgctca

SEQ ID NO: 5088850 - DNA, 25 bp, Homo sapien
gggcctgcctgaacatcctagtgct

SEQ ID NO: 5088851 - DNA, 25 bp, Homo sapien
cagcaattgagatgcttcattgcac

SEQ ID NO: 5088852 - DNA, 25 bp, Homo sapien
ctgaactaggactgagcctgggcct

SEQ ID NO: 5088853 - DNA, 25 bp, Homo sapien
tccaaatcctgaactaggactgagc

SEQ ID NO: 5088854 - DNA, 25 bp, Homo sapien
tcttggtcaaaattattgacgtctc

SEQ ID NO: 5088855 - DNA, 25 bp, Homo sapien
acctttgaattcctcctggttgatc

SEQ ID NO: 5088856 - DNA, 25 bp, Homo sapien
cacaagggtgagtaccggctcttcc

SEQ ID NO: 5088857 - DNA, 25 bp, Homo sapien
tttacaattgcttcgtccacaaggg

SEQ ID NO: 5088858 - DNA, 25 bp, Homo sapien
tgtgtgcggagaagcaccagtctct

SEQ ID NO: 5088859 - DNA, 25 bp, Homo sapien
tggtgagacaagaaccgagagcgcc

SEQ ID NO: 5088860 - DNA, 25 bp, Homo sapien
ccaatggtccaaacacggcagtgta

SEQ ID NO: 5088861 - DNA, 25 bp, Homo sapien
gcaagagttagccattccagagcaa

SEQ ID NO: 5088862 - DNA, 25 bp, Homo sapien
gagttgccattgcatgtcacacaga

SEQ ID NO: 5088863 - DNA, 25 bp, Homo sapien
tctacaggaggtaatgtcacatccc

SEQ ID NO: 5088864 - DNA, 25 bp, Homo sapien
tgtcctgtaggaaaggcccagttcc

SEQ ID NO: 5088865 - DNA, 25 bp, Homo sapien
gatgatgccaccgtaaagatgtttc

SEQ ID NO: 5088866 - DNA, 25 bp, Homo sapien
aaagggccctttctgggacagactg

SEQ ID NO: 5088867 - DNA, 25 bp, Homo sapien
tatgtgagaacttcaccagccagag

SEQ ID NO: 5088868 - DNA, 25 bp, Homo sapien
tgattactcaacgaacacgcaagcc

SEQ ID NO: 5088869 - DNA, 25 bp, Homo sapien
caaagtccataatgagagaacacag

SEQ ID NO: 5088870 - DNA, 25 bp, Homo sapien
tgaaataacactaatgaatggcaag

SEQ ID NO: 5088871 - DNA, 25 bp, Homo sapien
tcacatccttttgaatacagtacat

SEQ ID NO: 5088872 - DNA, 25 bp, Homo sapien
tacagtacatttggcacaataacgt

SEQ ID NO: 5088873 - DNA, 25 bp, Homo sapien
tacatttggcacaataacgtttaca

SEQ ID NO: 5088874 - DNA, 25 bp, Homo sapien
ggcagacaggccaaggcagctgaga

SEQ ID NO: 5088875 - DNA, 25 bp, Homo sapien
gacaggccaaggcagctgagagcca

SEQ ID NO: 5088876 - DNA, 25 bp, Homo sapien
ctcaaggcagacaggccaaggcagc

SEQ ID NO: 5088877 - DNA, 25 bp, Homo sapien
cagacaggccaaggcagctgagagc

SEQ ID NO: 5088878 - DNA, 25 bp, Homo sapien
taggataagaaatagtagaactgca

SEQ ID NO: 5088879 - DNA, 25 bp, Homo sapien
cttaggataagaaatagtagaactg

SEQ ID NO: 5088880 - DNA, 25 bp, Homo sapien
ggataagaaatagtagaactgcaat

SEQ ID NO: 5088881 - DNA, 25 bp, Homo sapien
gataagaaatagtagaactgcaatc

SEQ ID NO: 5088882 - DNA, 25 bp, Homo sapien
cagatatacggacagcaattgacct

SEQ ID NO: 5088883 - DNA, 25 bp, Homo sapien
tttggagctgttctcttccagagcg

SEQ ID NO: 5088884 - DNA, 25 bp, Homo sapien
tgacctttcttagtgctttgtggag

SEQ ID NO: 5088885 - DNA, 25 bp, Homo sapien
tggagcatagagatttgagaggacc

SEQ ID NO: 5088886 - DNA, 25 bp, Homo sapien
caaattcctgaactgctgatgtcac

SEQ ID NO: 5088887 - DNA, 25 bp, Homo sapien
ccttccaaattcctgaactgctgat

SEQ ID NO: 5088888 - DNA, 25 bp, Homo sapien
tagtcagaatctgactttgtcttcc

SEQ ID NO: 5088889 - DNA, 25 bp, Homo sapien
tcagaatctgactttgtcttccagt

SEQ ID NO: 5088890 - DNA, 25 bp, Homo sapien
gggcactgatcagggggatgaggct

SEQ ID NO: 5088891 - DNA, 25 bp, Homo sapien
cagactttgcgaaggaactgccatt

SEQ ID NO: 5088892 - DNA, 25 bp, Homo sapien
tggggagggcactgatcagggggat

SEQ ID NO: 5088893 - DNA, 25 bp, Homo sapien
tttgttagctggtctccctttggca

SEQ ID NO: 5088894 - DNA, 25 bp, Homo sapien
gagggtccagaatacgaagacaagg

SEQ ID NO: 5088895 - DNA, 25 bp, Homo sapien
cagagagggtccagaatacgaagac

SEQ ID NO: 5088896 - DNA, 25 bp, Homo sapien
ggtccagaatacgaagacaaggatg

SEQ ID NO: 5088897 - DNA, 25 bp, Homo sapien
tccagaatacgaagacaaggatggc

SEQ ID NO: 5088898 - DNA, 25 bp, Homo sapien
aagtaggcttgcggcaggcctgcag

SEQ ID NO: 5088899 - DNA, 25 bp, Homo sapien
agtaggcttgcggcaggcctgcagg

SEQ ID NO: 5088900 - DNA, 25 bp, Homo sapien
gtaggcttgcggcaggcctgcaggc

SEQ ID NO: 5088901 - DNA, 25 bp, Homo sapien
cggtggcttcagagggctgcagccc

SEQ ID NO: 5088902 - DNA, 25 bp, Homo sapien
catttagctccggtggcttcagagg

SEQ ID NO: 5088903 - DNA, 25 bp, Homo sapien
cagccccagggcaaagtttgtgttt

SEQ ID NO: 5088904 - DNA, 25 bp, Homo sapien
ctgcagccccagggcaaagtttgtg

SEQ ID NO: 5088905 - DNA, 25 bp, Homo sapien
actcaggaaagagagaaaaactatc

SEQ ID NO: 5088906 - DNA, 25 bp, Homo sapien
ctagtcgcactcaggaaagagagaa

SEQ ID NO: 5088907 - DNA, 25 bp, Homo sapien
tagtcgcactcaggaaagagagaaa

SEQ ID NO: 5088908 - DNA, 25 bp, Homo sapien
cgcactcaggaaagagagaaaaact

SEQ ID NO: 5088909 - DNA, 25 bp, Homo sapien
ctggaacatccctgtcatgtccttg

SEQ ID NO: 5088910 - DNA, 25 bp, Homo sapien
gggaagggttaacctgcagcagact

SEQ ID NO: 5088911 - DNA, 25 bp, Homo sapien
tggaacatccctgtcatgtccttga

SEQ ID NO: 5088912 - DNA, 25 bp, Homo sapien
gcagcagactctggtagacagcttc

SEQ ID NO: 5088913 - DNA, 25 bp, Homo sapien
aattccagagtcctgagcaccagct

SEQ ID NO: 5088914 - DNA, 25 bp, Homo sapien
caaggaattccagagtcctgagcac

SEQ ID NO: 5088915 - DNA, 25 bp, Homo sapien
aaggaattccagagtcctgagcacc

SEQ ID NO: 5088916 - DNA, 25 bp, Homo sapien
ggaattccagagtcctgagcaccag

SEQ ID NO: 5088917 - DNA, 25 bp, Homo sapien
ctggctggtgttgagagtagaagga

SEQ ID NO: 5088918 - DNA, 25 bp, Homo sapien
gggattgtaagtggagacatagaaa

SEQ ID NO: 5088919 - DNA, 25 bp, Homo sapien
ggctggtgttgagagtagaaggaaa

SEQ ID NO: 5088920 - DNA, 25 bp, Homo sapien
ttgtaagtggagacatagaaaaaga

SEQ ID NO: 5088921 - DNA, 25 bp, Homo sapien
ggcaagaacattcggcccaaaggaa

SEQ ID NO: 5088922 - DNA, 25 bp, Homo sapien
tattggcactaattggatcaataga

SEQ ID NO: 5088923 - DNA, 25 bp, Homo sapien
ctaattggatcaatagatccttccc

SEQ ID NO: 5088924 - DNA, 25 bp, Homo sapien
cctttgcggccaggcaagaacattc

SEQ ID NO: 5088925 - DNA, 25 bp, Homo sapien
tcatgcagtccctggtgtagccctg

SEQ ID NO: 5088926 - DNA, 25 bp, Homo sapien
cataatcaggattcatagcttcatt

SEQ ID NO: 5088927 - DNA, 25 bp, Homo sapien
cttgagcataatcaggattcatagc

SEQ ID NO: 5088928 - DNA, 25 bp, Homo sapien
tacacttgagcataatcaggattca

SEQ ID NO: 5088929 - DNA, 25 bp, Homo sapien
cttacacttgagcataatcaggatt

SEQ ID NO: 5088930 - DNA, 25 bp, Homo sapien
ctaatattcttggtctcaggtggga

SEQ ID NO: 5088931 - DNA, 25 bp, Homo sapien
tccatatgaactggtaacagctggg

SEQ ID NO: 5088932 - DNA, 25 bp, Homo sapien
tgaactgcgggtgtcttcttgtaca

SEQ ID NO: 5088933 - DNA, 25 bp, Homo sapien
ccaacattccgtccaggattgagaa

SEQ ID NO: 5088934 - DNA, 25 bp, Homo sapien
tgctcccataccacgggtgtaagaa

SEQ ID NO: 5088935 - DNA, 25 bp, Homo sapien
ccctgtatagagcttgctgtaaaat

SEQ ID NO: 5088936 - DNA, 25 bp, Homo sapien
cttctccttccctgtatagagcttg

SEQ ID NO: 5088937 - DNA, 25 bp, Homo sapien
ttctgtccaaattctgctcccatac

SEQ ID NO: 5088938 - DNA, 25 bp, Homo sapien
gctggtttggttggccacattggca

SEQ ID NO: 5088939 - DNA, 25 bp, Homo sapien
tggttggccacattggcaacccaac

SEQ ID NO: 5088940 - DNA, 25 bp, Homo sapien
gtcatgctggtttggttggccacat

SEQ ID NO: 5088941 - DNA, 25 bp, Homo sapien
ttaggtcatgctggtttggttggcc

SEQ ID NO: 5088942 - DNA, 25 bp, Homo sapien
caaccccttcttagaacttccacag

SEQ ID NO: 5088943 - DNA, 25 bp, Homo sapien
ttcttagaacttccacagaagaggc

SEQ ID NO: 5088944 - DNA, 25 bp, Homo sapien
ccttcttagaacttccacagaagag

SEQ ID NO: 5088945 - DNA, 25 bp, Homo sapien
ccccttcttagaacttccacagaag

SEQ ID NO: 5088946 - DNA, 25 bp, Homo sapien
gctcttcccacataaagggtctgcc

SEQ ID NO: 5088947 - DNA, 25 bp, Homo sapien
ttcccacataaagggtctgcctttc

SEQ ID NO: 5088948 - DNA, 25 bp, Homo sapien
ttgctcttcccacataaagggtctg

SEQ ID NO: 5088949 - DNA, 25 bp, Homo sapien
catgcagagagccacttgctcttcc

SEQ ID NO: 5088950 - DNA, 25 bp, Homo sapien
cttgatctcagcagctgaggcgcca

SEQ ID NO: 5088951 - DNA, 25 bp, Homo sapien
tgatctcagcagctgaggcgccact

SEQ ID NO: 5088952 - DNA, 25 bp, Homo sapien
gctgaggcgccactgccccaggagt

SEQ ID NO: 5088953 - DNA, 25 bp, Homo sapien
tgaggcgccactgccccaggagtgc

SEQ ID NO: 5088954 - DNA, 25 bp, Homo sapien
tatcctcaggtatttactaagcccc

SEQ ID NO: 5088955 - DNA, 25 bp, Homo sapien
agtctgatccccttcagttatcctc

SEQ ID NO: 5088956 - DNA, 25 bp, Homo sapien
gcagcagcagtctgatccccttcag

SEQ ID NO: 5088957 - DNA, 25 bp, Homo sapien
gagcatcaagctctttgcagcagca

SEQ ID NO: 5088958 - DNA, 25 bp, Homo sapien
cagtcactcatccagacattagcta

SEQ ID NO: 5088959 - DNA, 25 bp, Homo sapien
cactcatccagacattagctaggag

SEQ ID NO: 5088960 - DNA, 25 bp, Homo sapien
tccagacattagctaggagctggca

SEQ ID NO: 5088961 - DNA, 25 bp, Homo sapien
catccagacattagctaggagctgg

SEQ ID NO: 5088962 - DNA, 25 bp, Homo sapien
cggcttgtgccaggcggtttggttt

SEQ ID NO: 5088963 - DNA, 25 bp, Homo sapien
gaattggagaagtcagtctggttcc

SEQ ID NO: 5088964 - DNA, 25 bp, Homo sapien
cccagtgtgatcttggagtgacaag

SEQ ID NO: 5088965 - DNA, 25 bp, Homo sapien
agaggaggccctttgagccgcccga

SEQ ID NO: 5088966 - DNA, 25 bp, Homo sapien
cgatgcgcccttttcggtgggacgc

SEQ ID NO: 5088967 - DNA, 25 bp, Homo sapien
ttggaacgagggcaggaccgcgggc

SEQ ID NO: 5088968 - DNA, 25 bp, Homo sapien
tgcgtttcgggcgtgggcgatgcgc

SEQ ID NO: 5088969 - DNA, 25 bp, Homo sapien
tcggtgggacgcagctgacttgacc

SEQ ID NO: 5088970 - DNA, 25 bp, Homo sapien
gcgccacagcgtcggtgtcctcgta

SEQ ID NO: 5088971 - DNA, 25 bp, Homo sapien
gggacggcagttgcgccacagcgtc

SEQ ID NO: 5088972 - DNA, 25 bp, Homo sapien
acttgtttatgaggtcgtctgggcg

SEQ ID NO: 5088973 - DNA, 25 bp, Homo sapien
ttcgaggacttgtttatgaggtcgt

SEQ ID NO: 5088974 - DNA, 25 bp, Homo sapien
cgcgctgcgccccgcctcctgcctc

SEQ ID NO: 5088975 - DNA, 25 bp, Homo sapien
caccggacccgtgtggcggtccgct

SEQ ID NO: 5088976 - DNA, 25 bp, Homo sapien
ttgtacggccgcctcaggagcgctg

SEQ ID NO: 5088977 - DNA, 25 bp, Homo sapien
ggtccgctcgcgagtgtaaagctcc

SEQ ID NO: 5088978 - DNA, 25 bp, Homo sapien
gacactgccgaggattgtacggccg

SEQ ID NO: 5088979 - DNA, 25 bp, Homo sapien
cggaaggagtcggaggccgggctga

SEQ ID NO: 5088980 - DNA, 25 bp, Homo sapien
aaaagtggctcgaatgctgggagtc

SEQ ID NO: 5088981 - DNA, 25 bp, Homo sapien
gccgggctgagctgaccatacagtc

SEQ ID NO: 5088982 - DNA, 25 bp, Homo sapien
gaggctgtcagacccgaaaagagga

SEQ ID NO: 5088983 - DNA, 25 bp, Homo sapien
gccccgcgcagtcaggtggaaggtg

SEQ ID NO: 5088984 - DNA, 25 bp, Homo sapien
ggcgggtggtgaaggtccgaggtgc

SEQ ID NO: 5088985 - DNA, 25 bp, Homo sapien
gggctgtggccctcgtccgctcccc

SEQ ID NO: 5088986 - DNA, 25 bp, Homo sapien
gaggtgcgcgcaggtcccgagcgcc

SEQ ID NO: 5088987 - DNA, 25 bp, Homo sapien
ctttgagacgttcagacgccgagca

SEQ ID NO: 5088988 - DNA, 25 bp, Homo sapien
tttgagacgttcagacgccgagcac

SEQ ID NO: 5088989 - DNA, 25 bp, Homo sapien
ttttcttctccttgtcagctgtcat

SEQ ID NO: 5088990 - DNA, 25 bp, Homo sapien
cttttcttctccttgtcagctgtca

SEQ ID NO: 5088991 - DNA, 25 bp, Homo sapien
gcagggcaatccaggtcactcacta

SEQ ID NO: 5088992 - DNA, 25 bp, Homo sapien
tgtcctcttcggagacagacacccg

SEQ ID NO: 5088993 - DNA, 25 bp, Homo sapien
tcctcggtaggatcgtgtccctgag

SEQ ID NO: 5088994 - DNA, 25 bp, Homo sapien
gcacaggagcgcatttggaaggact

SEQ ID NO: 5088995 - DNA, 25 bp, Homo sapien
ggccgcgcgttggattccagcttcc

SEQ ID NO: 5088996 - DNA, 25 bp, Homo sapien
gctccgccgctggtttcccgcggct

SEQ ID NO: 5088997 - DNA, 25 bp, Homo sapien
ggctcaggcggttcagccggccgcg

SEQ ID NO: 5088998 - DNA, 25 bp, Homo sapien
tccagcttcccgcagcatagcctcg

SEQ ID NO: 5088999 - DNA, 25 bp, Homo sapien
tcccttagcgagtcggtcctcctca

SEQ ID NO: 5089000 - DNA, 25 bp, Homo sapien
ctccctcccttagcgagtcggtcct

SEQ ID NO: 5089001 - DNA, 25 bp, Homo sapien
cctcccttagcgagtcggtcctcct

SEQ ID NO: 5089002 - DNA, 25 bp, Homo sapien
ttagcgagtcggtcctcctcatcct

SEQ ID NO: 5089003 - DNA, 25 bp, Homo sapien
tatcaaatccttatcggtgccccga

SEQ ID NO: 5089004 - DNA, 25 bp, Homo sapien
ggcgcgattcgctcccgtttatcaa

SEQ ID NO: 5089005 - DNA, 25 bp, Homo sapien
ggcgattgccacattcccgataggc

SEQ ID NO: 5089006 - DNA, 25 bp, Homo sapien
gaaccgctgctttcgaccggaggat

SEQ ID NO: 5089007 - DNA, 25 bp, Homo sapien
tactgtagctgggtgtgtcgaaatc

SEQ ID NO: 5089008 - DNA, 25 bp, Homo sapien
aaaatccaggcaggtcgaagagggc

SEQ ID NO: 5089009 - DNA, 25 bp, Homo sapien
gaactagtgggcagaatcatcagca

SEQ ID NO: 5089010 - DNA, 25 bp, Homo sapien
aatcatctgcccacttcttgacggg

SEQ ID NO: 5089011 - DNA, 25 bp, Homo sapien
cctttctataaggttcagcggtttg

SEQ ID NO: 5089012 - DNA, 25 bp, Homo sapien
ctatctagagatatttcagggctgg

SEQ ID NO: 5089013 - DNA, 25 bp, Homo sapien
gggaaggcactccttcggaaatcat

SEQ ID NO: 5089014 - DNA, 25 bp, Homo sapien
gcctaaaggtgttgataattatcca

SEQ ID NO: 5089015 - DNA, 25 bp, Homo sapien
ggtgtccatcatgtgaacaggcagc

SEQ ID NO: 5089016 - DNA, 25 bp, Homo sapien
aagtacagagtactagggccccagg

SEQ ID NO: 5089017 - DNA, 25 bp, Homo sapien
gggccccaggagctaatattgctaa

SEQ ID NO: 5089018 - DNA, 25 bp, Homo sapien
tgatgaccaggaccatatcccctat

SEQ ID NO: 5089019 - DNA, 25 bp, Homo sapien
gcatgagttaccacgcccaacccct

SEQ ID NO: 5089020 - DNA, 25 bp, Homo sapien
catgagttaccacgcccaacccctt

SEQ ID NO: 5089021 - DNA, 25 bp, Homo sapien
ggcatgagttaccacgcccaacccc

SEQ ID NO: 5089022 - DNA, 25 bp, Homo sapien
aggcatgagttaccacgcccaaccc

SEQ ID NO: 5089023 - DNA, 25 bp, Homo sapien
taatggatccactttcctgcccacg

SEQ ID NO: 5089024 - DNA, 25 bp, Homo sapien
cagggcacctcggactaaaaatgag

SEQ ID NO: 5089025 - DNA, 25 bp, Homo sapien
ggttaccttcagcaccacaatcatg

SEQ ID NO: 5089026 - DNA, 25 bp, Homo sapien
tgtttgattacacggcctaaccaga

SEQ ID NO: 5089027 - DNA, 25 bp, Homo sapien
ggaattcataaacaaagccaagtaa

SEQ ID NO: 5089028 - DNA, 25 bp, Homo sapien
tatgtgtgcttaaaggcactctttc

SEQ ID NO: 5089029 - DNA, 25 bp, Homo sapien
aattttgctgtactaacttgcacag

SEQ ID NO: 5089030 - DNA, 25 bp, Homo sapien
caagtaaccgagtttttatgtgtgc

SEQ ID NO: 5089031 - DNA, 25 bp, Homo sapien
tgaggaggcctaaaacagctgcagg

SEQ ID NO: 5089032 - DNA, 25 bp, Homo sapien
aattagcttcgttgacctcagccag

SEQ ID NO: 5089033 - DNA, 25 bp, Homo sapien
ttaccaaatgggaggcgcacatcag

SEQ ID NO: 5089034 - DNA, 25 bp, Homo sapien
gactcccgctgcacaacgatatggt

SEQ ID NO: 5089035 - DNA, 25 bp, Homo sapien
ctggctggcggccacagtgaccaca

SEQ ID NO: 5089036 - DNA, 25 bp, Homo sapien
gccacagtgaccacaccaccctcag

SEQ ID NO: 5089037 - DNA, 25 bp, Homo sapien
aaggccttgggctggctggcggcca

SEQ ID NO: 5089038 - DNA, 25 bp, Homo sapien
agtgaccacaccaccctcaggtgtg

SEQ ID NO: 5089039 - DNA, 25 bp, Homo sapien
gctgtcatggaagtgggttgggcca

SEQ ID NO: 5089040 - DNA, 25 bp, Homo sapien
tgctgtcatggaagtgggttgggcc

SEQ ID NO: 5089041 - DNA, 25 bp, Homo sapien
ctgtcatggaagtgggttgggccat

SEQ ID NO: 5089042 - DNA, 25 bp, Homo sapien
gcctggcaaggagtctgtgtgaact

SEQ ID NO: 5089043 - DNA, 25 bp, Homo sapien
ggagccgtccacctcatgtctctgg

SEQ ID NO: 5089044 - DNA, 25 bp, Homo sapien
aactccagtgaacaagcagactttg

SEQ ID NO: 5089045 - DNA, 25 bp, Homo sapien
cagtgggcagccatccagaacttga

SEQ ID NO: 5089046 - DNA, 25 bp, Homo sapien
gataagactggagctcacacaaggt

SEQ ID NO: 5089047 - DNA, 25 bp, Homo sapien
gaaagattccgaggacatctctggg

SEQ ID NO: 5089048 - DNA, 25 bp, Homo sapien
cgccatgggagtgctgtgcttcaca

SEQ ID NO: 5089049 - DNA, 25 bp, Homo sapien
tctagttatgatccgtgaggtcgcc

SEQ ID NO: 5089050 - DNA, 25 bp, Homo sapien
gcagcccaaggatgagcgttttcat

SEQ ID NO: 5089051 - DNA, 25 bp, Homo sapien
gggcagcccaaggatgagcgttttc

SEQ ID NO: 5089052 - DNA, 25 bp, Homo sapien
aggggcagcccaaggatgagcgttt

SEQ ID NO: 5089053 - DNA, 25 bp, Homo sapien
ggcagcccaaggatgagcgttttca

SEQ ID NO: 5089054 - DNA, 25 bp, Homo sapien
actgcttttaataatgtgccttgaa

SEQ ID NO: 5089055 - DNA, 25 bp, Homo sapien
aataatgtgccttgaaaacttgtac

SEQ ID NO: 5089056 - DNA, 25 bp, Homo sapien
tgtgccttgaaaacttgtacggaaa

SEQ ID NO: 5089057 - DNA, 25 bp, Homo sapien
taatgtgccttgaaaacttgtacgg

SEQ ID NO: 5089058 - DNA, 25 bp, Homo sapien
ggaagtgagcgtgtatgtcccaatg

SEQ ID NO: 5089059 - DNA, 25 bp, Homo sapien
gagcgtgtatgtcccaatggagctt

SEQ ID NO: 5089060 - DNA, 25 bp, Homo sapien
tggatgaatataaaacaccctggaa

SEQ ID NO: 5089061 - DNA, 25 bp, Homo sapien
gatgaatataaaacaccctggaagt

SEQ ID NO: 5089062 - DNA, 25 bp, Homo sapien
agccttctgtttcttctttgtgtcc

SEQ ID NO: 5089063 - DNA, 25 bp, Homo sapien
cttgcatatggcagccttctgtttc

SEQ ID NO: 5089064 - DNA, 25 bp, Homo sapien
gcagccttctgtttcttctttgtgt

SEQ ID NO: 5089065 - DNA, 25 bp, Homo sapien
tggcagccttctgtttcttctttgt

SEQ ID NO: 5089066 - DNA, 25 bp, Homo sapien
cacctttgatagagggctggctcag

SEQ ID NO: 5089067 - DNA, 25 bp, Homo sapien
catccaaggatatatgggaagctgg

SEQ ID NO: 5089068 - DNA, 25 bp, Homo sapien
cacactaccggttttagacatggag

SEQ ID NO: 5089069 - DNA, 25 bp, Homo sapien
caggaggcatgaggcaatattaagc

SEQ ID NO: 5089070 - DNA, 25 bp, Homo sapien
ccataggatagttagactggaagaa

SEQ ID NO: 5089071 - DNA, 25 bp, Homo sapien
agcccgatctgcatatggactctgg

SEQ ID NO: 5089072 - DNA, 25 bp, Homo sapien
agccagggtcactaacagcccgatc

SEQ ID NO: 5089073 - DNA, 25 bp, Homo sapien
gactctggggaccataggatagtta

SEQ ID NO: 5089074 - DNA, 25 bp, Homo sapien
acgttcccctcctgtcttgcaagga

SEQ ID NO: 5089075 - DNA, 25 bp, Homo sapien
ataggatagcctacacgttcccctc

SEQ ID NO: 5089076 - DNA, 25 bp, Homo sapien
cataaataggatagcctacacgttc

SEQ ID NO: 5089077 - DNA, 25 bp, Homo sapien
tgcaaggactgtcggcataggtgct

SEQ ID NO: 5089078 - DNA, 25 bp, Homo sapien
gccagcttcccttgaccatcttcct

SEQ ID NO: 5089079 - DNA, 25 bp, Homo sapien
tgccagcttcccttgaccatcttcc

SEQ ID NO: 5089080 - DNA, 25 bp, Homo sapien
tctgtgcgatgctcattgccctggc

SEQ ID NO: 5089081 - DNA, 25 bp, Homo sapien
aacagttgtataacacgcaggcagg

SEQ ID NO: 5089082 - DNA, 25 bp, Homo sapien
ggcagcgccgtgtctgattaaacga

SEQ ID NO: 5089083 - DNA, 25 bp, Homo sapien
cattggagtgacgtctgatggccac

SEQ ID NO: 5089084 - DNA, 25 bp, Homo sapien
cttgcagagaggtgaagagccaagt

SEQ ID NO: 5089085 - DNA, 25 bp, Homo sapien
gcttgcagagaggtgaagagccaag

SEQ ID NO: 5089086 - DNA, 25 bp, Homo sapien
ggacttgccctgattagacctttag

SEQ ID NO: 5089087 - DNA, 25 bp, Homo sapien
tagacctttagtggcagtttttata

SEQ ID NO: 5089088 - DNA, 25 bp, Homo sapien
ccctgattagacctttagtggcagt

SEQ ID NO: 5089089 - DNA, 25 bp, Homo sapien
cttgccctgattagacctttagtgg

SEQ ID NO: 5089090 - DNA, 25 bp, Homo sapien
cagaaagtgatttccacagtaaaaa

SEQ ID NO: 5089091 - DNA, 25 bp, Homo sapien
aagtgatttccacagtaaaaactga

SEQ ID NO: 5089092 - DNA, 25 bp, Homo sapien
tgatttccacagtaaaaactgaaaa

SEQ ID NO: 5089093 - DNA, 25 bp, Homo sapien
aaagtgatttccacagtaaaaactg

SEQ ID NO: 5089094 - DNA, 25 bp, Homo sapien
gttggtgtcttcacaaccaaagtcc

SEQ ID NO: 5089095 - DNA, 25 bp, Homo sapien
acaacctgctttgtattgttagctc

SEQ ID NO: 5089096 - DNA, 25 bp, Homo sapien
caacctgctttgtattgttagctct

SEQ ID NO: 5089097 - DNA, 25 bp, Homo sapien
ttggtgtcttcacaaccaaagtcct

SEQ ID NO: 5089098 - DNA, 25 bp, Homo sapien
tagaacacctccgtctccttgctcc

SEQ ID NO: 5089099 - DNA, 25 bp, Homo sapien
ggccagctcatagaacacctccgtc

SEQ ID NO: 5089100 - DNA, 25 bp, Homo sapien
cgtctccttgctccgccggcaccgc

SEQ ID NO: 5089101 - DNA, 25 bp, Homo sapien
agctcatagaacacctccgtctcct

SEQ ID NO: 5089102 - DNA, 25 bp, Homo sapien
ttgccagtcgcatgatggaggcctt

SEQ ID NO: 5089103 - DNA, 25 bp, Homo sapien
cttgtgtgttcgcaggaagctgatt

SEQ ID NO: 5089104 - DNA, 25 bp, Homo sapien
tgttcgcaggaagctgattgccagt

SEQ ID NO: 5089105 - DNA, 25 bp, Homo sapien
gaagctgattgccagtcgcatgatg

SEQ ID NO: 5089106 - DNA, 25 bp, Homo sapien
ctcagagggaaaagatcatccgggc

SEQ ID NO: 5089107 - DNA, 25 bp, Homo sapien
cagctggattcacggtaaaggtcac

SEQ ID NO: 5089108 - DNA, 25 bp, Homo sapien
gaagtcagcaaaagccgtccttggt

SEQ ID NO: 5089109 - DNA, 25 bp, Homo sapien
cctgcggactcaatctagtgtggag

SEQ ID NO: 5089110 - DNA, 25 bp, Homo sapien
tcatcagcccgctgaagcgatgatg

SEQ ID NO: 5089111 - DNA, 25 bp, Homo sapien
tttctgctgatacacctgttctctg

SEQ ID NO: 5089112 - DNA, 25 bp, Homo sapien
gaagcgatgatgcaatgtcccaggt

SEQ ID NO: 5089113 - DNA, 25 bp, Homo sapien
gccactgtgaatgttagctttccca

SEQ ID NO: 5089114 - DNA, 25 bp, Homo sapien
tttctgacagaaagatcatgtcgcc

SEQ ID NO: 5089115 - DNA, 25 bp, Homo sapien
cgccatcttgggtcaccacggcaat

SEQ ID NO: 5089116 - DNA, 25 bp, Homo sapien
aggtacaagttgtccatctgctggt

SEQ ID NO: 5089117 - DNA, 25 bp, Homo sapien
tgctggtcagcttcggcttcggact

SEQ ID NO: 5089118 - DNA, 25 bp, Homo sapien
gggatgagtgaagtcaaagatacta

SEQ ID NO: 5089119 - DNA, 25 bp, Homo sapien
cctcatggtcgcagggatgagtgaa

SEQ ID NO: 5089120 - DNA, 25 bp, Homo sapien
agatactatgtcctgttagctccac

SEQ ID NO: 5089121 - DNA, 25 bp, Homo sapien
aatctcctcatggtcgcagggatga

SEQ ID NO: 5089122 - DNA, 25 bp, Homo sapien
tacccgtagacaaaggggaggcaga

SEQ ID NO: 5089123 - DNA, 25 bp, Homo sapien
ggccatgagctatctcccttatacc

SEQ ID NO: 5089124 - DNA, 25 bp, Homo sapien
tgggggcaagaaggaagtaaacaca

SEQ ID NO: 5089125 - DNA, 25 bp, Homo sapien
tatctcccttatacccgtagacaaa

SEQ ID NO: 5089126 - DNA, 25 bp, Homo sapien
gttactatgagcactttggcacaga

SEQ ID NO: 5089127 - DNA, 25 bp, Homo sapien
tgcttgactcttgggtgatgaaacc

SEQ ID NO: 5089128 - DNA, 25 bp, Homo sapien
tgatgaaacctcctagagacagtgt

SEQ ID NO: 5089129 - DNA, 25 bp, Homo sapien
gagacagtgtcctaacccaaaggtg

SEQ ID NO: 5089130 - DNA, 25 bp, Homo sapien
gctgggtgagggagctgtggcagtg

SEQ ID NO: 5089131 - DNA, 25 bp, Homo sapien
gggagctgtggcagtggtagaagag

SEQ ID NO: 5089132 - DNA, 25 bp, Homo sapien
gtgagggagctgtggcagtggtaga

SEQ ID NO: 5089133 - DNA, 25 bp, Homo sapien
agctgtggcagtggtagaagaggag

SEQ ID NO: 5089134 - DNA, 25 bp, Homo sapien
aagtagggtacttgcttctggtcac

SEQ ID NO: 5089135 - DNA, 25 bp, Homo sapien
caaactcagactatggtcagtggct

SEQ ID NO: 5089136 - DNA, 25 bp, Homo sapien
ggcttcaagcacctacccatgcaga

SEQ ID NO: 5089137 - DNA, 25 bp, Homo sapien
tgaactgacactaagaacccaaagg

SEQ ID NO: 5089138 - DNA, 25 bp, Homo sapien
ctcacactaaccctttaggtctaga

SEQ ID NO: 5089139 - DNA, 25 bp, Homo sapien
atcacgagtccacccataggctggc

SEQ ID NO: 5089140 - DNA, 25 bp, Homo sapien
tcaatagctccccattgtctatgga

SEQ ID NO: 5089141 - DNA, 25 bp, Homo sapien
cataggctggcaccttcagtgaaga

SEQ ID NO: 5089142 - DNA, 25 bp, Homo sapien
tggatgtggaaggatgggaagaacc

SEQ ID NO: 5089143 - DNA, 25 bp, Homo sapien
ctggatgtggaaggatgggaagaac

SEQ ID NO: 5089144 - DNA, 25 bp, Homo sapien
ggatgtggaaggatgggaagaacca

SEQ ID NO: 5089145 - DNA, 25 bp, Homo sapien
gatgtggaaggatgggaagaaccag

SEQ ID NO: 5089146 - DNA, 25 bp, Homo sapien
ctgacttgaggttgacagtacggcc

SEQ ID NO: 5089147 - DNA, 25 bp, Homo sapien
tggtgaccgtgcacttcatcctcat

SEQ ID NO: 5089148 - DNA, 25 bp, Homo sapien
tcatcctcatgaagaagtcccgctc

SEQ ID NO: 5089149 - DNA, 25 bp, Homo sapien
tacggcctctgttggtgaccgtgca

SEQ ID NO: 5089150 - DNA, 25 bp, Homo sapien
ggcggctcaggaaggtcttgctatc

SEQ ID NO: 5089151 - DNA, 25 bp, Homo sapien
ttgttgtagactttcacctggcccg

SEQ ID NO: 5089152 - DNA, 25 bp, Homo sapien
gctccttgtagccacacagactatt

SEQ ID NO: 5089153 - DNA, 25 bp, Homo sapien
cacagactattgtgaggagggcagt

SEQ ID NO: 5089154 - DNA, 25 bp, Homo sapien
cagctcctcagggtggtaaccaatc

SEQ ID NO: 5089155 - DNA, 25 bp, Homo sapien
aattcataggctgagcggccaagca

SEQ ID NO: 5089156 - DNA, 25 bp, Homo sapien
ctagcgcatggtagaattcataggc

SEQ ID NO: 5089157 - DNA, 25 bp, Homo sapien
tgactcttggtcatgttctcggagt

SEQ ID NO: 5089158 - DNA, 25 bp, Homo sapien
aaggaagccacaaggggcactcctg

SEQ ID NO: 5089159 - DNA, 25 bp, Homo sapien
gccacaaggggcactcctggaactc

SEQ ID NO: 5089160 - DNA, 25 bp, Homo sapien
cacaaggggcactcctggaactcac

SEQ ID NO: 5089161 - DNA, 25 bp, Homo sapien
cagacacaaggaagccacaaggggc

SEQ ID NO: 5089162 - DNA, 25 bp, Homo sapien
gcataagtcttgtctgccacacaag

SEQ ID NO: 5089163 - DNA, 25 bp, Homo sapien
tggtcttctgtctcaccagtcacac

SEQ ID NO: 5089164 - DNA, 25 bp, Homo sapien
gtcacaccccactcaaggccacata

SEQ ID NO: 5089165 - DNA, 25 bp, Homo sapien
agtcttgtctgccacacaagacagc

SEQ ID NO: 5089166 - DNA, 25 bp, Homo sapien
caaaggtacagtgaaggcatagcac

SEQ ID NO: 5089167 - DNA, 25 bp, Homo sapien
tttgctgaaagaccacctcagtgga

SEQ ID NO: 5089168 - DNA, 25 bp, Homo sapien
catagggcgctcactaaggattagg

SEQ ID NO: 5089169 - DNA, 25 bp, Homo sapien
catcagtgagttgtattccgttgca

SEQ ID NO: 5089170 - DNA, 25 bp, Homo sapien
cactcgggaggatatccaggctctc

SEQ ID NO: 5089171 - DNA, 25 bp, Homo sapien
gccactgaaggtttgtgacccacag

SEQ ID NO: 5089172 - DNA, 25 bp, Homo sapien
catattatgcccatggcctgtcaca

SEQ ID NO: 5089173 - DNA, 25 bp, Homo sapien
gaggatcgactgtacccacatggct

SEQ ID NO: 5089174 - DNA, 25 bp, Homo sapien
gaggagaaacagagctgagcttagg

SEQ ID NO: 5089175 - DNA, 25 bp, Homo sapien
ggaggagaaacagagctgagcttag

SEQ ID NO: 5089176 - DNA, 25 bp, Homo sapien
gagaaacagagctgagcttagggag

SEQ ID NO: 5089177 - DNA, 25 bp, Homo sapien
ctaggggaggagaaacagagctgag

SEQ ID NO: 5089178 - DNA, 25 bp, Homo sapien
gctgcaggttgcgagggttgtagat

SEQ ID NO: 5089179 - DNA, 25 bp, Homo sapien
ttgtagatgaccgtcccctgggtct

SEQ ID NO: 5089180 - DNA, 25 bp, Homo sapien
tgacacacatgatgcactggggctg

SEQ ID NO: 5089181 - DNA, 25 bp, Homo sapien
acacgtagcccccatgctttgcgag

SEQ ID NO: 5089182 - DNA, 25 bp, Homo sapien
ggaagttactcttctcagacacagc

SEQ ID NO: 5089183 - DNA, 25 bp, Homo sapien
tcaaagatgctgttcatggccatca

SEQ ID NO: 5089184 - DNA, 25 bp, Homo sapien
tcagtctggtccatggagaacacca

SEQ ID NO: 5089185 - DNA, 25 bp, Homo sapien
cccttgccactgctatcaaagatgc

SEQ ID NO: 5089186 - DNA, 25 bp, Homo sapien
ttcagattctctttagctgcaatcc

SEQ ID NO: 5089187 - DNA, 25 bp, Homo sapien
ccaagggcccgctgcgtttcagatt

SEQ ID NO: 5089188 - DNA, 25 bp, Homo sapien
tttagctgcaatcctcacgtggccg

SEQ ID NO: 5089189 - DNA, 25 bp, Homo sapien
ctcacgtggccgctgtagaacccat

SEQ ID NO: 5089190 - DNA, 25 bp, Homo sapien
gccttgccataggctgaggactcct

SEQ ID NO: 5089191 - DNA, 25 bp, Homo sapien
agctgcctggggcacggtgaaggca

SEQ ID NO: 5089192 - DNA, 25 bp, Homo sapien
ggcaggatggccttgccataggctg

SEQ ID NO: 5089193 - DNA, 25 bp, Homo sapien
ggctcctcaactccgtggcccatgg

SEQ ID NO: 5089194 - DNA, 25 bp, Homo sapien
tgggtactgcattggtccttggcct

SEQ ID NO: 5089195 - DNA, 25 bp, Homo sapien
aagatgtgtaatagtcttcagggct

SEQ ID NO: 5089196 - DNA, 25 bp, Homo sapien
tcaggtcgttatccaaagatgtgta

SEQ ID NO: 5089197 - DNA, 25 bp, Homo sapien
tgtgtccatggcgaagagcttctca

SEQ ID NO: 5089198 - DNA, 25 bp, Homo sapien
ctagcctgatctccacagccatcta

SEQ ID NO: 5089199 - DNA, 25 bp, Homo sapien
tagcctgatctccacagccatctac

SEQ ID NO: 5089200 - DNA, 25 bp, Homo sapien
cctagcctgatctccacagccatct

SEQ ID NO: 5089201 - DNA, 25 bp, Homo sapien
gatactcagatcatcccttagggtg

SEQ ID NO: 5089202 - DNA, 25 bp, Homo sapien
tggcacgggcctaagcaagcagtaa

SEQ ID NO: 5089203 - DNA, 25 bp, Homo sapien
caatgcttaggcctgtggtgcacac

SEQ ID NO: 5089204 - DNA, 25 bp, Homo sapien
tgacggacgcatgatacaagcaggg

SEQ ID NO: 5089205 - DNA, 25 bp, Homo sapien
gatatagggtgccagtgtctccaag

SEQ ID NO: 5089206 - DNA, 25 bp, Homo sapien
tccaagtccagctcattgaaatccg

SEQ ID NO: 5089207 - DNA, 25 bp, Homo sapien
gctggaagtcttccccgtccatggg

SEQ ID NO: 5089208 - DNA, 25 bp, Homo sapien
ttgcttccggcatcaaagaagatgg

SEQ ID NO: 5089209 - DNA, 25 bp, Homo sapien
cttgttggagagggctaccatggcc

SEQ ID NO: 5089210 - DNA, 25 bp, Homo sapien
catactccagctgtcgcttcagctt

SEQ ID NO: 5089211 - DNA, 25 bp, Homo sapien
tccagctgtcgcttcagcttcagct

SEQ ID NO: 5089212 - DNA, 25 bp, Homo sapien
ggactcagcacgtctgggcctcgag

SEQ ID NO: 5089213 - DNA, 25 bp, Homo sapien
tcttcatccgtttccacatcaaatg

SEQ ID NO: 5089214 - DNA, 25 bp, Homo sapien
atccgtttccacatcaaatgtgagg

SEQ ID NO: 5089215 - DNA, 25 bp, Homo sapien
tggcttgtccggcatcaaagggcag

SEQ ID NO: 5089216 - DNA, 25 bp, Homo sapien
cattgggtacatttgcgctcagtgg

SEQ ID NO: 5089217 - DNA, 25 bp, Homo sapien
gaccaaagtcagagagtgacggtag

SEQ ID NO: 5089218 - DNA, 25 bp, Homo sapien
aagaccaaagtcagagagtgacggt

SEQ ID NO: 5089219 - DNA, 25 bp, Homo sapien
aagtcagagagtgacggtagcattg

SEQ ID NO: 5089220 - DNA, 25 bp, Homo sapien
ccaaagtcagagagtgacggtagca

SEQ ID NO: 5089221 - DNA, 25 bp, Homo sapien
ttctccccgggactgatggcagatg

SEQ ID NO: 5089222 - DNA, 25 bp, Homo sapien
tcctggtactgggtggcgtagcact

SEQ ID NO: 5089223 - DNA, 25 bp, Homo sapien
tgggctgacgacaggctgtagtcct

SEQ ID NO: 5089224 - DNA, 25 bp, Homo sapien
ctcatggggttttgggtgaacttat

SEQ ID NO: 5089225 - DNA, 25 bp, Homo sapien
tagagcagccctaatttcactctgc

SEQ ID NO: 5089226 - DNA, 25 bp, Homo sapien
taaaggcctaaatcgaacatttgga

SEQ ID NO: 5089227 - DNA, 25 bp, Homo sapien
cagcacaggtatgtggaagcttcag

SEQ ID NO: 5089228 - DNA, 25 bp, Homo sapien
caagaaagaggaaagcgtgaggtgc

SEQ ID NO: 5089229 - DNA, 25 bp, Homo sapien
gagcttcccagcacgggcacgttca

SEQ ID NO: 5089230 - DNA, 25 bp, Homo sapien
cttgcaggagcgtggagcttcccag

SEQ ID NO: 5089231 - DNA, 25 bp, Homo sapien
taggactcaaatgagggcccgagca

SEQ ID NO: 5089232 - DNA, 25 bp, Homo sapien
cacagtcatatctggtcagttcggg

SEQ ID NO: 5089233 - DNA, 25 bp, Homo sapien
cacttgaagggctagcaacaaaacc

SEQ ID NO: 5089234 - DNA, 25 bp, Homo sapien
ggagacgccacaaaccaagcttgga

SEQ ID NO: 5089235 - DNA, 25 bp, Homo sapien
cacatacgttggagttgacccttca

SEQ ID NO: 5089236 - DNA, 25 bp, Homo sapien
caaaaagccgacagagggaggcctt

SEQ ID NO: 5089237 - DNA, 25 bp, Homo sapien
tccaaatgtgccgtgtgaaagacca

SEQ ID NO: 5089238 - DNA, 25 bp, Homo sapien
tacatgtcactgaccgacccagaga

SEQ ID NO: 5089239 - DNA, 25 bp, Homo sapien
ccctcatttgcatgaattcccgtct

SEQ ID NO: 5089240 - DNA, 25 bp, Homo sapien
tctaaaccatctcatggtagttctg

SEQ ID NO: 5089241 - DNA, 25 bp, Homo sapien
tttggcaataagtctatccgggctt

SEQ ID NO: 5089242 - DNA, 25 bp, Homo sapien
tattgaaaaaccagaggtgtcgtcc

SEQ ID NO: 5089243 - DNA, 25 bp, Homo sapien
gatttacgcaacaccatgactaagg

SEQ ID NO: 5089244 - DNA, 25 bp, Homo sapien
ggtaatgccgtgcagctaaaatatg

SEQ ID NO: 5089245 - DNA, 25 bp, Homo sapien
acagcataggctattggccaacaca

SEQ ID NO: 5089246 - DNA, 25 bp, Homo sapien
cgggcagctctggtagtttcattaa

SEQ ID NO: 5089247 - DNA, 25 bp, Homo sapien
cttgatcctgggcacccgttctggg

SEQ ID NO: 5089248 - DNA, 25 bp, Homo sapien
ctgtgccaaagatgagaggagcagg

SEQ ID NO: 5089249 - DNA, 25 bp, Homo sapien
gggccagcgtggctacatcaacaca

SEQ ID NO: 5089250 - DNA, 25 bp, Homo sapien
caacttcatctaatggggccagcgt

SEQ ID NO: 5089251 - DNA, 25 bp, Homo sapien
ccagcgtggctacatcaacacagct

SEQ ID NO: 5089252 - DNA, 25 bp, Homo sapien
tctgtccaacttcatctaatggggc

SEQ ID NO: 5089253 - DNA, 25 bp, Homo sapien
gaactgagctcacttggatgtccca

SEQ ID NO: 5089254 - DNA, 25 bp, Homo sapien
tcttaggaccatacactcagtgagg

SEQ ID NO: 5089255 - DNA, 25 bp, Homo sapien
tcagcagagctggaattggcccaaa

SEQ ID NO: 5089256 - DNA, 25 bp, Homo sapien
aacaaatctgatggtgagctccctg

SEQ ID NO: 5089257 - DNA, 25 bp, Homo sapien
caggactcagtaggtctccttcaac

SEQ ID NO: 5089258 - DNA, 25 bp, Homo sapien
aggactcagtaggtctccttcaact

SEQ ID NO: 5089259 - DNA, 25 bp, Homo sapien
accaaactcaatcccagaagacagg

SEQ ID NO: 5089260 - DNA, 25 bp, Homo sapien
tactgtgtttagctccaaggggtgg

SEQ ID NO: 5089261 - DNA, 25 bp, Homo sapien
tccaaggggtggattaccaaactca

SEQ ID NO: 5089262 - DNA, 25 bp, Homo sapien
aaactcaatcccagaagacaggact

SEQ ID NO: 5089263 - DNA, 25 bp, Homo sapien
tttatcatacattgtcactccagga

SEQ ID NO: 5089264 - DNA, 25 bp, Homo sapien
tgctcatatagagctatgggtatga

SEQ ID NO: 5089265 - DNA, 25 bp, Homo sapien
ccaggactttcataaagctcagatg

SEQ ID NO: 5089266 - DNA, 25 bp, Homo sapien
cacatatatcaatgactagtatcaa

SEQ ID NO: 5089267 - DNA, 25 bp, Homo sapien
tgtgtagatacaacatccaacttga

SEQ ID NO: 5089268 - DNA, 25 bp, Homo sapien
tagtttcacatgtccttctaagtcc

SEQ ID NO: 5089269 - DNA, 25 bp, Homo sapien
ccttatgatgtagcgtcacctggaa

SEQ ID NO: 5089270 - DNA, 25 bp, Homo sapien
gagtcagcaacttaccccagtggct

SEQ ID NO: 5089271 - DNA, 25 bp, Homo sapien
tgtatatgcctctaccaggtgcctg

SEQ ID NO: 5089272 - DNA, 25 bp, Homo sapien
gactggacagccctatgcctgacat

SEQ ID NO: 5089273 - DNA, 25 bp, Homo sapien
cctctgttgtcagcatgactggaca

SEQ ID NO: 5089274 - DNA, 25 bp, Homo sapien
tgacacatgaaattacaggagctcc

SEQ ID NO: 5089275 - DNA, 25 bp, Homo sapien
atgcagaactagttcctgtgggaat

SEQ ID NO: 5089276 - DNA, 25 bp, Homo sapien
gccacaggtttgaatagatgcagaa

SEQ ID NO: 5089277 - DNA, 25 bp, Homo sapien
cacaggtttgaatagatgcagaact

SEQ ID NO: 5089278 - DNA, 25 bp, Homo sapien
cagaactagttcctgtgggaatcat

SEQ ID NO: 5089279 - DNA, 25 bp, Homo sapien
ggaggcaatgtcacagtttcttgga

SEQ ID NO: 5089280 - DNA, 25 bp, Homo sapien
gaaggttgtaacttccaatggaggc

SEQ ID NO: 5089281 - DNA, 25 bp, Homo sapien
tttcttggaatcagagctggtctcc

SEQ ID NO: 5089282 - DNA, 25 bp, Homo sapien
gatcagttcagttgaagtttccagt

SEQ ID NO: 5089283 - DNA, 25 bp, Homo sapien
gatcacagaaagatttaatgacagg

SEQ ID NO: 5089284 - DNA, 25 bp, Homo sapien
tcttagcgatcacgtctatcaactt

SEQ ID NO: 5089285 - DNA, 25 bp, Homo sapien
ggtctcttttacttgtagtcctaga

SEQ ID NO: 5089286 - DNA, 25 bp, Homo sapien
cttgtagtcctagaatattcggcaa

SEQ ID NO: 5089287 - DNA, 25 bp, Homo sapien
tattcggcaagattcttagcgatca

SEQ ID NO: 5089288 - DNA, 25 bp, Homo sapien
ctggcttaaagtgtgctactcataa

SEQ ID NO: 5089289 - DNA, 25 bp, Homo sapien
tggctagtcttctctggacaaagtc

SEQ ID NO: 5089290 - DNA, 25 bp, Homo sapien
ggttagaacttgatgagaaattcca

SEQ ID NO: 5089291 - DNA, 25 bp, Homo sapien
gcttgggagagtgaaaataactgga

SEQ ID NO: 5089292 - DNA, 25 bp, Homo sapien
acgttgcacctgaagtgttttattc

SEQ ID NO: 5089293 - DNA, 25 bp, Homo sapien
tcactttgcaaagggggtaattggc

SEQ ID NO: 5089294 - DNA, 25 bp, Homo sapien
ggtaattggcttcacagaacctttg

SEQ ID NO: 5089295 - DNA, 25 bp, Homo sapien
tgaataatgatcacgttgcacctga

SEQ ID NO: 5089296 - DNA, 25 bp, Homo sapien
taaaggtgactgtgttttactcttc

SEQ ID NO: 5089297 - DNA, 25 bp, Homo sapien
tcttctctgtatagtaagaaaaggg

SEQ ID NO: 5089298 - DNA, 25 bp, Homo sapien
ctgtatagtaagaaaagggtgggct

SEQ ID NO: 5089299 - DNA, 25 bp, Homo sapien
gttttactcttctctgtatagtaag

SEQ ID NO: 5089300 - DNA, 25 bp, Homo sapien
ctcctggaggctttgaagtttgttc

SEQ ID NO: 5089301 - DNA, 25 bp, Homo sapien
taaatgagccttgttcacagttgca

SEQ ID NO: 5089302 - DNA, 25 bp, Homo sapien
aatgtgtgagcagttcggagttgaa

SEQ ID NO: 5089303 - DNA, 25 bp, Homo sapien
gtggtgaaaacattagaagcttcat

SEQ ID NO: 5089304 - DNA, 25 bp, Homo sapien
aatcaaactagtcaacatatccagc

SEQ ID NO: 5089305 - DNA, 25 bp, Homo sapien
agcagcaggagacctggagacactg

SEQ ID NO: 5089306 - DNA, 25 bp, Homo sapien
tatgtgggctcaactggcagtaggt

SEQ ID NO: 5089307 - DNA, 25 bp, Homo sapien
tgtgtgcctccaggattatgtgggc

SEQ ID NO: 5089308 - DNA, 25 bp, Homo sapien
ctcaactggcagtaggtgcccagga

SEQ ID NO: 5089309 - DNA, 25 bp, Homo sapien
cttttgctcataattatgtaaacag

SEQ ID NO: 5089310 - DNA, 25 bp, Homo sapien
ctcttttgctcataattatgtaaac

SEQ ID NO: 5089311 - DNA, 25 bp, Homo sapien
tcataattatgtaaacaggaaaaca

SEQ ID NO: 5089312 - DNA, 25 bp, Homo sapien
ttgctcataattatgtaaacaggaa

SEQ ID NO: 5089313 - DNA, 25 bp, Homo sapien
gtgctctcagaaggcggtcttcacc

SEQ ID NO: 5089314 - DNA, 25 bp, Homo sapien
gctctcagaaggcggtcttcaccct

SEQ ID NO: 5089315 - DNA, 25 bp, Homo sapien
ttgtgctctcagaaggcggtcttca

SEQ ID NO: 5089316 - DNA, 25 bp, Homo sapien
ctcagaaggcggtcttcaccctgag

SEQ ID NO: 5089317 - DNA, 25 bp, Homo sapien
agtcatctggaggccataatcatat

SEQ ID NO: 5089318 - DNA, 25 bp, Homo sapien
tcaaggtggacaggactctctgtgg

SEQ ID NO: 5089319 - DNA, 25 bp, Homo sapien
tgtgcattcaaggtggacaggactc

SEQ ID NO: 5089320 - DNA, 25 bp, Homo sapien
atatgtggtgcagatgacaaatggg

SEQ ID NO: 5089321 - DNA, 25 bp, Homo sapien
ccccgagtcaacgtgataacagaaa

SEQ ID NO: 5089322 - DNA, 25 bp, Homo sapien
catctgacaaatggcgttggactcc

SEQ ID NO: 5089323 - DNA, 25 bp, Homo sapien
gacaaaggcgccctgttttgaaggc

SEQ ID NO: 5089324 - DNA, 25 bp, Homo sapien
tgaaggcctggttactgtgttttcc

SEQ ID NO: 5089325 - DNA, 25 bp, Homo sapien
acttcaaaggggcttccacaacagc

SEQ ID NO: 5089326 - DNA, 25 bp, Homo sapien
tacctgcaacttcaaaggggcttcc

SEQ ID NO: 5089327 - DNA, 25 bp, Homo sapien
caacagccccaatccactcctgtaa

SEQ ID NO: 5089328 - DNA, 25 bp, Homo sapien
taatctcccttgactgccttgggtc

SEQ ID NO: 5089329 - DNA, 25 bp, Homo sapien
agtcagagtttcactatattggcca

SEQ ID NO: 5089330 - DNA, 25 bp, Homo sapien
agagtcagagtttcactatattggc

SEQ ID NO: 5089331 - DNA, 25 bp, Homo sapien
caaactcctgacgtcgtgatctgcc

SEQ ID NO: 5089332 - DNA, 25 bp, Homo sapien
aaactcctgacgtcgtgatctgccc

SEQ ID NO: 5089333 - DNA, 25 bp, Homo sapien
taccactagattagaggctggctga

SEQ ID NO: 5089334 - DNA, 25 bp, Homo sapien
gagtcagtttggtcaatggccctgg

SEQ ID NO: 5089335 - DNA, 25 bp, Homo sapien
tgaggacggagcacactaccttgct

SEQ ID NO: 5089336 - DNA, 25 bp, Homo sapien
caagtatgaaaaaggctggtggacc

SEQ ID NO: 5089337 - DNA, 25 bp, Homo sapien
ctgtcctctgctgccatccagaaaa

SEQ ID NO: 5089338 - DNA, 25 bp, Homo sapien
tctgctgccatccagaaaaccagaa

SEQ ID NO: 5089339 - DNA, 25 bp, Homo sapien
tgctgccatccagaaaaccagaacg

SEQ ID NO: 5089340 - DNA, 25 bp, Homo sapien
tcctctgctgccatccagaaaacca

SEQ ID NO: 5089341 - DNA, 25 bp, Homo sapien
tggcttcccttcagacttggagtca

SEQ ID NO: 5089342 - DNA, 25 bp, Homo sapien
cagacttggagtcaccaggcaccat

SEQ ID NO: 5089343 - DNA, 25 bp, Homo sapien
cttggcttcccttcagacttggagt

SEQ ID NO: 5089344 - DNA, 25 bp, Homo sapien
gaaggtcgggcaactttctcccgca

SEQ ID NO: 5089345 - DNA, 25 bp, Homo sapien
ttgtctggaagctcaaagcatgtgt

SEQ ID NO: 5089346 - DNA, 25 bp, Homo sapien
aagcatgtgttcctacagtattctt

SEQ ID NO: 5089347 - DNA, 25 bp, Homo sapien
tgttcctacagtattcttgctcccc

SEQ ID NO: 5089348 - DNA, 25 bp, Homo sapien
gttgtctggaagctcaaagcatgtg

SEQ ID NO: 5089349 - DNA, 25 bp, Homo sapien
acagcgatttaagcggcccttggca

SEQ ID NO: 5089350 - DNA, 25 bp, Homo sapien
tgcaggtacttgagccgcgtgagct

SEQ ID NO: 5089351 - DNA, 25 bp, Homo sapien
tccatctcgggattgcgctcagtcc

SEQ ID NO: 5089352 - DNA, 25 bp, Homo sapien
cagcctggcctttggtagcacggca

SEQ ID NO: 5089353 - DNA, 25 bp, Homo sapien
aggaacatggcaaactggttctggg

SEQ ID NO: 5089354 - DNA, 25 bp, Homo sapien
gatgaagcagtacaggaacatggca

SEQ ID NO: 5089355 - DNA, 25 bp, Homo sapien
caggaacatggcaaactggttctgg

SEQ ID NO: 5089356 - DNA, 25 bp, Homo sapien
tgaagatgaagcagtacaggaacat

SEQ ID NO: 5089357 - DNA, 25 bp, Homo sapien
tcaggcccagtgctaaatgagtcct

SEQ ID NO: 5089358 - DNA, 25 bp, Homo sapien
gaaggccagctgtgtacaagtctcc

SEQ ID NO: 5089359 - DNA, 25 bp, Homo sapien
tttgaccatatgctgtctgaaggcc

SEQ ID NO: 5089360 - DNA, 25 bp, Homo sapien
gccagtggcctggtgatggtatcct

SEQ ID NO: 5089361 - DNA, 25 bp, Homo sapien
cattatcactaaagtgtcctgtggc

SEQ ID NO: 5089362 - DNA, 25 bp, Homo sapien
ttatcactaaagtgtcctgtggcac

SEQ ID NO: 5089363 - DNA, 25 bp, Homo sapien
tatcactaaagtgtcctgtggcaca

SEQ ID NO: 5089364 - DNA, 25 bp, Homo sapien
tcactaaagtgtcctgtggcacagc

SEQ ID NO: 5089365 - DNA, 25 bp, Homo sapien
catcaagcccttcgtggtgctagag

SEQ ID NO: 5089366 - DNA, 25 bp, Homo sapien
tttcatggaccatcctgcgagcgca

SEQ ID NO: 5089367 - DNA, 25 bp, Homo sapien
gttgattgacacctgggctgcttcc

SEQ ID NO: 5089368 - DNA, 25 bp, Homo sapien
tgttggcagcgcacagcatatgctg

SEQ ID NO: 5089369 - DNA, 25 bp, Homo sapien
tctaatcactgggaagcgagacgat

SEQ ID NO: 5089370 - DNA, 25 bp, Homo sapien
gaagcgagacgatttagcctcacaa

SEQ ID NO: 5089371 - DNA, 25 bp, Homo sapien
ccccaagttggcaagttactcaaag

SEQ ID NO: 5089372 - DNA, 25 bp, Homo sapien
ggaagcccaggcttctctaatcact

SEQ ID NO: 5089373 - DNA, 25 bp, Homo sapien
agctccgaggctcgtgcgttcagag

SEQ ID NO: 5089374 - DNA, 25 bp, Homo sapien
tccgaggctcgtgcgttcagagccc

SEQ ID NO: 5089375 - DNA, 25 bp, Homo sapien
gctccgaggctcgtgcgttcagagc

SEQ ID NO: 5089376 - DNA, 25 bp, Homo sapien
gaggctcgtgcgttcagagcccgac

SEQ ID NO: 5089377 - DNA, 25 bp, Homo sapien
gcaggtttgaatgtccggacagtct

SEQ ID NO: 5089378 - DNA, 25 bp, Homo sapien
agcggccacgtgacccgtgtatgac

SEQ ID NO: 5089379 - DNA, 25 bp, Homo sapien
gccacgtgacccgtgtatgacctca

SEQ ID NO: 5089380 - DNA, 25 bp, Homo sapien
ttagtaattgtatcacagttgacag

SEQ ID NO: 5089381 - DNA, 25 bp, Homo sapien
tgagacggtcccttggtgtgaaaag

SEQ ID NO: 5089382 - DNA, 25 bp, Homo sapien
cagcaacgagaagtgtagtcttcga

SEQ ID NO: 5089383 - DNA, 25 bp, Homo sapien
cgtagcatttggagcctagactttt

SEQ ID NO: 5089384 - DNA, 25 bp, Homo sapien
tctcctcctttcttacgtcgtagca

SEQ ID NO: 5089385 - DNA, 25 bp, Homo sapien
tcctagaacaggaattaatgagtta

SEQ ID NO: 5089386 - DNA, 25 bp, Homo sapien
ctatttccatatgcaagcatcctag

SEQ ID NO: 5089387 - DNA, 25 bp, Homo sapien
catatgccaacttgctttggcagaa

SEQ ID NO: 5089388 - DNA, 25 bp, Homo sapien
taaacctttgctctagtttggacta

SEQ ID NO: 5089389 - DNA, 25 bp, Homo sapien
cctggctttttagtgaaatcgacct

SEQ ID NO: 5089390 - DNA, 25 bp, Homo sapien
caacagtaattgatatgtgagctac

SEQ ID NO: 5089391 - DNA, 25 bp, Homo sapien
cacataatggtttcacttggtcttt

SEQ ID NO: 5089392 - DNA, 25 bp, Homo sapien
ttaacaaatccaatagtgacccgag

SEQ ID NO: 5089393 - DNA, 25 bp, Homo sapien
cggggatccttgcttctcttactgg

SEQ ID NO: 5089394 - DNA, 25 bp, Homo sapien
tttgcaactggactttggcacattc

SEQ ID NO: 5089395 - DNA, 25 bp, Homo sapien
tcactgataccggcctggtttgcaa

SEQ ID NO: 5089396 - DNA, 25 bp, Homo sapien
ggcctcggggatccttgcttctctt

SEQ ID NO: 5089397 - DNA, 25 bp, Homo sapien
gcctgaaaagactaggttgtcatcg

SEQ ID NO: 5089398 - DNA, 25 bp, Homo sapien
aggacagaaagtgcgtggccacagc

SEQ ID NO: 5089399 - DNA, 25 bp, Homo sapien
tgtacagaagcttaagaactttggc

SEQ ID NO: 5089400 - DNA, 25 bp, Homo sapien
cctcagggcttggtcaaaatgaagg

SEQ ID NO: 5089401 - DNA, 25 bp, Homo sapien
cactctgattagctgaagttacaag

SEQ ID NO: 5089402 - DNA, 25 bp, Homo sapien
tttgaggattgcaacctgcgagcat

SEQ ID NO: 5089403 - DNA, 25 bp, Homo sapien
tagcaagcagcttcaagagacgaac

SEQ ID NO: 5089404 - DNA, 25 bp, Homo sapien
gctataaagcgtgggttacagtgtc

SEQ ID NO: 5089405 - DNA, 25 bp, Homo sapien
tactttctttctgcttatgatgacg

SEQ ID NO: 5089406 - DNA, 25 bp, Homo sapien
gcaggcctttgcccgcagtgttctc

SEQ ID NO: 5089407 - DNA, 25 bp, Homo sapien
cccgcagtgttctccccatccagtg

SEQ ID NO: 5089408 - DNA, 25 bp, Homo sapien
tctttctgcttatgatgacggtcca

SEQ ID NO: 5089409 - DNA, 25 bp, Homo sapien
cctctgaagggctatttcccagggc

SEQ ID NO: 5089410 - DNA, 25 bp, Homo sapien
agcctgggccaacttctccataggc

SEQ ID NO: 5089411 - DNA, 25 bp, Homo sapien
cataggcagctctaggagtatggtt

SEQ ID NO: 5089412 - DNA, 25 bp, Homo sapien
tgctgacttcatacctacccttggc

SEQ ID NO: 5089413 - DNA, 25 bp, Homo sapien
ggtgtctcacatgctgtagggacca

SEQ ID NO: 5089414 - DNA, 25 bp, Homo sapien
tctcacatgctgtagggaccaggga

SEQ ID NO: 5089415 - DNA, 25 bp, Homo sapien
atcctggtgtctcacatgctgtagg

SEQ ID NO: 5089416 - DNA, 25 bp, Homo sapien
cctggtgtctcacatgctgtaggga

SEQ ID NO: 5089417 - DNA, 25 bp, Homo sapien
tccgccggatcataagaccggccgg

SEQ ID NO: 5089418 - DNA, 25 bp, Homo sapien
gaggatccgccggatcataagaccg

SEQ ID NO: 5089419 - DNA, 25 bp, Homo sapien
tccccaggaggatccgccggatcat

SEQ ID NO: 5089420 - DNA, 25 bp, Homo sapien
ccccaggaggatccgccggatcata

SEQ ID NO: 5089421 - DNA, 25 bp, Homo sapien
cgcccccccggccccatgcagcggc

SEQ ID NO: 5089422 - DNA, 25 bp, Homo sapien
ccccccggccccatgcagcggctcc

SEQ ID NO: 5089423 - DNA, 25 bp, Homo sapien
catgcagcggctcccctcgcaggag

SEQ ID NO: 5089424 - DNA, 25 bp, Homo sapien
atgcagcggctcccctcgcaggagg

SEQ ID NO: 5089425 - DNA, 25 bp, Homo sapien
ggctcagccccagcccgcctggggg

SEQ ID NO: 5089426 - DNA, 25 bp, Homo sapien
cgggctcagccccagcccgcctggg

SEQ ID NO: 5089427 - DNA, 25 bp, Homo sapien
gccccgggctcagccccagcccgcc

SEQ ID NO: 5089428 - DNA, 25 bp, Homo sapien
tcagccccagcccgcctggggggtc

SEQ ID NO: 5089429 - DNA, 25 bp, Homo sapien
ccaccacgcacttgagcatcagcgc

SEQ ID NO: 5089430 - DNA, 25 bp, Homo sapien
tgggctctggggcaatttcgctccc

SEQ ID NO: 5089431 - DNA, 25 bp, Homo sapien
gtctcgctcggtcccctcgaatatt

SEQ ID NO: 5089432 - DNA, 25 bp, Homo sapien
agctcactgtgaaccggcaaagggc

SEQ ID NO: 5089433 - DNA, 25 bp, Homo sapien
aagtcccgtagccacgtctcgctcg

SEQ ID NO: 5089434 - DNA, 25 bp, Homo sapien
gtactgcttgccccccacggtgacg

SEQ ID NO: 5089435 - DNA, 25 bp, Homo sapien
tgcttgccccccacggtgacgctga

SEQ ID NO: 5089436 - DNA, 25 bp, Homo sapien
actgcttgccccccacggtgacgct

SEQ ID NO: 5089437 - DNA, 25 bp, Homo sapien
aggtactgcttgccccccacggtga

SEQ ID NO: 5089438 - DNA, 25 bp, Homo sapien
ggcagaccactcaccaatgagggac

SEQ ID NO: 5089439 - DNA, 25 bp, Homo sapien
aataagggcgcttcatgattggctg

SEQ ID NO: 5089440 - DNA, 25 bp, Homo sapien
tgctgccactttgcaacaggagttg

SEQ ID NO: 5089441 - DNA, 25 bp, Homo sapien
gggagacctggtcatctgcaactaa

SEQ ID NO: 5089442 - DNA, 25 bp, Homo sapien
tcagactttggagcgaacacagcaa

SEQ ID NO: 5089443 - DNA, 25 bp, Homo sapien
cgttcaaagcgtgggaatgtcacca

SEQ ID NO: 5089444 - DNA, 25 bp, Homo sapien
taaatctggaactctagggatccca

SEQ ID NO: 5089445 - DNA, 25 bp, Homo sapien
aagcattgctgttgtgtctgaggcc

SEQ ID NO: 5089446 - DNA, 25 bp, Homo sapien
tcacacgatgaacttgcccagttgt

SEQ ID NO: 5089447 - DNA, 25 bp, Homo sapien
tgcccagttgtgtagtggacctttc

SEQ ID NO: 5089448 - DNA, 25 bp, Homo sapien
cagttgtgtagtggacctttctgtg

SEQ ID NO: 5089449 - DNA, 25 bp, Homo sapien
cacacgatgaacttgcccagttgtg

SEQ ID NO: 5089450 - DNA, 25 bp, Homo sapien
tctctccgtatttcttcacctggga

SEQ ID NO: 5089451 - DNA, 25 bp, Homo sapien
gtattcaccatctcactagaagata

SEQ ID NO: 5089452 - DNA, 25 bp, Homo sapien
gaaagttctcaggatcaacccctaa

SEQ ID NO: 5089453 - DNA, 25 bp, Homo sapien
tcaatcagggtgcacaagccagaaa

SEQ ID NO: 5089454 - DNA, 25 bp, Homo sapien
tagggagagaactcaagaggacagt

SEQ ID NO: 5089455 - DNA, 25 bp, Homo sapien
aggacagtttgggacgtgttaagct

SEQ ID NO: 5089456 - DNA, 25 bp, Homo sapien
tgttaagcttgagatgtcaagcagg

SEQ ID NO: 5089457 - DNA, 25 bp, Homo sapien
tagagaagcaccatagggagagaac

SEQ ID NO: 5089458 - DNA, 25 bp, Homo sapien
taactgtgttgtgacgaactggcac

SEQ ID NO: 5089459 - DNA, 25 bp, Homo sapien
gaagaccgccacgtcacatgatgaa

SEQ ID NO: 5089460 - DNA, 25 bp, Homo sapien
gaggaggttcacactacgggataaa

SEQ ID NO: 5089461 - DNA, 25 bp, Homo sapien
tatgtcactggcctgattagcgctt

SEQ ID NO: 5089462 - DNA, 25 bp, Homo sapien
tatcaaagtcacaacttctcacagc

SEQ ID NO: 5089463 - DNA, 25 bp, Homo sapien
gacttatcaaagtcacaacttctca

SEQ ID NO: 5089464 - DNA, 25 bp, Homo sapien
gatcgacttatcaaagtcacaactt

SEQ ID NO: 5089465 - DNA, 25 bp, Homo sapien
tttaaaagatcgacttatcaaagtc

SEQ ID NO: 5089466 - DNA, 25 bp, Homo sapien
gaatgccatgttccctagagatgct

SEQ ID NO: 5089467 - DNA, 25 bp, Homo sapien
gaagtgtgcgctctttctctagtga

SEQ ID NO: 5089468 - DNA, 25 bp, Homo sapien
ttcaagcaagtttacctcctcaggg

SEQ ID NO: 5089469 - DNA, 25 bp, Homo sapien
gaatcctgactttcctccatgagag

SEQ ID NO: 5089470 - DNA, 25 bp, Homo sapien
catgcagtacttgttgttctgcact

SEQ ID NO: 5089471 - DNA, 25 bp, Homo sapien
tcatgcagtacttgttgttctgcac

SEQ ID NO: 5089472 - DNA, 25 bp, Homo sapien
atcatgcagtacttgttgttctgca

SEQ ID NO: 5089473 - DNA, 25 bp, Homo sapien
agaaaagcctcattatgtatttaca

SEQ ID NO: 5089474 - DNA, 25 bp, Homo sapien
ctgaggaacaaagaaaagcctcatt

SEQ ID NO: 5089475 - DNA, 25 bp, Homo sapien
ggaacaaagaaaagcctcattatgt

SEQ ID NO: 5089476 - DNA, 25 bp, Homo sapien
caaagaaaagcctcattatgtattt

SEQ ID NO: 5089477 - DNA, 25 bp, Homo sapien
tttgaaatgaggctggatttaccac

SEQ ID NO: 5089478 - DNA, 25 bp, Homo sapien
tttaccaccgagaagcatataagga

SEQ ID NO: 5089479 - DNA, 25 bp, Homo sapien
tcacattttgaaatgaggctggatt

SEQ ID NO: 5089480 - DNA, 25 bp, Homo sapien
tgaggctggatttaccaccgagaag

SEQ ID NO: 5089481 - DNA, 25 bp, Homo sapien
tgagagcagcctctacgacagacca

SEQ ID NO: 5089482 - DNA, 25 bp, Homo sapien
gatagaactcattaacttgcagctg

SEQ ID NO: 5089483 - DNA, 25 bp, Homo sapien
cttgcagctgagattaaacacttac

SEQ ID NO: 5089484 - DNA, 25 bp, Homo sapien
tacatcatttgctcagctttgggac

SEQ ID NO: 5089485 - DNA, 25 bp, Homo sapien
taaagttttggggtcatctcggaga

SEQ ID NO: 5089486 - DNA, 25 bp, Homo sapien
aaagttttggggtcatctcggagat

SEQ ID NO: 5089487 - DNA, 25 bp, Homo sapien
agttttggggtcatctcggagatca

SEQ ID NO: 5089488 - DNA, 25 bp, Homo sapien
aagttttggggtcatctcggagatc

SEQ ID NO: 5089489 - DNA, 25 bp, Homo sapien
tgcatgtaaagcactccacctggca

SEQ ID NO: 5089490 - DNA, 25 bp, Homo sapien
taaactgtcatcctaggtggctcca

SEQ ID NO: 5089491 - DNA, 25 bp, Homo sapien
cagagctgatttggcacagtgcaac

SEQ ID NO: 5089492 - DNA, 25 bp, Homo sapien
tagcaaaggtgtaagagtctcggcc

SEQ ID NO: 5089493 - DNA, 25 bp, Homo sapien
cagagtgtccattttactacacggg

SEQ ID NO: 5089494 - DNA, 25 bp, Homo sapien
tgcaagaggttcctgtatactaagg

SEQ ID NO: 5089495 - DNA, 25 bp, Homo sapien
tcaatgaccaatagtacaacagagt

SEQ ID NO: 5089496 - DNA, 25 bp, Homo sapien
ggattttgcatactgtcaagactgc

SEQ ID NO: 5089497 - DNA, 25 bp, Homo sapien
actacaggtatgcaccatcatgctc

SEQ ID NO: 5089498 - DNA, 25 bp, Homo sapien
gggactacaggtatgcaccatcatg

SEQ ID NO: 5089499 - DNA, 25 bp, Homo sapien
tacaggtatgcaccatcatgctcag

SEQ ID NO: 5089500 - DNA, 25 bp, Homo sapien
gactacaggtatgcaccatcatgct

SEQ ID NO: 5089501 - DNA, 25 bp, Homo sapien
atacgcagtccaccattatttattt

SEQ ID NO: 5089502 - DNA, 25 bp, Homo sapien
gcaatttggaaatacgcagtccacc

SEQ ID NO: 5089503 - DNA, 25 bp, Homo sapien
gaaatacgcagtccaccattattta

SEQ ID NO: 5089504 - DNA, 25 bp, Homo sapien
tttggaaatacgcagtccaccatta

SEQ ID NO: 5089505 - DNA, 25 bp, Homo sapien
tccacaaagctgagtgctcatcact

SEQ ID NO: 5089506 - DNA, 25 bp, Homo sapien
taggcctagggagtgtagctataga

SEQ ID NO: 5089507 - DNA, 25 bp, Homo sapien
gtttcaggaaggacgcaactgtgcc

SEQ ID NO: 5089508 - DNA, 25 bp, Homo sapien
tctttgtagctctaagtacgtccct

SEQ ID NO: 5089509 - DNA, 25 bp, Homo sapien
tcaagcggttctgcctcagattcct

SEQ ID NO: 5089510 - DNA, 25 bp, Homo sapien
tactatggttcgatcttggctcatc

SEQ ID NO: 5089511 - DNA, 25 bp, Homo sapien
aggtaattctgcccgcctcgggctc

SEQ ID NO: 5089512 - DNA, 25 bp, Homo sapien
ctggagtactatggttcgatcttgg

SEQ ID NO: 5089513 - DNA, 25 bp, Homo sapien
ccactgtgcggactttggcgtttag

SEQ ID NO: 5089514 - DNA, 25 bp, Homo sapien
tcaggtagaactttgagggaacaac

SEQ ID NO: 5089515 - DNA, 25 bp, Homo sapien
gagcagtgacatgattgcgcttaca

SEQ ID NO: 5089516 - DNA, 25 bp, Homo sapien
tctgaaggtatgttgtgccgaaggc

SEQ ID NO: 5089517 - DNA, 25 bp, Homo sapien
gaactgaacgaaagagcagagtccc

SEQ ID NO: 5089518 - DNA, 25 bp, Homo sapien
gagcagtcaaggaacaagatcacac

SEQ ID NO: 5089519 - DNA, 25 bp, Homo sapien
tgtcaagcactgtttaggtcctggg

SEQ ID NO: 5089520 - DNA, 25 bp, Homo sapien
tgtggcgtccacatgtgctgacatc

SEQ ID NO: 5089521 - DNA, 25 bp, Homo sapien
tactagtatatgtccttccagactt

SEQ ID NO: 5089522 - DNA, 25 bp, Homo sapien
ctagtatatgtccttccagactttc

SEQ ID NO: 5089523 - DNA, 25 bp, Homo sapien
aatactagtatatgtccttccagac

SEQ ID NO: 5089524 - DNA, 25 bp, Homo sapien
taaaatactagtatatgtccttcca

SEQ ID NO: 5089525 - DNA, 25 bp, Homo sapien
tccatgttcataaccccagagggga

SEQ ID NO: 5089526 - DNA, 25 bp, Homo sapien
tcatgtttatacaattggcatgaca

SEQ ID NO: 5089527 - DNA, 25 bp, Homo sapien
atccatgttcataaccccagagggg

SEQ ID NO: 5089528 - DNA, 25 bp, Homo sapien
atgtttatacaattggcatgacata

SEQ ID NO: 5089529 - DNA, 25 bp, Homo sapien
ttaaagctgaacattccacatagca

SEQ ID NO: 5089530 - DNA, 25 bp, Homo sapien
aatggctatgatagcctcatcaaaa

SEQ ID NO: 5089531 - DNA, 25 bp, Homo sapien
taaaatggctatgatagcctcatca

SEQ ID NO: 5089532 - DNA, 25 bp, Homo sapien
ttctgggttaaagctgaacattcca

SEQ ID NO: 5089533 - DNA, 25 bp, Homo sapien
gcagaaatgtgtatggtcaaagcca

SEQ ID NO: 5089534 - DNA, 25 bp, Homo sapien
tgtgtatggtcaaagccaagcagtt

SEQ ID NO: 5089535 - DNA, 25 bp, Homo sapien
caagcagttccatttacagctctgt

SEQ ID NO: 5089536 - DNA, 25 bp, Homo sapien
ctgagagattgtaccttctagttga

SEQ ID NO: 5089537 - DNA, 25 bp, Homo sapien
taatctgtttctgttagggcagggc

SEQ ID NO: 5089538 - DNA, 25 bp, Homo sapien
tcatgtaacacgcttggattctagg

SEQ ID NO: 5089539 - DNA, 25 bp, Homo sapien
caagcagagcctttcacttagggac

SEQ ID NO: 5089540 - DNA, 25 bp, Homo sapien
tttcagagatatgaattggagcccc

SEQ ID NO: 5089541 - DNA, 25 bp, Homo sapien
tctatatgcaaacactgattaactc

SEQ ID NO: 5089542 - DNA, 25 bp, Homo sapien
tcattcatacatggccttatttgag

SEQ ID NO: 5089543 - DNA, 25 bp, Homo sapien
cactagcaaaattcatgtcagtaaa

SEQ ID NO: 5089544 - DNA, 25 bp, Homo sapien
tcttgtaagttcattcatacatggc

SEQ ID NO: 5089545 - DNA, 25 bp, Homo sapien
aacagtgtctaaagtcactaagata

SEQ ID NO: 5089546 - DNA, 25 bp, Homo sapien
aagtcactaagataattcataacaa

SEQ ID NO: 5089547 - DNA, 25 bp, Homo sapien
taattcataacaaaacccattaatc

SEQ ID NO: 5089548 - DNA, 25 bp, Homo sapien
taagataattcataacaaaacccat

SEQ ID NO: 5089549 - DNA, 25 bp, Homo sapien
ttatttgtaaccccatgtgttaaga

SEQ ID NO: 5089550 - DNA, 25 bp, Homo sapien
atttgtaaccccatgtgttaagaag

SEQ ID NO: 5089551 - DNA, 25 bp, Homo sapien
tgtaaccccatgtgttaagaaggga

SEQ ID NO: 5089552 - DNA, 25 bp, Homo sapien
tatttgtaaccccatgtgttaagaa

SEQ ID NO: 5089553 - DNA, 25 bp, Homo sapien
tgaataaccaagtgttccaagccgt

SEQ ID NO: 5089554 - DNA, 25 bp, Homo sapien
taacccaaattggaatctagctggg

SEQ ID NO: 5089555 - DNA, 25 bp, Homo sapien
gatggcatgcacttcttgatttaca

SEQ ID NO: 5089556 - DNA, 25 bp, Homo sapien
tgccaatgattagtagactctcagc

SEQ ID NO: 5089557 - DNA, 25 bp, Homo sapien
cagtaggaaacttgcttgaggaata

SEQ ID NO: 5089558 - DNA, 25 bp, Homo sapien
tgaaaatacctgattaagctaggat

SEQ ID NO: 5089559 - DNA, 25 bp, Homo sapien
tcctatttgtggcatgaagaacgtt

SEQ ID NO: 5089560 - DNA, 25 bp, Homo sapien
gaagaacgttgaatagaaacatgtc

SEQ ID NO: 5089561 - DNA, 25 bp, Homo sapien
ttaagagattacttcagccctgcat

SEQ ID NO: 5089562 - DNA, 25 bp, Homo sapien
ggctaaggtcacttaacatctgatg

SEQ ID NO: 5089563 - DNA, 25 bp, Homo sapien
tacagaatactggtacgtggtactt

SEQ ID NO: 5089564 - DNA, 25 bp, Homo sapien
tgaactattcgttctaaactgccgg

SEQ ID NO: 5089565 - DNA, 25 bp, Homo sapien
ttaagattcacatgagagccccact

SEQ ID NO: 5089566 - DNA, 25 bp, Homo sapien
aataatcaagtctcggctaggatgc

SEQ ID NO: 5089567 - DNA, 25 bp, Homo sapien
tagatctctccatgtaccctgcagg

SEQ ID NO: 5089568 - DNA, 25 bp, Homo sapien
ttaatcctgacaaccgtagtgcaag

SEQ ID NO: 5089569 - DNA, 25 bp, Homo sapien
caataccgatttgatctgcttgtgg

SEQ ID NO: 5089570 - DNA, 25 bp, Homo sapien
tgtgttccttgtagcccaataccga

SEQ ID NO: 5089571 - DNA, 25 bp, Homo sapien
tcctgaggccaagcataagattata

SEQ ID NO: 5089572 - DNA, 25 bp, Homo sapien
gaatatctggttaagcaattgtacc

SEQ ID NO: 5089573 - DNA, 25 bp, Homo sapien
gatttctaagaggaggcgtaagcct

SEQ ID NO: 5089574 - DNA, 25 bp, Homo sapien
cagactgtgcactatagtagcttca

SEQ ID NO: 5089575 - DNA, 25 bp, Homo sapien
caaaggaagttaacagacactgtca

SEQ ID NO: 5089576 - DNA, 25 bp, Homo sapien
taccaatagagtgtaggtttccctg

SEQ ID NO: 5089577 - DNA, 25 bp, Homo sapien
caatgtcagtgatgctagaaattag

SEQ ID NO: 5089578 - DNA, 25 bp, Homo sapien
caaaatgagagtacatcaatgtcag

SEQ ID NO: 5089579 - DNA, 25 bp, Homo sapien
tggaagcaatgaacaactagcagat

SEQ ID NO: 5089580 - DNA, 25 bp, Homo sapien
tcctagtaatgctatcatggaagca

SEQ ID NO: 5089581 - DNA, 25 bp, Homo sapien
tcttgccaagagtagtgatctagcc

SEQ ID NO: 5089582 - DNA, 25 bp, Homo sapien
gatctagccgaggtgaaaacattca

SEQ ID NO: 5089583 - DNA, 25 bp, Homo sapien
ggaactacatcctacaagttaagga

SEQ ID NO: 5089584 - DNA, 25 bp, Homo sapien
catgatagtcatgtgacgacagaga

SEQ ID NO: 5089585 - DNA, 25 bp, Homo sapien
tgcccgtggcacttctgcaggcgtc

SEQ ID NO: 5089586 - DNA, 25 bp, Homo sapien
tcatgcccgtggcacttctgcaggc

SEQ ID NO: 5089587 - DNA, 25 bp, Homo sapien
ctgcggtgcgtagcgaggtgggccg

SEQ ID NO: 5089588 - DNA, 25 bp, Homo sapien
tgcgtagcgaggtgggccgggtcat

SEQ ID NO: 5089589 - DNA, 25 bp, Homo sapien
tctgggtgccgctcggaagagcctt

SEQ ID NO: 5089590 - DNA, 25 bp, Homo sapien
gatgcccgcgaaggctcctctgggt

SEQ ID NO: 5089591 - DNA, 25 bp, Homo sapien
ccggcgtaggctcgggcagaatccc

SEQ ID NO: 5089592 - DNA, 25 bp, Homo sapien
tcggatccgagttttcgcctctgtc

SEQ ID NO: 5089593 - DNA, 25 bp, Homo sapien
agctcagcgccactcttccggcgtg

SEQ ID NO: 5089594 - DNA, 25 bp, Homo sapien
ttccggcgtgccctgatggacagac

SEQ ID NO: 5089595 - DNA, 25 bp, Homo sapien
cactcttccggcgtgccctgatgga

SEQ ID NO: 5089596 - DNA, 25 bp, Homo sapien
tcagctcagcgccactcttccggcg

SEQ ID NO: 5089597 - DNA, 25 bp, Homo sapien
cactacaacttggaagtattcccct

SEQ ID NO: 5089598 - DNA, 25 bp, Homo sapien
acgacggttcccctagccgcaacag

SEQ ID NO: 5089599 - DNA, 25 bp, Homo sapien
acaacaacactacaacttggaagta

SEQ ID NO: 5089600 - DNA, 25 bp, Homo sapien
acggttcccctagccgcaacagcag

SEQ ID NO: 5089601 - DNA, 25 bp, Homo sapien
ggagtgataacagtaccaagtttct

SEQ ID NO: 5089602 - DNA, 25 bp, Homo sapien
catctttccatgtatctggagtgat

SEQ ID NO: 5089603 - DNA, 25 bp, Homo sapien
ctgtggtattcctagcaccatcttt

SEQ ID NO: 5089604 - DNA, 25 bp, Homo sapien
tggtattcctagcaccatctttcca

SEQ ID NO: 5089605 - DNA, 25 bp, Homo sapien
ttttgaagtcaaagctttattttca

SEQ ID NO: 5089606 - DNA, 25 bp, Homo sapien
tttcattcagctttcttccaccact

SEQ ID NO: 5089607 - DNA, 25 bp, Homo sapien
cttgctttttttgaagtcaaagctt

SEQ ID NO: 5089608 - DNA, 25 bp, Homo sapien
attttcattcagctttcttccacca

SEQ ID NO: 5089609 - DNA, 25 bp, Homo sapien
attctacaagtggagaacttattct

SEQ ID NO: 5089610 - DNA, 25 bp, Homo sapien
ggttggtgcacagaacttttacaaa

SEQ ID NO: 5089611 - DNA, 25 bp, Homo sapien
acaaattctacaagtggagaactta

SEQ ID NO: 5089612 - DNA, 25 bp, Homo sapien
tgagaacctggttggtgcacagaac

SEQ ID NO: 5089613 - DNA, 25 bp, Homo sapien
aaccttttttccacacatcgcacag

SEQ ID NO: 5089614 - DNA, 25 bp, Homo sapien
aaaccttttttccacacatcgcaca

SEQ ID NO: 5089615 - DNA, 25 bp, Homo sapien
ccttttttccacacatcgcacagat

SEQ ID NO: 5089616 - DNA, 25 bp, Homo sapien
ttttttccacacatcgcacagatgc

SEQ ID NO: 5089617 - DNA, 25 bp, Homo sapien
taagaggctgctgattctaataact

SEQ ID NO: 5089618 - DNA, 25 bp, Homo sapien
tctaataactatgacaccagcaagg

SEQ ID NO: 5089619 - DNA, 25 bp, Homo sapien
gaaaccgcaattagttaagaggctg

SEQ ID NO: 5089620 - DNA, 25 bp, Homo sapien
caaaagactagttacactgttgctg

SEQ ID NO: 5089621 - DNA, 25 bp, Homo sapien
tatttatttggccatatggatgctc

SEQ ID NO: 5089622 - DNA, 25 bp, Homo sapien
tctaaaattcagtgtatttatttgg

SEQ ID NO: 5089623 - DNA, 25 bp, Homo sapien
atggatgctccttgtgttcttggtc

SEQ ID NO: 5089624 - DNA, 25 bp, Homo sapien
tatttggccatatggatgctccttg

SEQ ID NO: 5089625 - DNA, 25 bp, Homo sapien
aacactgttctggttttcatgacaa

SEQ ID NO: 5089626 - DNA, 25 bp, Homo sapien
tacatgcaacatggacaaacactgt

SEQ ID NO: 5089627 - DNA, 25 bp, Homo sapien
catgcaacatggacaaacactgttc

SEQ ID NO: 5089628 - DNA, 25 bp, Homo sapien
acaaacactgttctggttttcatga

SEQ ID NO: 5089629 - DNA, 25 bp, Homo sapien
gagtgagctcttgtatccaaaaaaa

SEQ ID NO: 5089630 - DNA, 25 bp, Homo sapien
acagagtgagctcttgtatccaaaa

SEQ ID NO: 5089631 - DNA, 25 bp, Homo sapien
aacagagtgagctcttgtatccaaa

SEQ ID NO: 5089632 - DNA, 25 bp, Homo sapien
tttggtttcccacggtaggctgcag

SEQ ID NO: 5089633 - DNA, 25 bp, Homo sapien
cattcatgtatctcatcacactttc

SEQ ID NO: 5089634 - DNA, 25 bp, Homo sapien
tactgcagttggaaatagggaatgc

SEQ ID NO: 5089635 - DNA, 25 bp, Homo sapien
aaaagcagaagtcctgaacctctga

SEQ ID NO: 5089636 - DNA, 25 bp, Homo sapien
gacaacatacaagcggttaacaaac

SEQ ID NO: 5089637 - DNA, 25 bp, Homo sapien
caagtaactcgtggccaggtgtggt

SEQ ID NO: 5089638 - DNA, 25 bp, Homo sapien
aaagtaccaaaattagccacgcttg

SEQ ID NO: 5089639 - DNA, 25 bp, Homo sapien
gaatgcgcctacactgatggaaatg

SEQ ID NO: 5089640 - DNA, 25 bp, Homo sapien
taggagaacctaagtgcggccactg

SEQ ID NO: 5089641 - DNA, 25 bp, Homo sapien
tcgaggattctaggatacacacccc

SEQ ID NO: 5089642 - DNA, 25 bp, Homo sapien
gttaaaaggtattcgaaggctgcca

SEQ ID NO: 5089643 - DNA, 25 bp, Homo sapien
ccattcatggaaggaggctactcaa

SEQ ID NO: 5089644 - DNA, 25 bp, Homo sapien
gttgatgataaagggaaacctcttc

SEQ ID NO: 5089645 - DNA, 25 bp, Homo sapien
taaagaggcaccacatctagtaagg

SEQ ID NO: 5089646 - DNA, 25 bp, Homo sapien
taaggaatattcaaatggctcagaa

SEQ ID NO: 5089647 - DNA, 25 bp, Homo sapien
gctatggctatgcaggaaaacaccc

SEQ ID NO: 5089648 - DNA, 25 bp, Homo sapien
ccctgtagcggttggactggaactg

SEQ ID NO: 5089649 - DNA, 25 bp, Homo sapien
tacaattggaagaatccccacttgg

SEQ ID NO: 5089650 - DNA, 25 bp, Homo sapien
ggcctaaaagcaatgacaacccagg

SEQ ID NO: 5089651 - DNA, 25 bp, Homo sapien
catgatacggtgcactgaaaagaac

SEQ ID NO: 5089652 - DNA, 25 bp, Homo sapien
gaaaagagcatcattgccatctggt

SEQ ID NO: 5089653 - DNA, 25 bp, Homo sapien
tgagacccaatgattcaggcaaggc

SEQ ID NO: 5089654 - DNA, 25 bp, Homo sapien
cacatttagtaactgagtcctgtca

SEQ ID NO: 5089655 - DNA, 25 bp, Homo sapien
ggtggagagacctactattaccaat

SEQ ID NO: 5089656 - DNA, 25 bp, Homo sapien
tacccatggaacaagaatactctaa

SEQ ID NO: 5089657 - DNA, 25 bp, Homo sapien
caagataaatcacatgctgggccat

SEQ ID NO: 5089658 - DNA, 25 bp, Homo sapien
cactgatccaacaagcgcaagattg

SEQ ID NO: 5089659 - DNA, 25 bp, Homo sapien
gaagagaagctagtatacccatgga

SEQ ID NO: 5089660 - DNA, 25 bp, Homo sapien
tgccctaagcagctagaaaactggg

SEQ ID NO: 5089661 - DNA, 25 bp, Homo sapien
tgagaggcgtgagtcctgaagacac

SEQ ID NO: 5089662 - DNA, 25 bp, Homo sapien
tctgatactgaatagcaggctgcac

SEQ ID NO: 5089663 - DNA, 25 bp, Homo sapien
catgactgactgtgagggaccagat

SEQ ID NO: 5089664 - DNA, 25 bp, Homo sapien
tgtgtgaccctttcggattcaggag

SEQ ID NO: 5089665 - DNA, 25 bp, Homo sapien
taaggagtacaaaccaggctagctg

SEQ ID NO: 5089666 - DNA, 25 bp, Homo sapien
gatttcacgaatctagggcctgcaa

SEQ ID NO: 5089667 - DNA, 25 bp, Homo sapien
tgcagtcgggcatccagagctaagt

SEQ ID NO: 5089668 - DNA, 25 bp, Homo sapien
aagacatttaagtggctcgttgagc

SEQ ID NO: 5089669 - DNA, 25 bp, Homo sapien
gttggataatatacccaccatttgg

SEQ ID NO: 5089670 - DNA, 25 bp, Homo sapien
gaaccttaacatttgataggaagac

SEQ ID NO: 5089671 - DNA, 25 bp, Homo sapien
cctgttcttccatgagatacgtcat

SEQ ID NO: 5089672 - DNA, 25 bp, Homo sapien
gattcagctggtacgaagactttgc

SEQ ID NO: 5089673 - DNA, 25 bp, Homo sapien
caagctgcctttcggtctgctagaa

SEQ ID NO: 5089674 - DNA, 25 bp, Homo sapien
agtttactaattctgcagccgccct

SEQ ID NO: 5089675 - DNA, 25 bp, Homo sapien
tgttagtgaagatacctcagctcgt

SEQ ID NO: 5089676 - DNA, 25 bp, Homo sapien
cgatggtgccaagaattgtcataat

SEQ ID NO: 5089677 - DNA, 25 bp, Homo sapien
aaaactccataatgtttcctttgct

SEQ ID NO: 5089678 - DNA, 25 bp, Homo sapien
cttgccccgggcgatggtgccaaga

SEQ ID NO: 5089679 - DNA, 25 bp, Homo sapien
gtactggcacctgcaaaactccata

SEQ ID NO: 5089680 - DNA, 25 bp, Homo sapien
tgggtgcgtcccttcagaaattcag

SEQ ID NO: 5089681 - DNA, 25 bp, Homo sapien
gaaaccataggctcagggctgacac

SEQ ID NO: 5089682 - DNA, 25 bp, Homo sapien
atctcagtaagaagtgacagtggcc

SEQ ID NO: 5089683 - DNA, 25 bp, Homo sapien
gggccatatgatccttacttccaga

SEQ ID NO: 5089684 - DNA, 25 bp, Homo sapien
tagctaaatcttctgtggcctggtg

SEQ ID NO: 5089685 - DNA, 25 bp, Homo sapien
tatagaccaaggacaagcggcattg

SEQ ID NO: 5089686 - DNA, 25 bp, Homo sapien
caatatgagcactaggaatccggag

SEQ ID NO: 5089687 - DNA, 25 bp, Homo sapien
gacagaagacatgcacatatgggac

SEQ ID NO: 5089688 - DNA, 25 bp, Homo sapien
ccattgatgagcgaagtgtagcatt

SEQ ID NO: 5089689 - DNA, 25 bp, Homo sapien
ctccattgatgagcgaagtgtagca

SEQ ID NO: 5089690 - DNA, 25 bp, Homo sapien
atcttgagctccattgatgagcgaa

SEQ ID NO: 5089691 - DNA, 25 bp, Homo sapien
tgagctccattgatgagcgaagtgt

SEQ ID NO: 5089692 - DNA, 25 bp, Homo sapien
tgattccgccgagagtgtaacatct

SEQ ID NO: 5089693 - DNA, 25 bp, Homo sapien
ggcagtaacacaccactagatggcg

SEQ ID NO: 5089694 - DNA, 25 bp, Homo sapien
caagcttcctggtgcgatagggccc

SEQ ID NO: 5089695 - DNA, 25 bp, Homo sapien
ccgtaaggaagcgtaggcagtaaca

SEQ ID NO: 5089696 - DNA, 25 bp, Homo sapien
tgcatgcaaggcctacagcaggtgc

SEQ ID NO: 5089697 - DNA, 25 bp, Homo sapien
tgccaggtgaccaatcgccatagtt

SEQ ID NO: 5089698 - DNA, 25 bp, Homo sapien
cagcaggtgctctaggttggtaatc

SEQ ID NO: 5089699 - DNA, 25 bp, Homo sapien
taacttccatgggtacatcagatcc

SEQ ID NO: 5089700 - DNA, 25 bp, Homo sapien
caccttgtctggatgctccaccctg

SEQ ID NO: 5089701 - DNA, 25 bp, Homo sapien
atttctcccttggctgctgtcttcc

SEQ ID NO: 5089702 - DNA, 25 bp, Homo sapien
gctgctgtcttcctcaaatcattgg

SEQ ID NO: 5089703 - DNA, 25 bp, Homo sapien
gctgtcttcctcaaatcattggcat

SEQ ID NO: 5089704 - DNA, 25 bp, Homo sapien
ggctgctgtcttcctcaaatcattg

SEQ ID NO: 5089705 - DNA, 25 bp, Homo sapien
aattcaatcacctttggccgcctgg

SEQ ID NO: 5089706 - DNA, 25 bp, Homo sapien
tagagatgtcctagccagtctgggt

SEQ ID NO: 5089707 - DNA, 25 bp, Homo sapien
gatttcataggcaagctcacctcag

SEQ ID NO: 5089708 - DNA, 25 bp, Homo sapien
tcatataccagctaccaaaggagtg

SEQ ID NO: 5089709 - DNA, 25 bp, Homo sapien
tgaatcctcttttcgggtgtgtgtg

SEQ ID NO: 5089710 - DNA, 25 bp, Homo sapien
tcctcttttcgggtgtgtgtgtagg

SEQ ID NO: 5089711 - DNA, 25 bp, Homo sapien
aatcctcttttcgggtgtgtgtgta

SEQ ID NO: 5089712 - DNA, 25 bp, Homo sapien
ccaggtctgtccctctcatattcag

SEQ ID NO: 5089713 - DNA, 25 bp, Homo sapien
aaagatgctcaacctatcagtaata

SEQ ID NO: 5089714 - DNA, 25 bp, Homo sapien
gctcaacctatcagtaataagcaaa

SEQ ID NO: 5089715 - DNA, 25 bp, Homo sapien
catgccacaatctgggaaaaattat

SEQ ID NO: 5089716 - DNA, 25 bp, Homo sapien
aagacatgccacaatctgggaaaaa

SEQ ID NO: 5089717 - DNA, 25 bp, Homo sapien
gactttccatatcatttccacacca

SEQ ID NO: 5089718 - DNA, 25 bp, Homo sapien
aatgatcgacgcttatttggaaagg

SEQ ID NO: 5089719 - DNA, 25 bp, Homo sapien
gaatggtttaggcaagaacgttctc

SEQ ID NO: 5089720 - DNA, 25 bp, Homo sapien
gaaagaaaattcgtccaggatactg

SEQ ID NO: 5089721 - DNA, 25 bp, Homo sapien
aaggtgtactctgagagacactgtc

SEQ ID NO: 5089722 - DNA, 25 bp, Homo sapien
caggaaaaggaccaaggtgtactct

SEQ ID NO: 5089723 - DNA, 25 bp, Homo sapien
gaccaaggtgtactctgagagacac

SEQ ID NO: 5089724 - DNA, 25 bp, Homo sapien
aggaaaaggaccaaggtgtactctg

SEQ ID NO: 5089725 - DNA, 25 bp, Homo sapien
tccatagaggcataattagacctgc

SEQ ID NO: 5089726 - DNA, 25 bp, Homo sapien
gaaggcgggccatctggaatgcatc

SEQ ID NO: 5089727 - DNA, 25 bp, Homo sapien
ggaatgcatcgtccagatcggctcc

SEQ ID NO: 5089728 - DNA, 25 bp, Homo sapien
ggcaccctgacagctttttgggact

SEQ ID NO: 5089729 - DNA, 25 bp, Homo sapien
tccagatgttcaacacaaagttggg

SEQ ID NO: 5089730 - DNA, 25 bp, Homo sapien
caattccaagcctgccacagtgatt

SEQ ID NO: 5089731 - DNA, 25 bp, Homo sapien
acagtgattcttattttggttcctc

SEQ ID NO: 5089732 - DNA, 25 bp, Homo sapien
tctctggggggctaccttaggagac

SEQ ID NO: 5089733 - DNA, 25 bp, Homo sapien
tccaaacagttccatatgcattggg

SEQ ID NO: 5089734 - DNA, 25 bp, Homo sapien
acagcctattttcaaccgtgattgg

SEQ ID NO: 5089735 - DNA, 25 bp, Homo sapien
gactgcaccatatgaaacagcctat

SEQ ID NO: 5089736 - DNA, 25 bp, Homo sapien
ccgtgattggcttacaaagaggcaa

SEQ ID NO: 5089737 - DNA, 25 bp, Homo sapien
catacacgggagtcatgacctggac

SEQ ID NO: 5089738 - DNA, 25 bp, Homo sapien
cctcaggagagacttgtggctggac

SEQ ID NO: 5089739 - DNA, 25 bp, Homo sapien
gaccatgcagactgggacgtgctca

SEQ ID NO: 5089740 - DNA, 25 bp, Homo sapien
ttcaccatgggtttactttgccggc

SEQ ID NO: 5089741 - DNA, 25 bp, Homo sapien
caggtccccaaagtcatcctagaga

SEQ ID NO: 5089742 - DNA, 25 bp, Homo sapien
cttatgcgggaagatgttgagagcc

SEQ ID NO: 5089743 - DNA, 25 bp, Homo sapien
tcatcttgttggatatgccccaggg

SEQ ID NO: 5089744 - DNA, 25 bp, Homo sapien
taattcagccctggatggatcaaca

SEQ ID NO: 5089745 - DNA, 25 bp, Homo sapien
tatttccaacaagtggaaacacagg

SEQ ID NO: 5089746 - DNA, 25 bp, Homo sapien
gcgttctcagacattgacaggcaga

SEQ ID NO: 5089747 - DNA, 25 bp, Homo sapien
tcgtaacatcgaaaaggtgctggcg

SEQ ID NO: 5089748 - DNA, 25 bp, Homo sapien
gagcactgtgagttcgtaacatcga

SEQ ID NO: 5089749 - DNA, 25 bp, Homo sapien
cattggcaatctgctttggagggaa

SEQ ID NO: 5089750 - DNA, 25 bp, Homo sapien
agagtaaccataattaatcttatag

SEQ ID NO: 5089751 - DNA, 25 bp, Homo sapien
ggcaatctgctttggagggaataaa

SEQ ID NO: 5089752 - DNA, 25 bp, Homo sapien
ttggccctcaaaagagtaaccataa

SEQ ID NO: 5089753 - DNA, 25 bp, Homo sapien
tgaggaggccaaattggccataagc

SEQ ID NO: 5089754 - DNA, 25 bp, Homo sapien
gacagttcataagtgatgctgaggg

SEQ ID NO: 5089755 - DNA, 25 bp, Homo sapien
ttgtacaaaatagagtttaagctga

SEQ ID NO: 5089756 - DNA, 25 bp, Homo sapien
gatttatgccaaatgaggaggccaa

SEQ ID NO: 5089757 - DNA, 25 bp, Homo sapien
ccccaatagggagcaagatgttgcc

SEQ ID NO: 5089758 - DNA, 25 bp, Homo sapien
cactttgtatttccaggcccttggg

SEQ ID NO: 5089759 - DNA, 25 bp, Homo sapien
gatgttgccagttctgtcatagtca

SEQ ID NO: 5089760 - DNA, 25 bp, Homo sapien
ggtgaactgccaggataggccctgc

SEQ ID NO: 5089761 - DNA, 25 bp, Homo sapien
gcgggattcctagcggccaatccgg

SEQ ID NO: 5089762 - DNA, 25 bp, Homo sapien
gaggtccggccgcttgggtgcgcgc

SEQ ID NO: 5089763 - DNA, 25 bp, Homo sapien
caatccggaggcgggtaggtgaagg

SEQ ID NO: 5089764 - DNA, 25 bp, Homo sapien
gcagggctttagaggggcgggattc

SEQ ID NO: 5089765 - DNA, 25 bp, Homo sapien
gcgagtccgcctgccctccggtgcg

SEQ ID NO: 5089766 - DNA, 25 bp, Homo sapien
aggacgggcccggacggcgcagtca

SEQ ID NO: 5089767 - DNA, 25 bp, Homo sapien
gcgcagtcaccgacagggcgagtcc

SEQ ID NO: 5089768 - DNA, 25 bp, Homo sapien
gcagcgtcgcttcctccggacggag

SEQ ID NO: 5089769 - DNA, 25 bp, Homo sapien
tcccactgtgagcggcgtggtctgc

SEQ ID NO: 5089770 - DNA, 25 bp, Homo sapien
gcggcccgggctagcagtccttttc

SEQ ID NO: 5089771 - DNA, 25 bp, Homo sapien
agagcctactaagcgcaagctccca

SEQ ID NO: 5089772 - DNA, 25 bp, Homo sapien
aggcggccgcggacgacggcgcggg

SEQ ID NO: 5089773 - DNA, 25 bp, Homo sapien
aagtcatctacataacttctggatc

SEQ ID NO: 5089774 - DNA, 25 bp, Homo sapien
tttttgttttcagaaccatgcccaa

SEQ ID NO: 5089775 - DNA, 25 bp, Homo sapien
tgccttcaaggaagtcatctacata

SEQ ID NO: 5089776 - DNA, 25 bp, Homo sapien
caatgtttaacatattcttggactt

SEQ ID NO: 5089777 - DNA, 25 bp, Homo sapien
cagggaaacttatagctttaaatgt

SEQ ID NO: 5089778 - DNA, 25 bp, Homo sapien
attaaagagctcaaatcatgaaaca

SEQ ID NO: 5089779 - DNA, 25 bp, Homo sapien
gggaaggaattaaagagctcaaatc

SEQ ID NO: 5089780 - DNA, 25 bp, Homo sapien
attctttcaaacaacccatgggtca

SEQ ID NO: 5089781 - DNA, 25 bp, Homo sapien
gaaacaacaccagccaacagaaaac

SEQ ID NO: 5089782 - DNA, 25 bp, Homo sapien
gccagatttaacctgccagccatag

SEQ ID NO: 5089783 - DNA, 25 bp, Homo sapien
cattaagtgcaaatggtctaaacca

SEQ ID NO: 5089784 - DNA, 25 bp, Homo sapien
gtaagatggcacagtttcattcaac

SEQ ID NO: 5089785 - DNA, 25 bp, Homo sapien
agcaatacctcccacctaagcttcc

SEQ ID NO: 5089786 - DNA, 25 bp, Homo sapien
aacaaaagcacgaaatatggaaaag

SEQ ID NO: 5089787 - DNA, 25 bp, Homo sapien
acaaaagcacgaaatatggaaaaga

SEQ ID NO: 5089788 - DNA, 25 bp, Homo sapien
cacttcaactcaaaatgcatgacaa

SEQ ID NO: 5089789 - DNA, 25 bp, Homo sapien
taaaagtcacccagtaggaatggag

SEQ ID NO: 5089790 - DNA, 25 bp, Homo sapien
tcagaattttctaggcatcaggcaa

SEQ ID NO: 5089791 - DNA, 25 bp, Homo sapien
tatatgcccactagaatacagaccc

SEQ ID NO: 5089792 - DNA, 25 bp, Homo sapien
tcaggcaaattattagcaaccaagc

SEQ ID NO: 5089793 - DNA, 25 bp, Homo sapien
ttaatttggatacccatgccagtcc

SEQ ID NO: 5089794 - DNA, 25 bp, Homo sapien
cctggttgggcagtggccgaccaat

SEQ ID NO: 5089795 - DNA, 25 bp, Homo sapien
ccatgtggagacaactttctgtgct

SEQ ID NO: 5089796 - DNA, 25 bp, Homo sapien
gcagtggccgaccaatcactggtga

SEQ ID NO: 5089797 - DNA, 25 bp, Homo sapien
taggtagaggccaagaaaatagttc

SEQ ID NO: 5089798 - DNA, 25 bp, Homo sapien
catgatacattatgggcatggcttc

SEQ ID NO: 5089799 - DNA, 25 bp, Homo sapien
gcatggcttccccaatacagacaat

SEQ ID NO: 5089800 - DNA, 25 bp, Homo sapien
cccaaactggaatcttacatgatac

SEQ ID NO: 5089801 - DNA, 25 bp, Homo sapien
ttctctgacatgcaaattataccca

SEQ ID NO: 5089802 - DNA, 25 bp, Homo sapien
taaaccacatcactctagacactag

SEQ ID NO: 5089803 - DNA, 25 bp, Homo sapien
cagactagtcgacataacaatcagg

SEQ ID NO: 5089804 - DNA, 25 bp, Homo sapien
tagaagagccatattcaagaagtcc

SEQ ID NO: 5089805 - DNA, 25 bp, Homo sapien
aagatttccgttccttgcccatagt

SEQ ID NO: 5089806 - DNA, 25 bp, Homo sapien
taagactacagtatcaacaggcaca

SEQ ID NO: 5089807 - DNA, 25 bp, Homo sapien
gtctattttagaacacggcctcctc

SEQ ID NO: 5089808 - DNA, 25 bp, Homo sapien
tgttaatacagtcgaattcctgccg

SEQ ID NO: 5089809 - DNA, 25 bp, Homo sapien
tgaagcaaatcaggcacgaggcagt

SEQ ID NO: 5089810 - DNA, 25 bp, Homo sapien
ctgctaacatgggtatggctgtctc

SEQ ID NO: 5089811 - DNA, 25 bp, Homo sapien
tgtagcggcggaagctcacagagaa

SEQ ID NO: 5089812 - DNA, 25 bp, Homo sapien
cagggatctgttgtagcggcggaag

SEQ ID NO: 5089813 - DNA, 25 bp, Homo sapien
tgcaggctaaaagggaaagtcctat

SEQ ID NO: 5089814 - DNA, 25 bp, Homo sapien
attaccgcgcgacagatatactgca

SEQ ID NO: 5089815 - DNA, 25 bp, Homo sapien
agattaccgcgcgacagatatactg

SEQ ID NO: 5089816 - DNA, 25 bp, Homo sapien
gatatactgcaggctaaaagggaaa

SEQ ID NO: 5089817 - DNA, 25 bp, Homo sapien
ccttgactggttctcgttccaacca

SEQ ID NO: 5089818 - DNA, 25 bp, Homo sapien
actggttctcgttccaaccagcgaa

SEQ ID NO: 5089819 - DNA, 25 bp, Homo sapien
tgactggttctcgttccaaccagcg

SEQ ID NO: 5089820 - DNA, 25 bp, Homo sapien
tttgccttgactggttctcgttcca

SEQ ID NO: 5089821 - DNA, 25 bp, Homo sapien
gaactgcactatgcccttgtggcca

SEQ ID NO: 5089822 - DNA, 25 bp, Homo sapien
tcacggttcacaaaatcatcctggg

SEQ ID NO: 5089823 - DNA, 25 bp, Homo sapien
gatgcacatgaaagcggacctagtt

SEQ ID NO: 5089824 - DNA, 25 bp, Homo sapien
catcctgggcataggaacagatcca

SEQ ID NO: 5089825 - DNA, 25 bp, Homo sapien
taactctgcattaactatagaaagg

SEQ ID NO: 5089826 - DNA, 25 bp, Homo sapien
cactttggtatatgatcttcaggga

SEQ ID NO: 5089827 - DNA, 25 bp, Homo sapien
taacctgcttctgatgcagtgggag

SEQ ID NO: 5089828 - DNA, 25 bp, Homo sapien
tttccaggtacattataagctcaag

SEQ ID NO: 5089829 - DNA, 25 bp, Homo sapien
tttgtatcaggtggaaatgccatct

SEQ ID NO: 5089830 - DNA, 25 bp, Homo sapien
taaacaaggctaaagtagcaaggct

SEQ ID NO: 5089831 - DNA, 25 bp, Homo sapien
tagttgacaggctacaatgggattc

SEQ ID NO: 5089832 - DNA, 25 bp, Homo sapien
cacacttatatgtatgcggaaggga

SEQ ID NO: 5089833 - DNA, 25 bp, Homo sapien
tcagagtttctcaagagggacagtc

SEQ ID NO: 5089834 - DNA, 25 bp, Homo sapien
taatggccaaagctgcaacgttgca

SEQ ID NO: 5089835 - DNA, 25 bp, Homo sapien
tatgaagcactatcctaggcactga

SEQ ID NO: 5089836 - DNA, 25 bp, Homo sapien
ctggcaagaaggaatcaacggtctg

SEQ ID NO: 5089837 - DNA, 25 bp, Homo sapien
gcaaattttcgattttctaacttca

SEQ ID NO: 5089838 - DNA, 25 bp, Homo sapien
atgtggcaaattttcgattttctaa

SEQ ID NO: 5089839 - DNA, 25 bp, Homo sapien
tcttttaaatatctagttgtactta

SEQ ID NO: 5089840 - DNA, 25 bp, Homo sapien
attttcgattttctaacttcagtga

SEQ ID NO: 5089841 - DNA, 25 bp, Homo sapien
gagccttagtgttttccagcgttca

SEQ ID NO: 5089842 - DNA, 25 bp, Homo sapien
caaagagtaagcctgcacctgtcca

SEQ ID NO: 5089843 - DNA, 25 bp, Homo sapien
tccactagaggtcaagatcaacaaa

SEQ ID NO: 5089844 - DNA, 25 bp, Homo sapien
cagttttgtgcccatactgcaagag

SEQ ID NO: 5089845 - DNA, 25 bp, Homo sapien
tttactggacatagaggtggcaagc

SEQ ID NO: 5089846 - DNA, 25 bp, Homo sapien
agcagagctttcaagggttgggcca

SEQ ID NO: 5089847 - DNA, 25 bp, Homo sapien
taaaagaactagtcacccaaagagc

SEQ ID NO: 5089848 - DNA, 25 bp, Homo sapien
cacgtaactgccacacctgaatgtg

SEQ ID NO: 5089849 - DNA, 25 bp, Homo sapien
taacctacattcgagcattttaggc

SEQ ID NO: 5089850 - DNA, 25 bp, Homo sapien
ggtttactttcgatcctccttgcta

SEQ ID NO: 5089851 - DNA, 25 bp, Homo sapien
tcacctctgtgaaaaacgaaaatct

SEQ ID NO: 5089852 - DNA, 25 bp, Homo sapien
cctctcagctctggatatggctgtc

SEQ ID NO: 5089853 - DNA, 25 bp, Homo sapien
tatcctgcaaagaactggccaccag

SEQ ID NO: 5089854 - DNA, 25 bp, Homo sapien
ccagtagaccaacggaaagtgtgct

SEQ ID NO: 5089855 - DNA, 25 bp, Homo sapien
tacgtcagttcaggtagtgcccaca

SEQ ID NO: 5089856 - DNA, 25 bp, Homo sapien
tgtaggatgcacctcggaatcatgc

SEQ ID NO: 5089857 - DNA, 25 bp, Homo sapien
aaccttaggacgggattgctgtctt

SEQ ID NO: 5089858 - DNA, 25 bp, Homo sapien
caaaaccttaggacgggattgctgt

SEQ ID NO: 5089859 - DNA, 25 bp, Homo sapien
cttaggacgggattgctgtcttcct

SEQ ID NO: 5089860 - DNA, 25 bp, Homo sapien
gcaaaaccttaggacgggattgctg

SEQ ID NO: 5089861 - DNA, 25 bp, Homo sapien
catctcagcctatagtctattttgg

SEQ ID NO: 5089862 - DNA, 25 bp, Homo sapien
tgtgcactcgaaaaagtgtgtcttc

SEQ ID NO: 5089863 - DNA, 25 bp, Homo sapien
tttgagacttactctccatctcagc

SEQ ID NO: 5089864 - DNA, 25 bp, Homo sapien
ttttccgcatctttctgttactgac

SEQ ID NO: 5089865 - DNA, 25 bp, Homo sapien
agaaacaacctctttggtggatatg

SEQ ID NO: 5089866 - DNA, 25 bp, Homo sapien
tatgaaaggacaactgtatgcattt

SEQ ID NO: 5089867 - DNA, 25 bp, Homo sapien
actttccaacactgtagatgaggtt

SEQ ID NO: 5089868 - DNA, 25 bp, Homo sapien
cattggctgggttcctagaaacaac

SEQ ID NO: 5089869 - DNA, 25 bp, Homo sapien
gctgccccatgttctgaaatgtgaa

SEQ ID NO: 5089870 - DNA, 25 bp, Homo sapien
gagcagtaagtacaaccagatgtgt

SEQ ID NO: 5089871 - DNA, 25 bp, Homo sapien
aagtacaaccagatgtgtggacggg

SEQ ID NO: 5089872 - DNA, 25 bp, Homo sapien
tgaggctgccccatgttctgaaatg

SEQ ID NO: 5089873 - DNA, 25 bp, Homo sapien
gtggttctggccatcggaaagaaga

SEQ ID NO: 5089874 - DNA, 25 bp, Homo sapien
agtgaccagtgagccgtgggctggg

SEQ ID NO: 5089875 - DNA, 25 bp, Homo sapien
agagtgaccagtgagccgtgggctg

SEQ ID NO: 5089876 - DNA, 25 bp, Homo sapien
gaccagtgagccgtgggctgggagc

SEQ ID NO: 5089877 - DNA, 25 bp, Homo sapien
caggtgttgagagtgccagcagaaa

SEQ ID NO: 5089878 - DNA, 25 bp, Homo sapien
gagaagcacccacatgaaggcctgg

SEQ ID NO: 5089879 - DNA, 25 bp, Homo sapien
gcctggtgacaggactgagtgacca

SEQ ID NO: 5089880 - DNA, 25 bp, Homo sapien
ccttctccaggtacgctgggtccag

SEQ ID NO: 5089881 - DNA, 25 bp, Homo sapien
gagatgagggctgactgggttttct

SEQ ID NO: 5089882 - DNA, 25 bp, Homo sapien
acagatgccaagttgctcggaggct

SEQ ID NO: 5089883 - DNA, 25 bp, Homo sapien
ctgagatgagggctgactgggtttt

SEQ ID NO: 5089884 - DNA, 25 bp, Homo sapien
cagatgccaagttgctcggaggctg

SEQ ID NO: 5089885 - DNA, 25 bp, Homo sapien
catgagaggcctcgagtgaagcagc

SEQ ID NO: 5089886 - DNA, 25 bp, Homo sapien
gagtaacgggaactgacagcggcct

SEQ ID NO: 5089887 - DNA, 25 bp, Homo sapien
tttgccgtgccaaaataaactcgca

SEQ ID NO: 5089888 - DNA, 25 bp, Homo sapien
tcttcccacagaggcgtccagagaa

SEQ ID NO: 5089889 - DNA, 25 bp, Homo sapien
tatctcatttccttctcagagctac

SEQ ID NO: 5089890 - DNA, 25 bp, Homo sapien
ttatctcatttccttctcagagcta

SEQ ID NO: 5089891 - DNA, 25 bp, Homo sapien
ctccctcactagctgtcatctggcc

SEQ ID NO: 5089892 - DNA, 25 bp, Homo sapien
gctccctcactagctgtcatctggc

SEQ ID NO: 5089893 - DNA, 25 bp, Homo sapien
tcctcttgtactttcagcggcagaa

SEQ ID NO: 5089894 - DNA, 25 bp, Homo sapien
cctcttgtactttcagcggcagaaa

SEQ ID NO: 5089895 - DNA, 25 bp, Homo sapien
ctctcctcttgtactttcagcggca

SEQ ID NO: 5089896 - DNA, 25 bp, Homo sapien
cttgtactttcagcggcagaaaggt

SEQ ID NO: 5089897 - DNA, 25 bp, Homo sapien
cagagccagggttgtaaccgccagt

SEQ ID NO: 5089898 - DNA, 25 bp, Homo sapien
ctggagccaagtagggcagtcagaa

SEQ ID NO: 5089899 - DNA, 25 bp, Homo sapien
agtcttcttggtagaggaagctgga

SEQ ID NO: 5089900 - DNA, 25 bp, Homo sapien
ccagggttgtaaccgccagtcttct

SEQ ID NO: 5089901 - DNA, 25 bp, Homo sapien
gagacctgcctggtgagttccccca

SEQ ID NO: 5089902 - DNA, 25 bp, Homo sapien
tgagacctgcctggtgagttccccc

SEQ ID NO: 5089903 - DNA, 25 bp, Homo sapien
ctgagacctgcctggtgagttcccc

SEQ ID NO: 5089904 - DNA, 25 bp, Homo sapien
gaactgcaggcatgatctggtgtcc

SEQ ID NO: 5089905 - DNA, 25 bp, Homo sapien
ggaactgcaggcatgatctggtgtc

SEQ ID NO: 5089906 - DNA, 25 bp, Homo sapien
actgcaggcatgatctggtgtcctc

SEQ ID NO: 5089907 - DNA, 25 bp, Homo sapien
ctggaactgcaggcatgatctggtg

SEQ ID NO: 5089908 - DNA, 25 bp, Homo sapien
aggccaggacagagttttaaatagc

SEQ ID NO: 5089909 - DNA, 25 bp, Homo sapien
cagtgtcaggccgattgtgaggctc

SEQ ID NO: 5089910 - DNA, 25 bp, Homo sapien
tggaacagaccctgcacactacata

SEQ ID NO: 5089911 - DNA, 25 bp, Homo sapien
cagggctccattgaatcaggtttaa

SEQ ID NO: 5089912 - DNA, 25 bp, Homo sapien
gggctcattagacctctcagtgggc

SEQ ID NO: 5089913 - DNA, 25 bp, Homo sapien
tagacctctcagtgggcttttgcct

SEQ ID NO: 5089914 - DNA, 25 bp, Homo sapien
ctcattagacctctcagtgggcttt

SEQ ID NO: 5089915 - DNA, 25 bp, Homo sapien
cattagacctctcagtgggcttttg

SEQ ID NO: 5089916 - DNA, 25 bp, Homo sapien
ttgggtctgtgagaccattgaagaa

SEQ ID NO: 5089917 - DNA, 25 bp, Homo sapien
cagaggcaggtagtccagagtgtgt

SEQ ID NO: 5089918 - DNA, 25 bp, Homo sapien
agtctagttgggtctgtgagaccat

SEQ ID NO: 5089919 - DNA, 25 bp, Homo sapien
tctgtgagaccattgaagaatccca

SEQ ID NO: 5089920 - DNA, 25 bp, Homo sapien
gattcttcaccaaagagagcttgag

SEQ ID NO: 5089921 - DNA, 25 bp, Homo sapien
tgtcacttctattgtccctctcagg

SEQ ID NO: 5089922 - DNA, 25 bp, Homo sapien
gcttgccaggccttggccagaggaa

SEQ ID NO: 5089923 - DNA, 25 bp, Homo sapien
ctgatctcagtcctcgctgctggaa

SEQ ID NO: 5089924 - DNA, 25 bp, Homo sapien
tactggttgctgataagctgagcac

SEQ ID NO: 5089925 - DNA, 25 bp, Homo sapien
gacattaccatggtacccaagtatg

SEQ ID NO: 5089926 - DNA, 25 bp, Homo sapien
tagcatggttgtcgtggtacaaacc

SEQ ID NO: 5089927 - DNA, 25 bp, Homo sapien
tgtcagctccaagtgtagcatggtt

SEQ ID NO: 5089928 - DNA, 25 bp, Homo sapien
tctatttagaaaggtaacacgctcc

SEQ ID NO: 5089929 - DNA, 25 bp, Homo sapien
ttctatttagaaaggtaacacgctc

SEQ ID NO: 5089930 - DNA, 25 bp, Homo sapien
ctgagttatccttccaagactggaa

SEQ ID NO: 5089931 - DNA, 25 bp, Homo sapien
tgagaatattttagatctgagttat

SEQ ID NO: 5089932 - DNA, 25 bp, Homo sapien
ccttccaagactggaacatgtggct

SEQ ID NO: 5089933 - DNA, 25 bp, Homo sapien
gggctaatgtgcaatgagaatattt

SEQ ID NO: 5089934 - DNA, 25 bp, Homo sapien
ctggctctgagccatcatggcgagt

SEQ ID NO: 5089935 - DNA, 25 bp, Homo sapien
tgtcctcaggtgagtgtcggagcga

SEQ ID NO: 5089936 - DNA, 25 bp, Homo sapien
tcaggtgagtgtcggagcgaggccc

SEQ ID NO: 5089937 - DNA, 25 bp, Homo sapien
atcatggcgagtgaccggagctgct

SEQ ID NO: 5089938 - DNA, 25 bp, Homo sapien
ccccgaggtaccagctgacagggtg

SEQ ID NO: 5089939 - DNA, 25 bp, Homo sapien
gcctggacggcagtaaggagtcact

SEQ ID NO: 5089940 - DNA, 25 bp, Homo sapien
tctcatgggtccagtatggccaggc

SEQ ID NO: 5089941 - DNA, 25 bp, Homo sapien
tcacctccgagttagaggaccaggg

SEQ ID NO: 5089942 - DNA, 25 bp, Homo sapien
atagcagacatctaattccatctgg

SEQ ID NO: 5089943 - DNA, 25 bp, Homo sapien
gacatctaattccatctggacacct

SEQ ID NO: 5089944 - DNA, 25 bp, Homo sapien
tgctttgtccctatacttggctgtc

SEQ ID NO: 5089945 - DNA, 25 bp, Homo sapien
tccaacatgcattccatagcagaca

SEQ ID NO: 5089946 - DNA, 25 bp, Homo sapien
cagagagataggagcctttggtggg

SEQ ID NO: 5089947 - DNA, 25 bp, Homo sapien
cttgcggatccccttgggtgggcat

SEQ ID NO: 5089948 - DNA, 25 bp, Homo sapien
tcacttgcggatccccttgggtggg

SEQ ID NO: 5089949 - DNA, 25 bp, Homo sapien
gcagagagataggagcctttggtgg

SEQ ID NO: 5089950 - DNA, 25 bp, Homo sapien
tatctggttcatgtgtcacgtgaga

SEQ ID NO: 5089951 - DNA, 25 bp, Homo sapien
taacagtgcatgctacaattgatag

SEQ ID NO: 5089952 - DNA, 25 bp, Homo sapien
cccactggactgtgaatgttttgaa

SEQ ID NO: 5089953 - DNA, 25 bp, Homo sapien
gaaaagatggcctgtcacataccaa

SEQ ID NO: 5089954 - DNA, 25 bp, Homo sapien
gcctgaataagcataaatttggtct

SEQ ID NO: 5089955 - DNA, 25 bp, Homo sapien
cattgcctgaataagcataaatttg

SEQ ID NO: 5089956 - DNA, 25 bp, Homo sapien
cacatagttgtcattgcctgaataa

SEQ ID NO: 5089957 - DNA, 25 bp, Homo sapien
tctttagagctatgagttgtaaatg

SEQ ID NO: 5089958 - DNA, 25 bp, Homo sapien
aattactgttattggatgaatgttt

SEQ ID NO: 5089959 - DNA, 25 bp, Homo sapien
agaggcaggtgccttccactgtctt

SEQ ID NO: 5089960 - DNA, 25 bp, Homo sapien
tgtgagaggcaggtgccttccactg

SEQ ID NO: 5089961 - DNA, 25 bp, Homo sapien
tgagaggcaggtgccttccactgtc

SEQ ID NO: 5089962 - DNA, 25 bp, Homo sapien
aggcaggtgccttccactgtctttc

SEQ ID NO: 5089963 - DNA, 25 bp, Homo sapien
tctatgccagcgtgtcggtcagggt

SEQ ID NO: 5089964 - DNA, 25 bp, Homo sapien
ccttgtaaagcaccgtctgagtaga

SEQ ID NO: 5089965 - DNA, 25 bp, Homo sapien
caaagggctgtgaacggtggttact

SEQ ID NO: 5089966 - DNA, 25 bp, Homo sapien
tcataatggacggaagggctgcatt

SEQ ID NO: 5089967 - DNA, 25 bp, Homo sapien
gccgaagattatccaagacagcctt

SEQ ID NO: 5089968 - DNA, 25 bp, Homo sapien
tttctcacaggacacagagcggagg

SEQ ID NO: 5089969 - DNA, 25 bp, Homo sapien
gggcagcccagagaattcttcactc

SEQ ID NO: 5089970 - DNA, 25 bp, Homo sapien
tagcagagggactaggataccaagg

SEQ ID NO: 5089971 - DNA, 25 bp, Homo sapien
catgccactgaggttggtcacagct

SEQ ID NO: 5089972 - DNA, 25 bp, Homo sapien
ggttttaatctgtgcaaagggctga

SEQ ID NO: 5089973 - DNA, 25 bp, Homo sapien
agagatcctgattgattggtctggg

SEQ ID NO: 5089974 - DNA, 25 bp, Homo sapien
cagcgtggtagttggacatgccact

SEQ ID NO: 5089975 - DNA, 25 bp, Homo sapien
tcatcattggctgtacattggaatc

SEQ ID NO: 5089976 - DNA, 25 bp, Homo sapien
catcattggctgtacattggaatca

SEQ ID NO: 5089977 - DNA, 25 bp, Homo sapien
gctcatcattggctgtacattggaa

SEQ ID NO: 5089978 - DNA, 25 bp, Homo sapien
atcattggctgtacattggaatcat

SEQ ID NO: 5089979 - DNA, 25 bp, Homo sapien
tgacagagtgtagcttgccacagcc

SEQ ID NO: 5089980 - DNA, 25 bp, Homo sapien
gaacaaatctcacagggaatgcgct

SEQ ID NO: 5089981 - DNA, 25 bp, Homo sapien
tccaagttcaaaggctagcagggtg

SEQ ID NO: 5089982 - DNA, 25 bp, Homo sapien
tataggtggttcttgctcaggaccg

SEQ ID NO: 5089983 - DNA, 25 bp, Homo sapien
gatggttaaggactagactccccac

SEQ ID NO: 5089984 - DNA, 25 bp, Homo sapien
agtggccgcccagtactgccctggt

SEQ ID NO: 5089985 - DNA, 25 bp, Homo sapien
gatgtcaaggccctgaggatggtta

SEQ ID NO: 5089986 - DNA, 25 bp, Homo sapien
cctgcaggttggacggcttgatgtc

SEQ ID NO: 5089987 - DNA, 25 bp, Homo sapien
tggtagccaaacatgtcacaagcaa

SEQ ID NO: 5089988 - DNA, 25 bp, Homo sapien
tgcagcattcgagttccccagaagg

SEQ ID NO: 5089989 - DNA, 25 bp, Homo sapien
ccctggtttaagagacaccctcgat

SEQ ID NO: 5089990 - DNA, 25 bp, Homo sapien
ccggccgcaacatcactggagtaga

SEQ ID NO: 5089991 - DNA, 25 bp, Homo sapien
cagtgtccatagcagattggttcca

SEQ ID NO: 5089992 - DNA, 25 bp, Homo sapien
aaaactttcgatgtactgctgtccc

SEQ ID NO: 5089993 - DNA, 25 bp, Homo sapien
cagagtcatgtggtgtttaaacgag

SEQ ID NO: 5089994 - DNA, 25 bp, Homo sapien
gaaaccaaggctcatagaagttgac

SEQ ID NO: 5089995 - DNA, 25 bp, Homo sapien
ggttttcagacacgatcccatctaa

SEQ ID NO: 5089996 - DNA, 25 bp, Homo sapien
aagactggttttcagacacgatccc

SEQ ID NO: 5089997 - DNA, 25 bp, Homo sapien
gactggttttcagacacgatcccat

SEQ ID NO: 5089998 - DNA, 25 bp, Homo sapien
cagacacgatcccatctaaaaccat

SEQ ID NO: 5089999 - DNA, 25 bp, Homo sapien
cgtgccaccacgctctgctctcctc

SEQ ID NO: 5090000 - DNA, 25 bp, Homo sapien
caccacgctctgctctcctccccat

SEQ ID NO: 5090001 - DNA, 25 bp, Homo sapien
gccaccacgctctgctctcctcccc

SEQ ID NO: 5090002 - DNA, 25 bp, Homo sapien
gtgccaccacgctctgctctcctcc

SEQ ID NO: 5090003 - DNA, 25 bp, Homo sapien
agtgaatgggctcccagttgttggc

SEQ ID NO: 5090004 - DNA, 25 bp, Homo sapien
tgaatgggctcccagttgttggcag

SEQ ID NO: 5090005 - DNA, 25 bp, Homo sapien
ctagtgaatgggctcccagttgttg

SEQ ID NO: 5090006 - DNA, 25 bp, Homo sapien
tagtgaatgggctcccagttgttgg

SEQ ID NO: 5090007 - DNA, 25 bp, Homo sapien
aagtatttgtgcagtcagagctgac

SEQ ID NO: 5090008 - DNA, 25 bp, Homo sapien
tggtttcctgtgtcaagtatttgtg

SEQ ID NO: 5090009 - DNA, 25 bp, Homo sapien
tcctgtgtcaagtatttgtgcagtc

SEQ ID NO: 5090010 - DNA, 25 bp, Homo sapien
ttgtcgtaggatgtatacagactta

SEQ ID NO: 5090011 - DNA, 25 bp, Homo sapien
caaggcttggggcttccactctgaa

SEQ ID NO: 5090012 - DNA, 25 bp, Homo sapien
gcttaacagcacatagaagctgcca

SEQ ID NO: 5090013 - DNA, 25 bp, Homo sapien
ttaacagcacatagaagctgccaag

SEQ ID NO: 5090014 - DNA, 25 bp, Homo sapien
gcttggggcttccactctgaagcca

SEQ ID NO: 5090015 - DNA, 25 bp, Homo sapien
acgtttgcctgggcattgaggcatt

SEQ ID NO: 5090016 - DNA, 25 bp, Homo sapien
agcaaacgtttgcctgggcattgag

SEQ ID NO: 5090017 - DNA, 25 bp, Homo sapien
aaacgtttgcctgggcattgaggca

SEQ ID NO: 5090018 - DNA, 25 bp, Homo sapien
caaacgtttgcctgggcattgaggc

SEQ ID NO: 5090019 - DNA, 25 bp, Homo sapien
gaatcagtgcctaaaagacagaccg

SEQ ID NO: 5090020 - DNA, 25 bp, Homo sapien
tcaattggcctgaacctgactgttg

SEQ ID NO: 5090021 - DNA, 25 bp, Homo sapien
gagatgtcgccacaagaattgcagc

SEQ ID NO: 5090022 - DNA, 25 bp, Homo sapien
tatcatggagcatctagaaggtgtc

SEQ ID NO: 5090023 - DNA, 25 bp, Homo sapien
taaagaagggatattttggactcat

SEQ ID NO: 5090024 - DNA, 25 bp, Homo sapien
ttaaagaagggatattttggactca

SEQ ID NO: 5090025 - DNA, 25 bp, Homo sapien
tccagcggcccaactggagtggagc

SEQ ID NO: 5090026 - DNA, 25 bp, Homo sapien
tcgcccgtggaactacgttcctgag

SEQ ID NO: 5090027 - DNA, 25 bp, Homo sapien
ttcctgagggcttccggcgttgcct

SEQ ID NO: 5090028 - DNA, 25 bp, Homo sapien
caggtagaagaactgcgtcagtccc

SEQ ID NO: 5090029 - DNA, 25 bp, Homo sapien
gaactgggtcgcatagtcttgctgg

SEQ ID NO: 5090030 - DNA, 25 bp, Homo sapien
tgcagcaggacgaaccaagagacct

SEQ ID NO: 5090031 - DNA, 25 bp, Homo sapien
tcacgaacggtacatggaagatggt

SEQ ID NO: 5090032 - DNA, 25 bp, Homo sapien
ggccaatcttgaaacgtagggtcca

SEQ ID NO: 5090033 - DNA, 25 bp, Homo sapien
taatcttgtataggagcacaggtgt

SEQ ID NO: 5090034 - DNA, 25 bp, Homo sapien
taagtaatctgtcctctcttgaatg

SEQ ID NO: 5090035 - DNA, 25 bp, Homo sapien
tacagggatgatgtattcgtttccc

SEQ ID NO: 5090036 - DNA, 25 bp, Homo sapien
tatacagggatgaattcgatacagg

SEQ ID NO: 5090037 - DNA, 25 bp, Homo sapien
agacgagctgggcaccatggagact

SEQ ID NO: 5090038 - DNA, 25 bp, Homo sapien
acgagctgggcaccatggagactct

SEQ ID NO: 5090039 - DNA, 25 bp, Homo sapien
gagctgggcaccatggagactcttt

SEQ ID NO: 5090040 - DNA, 25 bp, Homo sapien
gagttcgagacgagctgggcaccat

SEQ ID NO: 5090041 - DNA, 25 bp, Homo sapien
caaagagaccactagatttgcatgg

SEQ ID NO: 5090042 - DNA, 25 bp, Homo sapien
tgaggacactttatccatctaccag

SEQ ID NO: 5090043 - DNA, 25 bp, Homo sapien
cttagggattctttgtcccggcgcg

SEQ ID NO: 5090044 - DNA, 25 bp, Homo sapien
tctagtagctcctagtagagcgcct

SEQ ID NO: 5090045 - DNA, 25 bp, Homo sapien
gaaagagatgccacctagaggccat

SEQ ID NO: 5090046 - DNA, 25 bp, Homo sapien
cctggttgcaggtaaagagatcctc

SEQ ID NO: 5090047 - DNA, 25 bp, Homo sapien
ggatggccgtcctatctcctgataa

SEQ ID NO: 5090048 - DNA, 25 bp, Homo sapien
ccaagttatgagactcctggttgca

SEQ ID NO: 5090049 - DNA, 25 bp, Homo sapien
caggcgtgagccaccacacccagcc

SEQ ID NO: 5090050 - DNA, 25 bp, Homo sapien
ggcgtgagccaccacacccagccta

SEQ ID NO: 5090051 - DNA, 25 bp, Homo sapien
ctgacctgaggtgatttgccgcctc

SEQ ID NO: 5090052 - DNA, 25 bp, Homo sapien
cgtgagccaccacacccagcctatc

SEQ ID NO: 5090053 - DNA, 25 bp, Homo sapien
gaggtcaccctcatccaatgcaagg

SEQ ID NO: 5090054 - DNA, 25 bp, Homo sapien
agagagaaatacaaagccccatccc

SEQ ID NO: 5090055 - DNA, 25 bp, Homo sapien
ggtcatcaaatgcagatggccatca

SEQ ID NO: 5090056 - DNA, 25 bp, Homo sapien
gagcctagaacatgcaacccattga

SEQ ID NO: 5090057 - DNA, 25 bp, Homo sapien
gacactattgcaggactagagcaca

SEQ ID NO: 5090058 - DNA, 25 bp, Homo sapien
tcctgtgacagtgctaaatcaatag

SEQ ID NO: 5090059 - DNA, 25 bp, Homo sapien
tagacttgcccctgagtatttcatg

SEQ ID NO: 5090060 - DNA, 25 bp, Homo sapien
tatcttgttctctaacggcttaaag

SEQ ID NO: 5090061 - DNA, 25 bp, Homo sapien
gactagactctttgctggatgccag

SEQ ID NO: 5090062 - DNA, 25 bp, Homo sapien
aacattatagtatcagcctggcaca

SEQ ID NO: 5090063 - DNA, 25 bp, Homo sapien
tcaagggcacgcttcacagactaga

SEQ ID NO: 5090064 - DNA, 25 bp, Homo sapien
tgttgtttgatgaccctagccagcc

SEQ ID NO: 5090065 - DNA, 25 bp, Homo sapien
ttttaatggagactgcaacaaggga

SEQ ID NO: 5090066 - DNA, 25 bp, Homo sapien
gactaatggtttggtcaactgtgcc

SEQ ID NO: 5090067 - DNA, 25 bp, Homo sapien
caggtctgatactttcacatatggc

SEQ ID NO: 5090068 - DNA, 25 bp, Homo sapien
cacatatggctaggactctccaagg

SEQ ID NO: 5090069 - DNA, 25 bp, Homo sapien
acgggacttgattaggactgggcaa

SEQ ID NO: 5090070 - DNA, 25 bp, Homo sapien
gcttaagctcagtggcaagaaagga

SEQ ID NO: 5090071 - DNA, 25 bp, Homo sapien
gaggaacagttgtcatggctcacat

SEQ ID NO: 5090072 - DNA, 25 bp, Homo sapien
aaagcagctcttccaatgacgggac

SEQ ID NO: 5090073 - DNA, 25 bp, Homo sapien
tgttgccctggatttcttaaaggct

SEQ ID NO: 5090074 - DNA, 25 bp, Homo sapien
ggctttaggctgtttcaccaccttg

SEQ ID NO: 5090075 - DNA, 25 bp, Homo sapien
cactgcccgacgacctggctttgtg

SEQ ID NO: 5090076 - DNA, 25 bp, Homo sapien
gactgtgatcaaagctctatggagt

SEQ ID NO: 5090077 - DNA, 25 bp, Homo sapien
ccgagcggcccgtacgcgtacagga

SEQ ID NO: 5090078 - DNA, 25 bp, Homo sapien
gtacgcgtacaggagcaacctccgc

SEQ ID NO: 5090079 - DNA, 25 bp, Homo sapien
gcccgtacgcgtacaggagcaacct

SEQ ID NO: 5090080 - DNA, 25 bp, Homo sapien
cggcccgtacgcgtacaggagcaac

SEQ ID NO: 5090081 - DNA, 25 bp, Homo sapien
gctgtcatggaaggtgcggccaaga

SEQ ID NO: 5090082 - DNA, 25 bp, Homo sapien
gacgggggcgcagacggcagccggg

SEQ ID NO: 5090083 - DNA, 25 bp, Homo sapien
tcgcgggcgctgtcatggaaggtgc

SEQ ID NO: 5090084 - DNA, 25 bp, Homo sapien
cttctcgcgggcgctgtcatggaag

SEQ ID NO: 5090085 - DNA, 25 bp, Homo sapien
ggcatgcggtcccagtggccctcgg

SEQ ID NO: 5090086 - DNA, 25 bp, Homo sapien
tgccggaccagctccggcatgcggt

SEQ ID NO: 5090087 - DNA, 25 bp, Homo sapien
cagctccggcatgcggtcccagtgg

SEQ ID NO: 5090088 - DNA, 25 bp, Homo sapien
agccgtgcgcgcccttcgcagccat

SEQ ID NO: 5090089 - DNA, 25 bp, Homo sapien
cggtgtccggaaaggtgaacgctgc

SEQ ID NO: 5090090 - DNA, 25 bp, Homo sapien
tgtccggaaaggtgaacgctgcgct

SEQ ID NO: 5090091 - DNA, 25 bp, Homo sapien
tccggaaaggtgaacgctgcgctcg

SEQ ID NO: 5090092 - DNA, 25 bp, Homo sapien
ggtgtccggaaaggtgaacgctgcg

SEQ ID NO: 5090093 - DNA, 25 bp, Homo sapien
tttcacggtagacagagttagccac

SEQ ID NO: 5090094 - DNA, 25 bp, Homo sapien
cacctgatggagtttagggacaccc

SEQ ID NO: 5090095 - DNA, 25 bp, Homo sapien
tcaacgtcacttgcgagaactatgg

SEQ ID NO: 5090096 - DNA, 25 bp, Homo sapien
ctcttaagactagcacggtgggctg

SEQ ID NO: 5090097 - DNA, 25 bp, Homo sapien
caatcccttgagtgatcaaggaacc

SEQ ID NO: 5090098 - DNA, 25 bp, Homo sapien
tcaatcccttgagtgatcaaggaac

SEQ ID NO: 5090099 - DNA, 25 bp, Homo sapien
tactttcatgccaagagaaaccagc

SEQ ID NO: 5090100 - DNA, 25 bp, Homo sapien
ttgagctgtttggttgggtactttc

SEQ ID NO: 5090101 - DNA, 25 bp, Homo sapien
gagctcctcgcttggttgagctgtt

SEQ ID NO: 5090102 - DNA, 25 bp, Homo sapien
cagagctcctcgcttggttgagctg

SEQ ID NO: 5090103 - DNA, 25 bp, Homo sapien
catatagggtatacccgcaaatgag

SEQ ID NO: 5090104 - DNA, 25 bp, Homo sapien
tcctcgaacatgttgaatacctgca

SEQ ID NO: 5090105 - DNA, 25 bp, Homo sapien
gaagcagatctacttgttgccaagg

SEQ ID NO: 5090106 - DNA, 25 bp, Homo sapien
gataacctagcagccacagtagagt

SEQ ID NO: 5090107 - DNA, 25 bp, Homo sapien
cagccagcagcaatttcccaaagtc

SEQ ID NO: 5090108 - DNA, 25 bp, Homo sapien
ctcagccagcagcaatttcccaaag

SEQ ID NO: 5090109 - DNA, 25 bp, Homo sapien
tcagccagcagcaatttcccaaagt

SEQ ID NO: 5090110 - DNA, 25 bp, Homo sapien
gccagcagcaatttcccaaagtcat

SEQ ID NO: 5090111 - DNA, 25 bp, Homo sapien
aatttttggcttcgctcatcttcgg

SEQ ID NO: 5090112 - DNA, 25 bp, Homo sapien
gcttagataatttttggcttcgctc

SEQ ID NO: 5090113 - DNA, 25 bp, Homo sapien
ggatactgcttagataatttttggc

SEQ ID NO: 5090114 - DNA, 25 bp, Homo sapien
ggcttcgctcatcttcggctcattc

SEQ ID NO: 5090115 - DNA, 25 bp, Homo sapien
agtctttgaaaccttgtgtatgctt

SEQ ID NO: 5090116 - DNA, 25 bp, Homo sapien
tctcaatgtggactagccatactcc

SEQ ID NO: 5090117 - DNA, 25 bp, Homo sapien
ccatctgaacatgtaatcaacataa

SEQ ID NO: 5090118 - DNA, 25 bp, Homo sapien
tgtgtatgctttatacttacagcac

SEQ ID NO: 5090119 - DNA, 25 bp, Homo sapien
tacacgtggacttaaatgggcttgc

SEQ ID NO: 5090120 - DNA, 25 bp, Homo sapien
aagggccaggcacatattaagtcaa

SEQ ID NO: 5090121 - DNA, 25 bp, Homo sapien
taactaggtcacaggttcactgagg

SEQ ID NO: 5090122 - DNA, 25 bp, Homo sapien
gttgtgaccatactccttctgggag

SEQ ID NO: 5090123 - DNA, 25 bp, Homo sapien
gagtttctaatgacatacccatgcc

SEQ ID NO: 5090124 - DNA, 25 bp, Homo sapien
gatacattgtaatctaacacagcca

SEQ ID NO: 5090125 - DNA, 25 bp, Homo sapien
cactattatagttcaggatacattg

SEQ ID NO: 5090126 - DNA, 25 bp, Homo sapien
cacatatgaatcacccaggagagct

SEQ ID NO: 5090127 - DNA, 25 bp, Homo sapien
aaaatcagctgggcgcagtgcctca

SEQ ID NO: 5090128 - DNA, 25 bp, Homo sapien
tttggaatagctctttaaaaatcag

SEQ ID NO: 5090129 - DNA, 25 bp, Homo sapien
atcagctgggcgcagtgcctcactc

SEQ ID NO: 5090130 - DNA, 25 bp, Homo sapien
ccaacgcttcgggaggctgaagtag

SEQ ID NO: 5090131 - DNA, 25 bp, Homo sapien
tggaccttgtttgcctcagaccttg

SEQ ID NO: 5090132 - DNA, 25 bp, Homo sapien
agaccttgctcagaactcccctcct

SEQ ID NO: 5090133 - DNA, 25 bp, Homo sapien
gaacctggaccttgtttgcctcaga

SEQ ID NO: 5090134 - DNA, 25 bp, Homo sapien
ggtgaacacccccactgaacctgga

SEQ ID NO: 5090135 - DNA, 25 bp, Homo sapien
gtatgagccctccacgtaatgcagt

SEQ ID NO: 5090136 - DNA, 25 bp, Homo sapien
gcatggcctcacacatgtactgtgg

SEQ ID NO: 5090137 - DNA, 25 bp, Homo sapien
catggacatgtcatcaatcccggcc

SEQ ID NO: 5090138 - DNA, 25 bp, Homo sapien
tgctgatggcatctcggtatgagcc

SEQ ID NO: 5090139 - DNA, 25 bp, Homo sapien
gggtgaagaatctggacacgagccc

SEQ ID NO: 5090140 - DNA, 25 bp, Homo sapien
tgcaacgagctgcacacagtggagg

SEQ ID NO: 5090141 - DNA, 25 bp, Homo sapien
ggagtcagagtgcaacgagctgcac

SEQ ID NO: 5090142 - DNA, 25 bp, Homo sapien
agaatctggacacgagcccagcagg

SEQ ID NO: 5090143 - DNA, 25 bp, Homo sapien
tgtcacatagtctacaaatgccagg

SEQ ID NO: 5090144 - DNA, 25 bp, Homo sapien
ttcctggcatggtgtggacccaaca

SEQ ID NO: 5090145 - DNA, 25 bp, Homo sapien
tttgtgctgcactagggagacgatc

SEQ ID NO: 5090146 - DNA, 25 bp, Homo sapien
cccacaagatagtgagaatgtccct

SEQ ID NO: 5090147 - DNA, 25 bp, Homo sapien
ctctgaccaccgggactgtgttccc

SEQ ID NO: 5090148 - DNA, 25 bp, Homo sapien
gacctctgaccaccgggactgtgtt

SEQ ID NO: 5090149 - DNA, 25 bp, Homo sapien
caggacctctgaccaccgggactgt

SEQ ID NO: 5090150 - DNA, 25 bp, Homo sapien
ggacctctgaccaccgggactgtgt

SEQ ID NO: 5090151 - DNA, 25 bp, Homo sapien
tggtggccacgtgcatggtctcaag

SEQ ID NO: 5090152 - DNA, 25 bp, Homo sapien
aggcaaacctcagcatgccgggcag

SEQ ID NO: 5090153 - DNA, 25 bp, Homo sapien
ggcagatcaacatcatgcacaccct

SEQ ID NO: 5090154 - DNA, 25 bp, Homo sapien
cacgtgcatggtctcaagcacacac

SEQ ID NO: 5090155 - DNA, 25 bp, Homo sapien
aaatatcagcattctgtgaactctg

SEQ ID NO: 5090156 - DNA, 25 bp, Homo sapien
ccaccctcatgctcacagacggagt

SEQ ID NO: 5090157 - DNA, 25 bp, Homo sapien
aggaccaatgaccagcgtcctcagc

SEQ ID NO: 5090158 - DNA, 25 bp, Homo sapien
gaggggggctgaataaatatcagca

SEQ ID NO: 5090159 - DNA, 25 bp, Homo sapien
agcctcctagcctgaccagctcagg

SEQ ID NO: 5090160 - DNA, 25 bp, Homo sapien
tgggggcgaagagacagagggcctg

SEQ ID NO: 5090161 - DNA, 25 bp, Homo sapien
cagctccatgttggaaccgctccac

SEQ ID NO: 5090162 - DNA, 25 bp, Homo sapien
tccatgttggaaccgctccacactg

SEQ ID NO: 5090163 - DNA, 25 bp, Homo sapien
taatgtgcgtgtacatcacctggga

SEQ ID NO: 5090164 - DNA, 25 bp, Homo sapien
cagggcattactgagcaacaggtca

SEQ ID NO: 5090165 - DNA, 25 bp, Homo sapien
cagggcagtgtctcaccaacggtaa

SEQ ID NO: 5090166 - DNA, 25 bp, Homo sapien
cataggtgacttgggagcagctgac

SEQ ID NO: 5090167 - DNA, 25 bp, Homo sapien
ctggaatcggctgggaacatttcct

SEQ ID NO: 5090168 - DNA, 25 bp, Homo sapien
tctgacatgtttggtcaggggtccg

SEQ ID NO: 5090169 - DNA, 25 bp, Homo sapien
cgtaggctggcggaagttacaaagg

SEQ ID NO: 5090170 - DNA, 25 bp, Homo sapien
ctgcacctggaatcggctgggaaca

SEQ ID NO: 5090171 - DNA, 25 bp, Homo sapien
gaatggacgtgcatactgagctgag

SEQ ID NO: 5090172 - DNA, 25 bp, Homo sapien
ggtagaatggacgtgcatactgagc

SEQ ID NO: 5090173 - DNA, 25 bp, Homo sapien
tgacccctaactgggtagaatggac

SEQ ID NO: 5090174 - DNA, 25 bp, Homo sapien
gacgtgcatactgagctgaggtcca

SEQ ID NO: 5090175 - DNA, 25 bp, Homo sapien
aggtgaaggagaacgcgagccggcc

SEQ ID NO: 5090176 - DNA, 25 bp, Homo sapien
ctccctggcgctgggtgtgaggtga

SEQ ID NO: 5090177 - DNA, 25 bp, Homo sapien
tcactgcactgcacagttcatgtgc

SEQ ID NO: 5090178 - DNA, 25 bp, Homo sapien
ttcatgtgcaccacggtcagggcat

SEQ ID NO: 5090179 - DNA, 25 bp, Homo sapien
caaagggcacgaggacagctgcagc

SEQ ID NO: 5090180 - DNA, 25 bp, Homo sapien
gtcaaagggcacgaggacagctgca

SEQ ID NO: 5090181 - DNA, 25 bp, Homo sapien
tcaaagggcacgaggacagctgcag

SEQ ID NO: 5090182 - DNA, 25 bp, Homo sapien
tgtcaaagggcacgaggacagctgc

SEQ ID NO: 5090183 - DNA, 25 bp, Homo sapien
tgccaatacccagctctaggaaagg

SEQ ID NO: 5090184 - DNA, 25 bp, Homo sapien
caaacggccagactacagtgctcaa

SEQ ID NO: 5090185 - DNA, 25 bp, Homo sapien
gcatcggagggttgtaacacagccc

SEQ ID NO: 5090186 - DNA, 25 bp, Homo sapien
aatccaggatgaaggtgggctgccc

SEQ ID NO: 5090187 - DNA, 25 bp, Homo sapien
tgggtgtcaacgactgccaaatgac

SEQ ID NO: 5090188 - DNA, 25 bp, Homo sapien
catgaaggtccttgctcaacacaaa

SEQ ID NO: 5090189 - DNA, 25 bp, Homo sapien
gccaaatgactcacaaccaggaggg

SEQ ID NO: 5090190 - DNA, 25 bp, Homo sapien
aaagcgggcagagaacatgaaggtc

SEQ ID NO: 5090191 - DNA, 25 bp, Homo sapien
gtaaggtccaacttctggaagctcc

SEQ ID NO: 5090192 - DNA, 25 bp, Homo sapien
gggtccacactgctacagagtaagg

SEQ ID NO: 5090193 - DNA, 25 bp, Homo sapien
ggccctcctggtatcaattctccag

SEQ ID NO: 5090194 - DNA, 25 bp, Homo sapien
ccaactgctaggttgtaggatgcct

SEQ ID NO: 5090195 - DNA, 25 bp, Homo sapien
gcaacaaggtctttgtcccctcaaa

SEQ ID NO: 5090196 - DNA, 25 bp, Homo sapien
attggacatgggcaacaaggtcttt

SEQ ID NO: 5090197 - DNA, 25 bp, Homo sapien
cactttgctgttccacaacccttaa

SEQ ID NO: 5090198 - DNA, 25 bp, Homo sapien
tatctcctccataaaacgcgaggac

SEQ ID NO: 5090199 - DNA, 25 bp, Homo sapien
gccagccagatagtccatactctta

SEQ ID NO: 5090200 - DNA, 25 bp, Homo sapien
cataaaacgcgaggacaagtttctc

SEQ ID NO: 5090201 - DNA, 25 bp, Homo sapien
cccatgggccgaaggtgggctcatc

SEQ ID NO: 5090202 - DNA, 25 bp, Homo sapien
gtgggctcatccgagggggcagaca

SEQ ID NO: 5090203 - DNA, 25 bp, Homo sapien
cctccccatgggccgaaggtgggct

SEQ ID NO: 5090204 - DNA, 25 bp, Homo sapien
tccccatgggccgaaggtgggctca

SEQ ID NO: 5090205 - DNA, 25 bp, Homo sapien
gcgggaggaagagggtgcctcagac

SEQ ID NO: 5090206 - DNA, 25 bp, Homo sapien
ctgcgggaggaagagggtgcctcag

SEQ ID NO: 5090207 - DNA, 25 bp, Homo sapien
tgcgggaggaagagggtgcctcaga

SEQ ID NO: 5090208 - DNA, 25 bp, Homo sapien
gatggagttgggtaggcgttccaga

SEQ ID NO: 5090209 - DNA, 25 bp, Homo sapien
gaggccctctcaaaacaggtgatca

SEQ ID NO: 5090210 - DNA, 25 bp, Homo sapien
acacctgagcgatccaggaggccct

SEQ ID NO: 5090211 - DNA, 25 bp, Homo sapien
ctgcaggaacacctgagcgatccag

SEQ ID NO: 5090212 - DNA, 25 bp, Homo sapien
tgcttcctcacaggatccagggagg

SEQ ID NO: 5090213 - DNA, 25 bp, Homo sapien
cttctgggacaccgagagcagggaa

SEQ ID NO: 5090214 - DNA, 25 bp, Homo sapien
ctgaaaggctcggagaaggagtccc

SEQ ID NO: 5090215 - DNA, 25 bp, Homo sapien
gagtcccaagatcctgcttcctcac

SEQ ID NO: 5090216 - DNA, 25 bp, Homo sapien
gccagagccctgccgaccaactctt

SEQ ID NO: 5090217 - DNA, 25 bp, Homo sapien
agagccctgccgaccaactctttta

SEQ ID NO: 5090218 - DNA, 25 bp, Homo sapien
gagccctgccgaccaactcttttac

SEQ ID NO: 5090219 - DNA, 25 bp, Homo sapien
cagagccctgccgaccaactctttt

SEQ ID NO: 5090220 - DNA, 25 bp, Homo sapien
tgcccaaccagacaggcttgccttc

SEQ ID NO: 5090221 - DNA, 25 bp, Homo sapien
agctctaacagggtcctcctgccca

SEQ ID NO: 5090222 - DNA, 25 bp, Homo sapien
ctcattaactgagctgttgcttaaa

SEQ ID NO: 5090223 - DNA, 25 bp, Homo sapien
tctgtataccatttcctttgtctaa

SEQ ID NO: 5090224 - DNA, 25 bp, Homo sapien
cagaaccatgctgagcactcactct

SEQ ID NO: 5090225 - DNA, 25 bp, Homo sapien
ctgagcacatggtagagagaccgct

SEQ ID NO: 5090226 - DNA, 25 bp, Homo sapien
catggtagagagaccgcttcacgca

SEQ ID NO: 5090227 - DNA, 25 bp, Homo sapien
tccagaaccatgctgagcactcact

SEQ ID NO: 5090228 - DNA, 25 bp, Homo sapien
agagagagccattgtctcaaagttc

SEQ ID NO: 5090229 - DNA, 25 bp, Homo sapien
gagagagccattgtctcaaagttct

SEQ ID NO: 5090230 - DNA, 25 bp, Homo sapien
gacagcctttcagatgcctcgacgt

SEQ ID NO: 5090231 - DNA, 25 bp, Homo sapien
gcctcgacgtgctgttatttgtggt

SEQ ID NO: 5090232 - DNA, 25 bp, Homo sapien
tgagctcatagtcaagcgggtgaca

SEQ ID NO: 5090233 - DNA, 25 bp, Homo sapien
tagtcaagcgggtgacagcctttca

SEQ ID NO: 5090234 - DNA, 25 bp, Homo sapien
gcttggcacctatgggtctgctcct

SEQ ID NO: 5090235 - DNA, 25 bp, Homo sapien
ctaaggttgtaatgacgcagaggaa

SEQ ID NO: 5090236 - DNA, 25 bp, Homo sapien
tcctctcgtcagtgatgtcctccag

SEQ ID NO: 5090237 - DNA, 25 bp, Homo sapien
tgacccatggccatggaaggctgag

SEQ ID NO: 5090238 - DNA, 25 bp, Homo sapien
ccccacaaccgcaagggcagggtgg

SEQ ID NO: 5090239 - DNA, 25 bp, Homo sapien
gatagggactcgtgcgtgcctgtcc

SEQ ID NO: 5090240 - DNA, 25 bp, Homo sapien
gtgcctgtccccacaaccgcaaggg

SEQ ID NO: 5090241 - DNA, 25 bp, Homo sapien
tctttccatttggaagatagggact

SEQ ID NO: 5090242 - DNA, 25 bp, Homo sapien
cttgctgtatccgattgatgctgga

SEQ ID NO: 5090243 - DNA, 25 bp, Homo sapien
tgtatccgattgatgctggattcca

SEQ ID NO: 5090244 - DNA, 25 bp, Homo sapien
gcttcacttgctgtatccgattgat

SEQ ID NO: 5090245 - DNA, 25 bp, Homo sapien
cacttgctgtatccgattgatgctg

SEQ ID NO: 5090246 - DNA, 25 bp, Homo sapien
ccttgggctggtgtcagactttctg

SEQ ID NO: 5090247 - DNA, 25 bp, Homo sapien
tcaaacaaggtgtgaccttggacta

SEQ ID NO: 5090248 - DNA, 25 bp, Homo sapien
gggtaccaagattgagtatctcaaa

SEQ ID NO: 5090249 - DNA, 25 bp, Homo sapien
accttggactaagagccttgggctg

SEQ ID NO: 5090250 - DNA, 25 bp, Homo sapien
gctttggtctccacagtccgcagca

SEQ ID NO: 5090251 - DNA, 25 bp, Homo sapien
acctcccggagctctctcatgccct

SEQ ID NO: 5090252 - DNA, 25 bp, Homo sapien
ctctctcatgcccttcacgatgttc

SEQ ID NO: 5090253 - DNA, 25 bp, Homo sapien
cactttgaagttctgagttgctttg

SEQ ID NO: 5090254 - DNA, 25 bp, Homo sapien
tgagtggcgaaagaactctcctcct

SEQ ID NO: 5090255 - DNA, 25 bp, Homo sapien
cagggcctgagtggcgaaagaactc

SEQ ID NO: 5090256 - DNA, 25 bp, Homo sapien
ccagtagcactcctcactcagggag

SEQ ID NO: 5090257 - DNA, 25 bp, Homo sapien
tccagtagcactcctcactcaggga

SEQ ID NO: 5090258 - DNA, 25 bp, Homo sapien
gcaccagctcggtaaggtgacctct

SEQ ID NO: 5090259 - DNA, 25 bp, Homo sapien
ggtaaggtgacctcttcctgcataa

SEQ ID NO: 5090260 - DNA, 25 bp, Homo sapien
caccggataccatatgccccagagt

SEQ ID NO: 5090261 - DNA, 25 bp, Homo sapien
ttcctgcataattcatgggcaccgg

SEQ ID NO: 5090262 - DNA, 25 bp, Homo sapien
gaggagcaggagggcttcctcgatg

SEQ ID NO: 5090263 - DNA, 25 bp, Homo sapien
tggattcgctgatgaggaggagcag

SEQ ID NO: 5090264 - DNA, 25 bp, Homo sapien
catggattcgctgatgaggaggagc

SEQ ID NO: 5090265 - DNA, 25 bp, Homo sapien
gcaggagggcttcctcgatgttgtc

SEQ ID NO: 5090266 - DNA, 25 bp, Homo sapien
gaggcccctgaaggacatcctggag

SEQ ID NO: 5090267 - DNA, 25 bp, Homo sapien
gcactctcctttgctgagcacccaa

SEQ ID NO: 5090268 - DNA, 25 bp, Homo sapien
gccaccatatgtgtgcaagcacgag

SEQ ID NO: 5090269 - DNA, 25 bp, Homo sapien
cactctcctttgctgagcacccaaa

SEQ ID NO: 5090270 - DNA, 25 bp, Homo sapien
tgtcattttggctccgaagacccaa

SEQ ID NO: 5090271 - DNA, 25 bp, Homo sapien
actaggtccaaaacagaaatcatct

SEQ ID NO: 5090272 - DNA, 25 bp, Homo sapien
taaaaaccatatccaaggtagcagc

SEQ ID NO: 5090273 - DNA, 25 bp, Homo sapien
taaatggtaaagtgggtcggtgatc

SEQ ID NO: 5090274 - DNA, 25 bp, Homo sapien
ttccatttctaacagcagcaacttg

SEQ ID NO: 5090275 - DNA, 25 bp, Homo sapien
tcaacaccagggctctgtacccttt

SEQ ID NO: 5090276 - DNA, 25 bp, Homo sapien
ctaacagcagcaacttgttcgccag

SEQ ID NO: 5090277 - DNA, 25 bp, Homo sapien
actctcaacaccagggctctgtacc

SEQ ID NO: 5090278 - DNA, 25 bp, Homo sapien
tggtaagaagctcaaccaggccaca

SEQ ID NO: 5090279 - DNA, 25 bp, Homo sapien
caaagtctgttaatctgcagagtcc

SEQ ID NO: 5090280 - DNA, 25 bp, Homo sapien
tgaacaaccaaaatgtaccaggcac

SEQ ID NO: 5090281 - DNA, 25 bp, Homo sapien
cagcattgggcatggcacaaagtct

SEQ ID NO: 5090282 - DNA, 25 bp, Homo sapien
taggatgcacatccccgagtggagg

SEQ ID NO: 5090283 - DNA, 25 bp, Homo sapien
gaaggagcagcattataggatgcac

SEQ ID NO: 5090284 - DNA, 25 bp, Homo sapien
cacatccccgagtggaggctgacct

SEQ ID NO: 5090285 - DNA, 25 bp, Homo sapien
gcattataggatgcacatccccgag

SEQ ID NO: 5090286 - DNA, 25 bp, Homo sapien
ctcgggtgtgagaggacgggggcac

SEQ ID NO: 5090287 - DNA, 25 bp, Homo sapien
gcggcctccaacaggcaagagtggc

SEQ ID NO: 5090288 - DNA, 25 bp, Homo sapien
acaggggcggcctccaacaggcaag

SEQ ID NO: 5090289 - DNA, 25 bp, Homo sapien
aggcaagagtggctcgggtgtgaga

SEQ ID NO: 5090290 - DNA, 25 bp, Homo sapien
gcccccatggacttagatggcccag

SEQ ID NO: 5090291 - DNA, 25 bp, Homo sapien
agctcagtcactgagagactggtgg

SEQ ID NO: 5090292 - DNA, 25 bp, Homo sapien
cgggatgcccggaaatcccggcaag

SEQ ID NO: 5090293 - DNA, 25 bp, Homo sapien
cctgttgccacagttggtgagtgct

SEQ ID NO: 5090294 - DNA, 25 bp, Homo sapien
tttcagtagctcacagagttgccag

SEQ ID NO: 5090295 - DNA, 25 bp, Homo sapien
ctggctccttccaaccatggaaact

SEQ ID NO: 5090296 - DNA, 25 bp, Homo sapien
agaactctgctcttggcgtccagcg

SEQ ID NO: 5090297 - DNA, 25 bp, Homo sapien
gcgtccagcgccgaggatttcagta

SEQ ID NO: 5090298 - DNA, 25 bp, Homo sapien
ccagaaatggccttttcctatctcc

SEQ ID NO: 5090299 - DNA, 25 bp, Homo sapien
tcacctttttgccactgccccaagc

SEQ ID NO: 5090300 - DNA, 25 bp, Homo sapien
gaaatggccttttcctatctccaca

SEQ ID NO: 5090301 - DNA, 25 bp, Homo sapien
agccgctatcacctttttgccactg

SEQ ID NO: 5090302 - DNA, 25 bp, Homo sapien
gcattctgcaagctcactgtccggt

SEQ ID NO: 5090303 - DNA, 25 bp, Homo sapien
ttctgcccaacgtgatgctcaggag

SEQ ID NO: 5090304 - DNA, 25 bp, Homo sapien
tgatgctcaggaggtcatagatggc

SEQ ID NO: 5090305 - DNA, 25 bp, Homo sapien
tccgagagcatgacgtactgtcccc

SEQ ID NO: 5090306 - DNA, 25 bp, Homo sapien
gaaattctccaaacgcaaacttcat

SEQ ID NO: 5090307 - DNA, 25 bp, Homo sapien
gccccttcaccgttgcccacattgt

SEQ ID NO: 5090308 - DNA, 25 bp, Homo sapien
tgcagttctgtaggagggtttctct

SEQ ID NO: 5090309 - DNA, 25 bp, Homo sapien
tctctaacccttggagggccagggc

SEQ ID NO: 5090310 - DNA, 25 bp, Homo sapien
acggccagctcgtcttttccagccc

SEQ ID NO: 5090311 - DNA, 25 bp, Homo sapien
cctgtccctactaccccaggctgac

SEQ ID NO: 5090312 - DNA, 25 bp, Homo sapien
tcactgtcccaagattagacgggct

SEQ ID NO: 5090313 - DNA, 25 bp, Homo sapien
agattagacgggctttctgtgtttc

SEQ ID NO: 5090314 - DNA, 25 bp, Homo sapien
gaacctgcccatgccactgtgagct

SEQ ID NO: 5090315 - DNA, 25 bp, Homo sapien
ttgattccaccttaggctttcagca

SEQ ID NO: 5090316 - DNA, 25 bp, Homo sapien
gcaaggtctggccactcttgagggc

SEQ ID NO: 5090317 - DNA, 25 bp, Homo sapien
cagatacaggcccttgattccacct

SEQ ID NO: 5090318 - DNA, 25 bp, Homo sapien
aggcctttcgggcataatcacagat

SEQ ID NO: 5090319 - DNA, 25 bp, Homo sapien
actgggctaggcgttgtgcggtcac

SEQ ID NO: 5090320 - DNA, 25 bp, Homo sapien
ccagtactgggctaggcgttgtgcg

SEQ ID NO: 5090321 - DNA, 25 bp, Homo sapien
aggcgttgtgcggtcactcaggaaa

SEQ ID NO: 5090322 - DNA, 25 bp, Homo sapien
aggggatgaggtcatggctctttcc

SEQ ID NO: 5090323 - DNA, 25 bp, Homo sapien
ccagatcttgggatgtgcaggcgtt

SEQ ID NO: 5090324 - DNA, 25 bp, Homo sapien
acctgctgaggacggccaagtgtga

SEQ ID NO: 5090325 - DNA, 25 bp, Homo sapien
gcctgcagagtcaacaacgtctact

SEQ ID NO: 5090326 - DNA, 25 bp, Homo sapien
tgaggtttgaacgtagcctggctct

SEQ ID NO: 5090327 - DNA, 25 bp, Homo sapien
ggtccgagggccgcaacttcacaca

SEQ ID NO: 5090328 - DNA, 25 bp, Homo sapien
aagggacccgatgcagaccttcgcg

SEQ ID NO: 5090329 - DNA, 25 bp, Homo sapien
gcagcagggacacagcgtaggctga

SEQ ID NO: 5090330 - DNA, 25 bp, Homo sapien
acttcacacactcccgcagcaggga

SEQ ID NO: 5090331 - DNA, 25 bp, Homo sapien
caggcccttgcagattggatgctaa

SEQ ID NO: 5090332 - DNA, 25 bp, Homo sapien
tacacgtcaagacgtgcacagccag

SEQ ID NO: 5090333 - DNA, 25 bp, Homo sapien
tacttccttatgtttcactctctgg

SEQ ID NO: 5090334 - DNA, 25 bp, Homo sapien
cttacctactactctgctgctgggc

SEQ ID NO: 5090335 - DNA, 25 bp, Homo sapien
ctgcagagagcagtaagcaggcagc

SEQ ID NO: 5090336 - DNA, 25 bp, Homo sapien
tcctaacagttcagctgcttctgca

SEQ ID NO: 5090337 - DNA, 25 bp, Homo sapien
ctggagccatagcctcctaacagtt

SEQ ID NO: 5090338 - DNA, 25 bp, Homo sapien
gagccatagcctcctaacagttcag

SEQ ID NO: 5090339 - DNA, 25 bp, Homo sapien
aaggcctcgaactggggaaagagca

SEQ ID NO: 5090340 - DNA, 25 bp, Homo sapien
tcactactccaagctgctgatctca

SEQ ID NO: 5090341 - DNA, 25 bp, Homo sapien
agggcaggaggactacagcaaggcg

SEQ ID NO: 5090342 - DNA, 25 bp, Homo sapien
gcccccagtcggaagagatacctgc

SEQ ID NO: 5090343 - DNA, 25 bp, Homo sapien
cctggagcagcatccgagtaggccc

SEQ ID NO: 5090344 - DNA, 25 bp, Homo sapien
tggcctgtgcctgatttaaaccctg

SEQ ID NO: 5090345 - DNA, 25 bp, Homo sapien
catggcaagtgagcaagttccccac

SEQ ID NO: 5090346 - DNA, 25 bp, Homo sapien
caagtgaatgtgtccatcggcaaga

SEQ ID NO: 5090347 - DNA, 25 bp, Homo sapien
ccacctagttgggaagtcatgcacc

SEQ ID NO: 5090348 - DNA, 25 bp, Homo sapien
ctgccttccatttcaagggttacct

SEQ ID NO: 5090349 - DNA, 25 bp, Homo sapien
tttggtccctacacagactggcttc

SEQ ID NO: 5090350 - DNA, 25 bp, Homo sapien
aagggttacctcaccttgcagtgag

SEQ ID NO: 5090351 - DNA, 25 bp, Homo sapien
tctccagtgtttcgaatttggtccc

SEQ ID NO: 5090352 - DNA, 25 bp, Homo sapien
caaggtcacctgtctaggaagtagc

SEQ ID NO: 5090353 - DNA, 25 bp, Homo sapien
gagctgagctgaagcgacctatcca

SEQ ID NO: 5090354 - DNA, 25 bp, Homo sapien
agcaagctcaggttacagcaccggg

SEQ ID NO: 5090355 - DNA, 25 bp, Homo sapien
tgattcacagctaccctctggaggg

SEQ ID NO: 5090356 - DNA, 25 bp, Homo sapien
ccccactgtgggtaatacactggag

SEQ ID NO: 5090357 - DNA, 25 bp, Homo sapien
ccccacctgcgatctggaaaaattg

SEQ ID NO: 5090358 - DNA, 25 bp, Homo sapien
ttctatttcacagcccactaatggg

SEQ ID NO: 5090359 - DNA, 25 bp, Homo sapien
aattgctctaatcagatggctgcag

SEQ ID NO: 5090360 - DNA, 25 bp, Homo sapien
accttcacctctgggattcaaatgg

SEQ ID NO: 5090361 - DNA, 25 bp, Homo sapien
tcacctctgggattcaaatggttct

SEQ ID NO: 5090362 - DNA, 25 bp, Homo sapien
gcaaccttcacctctgggattcaaa

SEQ ID NO: 5090363 - DNA, 25 bp, Homo sapien
actctgtatcccaagctggcgtgca

SEQ ID NO: 5090364 - DNA, 25 bp, Homo sapien
accttgtgggcgagctcaagctgcc

SEQ ID NO: 5090365 - DNA, 25 bp, Homo sapien
caccttgtgggcgagctcaagctgc

SEQ ID NO: 5090366 - DNA, 25 bp, Homo sapien
ttgtgggcgagctcaagctgccagc

SEQ ID NO: 5090367 - DNA, 25 bp, Homo sapien
cagccaccttgtgggcgagctcaag

SEQ ID NO: 5090368 - DNA, 25 bp, Homo sapien
ctcggcacatagaggaaagccaggg

SEQ ID NO: 5090369 - DNA, 25 bp, Homo sapien
ggcctcaggaacatgtgccttgctg

SEQ ID NO: 5090370 - DNA, 25 bp, Homo sapien
ctgctcggcacatagaggaaagcca

SEQ ID NO: 5090371 - DNA, 25 bp, Homo sapien
ctgggcctcaggaacatgtgccttg

SEQ ID NO: 5090372 - DNA, 25 bp, Homo sapien
acagaagccttgtgctcaaggtcac

SEQ ID NO: 5090373 - DNA, 25 bp, Homo sapien
catgaacccaagaccgggccagttt

SEQ ID NO: 5090374 - DNA, 25 bp, Homo sapien
cctggacctgttcccgaaacagaag

SEQ ID NO: 5090375 - DNA, 25 bp, Homo sapien
gctcaaggtcacagggccttactct

SEQ ID NO: 5090376 - DNA, 25 bp, Homo sapien
actccccggcttcctctccgaggct

SEQ ID NO: 5090377 - DNA, 25 bp, Homo sapien
tcctctccgaggctgatcaccatca

SEQ ID NO: 5090378 - DNA, 25 bp, Homo sapien
tgcaggctataggtgagacccagag

SEQ ID NO: 5090379 - DNA, 25 bp, Homo sapien
gcaggctataggtgagacccagagc

SEQ ID NO: 5090380 - DNA, 25 bp, Homo sapien
cttccggtgcaattcatcttgcttg

SEQ ID NO: 5090381 - DNA, 25 bp, Homo sapien
ccggtgcaattcatcttgcttggac

SEQ ID NO: 5090382 - DNA, 25 bp, Homo sapien
gtgcaattcatcttgcttggacttc

SEQ ID NO: 5090383 - DNA, 25 bp, Homo sapien
tgccttccggtgcaattcatcttgc

SEQ ID NO: 5090384 - DNA, 25 bp, Homo sapien
tgctctgagcatatgccaggaaatc

SEQ ID NO: 5090385 - DNA, 25 bp, Homo sapien
atatgccaggaaatccctgtagggg

SEQ ID NO: 5090386 - DNA, 25 bp, Homo sapien
agcatatgccaggaaatccctgtag

SEQ ID NO: 5090387 - DNA, 25 bp, Homo sapien
gctctgagcatatgccaggaaatcc

SEQ ID NO: 5090388 - DNA, 25 bp, Homo sapien
gaatatacaacccatgggcagagag

SEQ ID NO: 5090389 - DNA, 25 bp, Homo sapien
cactcactgaggtaggggccatctg

SEQ ID NO: 5090390 - DNA, 25 bp, Homo sapien
ggtgacagaccccaaagaagaaaga

SEQ ID NO: 5090391 - DNA, 25 bp, Homo sapien
gagggagtgacaagtcaggcaccag

SEQ ID NO: 5090392 - DNA, 25 bp, Homo sapien
gccagctgcagcgagacatagagga

SEQ ID NO: 5090393 - DNA, 25 bp, Homo sapien
ccagctgcagcgagacatagaggat

SEQ ID NO: 5090394 - DNA, 25 bp, Homo sapien
gctgcagcgagacatagaggatgac

SEQ ID NO: 5090395 - DNA, 25 bp, Homo sapien
cagcgagacatagaggatgacctgg

SEQ ID NO: 5090396 - DNA, 25 bp, Homo sapien
tacatgggcttcttcgggcttccct

SEQ ID NO: 5090397 - DNA, 25 bp, Homo sapien
caaatacatgggcttcttcgggctt

SEQ ID NO: 5090398 - DNA, 25 bp, Homo sapien
tgacagcaaatacatgggcttcttc

SEQ ID NO: 5090399 - DNA, 25 bp, Homo sapien
cagcaaatacatgggcttcttcggg

SEQ ID NO: 5090400 - DNA, 25 bp, Homo sapien
ggagcatacgaggaggacactaaga

SEQ ID NO: 5090401 - DNA, 25 bp, Homo sapien
tagagcagacctgattatcctgggc

SEQ ID NO: 5090402 - DNA, 25 bp, Homo sapien
tggctcggcttgtcggtggccctaa

SEQ ID NO: 5090403 - DNA, 25 bp, Homo sapien
tatcctgggctacgtatccaaatcc

SEQ ID NO: 5090404 - DNA, 25 bp, Homo sapien
tccccaggatgcagggaatcctctc

SEQ ID NO: 5090405 - DNA, 25 bp, Homo sapien
aggttctgcaccctgtagaaaggct

SEQ ID NO: 5090406 - DNA, 25 bp, Homo sapien
accctgtagaaaggctgtgaccagg

SEQ ID NO: 5090407 - DNA, 25 bp, Homo sapien
aacctggcctgattccccaggatgc

SEQ ID NO: 5090408 - DNA, 25 bp, Homo sapien
caatgttctactggatctggctgca

SEQ ID NO: 5090409 - DNA, 25 bp, Homo sapien
caggcaggactccaatgttctactg

SEQ ID NO: 5090410 - DNA, 25 bp, Homo sapien
cagagggcacgggtgatttgcagct

SEQ ID NO: 5090411 - DNA, 25 bp, Homo sapien
tgctcccgccaaccctgcaggcagg

SEQ ID NO: 5090412 - DNA, 25 bp, Homo sapien
ccaattttcactggcttgagtttgc

SEQ ID NO: 5090413 - DNA, 25 bp, Homo sapien
cactggcttgagtttgctgcctccc

SEQ ID NO: 5090414 - DNA, 25 bp, Homo sapien
tccagtagcccagtcagtgagccca

SEQ ID NO: 5090415 - DNA, 25 bp, Homo sapien
gctccagtagcccagtcagtgagcc

SEQ ID NO: 5090416 - DNA, 25 bp, Homo sapien
aagcaggtttgtggtgtggcacaaa

SEQ ID NO: 5090417 - DNA, 25 bp, Homo sapien
tggtgtggcacaaaggaccatggca

SEQ ID NO: 5090418 - DNA, 25 bp, Homo sapien
tgtggcacaaaggaccatggcagcc

SEQ ID NO: 5090419 - DNA, 25 bp, Homo sapien
gaagcaggtttgtggtgtggcacaa

SEQ ID NO: 5090420 - DNA, 25 bp, Homo sapien
ggcagggaggctgctgtgagaaaac

SEQ ID NO: 5090421 - DNA, 25 bp, Homo sapien
cagggaggctgctgtgagaaaacac

SEQ ID NO: 5090422 - DNA, 25 bp, Homo sapien
tcaactcaagggagccccaggcact

SEQ ID NO: 5090423 - DNA, 25 bp, Homo sapien
actcaactcaagggagccccaggca

SEQ ID NO: 5090424 - DNA, 25 bp, Homo sapien
ggcgtgggcatcatccttgcgtacc

SEQ ID NO: 5090425 - DNA, 25 bp, Homo sapien
gatggccatgttgacaacatccagg

SEQ ID NO: 5090426 - DNA, 25 bp, Homo sapien
ttgaagttctcagggtgctcggtga

SEQ ID NO: 5090427 - DNA, 25 bp, Homo sapien
tcatccttgcgtaccttcagggcct

SEQ ID NO: 5090428 - DNA, 25 bp, Homo sapien
tgtgtgttggctgacaccatggcag

SEQ ID NO: 5090429 - DNA, 25 bp, Homo sapien
ctctccaccagggattgtgcatgca

SEQ ID NO: 5090430 - DNA, 25 bp, Homo sapien
gattgtgcatgcagcgggtgcttac

SEQ ID NO: 5090431 - DNA, 25 bp, Homo sapien
gggtgcttacttcatgtgtgttggc

SEQ ID NO: 5090432 - DNA, 25 bp, Homo sapien
aggagcagcatgtgcaccccattac

SEQ ID NO: 5090433 - DNA, 25 bp, Homo sapien
gctgaggagcagcatgtgcacccca

SEQ ID NO: 5090434 - DNA, 25 bp, Homo sapien
tgaggagcagcatgtgcaccccatt

SEQ ID NO: 5090435 - DNA, 25 bp, Homo sapien
ggagcagcatgtgcaccccattacc

SEQ ID NO: 5090436 - DNA, 25 bp, Homo sapien
cacagcgtgagtcacctatcagggc

SEQ ID NO: 5090437 - DNA, 25 bp, Homo sapien
acagcgtgagtcacctatcagggca

SEQ ID NO: 5090438 - DNA, 25 bp, Homo sapien
aggccaaggatgcaggaaaacctga

SEQ ID NO: 5090439 - DNA, 25 bp, Homo sapien
tgtggtcagccctgcctctgatggg

SEQ ID NO: 5090440 - DNA, 25 bp, Homo sapien
acccctgtggtcagccctgcctctg

SEQ ID NO: 5090441 - DNA, 25 bp, Homo sapien
gatgcaggaaaacctgaacccaccc

SEQ ID NO: 5090442 - DNA, 25 bp, Homo sapien
agcagtgctcggcacgctggcaaag

SEQ ID NO: 5090443 - DNA, 25 bp, Homo sapien
aggccacaagcagaactatgtgctg

SEQ ID NO: 5090444 - DNA, 25 bp, Homo sapien
gcacgctggcaaaggccacaagcag

SEQ ID NO: 5090445 - DNA, 25 bp, Homo sapien
aaggaagccatcaacagcagtgctc

SEQ ID NO: 5090446 - DNA, 25 bp, Homo sapien
agacccagggtggacaaagagccct

SEQ ID NO: 5090447 - DNA, 25 bp, Homo sapien
gaaagcaatcagctcagaagtcagc

SEQ ID NO: 5090448 - DNA, 25 bp, Homo sapien
cagcacctgagtaagcttgggagga

SEQ ID NO: 5090449 - DNA, 25 bp, Homo sapien
tggagacccagatgtccacccttgg

SEQ ID NO: 5090450 - DNA, 25 bp, Homo sapien
gaagcacccgagacaggggcacagt

SEQ ID NO: 5090451 - DNA, 25 bp, Homo sapien
tactctgcacattgacaaccagcac

SEQ ID NO: 5090452 - DNA, 25 bp, Homo sapien
gcacagttactctgcacattgacaa

SEQ ID NO: 5090453 - DNA, 25 bp, Homo sapien
gagacaggggcacagttactctgca

SEQ ID NO: 5090454 - DNA, 25 bp, Homo sapien
gaagcccttgcagtcgctctgcgat

SEQ ID NO: 5090455 - DNA, 25 bp, Homo sapien
gtcgctctgcgatgtctgcatgggt

SEQ ID NO: 5090456 - DNA, 25 bp, Homo sapien
gtgagttgttcccacggcagaggtt

SEQ ID NO: 5090457 - DNA, 25 bp, Homo sapien
gcagaggttcctgcctgcagacact

SEQ ID NO: 5090458 - DNA, 25 bp, Homo sapien
ctcagagctgattcccctaggcccc

SEQ ID NO: 5090459 - DNA, 25 bp, Homo sapien
tcagagctgattcccctaggcccca

SEQ ID NO: 5090460 - DNA, 25 bp, Homo sapien
cagagctgattcccctaggccccac

SEQ ID NO: 5090461 - DNA, 25 bp, Homo sapien
cagggcatggaacgaaagtctgctc

SEQ ID NO: 5090462 - DNA, 25 bp, Homo sapien
gggcatggaacgaaagtctgctctg

SEQ ID NO: 5090463 - DNA, 25 bp, Homo sapien
tcagggcatggaacgaaagtctgct

SEQ ID NO: 5090464 - DNA, 25 bp, Homo sapien
gcatggaacgaaagtctgctctgac

SEQ ID NO: 5090465 - DNA, 25 bp, Homo sapien
gcttcgcagcacactctacggtgag

SEQ ID NO: 5090466 - DNA, 25 bp, Homo sapien
tttgcagccttttagggccagctgg

SEQ ID NO: 5090467 - DNA, 25 bp, Homo sapien
cagccctggacaagcagactaagga

SEQ ID NO: 5090468 - DNA, 25 bp, Homo sapien
ggctcaagatgaagaacctactgct

SEQ ID NO: 5090469 - DNA, 25 bp, Homo sapien
cagtgatccctgacctgtaatggac

SEQ ID NO: 5090470 - DNA, 25 bp, Homo sapien
tttcctgctaatccatgggtttcta

SEQ ID NO: 5090471 - DNA, 25 bp, Homo sapien
cagggagcagtgtcaatcgaagagc

SEQ ID NO: 5090472 - DNA, 25 bp, Homo sapien
taatggactcagtgacatttcctgc

SEQ ID NO: 5090473 - DNA, 25 bp, Homo sapien
gggaccagtactgggccagcagaaa

SEQ ID NO: 5090474 - DNA, 25 bp, Homo sapien
tgtcgggaagcccatattattcctg

SEQ ID NO: 5090475 - DNA, 25 bp, Homo sapien
tgctctggcttgtcgggaagcccat

SEQ ID NO: 5090476 - DNA, 25 bp, Homo sapien
ctaccctgaccgacggaggttccag

SEQ ID NO: 5090477 - DNA, 25 bp, Homo sapien
cctgggcagcaattccggatccctc

SEQ ID NO: 5090478 - DNA, 25 bp, Homo sapien
tgggcagcaattccggatccctctg

SEQ ID NO: 5090479 - DNA, 25 bp, Homo sapien
gggcagcaattccggatccctctgg

SEQ ID NO: 5090480 - DNA, 25 bp, Homo sapien
gcagcaattccggatccctctggct

SEQ ID NO: 5090481 - DNA, 25 bp, Homo sapien
ggaagtgaagctgcagggcgttcct

SEQ ID NO: 5090482 - DNA, 25 bp, Homo sapien
aaggaagtgaagctgcagggcgttc

SEQ ID NO: 5090483 - DNA, 25 bp, Homo sapien
agtgaagctgcagggcgttcctgaa

SEQ ID NO: 5090484 - DNA, 25 bp, Homo sapien
aagtgaagctgcagggcgttcctga

SEQ ID NO: 5090485 - DNA, 25 bp, Homo sapien
ctggtgggggaagttggcagagcag

SEQ ID NO: 5090486 - DNA, 25 bp, Homo sapien
ggtgggggaagttggcagagcagag

SEQ ID NO: 5090487 - DNA, 25 bp, Homo sapien
gagctggctgcacggaaacacacag

SEQ ID NO: 5090488 - DNA, 25 bp, Homo sapien
tggtgggggaagttggcagagcaga

SEQ ID NO: 5090489 - DNA, 25 bp, Homo sapien
gggcaccaatcctcaccctccctgt

SEQ ID NO: 5090490 - DNA, 25 bp, Homo sapien
caccaatcctcaccctccctgtgtc

SEQ ID NO: 5090491 - DNA, 25 bp, Homo sapien
ctgggggcaccaatcctcaccctcc

SEQ ID NO: 5090492 - DNA, 25 bp, Homo sapien
tgggggcaccaatcctcaccctccc

SEQ ID NO: 5090493 - DNA, 25 bp, Homo sapien
gcacagaaaggcactcaggtgacct

SEQ ID NO: 5090494 - DNA, 25 bp, Homo sapien
ggggacatctcagcccacagggtct

SEQ ID NO: 5090495 - DNA, 25 bp, Homo sapien
tgacctaacagagtcagcccctgct

SEQ ID NO: 5090496 - DNA, 25 bp, Homo sapien
acagggtctgtatgtctagggcagc

SEQ ID NO: 5090497 - DNA, 25 bp, Homo sapien
ggcccgatcccaagaagcaagtttc

SEQ ID NO: 5090498 - DNA, 25 bp, Homo sapien
cataaagctataggaactgggctct

SEQ ID NO: 5090499 - DNA, 25 bp, Homo sapien
taagacaggcttatgacaggaagac

SEQ ID NO: 5090500 - DNA, 25 bp, Homo sapien
gctctgggcaaagcatgctcgctgt

SEQ ID NO: 5090501 - DNA, 25 bp, Homo sapien
cagctgcattcagctctccagcaca

SEQ ID NO: 5090502 - DNA, 25 bp, Homo sapien
agctgcattcagctctccagcacac

SEQ ID NO: 5090503 - DNA, 25 bp, Homo sapien
ctaagtagcagctgcattcagctct

SEQ ID NO: 5090504 - DNA, 25 bp, Homo sapien
agtagcagctgcattcagctctcca

SEQ ID NO: 5090505 - DNA, 25 bp, Homo sapien
ttcccctctgacattcagccagctc

SEQ ID NO: 5090506 - DNA, 25 bp, Homo sapien
tcccctctgacattcagccagctcc

SEQ ID NO: 5090507 - DNA, 25 bp, Homo sapien
ctcctaaccagatgtcgccctctgg

SEQ ID NO: 5090508 - DNA, 25 bp, Homo sapien
ccagatgtcgccctctggctttctg

SEQ ID NO: 5090509 - DNA, 25 bp, Homo sapien
tttgctcctgagatttccttgggct

SEQ ID NO: 5090510 - DNA, 25 bp, Homo sapien
gggaggatccagatttgctcctgag

SEQ ID NO: 5090511 - DNA, 25 bp, Homo sapien
ctgggaggatccagatttgctcctg

SEQ ID NO: 5090512 - DNA, 25 bp, Homo sapien
gatttgctcctgagatttccttggg

SEQ ID NO: 5090513 - DNA, 25 bp, Homo sapien
catgagtggcccagagcggattttc

SEQ ID NO: 5090514 - DNA, 25 bp, Homo sapien
gggcaagtgctccaccagtcactct

SEQ ID NO: 5090515 - DNA, 25 bp, Homo sapien
gcggattttctcaacccgaccacat

SEQ ID NO: 5090516 - DNA, 25 bp, Homo sapien
tggtctgatctttcactccaggatc

SEQ ID NO: 5090517 - DNA, 25 bp, Homo sapien
tgccttcgagacaacaattagagcg

SEQ ID NO: 5090518 - DNA, 25 bp, Homo sapien
tgagtaggaatgaccccagtgggca

SEQ ID NO: 5090519 - DNA, 25 bp, Homo sapien
aacacaatggctgccttcgagacaa

SEQ ID NO: 5090520 - DNA, 25 bp, Homo sapien
tggggacaactggtcttgccactgt

SEQ ID NO: 5090521 - DNA, 25 bp, Homo sapien
ctccatcggagggtccctacccaga

SEQ ID NO: 5090522 - DNA, 25 bp, Homo sapien
gcctgctccatcggagggtccctac

SEQ ID NO: 5090523 - DNA, 25 bp, Homo sapien
gctccatcggagggtccctacccag

SEQ ID NO: 5090524 - DNA, 25 bp, Homo sapien
ctgctccatcggagggtccctaccc

SEQ ID NO: 5090525 - DNA, 25 bp, Homo sapien
caagcaacgcctcctaagtggaact

SEQ ID NO: 5090526 - DNA, 25 bp, Homo sapien
cacaacagtataggtgcccaagcaa

SEQ ID NO: 5090527 - DNA, 25 bp, Homo sapien
cagtgacttagaatccgtgagtgaa

SEQ ID NO: 5090528 - DNA, 25 bp, Homo sapien
gcatgggaccttggataagagaccc

SEQ ID NO: 5090529 - DNA, 25 bp, Homo sapien
cactccatgaagcattgtcagtgcc

SEQ ID NO: 5090530 - DNA, 25 bp, Homo sapien
gcatgaagcactccatgaagcattg

SEQ ID NO: 5090531 - DNA, 25 bp, Homo sapien
tgcccacactgctgatgccccgtgt

SEQ ID NO: 5090532 - DNA, 25 bp, Homo sapien
ctgccaaagcatgaagcactccatg

SEQ ID NO: 5090533 - DNA, 25 bp, Homo sapien
tccctaactcgcagaaagcagagtg

SEQ ID NO: 5090534 - DNA, 25 bp, Homo sapien
cccctggaccgcttgctttctctgt

SEQ ID NO: 5090535 - DNA, 25 bp, Homo sapien
ctccctaactcgcagaaagcagagt

SEQ ID NO: 5090536 - DNA, 25 bp, Homo sapien
ccatgcccctggaccgcttgctttc

SEQ ID NO: 5090537 - DNA, 25 bp, Homo sapien
tgtggggacggagagtggccatcag

SEQ ID NO: 5090538 - DNA, 25 bp, Homo sapien
ccagcaagggcccactttcacctgg

SEQ ID NO: 5090539 - DNA, 25 bp, Homo sapien
caccagggcggctccacatgctcac

SEQ ID NO: 5090540 - DNA, 25 bp, Homo sapien
atcagcacaccccagcaagggccca

SEQ ID NO: 5090541 - DNA, 25 bp, Homo sapien
ttgtctgcaggtcacgagggcttcc

SEQ ID NO: 5090542 - DNA, 25 bp, Homo sapien
cttgtctgcaggtcacgagggcttc

SEQ ID NO: 5090543 - DNA, 25 bp, Homo sapien
tgtctgcaggtcacgagggcttcct

SEQ ID NO: 5090544 - DNA, 25 bp, Homo sapien
acttgtctgcaggtcacgagggctt

SEQ ID NO: 5090545 - DNA, 25 bp, Homo sapien
cctcctctgtaaatttcactgttac

SEQ ID NO: 5090546 - DNA, 25 bp, Homo sapien
gtctggaagccttctgggctcctaa

SEQ ID NO: 5090547 - DNA, 25 bp, Homo sapien
agtctggaagccttctgggctccta

SEQ ID NO: 5090548 - DNA, 25 bp, Homo sapien
cagatgttcctctggggagtctgga

SEQ ID NO: 5090549 - DNA, 25 bp, Homo sapien
agtgggtaaggccagaagctcccca

SEQ ID NO: 5090550 - DNA, 25 bp, Homo sapien
cagggggagcaacatccagcagagt

SEQ ID NO: 5090551 - DNA, 25 bp, Homo sapien
tagggcactagaagtgctgcaaccc

SEQ ID NO: 5090552 - DNA, 25 bp, Homo sapien
gctgagacctggaaactctcccaca

SEQ ID NO: 5090553 - DNA, 25 bp, Homo sapien
tggaaggcaaaagagggccagggtc

SEQ ID NO: 5090554 - DNA, 25 bp, Homo sapien
ctggaaggcaaaagagggccagggt

SEQ ID NO: 5090555 - DNA, 25 bp, Homo sapien
atggtgaggccctcaccgaagctgc

SEQ ID NO: 5090556 - DNA, 25 bp, Homo sapien
gcttcttcatggtgaggccctcacc

SEQ ID NO: 5090557 - DNA, 25 bp, Homo sapien
agagtctgcatcatgggcatcaggc

SEQ ID NO: 5090558 - DNA, 25 bp, Homo sapien
tcttcatggtgaggccctcaccgaa

SEQ ID NO: 5090559 - DNA, 25 bp, Homo sapien
tatgagacaagtgtacctggagtcc

SEQ ID NO: 5090560 - DNA, 25 bp, Homo sapien
ggatagcagctcaagtcagaacact

SEQ ID NO: 5090561 - DNA, 25 bp, Homo sapien
tagaaaggtacccattcaaggctgt

SEQ ID NO: 5090562 - DNA, 25 bp, Homo sapien
ctgtcatagacgcaataaaggctcc

SEQ ID NO: 5090563 - DNA, 25 bp, Homo sapien
cagcctgcagccagatctgttccag

SEQ ID NO: 5090564 - DNA, 25 bp, Homo sapien
gagggcatagtcagctctgacatgg

SEQ ID NO: 5090565 - DNA, 25 bp, Homo sapien
tctgttccagcgtggtccacagctg

SEQ ID NO: 5090566 - DNA, 25 bp, Homo sapien
cctgcttcaggaccgaagagggcat

SEQ ID NO: 5090567 - DNA, 25 bp, Homo sapien
caggacctccaatcctctcacgttt

SEQ ID NO: 5090568 - DNA, 25 bp, Homo sapien
cctctcaggacctccaatcctctca

SEQ ID NO: 5090569 - DNA, 25 bp, Homo sapien
tcaggacctccaatcctctcacgtt

SEQ ID NO: 5090570 - DNA, 25 bp, Homo sapien
tctcaggacctccaatcctctcacg

SEQ ID NO: 5090571 - DNA, 25 bp, Homo sapien
caaatccccatgtcccagtaagaga

SEQ ID NO: 5090572 - DNA, 25 bp, Homo sapien
cagtaagagatcatcaactttcggt

SEQ ID NO: 5090573 - DNA, 25 bp, Homo sapien
gatcatcaactttcggtttcttctc

SEQ ID NO: 5090574 - DNA, 25 bp, Homo sapien
ccatgtcccagtaagagatcatcaa

SEQ ID NO: 5090575 - DNA, 25 bp, Homo sapien
agatgctgttctcggagttctcttc

SEQ ID NO: 5090576 - DNA, 25 bp, Homo sapien
ttcagatgctgttctcggagttctc

SEQ ID NO: 5090577 - DNA, 25 bp, Homo sapien
ctgatgcagcgccacattcaaagca

SEQ ID NO: 5090578 - DNA, 25 bp, Homo sapien
gctgttctcggagttctcttctgtg

SEQ ID NO: 5090579 - DNA, 25 bp, Homo sapien
gtggagtcattaggcagggtttggc

SEQ ID NO: 5090580 - DNA, 25 bp, Homo sapien
gagtcattaggcagggtttggcggg

SEQ ID NO: 5090581 - DNA, 25 bp, Homo sapien
cggggggatgctgattgtattctta

SEQ ID NO: 5090582 - DNA, 25 bp, Homo sapien
ctggtggagtcattaggcagggttt

SEQ ID NO: 5090583 - DNA, 25 bp, Homo sapien
gccatacagattgggatgcaattta

SEQ ID NO: 5090584 - DNA, 25 bp, Homo sapien
tccttccaaaatgatcaaggcatct

SEQ ID NO: 5090585 - DNA, 25 bp, Homo sapien
tgaaccaaaccagggggattagctc

SEQ ID NO: 5090586 - DNA, 25 bp, Homo sapien
gatgcaatttatcttgaaccaaacc

SEQ ID NO: 5090587 - DNA, 25 bp, Homo sapien
ctcttgcttgtctgtctccggtttt

SEQ ID NO: 5090588 - DNA, 25 bp, Homo sapien
ctcctctgtgctttctctcggcagg

SEQ ID NO: 5090589 - DNA, 25 bp, Homo sapien
ttgcttgtctgtctccggttttcct

SEQ ID NO: 5090590 - DNA, 25 bp, Homo sapien
gcttgtctgtctccggttttcctcc

SEQ ID NO: 5090591 - DNA, 25 bp, Homo sapien
tctgctctcatcatcctcctgccta

SEQ ID NO: 5090592 - DNA, 25 bp, Homo sapien
ttcatgctgtcttcccctttctgat

SEQ ID NO: 5090593 - DNA, 25 bp, Homo sapien
cctcagcgtcaaggggcccctccat

SEQ ID NO: 5090594 - DNA, 25 bp, Homo sapien
tctgattttccctctgctctcatca

SEQ ID NO: 5090595 - DNA, 25 bp, Homo sapien
tccttgaattttcattgtcgaggtc

SEQ ID NO: 5090596 - DNA, 25 bp, Homo sapien
tggccagggcaccacattttccttg

SEQ ID NO: 5090597 - DNA, 25 bp, Homo sapien
ttttcattgtcgaggtcatcatcca

SEQ ID NO: 5090598 - DNA, 25 bp, Homo sapien
tcgaggtcatcatccagcacacggg

SEQ ID NO: 5090599 - DNA, 25 bp, Homo sapien
gagagcacgccctgaagaaccgtta

SEQ ID NO: 5090600 - DNA, 25 bp, Homo sapien
gagcacgccctgaagaaccgttagg

SEQ ID NO: 5090601 - DNA, 25 bp, Homo sapien
cgccctgaagaaccgttagggctgc

SEQ ID NO: 5090602 - DNA, 25 bp, Homo sapien
tgaagaaccgttagggctgctccac

SEQ ID NO: 5090603 - DNA, 25 bp, Homo sapien
tgcatgatgcgcacgccatctgggt

SEQ ID NO: 5090604 - DNA, 25 bp, Homo sapien
agccggccccgcatatagagtactg

SEQ ID NO: 5090605 - DNA, 25 bp, Homo sapien
accgtgagcgcctccttgtacagct

SEQ ID NO: 5090606 - DNA, 25 bp, Homo sapien
cggccccgcatatagagtactgagt

SEQ ID NO: 5090607 - DNA, 25 bp, Homo sapien
atgagagccttttggggctagatcc

SEQ ID NO: 5090608 - DNA, 25 bp, Homo sapien
tgatggttaacaatgagagcctttt

SEQ ID NO: 5090609 - DNA, 25 bp, Homo sapien
ttggggctagatccctttgcggaac

SEQ ID NO: 5090610 - DNA, 25 bp, Homo sapien
tggttaacaatgagagccttttggg

SEQ ID NO: 5090611 - DNA, 25 bp, Homo sapien
tctggcgaggcatttatcaaagaag

SEQ ID NO: 5090612 - DNA, 25 bp, Homo sapien
acaagggtgtatggtggctgcacgg

SEQ ID NO: 5090613 - DNA, 25 bp, Homo sapien
caagtttctggatgtgacctctggc

SEQ ID NO: 5090614 - DNA, 25 bp, Homo sapien
gaagctaatgtctaaattgagggag

SEQ ID NO: 5090615 - DNA, 25 bp, Homo sapien
tccccgtagctaaggtcaggctggg

SEQ ID NO: 5090616 - DNA, 25 bp, Homo sapien
aaaacagatgctgaaccggcatggc

SEQ ID NO: 5090617 - DNA, 25 bp, Homo sapien
ccaacgggcacagattacccaaggt

SEQ ID NO: 5090618 - DNA, 25 bp, Homo sapien
aatcatctcatcagaggtcacagag

SEQ ID NO: 5090619 - DNA, 25 bp, Homo sapien
gcttaattaagccagcagtgctcaa

SEQ ID NO: 5090620 - DNA, 25 bp, Homo sapien
caagtatcattctgatctgaatcta

SEQ ID NO: 5090621 - DNA, 25 bp, Homo sapien
gacttcaggagcctatatcagctta

SEQ ID NO: 5090622 - DNA, 25 bp, Homo sapien
agggttggtgatggacttcaggagc

SEQ ID NO: 5090623 - DNA, 25 bp, Homo sapien
agatgcgaggtctcacctactctgc

SEQ ID NO: 5090624 - DNA, 25 bp, Homo sapien
gaagatgcgaggtctcacctactct

SEQ ID NO: 5090625 - DNA, 25 bp, Homo sapien
caggaagatgcgaggtctcacctac

SEQ ID NO: 5090626 - DNA, 25 bp, Homo sapien
ggaagatgcgaggtctcacctactc

SEQ ID NO: 5090627 - DNA, 25 bp, Homo sapien
gcctcgtggcacgtactctgcctct

SEQ ID NO: 5090628 - DNA, 25 bp, Homo sapien
agggcggtgaggaagcagtcaacgg

SEQ ID NO: 5090629 - DNA, 25 bp, Homo sapien
cggcatcacgaagcaccttctgggc

SEQ ID NO: 5090630 - DNA, 25 bp, Homo sapien
acggcagcctcgttctggccctggg

SEQ ID NO: 5090631 - DNA, 25 bp, Homo sapien
cacaggatctaaagcctacggaggc

SEQ ID NO: 5090632 - DNA, 25 bp, Homo sapien
tagaaactgcctacctccatgttgg

SEQ ID NO: 5090633 - DNA, 25 bp, Homo sapien
aaggactggatctagcaaccacagg

SEQ ID NO: 5090634 - DNA, 25 bp, Homo sapien
aaaaggatcccctgataggcctggg

SEQ ID NO: 5090635 - DNA, 25 bp, Homo sapien
gaaggtggagctatgatgaaccagg

SEQ ID NO: 5090636 - DNA, 25 bp, Homo sapien
catggatggggggtctccaacagcc

SEQ ID NO: 5090637 - DNA, 25 bp, Homo sapien
agcccactccttccgaggaaggtgg

SEQ ID NO: 5090638 - DNA, 25 bp, Homo sapien
tcctgaaatgcaagctgtacctgat

SEQ ID NO: 5090639 - DNA, 25 bp, Homo sapien
tttgggcaccctgagataaaccaac

SEQ ID NO: 5090640 - DNA, 25 bp, Homo sapien
actttgggcaccctgagataaacca

SEQ ID NO: 5090641 - DNA, 25 bp, Homo sapien
gggcaccctgagataaaccaacagc

SEQ ID NO: 5090642 - DNA, 25 bp, Homo sapien
cattgggtgcctttcctagtaccaa

SEQ ID NO: 5090643 - DNA, 25 bp, Homo sapien
tgtgggagctacatgcccagtgaat

SEQ ID NO: 5090644 - DNA, 25 bp, Homo sapien
tctctgttcagacgtgagtcctgcc

SEQ ID NO: 5090645 - DNA, 25 bp, Homo sapien
ggttataatatccacagtacgttgg

SEQ ID NO: 5090646 - DNA, 25 bp, Homo sapien
cagaggtggccaatctgaacaaggc

SEQ ID NO: 5090647 - DNA, 25 bp, Homo sapien
gcatcttctgaacaccctatttggg

SEQ ID NO: 5090648 - DNA, 25 bp, Homo sapien
ggtagtaggcatcgcagagcactgt

SEQ ID NO: 5090649 - DNA, 25 bp, Homo sapien
aatgtccagcctcttgtgtgaccgc

SEQ ID NO: 5090650 - DNA, 25 bp, Homo sapien
ggcactcccgtagaggactcctggt

SEQ ID NO: 5090651 - DNA, 25 bp, Homo sapien
tatgcaccttgcaagtaggtggcca

SEQ ID NO: 5090652 - DNA, 25 bp, Homo sapien
taggccgcaggagttggaaagctca

SEQ ID NO: 5090653 - DNA, 25 bp, Homo sapien
cagacaaaagcaatcggtgaagttc

SEQ ID NO: 5090654 - DNA, 25 bp, Homo sapien
tcattcaggacggaatggagctcca

SEQ ID NO: 5090655 - DNA, 25 bp, Homo sapien
tttgggaccaattacaggcccttga

SEQ ID NO: 5090656 - DNA, 25 bp, Homo sapien
gaggcatggctctttgaggccacag

SEQ ID NO: 5090657 - DNA, 25 bp, Homo sapien
caaggcacaagcaaggagtgggcat

SEQ ID NO: 5090658 - DNA, 25 bp, Homo sapien
tgttctgccaaagcataagggcccc

SEQ ID NO: 5090659 - DNA, 25 bp, Homo sapien
ctcatggtctgccctccgcctctct

SEQ ID NO: 5090660 - DNA, 25 bp, Homo sapien
atggtctgccctccgcctctctcag

SEQ ID NO: 5090661 - DNA, 25 bp, Homo sapien
tcatggtctgccctccgcctctctc

SEQ ID NO: 5090662 - DNA, 25 bp, Homo sapien
gcctcatggtctgccctccgcctct

SEQ ID NO: 5090663 - DNA, 25 bp, Homo sapien
atggtctgccctccgcctctctcag

SEQ ID NO: 5090664 - DNA, 25 bp, Homo sapien
gcctcatggtctgccctccgcctct

SEQ ID NO: 5090665 - DNA, 25 bp, Homo sapien
tcatggtctgccctccgcctctctc

SEQ ID NO: 5090666 - DNA, 25 bp, Homo sapien
ctcatggtctgccctccgcctctct

SEQ ID NO: 5090667 - DNA, 25 bp, Homo sapien
tgatgtctcaggatagtgtctcctg

SEQ ID NO: 5090668 - DNA, 25 bp, Homo sapien
tctcaggatagtgtctcctgtcccc

SEQ ID NO: 5090669 - DNA, 25 bp, Homo sapien
tggaagatcagactgatgtctcagg

SEQ ID NO: 5090670 - DNA, 25 bp, Homo sapien
cagactgatgtctcaggatagtgtc

SEQ ID NO: 5090671 - DNA, 25 bp, Homo sapien
tggaataaacgccctacaattacat

SEQ ID NO: 5090672 - DNA, 25 bp, Homo sapien
gaataaacgccctacaattacattc

SEQ ID NO: 5090673 - DNA, 25 bp, Homo sapien
aggtgcacagaggagccattgtgac

SEQ ID NO: 5090674 - DNA, 25 bp, Homo sapien
gccaaatcattgcaccaggtgcaca

SEQ ID NO: 5090675 - DNA, 25 bp, Homo sapien
acgagctgtagtttcaggaagctgc

SEQ ID NO: 5090676 - DNA, 25 bp, Homo sapien
caggaagacgagctgtagtttcagg

SEQ ID NO: 5090677 - DNA, 25 bp, Homo sapien
gatctcatgtgctctggactgactg

SEQ ID NO: 5090678 - DNA, 25 bp, Homo sapien
agctgatctcatgtgctctggactg

SEQ ID NO: 5090679 - DNA, 25 bp, Homo sapien
ctgatctcatgtgctctggactgac

SEQ ID NO: 5090680 - DNA, 25 bp, Homo sapien
gctgatctcatgtgctctggactga

SEQ ID NO: 5090681 - DNA, 25 bp, Homo sapien
gctttgccgcagcatgcctgtggct

SEQ ID NO: 5090682 - DNA, 25 bp, Homo sapien
ttgaactgggttcagaaatggcaca

SEQ ID NO: 5090683 - DNA, 25 bp, Homo sapien
tctcagaatagtcacggctttgccg

SEQ ID NO: 5090684 - DNA, 25 bp, Homo sapien
gactctgctagagctgttgcccggc

SEQ ID NO: 5090685 - DNA, 25 bp, Homo sapien
gaagttgcttctcctactgttagca

SEQ ID NO: 5090686 - DNA, 25 bp, Homo sapien
ctgttagcaaagcatctgggagatg

SEQ ID NO: 5090687 - DNA, 25 bp, Homo sapien
ccatttgcgttgtcagggcagctct

SEQ ID NO: 5090688 - DNA, 25 bp, Homo sapien
ctgccggtgctgaggctttagccat

SEQ ID NO: 5090689 - DNA, 25 bp, Homo sapien
gcccttcattcctttggtgcctcac

SEQ ID NO: 5090690 - DNA, 25 bp, Homo sapien
tgcccttcattcctttggtgcctca

SEQ ID NO: 5090691 - DNA, 25 bp, Homo sapien
aatgcccttcattcctttggtgcct

SEQ ID NO: 5090692 - DNA, 25 bp, Homo sapien
tcaatgcccttcattcctttggtgc

SEQ ID NO: 5090693 - DNA, 25 bp, Homo sapien
ggatttagtggtccttacctacgca

SEQ ID NO: 5090694 - DNA, 25 bp, Homo sapien
tccccggaccctgctgatcggaata

SEQ ID NO: 5090695 - DNA, 25 bp, Homo sapien
tacctacgcattctcgaaaacctgc

SEQ ID NO: 5090696 - DNA, 25 bp, Homo sapien
atcggaatagttgggctcaccgacg

SEQ ID NO: 5090697 - DNA, 25 bp, Homo sapien
taacatcagccgagtcatgtattgc

SEQ ID NO: 5090698 - DNA, 25 bp, Homo sapien
tgtattgccatccagctgtgagcgt

SEQ ID NO: 5090699 - DNA, 25 bp, Homo sapien
gcttttccaacagcgttaacatcag

SEQ ID NO: 5090700 - DNA, 25 bp, Homo sapien
ccagctgtgagcgtgaagaatttcc

SEQ ID NO: 5090701 - DNA, 25 bp, Homo sapien
gcaaaacgggtgtattatccaggta

SEQ ID NO: 5090702 - DNA, 25 bp, Homo sapien
catgttgcatgtggcttactctgga

SEQ ID NO: 5090703 - DNA, 25 bp, Homo sapien
taactctgcgtggactatggacagt

SEQ ID NO: 5090704 - DNA, 25 bp, Homo sapien
tctggatatatctaagcccttctgc

SEQ ID NO: 5090705 - DNA, 25 bp, Homo sapien
tatctggaatagaagtgagcttaag

SEQ ID NO: 5090706 - DNA, 25 bp, Homo sapien
tggagttaagacagcttagctttga

SEQ ID NO: 5090707 - DNA, 25 bp, Homo sapien
tattctaacgttgaaaaaggaagca

SEQ ID NO: 5090708 - DNA, 25 bp, Homo sapien
cagtgggaatttctggtgatttata

SEQ ID NO: 5090709 - DNA, 25 bp, Homo sapien
agtcctggctagtcaatgggctgag

SEQ ID NO: 5090710 - DNA, 25 bp, Homo sapien
ttagccggacataatggcctgtgcg

SEQ ID NO: 5090711 - DNA, 25 bp, Homo sapien
agttggtatctacgcatttgtggtc

SEQ ID NO: 5090712 - DNA, 25 bp, Homo sapien
cccttgcccagtgttaagcttttgt

SEQ ID NO: 5090713 - DNA, 25 bp, Homo sapien
ctgccaagtggttacagcgatgggt

SEQ ID NO: 5090714 - DNA, 25 bp, Homo sapien
tcctgccaagtggttacagcgatgg

SEQ ID NO: 5090715 - DNA, 25 bp, Homo sapien
caagtggttacagcgatgggtgtgt

SEQ ID NO: 5090716 - DNA, 25 bp, Homo sapien
tggttacagcgatgggtgtgtccag

SEQ ID NO: 5090717 - DNA, 25 bp, Homo sapien
tatgcttgaaaacagcgtgcagtcc

SEQ ID NO: 5090718 - DNA, 25 bp, Homo sapien
taaattccgtgtagaagttgccagg

SEQ ID NO: 5090719 - DNA, 25 bp, Homo sapien
tcttgtaacaattggatggatgcct

SEQ ID NO: 5090720 - DNA, 25 bp, Homo sapien
taaaagcattttccggtcacctcag

SEQ ID NO: 5090721 - DNA, 25 bp, Homo sapien
cgctgcggggccattggcggggatg

SEQ ID NO: 5090722 - DNA, 25 bp, Homo sapien
gcaggactgcggagatctccttggc

SEQ ID NO: 5090723 - DNA, 25 bp, Homo sapien
ctgcaggactgcggagatctccttg

SEQ ID NO: 5090724 - DNA, 25 bp, Homo sapien
tctccttggcgctgcggggccattg

SEQ ID NO: 5090725 - DNA, 25 bp, Homo sapien
gctcggccccgctcgagctccagct

SEQ ID NO: 5090726 - DNA, 25 bp, Homo sapien
gggcgagcgcctcgcgggacccgga

SEQ ID NO: 5090727 - DNA, 25 bp, Homo sapien
gtcggcgtcgcagttagcccgcgtc

SEQ ID NO: 5090728 - DNA, 25 bp, Homo sapien
cgggcggcgcgctgtgtgggccgag

SEQ ID NO: 5090729 - DNA, 25 bp, Homo sapien
agggacagcccagtgcacgggaagg

SEQ ID NO: 5090730 - DNA, 25 bp, Homo sapien
agagagggagcgtagagagccttct

SEQ ID NO: 5090731 - DNA, 25 bp, Homo sapien
gcgtagagagccttctgtcgggcgt

SEQ ID NO: 5090732 - DNA, 25 bp, Homo sapien
ggatgggtccgggatgagggacagc

SEQ ID NO: 5090733 - DNA, 25 bp, Homo sapien
gggatggcgcgaaagaggccaggga

SEQ ID NO: 5090734 - DNA, 25 bp, Homo sapien
ttgagggccggacgcacagttcccg

SEQ ID NO: 5090735 - DNA, 25 bp, Homo sapien
cgacggttgtgtcgcaggtgctccc

SEQ ID NO: 5090736 - DNA, 25 bp, Homo sapien
ggcttcctctagtgagttgagggcc

SEQ ID NO: 5090737 - DNA, 25 bp, Homo sapien
ttgtgtggtcgcgtctcggaaaccg

SEQ ID NO: 5090738 - DNA, 25 bp, Homo sapien
catggtgagtgcatcgctgagctgc

SEQ ID NO: 5090739 - DNA, 25 bp, Homo sapien
gatgttccgttatctggatgcggcg

SEQ ID NO: 5090740 - DNA, 25 bp, Homo sapien
accggtagcgcttgcagcatggtga

SEQ ID NO: 5090741 - DNA, 25 bp, Homo sapien
gccaatcagaggcaggctcaacgac

SEQ ID NO: 5090742 - DNA, 25 bp, Homo sapien
gcggctgcgagtcccagtgacgcat

SEQ ID NO: 5090743 - DNA, 25 bp, Homo sapien
tgacgcattgcaggtacaaaccagc

SEQ ID NO: 5090744 - DNA, 25 bp, Homo sapien
taacggctcgctggaaatgaaaccc

SEQ ID NO: 5090745 - DNA, 25 bp, Homo sapien
cattctttatcggcttaaggtgttt

SEQ ID NO: 5090746 - DNA, 25 bp, Homo sapien
tcattctttatcggcttaaggtgtt

SEQ ID NO: 5090747 - DNA, 25 bp, Homo sapien
tctctgcctaacgaggctggctgtc

SEQ ID NO: 5090748 - DNA, 25 bp, Homo sapien
ggctttagtaatgcctatccccttg

SEQ ID NO: 5090749 - DNA, 25 bp, Homo sapien
caatttaggagttaccttctctagg

SEQ ID NO: 5090750 - DNA, 25 bp, Homo sapien
tctgagctggattctaccaacaatc

SEQ ID NO: 5090751 - DNA, 25 bp, Homo sapien
ccattagcttgtcaccatgtgcttc

SEQ ID NO: 5090752 - DNA, 25 bp, Homo sapien
cattagcttgtcaccatgtgcttcc

SEQ ID NO: 5090753 - DNA, 25 bp, Homo sapien
tgccctcatcaaggtgacagctgcc

SEQ ID NO: 5090754 - DNA, 25 bp, Homo sapien
ccttaacagggtactcatctgatcc

SEQ ID NO: 5090755 - DNA, 25 bp, Homo sapien
cagctgccttctcggactgtctggt

SEQ ID NO: 5090756 - DNA, 25 bp, Homo sapien
gaaactaagctcttcccttccagga

SEQ ID NO: 5090757 - DNA, 25 bp, Homo sapien
gctgccaggctgtctcaagacctta

SEQ ID NO: 5090758 - DNA, 25 bp, Homo sapien
ctggctgccaggctgtctcaagacc

SEQ ID NO: 5090759 - DNA, 25 bp, Homo sapien
aagaccttaccagttgttgtgacca

SEQ ID NO: 5090760 - DNA, 25 bp, Homo sapien
tcaagaccttaccagttgttgtgac

SEQ ID NO: 5090761 - DNA, 25 bp, Homo sapien
cagaatcctggagggcaaaagttgc

SEQ ID NO: 5090762 - DNA, 25 bp, Homo sapien
agcaggccttgttgctgcccacagt

SEQ ID NO: 5090763 - DNA, 25 bp, Homo sapien
aaccctgacactgcggaccagagat

SEQ ID NO: 5090764 - DNA, 25 bp, Homo sapien
caaaagttgcagttaggtcctgctc

SEQ ID NO: 5090765 - DNA, 25 bp, Homo sapien
ctaatctgcattcagccttgctcca

SEQ ID NO: 5090766 - DNA, 25 bp, Homo sapien
tccttgtctgggctctgtgcccagc

SEQ ID NO: 5090767 - DNA, 25 bp, Homo sapien
cttgtctgggctctgtgcccagcac

SEQ ID NO: 5090768 - DNA, 25 bp, Homo sapien
ccttgctccagccttccttgtctgg

SEQ ID NO: 5090769 - DNA, 25 bp, Homo sapien
attctgggataggaactgaggatgt

SEQ ID NO: 5090770 - DNA, 25 bp, Homo sapien
tattctgggataggaactgaggatg

SEQ ID NO: 5090771 - DNA, 25 bp, Homo sapien
gagtggccagttgctgatagcattg

SEQ ID NO: 5090772 - DNA, 25 bp, Homo sapien
cagttgctgatagcattgctgctgc

SEQ ID NO: 5090773 - DNA, 25 bp, Homo sapien
tggccagttgctgatagcattgctg

SEQ ID NO: 5090774 - DNA, 25 bp, Homo sapien
ggccagttgctgatagcattgctgc

SEQ ID NO: 5090775 - DNA, 25 bp, Homo sapien
tctgcaggttttgcagcccttgcca

SEQ ID NO: 5090776 - DNA, 25 bp, Homo sapien
catccccattagtccagtgtttcca

SEQ ID NO: 5090777 - DNA, 25 bp, Homo sapien
ctctttcaatttctggccaaccatc

SEQ ID NO: 5090778 - DNA, 25 bp, Homo sapien
ttggccctacgatggatcctggaga

SEQ ID NO: 5090779 - DNA, 25 bp, Homo sapien
tcttgcttctgcctgagtgaactgg

SEQ ID NO: 5090780 - DNA, 25 bp, Homo sapien
ctctcgggcctgcatgaggaggagc

SEQ ID NO: 5090781 - DNA, 25 bp, Homo sapien
ttctgcctgagtgaactgggtttac

SEQ ID NO: 5090782 - DNA, 25 bp, Homo sapien
ttgcttctgcctgagtgaactgggt

SEQ ID NO: 5090783 - DNA, 25 bp, Homo sapien
catttgtcgaagcaaagtggatata

SEQ ID NO: 5090784 - DNA, 25 bp, Homo sapien
actgggctggcagaatgccctccca

SEQ ID NO: 5090785 - DNA, 25 bp, Homo sapien
gtgggtacttccttattctgggcag

SEQ ID NO: 5090786 - DNA, 25 bp, Homo sapien
cttccttattctgggcaggctgaca

SEQ ID NO: 5090787 - DNA, 25 bp, Homo sapien
tattgccccataaacagggctccgc

SEQ ID NO: 5090788 - DNA, 25 bp, Homo sapien
agggctccgcaaggacgctgcaagc

SEQ ID NO: 5090789 - DNA, 25 bp, Homo sapien
aggacgctgcaagctgtgttatttc

SEQ ID NO: 5090790 - DNA, 25 bp, Homo sapien
tttattgccccataaacagggctcc

SEQ ID NO: 5090791 - DNA, 25 bp, Homo sapien
cagacgtcctggagccctactagca

SEQ ID NO: 5090792 - DNA, 25 bp, Homo sapien
catcctggccctccagacgtcctgg

SEQ ID NO: 5090793 - DNA, 25 bp, Homo sapien
cgtcctggagccctactagcagtgt

SEQ ID NO: 5090794 - DNA, 25 bp, Homo sapien
ctggagccctactagcagtgtctgt

SEQ ID NO: 5090795 - DNA, 25 bp, Homo sapien
catggcagcctctccaggggctggc

SEQ ID NO: 5090796 - DNA, 25 bp, Homo sapien
tggcagcctctccaggggctggcgt

SEQ ID NO: 5090797 - DNA, 25 bp, Homo sapien
ctcatggcagcctctccaggggctg

SEQ ID NO: 5090798 - DNA, 25 bp, Homo sapien
gcagcctctccaggggctggcgttc

SEQ ID NO: 5090799 - DNA, 25 bp, Homo sapien
ctgagtcatagagagggcaagtaca

SEQ ID NO: 5090800 - DNA, 25 bp, Homo sapien
tcttacgggtgataaaactgagtca

SEQ ID NO: 5090801 - DNA, 25 bp, Homo sapien
caaggttaggcaacaaacataggat

SEQ ID NO: 5090802 - DNA, 25 bp, Homo sapien
gaaattcacgtttaggtcatgcttt

SEQ ID NO: 5090803 - DNA, 25 bp, Homo sapien
gcaggctgtctgctcgaagtccacc

SEQ ID NO: 5090804 - DNA, 25 bp, Homo sapien
aggctgtctgctcgaagtccacctg

SEQ ID NO: 5090805 - DNA, 25 bp, Homo sapien
tgctgcccaaagaagccactggcac

SEQ ID NO: 5090806 - DNA, 25 bp, Homo sapien
ctgcccaaagaagccactggcactg

SEQ ID NO: 5090807 - DNA, 25 bp, Homo sapien
ttctacaaacgggtatttagtcatg

SEQ ID NO: 5090808 - DNA, 25 bp, Homo sapien
agagggtctcctccgactattttgc

SEQ ID NO: 5090809 - DNA, 25 bp, Homo sapien
aacagagggtctcctccgactattt

SEQ ID NO: 5090810 - DNA, 25 bp, Homo sapien
ttagtcatgtccagcttcgccaggc

SEQ ID NO: 5090811 - DNA, 25 bp, Homo sapien
ggtgccttcgctctttttcaagtgg

SEQ ID NO: 5090812 - DNA, 25 bp, Homo sapien
ttccgtgagtcaggagcttggccag

SEQ ID NO: 5090813 - DNA, 25 bp, Homo sapien
ggcctccctagcaagttgcttagat

SEQ ID NO: 5090814 - DNA, 25 bp, Homo sapien
tcagctgcagcatcttaggaatgca

SEQ ID NO: 5090815 - DNA, 25 bp, Homo sapien
gcaactgcactagaattttttagct

SEQ ID NO: 5090816 - DNA, 25 bp, Homo sapien
catctctttggagcatttcgctata

SEQ ID NO: 5090817 - DNA, 25 bp, Homo sapien
gctggaatccaatgacagtcatatt

SEQ ID NO: 5090818 - DNA, 25 bp, Homo sapien
taatagcagttatggcatcgagata

SEQ ID NO: 5090819 - DNA, 25 bp, Homo sapien
aggctcaggctaacgcccagctcag

SEQ ID NO: 5090820 - DNA, 25 bp, Homo sapien
tcaggctaacgcccagctcaggtgg

SEQ ID NO: 5090821 - DNA, 25 bp, Homo sapien
ggcaaaggctcaggctaacgcccag

SEQ ID NO: 5090822 - DNA, 25 bp, Homo sapien
caaaggctcaggctaacgcccagct

SEQ ID NO: 5090823 - DNA, 25 bp, Homo sapien
gaacacatatgcctgctgacctcat

SEQ ID NO: 5090824 - DNA, 25 bp, Homo sapien
agacccagaacacatatgcctgctg

SEQ ID NO: 5090825 - DNA, 25 bp, Homo sapien
acccagaacacatatgcctgctgac

SEQ ID NO: 5090826 - DNA, 25 bp, Homo sapien
cagaacacatatgcctgctgacctc

SEQ ID NO: 5090827 - DNA, 25 bp, Homo sapien
cgctgaaaaactggaaccgaggtgg

SEQ ID NO: 5090828 - DNA, 25 bp, Homo sapien
catatagtagatgtgaaatgtgtgt

SEQ ID NO: 5090829 - DNA, 25 bp, Homo sapien
gatgtgaaatgtgtgtccgctgaaa

SEQ ID NO: 5090830 - DNA, 25 bp, Homo sapien
aatgtgtgtccgctgaaaaactgga

SEQ ID NO: 5090831 - DNA, 25 bp, Homo sapien
tatacaagaaattgcataaaactca

SEQ ID NO: 5090832 - DNA, 25 bp, Homo sapien
cctccccgaaggtgacatcatgtct

SEQ ID NO: 5090833 - DNA, 25 bp, Homo sapien
cttgcttaggtcttttcttggtggc

SEQ ID NO: 5090834 - DNA, 25 bp, Homo sapien
gatgttcaatcccaacttccatgga

SEQ ID NO: 5090835 - DNA, 25 bp, Homo sapien
caaggaactgcatattcaggatgtt

SEQ ID NO: 5090836 - DNA, 25 bp, Homo sapien
tggactgggtcctagaaaggtgctc

SEQ ID NO: 5090837 - DNA, 25 bp, Homo sapien
tcaatggcccttaaactgtctttgg

SEQ ID NO: 5090838 - DNA, 25 bp, Homo sapien
gcctttaggctcctgatcttcgtgg

SEQ ID NO: 5090839 - DNA, 25 bp, Homo sapien
tcttcgtgggtagggcacaggatac

SEQ ID NO: 5090840 - DNA, 25 bp, Homo sapien
gctgctcgctgctctgttctgacaa

SEQ ID NO: 5090841 - DNA, 25 bp, Homo sapien
agtgctcatccccaccgacatatgg

SEQ ID NO: 5090842 - DNA, 25 bp, Homo sapien
gctgaggctgatgcataacttcctg

SEQ ID NO: 5090843 - DNA, 25 bp, Homo sapien
gataagtggaggtcctgttctctct

SEQ ID NO: 5090844 - DNA, 25 bp, Homo sapien
ccatttgactgtattgcatttcatt

SEQ ID NO: 5090845 - DNA, 25 bp, Homo sapien
attgcatttcattggctctttcacg

SEQ ID NO: 5090846 - DNA, 25 bp, Homo sapien
atttcattggctctttcacgtgtgc

SEQ ID NO: 5090847 - DNA, 25 bp, Homo sapien
gactgtattgcatttcattggctct

SEQ ID NO: 5090848 - DNA, 25 bp, Homo sapien
tgccaaataatttggcattgctcat

SEQ ID NO: 5090849 - DNA, 25 bp, Homo sapien
tcttgccaaataatttggcattgct

SEQ ID NO: 5090850 - DNA, 25 bp, Homo sapien
tgtcttgccaaataatttggcattg

SEQ ID NO: 5090851 - DNA, 25 bp, Homo sapien
ttgccaaataatttggcattgctca

SEQ ID NO: 5090852 - DNA, 25 bp, Homo sapien
ccatgtttcatccatggtcttcctg

SEQ ID NO: 5090853 - DNA, 25 bp, Homo sapien
gctgctgcagtcctaacaccagcta

SEQ ID NO: 5090854 - DNA, 25 bp, Homo sapien
gcggctgctgcagtcctaacaccag

SEQ ID NO: 5090855 - DNA, 25 bp, Homo sapien
gagcggctgctgcagtcctaacacc

SEQ ID NO: 5090856 - DNA, 25 bp, Homo sapien
cagcagggcagtatgtgtgtccttg

SEQ ID NO: 5090857 - DNA, 25 bp, Homo sapien
tgcagggaacttgagcctgtggcct

SEQ ID NO: 5090858 - DNA, 25 bp, Homo sapien
cactctggatgtttccatcctggta

SEQ ID NO: 5090859 - DNA, 25 bp, Homo sapien
caagcagaccactggcttccagact

SEQ ID NO: 5090860 - DNA, 25 bp, Homo sapien
tctttctgtagtatgaagggcacct

SEQ ID NO: 5090861 - DNA, 25 bp, Homo sapien
cttctggaatttaacacctgcttga

SEQ ID NO: 5090862 - DNA, 25 bp, Homo sapien
gcatcccagttgtcctttgacttta

SEQ ID NO: 5090863 - DNA, 25 bp, Homo sapien
gaatttaacacctgcttgactcatg

SEQ ID NO: 5090864 - DNA, 25 bp, Homo sapien
tttaacacctgcttgactcatgccc

SEQ ID NO: 5090865 - DNA, 25 bp, Homo sapien
gagccttgttttgtcccggccatca

SEQ ID NO: 5090866 - DNA, 25 bp, Homo sapien
tctgcggagccttgttttgtcccgg

SEQ ID NO: 5090867 - DNA, 25 bp, Homo sapien
ctttcctgtctcgtttgaatagaca

SEQ ID NO: 5090868 - DNA, 25 bp, Homo sapien
gaatagacattagaagccaaggact

SEQ ID NO: 5090869 - DNA, 25 bp, Homo sapien
ttatccactttgcatgatggcaggc

SEQ ID NO: 5090870 - DNA, 25 bp, Homo sapien
tgcttggcccgggtagtacacaggg

SEQ ID NO: 5090871 - DNA, 25 bp, Homo sapien
tcttgggcatggtggacagtccact

SEQ ID NO: 5090872 - DNA, 25 bp, Homo sapien
gcttccctgaaaggactcttgggca

SEQ ID NO: 5090873 - DNA, 25 bp, Homo sapien
tcccgtactttcagtgaagacaaag

SEQ ID NO: 5090874 - DNA, 25 bp, Homo sapien
caaagtccttcccgtactttcagtg

SEQ ID NO: 5090875 - DNA, 25 bp, Homo sapien
ccttcccgtactttcagtgaagaca

SEQ ID NO: 5090876 - DNA, 25 bp, Homo sapien
agtccttcccgtactttcagtgaag

SEQ ID NO: 5090877 - DNA, 25 bp, Homo sapien
tgcctgtagtgcaatttcagggtca

SEQ ID NO: 5090878 - DNA, 25 bp, Homo sapien
atctctgcatagtggagtaggtggc

SEQ ID NO: 5090879 - DNA, 25 bp, Homo sapien
ggagatgaagccttttgttccccaa

SEQ ID NO: 5090880 - DNA, 25 bp, Homo sapien
caaagtgtacagagctcaggcctga

SEQ ID NO: 5090881 - DNA, 25 bp, Homo sapien
cttgcggtgaccacgacaggtgcaa

SEQ ID NO: 5090882 - DNA, 25 bp, Homo sapien
tctaacggtggaattgcaggcactg

SEQ ID NO: 5090883 - DNA, 25 bp, Homo sapien
gaggagacttccgagaatgcttcta

SEQ ID NO: 5090884 - DNA, 25 bp, Homo sapien
cgtaataaccaataagagttgaaga

SEQ ID NO: 5090885 - DNA, 25 bp, Homo sapien
caggaaatgggcgagtctgctccct

SEQ ID NO: 5090886 - DNA, 25 bp, Homo sapien
gagtgtgtccttgaccttgacggca

SEQ ID NO: 5090887 - DNA, 25 bp, Homo sapien
aacgagcctggactctggtgatacc

SEQ ID NO: 5090888 - DNA, 25 bp, Homo sapien
tcagtaatgtgaggccaaggcaacc

SEQ ID NO: 5090889 - DNA, 25 bp, Homo sapien
aatgagggctgtcacaggcttcaga

SEQ ID NO: 5090890 - DNA, 25 bp, Homo sapien
ctgtcacaggcttcagaaaatgggc

SEQ ID NO: 5090891 - DNA, 25 bp, Homo sapien
agcagagaatgagggctgtcacagg

SEQ ID NO: 5090892 - DNA, 25 bp, Homo sapien
ggtgcggtggtcctgaaagctgtca

SEQ ID NO: 5090893 - DNA, 25 bp, Homo sapien
atggtttctcttcaggtaactgcag

SEQ ID NO: 5090894 - DNA, 25 bp, Homo sapien
ctgcagagatcctgaaatgccaaat

SEQ ID NO: 5090895 - DNA, 25 bp, Homo sapien
tggtttctcttcaggtaactgcaga

SEQ ID NO: 5090896 - DNA, 25 bp, Homo sapien
tcaggtaactgcagagatcctgaaa

SEQ ID NO: 5090897 - DNA, 25 bp, Homo sapien
gagctatatggcagacgctgcctgg

SEQ ID NO: 5090898 - DNA, 25 bp, Homo sapien
ttctgacatgaggttccagttccag

SEQ ID NO: 5090899 - DNA, 25 bp, Homo sapien
tgctgccaaataggccccctatggc

SEQ ID NO: 5090900 - DNA, 25 bp, Homo sapien
ccctatggcctggtttctgacatga

SEQ ID NO: 5090901 - DNA, 25 bp, Homo sapien
tatgttctgtgcctgaagcctatgg

SEQ ID NO: 5090902 - DNA, 25 bp, Homo sapien
tcacgtcaggtgattaatagtcttc

SEQ ID NO: 5090903 - DNA, 25 bp, Homo sapien
ttttacaaaagggaactctatgctc

SEQ ID NO: 5090904 - DNA, 25 bp, Homo sapien
gcaactgtagccctgcatacttgtg

SEQ ID NO: 5090905 - DNA, 25 bp, Homo sapien
aaatttttcctcactgttctattga

SEQ ID NO: 5090906 - DNA, 25 bp, Homo sapien
tgccgtccaaaatttttcctcactg

SEQ ID NO: 5090907 - DNA, 25 bp, Homo sapien
tccaaaatttttcctcactgttcta

SEQ ID NO: 5090908 - DNA, 25 bp, Homo sapien
tttttcctcactgttctattgaaca

SEQ ID NO: 5090909 - DNA, 25 bp, Homo sapien
aaggctcccagtatatatttgtcga

SEQ ID NO: 5090910 - DNA, 25 bp, Homo sapien
caattcctggtaggttggccttgag

SEQ ID NO: 5090911 - DNA, 25 bp, Homo sapien
tatcctccacagcatttaaggctcc

SEQ ID NO: 5090912 - DNA, 25 bp, Homo sapien
ggaactggacttggatatatttgta

SEQ ID NO: 5090913 - DNA, 25 bp, Homo sapien
catgttgaagtagtgggtggtgagt

SEQ ID NO: 5090914 - DNA, 25 bp, Homo sapien
ccagaagtccaacaggaggatggtt

SEQ ID NO: 5090915 - DNA, 25 bp, Homo sapien
ggtggtgagtaaggaaccattcgca

SEQ ID NO: 5090916 - DNA, 25 bp, Homo sapien
gaaccattcgcaattgggcccagaa

SEQ ID NO: 5090917 - DNA, 25 bp, Homo sapien
gtcctgccatgcatctgtgtggtcg

SEQ ID NO: 5090918 - DNA, 25 bp, Homo sapien
tcttcaccactgtgtgcacctgcat

SEQ ID NO: 5090919 - DNA, 25 bp, Homo sapien
agagggtccccaccgtctgcttctt

SEQ ID NO: 5090920 - DNA, 25 bp, Homo sapien
gtggtcggggactgccaagagggtc

SEQ ID NO: 5090921 - DNA, 25 bp, Homo sapien
ttgactgatctgtgactgcaaccgc

SEQ ID NO: 5090922 - DNA, 25 bp, Homo sapien
tacaagaagttctgtgccgaagggc

SEQ ID NO: 5090923 - DNA, 25 bp, Homo sapien
cagatgccacactcttccagagctg

SEQ ID NO: 5090924 - DNA, 25 bp, Homo sapien
cccaagcttgctgtgtgggcccgtg

SEQ ID NO: 5090925 - DNA, 25 bp, Homo sapien
tagtgcctaacattcttcacagtgt

SEQ ID NO: 5090926 - DNA, 25 bp, Homo sapien
gggccttcaggatagacttcttgaa

SEQ ID NO: 5090927 - DNA, 25 bp, Homo sapien
aaacagatctttctctgatagtgcc

SEQ ID NO: 5090928 - DNA, 25 bp, Homo sapien
tctgatagtgcctaacattcttcac

SEQ ID NO: 5090929 - DNA, 25 bp, Homo sapien
tagagggaatgtcttgctcaaggtg

SEQ ID NO: 5090930 - DNA, 25 bp, Homo sapien
gcatagaatggtactttggtaacca

SEQ ID NO: 5090931 - DNA, 25 bp, Homo sapien
gatgattagaatccaccaggatgct

SEQ ID NO: 5090932 - DNA, 25 bp, Homo sapien
cactcaaggttattctgttacagga

SEQ ID NO: 5090933 - DNA, 25 bp, Homo sapien
tttctggagaacggggtctcgctat

SEQ ID NO: 5090934 - DNA, 25 bp, Homo sapien
tcccgcctcttagcctccctgagag

SEQ ID NO: 5090935 - DNA, 25 bp, Homo sapien
caagctatcctcccgcctcttagcc

SEQ ID NO: 5090936 - DNA, 25 bp, Homo sapien
ttttctggagaacggggtctcgcta

SEQ ID NO: 5090937 - DNA, 25 bp, Homo sapien
gccgggtagccgtggcatcctcacc

SEQ ID NO: 5090938 - DNA, 25 bp, Homo sapien
ccgggtagccgtggcatcctcaccc

SEQ ID NO: 5090939 - DNA, 25 bp, Homo sapien
agccgggtagccgtggcatcctcac

SEQ ID NO: 5090940 - DNA, 25 bp, Homo sapien
ttctaaactgcatctagctctcact

SEQ ID NO: 5090941 - DNA, 25 bp, Homo sapien
tttaaattaacagtctgttcaacag

SEQ ID NO: 5090942 - DNA, 25 bp, Homo sapien
aataatggaaatcatcataaatgga

SEQ ID NO: 5090943 - DNA, 25 bp, Homo sapien
cactgtacccatgtgtgtgacagaa

SEQ ID NO: 5090944 - DNA, 25 bp, Homo sapien
aggtgtgagataccacgtccggcca

SEQ ID NO: 5090945 - DNA, 25 bp, Homo sapien
tgagataccacgtccggccaacttt

SEQ ID NO: 5090946 - DNA, 25 bp, Homo sapien
ggtgtgagataccacgtccggccaa

SEQ ID NO: 5090947 - DNA, 25 bp, Homo sapien
tgtgagataccacgtccggccaact

SEQ ID NO: 5090948 - DNA, 25 bp, Homo sapien
ccttttaaccggaggagcgctgctc

SEQ ID NO: 5090949 - DNA, 25 bp, Homo sapien
tccatggcggcgttagggatctttg

SEQ ID NO: 5090950 - DNA, 25 bp, Homo sapien
gcctccgaggaggtttgaagattct

SEQ ID NO: 5090951 - DNA, 25 bp, Homo sapien
tctggccgctggtgctcgttgatga

SEQ ID NO: 5090952 - DNA, 25 bp, Homo sapien
gccgaaggactagcgctctgtgcgc

SEQ ID NO: 5090953 - DNA, 25 bp, Homo sapien
tccgcgtcgggaggacagcgacgag

SEQ ID NO: 5090954 - DNA, 25 bp, Homo sapien
gcgtcgaaggtgctcgctcgccgaa

SEQ ID NO: 5090955 - DNA, 25 bp, Homo sapien
ccgggagtgggacacgaggagccgg

SEQ ID NO: 5090956 - DNA, 25 bp, Homo sapien
ctgcgcgcgcgccgagaagaggggc

SEQ ID NO: 5090957 - DNA, 25 bp, Homo sapien
cctgagctgcggcaaaagtcgccgt

SEQ ID NO: 5090958 - DNA, 25 bp, Homo sapien
gtcgccgcggcaagcagaagcccga

SEQ ID NO: 5090959 - DNA, 25 bp, Homo sapien
tgcggcaaaagtcgccgtcgccgcg

SEQ ID NO: 5090960 - DNA, 25 bp, Homo sapien
gcagaagcccgaacgcgaggacctg

SEQ ID NO: 5090961 - DNA, 25 bp, Homo sapien
aactctgctccaatccgcgcctcac

SEQ ID NO: 5090962 - DNA, 25 bp, Homo sapien
acaactctgctccaatccgcgcctc

SEQ ID NO: 5090963 - DNA, 25 bp, Homo sapien
caactctgctccaatccgcgcctca

SEQ ID NO: 5090964 - DNA, 25 bp, Homo sapien
ctccacgctggaaagcgcggcctct

SEQ ID NO: 5090965 - DNA, 25 bp, Homo sapien
tccacgctggaaagcgcggcctctt

SEQ ID NO: 5090966 - DNA, 25 bp, Homo sapien
ccacgctggaaagcgcggcctcttg

SEQ ID NO: 5090967 - DNA, 25 bp, Homo sapien
cctcgccgtttcctaccgcgcggag

SEQ ID NO: 5090968 - DNA, 25 bp, Homo sapien
caaggcgagcaaagctgcgaagtga

SEQ ID NO: 5090969 - DNA, 25 bp, Homo sapien
ctcgccgtttcctaccgcgcggagg

SEQ ID NO: 5090970 - DNA, 25 bp, Homo sapien
gcaaagctgcgaagtgaggctgctc

SEQ ID NO: 5090971 - DNA, 25 bp, Homo sapien
ggcattgacgattattattcacaaa

SEQ ID NO: 5090972 - DNA, 25 bp, Homo sapien
cacaaagcagtttacggccagcttg

SEQ ID NO: 5090973 - DNA, 25 bp, Homo sapien
gaagtacactggcattgacgattat

SEQ ID NO: 5090974 - DNA, 25 bp, Homo sapien
ttttgtgcaccaactgaagtacact

SEQ ID NO: 5090975 - DNA, 25 bp, Homo sapien
ttcatcaccaaacatttggcagcca

SEQ ID NO: 5090976 - DNA, 25 bp, Homo sapien
cttcatcaccaaacatttggcagcc

SEQ ID NO: 5090977 - DNA, 25 bp, Homo sapien
cagcacatggaggtgccgttgcact

SEQ ID NO: 5090978 - DNA, 25 bp, Homo sapien
catcattgttctggagggccccttc

SEQ ID NO: 5090979 - DNA, 25 bp, Homo sapien
ttaaagagcccgctctcatcgcagt

SEQ ID NO: 5090980 - DNA, 25 bp, Homo sapien
tcatcgcagtcaggatcataaagcc

SEQ ID NO: 5090981 - DNA, 25 bp, Homo sapien
tctgaccccagcagtgttcacacac

SEQ ID NO: 5090982 - DNA, 25 bp, Homo sapien
cttctgaccccagcagtgttcacac

SEQ ID NO: 5090983 - DNA, 25 bp, Homo sapien
ttctgaccccagcagtgttcacaca

SEQ ID NO: 5090984 - DNA, 25 bp, Homo sapien
tctcactcgctcagagcaggttatt

SEQ ID NO: 5090985 - DNA, 25 bp, Homo sapien
ggttctcactcgctcagagcaggtt

SEQ ID NO: 5090986 - DNA, 25 bp, Homo sapien
taggttctcactcgctcagagcagg

SEQ ID NO: 5090987 - DNA, 25 bp, Homo sapien
tcactcgctcagagcaggttatttc

SEQ ID NO: 5090988 - DNA, 25 bp, Homo sapien
gtccgcaaacttttactatcataag

SEQ ID NO: 5090989 - DNA, 25 bp, Homo sapien
ccgcaaacttttactatcataaggt

SEQ ID NO: 5090990 - DNA, 25 bp, Homo sapien
cgcaaacttttactatcataaggtt

SEQ ID NO: 5090991 - DNA, 25 bp, Homo sapien
tccgcaaacttttactatcataagg

SEQ ID NO: 5090992 - DNA, 25 bp, Homo sapien
tggatccagttgataacgcgttgtg

SEQ ID NO: 5090993 - DNA, 25 bp, Homo sapien
aaattttggatccagttgataacgc

SEQ ID NO: 5090994 - DNA, 25 bp, Homo sapien
caaaatactcgtgataaattttgga

SEQ ID NO: 5090995 - DNA, 25 bp, Homo sapien
ttgataacgcgttgtgatctccttc

SEQ ID NO: 5090996 - DNA, 25 bp, Homo sapien
catcactgttcctttccattagtgg

SEQ ID NO: 5090997 - DNA, 25 bp, Homo sapien
ggaggtctctaaatctatcaaaggg

SEQ ID NO: 5090998 - DNA, 25 bp, Homo sapien
gggaaataagacagccatgcaacca

SEQ ID NO: 5090999 - DNA, 25 bp, Homo sapien
ccattagtggataactaagtttatc

SEQ ID NO: 5091000 - DNA, 25 bp, Homo sapien
gagaagaattttgaaccagatcaat

SEQ ID NO: 5091001 - DNA, 25 bp, Homo sapien
accagatcaatagtgataacattat

SEQ ID NO: 5091002 - DNA, 25 bp, Homo sapien
ttgagaagaattttgaaccagatca

SEQ ID NO: 5091003 - DNA, 25 bp, Homo sapien
caatagtgataacattattctcata

SEQ ID NO: 5091004 - DNA, 25 bp, Homo sapien
aaattaaagtttgaccaggatccag

SEQ ID NO: 5091005 - DNA, 25 bp, Homo sapien
taaattaaagtttgaccaggatcca

SEQ ID NO: 5091006 - DNA, 25 bp, Homo sapien
gaatgaaacaaggattcacctttaa

SEQ ID NO: 5091007 - DNA, 25 bp, Homo sapien
attaaagtttgaccaggatccagat

SEQ ID NO: 5091008 - DNA, 25 bp, Homo sapien
gcaacaactgctatcaccacaacca

SEQ ID NO: 5091009 - DNA, 25 bp, Homo sapien
acagcaataacaccagcttttagac

SEQ ID NO: 5091010 - DNA, 25 bp, Homo sapien
aattccagcaacaactgctatcacc

SEQ ID NO: 5091011 - DNA, 25 bp, Homo sapien
ccacaaccacaataacagcaataac

SEQ ID NO: 5091012 - DNA, 25 bp, Homo sapien
acaggtgcaagccatcacatctgac

SEQ ID NO: 5091013 - DNA, 25 bp, Homo sapien
ctcaactgaccactcccacatcagc

SEQ ID NO: 5091014 - DNA, 25 bp, Homo sapien
tggactcaactgaccactcccacat

SEQ ID NO: 5091015 - DNA, 25 bp, Homo sapien
ggtgcaagccatcacatctgactaa

SEQ ID NO: 5091016 - DNA, 25 bp, Homo sapien
agccttctcatactttgccattctc

SEQ ID NO: 5091017 - DNA, 25 bp, Homo sapien
ctcagccttctcatactttgccatt

SEQ ID NO: 5091018 - DNA, 25 bp, Homo sapien
catactttgccattctcttctttct

SEQ ID NO: 5091019 - DNA, 25 bp, Homo sapien
tcatactttgccattctcttctttc

SEQ ID NO: 5091020 - DNA, 25 bp, Homo sapien
gagtttctccaaggtgaatccactg

SEQ ID NO: 5091021 - DNA, 25 bp, Homo sapien
gaagattctgttagatgttgactct

SEQ ID NO: 5091022 - DNA, 25 bp, Homo sapien
gaatccactggagtatgccttcaga

SEQ ID NO: 5091023 - DNA, 25 bp, Homo sapien
tctttgtagaataaaaaccataggc

SEQ ID NO: 5091024 - DNA, 25 bp, Homo sapien
tgaaattaaaggaacacaagataat

SEQ ID NO: 5091025 - DNA, 25 bp, Homo sapien
atgaaattaaaggaacacaagataa

SEQ ID NO: 5091026 - DNA, 25 bp, Homo sapien
gcattgagttccctatgcatctcac

SEQ ID NO: 5091027 - DNA, 25 bp, Homo sapien
cattgagttccctatgcatctcacc

SEQ ID NO: 5091028 - DNA, 25 bp, Homo sapien
tgagttccctatgcatctcacccat

SEQ ID NO: 5091029 - DNA, 25 bp, Homo sapien
ttatgcattgagttccctatgcatc

SEQ ID NO: 5091030 - DNA, 25 bp, Homo sapien
aaactaacaaactcatgaccttcaa

SEQ ID NO: 5091031 - DNA, 25 bp, Homo sapien
gatctgcatatataagacacttgtg

SEQ ID NO: 5091032 - DNA, 25 bp, Homo sapien
aggtttcactattacaaatatatga

SEQ ID NO: 5091033 - DNA, 25 bp, Homo sapien
ttcaaagatgtcttcgtcccacgca

SEQ ID NO: 5091034 - DNA, 25 bp, Homo sapien
aggcagctttcaatcacaaatcagt

SEQ ID NO: 5091035 - DNA, 25 bp, Homo sapien
agtatgtatgtacaagactcaagta

SEQ ID NO: 5091036 - DNA, 25 bp, Homo sapien
tgtacaagactcaagtaaatagaaa

SEQ ID NO: 5091037 - DNA, 25 bp, Homo sapien
tatttcatagctcataaaaaagtat

SEQ ID NO: 5091038 - DNA, 25 bp, Homo sapien
ttaccagggagtggaatattcatga

SEQ ID NO: 5091039 - DNA, 25 bp, Homo sapien
catgctatggggtttgaggtttcta

SEQ ID NO: 5091040 - DNA, 25 bp, Homo sapien
gggagtgtgagcatactcaagaatg

SEQ ID NO: 5091041 - DNA, 25 bp, Homo sapien
tcgagaagtacgcactcaagaaagg

SEQ ID NO: 5091042 - DNA, 25 bp, Homo sapien
ccacacccactaagctgtttcccgc

SEQ ID NO: 5091043 - DNA, 25 bp, Homo sapien
ggttgaagaaaatgcgcgaccccac

SEQ ID NO: 5091044 - DNA, 25 bp, Homo sapien
cctggttgaagaaaatgcgcgaccc

SEQ ID NO: 5091045 - DNA, 25 bp, Homo sapien
cacccactaagctgtttcccgcctc

SEQ ID NO: 5091046 - DNA, 25 bp, Homo sapien
tggtggtcggcttctccggcatgcc

SEQ ID NO: 5091047 - DNA, 25 bp, Homo sapien
ccatgtacttgatcaccccctgggt

SEQ ID NO: 5091048 - DNA, 25 bp, Homo sapien
cccggtcgaaaaggcgcactgtggt

SEQ ID NO: 5091049 - DNA, 25 bp, Homo sapien
tgaaagaagcgcacgaagccgacct

SEQ ID NO: 5091050 - DNA, 25 bp, Homo sapien
tgccaaataccaatcattctccttg

SEQ ID NO: 5091051 - DNA, 25 bp, Homo sapien
taaacttcaactctatactgacgaa

SEQ ID NO: 5091052 - DNA, 25 bp, Homo sapien
tactgacgaaccagaagaagatctt

SEQ ID NO: 5091053 - DNA, 25 bp, Homo sapien
gatgccttatttccagctctattct

SEQ ID NO: 5091054 - DNA, 25 bp, Homo sapien
tcattgttaccaaagagaatgtctt

SEQ ID NO: 5091055 - DNA, 25 bp, Homo sapien
ggaagctgacatatcattgttacca

SEQ ID NO: 5091056 - DNA, 25 bp, Homo sapien
ttaacacccacaacaccaatggaag

SEQ ID NO: 5091057 - DNA, 25 bp, Homo sapien
caacaccaatggaagctgacatatc

SEQ ID NO: 5091058 - DNA, 25 bp, Homo sapien
ctgtatggaatccacatacccaact

SEQ ID NO: 5091059 - DNA, 25 bp, Homo sapien
tgtatggaatccacatacccaactc

SEQ ID NO: 5091060 - DNA, 25 bp, Homo sapien
atggaatccacatacccaactccaa

SEQ ID NO: 5091061 - DNA, 25 bp, Homo sapien
ccacatacccaactccaacctgtct

SEQ ID NO: 5091062 - DNA, 25 bp, Homo sapien
tcagggaattcacacagtcctagtt

SEQ ID NO: 5091063 - DNA, 25 bp, Homo sapien
tatcagggaattcacacagtcctag

SEQ ID NO: 5091064 - DNA, 25 bp, Homo sapien
ttatcagggaattcacacagtccta

SEQ ID NO: 5091065 - DNA, 25 bp, Homo sapien
ctgatcattatcagggaattcacac

SEQ ID NO: 5091066 - DNA, 25 bp, Homo sapien
attcctttggtccaatctggatgag

SEQ ID NO: 5091067 - DNA, 25 bp, Homo sapien
tgaggagagcctcaagattggagaa

SEQ ID NO: 5091068 - DNA, 25 bp, Homo sapien
ttggtccaatctggatgaggagagc

SEQ ID NO: 5091069 - DNA, 25 bp, Homo sapien
atgaggagagcctcaagattggaga

SEQ ID NO: 5091070 - DNA, 25 bp, Homo sapien
tctttctgtgatcagaattcctcct

SEQ ID NO: 5091071 - DNA, 25 bp, Homo sapien
tccatttctggcaatacagcactat

SEQ ID NO: 5091072 - DNA, 25 bp, Homo sapien
ccggttgaggtcctgataaatgtct

SEQ ID NO: 5091073 - DNA, 25 bp, Homo sapien
gcactattcatctgctctccctttt

SEQ ID NO: 5091074 - DNA, 25 bp, Homo sapien
acatagcaaaatcccctctactgaa

SEQ ID NO: 5091075 - DNA, 25 bp, Homo sapien
gacagagcgaaattctgagactcca

SEQ ID NO: 5091076 - DNA, 25 bp, Homo sapien
tctgacatgctcgtgctatgaaata

SEQ ID NO: 5091077 - DNA, 25 bp, Homo sapien
atggtggcgtgcagctgaacccaga

SEQ ID NO: 5091078 - DNA, 25 bp, Homo sapien
acttgattaccgcagacagtgatga

SEQ ID NO: 5091079 - DNA, 25 bp, Homo sapien
tcaaaagtagtcagttcaaactgtc

SEQ ID NO: 5091080 - DNA, 25 bp, Homo sapien
ggctctgactgctgcaatatccaat

SEQ ID NO: 5091081 - DNA, 25 bp, Homo sapien
ctgaaaaaggttaagggctctgact

SEQ ID NO: 5091082 - DNA, 25 bp, Homo sapien
gggttttacacttattcagcaaggc

SEQ ID NO: 5091083 - DNA, 25 bp, Homo sapien
gttttacacttattcagcaaggcag

SEQ ID NO: 5091084 - DNA, 25 bp, Homo sapien
tccactggttaacaagtctttgtcc

SEQ ID NO: 5091085 - DNA, 25 bp, Homo sapien
ccatgagaggctgcttaatccactg

SEQ ID NO: 5091086 - DNA, 25 bp, Homo sapien
taagtgcttcctatatatcagactg

SEQ ID NO: 5091087 - DNA, 25 bp, Homo sapien
ggttctaaatcactaaatcccactc

SEQ ID NO: 5091088 - DNA, 25 bp, Homo sapien
caaacctggctttagaaatcacctt

SEQ ID NO: 5091089 - DNA, 25 bp, Homo sapien
tctgacatatatgttaaggtcacct

SEQ ID NO: 5091090 - DNA, 25 bp, Homo sapien
cattaagaaacaagtaatgggtaat

SEQ ID NO: 5091091 - DNA, 25 bp, Homo sapien
tgtaacattaagaaacaagtaatgg

SEQ ID NO: 5091092 - DNA, 25 bp, Homo sapien
aacaagtaatgggtaatgggccagg

SEQ ID NO: 5091093 - DNA, 25 bp, Homo sapien
aagtaatgggtaatgggccaggcgt

SEQ ID NO: 5091094 - DNA, 25 bp, Homo sapien
cagattgtattcctaatacgatccc

SEQ ID NO: 5091095 - DNA, 25 bp, Homo sapien
ggctgtgcatccctacctgtgaaat

SEQ ID NO: 5091096 - DNA, 25 bp, Homo sapien
aataaatcataactaatcaacagag

SEQ ID NO: 5091097 - DNA, 25 bp, Homo sapien
catatcctttcctctcgtcggtgga

SEQ ID NO: 5091098 - DNA, 25 bp, Homo sapien
tctgggaatcgacgaagtaaatctt

SEQ ID NO: 5091099 - DNA, 25 bp, Homo sapien
ccctgatagagtcggtaacaatctt

SEQ ID NO: 5091100 - DNA, 25 bp, Homo sapien
gcaagtcggttaagatctgggaatc

SEQ ID NO: 5091101 - DNA, 25 bp, Homo sapien
ccagagcctgtataacattaggtag

SEQ ID NO: 5091102 - DNA, 25 bp, Homo sapien
tgttttgttaaagttcctgcatggc

SEQ ID NO: 5091103 - DNA, 25 bp, Homo sapien
caacaattctattattagcctgtac

SEQ ID NO: 5091104 - DNA, 25 bp, Homo sapien
aactctctctcataggtgtgctgtg

SEQ ID NO: 5091105 - DNA, 25 bp, Homo sapien
gacccctgatcaaggcatgaaaaat

SEQ ID NO: 5091106 - DNA, 25 bp, Homo sapien
gcacttagctacctcttgcactaga

SEQ ID NO: 5091107 - DNA, 25 bp, Homo sapien
aattctgctttgttggaagtaaatg

SEQ ID NO: 5091108 - DNA, 25 bp, Homo sapien
tcttgcactagataagggaaaaggt

SEQ ID NO: 5091109 - DNA, 25 bp, Homo sapien
gcaggtgctctaagttttatcagtc

SEQ ID NO: 5091110 - DNA, 25 bp, Homo sapien
tcagaacgaagatcagtaagaggag

SEQ ID NO: 5091111 - DNA, 25 bp, Homo sapien
agaagtcagaacgaagatcagtaag

SEQ ID NO: 5091112 - DNA, 25 bp, Homo sapien
cgaagatcagtaagaggagtcacaa

SEQ ID NO: 5091113 - DNA, 25 bp, Homo sapien
aagaggagtcacaaaaactgccaac

SEQ ID NO: 5091114 - DNA, 25 bp, Homo sapien
caggcaggaataaaacacattcggc

SEQ ID NO: 5091115 - DNA, 25 bp, Homo sapien
acaggcaggaataaaacacattcgg

SEQ ID NO: 5091116 - DNA, 25 bp, Homo sapien
tacaaataactttgccctatcaaag

SEQ ID NO: 5091117 - DNA, 25 bp, Homo sapien
ctttgccctatcaaaggcaagacca

SEQ ID NO: 5091118 - DNA, 25 bp, Homo sapien
agagtctcgcactctcgcccaggtt

SEQ ID NO: 5091119 - DNA, 25 bp, Homo sapien
gttggagtgcagcagcgccatctcg

SEQ ID NO: 5091120 - DNA, 25 bp, Homo sapien
cagagtctcgcactctcgcccaggt

SEQ ID NO: 5091121 - DNA, 25 bp, Homo sapien
caggttggagtgcagcagcgccatc

SEQ ID NO: 5091122 - DNA, 25 bp, Homo sapien
caactgctaactggtcctagggcca

SEQ ID NO: 5091123 - DNA, 25 bp, Homo sapien
tggaagcacgcacgatacacaaagc

SEQ ID NO: 5091124 - DNA, 25 bp, Homo sapien
gactcttgcttggaatggtgcccca

SEQ ID NO: 5091125 - DNA, 25 bp, Homo sapien
gaagatactatatgaggtcaacccc

SEQ ID NO: 5091126 - DNA, 25 bp, Homo sapien
ccaatgaatctgagaggtgagccaa

SEQ ID NO: 5091127 - DNA, 25 bp, Homo sapien
tcaagaaacctagttggtaagtcaa

SEQ ID NO: 5091128 - DNA, 25 bp, Homo sapien
tgaaaaaagcagtatgcggcaaggc

SEQ ID NO: 5091129 - DNA, 25 bp, Homo sapien
tcaatctgaggaaacaatgcaacag

SEQ ID NO: 5091130 - DNA, 25 bp, Homo sapien
gcaaacagaacaaagtgacaaaatc

SEQ ID NO: 5091131 - DNA, 25 bp, Homo sapien
ctgcaaacagaacaaagtgacaaaa

SEQ ID NO: 5091132 - DNA, 25 bp, Homo sapien
tgcaaacagaacaaagtgacaaaat

SEQ ID NO: 5091133 - DNA, 25 bp, Homo sapien
gctgcacttattaatgttgactgca

SEQ ID NO: 5091134 - DNA, 25 bp, Homo sapien
tctggctgcacttattaatgttgac

SEQ ID NO: 5091135 - DNA, 25 bp, Homo sapien
ttctcttaattcactgagattagga

SEQ ID NO: 5091136 - DNA, 25 bp, Homo sapien
tctctggctgcacttattaatgttg

SEQ ID NO: 5091137 - DNA, 25 bp, Homo sapien
ctgttggtaaatttaacaccattct

SEQ ID NO: 5091138 - DNA, 25 bp, Homo sapien
ggaatccagtttaatctgtttgcca

SEQ ID NO: 5091139 - DNA, 25 bp, Homo sapien
gtaaatttaacaccattcttctgga

SEQ ID NO: 5091140 - DNA, 25 bp, Homo sapien
caggttacacgaaagtaatatccaa

SEQ ID NO: 5091141 - DNA, 25 bp, Homo sapien
aatattgacaatttctttaacaatg

SEQ ID NO: 5091142 - DNA, 25 bp, Homo sapien
tggtatactcttcatttaaagaagt

SEQ ID NO: 5091143 - DNA, 25 bp, Homo sapien
ctttaacaatggcatcctgggcttc

SEQ ID NO: 5091144 - DNA, 25 bp, Homo sapien
cctgggcttcttcatattctgtttt

SEQ ID NO: 5091145 - DNA, 25 bp, Homo sapien
gtccttccttctatatcacaccagg

SEQ ID NO: 5091146 - DNA, 25 bp, Homo sapien
acacaccatgatcggcaaagccttc

SEQ ID NO: 5091147 - DNA, 25 bp, Homo sapien
ttaaaggcacaataaaggttagtca

SEQ ID NO: 5091148 - DNA, 25 bp, Homo sapien
catgtcatttgtcccacaactggta

SEQ ID NO: 5091149 - DNA, 25 bp, Homo sapien
tagctgagctaacacatcattgagt

SEQ ID NO: 5091150 - DNA, 25 bp, Homo sapien
gagtgtctgcattggttctacatag

SEQ ID NO: 5091151 - DNA, 25 bp, Homo sapien
catttgacacgtgagcaaagctgac

SEQ ID NO: 5091152 - DNA, 25 bp, Homo sapien
tcgtacatatggaacaggtgctcca

SEQ ID NO: 5091153 - DNA, 25 bp, Homo sapien
gccaatttggcctgaccttcaaaga

SEQ ID NO: 5091154 - DNA, 25 bp, Homo sapien
catgatacatgagcctatatgcaag

SEQ ID NO: 5091155 - DNA, 25 bp, Homo sapien
tctagaatctagttaagatctctca

SEQ ID NO: 5091156 - DNA, 25 bp, Homo sapien
cctcactattggaggactggctcaa

SEQ ID NO: 5091157 - DNA, 25 bp, Homo sapien
tactcgggctaagatgcagtccaca

SEQ ID NO: 5091158 - DNA, 25 bp, Homo sapien
cgtggagactcctttcaattgactg

SEQ ID NO: 5091159 - DNA, 25 bp, Homo sapien
caacatttcagccatgaacgtggag

SEQ ID NO: 5091160 - DNA, 25 bp, Homo sapien
caatttgggccatgagtactatcac

SEQ ID NO: 5091161 - DNA, 25 bp, Homo sapien
taaggtctcttcagtggtgagtgct

SEQ ID NO: 5091162 - DNA, 25 bp, Homo sapien
tcatgaaaatgggttgcaaacatgc

SEQ ID NO: 5091163 - DNA, 25 bp, Homo sapien
catgctaacccaaatccatcgtagg

SEQ ID NO: 5091164 - DNA, 25 bp, Homo sapien
ccatcgtaggtagaagttcctcttc

SEQ ID NO: 5091165 - DNA, 25 bp, Homo sapien
gatctgactagatcccaagcccacg

SEQ ID NO: 5091166 - DNA, 25 bp, Homo sapien
cgtgttcgtggaaaatcagagcgct

SEQ ID NO: 5091167 - DNA, 25 bp, Homo sapien
actgatgcagaaaaacgtgttcgtg

SEQ ID NO: 5091168 - DNA, 25 bp, Homo sapien
gaatctcatcaatacagggatctga

SEQ ID NO: 5091169 - DNA, 25 bp, Homo sapien
gcacactctattacatgcttaggga

SEQ ID NO: 5091170 - DNA, 25 bp, Homo sapien
tttccagatagcacttctttgctgc

SEQ ID NO: 5091171 - DNA, 25 bp, Homo sapien
gatatcatatccttgcgattctcca

SEQ ID NO: 5091172 - DNA, 25 bp, Homo sapien
tactgaaactcctcaagttccaggg

SEQ ID NO: 5091173 - DNA, 25 bp, Homo sapien
tattgcagtacatgtttccaggacc

SEQ ID NO: 5091174 - DNA, 25 bp, Homo sapien
ttgtagcaactatctatccttcaga

SEQ ID NO: 5091175 - DNA, 25 bp, Homo sapien
caggaccaggcagtgaaataagatt

SEQ ID NO: 5091176 - DNA, 25 bp, Homo sapien
aggtaaaagctaaaaacatgacagg

SEQ ID NO: 5091177 - DNA, 25 bp, Homo sapien
tactggaaggcataaacagtcactg

SEQ ID NO: 5091178 - DNA, 25 bp, Homo sapien
gagattgcataaaagagtctgccta

SEQ ID NO: 5091179 - DNA, 25 bp, Homo sapien
gaataatgttaccaacctcacaggg

SEQ ID NO: 5091180 - DNA, 25 bp, Homo sapien
tgccaagttattgctgcttcagaga

SEQ ID NO: 5091181 - DNA, 25 bp, Homo sapien
gtttcatttccatctaaacatatca

SEQ ID NO: 5091182 - DNA, 25 bp, Homo sapien
cttttctaaaagtcatgttagacag

SEQ ID NO: 5091183 - DNA, 25 bp, Homo sapien
tgtgaatgtcccattagtaattaaa

SEQ ID NO: 5091184 - DNA, 25 bp, Homo sapien
atcttttctaaaagtcatgttagac

SEQ ID NO: 5091185 - DNA, 25 bp, Homo sapien
ctttgctattacttcagcttttagc

SEQ ID NO: 5091186 - DNA, 25 bp, Homo sapien
agtaaagggcatttgtttcaccttg

SEQ ID NO: 5091187 - DNA, 25 bp, Homo sapien
tgctattacttcagcttttagctgt

SEQ ID NO: 5091188 - DNA, 25 bp, Homo sapien
tcagtaaagggcatttgtttcacct

SEQ ID NO: 5091189 - DNA, 25 bp, Homo sapien
agtaacttttattcgtgaaatgatt

SEQ ID NO: 5091190 - DNA, 25 bp, Homo sapien
cgtagtaacttttattcgtgaaatg

SEQ ID NO: 5091191 - DNA, 25 bp, Homo sapien
tcacgtagtaacttttattcgtgaa

SEQ ID NO: 5091192 - DNA, 25 bp, Homo sapien
gtagtaacttttattcgtgaaatga

SEQ ID NO: 5091193 - DNA, 25 bp, Homo sapien
aattcagcacatcacttattattgc

SEQ ID NO: 5091194 - DNA, 25 bp, Homo sapien
tattgcctatgtcaattgcaaacag

SEQ ID NO: 5091195 - DNA, 25 bp, Homo sapien
tattaagttgatagcccatgggcac

SEQ ID NO: 5091196 - DNA, 25 bp, Homo sapien
tgggcactgacagttaacactatgg

SEQ ID NO: 5091197 - DNA, 25 bp, Homo sapien
gactaaatcaaggttctcaatctga

SEQ ID NO: 5091198 - DNA, 25 bp, Homo sapien
ggctcacggtaggactctggatata

SEQ ID NO: 5091199 - DNA, 25 bp, Homo sapien
ccctcactttgcgtaggattagcta

SEQ ID NO: 5091200 - DNA, 25 bp, Homo sapien
cagcccgccgcatttattaaaaaga

SEQ ID NO: 5091201 - DNA, 25 bp, Homo sapien
taaaaccatgagctgatttccacgt

SEQ ID NO: 5091202 - DNA, 25 bp, Homo sapien
aacactctttcacaaccacgggatg

SEQ ID NO: 5091203 - DNA, 25 bp, Homo sapien
tgttttcttggaatgaagtctcccc

SEQ ID NO: 5091204 - DNA, 25 bp, Homo sapien
tgtagccctaacaactaaaaccatg

SEQ ID NO: 5091205 - DNA, 25 bp, Homo sapien
ggcactttggtttggacaaaccaca

SEQ ID NO: 5091206 - DNA, 25 bp, Homo sapien
tgctgaatttcccacatggctggac

SEQ ID NO: 5091207 - DNA, 25 bp, Homo sapien
tccatatggttcaccccactgctga

SEQ ID NO: 5091208 - DNA, 25 bp, Homo sapien
gctggaccagagacatgtatgggca

SEQ ID NO: 5091209 - DNA, 25 bp, Homo sapien
tgcccactgacagaactttttcttg

SEQ ID NO: 5091210 - DNA, 25 bp, Homo sapien
tccctctttgaggtgaacccagggc

SEQ ID NO: 5091211 - DNA, 25 bp, Homo sapien
taaccatttaagttgctaattcttc

SEQ ID NO: 5091212 - DNA, 25 bp, Homo sapien
ccctctttgaggtgaacccagggca

SEQ ID NO: 5091213 - DNA, 25 bp, Homo sapien
tctggctgttgaagctcggctggcc

SEQ ID NO: 5091214 - DNA, 25 bp, Homo sapien
ggcagaggcataaatggaagatcaa

SEQ ID NO: 5091215 - DNA, 25 bp, Homo sapien
ccaccgatcaggacgcagctgggca

SEQ ID NO: 5091216 - DNA, 25 bp, Homo sapien
cagagccaccgatcaggacgcagct

SEQ ID NO: 5091217 - DNA, 25 bp, Homo sapien
cattggtccacttctgtgggcagga

SEQ ID NO: 5091218 - DNA, 25 bp, Homo sapien
tgggcaggacaacgggccatgtgat

SEQ ID NO: 5091219 - DNA, 25 bp, Homo sapien
gatgacatggcttgggtcattggtc

SEQ ID NO: 5091220 - DNA, 25 bp, Homo sapien
gaggaaggagagcttctcgttccca

SEQ ID NO: 5091221 - DNA, 25 bp, Homo sapien
gctgggagggtaatgcatcccaaga

SEQ ID NO: 5091222 - DNA, 25 bp, Homo sapien
caccttctttgcagctgatgtctga

SEQ ID NO: 5091223 - DNA, 25 bp, Homo sapien
caaatttatagtcagttgggcagaa

SEQ ID NO: 5091224 - DNA, 25 bp, Homo sapien
cctagtctggagtgtgagttcaatc

SEQ ID NO: 5091225 - DNA, 25 bp, Homo sapien
tgtcctctccattaccgacttcaag

SEQ ID NO: 5091226 - DNA, 25 bp, Homo sapien
gtcccacagacagttgcctggagag

SEQ ID NO: 5091227 - DNA, 25 bp, Homo sapien
agtcccacagacagttgcctggaga

SEQ ID NO: 5091228 - DNA, 25 bp, Homo sapien
ggcccaacaccaggtgatccaagcc

SEQ ID NO: 5091229 - DNA, 25 bp, Homo sapien
cacagaaggagcaagccaagctcca

SEQ ID NO: 5091230 - DNA, 25 bp, Homo sapien
gtggtaaaacaagccagctggccac

SEQ ID NO: 5091231 - DNA, 25 bp, Homo sapien
aggcagtggtaaaacaagccagctg

SEQ ID NO: 5091232 - DNA, 25 bp, Homo sapien
ccaaaggcagtggtaaaacaagcca

SEQ ID NO: 5091233 - DNA, 25 bp, Homo sapien
ttcgctcccgctagagaaactccag

SEQ ID NO: 5091234 - DNA, 25 bp, Homo sapien
tccagagagatttgccacagctgcc

SEQ ID NO: 5091235 - DNA, 25 bp, Homo sapien
ccatgtctatgggtgcaggcctggc

SEQ ID NO: 5091236 - DNA, 25 bp, Homo sapien
catgtgctttaggtgcttcgctccc

SEQ ID NO: 5091237 - DNA, 25 bp, Homo sapien
cgggtaacgtcatgcactgtgggca

SEQ ID NO: 5091238 - DNA, 25 bp, Homo sapien
acacctgtgcgggtaacgtcatgca

SEQ ID NO: 5091239 - DNA, 25 bp, Homo sapien
ctgtgatgtcacacctgtgcgggta

SEQ ID NO: 5091240 - DNA, 25 bp, Homo sapien
tgtcacacctgtgcgggtaacgtca

SEQ ID NO: 5091241 - DNA, 25 bp, Homo sapien
tctgtctctctggccgactgcaagc

SEQ ID NO: 5091242 - DNA, 25 bp, Homo sapien
ctctggccgactgcaagcagatctc

SEQ ID NO: 5091243 - DNA, 25 bp, Homo sapien
gcactggtcttttggctctgtcact

SEQ ID NO: 5091244 - DNA, 25 bp, Homo sapien
aaatgaggcactggtcttttggctc

SEQ ID NO: 5091245 - DNA, 25 bp, Homo sapien
ttggaaatttggcactttcctccca

SEQ ID NO: 5091246 - DNA, 25 bp, Homo sapien
catgggcacaccaaagagaggcagc

SEQ ID NO: 5091247 - DNA, 25 bp, Homo sapien
gaggtcaagtaactcgtctagtttg

SEQ ID NO: 5091248 - DNA, 25 bp, Homo sapien
tgagaaagacaggaccgcccttgat

SEQ ID NO: 5091249 - DNA, 25 bp, Homo sapien
agagaatccagagtcttggctagca

SEQ ID NO: 5091250 - DNA, 25 bp, Homo sapien
gagaatccagagtcttggctagcag

SEQ ID NO: 5091251 - DNA, 25 bp, Homo sapien
agaatccagagtcttggctagcagc

SEQ ID NO: 5091252 - DNA, 25 bp, Homo sapien
tacagttttgctctcgggctgaggg

SEQ ID NO: 5091253 - DNA, 25 bp, Homo sapien
tgagggacagattctcccagacttg

SEQ ID NO: 5091254 - DNA, 25 bp, Homo sapien
ttcattgaaaggatagtggtctggg

SEQ ID NO: 5091255 - DNA, 25 bp, Homo sapien
gggtgtaaacgaacactctctctgc

SEQ ID NO: 5091256 - DNA, 25 bp, Homo sapien
gcaccaggaacccaaaagaagccat

SEQ ID NO: 5091257 - DNA, 25 bp, Homo sapien
atcaagaggatttgtcttctccatg

SEQ ID NO: 5091258 - DNA, 25 bp, Homo sapien
gatagaatccctttctaaatattgt

SEQ ID NO: 5091259 - DNA, 25 bp, Homo sapien
tgtttatcaagaggatttgtcttct

SEQ ID NO: 5091260 - DNA, 25 bp, Homo sapien
atggggttgccgggcgcagccctcc

SEQ ID NO: 5091261 - DNA, 25 bp, Homo sapien
catggggttgccgggcgcagccctc

SEQ ID NO: 5091262 - DNA, 25 bp, Homo sapien
tcatggggttgccgggcgcagccct

SEQ ID NO: 5091263 - DNA, 25 bp, Homo sapien
tgatctccaggctcggatcggcaga

SEQ ID NO: 5091264 - DNA, 25 bp, Homo sapien
gggcttttagctggctgatctccag

SEQ ID NO: 5091265 - DNA, 25 bp, Homo sapien
tttttcttaactactgttgatcagt

SEQ ID NO: 5091266 - DNA, 25 bp, Homo sapien
taaccaggaatatctgagtcttctc

SEQ ID NO: 5091267 - DNA, 25 bp, Homo sapien
ccatttagcacagagcacagggcag

SEQ ID NO: 5091268 - DNA, 25 bp, Homo sapien
cagctcagagttagtccatttagca

SEQ ID NO: 5091269 - DNA, 25 bp, Homo sapien
ttagtccatttagcacagagcacag

SEQ ID NO: 5091270 - DNA, 25 bp, Homo sapien
acttctaatggtgggcggtccaggg

SEQ ID NO: 5091271 - DNA, 25 bp, Homo sapien
tctccacaggtttcggcatgaccac

SEQ ID NO: 5091272 - DNA, 25 bp, Homo sapien
caactggatgctgcgcaagctgagc

SEQ ID NO: 5091273 - DNA, 25 bp, Homo sapien
tacgtggactcgctctacttctgct

SEQ ID NO: 5091274 - DNA, 25 bp, Homo sapien
cctcggtgtaccacgtgctgctcat

SEQ ID NO: 5091275 - DNA, 25 bp, Homo sapien
gggctgccaagatcaggaaacctat

SEQ ID NO: 5091276 - DNA, 25 bp, Homo sapien
gccaccaagggagataaatgactaa

SEQ ID NO: 5091277 - DNA, 25 bp, Homo sapien
aaaatatgatcgtttgaccaaaggc

SEQ ID NO: 5091278 - DNA, 25 bp, Homo sapien
tataggtccccaagatgaagggcca

SEQ ID NO: 5091279 - DNA, 25 bp, Homo sapien
gtcattaagcgtaagatcaacacca

SEQ ID NO: 5091280 - DNA, 25 bp, Homo sapien
ctgagtcattaagcgtaagatcaac

SEQ ID NO: 5091281 - DNA, 25 bp, Homo sapien
taagatcaacaccacactcgggcaa

SEQ ID NO: 5091282 - DNA, 25 bp, Homo sapien
cactcgggcaactgggcatttcctt

SEQ ID NO: 5091283 - DNA, 25 bp, Homo sapien
gatgggagtcacaactctgagcagc

SEQ ID NO: 5091284 - DNA, 25 bp, Homo sapien
cttggtgccctcagaatacagtcta

SEQ ID NO: 5091285 - DNA, 25 bp, Homo sapien
tagatgctagcacacctgggtttca

SEQ ID NO: 5091286 - DNA, 25 bp, Homo sapien
tacagtctaatgtggtggaaagagc

SEQ ID NO: 5091287 - DNA, 25 bp, Homo sapien
ctttaggggataggccatggcccct

SEQ ID NO: 5091288 - DNA, 25 bp, Homo sapien
tctttaggggataggccatggcccc

SEQ ID NO: 5091289 - DNA, 25 bp, Homo sapien
actctttaggggataggccatggcc

SEQ ID NO: 5091290 - DNA, 25 bp, Homo sapien
taggggataggccatggcccctctc

SEQ ID NO: 5091291 - DNA, 25 bp, Homo sapien
tcagccaggcagactgtcacccaga

SEQ ID NO: 5091292 - DNA, 25 bp, Homo sapien
tgccacggggaggttatgagtctac

SEQ ID NO: 5091293 - DNA, 25 bp, Homo sapien
gggtcaagtcttatgtaaatagccc

SEQ ID NO: 5091294 - DNA, 25 bp, Homo sapien
gcgctgtcctcaagccctgggtcaa

SEQ ID NO: 5091295 - DNA, 25 bp, Homo sapien
gagtccagacatggaagagtttgga

SEQ ID NO: 5091296 - DNA, 25 bp, Homo sapien
ctcaactggaaacccaaactccaat

SEQ ID NO: 5091297 - DNA, 25 bp, Homo sapien
tcacattctaggtttggtcatccag

SEQ ID NO: 5091298 - DNA, 25 bp, Homo sapien
ggaaaaaggcagatcctcaactgga

SEQ ID NO: 5091299 - DNA, 25 bp, Homo sapien
cttgctgaggccctcggataaagcc

SEQ ID NO: 5091300 - DNA, 25 bp, Homo sapien
tgctgaggccctcggataaagccac

SEQ ID NO: 5091301 - DNA, 25 bp, Homo sapien
tgaggccctcggataaagccacacc

SEQ ID NO: 5091302 - DNA, 25 bp, Homo sapien
ctgaggccctcggataaagccacac

SEQ ID NO: 5091303 - DNA, 25 bp, Homo sapien
gatgcggaagaaggatggaccatcc

SEQ ID NO: 5091304 - DNA, 25 bp, Homo sapien
gaagaaggatggaccatcctccacc

SEQ ID NO: 5091305 - DNA, 25 bp, Homo sapien
tgcggaagaaggatggaccatcctc

SEQ ID NO: 5091306 - DNA, 25 bp, Homo sapien
cttgatgcggaagaaggatggacca

SEQ ID NO: 5091307 - DNA, 25 bp, Homo sapien
ttgcgaaggcggcaccagacaggct

SEQ ID NO: 5091308 - DNA, 25 bp, Homo sapien
tgtgggaacgagcttcacagctttt

SEQ ID NO: 5091309 - DNA, 25 bp, Homo sapien
tctctgagctgaactccgaaggccc

SEQ ID NO: 5091310 - DNA, 25 bp, Homo sapien
tcaccagggccccatttgcgaaggc

SEQ ID NO: 5091311 - DNA, 25 bp, Homo sapien
cagctcagccacgtacaaactaact

SEQ ID NO: 5091312 - DNA, 25 bp, Homo sapien
gtgtcaagggcccaaccgaggctgc

SEQ ID NO: 5091313 - DNA, 25 bp, Homo sapien
tttgggcgtaatagtgcctccctca

SEQ ID NO: 5091314 - DNA, 25 bp, Homo sapien
cacgatacagatcagtgctggcctc

SEQ ID NO: 5091315 - DNA, 25 bp, Homo sapien
cagttgcttggaacagccctggttt

SEQ ID NO: 5091316 - DNA, 25 bp, Homo sapien
aataaacctctgagcgggacctgcc

SEQ ID NO: 5091317 - DNA, 25 bp, Homo sapien
gagcccagcaggaaaagtctccagc

SEQ ID NO: 5091318 - DNA, 25 bp, Homo sapien
tctccagcgggtaatgagtcaagac

SEQ ID NO: 5091319 - DNA, 25 bp, Homo sapien
tactcccagagaggcgatgtcgcag

SEQ ID NO: 5091320 - DNA, 25 bp, Homo sapien
cactcctactcccagagaggcgatg

SEQ ID NO: 5091321 - DNA, 25 bp, Homo sapien
atgtcgcagttccagccacggagca

SEQ ID NO: 5091322 - DNA, 25 bp, Homo sapien
ccagagaggcgatgtcgcagttcca

SEQ ID NO: 5091323 - DNA, 25 bp, Homo sapien
cacctcagtttgagggagccgggcc

SEQ ID NO: 5091324 - DNA, 25 bp, Homo sapien
cagatgtggcttgtagctccatgga

SEQ ID NO: 5091325 - DNA, 25 bp, Homo sapien
cttctgtgggaagaccaagcatggg

SEQ ID NO: 5091326 - DNA, 25 bp, Homo sapien
gtgcattgagtcgtccccgagggct

SEQ ID NO: 5091327 - DNA, 25 bp, Homo sapien
gcaccctcccaaaccgcttctcttg

SEQ ID NO: 5091328 - DNA, 25 bp, Homo sapien
actactcagttccaatggcacctgc

SEQ ID NO: 5091329 - DNA, 25 bp, Homo sapien
atcttcactactcagttccaatggc

SEQ ID NO: 5091330 - DNA, 25 bp, Homo sapien
catctcctggctaaggcatcttcac

SEQ ID NO: 5091331 - DNA, 25 bp, Homo sapien
cacacgtgctccctggaaagtctta

SEQ ID NO: 5091332 - DNA, 25 bp, Homo sapien
ccctggaaagtcttatccacatgac

SEQ ID NO: 5091333 - DNA, 25 bp, Homo sapien
gaaagtcttatccacatgacacctg

SEQ ID NO: 5091334 - DNA, 25 bp, Homo sapien
acatgacacctgaacccttgaatgc

SEQ ID NO: 5091335 - DNA, 25 bp, Homo sapien
ccgcacagcggtgcccccttctttc

SEQ ID NO: 5091336 - DNA, 25 bp, Homo sapien
cgcagtctggcgtccgcacagcggt

SEQ ID NO: 5091337 - DNA, 25 bp, Homo sapien
cttctgcagcccttcgcagtctggc

SEQ ID NO: 5091338 - DNA, 25 bp, Homo sapien
tctgcagcccttcgcagtctggcgt

SEQ ID NO: 5091339 - DNA, 25 bp, Homo sapien
tgacttgtttgcgaaggctccagtc

SEQ ID NO: 5091340 - DNA, 25 bp, Homo sapien
agcagtcggtccctgcgtctgagca

SEQ ID NO: 5091341 - DNA, 25 bp, Homo sapien
agagctgcgtcagagagagcctcga

SEQ ID NO: 5091342 - DNA, 25 bp, Homo sapien
tcgacagaagtggtatgatgagaac

SEQ ID NO: 5091343 - DNA, 25 bp, Homo sapien
cagcagagcacatgtctcggagaag

SEQ ID NO: 5091344 - DNA, 25 bp, Homo sapien
cagattgtgcatctaaaaaccgagg

SEQ ID NO: 5091345 - DNA, 25 bp, Homo sapien
cacgggtttctacagtgtcttcaga

SEQ ID NO: 5091346 - DNA, 25 bp, Homo sapien
tcagagaaccgcaaggagggtcagc

SEQ ID NO: 5091347 - DNA, 25 bp, Homo sapien
tccctgtccatagttgcctctttct

SEQ ID NO: 5091348 - DNA, 25 bp, Homo sapien
tgaccatttatcctcaaactcctct

SEQ ID NO: 5091349 - DNA, 25 bp, Homo sapien
ggctgaccatttatcctcaaactcc

SEQ ID NO: 5091350 - DNA, 25 bp, Homo sapien
gacatggctgaccatttatcctcaa

SEQ ID NO: 5091351 - DNA, 25 bp, Homo sapien
catggctgaccatttatcctcaaac

SEQ ID NO: 5091352 - DNA, 25 bp, Homo sapien
gagtcatccatgtggaaggcatcac

SEQ ID NO: 5091353 - DNA, 25 bp, Homo sapien
tatgcctaacatacggaaattgcct

SEQ ID NO: 5091354 - DNA, 25 bp, Homo sapien
cagccgggcaggtatgcattattca

SEQ ID NO: 5091355 - DNA, 25 bp, Homo sapien
ttgatgtgcattgttcagccgggca

SEQ ID NO: 5091356 - DNA, 25 bp, Homo sapien
ccctgctgccaagtgttctgaattc

SEQ ID NO: 5091357 - DNA, 25 bp, Homo sapien
cctgtgctgagtgtgttggcatttc

SEQ ID NO: 5091358 - DNA, 25 bp, Homo sapien
gagcgcctcgtgtgagcctgtttag

SEQ ID NO: 5091359 - DNA, 25 bp, Homo sapien
tgagataaacgcaaactccgaatcg

SEQ ID NO: 5091360 - DNA, 25 bp, Homo sapien
caaactgtaaggtgcctggaaccac

SEQ ID NO: 5091361 - DNA, 25 bp, Homo sapien
gcaacagatgttacagaccaggaag

SEQ ID NO: 5091362 - DNA, 25 bp, Homo sapien
tgcattcctcatgagctcctggcaa

SEQ ID NO: 5091363 - DNA, 25 bp, Homo sapien
ccaggaaggtaggatagcatgcagc

SEQ ID NO: 5091364 - DNA, 25 bp, Homo sapien
tgcctcccgaacaagcctgtggcgt

SEQ ID NO: 5091365 - DNA, 25 bp, Homo sapien
caaagcctaggagcgactggacagt

SEQ ID NO: 5091366 - DNA, 25 bp, Homo sapien
gagcctatgcctctacaaagcctag

SEQ ID NO: 5091367 - DNA, 25 bp, Homo sapien
cctgtggcgttaggatcttcaacct

SEQ ID NO: 5091368 - DNA, 25 bp, Homo sapien
ggcagtttgcaatcgtgtagataca

SEQ ID NO: 5091369 - DNA, 25 bp, Homo sapien
aaagtcaatctgaatagctcaagcg

SEQ ID NO: 5091370 - DNA, 25 bp, Homo sapien
caaggttacatggaacaccacaatg

SEQ ID NO: 5091371 - DNA, 25 bp, Homo sapien
taccgattgcttacactgaactgaa

SEQ ID NO: 5091372 - DNA, 25 bp, Homo sapien
gacatgttccggcttcctaatggaa

SEQ ID NO: 5091373 - DNA, 25 bp, Homo sapien
ctgctgattattgcccctgctggga

SEQ ID NO: 5091374 - DNA, 25 bp, Homo sapien
gagtccatccaaataaggccccatt

SEQ ID NO: 5091375 - DNA, 25 bp, Homo sapien
tattacgagtgacccagcacgttgc

SEQ ID NO: 5091376 - DNA, 25 bp, Homo sapien
gagaatactgcagcgaagcaccctg

SEQ ID NO: 5091377 - DNA, 25 bp, Homo sapien
gcaagttggaggacaagacaggcct

SEQ ID NO: 5091378 - DNA, 25 bp, Homo sapien
tattgatttagtgggcaaaagccgc

SEQ ID NO: 5091379 - DNA, 25 bp, Homo sapien
cattcggagctgagattgatgccag

SEQ ID NO: 5091380 - DNA, 25 bp, Homo sapien
aatagggtaaatccatcaagaagct

SEQ ID NO: 5091381 - DNA, 25 bp, Homo sapien
caaaatatgtgacaccagcattgac

SEQ ID NO: 5091382 - DNA, 25 bp, Homo sapien
tagttgcagacctcaatatttcacc

SEQ ID NO: 5091383 - DNA, 25 bp, Homo sapien
tgaaaatagaggcacgttacccatg

SEQ ID NO: 5091384 - DNA, 25 bp, Homo sapien
tgacgggtggaaaaggccatccaaa

SEQ ID NO: 5091385 - DNA, 25 bp, Homo sapien
gcccaaaccagccagtgacctctca

SEQ ID NO: 5091386 - DNA, 25 bp, Homo sapien
ctgctgacgggtggaaaaggccatc

SEQ ID NO: 5091387 - DNA, 25 bp, Homo sapien
agccttgcccctacccgaaattcag

SEQ ID NO: 5091388 - DNA, 25 bp, Homo sapien
tccctccatcagtaataactgcttt

SEQ ID NO: 5091389 - DNA, 25 bp, Homo sapien
cctccatcagtaataactgctttat

SEQ ID NO: 5091390 - DNA, 25 bp, Homo sapien
ctcattgtccctccatcagtaataa

SEQ ID NO: 5091391 - DNA, 25 bp, Homo sapien
cattgtccctccatcagtaataact

SEQ ID NO: 5091392 - DNA, 25 bp, Homo sapien
ttggtgtagacgaaattggtgtctc

SEQ ID NO: 5091393 - DNA, 25 bp, Homo sapien
tagacgaaattggtgtctccaggcc

SEQ ID NO: 5091394 - DNA, 25 bp, Homo sapien
ggtgtagacgaaattggtgtctcca

SEQ ID NO: 5091395 - DNA, 25 bp, Homo sapien
tgtagacgaaattggtgtctccagg

SEQ ID NO: 5091396 - DNA, 25 bp, Homo sapien
tagccctttcccgttagcacagatt

SEQ ID NO: 5091397 - DNA, 25 bp, Homo sapien
tcccgttagcacagattccggtggc

SEQ ID NO: 5091398 - DNA, 25 bp, Homo sapien
cctttcccgttagcacagattccgg

SEQ ID NO: 5091399 - DNA, 25 bp, Homo sapien
ttagcacagattccggtggccctgg

SEQ ID NO: 5091400 - DNA, 25 bp, Homo sapien
tccattgtgcagacccctggctcac

SEQ ID NO: 5091401 - DNA, 25 bp, Homo sapien
cagtggagagttctccattgtgcag

SEQ ID NO: 5091402 - DNA, 25 bp, Homo sapien
agagttctccattgtgcagacccct

SEQ ID NO: 5091403 - DNA, 25 bp, Homo sapien
ttctccattgtgcagacccctggct

SEQ ID NO: 5091404 - DNA, 25 bp, Homo sapien
ggtcaaagggcaacacaggttcctg

SEQ ID NO: 5091405 - DNA, 25 bp, Homo sapien
gtcaaagggcaacacaggttcctgg

SEQ ID NO: 5091406 - DNA, 25 bp, Homo sapien
cttgctacttggaattggatgccat

SEQ ID NO: 5091407 - DNA, 25 bp, Homo sapien
ataaagctccaaggcacttgggctg

SEQ ID NO: 5091408 - DNA, 25 bp, Homo sapien
tggatgccataaagctccaaggcac

SEQ ID NO: 5091409 - DNA, 25 bp, Homo sapien
ttggaattggatgccataaagctcc

SEQ ID NO: 5091410 - DNA, 25 bp, Homo sapien
ggcatgggggaagtactcaagttca

SEQ ID NO: 5091411 - DNA, 25 bp, Homo sapien
tccaacctcagagggagtacaagcc

SEQ ID NO: 5091412 - DNA, 25 bp, Homo sapien
tcagggtggtccaacctcagaggga

SEQ ID NO: 5091413 - DNA, 25 bp, Homo sapien
ggggaagtactcaagttcaaatgct

SEQ ID NO: 5091414 - DNA, 25 bp, Homo sapien
aatccaactggattctgaacatcct

SEQ ID NO: 5091415 - DNA, 25 bp, Homo sapien
aaatccaactggattctgaacatcc

SEQ ID NO: 5091416 - DNA, 25 bp, Homo sapien
cctgaaagactgagatgtcgggttc

SEQ ID NO: 5091417 - DNA, 25 bp, Homo sapien
aaagactgagatgtcgggttccctc

SEQ ID NO: 5091418 - DNA, 25 bp, Homo sapien
gatctcaggttcacattttctgtca

SEQ ID NO: 5091419 - DNA, 25 bp, Homo sapien
gcagggcaccaagccgatctcaggt

SEQ ID NO: 5091420 - DNA, 25 bp, Homo sapien
ttcatctgctgtttggatcccattc

SEQ ID NO: 5091421 - DNA, 25 bp, Homo sapien
cacagcctgatgatgtttcatctgc

SEQ ID NO: 5091422 - DNA, 25 bp, Homo sapien
ttcttcccttctgatactatcagca

SEQ ID NO: 5091423 - DNA, 25 bp, Homo sapien
gtttggaacagcctctccttgaagc

SEQ ID NO: 5091424 - DNA, 25 bp, Homo sapien
atcttatagatttcccagggttggc

SEQ ID NO: 5091425 - DNA, 25 bp, Homo sapien
tggctgtgcacagacgacataaatc

SEQ ID NO: 5091426 - DNA, 25 bp, Homo sapien
gatctctgcccaagatcctagtggg

SEQ ID NO: 5091427 - DNA, 25 bp, Homo sapien
tgttggaccattaactggctgtgca

SEQ ID NO: 5091428 - DNA, 25 bp, Homo sapien
gctgagagggcaggcctagccatct

SEQ ID NO: 5091429 - DNA, 25 bp, Homo sapien
tgcacacttgaaagggcacggccag

SEQ ID NO: 5091430 - DNA, 25 bp, Homo sapien
agggcaggcctagccatctgcctgc

SEQ ID NO: 5091431 - DNA, 25 bp, Homo sapien
ctgggagggtggatactggcttgca

SEQ ID NO: 5091432 - DNA, 25 bp, Homo sapien
gaaaatggagtttgcgagagtgtta

SEQ ID NO: 5091433 - DNA, 25 bp, Homo sapien
gaacattaggaaagccttcgtctct

SEQ ID NO: 5091434 - DNA, 25 bp, Homo sapien
taggcagatttgtcaatagctggct

SEQ ID NO: 5091435 - DNA, 25 bp, Homo sapien
ttttcaggcgtcctgaagagctgtc

SEQ ID NO: 5091436 - DNA, 25 bp, Homo sapien
tctgccaaggttgacaaatgacatc

SEQ ID NO: 5091437 - DNA, 25 bp, Homo sapien
caaacagtgatgcaagcctcaggct

SEQ ID NO: 5091438 - DNA, 25 bp, Homo sapien
ggtctcatgtccctaacttggagca

SEQ ID NO: 5091439 - DNA, 25 bp, Homo sapien
caaatggtccagcagaatccttggg

SEQ ID NO: 5091440 - DNA, 25 bp, Homo sapien
aaatcctgccaagagagccctgtga

SEQ ID NO: 5091441 - DNA, 25 bp, Homo sapien
tcaacgagtgactaagtagcagcag

SEQ ID NO: 5091442 - DNA, 25 bp, Homo sapien
tctagaagggagacctcacaaggcc

SEQ ID NO: 5091443 - DNA, 25 bp, Homo sapien
ggagagtctgtagggccaatgcacc

SEQ ID NO: 5091444 - DNA, 25 bp, Homo sapien
gattcacccaggagaggccctcagt

SEQ ID NO: 5091445 - DNA, 25 bp, Homo sapien
gttactgagacccaggtagatgctc

SEQ ID NO: 5091446 - DNA, 25 bp, Homo sapien
ccaggagaggccctcagtgttactg

SEQ ID NO: 5091447 - DNA, 25 bp, Homo sapien
cagagattcacccaggagaggccct

SEQ ID NO: 5091448 - DNA, 25 bp, Homo sapien
cacaggagcctccccgctaggagaa

SEQ ID NO: 5091449 - DNA, 25 bp, Homo sapien
ggagcctccccgctaggagaaccat

SEQ ID NO: 5091450 - DNA, 25 bp, Homo sapien
ggcacaggagcctccccgctaggag

SEQ ID NO: 5091451 - DNA, 25 bp, Homo sapien
ctgcaggaagcagacagaggcacag

SEQ ID NO: 5091452 - DNA, 25 bp, Homo sapien
ccagaaccaccggtggggcactcaa

SEQ ID NO: 5091453 - DNA, 25 bp, Homo sapien
gggcactcaagtgaccggcaccctg

SEQ ID NO: 5091454 - DNA, 25 bp, Homo sapien
ccaccggtggggcactcaagtgacc

SEQ ID NO: 5091455 - DNA, 25 bp, Homo sapien
gaggaagaagggcttcgacagagcc

SEQ ID NO: 5091456 - DNA, 25 bp, Homo sapien
tgctactaggggcatggcttgcagt

SEQ ID NO: 5091457 - DNA, 25 bp, Homo sapien
tgattgctactaggggcatggcttg

SEQ ID NO: 5091458 - DNA, 25 bp, Homo sapien
tactaggggcatggcttgcagtaag

SEQ ID NO: 5091459 - DNA, 25 bp, Homo sapien
atgtgattgctactaggggcatggc

SEQ ID NO: 5091460 - DNA, 25 bp, Homo sapien
gccaggccccacagatctgtccacc

SEQ ID NO: 5091461 - DNA, 25 bp, Homo sapien
gccccacagatctgtccaccctgct

SEQ ID NO: 5091462 - DNA, 25 bp, Homo sapien
aggccccacagatctgtccaccctg

SEQ ID NO: 5091463 - DNA, 25 bp, Homo sapien
caggccccacagatctgtccaccct

SEQ ID NO: 5091464 - DNA, 25 bp, Homo sapien
cgttgtcaatatccaagatctccct

SEQ ID NO: 5091465 - DNA, 25 bp, Homo sapien
cccggaaaatgttcgttgtcaatat

SEQ ID NO: 5091466 - DNA, 25 bp, Homo sapien
taggcagaaaatcctcacagacacc

SEQ ID NO: 5091467 - DNA, 25 bp, Homo sapien
actgagaaagtgtacgagaaagcac

SEQ ID NO: 5091468 - DNA, 25 bp, Homo sapien
taaacttagctggaactgcggactg

SEQ ID NO: 5091469 - DNA, 25 bp, Homo sapien
ttgcatatttaaacttagctggaac

SEQ ID NO: 5091470 - DNA, 25 bp, Homo sapien
ttagctggaactgcggactgagagc

SEQ ID NO: 5091471 - DNA, 25 bp, Homo sapien
aactgcggactgagagcctttgccc

SEQ ID NO: 5091472 - DNA, 25 bp, Homo sapien
ggaagaagaaaccagctccagcctc

SEQ ID NO: 5091473 - DNA, 25 bp, Homo sapien
ggtggtaatgaaggtcttcctccag

SEQ ID NO: 5091474 - DNA, 25 bp, Homo sapien
agggacccagctgacactgtcagag

SEQ ID NO: 5091475 - DNA, 25 bp, Homo sapien
cattcaccctgggatggggtatggg

SEQ ID NO: 5091476 - DNA, 25 bp, Homo sapien
gcttggccaggtctcagatcaggat

SEQ ID NO: 5091477 - DNA, 25 bp, Homo sapien
cctgtggaatataggagccatggaa

SEQ ID NO: 5091478 - DNA, 25 bp, Homo sapien
gagttgctggatcccacttagtgaa

SEQ ID NO: 5091479 - DNA, 25 bp, Homo sapien
gagatgactttgctgtgcctccatg

SEQ ID NO: 5091480 - DNA, 25 bp, Homo sapien
ctctctgctcctctcggcactaggt

SEQ ID NO: 5091481 - DNA, 25 bp, Homo sapien
actaggtctctctgaccggatcccc

SEQ ID NO: 5091482 - DNA, 25 bp, Homo sapien
tgcaggggtagtgccaaaaaggctt

SEQ ID NO: 5091483 - DNA, 25 bp, Homo sapien
tgaccggatcccctctgacgtcagg

SEQ ID NO: 5091484 - DNA, 25 bp, Homo sapien
tcaggttccaggctccccgaaacag

SEQ ID NO: 5091485 - DNA, 25 bp, Homo sapien
ccaggctccccgaaacagatgcagt

SEQ ID NO: 5091486 - DNA, 25 bp, Homo sapien
aggttccaggctccccgaaacagat

SEQ ID NO: 5091487 - DNA, 25 bp, Homo sapien
gttccaggctccccgaaacagatgc

SEQ ID NO: 5091488 - DNA, 25 bp, Homo sapien
aagaccatttgcaaagggggcctgt

SEQ ID NO: 5091489 - DNA, 25 bp, Homo sapien
gaccatttgcaaagggggcctgtgc

SEQ ID NO: 5091490 - DNA, 25 bp, Homo sapien
aaagaccatttgcaaagggggcctg

SEQ ID NO: 5091491 - DNA, 25 bp, Homo sapien
catttgcaaagggggcctgtgcttt

SEQ ID NO: 5091492 - DNA, 25 bp, Homo sapien
tcaactctgcacttatataaaaatg

SEQ ID NO: 5091493 - DNA, 25 bp, Homo sapien
tctttgcaaggagcaatgttaatca

SEQ ID NO: 5091494 - DNA, 25 bp, Homo sapien
gagcaatgttaatcagaacagcgag

SEQ ID NO: 5091495 - DNA, 25 bp, Homo sapien
agtgtcaactctgcacttatataaa

SEQ ID NO: 5091496 - DNA, 25 bp, Homo sapien
cacacctggcagcattggctttcta

SEQ ID NO: 5091497 - DNA, 25 bp, Homo sapien
tgagaccactgcataattttgcccc

SEQ ID NO: 5091498 - DNA, 25 bp, Homo sapien
gagagtccatcctctaactttgcca

SEQ ID NO: 5091499 - DNA, 25 bp, Homo sapien
gatgcttccggtattgctcccagag

SEQ ID NO: 5091500 - DNA, 25 bp, Homo sapien
gagacagtatgcttgtccagaaaag

SEQ ID NO: 5091501 - DNA, 25 bp, Homo sapien
agatagagacagtatgcttgtccag

SEQ ID NO: 5091502 - DNA, 25 bp, Homo sapien
gattccccattcctgagcaagtttg

SEQ ID NO: 5091503 - DNA, 25 bp, Homo sapien
aagaggccactttaatctcagaaac

SEQ ID NO: 5091504 - DNA, 25 bp, Homo sapien
taccgcatgcgaatctttgcgccta

SEQ ID NO: 5091505 - DNA, 25 bp, Homo sapien
ctaatcatgtcgtcgccaagtcccg

SEQ ID NO: 5091506 - DNA, 25 bp, Homo sapien
gattgtctactgtgggcaggtgttt

SEQ ID NO: 5091507 - DNA, 25 bp, Homo sapien
cggagagcacgccatgaaggcctcg

SEQ ID NO: 5091508 - DNA, 25 bp, Homo sapien
tgtgagtaggataccaaagctctgc

SEQ ID NO: 5091509 - DNA, 25 bp, Homo sapien
ttggcccctgcagttttggcgctgt

SEQ ID NO: 5091510 - DNA, 25 bp, Homo sapien
cagataagggaactcatacagaggg

SEQ ID NO: 5091511 - DNA, 25 bp, Homo sapien
tctggaagctgcagtcatgggaact

SEQ ID NO: 5091512 - DNA, 25 bp, Homo sapien
ttgattggtcggattgaagataaaa

SEQ ID NO: 5091513 - DNA, 25 bp, Homo sapien
gtgttgattggtcggattgaagata

SEQ ID NO: 5091514 - DNA, 25 bp, Homo sapien
gagtgttgattggtcggattgaaga

SEQ ID NO: 5091515 - DNA, 25 bp, Homo sapien
gttgattggtcggattgaagataaa

SEQ ID NO: 5091516 - DNA, 25 bp, Homo sapien
aagctgtcttttgtgcggaagattt

SEQ ID NO: 5091517 - DNA, 25 bp, Homo sapien
gatggctgttcagagggcctgcaaa

SEQ ID NO: 5091518 - DNA, 25 bp, Homo sapien
tgtcttttgtgcggaagatttgcat

SEQ ID NO: 5091519 - DNA, 25 bp, Homo sapien
ttgacatgttttgagatggctgttc

SEQ ID NO: 5091520 - DNA, 25 bp, Homo sapien
gaatcccttctgctcagagtatttg

SEQ ID NO: 5091521 - DNA, 25 bp, Homo sapien
agaggcccgaaggaacttcatggtc

SEQ ID NO: 5091522 - DNA, 25 bp, Homo sapien
tcatggtcaccaggtagaatccctt

SEQ ID NO: 5091523 - DNA, 25 bp, Homo sapien
cactcggattgataatgatgctctc

SEQ ID NO: 5091524 - DNA, 25 bp, Homo sapien
tgcacacaagaattttgtatctttc

SEQ ID NO: 5091525 - DNA, 25 bp, Homo sapien
ctgcacacaagaattttgtatcttt

SEQ ID NO: 5091526 - DNA, 25 bp, Homo sapien
gaatcacagccgatgacttgaaggg

SEQ ID NO: 5091527 - DNA, 25 bp, Homo sapien
gaaagcaatgaagatcgagccacca

SEQ ID NO: 5091528 - DNA, 25 bp, Homo sapien
gagcagaggtctgttcccagccaat

SEQ ID NO: 5091529 - DNA, 25 bp, Homo sapien
tgggattcagcgagagaacaagagc

SEQ ID NO: 5091530 - DNA, 25 bp, Homo sapien
tctaaaattatacatgagcccgctg

SEQ ID NO: 5091531 - DNA, 25 bp, Homo sapien
ttggaacatttcactgcagagcagc

SEQ ID NO: 5091532 - DNA, 25 bp, Homo sapien
cccgctgaaggagaaaattggccac

SEQ ID NO: 5091533 - DNA, 25 bp, Homo sapien
tggtcacccgtcagaatcctttgag

SEQ ID NO: 5091534 - DNA, 25 bp, Homo sapien
catagtgactactgagggatgccgg

SEQ ID NO: 5091535 - DNA, 25 bp, Homo sapien
cgtttagagccagcgacatatcttc

SEQ ID NO: 5091536 - DNA, 25 bp, Homo sapien
cctcttaagtccagtcgtttagagc

SEQ ID NO: 5091537 - DNA, 25 bp, Homo sapien
tggatagaggtcagcagcatagtga

SEQ ID NO: 5091538 - DNA, 25 bp, Homo sapien
ttaagaagataaacattatgaatga

SEQ ID NO: 5091539 - DNA, 25 bp, Homo sapien
ttgtagtatagtggtgatgcatcta

SEQ ID NO: 5091540 - DNA, 25 bp, Homo sapien
taatggctcagttgtagtatagtgg

SEQ ID NO: 5091541 - DNA, 25 bp, Homo sapien
tcttgaacatctacagaaagaattg

SEQ ID NO: 5091542 - DNA, 25 bp, Homo sapien
tgggagtctgacacgggaggatggc

SEQ ID NO: 5091543 - DNA, 25 bp, Homo sapien
tcagttaggaactaacaggaactgg

SEQ ID NO: 5091544 - DNA, 25 bp, Homo sapien
taagggttatacgtaaatccagctg

SEQ ID NO: 5091545 - DNA, 25 bp, Homo sapien
tctaactaccatgtggcagcacagt

SEQ ID NO: 5091546 - DNA, 25 bp, Homo sapien
cgtgttatacgtgtccagaagagca

SEQ ID NO: 5091547 - DNA, 25 bp, Homo sapien
aggaaaagtcctaaagatagtcaag

SEQ ID NO: 5091548 - DNA, 25 bp, Homo sapien
ggaaaagtcctaaagatagtcaaga

SEQ ID NO: 5091549 - DNA, 25 bp, Homo sapien
cagattccatgggtaggaggagttt

SEQ ID NO: 5091550 - DNA, 25 bp, Homo sapien
actgctggcagattccatgggtagg

SEQ ID NO: 5091551 - DNA, 25 bp, Homo sapien
cacatggcaggtatccaaaactggt

SEQ ID NO: 5091552 - DNA, 25 bp, Homo sapien
gattgactgagtgatggcaacgaga

SEQ ID NO: 5091553 - DNA, 25 bp, Homo sapien
tcaagtctgccagcaaacggtttgc

SEQ ID NO: 5091554 - DNA, 25 bp, Homo sapien
tattgccattgaacgtctttgacca

SEQ ID NO: 5091555 - DNA, 25 bp, Homo sapien
ggcaaggcccaaccgttctgtcgga

SEQ ID NO: 5091556 - DNA, 25 bp, Homo sapien
taaaagcaccgcatctaccgcgcgg

SEQ ID NO: 5091557 - DNA, 25 bp, Homo sapien
caaccgttctgtcggacggagctcc

SEQ ID NO: 5091558 - DNA, 25 bp, Homo sapien
tgtcggacggagctcctaaaagcac

SEQ ID NO: 5091559 - DNA, 25 bp, Homo sapien
gccttgttggcatcactcagcgccg

SEQ ID NO: 5091560 - DNA, 25 bp, Homo sapien
tggcatcactcagcgccggagactt

SEQ ID NO: 5091561 - DNA, 25 bp, Homo sapien
tgtacagggtgctctgtcgcgacat

SEQ ID NO: 5091562 - DNA, 25 bp, Homo sapien
ccgttgaggttcttcgccttgggcg

SEQ ID NO: 5091563 - DNA, 25 bp, Homo sapien
atgtcgccagctgcccggataaaaa

SEQ ID NO: 5091564 - DNA, 25 bp, Homo sapien
cagctgcccggataaaaagccctaa

SEQ ID NO: 5091565 - DNA, 25 bp, Homo sapien
cttttcaaaatgtcgccagctgccc

SEQ ID NO: 5091566 - DNA, 25 bp, Homo sapien
aaaatgtcgccagctgcccggataa

SEQ ID NO: 5091567 - DNA, 25 bp, Homo sapien
tggcattaatattgaagcacagaaa

SEQ ID NO: 5091568 - DNA, 25 bp, Homo sapien
aataaacaattccaagtcttctggc

SEQ ID NO: 5091569 - DNA, 25 bp, Homo sapien
aggcagttacctacaaataaacaat

SEQ ID NO: 5091570 - DNA, 25 bp, Homo sapien
tctggcattaatattgaagcacaga

SEQ ID NO: 5091571 - DNA, 25 bp, Homo sapien
agccttttgctaacccagccccttg

SEQ ID NO: 5091572 - DNA, 25 bp, Homo sapien
gatttccctttctcgcggatgaatg

SEQ ID NO: 5091573 - DNA, 25 bp, Homo sapien
aaactgtacatgaacacggactgat

SEQ ID NO: 5091574 - DNA, 25 bp, Homo sapien
ccttgttgggctgtcatcaaaaaac

SEQ ID NO: 5091575 - DNA, 25 bp, Homo sapien
ctgccaattcaagcctcttaatctt

SEQ ID NO: 5091576 - DNA, 25 bp, Homo sapien
atctgcacgttgcattgctctcagt

SEQ ID NO: 5091577 - DNA, 25 bp, Homo sapien
gccaattcaagcctcttaatcttgt

SEQ ID NO: 5091578 - DNA, 25 bp, Homo sapien
gcacgttgcattgctctcagtattt

SEQ ID NO: 5091579 - DNA, 25 bp, Homo sapien
tacgcccaagctacaatattcggtg

SEQ ID NO: 5091580 - DNA, 25 bp, Homo sapien
tctgagataggttaggctacgccca

SEQ ID NO: 5091581 - DNA, 25 bp, Homo sapien
gactttataatggtacccgtgcagc

SEQ ID NO: 5091582 - DNA, 25 bp, Homo sapien
aatagttctcctgcaaacgtggtgg

SEQ ID NO: 5091583 - DNA, 25 bp, Homo sapien
cttcactcttatctgttacgtaagt

SEQ ID NO: 5091584 - DNA, 25 bp, Homo sapien
ctagatccttgtgtcttaggctgta

SEQ ID NO: 5091585 - DNA, 25 bp, Homo sapien
tatctgttacgtaagttgtgcctac

SEQ ID NO: 5091586 - DNA, 25 bp, Homo sapien
ccttgtgtcttaggctgtacttcct

SEQ ID NO: 5091587 - DNA, 25 bp, Homo sapien
tttcatgataccaaacagtagggcg

SEQ ID NO: 5091588 - DNA, 25 bp, Homo sapien
cactaacgtgggcttgggattcaga

SEQ ID NO: 5091589 - DNA, 25 bp, Homo sapien
ccaaaactgggagccgggtatcaga

SEQ ID NO: 5091590 - DNA, 25 bp, Homo sapien
gaagtcatacctttaagcacctggg

SEQ ID NO: 5091591 - DNA, 25 bp, Homo sapien
tgtcaggcacaaccatgaggtcttc

SEQ ID NO: 5091592 - DNA, 25 bp, Homo sapien
caacttcggagattttgtcaggcac

SEQ ID NO: 5091593 - DNA, 25 bp, Homo sapien
caaaggctgtatcccatcggttcaa

SEQ ID NO: 5091594 - DNA, 25 bp, Homo sapien
agttatagaacagtcgccgcatgca

SEQ ID NO: 5091595 - DNA, 25 bp, Homo sapien
agaacaagcttgttcaaagtcttac

SEQ ID NO: 5091596 - DNA, 25 bp, Homo sapien
gagaacaagcttgttcaaagtctta

SEQ ID NO: 5091597 - DNA, 25 bp, Homo sapien
tatacagctggcaaacagcactact

SEQ ID NO: 5091598 - DNA, 25 bp, Homo sapien
tttttagggataatatacagctggc

SEQ ID NO: 5091599 - DNA, 25 bp, Homo sapien
gtaacttaaattgctgtgggcagcc

SEQ ID NO: 5091600 - DNA, 25 bp, Homo sapien
gcctagtcaggatgcaaatatgtat

SEQ ID NO: 5091601 - DNA, 25 bp, Homo sapien
cctaagaggctgacacgagaggtct

SEQ ID NO: 5091602 - DNA, 25 bp, Homo sapien
caatggttccaggtaatgttggccg

SEQ ID NO: 5091603 - DNA, 25 bp, Homo sapien
ggcacgccggtgcttacctgtaaat

SEQ ID NO: 5091604 - DNA, 25 bp, Homo sapien
tgtaaatcctagctacctaagaggc

SEQ ID NO: 5091605 - DNA, 25 bp, Homo sapien
gcctcttacttagcagaatgtgcca

SEQ ID NO: 5091606 - DNA, 25 bp, Homo sapien
gttccattagatacttgcgttcaga

SEQ ID NO: 5091607 - DNA, 25 bp, Homo sapien
tatgaaaacaatctctgaagactgg

SEQ ID NO: 5091608 - DNA, 25 bp, Homo sapien
gcctaatacacgtggcatatgcctg

SEQ ID NO: 5091609 - DNA, 25 bp, Homo sapien
gcaacagaattactgggcgacacat

SEQ ID NO: 5091610 - DNA, 25 bp, Homo sapien
ccctcgactatagttagccaggcac

SEQ ID NO: 5091611 - DNA, 25 bp, Homo sapien
ggtatcttccggcaacagaattact

SEQ ID NO: 5091612 - DNA, 25 bp, Homo sapien
gaattactgggcgacacataggacc

SEQ ID NO: 5091613 - DNA, 25 bp, Homo sapien
tcgtaatgcaaggatggcgtgatcc

SEQ ID NO: 5091614 - DNA, 25 bp, Homo sapien
aaaaaagtcttcgtaatgcaaggat

SEQ ID NO: 5091615 - DNA, 25 bp, Homo sapien
caaggatggcgtgatcctttaagct

SEQ ID NO: 5091616 - DNA, 25 bp, Homo sapien
aagtcttcgtaatgcaaggatggcg

SEQ ID NO: 5091617 - DNA, 25 bp, Homo sapien
gtccagtaacaagcacacaataggc

SEQ ID NO: 5091618 - DNA, 25 bp, Homo sapien
acaataggctttgccattttcctgc

SEQ ID NO: 5091619 - DNA, 25 bp, Homo sapien
gacttgccccccatatttggtccag

SEQ ID NO: 5091620 - DNA, 25 bp, Homo sapien
tgtctcataagcgtagacttgcccc

SEQ ID NO: 5091621 - DNA, 25 bp, Homo sapien
tctctctagcaaactaggtgaacag

SEQ ID NO: 5091622 - DNA, 25 bp, Homo sapien
caacccctggttataaagagaagat

SEQ ID NO: 5091623 - DNA, 25 bp, Homo sapien
tcaacagttgctagaggtcatgaac

SEQ ID NO: 5091624 - DNA, 25 bp, Homo sapien
ccagcatgtcatccctaaagagcag

SEQ ID NO: 5091625 - DNA, 25 bp, Homo sapien
tctgaggcaccaagtctagtaaaca

SEQ ID NO: 5091626 - DNA, 25 bp, Homo sapien
ctagtaaacactctatcaattggtg

SEQ ID NO: 5091627 - DNA, 25 bp, Homo sapien
gggacgtaacaacccatctgggcca

SEQ ID NO: 5091628 - DNA, 25 bp, Homo sapien
caattggtgtgagcctgcacacttc

SEQ ID NO: 5091629 - DNA, 25 bp, Homo sapien
gaatgtgctgttgcatgcatgagta

SEQ ID NO: 5091630 - DNA, 25 bp, Homo sapien
attcatccacaagcaccagagaatg

SEQ ID NO: 5091631 - DNA, 25 bp, Homo sapien
tgcatgagtatgctggcagtttcac

SEQ ID NO: 5091632 - DNA, 25 bp, Homo sapien
tccacaagcaccagagaatgtgctg

SEQ ID NO: 5091633 - DNA, 25 bp, Homo sapien
gtcctaggcgcacagcaacattttg

SEQ ID NO: 5091634 - DNA, 25 bp, Homo sapien
tgcatttgctattgccgtcccatca

SEQ ID NO: 5091635 - DNA, 25 bp, Homo sapien
gaataatcttctactaatgaatggt

SEQ ID NO: 5091636 - DNA, 25 bp, Homo sapien
ccatcaaatgttgcagtacctcttc

SEQ ID NO: 5091637 - DNA, 25 bp, Homo sapien
gccttgctgcattaaagccatagct

SEQ ID NO: 5091638 - DNA, 25 bp, Homo sapien
ggaacgtaatagtctcctggctggg

SEQ ID NO: 5091639 - DNA, 25 bp, Homo sapien
cttttaggacaagctcccttaatga

SEQ ID NO: 5091640 - DNA, 25 bp, Homo sapien
ctgggagattagcaagccttgctgc

SEQ ID NO: 5091641 - DNA, 25 bp, Homo sapien
cagcttcagcatctacagttgacct

SEQ ID NO: 5091642 - DNA, 25 bp, Homo sapien
tgacctttcactagccaggcaaact

SEQ ID NO: 5091643 - DNA, 25 bp, Homo sapien
ctataattccttaatcaaagtcagc

SEQ ID NO: 5091644 - DNA, 25 bp, Homo sapien
gtcagcaatttatggacagcttcag

SEQ ID NO: 5091645 - DNA, 25 bp, Homo sapien
gtttattagatcataatgttgtctg

SEQ ID NO: 5091646 - DNA, 25 bp, Homo sapien
tattagatcataatgttgtctgaat

SEQ ID NO: 5091647 - DNA, 25 bp, Homo sapien
gtcagaagtcaactcaaagcttcca

SEQ ID NO: 5091648 - DNA, 25 bp, Homo sapien
aactcaaagcttccaatgtagtcag

SEQ ID NO: 5091649 - DNA, 25 bp, Homo sapien
tcttactgtacttgaatgtgccctg

SEQ ID NO: 5091650 - DNA, 25 bp, Homo sapien
tcctaggaagggatgcactgtaaaa

SEQ ID NO: 5091651 - DNA, 25 bp, Homo sapien
cagcctgaaagtgtatgcatgtacc

SEQ ID NO: 5091652 - DNA, 25 bp, Homo sapien
ggtgacagtgggtataaaacagcct

SEQ ID NO: 5091653 - DNA, 25 bp, Homo sapien
tagtaatcttcaatagacaagcagc

SEQ ID NO: 5091654 - DNA, 25 bp, Homo sapien
tggacatgggtaccaattgcttttg

SEQ ID NO: 5091655 - DNA, 25 bp, Homo sapien
gctgcaattttgtacagataccaac

SEQ ID NO: 5091656 - DNA, 25 bp, Homo sapien
taaaaatgtgagctagcacttctgc

SEQ ID NO: 5091657 - DNA, 25 bp, Homo sapien
actgcattaagaagtgccatcaggg

SEQ ID NO: 5091658 - DNA, 25 bp, Homo sapien
tcgaaatgccatatgtgtgaactgc

SEQ ID NO: 5091659 - DNA, 25 bp, Homo sapien
ttgtaacaccacagatcgaaatgcc

SEQ ID NO: 5091660 - DNA, 25 bp, Homo sapien
gtacattagctggtgagcctacaca

SEQ ID NO: 5091661 - DNA, 25 bp, Homo sapien
tcacgcaactgcaacactagaaggc

SEQ ID NO: 5091662 - DNA, 25 bp, Homo sapien
cgaaagttaattgcagttttgacca

SEQ ID NO: 5091663 - DNA, 25 bp, Homo sapien
aatgcaggcttgtattaccactagg

SEQ ID NO: 5091664 - DNA, 25 bp, Homo sapien
taagacagttaggttggtgcgaaag

SEQ ID NO: 5091665 - DNA, 25 bp, Homo sapien
gtaaacttagacatggaccctgcta

SEQ ID NO: 5091666 - DNA, 25 bp, Homo sapien
gaatatttgatggatttgccgcagg

SEQ ID NO: 5091667 - DNA, 25 bp, Homo sapien
ttgagaatcacctatgcacctggct

SEQ ID NO: 5091668 - DNA, 25 bp, Homo sapien
aatgctcaagcaggtgttctcatca

SEQ ID NO: 5091669 - DNA, 25 bp, Homo sapien
cattagcaggaattcaaattaggac

SEQ ID NO: 5091670 - DNA, 25 bp, Homo sapien
gctcggctccacaactatagcatag

SEQ ID NO: 5091671 - DNA, 25 bp, Homo sapien
tagctatactatactgcctgcagct

SEQ ID NO: 5091672 - DNA, 25 bp, Homo sapien
aattcctgggattcaaaatgtggca

SEQ ID NO: 5091673 - DNA, 25 bp, Homo sapien
ccggcccacaccttacatttaagag

SEQ ID NO: 5091674 - DNA, 25 bp, Homo sapien
gtgcccggcccacaccttacattta

SEQ ID NO: 5091675 - DNA, 25 bp, Homo sapien
tgcccggcccacaccttacatttaa

SEQ ID NO: 5091676 - DNA, 25 bp, Homo sapien
gcccacaccttacatttaagagaaa

SEQ ID NO: 5091677 - DNA, 25 bp, Homo sapien
tagctagtctatgctttctgactcc

SEQ ID NO: 5091678 - DNA, 25 bp, Homo sapien
aacccaaatgactcactaatgcttg

SEQ ID NO: 5091679 - DNA, 25 bp, Homo sapien
aatagtccactttacatcatatggc

SEQ ID NO: 5091680 - DNA, 25 bp, Homo sapien
tcaaaaattgaatggcacgtctacc

SEQ ID NO: 5091681 - DNA, 25 bp, Homo sapien
ctgacctctgtggacttttattcat

SEQ ID NO: 5091682 - DNA, 25 bp, Homo sapien
catacgaattagaagataaacgcga

SEQ ID NO: 5091683 - DNA, 25 bp, Homo sapien
tagcactctagacctaagttgtcca

SEQ ID NO: 5091684 - DNA, 25 bp, Homo sapien
aattactcttacttcacggtggctg

SEQ ID NO: 5091685 - DNA, 25 bp, Homo sapien
taaacgcgaagataaatagcactct

SEQ ID NO: 5091686 - DNA, 25 bp, Homo sapien
gaaataaagagatgagttagattag

SEQ ID NO: 5091687 - DNA, 25 bp, Homo sapien
gttgagtgaaataaagagatgagtt

SEQ ID NO: 5091688 - DNA, 25 bp, Homo sapien
aataaagagatgagttagattaggg

SEQ ID NO: 5091689 - DNA, 25 bp, Homo sapien
gaggttgagtgaaataaagagatga

SEQ ID NO: 5091690 - DNA, 25 bp, Homo sapien
tccagacgaatttcttccttatcct

SEQ ID NO: 5091691 - DNA, 25 bp, Homo sapien
ttgccgatccagacgaatttcttcc

SEQ ID NO: 5091692 - DNA, 25 bp, Homo sapien
tgtagttagataaagtacgttcatc

SEQ ID NO: 5091693 - DNA, 25 bp, Homo sapien
caaacatcagtgtttgccgatccag

SEQ ID NO: 5091694 - DNA, 25 bp, Homo sapien
cttgggagttgtataagaattcttc

SEQ ID NO: 5091695 - DNA, 25 bp, Homo sapien
tgggagttgtataagaattcttcct

SEQ ID NO: 5091696 - DNA, 25 bp, Homo sapien
ttgggagttgtataagaattcttcc

SEQ ID NO: 5091697 - DNA, 25 bp, Homo sapien
atctgaagggcactcccgactaagg

SEQ ID NO: 5091698 - DNA, 25 bp, Homo sapien
tgaagggcactcccgactaaggcga

SEQ ID NO: 5091699 - DNA, 25 bp, Homo sapien
catctgaagggcactcccgactaag

SEQ ID NO: 5091700 - DNA, 25 bp, Homo sapien
tctgaagggcactcccgactaaggc

SEQ ID NO: 5091701 - DNA, 25 bp, Homo sapien
tgtccctccaagcccgctaatgggt

SEQ ID NO: 5091702 - DNA, 25 bp, Homo sapien
tgttattcagtcttaaggaattctg

SEQ ID NO: 5091703 - DNA, 25 bp, Homo sapien
ttgaagaaatactagcactcccatg

SEQ ID NO: 5091704 - DNA, 25 bp, Homo sapien
tgaagatacgtagaaattgaacccc

SEQ ID NO: 5091705 - DNA, 25 bp, Homo sapien
gcaaaatggtgtaactattatggaa

SEQ ID NO: 5091706 - DNA, 25 bp, Homo sapien
caaacgtagttcttgcccttgtgga

SEQ ID NO: 5091707 - DNA, 25 bp, Homo sapien
actgaacattatccctaaatttggg

SEQ ID NO: 5091708 - DNA, 25 bp, Homo sapien
aaattctgtatcatttgggttgcca

SEQ ID NO: 5091709 - DNA, 25 bp, Homo sapien
taggttatcaccatgcaaacgtagt

SEQ ID NO: 5091710 - DNA, 25 bp, Homo sapien
tgaaaagtaggagtctttccagact

SEQ ID NO: 5091711 - DNA, 25 bp, Homo sapien
gcaaagtgttcttatggtaaaggaa

SEQ ID NO: 5091712 - DNA, 25 bp, Homo sapien
gaaatagaagttggagtaaggcact

SEQ ID NO: 5091713 - DNA, 25 bp, Homo sapien
ggtcagcaatacataaaagtagcca

SEQ ID NO: 5091714 - DNA, 25 bp, Homo sapien
aaatgaactccgtccgagccgccaa

SEQ ID NO: 5091715 - DNA, 25 bp, Homo sapien
cccgaagctcgctgtgcgtgtgcgt

SEQ ID NO: 5091716 - DNA, 25 bp, Homo sapien
ctgccccgaagctcgctgtgcgtgt

SEQ ID NO: 5091717 - DNA, 25 bp, Homo sapien
acctcagcccggcaaatgaactccg

SEQ ID NO: 5091718 - DNA, 25 bp, Homo sapien
gcggcttcggccttccccgtgcgtc

SEQ ID NO: 5091719 - DNA, 25 bp, Homo sapien
tttctgccttcgtccctcgcggccg

SEQ ID NO: 5091720 - DNA, 25 bp, Homo sapien
gcccgtctttctgccttcgtccctc

SEQ ID NO: 5091721 - DNA, 25 bp, Homo sapien
ggccttccccgtgcgtcaggccctc

SEQ ID NO: 5091722 - DNA, 25 bp, Homo sapien
agctgaaacggcgaaccgaaggatt

SEQ ID NO: 5091723 - DNA, 25 bp, Homo sapien
tcacttctccccattacatcagcaa

SEQ ID NO: 5091724 - DNA, 25 bp, Homo sapien
cagctcaaaaaaatcgggtgaaggt

SEQ ID NO: 5091725 - DNA, 25 bp, Homo sapien
caaagattggctccctcgttccact

SEQ ID NO: 5091726 - DNA, 25 bp, Homo sapien
gatgatatacgattaggcaccgact

SEQ ID NO: 5091727 - DNA, 25 bp, Homo sapien
caaagctcggagacggaaatcttca

SEQ ID NO: 5091728 - DNA, 25 bp, Homo sapien
taaagggcacgaaatctctagcgct

SEQ ID NO: 5091729 - DNA, 25 bp, Homo sapien
ggtttgcaaataccctcagcttggc

SEQ ID NO: 5091730 - DNA, 25 bp, Homo sapien
tgtcaaacctagagagcaactgatg

SEQ ID NO: 5091731 - DNA, 25 bp, Homo sapien
tattaatgcatacacggaaggagcc

SEQ ID NO: 5091732 - DNA, 25 bp, Homo sapien
caagtctgggactcaacacacaggc

SEQ ID NO: 5091733 - DNA, 25 bp, Homo sapien
gagaatacattttcagccgcaaggc

SEQ ID NO: 5091734 - DNA, 25 bp, Homo sapien
aggaagattggagcttctcaccaga

SEQ ID NO: 5091735 - DNA, 25 bp, Homo sapien
gaggaagattggagcttctcaccag

SEQ ID NO: 5091736 - DNA, 25 bp, Homo sapien
ttccaggtatcaggatgaggttggc

SEQ ID NO: 5091737 - DNA, 25 bp, Homo sapien
aggatgaggttggcctgccagaccc

SEQ ID NO: 5091738 - DNA, 25 bp, Homo sapien
tcaggatgaggttggcctgccagac

SEQ ID NO: 5091739 - DNA, 25 bp, Homo sapien
ctttccaggtatcaggatgaggttg

SEQ ID NO: 5091740 - DNA, 25 bp, Homo sapien
agctcagggtccacaacgtagagat

SEQ ID NO: 5091741 - DNA, 25 bp, Homo sapien
tcagggtccacaacgtagagattag

SEQ ID NO: 5091742 - DNA, 25 bp, Homo sapien
gggtccacaacgtagagattaggat

SEQ ID NO: 5091743 - DNA, 25 bp, Homo sapien
cagggtccacaacgtagagattagg

SEQ ID NO: 5091744 - DNA, 25 bp, Homo sapien
atggcaacatgtggtcttggaaagg

SEQ ID NO: 5091745 - DNA, 25 bp, Homo sapien
gcaacatgtggtcttggaaaggtaa

SEQ ID NO: 5091746 - DNA, 25 bp, Homo sapien
tggcaacatgtggtcttggaaaggt

SEQ ID NO: 5091747 - DNA, 25 bp, Homo sapien
ggcaacatgtggtcttggaaaggta

SEQ ID NO: 5091748 - DNA, 25 bp, Homo sapien
caagaataagatttctgagcaaaca

SEQ ID NO: 5091749 - DNA, 25 bp, Homo sapien
tggtcaatggcaagtccttgggctg

SEQ ID NO: 5091750 - DNA, 25 bp, Homo sapien
ggcaccagccaactgagttctttga

SEQ ID NO: 5091751 - DNA, 25 bp, Homo sapien
gagttgtgagtgctttgcagatgct

SEQ ID NO: 5091752 - DNA, 25 bp, Homo sapien
tcagcaaggataacgttggggtaag

SEQ ID NO: 5091753 - DNA, 25 bp, Homo sapien
tttctcagcaaggataacgttgggg

SEQ ID NO: 5091754 - DNA, 25 bp, Homo sapien
cttcttccaacaggataaattggtt

SEQ ID NO: 5091755 - DNA, 25 bp, Homo sapien
tctcagcaaggataacgttggggta

SEQ ID NO: 5091756 - DNA, 25 bp, Homo sapien
aattctggaaagaagtcatttgtag

SEQ ID NO: 5091757 - DNA, 25 bp, Homo sapien
ttctggaaagaagtcatttgtagct

SEQ ID NO: 5091758 - DNA, 25 bp, Homo sapien
ttccaattctggaaagaagtcattt

SEQ ID NO: 5091759 - DNA, 25 bp, Homo sapien
tgagcaggtgtttgtagttctcttt

SEQ ID NO: 5091760 - DNA, 25 bp, Homo sapien
ttgcataacgtgttaagaagggatc

SEQ ID NO: 5091761 - DNA, 25 bp, Homo sapien
ttttgcataacgtgttaagaaggga

SEQ ID NO: 5091762 - DNA, 25 bp, Homo sapien
gcataacgtgttaagaagggatcca

SEQ ID NO: 5091763 - DNA, 25 bp, Homo sapien
aatttttgcataacgtgttaagaag

SEQ ID NO: 5091764 - DNA, 25 bp, Homo sapien
tcacagagggctatggatttttgct

SEQ ID NO: 5091765 - DNA, 25 bp, Homo sapien
ggacacgatgtgaaaggcaagcttt

SEQ ID NO: 5091766 - DNA, 25 bp, Homo sapien
aagcaatgagctttcccggaaggtg

SEQ ID NO: 5091767 - DNA, 25 bp, Homo sapien
tgctggtcgtaaatcgagctgttga

SEQ ID NO: 5091768 - DNA, 25 bp, Homo sapien
ataaggagttgactacaatcaggtg

SEQ ID NO: 5091769 - DNA, 25 bp, Homo sapien
gatccttcctattgccagatctttg

SEQ ID NO: 5091770 - DNA, 25 bp, Homo sapien
tttccaccccaaaactgctattatc

SEQ ID NO: 5091771 - DNA, 25 bp, Homo sapien
ctgctattatctgccaaactcttcc

SEQ ID NO: 5091772 - DNA, 25 bp, Homo sapien
ttgccttgggcttgtctattccttc

SEQ ID NO: 5091773 - DNA, 25 bp, Homo sapien
ggaggctcaccttaactcctctcat

SEQ ID NO: 5091774 - DNA, 25 bp, Homo sapien
tgggcttgtctattccttctgcatg

SEQ ID NO: 5091775 - DNA, 25 bp, Homo sapien
gaatccctggcagctaggaggctca

SEQ ID NO: 5091776 - DNA, 25 bp, Homo sapien
tagtttataagcttggctcagggct

SEQ ID NO: 5091777 - DNA, 25 bp, Homo sapien
aattgagcctgcatcggtagcacag

SEQ ID NO: 5091778 - DNA, 25 bp, Homo sapien
ggtataacctgtctccatgtacaag

SEQ ID NO: 5091779 - DNA, 25 bp, Homo sapien
ggcctgacccatgctctgtaggaag

SEQ ID NO: 5091780 - DNA, 25 bp, Homo sapien
caccccatattccctggagttaaag

SEQ ID NO: 5091781 - DNA, 25 bp, Homo sapien
atcaccaccattgctacaatatcag

SEQ ID NO: 5091782 - DNA, 25 bp, Homo sapien
tgtgcagcggccagtacatcaccac

SEQ ID NO: 5091783 - DNA, 25 bp, Homo sapien
gtgcatagcctccctgtgcagcggc

SEQ ID NO: 5091784 - DNA, 25 bp, Homo sapien
gatttggttctattgagtcctcatc

SEQ ID NO: 5091785 - DNA, 25 bp, Homo sapien
attgagtcctcatctactctttggg

SEQ ID NO: 5091786 - DNA, 25 bp, Homo sapien
ggcttcaatgcccatcaaatacata

SEQ ID NO: 5091787 - DNA, 25 bp, Homo sapien
acatgggccactgaatcagttgtct

SEQ ID NO: 5091788 - DNA, 25 bp, Homo sapien
gacaccagtgttgtactgttatcac

SEQ ID NO: 5091789 - DNA, 25 bp, Homo sapien
gacagtccactttcatactccaaga

SEQ ID NO: 5091790 - DNA, 25 bp, Homo sapien
tatcactgccaagtgaaagcacctt

SEQ ID NO: 5091791 - DNA, 25 bp, Homo sapien
cactgcatttggaacaaaagttgca

SEQ ID NO: 5091792 - DNA, 25 bp, Homo sapien
ccacggccagcagtccagtgccggc

SEQ ID NO: 5091793 - DNA, 25 bp, Homo sapien
ggccagcagtccagtgccggcctta

SEQ ID NO: 5091794 - DNA, 25 bp, Homo sapien
cagcagtccagtgccggccttatgc

SEQ ID NO: 5091795 - DNA, 25 bp, Homo sapien
cttgcccccacggccagcagtccag

SEQ ID NO: 5091796 - DNA, 25 bp, Homo sapien
ttagaactgcaagagacaccacact

SEQ ID NO: 5091797 - DNA, 25 bp, Homo sapien
agagacaccacacttgaggaatctg

SEQ ID NO: 5091798 - DNA, 25 bp, Homo sapien
gctttgccttcaattggcacaatta

SEQ ID NO: 5091799 - DNA, 25 bp, Homo sapien
ggccccagaggttccgctgacagtg

SEQ ID NO: 5091800 - DNA, 25 bp, Homo sapien
ctgagggagcaaataggacttttat

SEQ ID NO: 5091801 - DNA, 25 bp, Homo sapien
caaataggacttttatgtgtcctgc

SEQ ID NO: 5091802 - DNA, 25 bp, Homo sapien
taggacttttatgtgtcctgctgaa

SEQ ID NO: 5091803 - DNA, 25 bp, Homo sapien
ggagcaaataggacttttatgtgtc

SEQ ID NO: 5091804 - DNA, 25 bp, Homo sapien
cataagaactatgaatataagtatg

SEQ ID NO: 5091805 - DNA, 25 bp, Homo sapien
ctaccactagcaattccatttccct

SEQ ID NO: 5091806 - DNA, 25 bp, Homo sapien
aacaggtctccacattgagtgtaaa

SEQ ID NO: 5091807 - DNA, 25 bp, Homo sapien
aaatgagaataacaggtctccacat

SEQ ID NO: 5091808 - DNA, 25 bp, Homo sapien
cagggcaaggcatccttgtaaatgg

SEQ ID NO: 5091809 - DNA, 25 bp, Homo sapien
ggcatccttgtaaatggtgtcctca

SEQ ID NO: 5091810 - DNA, 25 bp, Homo sapien
attcccagggcaaggcatccttgta

SEQ ID NO: 5091811 - DNA, 25 bp, Homo sapien
catccttgtaaatggtgtcctcatc

SEQ ID NO: 5091812 - DNA, 25 bp, Homo sapien
gtgctcacagttgctttagtgcctt

SEQ ID NO: 5091813 - DNA, 25 bp, Homo sapien
gctcacagttgctttagtgcctttc

SEQ ID NO: 5091814 - DNA, 25 bp, Homo sapien
agtgctcacagttgctttagtgcct

SEQ ID NO: 5091815 - DNA, 25 bp, Homo sapien
tgctcacagttgctttagtgccttt

SEQ ID NO: 5091816 - DNA, 25 bp, Homo sapien
gctgcatgaagctgaagcccatgga

SEQ ID NO: 5091817 - DNA, 25 bp, Homo sapien
aagattccttctttgtgtcggcggg

SEQ ID NO: 5091818 - DNA, 25 bp, Homo sapien
agtccttccggagctggaaaccgag

SEQ ID NO: 5091819 - DNA, 25 bp, Homo sapien
ggaatttctcgggtgcttttgcaca

SEQ ID NO: 5091820 - DNA, 25 bp, Homo sapien
taagcccttggtatacagcatgcac

SEQ ID NO: 5091821 - DNA, 25 bp, Homo sapien
ttcacagggactagcggcaaaggag

SEQ ID NO: 5091822 - DNA, 25 bp, Homo sapien
cactggcattgtagggcaacttggc

SEQ ID NO: 5091823 - DNA, 25 bp, Homo sapien
ggaagactgagcattggcgcacact

SEQ ID NO: 5091824 - DNA, 25 bp, Homo sapien
ccaagagcccatacctattcagatg

SEQ ID NO: 5091825 - DNA, 25 bp, Homo sapien
aagagcccatacctattcagatgct

SEQ ID NO: 5091826 - DNA, 25 bp, Homo sapien
agcccatacctattcagatgctcct

SEQ ID NO: 5091827 - DNA, 25 bp, Homo sapien
atcccaagagcccatacctattcag

SEQ ID NO: 5091828 - DNA, 25 bp, Homo sapien
caccaataagcagccccagtccttt

SEQ ID NO: 5091829 - DNA, 25 bp, Homo sapien
tgaaggattcccataatttttccaa

SEQ ID NO: 5091830 - DNA, 25 bp, Homo sapien
agagccacatgccatgaaggattcc

SEQ ID NO: 5091831 - DNA, 25 bp, Homo sapien
ctgaggcccccggatggaagagcca

SEQ ID NO: 5091832 - DNA, 25 bp, Homo sapien
ttggacatttcctaacagaaacagg

SEQ ID NO: 5091833 - DNA, 25 bp, Homo sapien
tctctgtactacagggccttggaca

SEQ ID NO: 5091834 - DNA, 25 bp, Homo sapien
tatgcacaaggtcagtactaatgat

SEQ ID NO: 5091835 - DNA, 25 bp, Homo sapien
ctttttatggacagcaagcaagcag

SEQ ID NO: 5091836 - DNA, 25 bp, Homo sapien
cagggaagagttggactgccacaag

SEQ ID NO: 5091837 - DNA, 25 bp, Homo sapien
tctgtcacaaagtttggcctcctcc

SEQ ID NO: 5091838 - DNA, 25 bp, Homo sapien
tattgttccatggtgaaggtaggca

SEQ ID NO: 5091839 - DNA, 25 bp, Homo sapien
gagttagaaacagtgcctctctcaa

SEQ ID NO: 5091840 - DNA, 25 bp, Homo sapien
gacacaatggagataatgagcttca

SEQ ID NO: 5091841 - DNA, 25 bp, Homo sapien
tagggtgtggcagacttttgcccgc

SEQ ID NO: 5091842 - DNA, 25 bp, Homo sapien
tgccctgagaataaacgccatggag

SEQ ID NO: 5091843 - DNA, 25 bp, Homo sapien
gaatggaactatcagggcttgtgct

SEQ ID NO: 5091844 - DNA, 25 bp, Homo sapien
ttaccatcttgtagcaggatcttgg

SEQ ID NO: 5091845 - DNA, 25 bp, Homo sapien
cagggaccgatgatggtcaggagcc

SEQ ID NO: 5091846 - DNA, 25 bp, Homo sapien
ccgatgatggtcaggagccagggag

SEQ ID NO: 5091847 - DNA, 25 bp, Homo sapien
tcacctctgaaattaccatcttgta

SEQ ID NO: 5091848 - DNA, 25 bp, Homo sapien
gtggtatagttatgtatctgtgtcc

SEQ ID NO: 5091849 - DNA, 25 bp, Homo sapien
tatcatggcactgacggcactgtgc

SEQ ID NO: 5091850 - DNA, 25 bp, Homo sapien
ggcactgtgctttaattgttgttgg

SEQ ID NO: 5091851 - DNA, 25 bp, Homo sapien
tgttctccaggctctatatgcatcc

SEQ ID NO: 5091852 - DNA, 25 bp, Homo sapien
tcagcaggcagcaaacaagaatgtc

SEQ ID NO: 5091853 - DNA, 25 bp, Homo sapien
aatgtggcccgaatttaaacactgg

SEQ ID NO: 5091854 - DNA, 25 bp, Homo sapien
tagacttacacgaagcacactggag

SEQ ID NO: 5091855 - DNA, 25 bp, Homo sapien
tgttgtactccagcgagcaggctga

SEQ ID NO: 5091856 - DNA, 25 bp, Homo sapien
cattctttttgaccgagcgcgtagc

SEQ ID NO: 5091857 - DNA, 25 bp, Homo sapien
ccgagcgcgtagctttgggagagat

SEQ ID NO: 5091858 - DNA, 25 bp, Homo sapien
tgatggtcattctttttgaccgagc

SEQ ID NO: 5091859 - DNA, 25 bp, Homo sapien
ctttttgaccgagcgcgtagctttg

SEQ ID NO: 5091860 - DNA, 25 bp, Homo sapien
actgctgacttgtgttagggagaaa

SEQ ID NO: 5091861 - DNA, 25 bp, Homo sapien
cagaagacagctactttgctagcat

SEQ ID NO: 5091862 - DNA, 25 bp, Homo sapien
tgctagcatttacccacattgctga

SEQ ID NO: 5091863 - DNA, 25 bp, Homo sapien
gaattttatctaaagcagaagacag

SEQ ID NO: 5091864 - DNA, 25 bp, Homo sapien
cagagtgtttaagaggcaccagcat

SEQ ID NO: 5091865 - DNA, 25 bp, Homo sapien
gtgtttaagaggcaccagcatgctc

SEQ ID NO: 5091866 - DNA, 25 bp, Homo sapien
gagtgtttaagaggcaccagcatgc

SEQ ID NO: 5091867 - DNA, 25 bp, Homo sapien
gccagagtgtttaagaggcaccagc

SEQ ID NO: 5091868 - DNA, 25 bp, Homo sapien
tgtacctcttactttctgctccggg

SEQ ID NO: 5091869 - DNA, 25 bp, Homo sapien
tgtacctgtacctcttactttctgc

SEQ ID NO: 5091870 - DNA, 25 bp, Homo sapien
cttgcactgagcctgtgtacctgta

SEQ ID NO: 5091871 - DNA, 25 bp, Homo sapien
gagcctgtgtacctgtacctcttac

SEQ ID NO: 5091872 - DNA, 25 bp, Homo sapien
gccactgccacagagtccagttcca

SEQ ID NO: 5091873 - DNA, 25 bp, Homo sapien
cactgccacagagtccagttccaca

SEQ ID NO: 5091874 - DNA, 25 bp, Homo sapien
ccactgccacagagtccagttccac

SEQ ID NO: 5091875 - DNA, 25 bp, Homo sapien
actgccacagagtccagttccacag

SEQ ID NO: 5091876 - DNA, 25 bp, Homo sapien
atctttattgtccatgcacgggttt

SEQ ID NO: 5091877 - DNA, 25 bp, Homo sapien
attgtccatgcacgggttttcacta

SEQ ID NO: 5091878 - DNA, 25 bp, Homo sapien
tttattgtccatgcacgggttttca

SEQ ID NO: 5091879 - DNA, 25 bp, Homo sapien
tattgtccatgcacgggttttcact

SEQ ID NO: 5091880 - DNA, 25 bp, Homo sapien
ggatactcggcacttcttccgcatg

SEQ ID NO: 5091881 - DNA, 25 bp, Homo sapien
aatgcagtggcgatgccttgcggac

SEQ ID NO: 5091882 - DNA, 25 bp, Homo sapien
catgttactgcaagtggaacccagg

SEQ ID NO: 5091883 - DNA, 25 bp, Homo sapien
cccaggtggctccagtagtagtcgt

SEQ ID NO: 5091884 - DNA, 25 bp, Homo sapien
tgacaaatgatggaggttccgtaac

SEQ ID NO: 5091885 - DNA, 25 bp, Homo sapien
cataacatgataaggtgatagagca

SEQ ID NO: 5091886 - DNA, 25 bp, Homo sapien
ccgtaacttgcttgacataacatga

SEQ ID NO: 5091887 - DNA, 25 bp, Homo sapien
tagagcagagattcaagtatagttc

SEQ ID NO: 5091888 - DNA, 25 bp, Homo sapien
tatcggttctcaacctcagctggac

SEQ ID NO: 5091889 - DNA, 25 bp, Homo sapien
aatttagaagctctgggatgcaccc

SEQ ID NO: 5091890 - DNA, 25 bp, Homo sapien
ttccctggcaacaaccacgctgatg

SEQ ID NO: 5091891 - DNA, 25 bp, Homo sapien
tcacgaatggagtaatggcaagagc

SEQ ID NO: 5091892 - DNA, 25 bp, Homo sapien
gcgactggccgactttattttctta

SEQ ID NO: 5091893 - DNA, 25 bp, Homo sapien
ctgcgactggccgactttattttct

SEQ ID NO: 5091894 - DNA, 25 bp, Homo sapien
atactgcatttcgcattcttttaaa

SEQ ID NO: 5091895 - DNA, 25 bp, Homo sapien
ttttcttataagcaaatactgcatt

SEQ ID NO: 5091896 - DNA, 25 bp, Homo sapien
cacgttatgtgggtttccgcaagac

SEQ ID NO: 5091897 - DNA, 25 bp, Homo sapien
tagctttgccacacgaaatacagga

SEQ ID NO: 5091898 - DNA, 25 bp, Homo sapien
cataggatttacagaagctaaggac

SEQ ID NO: 5091899 - DNA, 25 bp, Homo sapien
caagtcactgtgtttgcagtaggga

SEQ ID NO: 5091900 - DNA, 25 bp, Homo sapien
agagcaccgcagctgttccctgcag

SEQ ID NO: 5091901 - DNA, 25 bp, Homo sapien
gcctccgggaagacgcggcaaccag

SEQ ID NO: 5091902 - DNA, 25 bp, Homo sapien
cagcagtcgcctccgggaagacgcg

SEQ ID NO: 5091903 - DNA, 25 bp, Homo sapien
acaatatggcagagcaccgcagctg

SEQ ID NO: 5091904 - DNA, 25 bp, Homo sapien
cccagactatggaggggccccagtt

SEQ ID NO: 5091905 - DNA, 25 bp, Homo sapien
tctcccatagtactcgaaccttttg

SEQ ID NO: 5091906 - DNA, 25 bp, Homo sapien
cttttgataacatttgtcacacctg

SEQ ID NO: 5091907 - DNA, 25 bp, Homo sapien
cagttctactctcccatagtactcg

SEQ ID NO: 5091908 - DNA, 25 bp, Homo sapien
catctagaatcagaagtaatatcac

SEQ ID NO: 5091909 - DNA, 25 bp, Homo sapien
tactataagtcatacagtgaccaat

SEQ ID NO: 5091910 - DNA, 25 bp, Homo sapien
gtgaccaattattagccaaccagca

SEQ ID NO: 5091911 - DNA, 25 bp, Homo sapien
ggttttttgacagacttgtacagtc

SEQ ID NO: 5091912 - DNA, 25 bp, Homo sapien
ggctgtaaataaagaccaccaatac

SEQ ID NO: 5091913 - DNA, 25 bp, Homo sapien
tactgtatgtagtcaatgtacctga

SEQ ID NO: 5091914 - DNA, 25 bp, Homo sapien
cagatcatgttttgccactataggg

SEQ ID NO: 5091915 - DNA, 25 bp, Homo sapien
tagtgaagtctgaggcaacacccca

SEQ ID NO: 5091916 - DNA, 25 bp, Homo sapien
aagaccctcacttccgaggctgaag

SEQ ID NO: 5091917 - DNA, 25 bp, Homo sapien
gaagattagtgctttcatgaagcca

SEQ ID NO: 5091918 - DNA, 25 bp, Homo sapien
tagagtggccttcggcctggcagca

SEQ ID NO: 5091919 - DNA, 25 bp, Homo sapien
tgactcactgtccactagagtggcc

SEQ ID NO: 5091920 - DNA, 25 bp, Homo sapien
cctctatgtcatacaatggactaac

SEQ ID NO: 5091921 - DNA, 25 bp, Homo sapien
ctccctctatgtcatacaatggact

SEQ ID NO: 5091922 - DNA, 25 bp, Homo sapien
ccctctatgtcatacaatggactaa

SEQ ID NO: 5091923 - DNA, 25 bp, Homo sapien
tccctctatgtcatacaatggacta

SEQ ID NO: 5091924 - DNA, 25 bp, Homo sapien
ggaaaatggtccagaatccagctat

SEQ ID NO: 5091925 - DNA, 25 bp, Homo sapien
gattatgtcgaacagaattcttcca

SEQ ID NO: 5091926 - DNA, 25 bp, Homo sapien
ggttctggtagcaagctggtccaaa

SEQ ID NO: 5091927 - DNA, 25 bp, Homo sapien
tccagcctgttggtgcagtagcaaa

SEQ ID NO: 5091928 - DNA, 25 bp, Homo sapien
ccaaatatagcaatgttcataaaca

SEQ ID NO: 5091929 - DNA, 25 bp, Homo sapien
accaaatatagcaatgttcataaac

SEQ ID NO: 5091930 - DNA, 25 bp, Homo sapien
ctcccaggttcggacgattcccttg

SEQ ID NO: 5091931 - DNA, 25 bp, Homo sapien
caggttcggacgattcccttgcctc

SEQ ID NO: 5091932 - DNA, 25 bp, Homo sapien
tagccttctgtgctacggaaacagg

SEQ ID NO: 5091933 - DNA, 25 bp, Homo sapien
gaattcctgagattacgctcctaga

SEQ ID NO: 5091934 - DNA, 25 bp, Homo sapien
gctatatgttcagtcacctggacca

SEQ ID NO: 5091935 - DNA, 25 bp, Homo sapien
taatgctagccatgctctaccttgg

SEQ ID NO: 5091936 - DNA, 25 bp, Homo sapien
gatcaacacaccataaggaaccttt

SEQ ID NO: 5091937 - DNA, 25 bp, Homo sapien
tgggtttatattccggatcaacaca

SEQ ID NO: 5091938 - DNA, 25 bp, Homo sapien
agtgcctggataagattgggtttat

SEQ ID NO: 5091939 - DNA, 25 bp, Homo sapien
gataagattgggtttatattccgga

SEQ ID NO: 5091940 - DNA, 25 bp, Homo sapien
tacagagcttaaatagtgaggtgat

SEQ ID NO: 5091941 - DNA, 25 bp, Homo sapien
tttgaggtttcgcacctggttctgc

SEQ ID NO: 5091942 - DNA, 25 bp, Homo sapien
taaatagtgaggtgataaagaacca

SEQ ID NO: 5091943 - DNA, 25 bp, Homo sapien
cagagcttaaatagtgaggtgataa

SEQ ID NO: 5091944 - DNA, 25 bp, Homo sapien
tatacttttacaggactagcagtgc

SEQ ID NO: 5091945 - DNA, 25 bp, Homo sapien
gggacaataaacacagagagctgtc

SEQ ID NO: 5091946 - DNA, 25 bp, Homo sapien
gagagctgtcatcttactgtaacaa

SEQ ID NO: 5091947 - DNA, 25 bp, Homo sapien
tacacacattaacctgagcatacac

SEQ ID NO: 5091948 - DNA, 25 bp, Homo sapien
gctgcacctgtttaggctgataaca

SEQ ID NO: 5091949 - DNA, 25 bp, Homo sapien
tcactgatgtaccttggtgtctaga

SEQ ID NO: 5091950 - DNA, 25 bp, Homo sapien
catttgcagagcatccagatggaga

SEQ ID NO: 5091951 - DNA, 25 bp, Homo sapien
tatctgtttgtagtataccaggtgc

SEQ ID NO: 5091952 - DNA, 25 bp, Homo sapien
gatttgtccaaggtacagtcttgaa

SEQ ID NO: 5091953 - DNA, 25 bp, Homo sapien
tggtaagaggcttatcctgataaca

SEQ ID NO: 5091954 - DNA, 25 bp, Homo sapien
cacaacacctaaaactggtaagagg

SEQ ID NO: 5091955 - DNA, 25 bp, Homo sapien
tcaccatcataatagagaacacctg

SEQ ID NO: 5091956 - DNA, 25 bp, Homo sapien
ggcacacagctagacgaatggaatg

SEQ ID NO: 5091957 - DNA, 25 bp, Homo sapien
gagagattacttctccataaactaa

SEQ ID NO: 5091958 - DNA, 25 bp, Homo sapien
cactcactgccttaagccaggtgga

SEQ ID NO: 5091959 - DNA, 25 bp, Homo sapien
agggcacaacttgcatggcattatg

SEQ ID NO: 5091960 - DNA, 25 bp, Homo sapien
taattacatgccagttacaggagat

SEQ ID NO: 5091961 - DNA, 25 bp, Homo sapien
tcgtcagtctaggtcatgtaaacct

SEQ ID NO: 5091962 - DNA, 25 bp, Homo sapien
catcttggtgatatactagtctgaa

SEQ ID NO: 5091963 - DNA, 25 bp, Homo sapien
gcaaaatcagcaggttctacaacag

SEQ ID NO: 5091964 - DNA, 25 bp, Homo sapien
ttccttgttctatagaagtatttaa

SEQ ID NO: 5091965 - DNA, 25 bp, Homo sapien
aaaattccttgttctatagaagtat

SEQ ID NO: 5091966 - DNA, 25 bp, Homo sapien
aattccttgttctatagaagtattt

SEQ ID NO: 5091967 - DNA, 25 bp, Homo sapien
tctaaaattccttgttctatagaag

SEQ ID NO: 5091968 - DNA, 25 bp, Homo sapien
tctcttgtaatcgtacagcactggg

SEQ ID NO: 5091969 - DNA, 25 bp, Homo sapien
gctagacctggatgcacaacgctgt

SEQ ID NO: 5091970 - DNA, 25 bp, Homo sapien
taaacatgtacgaattccagcaagg

SEQ ID NO: 5091971 - DNA, 25 bp, Homo sapien
tctttgcagtacttattagggaacc

SEQ ID NO: 5091972 - DNA, 25 bp, Homo sapien
gcaaaggcctcctggtctaccaaga

SEQ ID NO: 5091973 - DNA, 25 bp, Homo sapien
taaaaggccccaataaatgctatgc

SEQ ID NO: 5091974 - DNA, 25 bp, Homo sapien
tatactcaacaaaggcagctagtgg

SEQ ID NO: 5091975 - DNA, 25 bp, Homo sapien
ggcagttataactcaaaccgggaca

SEQ ID NO: 5091976 - DNA, 25 bp, Homo sapien
tattatgcaatactttctcataatg

SEQ ID NO: 5091977 - DNA, 25 bp, Homo sapien
ttattatgcaatactttctcataat

SEQ ID NO: 5091978 - DNA, 25 bp, Homo sapien
cttgtctccggagttatcctactcc

SEQ ID NO: 5091979 - DNA, 25 bp, Homo sapien
cctactcccatacggaaggttatga

SEQ ID NO: 5091980 - DNA, 25 bp, Homo sapien
ggttatgattggacaaaggtgacat

SEQ ID NO: 5091981 - DNA, 25 bp, Homo sapien
gagttatcctactcccatacggaag

SEQ ID NO: 5091982 - DNA, 25 bp, Homo sapien
tcaggtagtgaggaagccttgactt

SEQ ID NO: 5091983 - DNA, 25 bp, Homo sapien
cagtagctgggcaattcaggtagtg

SEQ ID NO: 5091984 - DNA, 25 bp, Homo sapien
tctcctttgactcctgaacgcacag

SEQ ID NO: 5091985 - DNA, 25 bp, Homo sapien
ttggtagtagtcatccctctctgga

SEQ ID NO: 5091986 - DNA, 25 bp, Homo sapien
gaaactctctaagggggtctctgga

SEQ ID NO: 5091987 - DNA, 25 bp, Homo sapien
aaaaggcagacaccagtccgcaaac

SEQ ID NO: 5091988 - DNA, 25 bp, Homo sapien
tcagggagcccatgtgaaactctct

SEQ ID NO: 5091989 - DNA, 25 bp, Homo sapien
gtgagggcatgcactccctcctctt

SEQ ID NO: 5091990 - DNA, 25 bp, Homo sapien
gtttccagcaatctcctttacatta

SEQ ID NO: 5091991 - DNA, 25 bp, Homo sapien
taccccctcctcaggagtcctcttg

SEQ ID NO: 5091992 - DNA, 25 bp, Homo sapien
accccctcctcaggagtcctcttgt

SEQ ID NO: 5091993 - DNA, 25 bp, Homo sapien
ttccagcaatctcctttacattaac

SEQ ID NO: 5091994 - DNA, 25 bp, Homo sapien
ggaggtgtgacagaggcacctttgc

SEQ ID NO: 5091995 - DNA, 25 bp, Homo sapien
agccaccattagttcctggaggtgt

SEQ ID NO: 5091996 - DNA, 25 bp, Homo sapien
gatggttttgcaagttgcccccaaa

SEQ ID NO: 5091997 - DNA, 25 bp, Homo sapien
cccaaaatcgtttatggaggacgct

SEQ ID NO: 5091998 - DNA, 25 bp, Homo sapien
aaaggcctcccctcaggcattcttc

SEQ ID NO: 5091999 - DNA, 25 bp, Homo sapien
acccctccgtgctcccagccaaagg

SEQ ID NO: 5092000 - DNA, 25 bp, Homo sapien
cagccaaaggcctcccctcaggcat

SEQ ID NO: 5092001 - DNA, 25 bp, Homo sapien
tcctggacccctccgtgctcccagc

SEQ ID NO: 5092002 - DNA, 25 bp, Homo sapien
tgggaaaggatacccccctctctgc

SEQ ID NO: 5092003 - DNA, 25 bp, Homo sapien
ttctttgtcctggataggcctggct

SEQ ID NO: 5092004 - DNA, 25 bp, Homo sapien
gaggggcctcgaccttcagaagcct

SEQ ID NO: 5092005 - DNA, 25 bp, Homo sapien
taggcctggctagcagagcaggagt

SEQ ID NO: 5092006 - DNA, 25 bp, Homo sapien
gatatttgtaactttggctgctgcc

SEQ ID NO: 5092007 - DNA, 25 bp, Homo sapien
tacatctttcagcacaagcgtggaa

SEQ ID NO: 5092008 - DNA, 25 bp, Homo sapien
cgataattgcgaagaccagagggcc

SEQ ID NO: 5092009 - DNA, 25 bp, Homo sapien
ccgcctggcgcttgatggttacatc

SEQ ID NO: 5092010 - DNA, 25 bp, Homo sapien
cgcgcctcctcctccacttccgggt

SEQ ID NO: 5092011 - DNA, 25 bp, Homo sapien
tgcctgcttggccaccgcagccgcc

SEQ ID NO: 5092012 - DNA, 25 bp, Homo sapien
tcaggcagtatctgcctgcttggcc

SEQ ID NO: 5092013 - DNA, 25 bp, Homo sapien
cgccgcgcctcctcctccacttccg

SEQ ID NO: 5092014 - DNA, 25 bp, Homo sapien
cgccccgtacaggccaggccgccca

SEQ ID NO: 5092015 - DNA, 25 bp, Homo sapien
cagcttctggtacttcccctgcaac

SEQ ID NO: 5092016 - DNA, 25 bp, Homo sapien
tctggtacttcccctgcaactcagc

SEQ ID NO: 5092017 - DNA, 25 bp, Homo sapien
ttctggtacttcccctgcaactcag

SEQ ID NO: 5092018 - DNA, 25 bp, Homo sapien
gcttctggtacttcccctgcaactc

SEQ ID NO: 5092019 - DNA, 25 bp, Homo sapien
tcaaaagactcctatgtgatggtga

SEQ ID NO: 5092020 - DNA, 25 bp, Homo sapien
caaaagatgaacacttgccatcact

SEQ ID NO: 5092021 - DNA, 25 bp, Homo sapien
caacgaagttttgctaatggtagca

SEQ ID NO: 5092022 - DNA, 25 bp, Homo sapien
caaacaacttctggcccttcaagca

SEQ ID NO: 5092023 - DNA, 25 bp, Homo sapien
agtgccttgtatgtttggttagtgc

SEQ ID NO: 5092024 - DNA, 25 bp, Homo sapien
gccctcattgtgtcagtggcagtca

SEQ ID NO: 5092025 - DNA, 25 bp, Homo sapien
aatgagacacaaggatgagtgcctt

SEQ ID NO: 5092026 - DNA, 25 bp, Homo sapien
gtggcagtcatgttccctcacctca

SEQ ID NO: 5092027 - DNA, 25 bp, Homo sapien
tatcagcccacgaaacttgtaccag

SEQ ID NO: 5092028 - DNA, 25 bp, Homo sapien
gatgggcttccttctacagattaag

SEQ ID NO: 5092029 - DNA, 25 bp, Homo sapien
ggaatactcttaggcataggactgg

SEQ ID NO: 5092030 - DNA, 25 bp, Homo sapien
gcatcgtgatgggacttactccaaa

SEQ ID NO: 5092031 - DNA, 25 bp, Homo sapien
atgcagggaaactcactacgacaaa

SEQ ID NO: 5092032 - DNA, 25 bp, Homo sapien
accccaacccttgcagtttagctgc

SEQ ID NO: 5092033 - DNA, 25 bp, Homo sapien
tctgcctcaaatggcatcctttctc

SEQ ID NO: 5092034 - DNA, 25 bp, Homo sapien
gcagggaaactcactacgacaaaac

SEQ ID NO: 5092035 - DNA, 25 bp, Homo sapien
accttttttcagaacctgattctga

SEQ ID NO: 5092036 - DNA, 25 bp, Homo sapien
tcagaacctgattctgagcccgaag

SEQ ID NO: 5092037 - DNA, 25 bp, Homo sapien
tgcagaatttgcttgttcatccaca

SEQ ID NO: 5092038 - DNA, 25 bp, Homo sapien
gcagaatttgcttgttcatccacaa

SEQ ID NO: 5092039 - DNA, 25 bp, Homo sapien
aaacagattggtcctcacagtttag

SEQ ID NO: 5092040 - DNA, 25 bp, Homo sapien
gtgaaaacagattggtcctcacagt

SEQ ID NO: 5092041 - DNA, 25 bp, Homo sapien
aaagtgaaaacagattggtcctcac

SEQ ID NO: 5092042 - DNA, 25 bp, Homo sapien
gaaaacagattggtcctcacagttt

SEQ ID NO: 5092043 - DNA, 25 bp, Homo sapien
gaagtagttctaccctcttggcaag

SEQ ID NO: 5092044 - DNA, 25 bp, Homo sapien
cacttagagctagttcatcttgaag

SEQ ID NO: 5092045 - DNA, 25 bp, Homo sapien
tcttgcctcgtggttcacttagagc

SEQ ID NO: 5092046 - DNA, 25 bp, Homo sapien
cagatttcgaaatgtcaaactgtcc

SEQ ID NO: 5092047 - DNA, 25 bp, Homo sapien
catgagtcggagttgttaaactcca

SEQ ID NO: 5092048 - DNA, 25 bp, Homo sapien
gaggacggagcagacctagaaagct

SEQ ID NO: 5092049 - DNA, 25 bp, Homo sapien
tgaattcaggagtagttctgctgga

SEQ ID NO: 5092050 - DNA, 25 bp, Homo sapien
caaatattgtaaggagcaggaaagc

SEQ ID NO: 5092051 - DNA, 25 bp, Homo sapien
ctgatggaaagaataagttatgtcc

SEQ ID NO: 5092052 - DNA, 25 bp, Homo sapien
gttatgtccacataactttcatcct

SEQ ID NO: 5092053 - DNA, 25 bp, Homo sapien
tgtccacataactttcatcctttag

SEQ ID NO: 5092054 - DNA, 25 bp, Homo sapien
cataactttcatcctttagagaaac

SEQ ID NO: 5092055 - DNA, 25 bp, Homo sapien
atcttcttttgcagatcttcatcaa

SEQ ID NO: 5092056 - DNA, 25 bp, Homo sapien
gggcaggcactaacttttcaacatt

SEQ ID NO: 5092057 - DNA, 25 bp, Homo sapien
agcccactatgaatcttagaatatg

SEQ ID NO: 5092058 - DNA, 25 bp, Homo sapien
tgcgcccagcccactatgaatctta

SEQ ID NO: 5092059 - DNA, 25 bp, Homo sapien
gggggcaggcactaacttttcaaca

SEQ ID NO: 5092060 - DNA, 25 bp, Homo sapien
gtctggcatacatagaattcaattg

SEQ ID NO: 5092061 - DNA, 25 bp, Homo sapien
aatcctcacaggatatcagaagtag

SEQ ID NO: 5092062 - DNA, 25 bp, Homo sapien
tatgttaaacccacacaggcattat

SEQ ID NO: 5092063 - DNA, 25 bp, Homo sapien
aggaaacctactccaaagcctgcac

SEQ ID NO: 5092064 - DNA, 25 bp, Homo sapien
agagtggccagtcgactcctcagct

SEQ ID NO: 5092065 - DNA, 25 bp, Homo sapien
tagtttagccttgtcgttctgcagc

SEQ ID NO: 5092066 - DNA, 25 bp, Homo sapien
gggtgagaccgtcaaccacagcttg

SEQ ID NO: 5092067 - DNA, 25 bp, Homo sapien
gaccgtcaaccacagcttggtgctg

SEQ ID NO: 5092068 - DNA, 25 bp, Homo sapien
tcgaagtcgacattccttggcttcc

SEQ ID NO: 5092069 - DNA, 25 bp, Homo sapien
cattcttccgttcgaagtcgacatt

SEQ ID NO: 5092070 - DNA, 25 bp, Homo sapien
tcttccgttcgaagtcgacattcct

SEQ ID NO: 5092071 - DNA, 25 bp, Homo sapien
cgttcgaagtcgacattccttggct

SEQ ID NO: 5092072 - DNA, 25 bp, Homo sapien
tccccaagctcaaagtaatcttaga

SEQ ID NO: 5092073 - DNA, 25 bp, Homo sapien
caacacataagtattcactagtatc

SEQ ID NO: 5092074 - DNA, 25 bp, Homo sapien
taatcacaaatgttctcgttacaac

SEQ ID NO: 5092075 - DNA, 25 bp, Homo sapien
gtattcactagtatcactatagact

SEQ ID NO: 5092076 - DNA, 25 bp, Homo sapien
catgaagagtctttaactgtaattg

SEQ ID NO: 5092077 - DNA, 25 bp, Homo sapien
cattgatgattgataaggattcctc

SEQ ID NO: 5092078 - DNA, 25 bp, Homo sapien
ttcctctaatctacctgacaaatct

SEQ ID NO: 5092079 - DNA, 25 bp, Homo sapien
aaggtactttttcattgatgattga

SEQ ID NO: 5092080 - DNA, 25 bp, Homo sapien
tacctaaaggttgcaaatttggcac

SEQ ID NO: 5092081 - DNA, 25 bp, Homo sapien
caaaccattcccagggtgaatagga

SEQ ID NO: 5092082 - DNA, 25 bp, Homo sapien
ggaagcaaggcttaaccaagttagc

SEQ ID NO: 5092083 - DNA, 25 bp, Homo sapien
gctattgctgggaattgaccaaggg

SEQ ID NO: 5092084 - DNA, 25 bp, Homo sapien
tgtctccttgaaaggaccagtctgc

SEQ ID NO: 5092085 - DNA, 25 bp, Homo sapien
cacatctccccaatccaggctaagc

SEQ ID NO: 5092086 - DNA, 25 bp, Homo sapien
ccacatctccccaatccaggctaag

SEQ ID NO: 5092087 - DNA, 25 bp, Homo sapien
ctccttgaaaggaccagtctgctcc

SEQ ID NO: 5092088 - DNA, 25 bp, Homo sapien
tatcaggactacttagaaaggctca

SEQ ID NO: 5092089 - DNA, 25 bp, Homo sapien
gaatgttcctgtggcatagtcaccc

SEQ ID NO: 5092090 - DNA, 25 bp, Homo sapien
tatgtctccattgctactcactggg

SEQ ID NO: 5092091 - DNA, 25 bp, Homo sapien
gcttttgctaacacgaatcccgagt

SEQ ID NO: 5092092 - DNA, 25 bp, Homo sapien
gagtggaacgttcagagcgttgtac

SEQ ID NO: 5092093 - DNA, 25 bp, Homo sapien
cgttcagagcgttgtactgactata

SEQ ID NO: 5092094 - DNA, 25 bp, Homo sapien
tctcctattgtggagtggaacgttc

SEQ ID NO: 5092095 - DNA, 25 bp, Homo sapien
tattgtggagtggaacgttcagagc

SEQ ID NO: 5092096 - DNA, 25 bp, Homo sapien
ttagaagagccgtcacaagatcctg

SEQ ID NO: 5092097 - DNA, 25 bp, Homo sapien
caatggagatatagtgtcaatggca

SEQ ID NO: 5092098 - DNA, 25 bp, Homo sapien
caagatcctgaacaaaagccagggc

SEQ ID NO: 5092099 - DNA, 25 bp, Homo sapien
caacaggaaaaatttgaatcctctg

SEQ ID NO: 5092100 - DNA, 25 bp, Homo sapien
taaattgtaaacctgataatggctc

SEQ ID NO: 5092101 - DNA, 25 bp, Homo sapien
ctggaaaataacaaacatcaacaca

SEQ ID NO: 5092102 - DNA, 25 bp, Homo sapien
gagggaaagtattgtgaattaaatc

SEQ ID NO: 5092103 - DNA, 25 bp, Homo sapien
aacacatttctaaatggacccacca

SEQ ID NO: 5092104 - DNA, 25 bp, Homo sapien
cataggacgcattttcatgaaggta

SEQ ID NO: 5092105 - DNA, 25 bp, Homo sapien
cacagtatcctcagtgatactttca

SEQ ID NO: 5092106 - DNA, 25 bp, Homo sapien
tccttcctcaagagggcggacatag

SEQ ID NO: 5092107 - DNA, 25 bp, Homo sapien
cctcagtgatactttcaaataaatg

SEQ ID NO: 5092108 - DNA, 25 bp, Homo sapien
ggttaaaagtgctactggacaaaga

SEQ ID NO: 5092109 - DNA, 25 bp, Homo sapien
caaggttaaaagtgctactggacaa

SEQ ID NO: 5092110 - DNA, 25 bp, Homo sapien
ctggacaaagaggagctcccagttt

SEQ ID NO: 5092111 - DNA, 25 bp, Homo sapien
tcaaggttaaaagtgctactggaca

SEQ ID NO: 5092112 - DNA, 25 bp, Homo sapien
aagaaaacatatgtaggaggttaag

SEQ ID NO: 5092113 - DNA, 25 bp, Homo sapien
ctgatagggaagaatcttcctaaga

SEQ ID NO: 5092114 - DNA, 25 bp, Homo sapien
gaaaacatatgtaggaggttaagtg

SEQ ID NO: 5092115 - DNA, 25 bp, Homo sapien
aacatatgtaggaggttaagtgttc

SEQ ID NO: 5092116 - DNA, 25 bp, Homo sapien
gccagatcaggttacacccacaatt

SEQ ID NO: 5092117 - DNA, 25 bp, Homo sapien
ccatctaggtgttaactgcaaaggg

SEQ ID NO: 5092118 - DNA, 25 bp, Homo sapien
gcagatcacaagaggcacatgttaa

SEQ ID NO: 5092119 - DNA, 25 bp, Homo sapien
taagttaatgctgctcaaccatgct

SEQ ID NO: 5092120 - DNA, 25 bp, Homo sapien
tcacccaggctgatataattactta

SEQ ID NO: 5092121 - DNA, 25 bp, Homo sapien
acccaggctgcagtaacagctcact

SEQ ID NO: 5092122 - DNA, 25 bp, Homo sapien
ttttaagaggcagggactctatcac

SEQ ID NO: 5092123 - DNA, 25 bp, Homo sapien
ggctgatataattacttatacattc

SEQ ID NO: 5092124 - DNA, 25 bp, Homo sapien
agcatcccaaacgattttcaattag

SEQ ID NO: 5092125 - DNA, 25 bp, Homo sapien
ctaggaataggcagatttttaagaa

SEQ ID NO: 5092126 - DNA, 25 bp, Homo sapien
agtgagcatcccaaacgattttcaa

SEQ ID NO: 5092127 - DNA, 25 bp, Homo sapien
tgagcatcccaaacgattttcaatt

SEQ ID NO: 5092128 - DNA, 25 bp, Homo sapien
cttaacgcagatgtgcaaagagagg

SEQ ID NO: 5092129 - DNA, 25 bp, Homo sapien
tggctcttaacgcagatgtgcaaag

SEQ ID NO: 5092130 - DNA, 25 bp, Homo sapien
agagctatgtaagtctgcagcttct

SEQ ID NO: 5092131 - DNA, 25 bp, Homo sapien
aagagctatgtaagtctgcagcttc

SEQ ID NO: 5092132 - DNA, 25 bp, Homo sapien
ggagatcacacatacaggtactgac

SEQ ID NO: 5092133 - DNA, 25 bp, Homo sapien
tctgttggccctaggtgttacttgc

SEQ ID NO: 5092134 - DNA, 25 bp, Homo sapien
gcataactccaatccctgcatctgt

SEQ ID NO: 5092135 - DNA, 25 bp, Homo sapien
gtgtgtctctgtctcgaaatctctc

SEQ ID NO: 5092136 - DNA, 25 bp, Homo sapien
tcaacaggagttccaccctgaaaga

SEQ ID NO: 5092137 - DNA, 25 bp, Homo sapien
acaggagttccaccctgaaagaggc

SEQ ID NO: 5092138 - DNA, 25 bp, Homo sapien
agctcatcaacaggagttccaccct

SEQ ID NO: 5092139 - DNA, 25 bp, Homo sapien
catcaacaggagttccaccctgaaa

SEQ ID NO: 5092140 - DNA, 25 bp, Homo sapien
ttcataacgtcatgaaatccatgca

SEQ ID NO: 5092141 - DNA, 25 bp, Homo sapien
cacagaactgtagtttgtccgaagg

SEQ ID NO: 5092142 - DNA, 25 bp, Homo sapien
aacatttgttaacacagaactgtag

SEQ ID NO: 5092143 - DNA, 25 bp, Homo sapien
gtccgaaggagtccatctggctctg

SEQ ID NO: 5092144 - DNA, 25 bp, Homo sapien
tctggaagagaggactacgactaag

SEQ ID NO: 5092145 - DNA, 25 bp, Homo sapien
gaccaaactaaattctgcaggactg

SEQ ID NO: 5092146 - DNA, 25 bp, Homo sapien
tataagcgtcagctattgcacccag

SEQ ID NO: 5092147 - DNA, 25 bp, Homo sapien
gagttgaatattgttaactgccacc

SEQ ID NO: 5092148 - DNA, 25 bp, Homo sapien
aaagagtaatacattaggctgggca

SEQ ID NO: 5092149 - DNA, 25 bp, Homo sapien
gctacaggagtcacagcctatgatt

SEQ ID NO: 5092150 - DNA, 25 bp, Homo sapien
cttgggtggctgcaaaacagatctc

SEQ ID NO: 5092151 - DNA, 25 bp, Homo sapien
gcctgggaaatatagaaggacccca

SEQ ID NO: 5092152 - DNA, 25 bp, Homo sapien
tagttgttatcagcttctgtgttgc

SEQ ID NO: 5092153 - DNA, 25 bp, Homo sapien
ttgctgttggaagttcatgctctat

SEQ ID NO: 5092154 - DNA, 25 bp, Homo sapien
gctccatttgttaatgccactactg

SEQ ID NO: 5092155 - DNA, 25 bp, Homo sapien
gccactactgatgacaggatacagt

SEQ ID NO: 5092156 - DNA, 25 bp, Homo sapien
ggtgcccgtcaccacatccgggtaa

SEQ ID NO: 5092157 - DNA, 25 bp, Homo sapien
tgcccgtcaccacatccgggtaatt

SEQ ID NO: 5092158 - DNA, 25 bp, Homo sapien
tggctcagctgtcccagtagctggg

SEQ ID NO: 5092159 - DNA, 25 bp, Homo sapien
ctcctggctcagctgtcccagtagc

SEQ ID NO: 5092160 - DNA, 25 bp, Homo sapien
tcttatactgtagcatgcattcagc

SEQ ID NO: 5092161 - DNA, 25 bp, Homo sapien
cagctgaaagaggactaatgaatcc

SEQ ID NO: 5092162 - DNA, 25 bp, Homo sapien
taatgaatccactcgctgccttagg

SEQ ID NO: 5092163 - DNA, 25 bp, Homo sapien
tgccttaggtccatagctcagtgaa

SEQ ID NO: 5092164 - DNA, 25 bp, Homo sapien
tttaagagtctctgaagttcaatat

SEQ ID NO: 5092165 - DNA, 25 bp, Homo sapien
tcttaatatactgcagtatcttctc

SEQ ID NO: 5092166 - DNA, 25 bp, Homo sapien
tgtgcactcaaacatataataacat

SEQ ID NO: 5092167 - DNA, 25 bp, Homo sapien
tctaaaacagtacatgcacctaaat

SEQ ID NO: 5092168 - DNA, 25 bp, Homo sapien
accctggctaagaatgatcaccatg

SEQ ID NO: 5092169 - DNA, 25 bp, Homo sapien
tgctggaagaaaatacacgtgaatg

SEQ ID NO: 5092170 - DNA, 25 bp, Homo sapien
ttttttccagctactacaggctgcc

SEQ ID NO: 5092171 - DNA, 25 bp, Homo sapien
caggctgcctgtccaaatgtaaaaa

SEQ ID NO: 5092172 - DNA, 25 bp, Homo sapien
gcttatcaggacgtaatcccatcat

SEQ ID NO: 5092173 - DNA, 25 bp, Homo sapien
aatgggcttatcaggacgtaatccc

SEQ ID NO: 5092174 - DNA, 25 bp, Homo sapien
ggagcatcagtataagctacactaa

SEQ ID NO: 5092175 - DNA, 25 bp, Homo sapien
gtataagctacactaactaaaacca

SEQ ID NO: 5092176 - DNA, 25 bp, Homo sapien
agcccagcctcccaagcatgcacct

SEQ ID NO: 5092177 - DNA, 25 bp, Homo sapien
ccagcctcccaagcatgcacctggg

SEQ ID NO: 5092178 - DNA, 25 bp, Homo sapien
tcccaagcatgcacctgggactaca

SEQ ID NO: 5092179 - DNA, 25 bp, Homo sapien
cctcccaagcatgcacctgggacta

SEQ ID NO: 5092180 - DNA, 25 bp, Homo sapien
gctgagaaggatgcggcggtttgcc

SEQ ID NO: 5092181 - DNA, 25 bp, Homo sapien
gcggcggtttgccagtgcttcttca

SEQ ID NO: 5092182 - DNA, 25 bp, Homo sapien
gctgtgcaaggccttctcgactttc

SEQ ID NO: 5092183 - DNA, 25 bp, Homo sapien
gcaaggccttctcgactttcagtag

SEQ ID NO: 5092184 - DNA, 25 bp, Homo sapien
taactcagagtcactagctcttgcc

SEQ ID NO: 5092185 - DNA, 25 bp, Homo sapien
gatgacttagagtgtcaacacatgt

SEQ ID NO: 5092186 - DNA, 25 bp, Homo sapien
ttataccaccaactgaatcaagatg

SEQ ID NO: 5092187 - DNA, 25 bp, Homo sapien
tcatcatggccaaagtgtgttgata

SEQ ID NO: 5092188 - DNA, 25 bp, Homo sapien
tagactggtgctctgaatgggctcc

SEQ ID NO: 5092189 - DNA, 25 bp, Homo sapien
ggctaattgtgcttccaacatccaa

SEQ ID NO: 5092190 - DNA, 25 bp, Homo sapien
tggccagcagtatttgacacagcag

SEQ ID NO: 5092191 - DNA, 25 bp, Homo sapien
cagctgggcactacctgtattcttc

SEQ ID NO: 5092192 - DNA, 25 bp, Homo sapien
aaagcacacaccttaggacagggtc

SEQ ID NO: 5092193 - DNA, 25 bp, Homo sapien
gacactgtttagatgcaatagggcc

SEQ ID NO: 5092194 - DNA, 25 bp, Homo sapien
tgagcttcaggagtaaagtcagcag

SEQ ID NO: 5092195 - DNA, 25 bp, Homo sapien
caaacatgcagaaaggttagcggta

SEQ ID NO: 5092196 - DNA, 25 bp, Homo sapien
gacagtacctacaatcctgtgtgag

SEQ ID NO: 5092197 - DNA, 25 bp, Homo sapien
tacaatgtcattgtcagcagcaccc

SEQ ID NO: 5092198 - DNA, 25 bp, Homo sapien
tggaaagtccttagacctgtgtcag

SEQ ID NO: 5092199 - DNA, 25 bp, Homo sapien
gctaaaccactgatatggaggtaaa

SEQ ID NO: 5092200 - DNA, 25 bp, Homo sapien
aaggaaactactggaaactcagtgt

SEQ ID NO: 5092201 - DNA, 25 bp, Homo sapien
gaattctggttattgttcaaggtgg

SEQ ID NO: 5092202 - DNA, 25 bp, Homo sapien
tgtgcttgggcacaatgacaaggaa

SEQ ID NO: 5092203 - DNA, 25 bp, Homo sapien
taataaacactctagttgaaagctc

SEQ ID NO: 5092204 - DNA, 25 bp, Homo sapien
aatcttttagaacagaatgtgtaca

SEQ ID NO: 5092205 - DNA, 25 bp, Homo sapien
aaatcttttagaacagaatgtgtac

SEQ ID NO: 5092206 - DNA, 25 bp, Homo sapien
tgtcagatgtcctggttaaagtccc

SEQ ID NO: 5092207 - DNA, 25 bp, Homo sapien
actgtcagatgtcctggttaaagtc

SEQ ID NO: 5092208 - DNA, 25 bp, Homo sapien
tcagatgtcctggttaaagtcccaa

SEQ ID NO: 5092209 - DNA, 25 bp, Homo sapien
cagatgtcctggttaaagtcccaat

SEQ ID NO: 5092210 - DNA, 25 bp, Homo sapien
tagatagcccttgctaagccctgct

SEQ ID NO: 5092211 - DNA, 25 bp, Homo sapien
caaatgaaggcccaagcaggagcca

SEQ ID NO: 5092212 - DNA, 25 bp, Homo sapien
actgcgaggactaacacggctctca

SEQ ID NO: 5092213 - DNA, 25 bp, Homo sapien
cactgtacttggtcaaggccctaga

SEQ ID NO: 5092214 - DNA, 25 bp, Homo sapien
gcccacccaacatactaacaaatta

SEQ ID NO: 5092215 - DNA, 25 bp, Homo sapien
gcgcccacccaacatactaacaaat

SEQ ID NO: 5092216 - DNA, 25 bp, Homo sapien
ggtatttctactagttactcaaaca

SEQ ID NO: 5092217 - DNA, 25 bp, Homo sapien
cagactggtatttctactagttact

SEQ ID NO: 5092218 - DNA, 25 bp, Homo sapien
taaatagaacacaaatacacataaa

SEQ ID NO: 5092219 - DNA, 25 bp, Homo sapien
ctaaatagaacacaaatacacataa

SEQ ID NO: 5092220 - DNA, 25 bp, Homo sapien
aatacacataaataaacaagtacca

SEQ ID NO: 5092221 - DNA, 25 bp, Homo sapien
cacaaatacacataaataaacaagt

SEQ ID NO: 5092222 - DNA, 25 bp, Homo sapien
taattaagtcttcacgagattccac

SEQ ID NO: 5092223 - DNA, 25 bp, Homo sapien
ataaaaatgcactgacttactgtca

SEQ ID NO: 5092224 - DNA, 25 bp, Homo sapien
aactgagacgtaagttccactatcc

SEQ ID NO: 5092225 - DNA, 25 bp, Homo sapien
tgacttactgtcagccagctgcaac

SEQ ID NO: 5092226 - DNA, 25 bp, Homo sapien
tggactgccggcttagtgattcagc

SEQ ID NO: 5092227 - DNA, 25 bp, Homo sapien
ccaaacaatgaggatccatgcctgc

SEQ ID NO: 5092228 - DNA, 25 bp, Homo sapien
tattcgatggctgcttgtgaacaac

SEQ ID NO: 5092229 - DNA, 25 bp, Homo sapien
tgaaaaggacaatcaagtctgagac

SEQ ID NO: 5092230 - DNA, 25 bp, Homo sapien
cagattatgcgctacttacaaggga

SEQ ID NO: 5092231 - DNA, 25 bp, Homo sapien
tatgtcaacataaggcgctcagagc

SEQ ID NO: 5092232 - DNA, 25 bp, Homo sapien
cattagagaccacattataggagca

SEQ ID NO: 5092233 - DNA, 25 bp, Homo sapien
taaggttactgacaaggagaatctg

SEQ ID NO: 5092234 - DNA, 25 bp, Homo sapien
tgttctgactggcaagtttcatttc

SEQ ID NO: 5092235 - DNA, 25 bp, Homo sapien
caatgcttccttagacttttcagcc

SEQ ID NO: 5092236 - DNA, 25 bp, Homo sapien
ttcatttcttctgtcaatgcttcct

SEQ ID NO: 5092237 - DNA, 25 bp, Homo sapien
ccagtcttttagacagtgctcggca

SEQ ID NO: 5092238 - DNA, 25 bp, Homo sapien
tacttaactgatcctcgtaactcct

SEQ ID NO: 5092239 - DNA, 25 bp, Homo sapien
ggacatctttagtgtgtcaatctct

SEQ ID NO: 5092240 - DNA, 25 bp, Homo sapien
ggtggtcactcatcatacttaactg

SEQ ID NO: 5092241 - DNA, 25 bp, Homo sapien
tcctcttggtagttgtcagctcatc

SEQ ID NO: 5092242 - DNA, 25 bp, Homo sapien
ttatattgcagagagactacctcac

SEQ ID NO: 5092243 - DNA, 25 bp, Homo sapien
tcgactcttgttctttttagaattc

SEQ ID NO: 5092244 - DNA, 25 bp, Homo sapien
tatcgactcttgttctttttagaat

SEQ ID NO: 5092245 - DNA, 25 bp, Homo sapien
ctatcgactcttgttctttttagaa

SEQ ID NO: 5092246 - DNA, 25 bp, Homo sapien
atcgactcttgttctttttagaatt

SEQ ID NO: 5092247 - DNA, 25 bp, Homo sapien
tggaaagaacagtcgccaaccagct

SEQ ID NO: 5092248 - DNA, 25 bp, Homo sapien
cagccagcatggacgtggtctcagc

SEQ ID NO: 5092249 - DNA, 25 bp, Homo sapien
acaatactttagcttcctgaaggca

SEQ ID NO: 5092250 - DNA, 25 bp, Homo sapien
gataatgatactaaacccacaggat

SEQ ID NO: 5092251 - DNA, 25 bp, Homo sapien
tgatgggatctcaggtaaactccgg

SEQ ID NO: 5092252 - DNA, 25 bp, Homo sapien
cctggacacggttgaaatgggcctg

SEQ ID NO: 5092253 - DNA, 25 bp, Homo sapien
tgaggactgggcctaacaaccagag

SEQ ID NO: 5092254 - DNA, 25 bp, Homo sapien
gagtagactcgagagatggtgccac

SEQ ID NO: 5092255 - DNA, 25 bp, Homo sapien
cggtggggcagttgagaagtgtttt

SEQ ID NO: 5092256 - DNA, 25 bp, Homo sapien
taagggtagcagagatgcctctgcc

SEQ ID NO: 5092257 - DNA, 25 bp, Homo sapien
gaacgggaagcatgggtaaatatat

SEQ ID NO: 5092258 - DNA, 25 bp, Homo sapien
taaatatatgaagcggtggggcagt

SEQ ID NO: 5092259 - DNA, 25 bp, Homo sapien
gaggcaaccacttactgacaagctt

SEQ ID NO: 5092260 - DNA, 25 bp, Homo sapien
tggctcttagccgagaacagaagct

SEQ ID NO: 5092261 - DNA, 25 bp, Homo sapien
taaaaagtatctgtgtgagcatgca

SEQ ID NO: 5092262 - DNA, 25 bp, Homo sapien
tcccttgttaatatggctgtgccag

SEQ ID NO: 5092263 - DNA, 25 bp, Homo sapien
agatagtttagtgagggccaagctg

SEQ ID NO: 5092264 - DNA, 25 bp, Homo sapien
tctttgctgcctcaagagtgcatgg

SEQ ID NO: 5092265 - DNA, 25 bp, Homo sapien
gaggtaaacgcgtccagatgcctcc

SEQ ID NO: 5092266 - DNA, 25 bp, Homo sapien
cttcctgggcgaatcaatcatagca

SEQ ID NO: 5092267 - DNA, 25 bp, Homo sapien
tagcttggacccgtggaaggtctga

SEQ ID NO: 5092268 - DNA, 25 bp, Homo sapien
gatgccctcttgaagcagatagctt

SEQ ID NO: 5092269 - DNA, 25 bp, Homo sapien
gggcctttgcggtcgtgctttctaa

SEQ ID NO: 5092270 - DNA, 25 bp, Homo sapien
cggtcgtgctttctaagttgcttca

SEQ ID NO: 5092271 - DNA, 25 bp, Homo sapien
tcttctgtccccgagtctccagcct

SEQ ID NO: 5092272 - DNA, 25 bp, Homo sapien
ttggggctccgattctggccgcagc

SEQ ID NO: 5092273 - DNA, 25 bp, Homo sapien
gcggcgcagtgactcctcccgctcc

SEQ ID NO: 5092274 - DNA, 25 bp, Homo sapien
tttctggtgtccgacgctccgttct

SEQ ID NO: 5092275 - DNA, 25 bp, Homo sapien
acagagaccccgagggaggcgtgag

SEQ ID NO: 5092276 - DNA, 25 bp, Homo sapien
cagtctcagaacagaggggagccga

SEQ ID NO: 5092277 - DNA, 25 bp, Homo sapien
tggtggcccgggtccgagaggtcga

SEQ ID NO: 5092278 - DNA, 25 bp, Homo sapien
cccgccctcggaactgagtcgatat

SEQ ID NO: 5092279 - DNA, 25 bp, Homo sapien
ctgcaggcacaggctaaggtccgag

SEQ ID NO: 5092280 - DNA, 25 bp, Homo sapien
gctgcaggcacaggctaaggtccga

SEQ ID NO: 5092281 - DNA, 25 bp, Homo sapien
cacgaggttcagtttgtgggtccaa

SEQ ID NO: 5092282 - DNA, 25 bp, Homo sapien
ttaaaacttctagcctggaggaggc

SEQ ID NO: 5092283 - DNA, 25 bp, Homo sapien
gactagagctatgcagacgggaatg

SEQ ID NO: 5092284 - DNA, 25 bp, Homo sapien
tctcccaggaaaacagtcgagtgtg

SEQ ID NO: 5092285 - DNA, 25 bp, Homo sapien
tgtggtccagctcgtttgagcctct

SEQ ID NO: 5092286 - DNA, 25 bp, Homo sapien
ttatgtggtccagctcgtttgagcc

SEQ ID NO: 5092287 - DNA, 25 bp, Homo sapien
tggtccagctcgtttgagcctctcc

SEQ ID NO: 5092288 - DNA, 25 bp, Homo sapien
cagctcgtttgagcctctcccattg

SEQ ID NO: 5092289 - DNA, 25 bp, Homo sapien
cacacagttcgctccttggtagagc

SEQ ID NO: 5092290 - DNA, 25 bp, Homo sapien
agaattaacaggctccccatcgtgc

SEQ ID NO: 5092291 - DNA, 25 bp, Homo sapien
tgtccagacccatccgagaattaac

SEQ ID NO: 5092292 - DNA, 25 bp, Homo sapien
cagaggtttgcaatatcagcccagg

SEQ ID NO: 5092293 - DNA, 25 bp, Homo sapien
actgcatcagtggagagaagtgaat

SEQ ID NO: 5092294 - DNA, 25 bp, Homo sapien
gatctactacatttgttacaaccac

SEQ ID NO: 5092295 - DNA, 25 bp, Homo sapien
tttattgtttgtatggaaacaggaa

SEQ ID NO: 5092296 - DNA, 25 bp, Homo sapien
caaatggttcaatacttggacctgt

SEQ ID NO: 5092297 - DNA, 25 bp, Homo sapien
ttttgatgcacataattccagtatt

SEQ ID NO: 5092298 - DNA, 25 bp, Homo sapien
taaaagttgagaaatacaagtacaa

SEQ ID NO: 5092299 - DNA, 25 bp, Homo sapien
aattccagtattttctcgatgtatt

SEQ ID NO: 5092300 - DNA, 25 bp, Homo sapien
atgtaagtgcttagttctcagtaaa

SEQ ID NO: 5092301 - DNA, 25 bp, Homo sapien
gactgctccagaatcccataaggta

SEQ ID NO: 5092302 - DNA, 25 bp, Homo sapien
ggtgagctacctctaaatctggagc

SEQ ID NO: 5092303 - DNA, 25 bp, Homo sapien
gcattttccattttacgtatcagtg

SEQ ID NO: 5092304 - DNA, 25 bp, Homo sapien
gcctccatggaattcgggattcttc

SEQ ID NO: 5092305 - DNA, 25 bp, Homo sapien
tacctagacatacctgtggaacatt

SEQ ID NO: 5092306 - DNA, 25 bp, Homo sapien
gactgctgggtaggataaaattttc

SEQ ID NO: 5092307 - DNA, 25 bp, Homo sapien
ttctaaatccatacctagacatacc

SEQ ID NO: 5092308 - DNA, 25 bp, Homo sapien
cactgggtaatcacaaatcctcaca

SEQ ID NO: 5092309 - DNA, 25 bp, Homo sapien
tcaagttgaggctcaagagcgccgt

SEQ ID NO: 5092310 - DNA, 25 bp, Homo sapien
gaggcctaaatacctgcgagctggg

SEQ ID NO: 5092311 - DNA, 25 bp, Homo sapien
tgcatcaacactctcacaggcggaa

SEQ ID NO: 5092312 - DNA, 25 bp, Homo sapien
tcatagagaaatccaccgcagcaag

SEQ ID NO: 5092313 - DNA, 25 bp, Homo sapien
tttcatgatagtcttttcctctcct

SEQ ID NO: 5092314 - DNA, 25 bp, Homo sapien
ttttcatgatagtcttttcctctcc

SEQ ID NO: 5092315 - DNA, 25 bp, Homo sapien
tgtagcatcaaaccttatggccggg

SEQ ID NO: 5092316 - DNA, 25 bp, Homo sapien
taaacagaggccaatgtgtcagccc

SEQ ID NO: 5092317 - DNA, 25 bp, Homo sapien
actaggagggattcctggttgcaaa

SEQ ID NO: 5092318 - DNA, 25 bp, Homo sapien
caacaggcctggagctacactagga

SEQ ID NO: 5092319 - DNA, 25 bp, Homo sapien
agctgctcattaagtgggggctgaa

SEQ ID NO: 5092320 - DNA, 25 bp, Homo sapien
tatgtaggtacctgaaacagagcag

SEQ ID NO: 5092321 - DNA, 25 bp, Homo sapien
agaaagtaatgtcagccttagcatc

SEQ ID NO: 5092322 - DNA, 25 bp, Homo sapien
catgaccaattgtgatatgtaggta

SEQ ID NO: 5092323 - DNA, 25 bp, Homo sapien
gatctcgccaggtcttaacagttca

SEQ ID NO: 5092324 - DNA, 25 bp, Homo sapien
gacaagtaactaaatggcccagaaa

SEQ ID NO: 5092325 - DNA, 25 bp, Homo sapien
cctatatgagaagtgaaggaccacc

SEQ ID NO: 5092326 - DNA, 25 bp, Homo sapien
tgaagagcgtttggctcagatcaca

SEQ ID NO: 5092327 - DNA, 25 bp, Homo sapien
agcaggcttcgttcaggcaaagacc

SEQ ID NO: 5092328 - DNA, 25 bp, Homo sapien
aagcaggcttcgttcaggcaaagac

SEQ ID NO: 5092329 - DNA, 25 bp, Homo sapien
ctgggcttcctactctccaaaaaat

SEQ ID NO: 5092330 - DNA, 25 bp, Homo sapien
gcaggcttcgttcaggcaaagacct

SEQ ID NO: 5092331 - DNA, 25 bp, Homo sapien
actgtccctgttgggtcaattccta

SEQ ID NO: 5092332 - DNA, 25 bp, Homo sapien
ctgtccctgttgggtcaattcctac

SEQ ID NO: 5092333 - DNA, 25 bp, Homo sapien
gctcaggaaggcatcatcgacacct

SEQ ID NO: 5092334 - DNA, 25 bp, Homo sapien
tgatgccaaggaggtattcagcaga

SEQ ID NO: 5092335 - DNA, 25 bp, Homo sapien
aatgtggtccctaatgtctggctcc

SEQ ID NO: 5092336 - DNA, 25 bp, Homo sapien
aaaagcacgccccaatgtggtccct

SEQ ID NO: 5092337 - DNA, 25 bp, Homo sapien
agcccaccacacgtatctgcccctt

SEQ ID NO: 5092338 - DNA, 25 bp, Homo sapien
accacacgtatctgccccttggaca

SEQ ID NO: 5092339 - DNA, 25 bp, Homo sapien
tccagcaagcccaccacacgtatct

SEQ ID NO: 5092340 - DNA, 25 bp, Homo sapien
agcaagcccaccacacgtatctgcc

SEQ ID NO: 5092341 - DNA, 25 bp, Homo sapien
tcgaccagtaagatgtagaacctag

SEQ ID NO: 5092342 - DNA, 25 bp, Homo sapien
tgtagaacctagactgtgaccaggt

SEQ ID NO: 5092343 - DNA, 25 bp, Homo sapien
gtgaccaggtctgtccagtcccaaa

SEQ ID NO: 5092344 - DNA, 25 bp, Homo sapien
ctaaagttgctcgaccagtaagatg

SEQ ID NO: 5092345 - DNA, 25 bp, Homo sapien
tgtcactgcccttaggctgaagttg

SEQ ID NO: 5092346 - DNA, 25 bp, Homo sapien
tcactgcccttaggctgaagttgct

SEQ ID NO: 5092347 - DNA, 25 bp, Homo sapien
cactgcccttaggctgaagttgctg

SEQ ID NO: 5092348 - DNA, 25 bp, Homo sapien
ctgaagttgctgtgaagcaccttcc

SEQ ID NO: 5092349 - DNA, 25 bp, Homo sapien
gggcacaaaaacacacagcggaggg

SEQ ID NO: 5092350 - DNA, 25 bp, Homo sapien
ctgagggcacaaaaacacacagcgg

SEQ ID NO: 5092351 - DNA, 25 bp, Homo sapien
acaaaaacacacagcggagggcagc

SEQ ID NO: 5092352 - DNA, 25 bp, Homo sapien
gagggcacaaaaacacacagcggag

SEQ ID NO: 5092353 - DNA, 25 bp, Homo sapien
tgttgtcatttgctgcatccacaca

SEQ ID NO: 5092354 - DNA, 25 bp, Homo sapien
ttgtcatttgctgcatccacacatt

SEQ ID NO: 5092355 - DNA, 25 bp, Homo sapien
gttgtcatttgctgcatccacacat

SEQ ID NO: 5092356 - DNA, 25 bp, Homo sapien
tgtcatttgctgcatccacacattc

SEQ ID NO: 5092357 - DNA, 25 bp, Homo sapien
gggatcagattgtggtcttgtcaag

SEQ ID NO: 5092358 - DNA, 25 bp, Homo sapien
gattgtggtcttgtcaagaaatcaa

SEQ ID NO: 5092359 - DNA, 25 bp, Homo sapien
ggtcttgtcaagaaatcaaataggt

SEQ ID NO: 5092360 - DNA, 25 bp, Homo sapien
tgtcaagaaatcaaataggttgact

SEQ ID NO: 5092361 - DNA, 25 bp, Homo sapien
gacaccttgattctccagaggaaaa

SEQ ID NO: 5092362 - DNA, 25 bp, Homo sapien
tttgagaagattgaacagcaggatc

SEQ ID NO: 5092363 - DNA, 25 bp, Homo sapien
gccaggaaggttcagcttcagtcca

SEQ ID NO: 5092364 - DNA, 25 bp, Homo sapien
ccatttggtctacagacaccttgat

SEQ ID NO: 5092365 - DNA, 25 bp, Homo sapien
gaagtctttggtaggtgtagaaaga

SEQ ID NO: 5092366 - DNA, 25 bp, Homo sapien
tgggaagtctttggtaggtgtagaa

SEQ ID NO: 5092367 - DNA, 25 bp, Homo sapien
agtctttggtaggtgtagaaagagg

SEQ ID NO: 5092368 - DNA, 25 bp, Homo sapien
aggagagttacttggaggtcctgga

SEQ ID NO: 5092369 - DNA, 25 bp, Homo sapien
aagattctcctcctgatattgcgag

SEQ ID NO: 5092370 - DNA, 25 bp, Homo sapien
taaacatgttggtctggtaggcagt

SEQ ID NO: 5092371 - DNA, 25 bp, Homo sapien
cctactttgggagttggatgtgtac

SEQ ID NO: 5092372 - DNA, 25 bp, Homo sapien
cgagtgggctgtctgaagatgattc

SEQ ID NO: 5092373 - DNA, 25 bp, Homo sapien
aagtcatggtacgatgtggacccca

SEQ ID NO: 5092374 - DNA, 25 bp, Homo sapien
ggttcccattcacaaagcagaggca

SEQ ID NO: 5092375 - DNA, 25 bp, Homo sapien
taataggattcatctcgcttcggca

SEQ ID NO: 5092376 - DNA, 25 bp, Homo sapien
aaagggccttgatccactgcgatgg

SEQ ID NO: 5092377 - DNA, 25 bp, Homo sapien
ccatgaaaataaacttggggtgttg

SEQ ID NO: 5092378 - DNA, 25 bp, Homo sapien
ctatttcccatgaaaataaacttgg

SEQ ID NO: 5092379 - DNA, 25 bp, Homo sapien
catgaaaataaacttggggtgttga

SEQ ID NO: 5092380 - DNA, 25 bp, Homo sapien
aactagggggaaagctgtctgccat

SEQ ID NO: 5092381 - DNA, 25 bp, Homo sapien
atctacaattttgcaccaactaggg

SEQ ID NO: 5092382 - DNA, 25 bp, Homo sapien
accaactagggggaaagctgtctgc

SEQ ID NO: 5092383 - DNA, 25 bp, Homo sapien
tttgcaccaactagggggaaagctg

SEQ ID NO: 5092384 - DNA, 25 bp, Homo sapien
ggtctgatccaagctctaatttgta

SEQ ID NO: 5092385 - DNA, 25 bp, Homo sapien
gggaatttcttggtctgatccaagc

SEQ ID NO: 5092386 - DNA, 25 bp, Homo sapien
tagcaaatggataccaatcagaggg

SEQ ID NO: 5092387 - DNA, 25 bp, Homo sapien
tctaatttgtatgacagacaatggg

SEQ ID NO: 5092388 - DNA, 25 bp, Homo sapien
cactcccagagacctgacctctgtc

SEQ ID NO: 5092389 - DNA, 25 bp, Homo sapien
ctggatgttgtagcaagctcgctgc

SEQ ID NO: 5092390 - DNA, 25 bp, Homo sapien
tagcaagctcgctgctgaacatgtt

SEQ ID NO: 5092391 - DNA, 25 bp, Homo sapien
ccttgaggcacaggtgtcaggcacg

SEQ ID NO: 5092392 - DNA, 25 bp, Homo sapien
tatctgggtcttctccatcgatttt

SEQ ID NO: 5092393 - DNA, 25 bp, Homo sapien
tctccatcgattttaatccacttct

SEQ ID NO: 5092394 - DNA, 25 bp, Homo sapien
tctgggtcttctccatcgattttaa

SEQ ID NO: 5092395 - DNA, 25 bp, Homo sapien
ggtcttctccatcgattttaatcca

SEQ ID NO: 5092396 - DNA, 25 bp, Homo sapien
tgaagatcactattccggcaagggc

SEQ ID NO: 5092397 - DNA, 25 bp, Homo sapien
aaaaagagcaatagcggccgggcat

SEQ ID NO: 5092398 - DNA, 25 bp, Homo sapien
gaaatagcttctttgcagcacgcgc

SEQ ID NO: 5092399 - DNA, 25 bp, Homo sapien
gagtgcgcccacaccagatgataaa

SEQ ID NO: 5092400 - DNA, 25 bp, Homo sapien
gagtggagcctgacatatgcctgac

SEQ ID NO: 5092401 - DNA, 25 bp, Homo sapien
tttttccaggatatgcaaagaggtc

SEQ ID NO: 5092402 - DNA, 25 bp, Homo sapien
tcactgactccttaagagtggagcc

SEQ ID NO: 5092403 - DNA, 25 bp, Homo sapien
tctttgtgagtcatgattataccct

SEQ ID NO: 5092404 - DNA, 25 bp, Homo sapien
gacacctgagatactgcaatagact

SEQ ID NO: 5092405 - DNA, 25 bp, Homo sapien
gcagcaagaaaggactaagacacct

SEQ ID NO: 5092406 - DNA, 25 bp, Homo sapien
aatccatggcccacaaaaccctagg

SEQ ID NO: 5092407 - DNA, 25 bp, Homo sapien
tcagtctcaggtatagcagcaagaa

SEQ ID NO: 5092408 - DNA, 25 bp, Homo sapien
gagttgatgccgaaatggacttcca

SEQ ID NO: 5092409 - DNA, 25 bp, Homo sapien
tgtatataagcttcacggcctactg

SEQ ID NO: 5092410 - DNA, 25 bp, Homo sapien
ggtgatcccagttagtcccatggct

SEQ ID NO: 5092411 - DNA, 25 bp, Homo sapien
tgacctccagtgttagagatgagcc

SEQ ID NO: 5092412 - DNA, 25 bp, Homo sapien
tttgagcatatgactaaaggcagca

SEQ ID NO: 5092413 - DNA, 25 bp, Homo sapien
tgcaaccaatgcactaaacccaggg

SEQ ID NO: 5092414 - DNA, 25 bp, Homo sapien
tcaagagatgtatatatcgtgcacg

SEQ ID NO: 5092415 - DNA, 25 bp, Homo sapien
caacaagatttcagttaaagtgacc

SEQ ID NO: 5092416 - DNA, 25 bp, Homo sapien
tttgcttattgtgagcaaaggccat

SEQ ID NO: 5092417 - DNA, 25 bp, Homo sapien
gcaaaggccatatttgtgaagtcct

SEQ ID NO: 5092418 - DNA, 25 bp, Homo sapien
aaaggccatatttgtgaagtccttt

SEQ ID NO: 5092419 - DNA, 25 bp, Homo sapien
caaaggccatatttgtgaagtcctt

SEQ ID NO: 5092420 - DNA, 25 bp, Homo sapien
aggtgcgcaaccacggagaacgccg

SEQ ID NO: 5092421 - DNA, 25 bp, Homo sapien
acgcagtgccctcggagggaaacac

SEQ ID NO: 5092422 - DNA, 25 bp, Homo sapien
actgggcacgttttgaacgatgtac

SEQ ID NO: 5092423 - DNA, 25 bp, Homo sapien
aacgatgtacgtcaggtgcgcaacc

SEQ ID NO: 5092424 - DNA, 25 bp, Homo sapien
ccttcttcagcaaatagattccgaa

SEQ ID NO: 5092425 - DNA, 25 bp, Homo sapien
tagattccgaactccttcaattaca

SEQ ID NO: 5092426 - DNA, 25 bp, Homo sapien
tataccttcttcagcaaatagattc

SEQ ID NO: 5092427 - DNA, 25 bp, Homo sapien
tcagcaaatagattccgaactcctt

SEQ ID NO: 5092428 - DNA, 25 bp, Homo sapien
caagctgtgcggcaactgaagagta

SEQ ID NO: 5092429 - DNA, 25 bp, Homo sapien
gtaaacagaggtgattggatgctat

SEQ ID NO: 5092430 - DNA, 25 bp, Homo sapien
gttgctttagactgcaaaaccttgg

SEQ ID NO: 5092431 - DNA, 25 bp, Homo sapien
ctgttgacgattgcaatgtttggtg

SEQ ID NO: 5092432 - DNA, 25 bp, Homo sapien
caattttatgagactatttatttca

SEQ ID NO: 5092433 - DNA, 25 bp, Homo sapien
tgaaaccaaacaccggttctctgaa

SEQ ID NO: 5092434 - DNA, 25 bp, Homo sapien
ttctatgaagccagcgtcgccttta

SEQ ID NO: 5092435 - DNA, 25 bp, Homo sapien
cagaccagatagactcacagctgaa

SEQ ID NO: 5092436 - DNA, 25 bp, Homo sapien
ggaagattccaataagcacagtcag

SEQ ID NO: 5092437 - DNA, 25 bp, Homo sapien
ggaagaagatagtcagtaggacaga

SEQ ID NO: 5092438 - DNA, 25 bp, Homo sapien
gacagaaatgcctccgcagaaggcc

SEQ ID NO: 5092439 - DNA, 25 bp, Homo sapien
cattgacagaaatgcctccgcagaa

SEQ ID NO: 5092440 - DNA, 25 bp, Homo sapien
aagaagatagtcagtaggacagagg

SEQ ID NO: 5092441 - DNA, 25 bp, Homo sapien
tacaatatctgggagattgcagact

SEQ ID NO: 5092442 - DNA, 25 bp, Homo sapien
acatttacaatatctgggagattgc

SEQ ID NO: 5092443 - DNA, 25 bp, Homo sapien
tttacaatatctgggagattgcaga

SEQ ID NO: 5092444 - DNA, 25 bp, Homo sapien
catttacaatatctgggagattgca

SEQ ID NO: 5092445 - DNA, 25 bp, Homo sapien
tatagctgttagaatgtcattttcc

SEQ ID NO: 5092446 - DNA, 25 bp, Homo sapien
tagctgttagaatgtcattttccct

SEQ ID NO: 5092447 - DNA, 25 bp, Homo sapien
atagctgttagaatgtcattttccc

SEQ ID NO: 5092448 - DNA, 25 bp, Homo sapien
ttggaagagttctaccagcaggaat

SEQ ID NO: 5092449 - DNA, 25 bp, Homo sapien
gctgtggtaaaacttggaagagttc

SEQ ID NO: 5092450 - DNA, 25 bp, Homo sapien
ctaccagcaggaataactaatgatg

SEQ ID NO: 5092451 - DNA, 25 bp, Homo sapien
gaagagttctaccagcaggaataac

SEQ ID NO: 5092452 - DNA, 25 bp, Homo sapien
catgaatgggataaccaggaaaagt

SEQ ID NO: 5092453 - DNA, 25 bp, Homo sapien
cagatacagtctgtagtgtcacacc

SEQ ID NO: 5092454 - DNA, 25 bp, Homo sapien
aaagtaaagtttgcactggagtttg

SEQ ID NO: 5092455 - DNA, 25 bp, Homo sapien
acctgctggtacatgaatgggataa

SEQ ID NO: 5092456 - DNA, 25 bp, Homo sapien
aattggtacattgactttataaagg

SEQ ID NO: 5092457 - DNA, 25 bp, Homo sapien
ggtacattgactttataaaggtgac

SEQ ID NO: 5092458 - DNA, 25 bp, Homo sapien
ttggtacattgactttataaaggtg

SEQ ID NO: 5092459 - DNA, 25 bp, Homo sapien
tggtacattgactttataaaggtga

SEQ ID NO: 5092460 - DNA, 25 bp, Homo sapien
tgaatatcagtcacgtgctggtgga

SEQ ID NO: 5092461 - DNA, 25 bp, Homo sapien
agtttgtattactgaaggctggcca

SEQ ID NO: 5092462 - DNA, 25 bp, Homo sapien
tagaattgcgggttgctgtagcacg

SEQ ID NO: 5092463 - DNA, 25 bp, Homo sapien
cagattttgagccatgctagctgaa

SEQ ID NO: 5092464 - DNA, 25 bp, Homo sapien
ggctgaatcctcatttgaaatactg

SEQ ID NO: 5092465 - DNA, 25 bp, Homo sapien
gagggtcttcattatcactactgtt

SEQ ID NO: 5092466 - DNA, 25 bp, Homo sapien
tgtatcaccgcttccatctacttga

SEQ ID NO: 5092467 - DNA, 25 bp, Homo sapien
tcagtaacccgaatgcttaaatcca

SEQ ID NO: 5092468 - DNA, 25 bp, Homo sapien
tgtcaaacaggtctggcacatcctg

SEQ ID NO: 5092469 - DNA, 25 bp, Homo sapien
acaataacattatccgtgtcaaaca

SEQ ID NO: 5092470 - DNA, 25 bp, Homo sapien
cttatcatactgacagacaataaca

SEQ ID NO: 5092471 - DNA, 25 bp, Homo sapien
ggcacatcctgttcactaacatcat

SEQ ID NO: 5092472 - DNA, 25 bp, Homo sapien
ctctgcatcaccaatggcttttgca

SEQ ID NO: 5092473 - DNA, 25 bp, Homo sapien
aaatacatagtctctccctccaaaa

SEQ ID NO: 5092474 - DNA, 25 bp, Homo sapien
tctgcatcaccaatggcttttgcaa

SEQ ID NO: 5092475 - DNA, 25 bp, Homo sapien
gcaaatacatagtctctccctccaa

SEQ ID NO: 5092476 - DNA, 25 bp, Homo sapien
tatgcaatataatccaactgatgtt

SEQ ID NO: 5092477 - DNA, 25 bp, Homo sapien
cagctctgtgctggactatattcaa

SEQ ID NO: 5092478 - DNA, 25 bp, Homo sapien
aatagatgtactgagctcacaaggt

SEQ ID NO: 5092479 - DNA, 25 bp, Homo sapien
taaattccatacagtgaactaaaaa

SEQ ID NO: 5092480 - DNA, 25 bp, Homo sapien
tcagccctggagtgggtacatttca

SEQ ID NO: 5092481 - DNA, 25 bp, Homo sapien
cctgggagttctcaagatccagaga

SEQ ID NO: 5092482 - DNA, 25 bp, Homo sapien
gagaaggatctagaatagcactggt

SEQ ID NO: 5092483 - DNA, 25 bp, Homo sapien
tggaaggcaacacccttgaaaagaa

SEQ ID NO: 5092484 - DNA, 25 bp, Homo sapien
ctttaatgataaagtatactacaca

SEQ ID NO: 5092485 - DNA, 25 bp, Homo sapien
cagtatttgtaatataccatttaaa

SEQ ID NO: 5092486 - DNA, 25 bp, Homo sapien
ggcacttgaaccaacacattaattc

SEQ ID NO: 5092487 - DNA, 25 bp, Homo sapien
aagaggcccaatatcataacagtat

SEQ ID NO: 5092488 - DNA, 25 bp, Homo sapien
tctactatagtcaggactcttcctt

SEQ ID NO: 5092489 - DNA, 25 bp, Homo sapien
aaataatgtataacccacagtggtc

SEQ ID NO: 5092490 - DNA, 25 bp, Homo sapien
ccctacactgctgggtattattaat

SEQ ID NO: 5092491 - DNA, 25 bp, Homo sapien
cttattcacctatgataggagtttt

SEQ ID NO: 5092492 - DNA, 25 bp, Homo sapien
ccagagtcgctaggggtcctcccaa

SEQ ID NO: 5092493 - DNA, 25 bp, Homo sapien
cattttcagccagcaacttctggtg

SEQ ID NO: 5092494 - DNA, 25 bp, Homo sapien
gggtcctcccaagcatatgaaggtc

SEQ ID NO: 5092495 - DNA, 25 bp, Homo sapien
gcatatgaaggtcgcctgcttttgc

SEQ ID NO: 5092496 - DNA, 25 bp, Homo sapien
ctttagaagcttgagagcagtgctt

SEQ ID NO: 5092497 - DNA, 25 bp, Homo sapien
ctctttagaagcttgagagcagtgc

SEQ ID NO: 5092498 - DNA, 25 bp, Homo sapien
ttagaagcttgagagcagtgcttcc

SEQ ID NO: 5092499 - DNA, 25 bp, Homo sapien
ctggaaatagggaactggctctcac

SEQ ID NO: 5092500 - DNA, 25 bp, Homo sapien
cagtggggcagaatctgcttggcca

SEQ ID NO: 5092501 - DNA, 25 bp, Homo sapien
tctcctgagaggagtctctcatcac

SEQ ID NO: 5092502 - DNA, 25 bp, Homo sapien
cctcagtgtacagggtccacagtgg

SEQ ID NO: 5092503 - DNA, 25 bp, Homo sapien
accctcagtgtacagggtccacagt

SEQ ID NO: 5092504 - DNA, 25 bp, Homo sapien
aggtgttaaacgatgtccttcttgg

SEQ ID NO: 5092505 - DNA, 25 bp, Homo sapien
taggtgttaaacgatgtccttcttg

SEQ ID NO: 5092506 - DNA, 25 bp, Homo sapien
tggcagtgcagagagcaataaaact

SEQ ID NO: 5092507 - DNA, 25 bp, Homo sapien
tatgccatcacaagaagatttcttc

SEQ ID NO: 5092508 - DNA, 25 bp, Homo sapien
gtccctgttcttctcggatcctttg

SEQ ID NO: 5092509 - DNA, 25 bp, Homo sapien
taatcaggaagccaagcgaacatga

SEQ ID NO: 5092510 - DNA, 25 bp, Homo sapien
tgcccagctaaagcatccaagccca

SEQ ID NO: 5092511 - DNA, 25 bp, Homo sapien
ctaatacctgattattggctgtttt

SEQ ID NO: 5092512 - DNA, 25 bp, Homo sapien
ctcctaatacctgattattggctgt

SEQ ID NO: 5092513 - DNA, 25 bp, Homo sapien
gcccagctaaagcatccaagcccat

SEQ ID NO: 5092514 - DNA, 25 bp, Homo sapien
catgagtagcagcagacagcatttc

SEQ ID NO: 5092515 - DNA, 25 bp, Homo sapien
tgcactgtaggtattggctcaatga

SEQ ID NO: 5092516 - DNA, 25 bp, Homo sapien
gatcaacaggacagactgggcagaa

SEQ ID NO: 5092517 - DNA, 25 bp, Homo sapien
tctgagcccacagaggtgaggatgc

SEQ ID NO: 5092518 - DNA, 25 bp, Homo sapien
ttgatctgcttgatatggaaacagc

SEQ ID NO: 5092519 - DNA, 25 bp, Homo sapien
gaaaggttgatctgcttgatatgga

SEQ ID NO: 5092520 - DNA, 25 bp, Homo sapien
caacagaaaggttgatctgcttgat

SEQ ID NO: 5092521 - DNA, 25 bp, Homo sapien
tatgacaacagaaaggttgatctgc

SEQ ID NO: 5092522 - DNA, 25 bp, Homo sapien
cagtcacacgggcatcttagtgagc

SEQ ID NO: 5092523 - DNA, 25 bp, Homo sapien
tgactgctggcagtcacacgggcat

SEQ ID NO: 5092524 - DNA, 25 bp, Homo sapien
tggtctaatggaccaaaggccctgt

SEQ ID NO: 5092525 - DNA, 25 bp, Homo sapien
gaacttcagtctcatggtctaatgg

SEQ ID NO: 5092526 - DNA, 25 bp, Homo sapien
gctctctgccgctgcttgaagggaa

SEQ ID NO: 5092527 - DNA, 25 bp, Homo sapien
tctgccagagaagtcttacaggcct

SEQ ID NO: 5092528 - DNA, 25 bp, Homo sapien
gaatatgggtgtgacgctcctcaac

SEQ ID NO: 5092529 - DNA, 25 bp, Homo sapien
gtagaactattcaggaacctcaggg

SEQ ID NO: 5092530 - DNA, 25 bp, Homo sapien
tctgagagccccagccccattcttt

SEQ ID NO: 5092531 - DNA, 25 bp, Homo sapien
ccatgcctctgagagccccagcccc

SEQ ID NO: 5092532 - DNA, 25 bp, Homo sapien
ctctgagagccccagccccattctt

SEQ ID NO: 5092533 - DNA, 25 bp, Homo sapien
caccccatgcctctgagagccccag

SEQ ID NO: 5092534 - DNA, 25 bp, Homo sapien
ctggaagcttggagaaaaacgcttt

SEQ ID NO: 5092535 - DNA, 25 bp, Homo sapien
atgagaacccaaaacttggtggttg

SEQ ID NO: 5092536 - DNA, 25 bp, Homo sapien
ggagaaaaacgctttgccctatcaa

SEQ ID NO: 5092537 - DNA, 25 bp, Homo sapien
tcccccacgttttagggtgatgaga

SEQ ID NO: 5092538 - DNA, 25 bp, Homo sapien
tcttccagcaaaactgctaggattt

SEQ ID NO: 5092539 - DNA, 25 bp, Homo sapien
taggatttccagaatccaaacagaa

SEQ ID NO: 5092540 - DNA, 25 bp, Homo sapien
ctaggatttccagaatccaaacaga

SEQ ID NO: 5092541 - DNA, 25 bp, Homo sapien
ccacctcttccagcaaaactgctag

SEQ ID NO: 5092542 - DNA, 25 bp, Homo sapien
catccaaatggcactcttggtcttg

SEQ ID NO: 5092543 - DNA, 25 bp, Homo sapien
tctcaggcatgctcagcacttctgc

SEQ ID NO: 5092544 - DNA, 25 bp, Homo sapien
ctcaactctgcacatccaaatggca

SEQ ID NO: 5092545 - DNA, 25 bp, Homo sapien
tcttggtcttgatcactcccatctc

SEQ ID NO: 5092546 - DNA, 25 bp, Homo sapien
gtgtttctcttgctttacgtgagtg

SEQ ID NO: 5092547 - DNA, 25 bp, Homo sapien
ctcttgctttacgtgagtgtatttc

SEQ ID NO: 5092548 - DNA, 25 bp, Homo sapien
cttgctttacgtgagtgtatttcag

SEQ ID NO: 5092549 - DNA, 25 bp, Homo sapien
gtttctcttgctttacgtgagtgta

SEQ ID NO: 5092550 - DNA, 25 bp, Homo sapien
ctcagaaaattaggattagggcctc

SEQ ID NO: 5092551 - DNA, 25 bp, Homo sapien
tgtcaggcatttacaggagtcttct

SEQ ID NO: 5092552 - DNA, 25 bp, Homo sapien
ttgctgcccatgacgaaccctggta

SEQ ID NO: 5092553 - DNA, 25 bp, Homo sapien
gagttcacatgctcctagacttgca

SEQ ID NO: 5092554 - DNA, 25 bp, Homo sapien
aagggctcgatgtgcagggcctcat

SEQ ID NO: 5092555 - DNA, 25 bp, Homo sapien
ggcctcataggtgtctctgacccga

SEQ ID NO: 5092556 - DNA, 25 bp, Homo sapien
aggtgtctctgacccgacccagaaa

SEQ ID NO: 5092557 - DNA, 25 bp, Homo sapien
gggaagccaaactcatgcatcgtct

SEQ ID NO: 5092558 - DNA, 25 bp, Homo sapien
caggaggactgctgcctctaaggct

SEQ ID NO: 5092559 - DNA, 25 bp, Homo sapien
gcctctaaggctggcttccactgtt

SEQ ID NO: 5092560 - DNA, 25 bp, Homo sapien
tcaatttcgatttatttagctgtgg

SEQ ID NO: 5092561 - DNA, 25 bp, Homo sapien
ccacgctctccagaatcacctcaaa

SEQ ID NO: 5092562 - DNA, 25 bp, Homo sapien
gcattaatagctccacctcacggca

SEQ ID NO: 5092563 - DNA, 25 bp, Homo sapien
gaccgcagatgtacagcatgccaca

SEQ ID NO: 5092564 - DNA, 25 bp, Homo sapien
ttagcttagacatgcagagcctgca

SEQ ID NO: 5092565 - DNA, 25 bp, Homo sapien
acacagtatcttgcccacaggacga

SEQ ID NO: 5092566 - DNA, 25 bp, Homo sapien
ccagggtctgattcaattcagtctt

SEQ ID NO: 5092567 - DNA, 25 bp, Homo sapien
caatctataggaagaactgtaggtg

SEQ ID NO: 5092568 - DNA, 25 bp, Homo sapien
tgtggccgcactgaacaatctatag

SEQ ID NO: 5092569 - DNA, 25 bp, Homo sapien
caagataacgattgaaccagggtct

SEQ ID NO: 5092570 - DNA, 25 bp, Homo sapien
gggtgaaaatctcatttccttttgc

SEQ ID NO: 5092571 - DNA, 25 bp, Homo sapien
aaaatctcatttccttttgccccat

SEQ ID NO: 5092572 - DNA, 25 bp, Homo sapien
tgaaaatctcatttccttttgcccc

SEQ ID NO: 5092573 - DNA, 25 bp, Homo sapien
ggtgaaaatctcatttccttttgcc

SEQ ID NO: 5092574 - DNA, 25 bp, Homo sapien
catttccccagagcttcattttcaa

SEQ ID NO: 5092575 - DNA, 25 bp, Homo sapien
ccatttccccagagcttcattttca

SEQ ID NO: 5092576 - DNA, 25 bp, Homo sapien
tccccagagcttcattttcaaagag

SEQ ID NO: 5092577 - DNA, 25 bp, Homo sapien
tttccccagagcttcattttcaaag

SEQ ID NO: 5092578 - DNA, 25 bp, Homo sapien
agaaccagctgggttgtcaagacag

SEQ ID NO: 5092579 - DNA, 25 bp, Homo sapien
aaccagctgggttgtcaagacagga

SEQ ID NO: 5092580 - DNA, 25 bp, Homo sapien
cagggggtttgagcccctgatggtt

SEQ ID NO: 5092581 - DNA, 25 bp, Homo sapien
caggagaaatgactcttccaggggg

SEQ ID NO: 5092582 - DNA, 25 bp, Homo sapien
ccatcaagcttggagcagactttca

SEQ ID NO: 5092583 - DNA, 25 bp, Homo sapien
ctatgaaagggcttttgaggcatca

SEQ ID NO: 5092584 - DNA, 25 bp, Homo sapien
gaggcatcagagattcaatgaagcc

SEQ ID NO: 5092585 - DNA, 25 bp, Homo sapien
tatgcaatctatgaaagggcttttg

SEQ ID NO: 5092586 - DNA, 25 bp, Homo sapien
aaggaggacaggcatatgcattcat

SEQ ID NO: 5092587 - DNA, 25 bp, Homo sapien
ttctctgctgagtatcagggactgt

SEQ ID NO: 5092588 - DNA, 25 bp, Homo sapien
gaggacaggcatatgcattcatgta

SEQ ID NO: 5092589 - DNA, 25 bp, Homo sapien
cattctctgctgagtatcagggact

SEQ ID NO: 5092590 - DNA, 25 bp, Homo sapien
tttgacatctctcagcaggaccaag

SEQ ID NO: 5092591 - DNA, 25 bp, Homo sapien
gaccaagggtctccacctggcaggg

SEQ ID NO: 5092592 - DNA, 25 bp, Homo sapien
ttttcctactacaggctcctgcgtc

SEQ ID NO: 5092593 - DNA, 25 bp, Homo sapien
cgtccctgtagtaggaaatgtcaaa

SEQ ID NO: 5092594 - DNA, 25 bp, Homo sapien
tcaaatgtatccttgggttgtagcc

SEQ ID NO: 5092595 - DNA, 25 bp, Homo sapien
aaatgtatccttgggttgtagcctg

SEQ ID NO: 5092596 - DNA, 25 bp, Homo sapien
attcaaatgtatccttgggttgtag

SEQ ID NO: 5092597 - DNA, 25 bp, Homo sapien
gtatccttgggttgtagcctggtct

SEQ ID NO: 5092598 - DNA, 25 bp, Homo sapien
tgtttcctagagagtcagccgacgc

SEQ ID NO: 5092599 - DNA, 25 bp, Homo sapien
tgaacgcctgttggcaagctccaaa

SEQ ID NO: 5092600 - DNA, 25 bp, Homo sapien
tgcatttgacccatctgaacgcctg

SEQ ID NO: 5092601 - DNA, 25 bp, Homo sapien
cccatggtgcgcatctctggcagta

SEQ ID NO: 5092602 - DNA, 25 bp, Homo sapien
cagaaaagcccggactttccagaag

SEQ ID NO: 5092603 - DNA, 25 bp, Homo sapien
gatcagcacaatcagccagcagcac

SEQ ID NO: 5092604 - DNA, 25 bp, Homo sapien
gaaaagcccggactttccagaagca

SEQ ID NO: 5092605 - DNA, 25 bp, Homo sapien
ctaggatcagcacaatcagccagca

SEQ ID NO: 5092606 - DNA, 25 bp, Homo sapien
ttagtggtagattctgcaccaaaac

SEQ ID NO: 5092607 - DNA, 25 bp, Homo sapien
caaggcgttaacctgtttctcttga

SEQ ID NO: 5092608 - DNA, 25 bp, Homo sapien
tgcttctggcacagacagatttgta

SEQ ID NO: 5092609 - DNA, 25 bp, Homo sapien
gctctaggcaactgtaaggcttcca

SEQ ID NO: 5092610 - DNA, 25 bp, Homo sapien
gagggagacctggtgcagccatgtg

SEQ ID NO: 5092611 - DNA, 25 bp, Homo sapien
tagtcactgccaagttcaatgtact

SEQ ID NO: 5092612 - DNA, 25 bp, Homo sapien
atgtactgacatcgtctttctccag

SEQ ID NO: 5092613 - DNA, 25 bp, Homo sapien
ttcccaaccctgagcacctaaaatc

SEQ ID NO: 5092614 - DNA, 25 bp, Homo sapien
accctgagcacctaaaatcccattt

SEQ ID NO: 5092615 - DNA, 25 bp, Homo sapien
tctcctttcttctgcgcccacctga

SEQ ID NO: 5092616 - DNA, 25 bp, Homo sapien
ttccacaaatagtcccggatgtgtg

SEQ ID NO: 5092617 - DNA, 25 bp, Homo sapien
ttcttctgcgcccacctgacctcta

SEQ ID NO: 5092618 - DNA, 25 bp, Homo sapien
tgttccacaaatagtcccggatgtg

SEQ ID NO: 5092619 - DNA, 25 bp, Homo sapien
cactgggacacatatgtgggcagac

SEQ ID NO: 5092620 - DNA, 25 bp, Homo sapien
gagctggtaataggagggctccaaa

SEQ ID NO: 5092621 - DNA, 25 bp, Homo sapien
ggagaccaacctatcatctgggaag

SEQ ID NO: 5092622 - DNA, 25 bp, Homo sapien
tacaacaggttgtgggatatcatat

SEQ ID NO: 5092623 - DNA, 25 bp, Homo sapien
ttagtttgagttgctattactgtac

SEQ ID NO: 5092624 - DNA, 25 bp, Homo sapien
tagcattcactgccatttttagtaa

SEQ ID NO: 5092625 - DNA, 25 bp, Homo sapien
gtaaagctggacatttagcattcac

SEQ ID NO: 5092626 - DNA, 25 bp, Homo sapien
attactgtacttattgtaaagctgg

SEQ ID NO: 5092627 - DNA, 25 bp, Homo sapien
gacagtggtacatccttcccaagct

SEQ ID NO: 5092628 - DNA, 25 bp, Homo sapien
gtgattcacaatctcccgacagtgg

SEQ ID NO: 5092629 - DNA, 25 bp, Homo sapien
aaacacggagacaatcgagagcacc

SEQ ID NO: 5092630 - DNA, 25 bp, Homo sapien
gcagtgttaaaactacaagagctag

SEQ ID NO: 5092631 - DNA, 25 bp, Homo sapien
tagctaataaaaatggttgagatct

SEQ ID NO: 5092632 - DNA, 25 bp, Homo sapien
tggttgagatctgccagcgttttcc

SEQ ID NO: 5092633 - DNA, 25 bp, Homo sapien
taaaaatggttgagatctgccagcg

SEQ ID NO: 5092634 - DNA, 25 bp, Homo sapien
tgagatctgccagcgttttccctgc

SEQ ID NO: 5092635 - DNA, 25 bp, Homo sapien
tctaggcaaccggtcacccagagta

SEQ ID NO: 5092636 - DNA, 25 bp, Homo sapien
agagctgccctgatgttaccctgcc

SEQ ID NO: 5092637 - DNA, 25 bp, Homo sapien
tttcctgcccatagatctaggcaac

SEQ ID NO: 5092638 - DNA, 25 bp, Homo sapien
caggtgttgtcactactagcttcac

SEQ ID NO: 5092639 - DNA, 25 bp, Homo sapien
tcatttttcctcgttgcctctgcac

SEQ ID NO: 5092640 - DNA, 25 bp, Homo sapien
catttttcctcgttgcctctgcact

SEQ ID NO: 5092641 - DNA, 25 bp, Homo sapien
cacttctgttgactctgcactcgca

SEQ ID NO: 5092642 - DNA, 25 bp, Homo sapien
tgactctgcactcgcaacttttcat

SEQ ID NO: 5092643 - DNA, 25 bp, Homo sapien
tgttgggcaccgggcatccttccca

SEQ ID NO: 5092644 - DNA, 25 bp, Homo sapien
tctgttgactctgcactcgcaactt

SEQ ID NO: 5092645 - DNA, 25 bp, Homo sapien
ggtctcagagggcacctcatttgcc

SEQ ID NO: 5092646 - DNA, 25 bp, Homo sapien
tgctctagactgattgtctgtgatg

SEQ ID NO: 5092647 - DNA, 25 bp, Homo sapien
ggaaaagaatctagctgctctagac

SEQ ID NO: 5092648 - DNA, 25 bp, Homo sapien
tcacaaaacatgtatccctcaggtt

SEQ ID NO: 5092649 - DNA, 25 bp, Homo sapien
tccggagtcaccacacggctgttaa

SEQ ID NO: 5092650 - DNA, 25 bp, Homo sapien
tatgaccaacatcaaaccactccgg

SEQ ID NO: 5092651 - DNA, 25 bp, Homo sapien
gcaaagctgacaatgatggtgggaa

SEQ ID NO: 5092652 - DNA, 25 bp, Homo sapien
ctattggtggtggaaattgcaaagc

SEQ ID NO: 5092653 - DNA, 25 bp, Homo sapien
gcagtgccataagaaggatgcggca

SEQ ID NO: 5092654 - DNA, 25 bp, Homo sapien
gatgcagtgccataagaaggatgcg

SEQ ID NO: 5092655 - DNA, 25 bp, Homo sapien
tgcagtgccataagaaggatgcggc

SEQ ID NO: 5092656 - DNA, 25 bp, Homo sapien
cagtgccataagaaggatgcggcat

SEQ ID NO: 5092657 - DNA, 25 bp, Homo sapien
cagggcttcgagtggtaaatggccc

SEQ ID NO: 5092658 - DNA, 25 bp, Homo sapien
tccagggcttcgagtggtaaatggc

SEQ ID NO: 5092659 - DNA, 25 bp, Homo sapien
ccagggcttcgagtggtaaatggcc

SEQ ID NO: 5092660 - DNA, 25 bp, Homo sapien
caggccagaagtcctttctcacact

SEQ ID NO: 5092661 - DNA, 25 bp, Homo sapien
tggagccctctttaaactgacaata

SEQ ID NO: 5092662 - DNA, 25 bp, Homo sapien
tcaatggagccctctttaaactgac

SEQ ID NO: 5092663 - DNA, 25 bp, Homo sapien
ttgtagggggtatcaatggagccct

SEQ ID NO: 5092664 - DNA, 25 bp, Homo sapien
aatggagccctctttaaactgacaa

SEQ ID NO: 5092665 - DNA, 25 bp, Homo sapien
caggtacggtatcaaaaaggcacaa

SEQ ID NO: 5092666 - DNA, 25 bp, Homo sapien
caaaaaggcacaatcgaacccagag

SEQ ID NO: 5092667 - DNA, 25 bp, Homo sapien
caatcgaacccagagagaattatta

SEQ ID NO: 5092668 - DNA, 25 bp, Homo sapien
gaagccatttgttacaggtacggta

SEQ ID NO: 5092669 - DNA, 25 bp, Homo sapien
tggataacagctttgcatgcagggc

SEQ ID NO: 5092670 - DNA, 25 bp, Homo sapien
tgtgactcaaatacaaaagcagcca

SEQ ID NO: 5092671 - DNA, 25 bp, Homo sapien
caaggcttccaagggataaaataag

SEQ ID NO: 5092672 - DNA, 25 bp, Homo sapien
taagggtgctacattcaaggcttcc

SEQ ID NO: 5092673 - DNA, 25 bp, Homo sapien
tctcaggaccaataggagacaaagg

SEQ ID NO: 5092674 - DNA, 25 bp, Homo sapien
cacggacagtctcaggaccaatagg

SEQ ID NO: 5092675 - DNA, 25 bp, Homo sapien
ggaggtgcaggagtagggcttttgc

SEQ ID NO: 5092676 - DNA, 25 bp, Homo sapien
aaaacacggacagtctcaggaccaa

SEQ ID NO: 5092677 - DNA, 25 bp, Homo sapien
ccaatatcttgggtggcctaactgg

SEQ ID NO: 5092678 - DNA, 25 bp, Homo sapien
cagtaccctccatcctcaataggag

SEQ ID NO: 5092679 - DNA, 25 bp, Homo sapien
gaaccaggttgttgatccccaatat

SEQ ID NO: 5092680 - DNA, 25 bp, Homo sapien
gtcccaaaggtacagcaaaggcctg

SEQ ID NO: 5092681 - DNA, 25 bp, Homo sapien
tccaaagagagtacaatttctgtta

SEQ ID NO: 5092682 - DNA, 25 bp, Homo sapien
gtattgttaattcttgctccctcca

SEQ ID NO: 5092683 - DNA, 25 bp, Homo sapien
tactctttcaaatatgtatgaagaa

SEQ ID NO: 5092684 - DNA, 25 bp, Homo sapien
tatgtactccaaagagagtacaatt

SEQ ID NO: 5092685 - DNA, 25 bp, Homo sapien
ttgtcagcaattgcagtctaattgg

SEQ ID NO: 5092686 - DNA, 25 bp, Homo sapien
cagtctaattggaaagcaagttgct

SEQ ID NO: 5092687 - DNA, 25 bp, Homo sapien
agcaagttgctatggtaattcctgt

SEQ ID NO: 5092688 - DNA, 25 bp, Homo sapien
gaaagcaagttgctatggtaattcc

SEQ ID NO: 5092689 - DNA, 25 bp, Homo sapien
cccttacttttgcacagcatttagg

SEQ ID NO: 5092690 - DNA, 25 bp, Homo sapien
cttacttttgcacagcatttaggtg

SEQ ID NO: 5092691 - DNA, 25 bp, Homo sapien
ttcccccttacttttgcacagcatt

SEQ ID NO: 5092692 - DNA, 25 bp, Homo sapien
tgattttcccccttacttttgcaca

SEQ ID NO: 5092693 - DNA, 25 bp, Homo sapien
agcagagactagtatagggaacagg

SEQ ID NO: 5092694 - DNA, 25 bp, Homo sapien
ccatgcttcccatgatgctgtatgc

SEQ ID NO: 5092695 - DNA, 25 bp, Homo sapien
cagggatgcagggtgaaaggctcgc

SEQ ID NO: 5092696 - DNA, 25 bp, Homo sapien
gaaaggctcgccatgcttcccatga

SEQ ID NO: 5092697 - DNA, 25 bp, Homo sapien
attaaacatttgagccctccagact

SEQ ID NO: 5092698 - DNA, 25 bp, Homo sapien
tgtgtttactttctgcagtgttgca

SEQ ID NO: 5092699 - DNA, 25 bp, Homo sapien
aaatgctccctgatagctggctttg

SEQ ID NO: 5092700 - DNA, 25 bp, Homo sapien
ggagtggcaggcagaaagtcaatca

SEQ ID NO: 5092701 - DNA, 25 bp, Homo sapien
tataaggcctataaagaccaggctt

SEQ ID NO: 5092702 - DNA, 25 bp, Homo sapien
cactgggtagccacctgtgtaagca

SEQ ID NO: 5092703 - DNA, 25 bp, Homo sapien
tgggagggcttgttgccacaaaaga

SEQ ID NO: 5092704 - DNA, 25 bp, Homo sapien
gaaacacgtcgaatgtgacactggg

SEQ ID NO: 5092705 - DNA, 25 bp, Homo sapien
ttgctcaaagatttctcctcctact

SEQ ID NO: 5092706 - DNA, 25 bp, Homo sapien
cctcatgctttaaggactgtagtcc

SEQ ID NO: 5092707 - DNA, 25 bp, Homo sapien
gctcaaagatttctcctcctactgg

SEQ ID NO: 5092708 - DNA, 25 bp, Homo sapien
catcttcctcatgctttaaggactg

SEQ ID NO: 5092709 - DNA, 25 bp, Homo sapien
ttccttactccaggctttatgcaag

SEQ ID NO: 5092710 - DNA, 25 bp, Homo sapien
gattttccttactccaggctttatg

SEQ ID NO: 5092711 - DNA, 25 bp, Homo sapien
ttttccttactccaggctttatgca

SEQ ID NO: 5092712 - DNA, 25 bp, Homo sapien
gattccccagtttctctaatgggaa

SEQ ID NO: 5092713 - DNA, 25 bp, Homo sapien
aacaagaaagtggagcactgttgac

SEQ ID NO: 5092714 - DNA, 25 bp, Homo sapien
aaagataacaagaaagtggagcact

SEQ ID NO: 5092715 - DNA, 25 bp, Homo sapien
gagcactgttgacctttgtatactg

SEQ ID NO: 5092716 - DNA, 25 bp, Homo sapien
aagtggagcactgttgacctttgta

SEQ ID NO: 5092717 - DNA, 25 bp, Homo sapien
aacgctgggccctgatttaaggcca

SEQ ID NO: 5092718 - DNA, 25 bp, Homo sapien
tatcaatcaacgctgggccctgatt

SEQ ID NO: 5092719 - DNA, 25 bp, Homo sapien
caacgctgggccctgatttaaggcc

SEQ ID NO: 5092720 - DNA, 25 bp, Homo sapien
gcttctttatcaatcaacgctgggc

SEQ ID NO: 5092721 - DNA, 25 bp, Homo sapien
aagaaaccatctatcccattcctat

SEQ ID NO: 5092722 - DNA, 25 bp, Homo sapien
tatcatagaccgacaatgaaagaaa

SEQ ID NO: 5092723 - DNA, 25 bp, Homo sapien
gaatgtttagctcaggtaatagtat

SEQ ID NO: 5092724 - DNA, 25 bp, Homo sapien
gtaatagtatcatagaccgacaatg

SEQ ID NO: 5092725 - DNA, 25 bp, Homo sapien
caaagcagttgaaagacgtgggagt

SEQ ID NO: 5092726 - DNA, 25 bp, Homo sapien
ttttatggagacagtaggatttcca

SEQ ID NO: 5092727 - DNA, 25 bp, Homo sapien
gagaagcaagagaaggttttatgga

SEQ ID NO: 5092728 - DNA, 25 bp, Homo sapien
tagatctatgtcaggcagagaagca

SEQ ID NO: 5092729 - DNA, 25 bp, Homo sapien
tcaagaaatttatcaaggttcacag

SEQ ID NO: 5092730 - DNA, 25 bp, Homo sapien
ctgatgaatgacaccagctaattca

SEQ ID NO: 5092731 - DNA, 25 bp, Homo sapien
gaaatttatcaaggttcacagagta

SEQ ID NO: 5092732 - DNA, 25 bp, Homo sapien
ttcatcaagaaatttatcaaggttc

SEQ ID NO: 5092733 - DNA, 25 bp, Homo sapien
gctgacttgcttgtttggaccacaa

SEQ ID NO: 5092734 - DNA, 25 bp, Homo sapien
agcagggtgatcgtgctgtaagcac

SEQ ID NO: 5092735 - DNA, 25 bp, Homo sapien
gacattagtgctttagagatcccgt

SEQ ID NO: 5092736 - DNA, 25 bp, Homo sapien
gaaaaaccatatcctggctgacttg

SEQ ID NO: 5092737 - DNA, 25 bp, Homo sapien
cctcttggccatttgatactccaag

SEQ ID NO: 5092738 - DNA, 25 bp, Homo sapien
ctcttggccatttgatactccaagc

SEQ ID NO: 5092739 - DNA, 25 bp, Homo sapien
ttatccatgaggttagagtgggatt

SEQ ID NO: 5092740 - DNA, 25 bp, Homo sapien
ccatgaggttagagtgggatttcct

SEQ ID NO: 5092741 - DNA, 25 bp, Homo sapien
tttatccatgaggttagagtgggat

SEQ ID NO: 5092742 - DNA, 25 bp, Homo sapien
tgaggttagagtgggatttccttgg

SEQ ID NO: 5092743 - DNA, 25 bp, Homo sapien
tatttttaacttgctaggtgtgtcc

SEQ ID NO: 5092744 - DNA, 25 bp, Homo sapien
atttttaacttgctaggtgtgtcct

SEQ ID NO: 5092745 - DNA, 25 bp, Homo sapien
ctatttttaacttgctaggtgtgtc

SEQ ID NO: 5092746 - DNA, 25 bp, Homo sapien
aggagaggctgatgattctactggc

SEQ ID NO: 5092747 - DNA, 25 bp, Homo sapien
ggagaggctgatgattctactggct

SEQ ID NO: 5092748 - DNA, 25 bp, Homo sapien
gagaggctgatgattctactggctc

SEQ ID NO: 5092749 - DNA, 25 bp, Homo sapien
caatgtggtgatttatggtaaccag

SEQ ID NO: 5092750 - DNA, 25 bp, Homo sapien
tatgtcagcttggtataaagtgtga

SEQ ID NO: 5092751 - DNA, 25 bp, Homo sapien
aacacatctatgtgttattataaca

SEQ ID NO: 5092752 - DNA, 25 bp, Homo sapien
aattacttcggagccatatgtcagc

SEQ ID NO: 5092753 - DNA, 25 bp, Homo sapien
cttggcaggattagatgtaggtttc

SEQ ID NO: 5092754 - DNA, 25 bp, Homo sapien
ttcaaggtgccacgttgtagtggtg

SEQ ID NO: 5092755 - DNA, 25 bp, Homo sapien
cctgggtcttgaggtgcaagtttgc

SEQ ID NO: 5092756 - DNA, 25 bp, Homo sapien
tagtggtgattatgcccctgaggag

SEQ ID NO: 5092757 - DNA, 25 bp, Homo sapien
gacatggtcagccaaactttctgca

SEQ ID NO: 5092758 - DNA, 25 bp, Homo sapien
gctatagggagcaacctcagaccac

SEQ ID NO: 5092759 - DNA, 25 bp, Homo sapien
cttagtagccgaactgacatggtca

SEQ ID NO: 5092760 - DNA, 25 bp, Homo sapien
caagcttcgagtcatccaaaaaggt

SEQ ID NO: 5092761 - DNA, 25 bp, Homo sapien
aaagctagaaaaagccagagagaag

SEQ ID NO: 5092762 - DNA, 25 bp, Homo sapien
ctagaaaaagccagagagaagaagg

SEQ ID NO: 5092763 - DNA, 25 bp, Homo sapien
gctagaaaaagccagagagaagaag

SEQ ID NO: 5092764 - DNA, 25 bp, Homo sapien
aagctagaaaaagccagagagaaga

SEQ ID NO: 5092765 - DNA, 25 bp, Homo sapien
tctcatgattcatcaccacagggtt

SEQ ID NO: 5092766 - DNA, 25 bp, Homo sapien
cacagggttggtacacctagcagcc

SEQ ID NO: 5092767 - DNA, 25 bp, Homo sapien
gcctgagtagcagctctatctgaaa

SEQ ID NO: 5092768 - DNA, 25 bp, Homo sapien
cagcacacagggttctctctcatga

SEQ ID NO: 5092769 - DNA, 25 bp, Homo sapien
aattataaatcgagtccatgaaacc

SEQ ID NO: 5092770 - DNA, 25 bp, Homo sapien
aaccttttgctactagtagaaagct

SEQ ID NO: 5092771 - DNA, 25 bp, Homo sapien
tataaatcgagtccatgaaaccatt

SEQ ID NO: 5092772 - DNA, 25 bp, Homo sapien
tactagtagaaagctccttacccat

SEQ ID NO: 5092773 - DNA, 25 bp, Homo sapien
tctccaatggaaagtgtatatatcc

SEQ ID NO: 5092774 - DNA, 25 bp, Homo sapien
taccaaaaagcctaacctccattga

SEQ ID NO: 5092775 - DNA, 25 bp, Homo sapien
cctccattgaacaaagaagaggatc

SEQ ID NO: 5092776 - DNA, 25 bp, Homo sapien
catttatgtactgtgtacacctgag

SEQ ID NO: 5092777 - DNA, 25 bp, Homo sapien
gcagaatctagagtaacaaaagttc

SEQ ID NO: 5092778 - DNA, 25 bp, Homo sapien
tctgaagaatttctggtaaaatttc

SEQ ID NO: 5092779 - DNA, 25 bp, Homo sapien
tgaattatcccaaccggggtgcaga

SEQ ID NO: 5092780 - DNA, 25 bp, Homo sapien
gagtaacaaaagttcaattctgaat

SEQ ID NO: 5092781 - DNA, 25 bp, Homo sapien
ctgctttagaggcacaatgcgtttg

SEQ ID NO: 5092782 - DNA, 25 bp, Homo sapien
ttaactgagggcacctaaagaactg

SEQ ID NO: 5092783 - DNA, 25 bp, Homo sapien
aatgcgtttgtcattctgcctgaaa

SEQ ID NO: 5092784 - DNA, 25 bp, Homo sapien
taaagtcgaattctgtttacccaca

SEQ ID NO: 5092785 - DNA, 25 bp, Homo sapien
tattctattccagcccttgctcaga

SEQ ID NO: 5092786 - DNA, 25 bp, Homo sapien
ggttcttcattcaggcaatgcacag

SEQ ID NO: 5092787 - DNA, 25 bp, Homo sapien
ctgctgtggaaacctttcatcttgg

SEQ ID NO: 5092788 - DNA, 25 bp, Homo sapien
tagctctctagcacagtagttcatc

SEQ ID NO: 5092789 - DNA, 25 bp, Homo sapien
ccccacacttggagtaaatgttctt

SEQ ID NO: 5092790 - DNA, 25 bp, Homo sapien
acttggagtaaatgttcttgccttc

SEQ ID NO: 5092791 - DNA, 25 bp, Homo sapien
ccacacttggagtaaatgttcttgc

SEQ ID NO: 5092792 - DNA, 25 bp, Homo sapien
cacacttggagtaaatgttcttgcc

SEQ ID NO: 5092793 - DNA, 25 bp, Homo sapien
tttgtaaacaccatacgtcttgatt

SEQ ID NO: 5092794 - DNA, 25 bp, Homo sapien
gtaaacaccatacgtcttgattttg

SEQ ID NO: 5092795 - DNA, 25 bp, Homo sapien
aacaccatacgtcttgattttgacc

SEQ ID NO: 5092796 - DNA, 25 bp, Homo sapien
ttttgtaaacaccatacgtcttgat

SEQ ID NO: 5092797 - DNA, 25 bp, Homo sapien
tagggataggtcctcactgtaccaa

SEQ ID NO: 5092798 - DNA, 25 bp, Homo sapien
tgtgagagatttgccagtgccactt

SEQ ID NO: 5092799 - DNA, 25 bp, Homo sapien
tagaggcaggccatcggttctgtag

SEQ ID NO: 5092800 - DNA, 25 bp, Homo sapien
taccaatgagccagccgttagaggc

SEQ ID NO: 5092801 - DNA, 25 bp, Homo sapien
ctgagaaagcagaaacttagttgtt

SEQ ID NO: 5092802 - DNA, 25 bp, Homo sapien
aacagggcacattgatgagaatcag

SEQ ID NO: 5092803 - DNA, 25 bp, Homo sapien
ccaacagggcacattgatgagaatc

SEQ ID NO: 5092804 - DNA, 25 bp, Homo sapien
gagccaacagggcacattgatgaga

SEQ ID NO: 5092805 - DNA, 25 bp, Homo sapien
gaatgtatcaatgtggagactggga

SEQ ID NO: 5092806 - DNA, 25 bp, Homo sapien
gaaagactgaatgtatcaatgtgga

SEQ ID NO: 5092807 - DNA, 25 bp, Homo sapien
gacagcactgctttgtcctgaaaga

SEQ ID NO: 5092808 - DNA, 25 bp, Homo sapien
ttgtcctgaaagactgaatgtatca

SEQ ID NO: 5092809 - DNA, 25 bp, Homo sapien
ttgtctgctcagtggccttgagtgg

SEQ ID NO: 5092810 - DNA, 25 bp, Homo sapien
ctttgtttgtctgctcagtggcctt

SEQ ID NO: 5092811 - DNA, 25 bp, Homo sapien
ttgtttgtctgctcagtggccttga

SEQ ID NO: 5092812 - DNA, 25 bp, Homo sapien
ccttgagtggggcagcttgcaggca

SEQ ID NO: 5092813 - DNA, 25 bp, Homo sapien
gagagaggtcaaaacatccagatgc

SEQ ID NO: 5092814 - DNA, 25 bp, Homo sapien
gagaggtcaaaacatccagatgcac

SEQ ID NO: 5092815 - DNA, 25 bp, Homo sapien
ggtggagagaggtcaaaacatccag

SEQ ID NO: 5092816 - DNA, 25 bp, Homo sapien
ggtcaaaacatccagatgcacctct

SEQ ID NO: 5092817 - DNA, 25 bp, Homo sapien
gaaaatccctgaatggcaggaacca

SEQ ID NO: 5092818 - DNA, 25 bp, Homo sapien
gcaggaaccatctccagccaaactg

SEQ ID NO: 5092819 - DNA, 25 bp, Homo sapien
taaaattattgaaggttattctgga

SEQ ID NO: 5092820 - DNA, 25 bp, Homo sapien
tgcactcatatcctctatctgttgg

SEQ ID NO: 5092821 - DNA, 25 bp, Homo sapien
ttagagggaaccacaaccatcaggc

SEQ ID NO: 5092822 - DNA, 25 bp, Homo sapien
gatgcttaaggcgagaggctgctcc

SEQ ID NO: 5092823 - DNA, 25 bp, Homo sapien
gagctgagggacttgccatcttgca

SEQ ID NO: 5092824 - DNA, 25 bp, Homo sapien
gaccaccattgtgaagcggtacagg

SEQ ID NO: 5092825 - DNA, 25 bp, Homo sapien
ctctttaccatcatagatggattaa

SEQ ID NO: 5092826 - DNA, 25 bp, Homo sapien
ccacattcatggaggcttttctttt

SEQ ID NO: 5092827 - DNA, 25 bp, Homo sapien
cttccacattcatggaggcttttct

SEQ ID NO: 5092828 - DNA, 25 bp, Homo sapien
ttcccttccacattcatggaggctt

SEQ ID NO: 5092829 - DNA, 25 bp, Homo sapien
tcccttccacattcatggaggcttt

SEQ ID NO: 5092830 - DNA, 25 bp, Homo sapien
tcacctctttagtcataacctctag

SEQ ID NO: 5092831 - DNA, 25 bp, Homo sapien
catggtctattaagtggcccgtttt

SEQ ID NO: 5092832 - DNA, 25 bp, Homo sapien
tcataacctctagagcgctgccctg

SEQ ID NO: 5092833 - DNA, 25 bp, Homo sapien
tcctcatacatggtctattaagtgg

SEQ ID NO: 5092834 - DNA, 25 bp, Homo sapien
tgcatacagccatctgccagagatt

SEQ ID NO: 5092835 - DNA, 25 bp, Homo sapien
catacagccatctgccagagatttc

SEQ ID NO: 5092836 - DNA, 25 bp, Homo sapien
gcatacagccatctgccagagattt

SEQ ID NO: 5092837 - DNA, 25 bp, Homo sapien
atacagccatctgccagagatttcc

SEQ ID NO: 5092838 - DNA, 25 bp, Homo sapien
cttagctctcttcttgactgtgcaa

SEQ ID NO: 5092839 - DNA, 25 bp, Homo sapien
gctctcttcttgactgtgcaaatgc

SEQ ID NO: 5092840 - DNA, 25 bp, Homo sapien
tagctctcttcttgactgtgcaaat

SEQ ID NO: 5092841 - DNA, 25 bp, Homo sapien
ctcttcttgactgtgcaaatgcaca

SEQ ID NO: 5092842 - DNA, 25 bp, Homo sapien
gggtgccaagacctccccacaagtg

SEQ ID NO: 5092843 - DNA, 25 bp, Homo sapien
tccccacaagtgtcctttttggcac

SEQ ID NO: 5092844 - DNA, 25 bp, Homo sapien
caagtgtcctttttggcacagttta

SEQ ID NO: 5092845 - DNA, 25 bp, Homo sapien
cctttttggcacagtttaaattcag

SEQ ID NO: 5092846 - DNA, 25 bp, Homo sapien
tgggagtataaccatcctgccaggt

SEQ ID NO: 5092847 - DNA, 25 bp, Homo sapien
caaaggctccctaagtgcaggtgat

SEQ ID NO: 5092848 - DNA, 25 bp, Homo sapien
caaaggaaatcatggcaagctggtt

SEQ ID NO: 5092849 - DNA, 25 bp, Homo sapien
tctgtgtcatcctgtggtaacgaag

SEQ ID NO: 5092850 - DNA, 25 bp, Homo sapien
catgtttcacatctaaaaaatgctg

SEQ ID NO: 5092851 - DNA, 25 bp, Homo sapien
aacatttccagaggtattaaggtag

SEQ ID NO: 5092852 - DNA, 25 bp, Homo sapien
ttaaggtagtgtgtccaaatgcgac

SEQ ID NO: 5092853 - DNA, 25 bp, Homo sapien
taagcatcacaaggacatgtttcac

SEQ ID NO: 5092854 - DNA, 25 bp, Homo sapien
agtcagggcaaggattgctttgatt

SEQ ID NO: 5092855 - DNA, 25 bp, Homo sapien
gtcagggcaaggattgctttgattt

SEQ ID NO: 5092856 - DNA, 25 bp, Homo sapien
cagtcagggcaaggattgctttgat

SEQ ID NO: 5092857 - DNA, 25 bp, Homo sapien
tatcacattccccaataatatcagt

SEQ ID NO: 5092858 - DNA, 25 bp, Homo sapien
cacattccccaataatatcagtctt

SEQ ID NO: 5092859 - DNA, 25 bp, Homo sapien
cattccccaataatatcagtcttca

SEQ ID NO: 5092860 - DNA, 25 bp, Homo sapien
tcacattccccaataatatcagtct

SEQ ID NO: 5092861 - DNA, 25 bp, Homo sapien
agataattcagtgataacagatttt

SEQ ID NO: 5092862 - DNA, 25 bp, Homo sapien
caagataattcagtgataacagatt

SEQ ID NO: 5092863 - DNA, 25 bp, Homo sapien
aagataattcagtgataacagattt

SEQ ID NO: 5092864 - DNA, 25 bp, Homo sapien
ctaagtgtttgtataatattggtac

SEQ ID NO: 5092865 - DNA, 25 bp, Homo sapien
gttctaagtgtttgtataatattgg

SEQ ID NO: 5092866 - DNA, 25 bp, Homo sapien
tcagtggtaatctgttctaagtgtt

SEQ ID NO: 5092867 - DNA, 25 bp, Homo sapien
ctgggatttcagtggtaatctgttc

SEQ ID NO: 5092868 - DNA, 25 bp, Homo sapien
tcataaccactgcaaagggagcgtg

SEQ ID NO: 5092869 - DNA, 25 bp, Homo sapien
gagcgtgtccaagggtgatatatgt

SEQ ID NO: 5092870 - DNA, 25 bp, Homo sapien
gcaaagggagcgtgtccaagggtga

SEQ ID NO: 5092871 - DNA, 25 bp, Homo sapien
aagggagcgtgtccaagggtgatat

SEQ ID NO: 5092872 - DNA, 25 bp, Homo sapien
ttaaagtgtcatccaactacaaaag

SEQ ID NO: 5092873 - DNA, 25 bp, Homo sapien
aagtgtcatccaactacaaaagacc

SEQ ID NO: 5092874 - DNA, 25 bp, Homo sapien
attcatcagtattatccacagggaa

SEQ ID NO: 5092875 - DNA, 25 bp, Homo sapien
catcagtattatccacagggaaaca

SEQ ID NO: 5092876 - DNA, 25 bp, Homo sapien
ctatataagcaccaaggtatccaga

SEQ ID NO: 5092877 - DNA, 25 bp, Homo sapien
cttgagctgctgtctatataagcac

SEQ ID NO: 5092878 - DNA, 25 bp, Homo sapien
tccttgagctgctgtctatataagc

SEQ ID NO: 5092879 - DNA, 25 bp, Homo sapien
atataagcaccaaggtatccagaat

SEQ ID NO: 5092880 - DNA, 25 bp, Homo sapien
tatctgaatcttgcatgaagggcat

SEQ ID NO: 5092881 - DNA, 25 bp, Homo sapien
ttatctgaatcttgcatgaagggca

SEQ ID NO: 5092882 - DNA, 25 bp, Homo sapien
gttatctgaatcttgcatgaagggc

SEQ ID NO: 5092883 - DNA, 25 bp, Homo sapien
tgcttctactgaatcccttctctct

SEQ ID NO: 5092884 - DNA, 25 bp, Homo sapien
tcccagtgcttctactgaatccctt

SEQ ID NO: 5092885 - DNA, 25 bp, Homo sapien
aacattctgcattgttcttccttgc

SEQ ID NO: 5092886 - DNA, 25 bp, Homo sapien
tcctctcccagtgcttctactgaat

SEQ ID NO: 5092887 - DNA, 25 bp, Homo sapien
agagtgtgtatcagagaaggaaagc

SEQ ID NO: 5092888 - DNA, 25 bp, Homo sapien
ggcaggattggcaagatgagagtgt

SEQ ID NO: 5092889 - DNA, 25 bp, Homo sapien
caagatgagagtgtgtatcagagaa

SEQ ID NO: 5092890 - DNA, 25 bp, Homo sapien
tcagacaagacaggtagcagaggca

SEQ ID NO: 5092891 - DNA, 25 bp, Homo sapien
ttctgattattgactattctagtac

SEQ ID NO: 5092892 - DNA, 25 bp, Homo sapien
actattctagtactgaagatctgca

SEQ ID NO: 5092893 - DNA, 25 bp, Homo sapien
gagaagcacttatcatcctatcaga

SEQ ID NO: 5092894 - DNA, 25 bp, Homo sapien
acagagaagcacttatcatcctatc

SEQ ID NO: 5092895 - DNA, 25 bp, Homo sapien
cagtgaggactgattgagtgcttcc

SEQ ID NO: 5092896 - DNA, 25 bp, Homo sapien
atcagtgaggactgattgagtgctt

SEQ ID NO: 5092897 - DNA, 25 bp, Homo sapien
gactgattgagtgcttccaatagcc

SEQ ID NO: 5092898 - DNA, 25 bp, Homo sapien
gaggactgattgagtgcttccaata

SEQ ID NO: 5092899 - DNA, 25 bp, Homo sapien
gaatgaccaggaatcctaacactgt

SEQ ID NO: 5092900 - DNA, 25 bp, Homo sapien
aatgaccaggaatcctaacactgtg

SEQ ID NO: 5092901 - DNA, 25 bp, Homo sapien
cataaggataggatgggcagagcaa

SEQ ID NO: 5092902 - DNA, 25 bp, Homo sapien
ctagaaatgtgccaagtacagtgct

SEQ ID NO: 5092903 - DNA, 25 bp, Homo sapien
cctttaaagggtgaggcatgtgctg

SEQ ID NO: 5092904 - DNA, 25 bp, Homo sapien
aatatatggtagtaagagagaagcc

SEQ ID NO: 5092905 - DNA, 25 bp, Homo sapien
acagtgtatacagccacttgctggg

SEQ ID NO: 5092906 - DNA, 25 bp, Homo sapien
ccctgacacatagactcttttaatg

SEQ ID NO: 5092907 - DNA, 25 bp, Homo sapien
aacagtgtatacagccacttgctgg

SEQ ID NO: 5092908 - DNA, 25 bp, Homo sapien
cagccctgacacatagactctttta

SEQ ID NO: 5092909 - DNA, 25 bp, Homo sapien
ccctgagtatttacagtcctgaaca

SEQ ID NO: 5092910 - DNA, 25 bp, Homo sapien
gcaaaataaggccaataactgttct

SEQ ID NO: 5092911 - DNA, 25 bp, Homo sapien
tgtgacatggtgagcaaaacatcga

SEQ ID NO: 5092912 - DNA, 25 bp, Homo sapien
tgaaaagatgctttccagtgctcct

SEQ ID NO: 5092913 - DNA, 25 bp, Homo sapien
tggtgtgcccttgaacaaaagagaa

SEQ ID NO: 5092914 - DNA, 25 bp, Homo sapien
caaaagagaacagttgggcaagcca

SEQ ID NO: 5092915 - DNA, 25 bp, Homo sapien
catgtcctaaatactggtctggtga

SEQ ID NO: 5092916 - DNA, 25 bp, Homo sapien
gaagcaaagcagttaggtacccagg

SEQ ID NO: 5092917 - DNA, 25 bp, Homo sapien
cagcagagctccttaaactgtcatg

SEQ ID NO: 5092918 - DNA, 25 bp, Homo sapien
tcaattccacaactatgtttttgac

SEQ ID NO: 5092919 - DNA, 25 bp, Homo sapien
ttcaccgtggaacaggacagcagag

SEQ ID NO: 5092920 - DNA, 25 bp, Homo sapien
ctgtcatgctggaagtcaattccac

SEQ ID NO: 5092921 - DNA, 25 bp, Homo sapien
tagctaactgaaaataggctttggc

SEQ ID NO: 5092922 - DNA, 25 bp, Homo sapien
tatgtacaacccaaaatagatggta

SEQ ID NO: 5092923 - DNA, 25 bp, Homo sapien
tagatggtagacaccaaaatccctt

SEQ ID NO: 5092924 - DNA, 25 bp, Homo sapien
tggcaaatgggtctccatatacacc

SEQ ID NO: 5092925 - DNA, 25 bp, Homo sapien
ctttgataccaaagaaaagatgctc

SEQ ID NO: 5092926 - DNA, 25 bp, Homo sapien
ataccaaagaaaagatgctcatttt

SEQ ID NO: 5092927 - DNA, 25 bp, Homo sapien
caaagaaaagatgctcatttttcat

SEQ ID NO: 5092928 - DNA, 25 bp, Homo sapien
taccaaagaaaagatgctcattttt

SEQ ID NO: 5092929 - DNA, 25 bp, Homo sapien
caatagtagcctctgaattggtctt

SEQ ID NO: 5092930 - DNA, 25 bp, Homo sapien
gagatcttgtcctggtttaattcct

SEQ ID NO: 5092931 - DNA, 25 bp, Homo sapien
cattgcctcttgtggttcctcgtct

SEQ ID NO: 5092932 - DNA, 25 bp, Homo sapien
cctgctctgagatcttgtcctggtt

SEQ ID NO: 5092933 - DNA, 25 bp, Homo sapien
aaacaaagaatttatgagggatcct

SEQ ID NO: 5092934 - DNA, 25 bp, Homo sapien
gcaatgatttcataactaaacaggg

SEQ ID NO: 5092935 - DNA, 25 bp, Homo sapien
caaagaatttatgagggatcctatc

SEQ ID NO: 5092936 - DNA, 25 bp, Homo sapien
agcaatgatttcataactaaacagg

SEQ ID NO: 5092937 - DNA, 25 bp, Homo sapien
agagtgacatgagcccttttttgca

SEQ ID NO: 5092938 - DNA, 25 bp, Homo sapien
gaatgcacagctgagcccatttttg

SEQ ID NO: 5092939 - DNA, 25 bp, Homo sapien
tctaatggcaagcttgatgaaaact

SEQ ID NO: 5092940 - DNA, 25 bp, Homo sapien
tcaacataaagttatcacagagtcc

SEQ ID NO: 5092941 - DNA, 25 bp, Homo sapien
tgacctgaacatgccattaccttgt

SEQ ID NO: 5092942 - DNA, 25 bp, Homo sapien
ttcgtatgaaataggctggctgatc

SEQ ID NO: 5092943 - DNA, 25 bp, Homo sapien
gagcatgttttgtatctctgacctg

SEQ ID NO: 5092944 - DNA, 25 bp, Homo sapien
tctccctggagtatctcagagcatg

SEQ ID NO: 5092945 - DNA, 25 bp, Homo sapien
caagtcctctactctaagaagccta

SEQ ID NO: 5092946 - DNA, 25 bp, Homo sapien
tctccaaagccactaattgggttat

SEQ ID NO: 5092947 - DNA, 25 bp, Homo sapien
ctaagaagcctatgcttcagaaata

SEQ ID NO: 5092948 - DNA, 25 bp, Homo sapien
ttaacttttgattatctttctccaa

SEQ ID NO: 5092949 - DNA, 25 bp, Homo sapien
tgaacaccccactgtgcaaattgcc

SEQ ID NO: 5092950 - DNA, 25 bp, Homo sapien
aattgccctgagtgcccatgtttgg

SEQ ID NO: 5092951 - DNA, 25 bp, Homo sapien
tggagtctcctatagccttgtttag

SEQ ID NO: 5092952 - DNA, 25 bp, Homo sapien
aaaatcctgcacctacttttgtgag

SEQ ID NO: 5092953 - DNA, 25 bp, Homo sapien
ggcccacttttgcagtgatgagcag

SEQ ID NO: 5092954 - DNA, 25 bp, Homo sapien
cacttttgcagtgatgagcagtcta

SEQ ID NO: 5092955 - DNA, 25 bp, Homo sapien
cttttgcagtgatgagcagtctact

SEQ ID NO: 5092956 - DNA, 25 bp, Homo sapien
aaggcccacttttgcagtgatgagc

SEQ ID NO: 5092957 - DNA, 25 bp, Homo sapien
catattagtgtaccccaattcccaa

SEQ ID NO: 5092958 - DNA, 25 bp, Homo sapien
aaacataagacatatgatttccata

SEQ ID NO: 5092959 - DNA, 25 bp, Homo sapien
tcccactggctccttatgtcaaaac

SEQ ID NO: 5092960 - DNA, 25 bp, Homo sapien
ctctgaaatctagacatgtggggat

SEQ ID NO: 5092961 - DNA, 25 bp, Homo sapien
aactctccctggtcaaatctggaac

SEQ ID NO: 5092962 - DNA, 25 bp, Homo sapien
ttcctgagaacatttatctgccctg

SEQ ID NO: 5092963 - DNA, 25 bp, Homo sapien
tctccctggtcaaatctggaactac

SEQ ID NO: 5092964 - DNA, 25 bp, Homo sapien
aaaactctccctggtcaaatctgga

SEQ ID NO: 5092965 - DNA, 25 bp, Homo sapien
ggagccaagatttcacaccaccagg

SEQ ID NO: 5092966 - DNA, 25 bp, Homo sapien
atacatttctgatcaattaatcggt

SEQ ID NO: 5092967 - DNA, 25 bp, Homo sapien
aattaatcggttgcctcccaagctc

SEQ ID NO: 5092968 - DNA, 25 bp, Homo sapien
gcctcccaagctcagtgaacactcc

SEQ ID NO: 5092969 - DNA, 25 bp, Homo sapien
gtgagtcagtaaattccttgaggac

SEQ ID NO: 5092970 - DNA, 25 bp, Homo sapien
ctctcaactctcctgtgagtcagta

SEQ ID NO: 5092971 - DNA, 25 bp, Homo sapien
tctcaactctcctgtgagtcagtaa

SEQ ID NO: 5092972 - DNA, 25 bp, Homo sapien
tctcctgtgagtcagtaaattcctt

SEQ ID NO: 5092973 - DNA, 25 bp, Homo sapien
acaatgaggtgggaatgattcagca

SEQ ID NO: 5092974 - DNA, 25 bp, Homo sapien
tcagcaggaccatctggcagaaacg

SEQ ID NO: 5092975 - DNA, 25 bp, Homo sapien
gagggagggactcttctccccagga

SEQ ID NO: 5092976 - DNA, 25 bp, Homo sapien
gcaggtaatttagctacaatgaggt

SEQ ID NO: 5092977 - DNA, 25 bp, Homo sapien
tgatcaatgatgctgtcataaacca

SEQ ID NO: 5092978 - DNA, 25 bp, Homo sapien
gatcaatgatgctgtcataaaccaa

SEQ ID NO: 5092979 - DNA, 25 bp, Homo sapien
tttgatcaatgatgctgtcataaac

SEQ ID NO: 5092980 - DNA, 25 bp, Homo sapien
tcatttgatcaatgatgctgtcata

SEQ ID NO: 5092981 - DNA, 25 bp, Homo sapien
ttttcatctctgcacatacctctta

SEQ ID NO: 5092982 - DNA, 25 bp, Homo sapien
cattctgagaatgaagggcctggaa

SEQ ID NO: 5092983 - DNA, 25 bp, Homo sapien
tctgcacatacctcttactaaaaat

SEQ ID NO: 5092984 - DNA, 25 bp, Homo sapien
tctggggtggtttcatccccacatt

SEQ ID NO: 5092985 - DNA, 25 bp, Homo sapien
ctttaatgttatcaacatcttcagt

SEQ ID NO: 5092986 - DNA, 25 bp, Homo sapien
ttaatgttatcaacatcttcagttt

SEQ ID NO: 5092987 - DNA, 25 bp, Homo sapien
tttaatgttatcaacatcttcagtt

SEQ ID NO: 5092988 - DNA, 25 bp, Homo sapien
cagagattcgctgtatttacaatgc

SEQ ID NO: 5092989 - DNA, 25 bp, Homo sapien
cggagctaagggtgttgtgttccct

SEQ ID NO: 5092990 - DNA, 25 bp, Homo sapien
ctctttggacttgtgattgagaaaa

SEQ ID NO: 5092991 - DNA, 25 bp, Homo sapien
aactggttgccggagctaagggtgt

SEQ ID NO: 5092992 - DNA, 25 bp, Homo sapien
ttatcctctggtgtaagcctctgtg

SEQ ID NO: 5092993 - DNA, 25 bp, Homo sapien
cttcagggtcacctgggttgagggc

SEQ ID NO: 5092994 - DNA, 25 bp, Homo sapien
gcctctgtggtcttattaatatggt

SEQ ID NO: 5092995 - DNA, 25 bp, Homo sapien
ggttgagggcaggtgcctatgagtc

SEQ ID NO: 5092996 - DNA, 25 bp, Homo sapien
taccaacgattgttctcagagaaag

SEQ ID NO: 5092997 - DNA, 25 bp, Homo sapien
tagaaatcatgtaaataccaacgat

SEQ ID NO: 5092998 - DNA, 25 bp, Homo sapien
tagttgggtaaatttgatccatcca

SEQ ID NO: 5092999 - DNA, 25 bp, Homo sapien
tgtgattcccccacaaatgtgactg

SEQ ID NO: 5093000 - DNA, 25 bp, Homo sapien
tatttgggaatctgaaactattgac

SEQ ID NO: 5093001 - DNA, 25 bp, Homo sapien
tttgggaatctgaaactattgacac

SEQ ID NO: 5093002 - DNA, 25 bp, Homo sapien
gctatttgggaatctgaaactattg

SEQ ID NO: 5093003 - DNA, 25 bp, Homo sapien
tgggaatctgaaactattgacacca

SEQ ID NO: 5093004 - DNA, 25 bp, Homo sapien
tacgtatgattagaaagggaatagg

SEQ ID NO: 5093005 - DNA, 25 bp, Homo sapien
tctgagtaagatatgtagaagcagg

SEQ ID NO: 5093006 - DNA, 25 bp, Homo sapien
gggattctcacattatacgtatgat

SEQ ID NO: 5093007 - DNA, 25 bp, Homo sapien
tcattaaaacactctgcttcatctg

SEQ ID NO: 5093008 - DNA, 25 bp, Homo sapien
cccaagagaggttcaccagtaagta

SEQ ID NO: 5093009 - DNA, 25 bp, Homo sapien
tggaacctaaacataggcccacact

SEQ ID NO: 5093010 - DNA, 25 bp, Homo sapien
tggctctgagtcctacattgaattg

SEQ ID NO: 5093011 - DNA, 25 bp, Homo sapien
tctcaaacacatgccgaggctccat

SEQ ID NO: 5093012 - DNA, 25 bp, Homo sapien
ttcaaagatgggatctgtagagggt

SEQ ID NO: 5093013 - DNA, 25 bp, Homo sapien
ttggcttgttcaaagatgggatctg

SEQ ID NO: 5093014 - DNA, 25 bp, Homo sapien
cagtttggcttgttcaaagatggga

SEQ ID NO: 5093015 - DNA, 25 bp, Homo sapien
cttgttcaaagatgggatctgtaga

SEQ ID NO: 5093016 - DNA, 25 bp, Homo sapien
ttgataactctgtaatgctgtcttg

SEQ ID NO: 5093017 - DNA, 25 bp, Homo sapien
tgcttgaaaagaaggttatgattcc

SEQ ID NO: 5093018 - DNA, 25 bp, Homo sapien
tcctgattgccagaagcaggtctca

SEQ ID NO: 5093019 - DNA, 25 bp, Homo sapien
ggttatgattccagcattattgaaa

SEQ ID NO: 5093020 - DNA, 25 bp, Homo sapien
gaggtgtccacagacagacatcctc

SEQ ID NO: 5093021 - DNA, 25 bp, Homo sapien
gctgctgcagtccaatgacccttaa

SEQ ID NO: 5093022 - DNA, 25 bp, Homo sapien
gaaagcaatgactcctagcagctgc

SEQ ID NO: 5093023 - DNA, 25 bp, Homo sapien
cagttgcttccagagataatggtag

SEQ ID NO: 5093024 - DNA, 25 bp, Homo sapien
ggatgtcccttgaatgtccacgaca

SEQ ID NO: 5093025 - DNA, 25 bp, Homo sapien
ccatacaaagggatagatgcaaggg

SEQ ID NO: 5093026 - DNA, 25 bp, Homo sapien
caatggatgaggctaggatgtccct

SEQ ID NO: 5093027 - DNA, 25 bp, Homo sapien
caagagccaagacctgaaaatccat

SEQ ID NO: 5093028 - DNA, 25 bp, Homo sapien
gaaacttgtgatagcagcaactgca

SEQ ID NO: 5093029 - DNA, 25 bp, Homo sapien
tgtctcctttccatcaagatcagct

SEQ ID NO: 5093030 - DNA, 25 bp, Homo sapien
gctctgagatgtcctaaccaaatgt

SEQ ID NO: 5093031 - DNA, 25 bp, Homo sapien
gattcactaggcagtagctctgaga

SEQ ID NO: 5093032 - DNA, 25 bp, Homo sapien
gaacacagaaaggctctgagatgct

SEQ ID NO: 5093033 - DNA, 25 bp, Homo sapien
ggtgaataattcatgccttttggga

SEQ ID NO: 5093034 - DNA, 25 bp, Homo sapien
tgaataattcatgccttttgggaac

SEQ ID NO: 5093035 - DNA, 25 bp, Homo sapien
ccttttgggaacacagaaaggctct

SEQ ID NO: 5093036 - DNA, 25 bp, Homo sapien
ggctgatactatacaagagagatat

SEQ ID NO: 5093037 - DNA, 25 bp, Homo sapien
gagagatatcctgtctttccatgta

SEQ ID NO: 5093038 - DNA, 25 bp, Homo sapien
ccatgtatggtcaggaaggtattta

SEQ ID NO: 5093039 - DNA, 25 bp, Homo sapien
gcagaattagcagctgggctgatac

SEQ ID NO: 5093040 - DNA, 25 bp, Homo sapien
ttttccccttcacacattttcaaca

SEQ ID NO: 5093041 - DNA, 25 bp, Homo sapien
tttgcctgtggcacttcctttttcc

SEQ ID NO: 5093042 - DNA, 25 bp, Homo sapien
ttgcctgtggcacttcctttttccc

SEQ ID NO: 5093043 - DNA, 25 bp, Homo sapien
tccccttcacacattttcaacattt

SEQ ID NO: 5093044 - DNA, 25 bp, Homo sapien
gagtaggtgcctccggagactttgc

SEQ ID NO: 5093045 - DNA, 25 bp, Homo sapien
agactttgctatccacagacctata

SEQ ID NO: 5093046 - DNA, 25 bp, Homo sapien
gtttgtgactcccatagcactactg

SEQ ID NO: 5093047 - DNA, 25 bp, Homo sapien
cagatattcaagttcctgcatcact

SEQ ID NO: 5093048 - DNA, 25 bp, Homo sapien
gtatttgatggcgttctgacagcca

SEQ ID NO: 5093049 - DNA, 25 bp, Homo sapien
aaaggcttagtgagcaatgccatag

SEQ ID NO: 5093050 - DNA, 25 bp, Homo sapien
caagtaagtagacatggagaaaaca

SEQ ID NO: 5093051 - DNA, 25 bp, Homo sapien
tcttgccagagccaactgatgggta

SEQ ID NO: 5093052 - DNA, 25 bp, Homo sapien
ggcagcagtagtagcccccaaggaa

SEQ ID NO: 5093053 - DNA, 25 bp, Homo sapien
ccatttctgcaaaaggttgtaaaca

SEQ ID NO: 5093054 - DNA, 25 bp, Homo sapien
cagccatttctgcaaaaggttgtaa

SEQ ID NO: 5093055 - DNA, 25 bp, Homo sapien
gcagcagtagtagcccccaaggaaa

SEQ ID NO: 5093056 - DNA, 25 bp, Homo sapien
tcagatatggcatagttatcaatct

SEQ ID NO: 5093057 - DNA, 25 bp, Homo sapien
tagttatcaatctggaggtgacata

SEQ ID NO: 5093058 - DNA, 25 bp, Homo sapien
gtggcagttcagatatggcatagtt

SEQ ID NO: 5093059 - DNA, 25 bp, Homo sapien
tctggaggtgacataatttgtgctt

SEQ ID NO: 5093060 - DNA, 25 bp, Homo sapien
gaaacacaatgaaactgagtattat

SEQ ID NO: 5093061 - DNA, 25 bp, Homo sapien
gaaggaaacacaatgaaactgagta

SEQ ID NO: 5093062 - DNA, 25 bp, Homo sapien
tgagatagggaaggaaacacaatga

SEQ ID NO: 5093063 - DNA, 25 bp, Homo sapien
tagggaaggaaacacaatgaaactg

SEQ ID NO: 5093064 - DNA, 25 bp, Homo sapien
gccaggcactatggatactataagg

SEQ ID NO: 5093065 - DNA, 25 bp, Homo sapien
gagaaaagaggacatcagagtagac

SEQ ID NO: 5093066 - DNA, 25 bp, Homo sapien
aaggaaattgctggtcttggtcaca

SEQ ID NO: 5093067 - DNA, 25 bp, Homo sapien
tttccgttcataaatgcagaggcag

SEQ ID NO: 5093068 - DNA, 25 bp, Homo sapien
acaattgtttcccaagtccttaatg

SEQ ID NO: 5093069 - DNA, 25 bp, Homo sapien
tcccaagtccttaatggctctgtct

SEQ ID NO: 5093070 - DNA, 25 bp, Homo sapien
ttgtttcccaagtccttaatggctc

SEQ ID NO: 5093071 - DNA, 25 bp, Homo sapien
gtttcccaagtccttaatggctctg

SEQ ID NO: 5093072 - DNA, 25 bp, Homo sapien
tccccaaatgagtgtggaagatgct

SEQ ID NO: 5093073 - DNA, 25 bp, Homo sapien
ttgtccccaaatgagtgtggaagat

SEQ ID NO: 5093074 - DNA, 25 bp, Homo sapien
ccccaaatgagtgtggaagatgctt

SEQ ID NO: 5093075 - DNA, 25 bp, Homo sapien
tgtccccaaatgagtgtggaagatg

SEQ ID NO: 5093076 - DNA, 25 bp, Homo sapien
tcaaaatatcacttgcttcttcagg

SEQ ID NO: 5093077 - DNA, 25 bp, Homo sapien
aaatctgtttatcaagggtcaaaat

SEQ ID NO: 5093078 - DNA, 25 bp, Homo sapien
gtttatcaagggtcaaaatatcact

SEQ ID NO: 5093079 - DNA, 25 bp, Homo sapien
caaaatatcacttgcttcttcaggt

SEQ ID NO: 5093080 - DNA, 25 bp, Homo sapien
caagtgatggtgatagcctgagcca

SEQ ID NO: 5093081 - DNA, 25 bp, Homo sapien
gagaatatatttccaagtgatggtg

SEQ ID NO: 5093082 - DNA, 25 bp, Homo sapien
cctgagccaagacaggtacgtaacc

SEQ ID NO: 5093083 - DNA, 25 bp, Homo sapien
gagccaagacaggtacgtaaccaga

SEQ ID NO: 5093084 - DNA, 25 bp, Homo sapien
ggcaaatgacaaagcgaggccagag

SEQ ID NO: 5093085 - DNA, 25 bp, Homo sapien
gcaaatgacaaagcgaggccagagc

SEQ ID NO: 5093086 - DNA, 25 bp, Homo sapien
tcactcttcttgataatttgggagg

SEQ ID NO: 5093087 - DNA, 25 bp, Homo sapien
gaacgcacacgaaatcaaatctcag

SEQ ID NO: 5093088 - DNA, 25 bp, Homo sapien
tttacaaactcctaatcgagggtga

SEQ ID NO: 5093089 - DNA, 25 bp, Homo sapien
tgggaggtaataatgggatgttcac

SEQ ID NO: 5093090 - DNA, 25 bp, Homo sapien
ctgttaattccagaatttgaggcat

SEQ ID NO: 5093091 - DNA, 25 bp, Homo sapien
ctggaaaatgatagctgatcaatct

SEQ ID NO: 5093092 - DNA, 25 bp, Homo sapien
agccctggccctagcactggaaaat

SEQ ID NO: 5093093 - DNA, 25 bp, Homo sapien
ccagctgcctgtaggtcgttaggct

SEQ ID NO: 5093094 - DNA, 25 bp, Homo sapien
tgtaggtcgttaggctgctgattca

SEQ ID NO: 5093095 - DNA, 25 bp, Homo sapien
gtcttgtttatcattgttcctgtta

SEQ ID NO: 5093096 - DNA, 25 bp, Homo sapien
taattttcatctgttcgtgtgcagt

SEQ ID NO: 5093097 - DNA, 25 bp, Homo sapien
ctgttcgtgtgcagttgaaatattc

SEQ ID NO: 5093098 - DNA, 25 bp, Homo sapien
tctgtgttcaggtcagtcttgttta

SEQ ID NO: 5093099 - DNA, 25 bp, Homo sapien
ccatctctgatataagtttgcctga

SEQ ID NO: 5093100 - DNA, 25 bp, Homo sapien
ggtacttgctgatgattgttaacaa

SEQ ID NO: 5093101 - DNA, 25 bp, Homo sapien
gccccttggggtaacttagcatgct

SEQ ID NO: 5093102 - DNA, 25 bp, Homo sapien
catgctgcagctgcgcagatttcca

SEQ ID NO: 5093103 - DNA, 25 bp, Homo sapien
tgtgccagttgtcatctgagaggag

SEQ ID NO: 5093104 - DNA, 25 bp, Homo sapien
ttgtcatctgagaggagtgcactgt

SEQ ID NO: 5093105 - DNA, 25 bp, Homo sapien
ccgcctgtgtgccagttgtcatctg

SEQ ID NO: 5093106 - DNA, 25 bp, Homo sapien
ccagttgtcatctgagaggagtgca

SEQ ID NO: 5093107 - DNA, 25 bp, Homo sapien
ctggtatttgagcaggcatatcctc

SEQ ID NO: 5093108 - DNA, 25 bp, Homo sapien
tactggtatttgagcaggcatatcc

SEQ ID NO: 5093109 - DNA, 25 bp, Homo sapien
tgtactggtatttgagcaggcatat

SEQ ID NO: 5093110 - DNA, 25 bp, Homo sapien
atgtactggtatttgagcaggcata

SEQ ID NO: 5093111 - DNA, 25 bp, Homo sapien
tgctaaaggctgctggcaaatcttc

SEQ ID NO: 5093112 - DNA, 25 bp, Homo sapien
cattagattctctctgaccgaggcg

SEQ ID NO: 5093113 - DNA, 25 bp, Homo sapien
gcgaatattaaaacaaggccacctg

SEQ ID NO: 5093114 - DNA, 25 bp, Homo sapien
aatgaataccgaggcagtgtcagct

SEQ ID NO: 5093115 - DNA, 25 bp, Homo sapien
tcttctttcatccactaccctggaa

SEQ ID NO: 5093116 - DNA, 25 bp, Homo sapien
tctttcatccactaccctggaaaag

SEQ ID NO: 5093117 - DNA, 25 bp, Homo sapien
aagaacttctagttccactacttct

SEQ ID NO: 5093118 - DNA, 25 bp, Homo sapien
ctagttccactacttctcttctttc

SEQ ID NO: 5093119 - DNA, 25 bp, Homo sapien
agtgagtgaggcagaacatctgcag

SEQ ID NO: 5093120 - DNA, 25 bp, Homo sapien
aagtgagtgaggcagaacatctgca

SEQ ID NO: 5093121 - DNA, 25 bp, Homo sapien
gtgagtgaggcagaacatctgcagt

SEQ ID NO: 5093122 - DNA, 25 bp, Homo sapien
aaactctcaagctggttttggaggg

SEQ ID NO: 5093123 - DNA, 25 bp, Homo sapien
tgacatcaaaatgcccgtagctggt

SEQ ID NO: 5093124 - DNA, 25 bp, Homo sapien
tcagccatgaatgcagagacacaag

SEQ ID NO: 5093125 - DNA, 25 bp, Homo sapien
gaagcactcacaagtacccaattgg

SEQ ID NO: 5093126 - DNA, 25 bp, Homo sapien
taggccaaagagcagtctaagcagc

SEQ ID NO: 5093127 - DNA, 25 bp, Homo sapien
ttcacttctgctatagtaagttttt

SEQ ID NO: 5093128 - DNA, 25 bp, Homo sapien
agtaagtttttctctgtactgatgt

SEQ ID NO: 5093129 - DNA, 25 bp, Homo sapien
agtttttctctgtactgatgtcttc

SEQ ID NO: 5093130 - DNA, 25 bp, Homo sapien
ctcttcacttctgctatagtaagtt

SEQ ID NO: 5093131 - DNA, 25 bp, Homo sapien
tagtctctaatgaaaccattcaggt

SEQ ID NO: 5093132 - DNA, 25 bp, Homo sapien
agtctctaatgaaaccattcaggtt

SEQ ID NO: 5093133 - DNA, 25 bp, Homo sapien
ctagtctctaatgaaaccattcagg

SEQ ID NO: 5093134 - DNA, 25 bp, Homo sapien
gtctctaatgaaaccattcaggttc

SEQ ID NO: 5093135 - DNA, 25 bp, Homo sapien
ttatgagaactagggcacactccag

SEQ ID NO: 5093136 - DNA, 25 bp, Homo sapien
caatatacaatgtgaggactaggtc

SEQ ID NO: 5093137 - DNA, 25 bp, Homo sapien
gctgggagttctgtgctagaatcaa

SEQ ID NO: 5093138 - DNA, 25 bp, Homo sapien
caggaaggcaaacagggacttgagc

SEQ ID NO: 5093139 - DNA, 25 bp, Homo sapien
tgggcctgaaagatggtctcagaag

SEQ ID NO: 5093140 - DNA, 25 bp, Homo sapien
ttgctgctagtttctctccatgggc

SEQ ID NO: 5093141 - DNA, 25 bp, Homo sapien
tttatagacagaatggagtgaaagt

SEQ ID NO: 5093142 - DNA, 25 bp, Homo sapien
tccatgggcctgaaagatggtctca

SEQ ID NO: 5093143 - DNA, 25 bp, Homo sapien
ttgggaaggcatactgaggacccgt

SEQ ID NO: 5093144 - DNA, 25 bp, Homo sapien
cccgtgtgggttgagggttgtggct

SEQ ID NO: 5093145 - DNA, 25 bp, Homo sapien
cagttgctgcccaattccttgggaa

SEQ ID NO: 5093146 - DNA, 25 bp, Homo sapien
gctaataacataacacggaatccca

SEQ ID NO: 5093147 - DNA, 25 bp, Homo sapien
actttaaggcatctgttttgccctt

SEQ ID NO: 5093148 - DNA, 25 bp, Homo sapien
ttactttaaggcatctgttttgccc

SEQ ID NO: 5093149 - DNA, 25 bp, Homo sapien
ctttaaggcatctgttttgcccttt

SEQ ID NO: 5093150 - DNA, 25 bp, Homo sapien
gacccttgaatctaggatctcccat

SEQ ID NO: 5093151 - DNA, 25 bp, Homo sapien
tgtggacccttgaatctaggatctc

SEQ ID NO: 5093152 - DNA, 25 bp, Homo sapien
tctctgtggacccttgaatctagga

SEQ ID NO: 5093153 - DNA, 25 bp, Homo sapien
atccagtcctccacaattcttttct

SEQ ID NO: 5093154 - DNA, 25 bp, Homo sapien
tggaggcacttagacgcaaactctg

SEQ ID NO: 5093155 - DNA, 25 bp, Homo sapien
gaggcacttagacgcaaactctgca

SEQ ID NO: 5093156 - DNA, 25 bp, Homo sapien
aagccatggttcttaatatctttaa

SEQ ID NO: 5093157 - DNA, 25 bp, Homo sapien
gcacttagacgcaaactctgcataa

SEQ ID NO: 5093158 - DNA, 25 bp, Homo sapien
gtgcttcgtgtcttaatatttctca

SEQ ID NO: 5093159 - DNA, 25 bp, Homo sapien
atctagtctccgcttgaattgtgtg

SEQ ID NO: 5093160 - DNA, 25 bp, Homo sapien
gtctccgcttgaattgtgtgcttcg

SEQ ID NO: 5093161 - DNA, 25 bp, Homo sapien
ccgcttgaattgtgtgcttcgtgtc

SEQ ID NO: 5093162 - DNA, 25 bp, Homo sapien
ccttatagtttgcaggtttagtaat

SEQ ID NO: 5093163 - DNA, 25 bp, Homo sapien
gtttgcaggtttagtaatgtcttgc

SEQ ID NO: 5093164 - DNA, 25 bp, Homo sapien
tctttttgcttactcgaatccacat

SEQ ID NO: 5093165 - DNA, 25 bp, Homo sapien
caggtttagtaatgtcttgcatgaa

SEQ ID NO: 5093166 - DNA, 25 bp, Homo sapien
tgggtgacacactgactccttttaa

SEQ ID NO: 5093167 - DNA, 25 bp, Homo sapien
ctgactccttttaattgtccctctc

SEQ ID NO: 5093168 - DNA, 25 bp, Homo sapien
tccagtgggtgacacactgactcct

SEQ ID NO: 5093169 - DNA, 25 bp, Homo sapien
tggaagcatccagtgggtgacacac

SEQ ID NO: 5093170 - DNA, 25 bp, Homo sapien
cttcaggtccaacctgaagtgtatt

SEQ ID NO: 5093171 - DNA, 25 bp, Homo sapien
tcttcaggtccaacctgaagtgtat

SEQ ID NO: 5093172 - DNA, 25 bp, Homo sapien
ttcaggtccaacctgaagtgtattt

SEQ ID NO: 5093173 - DNA, 25 bp, Homo sapien
ctgtctgtccaaaggatgatatcgt

SEQ ID NO: 5093174 - DNA, 25 bp, Homo sapien
tgatatcgtattcatctgagctttc

SEQ ID NO: 5093175 - DNA, 25 bp, Homo sapien
tgtccaaaggatgatatcgtattca

SEQ ID NO: 5093176 - DNA, 25 bp, Homo sapien
caaaggatgatatcgtattcatctg

SEQ ID NO: 5093177 - DNA, 25 bp, Homo sapien
atccaagccaagagaatatggtaaa

SEQ ID NO: 5093178 - DNA, 25 bp, Homo sapien
catccaagccaagagaatatggtaa

SEQ ID NO: 5093179 - DNA, 25 bp, Homo sapien
actgtggtcatccaagccaagagaa

SEQ ID NO: 5093180 - DNA, 25 bp, Homo sapien
gaagattccactctcgccttttagt

SEQ ID NO: 5093181 - DNA, 25 bp, Homo sapien
ctctgcagctctcaataaagcatta

SEQ ID NO: 5093182 - DNA, 25 bp, Homo sapien
ttagtgaggcaacttcacatcccat

SEQ ID NO: 5093183 - DNA, 25 bp, Homo sapien
tatcagcaacatcgaagattccact

SEQ ID NO: 5093184 - DNA, 25 bp, Homo sapien
agaggaggatgctgataaacagaac

SEQ ID NO: 5093185 - DNA, 25 bp, Homo sapien
gaggaggatgctgataaacagaact

SEQ ID NO: 5093186 - DNA, 25 bp, Homo sapien
ggaggatgctgataaacagaactgc

SEQ ID NO: 5093187 - DNA, 25 bp, Homo sapien
gaggatgctgataaacagaactgcc

SEQ ID NO: 5093188 - DNA, 25 bp, Homo sapien
cattttgtatcagaggactttattt

SEQ ID NO: 5093189 - DNA, 25 bp, Homo sapien
taggtaaagcttctgagtgaaacag

SEQ ID NO: 5093190 - DNA, 25 bp, Homo sapien
gtgaaacagaagaatacatgcagac

SEQ ID NO: 5093191 - DNA, 25 bp, Homo sapien
tctgtgagtcacatgtaggtaaagc

SEQ ID NO: 5093192 - DNA, 25 bp, Homo sapien
gaaacagaagaatacatgcagacag

SEQ ID NO: 5093193 - DNA, 25 bp, Homo sapien
ttgatgacatacaacatccacagga

SEQ ID NO: 5093194 - DNA, 25 bp, Homo sapien
acaggatgtaattcatgggattcac

SEQ ID NO: 5093195 - DNA, 25 bp, Homo sapien
atgattgatgacatacaacatccac

SEQ ID NO: 5093196 - DNA, 25 bp, Homo sapien
caggatgtaattcatgggattcacc

SEQ ID NO: 5093197 - DNA, 25 bp, Homo sapien
ctgccattttgaagttttggttcca

SEQ ID NO: 5093198 - DNA, 25 bp, Homo sapien
taaattgtagaactgccattttgaa

SEQ ID NO: 5093199 - DNA, 25 bp, Homo sapien
tctgatcatccactaacggccagac

SEQ ID NO: 5093200 - DNA, 25 bp, Homo sapien
ctgatcatccactaacggccagaca

SEQ ID NO: 5093201 - DNA, 25 bp, Homo sapien
tgtgaaattgaagggtcttttactc

SEQ ID NO: 5093202 - DNA, 25 bp, Homo sapien
aaattgaagggtcttttactccatg

SEQ ID NO: 5093203 - DNA, 25 bp, Homo sapien
tttactccatgttgaccttcgtgca

SEQ ID NO: 5093204 - DNA, 25 bp, Homo sapien
ccttcgtgcaaagctatgtaaagca

SEQ ID NO: 5093205 - DNA, 25 bp, Homo sapien
ggtcagtgtgaaagggatcagcgga

SEQ ID NO: 5093206 - DNA, 25 bp, Homo sapien
ggatggtcagtgtgaaagggatcag

SEQ ID NO: 5093207 - DNA, 25 bp, Homo sapien
cagtgtgaaagggatcagcggaagg

SEQ ID NO: 5093208 - DNA, 25 bp, Homo sapien
tgaaagggatcagcggaagggccca

SEQ ID NO: 5093209 - DNA, 25 bp, Homo sapien
tatctgtcagtcatttgtatatgtt

SEQ ID NO: 5093210 - DNA, 25 bp, Homo sapien
tttatatatctgtcagtcatttgta

SEQ ID NO: 5093211 - DNA, 25 bp, Homo sapien
acaggtgtgaggtaacatttcatta

SEQ ID NO: 5093212 - DNA, 25 bp, Homo sapien
ttaggagaaatgtccattaaagtct

SEQ ID NO: 5093213 - DNA, 25 bp, Homo sapien
gaagctgactcaaactctgctttgc

SEQ ID NO: 5093214 - DNA, 25 bp, Homo sapien
tttctgaagctgactcaaactctgc

SEQ ID NO: 5093215 - DNA, 25 bp, Homo sapien
tctgaagctgactcaaactctgctt

SEQ ID NO: 5093216 - DNA, 25 bp, Homo sapien
tgaagctgactcaaactctgctttg

SEQ ID NO: 5093217 - DNA, 25 bp, Homo sapien
caaagggagacatattgatagagtg

SEQ ID NO: 5093218 - DNA, 25 bp, Homo sapien
gtcccctcaacaggactatgggctc

SEQ ID NO: 5093219 - DNA, 25 bp, Homo sapien
ttggaaatggaggaatttgcatatt

SEQ ID NO: 5093220 - DNA, 25 bp, Homo sapien
catgtaagaggctgggtctactaag

SEQ ID NO: 5093221 - DNA, 25 bp, Homo sapien
tgtttagtgatatagacctgatgcc

SEQ ID NO: 5093222 - DNA, 25 bp, Homo sapien
gaatgggatgacttagaatctcctc

SEQ ID NO: 5093223 - DNA, 25 bp, Homo sapien
accttagtaatcgtcatgaatggga

SEQ ID NO: 5093224 - DNA, 25 bp, Homo sapien
gggaccagtctggtactgatggcaa

SEQ ID NO: 5093225 - DNA, 25 bp, Homo sapien
ctaaggatcacaactcgagatgaga

SEQ ID NO: 5093226 - DNA, 25 bp, Homo sapien
acaggtctctcctccaacactaagg

SEQ ID NO: 5093227 - DNA, 25 bp, Homo sapien
aaacgttatcagtctgcccttggcc

SEQ ID NO: 5093228 - DNA, 25 bp, Homo sapien
ttaaccagaagcaagacttggaggc

SEQ ID NO: 5093229 - DNA, 25 bp, Homo sapien
tggagaaaaggctcgaatttctcat

SEQ ID NO: 5093230 - DNA, 25 bp, Homo sapien
tgtactggagaaaaggctcgaattt

SEQ ID NO: 5093231 - DNA, 25 bp, Homo sapien
ctggagaaaaggctcgaatttctca

SEQ ID NO: 5093232 - DNA, 25 bp, Homo sapien
tactggagaaaaggctcgaatttct

SEQ ID NO: 5093233 - DNA, 25 bp, Homo sapien
caaatagagagactagggtgttttc

SEQ ID NO: 5093234 - DNA, 25 bp, Homo sapien
gtagccccatgcaaatagagagact

SEQ ID NO: 5093235 - DNA, 25 bp, Homo sapien
cttgagtagccccatgcaaatagag

SEQ ID NO: 5093236 - DNA, 25 bp, Homo sapien
ccatgcaaatagagagactagggtg

SEQ ID NO: 5093237 - DNA, 25 bp, Homo sapien
catatttcaaaacatctgctggcat

SEQ ID NO: 5093238 - DNA, 25 bp, Homo sapien
ctgcatatttcaaaacatctgctgg

SEQ ID NO: 5093239 - DNA, 25 bp, Homo sapien
gcatatttcaaaacatctgctggca

SEQ ID NO: 5093240 - DNA, 25 bp, Homo sapien
tgcatatttcaaaacatctgctggc

SEQ ID NO: 5093241 - DNA, 25 bp, Homo sapien
aaactgatacttgaagctctttgct

SEQ ID NO: 5093242 - DNA, 25 bp, Homo sapien
tgtgcacacacgtgctatctttcct

SEQ ID NO: 5093243 - DNA, 25 bp, Homo sapien
tccaactctgtgcaaactgatactt

SEQ ID NO: 5093244 - DNA, 25 bp, Homo sapien
gcacacacgtgctatctttcctggc

SEQ ID NO: 5093245 - DNA, 25 bp, Homo sapien
tttgatctgaagctgatagaggaca

SEQ ID NO: 5093246 - DNA, 25 bp, Homo sapien
gatctgaagctgatagaggacaaca

SEQ ID NO: 5093247 - DNA, 25 bp, Homo sapien
ctttgatctgaagctgatagaggac

SEQ ID NO: 5093248 - DNA, 25 bp, Homo sapien
tgatctgaagctgatagaggacaac

SEQ ID NO: 5093249 - DNA, 25 bp, Homo sapien
tgttggagctagtaaaacattccca

SEQ ID NO: 5093250 - DNA, 25 bp, Homo sapien
tagctcttgtatggcaacagttgcc

SEQ ID NO: 5093251 - DNA, 25 bp, Homo sapien
gttgccatttgttggagctagtaaa

SEQ ID NO: 5093252 - DNA, 25 bp, Homo sapien
tcataaacagatgatctatagctct

SEQ ID NO: 5093253 - DNA, 25 bp, Homo sapien
tgaaaactatgtttagatgaactac

SEQ ID NO: 5093254 - DNA, 25 bp, Homo sapien
cagtaccgtgctcagatcaaccttg

SEQ ID NO: 5093255 - DNA, 25 bp, Homo sapien
catcccttcggcaggttctgtgtgc

SEQ ID NO: 5093256 - DNA, 25 bp, Homo sapien
tactgccttggtgtatgtagaggac

SEQ ID NO: 5093257 - DNA, 25 bp, Homo sapien
ggccacagaagctgctttgcataca

SEQ ID NO: 5093258 - DNA, 25 bp, Homo sapien
tcacggcattgtgaactgattgatg

SEQ ID NO: 5093259 - DNA, 25 bp, Homo sapien
gcattgtgaactgattgatgctgct

SEQ ID NO: 5093260 - DNA, 25 bp, Homo sapien
ttgtgaactgattgatgctgctgtt

SEQ ID NO: 5093261 - DNA, 25 bp, Homo sapien
atgctgctgttgtgaccctgaggta

SEQ ID NO: 5093262 - DNA, 25 bp, Homo sapien
cctgagccccactgttagtgttctc

SEQ ID NO: 5093263 - DNA, 25 bp, Homo sapien
ccactgttagtgttctctgcatcaa

SEQ ID NO: 5093264 - DNA, 25 bp, Homo sapien
agccccactgttagtgttctctgca

SEQ ID NO: 5093265 - DNA, 25 bp, Homo sapien
tagtgttctctgcatcaacttgaac

SEQ ID NO: 5093266 - DNA, 25 bp, Homo sapien
atgacaatttgataatgcacatatc

SEQ ID NO: 5093267 - DNA, 25 bp, Homo sapien
agccaacaggatgcctctgctgtgc

SEQ ID NO: 5093268 - DNA, 25 bp, Homo sapien
acaggatgcctctgctgtgcagccc

SEQ ID NO: 5093269 - DNA, 25 bp, Homo sapien
ccaacaggatgcctctgctgtgcag

SEQ ID NO: 5093270 - DNA, 25 bp, Homo sapien
aacaggatgcctctgctgtgcagcc

SEQ ID NO: 5093271 - DNA, 25 bp, Homo sapien
ctattccatggtataatgtatgtac

SEQ ID NO: 5093272 - DNA, 25 bp, Homo sapien
ctgtgctgctgtaaagggcatgatt

SEQ ID NO: 5093273 - DNA, 25 bp, Homo sapien
cccacctcaaccatggaaaagttat

SEQ ID NO: 5093274 - DNA, 25 bp, Homo sapien
ccatggtataatgtatgtaccatac

SEQ ID NO: 5093275 - DNA, 25 bp, Homo sapien
gagagagctaaatatcactgcatgt

SEQ ID NO: 5093276 - DNA, 25 bp, Homo sapien
gatttagataactacatattcttgg

SEQ ID NO: 5093277 - DNA, 25 bp, Homo sapien
gttttcacctttagtgccctcaagc

SEQ ID NO: 5093278 - DNA, 25 bp, Homo sapien
tctctgcactgtataatgtggctct

SEQ ID NO: 5093279 - DNA, 25 bp, Homo sapien
tggctctcgagtaaaatacactgct

SEQ ID NO: 5093280 - DNA, 25 bp, Homo sapien
gctctcgagtaaaatacactgctga

SEQ ID NO: 5093281 - DNA, 25 bp, Homo sapien
ggctctcgagtaaaatacactgctg

SEQ ID NO: 5093282 - DNA, 25 bp, Homo sapien
acaatccataataacctggaagtac

SEQ ID NO: 5093283 - DNA, 25 bp, Homo sapien
caatccataataacctggaagtact

SEQ ID NO: 5093284 - DNA, 25 bp, Homo sapien
caaactggatcatatgaccattcag

SEQ ID NO: 5093285 - DNA, 25 bp, Homo sapien
gatcatatgaccattcaggaaattc

SEQ ID NO: 5093286 - DNA, 25 bp, Homo sapien
ttcaaatttcctgcaaactggatca

SEQ ID NO: 5093287 - DNA, 25 bp, Homo sapien
aggaaattctgttgacctctgtttt

SEQ ID NO: 5093288 - DNA, 25 bp, Homo sapien
gcacaggtactgtggtatcaggaag

SEQ ID NO: 5093289 - DNA, 25 bp, Homo sapien
gtggtatcaggaagagcataagcac

SEQ ID NO: 5093290 - DNA, 25 bp, Homo sapien
caggtactgtggtatcaggaagagc

SEQ ID NO: 5093291 - DNA, 25 bp, Homo sapien
tactgtggtatcaggaagagcataa

SEQ ID NO: 5093292 - DNA, 25 bp, Homo sapien
tacagcgtaacctgtgaaggcatgg

SEQ ID NO: 5093293 - DNA, 25 bp, Homo sapien
cagcgtaacctgtgaaggcatggca

SEQ ID NO: 5093294 - DNA, 25 bp, Homo sapien
atagtacagcgtaacctgtgaaggc

SEQ ID NO: 5093295 - DNA, 25 bp, Homo sapien
tagtacagcgtaacctgtgaaggca

SEQ ID NO: 5093296 - DNA, 25 bp, Homo sapien
gctcttctctgtaatggcattttcc

SEQ ID NO: 5093297 - DNA, 25 bp, Homo sapien
tcaagtatgatcatagccatactta

SEQ ID NO: 5093298 - DNA, 25 bp, Homo sapien
gatcatagccatacttaactccgct

SEQ ID NO: 5093299 - DNA, 25 bp, Homo sapien
tacttaactccgctcttctctgtaa

SEQ ID NO: 5093300 - DNA, 25 bp, Homo sapien
gaagatccaagattttctatggcca

SEQ ID NO: 5093301 - DNA, 25 bp, Homo sapien
agaagccagaagatccaagattttc

SEQ ID NO: 5093302 - DNA, 25 bp, Homo sapien
ccagaagatccaagattttctatgg

SEQ ID NO: 5093303 - DNA, 25 bp, Homo sapien
gaagccagaagatccaagattttct

SEQ ID NO: 5093304 - DNA, 25 bp, Homo sapien
gacgcaacttagtttatgtccttgc

SEQ ID NO: 5093305 - DNA, 25 bp, Homo sapien
caatgtgagtgtcaatgtgagcaaa

SEQ ID NO: 5093306 - DNA, 25 bp, Homo sapien
gcccagattcatatggccccatcaa

SEQ ID NO: 5093307 - DNA, 25 bp, Homo sapien
tgatggctctttgacgcaacttagt

SEQ ID NO: 5093308 - DNA, 25 bp, Homo sapien
cctgcctgttcttcaaaattgtcat

SEQ ID NO: 5093309 - DNA, 25 bp, Homo sapien
ccctgcctgttcttcaaaattgtca

SEQ ID NO: 5093310 - DNA, 25 bp, Homo sapien
gccctgcctgttcttcaaaattgtc

SEQ ID NO: 5093311 - DNA, 25 bp, Homo sapien
tgccctgcctgttcttcaaaattgt

SEQ ID NO: 5093312 - DNA, 25 bp, Homo sapien
catttccctttggtagaagagtcat

SEQ ID NO: 5093313 - DNA, 25 bp, Homo sapien
tcctcctttactcccttcctgattc

SEQ ID NO: 5093314 - DNA, 25 bp, Homo sapien
tgattcttttcagacccccatttcc

SEQ ID NO: 5093315 - DNA, 25 bp, Homo sapien
ccatttccctttggtagaagagtca

SEQ ID NO: 5093316 - DNA, 25 bp, Homo sapien
ctgcctccagataatatactttaga

SEQ ID NO: 5093317 - DNA, 25 bp, Homo sapien
ctccagataatatactttagatagt

SEQ ID NO: 5093318 - DNA, 25 bp, Homo sapien
gcctccagataatatactttagata

SEQ ID NO: 5093319 - DNA, 25 bp, Homo sapien
cctaggctggtagcgaactcctttg

SEQ ID NO: 5093320 - DNA, 25 bp, Homo sapien
cagcattctggatcagtgttaagga

SEQ ID NO: 5093321 - DNA, 25 bp, Homo sapien
gcacaatcagtgctaaaagccaaag

SEQ ID NO: 5093322 - DNA, 25 bp, Homo sapien
tggctttggcatgaacgttattcct

SEQ ID NO: 5093323 - DNA, 25 bp, Homo sapien
ggatgtttctagtgatcagactggc

SEQ ID NO: 5093324 - DNA, 25 bp, Homo sapien
cgaaacatcttctggacaaacttct

SEQ ID NO: 5093325 - DNA, 25 bp, Homo sapien
ctttcgaaacatcttctggacaaac

SEQ ID NO: 5093326 - DNA, 25 bp, Homo sapien
ctttctcaggtgcttgatcttcagt

SEQ ID NO: 5093327 - DNA, 25 bp, Homo sapien
ttcgaaacatcttctggacaaactt

SEQ ID NO: 5093328 - DNA, 25 bp, Homo sapien
attcctcgtgaaagtgcttcgcttt

SEQ ID NO: 5093329 - DNA, 25 bp, Homo sapien
tattcctcgtgaaagtgcttcgctt

SEQ ID NO: 5093330 - DNA, 25 bp, Homo sapien
cctatattcctcgtgaaagtgcttc

SEQ ID NO: 5093331 - DNA, 25 bp, Homo sapien
tatattcctcgtgaaagtgcttcgc

SEQ ID NO: 5093332 - DNA, 25 bp, Homo sapien
ctcacaccattgacacctctggtcc

SEQ ID NO: 5093333 - DNA, 25 bp, Homo sapien
acaccattgacacctctggtcctga

SEQ ID NO: 5093334 - DNA, 25 bp, Homo sapien
cattgacacctctggtcctgatgac

SEQ ID NO: 5093335 - DNA, 25 bp, Homo sapien
accattgacacctctggtcctgatg

SEQ ID NO: 5093336 - DNA, 25 bp, Homo sapien
tttctgagtttcacaaagattccat

SEQ ID NO: 5093337 - DNA, 25 bp, Homo sapien
gcctttctgagtttcacaaagattc

SEQ ID NO: 5093338 - DNA, 25 bp, Homo sapien
gagtacccccatgcaatgtatgggt

SEQ ID NO: 5093339 - DNA, 25 bp, Homo sapien
tgagtacccccatgcaatgtatggg

SEQ ID NO: 5093340 - DNA, 25 bp, Homo sapien
tgatgtcatatttatcaagagatcg

SEQ ID NO: 5093341 - DNA, 25 bp, Homo sapien
tgaatggccgcaggaagttattttc

SEQ ID NO: 5093342 - DNA, 25 bp, Homo sapien
agataatttgaatggccgcaggaag

SEQ ID NO: 5093343 - DNA, 25 bp, Homo sapien
tggagaagataatttgaatggccgc

SEQ ID NO: 5093344 - DNA, 25 bp, Homo sapien
gaactttctaccctcagtgtatctc

SEQ ID NO: 5093345 - DNA, 25 bp, Homo sapien
taccctcagtgtatctctagcaggc

SEQ ID NO: 5093346 - DNA, 25 bp, Homo sapien
tctaccctcagtgtatctctagcag

SEQ ID NO: 5093347 - DNA, 25 bp, Homo sapien
ctttctaccctcagtgtatctctag

SEQ ID NO: 5093348 - DNA, 25 bp, Homo sapien
ctagtgctttgtgtgattgggtatc

SEQ ID NO: 5093349 - DNA, 25 bp, Homo sapien
gaagtggtcaatccctaagacatca

SEQ ID NO: 5093350 - DNA, 25 bp, Homo sapien
caaatactacaataacgtgtgaagt

SEQ ID NO: 5093351 - DNA, 25 bp, Homo sapien
tgttgcaaggccaatttatccatta

SEQ ID NO: 5093352 - DNA, 25 bp, Homo sapien
cagtcttactcagggaaagccagtt

SEQ ID NO: 5093353 - DNA, 25 bp, Homo sapien
tatctattaagcttgaaccagtttc

SEQ ID NO: 5093354 - DNA, 25 bp, Homo sapien
tattggcttacacaaactctagcaa

SEQ ID NO: 5093355 - DNA, 25 bp, Homo sapien
ttcaatgtttctccccagcgtaaat

SEQ ID NO: 5093356 - DNA, 25 bp, Homo sapien
gattgtaaccactgactgtagcgct

SEQ ID NO: 5093357 - DNA, 25 bp, Homo sapien
caaatcgggatgtatgtcgtgcatc

SEQ ID NO: 5093358 - DNA, 25 bp, Homo sapien
cttagagagcagctgctgagtgcca

SEQ ID NO: 5093359 - DNA, 25 bp, Homo sapien
gtcacctcgcaacaggacagggcgt

SEQ ID NO: 5093360 - DNA, 25 bp, Homo sapien
tgtaatgagtcttgtagggttccac

SEQ ID NO: 5093361 - DNA, 25 bp, Homo sapien
aatgtaatgagtcttgtagggttcc

SEQ ID NO: 5093362 - DNA, 25 bp, Homo sapien
aaatgtaatgagtcttgtagggttc

SEQ ID NO: 5093363 - DNA, 25 bp, Homo sapien
taatgagtcttgtagggttccacca

SEQ ID NO: 5093364 - DNA, 25 bp, Homo sapien
gactgacagagcgttttctgtgtct

SEQ ID NO: 5093365 - DNA, 25 bp, Homo sapien
ccattggctcctcagtgacacgtga

SEQ ID NO: 5093366 - DNA, 25 bp, Homo sapien
atcccttcctgccgtagtgcgtcag

SEQ ID NO: 5093367 - DNA, 25 bp, Homo sapien
aacagcctcgtcaactgcagacgga

SEQ ID NO: 5093368 - DNA, 25 bp, Homo sapien
ttcacagttttgttaataggcaaca

SEQ ID NO: 5093369 - DNA, 25 bp, Homo sapien
catgaaataagtgcatctgaggctg

SEQ ID NO: 5093370 - DNA, 25 bp, Homo sapien
gtatttatgtaagtgtccatttgaa

SEQ ID NO: 5093371 - DNA, 25 bp, Homo sapien
tgctataaaatattgagtcttcatg

SEQ ID NO: 5093372 - DNA, 25 bp, Homo sapien
cctgtgctagaagctgatgttccaa

SEQ ID NO: 5093373 - DNA, 25 bp, Homo sapien
atgaagtggacagcggctcatccct

SEQ ID NO: 5093374 - DNA, 25 bp, Homo sapien
tgtctaatataaccagcccctgtgc

SEQ ID NO: 5093375 - DNA, 25 bp, Homo sapien
tgatgttccaaagatgaagtggaca

SEQ ID NO: 5093376 - DNA, 25 bp, Homo sapien
taggcttcaatctatcaatgggtca

SEQ ID NO: 5093377 - DNA, 25 bp, Homo sapien
tgaggtacactgtggttccaggcag

SEQ ID NO: 5093378 - DNA, 25 bp, Homo sapien
taaagggaccataagacactatagg

SEQ ID NO: 5093379 - DNA, 25 bp, Homo sapien
caagttactaagtgggtgcctttca

SEQ ID NO: 5093380 - DNA, 25 bp, Homo sapien
cactgaaactagtacccaaatgatg

SEQ ID NO: 5093381 - DNA, 25 bp, Homo sapien
actgaaactagtacccaaatgatgt

SEQ ID NO: 5093382 - DNA, 25 bp, Homo sapien
ttcactgaaactagtacccaaatga

SEQ ID NO: 5093383 - DNA, 25 bp, Homo sapien
tgaaactagtacccaaatgatgtaa

SEQ ID NO: 5093384 - DNA, 25 bp, Homo sapien
tcattacaccactcttccgactccc

SEQ ID NO: 5093385 - DNA, 25 bp, Homo sapien
ctagctttagcattccgtcattaca

SEQ ID NO: 5093386 - DNA, 25 bp, Homo sapien
agctttagcattccgtcattacacc

SEQ ID NO: 5093387 - DNA, 25 bp, Homo sapien
tagcattccgtcattacaccactct

SEQ ID NO: 5093388 - DNA, 25 bp, Homo sapien
ttattcctgaaagtctgtgagctgg

SEQ ID NO: 5093389 - DNA, 25 bp, Homo sapien
attcctgaaagtctgtgagctggaa

SEQ ID NO: 5093390 - DNA, 25 bp, Homo sapien
agtctgtgagctggaacacatcctc

SEQ ID NO: 5093391 - DNA, 25 bp, Homo sapien
gaaagtctgtgagctggaacacatc

SEQ ID NO: 5093392 - DNA, 25 bp, Homo sapien
ggctgaatacatgtaaatttctcca

SEQ ID NO: 5093393 - DNA, 25 bp, Homo sapien
ctagggctgaatacatgtaaatttc

SEQ ID NO: 5093394 - DNA, 25 bp, Homo sapien
aggatgagtaatcgaaccctatacc

SEQ ID NO: 5093395 - DNA, 25 bp, Homo sapien
tttctccattgtgcaaagggatagg

SEQ ID NO: 5093396 - DNA, 25 bp, Homo sapien
ggaagatattctaggtggcaagcac

SEQ ID NO: 5093397 - DNA, 25 bp, Homo sapien
gaggcttcccataactgtgcatgtg

SEQ ID NO: 5093398 - DNA, 25 bp, Homo sapien
tctaggtggcaagcacagtttgagc

SEQ ID NO: 5093399 - DNA, 25 bp, Homo sapien
gcaaaggtgttaggatagaagtttc

SEQ ID NO: 5093400 - DNA, 25 bp, Homo sapien
aaacaactggactaatttaatgctc

SEQ ID NO: 5093401 - DNA, 25 bp, Homo sapien
actggactaatttaatgctcatgaa

SEQ ID NO: 5093402 - DNA, 25 bp, Homo sapien
aaagaggaattgctgcgtctgtcca

SEQ ID NO: 5093403 - DNA, 25 bp, Homo sapien
aggaattgctgcgtctgtccacccc

SEQ ID NO: 5093404 - DNA, 25 bp, Homo sapien
tggaagacgaaatcaccatcagctg

SEQ ID NO: 5093405 - DNA, 25 bp, Homo sapien
gttgcattcatgtaagtcctgggct

SEQ ID NO: 5093406 - DNA, 25 bp, Homo sapien
tgggcttgtcaaccacctggtccag

SEQ ID NO: 5093407 - DNA, 25 bp, Homo sapien
gatggctattgaagaggcacttgca

SEQ ID NO: 5093408 - DNA, 25 bp, Homo sapien
caattttgtggtgcgctcattacta

SEQ ID NO: 5093409 - DNA, 25 bp, Homo sapien
ggtgcgctcattactagaactatgg

SEQ ID NO: 5093410 - DNA, 25 bp, Homo sapien
ctttgcagtagtcacaaaaacgttc

SEQ ID NO: 5093411 - DNA, 25 bp, Homo sapien
caacaatgctcgttttccatgataa

SEQ ID NO: 5093412 - DNA, 25 bp, Homo sapien
ttatctgaagttttcaaagcagacc

SEQ ID NO: 5093413 - DNA, 25 bp, Homo sapien
gaagttttcaaagcagacctgttcc

SEQ ID NO: 5093414 - DNA, 25 bp, Homo sapien
agttttcaaagcagacctgttcctg

SEQ ID NO: 5093415 - DNA, 25 bp, Homo sapien
tctgaagttttcaaagcagacctgt

SEQ ID NO: 5093416 - DNA, 25 bp, Homo sapien
gttcttgctcactgttttgcagatg

SEQ ID NO: 5093417 - DNA, 25 bp, Homo sapien
tatcttgttcttgctcactgttttg

SEQ ID NO: 5093418 - DNA, 25 bp, Homo sapien
gatgttgtttaatgccaggaaccat

SEQ ID NO: 5093419 - DNA, 25 bp, Homo sapien
ttttgcagatgttgtttaatgccag

SEQ ID NO: 5093420 - DNA, 25 bp, Homo sapien
ttgtcacatcgatggttctgcttga

SEQ ID NO: 5093421 - DNA, 25 bp, Homo sapien
gcttctttggtgtcttcggttgtca

SEQ ID NO: 5093422 - DNA, 25 bp, Homo sapien
tcttgaataataaaggactgcttct

SEQ ID NO: 5093423 - DNA, 25 bp, Homo sapien
taatgacatcttgaataataaagga

SEQ ID NO: 5093424 - DNA, 25 bp, Homo sapien
ctgcagtacgaccttgattctccag

SEQ ID NO: 5093425 - DNA, 25 bp, Homo sapien
agtacgaccttgattctccaggctc

SEQ ID NO: 5093426 - DNA, 25 bp, Homo sapien
tgcagtacgaccttgattctccagg

SEQ ID NO: 5093427 - DNA, 25 bp, Homo sapien
gcagtacgaccttgattctccaggc

SEQ ID NO: 5093428 - DNA, 25 bp, Homo sapien
tgaactttcagagtttgtactttca

SEQ ID NO: 5093429 - DNA, 25 bp, Homo sapien
tatcgtttattctgaacaaatctga

SEQ ID NO: 5093430 - DNA, 25 bp, Homo sapien
tgtctggtatcgtttattctgaaca

SEQ ID NO: 5093431 - DNA, 25 bp, Homo sapien
tgtgaactttcagagtttgtacttt

SEQ ID NO: 5093432 - DNA, 25 bp, Homo sapien
atttgtcgttaattattttgcgcaa

SEQ ID NO: 5093433 - DNA, 25 bp, Homo sapien
tgtcgttaattattttgcgcaaatg

SEQ ID NO: 5093434 - DNA, 25 bp, Homo sapien
attattttgcgcaaatgagcttcac

SEQ ID NO: 5093435 - DNA, 25 bp, Homo sapien
cgttaattattttgcgcaaatgagc

SEQ ID NO: 5093436 - DNA, 25 bp, Homo sapien
tcagcctggcaaagtatcgcctgtt

SEQ ID NO: 5093437 - DNA, 25 bp, Homo sapien
cagggagtctcagttccagggatga

SEQ ID NO: 5093438 - DNA, 25 bp, Homo sapien
gaacatattcttacaaatctggccc

SEQ ID NO: 5093439 - DNA, 25 bp, Homo sapien
ctagagctgggttcatgggttgcaa

SEQ ID NO: 5093440 - DNA, 25 bp, Homo sapien
ttcaattaatttgtctgttccatac

SEQ ID NO: 5093441 - DNA, 25 bp, Homo sapien
tcaattaatttgtctgttccatacc

SEQ ID NO: 5093442 - DNA, 25 bp, Homo sapien
caattaatttgtctgttccatacca

SEQ ID NO: 5093443 - DNA, 25 bp, Homo sapien
gagtggtgggctcagatcattaacc

SEQ ID NO: 5093444 - DNA, 25 bp, Homo sapien
aagcctgtactcctgaagacttggg

SEQ ID NO: 5093445 - DNA, 25 bp, Homo sapien
tgatgccaggcgttagacagctgcc

SEQ ID NO: 5093446 - DNA, 25 bp, Homo sapien
gaatgtctggaaagcgtaacactaa

SEQ ID NO: 5093447 - DNA, 25 bp, Homo sapien
gcttgagctgaatttcatattcgat

SEQ ID NO: 5093448 - DNA, 25 bp, Homo sapien
ccaatgccagaaataccctcctcct

SEQ ID NO: 5093449 - DNA, 25 bp, Homo sapien
ggtcatagcccctacttatcttcac

SEQ ID NO: 5093450 - DNA, 25 bp, Homo sapien
tttcatattcgatttccaatgccag

SEQ ID NO: 5093451 - DNA, 25 bp, Homo sapien
taatagaggccgtcaaatccattct

SEQ ID NO: 5093452 - DNA, 25 bp, Homo sapien
tgttctttcagacaccttcgggagg

SEQ ID NO: 5093453 - DNA, 25 bp, Homo sapien
tgcttttctgacacaccagaggccc

SEQ ID NO: 5093454 - DNA, 25 bp, Homo sapien
cagaggccccatttgtaccatggca

SEQ ID NO: 5093455 - DNA, 25 bp, Homo sapien
tcaagtgcttatcaggtgccttctg

SEQ ID NO: 5093456 - DNA, 25 bp, Homo sapien
cagggcatcgagaggcttccttgtg

SEQ ID NO: 5093457 - DNA, 25 bp, Homo sapien
gaggcttccttgtgcttcgcttcct

SEQ ID NO: 5093458 - DNA, 25 bp, Homo sapien
ttaagtacacagggcatcgagaggc

SEQ ID NO: 5093459 - DNA, 25 bp, Homo sapien
ttgttctgactgatttattaatctc

SEQ ID NO: 5093460 - DNA, 25 bp, Homo sapien
tttgtgcaagctgacccagttgcag

SEQ ID NO: 5093461 - DNA, 25 bp, Homo sapien
ctttgtgcaagctgacccagttgca

SEQ ID NO: 5093462 - DNA, 25 bp, Homo sapien
aaggtttgcagggcgcagagagcgc

SEQ ID NO: 5093463 - DNA, 25 bp, Homo sapien
ggtttgcagggcgcagagagcgctc

SEQ ID NO: 5093464 - DNA, 25 bp, Homo sapien
gtttgcagggcgcagagagcgctca

SEQ ID NO: 5093465 - DNA, 25 bp, Homo sapien
tttgcagggcgcagagagcgctcat

SEQ ID NO: 5093466 - DNA, 25 bp, Homo sapien
tttttcaatcagaggcgcaaactta

SEQ ID NO: 5093467 - DNA, 25 bp, Homo sapien
caaacttacatgtcagtaaccaacc

SEQ ID NO: 5093468 - DNA, 25 bp, Homo sapien
ggcgcaaacttacatgtcagtaacc

SEQ ID NO: 5093469 - DNA, 25 bp, Homo sapien
tcagaggcgcaaacttacatgtcag

SEQ ID NO: 5093470 - DNA, 25 bp, Homo sapien
gcagttctcaaccactgccctgcct

SEQ ID NO: 5093471 - DNA, 25 bp, Homo sapien
tgggtgcagttctcaaccactgccc

SEQ ID NO: 5093472 - DNA, 25 bp, Homo sapien
ctgccctgcctttgtgcagaattgt

SEQ ID NO: 5093473 - DNA, 25 bp, Homo sapien
gcctttgtgcagaattgtgtgagtc

SEQ ID NO: 5093474 - DNA, 25 bp, Homo sapien
gcccctcagcccactccgcgccgcc

SEQ ID NO: 5093475 - DNA, 25 bp, Homo sapien
ggagaggatgggtgccctggcgcgg

SEQ ID NO: 5093476 - DNA, 25 bp, Homo sapien
gatgggtgccctggcgcggtgaggc

SEQ ID NO: 5093477 - DNA, 25 bp, Homo sapien
tgccctggcgcggtgaggcggccgg

SEQ ID NO: 5093478 - DNA, 25 bp, Homo sapien
cattcgcctcggctatgtttcggat

SEQ ID NO: 5093479 - DNA, 25 bp, Homo sapien
gggtgctaggcacggcggactccag

SEQ ID NO: 5093480 - DNA, 25 bp, Homo sapien
tcgcctcggctatgtttcggattgt

SEQ ID NO: 5093481 - DNA, 25 bp, Homo sapien
tcggctatgtttcggattgtttggg

SEQ ID NO: 5093482 - DNA, 25 bp, Homo sapien
tctcgcccgaaactctttgggagta

SEQ ID NO: 5093483 - DNA, 25 bp, Homo sapien
ccgctccgcgcttgctgttcccggg

SEQ ID NO: 5093484 - DNA, 25 bp, Homo sapien
ttgggagtatctctcgagaacctgg

SEQ ID NO: 5093485 - DNA, 25 bp, Homo sapien
gctgcctttccggacaagcccctct

SEQ ID NO: 5093486 - DNA, 25 bp, Homo sapien
tgtgagttttggtcccctgaacttc

SEQ ID NO: 5093487 - DNA, 25 bp, Homo sapien
tgagttttggtcccctgaacttcca

SEQ ID NO: 5093488 - DNA, 25 bp, Homo sapien
tcctacgctaactgatgatggtgaa

SEQ ID NO: 5093489 - DNA, 25 bp, Homo sapien
ttttctcctacgctaactgatgatg

SEQ ID NO: 5093490 - DNA, 25 bp, Homo sapien
ggtagcagctgtttactttcttgtt

SEQ ID NO: 5093491 - DNA, 25 bp, Homo sapien
tcagactgtatggagatttcctctt

SEQ ID NO: 5093492 - DNA, 25 bp, Homo sapien
gtccccagttatcaaaccatttgcc

SEQ ID NO: 5093493 - DNA, 25 bp, Homo sapien
agtccccagttatcaaaccatttgc

SEQ ID NO: 5093494 - DNA, 25 bp, Homo sapien
tccccagttatcaaaccatttgcca

SEQ ID NO: 5093495 - DNA, 25 bp, Homo sapien
gcgcatttccaccaattcatagtgc

SEQ ID NO: 5093496 - DNA, 25 bp, Homo sapien
tcacatgatgagacagcgcatttcc

SEQ ID NO: 5093497 - DNA, 25 bp, Homo sapien
gagacagcgcatttccaccaattca

SEQ ID NO: 5093498 - DNA, 25 bp, Homo sapien
caccaattcatagtgcactttgtca

SEQ ID NO: 5093499 - DNA, 25 bp, Homo sapien
caaatgttaaacacaaaattgatga

SEQ ID NO: 5093500 - DNA, 25 bp, Homo sapien
cattggccagtgttagggcaatgca

SEQ ID NO: 5093501 - DNA, 25 bp, Homo sapien
tgatgatgttaagtatcatagggac

SEQ ID NO: 5093502 - DNA, 25 bp, Homo sapien
atagggacagctggctcatccacat

SEQ ID NO: 5093503 - DNA, 25 bp, Homo sapien
gatgtccacaatttggcatgcccag

SEQ ID NO: 5093504 - DNA, 25 bp, Homo sapien
gcccagtgtgcctcctctttagtag

SEQ ID NO: 5093505 - DNA, 25 bp, Homo sapien
gggtaacctatgacgacatgcctct

SEQ ID NO: 5093506 - DNA, 25 bp, Homo sapien
gaataccggtgaagtgacgttcaag

SEQ ID NO: 5093507 - DNA, 25 bp, Homo sapien
ctgaagacagtttacagaatagaac

SEQ ID NO: 5093508 - DNA, 25 bp, Homo sapien
tcgcttctcttgattgacaatcccc

SEQ ID NO: 5093509 - DNA, 25 bp, Homo sapien
gagccacagagcctcgccttgcctt

SEQ ID NO: 5093510 - DNA, 25 bp, Homo sapien
gtctctcaatgaaaatgtgtaccat

SEQ ID NO: 5093511 - DNA, 25 bp, Homo sapien
gtaattcgagtagaggcagcgctgc

SEQ ID NO: 5093512 - DNA, 25 bp, Homo sapien
taaaaaggtccgataggcagacacg

SEQ ID NO: 5093513 - DNA, 25 bp, Homo sapien
tattaatgcataaatcctatgactc

SEQ ID NO: 5093514 - DNA, 25 bp, Homo sapien
cctatgactcatctgcaggactgta

SEQ ID NO: 5093515 - DNA, 25 bp, Homo sapien
agagtaagacagtgttgctgaaact

SEQ ID NO: 5093516 - DNA, 25 bp, Homo sapien
aactgtggggtccatctttgatgac

SEQ ID NO: 5093517 - DNA, 25 bp, Homo sapien
ccaggtcctattaagggaaagtgct

SEQ ID NO: 5093518 - DNA, 25 bp, Homo sapien
caatcattgcacagtcagagtaaga

SEQ ID NO: 5093519 - DNA, 25 bp, Homo sapien
catggcacagaggagtacggaacgt

SEQ ID NO: 5093520 - DNA, 25 bp, Homo sapien
tacggaacgttgtgtgagactgtct

SEQ ID NO: 5093521 - DNA, 25 bp, Homo sapien
tacctgaggttttgagattcaccag

SEQ ID NO: 5093522 - DNA, 25 bp, Homo sapien
gaaattgttctatagctcccatggc

SEQ ID NO: 5093523 - DNA, 25 bp, Homo sapien
gcgcctgttggccagattctttatt

SEQ ID NO: 5093524 - DNA, 25 bp, Homo sapien
caccgcgcctgttggccagattctt

SEQ ID NO: 5093525 - DNA, 25 bp, Homo sapien
accgcgcctgttggccagattcttt

SEQ ID NO: 5093526 - DNA, 25 bp, Homo sapien
cctgttggccagattctttattgca

SEQ ID NO: 5093527 - DNA, 25 bp, Homo sapien
tttctcccgtagaccatgagtttgg

SEQ ID NO: 5093528 - DNA, 25 bp, Homo sapien
ataccaaggctagcaccggacacat

SEQ ID NO: 5093529 - DNA, 25 bp, Homo sapien
tgtgggtcactaacctacttgttcc

SEQ ID NO: 5093530 - DNA, 25 bp, Homo sapien
gcttaaatatcaaacctggcatctt

SEQ ID NO: 5093531 - DNA, 25 bp, Homo sapien
gtgcaaacctgttgttctgaatgac

SEQ ID NO: 5093532 - DNA, 25 bp, Homo sapien
gcaaacctgttgttctgaatgacca

SEQ ID NO: 5093533 - DNA, 25 bp, Homo sapien
ctgtgcaaacctgttgttctgaatg

SEQ ID NO: 5093534 - DNA, 25 bp, Homo sapien
caaacctgttgttctgaatgaccat

SEQ ID NO: 5093535 - DNA, 25 bp, Homo sapien
tacattgctctaatacatcccagtg

SEQ ID NO: 5093536 - DNA, 25 bp, Homo sapien
catcctgtaagttaagtgttttggt

SEQ ID NO: 5093537 - DNA, 25 bp, Homo sapien
catcccagtgagtatgctctgagag

SEQ ID NO: 5093538 - DNA, 25 bp, Homo sapien
cctcacgtggcaatacatcctgtaa

SEQ ID NO: 5093539 - DNA, 25 bp, Homo sapien
tccgaagtaccaggataacgggcat

SEQ ID NO: 5093540 - DNA, 25 bp, Homo sapien
tcggccttccgaagtaccaggataa

SEQ ID NO: 5093541 - DNA, 25 bp, Homo sapien
cactctaaattagattagggttctt

SEQ ID NO: 5093542 - DNA, 25 bp, Homo sapien
gcatcacactctaaattagattagg

SEQ ID NO: 5093543 - DNA, 25 bp, Homo sapien
tagttgacttgctacgcttcacaga

SEQ ID NO: 5093544 - DNA, 25 bp, Homo sapien
actctgagccgtagggttcatcttc

SEQ ID NO: 5093545 - DNA, 25 bp, Homo sapien
cacagtagggatagacgtggataca

SEQ ID NO: 5093546 - DNA, 25 bp, Homo sapien
taacatcaaatgatctgccgcggta

SEQ ID NO: 5093547 - DNA, 25 bp, Homo sapien
tcctcatgcaactgtaagcatatgg

SEQ ID NO: 5093548 - DNA, 25 bp, Homo sapien
aagcatatggtgatagttacttttc

SEQ ID NO: 5093549 - DNA, 25 bp, Homo sapien
cagcctagatatgttggatgtaata

SEQ ID NO: 5093550 - DNA, 25 bp, Homo sapien
ttcagaggctaaggtatcaagggta

SEQ ID NO: 5093551 - DNA, 25 bp, Homo sapien
gttccccgacagtgctgatgtgcat

SEQ ID NO: 5093552 - DNA, 25 bp, Homo sapien
aaggttccccgacagtgctgatgtg

SEQ ID NO: 5093553 - DNA, 25 bp, Homo sapien
ggttccccgacagtgctgatgtgca

SEQ ID NO: 5093554 - DNA, 25 bp, Homo sapien
taaaggttccccgacagtgctgatg

SEQ ID NO: 5093555 - DNA, 25 bp, Homo sapien
tgagataggatggagtaagacaaga

SEQ ID NO: 5093556 - DNA, 25 bp, Homo sapien
tgttgagataggatggagtaagaca

SEQ ID NO: 5093557 - DNA, 25 bp, Homo sapien
cacccctggtgttgagataggatgg

SEQ ID NO: 5093558 - DNA, 25 bp, Homo sapien
gagagtcacccctggtgttgagata

SEQ ID NO: 5093559 - DNA, 25 bp, Homo sapien
taaacactgtagtgcctcaatgtgc

SEQ ID NO: 5093560 - DNA, 25 bp, Homo sapien
ggagtcagcatattccagagaaagc

SEQ ID NO: 5093561 - DNA, 25 bp, Homo sapien
tgtgagtgccatccctgagttgata

SEQ ID NO: 5093562 - DNA, 25 bp, Homo sapien
tgagttacccaagaggcatgtgcct

SEQ ID NO: 5093563 - DNA, 25 bp, Homo sapien
tctcatggcagaatttgcattccaa

SEQ ID NO: 5093564 - DNA, 25 bp, Homo sapien
gaatagagtatctgtcatttacacg

SEQ ID NO: 5093565 - DNA, 25 bp, Homo sapien
catttacacgtaagaacaaaatctc

SEQ ID NO: 5093566 - DNA, 25 bp, Homo sapien
tttgctcagagaggaatagagtatc

SEQ ID NO: 5093567 - DNA, 25 bp, Homo sapien
tcaagtgtatcatcaagagtcctgg

SEQ ID NO: 5093568 - DNA, 25 bp, Homo sapien
catatttagtgacttcaagtgtatc

SEQ ID NO: 5093569 - DNA, 25 bp, Homo sapien
tagtgacttcaagtgtatcatcaag

SEQ ID NO: 5093570 - DNA, 25 bp, Homo sapien
gtatcatcaagagtcctgggtctcc

SEQ ID NO: 5093571 - DNA, 25 bp, Homo sapien
ttcaaaccacagttcgagaaggagg

SEQ ID NO: 5093572 - DNA, 25 bp, Homo sapien
gctgatgatactgtccttcaaacca

SEQ ID NO: 5093573 - DNA, 25 bp, Homo sapien
tacagagtttgcaccagtaagttgg

SEQ ID NO: 5093574 - DNA, 25 bp, Homo sapien
tgcagcactataagaatccattcat

SEQ ID NO: 5093575 - DNA, 25 bp, Homo sapien
tgcctaaaggtgaaacatgttgaga

SEQ ID NO: 5093576 - DNA, 25 bp, Homo sapien
gatacatctacacactgatcagagc

SEQ ID NO: 5093577 - DNA, 25 bp, Homo sapien
cttccaatgatttaaagcctggact

SEQ ID NO: 5093578 - DNA, 25 bp, Homo sapien
ggactctctgctggagtacatatta

SEQ ID NO: 5093579 - DNA, 25 bp, Homo sapien
gtggtacaaacggaattcctgtcat

SEQ ID NO: 5093580 - DNA, 25 bp, Homo sapien
gtgaagtagctagtccatcatgaaa

SEQ ID NO: 5093581 - DNA, 25 bp, Homo sapien
gaagagcaggttagactactgaata

SEQ ID NO: 5093582 - DNA, 25 bp, Homo sapien
cccagacctcagttggtgtgaatgt

SEQ ID NO: 5093583 - DNA, 25 bp, Homo sapien
cataatctattctgaatgatggaac

SEQ ID NO: 5093584 - DNA, 25 bp, Homo sapien
gaacttcagagtaagaagcagccat

SEQ ID NO: 5093585 - DNA, 25 bp, Homo sapien
gcataatctattctgaatgatggaa

SEQ ID NO: 5093586 - DNA, 25 bp, Homo sapien
ttccaggcaatatcaccaagagttc

SEQ ID NO: 5093587 - DNA, 25 bp, Homo sapien
tcaccaagagttccatactcttctg

SEQ ID NO: 5093588 - DNA, 25 bp, Homo sapien
ggcaatatcaccaagagttccatac

SEQ ID NO: 5093589 - DNA, 25 bp, Homo sapien
ccttccaggcaatatcaccaagagt

SEQ ID NO: 5093590 - DNA, 25 bp, Homo sapien
tgagatgtcgtttaaaagtaggtgg

SEQ ID NO: 5093591 - DNA, 25 bp, Homo sapien
tccacatgcacgaagaagtaggaat

SEQ ID NO: 5093592 - DNA, 25 bp, Homo sapien
aatttctgagatgtcgtttaaaagt

SEQ ID NO: 5093593 - DNA, 25 bp, Homo sapien
agaagtaggaatgggtttggaaatg

SEQ ID NO: 5093594 - DNA, 25 bp, Homo sapien
tgctgtcagagtcctgaagaatggc

SEQ ID NO: 5093595 - DNA, 25 bp, Homo sapien
aaagtacaagataacgtctgccaga

SEQ ID NO: 5093596 - DNA, 25 bp, Homo sapien
tgggtatcagaactgcctgaaagga

SEQ ID NO: 5093597 - DNA, 25 bp, Homo sapien
cctgaaaggaatctactgcagctga

SEQ ID NO: 5093598 - DNA, 25 bp, Homo sapien
tagattcgttggttgttaataatcc

SEQ ID NO: 5093599 - DNA, 25 bp, Homo sapien
tggcccagaggcattgaaagccttc

SEQ ID NO: 5093600 - DNA, 25 bp, Homo sapien
tctccagttcttgaattcagatgag

SEQ ID NO: 5093601 - DNA, 25 bp, Homo sapien
ccgactttccacataacaataattt

SEQ ID NO: 5093602 - DNA, 25 bp, Homo sapien
caggtactgatctatgctcagctgc

SEQ ID NO: 5093603 - DNA, 25 bp, Homo sapien
gaccacagccatgcaggttgtaaat

SEQ ID NO: 5093604 - DNA, 25 bp, Homo sapien
tcactgagtctcctgttggtaccct

SEQ ID NO: 5093605 - DNA, 25 bp, Homo sapien
gtaccctgaccacgttgtgtctgca

SEQ ID NO: 5093606 - DNA, 25 bp, Homo sapien
tctgacagtggagccaagatcttct

SEQ ID NO: 5093607 - DNA, 25 bp, Homo sapien
catgcaatgctagctttattaagtc

SEQ ID NO: 5093608 - DNA, 25 bp, Homo sapien
caatgctagctttattaagtctgac

SEQ ID NO: 5093609 - DNA, 25 bp, Homo sapien
ctttattaagtctgacagtggagcc

SEQ ID NO: 5093610 - DNA, 25 bp, Homo sapien
ctgaagcagtatattgctcagagaa

SEQ ID NO: 5093611 - DNA, 25 bp, Homo sapien
gacactcactgacagtagttgttat

SEQ ID NO: 5093612 - DNA, 25 bp, Homo sapien
atatctgatttgtgggtctcttgac

SEQ ID NO: 5093613 - DNA, 25 bp, Homo sapien
tccaaaaccgaaaccagacactcac

SEQ ID NO: 5093614 - DNA, 25 bp, Homo sapien
aaaacagcttgattgtgctgccatc

SEQ ID NO: 5093615 - DNA, 25 bp, Homo sapien
ccccagtgtttgtataggtcctgat

SEQ ID NO: 5093616 - DNA, 25 bp, Homo sapien
acaaaacagcttgattgtgctgcca

SEQ ID NO: 5093617 - DNA, 25 bp, Homo sapien
aacagcttgattgtgctgccatcac

SEQ ID NO: 5093618 - DNA, 25 bp, Homo sapien
tatttccgagttgtggaagtctctg

SEQ ID NO: 5093619 - DNA, 25 bp, Homo sapien
caagataaaaagatacatggctttt

SEQ ID NO: 5093620 - DNA, 25 bp, Homo sapien
tgtgctagttgcctagaagcccaag

SEQ ID NO: 5093621 - DNA, 25 bp, Homo sapien
ggattttgtacccagtgcactgtgg

SEQ ID NO: 5093622 - DNA, 25 bp, Homo sapien
aagaaataagatttgtctagggatt

SEQ ID NO: 5093623 - DNA, 25 bp, Homo sapien
taagatttgtctagggattttgctg

SEQ ID NO: 5093624 - DNA, 25 bp, Homo sapien
gattttgctggtaaggctaagggaa

SEQ ID NO: 5093625 - DNA, 25 bp, Homo sapien
tgtctagggattttgctggtaaggc

SEQ ID NO: 5093626 - DNA, 25 bp, Homo sapien
ggagcctcacaacagctgtacaaat

SEQ ID NO: 5093627 - DNA, 25 bp, Homo sapien
cattgcaggagtcttcatacaggat

SEQ ID NO: 5093628 - DNA, 25 bp, Homo sapien
agtggcagtagaaaaggcgatattg

SEQ ID NO: 5093629 - DNA, 25 bp, Homo sapien
cagctgtacaaattccagtggagaa

SEQ ID NO: 5093630 - DNA, 25 bp, Homo sapien
cacgtgctagaaagaggaatctttt

SEQ ID NO: 5093631 - DNA, 25 bp, Homo sapien
tcaatggcagttacaaggcaaaagt

SEQ ID NO: 5093632 - DNA, 25 bp, Homo sapien
ggtgaaatatcaccttcaatggcag

SEQ ID NO: 5093633 - DNA, 25 bp, Homo sapien
gcaaaagtggaatactctgccacgt

SEQ ID NO: 5093634 - DNA, 25 bp, Homo sapien
ggagcatgcacatggctcactagcc

SEQ ID NO: 5093635 - DNA, 25 bp, Homo sapien
tacggttcataccaacgcactgttt

SEQ ID NO: 5093636 - DNA, 25 bp, Homo sapien
tatgttgcggcatgtagaaagaagc

SEQ ID NO: 5093637 - DNA, 25 bp, Homo sapien
ggtgtcctatagtgcactctcttca

SEQ ID NO: 5093638 - DNA, 25 bp, Homo sapien
tcttcttagatgtacagggaagcac

SEQ ID NO: 5093639 - DNA, 25 bp, Homo sapien
aaccaaatggcgtatgtttcaaagc

SEQ ID NO: 5093640 - DNA, 25 bp, Homo sapien
tattagtgattttccggctgccttg

SEQ ID NO: 5093641 - DNA, 25 bp, Homo sapien
cacaagtgaagttctactgctgcag

SEQ ID NO: 5093642 - DNA, 25 bp, Homo sapien
tactgttaggtttagaaccagccat

SEQ ID NO: 5093643 - DNA, 25 bp, Homo sapien
tacttcagaatctctggaaaaggat

SEQ ID NO: 5093644 - DNA, 25 bp, Homo sapien
ctacttcagaatctctggaaaagga

SEQ ID NO: 5093645 - DNA, 25 bp, Homo sapien
gatgagtcactactgttaggtttag

SEQ ID NO: 5093646 - DNA, 25 bp, Homo sapien
cacccttctctctgctcccacagga

SEQ ID NO: 5093647 - DNA, 25 bp, Homo sapien
ctggaaaccaaatcacccttctctc

SEQ ID NO: 5093648 - DNA, 25 bp, Homo sapien
ggaaaccaaatcacccttctctctg

SEQ ID NO: 5093649 - DNA, 25 bp, Homo sapien
cccttctctctgctcccacaggacc

SEQ ID NO: 5093650 - DNA, 25 bp, Homo sapien
tcctatgcattcattgcttctactg

SEQ ID NO: 5093651 - DNA, 25 bp, Homo sapien
cattcattgcttctactgccatctc

SEQ ID NO: 5093652 - DNA, 25 bp, Homo sapien
gccatctccttcaagacaacttgtc

SEQ ID NO: 5093653 - DNA, 25 bp, Homo sapien
tccagggtcactcctatgcattcat

SEQ ID NO: 5093654 - DNA, 25 bp, Homo sapien
catgttttttcatgcttttcttttc

SEQ ID NO: 5093655 - DNA, 25 bp, Homo sapien
ttttcatgcttttcttttcctctac

SEQ ID NO: 5093656 - DNA, 25 bp, Homo sapien
tttttcatgcttttcttttcctcta

SEQ ID NO: 5093657 - DNA, 25 bp, Homo sapien
gcttcttcagactttctctcagtgc

SEQ ID NO: 5093658 - DNA, 25 bp, Homo sapien
tcagactttctctcagtgcttttgc

SEQ ID NO: 5093659 - DNA, 25 bp, Homo sapien
gactttctctcagtgcttttgcttc

SEQ ID NO: 5093660 - DNA, 25 bp, Homo sapien
tgcttctctttatgtgttttttagg

SEQ ID NO: 5093661 - DNA, 25 bp, Homo sapien
tcacggaaacctctgaatagataag

SEQ ID NO: 5093662 - DNA, 25 bp, Homo sapien
tacaatttgaatacgctgcagagga

SEQ ID NO: 5093663 - DNA, 25 bp, Homo sapien
caactcattactgggctgttcttca

SEQ ID NO: 5093664 - DNA, 25 bp, Homo sapien
gtgtgcatttggcaaacttaggagt

SEQ ID NO: 5093665 - DNA, 25 bp, Homo sapien
cccagacttgactggtggctttagt

SEQ ID NO: 5093666 - DNA, 25 bp, Homo sapien
gcttaacatggcttctgagaatccc

SEQ ID NO: 5093667 - DNA, 25 bp, Homo sapien
gcctagcaaccagaccaagcctatt

SEQ ID NO: 5093668 - DNA, 25 bp, Homo sapien
gaaccttgggtcattgcgtgatgaa

SEQ ID NO: 5093669 - DNA, 25 bp, Homo sapien
caagggtcaaaagcatcagtgtgga

SEQ ID NO: 5093670 - DNA, 25 bp, Homo sapien
tgtggaaaacaagacggcatatttg

SEQ ID NO: 5093671 - DNA, 25 bp, Homo sapien
aaagaggtcatgctgactttatggc

SEQ ID NO: 5093672 - DNA, 25 bp, Homo sapien
ggagtctgagagactcaacttcaaa

SEQ ID NO: 5093673 - DNA, 25 bp, Homo sapien
cactgttaacaaggcctgcctcatg

SEQ ID NO: 5093674 - DNA, 25 bp, Homo sapien
gggaaacactgttaacaaggcctgc

SEQ ID NO: 5093675 - DNA, 25 bp, Homo sapien
gctggggaaacactgttaacaaggc

SEQ ID NO: 5093676 - DNA, 25 bp, Homo sapien
gaaacactgttaacaaggcctgcct

SEQ ID NO: 5093677 - DNA, 25 bp, Homo sapien
atgtgaggtgaacattttcagtggt

SEQ ID NO: 5093678 - DNA, 25 bp, Homo sapien
tgtgaggtgaacattttcagtggta

SEQ ID NO: 5093679 - DNA, 25 bp, Homo sapien
aatgtgaggtgaacattttcagtgg

SEQ ID NO: 5093680 - DNA, 25 bp, Homo sapien
atacagcagtgaccaactcatggcc

SEQ ID NO: 5093681 - DNA, 25 bp, Homo sapien
tcaggctctccgtaggatacagcag

SEQ ID NO: 5093682 - DNA, 25 bp, Homo sapien
cagtaagtacatcatcacgagaggc

SEQ ID NO: 5093683 - DNA, 25 bp, Homo sapien
tcatggcccaagtgattaactgcat

SEQ ID NO: 5093684 - DNA, 25 bp, Homo sapien
ggtatccctatcaccacaatgctgg

SEQ ID NO: 5093685 - DNA, 25 bp, Homo sapien
cactctttattctactaatgtggtg

SEQ ID NO: 5093686 - DNA, 25 bp, Homo sapien
gaatagatccctcttcgtcatgatg

SEQ ID NO: 5093687 - DNA, 25 bp, Homo sapien
tattcacagtaggttcttttaatcc

SEQ ID NO: 5093688 - DNA, 25 bp, Homo sapien
actattccaagtgctctttaggacc

SEQ ID NO: 5093689 - DNA, 25 bp, Homo sapien
gaatgttgatgttgcctctgctact

SEQ ID NO: 5093690 - DNA, 25 bp, Homo sapien
ggtcacaggtagttaactcagtctt

SEQ ID NO: 5093691 - DNA, 25 bp, Homo sapien
ggtctgcactgatggcctagggtca

SEQ ID NO: 5093692 - DNA, 25 bp, Homo sapien
cgagggcctgatgaagggacagaaa

SEQ ID NO: 5093693 - DNA, 25 bp, Homo sapien
gaaaagccgatgagaaccttgggca

SEQ ID NO: 5093694 - DNA, 25 bp, Homo sapien
gggcctgatgaagggacagaaaagc

SEQ ID NO: 5093695 - DNA, 25 bp, Homo sapien
gccgatgagaaccttgggcagccat

SEQ ID NO: 5093696 - DNA, 25 bp, Homo sapien
ttcccagccatgtagccaccactgg

SEQ ID NO: 5093697 - DNA, 25 bp, Homo sapien
caccactggctttttaactgaccct

SEQ ID NO: 5093698 - DNA, 25 bp, Homo sapien
cactggctttttaactgacccttca

SEQ ID NO: 5093699 - DNA, 25 bp, Homo sapien
ccaggtaattgcacttgtgagacaa

SEQ ID NO: 5093700 - DNA, 25 bp, Homo sapien
aaatgcagaggtctggtgggttgct

SEQ ID NO: 5093701 - DNA, 25 bp, Homo sapien
tgccccctagcactgccaaggtgtg

SEQ ID NO: 5093702 - DNA, 25 bp, Homo sapien
gaatgtattctgtatgctgagacct

SEQ ID NO: 5093703 - DNA, 25 bp, Homo sapien
tgcaccttgcagtcattatactggc

SEQ ID NO: 5093704 - DNA, 25 bp, Homo sapien
cagaccacctttccaatgtgttcat

SEQ ID NO: 5093705 - DNA, 25 bp, Homo sapien
ggctgaattgatttacttgagatgg

SEQ ID NO: 5093706 - DNA, 25 bp, Homo sapien
gaactgtgggtactctgtagttgca

SEQ ID NO: 5093707 - DNA, 25 bp, Homo sapien
tgctctagaattccatggtgacaag

SEQ ID NO: 5093708 - DNA, 25 bp, Homo sapien
ctgtaaacaatgaccaaccaacctt

SEQ ID NO: 5093709 - DNA, 25 bp, Homo sapien
ggcatgttctaccaccaactgtaaa

SEQ ID NO: 5093710 - DNA, 25 bp, Homo sapien
tctctttgggactcatctaacttgg

SEQ ID NO: 5093711 - DNA, 25 bp, Homo sapien
tgtcctgcacatccctggaattcat

SEQ ID NO: 5093712 - DNA, 25 bp, Homo sapien
tcatttctactgctagtatagagta

SEQ ID NO: 5093713 - DNA, 25 bp, Homo sapien
ttcatttctactgctagtatagagt

SEQ ID NO: 5093714 - DNA, 25 bp, Homo sapien
gtcattgtcctgcacatccctggaa

SEQ ID NO: 5093715 - DNA, 25 bp, Homo sapien
gtgaccagtggcattcttttccaga

SEQ ID NO: 5093716 - DNA, 25 bp, Homo sapien
ggactggctgaagttaagagtctta

SEQ ID NO: 5093717 - DNA, 25 bp, Homo sapien
cagcagtgtggttggatttacactg

SEQ ID NO: 5093718 - DNA, 25 bp, Homo sapien
tgacccatcggtactttcagtgacc

SEQ ID NO: 5093719 - DNA, 25 bp, Homo sapien
tatgtatgtgtaactggtcacttca

SEQ ID NO: 5093720 - DNA, 25 bp, Homo sapien
aatagctggttaatagctcaggagc

SEQ ID NO: 5093721 - DNA, 25 bp, Homo sapien
taattatcagcgaatgttggcactt

SEQ ID NO: 5093722 - DNA, 25 bp, Homo sapien
tgaaaatcaagccataatagctggt

SEQ ID NO: 5093723 - DNA, 25 bp, Homo sapien
tgatgggcgaccaaggtatgggctc

SEQ ID NO: 5093724 - DNA, 25 bp, Homo sapien
cgcacctgatgatgggcgaccaagg

SEQ ID NO: 5093725 - DNA, 25 bp, Homo sapien
caaggtctggcgcacctgatgatgg

SEQ ID NO: 5093726 - DNA, 25 bp, Homo sapien
tcccttcaaggtctggcgcacctga

SEQ ID NO: 5093727 - DNA, 25 bp, Homo sapien
ccccatgggatcctaagtctgccag

SEQ ID NO: 5093728 - DNA, 25 bp, Homo sapien
ggatcctaagtctgccaggtgtttc

SEQ ID NO: 5093729 - DNA, 25 bp, Homo sapien
gactagtgtaccttgggtctgactt

SEQ ID NO: 5093730 - DNA, 25 bp, Homo sapien
tgactttagaaattgcttccttaac

SEQ ID NO: 5093731 - DNA, 25 bp, Homo sapien
aaggacttcttgacggacatctctc

SEQ ID NO: 5093732 - DNA, 25 bp, Homo sapien
gtgaaggacttcttgacggacatct

SEQ ID NO: 5093733 - DNA, 25 bp, Homo sapien
ggacttcttgacggacatctctcat

SEQ ID NO: 5093734 - DNA, 25 bp, Homo sapien
gaaggacttcttgacggacatctct

SEQ ID NO: 5093735 - DNA, 25 bp, Homo sapien
tcaggaaactcacagtattctggaa

SEQ ID NO: 5093736 - DNA, 25 bp, Homo sapien
ctattcaggaaactcacagtattct

SEQ ID NO: 5093737 - DNA, 25 bp, Homo sapien
actcacagtattctggaaagtctcc

SEQ ID NO: 5093738 - DNA, 25 bp, Homo sapien
gaaagtctccaagggaaagtgtgtc

SEQ ID NO: 5093739 - DNA, 25 bp, Homo sapien
ggtggataagccatattgaattcat

SEQ ID NO: 5093740 - DNA, 25 bp, Homo sapien
aattggtggataagccatattgaat

SEQ ID NO: 5093741 - DNA, 25 bp, Homo sapien
ttttattttggtgtattccaccaga

SEQ ID NO: 5093742 - DNA, 25 bp, Homo sapien
tgtattccaccagatccaaaattgg

SEQ ID NO: 5093743 - DNA, 25 bp, Homo sapien
atagcgattactccccttacatgag

SEQ ID NO: 5093744 - DNA, 25 bp, Homo sapien
tgttttaagcccatcacgttagtga

SEQ ID NO: 5093745 - DNA, 25 bp, Homo sapien
cttgaaattgcagatagtactaaaa

SEQ ID NO: 5093746 - DNA, 25 bp, Homo sapien
aacctgtgtactatgttattcccta

SEQ ID NO: 5093747 - DNA, 25 bp, Homo sapien
catttccaggactgatgctttcaga

SEQ ID NO: 5093748 - DNA, 25 bp, Homo sapien
tctgttgaacataggaatctctcgt

SEQ ID NO: 5093749 - DNA, 25 bp, Homo sapien
tctactgggtacacagaaagcttat

SEQ ID NO: 5093750 - DNA, 25 bp, Homo sapien
tattaatgttgagctccaaagcaag

SEQ ID NO: 5093751 - DNA, 25 bp, Homo sapien
cttggttagaacctttagacagcat

SEQ ID NO: 5093752 - DNA, 25 bp, Homo sapien
atggattgtctccttggttagaacc

SEQ ID NO: 5093753 - DNA, 25 bp, Homo sapien
cagtcatttacggatggattgtctc

SEQ ID NO: 5093754 - DNA, 25 bp, Homo sapien
cttgacagtcatttacggatggatt

SEQ ID NO: 5093755 - DNA, 25 bp, Homo sapien
gtcactaaggttcccctctgtactc

SEQ ID NO: 5093756 - DNA, 25 bp, Homo sapien
tttatgtaagtgtttcttccctaga

SEQ ID NO: 5093757 - DNA, 25 bp, Homo sapien
aactgtgtcactaaggttcccctct

SEQ ID NO: 5093758 - DNA, 25 bp, Homo sapien
taagtgtttcttccctagagaataa

SEQ ID NO: 5093759 - DNA, 25 bp, Homo sapien
tattttagcatgagctgttggtgtc

SEQ ID NO: 5093760 - DNA, 25 bp, Homo sapien
tagcatgagctgttggtgtcctcgc

SEQ ID NO: 5093761 - DNA, 25 bp, Homo sapien
aaaatattttagcatgagctgttgg

SEQ ID NO: 5093762 - DNA, 25 bp, Homo sapien
tggtgtcctcgcaacttttaaagtg

SEQ ID NO: 5093763 - DNA, 25 bp, Homo sapien
cagcaccagtttctatctgagctat

SEQ ID NO: 5093764 - DNA, 25 bp, Homo sapien
aaccccagcaccagtttctatctga

SEQ ID NO: 5093765 - DNA, 25 bp, Homo sapien
gcaccagtttctatctgagctattc

SEQ ID NO: 5093766 - DNA, 25 bp, Homo sapien
cccagcaccagtttctatctgagct

SEQ ID NO: 5093767 - DNA, 25 bp, Homo sapien
ttcaccagttctttcagttggaaga

SEQ ID NO: 5093768 - DNA, 25 bp, Homo sapien
cagttctttcagttggaagagtctg

SEQ ID NO: 5093769 - DNA, 25 bp, Homo sapien
caccagttctttcagttggaagagt

SEQ ID NO: 5093770 - DNA, 25 bp, Homo sapien
aattcaccagttctttcagttggaa

SEQ ID NO: 5093771 - DNA, 25 bp, Homo sapien
gggtatcctcccagtactgactcta

SEQ ID NO: 5093772 - DNA, 25 bp, Homo sapien
tacagccgctgcctgtattgcagac

SEQ ID NO: 5093773 - DNA, 25 bp, Homo sapien
tggttgagctcgagttacagccgct

SEQ ID NO: 5093774 - DNA, 25 bp, Homo sapien
cctctttacacagtggattgcccca

SEQ ID NO: 5093775 - DNA, 25 bp, Homo sapien
catgacggtgttcagcggccttttc

SEQ ID NO: 5093776 - DNA, 25 bp, Homo sapien
gaggtcaagtccaagcgcagggaca

SEQ ID NO: 5093777 - DNA, 25 bp, Homo sapien
tcttcatcgaccaggtggaggccaa

SEQ ID NO: 5093778 - DNA, 25 bp, Homo sapien
tcctggccgacacgccggttaacga

SEQ ID NO: 5093779 - DNA, 25 bp, Homo sapien
ggaggggctgcgaccacgggccgag

SEQ ID NO: 5093780 - DNA, 25 bp, Homo sapien
gaccacgggccgagcccacccattc

SEQ ID NO: 5093781 - DNA, 25 bp, Homo sapien
ttagaagcgcttgcggaaggtcccc

SEQ ID NO: 5093782 - DNA, 25 bp, Homo sapien
ctccgcagcatccagacctggaggg

SEQ ID NO: 5093783 - DNA, 25 bp, Homo sapien
aagttggcatcttaccctggtgggt

SEQ ID NO: 5093784 - DNA, 25 bp, Homo sapien
gacacagttgatcgtcgtctgcaag

SEQ ID NO: 5093785 - DNA, 25 bp, Homo sapien
tggcacagcctaggcaagtcatgaa

SEQ ID NO: 5093786 - DNA, 25 bp, Homo sapien
caaggtgcacaagtaaagccagagc

SEQ ID NO: 5093787 - DNA, 25 bp, Homo sapien
attgggcatgcccagttgcatggtt

SEQ ID NO: 5093788 - DNA, 25 bp, Homo sapien
gggcatgcccagttgcatggttaga

SEQ ID NO: 5093789 - DNA, 25 bp, Homo sapien
tgcccagttgcatggttagagcctc

SEQ ID NO: 5093790 - DNA, 25 bp, Homo sapien
catgcccagttgcatggttagagcc

SEQ ID NO: 5093791 - DNA, 25 bp, Homo sapien
tttgcaataagctttagctctatac

SEQ ID NO: 5093792 - DNA, 25 bp, Homo sapien
tagctctatactaaacacatcgcgg

SEQ ID NO: 5093793 - DNA, 25 bp, Homo sapien
aaacacatcgcggtgtaccttctgt

SEQ ID NO: 5093794 - DNA, 25 bp, Homo sapien
ccttctgtactatttgtcctataac

SEQ ID NO: 5093795 - DNA, 25 bp, Homo sapien
gaaccaagttagacttgatttttga

SEQ ID NO: 5093796 - DNA, 25 bp, Homo sapien
gagtctagccaactgtttcttcaac

SEQ ID NO: 5093797 - DNA, 25 bp, Homo sapien
gaaattgtgaacagctgttagagtc

SEQ ID NO: 5093798 - DNA, 25 bp, Homo sapien
tgtcctccatcaggagagatacgag

SEQ ID NO: 5093799 - DNA, 25 bp, Homo sapien
tcttcaactatgattccagaacaac

SEQ ID NO: 5093800 - DNA, 25 bp, Homo sapien
aagatgcgagttcacctttcacagg

SEQ ID NO: 5093801 - DNA, 25 bp, Homo sapien
tttcacaggcaactggggagacagc

SEQ ID NO: 5093802 - DNA, 25 bp, Homo sapien
taaagatgcgagttcacctttcaca

SEQ ID NO: 5093803 - DNA, 25 bp, Homo sapien
ttataaagatgcgagttcacctttc

SEQ ID NO: 5093804 - DNA, 25 bp, Homo sapien
tgctccactcaacacagccaattta

SEQ ID NO: 5093805 - DNA, 25 bp, Homo sapien
tcaacacagccaatttaatcactga

SEQ ID NO: 5093806 - DNA, 25 bp, Homo sapien
tccactcaacacagccaatttaatc

SEQ ID NO: 5093807 - DNA, 25 bp, Homo sapien
atccactgctccactcaacacagcc

SEQ ID NO: 5093808 - DNA, 25 bp, Homo sapien
ccaaaatatttcggcttttaggcat

SEQ ID NO: 5093809 - DNA, 25 bp, Homo sapien
gccaagcagctaaagactgcttttg

SEQ ID NO: 5093810 - DNA, 25 bp, Homo sapien
caagcagctaaagactgcttttggg

SEQ ID NO: 5093811 - DNA, 25 bp, Homo sapien
accactatcccataattttaccagc

SEQ ID NO: 5093812 - DNA, 25 bp, Homo sapien
ataattttaccagccaagcagctaa

SEQ ID NO: 5093813 - DNA, 25 bp, Homo sapien
caaggaatgattctctgcaatagca

SEQ ID NO: 5093814 - DNA, 25 bp, Homo sapien
cacggatgtgcggtaacattgctaa

SEQ ID NO: 5093815 - DNA, 25 bp, Homo sapien
gagatcacataggtgttgcctgatg

SEQ ID NO: 5093816 - DNA, 25 bp, Homo sapien
ttctctgcaatagcagggagatcac

SEQ ID NO: 5093817 - DNA, 25 bp, Homo sapien
taggatctcgttgtgcattccagct

SEQ ID NO: 5093818 - DNA, 25 bp, Homo sapien
ctcgttgtgcattccagctgtgaaa

SEQ ID NO: 5093819 - DNA, 25 bp, Homo sapien
ggaacagcctttaggatctcgttgt

SEQ ID NO: 5093820 - DNA, 25 bp, Homo sapien
gctgtgaaagggcattatcaggccc

SEQ ID NO: 5093821 - DNA, 25 bp, Homo sapien
tttatatctaccagatgttcataag

SEQ ID NO: 5093822 - DNA, 25 bp, Homo sapien
gtttctttatatctaccagatgttc

SEQ ID NO: 5093823 - DNA, 25 bp, Homo sapien
ttatatctaccagatgttcataagg

SEQ ID NO: 5093824 - DNA, 25 bp, Homo sapien
tctttatatctaccagatgttcata

SEQ ID NO: 5093825 - DNA, 25 bp, Homo sapien
agagtgtcagagattctggagtgca

SEQ ID NO: 5093826 - DNA, 25 bp, Homo sapien
gcagagttttccactaagaacccga

SEQ ID NO: 5093827 - DNA, 25 bp, Homo sapien
cagagttttccactaagaacccgat

SEQ ID NO: 5093828 - DNA, 25 bp, Homo sapien
tagcagagttttccactaagaaccc

SEQ ID NO: 5093829 - DNA, 25 bp, Homo sapien
agcagagttttccactaagaacccg

SEQ ID NO: 5093830 - DNA, 25 bp, Homo sapien
cagagtgtagtcagccagcagagtg

SEQ ID NO: 5093831 - DNA, 25 bp, Homo sapien
cagcagagtgtggtcagggattgag

SEQ ID NO: 5093832 - DNA, 25 bp, Homo sapien
gaagagggttttgccagggagctgg

SEQ ID NO: 5093833 - DNA, 25 bp, Homo sapien
tgtggtcagggattgagtgtcctca

SEQ ID NO: 5093834 - DNA, 25 bp, Homo sapien
ggaggcagttgtactccagaagtgg

SEQ ID NO: 5093835 - DNA, 25 bp, Homo sapien
cagggaggcagttgtactccagaag

SEQ ID NO: 5093836 - DNA, 25 bp, Homo sapien
tcagggaggcagttgtactccagaa

SEQ ID NO: 5093837 - DNA, 25 bp, Homo sapien
agggaggcagttgtactccagaagt

SEQ ID NO: 5093838 - DNA, 25 bp, Homo sapien
agttaggaagttgaatgtcatcagg

SEQ ID NO: 5093839 - DNA, 25 bp, Homo sapien
gtgtagttaggaagttgaatgtcat

SEQ ID NO: 5093840 - DNA, 25 bp, Homo sapien
aaatgtgtagttaggaagttgaatg

SEQ ID NO: 5093841 - DNA, 25 bp, Homo sapien
gaaaaatgtgtagttaggaagttga

SEQ ID NO: 5093842 - DNA, 25 bp, Homo sapien
ttcctggtagtctaattttgtgaaa

SEQ ID NO: 5093843 - DNA, 25 bp, Homo sapien
tatctctggattggtttgaatgcat

SEQ ID NO: 5093844 - DNA, 25 bp, Homo sapien
tataagcatgagaatcaagatcctc

SEQ ID NO: 5093845 - DNA, 25 bp, Homo sapien
tggataacactgacccagccagtat

SEQ ID NO: 5093846 - DNA, 25 bp, Homo sapien
ctcatttagaatagccacaggcact

SEQ ID NO: 5093847 - DNA, 25 bp, Homo sapien
tcctgaggattctcgactgcctgcc

SEQ ID NO: 5093848 - DNA, 25 bp, Homo sapien
ctgtcatgaattcgtccagactcat

SEQ ID NO: 5093849 - DNA, 25 bp, Homo sapien
tcttctgtcatgaattcgtccagac

SEQ ID NO: 5093850 - DNA, 25 bp, Homo sapien
ttctgtcatgaattcgtccagactc

SEQ ID NO: 5093851 - DNA, 25 bp, Homo sapien
ctttcttctgtcatgaattcgtcca

SEQ ID NO: 5093852 - DNA, 25 bp, Homo sapien
gagctgtagataaagagatgatttt

SEQ ID NO: 5093853 - DNA, 25 bp, Homo sapien
ttcttcagcacatcctgtaatggtt

SEQ ID NO: 5093854 - DNA, 25 bp, Homo sapien
agcacatcctgtaatggtttctatg

SEQ ID NO: 5093855 - DNA, 25 bp, Homo sapien
tcagcacatcctgtaatggtttcta

SEQ ID NO: 5093856 - DNA, 25 bp, Homo sapien
tgaaagcaataacacttacgtaagc

SEQ ID NO: 5093857 - DNA, 25 bp, Homo sapien
tatttaagatgagtgtcctttgccc

SEQ ID NO: 5093858 - DNA, 25 bp, Homo sapien
tcaaaggcacacatgtaataaatgc

SEQ ID NO: 5093859 - DNA, 25 bp, Homo sapien
gagagatatcaagctcatggatcaa

SEQ ID NO: 5093860 - DNA, 25 bp, Homo sapien
aacaacgtatgctgacatcttaggt

SEQ ID NO: 5093861 - DNA, 25 bp, Homo sapien
aacgtatgctgacatcttaggtcac

SEQ ID NO: 5093862 - DNA, 25 bp, Homo sapien
caacgtatgctgacatcttaggtca

SEQ ID NO: 5093863 - DNA, 25 bp, Homo sapien
gaacaacgtatgctgacatcttagg

SEQ ID NO: 5093864 - DNA, 25 bp, Homo sapien
tactcaatcttagtattcagatgtg

SEQ ID NO: 5093865 - DNA, 25 bp, Homo sapien
tggtaggtccgtgatgcccaccagg

SEQ ID NO: 5093866 - DNA, 25 bp, Homo sapien
aagactgtattggaggaacctgccc

SEQ ID NO: 5093867 - DNA, 25 bp, Homo sapien
tacaggtcctgtaaggtttatacta

SEQ ID NO: 5093868 - DNA, 25 bp, Homo sapien
ctcatcagcgattttggtgatggag

SEQ ID NO: 5093869 - DNA, 25 bp, Homo sapien
cagacagggtggcttctcatcagcg

SEQ ID NO: 5093870 - DNA, 25 bp, Homo sapien
ctttcgtatgggatctgattgtctg

SEQ ID NO: 5093871 - DNA, 25 bp, Homo sapien
cgtatgggatctgattgtctgcaga

SEQ ID NO: 5093872 - DNA, 25 bp, Homo sapien
tcccattgtcctcatatgccactgt

SEQ ID NO: 5093873 - DNA, 25 bp, Homo sapien
tagccacatgtcttcccattgtcct

SEQ ID NO: 5093874 - DNA, 25 bp, Homo sapien
cattgtcctcatatgccactgtagc

SEQ ID NO: 5093875 - DNA, 25 bp, Homo sapien
ctagccacatgtcttcccattgtcc

SEQ ID NO: 5093876 - DNA, 25 bp, Homo sapien
gactttcttctcgtaaccagggaga

SEQ ID NO: 5093877 - DNA, 25 bp, Homo sapien
gaagccgaggactttcttctcgtaa

SEQ ID NO: 5093878 - DNA, 25 bp, Homo sapien
tcttctcgtaaccagggagacgagg

SEQ ID NO: 5093879 - DNA, 25 bp, Homo sapien
cacaatgaagccgaggactttcttc

SEQ ID NO: 5093880 - DNA, 25 bp, Homo sapien
gagtttctcatgtaagttctacctc

SEQ ID NO: 5093881 - DNA, 25 bp, Homo sapien
ccacacccaggagaaatcttagagt

SEQ ID NO: 5093882 - DNA, 25 bp, Homo sapien
tgtttattagtcaagggagcatctg

SEQ ID NO: 5093883 - DNA, 25 bp, Homo sapien
ttcattcaaggtggaaacacccaga

SEQ ID NO: 5093884 - DNA, 25 bp, Homo sapien
cagacaaatacacctagtttctgac

SEQ ID NO: 5093885 - DNA, 25 bp, Homo sapien
tctgaccccatctgtgtactagatc

SEQ ID NO: 5093886 - DNA, 25 bp, Homo sapien
ctgacgcctcctcaccgatgtggaa

SEQ ID NO: 5093887 - DNA, 25 bp, Homo sapien
caaatacacctagtttctgacccca

SEQ ID NO: 5093888 - DNA, 25 bp, Homo sapien
aaccttctgagaatattagggatag

SEQ ID NO: 5093889 - DNA, 25 bp, Homo sapien
gaaatcctgccttgtgtgattattt

SEQ ID NO: 5093890 - DNA, 25 bp, Homo sapien
catgccactgatgaaccttctgaga

SEQ ID NO: 5093891 - DNA, 25 bp, Homo sapien
tattagggatagatgaaatcctgcc

SEQ ID NO: 5093892 - DNA, 25 bp, Homo sapien
ccatagactcagtatcattttctgg

SEQ ID NO: 5093893 - DNA, 25 bp, Homo sapien
catagactcagtatcattttctggt

SEQ ID NO: 5093894 - DNA, 25 bp, Homo sapien
tatcattttctggttgcgtgtcttc

SEQ ID NO: 5093895 - DNA, 25 bp, Homo sapien
tctggttgcgtgtcttcactggccc

SEQ ID NO: 5093896 - DNA, 25 bp, Homo sapien
atgtggactctctgcagtaaatact

SEQ ID NO: 5093897 - DNA, 25 bp, Homo sapien
ttgcccctggcttgccggacttttg

SEQ ID NO: 5093898 - DNA, 25 bp, Homo sapien
gtgaagtctccatttagaaagtaag

SEQ ID NO: 5093899 - DNA, 25 bp, Homo sapien
tggcttaacagtccatcattttccc

SEQ ID NO: 5093900 - DNA, 25 bp, Homo sapien
ctattgcctcccattttttccactc

SEQ ID NO: 5093901 - DNA, 25 bp, Homo sapien
cccattttttccactcattctataa

SEQ ID NO: 5093902 - DNA, 25 bp, Homo sapien
ttttttccactcattctataagctt

SEQ ID NO: 5093903 - DNA, 25 bp, Homo sapien
cattttttccactcattctataagc

SEQ ID NO: 5093904 - DNA, 25 bp, Homo sapien
gagggagagcctattttttggtgcc

SEQ ID NO: 5093905 - DNA, 25 bp, Homo sapien
tgagaaaccaccaatgtgtgacatt

SEQ ID NO: 5093906 - DNA, 25 bp, Homo sapien
tatgccatgggaacttaaaatactt

SEQ ID NO: 5093907 - DNA, 25 bp, Homo sapien
tgccagtgcataacaccatggttgt

SEQ ID NO: 5093908 - DNA, 25 bp, Homo sapien
tttcaaacacgcgttctttacttga

SEQ ID NO: 5093909 - DNA, 25 bp, Homo sapien
tcaaacacgcgttctttacttgaat

SEQ ID NO: 5093910 - DNA, 25 bp, Homo sapien
cacgcgttctttacttgaatattta

SEQ ID NO: 5093911 - DNA, 25 bp, Homo sapien
aaacacgcgttctttacttgaatat

SEQ ID NO: 5093912 - DNA, 25 bp, Homo sapien
caataattaaagactcctctccttt

SEQ ID NO: 5093913 - DNA, 25 bp, Homo sapien
ctgacaataattaaagactcctctc

SEQ ID NO: 5093914 - DNA, 25 bp, Homo sapien
tctgacaataattaaagactcctct

SEQ ID NO: 5093915 - DNA, 25 bp, Homo sapien
tgacaataattaaagactcctctcc

SEQ ID NO: 5093916 - DNA, 25 bp, Homo sapien
tcagctattcatctgtagtaggctt

SEQ ID NO: 5093917 - DNA, 25 bp, Homo sapien
ccacattacaaagtgtgagaattcc

SEQ ID NO: 5093918 - DNA, 25 bp, Homo sapien
ttttctggggctaatttgcacaatc

SEQ ID NO: 5093919 - DNA, 25 bp, Homo sapien
agaactgtcaggaactgtcactgcc

SEQ ID NO: 5093920 - DNA, 25 bp, Homo sapien
ctggtttcggaagcgtctgtattgt

SEQ ID NO: 5093921 - DNA, 25 bp, Homo sapien
tcggaagcgtctgtattgtcctctt

SEQ ID NO: 5093922 - DNA, 25 bp, Homo sapien
tttcggaagcgtctgtattgtcctc

SEQ ID NO: 5093923 - DNA, 25 bp, Homo sapien
gaagcgtctgtattgtcctcttcat

SEQ ID NO: 5093924 - DNA, 25 bp, Homo sapien
tgctttcttgctgagggcaattttg

SEQ ID NO: 5093925 - DNA, 25 bp, Homo sapien
ccaacgatacacagctagtggtaca

SEQ ID NO: 5093926 - DNA, 25 bp, Homo sapien
ttgacctactcttgttggcttgaag

SEQ ID NO: 5093927 - DNA, 25 bp, Homo sapien
gatagagtgggtagtgtcaaaagca

SEQ ID NO: 5093928 - DNA, 25 bp, Homo sapien
tagtggtacagagcccttaaaatca

SEQ ID NO: 5093929 - DNA, 25 bp, Homo sapien
gattatcctggatcattcaggtagg

SEQ ID NO: 5093930 - DNA, 25 bp, Homo sapien
gatatgggacgattatcctggatca

SEQ ID NO: 5093931 - DNA, 25 bp, Homo sapien
cttgatatgggacgattatcctgga

SEQ ID NO: 5093932 - DNA, 25 bp, Homo sapien
gatcattcaggtaggctcaatgtaa

SEQ ID NO: 5093933 - DNA, 25 bp, Homo sapien
ttatctttcatagccgttaccactc

SEQ ID NO: 5093934 - DNA, 25 bp, Homo sapien
gataatctcaacgaccaaaactaga

SEQ ID NO: 5093935 - DNA, 25 bp, Homo sapien
caagataatctcaacgaccaaaact

SEQ ID NO: 5093936 - DNA, 25 bp, Homo sapien
tagccgttaccactctcaagataat

SEQ ID NO: 5093937 - DNA, 25 bp, Homo sapien
ccttttacatagagtatagatgacc

SEQ ID NO: 5093938 - DNA, 25 bp, Homo sapien
cattgccacaccttttacatagagt

SEQ ID NO: 5093939 - DNA, 25 bp, Homo sapien
gatgacctatctttggcaattaact

SEQ ID NO: 5093940 - DNA, 25 bp, Homo sapien
ggcaattaactcaattgtaatagct

SEQ ID NO: 5093941 - DNA, 25 bp, Homo sapien
taatgttctgtcgaatagtccagtc

SEQ ID NO: 5093942 - DNA, 25 bp, Homo sapien
tccagtcaatgttaatggcgttgtc

SEQ ID NO: 5093943 - DNA, 25 bp, Homo sapien
tatcagacattcgaagaactaatgc

SEQ ID NO: 5093944 - DNA, 25 bp, Homo sapien
tgaatgagcagcaatttatcagaca

SEQ ID NO: 5093945 - DNA, 25 bp, Homo sapien
cacatggaatgtctaacaaccaggg

SEQ ID NO: 5093946 - DNA, 25 bp, Homo sapien
acatggaatgtctaacaaccagggc

SEQ ID NO: 5093947 - DNA, 25 bp, Homo sapien
tcacatggaatgtctaacaaccagg

SEQ ID NO: 5093948 - DNA, 25 bp, Homo sapien
taatttccactctcattacatctga

SEQ ID NO: 5093949 - DNA, 25 bp, Homo sapien
aacctcaccaactccaaactgatca

SEQ ID NO: 5093950 - DNA, 25 bp, Homo sapien
gcttgataacttgataaaacctcac

SEQ ID NO: 5093951 - DNA, 25 bp, Homo sapien
catctgatgctaattttttgaaggt

SEQ ID NO: 5093952 - DNA, 25 bp, Homo sapien
gccatgacaaactgattaattgtaa

SEQ ID NO: 5093953 - DNA, 25 bp, Homo sapien
aaaatcctggttagattgaaatttg

SEQ ID NO: 5093954 - DNA, 25 bp, Homo sapien
caaatggaaaaagccatgacaaact

SEQ ID NO: 5093955 - DNA, 25 bp, Homo sapien
ggcttttacaagttactattggaca

SEQ ID NO: 5093956 - DNA, 25 bp, Homo sapien
gccgatactctgacatcaatgaaag

SEQ ID NO: 5093957 - DNA, 25 bp, Homo sapien
gcaaattaagccgatactctgacat

SEQ ID NO: 5093958 - DNA, 25 bp, Homo sapien
taagccgatactctgacatcaatga

SEQ ID NO: 5093959 - DNA, 25 bp, Homo sapien
agctctgcaaattaagccgatactc

SEQ ID NO: 5093960 - DNA, 25 bp, Homo sapien
tcagaatggcgaaaaagacttccag

SEQ ID NO: 5093961 - DNA, 25 bp, Homo sapien
tggataaacggtgactccttttcag

SEQ ID NO: 5093962 - DNA, 25 bp, Homo sapien
gcacaagactatcaaggtggataaa

SEQ ID NO: 5093963 - DNA, 25 bp, Homo sapien
taggaacctgcaggccttttttcag

SEQ ID NO: 5093964 - DNA, 25 bp, Homo sapien
cacttggctctcaattgttttacct

SEQ ID NO: 5093965 - DNA, 25 bp, Homo sapien
tttagatcaagcttctcttctaatg

SEQ ID NO: 5093966 - DNA, 25 bp, Homo sapien
ttatcgatttccatcgtccacttgg

SEQ ID NO: 5093967 - DNA, 25 bp, Homo sapien
taccttttagatcaagcttctcttc

SEQ ID NO: 5093968 - DNA, 25 bp, Homo sapien
tgaaatccggtacattttcatttgt

SEQ ID NO: 5093969 - DNA, 25 bp, Homo sapien
tttctgaaatccggtacattttcat

SEQ ID NO: 5093970 - DNA, 25 bp, Homo sapien
cagttttctgaaatccggtacattt

SEQ ID NO: 5093971 - DNA, 25 bp, Homo sapien
tctgaaatccggtacattttcattt

SEQ ID NO: 5093972 - DNA, 25 bp, Homo sapien
gcataaaagtcagcaaatgtgagat

SEQ ID NO: 5093973 - DNA, 25 bp, Homo sapien
tgcaggtactgagctaatatataat

SEQ ID NO: 5093974 - DNA, 25 bp, Homo sapien
taaataatgcaggtactgagctaat

SEQ ID NO: 5093975 - DNA, 25 bp, Homo sapien
agttcctgtaaataatgcaggtact

SEQ ID NO: 5093976 - DNA, 25 bp, Homo sapien
tggagtggaacaggtttttgtagca

SEQ ID NO: 5093977 - DNA, 25 bp, Homo sapien
cttggagtggaacaggtttttgtag

SEQ ID NO: 5093978 - DNA, 25 bp, Homo sapien
tagcagcattgtcctctaagcaaat

SEQ ID NO: 5093979 - DNA, 25 bp, Homo sapien
tgtcctctaagcaaatcacactatt

SEQ ID NO: 5093980 - DNA, 25 bp, Homo sapien
ccctgacacaggacttggggtcgtt

SEQ ID NO: 5093981 - DNA, 25 bp, Homo sapien
cgttcagtggagaagataaatgcat

SEQ ID NO: 5093982 - DNA, 25 bp, Homo sapien
gggtcgttcagtggagaagataaat

SEQ ID NO: 5093983 - DNA, 25 bp, Homo sapien
gacacaggacttggggtcgttcagt

SEQ ID NO: 5093984 - DNA, 25 bp, Homo sapien
gagataagcatgatcactctctcca

SEQ ID NO: 5093985 - DNA, 25 bp, Homo sapien
atcaacgtgtgtgtaaggattctca

SEQ ID NO: 5093986 - DNA, 25 bp, Homo sapien
caacgtgtgtgtaaggattctcagg

SEQ ID NO: 5093987 - DNA, 25 bp, Homo sapien
gattctcaggatccatgatcaccca

SEQ ID NO: 5093988 - DNA, 25 bp, Homo sapien
ggcacaaaaagtagtcacttcaaca

SEQ ID NO: 5093989 - DNA, 25 bp, Homo sapien
gcacaaaaagtagtcacttcaacaa

SEQ ID NO: 5093990 - DNA, 25 bp, Homo sapien
aaagtagtcacttcaacaagaatat

SEQ ID NO: 5093991 - DNA, 25 bp, Homo sapien
aaaagtagtcacttcaacaagaata

SEQ ID NO: 5093992 - DNA, 25 bp, Homo sapien
tcaatcatgtagttcccatatctga

SEQ ID NO: 5093993 - DNA, 25 bp, Homo sapien
tcatgtagttcccatatctgaccat

SEQ ID NO: 5093994 - DNA, 25 bp, Homo sapien
tgtatcaatcatgtagttcccatat

SEQ ID NO: 5093995 - DNA, 25 bp, Homo sapien
tatcaatcatgtagttcccatatct

SEQ ID NO: 5093996 - DNA, 25 bp, Homo sapien
gattagagtccatatcagtggaaat

SEQ ID NO: 5093997 - DNA, 25 bp, Homo sapien
ttataagcattctggttcacttcct

SEQ ID NO: 5093998 - DNA, 25 bp, Homo sapien
taagcattctggttcacttcctgct

SEQ ID NO: 5093999 - DNA, 25 bp, Homo sapien
gagagattagagtccatatcagtgg

SEQ ID NO: 5094000 - DNA, 25 bp, Homo sapien
aatgccaagtcccacaatagctgca

SEQ ID NO: 5094001 - DNA, 25 bp, Homo sapien
atgccaagtcccacaatagctgcat

SEQ ID NO: 5094002 - DNA, 25 bp, Homo sapien
gaatgccaagtcccacaatagctgc

SEQ ID NO: 5094003 - DNA, 25 bp, Homo sapien
aataattctctgtgtttcatatgct

SEQ ID NO: 5094004 - DNA, 25 bp, Homo sapien
ataaggagtgacattttgcgagcaa

SEQ ID NO: 5094005 - DNA, 25 bp, Homo sapien
gagtgacattttgcgagcaacgcac

SEQ ID NO: 5094006 - DNA, 25 bp, Homo sapien
gacattttgcgagcaacgcacttta

SEQ ID NO: 5094007 - DNA, 25 bp, Homo sapien
gcgagcaacgcactttatatcacag

SEQ ID NO: 5094008 - DNA, 25 bp, Homo sapien
gcataaaactgggagcaactcaaac

SEQ ID NO: 5094009 - DNA, 25 bp, Homo sapien
cattcatggtagcataaaactggga

SEQ ID NO: 5094010 - DNA, 25 bp, Homo sapien
ctcattcatggtagcataaaactgg

SEQ ID NO: 5094011 - DNA, 25 bp, Homo sapien
ataaaactgggagcaactcaaacat

SEQ ID NO: 5094012 - DNA, 25 bp, Homo sapien
caggaagcatgtccaaatacagaga

SEQ ID NO: 5094013 - DNA, 25 bp, Homo sapien
caccaaagactttggatccaggaag

SEQ ID NO: 5094014 - DNA, 25 bp, Homo sapien
tttacattttacaccagtgagggca

SEQ ID NO: 5094015 - DNA, 25 bp, Homo sapien
gaaatgcactgattatcgtcaagga

SEQ ID NO: 5094016 - DNA, 25 bp, Homo sapien
ctattttattaagaagattttgctt

SEQ ID NO: 5094017 - DNA, 25 bp, Homo sapien
tttaatatcctccaattctatgtct

SEQ ID NO: 5094018 - DNA, 25 bp, Homo sapien
ctacagttataaggaatcattggat

SEQ ID NO: 5094019 - DNA, 25 bp, Homo sapien
catatgttaaccgcttcatttgaaa

SEQ ID NO: 5094020 - DNA, 25 bp, Homo sapien
tttgaaaataaagattgatttgaga

SEQ ID NO: 5094021 - DNA, 25 bp, Homo sapien
acaagtctgcacacgattttccacg

SEQ ID NO: 5094022 - DNA, 25 bp, Homo sapien
ccaatgaggttattctccccagttg

SEQ ID NO: 5094023 - DNA, 25 bp, Homo sapien
gcgaaaactctctatgtcaatgcca

SEQ ID NO: 5094024 - DNA, 25 bp, Homo sapien
tggtgcctcatcactgcctctactg

SEQ ID NO: 5094025 - DNA, 25 bp, Homo sapien
ctttcagtgcggtagccctgaggta

SEQ ID NO: 5094026 - DNA, 25 bp, Homo sapien
caagacggtacagatagatttcctc

SEQ ID NO: 5094027 - DNA, 25 bp, Homo sapien
caggacaatcaagacggtacagata

SEQ ID NO: 5094028 - DNA, 25 bp, Homo sapien
cggtagccctgaggtagatccccat

SEQ ID NO: 5094029 - DNA, 25 bp, Homo sapien
ggttagcaaatgatccagactctct

SEQ ID NO: 5094030 - DNA, 25 bp, Homo sapien
tagcaaatgatccagactctctttc

SEQ ID NO: 5094031 - DNA, 25 bp, Homo sapien
tgatgggttagcaaatgatccagac

SEQ ID NO: 5094032 - DNA, 25 bp, Homo sapien
cactgatgggttagcaaatgatcca

SEQ ID NO: 5094033 - DNA, 25 bp, Homo sapien
ggtagaattagctatttcttgtgat

SEQ ID NO: 5094034 - DNA, 25 bp, Homo sapien
gatgggggtagaattagctatttct

SEQ ID NO: 5094035 - DNA, 25 bp, Homo sapien
tgggggtagaattagctatttcttg

SEQ ID NO: 5094036 - DNA, 25 bp, Homo sapien
tttcagggagttcaataagatgggg

SEQ ID NO: 5094037 - DNA, 25 bp, Homo sapien
taccttcataggtgccaggatcagg

SEQ ID NO: 5094038 - DNA, 25 bp, Homo sapien
ttttccattagggattgagctctct

SEQ ID NO: 5094039 - DNA, 25 bp, Homo sapien
tgtgcattaatctgtgtcctatctc

SEQ ID NO: 5094040 - DNA, 25 bp, Homo sapien
tctgaggtagttatcttggctctgt

SEQ ID NO: 5094041 - DNA, 25 bp, Homo sapien
caccaccaccacgagggtactttgg

SEQ ID NO: 5094042 - DNA, 25 bp, Homo sapien
cgtgctggtgtcccatgtcattgca

SEQ ID NO: 5094043 - DNA, 25 bp, Homo sapien
tgctttacaaaggtcattcaggatc

SEQ ID NO: 5094044 - DNA, 25 bp, Homo sapien
tcattcgacctgagaatatgttggg

SEQ ID NO: 5094045 - DNA, 25 bp, Homo sapien
caatatcacaggttttgttacactg

SEQ ID NO: 5094046 - DNA, 25 bp, Homo sapien
gactctctgaccaaacatgcagtca

SEQ ID NO: 5094047 - DNA, 25 bp, Homo sapien
cctttgtttatctagcagtctatca

SEQ ID NO: 5094048 - DNA, 25 bp, Homo sapien
ttcctttgtttatctagcagtctat

SEQ ID NO: 5094049 - DNA, 25 bp, Homo sapien
ctttgtttatctagcagtctatcaa

SEQ ID NO: 5094050 - DNA, 25 bp, Homo sapien
tcctttgtttatctagcagtctatc

SEQ ID NO: 5094051 - DNA, 25 bp, Homo sapien
gacttggcattagcagtcacactgt

SEQ ID NO: 5094052 - DNA, 25 bp, Homo sapien
tcacactgtcaaatgtggcctttgg

SEQ ID NO: 5094053 - DNA, 25 bp, Homo sapien
cactgtcaaatgtggcctttggaga

SEQ ID NO: 5094054 - DNA, 25 bp, Homo sapien
cttggcattagcagtcacactgtca

SEQ ID NO: 5094055 - DNA, 25 bp, Homo sapien
ggcattgaaacttctctagctgttg

SEQ ID NO: 5094056 - DNA, 25 bp, Homo sapien
aacttctctagctgttgtcttagtt

SEQ ID NO: 5094057 - DNA, 25 bp, Homo sapien
tctatgggctcagaggcaccttttc

SEQ ID NO: 5094058 - DNA, 25 bp, Homo sapien
gcttcgggtaagagctctgctttga

SEQ ID NO: 5094059 - DNA, 25 bp, Homo sapien
tttctctcttgcttcgggtaagagc

SEQ ID NO: 5094060 - DNA, 25 bp, Homo sapien
tctgctttgaacatgttctatgggc

SEQ ID NO: 5094061 - DNA, 25 bp, Homo sapien
tcatggaatgatgtggaggtccaca

SEQ ID NO: 5094062 - DNA, 25 bp, Homo sapien
cttcaaatgtcactttcatggaatg

SEQ ID NO: 5094063 - DNA, 25 bp, Homo sapien
ttcatggaatgatgtggaggtccac

SEQ ID NO: 5094064 - DNA, 25 bp, Homo sapien
tgcaagtttcgatatattttttggc

SEQ ID NO: 5094065 - DNA, 25 bp, Homo sapien
gcaagtttcgatatattttttggca

SEQ ID NO: 5094066 - DNA, 25 bp, Homo sapien
ctgcaagtttcgatatattttttgg

SEQ ID NO: 5094067 - DNA, 25 bp, Homo sapien
gcgagtgaaggcacatgtagtagca

SEQ ID NO: 5094068 - DNA, 25 bp, Homo sapien
cacatgtagtagcatttacgactga

SEQ ID NO: 5094069 - DNA, 25 bp, Homo sapien
tcagggaactaccaaaggggagtca

SEQ ID NO: 5094070 - DNA, 25 bp, Homo sapien
tcatgtatcatcagcgagtgaaggc

SEQ ID NO: 5094071 - DNA, 25 bp, Homo sapien
acaaggtggattcattttcaaaagc

SEQ ID NO: 5094072 - DNA, 25 bp, Homo sapien
cttttcccagcaaggtagtggccat

SEQ ID NO: 5094073 - DNA, 25 bp, Homo sapien
caatactagataaaccaggcttttg

SEQ ID NO: 5094074 - DNA, 25 bp, Homo sapien
tacaaaggttacattacatgatgct

SEQ ID NO: 5094075 - DNA, 25 bp, Homo sapien
agacatttgtaactagtcgtgatca

SEQ ID NO: 5094076 - DNA, 25 bp, Homo sapien
atcaattagttatagacaccagcac

SEQ ID NO: 5094077 - DNA, 25 bp, Homo sapien
caattagttatagacaccagcacac

SEQ ID NO: 5094078 - DNA, 25 bp, Homo sapien
aagctagttaattgaaacagtgaca

SEQ ID NO: 5094079 - DNA, 25 bp, Homo sapien
gaccatttgaatgttggatccgtcc

SEQ ID NO: 5094080 - DNA, 25 bp, Homo sapien
agttgtacagctatccagtggccga

SEQ ID NO: 5094081 - DNA, 25 bp, Homo sapien
gccgagctaagatgcagacccaaga

SEQ ID NO: 5094082 - DNA, 25 bp, Homo sapien
tgcagacccaagaccatttgaatgt

SEQ ID NO: 5094083 - DNA, 25 bp, Homo sapien
caagagcatggtcagtgtgttcacg

SEQ ID NO: 5094084 - DNA, 25 bp, Homo sapien
tgagtggatactagaggaactgtcc

SEQ ID NO: 5094085 - DNA, 25 bp, Homo sapien
ggtagatttcgaaggtgacgccaac

SEQ ID NO: 5094086 - DNA, 25 bp, Homo sapien
tgtgttcacgaatcagcagggagga

SEQ ID NO: 5094087 - DNA, 25 bp, Homo sapien
ggattctcctcccaacgctgttgca

SEQ ID NO: 5094088 - DNA, 25 bp, Homo sapien
gacaacattaatgcattcctaaggg

SEQ ID NO: 5094089 - DNA, 25 bp, Homo sapien
gataattaacccactctagcaatga

SEQ ID NO: 5094090 - DNA, 25 bp, Homo sapien
taatcaccccttattgggattctcc

SEQ ID NO: 5094091 - DNA, 25 bp, Homo sapien
aggctgaagggcctgtatctgatga

SEQ ID NO: 5094092 - DNA, 25 bp, Homo sapien
tgaagggcctgtatctgatgagggc

SEQ ID NO: 5094093 - DNA, 25 bp, Homo sapien
agttctaatgactggaaaaccaagg

SEQ ID NO: 5094094 - DNA, 25 bp, Homo sapien
gaaaaccaaggctgaagggcctgta

SEQ ID NO: 5094095 - DNA, 25 bp, Homo sapien
gaagctttgggtagcaggccgaaaa

SEQ ID NO: 5094096 - DNA, 25 bp, Homo sapien
tatacaccctgagtttagaagcttc

SEQ ID NO: 5094097 - DNA, 25 bp, Homo sapien
tctttccttgtcgtttctctataca

SEQ ID NO: 5094098 - DNA, 25 bp, Homo sapien
tagaagcttcactaaactatgttta

SEQ ID NO: 5094099 - DNA, 25 bp, Homo sapien
aaattcacagagtgtactgcggaga

SEQ ID NO: 5094100 - DNA, 25 bp, Homo sapien
gtgtactgcggagataaccaaaggc

SEQ ID NO: 5094101 - DNA, 25 bp, Homo sapien
tcacagagtgtactgcggagataac

SEQ ID NO: 5094102 - DNA, 25 bp, Homo sapien
atcaaaattcacagagtgtactgcg

SEQ ID NO: 5094103 - DNA, 25 bp, Homo sapien
taacagattatgtaacttgacatgt

SEQ ID NO: 5094104 - DNA, 25 bp, Homo sapien
cagattatgtaacttgacatgtatt

SEQ ID NO: 5094105 - DNA, 25 bp, Homo sapien
ttatgtaacttgacatgtattttag

SEQ ID NO: 5094106 - DNA, 25 bp, Homo sapien
cttaacagattatgtaacttgacat

SEQ ID NO: 5094107 - DNA, 25 bp, Homo sapien
ttttccatgacagttctttgtttta

SEQ ID NO: 5094108 - DNA, 25 bp, Homo sapien
tttatttttgtgtttagcacggcca

SEQ ID NO: 5094109 - DNA, 25 bp, Homo sapien
ttatttttgtgtttagcacggccat

SEQ ID NO: 5094110 - DNA, 25 bp, Homo sapien
atgacagttctttgttttatttttg

SEQ ID NO: 5094111 - DNA, 25 bp, Homo sapien
ttgtttctccatctgcctactccgt

SEQ ID NO: 5094112 - DNA, 25 bp, Homo sapien
tgcctactccgttgtctctcttctg

SEQ ID NO: 5094113 - DNA, 25 bp, Homo sapien
ggactcagctttaggaatcctattc

SEQ ID NO: 5094114 - DNA, 25 bp, Homo sapien
gttagaacagcaaatcagtctcatt

SEQ ID NO: 5094115 - DNA, 25 bp, Homo sapien
tgtagtacaagacaggaacaacttt

SEQ ID NO: 5094116 - DNA, 25 bp, Homo sapien
tccagtcagtagagagagccctgta

SEQ ID NO: 5094117 - DNA, 25 bp, Homo sapien
gaaaggagtcatgatttctcctgag

SEQ ID NO: 5094118 - DNA, 25 bp, Homo sapien
aaagacatccaggtggttcagccag

SEQ ID NO: 5094119 - DNA, 25 bp, Homo sapien
caaggtgtgatagcattttctaatt

SEQ ID NO: 5094120 - DNA, 25 bp, Homo sapien
atttcaaagcaacatcctgaaaaat

SEQ ID NO: 5094121 - DNA, 25 bp, Homo sapien
tcaaggtgtgatagcattttctaat

SEQ ID NO: 5094122 - DNA, 25 bp, Homo sapien
aatttcaaagcaacatcctgaaaaa

SEQ ID NO: 5094123 - DNA, 25 bp, Homo sapien
caaaccaatgacgagaaaatgccag

SEQ ID NO: 5094124 - DNA, 25 bp, Homo sapien
tcatggctgcctatcgtgagaccag

SEQ ID NO: 5094125 - DNA, 25 bp, Homo sapien
aaaggttcactaatggagggccgct

SEQ ID NO: 5094126 - DNA, 25 bp, Homo sapien
gcacgttcatcagttatagggagac

SEQ ID NO: 5094127 - DNA, 25 bp, Homo sapien
acacagctaagatgttgaatcctct

SEQ ID NO: 5094128 - DNA, 25 bp, Homo sapien
taaattttgacttaatggagaccac

SEQ ID NO: 5094129 - DNA, 25 bp, Homo sapien
gagctcccacaagtatgatatcatt

SEQ ID NO: 5094130 - DNA, 25 bp, Homo sapien
tgttgatgaaaccatgaactggcat

SEQ ID NO: 5094131 - DNA, 25 bp, Homo sapien
tatgtgcccagtaggtctttaattt

SEQ ID NO: 5094132 - DNA, 25 bp, Homo sapien
taatttcaaaatacgtggtatccac

SEQ ID NO: 5094133 - DNA, 25 bp, Homo sapien
ccctggtaactatcagctgttgcca

SEQ ID NO: 5094134 - DNA, 25 bp, Homo sapien
ctccttgccttattttcattgctca

SEQ ID NO: 5094135 - DNA, 25 bp, Homo sapien
caccataaacaaaccctttcacttg

SEQ ID NO: 5094136 - DNA, 25 bp, Homo sapien
tagacaccataaacaaaccctttca

SEQ ID NO: 5094137 - DNA, 25 bp, Homo sapien
aaagaacctcatcacaacttcagca

SEQ ID NO: 5094138 - DNA, 25 bp, Homo sapien
gaaagaacctcatcacaacttcagc

SEQ ID NO: 5094139 - DNA, 25 bp, Homo sapien
cctcatcacaacttcagcaagcaac

SEQ ID NO: 5094140 - DNA, 25 bp, Homo sapien
ctcatcacaacttcagcaagcaact

SEQ ID NO: 5094141 - DNA, 25 bp, Homo sapien
tggggccgcatcaggcttagacctt

SEQ ID NO: 5094142 - DNA, 25 bp, Homo sapien
ggggccgcatcaggcttagaccttt

SEQ ID NO: 5094143 - DNA, 25 bp, Homo sapien
gccgtggggccgcatcaggcttaga

SEQ ID NO: 5094144 - DNA, 25 bp, Homo sapien
cgtggggccgcatcaggcttagacc

SEQ ID NO: 5094145 - DNA, 25 bp, Homo sapien
tactggccccgcttgggcccagttg

SEQ ID NO: 5094146 - DNA, 25 bp, Homo sapien
ccggcatagtactggccccgcttgg

SEQ ID NO: 5094147 - DNA, 25 bp, Homo sapien
cccgcttgggcccagttgcggatac

SEQ ID NO: 5094148 - DNA, 25 bp, Homo sapien
ggcccagttgcggatactgatattt

SEQ ID NO: 5094149 - DNA, 25 bp, Homo sapien
ccatggtgcctggtagtcaggctgg

SEQ ID NO: 5094150 - DNA, 25 bp, Homo sapien
cccatggtgcctggtagtcaggctg

SEQ ID NO: 5094151 - DNA, 25 bp, Homo sapien
tcctttgacaggtgcaggcagtgcg

SEQ ID NO: 5094152 - DNA, 25 bp, Homo sapien
ccgtatgggcagctgttggcctgct

SEQ ID NO: 5094153 - DNA, 25 bp, Homo sapien
cggggagcctagtcggccgcattcc

SEQ ID NO: 5094154 - DNA, 25 bp, Homo sapien
tagtcggccgcattcccggtacacc

SEQ ID NO: 5094155 - DNA, 25 bp, Homo sapien
ccagctggtgtccgtgggtggcaag

SEQ ID NO: 5094156 - DNA, 25 bp, Homo sapien
tggtgtccgtgggtggcaagaggta

SEQ ID NO: 5094157 - DNA, 25 bp, Homo sapien
gctggtgtccgtgggtggcaagagg

SEQ ID NO: 5094158 - DNA, 25 bp, Homo sapien
cagctggtgtccgtgggtggcaaga

SEQ ID NO: 5094159 - DNA, 25 bp, Homo sapien
aaaggattctggctgcatgggcgtc

SEQ ID NO: 5094160 - DNA, 25 bp, Homo sapien
gattctggctgcatgggcgtcattg

SEQ ID NO: 5094161 - DNA, 25 bp, Homo sapien
agtaaaggattctggctgcatgggc

SEQ ID NO: 5094162 - DNA, 25 bp, Homo sapien
ttctggctgcatgggcgtcattgtg

SEQ ID NO: 5094163 - DNA, 25 bp, Homo sapien
ccacgcttgcttggaaaggtttttg

SEQ ID NO: 5094164 - DNA, 25 bp, Homo sapien
tccattcctgggactgttaacagta

SEQ ID NO: 5094165 - DNA, 25 bp, Homo sapien
ttgtctgcctctgatatggtctctt

SEQ ID NO: 5094166 - DNA, 25 bp, Homo sapien
taacagtaagacttttttctggtgc

SEQ ID NO: 5094167 - DNA, 25 bp, Homo sapien
tcctggatcccgtcttcttggtttc

SEQ ID NO: 5094168 - DNA, 25 bp, Homo sapien
agatgttgattcgttgattccgcgc

SEQ ID NO: 5094169 - DNA, 25 bp, Homo sapien
ggaagatgttgattcgttgattccg

SEQ ID NO: 5094170 - DNA, 25 bp, Homo sapien
ttgattcgttgattccgcgcaggac

SEQ ID NO: 5094171 - DNA, 25 bp, Homo sapien
tgttgattcgttgattccgcgcagg

SEQ ID NO: 5094172 - DNA, 25 bp, Homo sapien
cacagtattgtgaatggcggagatc

SEQ ID NO: 5094173 - DNA, 25 bp, Homo sapien
caggtgcatcaggttggccgagacg

SEQ ID NO: 5094174 - DNA, 25 bp, Homo sapien
agagacagggcattcaaggccacgg

SEQ ID NO: 5094175 - DNA, 25 bp, Homo sapien
gagccgagtgtactcatccccttgg

SEQ ID NO: 5094176 - DNA, 25 bp, Homo sapien
cgattcaggttggtgctgggcaaca

SEQ ID NO: 5094177 - DNA, 25 bp, Homo sapien
ccacgattcaggttggtgctgggca

SEQ ID NO: 5094178 - DNA, 25 bp, Homo sapien
gctgtggcccacgattcaggttggt

SEQ ID NO: 5094179 - DNA, 25 bp, Homo sapien
tggcccacgattcaggttggtgctg

SEQ ID NO: 5094180 - DNA, 25 bp, Homo sapien
tagtgccgctactgctgcagaggcg

SEQ ID NO: 5094181 - DNA, 25 bp, Homo sapien
gatccccatcgacggcaggccggga

SEQ ID NO: 5094182 - DNA, 25 bp, Homo sapien
agccggggctagtgccgctactgct

SEQ ID NO: 5094183 - DNA, 25 bp, Homo sapien
ccatcgacggcaggccgggattctt

SEQ ID NO: 5094184 - DNA, 25 bp, Homo sapien
tgggtgagggctatcatgaccgcct

SEQ ID NO: 5094185 - DNA, 25 bp, Homo sapien
ctgttgtatagggagctgatggcgt

SEQ ID NO: 5094186 - DNA, 25 bp, Homo sapien
agttgagcgtggagcccctgttgta

SEQ ID NO: 5094187 - DNA, 25 bp, Homo sapien
ccagctgctgcgagttcagcaggct

SEQ ID NO: 5094188 - DNA, 25 bp, Homo sapien
cagagagctggtcagttctttaaag

SEQ ID NO: 5094189 - DNA, 25 bp, Homo sapien
ctgaccagagagctggtcagttctt

SEQ ID NO: 5094190 - DNA, 25 bp, Homo sapien
gagagctggtcagttctttaaagag

SEQ ID NO: 5094191 - DNA, 25 bp, Homo sapien
accagagagctggtcagttctttaa

SEQ ID NO: 5094192 - DNA, 25 bp, Homo sapien
ggggaaactggctgtcggagtcgaa

SEQ ID NO: 5094193 - DNA, 25 bp, Homo sapien
aggggaaactggctgtcggagtcga

SEQ ID NO: 5094194 - DNA, 25 bp, Homo sapien
gggaaactggctgtcggagtcgaag

SEQ ID NO: 5094195 - DNA, 25 bp, Homo sapien
tccgccagaaccacgtcggggtcat

SEQ ID NO: 5094196 - DNA, 25 bp, Homo sapien
ccattcggaaggtgttcttggtggc

SEQ ID NO: 5094197 - DNA, 25 bp, Homo sapien
tctgtccgtccagggtcagggggtc

SEQ ID NO: 5094198 - DNA, 25 bp, Homo sapien
catgtgcagtccgttcagggtctgt

SEQ ID NO: 5094199 - DNA, 25 bp, Homo sapien
gatacattgtctctctagctattaa

SEQ ID NO: 5094200 - DNA, 25 bp, Homo sapien
gctattaatttcttatctgaaagcc

SEQ ID NO: 5094201 - DNA, 25 bp, Homo sapien
tgccagtaactcagatgctttgcct

SEQ ID NO: 5094202 - DNA, 25 bp, Homo sapien
tcttttgagtccagaatgaacttta

SEQ ID NO: 5094203 - DNA, 25 bp, Homo sapien
tccatgtttctacttccttctggtt

SEQ ID NO: 5094204 - DNA, 25 bp, Homo sapien
tcaatagaggcaagtatcctctccc

SEQ ID NO: 5094205 - DNA, 25 bp, Homo sapien
ctcttcaatagaggcaagtatcctc

SEQ ID NO: 5094206 - DNA, 25 bp, Homo sapien
atagaggcaagtatcctctccctgt

SEQ ID NO: 5094207 - DNA, 25 bp, Homo sapien
tctctctacatggtatttgcagcca

SEQ ID NO: 5094208 - DNA, 25 bp, Homo sapien
cagccaacttctcctagaacatttc

SEQ ID NO: 5094209 - DNA, 25 bp, Homo sapien
tctctacatggtatttgcagccaac

SEQ ID NO: 5094210 - DNA, 25 bp, Homo sapien
tacatggtatttgcagccaacttct

SEQ ID NO: 5094211 - DNA, 25 bp, Homo sapien
tgactctataccaaggtccagaagt

SEQ ID NO: 5094212 - DNA, 25 bp, Homo sapien
ttttgactctataccaaggtccaga

SEQ ID NO: 5094213 - DNA, 25 bp, Homo sapien
ttgactctataccaaggtccagaag

SEQ ID NO: 5094214 - DNA, 25 bp, Homo sapien
ctttttgactctataccaaggtcca

SEQ ID NO: 5094215 - DNA, 25 bp, Homo sapien
gaacagatttcccatgcactgctgc

SEQ ID NO: 5094216 - DNA, 25 bp, Homo sapien
gcagaaaagcgtaggctgtggaaca

SEQ ID NO: 5094217 - DNA, 25 bp, Homo sapien
gctgctctgcattactgaacacggg

SEQ ID NO: 5094218 - DNA, 25 bp, Homo sapien
aatgcagaggcctttgtgaataact

SEQ ID NO: 5094219 - DNA, 25 bp, Homo sapien
cgttttccaagtgtgagcggctctg

SEQ ID NO: 5094220 - DNA, 25 bp, Homo sapien
cgttgtggtcgaagtagtaggtcac

SEQ ID NO: 5094221 - DNA, 25 bp, Homo sapien
agttcctccaagtcaccgcgttgtg

SEQ ID NO: 5094222 - DNA, 25 bp, Homo sapien
tcacagacaagaagaccgaaggctc

SEQ ID NO: 5094223 - DNA, 25 bp, Homo sapien
cagaacccactgaatgaaggtgaag

SEQ ID NO: 5094224 - DNA, 25 bp, Homo sapien
ggagactactggacactggctctga

SEQ ID NO: 5094225 - DNA, 25 bp, Homo sapien
tgacattgattccagggtacccaaa

SEQ ID NO: 5094226 - DNA, 25 bp, Homo sapien
cactaaatcactgacagtttattct

SEQ ID NO: 5094227 - DNA, 25 bp, Homo sapien
gggtgtggtgattctcttaataaag

SEQ ID NO: 5094228 - DNA, 25 bp, Homo sapien
gaagatgatatctcttacaacatca

SEQ ID NO: 5094229 - DNA, 25 bp, Homo sapien
cctgtacaactttttctctcgaaga

SEQ ID NO: 5094230 - DNA, 25 bp, Homo sapien
tctgccttctagtattttaggagcc

SEQ ID NO: 5094231 - DNA, 25 bp, Homo sapien
ggtaggaattacagaagatagggtc

SEQ ID NO: 5094232 - DNA, 25 bp, Homo sapien
cactttatggctttaaggagaccca

SEQ ID NO: 5094233 - DNA, 25 bp, Homo sapien
cataaagggacacaatggtaggaat

SEQ ID NO: 5094234 - DNA, 25 bp, Homo sapien
tagggtcaaatacatggaggacaca

SEQ ID NO: 5094235 - DNA, 25 bp, Homo sapien
catctcttcgcacttaatttgtgtg

SEQ ID NO: 5094236 - DNA, 25 bp, Homo sapien
tgtgcgtatattgtttttcaagatg

SEQ ID NO: 5094237 - DNA, 25 bp, Homo sapien
tctgccgcctttcatctcttcgcac

SEQ ID NO: 5094238 - DNA, 25 bp, Homo sapien
gcacttaatttgtgtgcgtatattg

SEQ ID NO: 5094239 - DNA, 25 bp, Homo sapien
ttgaatgatgtttccccaaccttga

SEQ ID NO: 5094240 - DNA, 25 bp, Homo sapien
tgaatgatgtttccccaaccttgaa

SEQ ID NO: 5094241 - DNA, 25 bp, Homo sapien
cttcacaagcctttactgagatgta

SEQ ID NO: 5094242 - DNA, 25 bp, Homo sapien
tactgagatgtaagtttgaatgatg

SEQ ID NO: 5094243 - DNA, 25 bp, Homo sapien
gtcacgctagtgaattctaagcccc

SEQ ID NO: 5094244 - DNA, 25 bp, Homo sapien
taagtaagtcttgaccgtggcgtag

SEQ ID NO: 5094245 - DNA, 25 bp, Homo sapien
tctaagccccatggaaactaggatt

SEQ ID NO: 5094246 - DNA, 25 bp, Homo sapien
ggattttcctgtgcaagctgggatg

SEQ ID NO: 5094247 - DNA, 25 bp, Homo sapien
taggatatgcctagaattttgaact

SEQ ID NO: 5094248 - DNA, 25 bp, Homo sapien
tatgcctagaattttgaactgcagc

SEQ ID NO: 5094249 - DNA, 25 bp, Homo sapien
tagaattttgaactgcagcttatac

SEQ ID NO: 5094250 - DNA, 25 bp, Homo sapien
cttgtaggatatgcctagaattttg

SEQ ID NO: 5094251 - DNA, 25 bp, Homo sapien
ctagaaattgcaggtgtttcactga

SEQ ID NO: 5094252 - DNA, 25 bp, Homo sapien
tagaaattgcaggtgtttcactgag

SEQ ID NO: 5094253 - DNA, 25 bp, Homo sapien
ttttctgcatgagacgtagaggctg

SEQ ID NO: 5094254 - DNA, 25 bp, Homo sapien
aataaggagagtcctccattttctc

SEQ ID NO: 5094255 - DNA, 25 bp, Homo sapien
tcttaatcgtcatgaaggtatcata

SEQ ID NO: 5094256 - DNA, 25 bp, Homo sapien
catgagacgtagaggctgaacacac

SEQ ID NO: 5094257 - DNA, 25 bp, Homo sapien
catgggctatgtctgctgacagggc

SEQ ID NO: 5094258 - DNA, 25 bp, Homo sapien
tgacagggccttggtatatcttttt

SEQ ID NO: 5094259 - DNA, 25 bp, Homo sapien
gggtttcagtatgttcatgggctat

SEQ ID NO: 5094260 - DNA, 25 bp, Homo sapien
gatggtaaggctcatttttagggaa

SEQ ID NO: 5094261 - DNA, 25 bp, Homo sapien
ccttcactgtgaattctacttcttc

SEQ ID NO: 5094262 - DNA, 25 bp, Homo sapien
tgctagtggatgaagctacatcatt

SEQ ID NO: 5094263 - DNA, 25 bp, Homo sapien
agctacatcattcaacttcttgctg

SEQ ID NO: 5094264 - DNA, 25 bp, Homo sapien
tgagttccttcactgtgaattctac

SEQ ID NO: 5094265 - DNA, 25 bp, Homo sapien
cagcatctagggaggatcggccatt

SEQ ID NO: 5094266 - DNA, 25 bp, Homo sapien
gattcagtctcacttctctgagtca

SEQ ID NO: 5094267 - DNA, 25 bp, Homo sapien
cttctctgagtcaattttaaccagg

SEQ ID NO: 5094268 - DNA, 25 bp, Homo sapien
tcggccattcatcaagcagccatgg

SEQ ID NO: 5094269 - DNA, 25 bp, Homo sapien
ttttgggtcgatgtgtctctctttt

SEQ ID NO: 5094270 - DNA, 25 bp, Homo sapien
cttttgggtcgatgtgtctctcttt

SEQ ID NO: 5094271 - DNA, 25 bp, Homo sapien
tttgggtcgatgtgtctctcttttc

SEQ ID NO: 5094272 - DNA, 25 bp, Homo sapien
ccttttgggtcgatgtgtctctctt

SEQ ID NO: 5094273 - DNA, 25 bp, Homo sapien
attcaggagggcagagctatacaga

SEQ ID NO: 5094274 - DNA, 25 bp, Homo sapien
ttcaggagggcagagctatacagag

SEQ ID NO: 5094275 - DNA, 25 bp, Homo sapien
aattcaggagggcagagctatacag

SEQ ID NO: 5094276 - DNA, 25 bp, Homo sapien
tgtagggtgacagacagtagttccc

SEQ ID NO: 5094277 - DNA, 25 bp, Homo sapien
tccaactactaccttgggagtccag

SEQ ID NO: 5094278 - DNA, 25 bp, Homo sapien
agtagttcccaaggtgtgatctgag

SEQ ID NO: 5094279 - DNA, 25 bp, Homo sapien
gctggtctgagctaacatgaagttc

SEQ ID NO: 5094280 - DNA, 25 bp, Homo sapien
gtgtgagagcacacgggcttcaggg

SEQ ID NO: 5094281 - DNA, 25 bp, Homo sapien
ggggctgccaactggccatactttc

SEQ ID NO: 5094282 - DNA, 25 bp, Homo sapien
agaggtgtgagagcacacgggcttc

SEQ ID NO: 5094283 - DNA, 25 bp, Homo sapien
ttcaggggctgccaactggccatac

SEQ ID NO: 5094284 - DNA, 25 bp, Homo sapien
tcatttcgctgtgcacagaggctca

SEQ ID NO: 5094285 - DNA, 25 bp, Homo sapien
ctgaaggttctttttaacacagcca

SEQ ID NO: 5094286 - DNA, 25 bp, Homo sapien
ctttggacattccaccaatgatgaa

SEQ ID NO: 5094287 - DNA, 25 bp, Homo sapien
cattccaccaatgatgaaattcaga

SEQ ID NO: 5094288 - DNA, 25 bp, Homo sapien
gaaattcagacaggtaattgcaaca

SEQ ID NO: 5094289 - DNA, 25 bp, Homo sapien
gacaggtaattgcaacattcctcat

SEQ ID NO: 5094290 - DNA, 25 bp, Homo sapien
ctaagtagaccacacggccattatc

SEQ ID NO: 5094291 - DNA, 25 bp, Homo sapien
agaccacacggccattatcagcaga

SEQ ID NO: 5094292 - DNA, 25 bp, Homo sapien
ttactaagtagaccacacggccatt

SEQ ID NO: 5094293 - DNA, 25 bp, Homo sapien
aagtagaccacacggccattatcag

SEQ ID NO: 5094294 - DNA, 25 bp, Homo sapien
tcctaagttctgcagaatctttgtc

SEQ ID NO: 5094295 - DNA, 25 bp, Homo sapien
tcatctttctggacttttcctaagt

SEQ ID NO: 5094296 - DNA, 25 bp, Homo sapien
ttcctaagttctgcagaatctttgt

SEQ ID NO: 5094297 - DNA, 25 bp, Homo sapien
tctggacttttcctaagttctgcag

SEQ ID NO: 5094298 - DNA, 25 bp, Homo sapien
aatactaactaatgccagggtggag

SEQ ID NO: 5094299 - DNA, 25 bp, Homo sapien
gccactgcactgatggaggtacatt

SEQ ID NO: 5094300 - DNA, 25 bp, Homo sapien
aaaaggccagcattgtgactcacgc

SEQ ID NO: 5094301 - DNA, 25 bp, Homo sapien
aatgagcacacttgcagggttctga

SEQ ID NO: 5094302 - DNA, 25 bp, Homo sapien
tcctatcctttcctagtcttttgga

SEQ ID NO: 5094303 - DNA, 25 bp, Homo sapien
ggaactcagtggggaggtaaatgaa

SEQ ID NO: 5094304 - DNA, 25 bp, Homo sapien
cctttcctagtcttttggacattga

SEQ ID NO: 5094305 - DNA, 25 bp, Homo sapien
aggaactcagtggggaggtaaatga

SEQ ID NO: 5094306 - DNA, 25 bp, Homo sapien
aaggatgactgtgatagacctgaaa

SEQ ID NO: 5094307 - DNA, 25 bp, Homo sapien
gatgactgtgatagacctgaaattc

SEQ ID NO: 5094308 - DNA, 25 bp, Homo sapien
ctgtgatagacctgaaattctagaa

SEQ ID NO: 5094309 - DNA, 25 bp, Homo sapien
gactgtgatagacctgaaattctag

SEQ ID NO: 5094310 - DNA, 25 bp, Homo sapien
ctgaccccgttgttgtgctttgacg

SEQ ID NO: 5094311 - DNA, 25 bp, Homo sapien
gacattggaagctgaccccgttgtt

SEQ ID NO: 5094312 - DNA, 25 bp, Homo sapien
tgacattggaagctgaccccgttgt

SEQ ID NO: 5094313 - DNA, 25 bp, Homo sapien
gaccccgttgttgtgctttgacgtc

SEQ ID NO: 5094314 - DNA, 25 bp, Homo sapien
ctactcccggtcatatctatttctc

SEQ ID NO: 5094315 - DNA, 25 bp, Homo sapien
tctactcccggtcatatctatttct

SEQ ID NO: 5094316 - DNA, 25 bp, Homo sapien
tactcccggtcatatctatttctcc

SEQ ID NO: 5094317 - DNA, 25 bp, Homo sapien
tttctactcccggtcatatctattt

SEQ ID NO: 5094318 - DNA, 25 bp, Homo sapien
ccttgattttgagttatatttggat

SEQ ID NO: 5094319 - DNA, 25 bp, Homo sapien
caccttgattttgagttatatttgg

SEQ ID NO: 5094320 - DNA, 25 bp, Homo sapien
tggcaccttgattttgagttatatt

SEQ ID NO: 5094321 - DNA, 25 bp, Homo sapien
caactggcaccttgattttgagtta

SEQ ID NO: 5094322 - DNA, 25 bp, Homo sapien
gatgaggaagaagaaaatggtcaag

SEQ ID NO: 5094323 - DNA, 25 bp, Homo sapien
tgaggaagaagaaaatggtcaagtg

SEQ ID NO: 5094324 - DNA, 25 bp, Homo sapien
ggaagaagaaaatggtcaagtgcat

SEQ ID NO: 5094325 - DNA, 25 bp, Homo sapien
gaggaagaagaaaatggtcaagtgc

SEQ ID NO: 5094326 - DNA, 25 bp, Homo sapien
agtgtcataagaagtaccagtggtg

SEQ ID NO: 5094327 - DNA, 25 bp, Homo sapien
taccagtggcgatgacagtgtcata

SEQ ID NO: 5094328 - DNA, 25 bp, Homo sapien
agtaccagtggcgatgacagtgtca

SEQ ID NO: 5094329 - DNA, 25 bp, Homo sapien
gtgtcataagaagtaccagtggtga

SEQ ID NO: 5094330 - DNA, 25 bp, Homo sapien
ttacacattatagaccatgttttgg

SEQ ID NO: 5094331 - DNA, 25 bp, Homo sapien
aaattacacattatagaccatgttt

SEQ ID NO: 5094332 - DNA, 25 bp, Homo sapien
cattatagaccatgttttgggaagc

SEQ ID NO: 5094333 - DNA, 25 bp, Homo sapien
tgtggcactttttatggcttcccac

SEQ ID NO: 5094334 - DNA, 25 bp, Homo sapien
cctcaagattaggagccagtaaaac

SEQ ID NO: 5094335 - DNA, 25 bp, Homo sapien
aaagggcacacctcaagattaggag

SEQ ID NO: 5094336 - DNA, 25 bp, Homo sapien
gggtgagtacagagtgcttgaaagg

SEQ ID NO: 5094337 - DNA, 25 bp, Homo sapien
aaaggcatgtgaaaaagggcacacc

SEQ ID NO: 5094338 - DNA, 25 bp, Homo sapien
gagcatcaacatgagataacttatc

SEQ ID NO: 5094339 - DNA, 25 bp, Homo sapien
tatccacgtacacaccaatgcacat

SEQ ID NO: 5094340 - DNA, 25 bp, Homo sapien
atctttgctaggtgagtttctccct

SEQ ID NO: 5094341 - DNA, 25 bp, Homo sapien
gtaagaagtgtaacattctgcctct

SEQ ID NO: 5094342 - DNA, 25 bp, Homo sapien
ggcagcagtatagctggcagaagtt

SEQ ID NO: 5094343 - DNA, 25 bp, Homo sapien
agggagcccatctgtaggtcagagt

SEQ ID NO: 5094344 - DNA, 25 bp, Homo sapien
gagatctcatccagacaaagtatct

SEQ ID NO: 5094345 - DNA, 25 bp, Homo sapien
cagacaaagtatctgtctggaaggc

SEQ ID NO: 5094346 - DNA, 25 bp, Homo sapien
accattttcttctagttgtgatgag

SEQ ID NO: 5094347 - DNA, 25 bp, Homo sapien
agacatggagttttagaggccaagg

SEQ ID NO: 5094348 - DNA, 25 bp, Homo sapien
tgcatatctgtgtcctgaacaatag

SEQ ID NO: 5094349 - DNA, 25 bp, Homo sapien
catttggcttggaaagacacttaag

SEQ ID NO: 5094350 - DNA, 25 bp, Homo sapien
gatgatactgtttatttcccatgta

SEQ ID NO: 5094351 - DNA, 25 bp, Homo sapien
tatttcccatgtagatcccagcaaa

SEQ ID NO: 5094352 - DNA, 25 bp, Homo sapien
tcccatgtagatcccagcaaacctt

SEQ ID NO: 5094353 - DNA, 25 bp, Homo sapien
tactgtttatttcccatgtagatcc

SEQ ID NO: 5094354 - DNA, 25 bp, Homo sapien
ccttcccatagcttgctccagacct

SEQ ID NO: 5094355 - DNA, 25 bp, Homo sapien
ctttgaatccattcaaagttagggc

SEQ ID NO: 5094356 - DNA, 25 bp, Homo sapien
caaagttagggcagacaggctgcca

SEQ ID NO: 5094357 - DNA, 25 bp, Homo sapien
caactgtgggagaaattcttgccac

SEQ ID NO: 5094358 - DNA, 25 bp, Homo sapien
tgcatagcatatttctccagtccat

SEQ ID NO: 5094359 - DNA, 25 bp, Homo sapien
tatgcatagcatatttctccagtcc

SEQ ID NO: 5094360 - DNA, 25 bp, Homo sapien
ttaagtgttatgcatagcatatttc

SEQ ID NO: 5094361 - DNA, 25 bp, Homo sapien
catagcatatttctccagtccatgt

SEQ ID NO: 5094362 - DNA, 25 bp, Homo sapien
caccacgcctggtcgatattagttc

SEQ ID NO: 5094363 - DNA, 25 bp, Homo sapien
accacgcctggtcgatattagttct

SEQ ID NO: 5094364 - DNA, 25 bp, Homo sapien
acgcctggtcgatattagttcttta

SEQ ID NO: 5094365 - DNA, 25 bp, Homo sapien
ccacgcctggtcgatattagttctt

SEQ ID NO: 5094366 - DNA, 25 bp, Homo sapien
aagcaactatggtctcagtcgtcat

SEQ ID NO: 5094367 - DNA, 25 bp, Homo sapien
ctcctttttccactcataagcaact

SEQ ID NO: 5094368 - DNA, 25 bp, Homo sapien
tcctttttccactcataagcaacta

SEQ ID NO: 5094369 - DNA, 25 bp, Homo sapien
acagagattagaatcaaaatgtgac

SEQ ID NO: 5094370 - DNA, 25 bp, Homo sapien
ctacacagagattagaatcaaaatg

SEQ ID NO: 5094371 - DNA, 25 bp, Homo sapien
cacagagattagaatcaaaatgtga

SEQ ID NO: 5094372 - DNA, 25 bp, Homo sapien
tacacagagattagaatcaaaatgt

SEQ ID NO: 5094373 - DNA, 25 bp, Homo sapien
actgatcttcatggccttccagttt

SEQ ID NO: 5094374 - DNA, 25 bp, Homo sapien
ttaagttacgtactgatcttcatgg

SEQ ID NO: 5094375 - DNA, 25 bp, Homo sapien
tgatcttcatggccttccagtttag

SEQ ID NO: 5094376 - DNA, 25 bp, Homo sapien
agttacgtactgatcttcatggcct

SEQ ID NO: 5094377 - DNA, 25 bp, Homo sapien
gctgaacgtctggcaccgttaaaaa

SEQ ID NO: 5094378 - DNA, 25 bp, Homo sapien
agctgaacgtctggcaccgttaaaa

SEQ ID NO: 5094379 - DNA, 25 bp, Homo sapien
tagctgaacgtctggcaccgttaaa

SEQ ID NO: 5094380 - DNA, 25 bp, Homo sapien
caggatttgtaaccaaacagggctt

SEQ ID NO: 5094381 - DNA, 25 bp, Homo sapien
actgagctctttttgccgaatttac

SEQ ID NO: 5094382 - DNA, 25 bp, Homo sapien
tttgctgaatttatcccaggatttg

SEQ ID NO: 5094383 - DNA, 25 bp, Homo sapien
caatctgagttacaacaagttccac

SEQ ID NO: 5094384 - DNA, 25 bp, Homo sapien
actctatattttgggccagaccagt

SEQ ID NO: 5094385 - DNA, 25 bp, Homo sapien
tactctatattttgggccagaccag

SEQ ID NO: 5094386 - DNA, 25 bp, Homo sapien
tcatactctatattttgggccagac

SEQ ID NO: 5094387 - DNA, 25 bp, Homo sapien
ctatattttgggccagaccagttac

SEQ ID NO: 5094388 - DNA, 25 bp, Homo sapien
gaggagtgcatcaagaggagttttt

SEQ ID NO: 5094389 - DNA, 25 bp, Homo sapien
gcgctcaggggtattgaggtttcct

SEQ ID NO: 5094390 - DNA, 25 bp, Homo sapien
tgctctcctctagatgcgctcaggg

SEQ ID NO: 5094391 - DNA, 25 bp, Homo sapien
tatagagtggccattccattttccc

SEQ ID NO: 5094392 - DNA, 25 bp, Homo sapien
aatttctagcaccaaaattgaattc

SEQ ID NO: 5094393 - DNA, 25 bp, Homo sapien
aaataaatgatagagtggtctggaa

SEQ ID NO: 5094394 - DNA, 25 bp, Homo sapien
gcaccaaaattgaattctatagaaa

SEQ ID NO: 5094395 - DNA, 25 bp, Homo sapien
acagtccagggaagtaaaataaatg

SEQ ID NO: 5094396 - DNA, 25 bp, Homo sapien
cctttagtcttttcctggattctat

SEQ ID NO: 5094397 - DNA, 25 bp, Homo sapien
ctttagtcttttcctggattctatg

SEQ ID NO: 5094398 - DNA, 25 bp, Homo sapien
ctggtgtacatcgtgctccaccatt

SEQ ID NO: 5094399 - DNA, 25 bp, Homo sapien
ggtgtacatcgtgctccaccattgt

SEQ ID NO: 5094400 - DNA, 25 bp, Homo sapien
gtacatcgtgctccaccattgtctg

SEQ ID NO: 5094401 - DNA, 25 bp, Homo sapien
tacatcgtgctccaccattgtctgc

SEQ ID NO: 5094402 - DNA, 25 bp, Homo sapien
aagcctggtggttgtcttatctgtt

SEQ ID NO: 5094403 - DNA, 25 bp, Homo sapien
ctggtggttgtcttatctgttgata

SEQ ID NO: 5094404 - DNA, 25 bp, Homo sapien
catgattagagtcagatcttgaatt

SEQ ID NO: 5094405 - DNA, 25 bp, Homo sapien
gcctggtggttgtcttatctgttga

SEQ ID NO: 5094406 - DNA, 25 bp, Homo sapien
catcaggagaaaatgggcaccgttg

SEQ ID NO: 5094407 - DNA, 25 bp, Homo sapien
gcccagcagataggttagtgaagaa

SEQ ID NO: 5094408 - DNA, 25 bp, Homo sapien
tagtgaagaactgggcagatctgag

SEQ ID NO: 5094409 - DNA, 25 bp, Homo sapien
gggagcctagacaagtggacagcat

SEQ ID NO: 5094410 - DNA, 25 bp, Homo sapien
cctgaggagattgcagccggatttt

SEQ ID NO: 5094411 - DNA, 25 bp, Homo sapien
agattgcagccggattttctcatga

SEQ ID NO: 5094412 - DNA, 25 bp, Homo sapien
gccggattttctcatgattgaaggg

SEQ ID NO: 5094413 - DNA, 25 bp, Homo sapien
cttaaaatgcctgaggagattgcag

SEQ ID NO: 5094414 - DNA, 25 bp, Homo sapien
gacacttgattacttgaagggtaag

SEQ ID NO: 5094415 - DNA, 25 bp, Homo sapien
attgacacttgattacttgaagggt

SEQ ID NO: 5094416 - DNA, 25 bp, Homo sapien
cacttgattacttgaagggtaagat

SEQ ID NO: 5094417 - DNA, 25 bp, Homo sapien
tgattacttgaagggtaagatgtgg

SEQ ID NO: 5094418 - DNA, 25 bp, Homo sapien
cccgataagggaatcttggtaagtg

SEQ ID NO: 5094419 - DNA, 25 bp, Homo sapien
tgggaggtaagcatgtgacagattt

SEQ ID NO: 5094420 - DNA, 25 bp, Homo sapien
tagatttaagagcttcaggggctca

SEQ ID NO: 5094421 - DNA, 25 bp, Homo sapien
tggtgcatgccggaagaaagagctt

SEQ ID NO: 5094422 - DNA, 25 bp, Homo sapien
gatgattttgtagtaacccttctaa

SEQ ID NO: 5094423 - DNA, 25 bp, Homo sapien
ccctgcctccggatgattttgtagt

SEQ ID NO: 5094424 - DNA, 25 bp, Homo sapien
ctccggatgattttgtagtaaccct

SEQ ID NO: 5094425 - DNA, 25 bp, Homo sapien
gcctccggatgattttgtagtaacc

SEQ ID NO: 5094426 - DNA, 25 bp, Homo sapien
agatctaggaaaatatctactgatc

SEQ ID NO: 5094427 - DNA, 25 bp, Homo sapien
taaagatctaggaaaatatctactg

SEQ ID NO: 5094428 - DNA, 25 bp, Homo sapien
aaagatctaggaaaatatctactga

SEQ ID NO: 5094429 - DNA, 25 bp, Homo sapien
ttaaagatctaggaaaatatctact

SEQ ID NO: 5094430 - DNA, 25 bp, Homo sapien
catgaatgtcgaaaagcattttctc

SEQ ID NO: 5094431 - DNA, 25 bp, Homo sapien
gaaggactagagttttcatctggga

SEQ ID NO: 5094432 - DNA, 25 bp, Homo sapien
ttacttgggcattttggcacatgaa

SEQ ID NO: 5094433 - DNA, 25 bp, Homo sapien
agattgttaagtcagttttactgga

SEQ ID NO: 5094434 - DNA, 25 bp, Homo sapien
tagagagagttcctagattcaaaga

SEQ ID NO: 5094435 - DNA, 25 bp, Homo sapien
gggttgctacactaaagcctgtaac

SEQ ID NO: 5094436 - DNA, 25 bp, Homo sapien
cataacgtagcccacactgagagaa

SEQ ID NO: 5094437 - DNA, 25 bp, Homo sapien
gaagaggcaacttccaatgtcaaag

SEQ ID NO: 5094438 - DNA, 25 bp, Homo sapien
tgtgccagagccttatgagtaaata

SEQ ID NO: 5094439 - DNA, 25 bp, Homo sapien
tctgtcttttatatgccttgtggtg

SEQ ID NO: 5094440 - DNA, 25 bp, Homo sapien
tctgtgggataccttgatgctgtac

SEQ ID NO: 5094441 - DNA, 25 bp, Homo sapien
cattccatgtaggatattaatagac

SEQ ID NO: 5094442 - DNA, 25 bp, Homo sapien
cttccagtagtcgcatcgtcagcat

SEQ ID NO: 5094443 - DNA, 25 bp, Homo sapien
ccttccagtagtcgcatcgtcagca

SEQ ID NO: 5094444 - DNA, 25 bp, Homo sapien
accttccagtagtcgcatcgtcagc

SEQ ID NO: 5094445 - DNA, 25 bp, Homo sapien
cccttggttcaggattttattgcca

SEQ ID NO: 5094446 - DNA, 25 bp, Homo sapien
agtgacaaattcaaagggataacca

SEQ ID NO: 5094447 - DNA, 25 bp, Homo sapien
ttcacttctgcaagatttgattctt

SEQ ID NO: 5094448 - DNA, 25 bp, Homo sapien
gaagagtgacaaattcaaagggata

SEQ ID NO: 5094449 - DNA, 25 bp, Homo sapien
tgatgcaatgtgaggactgcttctc

SEQ ID NO: 5094450 - DNA, 25 bp, Homo sapien
ttctctaagcgtctgatgtctgaag

SEQ ID NO: 5094451 - DNA, 25 bp, Homo sapien
tgatgtctgaagagtattcggattc

SEQ ID NO: 5094452 - DNA, 25 bp, Homo sapien
ttaaatgatccaaaaggcttaatct

SEQ ID NO: 5094453 - DNA, 25 bp, Homo sapien
gcacttccaaccaaatggatgcctg

SEQ ID NO: 5094454 - DNA, 25 bp, Homo sapien
tggatgcctgtagcaacagggatgt

SEQ ID NO: 5094455 - DNA, 25 bp, Homo sapien
taagcctcaagtgaagatagcatcc

SEQ ID NO: 5094456 - DNA, 25 bp, Homo sapien
gcaacagggatgtcataagcctcaa

SEQ ID NO: 5094457 - DNA, 25 bp, Homo sapien
catcacttcctgcctcatacttcat

SEQ ID NO: 5094458 - DNA, 25 bp, Homo sapien
tcttcatcacttcctgcctcatact

SEQ ID NO: 5094459 - DNA, 25 bp, Homo sapien
ttcatcacttcctgcctcatacttc

SEQ ID NO: 5094460 - DNA, 25 bp, Homo sapien
catcttcatcacttcctgcctcata

SEQ ID NO: 5094461 - DNA, 25 bp, Homo sapien
tcattccagctgcaatgggttgctg

SEQ ID NO: 5094462 - DNA, 25 bp, Homo sapien
cattccagctgcaatgggttgctgc

SEQ ID NO: 5094463 - DNA, 25 bp, Homo sapien
cttcattccagctgcaatgggttgc

SEQ ID NO: 5094464 - DNA, 25 bp, Homo sapien
tccagctgcaatgggttgctgcaga

SEQ ID NO: 5094465 - DNA, 25 bp, Homo sapien
aaaggatataaaccagttgtggaga

SEQ ID NO: 5094466 - DNA, 25 bp, Homo sapien
tataaaccagttgtggagaagacag

SEQ ID NO: 5094467 - DNA, 25 bp, Homo sapien
cttgcatcctcagacggtccagttg

SEQ ID NO: 5094468 - DNA, 25 bp, Homo sapien
tccagttggctcatggacttcctgg

SEQ ID NO: 5094469 - DNA, 25 bp, Homo sapien
tgcactggaatgattgacaactggt

SEQ ID NO: 5094470 - DNA, 25 bp, Homo sapien
tgggttcacactgggctaaagcatc

SEQ ID NO: 5094471 - DNA, 25 bp, Homo sapien
gacaagggtattctgaggctggctc

SEQ ID NO: 5094472 - DNA, 25 bp, Homo sapien
gagacagggtactgactacatcgac

SEQ ID NO: 5094473 - DNA, 25 bp, Homo sapien
atatccttgtgccaaattccaatct

SEQ ID NO: 5094474 - DNA, 25 bp, Homo sapien
tgtgccaaattccaatctctggcca

SEQ ID NO: 5094475 - DNA, 25 bp, Homo sapien
aagtattttccatatccttgtgcca

SEQ ID NO: 5094476 - DNA, 25 bp, Homo sapien
ccttgtgccaaattccaatctctgg

SEQ ID NO: 5094477 - DNA, 25 bp, Homo sapien
gatgtatatgcatgagattggaagg

SEQ ID NO: 5094478 - DNA, 25 bp, Homo sapien
gacagctttcctcaagagtgtcagc

SEQ ID NO: 5094479 - DNA, 25 bp, Homo sapien
ttaagcttgggtgatgatgtgcttt

SEQ ID NO: 5094480 - DNA, 25 bp, Homo sapien
gtgcttttcgttgggccagtaggat

SEQ ID NO: 5094481 - DNA, 25 bp, Homo sapien
ttgtcatcaggccaaagcgtccatt

SEQ ID NO: 5094482 - DNA, 25 bp, Homo sapien
gcgtccatttggtagaaaggcctgt

SEQ ID NO: 5094483 - DNA, 25 bp, Homo sapien
cagggatggtgaatctcttggacca

SEQ ID NO: 5094484 - DNA, 25 bp, Homo sapien
taaatgctctattaatggaggatcc

SEQ ID NO: 5094485 - DNA, 25 bp, Homo sapien
tagactgagtaaatacttctgtagc

SEQ ID NO: 5094486 - DNA, 25 bp, Homo sapien
caaactctgtgacctgactgcattc

SEQ ID NO: 5094487 - DNA, 25 bp, Homo sapien
ctgagtaaatacttctgtagccatc

SEQ ID NO: 5094488 - DNA, 25 bp, Homo sapien
gcacattgtagactgagtaaatact

SEQ ID NO: 5094489 - DNA, 25 bp, Homo sapien
tgctggcaggtttacagctgcaatc

SEQ ID NO: 5094490 - DNA, 25 bp, Homo sapien
aatgtgtttaacaggccagtgacct

SEQ ID NO: 5094491 - DNA, 25 bp, Homo sapien
taaatgccagcaatgccagagtgct

SEQ ID NO: 5094492 - DNA, 25 bp, Homo sapien
cagtgaccttgcagtctaaatgcca

SEQ ID NO: 5094493 - DNA, 25 bp, Homo sapien
agtttcctcatagatcatatgggag

SEQ ID NO: 5094494 - DNA, 25 bp, Homo sapien
gatcatatgggagttggcagtctta

SEQ ID NO: 5094495 - DNA, 25 bp, Homo sapien
cctcatagatcatatgggagttggc

SEQ ID NO: 5094496 - DNA, 25 bp, Homo sapien
gggagttggcagtcttatctgccat

SEQ ID NO: 5094497 - DNA, 25 bp, Homo sapien
tctgtggacacagcacttagcaaca

SEQ ID NO: 5094498 - DNA, 25 bp, Homo sapien
cacttagcaacagccaaatgcaggc

SEQ ID NO: 5094499 - DNA, 25 bp, Homo sapien
aatgcaggctgaatgaacgtgaaca

SEQ ID NO: 5094500 - DNA, 25 bp, Homo sapien
gcaacaactccagtaagggatgcac

SEQ ID NO: 5094501 - DNA, 25 bp, Homo sapien
tcatttcaccccagggcataaatga

SEQ ID NO: 5094502 - DNA, 25 bp, Homo sapien
caccccagggcataaatgactcatg

SEQ ID NO: 5094503 - DNA, 25 bp, Homo sapien
tttcaccccagggcataaatgactc

SEQ ID NO: 5094504 - DNA, 25 bp, Homo sapien
tcaccccagggcataaatgactcat

SEQ ID NO: 5094505 - DNA, 25 bp, Homo sapien
gtcacgcagaccagccacacctgag

SEQ ID NO: 5094506 - DNA, 25 bp, Homo sapien
caagtggaatgtgggtaagttttgt

SEQ ID NO: 5094507 - DNA, 25 bp, Homo sapien
atttggtgaagatgggcctgcaaga

SEQ ID NO: 5094508 - DNA, 25 bp, Homo sapien
agaggcgggcactgacacaggattt

SEQ ID NO: 5094509 - DNA, 25 bp, Homo sapien
ggagctatccaacaggctggtagga

SEQ ID NO: 5094510 - DNA, 25 bp, Homo sapien
tccgaagtgcgtaataggtctcagg

SEQ ID NO: 5094511 - DNA, 25 bp, Homo sapien
ttcctactccgaagtgcgtaatagg

SEQ ID NO: 5094512 - DNA, 25 bp, Homo sapien
gtgcgtaataggtctcaggagcatc

SEQ ID NO: 5094513 - DNA, 25 bp, Homo sapien
tttctttcctactccgaagtgcgta

SEQ ID NO: 5094514 - DNA, 25 bp, Homo sapien
tgttagatcacatgttggggtccct

SEQ ID NO: 5094515 - DNA, 25 bp, Homo sapien
gaagcccatgttctgtggattccat

SEQ ID NO: 5094516 - DNA, 25 bp, Homo sapien
ccatgtctgccccttattttagtca

SEQ ID NO: 5094517 - DNA, 25 bp, Homo sapien
tgtgaagcccatgttctgtggattc

SEQ ID NO: 5094518 - DNA, 25 bp, Homo sapien
gtaaatccagtagaatacagggtcc

SEQ ID NO: 5094519 - DNA, 25 bp, Homo sapien
tgtgtagcaggaaacatagcactgt

SEQ ID NO: 5094520 - DNA, 25 bp, Homo sapien
tcctgcaagtcctgtatagtggcct

SEQ ID NO: 5094521 - DNA, 25 bp, Homo sapien
ctgtgaacaccagcatagtcatggg

SEQ ID NO: 5094522 - DNA, 25 bp, Homo sapien
ctgtcagcgttgtttgtgtagaggc

SEQ ID NO: 5094523 - DNA, 25 bp, Homo sapien
gctttgcagggccttgcctgccctt

SEQ ID NO: 5094524 - DNA, 25 bp, Homo sapien
gtttgtgtagaggccaatccccatc

SEQ ID NO: 5094525 - DNA, 25 bp, Homo sapien
tcctctgctgtcagcgttgtttgtg

SEQ ID NO: 5094526 - DNA, 25 bp, Homo sapien
gctcagccagagcatgctccctggg

SEQ ID NO: 5094527 - DNA, 25 bp, Homo sapien
tttccttagttcctttcagctcagc

SEQ ID NO: 5094528 - DNA, 25 bp, Homo sapien
tctcctttccttagttcctttcagc

SEQ ID NO: 5094529 - DNA, 25 bp, Homo sapien
cagccagagcatgctccctgggcat

SEQ ID NO: 5094530 - DNA, 25 bp, Homo sapien
ggttcttctagatgcacaatctggg

SEQ ID NO: 5094531 - DNA, 25 bp, Homo sapien
ggacccagtgtgtcttggacccaga

SEQ ID NO: 5094532 - DNA, 25 bp, Homo sapien
gacgtgcctgcctgatatcctccag

SEQ ID NO: 5094533 - DNA, 25 bp, Homo sapien
tctgtgtcctgaacctatcacaggg

SEQ ID NO: 5094534 - DNA, 25 bp, Homo sapien
tcatttgacaaaggcaagcacgtgg

SEQ ID NO: 5094535 - DNA, 25 bp, Homo sapien
gaggtccccgtaataactggctgcc

SEQ ID NO: 5094536 - DNA, 25 bp, Homo sapien
ggcccctctaatcttgagtgttaca

SEQ ID NO: 5094537 - DNA, 25 bp, Homo sapien
caccagaggccggtaaatatcttct

SEQ ID NO: 5094538 - DNA, 25 bp, Homo sapien
tggactaatagtccctgctgccatt

SEQ ID NO: 5094539 - DNA, 25 bp, Homo sapien
gtagtcacaatggactaatagtccc

SEQ ID NO: 5094540 - DNA, 25 bp, Homo sapien
gagacccattgccaggatgtctgac

SEQ ID NO: 5094541 - DNA, 25 bp, Homo sapien
tctggtgcatctttaggaggagacc

SEQ ID NO: 5094542 - DNA, 25 bp, Homo sapien
gaaagcaggttgctagggccttagc

SEQ ID NO: 5094543 - DNA, 25 bp, Homo sapien
gccttagcacgccttggaatcagag

SEQ ID NO: 5094544 - DNA, 25 bp, Homo sapien
cactgtggcaggataattaattcga

SEQ ID NO: 5094545 - DNA, 25 bp, Homo sapien
taattcgactgccaattaatgtttg

SEQ ID NO: 5094546 - DNA, 25 bp, Homo sapien
gccggggttacaagtgcctgcagta

SEQ ID NO: 5094547 - DNA, 25 bp, Homo sapien
caagtgcctgcagtaggggtgctca

SEQ ID NO: 5094548 - DNA, 25 bp, Homo sapien
agcattttgcatacagggagccggg

SEQ ID NO: 5094549 - DNA, 25 bp, Homo sapien
gaagcattttgcatacagggagccg

SEQ ID NO: 5094550 - DNA, 25 bp, Homo sapien
tcagatatattcactggtatgtggg

SEQ ID NO: 5094551 - DNA, 25 bp, Homo sapien
tttctttgctgggtggggatgtcta

SEQ ID NO: 5094552 - DNA, 25 bp, Homo sapien
ctacaatgcttaacgaggccatttc

SEQ ID NO: 5094553 - DNA, 25 bp, Homo sapien
ggtggggatgtctacaatgcttaac

SEQ ID NO: 5094554 - DNA, 25 bp, Homo sapien
ggcacttatttgtatgctgcagagg

SEQ ID NO: 5094555 - DNA, 25 bp, Homo sapien
ccaggttggcacagtctcatctcca

SEQ ID NO: 5094556 - DNA, 25 bp, Homo sapien
gcaagcacagctgaaagacagcaga

SEQ ID NO: 5094557 - DNA, 25 bp, Homo sapien
cttggtgtgctctgcattattaatc

SEQ ID NO: 5094558 - DNA, 25 bp, Homo sapien
ctgaggtactaaagggaagcagaaa

SEQ ID NO: 5094559 - DNA, 25 bp, Homo sapien
tttggtatatgcatcataggaagcc

SEQ ID NO: 5094560 - DNA, 25 bp, Homo sapien
gaattttggtatatgcatcatagga

SEQ ID NO: 5094561 - DNA, 25 bp, Homo sapien
ataggaagccattccaactgcttga

SEQ ID NO: 5094562 - DNA, 25 bp, Homo sapien
atcataggaagccattccaactgct

SEQ ID NO: 5094563 - DNA, 25 bp, Homo sapien
gagacaaatactgcagcccatcttt

SEQ ID NO: 5094564 - DNA, 25 bp, Homo sapien
tactgcagcccatctttgcctgatc

SEQ ID NO: 5094565 - DNA, 25 bp, Homo sapien
gcccatctttgcctgatcatagtaa

SEQ ID NO: 5094566 - DNA, 25 bp, Homo sapien
tgtcctcttcagagacaaatactgc

SEQ ID NO: 5094567 - DNA, 25 bp, Homo sapien
gagctgcccatatttgggtggagcc

SEQ ID NO: 5094568 - DNA, 25 bp, Homo sapien
tctgctcagtgacagtttgcttttg

SEQ ID NO: 5094569 - DNA, 25 bp, Homo sapien
agctgcccatatttgggtggagcca

SEQ ID NO: 5094570 - DNA, 25 bp, Homo sapien
gagacccatgggaagcatctgctca

SEQ ID NO: 5094571 - DNA, 25 bp, Homo sapien
gggccacacattcagtacccagaaa

SEQ ID NO: 5094572 - DNA, 25 bp, Homo sapien
ggtgggccacacattcagtacccag

SEQ ID NO: 5094573 - DNA, 25 bp, Homo sapien
aggtgggccacacattcagtaccca

SEQ ID NO: 5094574 - DNA, 25 bp, Homo sapien
gccacacattcagtacccagaaaca

SEQ ID NO: 5094575 - DNA, 25 bp, Homo sapien
cacataggctacttcctgcaggtta

SEQ ID NO: 5094576 - DNA, 25 bp, Homo sapien
tcatcacggtctgggtaaactgtca

SEQ ID NO: 5094577 - DNA, 25 bp, Homo sapien
aatatgggtgtcgtcagaaaccagg

SEQ ID NO: 5094578 - DNA, 25 bp, Homo sapien
tcgtcagaaaccaggtcatctcatc

SEQ ID NO: 5094579 - DNA, 25 bp, Homo sapien
ccccgggctgaatgactaatgtctt

SEQ ID NO: 5094580 - DNA, 25 bp, Homo sapien
gcaaagacatgcagggcgacctgag

SEQ ID NO: 5094581 - DNA, 25 bp, Homo sapien
gccagggagcccacttgctttgtaa

SEQ ID NO: 5094582 - DNA, 25 bp, Homo sapien
taaggttctggcgaggcttcttctc

SEQ ID NO: 5094583 - DNA, 25 bp, Homo sapien
tctatgttgacatcggctccctgaa

SEQ ID NO: 5094584 - DNA, 25 bp, Homo sapien
gctccctgaactgccctaggtgtgg

SEQ ID NO: 5094585 - DNA, 25 bp, Homo sapien
cagttctgtgtaattgctgggccgc

SEQ ID NO: 5094586 - DNA, 25 bp, Homo sapien
tcttggaggccactgaagtcacgtc

SEQ ID NO: 5094587 - DNA, 25 bp, Homo sapien
ctggttccagggtaagtatcacttt

SEQ ID NO: 5094588 - DNA, 25 bp, Homo sapien
tctggttccagggtaagtatcactt

SEQ ID NO: 5094589 - DNA, 25 bp, Homo sapien
gttctggttccagggtaagtatcac

SEQ ID NO: 5094590 - DNA, 25 bp, Homo sapien
ggttctggttccagggtaagtatca

SEQ ID NO: 5094591 - DNA, 25 bp, Homo sapien
gatgtcctggtctgttccgtagagg

SEQ ID NO: 5094592 - DNA, 25 bp, Homo sapien
gattgcttgcaaagaatccactcgg

SEQ ID NO: 5094593 - DNA, 25 bp, Homo sapien
tccactcggtttggagtagaagtag

SEQ ID NO: 5094594 - DNA, 25 bp, Homo sapien
agatgttccttagccatctcttgta

SEQ ID NO: 5094595 - DNA, 25 bp, Homo sapien
tggaatcaacacagaaagccatggg

SEQ ID NO: 5094596 - DNA, 25 bp, Homo sapien
tgggaactgcctcagcttcactcct

SEQ ID NO: 5094597 - DNA, 25 bp, Homo sapien
tggacttgatgttttggcaataatt

SEQ ID NO: 5094598 - DNA, 25 bp, Homo sapien
tgatttcagtattgcctggggggcc

SEQ ID NO: 5094599 - DNA, 25 bp, Homo sapien
tccctaggcaatggatatttggcgt

SEQ ID NO: 5094600 - DNA, 25 bp, Homo sapien
gatatttggcgttttgccctgaagc

SEQ ID NO: 5094601 - DNA, 25 bp, Homo sapien
gatgacttggatatccctaggcaat

SEQ ID NO: 5094602 - DNA, 25 bp, Homo sapien
catgtgatgacttggatatccctag

SEQ ID NO: 5094603 - DNA, 25 bp, Homo sapien
ctgtggcataatggggcctgcctca

SEQ ID NO: 5094604 - DNA, 25 bp, Homo sapien
tgctgtggcataatggggcctgcct

SEQ ID NO: 5094605 - DNA, 25 bp, Homo sapien
tctttgctgtggcataatggggcct

SEQ ID NO: 5094606 - DNA, 25 bp, Homo sapien
ccagtgagcctttcttatctttgat

SEQ ID NO: 5094607 - DNA, 25 bp, Homo sapien
gacagctgtctgtaatgagtgggcc

SEQ ID NO: 5094608 - DNA, 25 bp, Homo sapien
agtgggccagtgcaaagctgatgct

SEQ ID NO: 5094609 - DNA, 25 bp, Homo sapien
taatgagtgggccagtgcaaagctg

SEQ ID NO: 5094610 - DNA, 25 bp, Homo sapien
ctgtctgtaatgagtgggccagtgc

SEQ ID NO: 5094611 - DNA, 25 bp, Homo sapien
catgggtgtttggtacctgtggtca

SEQ ID NO: 5094612 - DNA, 25 bp, Homo sapien
agctctccatgggtgtttggtacct

SEQ ID NO: 5094613 - DNA, 25 bp, Homo sapien
tctccttgactatctgaggccttcc

SEQ ID NO: 5094614 - DNA, 25 bp, Homo sapien
tcctgctctccttgactatctgagg

SEQ ID NO: 5094615 - DNA, 25 bp, Homo sapien
aagggctagacctctaggtgcccag

SEQ ID NO: 5094616 - DNA, 25 bp, Homo sapien
gctagacctctaggtgcccaggctc

SEQ ID NO: 5094617 - DNA, 25 bp, Homo sapien
gggctagacctctaggtgcccaggc

SEQ ID NO: 5094618 - DNA, 25 bp, Homo sapien
ggaagggctagacctctaggtgccc

SEQ ID NO: 5094619 - DNA, 25 bp, Homo sapien
ttggctctttcccacaatgctgctg

SEQ ID NO: 5094620 - DNA, 25 bp, Homo sapien
ttaactcttagatggtcccactgct

SEQ ID NO: 5094621 - DNA, 25 bp, Homo sapien
tgcatgctctgtttgagctttggtt

SEQ ID NO: 5094622 - DNA, 25 bp, Homo sapien
gtgcatgctctgtttgagctttggt

SEQ ID NO: 5094623 - DNA, 25 bp, Homo sapien
cttggcttcctctgtagctaaagct

SEQ ID NO: 5094624 - DNA, 25 bp, Homo sapien
tgtagctaaagctactggcactgtg

SEQ ID NO: 5094625 - DNA, 25 bp, Homo sapien
tgaggtgcagatttttccaggcatg

SEQ ID NO: 5094626 - DNA, 25 bp, Homo sapien
ggcactgtgtaaaaaggcacagcag

SEQ ID NO: 5094627 - DNA, 25 bp, Homo sapien
ccttcctgaattgctttacaagccg

SEQ ID NO: 5094628 - DNA, 25 bp, Homo sapien
catgacttcaggtaaagatggctca

SEQ ID NO: 5094629 - DNA, 25 bp, Homo sapien
ggctcatatttgacagcttacagaa

SEQ ID NO: 5094630 - DNA, 25 bp, Homo sapien
caatttaatattcctgtgtgcagca

SEQ ID NO: 5094631 - DNA, 25 bp, Homo sapien
gcctgaagtacgagaagttttcgat

SEQ ID NO: 5094632 - DNA, 25 bp, Homo sapien
tgaacttcatttggcatactgcctg

SEQ ID NO: 5094633 - DNA, 25 bp, Homo sapien
tcgatatttcgctactttttgagga

SEQ ID NO: 5094634 - DNA, 25 bp, Homo sapien
gaggaaaggttgctcattgggacca

SEQ ID NO: 5094635 - DNA, 25 bp, Homo sapien
gcagttcaggcttggaggtttctct

SEQ ID NO: 5094636 - DNA, 25 bp, Homo sapien
gacatggatcactcatatggctggg

SEQ ID NO: 5094637 - DNA, 25 bp, Homo sapien
ggacggctgcagtatcctcatggca

SEQ ID NO: 5094638 - DNA, 25 bp, Homo sapien
ttagcaagcttgacaggagccaggg

SEQ ID NO: 5094639 - DNA, 25 bp, Homo sapien
tgatgatggtcttttttggccttca

SEQ ID NO: 5094640 - DNA, 25 bp, Homo sapien
gcctttctctatcccaaatcttaag

SEQ ID NO: 5094641 - DNA, 25 bp, Homo sapien
tcttaagtccgttacagaactgaac

SEQ ID NO: 5094642 - DNA, 25 bp, Homo sapien
gaggttgcactgataacttttagtt

SEQ ID NO: 5094643 - DNA, 25 bp, Homo sapien
gacgcccaggcgtgccttgtttttg

SEQ ID NO: 5094644 - DNA, 25 bp, Homo sapien
tattactccggaatggctacagccc

SEQ ID NO: 5094645 - DNA, 25 bp, Homo sapien
gggacatgaagattgcctagaaata

SEQ ID NO: 5094646 - DNA, 25 bp, Homo sapien
ttactaaccgggcctgtgacactgg

SEQ ID NO: 5094647 - DNA, 25 bp, Homo sapien
tgaagcctccggtaagcgagtaacc

SEQ ID NO: 5094648 - DNA, 25 bp, Homo sapien
cagtggccgtgaaccctagctgtcg

SEQ ID NO: 5094649 - DNA, 25 bp, Homo sapien
gccccagtggccgtgaaccctagct

SEQ ID NO: 5094650 - DNA, 25 bp, Homo sapien
cggtaagcgagtaaccggccgcgcg

SEQ ID NO: 5094651 - DNA, 25 bp, Homo sapien
gtggtccgtgctgccctgccagaag

SEQ ID NO: 5094652 - DNA, 25 bp, Homo sapien
gcttgtcctgataggggaaatccac

SEQ ID NO: 5094653 - DNA, 25 bp, Homo sapien
tccagatcagggacccgtaaccaaa

SEQ ID NO: 5094654 - DNA, 25 bp, Homo sapien
tgctgtagttggtgatgtatccgac

SEQ ID NO: 5094655 - DNA, 25 bp, Homo sapien
tcaacaagagtcacaactcttccag

SEQ ID NO: 5094656 - DNA, 25 bp, Homo sapien
caacaagagtcacaactcttccagg

SEQ ID NO: 5094657 - DNA, 25 bp, Homo sapien
caggtatttccgttaatgtcaaagg

SEQ ID NO: 5094658 - DNA, 25 bp, Homo sapien
gaatctgtaccccaataaaatgact

SEQ ID NO: 5094659 - DNA, 25 bp, Homo sapien
tgaagagagcttttaagggttccat

SEQ ID NO: 5094660 - DNA, 25 bp, Homo sapien
taattctcggtggtagtctggctgt

SEQ ID NO: 5094661 - DNA, 25 bp, Homo sapien
tttccaaagcgaaaagatgctcatc

SEQ ID NO: 5094662 - DNA, 25 bp, Homo sapien
gcttcttctggcacaaggttcctaa

SEQ ID NO: 5094663 - DNA, 25 bp, Homo sapien
tggaccagctgcattaaaaatttgt

SEQ ID NO: 5094664 - DNA, 25 bp, Homo sapien
ggtgcaggaccaagataatcaggat

SEQ ID NO: 5094665 - DNA, 25 bp, Homo sapien
tatgcaattgaggttctgtttccct

SEQ ID NO: 5094666 - DNA, 25 bp, Homo sapien
gcaattgaggttctgtttcccttct

SEQ ID NO: 5094667 - DNA, 25 bp, Homo sapien
tgcaattgaggttctgtttcccttc

SEQ ID NO: 5094668 - DNA, 25 bp, Homo sapien
caattgaggttctgtttcccttcta

SEQ ID NO: 5094669 - DNA, 25 bp, Homo sapien
cacttctagtgagtaagtgttcaat

SEQ ID NO: 5094670 - DNA, 25 bp, Homo sapien
gcactgaagttaattctctgaagac

SEQ ID NO: 5094671 - DNA, 25 bp, Homo sapien
caagactgaactgagtccttcactg

SEQ ID NO: 5094672 - DNA, 25 bp, Homo sapien
aatatgtgtttcaggacatttccag

SEQ ID NO: 5094673 - DNA, 25 bp, Homo sapien
ttggctaaaaactcaaaagatttca

SEQ ID NO: 5094674 - DNA, 25 bp, Homo sapien
ggtacagtacattataattccaagg

SEQ ID NO: 5094675 - DNA, 25 bp, Homo sapien
aaaccatggttacagaattgtatag

SEQ ID NO: 5094676 - DNA, 25 bp, Homo sapien
cacaattaaggctgaaatactgttc

SEQ ID NO: 5094677 - DNA, 25 bp, Homo sapien
agtgatcatgatttgtataatgtaa

SEQ ID NO: 5094678 - DNA, 25 bp, Homo sapien
tgccattaatttgtagtatcagccc

SEQ ID NO: 5094679 - DNA, 25 bp, Homo sapien
tcagttttggtataagattaataca

SEQ ID NO: 5094680 - DNA, 25 bp, Homo sapien
cattatatgtgccattaatttgtag

SEQ ID NO: 5094681 - DNA, 25 bp, Homo sapien
aaactaaattttcattatatgtgcc

SEQ ID NO: 5094682 - DNA, 25 bp, Homo sapien
aattagccggaagtcttggcaggct

SEQ ID NO: 5094683 - DNA, 25 bp, Homo sapien
cattcccggaaatagctctgcttct

SEQ ID NO: 5094684 - DNA, 25 bp, Homo sapien
gaatttctttgaggataacacttat

SEQ ID NO: 5094685 - DNA, 25 bp, Homo sapien
gcattgttctcatgacatgaatttc

SEQ ID NO: 5094686 - DNA, 25 bp, Homo sapien
gaatctgtgttcaatagagctgatg

SEQ ID NO: 5094687 - DNA, 25 bp, Homo sapien
gcactagtcttaagtcatgaaggaa

SEQ ID NO: 5094688 - DNA, 25 bp, Homo sapien
aatttctagtattggtaagtgctgc

SEQ ID NO: 5094689 - DNA, 25 bp, Homo sapien
gaggtcctgttttagcatttagggc

SEQ ID NO: 5094690 - DNA, 25 bp, Homo sapien
gcttctgactaacgcagggcagttt

SEQ ID NO: 5094691 - DNA, 25 bp, Homo sapien
cgcagggcagtttgttcagcgactg

SEQ ID NO: 5094692 - DNA, 25 bp, Homo sapien
ggcagtttgttcagcgactgcaact

SEQ ID NO: 5094693 - DNA, 25 bp, Homo sapien
ctcgttacttaacagcttctgacta

SEQ ID NO: 5094694 - DNA, 25 bp, Homo sapien
ttgaggcttatctccatctcttctg

SEQ ID NO: 5094695 - DNA, 25 bp, Homo sapien
ttctccgcatttggcatttgtacac

SEQ ID NO: 5094696 - DNA, 25 bp, Homo sapien
tttctccgcatttggcatttgtaca

SEQ ID NO: 5094697 - DNA, 25 bp, Homo sapien
ttttcccgcttgaggcttatctcca

SEQ ID NO: 5094698 - DNA, 25 bp, Homo sapien
catttcggtgtagaagtggcagcac

SEQ ID NO: 5094699 - DNA, 25 bp, Homo sapien
ggcagaggtttgacccacacggagt

SEQ ID NO: 5094700 - DNA, 25 bp, Homo sapien
agaaatggcggtgttcctgactgac

SEQ ID NO: 5094701 - DNA, 25 bp, Homo sapien
tctcgttttcggacggctgcagcat

SEQ ID NO: 5094702 - DNA, 25 bp, Homo sapien
tataaagcgcccgggtatcaccggc

SEQ ID NO: 5094703 - DNA, 25 bp, Homo sapien
cgtctccttccggagagcccggcaa

SEQ ID NO: 5094704 - DNA, 25 bp, Homo sapien
aggaggcggcgggactataaagcgc

SEQ ID NO: 5094705 - DNA, 25 bp, Homo sapien
caaccgccgccacgtctccttccgg

SEQ ID NO: 5094706 - DNA, 25 bp, Homo sapien
ccgccgccgctttctccagccaccg

SEQ ID NO: 5094707 - DNA, 25 bp, Homo sapien
cgccgctttctccagccaccgccac

SEQ ID NO: 5094708 - DNA, 25 bp, Homo sapien
cctccgccgccgctttctccagcca

SEQ ID NO: 5094709 - DNA, 25 bp, Homo sapien
ccgctttctccagccaccgccacaa

SEQ ID NO: 5094710 - DNA, 25 bp, Homo sapien
agagagaactcggtgccgggccagt

SEQ ID NO: 5094711 - DNA, 25 bp, Homo sapien
tcatcgctgagttgaggaagggctc

SEQ ID NO: 5094712 - DNA, 25 bp, Homo sapien
tgccgggccagttgactcggaaagg

SEQ ID NO: 5094713 - DNA, 25 bp, Homo sapien
gccgcagaggaccagtaacaccggc

SEQ ID NO: 5094714 - DNA, 25 bp, Homo sapien
gggacgcatccacataacgtgagaa

SEQ ID NO: 5094715 - DNA, 25 bp, Homo sapien
gaacgctgcataaaagcagctttgg

SEQ ID NO: 5094716 - DNA, 25 bp, Homo sapien
ggaagaggccgaacccttagtgtca

SEQ ID NO: 5094717 - DNA, 25 bp, Homo sapien
cataacgtgagaacgaacgaatgaa

SEQ ID NO: 5094718 - DNA, 25 bp, Homo sapien
ccagtattctgggaggctcaggcac

SEQ ID NO: 5094719 - DNA, 25 bp, Homo sapien
tattctgggaggctcaggcacgagg

SEQ ID NO: 5094720 - DNA, 25 bp, Homo sapien
cccagtattctgggaggctcaggca

SEQ ID NO: 5094721 - DNA, 25 bp, Homo sapien
agtattctgggaggctcaggcacga

SEQ ID NO: 5094722 - DNA, 25 bp, Homo sapien
ttctttatataaaactccagttgtg

SEQ ID NO: 5094723 - DNA, 25 bp, Homo sapien
gatgacataattatcttctttatat

SEQ ID NO: 5094724 - DNA, 25 bp, Homo sapien
ctttatataaaactccagttgtggg

SEQ ID NO: 5094725 - DNA, 25 bp, Homo sapien
tcttctttatataaaactccagttg

SEQ ID NO: 5094726 - DNA, 25 bp, Homo sapien
gtcacaaggggaagtatgcatttat

SEQ ID NO: 5094727 - DNA, 25 bp, Homo sapien
tcacaaggggaagtatgcatttata

SEQ ID NO: 5094728 - DNA, 25 bp, Homo sapien
cattcaaaacgttaataattggttg

SEQ ID NO: 5094729 - DNA, 25 bp, Homo sapien
gggcatgggctaagataatgagaaa

SEQ ID NO: 5094730 - DNA, 25 bp, Homo sapien
gcatggggtacctacagacttattt

SEQ ID NO: 5094731 - DNA, 25 bp, Homo sapien
aagcaagtgtggagttagattttca

SEQ ID NO: 5094732 - DNA, 25 bp, Homo sapien
aagaattggagtttaatacttacag

SEQ ID NO: 5094733 - DNA, 25 bp, Homo sapien
cctacggtacgccattgctttcaaa

SEQ ID NO: 5094734 - DNA, 25 bp, Homo sapien
ttctagaatttcacccaactttgct

SEQ ID NO: 5094735 - DNA, 25 bp, Homo sapien
tgctgtttggatattaactcattac

SEQ ID NO: 5094736 - DNA, 25 bp, Homo sapien
acaactgctttgtttaaatagtggc

SEQ ID NO: 5094737 - DNA, 25 bp, Homo sapien
ggctccaaaagctctcttggattag

SEQ ID NO: 5094738 - DNA, 25 bp, Homo sapien
ttaaatagtggctccaaaagctctc

SEQ ID NO: 5094739 - DNA, 25 bp, Homo sapien
ctgctttgtttaaatagtggctcca

SEQ ID NO: 5094740 - DNA, 25 bp, Homo sapien
cttcgtaagtccaataagactcaat

SEQ ID NO: 5094741 - DNA, 25 bp, Homo sapien
catacttcgtaagtccaataagact

SEQ ID NO: 5094742 - DNA, 25 bp, Homo sapien
gacatacttcgtaagtccaataaga

SEQ ID NO: 5094743 - DNA, 25 bp, Homo sapien
tacttcgtaagtccaataagactca

SEQ ID NO: 5094744 - DNA, 25 bp, Homo sapien
ctttctcttcatggtactgccgaat

SEQ ID NO: 5094745 - DNA, 25 bp, Homo sapien
tttctcttcatggtactgccgaatg

SEQ ID NO: 5094746 - DNA, 25 bp, Homo sapien
ttctcttcatggtactgccgaatgt

SEQ ID NO: 5094747 - DNA, 25 bp, Homo sapien
tcccaaggtagtactcgtgaatatt

SEQ ID NO: 5094748 - DNA, 25 bp, Homo sapien
ggccaacatattcccaaggtagtac

SEQ ID NO: 5094749 - DNA, 25 bp, Homo sapien
catattcccaaggtagtactcgtga

SEQ ID NO: 5094750 - DNA, 25 bp, Homo sapien
caacatattcccaaggtagtactcg

SEQ ID NO: 5094751 - DNA, 25 bp, Homo sapien
ctcatttgatttttccttttcttct

SEQ ID NO: 5094752 - DNA, 25 bp, Homo sapien
atttgatttttccttttcttctgct

SEQ ID NO: 5094753 - DNA, 25 bp, Homo sapien
catttgatttttccttttcttctgc

SEQ ID NO: 5094754 - DNA, 25 bp, Homo sapien
tcatttgatttttccttttcttctg

SEQ ID NO: 5094755 - DNA, 25 bp, Homo sapien
atagggttgtatagtaaaacacact

SEQ ID NO: 5094756 - DNA, 25 bp, Homo sapien
tagggttgtatagtaaaacacacta

SEQ ID NO: 5094757 - DNA, 25 bp, Homo sapien
agggttgtatagtaaaacacactat

SEQ ID NO: 5094758 - DNA, 25 bp, Homo sapien
tctaaactctcggtaaatggctata

SEQ ID NO: 5094759 - DNA, 25 bp, Homo sapien
aactctcggtaaatggctatattag

SEQ ID NO: 5094760 - DNA, 25 bp, Homo sapien
tcttctctaaactctcggtaaatgg

SEQ ID NO: 5094761 - DNA, 25 bp, Homo sapien
cggtaaatggctatattagagttta

SEQ ID NO: 5094762 - DNA, 25 bp, Homo sapien
tgggccggttctgtttcaaactaca

SEQ ID NO: 5094763 - DNA, 25 bp, Homo sapien
cattcccacaggatagtatggtgtc

SEQ ID NO: 5094764 - DNA, 25 bp, Homo sapien
taggatgactgcacaagagtggtgt

SEQ ID NO: 5094765 - DNA, 25 bp, Homo sapien
tcacagtacttgatctgggccggtt

SEQ ID NO: 5094766 - DNA, 25 bp, Homo sapien
aggggcttaaatggagatcctggca

SEQ ID NO: 5094767 - DNA, 25 bp, Homo sapien
cttaaatggagatcctggcagtgat

SEQ ID NO: 5094768 - DNA, 25 bp, Homo sapien
aaatatgtcattcacaggagatgct

SEQ ID NO: 5094769 - DNA, 25 bp, Homo sapien
gggcttaaatggagatcctggcagt

SEQ ID NO: 5094770 - DNA, 25 bp, Homo sapien
atgtatatatggctatgcccagtag

SEQ ID NO: 5094771 - DNA, 25 bp, Homo sapien
tgcccagtaggcagatgaaaatgga

SEQ ID NO: 5094772 - DNA, 25 bp, Homo sapien
gaaggcaagaaaagggtcagtatga

SEQ ID NO: 5094773 - DNA, 25 bp, Homo sapien
tggtcaattgggtagaacacaggag

SEQ ID NO: 5094774 - DNA, 25 bp, Homo sapien
catgcacaaagagtccagtaatatt

SEQ ID NO: 5094775 - DNA, 25 bp, Homo sapien
tttcctcctatcagaatgacagtgt

SEQ ID NO: 5094776 - DNA, 25 bp, Homo sapien
ccttgaagagtaacgaaagctggga

SEQ ID NO: 5094777 - DNA, 25 bp, Homo sapien
gacagtgttggtcacaacatgcaca

SEQ ID NO: 5094778 - DNA, 25 bp, Homo sapien
agtgagtgcaccgattataaatgaa

SEQ ID NO: 5094779 - DNA, 25 bp, Homo sapien
gcagttaccgttaaccagctatggt

SEQ ID NO: 5094780 - DNA, 25 bp, Homo sapien
aatatatggtggatactatgtcccc

SEQ ID NO: 5094781 - DNA, 25 bp, Homo sapien
tacttcagcttgtatgagtcactgg

SEQ ID NO: 5094782 - DNA, 25 bp, Homo sapien
tggctgagagccaatagcaatcgac

SEQ ID NO: 5094783 - DNA, 25 bp, Homo sapien
caatttggatatgtgggttgtccca

SEQ ID NO: 5094784 - DNA, 25 bp, Homo sapien
cacgaaagcagtaagaaccactaag

SEQ ID NO: 5094785 - DNA, 25 bp, Homo sapien
tgtcccaacagtgagcactggctga

SEQ ID NO: 5094786 - DNA, 25 bp, Homo sapien
catgtttgccatagcagaattcata

SEQ ID NO: 5094787 - DNA, 25 bp, Homo sapien
gatgtacatgtttgccatagcagaa

SEQ ID NO: 5094788 - DNA, 25 bp, Homo sapien
gtacatgtttgccatagcagaattc

SEQ ID NO: 5094789 - DNA, 25 bp, Homo sapien
tacatgtttgccatagcagaattca

SEQ ID NO: 5094790 - DNA, 25 bp, Homo sapien
ccatctagtggtagaatgatatata

SEQ ID NO: 5094791 - DNA, 25 bp, Homo sapien
accatctagtggtagaatgatatat

SEQ ID NO: 5094792 - DNA, 25 bp, Homo sapien
aaaccatctagtggtagaatgatat

SEQ ID NO: 5094793 - DNA, 25 bp, Homo sapien
ttaaaccatctagtggtagaatgat

SEQ ID NO: 5094794 - DNA, 25 bp, Homo sapien
acatgtagaaactactctactaaaa

SEQ ID NO: 5094795 - DNA, 25 bp, Homo sapien
tagtgtatgccagacaaccatgctg

SEQ ID NO: 5094796 - DNA, 25 bp, Homo sapien
gctgggcactaatagatatctggtt

SEQ ID NO: 5094797 - DNA, 25 bp, Homo sapien
tgccagacaaccatgctgggcacta

SEQ ID NO: 5094798 - DNA, 25 bp, Homo sapien
ggttccatgtcccgacaaccacaga

SEQ ID NO: 5094799 - DNA, 25 bp, Homo sapien
tgtctgggtaccatcgtcttgaaga

SEQ ID NO: 5094800 - DNA, 25 bp, Homo sapien
gctctagcagtattcttcttagccc

SEQ ID NO: 5094801 - DNA, 25 bp, Homo sapien
tcttgaagatgataagctctagcag

SEQ ID NO: 5094802 - DNA, 25 bp, Homo sapien
tgttttgacaaggtatactcatata

SEQ ID NO: 5094803 - DNA, 25 bp, Homo sapien
tggtgttttgacaaggtatactcat

SEQ ID NO: 5094804 - DNA, 25 bp, Homo sapien
ttttgacaaggtatactcatatatc

SEQ ID NO: 5094805 - DNA, 25 bp, Homo sapien
ggtgttttgacaaggtatactcata

SEQ ID NO: 5094806 - DNA, 25 bp, Homo sapien
cagttatatcacaaatatctccatt

SEQ ID NO: 5094807 - DNA, 25 bp, Homo sapien
atatctccatttccataaaaatgtg

SEQ ID NO: 5094808 - DNA, 25 bp, Homo sapien
ctgtcttggtttgtcagttatatca

SEQ ID NO: 5094809 - DNA, 25 bp, Homo sapien
ccatttccataaaaatgtgacacca

SEQ ID NO: 5094810 - DNA, 25 bp, Homo sapien
agtaacagcatgaggtgaatctgat

SEQ ID NO: 5094811 - DNA, 25 bp, Homo sapien
aacagcatgaggtgaatctgattct

SEQ ID NO: 5094812 - DNA, 25 bp, Homo sapien
ctagcatatatacagtaacagcatg

SEQ ID NO: 5094813 - DNA, 25 bp, Homo sapien
caggagtgaggctctagcatatata

SEQ ID NO: 5094814 - DNA, 25 bp, Homo sapien
tcatctgctgtatctaagattttac

SEQ ID NO: 5094815 - DNA, 25 bp, Homo sapien
cagaaattatcatgactttcaatga

SEQ ID NO: 5094816 - DNA, 25 bp, Homo sapien
ggacagaaattatcatgactttcaa

SEQ ID NO: 5094817 - DNA, 25 bp, Homo sapien
gggacagaaattatcatgactttca

SEQ ID NO: 5094818 - DNA, 25 bp, Homo sapien
gtgggacagaaattatcatgacttt

SEQ ID NO: 5094819 - DNA, 25 bp, Homo sapien
aaaaaagcgagacaaatgtctgcct

SEQ ID NO: 5094820 - DNA, 25 bp, Homo sapien
tatcaataacctcttatatacacat

SEQ ID NO: 5094821 - DNA, 25 bp, Homo sapien
tgtctgcctcagaagtttatcaata

SEQ ID NO: 5094822 - DNA, 25 bp, Homo sapien
ctttagaagaggtccaatggctgag

SEQ ID NO: 5094823 - DNA, 25 bp, Homo sapien
tagtttaactacttgcagagagcag

SEQ ID NO: 5094824 - DNA, 25 bp, Homo sapien
gattaacaagggtgaggacaactcc

SEQ ID NO: 5094825 - DNA, 25 bp, Homo sapien
caagtacaagggatagacagcacag

SEQ ID NO: 5094826 - DNA, 25 bp, Homo sapien
tgagtctcagaagcatcaccaactg

SEQ ID NO: 5094827 - DNA, 25 bp, Homo sapien
ttcactttaaaataaatattgtgct

SEQ ID NO: 5094828 - DNA, 25 bp, Homo sapien
attcactttaaaataaatattgtgc

SEQ ID NO: 5094829 - DNA, 25 bp, Homo sapien
tattcactttaaaataaatattgtg

SEQ ID NO: 5094830 - DNA, 25 bp, Homo sapien
ccagaggaagcctagaaggtctgca

SEQ ID NO: 5094831 - DNA, 25 bp, Homo sapien
taggttcccgaacctagtgctggga

SEQ ID NO: 5094832 - DNA, 25 bp, Homo sapien
ggttggtcaaaagtactagatgccc

SEQ ID NO: 5094833 - DNA, 25 bp, Homo sapien
gatctgatgagcttctaggttcccg

SEQ ID NO: 5094834 - DNA, 25 bp, Homo sapien
ggccgagaagcgatatggcatacat

SEQ ID NO: 5094835 - DNA, 25 bp, Homo sapien
catgatctggatctagataattggc

SEQ ID NO: 5094836 - DNA, 25 bp, Homo sapien
ggcattgtgcttgcattgtttacca

SEQ ID NO: 5094837 - DNA, 25 bp, Homo sapien
gtgaagcaaaagcagtatggcactc

SEQ ID NO: 5094838 - DNA, 25 bp, Homo sapien
gaattacactttgcgaagaggccat

SEQ ID NO: 5094839 - DNA, 25 bp, Homo sapien
gaatgctttcagttcatggagcggg

SEQ ID NO: 5094840 - DNA, 25 bp, Homo sapien
tgtgagcaatcagtgcaaggcagca

SEQ ID NO: 5094841 - DNA, 25 bp, Homo sapien
ggaagagttcagagtgcctcagaat

SEQ ID NO: 5094842 - DNA, 25 bp, Homo sapien
gctgcaccggcccaaatgcggtgaa

SEQ ID NO: 5094843 - DNA, 25 bp, Homo sapien
accggcccaaatgcggtgaagggca

SEQ ID NO: 5094844 - DNA, 25 bp, Homo sapien
agcatgtgctcccacgtgcaccagt

SEQ ID NO: 5094845 - DNA, 25 bp, Homo sapien
ttagcagatgaccagagcatgtgct

SEQ ID NO: 5094846 - DNA, 25 bp, Homo sapien
cttgctattgaggtgtgtgaattcc

SEQ ID NO: 5094847 - DNA, 25 bp, Homo sapien
tatatggagtgagataaaggcccag

SEQ ID NO: 5094848 - DNA, 25 bp, Homo sapien
tgttttgttggtctacagatctgtt

SEQ ID NO: 5094849 - DNA, 25 bp, Homo sapien
tgtttttatgtcaatagcatgctgc

SEQ ID NO: 5094850 - DNA, 25 bp, Homo sapien
tatgagttaatctttttcagactcc

SEQ ID NO: 5094851 - DNA, 25 bp, Homo sapien
tttgtattctttgatcagcatcccc

SEQ ID NO: 5094852 - DNA, 25 bp, Homo sapien
tctgtggtgttgcaaataataggat

SEQ ID NO: 5094853 - DNA, 25 bp, Homo sapien
tgtaagtggtatcaggaggtatttg

SEQ ID NO: 5094854 - DNA, 25 bp, Homo sapien
tggcctattcattgatatttaccat

SEQ ID NO: 5094855 - DNA, 25 bp, Homo sapien
tcacacttggcctattcattgatat

SEQ ID NO: 5094856 - DNA, 25 bp, Homo sapien
agctggaactagcagcacaggccac

SEQ ID NO: 5094857 - DNA, 25 bp, Homo sapien
cattacagttataatgtggtcaatt

SEQ ID NO: 5094858 - DNA, 25 bp, Homo sapien
aaaggagatgcagagttctaatctg

SEQ ID NO: 5094859 - DNA, 25 bp, Homo sapien
agaggttcaccttggtagtcaacat

SEQ ID NO: 5094860 - DNA, 25 bp, Homo sapien
cacaaaagtatactcaaaggagatg

SEQ ID NO: 5094861 - DNA, 25 bp, Homo sapien
cagagttctaatctgttctgtccac

SEQ ID NO: 5094862 - DNA, 25 bp, Homo sapien
agtctccaggaaagattgcaccata

SEQ ID NO: 5094863 - DNA, 25 bp, Homo sapien
tctacagaatggttagatagggctc

SEQ ID NO: 5094864 - DNA, 25 bp, Homo sapien
gccggaccagccataaatgctacta

SEQ ID NO: 5094865 - DNA, 25 bp, Homo sapien
tggctgaacaacaagacactgctat

SEQ ID NO: 5094866 - DNA, 25 bp, Homo sapien
ctaagcaggtgcatatgaggtattg

SEQ ID NO: 5094867 - DNA, 25 bp, Homo sapien
gatgatttgactggcatgaggccca

SEQ ID NO: 5094868 - DNA, 25 bp, Homo sapien
tttcccaagatcgtacaaagaattg

SEQ ID NO: 5094869 - DNA, 25 bp, Homo sapien
tatttaccccagtgtgccaaacagc

SEQ ID NO: 5094870 - DNA, 25 bp, Homo sapien
tacaggcatgagaaaccacatccag

SEQ ID NO: 5094871 - DNA, 25 bp, Homo sapien
caggcatgagaaaccacatccagct

SEQ ID NO: 5094872 - DNA, 25 bp, Homo sapien
ttacaggcatgagaaaccacatcca

SEQ ID NO: 5094873 - DNA, 25 bp, Homo sapien
acaggcatgagaaaccacatccagc

SEQ ID NO: 5094874 - DNA, 25 bp, Homo sapien
atctcagatcgctgcaacctccgct

SEQ ID NO: 5094875 - DNA, 25 bp, Homo sapien
aattcctggcctcaagtaatccacc

SEQ ID NO: 5094876 - DNA, 25 bp, Homo sapien
tcctggcctcaagtaatccacccac

SEQ ID NO: 5094877 - DNA, 25 bp, Homo sapien
tctcagatcgctgcaacctccgctt

SEQ ID NO: 5094878 - DNA, 25 bp, Homo sapien
tattctaacttgagatcagtggcgg

SEQ ID NO: 5094879 - DNA, 25 bp, Homo sapien
tcagtggcggatcaaaacctacaag

SEQ ID NO: 5094880 - DNA, 25 bp, Homo sapien
aatttgtggaccaggcttgtggccc

SEQ ID NO: 5094881 - DNA, 25 bp, Homo sapien
tatattctcggaacagtgcagggct

SEQ ID NO: 5094882 - DNA, 25 bp, Homo sapien
cgtaatccctgtataaagtagtgcc

SEQ ID NO: 5094883 - DNA, 25 bp, Homo sapien
gcagtggtcctggtacagtatttaa

SEQ ID NO: 5094884 - DNA, 25 bp, Homo sapien
taagtgtcggcatacacaggcgtaa

SEQ ID NO: 5094885 - DNA, 25 bp, Homo sapien
gaatacagacctaagcacagcagtg

SEQ ID NO: 5094886 - DNA, 25 bp, Homo sapien
tgaacctaaccaatgacctgatgga

SEQ ID NO: 5094887 - DNA, 25 bp, Homo sapien
caacttgtccggaagtgtttccaga

SEQ ID NO: 5094888 - DNA, 25 bp, Homo sapien
cagtatgatcatggcatccaagacc

SEQ ID NO: 5094889 - DNA, 25 bp, Homo sapien
gatggattgctcgaccaagacacag

SEQ ID NO: 5094890 - DNA, 25 bp, Homo sapien
taagaaaatatactgcaggccgggc

SEQ ID NO: 5094891 - DNA, 25 bp, Homo sapien
tactaatcccaatttttgtaatcta

SEQ ID NO: 5094892 - DNA, 25 bp, Homo sapien
gagaatatgaaagcaatctagtcag

SEQ ID NO: 5094893 - DNA, 25 bp, Homo sapien
acaaattaagaatatagcatagtac

SEQ ID NO: 5094894 - DNA, 25 bp, Homo sapien
taattatagacatgtaccctggagt

SEQ ID NO: 5094895 - DNA, 25 bp, Homo sapien
taaaatatctcagaagtagaccctg

SEQ ID NO: 5094896 - DNA, 25 bp, Homo sapien
gtcactggaaaagagcataaatcag

SEQ ID NO: 5094897 - DNA, 25 bp, Homo sapien
atagtatgtttttagctgagaaggc

SEQ ID NO: 5094898 - DNA, 25 bp, Homo sapien
tcacagaaccataggacctgggcaa

SEQ ID NO: 5094899 - DNA, 25 bp, Homo sapien
ggtcatctcctttgttgtctgaaca

SEQ ID NO: 5094900 - DNA, 25 bp, Homo sapien
gccgtccccaaagtggccatttcag

SEQ ID NO: 5094901 - DNA, 25 bp, Homo sapien
gatcgcgtacttcccaaggtaataa

SEQ ID NO: 5094902 - DNA, 25 bp, Homo sapien
gctacatcgaggtatgatcattcca

SEQ ID NO: 5094903 - DNA, 25 bp, Homo sapien
gtttcgccatgtgaccagcttgatc

SEQ ID NO: 5094904 - DNA, 25 bp, Homo sapien
ttgagctcagaagcctaaggctaca

SEQ ID NO: 5094905 - DNA, 25 bp, Homo sapien
gatactttttaaagcgccatgcaaa

SEQ ID NO: 5094906 - DNA, 25 bp, Homo sapien
cagaggtaggcttttatatatcata

SEQ ID NO: 5094907 - DNA, 25 bp, Homo sapien
gaaattgggtcagtctgtatttgaa

SEQ ID NO: 5094908 - DNA, 25 bp, Homo sapien
ctatgtacagaggtaggcttttata

SEQ ID NO: 5094909 - DNA, 25 bp, Homo sapien
taaagaatagccagtaagaaattgg

SEQ ID NO: 5094910 - DNA, 25 bp, Homo sapien
tagctccgccatttaaggtgaaaaa

SEQ ID NO: 5094911 - DNA, 25 bp, Homo sapien
aattgaatccgttgttagctccgcc

SEQ ID NO: 5094912 - DNA, 25 bp, Homo sapien
caggcggatcttttgagtgcaggag

SEQ ID NO: 5094913 - DNA, 25 bp, Homo sapien
tcgagtgaatagctaaattgaatcc

SEQ ID NO: 5094914 - DNA, 25 bp, Homo sapien
tatttgaaacaagagtagcaggtcg

SEQ ID NO: 5094915 - DNA, 25 bp, Homo sapien
tagcaggtcgcatggtggcagacat

SEQ ID NO: 5094916 - DNA, 25 bp, Homo sapien
catatatttgaaacaagagtagcag

SEQ ID NO: 5094917 - DNA, 25 bp, Homo sapien
aacaagagtagcaggtcgcatggtg

SEQ ID NO: 5094918 - DNA, 25 bp, Homo sapien
aaatcttagacacttagttttacat

SEQ ID NO: 5094919 - DNA, 25 bp, Homo sapien
ccatggctggccaaagattttattt

SEQ ID NO: 5094920 - DNA, 25 bp, Homo sapien
agttttacatctccaagaaagcttc

SEQ ID NO: 5094921 - DNA, 25 bp, Homo sapien
ttttacatctccaagaaagcttctg

SEQ ID NO: 5094922 - DNA, 25 bp, Homo sapien
aaaacactcgtgaaaagctgccgac

SEQ ID NO: 5094923 - DNA, 25 bp, Homo sapien
taaagcctcttgttgtttctgtggg

SEQ ID NO: 5094924 - DNA, 25 bp, Homo sapien
gctgccgaccgtaagtagcttctca

SEQ ID NO: 5094925 - DNA, 25 bp, Homo sapien
taggtagttaatccttgcagttccg

SEQ ID NO: 5094926 - DNA, 25 bp, Homo sapien
cttgctgcttcataaccaagcgtcc

SEQ ID NO: 5094927 - DNA, 25 bp, Homo sapien
tgccttaagggtctacctttgcaaa

SEQ ID NO: 5094928 - DNA, 25 bp, Homo sapien
gatctcagggacctttgaactgtgt

SEQ ID NO: 5094929 - DNA, 25 bp, Homo sapien
ggtaaggcggtttcttcagtgatac

SEQ ID NO: 5094930 - DNA, 25 bp, Homo sapien
ctggagaactctagcaccatctcgg

SEQ ID NO: 5094931 - DNA, 25 bp, Homo sapien
tggagaactctagcaccatctcggc

SEQ ID NO: 5094932 - DNA, 25 bp, Homo sapien
catttgattaatacactgtagggct

SEQ ID NO: 5094933 - DNA, 25 bp, Homo sapien
gcttacaggaaagtcaaaccagagt

SEQ ID NO: 5094934 - DNA, 25 bp, Homo sapien
gattggtagtctgcactctagcact

SEQ ID NO: 5094935 - DNA, 25 bp, Homo sapien
gttcaatcgtgactgtttaccaggg

SEQ ID NO: 5094936 - DNA, 25 bp, Homo sapien
ttttagcctccctggcccacattgg

SEQ ID NO: 5094937 - DNA, 25 bp, Homo sapien
cattatagtctaaagcatgggtgtc

SEQ ID NO: 5094938 - DNA, 25 bp, Homo sapien
acaatcctgggccatcggttggaca

SEQ ID NO: 5094939 - DNA, 25 bp, Homo sapien
gaataagccacactttaacaagcca

SEQ ID NO: 5094940 - DNA, 25 bp, Homo sapien
agaaagtgaaaaaactgaaaatgtg

SEQ ID NO: 5094941 - DNA, 25 bp, Homo sapien
ctgaaaatgtgttttgaaaaacaca

SEQ ID NO: 5094942 - DNA, 25 bp, Homo sapien
caccaggcccagcctatttactttt

SEQ ID NO: 5094943 - DNA, 25 bp, Homo sapien
caggcccagcctatttacttttaga

SEQ ID NO: 5094944 - DNA, 25 bp, Homo sapien
aaggcgcagcccgttgggctccagc

SEQ ID NO: 5094945 - DNA, 25 bp, Homo sapien
tcgtgtttccggtgaggcagcctcg

SEQ ID NO: 5094946 - DNA, 25 bp, Homo sapien
gacaatagcttggaattcggcctcg

SEQ ID NO: 5094947 - DNA, 25 bp, Homo sapien
ctgtcgtggcgactgggactccagt

SEQ ID NO: 5094948 - DNA, 25 bp, Homo sapien
tgctagactaagtccttgggagggc

SEQ ID NO: 5094949 - DNA, 25 bp, Homo sapien
ccttaggattgccttctcagtctca

SEQ ID NO: 5094950 - DNA, 25 bp, Homo sapien
gtttgtctctaggataaagctctga

SEQ ID NO: 5094951 - DNA, 25 bp, Homo sapien
tctctcagctgaaatacgtgtcctc

SEQ ID NO: 5094952 - DNA, 25 bp, Homo sapien
gaggcctgacactcatctctttccg

SEQ ID NO: 5094953 - DNA, 25 bp, Homo sapien
taaggtaggattgttcgcttctcca

SEQ ID NO: 5094954 - DNA, 25 bp, Homo sapien
catttgacctgttagctacctaagg

SEQ ID NO: 5094955 - DNA, 25 bp, Homo sapien
cctcagagatttgtgaagggcccta

SEQ ID NO: 5094956 - DNA, 25 bp, Homo sapien
attgtctcgcgcgtccgtgggaaga

SEQ ID NO: 5094957 - DNA, 25 bp, Homo sapien
tcattgtctcgcgcgtccgtgggaa

SEQ ID NO: 5094958 - DNA, 25 bp, Homo sapien
ctcctcattgtctcgcgcgtccgtg

SEQ ID NO: 5094959 - DNA, 25 bp, Homo sapien
tcctcattgtctcgcgcgtccgtgg

SEQ ID NO: 5094960 - DNA, 25 bp, Homo sapien
ggctggtctcttcgaaatcttaaat

SEQ ID NO: 5094961 - DNA, 25 bp, Homo sapien
gctcaggcgaatcctttcatctttc

SEQ ID NO: 5094962 - DNA, 25 bp, Homo sapien
aacatttctattcttctagatccct

SEQ ID NO: 5094963 - DNA, 25 bp, Homo sapien
gatcccttgctcaggcgaatccttt

SEQ ID NO: 5094964 - DNA, 25 bp, Homo sapien
gcttgctcccgtaaattcttcaact

SEQ ID NO: 5094965 - DNA, 25 bp, Homo sapien
gatgtttgtttctagggagctcatt

SEQ ID NO: 5094966 - DNA, 25 bp, Homo sapien
ggagctcattgtcatctggaactgc

SEQ ID NO: 5094967 - DNA, 25 bp, Homo sapien
gagaccttattttgcttgctcccgt

SEQ ID NO: 5094968 - DNA, 25 bp, Homo sapien
ggatagaagttgaaggctgagacct

SEQ ID NO: 5094969 - DNA, 25 bp, Homo sapien
gttttaatatctacccagggataga

SEQ ID NO: 5094970 - DNA, 25 bp, Homo sapien
atctacccagggatagaagttgaag

SEQ ID NO: 5094971 - DNA, 25 bp, Homo sapien
cccagggatagaagttgaaggctga

SEQ ID NO: 5094972 - DNA, 25 bp, Homo sapien
taatgccttctcgaatccctactga

SEQ ID NO: 5094973 - DNA, 25 bp, Homo sapien
tattattatcaggtatcacgtgctg

SEQ ID NO: 5094974 - DNA, 25 bp, Homo sapien
tcacgtgctgtatgagtgtatatgc

SEQ ID NO: 5094975 - DNA, 25 bp, Homo sapien
acgcatggagctttcatcttctata

SEQ ID NO: 5094976 - DNA, 25 bp, Homo sapien
cacttaatgacggagatatgtttga

SEQ ID NO: 5094977 - DNA, 25 bp, Homo sapien
cagtcagactgattgcaagccaagt

SEQ ID NO: 5094978 - DNA, 25 bp, Homo sapien
ccctttttatgcgtggcaaatggaa

SEQ ID NO: 5094979 - DNA, 25 bp, Homo sapien
tatctctgactggtttctttccgca

SEQ ID NO: 5094980 - DNA, 25 bp, Homo sapien
ccctgtgtacctgcaataaaccttg

SEQ ID NO: 5094981 - DNA, 25 bp, Homo sapien
attggtagattttctgacattgaac

SEQ ID NO: 5094982 - DNA, 25 bp, Homo sapien
tgcaataaaccttgcttggtcccaa

SEQ ID NO: 5094983 - DNA, 25 bp, Homo sapien
atcatggactaataaatgctttttc

SEQ ID NO: 5094984 - DNA, 25 bp, Homo sapien
caaagtttcattgttaggtacagag

SEQ ID NO: 5094985 - DNA, 25 bp, Homo sapien
taacctggaccaatctattcataaa

SEQ ID NO: 5094986 - DNA, 25 bp, Homo sapien
gctgtgtaacctggaccaatctatt

SEQ ID NO: 5094987 - DNA, 25 bp, Homo sapien
gattttgggattgtttattaatgct

SEQ ID NO: 5094988 - DNA, 25 bp, Homo sapien
tgcccaacctagttcttagatctca

SEQ ID NO: 5094989 - DNA, 25 bp, Homo sapien
aaggcagggaaaatcgcatgaaccc

SEQ ID NO: 5094990 - DNA, 25 bp, Homo sapien
taaaccttgacctaaatgtcatgcc

SEQ ID NO: 5094991 - DNA, 25 bp, Homo sapien
ggtggccttcagatggtgttattta

SEQ ID NO: 5094992 - DNA, 25 bp, Homo sapien
atcacaatagtcgatggtgccagca

SEQ ID NO: 5094993 - DNA, 25 bp, Homo sapien
tagatcacaatagtcgatggtgcca

SEQ ID NO: 5094994 - DNA, 25 bp, Homo sapien
agtagatcacaatagtcgatggtgc

SEQ ID NO: 5094995 - DNA, 25 bp, Homo sapien
gatcacaatagtcgatggtgccagc

SEQ ID NO: 5094996 - DNA, 25 bp, Homo sapien
gacataatggccactgtaggcagcc

SEQ ID NO: 5094997 - DNA, 25 bp, Homo sapien
aacattctcaaacaattggctggga

SEQ ID NO: 5094998 - DNA, 25 bp, Homo sapien
agatgtcccgaatctagcaagtggg

SEQ ID NO: 5094999 - DNA, 25 bp, Homo sapien
gctaaatctgggtcacaaggctgtc

SEQ ID NO: 5095000 - DNA, 25 bp, Homo sapien
tcttggtagaggttgaagcatttcc

SEQ ID NO: 5095001 - DNA, 25 bp, Homo sapien
gacagaccatcttacactatcagcc

SEQ ID NO: 5095002 - DNA, 25 bp, Homo sapien
gaagttataatgtaatgccagaggt

SEQ ID NO: 5095003 - DNA, 25 bp, Homo sapien
attaggctgtggaagattggttgac

SEQ ID NO: 5095004 - DNA, 25 bp, Homo sapien
ttacagacatccaccaccaagccca

SEQ ID NO: 5095005 - DNA, 25 bp, Homo sapien
acaatctaggctgactgccatctcc

SEQ ID NO: 5095006 - DNA, 25 bp, Homo sapien
gcacaatctaggctgactgccatct

SEQ ID NO: 5095007 - DNA, 25 bp, Homo sapien
tggcacaatctaggctgactgccat

SEQ ID NO: 5095008 - DNA, 25 bp, Homo sapien
ccgcgtgtggtagttcaggtctgta

SEQ ID NO: 5095009 - DNA, 25 bp, Homo sapien
gctcccgggactgaaagcattctat

SEQ ID NO: 5095010 - DNA, 25 bp, Homo sapien
taataatgtgacgtgtcttttagcc

SEQ ID NO: 5095011 - DNA, 25 bp, Homo sapien
taaatgggatgtgtcagcaacatca

SEQ ID NO: 5095012 - DNA, 25 bp, Homo sapien
aatgttcataggtacagttcaagtt

SEQ ID NO: 5095013 - DNA, 25 bp, Homo sapien
gaaatgttcataggtacagttcaag

SEQ ID NO: 5095014 - DNA, 25 bp, Homo sapien
aaatgttcataggtacagttcaagt

SEQ ID NO: 5095015 - DNA, 25 bp, Homo sapien
tagatcagacgagtaacagaggagc

SEQ ID NO: 5095016 - DNA, 25 bp, Homo sapien
gacggcctcagtgctgtaccaagag

SEQ ID NO: 5095017 - DNA, 25 bp, Homo sapien
cagattctggtgactgacggcctca

SEQ ID NO: 5095018 - DNA, 25 bp, Homo sapien
aacccgcgccagacagagatgatgg

SEQ ID NO: 5095019 - DNA, 25 bp, Homo sapien
gctactcgggaggatgaggcaggag

SEQ ID NO: 5095020 - DNA, 25 bp, Homo sapien
cagctactcgggaggatgaggcagg

SEQ ID NO: 5095021 - DNA, 25 bp, Homo sapien
gcctggtggtgggtacctgtaatct

SEQ ID NO: 5095022 - DNA, 25 bp, Homo sapien
ctcagctactcgggaggatgaggca

SEQ ID NO: 5095023 - DNA, 25 bp, Homo sapien
ttgaactcccgtcctcacatgatct

SEQ ID NO: 5095024 - DNA, 25 bp, Homo sapien
cccgtcctcacatgatctgctcgcc

SEQ ID NO: 5095025 - DNA, 25 bp, Homo sapien
aactcccgtcctcacatgatctgct

SEQ ID NO: 5095026 - DNA, 25 bp, Homo sapien
ctcccgtcctcacatgatctgctcg

SEQ ID NO: 5095027 - DNA, 25 bp, Homo sapien
accctgtcaggggtaagatgtcatg

SEQ ID NO: 5095028 - DNA, 25 bp, Homo sapien
tgtcatgatatctacaacttctcaa

SEQ ID NO: 5095029 - DNA, 25 bp, Homo sapien
aaatattaaatacaacaggtcacca

SEQ ID NO: 5095030 - DNA, 25 bp, Homo sapien
tcaggggtaagatgtcatgatatct

SEQ ID NO: 5095031 - DNA, 25 bp, Homo sapien
ggtagatattctctaggccgtttag

SEQ ID NO: 5095032 - DNA, 25 bp, Homo sapien
ctgggtagatattctctaggccgtt

SEQ ID NO: 5095033 - DNA, 25 bp, Homo sapien
gggtagatattctctaggccgttta

SEQ ID NO: 5095034 - DNA, 25 bp, Homo sapien
tagatattctctaggccgtttagaa

SEQ ID NO: 5095035 - DNA, 25 bp, Homo sapien
cctcacaaagggctgggagtctttt

SEQ ID NO: 5095036 - DNA, 25 bp, Homo sapien
ttggcctcacaaagggctgggagtc

SEQ ID NO: 5095037 - DNA, 25 bp, Homo sapien
tggcctcacaaagggctgggagtct

SEQ ID NO: 5095038 - DNA, 25 bp, Homo sapien
ttcttttattttgggctttctggca

SEQ ID NO: 5095039 - DNA, 25 bp, Homo sapien
aaacatcttagactgcacttacgca

SEQ ID NO: 5095040 - DNA, 25 bp, Homo sapien
taggattatagtcgcctgccacgac

SEQ ID NO: 5095041 - DNA, 25 bp, Homo sapien
gggatagactatcactcctaggtta

SEQ ID NO: 5095042 - DNA, 25 bp, Homo sapien
caccgtgcccagatgagtctaatct

SEQ ID NO: 5095043 - DNA, 25 bp, Homo sapien
taagaaggaaacatctaccattggg

SEQ ID NO: 5095044 - DNA, 25 bp, Homo sapien
tgaaattgtctctaggccgggagcg

SEQ ID NO: 5095045 - DNA, 25 bp, Homo sapien
ccgaaaattataggtagccattcta

SEQ ID NO: 5095046 - DNA, 25 bp, Homo sapien
caaatgggtcaaactgtgatcatgt

SEQ ID NO: 5095047 - DNA, 25 bp, Homo sapien
ctagacattcaaatgccactttatt

SEQ ID NO: 5095048 - DNA, 25 bp, Homo sapien
tagacattcaaatgccactttattc

SEQ ID NO: 5095049 - DNA, 25 bp, Homo sapien
gacattcaaatgccactttattcat

SEQ ID NO: 5095050 - DNA, 25 bp, Homo sapien
agacattcaaatgccactttattca

SEQ ID NO: 5095051 - DNA, 25 bp, Homo sapien
caggatatggtccagaaacagtccc

SEQ ID NO: 5095052 - DNA, 25 bp, Homo sapien
ggccacgcaggaggtaacagagcac

SEQ ID NO: 5095053 - DNA, 25 bp, Homo sapien
aaacagtcccgccaatgtcctgggt

SEQ ID NO: 5095054 - DNA, 25 bp, Homo sapien
tgaagcagtcaaggcatcatccagg

SEQ ID NO: 5095055 - DNA, 25 bp, Homo sapien
taaatgagtgatctagaaatcagag

SEQ ID NO: 5095056 - DNA, 25 bp, Homo sapien
ttaaatgagtgatctagaaatcaga

SEQ ID NO: 5095057 - DNA, 25 bp, Homo sapien
aatgagtgatctagaaatcagagga

SEQ ID NO: 5095058 - DNA, 25 bp, Homo sapien
aaatgagtgatctagaaatcagagg

SEQ ID NO: 5095059 - DNA, 25 bp, Homo sapien
gaagcagtgtccacccagtagcaat

SEQ ID NO: 5095060 - DNA, 25 bp, Homo sapien
gatgtggagccaatctgaaagagct

SEQ ID NO: 5095061 - DNA, 25 bp, Homo sapien
cactagatatcatgctaactgcagc

SEQ ID NO: 5095062 - DNA, 25 bp, Homo sapien
tctagggctggataagggaaaatac

SEQ ID NO: 5095063 - DNA, 25 bp, Homo sapien
gcttgacattaggagttctagaaca

SEQ ID NO: 5095064 - DNA, 25 bp, Homo sapien
tgctgcttcttatgctcttcctgac

SEQ ID NO: 5095065 - DNA, 25 bp, Homo sapien
ctggctgctgcttcttatgctcttc

SEQ ID NO: 5095066 - DNA, 25 bp, Homo sapien
gctgctgcttcttatgctcttcctg

SEQ ID NO: 5095067 - DNA, 25 bp, Homo sapien
tggctgctgcttcttatgctcttcc

SEQ ID NO: 5095068 - DNA, 25 bp, Homo sapien
cttttctctttagcagacatggtct

SEQ ID NO: 5095069 - DNA, 25 bp, Homo sapien
ctttgccatgtcttcacttttctct

SEQ ID NO: 5095070 - DNA, 25 bp, Homo sapien
tttgccatgtcttcacttttctctt

SEQ ID NO: 5095071 - DNA, 25 bp, Homo sapien
ctctttagcagacatggtcttccac

SEQ ID NO: 5095072 - DNA, 25 bp, Homo sapien
gcactgggatcctcaaacttctttt

SEQ ID NO: 5095073 - DNA, 25 bp, Homo sapien
gggtgcactgggatcctcaaacttc

SEQ ID NO: 5095074 - DNA, 25 bp, Homo sapien
ggtgcactgggatcctcaaacttct

SEQ ID NO: 5095075 - DNA, 25 bp, Homo sapien
tcctccttctcctcatcctcttcat

SEQ ID NO: 5095076 - DNA, 25 bp, Homo sapien
ccttctcctcatcctcttcatcttc

SEQ ID NO: 5095077 - DNA, 25 bp, Homo sapien
ttattcagcatcatcatcttcttca

SEQ ID NO: 5095078 - DNA, 25 bp, Homo sapien
cctccttctcctcatcctcttcatc

SEQ ID NO: 5095079 - DNA, 25 bp, Homo sapien
ggaatgagttgtgtacaaggggctt

SEQ ID NO: 5095080 - DNA, 25 bp, Homo sapien
tgaaaggaatgagttgtgtacaagg

SEQ ID NO: 5095081 - DNA, 25 bp, Homo sapien
tttgaaaggaatgagttgtgtacaa

SEQ ID NO: 5095082 - DNA, 25 bp, Homo sapien
aatgagttgtgtacaaggggcttaa

SEQ ID NO: 5095083 - DNA, 25 bp, Homo sapien
gaaagccatgctgtccgggtctcct

SEQ ID NO: 5095084 - DNA, 25 bp, Homo sapien
tataggacagggtgaaagccatgct

SEQ ID NO: 5095085 - DNA, 25 bp, Homo sapien
aagccatgctgtccgggtctcctaa

SEQ ID NO: 5095086 - DNA, 25 bp, Homo sapien
agagcagcaatataggacagggtga

SEQ ID NO: 5095087 - DNA, 25 bp, Homo sapien
tattattcctgacacatgatttagg

SEQ ID NO: 5095088 - DNA, 25 bp, Homo sapien
gataggcttaatatgtctttggcta

SEQ ID NO: 5095089 - DNA, 25 bp, Homo sapien
gaaattcaatctccaccatcacgtc

SEQ ID NO: 5095090 - DNA, 25 bp, Homo sapien
aaatatttacgtaaagccagagaat

SEQ ID NO: 5095091 - DNA, 25 bp, Homo sapien
catggttcttcactcacaattatga

SEQ ID NO: 5095092 - DNA, 25 bp, Homo sapien
ttatgaaagtagttgatgagcaaga

SEQ ID NO: 5095093 - DNA, 25 bp, Homo sapien
tcactcacaattatgacttgaccaa

SEQ ID NO: 5095094 - DNA, 25 bp, Homo sapien
gattttatgaaagtagttgatgagc

SEQ ID NO: 5095095 - DNA, 25 bp, Homo sapien
catgacagtccctattcatatggaa

SEQ ID NO: 5095096 - DNA, 25 bp, Homo sapien
gagagctcattctatggtatacatg

SEQ ID NO: 5095097 - DNA, 25 bp, Homo sapien
aagtctaaaccataatgcacagcag

SEQ ID NO: 5095098 - DNA, 25 bp, Homo sapien
tgtgaccttgcctaaagtgagctaa

SEQ ID NO: 5095099 - DNA, 25 bp, Homo sapien
tgcgtgacagatggcaacccaattc

SEQ ID NO: 5095100 - DNA, 25 bp, Homo sapien
tctgaacaccggtaagcagcacgta

SEQ ID NO: 5095101 - DNA, 25 bp, Homo sapien
tatgtgtaaggagcaaagcccatgc

SEQ ID NO: 5095102 - DNA, 25 bp, Homo sapien
cctgatcagggatagccaagcattg

SEQ ID NO: 5095103 - DNA, 25 bp, Homo sapien
gatcagatgcctacctgtgaccaga

SEQ ID NO: 5095104 - DNA, 25 bp, Homo sapien
ccaacaacagaaattcgaacaggct

SEQ ID NO: 5095105 - DNA, 25 bp, Homo sapien
tgaggcccaggaagtattcaacggg

SEQ ID NO: 5095106 - DNA, 25 bp, Homo sapien
catgagtcgaaagcaatggccatcc

SEQ ID NO: 5095107 - DNA, 25 bp, Homo sapien
tgtttgagtaccttgcatttccata

SEQ ID NO: 5095108 - DNA, 25 bp, Homo sapien
agagatgtgatctcccactgtcacc

SEQ ID NO: 5095109 - DNA, 25 bp, Homo sapien
tttttagagatgtgatctcccactg

SEQ ID NO: 5095110 - DNA, 25 bp, Homo sapien
attttttagagatgtgatctcccac

SEQ ID NO: 5095111 - DNA, 25 bp, Homo sapien
tttagagatgtgatctcccactgtc

SEQ ID NO: 5095112 - DNA, 25 bp, Homo sapien
tgagtccttagagactgaagaaaca

SEQ ID NO: 5095113 - DNA, 25 bp, Homo sapien
agctgagtccttagagactgaagaa

SEQ ID NO: 5095114 - DNA, 25 bp, Homo sapien
taaggagctgagtccttagagactg

SEQ ID NO: 5095115 - DNA, 25 bp, Homo sapien
caaagctcatgtaaggagctgagtc

SEQ ID NO: 5095116 - DNA, 25 bp, Homo sapien
gctgaacattcccatctcgatttag

SEQ ID NO: 5095117 - DNA, 25 bp, Homo sapien
tggtgttgccacaaaggatcacagc

SEQ ID NO: 5095118 - DNA, 25 bp, Homo sapien
cagccatgtgcagcctacggataag

SEQ ID NO: 5095119 - DNA, 25 bp, Homo sapien
gctgcagttgttagggacatttcta

SEQ ID NO: 5095120 - DNA, 25 bp, Homo sapien
ggtccacatgtaggcagactcctcg

SEQ ID NO: 5095121 - DNA, 25 bp, Homo sapien
taaacagaactgaggaggtccacat

SEQ ID NO: 5095122 - DNA, 25 bp, Homo sapien
tcagaattccagtactcatggagca

SEQ ID NO: 5095123 - DNA, 25 bp, Homo sapien
tgaggatatcacagaattcattgtc

SEQ ID NO: 5095124 - DNA, 25 bp, Homo sapien
ttcatcactgggcaagcattacggg

SEQ ID NO: 5095125 - DNA, 25 bp, Homo sapien
gaagcccatacgagcttcctggaag

SEQ ID NO: 5095126 - DNA, 25 bp, Homo sapien
ccatatatggagcaaactgagactt

SEQ ID NO: 5095127 - DNA, 25 bp, Homo sapien
tgtaggcagttgcaacccagtagta

SEQ ID NO: 5095128 - DNA, 25 bp, Homo sapien
tcctacctaggaacttgagttttgc

SEQ ID NO: 5095129 - DNA, 25 bp, Homo sapien
ctaggaacttgagttttgcctgcaa

SEQ ID NO: 5095130 - DNA, 25 bp, Homo sapien
gaccacttctcagtcctacctagga

SEQ ID NO: 5095131 - DNA, 25 bp, Homo sapien
tctcagtcctacctaggaacttgag

SEQ ID NO: 5095132 - DNA, 25 bp, Homo sapien
caaatgtctggcttcagtggttgtg

SEQ ID NO: 5095133 - DNA, 25 bp, Homo sapien
gactcttacagcattactttcctaa

SEQ ID NO: 5095134 - DNA, 25 bp, Homo sapien
gttgctgactaggacaaagccccgg

SEQ ID NO: 5095135 - DNA, 25 bp, Homo sapien
ttcccaatgagggattccctgagca

SEQ ID NO: 5095136 - DNA, 25 bp, Homo sapien
caatagtgtgtgcaaaggctgcttc

SEQ ID NO: 5095137 - DNA, 25 bp, Homo sapien
tatgcagtgtctccaaacatttgac

SEQ ID NO: 5095138 - DNA, 25 bp, Homo sapien
gatctgggtatcctatggcataatg

SEQ ID NO: 5095139 - DNA, 25 bp, Homo sapien
aatgcctagcaaacacgcactagcg

SEQ ID NO: 5095140 - DNA, 25 bp, Homo sapien
tgaggtaggatctgtgtcacagcac

SEQ ID NO: 5095141 - DNA, 25 bp, Homo sapien
ctcctcctccaaaaagttctcccat

SEQ ID NO: 5095142 - DNA, 25 bp, Homo sapien
taggatctgtgtcacagcacaacct

SEQ ID NO: 5095143 - DNA, 25 bp, Homo sapien
gtcacagcacaaccttctctgaaga

SEQ ID NO: 5095144 - DNA, 25 bp, Homo sapien
ggagttagacgccagtccacaaaga

SEQ ID NO: 5095145 - DNA, 25 bp, Homo sapien
agtccacaaagactcccagctgcag

SEQ ID NO: 5095146 - DNA, 25 bp, Homo sapien
ctttccagagaggagttagacgcca

SEQ ID NO: 5095147 - DNA, 25 bp, Homo sapien
cagagaggagttagacgccagtcca

SEQ ID NO: 5095148 - DNA, 25 bp, Homo sapien
accccaggctcagtttgccagttag

SEQ ID NO: 5095149 - DNA, 25 bp, Homo sapien
tatggtcactttaagccacagtctc

SEQ ID NO: 5095150 - DNA, 25 bp, Homo sapien
ttagaatatccagtccaagatgttg

SEQ ID NO: 5095151 - DNA, 25 bp, Homo sapien
aattaataggccaatctatggtcac

SEQ ID NO: 5095152 - DNA, 25 bp, Homo sapien
tataggacattccatgggacaactg

SEQ ID NO: 5095153 - DNA, 25 bp, Homo sapien
caaagaagttgcctcgggagaacaa

SEQ ID NO: 5095154 - DNA, 25 bp, Homo sapien
taacctagtgtattggtgcatgcct

SEQ ID NO: 5095155 - DNA, 25 bp, Homo sapien
cacagtagcagaggttagtgaccaa

SEQ ID NO: 5095156 - DNA, 25 bp, Homo sapien
gaatctgaggacatcgtgttgcaca

SEQ ID NO: 5095157 - DNA, 25 bp, Homo sapien
gagttcaaaagatctacggtatagc

SEQ ID NO: 5095158 - DNA, 25 bp, Homo sapien
caagaaattttagctagacagaaga

SEQ ID NO: 5095159 - DNA, 25 bp, Homo sapien
aattagcttgatttggccattctgc

SEQ ID NO: 5095160 - DNA, 25 bp, Homo sapien
ggctatacagtgaactaaatctgga

SEQ ID NO: 5095161 - DNA, 25 bp, Homo sapien
gcataggagttctaacactgaccct

SEQ ID NO: 5095162 - DNA, 25 bp, Homo sapien
cactgaccctacaaagtggaaagaa

SEQ ID NO: 5095163 - DNA, 25 bp, Homo sapien
gagtatgtgatacacctggaagact

SEQ ID NO: 5095164 - DNA, 25 bp, Homo sapien
gatgatataagcctagacctccttg

SEQ ID NO: 5095165 - DNA, 25 bp, Homo sapien
tagaagaggaatgagggatagcact

SEQ ID NO: 5095166 - DNA, 25 bp, Homo sapien
gctggtctctaacaagtgtctctca

SEQ ID NO: 5095167 - DNA, 25 bp, Homo sapien
caaagatgtctcgttcctctagacc

SEQ ID NO: 5095168 - DNA, 25 bp, Homo sapien
gatctgactggcatctgtattcagt

SEQ ID NO: 5095169 - DNA, 25 bp, Homo sapien
ctgactggcatctgtattcagtgta

SEQ ID NO: 5095170 - DNA, 25 bp, Homo sapien
tctgactggcatctgtattcagtgt

SEQ ID NO: 5095171 - DNA, 25 bp, Homo sapien
aggatctgactggcatctgtattca

SEQ ID NO: 5095172 - DNA, 25 bp, Homo sapien
tacttttaggtgcatgctaaacccc

SEQ ID NO: 5095173 - DNA, 25 bp, Homo sapien
ccatctacccaaggcaaggcagttc

SEQ ID NO: 5095174 - DNA, 25 bp, Homo sapien
aaaaagaacatgtctagcgctctag

SEQ ID NO: 5095175 - DNA, 25 bp, Homo sapien
agtcttcaggaagctagtgccacct

SEQ ID NO: 5095176 - DNA, 25 bp, Homo sapien
gaatccagcagctatagcaacaact

SEQ ID NO: 5095177 - DNA, 25 bp, Homo sapien
tggcagtttccagagcatggcagct

SEQ ID NO: 5095178 - DNA, 25 bp, Homo sapien
cccggagtggcagctttttggatgt

SEQ ID NO: 5095179 - DNA, 25 bp, Homo sapien
tcagtagatcccttgatggcccagt

SEQ ID NO: 5095180 - DNA, 25 bp, Homo sapien
cagccaccagctcagacaaaaagta

SEQ ID NO: 5095181 - DNA, 25 bp, Homo sapien
cagattttgaacagagtgtgcccag

SEQ ID NO: 5095182 - DNA, 25 bp, Homo sapien
tcaggaggcaactaatcacagatgc

SEQ ID NO: 5095183 - DNA, 25 bp, Homo sapien
ggacttcagctggtatcaggtttgc

SEQ ID NO: 5095184 - DNA, 25 bp, Homo sapien
acagcgctccctaccatttaattga

SEQ ID NO: 5095185 - DNA, 25 bp, Homo sapien
taaaagccggatgctgtgcccaaaa

SEQ ID NO: 5095186 - DNA, 25 bp, Homo sapien
cacgcgtcggaagcggcaaatgaga

SEQ ID NO: 5095187 - DNA, 25 bp, Homo sapien
gatcaaggtactctgttctcaaagt

SEQ ID NO: 5095188 - DNA, 25 bp, Homo sapien
ggggcgcagcgactgcggcggctgc

SEQ ID NO: 5095189 - DNA, 25 bp, Homo sapien
acacctcgtagtccacggatttgag

SEQ ID NO: 5095190 - DNA, 25 bp, Homo sapien
agtccacggatttgagtgactgggc

SEQ ID NO: 5095191 - DNA, 25 bp, Homo sapien
ttccgaacacctcgtagtccacgga

SEQ ID NO: 5095192 - DNA, 25 bp, Homo sapien
atttgagtgactgggcggtagacat

SEQ ID NO: 5095193 - DNA, 25 bp, Homo sapien
catggcggagcggaagtcccagcca

SEQ ID NO: 5095194 - DNA, 25 bp, Homo sapien
gcatactttaggtgggaggcgcttc

SEQ ID NO: 5095195 - DNA, 25 bp, Homo sapien
gggcgcatgcgcgtttcgcctccct

SEQ ID NO: 5095196 - DNA, 25 bp, Homo sapien
cagccacaacgggaaaaggcatact

SEQ ID NO: 5095197 - DNA, 25 bp, Homo sapien
agttactgaatctctgtgcacctgt

SEQ ID NO: 5095198 - DNA, 25 bp, Homo sapien
catttgtcaactaagggcttgtcca

SEQ ID NO: 5095199 - DNA, 25 bp, Homo sapien
caggaataagacatgcatctcacaa

SEQ ID NO: 5095200 - DNA, 25 bp, Homo sapien
tctagtggaccattctgtcaggtga

SEQ ID NO: 5095201 - DNA, 25 bp, Homo sapien
gtatgaagcatactgcacaacagat

SEQ ID NO: 5095202 - DNA, 25 bp, Homo sapien
gaagcatactgcacaacagatagat

SEQ ID NO: 5095203 - DNA, 25 bp, Homo sapien
agagtcctgattcctagtatgaagc

SEQ ID NO: 5095204 - DNA, 25 bp, Homo sapien
gattcctagtatgaagcatactgca

SEQ ID NO: 5095205 - DNA, 25 bp, Homo sapien
tttgcttaccgtacaacctccctga

SEQ ID NO: 5095206 - DNA, 25 bp, Homo sapien
tgaagatcctcttgaagtacggcaa

SEQ ID NO: 5095207 - DNA, 25 bp, Homo sapien
tagaactaaatgactgagctctctc

SEQ ID NO: 5095208 - DNA, 25 bp, Homo sapien
tctctagcggaaattccttctgtga

SEQ ID NO: 5095209 - DNA, 25 bp, Homo sapien
agccaaccactcctattttcctagc

SEQ ID NO: 5095210 - DNA, 25 bp, Homo sapien
gccaaccactcctattttcctagct

SEQ ID NO: 5095211 - DNA, 25 bp, Homo sapien
cagccaaccactcctattttcctag

SEQ ID NO: 5095212 - DNA, 25 bp, Homo sapien
ggctgagtcggggagatctgagcct

SEQ ID NO: 5095213 - DNA, 25 bp, Homo sapien
ctgagtcggggagatctgagcctgg

SEQ ID NO: 5095214 - DNA, 25 bp, Homo sapien
gagtcggggagatctgagcctggaa

SEQ ID NO: 5095215 - DNA, 25 bp, Homo sapien
ggaggctgagtcggggagatctgag

SEQ ID NO: 5095216 - DNA, 25 bp, Homo sapien
tgtgttcttacatgctgctggcttg

SEQ ID NO: 5095217 - DNA, 25 bp, Homo sapien
cagggctgctataatcacagccagg

SEQ ID NO: 5095218 - DNA, 25 bp, Homo sapien
tgatggtccctgttgtattccacat

SEQ ID NO: 5095219 - DNA, 25 bp, Homo sapien
tctctaaatgatggtccctgttgta

SEQ ID NO: 5095220 - DNA, 25 bp, Homo sapien
cacaactctattagtgagtatctct

SEQ ID NO: 5095221 - DNA, 25 bp, Homo sapien
tatctatggaagaggtaaacacaac

SEQ ID NO: 5095222 - DNA, 25 bp, Homo sapien
catgcgcaatcatcagctctgtata

SEQ ID NO: 5095223 - DNA, 25 bp, Homo sapien
aattctaactcttgaactatgaaca

SEQ ID NO: 5095224 - DNA, 25 bp, Homo sapien
tcacaagtgaactctggacaggcac

SEQ ID NO: 5095225 - DNA, 25 bp, Homo sapien
gagtcaaccctaatgtaacctatca

SEQ ID NO: 5095226 - DNA, 25 bp, Homo sapien
taatggtagacacatgccatcatac

SEQ ID NO: 5095227 - DNA, 25 bp, Homo sapien
catgtacgtgtttttagtcccagct

SEQ ID NO: 5095228 - DNA, 25 bp, Homo sapien
tagtctcaggccatccacgtagaca

SEQ ID NO: 5095229 - DNA, 25 bp, Homo sapien
tgcggactacaccaaggaagtacag

SEQ ID NO: 5095230 - DNA, 25 bp, Homo sapien
tgtgaatccctggacgtagtctcag

SEQ ID NO: 5095231 - DNA, 25 bp, Homo sapien
ggatcacgccaatgacatccctgag

SEQ ID NO: 5095232 - DNA, 25 bp, Homo sapien
ggaggctctctgaataagaaacaat

SEQ ID NO: 5095233 - DNA, 25 bp, Homo sapien
gaggaggctctctgaataagaaaca

SEQ ID NO: 5095234 - DNA, 25 bp, Homo sapien
ggaggaggctctctgaataagaaac

SEQ ID NO: 5095235 - DNA, 25 bp, Homo sapien
ctggaggaggctctctgaataagaa

SEQ ID NO: 5095236 - DNA, 25 bp, Homo sapien
tgggttgaagcaatgctcatgcctc

SEQ ID NO: 5095237 - DNA, 25 bp, Homo sapien
tcctgggttgaagcaatgctcatgc

SEQ ID NO: 5095238 - DNA, 25 bp, Homo sapien
cctcctgggttgaagcaatgctcat

SEQ ID NO: 5095239 - DNA, 25 bp, Homo sapien
cctgggttgaagcaatgctcatgcc

SEQ ID NO: 5095240 - DNA, 25 bp, Homo sapien
gagctttacactcagactgacatgg

SEQ ID NO: 5095241 - DNA, 25 bp, Homo sapien
tggaaagggttgagctttacactca

SEQ ID NO: 5095242 - DNA, 25 bp, Homo sapien
gctttacactcagactgacatggca

SEQ ID NO: 5095243 - DNA, 25 bp, Homo sapien
gggttgagctttacactcagactga

SEQ ID NO: 5095244 - DNA, 25 bp, Homo sapien
actccagcttgagggtagaggcatg

SEQ ID NO: 5095245 - DNA, 25 bp, Homo sapien
caaggcttcaatagaagggaaaagc

SEQ ID NO: 5095246 - DNA, 25 bp, Homo sapien
gggtatctgggctatcaaggcttca

SEQ ID NO: 5095247 - DNA, 25 bp, Homo sapien
tagaggcatgactccaaagttgttg

SEQ ID NO: 5095248 - DNA, 25 bp, Homo sapien
gagtgtagtacaaagatgtcatgtc

SEQ ID NO: 5095249 - DNA, 25 bp, Homo sapien
gacctacactggtcctgtcgaagga

SEQ ID NO: 5095250 - DNA, 25 bp, Homo sapien
taagtgatggtgtcagaggtagcac

SEQ ID NO: 5095251 - DNA, 25 bp, Homo sapien
gatgtcatgtcaggaactgctgcag

SEQ ID NO: 5095252 - DNA, 25 bp, Homo sapien
gattgtggggattactcaggaggct

SEQ ID NO: 5095253 - DNA, 25 bp, Homo sapien
gagattgtggggattactcaggagg

SEQ ID NO: 5095254 - DNA, 25 bp, Homo sapien
gactatgggcctgccagtaattcca

SEQ ID NO: 5095255 - DNA, 25 bp, Homo sapien
tgagctgagattgtggggattactc

SEQ ID NO: 5095256 - DNA, 25 bp, Homo sapien
aatgcacagccaagcaatacacgtg

SEQ ID NO: 5095257 - DNA, 25 bp, Homo sapien
taaacttggcttgtcagcaatggca

SEQ ID NO: 5095258 - DNA, 25 bp, Homo sapien
tacacgtgaagtcccagaagtgaga

SEQ ID NO: 5095259 - DNA, 25 bp, Homo sapien
tataagacctaagagacagtgttcc

SEQ ID NO: 5095260 - DNA, 25 bp, Homo sapien
tgacggagaatgtaaactagagcca

SEQ ID NO: 5095261 - DNA, 25 bp, Homo sapien
tgagtgactttacccatgccatggc

SEQ ID NO: 5095262 - DNA, 25 bp, Homo sapien
gaatcgcccttattccaaattagag

SEQ ID NO: 5095263 - DNA, 25 bp, Homo sapien
tggccagagcatgtaaatgacggag

SEQ ID NO: 5095264 - DNA, 25 bp, Homo sapien
atctgacagtacaggtgcatggcct

SEQ ID NO: 5095265 - DNA, 25 bp, Homo sapien
cctgaagattgagaccttggtggct

SEQ ID NO: 5095266 - DNA, 25 bp, Homo sapien
catggcctgtggacaattgctgggc

SEQ ID NO: 5095267 - DNA, 25 bp, Homo sapien
cttctaagcgaagcgaatgatgctg

SEQ ID NO: 5095268 - DNA, 25 bp, Homo sapien
gacttcctgccagttaccactagtg

SEQ ID NO: 5095269 - DNA, 25 bp, Homo sapien
taaatctcactatcacttctacctg

SEQ ID NO: 5095270 - DNA, 25 bp, Homo sapien
gtttactagcatatacacctcacac

SEQ ID NO: 5095271 - DNA, 25 bp, Homo sapien
gaacttgccatgctcctaaagctga

SEQ ID NO: 5095272 - DNA, 25 bp, Homo sapien
ttcatatcacccctgtatgtagata

SEQ ID NO: 5095273 - DNA, 25 bp, Homo sapien
cttaaccactacatttcaacttatt

SEQ ID NO: 5095274 - DNA, 25 bp, Homo sapien
atcttcatatcacccctgtatgtag

SEQ ID NO: 5095275 - DNA, 25 bp, Homo sapien
aattaatcttcatatcacccctgta

SEQ ID NO: 5095276 - DNA, 25 bp, Homo sapien
tgggttcatttcttcgcctcgccat

SEQ ID NO: 5095277 - DNA, 25 bp, Homo sapien
gaatggctcagagagtaccccgtag

SEQ ID NO: 5095278 - DNA, 25 bp, Homo sapien
gctttataggctcagattgcctggg

SEQ ID NO: 5095279 - DNA, 25 bp, Homo sapien
tctgcaaattaacatttctgcacct

SEQ ID NO: 5095280 - DNA, 25 bp, Homo sapien
ttctcctctagctgttgccctatct

SEQ ID NO: 5095281 - DNA, 25 bp, Homo sapien
tagctgttgccctatcttgtttctt

SEQ ID NO: 5095282 - DNA, 25 bp, Homo sapien
cttcacccagcttccggagctgatg

SEQ ID NO: 5095283 - DNA, 25 bp, Homo sapien
cccagcttccggagctgatgaattc

SEQ ID NO: 5095284 - DNA, 25 bp, Homo sapien
catacattgggtagatcactataag

SEQ ID NO: 5095285 - DNA, 25 bp, Homo sapien
ctacttctttccatacattgggtag

SEQ ID NO: 5095286 - DNA, 25 bp, Homo sapien
tcactataagaaagtcatggttaaa

SEQ ID NO: 5095287 - DNA, 25 bp, Homo sapien
tgtataaataaatcgaccaggtttc

SEQ ID NO: 5095288 - DNA, 25 bp, Homo sapien
tttcaaatagtcagtagccaatcct

SEQ ID NO: 5095289 - DNA, 25 bp, Homo sapien
gccaatttcaaatagtcagtagcca

SEQ ID NO: 5095290 - DNA, 25 bp, Homo sapien
gaaatagccaatttcaaatagtcag

SEQ ID NO: 5095291 - DNA, 25 bp, Homo sapien
tagccaatttcaaatagtcagtagc

SEQ ID NO: 5095292 - DNA, 25 bp, Homo sapien
tcaagattgccttggaggctttggg

SEQ ID NO: 5095293 - DNA, 25 bp, Homo sapien
tgcaggtcaagattgccttggaggc

SEQ ID NO: 5095294 - DNA, 25 bp, Homo sapien
ggatgcaggtcaagattgccttgga

SEQ ID NO: 5095295 - DNA, 25 bp, Homo sapien
caggtcaagattgccttggaggctt

SEQ ID NO: 5095296 - DNA, 25 bp, Homo sapien
tcgactgaaatcttgtctagccacc

SEQ ID NO: 5095297 - DNA, 25 bp, Homo sapien
tctttacctgtcctgggtatcatca

SEQ ID NO: 5095298 - DNA, 25 bp, Homo sapien
tcatctcatctttacctgtcctggg

SEQ ID NO: 5095299 - DNA, 25 bp, Homo sapien
tgtctagccaccaacatcatctcat

SEQ ID NO: 5095300 - DNA, 25 bp, Homo sapien
tgtcacagggatccaaaggtatgtc

SEQ ID NO: 5095301 - DNA, 25 bp, Homo sapien
cagcatggcggcttcaaagtagcca

SEQ ID NO: 5095302 - DNA, 25 bp, Homo sapien
aaaactcagtcagctgggttctgca

SEQ ID NO: 5095303 - DNA, 25 bp, Homo sapien
gtgtgtgttgtcacagggatccaaa

SEQ ID NO: 5095304 - DNA, 25 bp, Homo sapien
tggaaaggcggctaacgacacaaga

SEQ ID NO: 5095305 - DNA, 25 bp, Homo sapien
gaaattcataaagcgaagccctgac

SEQ ID NO: 5095306 - DNA, 25 bp, Homo sapien
ggaatgtgcaagtcctcaaagggaa

SEQ ID NO: 5095307 - DNA, 25 bp, Homo sapien
tgacagcctgatgcaatttgcgcac

SEQ ID NO: 5095308 - DNA, 25 bp, Homo sapien
tctgtggccgtggactccgggacca

SEQ ID NO: 5095309 - DNA, 25 bp, Homo sapien
agcttcaggtgccattgatcgcggg

SEQ ID NO: 5095310 - DNA, 25 bp, Homo sapien
acggcctcgcccggggaagcttcag

SEQ ID NO: 5095311 - DNA, 25 bp, Homo sapien
tggccgtggactccgggaccaagcc

SEQ ID NO: 5095312 - DNA, 25 bp, Homo sapien
ggcatgcaacgttctatggttataa

SEQ ID NO: 5095313 - DNA, 25 bp, Homo sapien
tataaaaaccacgtcttcaaggcac

SEQ ID NO: 5095314 - DNA, 25 bp, Homo sapien
tccattaaaataaggcatgcaacgt

SEQ ID NO: 5095315 - DNA, 25 bp, Homo sapien
tatggttataaaaaccacgtcttca

SEQ ID NO: 5095316 - DNA, 25 bp, Homo sapien
ctcaggcttgagctatgcccaggat

SEQ ID NO: 5095317 - DNA, 25 bp, Homo sapien
ctggaagagccactcaggcttgagc

SEQ ID NO: 5095318 - DNA, 25 bp, Homo sapien
ggattctgagaaccagctaattgaa

SEQ ID NO: 5095319 - DNA, 25 bp, Homo sapien
gagaaccagctaattgaatcaaagg

SEQ ID NO: 5095320 - DNA, 25 bp, Homo sapien
tctcagcttgcagcggaaaatggcg

SEQ ID NO: 5095321 - DNA, 25 bp, Homo sapien
aatcacttagtgcaacatctggcca

SEQ ID NO: 5095322 - DNA, 25 bp, Homo sapien
cagcctgtttagcaagctctgtgac

SEQ ID NO: 5095323 - DNA, 25 bp, Homo sapien
caccccactgagctattgaaaggat

SEQ ID NO: 5095324 - DNA, 25 bp, Homo sapien
catttgaaaactgccctattaacct

SEQ ID NO: 5095325 - DNA, 25 bp, Homo sapien
gccctattaacctaacactaagcaa

SEQ ID NO: 5095326 - DNA, 25 bp, Homo sapien
gggagtggaatgtatgaagaatcca

SEQ ID NO: 5095327 - DNA, 25 bp, Homo sapien
gaatcccgcgggttctgagggactc

SEQ ID NO: 5095328 - DNA, 25 bp, Homo sapien
ggagcctctgacgttggtatcttga

SEQ ID NO: 5095329 - DNA, 25 bp, Homo sapien
cttggactggtcatattctccaggg

SEQ ID NO: 5095330 - DNA, 25 bp, Homo sapien
gccagtcttaggttttctagggtga

SEQ ID NO: 5095331 - DNA, 25 bp, Homo sapien
ggtgaccattgcatctgggagcctc

SEQ ID NO: 5095332 - DNA, 25 bp, Homo sapien
ctgtggggaggatggccactttgtg

SEQ ID NO: 5095333 - DNA, 25 bp, Homo sapien
ggggaggatggccactttgtgtcat

SEQ ID NO: 5095334 - DNA, 25 bp, Homo sapien
tgtggggaggatggccactttgtgt

SEQ ID NO: 5095335 - DNA, 25 bp, Homo sapien
tggggaggatggccactttgtgtca

SEQ ID NO: 5095336 - DNA, 25 bp, Homo sapien
gttgggagactgagctctgtttacc

SEQ ID NO: 5095337 - DNA, 25 bp, Homo sapien
agccaaaagtatggcctgggaggaa

SEQ ID NO: 5095338 - DNA, 25 bp, Homo sapien
ctgcctgtatcttgtcctcaacatc

SEQ ID NO: 5095339 - DNA, 25 bp, Homo sapien
gcctgtatcttgtcctcaacatcat

SEQ ID NO: 5095340 - DNA, 25 bp, Homo sapien
tgggaggaatctatgccactgatgg

SEQ ID NO: 5095341 - DNA, 25 bp, Homo sapien
tactcagcacgtggtagatgtttca

SEQ ID NO: 5095342 - DNA, 25 bp, Homo sapien
taaaatgagcccacagtaggtatta

SEQ ID NO: 5095343 - DNA, 25 bp, Homo sapien
aattaagcacagtcaattcctgatg

SEQ ID NO: 5095344 - DNA, 25 bp, Homo sapien
tacctggctcttatactcaaaacga

SEQ ID NO: 5095345 - DNA, 25 bp, Homo sapien
tagaaaagtttgtgcggtcaatgcg

SEQ ID NO: 5095346 - DNA, 25 bp, Homo sapien
taaaattagagtattcaagcttaga

SEQ ID NO: 5095347 - DNA, 25 bp, Homo sapien
cgagaactagggcttccaaccttgc

SEQ ID NO: 5095348 - DNA, 25 bp, Homo sapien
ttcaagcttagagatggttttttca

SEQ ID NO: 5095349 - DNA, 25 bp, Homo sapien
catttttagtagcacgtacagtcgc

SEQ ID NO: 5095350 - DNA, 25 bp, Homo sapien
aagttccttttcaccctactctgct

SEQ ID NO: 5095351 - DNA, 25 bp, Homo sapien
cagtcgcttagctttcagaacagaa

SEQ ID NO: 5095352 - DNA, 25 bp, Homo sapien
tatacatagtcttaagaacatacag

SEQ ID NO: 5095353 - DNA, 25 bp, Homo sapien
tatatgctgtaatgttcattgaaat

SEQ ID NO: 5095354 - DNA, 25 bp, Homo sapien
aaattaaagattccatgagacaagt

SEQ ID NO: 5095355 - DNA, 25 bp, Homo sapien
tccatgagacaagtttaaattaaat

SEQ ID NO: 5095356 - DNA, 25 bp, Homo sapien
gatgtctcgccaaataacatatata

SEQ ID NO: 5095357 - DNA, 25 bp, Homo sapien
gtaacaaattattcagaggatttta

SEQ ID NO: 5095358 - DNA, 25 bp, Homo sapien
atttctaatcactggttctttttga

SEQ ID NO: 5095359 - DNA, 25 bp, Homo sapien
tttataattcaacatagacaacagt

SEQ ID NO: 5095360 - DNA, 25 bp, Homo sapien
tttatggttatattgatcatcacat

SEQ ID NO: 5095361 - DNA, 25 bp, Homo sapien
gcttctctgggaactacagctgctt

SEQ ID NO: 5095362 - DNA, 25 bp, Homo sapien
cttgtaaccaccctggtgtttgtag

SEQ ID NO: 5095363 - DNA, 25 bp, Homo sapien
ctgggcctgggatctagcttctctg

SEQ ID NO: 5095364 - DNA, 25 bp, Homo sapien
caggaatcctgctaatgctggaagc

SEQ ID NO: 5095365 - DNA, 25 bp, Homo sapien
aatgtaggtatccagtttttgctta

SEQ ID NO: 5095366 - DNA, 25 bp, Homo sapien
gatcgcaggttgatagtcactgaaa

SEQ ID NO: 5095367 - DNA, 25 bp, Homo sapien
cacatggagtgttgagatcgcaggt

SEQ ID NO: 5095368 - DNA, 25 bp, Homo sapien
aattcactgtgtaaattcaacatga

SEQ ID NO: 5095369 - DNA, 25 bp, Homo sapien
caatttccactaccagagccaaaag

SEQ ID NO: 5095370 - DNA, 25 bp, Homo sapien
ttcatttcaccattgcctcccaatt

SEQ ID NO: 5095371 - DNA, 25 bp, Homo sapien
ctcctgggaaaagccgttgctgact

SEQ ID NO: 5095372 - DNA, 25 bp, Homo sapien
catagtaactcacgcatttccctgg

SEQ ID NO: 5095373 - DNA, 25 bp, Homo sapien
tctacggcaccaggcagcgaggagc

SEQ ID NO: 5095374 - DNA, 25 bp, Homo sapien
cctctacggcaccaggcagcgagga

SEQ ID NO: 5095375 - DNA, 25 bp, Homo sapien
agcgaggagcctcctgggaagaaca

SEQ ID NO: 5095376 - DNA, 25 bp, Homo sapien
gagcctcctgggaagaacagggacg

SEQ ID NO: 5095377 - DNA, 25 bp, Homo sapien
ctgaaaaacataaatagtaaaccat

SEQ ID NO: 5095378 - DNA, 25 bp, Homo sapien
tagggaaatggttcattgtatgttc

SEQ ID NO: 5095379 - DNA, 25 bp, Homo sapien
gcataatatatacgtcctcttccaa

SEQ ID NO: 5095380 - DNA, 25 bp, Homo sapien
ttccaacatgtgattttgaatgatg

SEQ ID NO: 5095381 - DNA, 25 bp, Homo sapien
catgtgattttgaatgatgtatgct

SEQ ID NO: 5095382 - DNA, 25 bp, Homo sapien
gatgtgtctcatcctttatagtctg

SEQ ID NO: 5095383 - DNA, 25 bp, Homo sapien
ggcaataatctgacccaatctaggg

SEQ ID NO: 5095384 - DNA, 25 bp, Homo sapien
tatttttagcatgggatagtcagtg

SEQ ID NO: 5095385 - DNA, 25 bp, Homo sapien
taaccccaaagcactactttgtggc

SEQ ID NO: 5095386 - DNA, 25 bp, Homo sapien
agattccggatgacggggctccttc

SEQ ID NO: 5095387 - DNA, 25 bp, Homo sapien
ggagttgcctggagattccggatga

SEQ ID NO: 5095388 - DNA, 25 bp, Homo sapien
ggatgacggggctccttctaacctg

SEQ ID NO: 5095389 - DNA, 25 bp, Homo sapien
gagttgcctggagattccggatgac

SEQ ID NO: 5095390 - DNA, 25 bp, Homo sapien
gccccaggatgatagtcactgggtt

SEQ ID NO: 5095391 - DNA, 25 bp, Homo sapien
ctgccccaggatgatagtcactggg

SEQ ID NO: 5095392 - DNA, 25 bp, Homo sapien
cccaggatgatagtcactgggttcc

SEQ ID NO: 5095393 - DNA, 25 bp, Homo sapien
tgccccaggatgatagtcactgggt

SEQ ID NO: 5095394 - DNA, 25 bp, Homo sapien
tatgacaaaataagctgggaagtta

SEQ ID NO: 5095395 - DNA, 25 bp, Homo sapien
aaataagctgggaagttacctagcg

SEQ ID NO: 5095396 - DNA, 25 bp, Homo sapien
ctgggaagttacctagcgtgatggc

SEQ ID NO: 5095397 - DNA, 25 bp, Homo sapien
ctagcgtgatggctttgtctaggct

SEQ ID NO: 5095398 - DNA, 25 bp, Homo sapien
ctttgtatcatactgaagggaaaga

SEQ ID NO: 5095399 - DNA, 25 bp, Homo sapien
tactgttctgtgtaccatcacttac

SEQ ID NO: 5095400 - DNA, 25 bp, Homo sapien
aaaatttactgttctgtgtaccatc

SEQ ID NO: 5095401 - DNA, 25 bp, Homo sapien
catactgaagggaaagactaacaaa

SEQ ID NO: 5095402 - DNA, 25 bp, Homo sapien
ctgggtgctcttagagtcgtaaggt

SEQ ID NO: 5095403 - DNA, 25 bp, Homo sapien
agtgctttaccatgtgaccaccagt

SEQ ID NO: 5095404 - DNA, 25 bp, Homo sapien
ctcttagagtcgtaaggtggtagga

SEQ ID NO: 5095405 - DNA, 25 bp, Homo sapien
gaagacaggttccagtgctttacca

SEQ ID NO: 5095406 - DNA, 25 bp, Homo sapien
ctggcaaaaccagtggacacgatgg

SEQ ID NO: 5095407 - DNA, 25 bp, Homo sapien
tggcaaaaccagtggacacgatggt

SEQ ID NO: 5095408 - DNA, 25 bp, Homo sapien
ggacacgatggtttttggaagtcac

SEQ ID NO: 5095409 - DNA, 25 bp, Homo sapien
accagtggacacgatggtttttgga

SEQ ID NO: 5095410 - DNA, 25 bp, Homo sapien
ctattccacaagaaggcttttgcat

SEQ ID NO: 5095411 - DNA, 25 bp, Homo sapien
ttattggcatgccaagccattttct

SEQ ID NO: 5095412 - DNA, 25 bp, Homo sapien
tattggcatgccaagccattttctt

SEQ ID NO: 5095413 - DNA, 25 bp, Homo sapien
gtacaaaccacacttctaatgcatc

SEQ ID NO: 5095414 - DNA, 25 bp, Homo sapien
tacaaaccacacttctaatgcatca

SEQ ID NO: 5095415 - DNA, 25 bp, Homo sapien
taacgagctgatgaaaatgggtaca

SEQ ID NO: 5095416 - DNA, 25 bp, Homo sapien
gaagtccctccaggataacgagctg

SEQ ID NO: 5095417 - DNA, 25 bp, Homo sapien
cagtaatagcagaagcgcgcagaag

SEQ ID NO: 5095418 - DNA, 25 bp, Homo sapien
tgccttgggaagatcatgcttgccc

SEQ ID NO: 5095419 - DNA, 25 bp, Homo sapien
ctgatgtaccaggagaggcaagtgg

SEQ ID NO: 5095420 - DNA, 25 bp, Homo sapien
tgatgtaccaggagaggcaagtggt

SEQ ID NO: 5095421 - DNA, 25 bp, Homo sapien
gatgtaccaggagaggcaagtggta

SEQ ID NO: 5095422 - DNA, 25 bp, Homo sapien
ccctggagaggctcattcggagttt

SEQ ID NO: 5095423 - DNA, 25 bp, Homo sapien
catcatattgatgtataaaagagat

SEQ ID NO: 5095424 - DNA, 25 bp, Homo sapien
ggctcattcggagtttttctggcat

SEQ ID NO: 5095425 - DNA, 25 bp, Homo sapien
gtttttctggcatcatattgatgta

SEQ ID NO: 5095426 - DNA, 25 bp, Homo sapien
tttaggaactgttggcctactgcct

SEQ ID NO: 5095427 - DNA, 25 bp, Homo sapien
tctctctgtacaaaagctccgtgtc

SEQ ID NO: 5095428 - DNA, 25 bp, Homo sapien
ctctctctgtacaaaagctccgtgt

SEQ ID NO: 5095429 - DNA, 25 bp, Homo sapien
ctctctgtacaaaagctccgtgtct

SEQ ID NO: 5095430 - DNA, 25 bp, Homo sapien
tttggactgttctgatgaacgtgac

SEQ ID NO: 5095431 - DNA, 25 bp, Homo sapien
gctttccgctgagtttcctttctct

SEQ ID NO: 5095432 - DNA, 25 bp, Homo sapien
tggtgagatcattctgctttccgct

SEQ ID NO: 5095433 - DNA, 25 bp, Homo sapien
cgtgaccctggagtgttcagtaata

SEQ ID NO: 5095434 - DNA, 25 bp, Homo sapien
gagttttaggctctaacagctcctg

SEQ ID NO: 5095435 - DNA, 25 bp, Homo sapien
agttttaggctctaacagctcctga

SEQ ID NO: 5095436 - DNA, 25 bp, Homo sapien
agtgagttttaggctctaacagctc

SEQ ID NO: 5095437 - DNA, 25 bp, Homo sapien
tgagttttaggctctaacagctcct

SEQ ID NO: 5095438 - DNA, 25 bp, Homo sapien
ttgtttgagtggcgcctgaggtctt

SEQ ID NO: 5095439 - DNA, 25 bp, Homo sapien
ttgagtggcgcctgaggtcttttct

SEQ ID NO: 5095440 - DNA, 25 bp, Homo sapien
aaagagcatctcctacagttgtttg

SEQ ID NO: 5095441 - DNA, 25 bp, Homo sapien
ggatttaaaggcttgtgcctagtga

SEQ ID NO: 5095442 - DNA, 25 bp, Homo sapien
tatgttctgaagttactgataacag

SEQ ID NO: 5095443 - DNA, 25 bp, Homo sapien
gattgtgaaatttccctatattcca

SEQ ID NO: 5095444 - DNA, 25 bp, Homo sapien
tgttctgaagttactgataacagaa

SEQ ID NO: 5095445 - DNA, 25 bp, Homo sapien
atattccagggattagatttttatc

SEQ ID NO: 5095446 - DNA, 25 bp, Homo sapien
tgtgttcataaagaatgtgacatag

SEQ ID NO: 5095447 - DNA, 25 bp, Homo sapien
tatatttgttaattacgatcatgtg

SEQ ID NO: 5095448 - DNA, 25 bp, Homo sapien
tgttgtgcaaaacaaagttgtgttc

SEQ ID NO: 5095449 - DNA, 25 bp, Homo sapien
taatgtctcactccacttattggag

SEQ ID NO: 5095450 - DNA, 25 bp, Homo sapien
tcacacagctcaaggaatgaagtga

SEQ ID NO: 5095451 - DNA, 25 bp, Homo sapien
caaagctgtccactcatgtctaaca

SEQ ID NO: 5095452 - DNA, 25 bp, Homo sapien
cacacagctcaaggaatgaagtgaa

SEQ ID NO: 5095453 - DNA, 25 bp, Homo sapien
tccaaagctgtccactcatgtctaa

SEQ ID NO: 5095454 - DNA, 25 bp, Homo sapien
gagttggtgctagaaatgatctgag

SEQ ID NO: 5095455 - DNA, 25 bp, Homo sapien
gaccacttactgatcaatgtgcata

SEQ ID NO: 5095456 - DNA, 25 bp, Homo sapien
tagtgagcagctgatatttcccaat

SEQ ID NO: 5095457 - DNA, 25 bp, Homo sapien
tataacagaggaatactccacctac

SEQ ID NO: 5095458 - DNA, 25 bp, Homo sapien
ctttttgggagacttccactgtttg

SEQ ID NO: 5095459 - DNA, 25 bp, Homo sapien
ttttgggagacttccactgtttggc

SEQ ID NO: 5095460 - DNA, 25 bp, Homo sapien
tttgggagacttccactgtttggcc

SEQ ID NO: 5095461 - DNA, 25 bp, Homo sapien
tctgtgttacatccaagttcaggct

SEQ ID NO: 5095462 - DNA, 25 bp, Homo sapien
agttcaggcttatcccagccttttc

SEQ ID NO: 5095463 - DNA, 25 bp, Homo sapien
cagccttttctttccgatacccatt

SEQ ID NO: 5095464 - DNA, 25 bp, Homo sapien
tccgatacccattttggataatgtg

SEQ ID NO: 5095465 - DNA, 25 bp, Homo sapien
agtaattgggatgagggtcagaaat

SEQ ID NO: 5095466 - DNA, 25 bp, Homo sapien
cctgggtgactgtcaccaaaggtca

SEQ ID NO: 5095467 - DNA, 25 bp, Homo sapien
tgtatagtgcgttatcctgggtgac

SEQ ID NO: 5095468 - DNA, 25 bp, Homo sapien
caaaggtcagatttatgtccatggg

SEQ ID NO: 5095469 - DNA, 25 bp, Homo sapien
aagcccaaggagctgtgaatacaga

SEQ ID NO: 5095470 - DNA, 25 bp, Homo sapien
ggttttacaaccagctgagaattcc

SEQ ID NO: 5095471 - DNA, 25 bp, Homo sapien
tatcttgcagtgtagcaatctcagg

SEQ ID NO: 5095472 - DNA, 25 bp, Homo sapien
aacatacctatggactgctgaaaac

SEQ ID NO: 5095473 - DNA, 25 bp, Homo sapien
agaaaataagatggcatgaaaccac

SEQ ID NO: 5095474 - DNA, 25 bp, Homo sapien
cctaaaaaaacatgcccgtgatctc

SEQ ID NO: 5095475 - DNA, 25 bp, Homo sapien
taagatggcatgaaaccacctaaaa

SEQ ID NO: 5095476 - DNA, 25 bp, Homo sapien
caggaccactgttacagtcttggct

SEQ ID NO: 5095477 - DNA, 25 bp, Homo sapien
catctccgccgtatttgttcattag

SEQ ID NO: 5095478 - DNA, 25 bp, Homo sapien
tctgttggcataaatccgccacatg

SEQ ID NO: 5095479 - DNA, 25 bp, Homo sapien
ccgccacatggtccaattaagtgaa

SEQ ID NO: 5095480 - DNA, 25 bp, Homo sapien
gaagagaatcactatgtccaacccc

SEQ ID NO: 5095481 - DNA, 25 bp, Homo sapien
aatctgttagttatctgtttatgac

SEQ ID NO: 5095482 - DNA, 25 bp, Homo sapien
gttagttatctgtttatgacaggta

SEQ ID NO: 5095483 - DNA, 25 bp, Homo sapien
tatatggaatgatttgtagctaagc

SEQ ID NO: 5095484 - DNA, 25 bp, Homo sapien
tagctaagcctgtatataagctgct

SEQ ID NO: 5095485 - DNA, 25 bp, Homo sapien
ccaccaggcgtcttgtaatttctca

SEQ ID NO: 5095486 - DNA, 25 bp, Homo sapien
ggctttctagggtagcactcctcca

SEQ ID NO: 5095487 - DNA, 25 bp, Homo sapien
cattggcaaagcacataccaccagg

SEQ ID NO: 5095488 - DNA, 25 bp, Homo sapien
tcatgtcctactcacctctgaaagg

SEQ ID NO: 5095489 - DNA, 25 bp, Homo sapien
gttttggcacagtagttggtgacaa

SEQ ID NO: 5095490 - DNA, 25 bp, Homo sapien
ttggcacagtagttggtgacaatgc

SEQ ID NO: 5095491 - DNA, 25 bp, Homo sapien
atgctgctcttccaattaagacttt

SEQ ID NO: 5095492 - DNA, 25 bp, Homo sapien
gctcttccaattaagactttcctta

SEQ ID NO: 5095493 - DNA, 25 bp, Homo sapien
tatctctagataaccatgaaaagtc

SEQ ID NO: 5095494 - DNA, 25 bp, Homo sapien
cagaagttcattgatctaatttcaa

SEQ ID NO: 5095495 - DNA, 25 bp, Homo sapien
caatttcaaatcgttctctctgcca

SEQ ID NO: 5095496 - DNA, 25 bp, Homo sapien
ctgttgaaaggatctcctaggtgct

SEQ ID NO: 5095497 - DNA, 25 bp, Homo sapien
gagatgtccttttcgctttggcaga

SEQ ID NO: 5095498 - DNA, 25 bp, Homo sapien
gaagatgctgggttttagtggacaa

SEQ ID NO: 5095499 - DNA, 25 bp, Homo sapien
caaatgttgcctgcgtgcatcacag

SEQ ID NO: 5095500 - DNA, 25 bp, Homo sapien
aggaaagagggacgagatgtccttt

SEQ ID NO: 5095501 - DNA, 25 bp, Homo sapien
tcctgctcggctccctggctctcca

SEQ ID NO: 5095502 - DNA, 25 bp, Homo sapien
cctgctcggctccctggctctccat

SEQ ID NO: 5095503 - DNA, 25 bp, Homo sapien
ctccctggattcctgctcggctccc

SEQ ID NO: 5095504 - DNA, 25 bp, Homo sapien
cctggattcctgctcggctccctgg

SEQ ID NO: 5095505 - DNA, 25 bp, Homo sapien
cacccacctcatcatgaaaatcaag

SEQ ID NO: 5095506 - DNA, 25 bp, Homo sapien
catgaaaatcaagctcttctgacct

SEQ ID NO: 5095507 - DNA, 25 bp, Homo sapien
tacctcacccacctcatcatgaaaa

SEQ ID NO: 5095508 - DNA, 25 bp, Homo sapien
tcatcatgaaaatcaagctcttctg

SEQ ID NO: 5095509 - DNA, 25 bp, Homo sapien
aaacagcgtcctgcaggagataagt

SEQ ID NO: 5095510 - DNA, 25 bp, Homo sapien
aaagaacaaaacagcgtcctgcagg

SEQ ID NO: 5095511 - DNA, 25 bp, Homo sapien
gaacaaaacagcgtcctgcaggaga

SEQ ID NO: 5095512 - DNA, 25 bp, Homo sapien
caggagataagtctggtgaggaaaa

SEQ ID NO: 5095513 - DNA, 25 bp, Homo sapien
aatgcaccacggcacataaaacaaa

SEQ ID NO: 5095514 - DNA, 25 bp, Homo sapien
gcagtgtcctccctagctggtcagg

SEQ ID NO: 5095515 - DNA, 25 bp, Homo sapien
gaggctaccagagagaatgcaccac

SEQ ID NO: 5095516 - DNA, 25 bp, Homo sapien
gagtgaggtaaggtcttgtaacttc

SEQ ID NO: 5095517 - DNA, 25 bp, Homo sapien
ctccccatcttcacttagcagttta

SEQ ID NO: 5095518 - DNA, 25 bp, Homo sapien
tatcaacgcgacgtgatggctcctc

SEQ ID NO: 5095519 - DNA, 25 bp, Homo sapien
ccatcttcacttagcagtttatcag

SEQ ID NO: 5095520 - DNA, 25 bp, Homo sapien
ctgtgtctattctatcaacgcgacg

SEQ ID NO: 5095521 - DNA, 25 bp, Homo sapien
caaacccagataccctgacttctgg

SEQ ID NO: 5095522 - DNA, 25 bp, Homo sapien
tgctgtgacctctttctattccaac

SEQ ID NO: 5095523 - DNA, 25 bp, Homo sapien
ccttactaatgtagagaaactatgg

SEQ ID NO: 5095524 - DNA, 25 bp, Homo sapien
tccatgagaggactgagaaccaagg

SEQ ID NO: 5095525 - DNA, 25 bp, Homo sapien
catcactgttgcttgcattttgcat

SEQ ID NO: 5095526 - DNA, 25 bp, Homo sapien
atcactgttgcttgcattttgcata

SEQ ID NO: 5095527 - DNA, 25 bp, Homo sapien
ttctctgggagcagattttcctctt

SEQ ID NO: 5095528 - DNA, 25 bp, Homo sapien
atattctctgggagcagattttcct

SEQ ID NO: 5095529 - DNA, 25 bp, Homo sapien
gatgttgtggaagtgtgacattcaa

SEQ ID NO: 5095530 - DNA, 25 bp, Homo sapien
gaaaagtttacaggaagatcgtgtg

SEQ ID NO: 5095531 - DNA, 25 bp, Homo sapien
cgtgtgtccattttacccttgatga

SEQ ID NO: 5095532 - DNA, 25 bp, Homo sapien
taccttggtaaacagggaatgcagg

SEQ ID NO: 5095533 - DNA, 25 bp, Homo sapien
tgattgacagcagaaacatctattt

SEQ ID NO: 5095534 - DNA, 25 bp, Homo sapien
tgtcccagagaaaccacttcacagg

SEQ ID NO: 5095535 - DNA, 25 bp, Homo sapien
ttaccagcaggtagtcttgttccat

SEQ ID NO: 5095536 - DNA, 25 bp, Homo sapien
aaaactccattcctatttaccagca

SEQ ID NO: 5095537 - DNA, 25 bp, Homo sapien
gttaattatcccaccacagaaatat

SEQ ID NO: 5095538 - DNA, 25 bp, Homo sapien
cttgatgttaattatcccaccacag

SEQ ID NO: 5095539 - DNA, 25 bp, Homo sapien
ctgagcctttactgttggagccaaa

SEQ ID NO: 5095540 - DNA, 25 bp, Homo sapien
aagaaggattctgagcctttactgt

SEQ ID NO: 5095541 - DNA, 25 bp, Homo sapien
gggctcacaggacgggaccagtggg

SEQ ID NO: 5095542 - DNA, 25 bp, Homo sapien
ctgcgcagggctgcgcgctcgctcc

SEQ ID NO: 5095543 - DNA, 25 bp, Homo sapien
cggcaacagcggcactgattccggg

SEQ ID NO: 5095544 - DNA, 25 bp, Homo sapien
ggactggaggaatccgcagcctgca

SEQ ID NO: 5095545 - DNA, 25 bp, Homo sapien
gtcctcctcccgctcctcggcggcc

SEQ ID NO: 5095546 - DNA, 25 bp, Homo sapien
ccgtcctcctcccgctcctcggcgg

SEQ ID NO: 5095547 - DNA, 25 bp, Homo sapien
tcccgtcctcctcccgctcctcggc

SEQ ID NO: 5095548 - DNA, 25 bp, Homo sapien
ctcctcccgctcctcggcggccggg

SEQ ID NO: 5095549 - DNA, 25 bp, Homo sapien
cggctgtccgctgtccgctccgcac

SEQ ID NO: 5095550 - DNA, 25 bp, Homo sapien
ggctgtccgctgtccgctccgcacc

SEQ ID NO: 5095551 - DNA, 25 bp, Homo sapien
ctgaaaatagaccctccggctgtcc

SEQ ID NO: 5095552 - DNA, 25 bp, Homo sapien
aaaatagaccctccggctgtccgct

SEQ ID NO: 5095553 - DNA, 25 bp, Homo sapien
cggagggtccctgcgctgagacaaa

SEQ ID NO: 5095554 - DNA, 25 bp, Homo sapien
gcccggagggtccctgcgctgagac

SEQ ID NO: 5095555 - DNA, 25 bp, Homo sapien
caaagcaggcccggagggtccctgc

SEQ ID NO: 5095556 - DNA, 25 bp, Homo sapien
ccaaagcaggcccggagggtccctg

SEQ ID NO: 5095557 - DNA, 25 bp, Homo sapien
tctggcctggctttcgattggaaaa

SEQ ID NO: 5095558 - DNA, 25 bp, Homo sapien
tggacagaggtttgcgttctgatcc

SEQ ID NO: 5095559 - DNA, 25 bp, Homo sapien
gaggtttgcgttctgatccccaccc

SEQ ID NO: 5095560 - DNA, 25 bp, Homo sapien
tggctttcgattggaaaaataatgg

SEQ ID NO: 5095561 - DNA, 25 bp, Homo sapien
aatatgctctcaacaggtgatgcag

SEQ ID NO: 5095562 - DNA, 25 bp, Homo sapien
gaacttacagttatcgacctccttg

SEQ ID NO: 5095563 - DNA, 25 bp, Homo sapien
catacactggtgagtttgaacttac

SEQ ID NO: 5095564 - DNA, 25 bp, Homo sapien
taggttaccaagctacatgtgagat

SEQ ID NO: 5095565 - DNA, 25 bp, Homo sapien
ctcgattctagagcagagatattaa

SEQ ID NO: 5095566 - DNA, 25 bp, Homo sapien
taaaaatcagaactaacagggcatt

SEQ ID NO: 5095567 - DNA, 25 bp, Homo sapien
ggatggtctcgaagaataaacatac

SEQ ID NO: 5095568 - DNA, 25 bp, Homo sapien
tgcctaactagtggcttcaaatttg

SEQ ID NO: 5095569 - DNA, 25 bp, Homo sapien
cgtggaaaatgtttaaacatcacag

SEQ ID NO: 5095570 - DNA, 25 bp, Homo sapien
tgtttaaacatcacagatcaaaata

SEQ ID NO: 5095571 - DNA, 25 bp, Homo sapien
aatgtttaaacatcacagatcaaaa

SEQ ID NO: 5095572 - DNA, 25 bp, Homo sapien
aaaatgtttaaacatcacagatcaa

SEQ ID NO: 5095573 - DNA, 25 bp, Homo sapien
cctaaaggcttaaagaactggcttg

SEQ ID NO: 5095574 - DNA, 25 bp, Homo sapien
atagaaataacgctttttcttcttg

SEQ ID NO: 5095575 - DNA, 25 bp, Homo sapien
gcagatacggaagccgttttggcac

SEQ ID NO: 5095576 - DNA, 25 bp, Homo sapien
tttccttcagcagatacggaagccg

SEQ ID NO: 5095577 - DNA, 25 bp, Homo sapien
tactagagttaaaggcaacaaaggc

SEQ ID NO: 5095578 - DNA, 25 bp, Homo sapien
tcctcagaaagaagccgaatactag

SEQ ID NO: 5095579 - DNA, 25 bp, Homo sapien
tcttccaatgaaatatttctcccct

SEQ ID NO: 5095580 - DNA, 25 bp, Homo sapien
ccaatgaaatatttctcccctcttc

SEQ ID NO: 5095581 - DNA, 25 bp, Homo sapien
ttatcttccaatgaaatatttctcc

SEQ ID NO: 5095582 - DNA, 25 bp, Homo sapien
ttccaatgaaatatttctcccctct

SEQ ID NO: 5095583 - DNA, 25 bp, Homo sapien
acaggtattctcatctgctcagagg

SEQ ID NO: 5095584 - DNA, 25 bp, Homo sapien
tgtcaagacctaacatttgcagctg

SEQ ID NO: 5095585 - DNA, 25 bp, Homo sapien
tgagactcctacaccaggcttcagg

SEQ ID NO: 5095586 - DNA, 25 bp, Homo sapien
tgttgccatcccaagtgtcaagacc

SEQ ID NO: 5095587 - DNA, 25 bp, Homo sapien
tctttccttccgaaatggcaggcag

SEQ ID NO: 5095588 - DNA, 25 bp, Homo sapien
ctttccttccgaaatggcaggcaga

SEQ ID NO: 5095589 - DNA, 25 bp, Homo sapien
ttctttccttccgaaatggcaggca

SEQ ID NO: 5095590 - DNA, 25 bp, Homo sapien
tttctttccttccgaaatggcaggc

SEQ ID NO: 5095591 - DNA, 25 bp, Homo sapien
gactccaatgtttccgtctgccttc

SEQ ID NO: 5095592 - DNA, 25 bp, Homo sapien
agactccaatgtttccgtctgcctt

SEQ ID NO: 5095593 - DNA, 25 bp, Homo sapien
actccaatgtttccgtctgccttca

SEQ ID NO: 5095594 - DNA, 25 bp, Homo sapien
tccaatgtttccgtctgccttcaca

SEQ ID NO: 5095595 - DNA, 25 bp, Homo sapien
tcttaatcgtaatggcagcaggaaa

SEQ ID NO: 5095596 - DNA, 25 bp, Homo sapien
cagtcttaatcgtaatggcagcagg

SEQ ID NO: 5095597 - DNA, 25 bp, Homo sapien
tcctgtcataaaacagcaattgtcc

SEQ ID NO: 5095598 - DNA, 25 bp, Homo sapien
cagtcagtcttaatcgtaatggcag

SEQ ID NO: 5095599 - DNA, 25 bp, Homo sapien
gaccaggatcggacagctctgtggc

SEQ ID NO: 5095600 - DNA, 25 bp, Homo sapien
caggatcggacagctctgtggcaac

SEQ ID NO: 5095601 - DNA, 25 bp, Homo sapien
gccctgggaccaggatcggacagct

SEQ ID NO: 5095602 - DNA, 25 bp, Homo sapien
tgggaccaggatcggacagctctgt

SEQ ID NO: 5095603 - DNA, 25 bp, Homo sapien
catctgagggcatgaaacacgagcg

SEQ ID NO: 5095604 - DNA, 25 bp, Homo sapien
tgagggcatgaaacacgagcgttct

SEQ ID NO: 5095605 - DNA, 25 bp, Homo sapien
gaaacacgagcgttctcataagaga

SEQ ID NO: 5095606 - DNA, 25 bp, Homo sapien
gcgttctcataagagagtgaaatct

SEQ ID NO: 5095607 - DNA, 25 bp, Homo sapien
gataaatgagtgtcccaatacccag

SEQ ID NO: 5095608 - DNA, 25 bp, Homo sapien
gcaattaagtttgagcaggtgccat

SEQ ID NO: 5095609 - DNA, 25 bp, Homo sapien
taagtgccacatatacacgtagctg

SEQ ID NO: 5095610 - DNA, 25 bp, Homo sapien
caccctaggaagtgagtcatgtccc

SEQ ID NO: 5095611 - DNA, 25 bp, Homo sapien
ctggcttaagttcatccacattcac

SEQ ID NO: 5095612 - DNA, 25 bp, Homo sapien
aagagctggcttaagttcatccaca

SEQ ID NO: 5095613 - DNA, 25 bp, Homo sapien
gagctggcttaagttcatccacatt

SEQ ID NO: 5095614 - DNA, 25 bp, Homo sapien
gctggcttaagttcatccacattca

SEQ ID NO: 5095615 - DNA, 25 bp, Homo sapien
aataagtcaccttaactaatggact

SEQ ID NO: 5095616 - DNA, 25 bp, Homo sapien
taagtcaccttaactaatggactcc

SEQ ID NO: 5095617 - DNA, 25 bp, Homo sapien
caataagtcaccttaactaatggac

SEQ ID NO: 5095618 - DNA, 25 bp, Homo sapien
tcaataagtcaccttaactaatgga

SEQ ID NO: 5095619 - DNA, 25 bp, Homo sapien
tcaattataaaaccgagaactccta

SEQ ID NO: 5095620 - DNA, 25 bp, Homo sapien
catcattattacttagagatgtgga

SEQ ID NO: 5095621 - DNA, 25 bp, Homo sapien
tctacattgacaagtgaaatataaa

SEQ ID NO: 5095622 - DNA, 25 bp, Homo sapien
atgacaataaaagtagctccctcta

SEQ ID NO: 5095623 - DNA, 25 bp, Homo sapien
ccaaagctggggcaaaaagctcacc

SEQ ID NO: 5095624 - DNA, 25 bp, Homo sapien
gggttgactgctgatagagttccaa

SEQ ID NO: 5095625 - DNA, 25 bp, Homo sapien
gcatttcccaaaggcatgccatgcc

SEQ ID NO: 5095626 - DNA, 25 bp, Homo sapien
ctgctgatagagttccaaagctggg

SEQ ID NO: 5095627 - DNA, 25 bp, Homo sapien
cacgtgagggtttctcacgcctgca

SEQ ID NO: 5095628 - DNA, 25 bp, Homo sapien
caatctccaaaaaggtcctgctgag

SEQ ID NO: 5095629 - DNA, 25 bp, Homo sapien
agactgcgggcttccagacagcctc

SEQ ID NO: 5095630 - DNA, 25 bp, Homo sapien
ggaagcaacgggtagaaaatccgca

SEQ ID NO: 5095631 - DNA, 25 bp, Homo sapien
tgtcctttgaaattctatcctataa

SEQ ID NO: 5095632 - DNA, 25 bp, Homo sapien
ccacgccgggtacaggcaaaaggat

SEQ ID NO: 5095633 - DNA, 25 bp, Homo sapien
tactcccaggagttaacacttctct

SEQ ID NO: 5095634 - DNA, 25 bp, Homo sapien
tgggagcttgtctccgacacaacca

SEQ ID NO: 5095635 - DNA, 25 bp, Homo sapien
cttggtctgaacactcttatcaaac

SEQ ID NO: 5095636 - DNA, 25 bp, Homo sapien
ttctttatagcgctgacatactata

SEQ ID NO: 5095637 - DNA, 25 bp, Homo sapien
gacatactatatcaggaagttttgc

SEQ ID NO: 5095638 - DNA, 25 bp, Homo sapien
aattttcttggtctgaacactctta

SEQ ID NO: 5095639 - DNA, 25 bp, Homo sapien
ttgacccctgagtggacacagcaca

SEQ ID NO: 5095640 - DNA, 25 bp, Homo sapien
accctgctgccttccacagtatttg

SEQ ID NO: 5095641 - DNA, 25 bp, Homo sapien
gaggaccctgctgccttccacagta

SEQ ID NO: 5095642 - DNA, 25 bp, Homo sapien
attgacccctgagtggacacagcac

SEQ ID NO: 5095643 - DNA, 25 bp, Homo sapien
tcataaaggatatgatgggccgggc

SEQ ID NO: 5095644 - DNA, 25 bp, Homo sapien
cacaaagaagccaccacgatgagat

SEQ ID NO: 5095645 - DNA, 25 bp, Homo sapien
aaaattgaggcatgacggtaaggcc

SEQ ID NO: 5095646 - DNA, 25 bp, Homo sapien
tatgagtcagacatcacggcagtcc

SEQ ID NO: 5095647 - DNA, 25 bp, Homo sapien
gaatgtctgggtaatatcacaggtc

SEQ ID NO: 5095648 - DNA, 25 bp, Homo sapien
ccattaaatggctacaacagtttgt

SEQ ID NO: 5095649 - DNA, 25 bp, Homo sapien
aaatacctcggaattgaatgtctgg

SEQ ID NO: 5095650 - DNA, 25 bp, Homo sapien
gacaaggactcaaatgcaccagagg

SEQ ID NO: 5095651 - DNA, 25 bp, Homo sapien
ttaacatatttctgatatggggagt

SEQ ID NO: 5095652 - DNA, 25 bp, Homo sapien
aacatatttctgatatggggagtaa

SEQ ID NO: 5095653 - DNA, 25 bp, Homo sapien
tatttctgatatggggagtaaatct

SEQ ID NO: 5095654 - DNA, 25 bp, Homo sapien
catatttctgatatggggagtaaat

SEQ ID NO: 5095655 - DNA, 25 bp, Homo sapien
cactaggtgaaaacactgcgggacc

SEQ ID NO: 5095656 - DNA, 25 bp, Homo sapien
tgggtttctccgtctacatctacac

SEQ ID NO: 5095657 - DNA, 25 bp, Homo sapien
gactaggagcaaatgcaaagtctcc

SEQ ID NO: 5095658 - DNA, 25 bp, Homo sapien
gtgctccacaggtgcaaagggaaaa

SEQ ID NO: 5095659 - DNA, 25 bp, Homo sapien
ccagaagtgggcaaatgttaaccct

SEQ ID NO: 5095660 - DNA, 25 bp, Homo sapien
tccagaagtgggcaaatgttaaccc

SEQ ID NO: 5095661 - DNA, 25 bp, Homo sapien
cagaagtgggcaaatgttaacccta

SEQ ID NO: 5095662 - DNA, 25 bp, Homo sapien
ttccagaagtgggcaaatgttaacc

SEQ ID NO: 5095663 - DNA, 25 bp, Homo sapien
tcatgtgggataaggaagggcaatt

SEQ ID NO: 5095664 - DNA, 25 bp, Homo sapien
ataaggaagggcaatttctactcgg

SEQ ID NO: 5095665 - DNA, 25 bp, Homo sapien
ggataaggaagggcaatttctactc

SEQ ID NO: 5095666 - DNA, 25 bp, Homo sapien
tgggataaggaagggcaatttctac

SEQ ID NO: 5095667 - DNA, 25 bp, Homo sapien
ccaaaacacgaagaggtggaactga

SEQ ID NO: 5095668 - DNA, 25 bp, Homo sapien
ccatgtcaaggagcactgagcagaa

SEQ ID NO: 5095669 - DNA, 25 bp, Homo sapien
ggtggaactgaccaattcagaatcc

SEQ ID NO: 5095670 - DNA, 25 bp, Homo sapien
cagaaaggtgagcaagtaacgagac

SEQ ID NO: 5095671 - DNA, 25 bp, Homo sapien
cgaagtctctatacacactagttgc

SEQ ID NO: 5095672 - DNA, 25 bp, Homo sapien
tgcagtgcccagtgccagcaaaggg

SEQ ID NO: 5095673 - DNA, 25 bp, Homo sapien
caaaacgtgatcgagcttttctcac

SEQ ID NO: 5095674 - DNA, 25 bp, Homo sapien
ggtggtaactctccggtgcagtgcc

SEQ ID NO: 5095675 - DNA, 25 bp, Homo sapien
gccatccctgatgtaaaccaaccct

SEQ ID NO: 5095676 - DNA, 25 bp, Homo sapien
cctctgttgccggaaatagacaatt

SEQ ID NO: 5095677 - DNA, 25 bp, Homo sapien
agccccacttcaaagtgtattctct

SEQ ID NO: 5095678 - DNA, 25 bp, Homo sapien
ctctaaatggcagaaggtatcttcc

SEQ ID NO: 5095679 - DNA, 25 bp, Homo sapien
tccatgaacacatctctgtctgact

SEQ ID NO: 5095680 - DNA, 25 bp, Homo sapien
tgacttcaagggaagtccattaacc

SEQ ID NO: 5095681 - DNA, 25 bp, Homo sapien
gtctgacttcaagggaagtccatta

SEQ ID NO: 5095682 - DNA, 25 bp, Homo sapien
catgaacacatctctgtctgacttc

SEQ ID NO: 5095683 - DNA, 25 bp, Homo sapien
gaacctccatctagaagctccagaa

SEQ ID NO: 5095684 - DNA, 25 bp, Homo sapien
tcaccactcacacaatctccaggaa

SEQ ID NO: 5095685 - DNA, 25 bp, Homo sapien
ctgacacaatgagggcaaagccaac

SEQ ID NO: 5095686 - DNA, 25 bp, Homo sapien
ggcaaagccaacaaacactggccct

SEQ ID NO: 5095687 - DNA, 25 bp, Homo sapien
tagctctctgagtccgtgcagagct

SEQ ID NO: 5095688 - DNA, 25 bp, Homo sapien
gatctgttagctctctgagtccgtg

SEQ ID NO: 5095689 - DNA, 25 bp, Homo sapien
cctagctgatctgttagctctctga

SEQ ID NO: 5095690 - DNA, 25 bp, Homo sapien
tgttagctctctgagtccgtgcaga

SEQ ID NO: 5095691 - DNA, 25 bp, Homo sapien
tggacactttcaaattctgctaagg

SEQ ID NO: 5095692 - DNA, 25 bp, Homo sapien
acagccagtgtcaaagagatttctc

SEQ ID NO: 5095693 - DNA, 25 bp, Homo sapien
tttctctgaagagcatcttgttccc

SEQ ID NO: 5095694 - DNA, 25 bp, Homo sapien
gatggtcgctttcatgctcatggag

SEQ ID NO: 5095695 - DNA, 25 bp, Homo sapien
cacatggattcaatgcagttctcag

SEQ ID NO: 5095696 - DNA, 25 bp, Homo sapien
aaatcgtgcttctgctttttcgaac

SEQ ID NO: 5095697 - DNA, 25 bp, Homo sapien
actgcttaggctggtatgacttctc

SEQ ID NO: 5095698 - DNA, 25 bp, Homo sapien
gttctcagtaagcagcaaatcgtgc

SEQ ID NO: 5095699 - DNA, 25 bp, Homo sapien
caagttaaatcaccccaggtactga

SEQ ID NO: 5095700 - DNA, 25 bp, Homo sapien
gcttcactgttagacgccaagttaa

SEQ ID NO: 5095701 - DNA, 25 bp, Homo sapien
gatacaactaaaggaagcttcactg

SEQ ID NO: 5095702 - DNA, 25 bp, Homo sapien
gaagcaacagcagaagatacaacta

SEQ ID NO: 5095703 - DNA, 25 bp, Homo sapien
catcaataagccatggcctcttgag

SEQ ID NO: 5095704 - DNA, 25 bp, Homo sapien
caataagccatggcctcttgaggtc

SEQ ID NO: 5095705 - DNA, 25 bp, Homo sapien
ataagccatggcctcttgaggtcat

SEQ ID NO: 5095706 - DNA, 25 bp, Homo sapien
tcaataagccatggcctcttgaggt

SEQ ID NO: 5095707 - DNA, 25 bp, Homo sapien
tagttccagcaggagtttctcattc

SEQ ID NO: 5095708 - DNA, 25 bp, Homo sapien
acaaaccttcgcagtcacctttcat

SEQ ID NO: 5095709 - DNA, 25 bp, Homo sapien
gacacaaaccttcgcagtcaccttt

SEQ ID NO: 5095710 - DNA, 25 bp, Homo sapien
tagccgccccagacacaaaccttcg

SEQ ID NO: 5095711 - DNA, 25 bp, Homo sapien
cagacacaaaccttcgcagtcacct

SEQ ID NO: 5095712 - DNA, 25 bp, Homo sapien
ccctcgctgaatggcatccccactt

SEQ ID NO: 5095713 - DNA, 25 bp, Homo sapien
cctcgctgaatggcatccccacttc

SEQ ID NO: 5095714 - DNA, 25 bp, Homo sapien
caggtgtctcctaacaatcactaac

SEQ ID NO: 5095715 - DNA, 25 bp, Homo sapien
ggtgtctcctaacaatcactaactc

SEQ ID NO: 5095716 - DNA, 25 bp, Homo sapien
gcaggtgtctcctaacaatcactaa

SEQ ID NO: 5095717 - DNA, 25 bp, Homo sapien
tgtctcctaacaatcactaactccg

SEQ ID NO: 5095718 - DNA, 25 bp, Homo sapien
gctggttacccggtgctgacagctg

SEQ ID NO: 5095719 - DNA, 25 bp, Homo sapien
ctttgctggttacccggtgctgaca

SEQ ID NO: 5095720 - DNA, 25 bp, Homo sapien
tggttacccggtgctgacagctgct

SEQ ID NO: 5095721 - DNA, 25 bp, Homo sapien
tgtctttgctggttacccggtgctg

SEQ ID NO: 5095722 - DNA, 25 bp, Homo sapien
agagcaagggcctggattccactgg

SEQ ID NO: 5095723 - DNA, 25 bp, Homo sapien
cctgcgtgtgacaagggtaatgccc

SEQ ID NO: 5095724 - DNA, 25 bp, Homo sapien
ccacagtaggagctcgttaaataac

SEQ ID NO: 5095725 - DNA, 25 bp, Homo sapien
gaaaggactatgtaaggctgacaca

SEQ ID NO: 5095726 - DNA, 25 bp, Homo sapien
tcagagtgagggcaacagtatggaa

SEQ ID NO: 5095727 - DNA, 25 bp, Homo sapien
tatggaagagtgtgcccatggcatg

SEQ ID NO: 5095728 - DNA, 25 bp, Homo sapien
tcaaggcaatttcacggcaaaacat

SEQ ID NO: 5095729 - DNA, 25 bp, Homo sapien
ggaaaggtcccttctaggcactcaa

SEQ ID NO: 5095730 - DNA, 25 bp, Homo sapien
cttgaactgtctcagctgctcctcc

SEQ ID NO: 5095731 - DNA, 25 bp, Homo sapien
tccacatcagctccttcttagagtt

SEQ ID NO: 5095732 - DNA, 25 bp, Homo sapien
tcctccacatcagctccttcttaga

SEQ ID NO: 5095733 - DNA, 25 bp, Homo sapien
agctgctcctccacatcagctcctt

SEQ ID NO: 5095734 - DNA, 25 bp, Homo sapien
tagtctgtggctactgtggtcgtca

SEQ ID NO: 5095735 - DNA, 25 bp, Homo sapien
gatgcgggaccgctcaaaaagccgc

SEQ ID NO: 5095736 - DNA, 25 bp, Homo sapien
aaaaagccgcgcagagctgttctca

SEQ ID NO: 5095737 - DNA, 25 bp, Homo sapien
cagtcgtcgacatcccagcggttgt

SEQ ID NO: 5095738 - DNA, 25 bp, Homo sapien
gggcctctgtgacaggtgtgaagga

SEQ ID NO: 5095739 - DNA, 25 bp, Homo sapien
gcctctgtgacaggtgtgaaggact

SEQ ID NO: 5095740 - DNA, 25 bp, Homo sapien
tctgtgacaggtgtgaaggactcac

SEQ ID NO: 5095741 - DNA, 25 bp, Homo sapien
ttaggcatcctgggcctctgtgaca

SEQ ID NO: 5095742 - DNA, 25 bp, Homo sapien
tccttgcgtgtaatactaacccatc

SEQ ID NO: 5095743 - DNA, 25 bp, Homo sapien
ttgcgtgtaatactaacccatcttg

SEQ ID NO: 5095744 - DNA, 25 bp, Homo sapien
ccttgcgtgtaatactaacccatct

SEQ ID NO: 5095745 - DNA, 25 bp, Homo sapien
aatccttgcgtgtaatactaaccca

SEQ ID NO: 5095746 - DNA, 25 bp, Homo sapien
ggcaaacttactcgttactgtatta

SEQ ID NO: 5095747 - DNA, 25 bp, Homo sapien
ttactgtattaaatgtgcctttacc

SEQ ID NO: 5095748 - DNA, 25 bp, Homo sapien
tactcgttactgtattaaatgtgcc

SEQ ID NO: 5095749 - DNA, 25 bp, Homo sapien
ctaatggaccaatggcaaacttact

SEQ ID NO: 5095750 - DNA, 25 bp, Homo sapien
tgttcaccagcaacaagggaatgag

SEQ ID NO: 5095751 - DNA, 25 bp, Homo sapien
tctaggtgttcaccagcaacaaggg

SEQ ID NO: 5095752 - DNA, 25 bp, Homo sapien
tggagaaagtgtgctctaggtgttc

SEQ ID NO: 5095753 - DNA, 25 bp, Homo sapien
cacaaagtaaggacatgttccacga

SEQ ID NO: 5095754 - DNA, 25 bp, Homo sapien
tatatccgggccatggtaagcagaa

SEQ ID NO: 5095755 - DNA, 25 bp, Homo sapien
tactaaggacagctggaggctctcc

SEQ ID NO: 5095756 - DNA, 25 bp, Homo sapien
tttactagcacaagccagggtcatg

SEQ ID NO: 5095757 - DNA, 25 bp, Homo sapien
cacttagcagcagtaagcccttggg

SEQ ID NO: 5095758 - DNA, 25 bp, Homo sapien
ggagcttccttcttcactttcggtg

SEQ ID NO: 5095759 - DNA, 25 bp, Homo sapien
caggagcttccttcttcactttcgg

SEQ ID NO: 5095760 - DNA, 25 bp, Homo sapien
agcttccttcttcactttcggtgcc

SEQ ID NO: 5095761 - DNA, 25 bp, Homo sapien
ctttaggcgggccaggagcttcctt

SEQ ID NO: 5095762 - DNA, 25 bp, Homo sapien
tatctgggcggcctccagagtctca

SEQ ID NO: 5095763 - DNA, 25 bp, Homo sapien
gatatctgggcggcctccagagtct

SEQ ID NO: 5095764 - DNA, 25 bp, Homo sapien
tctgggcggcctccagagtctcagt

SEQ ID NO: 5095765 - DNA, 25 bp, Homo sapien
ctgggcggcctccagagtctcagtg

SEQ ID NO: 5095766 - DNA, 25 bp, Homo sapien
tttttggtgaaaagagatatgtata

SEQ ID NO: 5095767 - DNA, 25 bp, Homo sapien
gtatatttagaattagccagatgga

SEQ ID NO: 5095768 - DNA, 25 bp, Homo sapien
atgtatatttagaattagccagatg

SEQ ID NO: 5095769 - DNA, 25 bp, Homo sapien
tttggtgaaaagagatatgtatatt

SEQ ID NO: 5095770 - DNA, 25 bp, Homo sapien
tgtttctggctactaaggagctggg

SEQ ID NO: 5095771 - DNA, 25 bp, Homo sapien
tgagtgacgcagatatgaatcagac

SEQ ID NO: 5095772 - DNA, 25 bp, Homo sapien
gaaagaactaggcactggaagtgac

SEQ ID NO: 5095773 - DNA, 25 bp, Homo sapien
tggaagtgactgattgctggccgat

SEQ ID NO: 5095774 - DNA, 25 bp, Homo sapien
ctcagcgactgtgagatttcagcca

SEQ ID NO: 5095775 - DNA, 25 bp, Homo sapien
tcagcgactgtgagatttcagccat

SEQ ID NO: 5095776 - DNA, 25 bp, Homo sapien
tgtacccaaccttacagacatttga

SEQ ID NO: 5095777 - DNA, 25 bp, Homo sapien
ctaagtatccggttggccatgatct

SEQ ID NO: 5095778 - DNA, 25 bp, Homo sapien
tataaaaggatcttccgggtcaatc

SEQ ID NO: 5095779 - DNA, 25 bp, Homo sapien
ccggttggccatgatctggtataaa

SEQ ID NO: 5095780 - DNA, 25 bp, Homo sapien
ggacacctcttctgaaggtatccac

SEQ ID NO: 5095781 - DNA, 25 bp, Homo sapien
gcaatccatggaactgtcaaataca

SEQ ID NO: 5095782 - DNA, 25 bp, Homo sapien
caaaatcggcatataaaacagcttt

SEQ ID NO: 5095783 - DNA, 25 bp, Homo sapien
aacagctttgggactggcaatccat

SEQ ID NO: 5095784 - DNA, 25 bp, Homo sapien
gactggcaatccatggaactgtcaa

SEQ ID NO: 5095785 - DNA, 25 bp, Homo sapien
cctaaaatggcgttcctccctgtgc

SEQ ID NO: 5095786 - DNA, 25 bp, Homo sapien
cacaacagtcccctaaaatggcgtt

SEQ ID NO: 5095787 - DNA, 25 bp, Homo sapien
tcacagtgtccccagagggatcctt

SEQ ID NO: 5095788 - DNA, 25 bp, Homo sapien
cttccctggaagaacacaacagtcc

SEQ ID NO: 5095789 - DNA, 25 bp, Homo sapien
aattaaagagtattcagagccctac

SEQ ID NO: 5095790 - DNA, 25 bp, Homo sapien
tcgttaagtttaggcaaggtctggc

SEQ ID NO: 5095791 - DNA, 25 bp, Homo sapien
tatattaccactagagcaagctggg

SEQ ID NO: 5095792 - DNA, 25 bp, Homo sapien
aaggcaggtcaaagataggcatcag

SEQ ID NO: 5095793 - DNA, 25 bp, Homo sapien
tcctgtagaaggacaaaggttgcta

SEQ ID NO: 5095794 - DNA, 25 bp, Homo sapien
taccttggtagcaacagcccgttag

SEQ ID NO: 5095795 - DNA, 25 bp, Homo sapien
gttagcatgctaactccctaagagc

SEQ ID NO: 5095796 - DNA, 25 bp, Homo sapien
tatacacaatcttagaggtctgagg

SEQ ID NO: 5095797 - DNA, 25 bp, Homo sapien
aagacaaggaatgcaccactgggca

SEQ ID NO: 5095798 - DNA, 25 bp, Homo sapien
tagagatcacggaagggcaaatggc

SEQ ID NO: 5095799 - DNA, 25 bp, Homo sapien
aaagatatttactcggaatcctgcc

SEQ ID NO: 5095800 - DNA, 25 bp, Homo sapien
caagcaggcaggtacacatttacac

SEQ ID NO: 5095801 - DNA, 25 bp, Homo sapien
tcatgccagtcaatgaagtgggccc

SEQ ID NO: 5095802 - DNA, 25 bp, Homo sapien
gttacaaagcaagctaccggcatgc

SEQ ID NO: 5095803 - DNA, 25 bp, Homo sapien
caggatgcggtacaagcacagcttc

SEQ ID NO: 5095804 - DNA, 25 bp, Homo sapien
caaaaggcctgtcctgagtgctaga

SEQ ID NO: 5095805 - DNA, 25 bp, Homo sapien
gctatcagctgcacgatgttgcgtt

SEQ ID NO: 5095806 - DNA, 25 bp, Homo sapien
tcagctgcacgatgttgcgtttcat

SEQ ID NO: 5095807 - DNA, 25 bp, Homo sapien
caaggaagctatcagctgcacgatg

SEQ ID NO: 5095808 - DNA, 25 bp, Homo sapien
ggaagctatcagctgcacgatgttg

SEQ ID NO: 5095809 - DNA, 25 bp, Homo sapien
tgcagaggtgggagttgagatagtt

SEQ ID NO: 5095810 - DNA, 25 bp, Homo sapien
ctgaagatacagtcctgagtgcaga

SEQ ID NO: 5095811 - DNA, 25 bp, Homo sapien
tgtggaactagagctcaaaactgaa

SEQ ID NO: 5095812 - DNA, 25 bp, Homo sapien
agggatgtggaactagagctcaaaa

SEQ ID NO: 5095813 - DNA, 25 bp, Homo sapien
aaagtcactctcagggcgctgtgca

SEQ ID NO: 5095814 - DNA, 25 bp, Homo sapien
tcggctgacttacgctgccatcagg

SEQ ID NO: 5095815 - DNA, 25 bp, Homo sapien
ccaccgggaagaagtcagacaaagt

SEQ ID NO: 5095816 - DNA, 25 bp, Homo sapien
tcgggctcagtgaagaatctcggct

SEQ ID NO: 5095817 - DNA, 25 bp, Homo sapien
tatcacttgaaaaggctagcgcgcc

SEQ ID NO: 5095818 - DNA, 25 bp, Homo sapien
tagcgtctgctgaggtaacgcggcc

SEQ ID NO: 5095819 - DNA, 25 bp, Homo sapien
gaaatgcaggctataccacgaggag

SEQ ID NO: 5095820 - DNA, 25 bp, Homo sapien
tgagcctcatgtaacggaaaagtct

SEQ ID NO: 5095821 - DNA, 25 bp, Homo sapien
agagaggaggcgcaggttctacttc

SEQ ID NO: 5095822 - DNA, 25 bp, Homo sapien
gaacttttaaatatggccaatccta

SEQ ID NO: 5095823 - DNA, 25 bp, Homo sapien
tggccaatcctaagcatgccacggt

SEQ ID NO: 5095824 - DNA, 25 bp, Homo sapien
catgccacggttgccgagcccggga

SEQ ID NO: 5095825 - DNA, 25 bp, Homo sapien
cattccggtctgcaagtccagcagg

SEQ ID NO: 5095826 - DNA, 25 bp, Homo sapien
tgcaagagagtccaccttagctccg

SEQ ID NO: 5095827 - DNA, 25 bp, Homo sapien
aggactgcgccctggaaatctcgct

SEQ ID NO: 5095828 - DNA, 25 bp, Homo sapien
gcccttgcctggaagctcgaaataa

SEQ ID NO: 5095829 - DNA, 25 bp, Homo sapien
ttgtaaggcacctgccccgtgtacg

SEQ ID NO: 5095830 - DNA, 25 bp, Homo sapien
cagcggcccggagatactagacgtc

SEQ ID NO: 5095831 - DNA, 25 bp, Homo sapien
gccttccagctggttgtagttgtaa

SEQ ID NO: 5095832 - DNA, 25 bp, Homo sapien
gcggcccggagatactagacgtcct

SEQ ID NO: 5095833 - DNA, 25 bp, Homo sapien
tagggtcacaaataaagcctccaag

SEQ ID NO: 5095834 - DNA, 25 bp, Homo sapien
tgggtctgagcacggcactttacac

SEQ ID NO: 5095835 - DNA, 25 bp, Homo sapien
tctggagtggagtatgagcaactgc

SEQ ID NO: 5095836 - DNA, 25 bp, Homo sapien
aagccgcccgtcttcattagggtca

SEQ ID NO: 5095837 - DNA, 25 bp, Homo sapien
cgcagtggattctccgacccgaaaa

SEQ ID NO: 5095838 - DNA, 25 bp, Homo sapien
ccaggcgggatgacacaatgaagct

SEQ ID NO: 5095839 - DNA, 25 bp, Homo sapien
gtgaggcccctaacaaacctagata

SEQ ID NO: 5095840 - DNA, 25 bp, Homo sapien
gcaaatttgactgccgaagagctca

SEQ ID NO: 5095841 - DNA, 25 bp, Homo sapien
gagcctacacacactattaggttta

SEQ ID NO: 5095842 - DNA, 25 bp, Homo sapien
aacttatatctctttctatagtggc

SEQ ID NO: 5095843 - DNA, 25 bp, Homo sapien
cttagagcctacacacactattagg

SEQ ID NO: 5095844 - DNA, 25 bp, Homo sapien
cttgctgaactatccttagagccta

SEQ ID NO: 5095845 - DNA, 25 bp, Homo sapien
taaacaaagacactcgcggttagaa

SEQ ID NO: 5095846 - DNA, 25 bp, Homo sapien
aagacactcgcggttagaaaagctg

SEQ ID NO: 5095847 - DNA, 25 bp, Homo sapien
caaagacactcgcggttagaaaagc

SEQ ID NO: 5095848 - DNA, 25 bp, Homo sapien
gacactcgcggttagaaaagctgtg

SEQ ID NO: 5095849 - DNA, 25 bp, Homo sapien
tatctaagtttctgaagcccagcct

SEQ ID NO: 5095850 - DNA, 25 bp, Homo sapien
cacattcgtgtgctatctaagtttc

SEQ ID NO: 5095851 - DNA, 25 bp, Homo sapien
ttaaaagaccaagtttgcacattcg

SEQ ID NO: 5095852 - DNA, 25 bp, Homo sapien
aagaccaagtttgcacattcgtgtg

SEQ ID NO: 5095853 - DNA, 25 bp, Homo sapien
tgaaaaaaataacatcccacctcca

SEQ ID NO: 5095854 - DNA, 25 bp, Homo sapien
ggaaagtagttcatgggccaaaagc

SEQ ID NO: 5095855 - DNA, 25 bp, Homo sapien
tcccacctccaaattgaaatcatat

SEQ ID NO: 5095856 - DNA, 25 bp, Homo sapien
gattgggaggcacaaagggctggga

SEQ ID NO: 5095857 - DNA, 25 bp, Homo sapien
cctggttcatgctggaaagccccca

SEQ ID NO: 5095858 - DNA, 25 bp, Homo sapien
ctggttcatgctggaaagcccccac

SEQ ID NO: 5095859 - DNA, 25 bp, Homo sapien
gcctggttcatgctggaaagccccc

SEQ ID NO: 5095860 - DNA, 25 bp, Homo sapien
caatgcaaatcgcagctggaagtct

SEQ ID NO: 5095861 - DNA, 25 bp, Homo sapien
caagtaaggctgaacacgtaaggat

SEQ ID NO: 5095862 - DNA, 25 bp, Homo sapien
taatacattcataccagagggcttc

SEQ ID NO: 5095863 - DNA, 25 bp, Homo sapien
gacatggcacctttcagtctagcag

SEQ ID NO: 5095864 - DNA, 25 bp, Homo sapien
aatattctcaggttccgtgtggccg

SEQ ID NO: 5095865 - DNA, 25 bp, Homo sapien
cccaggcctgtacttttggaagtat

SEQ ID NO: 5095866 - DNA, 25 bp, Homo sapien
gataaaaatgcctacccagagtggg

SEQ ID NO: 5095867 - DNA, 25 bp, Homo sapien
taatggcaatactagtggtcttccc

SEQ ID NO: 5095868 - DNA, 25 bp, Homo sapien
caagatcgacaccttcctttttaag

SEQ ID NO: 5095869 - DNA, 25 bp, Homo sapien
taattcatcttgcaccttcaaggag

SEQ ID NO: 5095870 - DNA, 25 bp, Homo sapien
aatggagggtgcttctctcccctgc

SEQ ID NO: 5095871 - DNA, 25 bp, Homo sapien
cacctgggaggagtgtaattcatct

SEQ ID NO: 5095872 - DNA, 25 bp, Homo sapien
caacacaacccaggactcgaggcag

SEQ ID NO: 5095873 - DNA, 25 bp, Homo sapien
ctaccaacacaacccaggactcgag

SEQ ID NO: 5095874 - DNA, 25 bp, Homo sapien
cccaggactcgaggcagctgcagct

SEQ ID NO: 5095875 - DNA, 25 bp, Homo sapien
cacaacccaggactcgaggcagctg

SEQ ID NO: 5095876 - DNA, 25 bp, Homo sapien
taaacagctgctatattgcatctta

SEQ ID NO: 5095877 - DNA, 25 bp, Homo sapien
gagggctaactgcacttataatcaa

SEQ ID NO: 5095878 - DNA, 25 bp, Homo sapien
ggcacagtcgtccttccgtatctaa

SEQ ID NO: 5095879 - DNA, 25 bp, Homo sapien
tagtatttgcctataaccaacatac

SEQ ID NO: 5095880 - DNA, 25 bp, Homo sapien
caccaagggcacgccctttgcaagg

SEQ ID NO: 5095881 - DNA, 25 bp, Homo sapien
agggcacgccctttgcaaggcagag

SEQ ID NO: 5095882 - DNA, 25 bp, Homo sapien
gccaccaagggcacgccctttgcaa

SEQ ID NO: 5095883 - DNA, 25 bp, Homo sapien
ccaagggcacgccctttgcaaggca

SEQ ID NO: 5095884 - DNA, 25 bp, Homo sapien
acttgttttaccattgaccacagaa

SEQ ID NO: 5095885 - DNA, 25 bp, Homo sapien
gcagagaagaacttgttttaccatt

SEQ ID NO: 5095886 - DNA, 25 bp, Homo sapien
gaagaacttgttttaccattgacca

SEQ ID NO: 5095887 - DNA, 25 bp, Homo sapien
gcaagcagagaagaacttgttttac

SEQ ID NO: 5095888 - DNA, 25 bp, Homo sapien
catccgtccatctcgaaggtcagtg

SEQ ID NO: 5095889 - DNA, 25 bp, Homo sapien
tctgtgatccggcaggacacacggg

SEQ ID NO: 5095890 - DNA, 25 bp, Homo sapien
cacacgggcaaggtgggaattgacc

SEQ ID NO: 5095891 - DNA, 25 bp, Homo sapien
aaggtcagtgtacaggtctgtgatc

SEQ ID NO: 5095892 - DNA, 25 bp, Homo sapien
ggcacttcctaaggtctccactcac

SEQ ID NO: 5095893 - DNA, 25 bp, Homo sapien
tttcattgcaggctgacaactttcc

SEQ ID NO: 5095894 - DNA, 25 bp, Homo sapien
aggtgcataaacaagagtcacatca

SEQ ID NO: 5095895 - DNA, 25 bp, Homo sapien
ctctgggaaacagattggggataca

SEQ ID NO: 5095896 - DNA, 25 bp, Homo sapien
ttaagcttctttggtataaggtgca

SEQ ID NO: 5095897 - DNA, 25 bp, Homo sapien
ggcaccacttccacctatggcacta

SEQ ID NO: 5095898 - DNA, 25 bp, Homo sapien
ttctggctcggcaccacttccacct

SEQ ID NO: 5095899 - DNA, 25 bp, Homo sapien
ttccacctatggcactacatgtgct

SEQ ID NO: 5095900 - DNA, 25 bp, Homo sapien
attctgggcgttggcttctggctcg

SEQ ID NO: 5095901 - DNA, 25 bp, Homo sapien
caggccaaggcccatctttccttcc

SEQ ID NO: 5095902 - DNA, 25 bp, Homo sapien
ctcaggccaaggcccatctttcctt

SEQ ID NO: 5095903 - DNA, 25 bp, Homo sapien
tcaggccaaggcccatctttccttc

SEQ ID NO: 5095904 - DNA, 25 bp, Homo sapien
gccaagggtcagccggtggtttcca

SEQ ID NO: 5095905 - DNA, 25 bp, Homo sapien
atccacgatgtcatgggaccccatg

SEQ ID NO: 5095906 - DNA, 25 bp, Homo sapien
gatgcgcattcgtcccttggtgggt

SEQ ID NO: 5095907 - DNA, 25 bp, Homo sapien
ggaccccatgttctcaagatggact

SEQ ID NO: 5095908 - DNA, 25 bp, Homo sapien
aatgaccttgagagtaccttccggc

SEQ ID NO: 5095909 - DNA, 25 bp, Homo sapien
tatttgttcgcagagaaacctgaca

SEQ ID NO: 5095910 - DNA, 25 bp, Homo sapien
taattggaacgcatgagtacgaagc

SEQ ID NO: 5095911 - DNA, 25 bp, Homo sapien
tgcacagtcccaaaaggctgagcgc

SEQ ID NO: 5095912 - DNA, 25 bp, Homo sapien
acagcaatgcatccttggcagattt

SEQ ID NO: 5095913 - DNA, 25 bp, Homo sapien
cagcaatgcatccttggcagatttc

SEQ ID NO: 5095914 - DNA, 25 bp, Homo sapien
aacagcaatgcatccttggcagatt

SEQ ID NO: 5095915 - DNA, 25 bp, Homo sapien
cctccagctagtggtgaaattgtga

SEQ ID NO: 5095916 - DNA, 25 bp, Homo sapien
tgtgtatcagtgcattgaaggccat

SEQ ID NO: 5095917 - DNA, 25 bp, Homo sapien
catgccgtccctccagctagtggtg

SEQ ID NO: 5095918 - DNA, 25 bp, Homo sapien
tgcattgaaggccatgccgtccctc

SEQ ID NO: 5095919 - DNA, 25 bp, Homo sapien
gcaggttgtagtgtgcgttagattt

SEQ ID NO: 5095920 - DNA, 25 bp, Homo sapien
tgtagtgtgcgttagatttctttag

SEQ ID NO: 5095921 - DNA, 25 bp, Homo sapien
ctttagtttgtcaaaatctatcagg

SEQ ID NO: 5095922 - DNA, 25 bp, Homo sapien
tcggggtccaacagtttagtgaggc

SEQ ID NO: 5095923 - DNA, 25 bp, Homo sapien
gacatttctaaattctatagcctac

SEQ ID NO: 5095924 - DNA, 25 bp, Homo sapien
actgtatctctgaatcaaacttgac

SEQ ID NO: 5095925 - DNA, 25 bp, Homo sapien
tatagcctactacctctcaaacact

SEQ ID NO: 5095926 - DNA, 25 bp, Homo sapien
gcctcctaaggaggtgaaattgcag

SEQ ID NO: 5095927 - DNA, 25 bp, Homo sapien
ggtagcaggaacaaatgcaacgact

SEQ ID NO: 5095928 - DNA, 25 bp, Homo sapien
gtagcaggaacaaatgcaacgactg

SEQ ID NO: 5095929 - DNA, 25 bp, Homo sapien
ctgtaacccagagaagactctgttc

SEQ ID NO: 5095930 - DNA, 25 bp, Homo sapien
caggtagcaggaacaaatgcaacga

SEQ ID NO: 5095931 - DNA, 25 bp, Homo sapien
ccacataagtgattatggacttctc

SEQ ID NO: 5095932 - DNA, 25 bp, Homo sapien
gacttctcatcaggatggtccacgc

SEQ ID NO: 5095933 - DNA, 25 bp, Homo sapien
gctaaggccttcatcttagagaagt

SEQ ID NO: 5095934 - DNA, 25 bp, Homo sapien
tagagaagtagtggtaataagtcac

SEQ ID NO: 5095935 - DNA, 25 bp, Homo sapien
gaatgatgatggtttgttcaatcca

SEQ ID NO: 5095936 - DNA, 25 bp, Homo sapien
gaaggtcagaggcaagtgattcata

SEQ ID NO: 5095937 - DNA, 25 bp, Homo sapien
cacagtgcggtaagtgttgaatgcc

SEQ ID NO: 5095938 - DNA, 25 bp, Homo sapien
tgttgaaccccgaccagtgaattgg

SEQ ID NO: 5095939 - DNA, 25 bp, Homo sapien
atgtcagagatgagcttcccctccc

SEQ ID NO: 5095940 - DNA, 25 bp, Homo sapien
cagagatgagcttcccctcccgggg

SEQ ID NO: 5095941 - DNA, 25 bp, Homo sapien
tgtcagagatgagcttcccctcccg

SEQ ID NO: 5095942 - DNA, 25 bp, Homo sapien
gtcagagatgagcttcccctcccgg

SEQ ID NO: 5095943 - DNA, 25 bp, Homo sapien
tatgagctcattccgcaaagccagt

SEQ ID NO: 5095944 - DNA, 25 bp, Homo sapien
aagccagttctctttcgtgttccgc

SEQ ID NO: 5095945 - DNA, 25 bp, Homo sapien
gcgatcaaatctgcgggcgagctgt

SEQ ID NO: 5095946 - DNA, 25 bp, Homo sapien
tccctcatagctgccttgcgatcaa

SEQ ID NO: 5095947 - DNA, 25 bp, Homo sapien
caactgcaggaaggtcaaacccaaa

SEQ ID NO: 5095948 - DNA, 25 bp, Homo sapien
tgcaggaaggtcaaacccaaagttg

SEQ ID NO: 5095949 - DNA, 25 bp, Homo sapien
ctcaactgcaggaaggtcaaaccca

SEQ ID NO: 5095950 - DNA, 25 bp, Homo sapien
actgcaggaaggtcaaacccaaagt

SEQ ID NO: 5095951 - DNA, 25 bp, Homo sapien
gatgtcgtggtaattctcggcctcg

SEQ ID NO: 5095952 - DNA, 25 bp, Homo sapien
gttccagtaggtattcccagagccg

SEQ ID NO: 5095953 - DNA, 25 bp, Homo sapien
gcacacgctcctcgtatgcggcaat

SEQ ID NO: 5095954 - DNA, 25 bp, Homo sapien
ccaggttcatctcgagccgctgtct

SEQ ID NO: 5095955 - DNA, 25 bp, Homo sapien
caccaagtaagtgtttgccatagtc

SEQ ID NO: 5095956 - DNA, 25 bp, Homo sapien
cgtctgttgcgaacttctgggcgga

SEQ ID NO: 5095957 - DNA, 25 bp, Homo sapien
caaccagggtgtgcttctgtaacag

SEQ ID NO: 5095958 - DNA, 25 bp, Homo sapien
tctgggcggaggcattgacacctct

SEQ ID NO: 5095959 - DNA, 25 bp, Homo sapien
acaccagggtgtcggtgcatggcca

SEQ ID NO: 5095960 - DNA, 25 bp, Homo sapien
tccaaagagaggtatatgcaaccag

SEQ ID NO: 5095961 - DNA, 25 bp, Homo sapien
gactgaggtatgacaaagtctcact

SEQ ID NO: 5095962 - DNA, 25 bp, Homo sapien
gaaatacacgaagcataaccaaatc

SEQ ID NO: 5095963 - DNA, 25 bp, Homo sapien
taagctacaccccatattcttatga

SEQ ID NO: 5095964 - DNA, 25 bp, Homo sapien
tgcaggctcactggcaggcagtaag

SEQ ID NO: 5095965 - DNA, 25 bp, Homo sapien
tatgattaccagctcactgctaaat

SEQ ID NO: 5095966 - DNA, 25 bp, Homo sapien
caaggaaggaacgtggctgtgtgag

SEQ ID NO: 5095967 - DNA, 25 bp, Homo sapien
tggaatactcatcgtggcccacgtc

SEQ ID NO: 5095968 - DNA, 25 bp, Homo sapien
ttccgaatggccgagagctgctcta

SEQ ID NO: 5095969 - DNA, 25 bp, Homo sapien
caggtctttcccgtaatcgtccgag

SEQ ID NO: 5095970 - DNA, 25 bp, Homo sapien
taacagaactccatgtgggccacgc

SEQ ID NO: 5095971 - DNA, 25 bp, Homo sapien
tggttcaccactgcaacccgggaag

SEQ ID NO: 5095972 - DNA, 25 bp, Homo sapien
ttgtgttgagtttgtcctgctgggc

SEQ ID NO: 5095973 - DNA, 25 bp, Homo sapien
atcagctggcgtgcaatctggttca

SEQ ID NO: 5095974 - DNA, 25 bp, Homo sapien
tcacttgggtggccgctgtgcatca

SEQ ID NO: 5095975 - DNA, 25 bp, Homo sapien
ccatggctggattgcaaaaggaaca

SEQ ID NO: 5095976 - DNA, 25 bp, Homo sapien
gaatgtgttacagagctccaatgtg

SEQ ID NO: 5095977 - DNA, 25 bp, Homo sapien
gactgatggtaaccttcaaaactgg

SEQ ID NO: 5095978 - DNA, 25 bp, Homo sapien
taaacatgctagagtcctgttcctg

SEQ ID NO: 5095979 - DNA, 25 bp, Homo sapien
cagggaggcctctcggtttttcagg

SEQ ID NO: 5095980 - DNA, 25 bp, Homo sapien
tggaagtcgtccaagtcccgtagga

SEQ ID NO: 5095981 - DNA, 25 bp, Homo sapien
taagaaaggcttcggcttgcttcgt

SEQ ID NO: 5095982 - DNA, 25 bp, Homo sapien
gtgtttggcatgtcctccgaggcga

SEQ ID NO: 5095983 - DNA, 25 bp, Homo sapien
cataagagatcctcaatggcagttg

SEQ ID NO: 5095984 - DNA, 25 bp, Homo sapien
tgaagacatactatgaacacataag

SEQ ID NO: 5095985 - DNA, 25 bp, Homo sapien
aggcaaagcagctcttatggcaact

SEQ ID NO: 5095986 - DNA, 25 bp, Homo sapien
tacaacgtgatggatttcaatgcct

SEQ ID NO: 5095987 - DNA, 25 bp, Homo sapien
agttgatgttcccatcgctcaccag

SEQ ID NO: 5095988 - DNA, 25 bp, Homo sapien
ctcctggatgcgatctgagttgatg

SEQ ID NO: 5095989 - DNA, 25 bp, Homo sapien
gatcttctcctcattggcgtccatg

SEQ ID NO: 5095990 - DNA, 25 bp, Homo sapien
atcaatagagtccaccttctcctgg

SEQ ID NO: 5095991 - DNA, 25 bp, Homo sapien
ctcccttaagaacctcagaaaactg

SEQ ID NO: 5095992 - DNA, 25 bp, Homo sapien
gcaaggctcccttaagaacctcaga

SEQ ID NO: 5095993 - DNA, 25 bp, Homo sapien
agccccaaggtgcaaggctccctta

SEQ ID NO: 5095994 - DNA, 25 bp, Homo sapien
gaagtttgagagccccaaggtgcaa

SEQ ID NO: 5095995 - DNA, 25 bp, Homo sapien
gaatcctaaggaagctctggaacac

SEQ ID NO: 5095996 - DNA, 25 bp, Homo sapien
catatccaggagtctagacagcatc

SEQ ID NO: 5095997 - DNA, 25 bp, Homo sapien
cccaggctcttggtcaagggcaaaa

SEQ ID NO: 5095998 - DNA, 25 bp, Homo sapien
tctggaacaccagtagcccaggctc

SEQ ID NO: 5095999 - DNA, 25 bp, Homo sapien
cccacccacatctgttagagtcagt

SEQ ID NO: 5096000 - DNA, 25 bp, Homo sapien
gttctggtactctttcaacaactca

SEQ ID NO: 5096001 - DNA, 25 bp, Homo sapien
tctttgttctggtactctttcaaca

SEQ ID NO: 5096002 - DNA, 25 bp, Homo sapien
ttgaaggccactcatgccccaccca

SEQ ID NO: 5096003 - DNA, 25 bp, Homo sapien
tatgcgcaggtgtgacaacggcctt

SEQ ID NO: 5096004 - DNA, 25 bp, Homo sapien
tgggactgccgctgactcagaagac

SEQ ID NO: 5096005 - DNA, 25 bp, Homo sapien
caacggccttcgtgtggtgtgaaac

SEQ ID NO: 5096006 - DNA, 25 bp, Homo sapien
gtccaaatgacaccgatctatgcgc

SEQ ID NO: 5096007 - DNA, 25 bp, Homo sapien
tcttgcaggaatttctgtagatccc

SEQ ID NO: 5096008 - DNA, 25 bp, Homo sapien
ttcaacctcatcaaaagttcactgg

SEQ ID NO: 5096009 - DNA, 25 bp, Homo sapien
cctgttgtccttcaacctcatcaaa

SEQ ID NO: 5096010 - DNA, 25 bp, Homo sapien
gttcactggctgtctcacgattctt

SEQ ID NO: 5096011 - DNA, 25 bp, Homo sapien
catttgctttgctaacctaggaaga

SEQ ID NO: 5096012 - DNA, 25 bp, Homo sapien
atgccagagtcctgattcccgcccc

SEQ ID NO: 5096013 - DNA, 25 bp, Homo sapien
agagtcctgattcccgccccatttg

SEQ ID NO: 5096014 - DNA, 25 bp, Homo sapien
gctttgctaacctaggaagagcttt

SEQ ID NO: 5096015 - DNA, 25 bp, Homo sapien
ggggtcagccaaacgccaggcccag

SEQ ID NO: 5096016 - DNA, 25 bp, Homo sapien
cggggtcagccaaacgccaggccca

SEQ ID NO: 5096017 - DNA, 25 bp, Homo sapien
gaacacttcacaggacttgattttg

SEQ ID NO: 5096018 - DNA, 25 bp, Homo sapien
tttgagacccaacatgtctgcttgg

SEQ ID NO: 5096019 - DNA, 25 bp, Homo sapien
cttggatctgaactctagagagccg

SEQ ID NO: 5096020 - DNA, 25 bp, Homo sapien
tagagagccgcacaaaggctgctgg

SEQ ID NO: 5096021 - DNA, 25 bp, Homo sapien
tggatgcaagttctgccataaatgc

SEQ ID NO: 5096022 - DNA, 25 bp, Homo sapien
tgcttgatgcttcaaccatttactg

SEQ ID NO: 5096023 - DNA, 25 bp, Homo sapien
caagccattctttgttggatgcaag

SEQ ID NO: 5096024 - DNA, 25 bp, Homo sapien
tggcttcatcgtaagacatgtcctg

SEQ ID NO: 5096025 - DNA, 25 bp, Homo sapien
tgtttgcatcaaagagccgctgggc

SEQ ID NO: 5096026 - DNA, 25 bp, Homo sapien
gccgtgcagccatttgtctagatct

SEQ ID NO: 5096027 - DNA, 25 bp, Homo sapien
tgaatctgactctccaggccgtgca

SEQ ID NO: 5096028 - DNA, 25 bp, Homo sapien
gctctgggtgaaaagttcggccttg

SEQ ID NO: 5096029 - DNA, 25 bp, Homo sapien
acccaagtccatgatggcttgtcca

SEQ ID NO: 5096030 - DNA, 25 bp, Homo sapien
cccaagtccatgatggcttgtccac

SEQ ID NO: 5096031 - DNA, 25 bp, Homo sapien
ctgagggcagagaagcagcctcagc

SEQ ID NO: 5096032 - DNA, 25 bp, Homo sapien
tgagggcagagaagcagcctcagcg

SEQ ID NO: 5096033 - DNA, 25 bp, Homo sapien
tttggagctcttcgatctccttctt

SEQ ID NO: 5096034 - DNA, 25 bp, Homo sapien
ggctttggagctcttcgatctcctt

SEQ ID NO: 5096035 - DNA, 25 bp, Homo sapien
ctttggagctcttcgatctccttct

SEQ ID NO: 5096036 - DNA, 25 bp, Homo sapien
gctttggagctcttcgatctccttc

SEQ ID NO: 5096037 - DNA, 25 bp, Homo sapien
ttcctctcgttcaagggctccagca

SEQ ID NO: 5096038 - DNA, 25 bp, Homo sapien
actccatgaacttggtctgcacggt

SEQ ID NO: 5096039 - DNA, 25 bp, Homo sapien
cacatccctgttgaactgatggatc

SEQ ID NO: 5096040 - DNA, 25 bp, Homo sapien
ggaggccagcaggttatgcttcctc

SEQ ID NO: 5096041 - DNA, 25 bp, Homo sapien
cactcagaggaacaaatatacgaca

SEQ ID NO: 5096042 - DNA, 25 bp, Homo sapien
ggaagcacgcccttgttctccgaga

SEQ ID NO: 5096043 - DNA, 25 bp, Homo sapien
tatacgacacaaacgagcagtgagg

SEQ ID NO: 5096044 - DNA, 25 bp, Homo sapien
tcaaggtcaaactcactgtgagtcc

SEQ ID NO: 5096045 - DNA, 25 bp, Homo sapien
gttgtggccatgatccgtggaagtt

SEQ ID NO: 5096046 - DNA, 25 bp, Homo sapien
ggccatgatccgtggaagttgccaa

SEQ ID NO: 5096047 - DNA, 25 bp, Homo sapien
tctttattaacagctgcacagtctg

SEQ ID NO: 5096048 - DNA, 25 bp, Homo sapien
taacagctgcacagtctggaggttg

SEQ ID NO: 5096049 - DNA, 25 bp, Homo sapien
caaagtagtactgctgggccctgtg

SEQ ID NO: 5096050 - DNA, 25 bp, Homo sapien
tcaaagatgtcgtcaatgcgaggct

SEQ ID NO: 5096051 - DNA, 25 bp, Homo sapien
aagcctctgtctgatggcctcagcg

SEQ ID NO: 5096052 - DNA, 25 bp, Homo sapien
tcggcctcagcagcgtcaaagtagt

SEQ ID NO: 5096053 - DNA, 25 bp, Homo sapien
tagtcctccacagcttgttctaaga

SEQ ID NO: 5096054 - DNA, 25 bp, Homo sapien
gtcttggagagctgatgcacggtct

SEQ ID NO: 5096055 - DNA, 25 bp, Homo sapien
tttcaggatggctgtcggccaccag

SEQ ID NO: 5096056 - DNA, 25 bp, Homo sapien
ttctaagatctggtgcttcttcaac

SEQ ID NO: 5096057 - DNA, 25 bp, Homo sapien
gctggaataacctgtgtctctcatc

SEQ ID NO: 5096058 - DNA, 25 bp, Homo sapien
caaggtctttcagaccagcgtacag

SEQ ID NO: 5096059 - DNA, 25 bp, Homo sapien
tccactttggactgccgcatgctaa

SEQ ID NO: 5096060 - DNA, 25 bp, Homo sapien
cagaccagcgtacagtttatccact

SEQ ID NO: 5096061 - DNA, 25 bp, Homo sapien
ctccctctcagcgatccactgctcc

SEQ ID NO: 5096062 - DNA, 25 bp, Homo sapien
tccctctcagcgatccactgctcca

SEQ ID NO: 5096063 - DNA, 25 bp, Homo sapien
tgtcccagttcatgggaccctgcga

SEQ ID NO: 5096064 - DNA, 25 bp, Homo sapien
catagtcctgtcccagttcatggga

SEQ ID NO: 5096065 - DNA, 25 bp, Homo sapien
tagtcctgtcccagttcatgggacc

SEQ ID NO: 5096066 - DNA, 25 bp, Homo sapien
tcctgtcccagttcatgggaccctg

SEQ ID NO: 5096067 - DNA, 25 bp, Homo sapien
acttgtgcagttcataggaagcggc

SEQ ID NO: 5096068 - DNA, 25 bp, Homo sapien
tgaggccatccttccattcagcgat

SEQ ID NO: 5096069 - DNA, 25 bp, Homo sapien
tgtatacgcccaaagatctccttgg

SEQ ID NO: 5096070 - DNA, 25 bp, Homo sapien
tccttggcatcgtggtaaaacttgt

SEQ ID NO: 5096071 - DNA, 25 bp, Homo sapien
tatgtatcgcctgtaagagttctca

SEQ ID NO: 5096072 - DNA, 25 bp, Homo sapien
cagctcctacagaaggtaaatgggc

SEQ ID NO: 5096073 - DNA, 25 bp, Homo sapien
aatgaaatgctacaggaagacaggc

SEQ ID NO: 5096074 - DNA, 25 bp, Homo sapien
aatatggcccatgccccttaaggag

SEQ ID NO: 5096075 - DNA, 25 bp, Homo sapien
catgaggtcgcgcaccatgctgaag

SEQ ID NO: 5096076 - DNA, 25 bp, Homo sapien
aggacctcgttctcgcgcttctgga

SEQ ID NO: 5096077 - DNA, 25 bp, Homo sapien
cgatctgccggatgacatcctccat

SEQ ID NO: 5096078 - DNA, 25 bp, Homo sapien
gatatcgtcggccttgtcacccgca

SEQ ID NO: 5096079 - DNA, 25 bp, Homo sapien
cccaagttcaatgcaggttgtgaaa

SEQ ID NO: 5096080 - DNA, 25 bp, Homo sapien
taagagttcaacagatgatacatcc

SEQ ID NO: 5096081 - DNA, 25 bp, Homo sapien
ggttgtgaaactgtcattacgtgca

SEQ ID NO: 5096082 - DNA, 25 bp, Homo sapien
catagtgttttctcgccaacaggga

SEQ ID NO: 5096083 - DNA, 25 bp, Homo sapien
agtcttaaccattcccatcggtctt

SEQ ID NO: 5096084 - DNA, 25 bp, Homo sapien
ccacttgtcgatcatttctttcctc

SEQ ID NO: 5096085 - DNA, 25 bp, Homo sapien
catcggtcttcccacttgtcgatca

SEQ ID NO: 5096086 - DNA, 25 bp, Homo sapien
cctcttttccgtcaactgcagtaat

SEQ ID NO: 5096087 - DNA, 25 bp, Homo sapien
ggaggtgccctctgtcatccctaaa

SEQ ID NO: 5096088 - DNA, 25 bp, Homo sapien
tatgacactgagatcaatcaagagg

SEQ ID NO: 5096089 - DNA, 25 bp, Homo sapien
gaggtgaaaaatgactacgccatag

SEQ ID NO: 5096090 - DNA, 25 bp, Homo sapien
tacgccataggaagcttcttaaaag

SEQ ID NO: 5096091 - DNA, 25 bp, Homo sapien
tagtacacgttgaccaggaggtgcc

SEQ ID NO: 5096092 - DNA, 25 bp, Homo sapien
tgccgggcagtcatatggccttacc

SEQ ID NO: 5096093 - DNA, 25 bp, Homo sapien
taaatgtaatgtgagccacacttgc

SEQ ID NO: 5096094 - DNA, 25 bp, Homo sapien
ccctctggtgatggctacctgcata

SEQ ID NO: 5096095 - DNA, 25 bp, Homo sapien
cgctctggcctatctctcggctgga

SEQ ID NO: 5096096 - DNA, 25 bp, Homo sapien
ggccacactggcgtctcttgagaac

SEQ ID NO: 5096097 - DNA, 25 bp, Homo sapien
gataggtacggctcctgtccaagca

SEQ ID NO: 5096098 - DNA, 25 bp, Homo sapien
tctcttgagaactgatggacctcca

SEQ ID NO: 5096099 - DNA, 25 bp, Homo sapien
gcagagaacctctcatcccaggttg

SEQ ID NO: 5096100 - DNA, 25 bp, Homo sapien
agagaacctctcatcccaggttgct

SEQ ID NO: 5096101 - DNA, 25 bp, Homo sapien
ggcagagaacctctcatcccaggtt

SEQ ID NO: 5096102 - DNA, 25 bp, Homo sapien
gggcagagaacctctcatcccaggt

SEQ ID NO: 5096103 - DNA, 25 bp, Homo sapien
tgtgagttgtttgtaggacccctgg

SEQ ID NO: 5096104 - DNA, 25 bp, Homo sapien
gaaatagtctattccatgggctggc

SEQ ID NO: 5096105 - DNA, 25 bp, Homo sapien
tttgctaaactggaccacactggac

SEQ ID NO: 5096106 - DNA, 25 bp, Homo sapien
gaagtcctcctgtctagtttgctaa

SEQ ID NO: 5096107 - DNA, 25 bp, Homo sapien
ttcctctgaaaccttcgtgctcggc

SEQ ID NO: 5096108 - DNA, 25 bp, Homo sapien
ctcttgctgtctgcgcacttccagt

SEQ ID NO: 5096109 - DNA, 25 bp, Homo sapien
ctgaaaccttcgtgctcggctcggg

SEQ ID NO: 5096110 - DNA, 25 bp, Homo sapien
gtctgcgcacttccagtaactccaa

SEQ ID NO: 5096111 - DNA, 25 bp, Homo sapien
tcagctggcaaaccgttttgggaaa

SEQ ID NO: 5096112 - DNA, 25 bp, Homo sapien
ttcagctggcaaaccgttttgggaa

SEQ ID NO: 5096113 - DNA, 25 bp, Homo sapien
gttcagctggcaaaccgttttggga

SEQ ID NO: 5096114 - DNA, 25 bp, Homo sapien
cactggctgtccgtctgctattaaa

SEQ ID NO: 5096115 - DNA, 25 bp, Homo sapien
tcacagtccagaccatggctggtca

SEQ ID NO: 5096116 - DNA, 25 bp, Homo sapien
tggtaggtttgagagcggtaactaa

SEQ ID NO: 5096117 - DNA, 25 bp, Homo sapien
ttgtagttttggtaggtttgagagc

SEQ ID NO: 5096118 - DNA, 25 bp, Homo sapien
aatatgaaaccaaggaaggctatga

SEQ ID NO: 5096119 - DNA, 25 bp, Homo sapien
taagtatgctgctttaaggcaagtg

SEQ ID NO: 5096120 - DNA, 25 bp, Homo sapien
gtgggcatccatcagttaagagact

SEQ ID NO: 5096121 - DNA, 25 bp, Homo sapien
ggaaagggtgattcttgacaaatgg

SEQ ID NO: 5096122 - DNA, 25 bp, Homo sapien
ttcatttcaattactcatgtaaggg

SEQ ID NO: 5096123 - DNA, 25 bp, Homo sapien
tcaattactcatgtaagggtttcgc

SEQ ID NO: 5096124 - DNA, 25 bp, Homo sapien
tcatgtaagggtttcgctgtaaaat

SEQ ID NO: 5096125 - DNA, 25 bp, Homo sapien
actcatgtaagggtttcgctgtaaa

SEQ ID NO: 5096126 - DNA, 25 bp, Homo sapien
taacatctgtaaaggcggctacata

SEQ ID NO: 5096127 - DNA, 25 bp, Homo sapien
gcagtcagcgggcactttactcctg

SEQ ID NO: 5096128 - DNA, 25 bp, Homo sapien
tctttcatggaatgttacacagctg

SEQ ID NO: 5096129 - DNA, 25 bp, Homo sapien
caacatctgtgcaaggaagcctaca

SEQ ID NO: 5096130 - DNA, 25 bp, Homo sapien
gcttctaaaacatgctgagaacggc

SEQ ID NO: 5096131 - DNA, 25 bp, Homo sapien
gtctgtgaggcaagcttctaaaaca

SEQ ID NO: 5096132 - DNA, 25 bp, Homo sapien
acatgctgagaacggctgtcacctg

SEQ ID NO: 5096133 - DNA, 25 bp, Homo sapien
gcatggaagtctgtgaggcaagctt

SEQ ID NO: 5096134 - DNA, 25 bp, Homo sapien
ctgctggtggcctgatagataccat

SEQ ID NO: 5096135 - DNA, 25 bp, Homo sapien
ggtccaccaagtgcaacgttcaagt

SEQ ID NO: 5096136 - DNA, 25 bp, Homo sapien
cgttcaagtaatcaggatgaaccac

SEQ ID NO: 5096137 - DNA, 25 bp, Homo sapien
attaaaacagtttgacaccctgaag

SEQ ID NO: 5096138 - DNA, 25 bp, Homo sapien
tagagctccctaatgaccaaagaca

SEQ ID NO: 5096139 - DNA, 25 bp, Homo sapien
tgggcacacccgagatacttaaatc

SEQ ID NO: 5096140 - DNA, 25 bp, Homo sapien
tgaatgcaacgtgacaactagtagc

SEQ ID NO: 5096141 - DNA, 25 bp, Homo sapien
tattcaaagtgcacgaagcaatgct

SEQ ID NO: 5096142 - DNA, 25 bp, Homo sapien
tgacctgggtagagagatgtttcct

SEQ ID NO: 5096143 - DNA, 25 bp, Homo sapien
ccagggtgtgcgattagcgagttac

SEQ ID NO: 5096144 - DNA, 25 bp, Homo sapien
tagtggattacagacaacctgcacc

SEQ ID NO: 5096145 - DNA, 25 bp, Homo sapien
caagataaacggtagactggccacc

SEQ ID NO: 5096146 - DNA, 25 bp, Homo sapien
ctgtgtaccatcaactgtgtaccat

SEQ ID NO: 5096147 - DNA, 25 bp, Homo sapien
gtgtaccatcaactgtgtaccatta

SEQ ID NO: 5096148 - DNA, 25 bp, Homo sapien
actgtgtaccattaactgtagcagc

SEQ ID NO: 5096149 - DNA, 25 bp, Homo sapien
taccattaactgtagcagcccctgg

SEQ ID NO: 5096150 - DNA, 25 bp, Homo sapien
ccttcaggctggagacgtcttcggg

SEQ ID NO: 5096151 - DNA, 25 bp, Homo sapien
ggttggttgatcacggtgccttgct

SEQ ID NO: 5096152 - DNA, 25 bp, Homo sapien
accctcatggcttttcggctttgga

SEQ ID NO: 5096153 - DNA, 25 bp, Homo sapien
cggctttggaaatgtagtagggtct

SEQ ID NO: 5096154 - DNA, 25 bp, Homo sapien
cacatctgccgaagttgtatcgtga

SEQ ID NO: 5096155 - DNA, 25 bp, Homo sapien
tcaacaaacatcaatttgaccacat

SEQ ID NO: 5096156 - DNA, 25 bp, Homo sapien
tagtttgtgttaaaggagctggaaa

SEQ ID NO: 5096157 - DNA, 25 bp, Homo sapien
ggagctggaaaagccaatcacagtc

SEQ ID NO: 5096158 - DNA, 25 bp, Homo sapien
catcccagttagactttggaactta

SEQ ID NO: 5096159 - DNA, 25 bp, Homo sapien
ccagttagactttggaacttaagag

SEQ ID NO: 5096160 - DNA, 25 bp, Homo sapien
ggcattcccccagagtaagacaagg

SEQ ID NO: 5096161 - DNA, 25 bp, Homo sapien
aacacatgcagaaattaggacgaca

SEQ ID NO: 5096162 - DNA, 25 bp, Homo sapien
gacctcggttcctgaaaatgctctc

SEQ ID NO: 5096163 - DNA, 25 bp, Homo sapien
gatagacaactctatcagagctaca

SEQ ID NO: 5096164 - DNA, 25 bp, Homo sapien
gaggccattcagctaactccgtgag

SEQ ID NO: 5096165 - DNA, 25 bp, Homo sapien
gggtgaccacatacgctctacctga

SEQ ID NO: 5096166 - DNA, 25 bp, Homo sapien
ggcacagatcgaggcagtacagtaa

SEQ ID NO: 5096167 - DNA, 25 bp, Homo sapien
agagagtggacgttatacagcagcc

SEQ ID NO: 5096168 - DNA, 25 bp, Homo sapien
ccactcgtgtttccgattgaggaag

SEQ ID NO: 5096169 - DNA, 25 bp, Homo sapien
ggctttcttattgtgggcctcccac

SEQ ID NO: 5096170 - DNA, 25 bp, Homo sapien
cctttgttctgtagcgccgttgacc

SEQ ID NO: 5096171 - DNA, 25 bp, Homo sapien
tcttggctttacgatcagaggtcgg

SEQ ID NO: 5096172 - DNA, 25 bp, Homo sapien
tctctttcacttcggagaaaagcaa

SEQ ID NO: 5096173 - DNA, 25 bp, Homo sapien
tactctttgctgtagcgccctctta

SEQ ID NO: 5096174 - DNA, 25 bp, Homo sapien
aagttaccctcttgtactctgagct

SEQ ID NO: 5096175 - DNA, 25 bp, Homo sapien
gcaagtgtttgaggactatgtcttc

SEQ ID NO: 5096176 - DNA, 25 bp, Homo sapien
ttcaaactcacagggacctcgctgt

SEQ ID NO: 5096177 - DNA, 25 bp, Homo sapien
tatgacacaataaacattgtgccag

SEQ ID NO: 5096178 - DNA, 25 bp, Homo sapien
gtaatcaagggccacttcgcagaca

SEQ ID NO: 5096179 - DNA, 25 bp, Homo sapien
acctcgctgtggtagggaattccag

SEQ ID NO: 5096180 - DNA, 25 bp, Homo sapien
gctgccggtgcattgtcctacaaaa

SEQ ID NO: 5096181 - DNA, 25 bp, Homo sapien
catctcctgggtcgggataagctga

SEQ ID NO: 5096182 - DNA, 25 bp, Homo sapien
ggaagtaaatgcaaacccactctgg

SEQ ID NO: 5096183 - DNA, 25 bp, Homo sapien
gaattcagcctaaccgagacacgtg

SEQ ID NO: 5096184 - DNA, 25 bp, Homo sapien
tggaagaggtactcattgccatcat

SEQ ID NO: 5096185 - DNA, 25 bp, Homo sapien
atcgtctttggcttggaagaggtac

SEQ ID NO: 5096186 - DNA, 25 bp, Homo sapien
ctttggcttggaagaggtactcatt

SEQ ID NO: 5096187 - DNA, 25 bp, Homo sapien
gaggtactcattgccatcatttagt

SEQ ID NO: 5096188 - DNA, 25 bp, Homo sapien
tggcggaagagatagcctggatcca

SEQ ID NO: 5096189 - DNA, 25 bp, Homo sapien
ctcgtgtttatcagaggagatggcg

SEQ ID NO: 5096190 - DNA, 25 bp, Homo sapien
tgccaaaaaggctgaaccgcttctc

SEQ ID NO: 5096191 - DNA, 25 bp, Homo sapien
actcgctggtgatggtgacgacgct

SEQ ID NO: 5096192 - DNA, 25 bp, Homo sapien
tagaggcgggttatttccaacacag

SEQ ID NO: 5096193 - DNA, 25 bp, Homo sapien
ccacattgaggaacattaggcacag

SEQ ID NO: 5096194 - DNA, 25 bp, Homo sapien
gcataccaacagcactagaggcggg

SEQ ID NO: 5096195 - DNA, 25 bp, Homo sapien
gagtcaagagtcagggtaaccacca

SEQ ID NO: 5096196 - DNA, 25 bp, Homo sapien
cattacaatagttacagtgacagag

SEQ ID NO: 5096197 - DNA, 25 bp, Homo sapien
gcccagcctctggagttcattccta

SEQ ID NO: 5096198 - DNA, 25 bp, Homo sapien
acacagtgtggcaacgcacgagcaa

SEQ ID NO: 5096199 - DNA, 25 bp, Homo sapien
gcacactatgtatcaaatagcaagg

SEQ ID NO: 5096200 - DNA, 25 bp, Homo sapien
taacagatagggcaaaagttgagag

SEQ ID NO: 5096201 - DNA, 25 bp, Homo sapien
caaaagttgagaggtacaggtcgta

SEQ ID NO: 5096202 - DNA, 25 bp, Homo sapien
tacaggtcgtacgactgagcaccag

SEQ ID NO: 5096203 - DNA, 25 bp, Homo sapien
gcatttaatgacatagcatatattt

SEQ ID NO: 5096204 - DNA, 25 bp, Homo sapien
tgatggcgaacacgtcttgactggg

SEQ ID NO: 5096205 - DNA, 25 bp, Homo sapien
gagagcaaataccaccaaaccctgg

SEQ ID NO: 5096206 - DNA, 25 bp, Homo sapien
tgctcaagtaggacaaaaagtggcc

SEQ ID NO: 5096207 - DNA, 25 bp, Homo sapien
ggctgtgcggcctgtaacctctgat

SEQ ID NO: 5096208 - DNA, 25 bp, Homo sapien
tttgatgctatctcttgttttatgt

SEQ ID NO: 5096209 - DNA, 25 bp, Homo sapien
actcaggccctttggtagtggtgaa

SEQ ID NO: 5096210 - DNA, 25 bp, Homo sapien
ccctgcttcaatctgatggcctgca

SEQ ID NO: 5096211 - DNA, 25 bp, Homo sapien
tcataccatccatgtggtcacactc

SEQ ID NO: 5096212 - DNA, 25 bp, Homo sapien
caatctgatggcctgcagagacatc

SEQ ID NO: 5096213 - DNA, 25 bp, Homo sapien
tcaactactagaccttgttaattct

SEQ ID NO: 5096214 - DNA, 25 bp, Homo sapien
caactactagaccttgttaattctt

SEQ ID NO: 5096215 - DNA, 25 bp, Homo sapien
ctatcaactactagaccttgttaat

SEQ ID NO: 5096216 - DNA, 25 bp, Homo sapien
ctactagaccttgttaattctttct

SEQ ID NO: 5096217 - DNA, 25 bp, Homo sapien
aactggaagtgccagagtttggatg

SEQ ID NO: 5096218 - DNA, 25 bp, Homo sapien
gatgatttgttgctgcccgcagtaa

SEQ ID NO: 5096219 - DNA, 25 bp, Homo sapien
ccgcagtaatgaggatttgaattgg

SEQ ID NO: 5096220 - DNA, 25 bp, Homo sapien
cctggtaggaaagctcgaaagaact

SEQ ID NO: 5096221 - DNA, 25 bp, Homo sapien
gtcagcggagcctgcggctctcggg

SEQ ID NO: 5096222 - DNA, 25 bp, Homo sapien
gggtgaggagatcccggctcaccaa

SEQ ID NO: 5096223 - DNA, 25 bp, Homo sapien
cacgcgggcgttcccttgtgactga

SEQ ID NO: 5096224 - DNA, 25 bp, Homo sapien
aaggacgattgcctgcccacgcggg

SEQ ID NO: 5096225 - DNA, 25 bp, Homo sapien
gggagacaggttcttcctccagccg

SEQ ID NO: 5096226 - DNA, 25 bp, Homo sapien
aagtgtagtcctctctgcgccggtt

SEQ ID NO: 5096227 - DNA, 25 bp, Homo sapien
gagatctcgccgcttggaaacagcg

SEQ ID NO: 5096228 - DNA, 25 bp, Homo sapien
tcagctgccggttactaggcgagat

SEQ ID NO: 5096229 - DNA, 25 bp, Homo sapien
ctctgctgccagcggacgccaccgg

SEQ ID NO: 5096230 - DNA, 25 bp, Homo sapien
accggcgcgtcccggatcccgcgcg

SEQ ID NO: 5096231 - DNA, 25 bp, Homo sapien
gccagcggacgccaccggcgcgtcc

SEQ ID NO: 5096232 - DNA, 25 bp, Homo sapien
tgctgccagcggacgccaccggcgc

SEQ ID NO: 5096233 - DNA, 25 bp, Homo sapien
gcaaaaatcgtgtacttctccccag

SEQ ID NO: 5096234 - DNA, 25 bp, Homo sapien
tacctacaaacgctcctggtcgagg

SEQ ID NO: 5096235 - DNA, 25 bp, Homo sapien
gtcggagggagtgcgctacctacaa

SEQ ID NO: 5096236 - DNA, 25 bp, Homo sapien
tcttactcggaagaaacgaggcact

SEQ ID NO: 5096237 - DNA, 25 bp, Homo sapien
ggaatctgcatatcccaacagcgat

SEQ ID NO: 5096238 - DNA, 25 bp, Homo sapien
gggatttattctgcgatagccttga

SEQ ID NO: 5096239 - DNA, 25 bp, Homo sapien
ctcactgaagtttgcggtgcgccgg

SEQ ID NO: 5096240 - DNA, 25 bp, Homo sapien
tgatttgacaggcaacccgggtgag

SEQ ID NO: 5096241 - DNA, 25 bp, Homo sapien
tgtgctcgcgggtgttgtaaaccac

SEQ ID NO: 5096242 - DNA, 25 bp, Homo sapien
tgataatgtcgtcgttgtgtcccag

SEQ ID NO: 5096243 - DNA, 25 bp, Homo sapien
gtacacccactccagccggagctgg

SEQ ID NO: 5096244 - DNA, 25 bp, Homo sapien
acctccttgcctgccgtgtagtaca

SEQ ID NO: 5096245 - DNA, 25 bp, Homo sapien
gcatcagaacactcaactccttgga

SEQ ID NO: 5096246 - DNA, 25 bp, Homo sapien
tcagtaattccatgcggctccagag

SEQ ID NO: 5096247 - DNA, 25 bp, Homo sapien
taaaagccagaattccggagggata

SEQ ID NO: 5096248 - DNA, 25 bp, Homo sapien
ggttattggtcctaccgtgcacctg

SEQ ID NO: 5096249 - DNA, 25 bp, Homo sapien
gaggctcccatatgacgaaaatctt

SEQ ID NO: 5096250 - DNA, 25 bp, Homo sapien
tcagcaagtcattttccctgtgggc

SEQ ID NO: 5096251 - DNA, 25 bp, Homo sapien
gaaaaggattccctgtgaacagcat

SEQ ID NO: 5096252 - DNA, 25 bp, Homo sapien
cataccttgtttgctcacataaaag

SEQ ID NO: 5096253 - DNA, 25 bp, Homo sapien
gacttctgcctgtgagcaatgatga

SEQ ID NO: 5096254 - DNA, 25 bp, Homo sapien
gataacgaagtcagtgccctttccc

SEQ ID NO: 5096255 - DNA, 25 bp, Homo sapien
tacccaagtgtgcatgataacgaag

SEQ ID NO: 5096256 - DNA, 25 bp, Homo sapien
tttgcaaatgggagccggaaaacga

SEQ ID NO: 5096257 - DNA, 25 bp, Homo sapien
cagacctgtgtccagcagcaaggct

SEQ ID NO: 5096258 - DNA, 25 bp, Homo sapien
tcctcagctggctcaacagacctgt

SEQ ID NO: 5096259 - DNA, 25 bp, Homo sapien
cagcaaggctgatgcttataaaatc

SEQ ID NO: 5096260 - DNA, 25 bp, Homo sapien
ggctcaacagacctgtgtccagcag

SEQ ID NO: 5096261 - DNA, 25 bp, Homo sapien
ccatgaatgggctaggagtatgtcc

SEQ ID NO: 5096262 - DNA, 25 bp, Homo sapien
gccagagtgacaggtatacagccta

SEQ ID NO: 5096263 - DNA, 25 bp, Homo sapien
gcacctgcgaccttgtgactggtaa

SEQ ID NO: 5096264 - DNA, 25 bp, Homo sapien
tgcatatgtggactcctgccctcgt

SEQ ID NO: 5096265 - DNA, 25 bp, Homo sapien
tgcaaggagtatgggtgatgggacc

SEQ ID NO: 5096266 - DNA, 25 bp, Homo sapien
tgatgggaccaaaggtaggaaagtc

SEQ ID NO: 5096267 - DNA, 25 bp, Homo sapien
gcaaggagtatgggtgatgggacca

SEQ ID NO: 5096268 - DNA, 25 bp, Homo sapien
caaggctgtgggcagtaacatggag

SEQ ID NO: 5096269 - DNA, 25 bp, Homo sapien
ggcttatatgaatctgccacaaatt

SEQ ID NO: 5096270 - DNA, 25 bp, Homo sapien
tagttctgcccccatgaaatcaggg

SEQ ID NO: 5096271 - DNA, 25 bp, Homo sapien
ggagacacatataccctttgactta

SEQ ID NO: 5096272 - DNA, 25 bp, Homo sapien
tttataagtccgtatgtctaaaatc

SEQ ID NO: 5096273 - DNA, 25 bp, Homo sapien
tataagtccgtatgtctaaaatcca

SEQ ID NO: 5096274 - DNA, 25 bp, Homo sapien
gatccagtcacagtcactaacatct

SEQ ID NO: 5096275 - DNA, 25 bp, Homo sapien
ataagtccgtatgtctaaaatccag

SEQ ID NO: 5096276 - DNA, 25 bp, Homo sapien
ccctgctctgcgttccagaggtcat

SEQ ID NO: 5096277 - DNA, 25 bp, Homo sapien
gctctgcgttccagaggtcattcct

SEQ ID NO: 5096278 - DNA, 25 bp, Homo sapien
cctcatcccatgaatgccccctttg

SEQ ID NO: 5096279 - DNA, 25 bp, Homo sapien
tgctccccctgctctgcgttccaga

SEQ ID NO: 5096280 - DNA, 25 bp, Homo sapien
agtgtctgtgacatgagtctcacct

SEQ ID NO: 5096281 - DNA, 25 bp, Homo sapien
tatccatctggctacctttcataga

SEQ ID NO: 5096282 - DNA, 25 bp, Homo sapien
atgagtctcacctttatccatctgg

SEQ ID NO: 5096283 - DNA, 25 bp, Homo sapien
tagaaggcactatcccatctggatc

SEQ ID NO: 5096284 - DNA, 25 bp, Homo sapien
gcctgctgaagctgttttccgatga

SEQ ID NO: 5096285 - DNA, 25 bp, Homo sapien
tgaaattaatgtcatacccaatttt

SEQ ID NO: 5096286 - DNA, 25 bp, Homo sapien
gctgttttccgatgaaattaatgtc

SEQ ID NO: 5096287 - DNA, 25 bp, Homo sapien
tgctgaagctgttttccgatgaaat

SEQ ID NO: 5096288 - DNA, 25 bp, Homo sapien
tctttagcaactgggactcatcctc

SEQ ID NO: 5096289 - DNA, 25 bp, Homo sapien
cactctctttagcaactgggactca

SEQ ID NO: 5096290 - DNA, 25 bp, Homo sapien
tagcaactgggactcatcctccaag

SEQ ID NO: 5096291 - DNA, 25 bp, Homo sapien
tctctttagcaactgggactcatcc

SEQ ID NO: 5096292 - DNA, 25 bp, Homo sapien
tggcactcctgaggcagctcatctg

SEQ ID NO: 5096293 - DNA, 25 bp, Homo sapien
ggcactcctgaggcagctcatctgg

SEQ ID NO: 5096294 - DNA, 25 bp, Homo sapien
caattgtggtagaataaaaagagac

SEQ ID NO: 5096295 - DNA, 25 bp, Homo sapien
gcagctggcaataaagctgtcctta

SEQ ID NO: 5096296 - DNA, 25 bp, Homo sapien
gatgtggacagcaaagctgcagctg

SEQ ID NO: 5096297 - DNA, 25 bp, Homo sapien
tcacagggcgatgtggacagcaaag

SEQ ID NO: 5096298 - DNA, 25 bp, Homo sapien
agctggcaataaagctgtccttact

SEQ ID NO: 5096299 - DNA, 25 bp, Homo sapien
cagacaaacatactgcggctcacgg

SEQ ID NO: 5096300 - DNA, 25 bp, Homo sapien
taatgctcaagaacaatccaatagg

SEQ ID NO: 5096301 - DNA, 25 bp, Homo sapien
tatttatcgatcaattactatgcgg

SEQ ID NO: 5096302 - DNA, 25 bp, Homo sapien
cagacctaggtctgtatgactacaa

SEQ ID NO: 5096303 - DNA, 25 bp, Homo sapien
ttgagaaggagaactgtctcctagt

SEQ ID NO: 5096304 - DNA, 25 bp, Homo sapien
ctgtctcctagtaggctattgaggg

SEQ ID NO: 5096305 - DNA, 25 bp, Homo sapien
aactgtcaagtagacactttctctt

SEQ ID NO: 5096306 - DNA, 25 bp, Homo sapien
aaccagtaacaactgttccatcaac

SEQ ID NO: 5096307 - DNA, 25 bp, Homo sapien
tcaaagtgctgcagagcttaccttt

SEQ ID NO: 5096308 - DNA, 25 bp, Homo sapien
ttaaaggatccccgccttgtgacta

SEQ ID NO: 5096309 - DNA, 25 bp, Homo sapien
cttgtgactacctggccacagggtg

SEQ ID NO: 5096310 - DNA, 25 bp, Homo sapien
ggatccccgccttgtgactacctgg

SEQ ID NO: 5096311 - DNA, 25 bp, Homo sapien
agcagcatccatcctcaacaggtgg

SEQ ID NO: 5096312 - DNA, 25 bp, Homo sapien
tgagagaggtctcaaggccagacca

SEQ ID NO: 5096313 - DNA, 25 bp, Homo sapien
tctctcctttgaactccgatggctg

SEQ ID NO: 5096314 - DNA, 25 bp, Homo sapien
tgttattgtctatactggccccttg

SEQ ID NO: 5096315 - DNA, 25 bp, Homo sapien
ttgccagatggcaaaatgttactac

SEQ ID NO: 5096316 - DNA, 25 bp, Homo sapien
caagcattgagggttgtatctggca

SEQ ID NO: 5096317 - DNA, 25 bp, Homo sapien
tacctttcttgtagtgtagcacaca

SEQ ID NO: 5096318 - DNA, 25 bp, Homo sapien
gataattaaatatgccagtcatgtg

SEQ ID NO: 5096319 - DNA, 25 bp, Homo sapien
tgacatgtatcatccagggcacagc

SEQ ID NO: 5096320 - DNA, 25 bp, Homo sapien
ttcagcagtgacatgtatcatccag

SEQ ID NO: 5096321 - DNA, 25 bp, Homo sapien
atgtatcatccagggcacagccaaa

SEQ ID NO: 5096322 - DNA, 25 bp, Homo sapien
gcagtgacatgtatcatccagggca

SEQ ID NO: 5096323 - DNA, 25 bp, Homo sapien
atgaaacttcgtcaaataccaactg

SEQ ID NO: 5096324 - DNA, 25 bp, Homo sapien
tttacatagatcactgtgacaccaa

SEQ ID NO: 5096325 - DNA, 25 bp, Homo sapien
ggaattaaacatacttgcagaagca

SEQ ID NO: 5096326 - DNA, 25 bp, Homo sapien
ctgtgtctgttgctatagattacaa

SEQ ID NO: 5096327 - DNA, 25 bp, Homo sapien
tatatatggctccttcccgacttgg

SEQ ID NO: 5096328 - DNA, 25 bp, Homo sapien
gagacacagtctggacattatagga

SEQ ID NO: 5096329 - DNA, 25 bp, Homo sapien
cttggccagttgcaacgagagtttt

SEQ ID NO: 5096330 - DNA, 25 bp, Homo sapien
tcaaaagccaggcaggcaactccat

SEQ ID NO: 5096331 - DNA, 25 bp, Homo sapien
tccagtcccaaatgcagactgtgtt

SEQ ID NO: 5096332 - DNA, 25 bp, Homo sapien
gtcccaaatgcagactgtgtttttg

SEQ ID NO: 5096333 - DNA, 25 bp, Homo sapien
tcctccagtcccaaatgcagactgt

SEQ ID NO: 5096334 - DNA, 25 bp, Homo sapien
caaatgcagactgtgtttttggcat

SEQ ID NO: 5096335 - DNA, 25 bp, Homo sapien
tgtgttttactccacagctaaccac

SEQ ID NO: 5096336 - DNA, 25 bp, Homo sapien
tccacagctaaccactctgtttggc

SEQ ID NO: 5096337 - DNA, 25 bp, Homo sapien
tatggatcccaggaaatatcaaaaa

SEQ ID NO: 5096338 - DNA, 25 bp, Homo sapien
tgtttggctgatatggatcccagga

SEQ ID NO: 5096339 - DNA, 25 bp, Homo sapien
cagctcttggttcatacttctaaca

SEQ ID NO: 5096340 - DNA, 25 bp, Homo sapien
aaaagccacaaatctaatcccacca

SEQ ID NO: 5096341 - DNA, 25 bp, Homo sapien
gataagttactcagcaatgagtcag

SEQ ID NO: 5096342 - DNA, 25 bp, Homo sapien
caacttcctagagacacttaagtgg

SEQ ID NO: 5096343 - DNA, 25 bp, Homo sapien
tgaggctcagcctaagcagcatctc

SEQ ID NO: 5096344 - DNA, 25 bp, Homo sapien
tatgtgctccttgaatggtgcggac

SEQ ID NO: 5096345 - DNA, 25 bp, Homo sapien
tttttgcagtcagggcatttccaca

SEQ ID NO: 5096346 - DNA, 25 bp, Homo sapien
ggtgcggactaaattgagccctttc

SEQ ID NO: 5096347 - DNA, 25 bp, Homo sapien
tctttttgcagtcagggcatttcca

SEQ ID NO: 5096348 - DNA, 25 bp, Homo sapien
tggtaggtcacccacagatttccac

SEQ ID NO: 5096349 - DNA, 25 bp, Homo sapien
tcacccacagatttccacaaggtaa

SEQ ID NO: 5096350 - DNA, 25 bp, Homo sapien
cttatttggtaggtcacccacagat

SEQ ID NO: 5096351 - DNA, 25 bp, Homo sapien
taggtcacccacagatttccacaag

SEQ ID NO: 5096352 - DNA, 25 bp, Homo sapien
gtgtcccacagtcgtatacacccat

SEQ ID NO: 5096353 - DNA, 25 bp, Homo sapien
tctcgcccaccagtggcaaagcctt

SEQ ID NO: 5096354 - DNA, 25 bp, Homo sapien
ggttattggtttgaaatcagtgtcc

SEQ ID NO: 5096355 - DNA, 25 bp, Homo sapien
tgaaatcagtgtcccacagtcgtat

SEQ ID NO: 5096356 - DNA, 25 bp, Homo sapien
taaacaggaagtacaatatccagct

SEQ ID NO: 5096357 - DNA, 25 bp, Homo sapien
gagaagacaagagtccaatcctgga

SEQ ID NO: 5096358 - DNA, 25 bp, Homo sapien
tagttgacttagatgcacatttttg

SEQ ID NO: 5096359 - DNA, 25 bp, Homo sapien
gctggcatccaggtataaacaggaa

SEQ ID NO: 5096360 - DNA, 25 bp, Homo sapien
gaacttaaggccttcgatctccttg

SEQ ID NO: 5096361 - DNA, 25 bp, Homo sapien
gctcttacgggtacttgcaagctta

SEQ ID NO: 5096362 - DNA, 25 bp, Homo sapien
tggcatgttttttccggatcaagtt

SEQ ID NO: 5096363 - DNA, 25 bp, Homo sapien
cattgaggtagacaccaaattccac

SEQ ID NO: 5096364 - DNA, 25 bp, Homo sapien
cggagggcgtcgctgactgtcctaa

SEQ ID NO: 5096365 - DNA, 25 bp, Homo sapien
taactctgtagatgggagttggctg

SEQ ID NO: 5096366 - DNA, 25 bp, Homo sapien
tctgagactgatgtataacggaggg

SEQ ID NO: 5096367 - DNA, 25 bp, Homo sapien
ccagatgtgctttgatcttggtaag

SEQ ID NO: 5096368 - DNA, 25 bp, Homo sapien
attttatactcagaccagagaagag

SEQ ID NO: 5096369 - DNA, 25 bp, Homo sapien
gatcaacatcggcttgtctcgctct

SEQ ID NO: 5096370 - DNA, 25 bp, Homo sapien
ggcttgtctcgctctcgcacaatca

SEQ ID NO: 5096371 - DNA, 25 bp, Homo sapien
ttccagcacacgctccggatagaga

SEQ ID NO: 5096372 - DNA, 25 bp, Homo sapien
tagaaggcggtctgctttccagcac

SEQ ID NO: 5096373 - DNA, 25 bp, Homo sapien
ttacagcgggcgatcaaggcatgat

SEQ ID NO: 5096374 - DNA, 25 bp, Homo sapien
ctgaaagctacactgcgaaccgcct

SEQ ID NO: 5096375 - DNA, 25 bp, Homo sapien
gcgaaccgcctcttccatgttacag

SEQ ID NO: 5096376 - DNA, 25 bp, Homo sapien
tcggagaacaatgaaagagccgtcc

SEQ ID NO: 5096377 - DNA, 25 bp, Homo sapien
aacgagtgactgttaagcttgatac

SEQ ID NO: 5096378 - DNA, 25 bp, Homo sapien
gaaacgagtgactgttaagcttgat

SEQ ID NO: 5096379 - DNA, 25 bp, Homo sapien
taagaaacgagtgactgttaagctt

SEQ ID NO: 5096380 - DNA, 25 bp, Homo sapien
tttaagaaacgagtgactgttaagc

SEQ ID NO: 5096381 - DNA, 25 bp, Homo sapien
aaaaagcaaaacgataagcagcaat

SEQ ID NO: 5096382 - DNA, 25 bp, Homo sapien
aaaagcaaaacgataagcagcaatt

SEQ ID NO: 5096383 - DNA, 25 bp, Homo sapien
taagtatttactatccaaggaccag

SEQ ID NO: 5096384 - DNA, 25 bp, Homo sapien
caattttcttatacctctgggcaac

SEQ ID NO: 5096385 - DNA, 25 bp, Homo sapien
gatcccactgcaaggtaagaaccat

SEQ ID NO: 5096386 - DNA, 25 bp, Homo sapien
tctgggcaacagcatagacatctac

SEQ ID NO: 5096387 - DNA, 25 bp, Homo sapien
gggagtattattgcccaacaagctg

SEQ ID NO: 5096388 - DNA, 25 bp, Homo sapien
gataatgtagccgactatccctgga

SEQ ID NO: 5096389 - DNA, 25 bp, Homo sapien
gatctgggactaaaacaatccaagt

SEQ ID NO: 5096390 - DNA, 25 bp, Homo sapien
tactatagtgtacaagtgttgcacc

SEQ ID NO: 5096391 - DNA, 25 bp, Homo sapien
tgtccaggaggcccaaggaatccct

SEQ ID NO: 5096392 - DNA, 25 bp, Homo sapien
ttcacgcatgtccaggaggcccaag

SEQ ID NO: 5096393 - DNA, 25 bp, Homo sapien
catgtccaggaggcccaaggaatcc

SEQ ID NO: 5096394 - DNA, 25 bp, Homo sapien
ctttcacgcatgtccaggaggccca

SEQ ID NO: 5096395 - DNA, 25 bp, Homo sapien
agttgatgtcagtaacctcagtgta

SEQ ID NO: 5096396 - DNA, 25 bp, Homo sapien
gttgtaattcgcatccactgagttg

SEQ ID NO: 5096397 - DNA, 25 bp, Homo sapien
ccagacaccagcactgagctgttgt

SEQ ID NO: 5096398 - DNA, 25 bp, Homo sapien
cagcactgagctgttgtaattcgca

SEQ ID NO: 5096399 - DNA, 25 bp, Homo sapien
tgcagtttccagcatgccgttgctg

SEQ ID NO: 5096400 - DNA, 25 bp, Homo sapien
cagaatggcccacatactttctaaa

SEQ ID NO: 5096401 - DNA, 25 bp, Homo sapien
tgggaccagcggacatttgtgacat

SEQ ID NO: 5096402 - DNA, 25 bp, Homo sapien
aacacccactgaaagtcatgggacc

SEQ ID NO: 5096403 - DNA, 25 bp, Homo sapien
tgcccacccaagtgttggtaattgt

SEQ ID NO: 5096404 - DNA, 25 bp, Homo sapien
ttggaacacataggccccaaccgtg

SEQ ID NO: 5096405 - DNA, 25 bp, Homo sapien
ggtaattgtcatggcccaaaccacc

SEQ ID NO: 5096406 - DNA, 25 bp, Homo sapien
cgtgaaccactgcttgagccccatt

SEQ ID NO: 5096407 - DNA, 25 bp, Homo sapien
tttctattagatagcagatacctgg

SEQ ID NO: 5096408 - DNA, 25 bp, Homo sapien
gatagcagatacctgggttttaagc

SEQ ID NO: 5096409 - DNA, 25 bp, Homo sapien
tcaccttttggtttagttcagccca

SEQ ID NO: 5096410 - DNA, 25 bp, Homo sapien
gcctaggttggtcatttacacattt

SEQ ID NO: 5096411 - DNA, 25 bp, Homo sapien
gttcgggcacatcagataaatctga

SEQ ID NO: 5096412 - DNA, 25 bp, Homo sapien
ttcttgctcaatatcagagtccagt

SEQ ID NO: 5096413 - DNA, 25 bp, Homo sapien
atcagagtccagttcgggcacatca

SEQ ID NO: 5096414 - DNA, 25 bp, Homo sapien
gagcttcttgctcaatatcagagtc

SEQ ID NO: 5096415 - DNA, 25 bp, Homo sapien
ttgcacatttttcttcaaaatatat

SEQ ID NO: 5096416 - DNA, 25 bp, Homo sapien
gcacatttttcttcaaaatatattt

SEQ ID NO: 5096417 - DNA, 25 bp, Homo sapien
tgcacatttttcttcaaaatatatt

SEQ ID NO: 5096418 - DNA, 25 bp, Homo sapien
tcaagggtatccatccttgtaaagg

SEQ ID NO: 5096419 - DNA, 25 bp, Homo sapien
tttcataatctgctaagaaagtgaa

SEQ ID NO: 5096420 - DNA, 25 bp, Homo sapien
caagggtatccatccttgtaaagga

SEQ ID NO: 5096421 - DNA, 25 bp, Homo sapien
gctttcataatctgctaagaaagtg

SEQ ID NO: 5096422 - DNA, 25 bp, Homo sapien
catcaggttccaaaaatatcagcat

SEQ ID NO: 5096423 - DNA, 25 bp, Homo sapien
tctgggtgagatgcctttcatcagg

SEQ ID NO: 5096424 - DNA, 25 bp, Homo sapien
tttcatcaggttccaaaaatatcag

SEQ ID NO: 5096425 - DNA, 25 bp, Homo sapien
gaaacatctgggtgagatgcctttc

SEQ ID NO: 5096426 - DNA, 25 bp, Homo sapien
tagctgaggtagatcttctttgtaa

SEQ ID NO: 5096427 - DNA, 25 bp, Homo sapien
ttgttgctttagctgaggtagatct

SEQ ID NO: 5096428 - DNA, 25 bp, Homo sapien
actttgttgctttagctgaggtaga

SEQ ID NO: 5096429 - DNA, 25 bp, Homo sapien
gctgaggtagatcttctttgtaaac

SEQ ID NO: 5096430 - DNA, 25 bp, Homo sapien
tttctcgtttgaggaagggcactgc

SEQ ID NO: 5096431 - DNA, 25 bp, Homo sapien
ccgtgtatgaactggagtttcaagc

SEQ ID NO: 5096432 - DNA, 25 bp, Homo sapien
tgtatgaactggagtttcaagctgt

SEQ ID NO: 5096433 - DNA, 25 bp, Homo sapien
aggaagggcactgcgtggtttttct

SEQ ID NO: 5096434 - DNA, 25 bp, Homo sapien
tatgacatggtgacaaaggactctc

SEQ ID NO: 5096435 - DNA, 25 bp, Homo sapien
taatgactggctaaggaatcctgca

SEQ ID NO: 5096436 - DNA, 25 bp, Homo sapien
gaacatgtacaagtggaaccccagg

SEQ ID NO: 5096437 - DNA, 25 bp, Homo sapien
tgactctcaaaaaggcacatgggca

SEQ ID NO: 5096438 - DNA, 25 bp, Homo sapien
gaacagattgtttctacagtcgtag

SEQ ID NO: 5096439 - DNA, 25 bp, Homo sapien
tgctgctgccgattatacacgacag

SEQ ID NO: 5096440 - DNA, 25 bp, Homo sapien
caactgcagcaatgtggtagactac

SEQ ID NO: 5096441 - DNA, 25 bp, Homo sapien
tgagaatgtcgtcatcgtgccccag

SEQ ID NO: 5096442 - DNA, 25 bp, Homo sapien
ccaaatgattgtagagggtccctgt

SEQ ID NO: 5096443 - DNA, 25 bp, Homo sapien
ttacactcccaaatgattgtagagg

SEQ ID NO: 5096444 - DNA, 25 bp, Homo sapien
gtagagggtccctgttttagcagct

SEQ ID NO: 5096445 - DNA, 25 bp, Homo sapien
gattgtagagggtccctgttttagc

SEQ ID NO: 5096446 - DNA, 25 bp, Homo sapien
tttcaacagcgacaaacattttaga

SEQ ID NO: 5096447 - DNA, 25 bp, Homo sapien
tctctgatgttgtcctttcaacagc

SEQ ID NO: 5096448 - DNA, 25 bp, Homo sapien
tgtcccacacatgaatagcagcatc

SEQ ID NO: 5096449 - DNA, 25 bp, Homo sapien
ttttagagtttgtgtgtcccacaca

SEQ ID NO: 5096450 - DNA, 25 bp, Homo sapien
caacacagaaccatctctgggtcag

SEQ ID NO: 5096451 - DNA, 25 bp, Homo sapien
gggtcagcagtctcccttccactag

SEQ ID NO: 5096452 - DNA, 25 bp, Homo sapien
gacgagtgatcaagctcatcctgca

SEQ ID NO: 5096453 - DNA, 25 bp, Homo sapien
actagctgtgcggttgctaggagac

SEQ ID NO: 5096454 - DNA, 25 bp, Homo sapien
aacacaaatgtcaaaatttcttcca

SEQ ID NO: 5096455 - DNA, 25 bp, Homo sapien
tcaaaatttcttccatgaaaaaaca

SEQ ID NO: 5096456 - DNA, 25 bp, Homo sapien
acacaaatgtcaaaatttcttccat

SEQ ID NO: 5096457 - DNA, 25 bp, Homo sapien
aatgtcaaaatttcttccatgaaaa

SEQ ID NO: 5096458 - DNA, 25 bp, Homo sapien
tgtgaaaatcgtctaaaccaaccga

SEQ ID NO: 5096459 - DNA, 25 bp, Homo sapien
aatcgtctaaaccaaccgacaccag

SEQ ID NO: 5096460 - DNA, 25 bp, Homo sapien
tttccagtcccaaaatacaatactg

SEQ ID NO: 5096461 - DNA, 25 bp, Homo sapien
aatacaatactgtgaaaatcgtcta

SEQ ID NO: 5096462 - DNA, 25 bp, Homo sapien
gaagcggtgaatgactctctgcaga

SEQ ID NO: 5096463 - DNA, 25 bp, Homo sapien
ggtctataaacagcagtcggtctca

SEQ ID NO: 5096464 - DNA, 25 bp, Homo sapien
actattgacctttactgaaccgtgg

SEQ ID NO: 5096465 - DNA, 25 bp, Homo sapien
ggataccgtaagatcccggcagctt

SEQ ID NO: 5096466 - DNA, 25 bp, Homo sapien
gatggtcagttggagtcctcatgcc

SEQ ID NO: 5096467 - DNA, 25 bp, Homo sapien
acagcagtcatcagaaaagcttccc

SEQ ID NO: 5096468 - DNA, 25 bp, Homo sapien
gctgtcatttgttgccaagaattca

SEQ ID NO: 5096469 - DNA, 25 bp, Homo sapien
ggagtcctcatgcctccatctgctg

SEQ ID NO: 5096470 - DNA, 25 bp, Homo sapien
gtttcgggcataaaactggtgagcc

SEQ ID NO: 5096471 - DNA, 25 bp, Homo sapien
tcttgggagcttagatgaccctgga

SEQ ID NO: 5096472 - DNA, 25 bp, Homo sapien
gagtggtacagaacaatcacccttg

SEQ ID NO: 5096473 - DNA, 25 bp, Homo sapien
gtcataaggcttgggagcaattcca

SEQ ID NO: 5096474 - DNA, 25 bp, Homo sapien
gctcctcctctgtggagaaatctca

SEQ ID NO: 5096475 - DNA, 25 bp, Homo sapien
cctcctctgtggagaaatctcactt

SEQ ID NO: 5096476 - DNA, 25 bp, Homo sapien
tcctcctctgtggagaaatctcact

SEQ ID NO: 5096477 - DNA, 25 bp, Homo sapien
ctcctctgtggagaaatctcacttc

SEQ ID NO: 5096478 - DNA, 25 bp, Homo sapien
aggagcaacttctgagtgcctggtt

SEQ ID NO: 5096479 - DNA, 25 bp, Homo sapien
ggagcaacttctgagtgcctggttg

SEQ ID NO: 5096480 - DNA, 25 bp, Homo sapien
gcacagctgacgatgccaccacagc

SEQ ID NO: 5096481 - DNA, 25 bp, Homo sapien
agcaacttctgagtgcctggttgca

SEQ ID NO: 5096482 - DNA, 25 bp, Homo sapien
aacagatcggatcgtctcacagaga

SEQ ID NO: 5096483 - DNA, 25 bp, Homo sapien
tattctgccctgattgacagtgatg

SEQ ID NO: 5096484 - DNA, 25 bp, Homo sapien
cagccttggttcttaaatgggatac

SEQ ID NO: 5096485 - DNA, 25 bp, Homo sapien
tgttcccctagtcacactaccagag

SEQ ID NO: 5096486 - DNA, 25 bp, Homo sapien
taagagacaaataggaaataagatt

SEQ ID NO: 5096487 - DNA, 25 bp, Homo sapien
ctgtaagagacaaataggaaataag

SEQ ID NO: 5096488 - DNA, 25 bp, Homo sapien
gtaagagacaaataggaaataagat

SEQ ID NO: 5096489 - DNA, 25 bp, Homo sapien
tgtaagagacaaataggaaataaga

SEQ ID NO: 5096490 - DNA, 25 bp, Homo sapien
ttatcccaactgtaaccagtttgtc

SEQ ID NO: 5096491 - DNA, 25 bp, Homo sapien
cacaaatatcttatctttatgtcct

SEQ ID NO: 5096492 - DNA, 25 bp, Homo sapien
tcccaactgtaaccagtttgtcaac

SEQ ID NO: 5096493 - DNA, 25 bp, Homo sapien
tgggttacactttaccacaaatatc

SEQ ID NO: 5096494 - DNA, 25 bp, Homo sapien
ataaatgataaacccaaacgacagt

SEQ ID NO: 5096495 - DNA, 25 bp, Homo sapien
taaatgataaacccaaacgacagta

SEQ ID NO: 5096496 - DNA, 25 bp, Homo sapien
tagatcttccattcgtccgtaagaa

SEQ ID NO: 5096497 - DNA, 25 bp, Homo sapien
aacactagatcttccattcgtccgt

SEQ ID NO: 5096498 - DNA, 25 bp, Homo sapien
ttcgtccgtaagaaacacacatcat

SEQ ID NO: 5096499 - DNA, 25 bp, Homo sapien
tcctcttttagaagtgaagccccca

SEQ ID NO: 5096500 - DNA, 25 bp, Homo sapien
cttatccagtgcatacatagcaaac

SEQ ID NO: 5096501 - DNA, 25 bp, Homo sapien
ttcactgtcttcagtagtagaatgt

SEQ ID NO: 5096502 - DNA, 25 bp, Homo sapien
cactgtcttcagtagtagaatgtct

SEQ ID NO: 5096503 - DNA, 25 bp, Homo sapien
gtgcatacatagcaaacacaggccc

SEQ ID NO: 5096504 - DNA, 25 bp, Homo sapien
agagctccacgatgccgtcctttcc

SEQ ID NO: 5096505 - DNA, 25 bp, Homo sapien
cttttaatggcataagtcttcaaac

SEQ ID NO: 5096506 - DNA, 25 bp, Homo sapien
cttttgagctagtcgacaatgctga

SEQ ID NO: 5096507 - DNA, 25 bp, Homo sapien
gctagtcgacaatgctgatctttta

SEQ ID NO: 5096508 - DNA, 25 bp, Homo sapien
ggaaggggatggtatatttaacaca

SEQ ID NO: 5096509 - DNA, 25 bp, Homo sapien
ggatggtatatttaacacaataaca

SEQ ID NO: 5096510 - DNA, 25 bp, Homo sapien
ggggatggtatatttaacacaataa

SEQ ID NO: 5096511 - DNA, 25 bp, Homo sapien
aaggggatggtatatttaacacaat

SEQ ID NO: 5096512 - DNA, 25 bp, Homo sapien
tgtcccaaagtgatggcacgaattg

SEQ ID NO: 5096513 - DNA, 25 bp, Homo sapien
tttttgttcccaccaggatatgtcc

SEQ ID NO: 5096514 - DNA, 25 bp, Homo sapien
gggccactcttatcaatttccagaa

SEQ ID NO: 5096515 - DNA, 25 bp, Homo sapien
tgaacaagcagtgtcattgggccac

SEQ ID NO: 5096516 - DNA, 25 bp, Homo sapien
gagccatagtgtatatgcacatgtg

SEQ ID NO: 5096517 - DNA, 25 bp, Homo sapien
gggattcactcgtaatacagcaagc

SEQ ID NO: 5096518 - DNA, 25 bp, Homo sapien
taagtcagagggaccctctcagtgg

SEQ ID NO: 5096519 - DNA, 25 bp, Homo sapien
gcacatgtgtttccatgatacagta

SEQ ID NO: 5096520 - DNA, 25 bp, Homo sapien
gccagcatacggtgctgggcagata

SEQ ID NO: 5096521 - DNA, 25 bp, Homo sapien
tcatcgctcactgttgcacagatgg

SEQ ID NO: 5096522 - DNA, 25 bp, Homo sapien
cagatagttcccagatgcgaagtgt

SEQ ID NO: 5096523 - DNA, 25 bp, Homo sapien
ttttgagtttccgtactgccagcat

SEQ ID NO: 5096524 - DNA, 25 bp, Homo sapien
tgaaaacttaatatcagagatcatt

SEQ ID NO: 5096525 - DNA, 25 bp, Homo sapien
caggaaactcccatcgttcaagcca

SEQ ID NO: 5096526 - DNA, 25 bp, Homo sapien
aagccaaccgctaaggctttcccat

SEQ ID NO: 5096527 - DNA, 25 bp, Homo sapien
cagtgtcagcatttaccaccaggaa

SEQ ID NO: 5096528 - DNA, 25 bp, Homo sapien
tctagagtcccagtcaatgtgtgta

SEQ ID NO: 5096529 - DNA, 25 bp, Homo sapien
gaagcacctttacagatgccaaccc

SEQ ID NO: 5096530 - DNA, 25 bp, Homo sapien
taaatatccacaaagttatcatggg

SEQ ID NO: 5096531 - DNA, 25 bp, Homo sapien
gcttgtaagtacgttgtaaatatcc

SEQ ID NO: 5096532 - DNA, 25 bp, Homo sapien
ctctgaaggtcttattatatgccgt

SEQ ID NO: 5096533 - DNA, 25 bp, Homo sapien
tatatgccgtttgcctcttggagct

SEQ ID NO: 5096534 - DNA, 25 bp, Homo sapien
gccgtttgcctcttggagcttcaaa

SEQ ID NO: 5096535 - DNA, 25 bp, Homo sapien
ggtcttattatatgccgtttgcctc

SEQ ID NO: 5096536 - DNA, 25 bp, Homo sapien
agttggccaagaaagcatcagttgg

SEQ ID NO: 5096537 - DNA, 25 bp, Homo sapien
tggaaggactctgcaaccaacatca

SEQ ID NO: 5096538 - DNA, 25 bp, Homo sapien
tagcggcactactagggaagttggc

SEQ ID NO: 5096539 - DNA, 25 bp, Homo sapien
tcttcaatgctctcagtagcggcac

SEQ ID NO: 5096540 - DNA, 25 bp, Homo sapien
ggcagcatttacgtcagttatatcg

SEQ ID NO: 5096541 - DNA, 25 bp, Homo sapien
aaatcatctccggtggctaaaaggg

SEQ ID NO: 5096542 - DNA, 25 bp, Homo sapien
catgtgtcccactctatcttctcga

SEQ ID NO: 5096543 - DNA, 25 bp, Homo sapien
agttatatcgctatgtgctggccag

SEQ ID NO: 5096544 - DNA, 25 bp, Homo sapien
tgggctcgtttatccatgttagttt

SEQ ID NO: 5096545 - DNA, 25 bp, Homo sapien
tctgggctcgtttatccatgttagt

SEQ ID NO: 5096546 - DNA, 25 bp, Homo sapien
cctttctctgggctcgtttatccat

SEQ ID NO: 5096547 - DNA, 25 bp, Homo sapien
tctctgggctcgtttatccatgtta

SEQ ID NO: 5096548 - DNA, 25 bp, Homo sapien
cacgttagtgacatgtgcactgtgc

SEQ ID NO: 5096549 - DNA, 25 bp, Homo sapien
tacttcttgaatcttgcgtgctgtc

SEQ ID NO: 5096550 - DNA, 25 bp, Homo sapien
gagtcattgtgcagccacctcacgt

SEQ ID NO: 5096551 - DNA, 25 bp, Homo sapien
tcttccacgtcggtgtctgactcct

SEQ ID NO: 5096552 - DNA, 25 bp, Homo sapien
tctctagcaacatcgctgtcatagc

SEQ ID NO: 5096553 - DNA, 25 bp, Homo sapien
tttctctagcaacatcgctgtcata

SEQ ID NO: 5096554 - DNA, 25 bp, Homo sapien
ttctctagcaacatcgctgtcatag

SEQ ID NO: 5096555 - DNA, 25 bp, Homo sapien
ttttctctagcaacatcgctgtcat

SEQ ID NO: 5096556 - DNA, 25 bp, Homo sapien
cacgtactgggatgttgtgcaattt

SEQ ID NO: 5096557 - DNA, 25 bp, Homo sapien
cctttgccacgtactgggatgttgt

SEQ ID NO: 5096558 - DNA, 25 bp, Homo sapien
tcacattccataaccaacttccaca

SEQ ID NO: 5096559 - DNA, 25 bp, Homo sapien
ataaaccgccctttgccacgtactg

SEQ ID NO: 5096560 - DNA, 25 bp, Homo sapien
cagaaacacccttgggataatggcc

SEQ ID NO: 5096561 - DNA, 25 bp, Homo sapien
cattctatatagaggatccaaggca

SEQ ID NO: 5096562 - DNA, 25 bp, Homo sapien
tgggaccagcgtattgtcaacatcg

SEQ ID NO: 5096563 - DNA, 25 bp, Homo sapien
tataacagcacattgaaaagcccca

SEQ ID NO: 5096564 - DNA, 25 bp, Homo sapien
ctcatggacattacatatctggtag

SEQ ID NO: 5096565 - DNA, 25 bp, Homo sapien
ggattcttttgagaccaactgtaaa

SEQ ID NO: 5096566 - DNA, 25 bp, Homo sapien
tacatatctggtaggtgtagcccag

SEQ ID NO: 5096567 - DNA, 25 bp, Homo sapien
aggattcttttgagaccaactgtaa

SEQ ID NO: 5096568 - DNA, 25 bp, Homo sapien
tagaccagaattagcgtcaagtcgg

SEQ ID NO: 5096569 - DNA, 25 bp, Homo sapien
caggttggggcgtggcacttgagag

SEQ ID NO: 5096570 - DNA, 25 bp, Homo sapien
tctagaccagaattagcgtcaagtc

SEQ ID NO: 5096571 - DNA, 25 bp, Homo sapien
tcctctagaccagaattagcgtcaa

SEQ ID NO: 5096572 - DNA, 25 bp, Homo sapien
ccgcctctttttgggaaggtggcat

SEQ ID NO: 5096573 - DNA, 25 bp, Homo sapien
cactatttggcaagttagggtggtt

SEQ ID NO: 5096574 - DNA, 25 bp, Homo sapien
tcagatcctggatgtggcaactggc

SEQ ID NO: 5096575 - DNA, 25 bp, Homo sapien
gggctttatctggacctggatgaga

SEQ ID NO: 5096576 - DNA, 25 bp, Homo sapien
taattgacaggaggcagatcaacac

SEQ ID NO: 5096577 - DNA, 25 bp, Homo sapien
tctgccacagtcttcggagagtcac

SEQ ID NO: 5096578 - DNA, 25 bp, Homo sapien
cagacacttgcctaaaagaatcaga

SEQ ID NO: 5096579 - DNA, 25 bp, Homo sapien
gatcaacacccctggtagtgcccat

SEQ ID NO: 5096580 - DNA, 25 bp, Homo sapien
gatggcagagcatgacacgaacttc

SEQ ID NO: 5096581 - DNA, 25 bp, Homo sapien
cacgaacttcaaatgagcgagaggg

SEQ ID NO: 5096582 - DNA, 25 bp, Homo sapien
tcgggtaaagagcacgccaacatag

SEQ ID NO: 5096583 - DNA, 25 bp, Homo sapien
ggttggccagttgaccatgagctga

SEQ ID NO: 5096584 - DNA, 25 bp, Homo sapien
ctggtgatgatgtaacccagggcat

SEQ ID NO: 5096585 - DNA, 25 bp, Homo sapien
aggagttcctggtgatgatgtaacc

SEQ ID NO: 5096586 - DNA, 25 bp, Homo sapien
ttaagacactgagggacaaaggagt

SEQ ID NO: 5096587 - DNA, 25 bp, Homo sapien
gacagctggttaagacactgaggga

SEQ ID NO: 5096588 - DNA, 25 bp, Homo sapien
aaagaagcaccaagatggaatgcgt

SEQ ID NO: 5096589 - DNA, 25 bp, Homo sapien
ccaagatggaatgcgtgccagtggc

SEQ ID NO: 5096590 - DNA, 25 bp, Homo sapien
gaggttgagttgaaacctggatgac

SEQ ID NO: 5096591 - DNA, 25 bp, Homo sapien
tgaatggcttacgtgagtgaaggat

SEQ ID NO: 5096592 - DNA, 25 bp, Homo sapien
ccggggccaagcaccaggtgaggga

SEQ ID NO: 5096593 - DNA, 25 bp, Homo sapien
tgagggaactgtcttgaataggaga

SEQ ID NO: 5096594 - DNA, 25 bp, Homo sapien
tggaggtgggaaactgggatgtatt

SEQ ID NO: 5096595 - DNA, 25 bp, Homo sapien
gtcttgaataggagaagggacttac

SEQ ID NO: 5096596 - DNA, 25 bp, Homo sapien
ttcagtccaatcagctcattagagt

SEQ ID NO: 5096597 - DNA, 25 bp, Homo sapien
gagttggtcattcccagctggcaca

SEQ ID NO: 5096598 - DNA, 25 bp, Homo sapien
ctgtgggcacaacccggcattggca

SEQ ID NO: 5096599 - DNA, 25 bp, Homo sapien
acaggacaggagtgcgaggaaggct

SEQ ID NO: 5096600 - DNA, 25 bp, Homo sapien
cagattccatcagaaatgggactct

SEQ ID NO: 5096601 - DNA, 25 bp, Homo sapien
tgggactctgaaaagctttgctgag

SEQ ID NO: 5096602 - DNA, 25 bp, Homo sapien
gggaaggagtggaggcatgaggaca

SEQ ID NO: 5096603 - DNA, 25 bp, Homo sapien
gtggaggcatgaggacattcactca

SEQ ID NO: 5096604 - DNA, 25 bp, Homo sapien
agccaaacactggaggtttaacagt

SEQ ID NO: 5096605 - DNA, 25 bp, Homo sapien
cagttttccgtggatctaaatcctt

SEQ ID NO: 5096606 - DNA, 25 bp, Homo sapien
acagttttccgtggatctaaatcct

SEQ ID NO: 5096607 - DNA, 25 bp, Homo sapien
taacagttttccgtggatctaaatc

SEQ ID NO: 5096608 - DNA, 25 bp, Homo sapien
tttcttggtaggtcagcctgcctgc

SEQ ID NO: 5096609 - DNA, 25 bp, Homo sapien
tgggtagacagcacatctctgcaaa

SEQ ID NO: 5096610 - DNA, 25 bp, Homo sapien
caaattgagcaaaatcgggagactg

SEQ ID NO: 5096611 - DNA, 25 bp, Homo sapien
cataagtgataattggaccaaacgg

SEQ ID NO: 5096612 - DNA, 25 bp, Homo sapien
tcagaattaagttgtcgatggccat

SEQ ID NO: 5096613 - DNA, 25 bp, Homo sapien
tgtgctcatgttgttcagaattaag

SEQ ID NO: 5096614 - DNA, 25 bp, Homo sapien
agggatgtgctcatgttgttcagaa

SEQ ID NO: 5096615 - DNA, 25 bp, Homo sapien
gttcagaattaagttgtcgatggcc

SEQ ID NO: 5096616 - DNA, 25 bp, Homo sapien
agaacatgtgggcttgaaacaagag

SEQ ID NO: 5096617 - DNA, 25 bp, Homo sapien
gaagaacatgtgggcttgaaacaag

SEQ ID NO: 5096618 - DNA, 25 bp, Homo sapien
ggaagaacatgtgggcttgaaacaa

SEQ ID NO: 5096619 - DNA, 25 bp, Homo sapien
aacatgtgggcttgaaacaagaggg

SEQ ID NO: 5096620 - DNA, 25 bp, Homo sapien
tcaaaggcccctccacttggatctg

SEQ ID NO: 5096621 - DNA, 25 bp, Homo sapien
cctgaattcacaggcactgggttgg

SEQ ID NO: 5096622 - DNA, 25 bp, Homo sapien
actgggttgggcctccccacgcttg

SEQ ID NO: 5096623 - DNA, 25 bp, Homo sapien
ccacgcttgaggcaccgtggtcagg

SEQ ID NO: 5096624 - DNA, 25 bp, Homo sapien
gagcggccagaggaagcacagcatt

SEQ ID NO: 5096625 - DNA, 25 bp, Homo sapien
agagcggccagaggaagcacagcat

SEQ ID NO: 5096626 - DNA, 25 bp, Homo sapien
gagagcggccagaggaagcacagca

SEQ ID NO: 5096627 - DNA, 25 bp, Homo sapien
tggtgatattgttcttctgcagttt

SEQ ID NO: 5096628 - DNA, 25 bp, Homo sapien
tttttggtgatattgttcttctgca

SEQ ID NO: 5096629 - DNA, 25 bp, Homo sapien
gggagctgctcggctaacgggtggt

SEQ ID NO: 5096630 - DNA, 25 bp, Homo sapien
tgcagtttctcaggctggggagctg

SEQ ID NO: 5096631 - DNA, 25 bp, Homo sapien
tgtagccaaacacgtggtctagagc

SEQ ID NO: 5096632 - DNA, 25 bp, Homo sapien
gccaaacacgtggtctagagccagc

SEQ ID NO: 5096633 - DNA, 25 bp, Homo sapien
tagccaaacacgtggtctagagcca

SEQ ID NO: 5096634 - DNA, 25 bp, Homo sapien
ctgtagccaaacacgtggtctagag

SEQ ID NO: 5096635 - DNA, 25 bp, Homo sapien
aatgcaggttatttcgacagtcgaa

SEQ ID NO: 5096636 - DNA, 25 bp, Homo sapien
gcgccatcattaaggtaatgcaggt

SEQ ID NO: 5096637 - DNA, 25 bp, Homo sapien
tggaagatgatgtcagcgccatcat

SEQ ID NO: 5096638 - DNA, 25 bp, Homo sapien
tgtggagaggttctgaacgatgcca

SEQ ID NO: 5096639 - DNA, 25 bp, Homo sapien
aacatggccgccttctctctagggc

SEQ ID NO: 5096640 - DNA, 25 bp, Homo sapien
ggctggtgtcaacatggccgccttc

SEQ ID NO: 5096641 - DNA, 25 bp, Homo sapien
tttctccatggctgtcggttacaga

SEQ ID NO: 5096642 - DNA, 25 bp, Homo sapien
ccatggctgtcggttacagaggctg

SEQ ID NO: 5096643 - DNA, 25 bp, Homo sapien
caagcaacctcaaactgggttctcc

SEQ ID NO: 5096644 - DNA, 25 bp, Homo sapien
caaaatgtgaacctgtttaaatctg

SEQ ID NO: 5096645 - DNA, 25 bp, Homo sapien
caccttgccgggcctggtatttttg

SEQ ID NO: 5096646 - DNA, 25 bp, Homo sapien
tctggtggtaatgatatagttttct

SEQ ID NO: 5096647 - DNA, 25 bp, Homo sapien
gccctaactcgacatatgtcacagg

SEQ ID NO: 5096648 - DNA, 25 bp, Homo sapien
gaaagccctaactcgacatatgtca

SEQ ID NO: 5096649 - DNA, 25 bp, Homo sapien
tggaaagccctaactcgacatatgt

SEQ ID NO: 5096650 - DNA, 25 bp, Homo sapien
cctaactcgacatatgtcacaggaa

SEQ ID NO: 5096651 - DNA, 25 bp, Homo sapien
caaaacatcgcgtggagccattgga

SEQ ID NO: 5096652 - DNA, 25 bp, Homo sapien
cttttagggcaacttcaaaacatcg

SEQ ID NO: 5096653 - DNA, 25 bp, Homo sapien
aacttcaaaacatcgcgtggagcca

SEQ ID NO: 5096654 - DNA, 25 bp, Homo sapien
tagggcaacttcaaaacatcgcgtg

SEQ ID NO: 5096655 - DNA, 25 bp, Homo sapien
tgtgtgctccagatagaagctctgg

SEQ ID NO: 5096656 - DNA, 25 bp, Homo sapien
ctggtggccaccacgtttctgtact

SEQ ID NO: 5096657 - DNA, 25 bp, Homo sapien
tggccaccacgtttctgtacttggg

SEQ ID NO: 5096658 - DNA, 25 bp, Homo sapien
tgctccagatagaagctctggctcc

SEQ ID NO: 5096659 - DNA, 25 bp, Homo sapien
gaatcagttcacatttgtcaccggc

SEQ ID NO: 5096660 - DNA, 25 bp, Homo sapien
aacgtttatttggactctcaggcgc

SEQ ID NO: 5096661 - DNA, 25 bp, Homo sapien
taaccagcttcaaaagacacggagt

SEQ ID NO: 5096662 - DNA, 25 bp, Homo sapien
tcaacgcaggtgacacagatacact

SEQ ID NO: 5096663 - DNA, 25 bp, Homo sapien
tcattgggcataagagacctatagc

SEQ ID NO: 5096664 - DNA, 25 bp, Homo sapien
gcttttaaaggcagagccctacgga

SEQ ID NO: 5096665 - DNA, 25 bp, Homo sapien
tatagcctgacctggccagaggaga

SEQ ID NO: 5096666 - DNA, 25 bp, Homo sapien
tcaaactactcacggatggaacagc

SEQ ID NO: 5096667 - DNA, 25 bp, Homo sapien
taattcacccccttggagtggaagc

SEQ ID NO: 5096668 - DNA, 25 bp, Homo sapien
catggcgtcccatatgtggatggaa

SEQ ID NO: 5096669 - DNA, 25 bp, Homo sapien
tcctgccatcgccagacagtgatgg

SEQ ID NO: 5096670 - DNA, 25 bp, Homo sapien
acagtgatggtgtgctcagggtcca

SEQ ID NO: 5096671 - DNA, 25 bp, Homo sapien
ggctgccaacatcggggaacctcct

SEQ ID NO: 5096672 - DNA, 25 bp, Homo sapien
agaaagagcacggaagacaaggacc

SEQ ID NO: 5096673 - DNA, 25 bp, Homo sapien
agcacggaagacaaggacccttggg

SEQ ID NO: 5096674 - DNA, 25 bp, Homo sapien
gagccccttcactaatgggccctgg

SEQ ID NO: 5096675 - DNA, 25 bp, Homo sapien
aggtgaccccctcggctggcaacct

SEQ ID NO: 5096676 - DNA, 25 bp, Homo sapien
tgagtcggggcgaaattccaccaca

SEQ ID NO: 5096677 - DNA, 25 bp, Homo sapien
attccaccacaaatatgcgctccag

SEQ ID NO: 5096678 - DNA, 25 bp, Homo sapien
cacaaatatgcgctccaggtgaccc

SEQ ID NO: 5096679 - DNA, 25 bp, Homo sapien
tcatatgtttgaccccgacagatac

SEQ ID NO: 5096680 - DNA, 25 bp, Homo sapien
tgtttgaccccgacagatacaaact

SEQ ID NO: 5096681 - DNA, 25 bp, Homo sapien
agaacttcatatgtttgaccccgac

SEQ ID NO: 5096682 - DNA, 25 bp, Homo sapien
gaccccgacagatacaaactgcgtg

SEQ ID NO: 5096683 - DNA, 25 bp, Homo sapien
cagggacccgatgacccctttcttg

SEQ ID NO: 5096684 - DNA, 25 bp, Homo sapien
gccacggagagcatcgtctgcattt

SEQ ID NO: 5096685 - DNA, 25 bp, Homo sapien
ccgaaggccacggagagcatcgtct

SEQ ID NO: 5096686 - DNA, 25 bp, Homo sapien
agcaccgaaggccacggagagcatc

SEQ ID NO: 5096687 - DNA, 25 bp, Homo sapien
catcccgaagggttgtgtacattgt

SEQ ID NO: 5096688 - DNA, 25 bp, Homo sapien
caccagccggatgaggaagtggtcc

SEQ ID NO: 5096689 - DNA, 25 bp, Homo sapien
gaagtggtccttccagacgtagaca

SEQ ID NO: 5096690 - DNA, 25 bp, Homo sapien
ttttccgccggtcactatgagtcca

SEQ ID NO: 5096691 - DNA, 25 bp, Homo sapien
tccagctgaaaggcccggcagcgct

SEQ ID NO: 5096692 - DNA, 25 bp, Homo sapien
agctgaaaggcccggcagcgcttca

SEQ ID NO: 5096693 - DNA, 25 bp, Homo sapien
acacggagcgcacacactccaccag

SEQ ID NO: 5096694 - DNA, 25 bp, Homo sapien
ttttccacggcacacggagcgcaca

SEQ ID NO: 5096695 - DNA, 25 bp, Homo sapien
ccccaggggagctggctgtgctcac

SEQ ID NO: 5096696 - DNA, 25 bp, Homo sapien
agcccccaggggagctggctgtgct

SEQ ID NO: 5096697 - DNA, 25 bp, Homo sapien
ccagcccccaggggagctggctgtg

SEQ ID NO: 5096698 - DNA, 25 bp, Homo sapien
cccccaggggagctggctgtgctca

SEQ ID NO: 5096699 - DNA, 25 bp, Homo sapien
gccatcgttgctggcagagatgaag

SEQ ID NO: 5096700 - DNA, 25 bp, Homo sapien
cccagatccgggctgtgccatcgtt

SEQ ID NO: 5096701 - DNA, 25 bp, Homo sapien
tcaattatttctccgtctttggttc

SEQ ID NO: 5096702 - DNA, 25 bp, Homo sapien
ccttccatgtgaccatcaatcagga

SEQ ID NO: 5096703 - DNA, 25 bp, Homo sapien
ctgagtttgggcagagtcggcctca

SEQ ID NO: 5096704 - DNA, 25 bp, Homo sapien
tgccgcgcagcccactcgtgggcat

SEQ ID NO: 5096705 - DNA, 25 bp, Homo sapien
ccatccccgtctctgccatgacgct

SEQ ID NO: 5096706 - DNA, 25 bp, Homo sapien
cccactcgtgggcatctgagtttgg

SEQ ID NO: 5096707 - DNA, 25 bp, Homo sapien
ctgatatcttggatagcagatttcc

SEQ ID NO: 5096708 - DNA, 25 bp, Homo sapien
gatagcagatttccggtctcgtttt

SEQ ID NO: 5096709 - DNA, 25 bp, Homo sapien
tcttggatagcagatttccggtctc

SEQ ID NO: 5096710 - DNA, 25 bp, Homo sapien
ttcccccaaactttcaggctgttca

SEQ ID NO: 5096711 - DNA, 25 bp, Homo sapien
tgtgtgttcagaagaaccaacggct

SEQ ID NO: 5096712 - DNA, 25 bp, Homo sapien
ccctgagtgaggtcatagaagtcaa

SEQ ID NO: 5096713 - DNA, 25 bp, Homo sapien
ccaatgcggttcagatttgtgccct

SEQ ID NO: 5096714 - DNA, 25 bp, Homo sapien
gctaagaatcggttgtctgggctga

SEQ ID NO: 5096715 - DNA, 25 bp, Homo sapien
atgcacctggcgcttataggcacct

SEQ ID NO: 5096716 - DNA, 25 bp, Homo sapien
ggcgcttataggcacctgttgacac

SEQ ID NO: 5096717 - DNA, 25 bp, Homo sapien
gacctcatgcacctggcgcttatag

SEQ ID NO: 5096718 - DNA, 25 bp, Homo sapien
ggtgatcttctcaatgaccacggct

SEQ ID NO: 5096719 - DNA, 25 bp, Homo sapien
cacatgcgcagttgacatcagcctt

SEQ ID NO: 5096720 - DNA, 25 bp, Homo sapien
tcctgtgacaatgttcaggccagcg

SEQ ID NO: 5096721 - DNA, 25 bp, Homo sapien
tgacaatgttcaggccagcgtgggt

SEQ ID NO: 5096722 - DNA, 25 bp, Homo sapien
gccagcgtgggtcacacatgcgcag

SEQ ID NO: 5096723 - DNA, 25 bp, Homo sapien
tgaccgaagtatcgcttatgtttgg

SEQ ID NO: 5096724 - DNA, 25 bp, Homo sapien
tcatcataagagaaacggatgttcg

SEQ ID NO: 5096725 - DNA, 25 bp, Homo sapien
gatgttcgtcacgtgagccgagtga

SEQ ID NO: 5096726 - DNA, 25 bp, Homo sapien
tccagtgctgaccacatacttgtca

SEQ ID NO: 5096727 - DNA, 25 bp, Homo sapien
tcatgcccctgggagaggctgaccc

SEQ ID NO: 5096728 - DNA, 25 bp, Homo sapien
tgcccctgggagaggctgacccacg

SEQ ID NO: 5096729 - DNA, 25 bp, Homo sapien
tgggagaggctgacccacgggatgc

SEQ ID NO: 5096730 - DNA, 25 bp, Homo sapien
ccctgggagaggctgacccacggga

SEQ ID NO: 5096731 - DNA, 25 bp, Homo sapien
ctggagatgggggctcccaggcagg

SEQ ID NO: 5096732 - DNA, 25 bp, Homo sapien
tggagatgggggctcccaggcaggc

SEQ ID NO: 5096733 - DNA, 25 bp, Homo sapien
agatgggggctcccaggcaggccat

SEQ ID NO: 5096734 - DNA, 25 bp, Homo sapien
gagatgggggctcccaggcaggcca

SEQ ID NO: 5096735 - DNA, 25 bp, Homo sapien
caattgggttggtgctgctttgaag

SEQ ID NO: 5096736 - DNA, 25 bp, Homo sapien
cggtactatctcaagggctataagt

SEQ ID NO: 5096737 - DNA, 25 bp, Homo sapien
gtcttttactcctagcttgttcaca

SEQ ID NO: 5096738 - DNA, 25 bp, Homo sapien
ctatctcaagggctataagtgccag

SEQ ID NO: 5096739 - DNA, 25 bp, Homo sapien
gtaaaccagggatcttgccaccaaa

SEQ ID NO: 5096740 - DNA, 25 bp, Homo sapien
acaagtctgtatcccctgcattggg

SEQ ID NO: 5096741 - DNA, 25 bp, Homo sapien
tgctcaaaagtcaagctcgggtgat

SEQ ID NO: 5096742 - DNA, 25 bp, Homo sapien
tgtttagcacagaaccagggatcac

SEQ ID NO: 5096743 - DNA, 25 bp, Homo sapien
taaaacttgaccttccttcgtggca

SEQ ID NO: 5096744 - DNA, 25 bp, Homo sapien
cgtcagcgggctacattatcagata

SEQ ID NO: 5096745 - DNA, 25 bp, Homo sapien
ttaggaagccttggcgtgaacacag

SEQ ID NO: 5096746 - DNA, 25 bp, Homo sapien
taaccgaggcttcaaaattcgtcag

SEQ ID NO: 5096747 - DNA, 25 bp, Homo sapien
tcagggtggtacaccaaggtgcagc

SEQ ID NO: 5096748 - DNA, 25 bp, Homo sapien
taataggcgtctatgtgctcagaac

SEQ ID NO: 5096749 - DNA, 25 bp, Homo sapien
tgcgggcccaacaacctattagtgg

SEQ ID NO: 5096750 - DNA, 25 bp, Homo sapien
tcactgaccagaaggactaataggc

SEQ ID NO: 5096751 - DNA, 25 bp, Homo sapien
cagtcacatggttacagaaaacaga

SEQ ID NO: 5096752 - DNA, 25 bp, Homo sapien
gacatggttatcactctgcatcacc

SEQ ID NO: 5096753 - DNA, 25 bp, Homo sapien
tctgcatcaccagtcacatggttac

SEQ ID NO: 5096754 - DNA, 25 bp, Homo sapien
gcagacatggttatcactctgcatc

SEQ ID NO: 5096755 - DNA, 25 bp, Homo sapien
tccacatggttatttcaatgcaaga

SEQ ID NO: 5096756 - DNA, 25 bp, Homo sapien
aataagtttttcatgacacacggac

SEQ ID NO: 5096757 - DNA, 25 bp, Homo sapien
gcaagatccgatcagcatgaagagt

SEQ ID NO: 5096758 - DNA, 25 bp, Homo sapien
ggttgtacatgtcatcattaatcga

SEQ ID NO: 5096759 - DNA, 25 bp, Homo sapien
gacgagatcataccggtaaagcagg

SEQ ID NO: 5096760 - DNA, 25 bp, Homo sapien
cctatctatctgaggcactggtgga

SEQ ID NO: 5096761 - DNA, 25 bp, Homo sapien
cgcaaagctgaatgaaaacgcccaa

SEQ ID NO: 5096762 - DNA, 25 bp, Homo sapien
aaatccctggattgaagcgcaaagc

SEQ ID NO: 5096763 - DNA, 25 bp, Homo sapien
ggttcctagctctaataactgcagc

SEQ ID NO: 5096764 - DNA, 25 bp, Homo sapien
tgctaccttagttgctgaagacagc

SEQ ID NO: 5096765 - DNA, 25 bp, Homo sapien
gaagacagctcctactaacaaacag

SEQ ID NO: 5096766 - DNA, 25 bp, Homo sapien
ggtgatactgcttcccggtttattg

SEQ ID NO: 5096767 - DNA, 25 bp, Homo sapien
taagacatgttctgcagagttctcc

SEQ ID NO: 5096768 - DNA, 25 bp, Homo sapien
gaaatgatgggtatccgtgtgcctg

SEQ ID NO: 5096769 - DNA, 25 bp, Homo sapien
gagccgctcttgctagcatgtgaaa

SEQ ID NO: 5096770 - DNA, 25 bp, Homo sapien
tcctggtggttgacttgggcgaata

SEQ ID NO: 5096771 - DNA, 25 bp, Homo sapien
ggtgactgggcctttagactcagaa

SEQ ID NO: 5096772 - DNA, 25 bp, Homo sapien
tgtttccaatctaagcctgggcaga

SEQ ID NO: 5096773 - DNA, 25 bp, Homo sapien
ggatctcgctacataagcagctgtt

SEQ ID NO: 5096774 - DNA, 25 bp, Homo sapien
caaagttctgactgacgaaacaggc

SEQ ID NO: 5096775 - DNA, 25 bp, Homo sapien
tataaatcatacttgtgggccgggt

SEQ ID NO: 5096776 - DNA, 25 bp, Homo sapien
taagttataaatcatacttgtgggc

SEQ ID NO: 5096777 - DNA, 25 bp, Homo sapien
aaatcatacttgtgggccgggtgtg

SEQ ID NO: 5096778 - DNA, 25 bp, Homo sapien
gagaataagttataaatcatacttg

SEQ ID NO: 5096779 - DNA, 25 bp, Homo sapien
gaggtaaaatcgagagcaacttgga

SEQ ID NO: 5096780 - DNA, 25 bp, Homo sapien
tagccttgagcaaactaatcacgaa

SEQ ID NO: 5096781 - DNA, 25 bp, Homo sapien
tatgagggaggaatatgcagacttc

SEQ ID NO: 5096782 - DNA, 25 bp, Homo sapien
gagttgcagtggaagctcctatgag

SEQ ID NO: 5096783 - DNA, 25 bp, Homo sapien
gttcttctgaggatgacagcactag

SEQ ID NO: 5096784 - DNA, 25 bp, Homo sapien
tggtaaaaccatagttctcagtagt

SEQ ID NO: 5096785 - DNA, 25 bp, Homo sapien
cactagggatgggaactgtaatggt

SEQ ID NO: 5096786 - DNA, 25 bp, Homo sapien
tttaaggtactttgctagcccagga

SEQ ID NO: 5096787 - DNA, 25 bp, Homo sapien
ctgcatggaatagtgtttagaaaac

SEQ ID NO: 5096788 - DNA, 25 bp, Homo sapien
taaaggatttgccatgttataaaaa

SEQ ID NO: 5096789 - DNA, 25 bp, Homo sapien
catttctgaaaaggagcatgttacc

SEQ ID NO: 5096790 - DNA, 25 bp, Homo sapien
aaaacatgctattttagtgctatat

SEQ ID NO: 5096791 - DNA, 25 bp, Homo sapien
tcggaaatgacttcgtgccgccggc

SEQ ID NO: 5096792 - DNA, 25 bp, Homo sapien
cccgagcccggtgtcgtcgaccgtg

SEQ ID NO: 5096793 - DNA, 25 bp, Homo sapien
cggcgcgcccctgatggacttcgga

SEQ ID NO: 5096794 - DNA, 25 bp, Homo sapien
agcggcagccgtcttgggacccgag

SEQ ID NO: 5096795 - DNA, 25 bp, Homo sapien
gcagctgcagcatcatctccaccct

SEQ ID NO: 5096796 - DNA, 25 bp, Homo sapien
gcagcagctgcagcatcatctccac

SEQ ID NO: 5096797 - DNA, 25 bp, Homo sapien
tctccaccctccagccatggaagac

SEQ ID NO: 5096798 - DNA, 25 bp, Homo sapien
atctccaccctccagccatggaaga

SEQ ID NO: 5096799 - DNA, 25 bp, Homo sapien
attgaacgcaatcccagccggtaag

SEQ ID NO: 5096800 - DNA, 25 bp, Homo sapien
ttaccatgtaagagtccagcaggca

SEQ ID NO: 5096801 - DNA, 25 bp, Homo sapien
agactttcaaatggtcggccccaga

SEQ ID NO: 5096802 - DNA, 25 bp, Homo sapien
tgctctaacgacatacggacgccag

SEQ ID NO: 5096803 - DNA, 25 bp, Homo sapien
cattctatgaaagctgggcaaactc

SEQ ID NO: 5096804 - DNA, 25 bp, Homo sapien
ggcaaactctttactcatctatcta

SEQ ID NO: 5096805 - DNA, 25 bp, Homo sapien
ttgatcattctatgaaagctgggca

SEQ ID NO: 5096806 - DNA, 25 bp, Homo sapien
tgggcaaactctttactcatctatc

SEQ ID NO: 5096807 - DNA, 25 bp, Homo sapien
ttctatgcctccgaatcctactatt

SEQ ID NO: 5096808 - DNA, 25 bp, Homo sapien
tcctactattttgagagtgaggtca

SEQ ID NO: 5096809 - DNA, 25 bp, Homo sapien
tccgaatcctactattttgagagtg

SEQ ID NO: 5096810 - DNA, 25 bp, Homo sapien
tatgcctccgaatcctactattttg

SEQ ID NO: 5096811 - DNA, 25 bp, Homo sapien
gctctcttagagaaaacactgaact

SEQ ID NO: 5096812 - DNA, 25 bp, Homo sapien
cagcatttggcttaattcatgtacc

SEQ ID NO: 5096813 - DNA, 25 bp, Homo sapien
tgaacttcgtggacattgggtgatg

SEQ ID NO: 5096814 - DNA, 25 bp, Homo sapien
tcaaattgacatggttcagttccac

SEQ ID NO: 5096815 - DNA, 25 bp, Homo sapien
gcatgttatcagtttgccctatgat

SEQ ID NO: 5096816 - DNA, 25 bp, Homo sapien
ccttggttaatggtgcttggcatgt

SEQ ID NO: 5096817 - DNA, 25 bp, Homo sapien
gaaaccactgggcaagacattttaa

SEQ ID NO: 5096818 - DNA, 25 bp, Homo sapien
cctatgattagtctctgccatcgaa

SEQ ID NO: 5096819 - DNA, 25 bp, Homo sapien
tttatgatattcatctctgacctag

SEQ ID NO: 5096820 - DNA, 25 bp, Homo sapien
tcagagtcactaccaacttccatag

SEQ ID NO: 5096821 - DNA, 25 bp, Homo sapien
gagtcactaccaacttccatagaat

SEQ ID NO: 5096822 - DNA, 25 bp, Homo sapien
gatattcatctctgacctagcttca

SEQ ID NO: 5096823 - DNA, 25 bp, Homo sapien
agtgccccttccgtttctcttgaga

SEQ ID NO: 5096824 - DNA, 25 bp, Homo sapien
cagtcattttgcagtgccccttccg

SEQ ID NO: 5096825 - DNA, 25 bp, Homo sapien
tttgcagtgccccttccgtttctct

SEQ ID NO: 5096826 - DNA, 25 bp, Homo sapien
tctaatcagtcattttgcagtgccc

SEQ ID NO: 5096827 - DNA, 25 bp, Homo sapien
tgggccagtcgccaaggctgggctt

SEQ ID NO: 5096828 - DNA, 25 bp, Homo sapien
gaaattgggccagtcgccaaggctg

SEQ ID NO: 5096829 - DNA, 25 bp, Homo sapien
gccagtcgccaaggctgggcttgct

SEQ ID NO: 5096830 - DNA, 25 bp, Homo sapien
aaattgggccagtcgccaaggctgg

SEQ ID NO: 5096831 - DNA, 25 bp, Homo sapien
gcaaaggagcccagatatcaaaaag

SEQ ID NO: 5096832 - DNA, 25 bp, Homo sapien
atcaaaaagcacatacagtaggatt

SEQ ID NO: 5096833 - DNA, 25 bp, Homo sapien
gacataatatagagcaaaggagccc

SEQ ID NO: 5096834 - DNA, 25 bp, Homo sapien
tatataaggttgaaaacaggctgag

SEQ ID NO: 5096835 - DNA, 25 bp, Homo sapien
caaaacgggatgtgcctagaaagaa

SEQ ID NO: 5096836 - DNA, 25 bp, Homo sapien
tggctgggctgaccaaaacgggatg

SEQ ID NO: 5096837 - DNA, 25 bp, Homo sapien
tgaccaaaacgggatgtgcctagaa

SEQ ID NO: 5096838 - DNA, 25 bp, Homo sapien
ctggcagatcatgccggaaagtggc

SEQ ID NO: 5096839 - DNA, 25 bp, Homo sapien
gctttgttggggtctaatggaccac

SEQ ID NO: 5096840 - DNA, 25 bp, Homo sapien
tggggtctaatggaccaccaaggaa

SEQ ID NO: 5096841 - DNA, 25 bp, Homo sapien
gtgctgagatcttaactcctcgaac

SEQ ID NO: 5096842 - DNA, 25 bp, Homo sapien
tgcagcagtgctgagatcttaactc

SEQ ID NO: 5096843 - DNA, 25 bp, Homo sapien
gacattggtctgcattattgataag

SEQ ID NO: 5096844 - DNA, 25 bp, Homo sapien
gatccaaatggacgtatatgcgccc

SEQ ID NO: 5096845 - DNA, 25 bp, Homo sapien
gtgatatgtcatagggtattcctga

SEQ ID NO: 5096846 - DNA, 25 bp, Homo sapien
ttcatcagcaagaattttttgagcc

SEQ ID NO: 5096847 - DNA, 25 bp, Homo sapien
cagaggcggatttcaacacgctgag

SEQ ID NO: 5096848 - DNA, 25 bp, Homo sapien
cagttttgagagcagtgcgtgccca

SEQ ID NO: 5096849 - DNA, 25 bp, Homo sapien
aaagccaaggcacgctctttctgga

SEQ ID NO: 5096850 - DNA, 25 bp, Homo sapien
cctcttgagtgtcgccattggagca

SEQ ID NO: 5096851 - DNA, 25 bp, Homo sapien
gaccatccactgagctcccagttgc

SEQ ID NO: 5096852 - DNA, 25 bp, Homo sapien
cagggccttctatctatggaccatc

SEQ ID NO: 5096853 - DNA, 25 bp, Homo sapien
gttgctcacgttgatcttgccacaa

SEQ ID NO: 5096854 - DNA, 25 bp, Homo sapien
tctttctacagtttgttgtcatgtg

SEQ ID NO: 5096855 - DNA, 25 bp, Homo sapien
agttctgaagtcctgagggatcctc

SEQ ID NO: 5096856 - DNA, 25 bp, Homo sapien
ttctgaagtcctgagggatcctctt

SEQ ID NO: 5096857 - DNA, 25 bp, Homo sapien
gtagaaaccacagttctgaagtcct

SEQ ID NO: 5096858 - DNA, 25 bp, Homo sapien
ctgtagaaaccacagttctgaagtc

SEQ ID NO: 5096859 - DNA, 25 bp, Homo sapien
cagttccacattgacctgaacatgc

SEQ ID NO: 5096860 - DNA, 25 bp, Homo sapien
attgataaggcttgaattcagttcc

SEQ ID NO: 5096861 - DNA, 25 bp, Homo sapien
ctctgttgtttgtgagtattgataa

SEQ ID NO: 5096862 - DNA, 25 bp, Homo sapien
gttccacattgacctgaacatgccc

SEQ ID NO: 5096863 - DNA, 25 bp, Homo sapien
tgacacagataattgataaagttga

SEQ ID NO: 5096864 - DNA, 25 bp, Homo sapien
cacagataattgataaagttgagag

SEQ ID NO: 5096865 - DNA, 25 bp, Homo sapien
ataaagttgagagggagtttgtgca

SEQ ID NO: 5096866 - DNA, 25 bp, Homo sapien
gataaagttgagagggagtttgtgc

SEQ ID NO: 5096867 - DNA, 25 bp, Homo sapien
agcagggaacagaacggttgcgtcc

SEQ ID NO: 5096868 - DNA, 25 bp, Homo sapien
ggttccatgagctagggcctttctg

SEQ ID NO: 5096869 - DNA, 25 bp, Homo sapien
gaatccactagacttaactcctggt

SEQ ID NO: 5096870 - DNA, 25 bp, Homo sapien
agagcagtctcttttcagggttcca

SEQ ID NO: 5096871 - DNA, 25 bp, Homo sapien
ggtctagaactccacgttttcctca

SEQ ID NO: 5096872 - DNA, 25 bp, Homo sapien
ggccttccttatcccatggttataa

SEQ ID NO: 5096873 - DNA, 25 bp, Homo sapien
aagcgcaagtggagtgagtttgctc

SEQ ID NO: 5096874 - DNA, 25 bp, Homo sapien
tctggtaggccttcgggacttagga

SEQ ID NO: 5096875 - DNA, 25 bp, Homo sapien
tggaaagacctcttctcaccactgt

SEQ ID NO: 5096876 - DNA, 25 bp, Homo sapien
tcctcttcgacaaagtaagccttcc

SEQ ID NO: 5096877 - DNA, 25 bp, Homo sapien
caccactgtattgggtcagaaatcc

SEQ ID NO: 5096878 - DNA, 25 bp, Homo sapien
cttccctacgactttcagaatagag

SEQ ID NO: 5096879 - DNA, 25 bp, Homo sapien
ggagatgaaccacataaacccgtat

SEQ ID NO: 5096880 - DNA, 25 bp, Homo sapien
ggatttagcccaagcagtggctcca

SEQ ID NO: 5096881 - DNA, 25 bp, Homo sapien
tgagagcatcccacttttcccctag

SEQ ID NO: 5096882 - DNA, 25 bp, Homo sapien
cagccttgtgatgctctcctgtaca

SEQ ID NO: 5096883 - DNA, 25 bp, Homo sapien
tgcaggcttggcaaaatagatattt

SEQ ID NO: 5096884 - DNA, 25 bp, Homo sapien
tgtttatactgaaacttctctactc

SEQ ID NO: 5096885 - DNA, 25 bp, Homo sapien
gcaggcttggcaaaatagatatttg

SEQ ID NO: 5096886 - DNA, 25 bp, Homo sapien
gaaacttctctactctggtcctctc

SEQ ID NO: 5096887 - DNA, 25 bp, Homo sapien
tcctgttatgcatgtgacccacttg

SEQ ID NO: 5096888 - DNA, 25 bp, Homo sapien
ttatgcatgtgacccacttgttcag

SEQ ID NO: 5096889 - DNA, 25 bp, Homo sapien
acagcaagtctcctgttatgcatgt

SEQ ID NO: 5096890 - DNA, 25 bp, Homo sapien
aagtctcctgttatgcatgtgaccc

SEQ ID NO: 5096891 - DNA, 25 bp, Homo sapien
ttgagttcagaaggccatatggagg

SEQ ID NO: 5096892 - DNA, 25 bp, Homo sapien
ttccccagaactggcgatggtgatg

SEQ ID NO: 5096893 - DNA, 25 bp, Homo sapien
ttggagtggacacagttccccgtgg

SEQ ID NO: 5096894 - DNA, 25 bp, Homo sapien
aaagccaggatttgagggatagaca

SEQ ID NO: 5096895 - DNA, 25 bp, Homo sapien
ctggcaaattgcttgggctgacatt

SEQ ID NO: 5096896 - DNA, 25 bp, Homo sapien
cctggcaaattgcttgggctgacat

SEQ ID NO: 5096897 - DNA, 25 bp, Homo sapien
ggcaaattgcttgggctgacattga

SEQ ID NO: 5096898 - DNA, 25 bp, Homo sapien
aaattgcttgggctgacattgagaa

SEQ ID NO: 5096899 - DNA, 25 bp, Homo sapien
tgatccctctgctgatggctatggg

SEQ ID NO: 5096900 - DNA, 25 bp, Homo sapien
acagacagggtcataaacatcggcc

SEQ ID NO: 5096901 - DNA, 25 bp, Homo sapien
cactctattagtggtgaatttggca

SEQ ID NO: 5096902 - DNA, 25 bp, Homo sapien
catccctgttctttggtgcactcta

SEQ ID NO: 5096903 - DNA, 25 bp, Homo sapien
ccagtttgtagccaaggaatttata

SEQ ID NO: 5096904 - DNA, 25 bp, Homo sapien
tatagccattgagcctggggattaa

SEQ ID NO: 5096905 - DNA, 25 bp, Homo sapien
cctggggattaactggagtgacaga

SEQ ID NO: 5096906 - DNA, 25 bp, Homo sapien
tggttgcacagaagtctgtgcagtc

SEQ ID NO: 5096907 - DNA, 25 bp, Homo sapien
ggccaggtagttgagtaggagccat

SEQ ID NO: 5096908 - DNA, 25 bp, Homo sapien
ccaggtagttgagtaggagccatgt

SEQ ID NO: 5096909 - DNA, 25 bp, Homo sapien
gccaggtagttgagtaggagccatg

SEQ ID NO: 5096910 - DNA, 25 bp, Homo sapien
atcctcacagcaacatctttaaaca

SEQ ID NO: 5096911 - DNA, 25 bp, Homo sapien
catctggtctgtttatttgcctcat

SEQ ID NO: 5096912 - DNA, 25 bp, Homo sapien
tctccttttatcctgccttcttgtc

SEQ ID NO: 5096913 - DNA, 25 bp, Homo sapien
acatctttaaacacatctggtctgt

SEQ ID NO: 5096914 - DNA, 25 bp, Homo sapien
cagagtgagccttgtctgctaggaa

SEQ ID NO: 5096915 - DNA, 25 bp, Homo sapien
ctgctaggaattcgtgcttctgtac

SEQ ID NO: 5096916 - DNA, 25 bp, Homo sapien
ttgtctgctaggaattcgtgcttct

SEQ ID NO: 5096917 - DNA, 25 bp, Homo sapien
ctcagagtgagccttgtctgctagg

SEQ ID NO: 5096918 - DNA, 25 bp, Homo sapien
gctgatgcagggacagggcttttgt

SEQ ID NO: 5096919 - DNA, 25 bp, Homo sapien
ctgagctgatgcagggacagggctt

SEQ ID NO: 5096920 - DNA, 25 bp, Homo sapien
tgcctcctctcggaagtccaacgac

SEQ ID NO: 5096921 - DNA, 25 bp, Homo sapien
tgatgcagggacagggcttttgtgc

SEQ ID NO: 5096922 - DNA, 25 bp, Homo sapien
tcccttgatccctttgtatcttcag

SEQ ID NO: 5096923 - DNA, 25 bp, Homo sapien
cctcttccgttctctgggggcacat

SEQ ID NO: 5096924 - DNA, 25 bp, Homo sapien
ttctgaactcgcagaccgcctcttc

SEQ ID NO: 5096925 - DNA, 25 bp, Homo sapien
ggcacattggcttccgtgttcctag

SEQ ID NO: 5096926 - DNA, 25 bp, Homo sapien
tgtccattgacagagcttagaaaaa

SEQ ID NO: 5096927 - DNA, 25 bp, Homo sapien
gatttttggccttcatacaggctgt

SEQ ID NO: 5096928 - DNA, 25 bp, Homo sapien
aaagggagaggtatttcggcagcac

SEQ ID NO: 5096929 - DNA, 25 bp, Homo sapien
tcagttagcattgcctttggcagct

SEQ ID NO: 5096930 - DNA, 25 bp, Homo sapien
tattacttagagagaagaccagtcg

SEQ ID NO: 5096931 - DNA, 25 bp, Homo sapien
tggcatgggcacaaatcaagcagaa

SEQ ID NO: 5096932 - DNA, 25 bp, Homo sapien
tgcatagaagtagacctgtgatacc

SEQ ID NO: 5096933 - DNA, 25 bp, Homo sapien
tactgctgatttaaagatgcgcccc

SEQ ID NO: 5096934 - DNA, 25 bp, Homo sapien
gaaagtctaattgaattgtcgtgaa

SEQ ID NO: 5096935 - DNA, 25 bp, Homo sapien
tgtgtgtgttcagtctaccgtcttt

SEQ ID NO: 5096936 - DNA, 25 bp, Homo sapien
tgtcgtgaatcttgttaatctatag

SEQ ID NO: 5096937 - DNA, 25 bp, Homo sapien
taatctatagtaggtataggaaatc

SEQ ID NO: 5096938 - DNA, 25 bp, Homo sapien
tattttttgagtgtccattgtatgc

SEQ ID NO: 5096939 - DNA, 25 bp, Homo sapien
gaaagtttagtctgctaacattcac

SEQ ID NO: 5096940 - DNA, 25 bp, Homo sapien
tgattggaaagtttagtctgctaac

SEQ ID NO: 5096941 - DNA, 25 bp, Homo sapien
cagtgttataatactgccttttttg

SEQ ID NO: 5096942 - DNA, 25 bp, Homo sapien
ctgcctcccgggctcaaattattct

SEQ ID NO: 5096943 - DNA, 25 bp, Homo sapien
gagacggaatcttgccctgtcttcc

SEQ ID NO: 5096944 - DNA, 25 bp, Homo sapien
gacggaatcttgccctgtcttccag

SEQ ID NO: 5096945 - DNA, 25 bp, Homo sapien
gcctcccgggctcaaattattctcc

SEQ ID NO: 5096946 - DNA, 25 bp, Homo sapien
tactcaactagattcatctcagtga

SEQ ID NO: 5096947 - DNA, 25 bp, Homo sapien
taaagccagtggatattttatttcc

SEQ ID NO: 5096948 - DNA, 25 bp, Homo sapien
caaacccaaagaatcccaagcatca

SEQ ID NO: 5096949 - DNA, 25 bp, Homo sapien
tagatactttctcgtccatgtggta

SEQ ID NO: 5096950 - DNA, 25 bp, Homo sapien
ccgtgcccggccttttacagataat

SEQ ID NO: 5096951 - DNA, 25 bp, Homo sapien
cgtgcccggccttttacagataatt

SEQ ID NO: 5096952 - DNA, 25 bp, Homo sapien
ggatcactccgagtacactggccac

SEQ ID NO: 5096953 - DNA, 25 bp, Homo sapien
ctgcagcgccagctaaggaccagga

SEQ ID NO: 5096954 - DNA, 25 bp, Homo sapien
tgcacaaactgcagcgccagctaag

SEQ ID NO: 5096955 - DNA, 25 bp, Homo sapien
actccaggatcactccgagtacact

SEQ ID NO: 5096956 - DNA, 25 bp, Homo sapien
gcctctttgacggagctttactcca

SEQ ID NO: 5096957 - DNA, 25 bp, Homo sapien
gttcccggctctgtctggtctggca

SEQ ID NO: 5096958 - DNA, 25 bp, Homo sapien
gctgctcgcagtggtccagaaaaga

SEQ ID NO: 5096959 - DNA, 25 bp, Homo sapien
gcactgatgttctcatggacacaag

SEQ ID NO: 5096960 - DNA, 25 bp, Homo sapien
tccaggactgaattcgaggtggcag

SEQ ID NO: 5096961 - DNA, 25 bp, Homo sapien
aaggcatccaggactgaattcgagg

SEQ ID NO: 5096962 - DNA, 25 bp, Homo sapien
catccaggactgaattcgaggtggc

SEQ ID NO: 5096963 - DNA, 25 bp, Homo sapien
tgcaggaaccccctggcacgcagtg

SEQ ID NO: 5096964 - DNA, 25 bp, Homo sapien
ctcccgtgttttggcatttctgaag

SEQ ID NO: 5096965 - DNA, 25 bp, Homo sapien
gaatccagtcgtttattcttcctgg

SEQ ID NO: 5096966 - DNA, 25 bp, Homo sapien
ctgaagaatccagtcgtttattctt

SEQ ID NO: 5096967 - DNA, 25 bp, Homo sapien
atttcctgacctatgccctcccgtg

SEQ ID NO: 5096968 - DNA, 25 bp, Homo sapien
gaatcagcaatctaccagacgctcc

SEQ ID NO: 5096969 - DNA, 25 bp, Homo sapien
agagaatcagcaatctaccagacgc

SEQ ID NO: 5096970 - DNA, 25 bp, Homo sapien
tttctctcctgtagcgcctccctgc

SEQ ID NO: 5096971 - DNA, 25 bp, Homo sapien
gcaatctaccagacgctccttgggc

SEQ ID NO: 5096972 - DNA, 25 bp, Homo sapien
ttctcttagccacgttgattgtacg

SEQ ID NO: 5096973 - DNA, 25 bp, Homo sapien
tagccacgttgattgtacgggaaaa

SEQ ID NO: 5096974 - DNA, 25 bp, Homo sapien
tcttagccacgttgattgtacggga

SEQ ID NO: 5096975 - DNA, 25 bp, Homo sapien
cttagccacgttgattgtacgggaa

SEQ ID NO: 5096976 - DNA, 25 bp, Homo sapien
gccacgttgattgtacgggaaaagc

SEQ ID NO: 5096977 - DNA, 25 bp, Homo sapien
cacgttgattgtacgggaaaagcct

SEQ ID NO: 5096978 - DNA, 25 bp, Homo sapien
cccgtacaatcaacgtggctaagag

SEQ ID NO: 5096979 - DNA, 25 bp, Homo sapien
gcttttcccgtacaatcaacgtggc

SEQ ID NO: 5096980 - DNA, 25 bp, Homo sapien
cgtacaatcaacgtggctaagagaa

SEQ ID NO: 5096981 - DNA, 25 bp, Homo sapien
aggcttttcccgtacaatcaacgtg

SEQ ID NO: 5096982 - DNA, 25 bp, Homo sapien
ttttcccgtacaatcaacgtggcta

SEQ ID NO: 5096983 - DNA, 25 bp, Homo sapien
ttcccgtacaatcaacgtggctaag

SEQ ID NO: 5096984 - DNA, 25 bp, Homo sapien
tttcgaaagcattccgaaggctaaa

SEQ ID NO: 5096985 - DNA, 25 bp, Homo sapien
tttagccttcggaatgctttcgaaa

SEQ ID NO: 5096986 - DNA, 25 bp, Homo sapien
acgtcctagtctggcaccgggttgg

SEQ ID NO: 5096987 - DNA, 25 bp, Homo sapien
tcgctgggacggcagtcaggcattt

SEQ ID NO: 5096988 - DNA, 25 bp, Homo sapien
tgggcctgcgcggcgttcttccttt

SEQ ID NO: 5096989 - DNA, 25 bp, Homo sapien
tctggcaccgggttggattgtcgct

SEQ ID NO: 5096990 - DNA, 25 bp, Homo sapien
gagaggagaaacgaagttcacgtcc

SEQ ID NO: 5096991 - DNA, 25 bp, Homo sapien
gaagttcacgtcctagtctggcacc

SEQ ID NO: 5096992 - DNA, 25 bp, Homo sapien
cttccttttcgatccgccatctgcg

SEQ ID NO: 5096993 - DNA, 25 bp, Homo sapien
cgcagatggcggatcgaaaaggaag

SEQ ID NO: 5096994 - DNA, 25 bp, Homo sapien
atccaacccggtgccagactaggac

SEQ ID NO: 5096995 - DNA, 25 bp, Homo sapien
aaatgcctgactgccgtcccagcga

SEQ ID NO: 5096996 - DNA, 25 bp, Homo sapien
acccggtgccagactaggacgtgaa

SEQ ID NO: 5096997 - DNA, 25 bp, Homo sapien
tgccagactaggacgtgaacttcgt

SEQ ID NO: 5096998 - DNA, 25 bp, Homo sapien
gacgtgaacttcgtttctcctctcc

SEQ ID NO: 5096999 - DNA, 25 bp, Homo sapien
agcgacaatccaacccggtgccaga

SEQ ID NO: 5097000 - DNA, 25 bp, Homo sapien
gcaccctatggtgccttctcttgtg

SEQ ID NO: 5097001 - DNA, 25 bp, Homo sapien
ttgtgatccctgacctaacctgtct

SEQ ID NO: 5097002 - DNA, 25 bp, Homo sapien
tctgcacttcggctgctctcgggtt

SEQ ID NO: 5097003 - DNA, 25 bp, Homo sapien
gctgctctcgggttagcaccctatg

SEQ ID NO: 5097004 - DNA, 25 bp, Homo sapien
tagcaccctatggtgccttctcttg

SEQ ID NO: 5097005 - DNA, 25 bp, Homo sapien
tcttgtgatccctgacctaacctgt

SEQ ID NO: 5097006 - DNA, 25 bp, Homo sapien
agacaggttaggtcagggatcacaa

SEQ ID NO: 5097007 - DNA, 25 bp, Homo sapien
catagggtgctaacccgagagcagc

SEQ ID NO: 5097008 - DNA, 25 bp, Homo sapien
acaggttaggtcagggatcacaaga

SEQ ID NO: 5097009 - DNA, 25 bp, Homo sapien
cacaagagaaggcaccatagggtgc

SEQ ID NO: 5097010 - DNA, 25 bp, Homo sapien
caagagaaggcaccatagggtgcta

SEQ ID NO: 5097011 - DNA, 25 bp, Homo sapien
aacccgagagcagccgaagtgcaga

SEQ ID NO: 5097012 - DNA, 25 bp, Homo sapien
cttacggggaagaccatcaccctcg

SEQ ID NO: 5097013 - DNA, 25 bp, Homo sapien
ttacggggaagaccatcaccctcga

SEQ ID NO: 5097014 - DNA, 25 bp, Homo sapien
tgcagattttcgtgaaaacccttac

SEQ ID NO: 5097015 - DNA, 25 bp, Homo sapien
tacggggaagaccatcaccctcgag

SEQ ID NO: 5097016 - DNA, 25 bp, Homo sapien
atgcagattttcgtgaaaaccctta

SEQ ID NO: 5097017 - DNA, 25 bp, Homo sapien
taagggttttcacgaaaatctgcat

SEQ ID NO: 5097018 - DNA, 25 bp, Homo sapien
gtaagggttttcacgaaaatctgca

SEQ ID NO: 5097019 - DNA, 25 bp, Homo sapien
tcgagggtgatggtcttccccgtaa

SEQ ID NO: 5097020 - DNA, 25 bp, Homo sapien
ctcgagggtgatggtcttccccgta

SEQ ID NO: 5097021 - DNA, 25 bp, Homo sapien
cgagggtgatggtcttccccgtaag

SEQ ID NO: 5097022 - DNA, 25 bp, Homo sapien
gaaatgagtaccttttgctgagcaa

SEQ ID NO: 5097023 - DNA, 25 bp, Homo sapien
cagctagttagttaaaacggaggag

SEQ ID NO: 5097024 - DNA, 25 bp, Homo sapien
aagccaaggtccgaataaggtcctg

SEQ ID NO: 5097025 - DNA, 25 bp, Homo sapien
taggaccggcgctgctttccatgtc

SEQ ID NO: 5097026 - DNA, 25 bp, Homo sapien
acctagaggtgattttcggtggcca

SEQ ID NO: 5097027 - DNA, 25 bp, Homo sapien
tttgctgagcaacgacctagaggtg

SEQ ID NO: 5097028 - DNA, 25 bp, Homo sapien
acatggaaagcagcgccggtcctaa

SEQ ID NO: 5097029 - DNA, 25 bp, Homo sapien
tcaggaccttattcggaccttggct

SEQ ID NO: 5097030 - DNA, 25 bp, Homo sapien
caaattcggaatcatggtctaagac

SEQ ID NO: 5097031 - DNA, 25 bp, Homo sapien
cacctctaggtcgttgctcagcaaa

SEQ ID NO: 5097032 - DNA, 25 bp, Homo sapien
tggccaccgaaaatcacctctaggt

SEQ ID NO: 5097033 - DNA, 25 bp, Homo sapien
tggaacccctcgagaggagacaggt

SEQ ID NO: 5097034 - DNA, 25 bp, Homo sapien
ccctcggatacgatagaaaatgtaa

SEQ ID NO: 5097035 - DNA, 25 bp, Homo sapien
gaaccctcggatacgatagaaaatg

SEQ ID NO: 5097036 - DNA, 25 bp, Homo sapien
tgaaccctcggatacgatagaaaat

SEQ ID NO: 5097037 - DNA, 25 bp, Homo sapien
gttgaaccctcggatacgatagaaa

SEQ ID NO: 5097038 - DNA, 25 bp, Homo sapien
cctcggatacgatagaaaatgtaaa

SEQ ID NO: 5097039 - DNA, 25 bp, Homo sapien
aaccctcggatacgatagaaaatgt

SEQ ID NO: 5097040 - DNA, 25 bp, Homo sapien
ttacattttctatcgtatccgaggg

SEQ ID NO: 5097041 - DNA, 25 bp, Homo sapien
tttacattttctatcgtatccgagg

SEQ ID NO: 5097042 - DNA, 25 bp, Homo sapien
cattttctatcgtatccgagggttc

SEQ ID NO: 5097043 - DNA, 25 bp, Homo sapien
tttctatcgtatccgagggttcaac

SEQ ID NO: 5097044 - DNA, 25 bp, Homo sapien
tacattttctatcgtatccgagggt

SEQ ID NO: 5097045 - DNA, 25 bp, Homo sapien
ttttctatcgtatccgagggttcaa

SEQ ID NO: 5097046 - DNA, 25 bp, Homo sapien
gctggaagatggacgtactttgtct

SEQ ID NO: 5097047 - DNA, 25 bp, Homo sapien
agatggacgtactttgtctgactac

SEQ ID NO: 5097048 - DNA, 25 bp, Homo sapien
ggacgtactttgtctgactacaata

SEQ ID NO: 5097049 - DNA, 25 bp, Homo sapien
gcagagactgatctttgctggcaag

SEQ ID NO: 5097050 - DNA, 25 bp, Homo sapien
tactttgtctgactacaatattcaa

SEQ ID NO: 5097051 - DNA, 25 bp, Homo sapien
gactgatctttgctggcaagcagct

SEQ ID NO: 5097052 - DNA, 25 bp, Homo sapien
cttgccagcaaagatcagtctctgc

SEQ ID NO: 5097053 - DNA, 25 bp, Homo sapien
agctgcttgccagcaaagatcagtc

SEQ ID NO: 5097054 - DNA, 25 bp, Homo sapien
gaatattgtagtcagacaaagtacg

SEQ ID NO: 5097055 - DNA, 25 bp, Homo sapien
tagtcagacaaagtacgtccatctt

SEQ ID NO: 5097056 - DNA, 25 bp, Homo sapien
tattgtagtcagacaaagtacgtcc

SEQ ID NO: 5097057 - DNA, 25 bp, Homo sapien
agacaaagtacgtccatcttccagc

SEQ ID NO: 5097058 - DNA, 25 bp, Homo sapien
tggcattcgaatagcagtagatttt

SEQ ID NO: 5097059 - DNA, 25 bp, Homo sapien
cattcgaatagcagtagatttttag

SEQ ID NO: 5097060 - DNA, 25 bp, Homo sapien
gaaaatggcattcgaatagcagtag

SEQ ID NO: 5097061 - DNA, 25 bp, Homo sapien
gggaaaatggcattcgaatagcagt

SEQ ID NO: 5097062 - DNA, 25 bp, Homo sapien
agtgagtggcgcagtcactgcaacc

SEQ ID NO: 5097063 - DNA, 25 bp, Homo sapien
gagtgagtggcgcagtcactgcaac

SEQ ID NO: 5097064 - DNA, 25 bp, Homo sapien
taaaaatctactgctattcgaatgc

SEQ ID NO: 5097065 - DNA, 25 bp, Homo sapien
ctaaaaatctactgctattcgaatg

SEQ ID NO: 5097066 - DNA, 25 bp, Homo sapien
aaaatctactgctattcgaatgcca

SEQ ID NO: 5097067 - DNA, 25 bp, Homo sapien
tactgctattcgaatgccattttcc

SEQ ID NO: 5097068 - DNA, 25 bp, Homo sapien
gttgcagtgactgcgccactcactc

SEQ ID NO: 5097069 - DNA, 25 bp, Homo sapien
ggttgcagtgactgcgccactcact

SEQ ID NO: 5097070 - DNA, 25 bp, Homo sapien
tatactgatacttgagaagcactgc

SEQ ID NO: 5097071 - DNA, 25 bp, Homo sapien
tgagaagcactgctatagttctccc

SEQ ID NO: 5097072 - DNA, 25 bp, Homo sapien
gtatcccatggtgtaatgtaatgca

SEQ ID NO: 5097073 - DNA, 25 bp, Homo sapien
gttctcccattatgaattttgcaag

SEQ ID NO: 5097074 - DNA, 25 bp, Homo sapien
ttttgcaagttgtatcccatggtgt

SEQ ID NO: 5097075 - DNA, 25 bp, Homo sapien
aatgtccctataaactgtcagttaa

SEQ ID NO: 5097076 - DNA, 25 bp, Homo sapien
gggagaactatagcagtgcttctca

SEQ ID NO: 5097077 - DNA, 25 bp, Homo sapien
caacttgcaaaattcataatgggag

SEQ ID NO: 5097078 - DNA, 25 bp, Homo sapien
tgcattacattacaccatgggatac

SEQ ID NO: 5097079 - DNA, 25 bp, Homo sapien
tacaccatgggatacaacttgcaaa

SEQ ID NO: 5097080 - DNA, 25 bp, Homo sapien
cttaactgacagtttatagggacat

SEQ ID NO: 5097081 - DNA, 25 bp, Homo sapien
tgcttctcaagtatcagtataggag

SEQ ID NO: 5097082 - DNA, 25 bp, Homo sapien
catgaaagcttgcttcattcttcca

SEQ ID NO: 5097083 - DNA, 25 bp, Homo sapien
gcttgcttcattcttccattaacag

SEQ ID NO: 5097084 - DNA, 25 bp, Homo sapien
aagcttgcttcattcttccattaac

SEQ ID NO: 5097085 - DNA, 25 bp, Homo sapien
tggaatcatgaaagcttgcttcatt

SEQ ID NO: 5097086 - DNA, 25 bp, Homo sapien
tgaaagcttgcttcattcttccatt

SEQ ID NO: 5097087 - DNA, 25 bp, Homo sapien
tcatgaaagcttgcttcattcttcc

SEQ ID NO: 5097088 - DNA, 25 bp, Homo sapien
aatgaagcaagctttcatgattcca

SEQ ID NO: 5097089 - DNA, 25 bp, Homo sapien
tgttaatggaagaatgaagcaagct

SEQ ID NO: 5097090 - DNA, 25 bp, Homo sapien
tggaagaatgaagcaagctttcatg

SEQ ID NO: 5097091 - DNA, 25 bp, Homo sapien
gaagaatgaagcaagctttcatgat

SEQ ID NO: 5097092 - DNA, 25 bp, Homo sapien
aatggaagaatgaagcaagctttca

SEQ ID NO: 5097093 - DNA, 25 bp, Homo sapien
ctgttaatggaagaatgaagcaagc

SEQ ID NO: 5097094 - DNA, 25 bp, Homo sapien
agaagaagtcttacaccactcccaa

SEQ ID NO: 5097095 - DNA, 25 bp, Homo sapien
aggaagaagaagtcttacaccactc

SEQ ID NO: 5097096 - DNA, 25 bp, Homo sapien
tgttgagacttcgtggtggtgctaa

SEQ ID NO: 5097097 - DNA, 25 bp, Homo sapien
cttcgtggtggtgctaagaaaagga

SEQ ID NO: 5097098 - DNA, 25 bp, Homo sapien
gttaagctggctgtcctgaaatatt

SEQ ID NO: 5097099 - DNA, 25 bp, Homo sapien
gcacaagagaaagaaggttaagctg

SEQ ID NO: 5097100 - DNA, 25 bp, Homo sapien
tccttttcttagcaccaccacgaag

SEQ ID NO: 5097101 - DNA, 25 bp, Homo sapien
cagcttaaccttctttctcttgtgc

SEQ ID NO: 5097102 - DNA, 25 bp, Homo sapien
aatatttcaggacagccagcttaac

SEQ ID NO: 5097103 - DNA, 25 bp, Homo sapien
ttgggagtggtgtaagacttcttct

SEQ ID NO: 5097104 - DNA, 25 bp, Homo sapien
gagtggtgtaagacttcttcttcct

SEQ ID NO: 5097105 - DNA, 25 bp, Homo sapien
ttagcaccaccacgaagtctcaaca

SEQ ID NO: 5097106 - DNA, 25 bp, Homo sapien
cagttatgtaatagggttctgagtt

SEQ ID NO: 5097107 - DNA, 25 bp, Homo sapien
tacctttgtctaccacttgcaaagc

SEQ ID NO: 5097108 - DNA, 25 bp, Homo sapien
tggacttaaacacccaatattatcc

SEQ ID NO: 5097109 - DNA, 25 bp, Homo sapien
tcaggtctttacctttgtctaccac

SEQ ID NO: 5097110 - DNA, 25 bp, Homo sapien
cactttggtttaaatgaggtattct

SEQ ID NO: 5097111 - DNA, 25 bp, Homo sapien
aacacccaatattatcccactttgg

SEQ ID NO: 5097112 - DNA, 25 bp, Homo sapien
agaatacctcatttaaaccaaagtg

SEQ ID NO: 5097113 - DNA, 25 bp, Homo sapien
gtggtagacaaaggtaaagacctga

SEQ ID NO: 5097114 - DNA, 25 bp, Homo sapien
aactcagaaccctattacataactg

SEQ ID NO: 5097115 - DNA, 25 bp, Homo sapien
gctttgcaagtggtagacaaaggta

SEQ ID NO: 5097116 - DNA, 25 bp, Homo sapien
taatattgggtgtttaagtccaaga

SEQ ID NO: 5097117 - DNA, 25 bp, Homo sapien
aaccaaagtgggataatattgggtg

SEQ ID NO: 5097118 - DNA, 25 bp, Homo sapien
aattatcttaacagcaggtttgtgc

SEQ ID NO: 5097119 - DNA, 25 bp, Homo sapien
ccagtattacacagttaaaagctta

SEQ ID NO: 5097120 - DNA, 25 bp, Homo sapien
tcacttaaattagacttcagaatgt

SEQ ID NO: 5097121 - DNA, 25 bp, Homo sapien
tagggtgctttggtttgtaagcacc

SEQ ID NO: 5097122 - DNA, 25 bp, Homo sapien
taactggtgagaatttagggtgctt

SEQ ID NO: 5097123 - DNA, 25 bp, Homo sapien
tggtttgtaagcaccaaaaccacca

SEQ ID NO: 5097124 - DNA, 25 bp, Homo sapien
caaagcaccctaaattctcaccagt

SEQ ID NO: 5097125 - DNA, 25 bp, Homo sapien
cattctgaagtctaatttaagtgac

SEQ ID NO: 5097126 - DNA, 25 bp, Homo sapien
gcacaaacctgctgttaagataatt

SEQ ID NO: 5097127 - DNA, 25 bp, Homo sapien
tggtggttttggtgcttacaaacca

SEQ ID NO: 5097128 - DNA, 25 bp, Homo sapien
tggtgcttacaaaccaaagcaccct

SEQ ID NO: 5097129 - DNA, 25 bp, Homo sapien
taagcttttaactgtgtaatactgg

SEQ ID NO: 5097130 - DNA, 25 bp, Homo sapien
aattagtcgccttcgtcgagagtgc

SEQ ID NO: 5097131 - DNA, 25 bp, Homo sapien
aaaattagtcgccttcgtcgagagt

SEQ ID NO: 5097132 - DNA, 25 bp, Homo sapien
cgccttcgtcgagagtgcccttctg

SEQ ID NO: 5097133 - DNA, 25 bp, Homo sapien
tcgccttcgtcgagagtgcccttct

SEQ ID NO: 5097134 - DNA, 25 bp, Homo sapien
gtttatggcaagtcactttgacaga

SEQ ID NO: 5097135 - DNA, 25 bp, Homo sapien
ggcaaaattagtcgccttcgtcgag

SEQ ID NO: 5097136 - DNA, 25 bp, Homo sapien
agaagggcactctcgacgaaggcga

SEQ ID NO: 5097137 - DNA, 25 bp, Homo sapien
tcgacgaaggcgactaattttgcca

SEQ ID NO: 5097138 - DNA, 25 bp, Homo sapien
tctgtcaaagtgacttgccataaac

SEQ ID NO: 5097139 - DNA, 25 bp, Homo sapien
cagaagggcactctcgacgaaggcg

SEQ ID NO: 5097140 - DNA, 25 bp, Homo sapien
actctcgacgaaggcgactaatttt

SEQ ID NO: 5097141 - DNA, 25 bp, Homo sapien
gtttgttgaaacagtaagtcagaca

SEQ ID NO: 5097142 - DNA, 25 bp, Homo sapien
cagtggttctgtatacctgccaggt

SEQ ID NO: 5097143 - DNA, 25 bp, Homo sapien
caggtgccaaccacttgtaaaggtc

SEQ ID NO: 5097144 - DNA, 25 bp, Homo sapien
cttagactacctatactttggcaga

SEQ ID NO: 5097145 - DNA, 25 bp, Homo sapien
taagcaccaaattgatggtcacacc

SEQ ID NO: 5097146 - DNA, 25 bp, Homo sapien
gctatcgctgtgtgaatgttgcctc

SEQ ID NO: 5097147 - DNA, 25 bp, Homo sapien
tagtagtgctactgctatcgctgtg

SEQ ID NO: 5097148 - DNA, 25 bp, Homo sapien
gacctttacaagtggttggcacctg

SEQ ID NO: 5097149 - DNA, 25 bp, Homo sapien
gaggcaacattcacacagcgatagc

SEQ ID NO: 5097150 - DNA, 25 bp, Homo sapien
tgggtcacataatccccagaggcaa

SEQ ID NO: 5097151 - DNA, 25 bp, Homo sapien
cacagcgatagcagtagcactacta

SEQ ID NO: 5097152 - DNA, 25 bp, Homo sapien
tctgccaaagtataggtagtctaag

SEQ ID NO: 5097153 - DNA, 25 bp, Homo sapien
cctggcaggtatacagaaccactgg

SEQ ID NO: 5097154 - DNA, 25 bp, Homo sapien
aaaaaagtaggctgactcctatggt

SEQ ID NO: 5097155 - DNA, 25 bp, Homo sapien
gtaggctgactcctatggtcctgcc

SEQ ID NO: 5097156 - DNA, 25 bp, Homo sapien
aagtaggctgactcctatggtcctg

SEQ ID NO: 5097157 - DNA, 25 bp, Homo sapien
ctatggtcctgcctactgggaagtc

SEQ ID NO: 5097158 - DNA, 25 bp, Homo sapien
tatggtcctgcctactgggaagtct

SEQ ID NO: 5097159 - DNA, 25 bp, Homo sapien
aaaagtaggctgactcctatggtcc

SEQ ID NO: 5097160 - DNA, 25 bp, Homo sapien
gacttcccagtaggcaggaccatag

SEQ ID NO: 5097161 - DNA, 25 bp, Homo sapien
caggaccataggagtcagcctactt

SEQ ID NO: 5097162 - DNA, 25 bp, Homo sapien
ggcaggaccataggagtcagcctac

SEQ ID NO: 5097163 - DNA, 25 bp, Homo sapien
gcaggaccataggagtcagcctact

SEQ ID NO: 5097164 - DNA, 25 bp, Homo sapien
ggaccataggagtcagcctactttt

SEQ ID NO: 5097165 - DNA, 25 bp, Homo sapien
agacttcccagtaggcaggaccata

SEQ ID NO: 5097166 - DNA, 25 bp, Homo sapien
cttaaccagggttgtccggtgcagg

SEQ ID NO: 5097167 - DNA, 25 bp, Homo sapien
tccgggtccagaaggtgatctccgc

SEQ ID NO: 5097168 - DNA, 25 bp, Homo sapien
cataaacattgtgcgttcggaagcc

SEQ ID NO: 5097169 - DNA, 25 bp, Homo sapien
tggcacaaatcacgcgaacttcata

SEQ ID NO: 5097170 - DNA, 25 bp, Homo sapien
ctaggttatgagttgatttttattt

SEQ ID NO: 5097171 - DNA, 25 bp, Homo sapien
tctaggttatgagttgatttttatt

SEQ ID NO: 5097172 - DNA, 25 bp, Homo sapien
ttctaggttatgagttgatttttat

SEQ ID NO: 5097173 - DNA, 25 bp, Homo sapien
aaaacggcacggcttcccgcggctg

SEQ ID NO: 5097174 - DNA, 25 bp, Homo sapien
ctatcgtggcgatgggcggaaaaac

SEQ ID NO: 5097175 - DNA, 25 bp, Homo sapien
tgcccagagggatctcggccgacgc

SEQ ID NO: 5097176 - DNA, 25 bp, Homo sapien
accgaagcctgaggcggaactgccc

SEQ ID NO: 5097177 - DNA, 25 bp, Homo sapien
gggtgctccacgacctcagtgtgga

SEQ ID NO: 5097178 - DNA, 25 bp, Homo sapien
cacgacctcagtgtggatggccagg

SEQ ID NO: 5097179 - DNA, 25 bp, Homo sapien
acctcagtgtggatggccagggcac

SEQ ID NO: 5097180 - DNA, 25 bp, Homo sapien
ccagggcaccgagccgctgctcgag

SEQ ID NO: 5097181 - DNA, 25 bp, Homo sapien
tcaacacggaatgtaagcagatcac

SEQ ID NO: 5097182 - DNA, 25 bp, Homo sapien
tcccagaccgatttaagatgcacag

SEQ ID NO: 5097183 - DNA, 25 bp, Homo sapien
tattccaggagcgacgttctcacgg

SEQ ID NO: 5097184 - DNA, 25 bp, Homo sapien
taaagatttccgtgcagtaacctca

SEQ ID NO: 5097185 - DNA, 25 bp, Homo sapien
tatgcacacgtttatacctattttg

SEQ ID NO: 5097186 - DNA, 25 bp, Homo sapien
tgggagtgcctatcgccctgaattt

SEQ ID NO: 5097187 - DNA, 25 bp, Homo sapien
taattacttataagcccatgccatc

SEQ ID NO: 5097188 - DNA, 25 bp, Homo sapien
tgctgggtgaaaacagcaaggtttg

SEQ ID NO: 5097189 - DNA, 25 bp, Homo sapien
caccttcgagaaaagcagaatccag

SEQ ID NO: 5097190 - DNA, 25 bp, Homo sapien
ggcacagccttgaccaacttttagt

SEQ ID NO: 5097191 - DNA, 25 bp, Homo sapien
catcacagaaaagtgccaagggtgt

SEQ ID NO: 5097192 - DNA, 25 bp, Homo sapien
ttcagggctcaatcccatggttgca

SEQ ID NO: 5097193 - DNA, 25 bp, Homo sapien
tatgggatcatgtcctgtcatcttc

SEQ ID NO: 5097194 - DNA, 25 bp, Homo sapien
agtattatgggatcatgtcctgtca

SEQ ID NO: 5097195 - DNA, 25 bp, Homo sapien
aaaatttagtattatgggatcatgt

SEQ ID NO: 5097196 - DNA, 25 bp, Homo sapien
tgggatcatgtcctgtcatcttcac

SEQ ID NO: 5097197 - DNA, 25 bp, Homo sapien
agaaagaaatttattctaaacattg

SEQ ID NO: 5097198 - DNA, 25 bp, Homo sapien
gaaatttattctaaacattggccca

SEQ ID NO: 5097199 - DNA, 25 bp, Homo sapien
cagaaagaaatttattctaaacatt

SEQ ID NO: 5097200 - DNA, 25 bp, Homo sapien
atggaaagtgtttacctttgcctca

SEQ ID NO: 5097201 - DNA, 25 bp, Homo sapien
gtgtttacctttgcctcaatgtttg

SEQ ID NO: 5097202 - DNA, 25 bp, Homo sapien
tagtacaatgattatgacataacat

SEQ ID NO: 5097203 - DNA, 25 bp, Homo sapien
tatcttgctagggagttcttattct

SEQ ID NO: 5097204 - DNA, 25 bp, Homo sapien
agataactcactaccatcaggccag

SEQ ID NO: 5097205 - DNA, 25 bp, Homo sapien
caagtgtagtagtggaaagggagga

SEQ ID NO: 5097206 - DNA, 25 bp, Homo sapien
agggaggaaagagtggaacaaggag

SEQ ID NO: 5097207 - DNA, 25 bp, Homo sapien
aagattagtcaagtgtagtagtgga

SEQ ID NO: 5097208 - DNA, 25 bp, Homo sapien
tatacagggtaatagctttggctca

SEQ ID NO: 5097209 - DNA, 25 bp, Homo sapien
caaaacaggtttgtatgtagcacct

SEQ ID NO: 5097210 - DNA, 25 bp, Homo sapien
caatgaagtactacagcctgtgctg

SEQ ID NO: 5097211 - DNA, 25 bp, Homo sapien
tattatagagttgtagccacctcac

SEQ ID NO: 5097212 - DNA, 25 bp, Homo sapien
cagtaaccataagaaaagtctctct

SEQ ID NO: 5097213 - DNA, 25 bp, Homo sapien
taggctttcattaccagctctgaag

SEQ ID NO: 5097214 - DNA, 25 bp, Homo sapien
taacagtgtacttcttaggctttca

SEQ ID NO: 5097215 - DNA, 25 bp, Homo sapien
tctgaaatgagaaacatactgactt

SEQ ID NO: 5097216 - DNA, 25 bp, Homo sapien
ttttaacttgagagctgactgttgc

SEQ ID NO: 5097217 - DNA, 25 bp, Homo sapien
gtattgggttatgtatgcgtgtgca

SEQ ID NO: 5097218 - DNA, 25 bp, Homo sapien
ggcattcccaagataaagctgttgt

SEQ ID NO: 5097219 - DNA, 25 bp, Homo sapien
cactaagcattcataagttaaccca

SEQ ID NO: 5097220 - DNA, 25 bp, Homo sapien
aaatttgaatctctaactcccagat

SEQ ID NO: 5097221 - DNA, 25 bp, Homo sapien
taaatttgaatctctaactcccaga

SEQ ID NO: 5097222 - DNA, 25 bp, Homo sapien
aacccataaccctgatccatttact

SEQ ID NO: 5097223 - DNA, 25 bp, Homo sapien
cttccagagaaatacacattggcat

SEQ ID NO: 5097224 - DNA, 25 bp, Homo sapien
tgtcatttaattaggccatctgtcc

SEQ ID NO: 5097225 - DNA, 25 bp, Homo sapien
aaatacaagagctcaagtaactgtc

SEQ ID NO: 5097226 - DNA, 25 bp, Homo sapien
aacagttgcatgctctcttaccaag

SEQ ID NO: 5097227 - DNA, 25 bp, Homo sapien
tccagaagcatgttaaaacagttgc

SEQ ID NO: 5097228 - DNA, 25 bp, Homo sapien
ttttgaccaaggacagtagactgcc

SEQ ID NO: 5097229 - DNA, 25 bp, Homo sapien
tatgatagacggacaactaagcctg

SEQ ID NO: 5097230 - DNA, 25 bp, Homo sapien
tctcaactgccgaaggaactacacg

SEQ ID NO: 5097231 - DNA, 25 bp, Homo sapien
gagacctggtcctcgaaaaactgaa

SEQ ID NO: 5097232 - DNA, 25 bp, Homo sapien
tatacagttgttacccttgttacag

SEQ ID NO: 5097233 - DNA, 25 bp, Homo sapien
cttgttacagataggaatacaggac

SEQ ID NO: 5097234 - DNA, 25 bp, Homo sapien
tattggcaataagtggataacatgt

SEQ ID NO: 5097235 - DNA, 25 bp, Homo sapien
ttttaagagttagcatagggcagtg

SEQ ID NO: 5097236 - DNA, 25 bp, Homo sapien
caaaagagctgtgattatttacacg

SEQ ID NO: 5097237 - DNA, 25 bp, Homo sapien
caagttaaagagctatatgtccatt

SEQ ID NO: 5097238 - DNA, 25 bp, Homo sapien
gaatggttagtgactctagtgaacg

SEQ ID NO: 5097239 - DNA, 25 bp, Homo sapien
gctcctaatagcaatcaaacaagtt

SEQ ID NO: 5097240 - DNA, 25 bp, Homo sapien
aaaaatgtcaattcagatataagca

SEQ ID NO: 5097241 - DNA, 25 bp, Homo sapien
cagatataagcatacacaagagagg

SEQ ID NO: 5097242 - DNA, 25 bp, Homo sapien
attcagatataagcatacacaagag

SEQ ID NO: 5097243 - DNA, 25 bp, Homo sapien
gtcaattcagatataagcatacaca

SEQ ID NO: 5097244 - DNA, 25 bp, Homo sapien
caagatagttcttcagtaggttcaa

SEQ ID NO: 5097245 - DNA, 25 bp, Homo sapien
ccctcatcaagacagtcaagatagt

SEQ ID NO: 5097246 - DNA, 25 bp, Homo sapien
caagacagtcaagatagttcttcag

SEQ ID NO: 5097247 - DNA, 25 bp, Homo sapien
tagttcttcagtaggttcaaactct

SEQ ID NO: 5097248 - DNA, 25 bp, Homo sapien
tattccatcattgggttaaagtacc

SEQ ID NO: 5097249 - DNA, 25 bp, Homo sapien
ctattccatcattgggttaaagtac

SEQ ID NO: 5097250 - DNA, 25 bp, Homo sapien
ccactctttccgatatatcctattc

SEQ ID NO: 5097251 - DNA, 25 bp, Homo sapien
actctttccgatatatcctattcca

SEQ ID NO: 5097252 - DNA, 25 bp, Homo sapien
taattagctggcatgtacgctgagg

SEQ ID NO: 5097253 - DNA, 25 bp, Homo sapien
ccacaggcaacttgaggcctagact

SEQ ID NO: 5097254 - DNA, 25 bp, Homo sapien
gacttggaactgttacaccatcact

SEQ ID NO: 5097255 - DNA, 25 bp, Homo sapien
ctatggtggcctcggtgggataacc

SEQ ID NO: 5097256 - DNA, 25 bp, Homo sapien
ttgcctaatgagtctgagtttgctg

SEQ ID NO: 5097257 - DNA, 25 bp, Homo sapien
tgagcatctatgctaatctactcac

SEQ ID NO: 5097258 - DNA, 25 bp, Homo sapien
gctctttaacaacgagacaacctta

SEQ ID NO: 5097259 - DNA, 25 bp, Homo sapien
cttagtggtaatggacagtaaacat

SEQ ID NO: 5097260 - DNA, 25 bp, Homo sapien
tatggatttacgattcccacagtgc

SEQ ID NO: 5097261 - DNA, 25 bp, Homo sapien
tcttgcagcaactccaaaggtatgg

SEQ ID NO: 5097262 - DNA, 25 bp, Homo sapien
gagctttcctggctttgaatccgta

SEQ ID NO: 5097263 - DNA, 25 bp, Homo sapien
gatagcagggcagtgtcagtccatc

SEQ ID NO: 5097264 - DNA, 25 bp, Homo sapien
agcctgggctacaagagcaaaactc

SEQ ID NO: 5097265 - DNA, 25 bp, Homo sapien
ttgaacacgggaagcggaggttgcg

SEQ ID NO: 5097266 - DNA, 25 bp, Homo sapien
agccgagattatgccattgcactcc

SEQ ID NO: 5097267 - DNA, 25 bp, Homo sapien
ggctacaagagcaaaactccatctc

SEQ ID NO: 5097268 - DNA, 25 bp, Homo sapien
agtatcctgtgccataagtatgtca

SEQ ID NO: 5097269 - DNA, 25 bp, Homo sapien
gataattgcaatactgacagtcaca

SEQ ID NO: 5097270 - DNA, 25 bp, Homo sapien
ataaggagtcttcattgccgggcgc

SEQ ID NO: 5097271 - DNA, 25 bp, Homo sapien
tactgtaactactctgtaccctgag

SEQ ID NO: 5097272 - DNA, 25 bp, Homo sapien
aattagttcccaaatgtacccagtg

SEQ ID NO: 5097273 - DNA, 25 bp, Homo sapien
tatatcatccaggtacagtcctcag

SEQ ID NO: 5097274 - DNA, 25 bp, Homo sapien
gagaatcattgtattagatcacgct

SEQ ID NO: 5097275 - DNA, 25 bp, Homo sapien
tctttttgggaatgaatacacacac

SEQ ID NO: 5097276 - DNA, 25 bp, Homo sapien
taaattgcctggtttgaatatgtta

SEQ ID NO: 5097277 - DNA, 25 bp, Homo sapien
tgctttagagtgcttcattattgac

SEQ ID NO: 5097278 - DNA, 25 bp, Homo sapien
agtagtatttcgagctagggtctca

SEQ ID NO: 5097279 - DNA, 25 bp, Homo sapien
tctaaaatgcgtaattgaaaagaaa

SEQ ID NO: 5097280 - DNA, 25 bp, Homo sapien
tgacaaaaaccgtagaagagcttcg

SEQ ID NO: 5097281 - DNA, 25 bp, Homo sapien
ccatgaggtgaatgagttgacatca

SEQ ID NO: 5097282 - DNA, 25 bp, Homo sapien
caagtagattattgaagctagagat

SEQ ID NO: 5097283 - DNA, 25 bp, Homo sapien
aatattatagcaccccagaaatccc

SEQ ID NO: 5097284 - DNA, 25 bp, Homo sapien
tttaatgggtctgcttgaactccaa

SEQ ID NO: 5097285 - DNA, 25 bp, Homo sapien
aaacatgtatctcttagctgggtgc

SEQ ID NO: 5097286 - DNA, 25 bp, Homo sapien
atcccttcagaccaggcgtttgagg

SEQ ID NO: 5097287 - DNA, 25 bp, Homo sapien
aattagctggctgtacctgcagtcc

SEQ ID NO: 5097288 - DNA, 25 bp, Homo sapien
tctgctgcctcaggattattgagcc

SEQ ID NO: 5097289 - DNA, 25 bp, Homo sapien
taaaagtactaacctgtgtcatcca

SEQ ID NO: 5097290 - DNA, 25 bp, Homo sapien
tggaggtgccgcaatttcccattct

SEQ ID NO: 5097291 - DNA, 25 bp, Homo sapien
tgttggatgggtgtcgatttcttga

SEQ ID NO: 5097292 - DNA, 25 bp, Homo sapien
gaatatacagtgctttcagtttggt

SEQ ID NO: 5097293 - DNA, 25 bp, Homo sapien
ttctcaatatgattcatatgtagtt

SEQ ID NO: 5097294 - DNA, 25 bp, Homo sapien
aactagttgttatacctgagagtat

SEQ ID NO: 5097295 - DNA, 25 bp, Homo sapien
tttttgtccacagctttgtattgga

SEQ ID NO: 5097296 - DNA, 25 bp, Homo sapien
caccgatgttatatctcctttgagg

SEQ ID NO: 5097297 - DNA, 25 bp, Homo sapien
ggcaaggtgataggagcaagatttc

SEQ ID NO: 5097298 - DNA, 25 bp, Homo sapien
gatatttttcccaccgatgttatat

SEQ ID NO: 5097299 - DNA, 25 bp, Homo sapien
tatatctcctttgaggcaaggtgat

SEQ ID NO: 5097300 - DNA, 25 bp, Homo sapien
ggagcagcgcgctccctttgacggc

SEQ ID NO: 5097301 - DNA, 25 bp, Homo sapien
tgatgcggcactgcggttctgaggc

SEQ ID NO: 5097302 - DNA, 25 bp, Homo sapien
tcatgcagcggttttcttctcccac

SEQ ID NO: 5097303 - DNA, 25 bp, Homo sapien
gttactccggcttctccatagaggg

SEQ ID NO: 5097304 - DNA, 25 bp, Homo sapien
tttcaccgttacaggccatgctcag

SEQ ID NO: 5097305 - DNA, 25 bp, Homo sapien
cacaagtgcgcattggtgggaaaga

SEQ ID NO: 5097306 - DNA, 25 bp, Homo sapien
actcgcaaactgcaggcacaagtgc

SEQ ID NO: 5097307 - DNA, 25 bp, Homo sapien
tctctggcagcgaacactttcaccg

SEQ ID NO: 5097308 - DNA, 25 bp, Homo sapien
gccccgctccgactcgcgcacggtg

SEQ ID NO: 5097309 - DNA, 25 bp, Homo sapien
tcgccccgctccgactcgcgcacgg

SEQ ID NO: 5097310 - DNA, 25 bp, Homo sapien
cccgctccgactcgcgcacggtgcg

SEQ ID NO: 5097311 - DNA, 25 bp, Homo sapien
ccccgctccgactcgcgcacggtgc

SEQ ID NO: 5097312 - DNA, 25 bp, Homo sapien
tgttagctggttgttttgctcgttc

SEQ ID NO: 5097313 - DNA, 25 bp, Homo sapien
ggccatgctaatctttgctgtgtca

SEQ ID NO: 5097314 - DNA, 25 bp, Homo sapien
catgctaatctttgctgtgtcattc

SEQ ID NO: 5097315 - DNA, 25 bp, Homo sapien
caattttagtatatgtgctgccaaa

SEQ ID NO: 5097316 - DNA, 25 bp, Homo sapien
tatatgtgctgccaaagggagcacc

SEQ ID NO: 5097317 - DNA, 25 bp, Homo sapien
gctgctattgtaaattaggattcct

SEQ ID NO: 5097318 - DNA, 25 bp, Homo sapien
tatattttccctcaaagttcattaa

SEQ ID NO: 5097319 - DNA, 25 bp, Homo sapien
cgacattattaaaatagtagtcttc

SEQ ID NO: 5097320 - DNA, 25 bp, Homo sapien
taattcattggtgggagaacgacat

SEQ ID NO: 5097321 - DNA, 25 bp, Homo sapien
tggcaacacacgtagccgccctaga

SEQ ID NO: 5097322 - DNA, 25 bp, Homo sapien
tcgctcagcccccaggatagaagct

SEQ ID NO: 5097323 - DNA, 25 bp, Homo sapien
gatagaagctaccaaccagttaatg

SEQ ID NO: 5097324 - DNA, 25 bp, Homo sapien
ctttgggccacaaggagccgagagg

SEQ ID NO: 5097325 - DNA, 25 bp, Homo sapien
cacatttctgttccacaaagtccaa

SEQ ID NO: 5097326 - DNA, 25 bp, Homo sapien
tccaagatggggatggaccagtctg

SEQ ID NO: 5097327 - DNA, 25 bp, Homo sapien
gggatggaccagtctgggcctcgca

SEQ ID NO: 5097328 - DNA, 25 bp, Homo sapien
aggaaccccgcgatgctctccacta

SEQ ID NO: 5097329 - DNA, 25 bp, Homo sapien
gggcttcctggagttatcacatgcc

SEQ ID NO: 5097330 - DNA, 25 bp, Homo sapien
gcttcctggagttatcacatgccct

SEQ ID NO: 5097331 - DNA, 25 bp, Homo sapien
tcctggagttatcacatgccctcct

SEQ ID NO: 5097332 - DNA, 25 bp, Homo sapien
ggaacacaggccaccaaaatcaccg

SEQ ID NO: 5097333 - DNA, 25 bp, Homo sapien
aatctctgtataggtcaatttgctt

SEQ ID NO: 5097334 - DNA, 25 bp, Homo sapien
ctctgtataggtcaatttgctttct

SEQ ID NO: 5097335 - DNA, 25 bp, Homo sapien
ctgtataggtcaatttgctttcttc

SEQ ID NO: 5097336 - DNA, 25 bp, Homo sapien
tctctgtataggtcaatttgctttc

SEQ ID NO: 5097337 - DNA, 25 bp, Homo sapien
tgaaattgatcttcattaattccaa

SEQ ID NO: 5097338 - DNA, 25 bp, Homo sapien
gaggtaaccttctaacagcttttca

SEQ ID NO: 5097339 - DNA, 25 bp, Homo sapien
ttgaaattgatcttcattaattcca

SEQ ID NO: 5097340 - DNA, 25 bp, Homo sapien
gaaattgatcttcattaattccaat

SEQ ID NO: 5097341 - DNA, 25 bp, Homo sapien
gcctagcactacacaaccagtaaga

SEQ ID NO: 5097342 - DNA, 25 bp, Homo sapien
ttaagtgagtgtttaaccctgggca

SEQ ID NO: 5097343 - DNA, 25 bp, Homo sapien
gaaaggtcactttgagttgcatcag

SEQ ID NO: 5097344 - DNA, 25 bp, Homo sapien
tttcagggttgctctcaaaaagaac

SEQ ID NO: 5097345 - DNA, 25 bp, Homo sapien
tatttttgattattggatgaagtgg

SEQ ID NO: 5097346 - DNA, 25 bp, Homo sapien
aagtggtgtatgtcaaataaattca

SEQ ID NO: 5097347 - DNA, 25 bp, Homo sapien
tcttgacgaacattctgtgtgatct

SEQ ID NO: 5097348 - DNA, 25 bp, Homo sapien
cataatgtagtctgtcttgacgaac

SEQ ID NO: 5097349 - DNA, 25 bp, Homo sapien
aattattcgaatggcttgcagctgc

SEQ ID NO: 5097350 - DNA, 25 bp, Homo sapien
ggaccatcattgctttaaagatagt

SEQ ID NO: 5097351 - DNA, 25 bp, Homo sapien
ttctctcttgaattattcgaatggc

SEQ ID NO: 5097352 - DNA, 25 bp, Homo sapien
tcttgaattattcgaatggcttgca

SEQ ID NO: 5097353 - DNA, 25 bp, Homo sapien
ttagatttctaacttcaacatttta

SEQ ID NO: 5097354 - DNA, 25 bp, Homo sapien
tagatttctaacttcaacattttac

SEQ ID NO: 5097355 - DNA, 25 bp, Homo sapien
catgagacagctacatttaagacca

SEQ ID NO: 5097356 - DNA, 25 bp, Homo sapien
tcagctgaagtctttcaaacttgaa

SEQ ID NO: 5097357 - DNA, 25 bp, Homo sapien
tgcacccagccatatactctaaaat

SEQ ID NO: 5097358 - DNA, 25 bp, Homo sapien
ctctaaaatctcaagtcagctgaag

SEQ ID NO: 5097359 - DNA, 25 bp, Homo sapien
aaatgcaaattatcggtaccccaga

SEQ ID NO: 5097360 - DNA, 25 bp, Homo sapien
accatttccaatgcttgctaaagct

SEQ ID NO: 5097361 - DNA, 25 bp, Homo sapien
taagaaccactgcttccggccacgt

SEQ ID NO: 5097362 - DNA, 25 bp, Homo sapien
ctccaaccatttccaatgcttgcta

SEQ ID NO: 5097363 - DNA, 25 bp, Homo sapien
gacaacagcgctattagctgctggg

SEQ ID NO: 5097364 - DNA, 25 bp, Homo sapien
caaatgaggaggaaactccccagta

SEQ ID NO: 5097365 - DNA, 25 bp, Homo sapien
caaggattttatagagcaaaccaca

SEQ ID NO: 5097366 - DNA, 25 bp, Homo sapien
gcactatgtcatggattcttcaggg

SEQ ID NO: 5097367 - DNA, 25 bp, Homo sapien
tccttgattagatcagtgagccact

SEQ ID NO: 5097368 - DNA, 25 bp, Homo sapien
tgtaagtaaaatgccccatgctgtg

SEQ ID NO: 5097369 - DNA, 25 bp, Homo sapien
gagagtgactcctaattggttcaag

SEQ ID NO: 5097370 - DNA, 25 bp, Homo sapien
gcagctaactacttagaggcagggc

SEQ ID NO: 5097371 - DNA, 25 bp, Homo sapien
tctgcagttttgagtataatcaaca

SEQ ID NO: 5097372 - DNA, 25 bp, Homo sapien
gattttgggtctactcttaagtagc

SEQ ID NO: 5097373 - DNA, 25 bp, Homo sapien
ataatcttcctgaggaaaactgaaa

SEQ ID NO: 5097374 - DNA, 25 bp, Homo sapien
taactaatccattaatcttaagtgc

SEQ ID NO: 5097375 - DNA, 25 bp, Homo sapien
taagaacttccctcaggattttcat

SEQ ID NO: 5097376 - DNA, 25 bp, Homo sapien
cacatcagagccatcggttaagcag

SEQ ID NO: 5097377 - DNA, 25 bp, Homo sapien
agccatcggttaagcagtcaggtaa

SEQ ID NO: 5097378 - DNA, 25 bp, Homo sapien
tcatctcttcgtgttcaaggtcact

SEQ ID NO: 5097379 - DNA, 25 bp, Homo sapien
ggcaaaaagcatatgtacagatcat

SEQ ID NO: 5097380 - DNA, 25 bp, Homo sapien
tattagttcatatttgttgggcaaa

SEQ ID NO: 5097381 - DNA, 25 bp, Homo sapien
tatttgttgggcaaaaagcatatgt

SEQ ID NO: 5097382 - DNA, 25 bp, Homo sapien
gcatatgtacagatcatataatatt

SEQ ID NO: 5097383 - DNA, 25 bp, Homo sapien
atgtggcaagaaagggttgagttca

SEQ ID NO: 5097384 - DNA, 25 bp, Homo sapien
aaagggttgagttcaactgcatatc

SEQ ID NO: 5097385 - DNA, 25 bp, Homo sapien
cataatcactcaaacccccgaaatt

SEQ ID NO: 5097386 - DNA, 25 bp, Homo sapien
acctgtaaactcaaagcattctgtg

SEQ ID NO: 5097387 - DNA, 25 bp, Homo sapien
cctggtcatattcctcttttgattt

SEQ ID NO: 5097388 - DNA, 25 bp, Homo sapien
ttcttcctggtcatattcctctttt

SEQ ID NO: 5097389 - DNA, 25 bp, Homo sapien
cttcctggtcatattcctcttttga

SEQ ID NO: 5097390 - DNA, 25 bp, Homo sapien
tttcttcttcctggtcatattcctc

SEQ ID NO: 5097391 - DNA, 25 bp, Homo sapien
tatatgcatgtcctgtaagattaat

SEQ ID NO: 5097392 - DNA, 25 bp, Homo sapien
taaacttaataagagataacagcaa

SEQ ID NO: 5097393 - DNA, 25 bp, Homo sapien
tggtggccagcagtaatgcacgaca

SEQ ID NO: 5097394 - DNA, 25 bp, Homo sapien
tgcacgacatacatagaattattga

SEQ ID NO: 5097395 - DNA, 25 bp, Homo sapien
cctccggctcctggatttaaatgat

SEQ ID NO: 5097396 - DNA, 25 bp, Homo sapien
ccggctcctggatttaaatgattct

SEQ ID NO: 5097397 - DNA, 25 bp, Homo sapien
ggctcctggatttaaatgattctca

SEQ ID NO: 5097398 - DNA, 25 bp, Homo sapien
acctccggctcctggatttaaatga

SEQ ID NO: 5097399 - DNA, 25 bp, Homo sapien
cttcaggattccataatacaatttt

SEQ ID NO: 5097400 - DNA, 25 bp, Homo sapien
taaaaaacacacaatttagattcat

SEQ ID NO: 5097401 - DNA, 25 bp, Homo sapien
caggattccataatacaatttttta

SEQ ID NO: 5097402 - DNA, 25 bp, Homo sapien
ttaaaaaacacacaatttagattca

SEQ ID NO: 5097403 - DNA, 25 bp, Homo sapien
caccatccccttgggaattattcat

SEQ ID NO: 5097404 - DNA, 25 bp, Homo sapien
agggtgggtgtgcaaaatgttcacc

SEQ ID NO: 5097405 - DNA, 25 bp, Homo sapien
gtgggtgtgcaaaatgttcaccatc

SEQ ID NO: 5097406 - DNA, 25 bp, Homo sapien
cactggaatgcactgtgggctcttc

SEQ ID NO: 5097407 - DNA, 25 bp, Homo sapien
tcaaggaaggttcaccaacgtaaca

SEQ ID NO: 5097408 - DNA, 25 bp, Homo sapien
taatggtgaatgcatgtcatcatac

SEQ ID NO: 5097409 - DNA, 25 bp, Homo sapien
taggcatgtactagggcagggacta

SEQ ID NO: 5097410 - DNA, 25 bp, Homo sapien
aatgtaaactatgctctttggttgg

SEQ ID NO: 5097411 - DNA, 25 bp, Homo sapien
ttgggtcagcaaactagagcacaga

SEQ ID NO: 5097412 - DNA, 25 bp, Homo sapien
cacagacaaacctaaagcaggagct

SEQ ID NO: 5097413 - DNA, 25 bp, Homo sapien
gaacatacgtatattctcaggccta

SEQ ID NO: 5097414 - DNA, 25 bp, Homo sapien
aagacactatccattgctggcagga

SEQ ID NO: 5097415 - DNA, 25 bp, Homo sapien
tgaaagaaagcacactgagacaagc

SEQ ID NO: 5097416 - DNA, 25 bp, Homo sapien
tggtgactgtgccaaccaagagaga

SEQ ID NO: 5097417 - DNA, 25 bp, Homo sapien
gatttctaaagcaagcagaacttgg

SEQ ID NO: 5097418 - DNA, 25 bp, Homo sapien
ttgcaagagtgcatgccagtaatgt

SEQ ID NO: 5097419 - DNA, 25 bp, Homo sapien
caataagtagacaataagagcaatt

SEQ ID NO: 5097420 - DNA, 25 bp, Homo sapien
ggcaataagtagacaataagagcaa

SEQ ID NO: 5097421 - DNA, 25 bp, Homo sapien
ctggcaataagtagacaataagagc

SEQ ID NO: 5097422 - DNA, 25 bp, Homo sapien
tggcaataagtagacaataagagca

SEQ ID NO: 5097423 - DNA, 25 bp, Homo sapien
tcttcccaaaggttctattgactga

SEQ ID NO: 5097424 - DNA, 25 bp, Homo sapien
atgctctaagccaggaatcttcagg

SEQ ID NO: 5097425 - DNA, 25 bp, Homo sapien
tgctattggtccttcaatgctcgca

SEQ ID NO: 5097426 - DNA, 25 bp, Homo sapien
tcaatgctcgcatgctctaagccag

SEQ ID NO: 5097427 - DNA, 25 bp, Homo sapien
cgaagtttgatttcccagtaccttg

SEQ ID NO: 5097428 - DNA, 25 bp, Homo sapien
cttatagttcttaagtgatgtcgtt

SEQ ID NO: 5097429 - DNA, 25 bp, Homo sapien
tttagtaagtagcacagatgcccac

SEQ ID NO: 5097430 - DNA, 25 bp, Homo sapien
gcccactgagtgattcaattcgaag

SEQ ID NO: 5097431 - DNA, 25 bp, Homo sapien
ctgggtcaagtaagaaaaggagcta

SEQ ID NO: 5097432 - DNA, 25 bp, Homo sapien
tgggtcaagtaagaaaaggagctat

SEQ ID NO: 5097433 - DNA, 25 bp, Homo sapien
tgtatctgtttagtcctcatatcct

SEQ ID NO: 5097434 - DNA, 25 bp, Homo sapien
agtgttctcgttgccgaagttcttc

SEQ ID NO: 5097435 - DNA, 25 bp, Homo sapien
gacatcaacttatctctcttctgct

SEQ ID NO: 5097436 - DNA, 25 bp, Homo sapien
tctgcttgagatagtgttctcgttg

SEQ ID NO: 5097437 - DNA, 25 bp, Homo sapien
tagcagctactgcactaggaggtga

SEQ ID NO: 5097438 - DNA, 25 bp, Homo sapien
cttggagaacccctctgggaagtgg

SEQ ID NO: 5097439 - DNA, 25 bp, Homo sapien
aaatcttgacatattaaggctagcc

SEQ ID NO: 5097440 - DNA, 25 bp, Homo sapien
taaaggtggtactgatgctgctcta

SEQ ID NO: 5097441 - DNA, 25 bp, Homo sapien
tctgcaagcaatctcctctttagta

SEQ ID NO: 5097442 - DNA, 25 bp, Homo sapien
ctgcaagcaatctcctctttagtaa

SEQ ID NO: 5097443 - DNA, 25 bp, Homo sapien
gacaatttgaacttccattttgtta

SEQ ID NO: 5097444 - DNA, 25 bp, Homo sapien
taagacaatttgaacttccattttg

SEQ ID NO: 5097445 - DNA, 25 bp, Homo sapien
agacaatttgaacttccattttgtt

SEQ ID NO: 5097446 - DNA, 25 bp, Homo sapien
aagacaatttgaacttccattttgt

SEQ ID NO: 5097447 - DNA, 25 bp, Homo sapien
tatccctcaaaagaacaattgtgag

SEQ ID NO: 5097448 - DNA, 25 bp, Homo sapien
ccctatctctgtatcttatgaagac

SEQ ID NO: 5097449 - DNA, 25 bp, Homo sapien
cctacgacgataagagaacaaggct

SEQ ID NO: 5097450 - DNA, 25 bp, Homo sapien
acggttttcatggtacaagtgctta

SEQ ID NO: 5097451 - DNA, 25 bp, Homo sapien
aagcagtttcccctgttttggagat

SEQ ID NO: 5097452 - DNA, 25 bp, Homo sapien
ttaacagtaattccagccacaatct

SEQ ID NO: 5097453 - DNA, 25 bp, Homo sapien
cctggaatcgtttaatctaaagcag

SEQ ID NO: 5097454 - DNA, 25 bp, Homo sapien
tgagatcatgccgaagtgagaaaaa

SEQ ID NO: 5097455 - DNA, 25 bp, Homo sapien
aagtctatgccagtttatgttacca

SEQ ID NO: 5097456 - DNA, 25 bp, Homo sapien
tgataataaatgtaagcatccttcc

SEQ ID NO: 5097457 - DNA, 25 bp, Homo sapien
tatgagtgtgcgtggccaattgcag

SEQ ID NO: 5097458 - DNA, 25 bp, Homo sapien
gaacgtcttcacacatacggtcaaa

SEQ ID NO: 5097459 - DNA, 25 bp, Homo sapien
tgaggaattaccattttttggaata

SEQ ID NO: 5097460 - DNA, 25 bp, Homo sapien
atactgccctgagtatatcatttaa

SEQ ID NO: 5097461 - DNA, 25 bp, Homo sapien
gcacagtggcacttacctggagtcc

SEQ ID NO: 5097462 - DNA, 25 bp, Homo sapien
cacagtggcacttacctggagtccc

SEQ ID NO: 5097463 - DNA, 25 bp, Homo sapien
tatgttcagacattcaaaggattga

SEQ ID NO: 5097464 - DNA, 25 bp, Homo sapien
gaagatatcaagtctcttactgccc

SEQ ID NO: 5097465 - DNA, 25 bp, Homo sapien
tactgcccatatagttgaaaacttt

SEQ ID NO: 5097466 - DNA, 25 bp, Homo sapien
tcatgtgtaaagaaaccaggacatt

SEQ ID NO: 5097467 - DNA, 25 bp, Homo sapien
cacattcattattctggagttttaa

SEQ ID NO: 5097468 - DNA, 25 bp, Homo sapien
gagaaataccctaattgttgaatga

SEQ ID NO: 5097469 - DNA, 25 bp, Homo sapien
gatgtataatggataatcaaatgca

SEQ ID NO: 5097470 - DNA, 25 bp, Homo sapien
gaatgatgaataggagaaggtaaaa

SEQ ID NO: 5097471 - DNA, 25 bp, Homo sapien
gaggtgatccacctgccccggcctc

SEQ ID NO: 5097472 - DNA, 25 bp, Homo sapien
tgagccaccccgcccagcccaattt

SEQ ID NO: 5097473 - DNA, 25 bp, Homo sapien
tgaggtgatccacctgccccggcct

SEQ ID NO: 5097474 - DNA, 25 bp, Homo sapien
catggatgtcgtgggatgccttgaa

SEQ ID NO: 5097475 - DNA, 25 bp, Homo sapien
tggctctcgccttggaaaatgaagg

SEQ ID NO: 5097476 - DNA, 25 bp, Homo sapien
gcttgcgagaacctagaaaacactg

SEQ ID NO: 5097477 - DNA, 25 bp, Homo sapien
cacctatccgtagggaaaagctggc

SEQ ID NO: 5097478 - DNA, 25 bp, Homo sapien
gccttaacggtgaagcgctctgcaa

SEQ ID NO: 5097479 - DNA, 25 bp, Homo sapien
ttcctaggaacgtcacatactggtg

SEQ ID NO: 5097480 - DNA, 25 bp, Homo sapien
ggtgccatccaacaacatgacgacg

SEQ ID NO: 5097481 - DNA, 25 bp, Homo sapien
tatttttcctcctcaggcggacgaa

SEQ ID NO: 5097482 - DNA, 25 bp, Homo sapien
ccctgtgctttggaggggtctgaaa

SEQ ID NO: 5097483 - DNA, 25 bp, Homo sapien
cagacttggataagcactgagccct

SEQ ID NO: 5097484 - DNA, 25 bp, Homo sapien
tgtaaaggcattacttattcaaaac

SEQ ID NO: 5097485 - DNA, 25 bp, Homo sapien
gcttatttggttagcaactctttga

SEQ ID NO: 5097486 - DNA, 25 bp, Homo sapien
gatacatactttgtgggcccagtgc

SEQ ID NO: 5097487 - DNA, 25 bp, Homo sapien
tagggttctcactcctaccagaatg

SEQ ID NO: 5097488 - DNA, 25 bp, Homo sapien
taaaccaagtgcctatctgtacagg

SEQ ID NO: 5097489 - DNA, 25 bp, Homo sapien
cgcagggcccttgtccagaaacttt

SEQ ID NO: 5097490 - DNA, 25 bp, Homo sapien
ttcttggccactttgacagctggag

SEQ ID NO: 5097491 - DNA, 25 bp, Homo sapien
gaccaggtgtgtcacattgagggaa

SEQ ID NO: 5097492 - DNA, 25 bp, Homo sapien
ctcggcccaccaggatgtgtctggc

SEQ ID NO: 5097493 - DNA, 25 bp, Homo sapien
gagtgaacgagtacagggcaggagt

SEQ ID NO: 5097494 - DNA, 25 bp, Homo sapien
aagagtgtgcgggtactaagatgca

SEQ ID NO: 5097495 - DNA, 25 bp, Homo sapien
tccagacaaagagaatacctgtgca

SEQ ID NO: 5097496 - DNA, 25 bp, Homo sapien
gaaataggcagtccaagaaggctcc

SEQ ID NO: 5097497 - DNA, 25 bp, Homo sapien
gatttgttcgaatgtggcttttgtc

SEQ ID NO: 5097498 - DNA, 25 bp, Homo sapien
cataaccttgggagatcctggccac

SEQ ID NO: 5097499 - DNA, 25 bp, Homo sapien
caatcagtgcttgacattctctaga

SEQ ID NO: 5097500 - DNA, 25 bp, Homo sapien
taaagctacaagtatgacaggtgct

SEQ ID NO: 5097501 - DNA, 25 bp, Homo sapien
tgcagttccctggactaatagaggt

SEQ ID NO: 5097502 - DNA, 25 bp, Homo sapien
cgttagaggagttctgcactgggca

SEQ ID NO: 5097503 - DNA, 25 bp, Homo sapien
cagtcaaaatgcaatccagggccag

SEQ ID NO: 5097504 - DNA, 25 bp, Homo sapien
agaaagagcctcgactacactgtag

SEQ ID NO: 5097505 - DNA, 25 bp, Homo sapien
taaaaagtgtagagcccaaaaggca

SEQ ID NO: 5097506 - DNA, 25 bp, Homo sapien
gctaacctcgggactacttgctgag

SEQ ID NO: 5097507 - DNA, 25 bp, Homo sapien
gtgtccagaggtatctacagagcca

SEQ ID NO: 5097508 - DNA, 25 bp, Homo sapien
tatcagggccagcagttcctaggca

SEQ ID NO: 5097509 - DNA, 25 bp, Homo sapien
tactggatctccctaggctgagcat

SEQ ID NO: 5097510 - DNA, 25 bp, Homo sapien
aaaaacagtcccgatgtggtggctc

SEQ ID NO: 5097511 - DNA, 25 bp, Homo sapien
caaaaaaaacagtcccgatgtggtg

SEQ ID NO: 5097512 - DNA, 25 bp, Homo sapien
agtgggctgggcacataccaagatg

SEQ ID NO: 5097513 - DNA, 25 bp, Homo sapien
cctaaacctggtataagcaactggt

SEQ ID NO: 5097514 - DNA, 25 bp, Homo sapien
gggataatggatggacttaacccag

SEQ ID NO: 5097515 - DNA, 25 bp, Homo sapien
gaagagagcggcagttatgactaag

SEQ ID NO: 5097516 - DNA, 25 bp, Homo sapien
cgaatatgaaacaagggatggccaa

SEQ ID NO: 5097517 - DNA, 25 bp, Homo sapien
tctagatagagggactaacaacttc

SEQ ID NO: 5097518 - DNA, 25 bp, Homo sapien
tcttcaccgaaattagaaagcaaag

SEQ ID NO: 5097519 - DNA, 25 bp, Homo sapien
tcagcacagacttaaatgaagcaga

SEQ ID NO: 5097520 - DNA, 25 bp, Homo sapien
tggtggttagctcaatacaagtact

SEQ ID NO: 5097521 - DNA, 25 bp, Homo sapien
tagtgactcagatcaaactgaatgc

SEQ ID NO: 5097522 - DNA, 25 bp, Homo sapien
ggctatattatatgctggaaacact

SEQ ID NO: 5097523 - DNA, 25 bp, Homo sapien
cagttcagccaagcatagcattctt

SEQ ID NO: 5097524 - DNA, 25 bp, Homo sapien
tgagggagctaatctgatacacttt

SEQ ID NO: 5097525 - DNA, 25 bp, Homo sapien
cagtttaccttcagtcatcctacag

SEQ ID NO: 5097526 - DNA, 25 bp, Homo sapien
gcctacaacggttcacaaactggaa

SEQ ID NO: 5097527 - DNA, 25 bp, Homo sapien
aaagattattggctaaggcaggcgg

SEQ ID NO: 5097528 - DNA, 25 bp, Homo sapien
tgatttgggcactgacgtaagaact

SEQ ID NO: 5097529 - DNA, 25 bp, Homo sapien
tacgcatgacctgagtaactaaggc

SEQ ID NO: 5097530 - DNA, 25 bp, Homo sapien
tagtgttagctatgcagactccatg

SEQ ID NO: 5097531 - DNA, 25 bp, Homo sapien
tggtaagagccatgttattcaggcc

SEQ ID NO: 5097532 - DNA, 25 bp, Homo sapien
ttagccttgaagttgtaaattgttc

SEQ ID NO: 5097533 - DNA, 25 bp, Homo sapien
tatgcacaacaactaatagattaac

SEQ ID NO: 5097534 - DNA, 25 bp, Homo sapien
ccatggacactacataattatgcac

SEQ ID NO: 5097535 - DNA, 25 bp, Homo sapien
tgcgcccagccgctaactgattttt

SEQ ID NO: 5097536 - DNA, 25 bp, Homo sapien
cattagatactgaaaacaagatgca

SEQ ID NO: 5097537 - DNA, 25 bp, Homo sapien
gatactgaaaacaagatgcagctgc

SEQ ID NO: 5097538 - DNA, 25 bp, Homo sapien
gtgagataggcattagatactgaaa

SEQ ID NO: 5097539 - DNA, 25 bp, Homo sapien
gataggcattagatactgaaaacaa

SEQ ID NO: 5097540 - DNA, 25 bp, Homo sapien
tgaacaccaggtccagttcacagac

SEQ ID NO: 5097541 - DNA, 25 bp, Homo sapien
gcttctttgctccatccgactctgt

SEQ ID NO: 5097542 - DNA, 25 bp, Homo sapien
gtttggaatgtgtctcctcggaccc

SEQ ID NO: 5097543 - DNA, 25 bp, Homo sapien
ctctgttggtgtgtgccgggcttct

SEQ ID NO: 5097544 - DNA, 25 bp, Homo sapien
ccactgggctcttaagtgggaaaca

SEQ ID NO: 5097545 - DNA, 25 bp, Homo sapien
gcagggtctcgagctgtggccgtgg

SEQ ID NO: 5097546 - DNA, 25 bp, Homo sapien
tggagtagcgcagggtctcgagctg

SEQ ID NO: 5097547 - DNA, 25 bp, Homo sapien
tatggagtagcgcagggtctcgagc

SEQ ID NO: 5097548 - DNA, 25 bp, Homo sapien
agcgcagggtctcgagctgtggccg

SEQ ID NO: 5097549 - DNA, 25 bp, Homo sapien
gcgttgaccgcgtgccgggtgtcat

SEQ ID NO: 5097550 - DNA, 25 bp, Homo sapien
tttccttctgccacggcgggatcgg

SEQ ID NO: 5097551 - DNA, 25 bp, Homo sapien
tccggcccctgagcgatggtccttt

SEQ ID NO: 5097552 - DNA, 25 bp, Homo sapien
actcacccagttgcaagtgcgagca

SEQ ID NO: 5097553 - DNA, 25 bp, Homo sapien
gccccacggtctgcggagtgagcca

SEQ ID NO: 5097554 - DNA, 25 bp, Homo sapien
tccgccccacggtctgcggagtgag

SEQ ID NO: 5097555 - DNA, 25 bp, Homo sapien
ggctccgccccacggtctgcggagt

SEQ ID NO: 5097556 - DNA, 25 bp, Homo sapien
cgccccacggtctgcggagtgagcc

SEQ ID NO: 5097557 - DNA, 25 bp, Homo sapien
taatcgcgttctgataggtttgacc

SEQ ID NO: 5097558 - DNA, 25 bp, Homo sapien
aaagatcgtttgcaacataatcgcg

SEQ ID NO: 5097559 - DNA, 25 bp, Homo sapien
ggtttgaccctctctagtcttcgta

SEQ ID NO: 5097560 - DNA, 25 bp, Homo sapien
aattggttaacacaaatcgctgtag

SEQ ID NO: 5097561 - DNA, 25 bp, Homo sapien
gcctgctccactgcctcacttctct

SEQ ID NO: 5097562 - DNA, 25 bp, Homo sapien
caccagatgggtgcagcctgctcca

SEQ ID NO: 5097563 - DNA, 25 bp, Homo sapien
agcaccagatgggtgcagcctgctc

SEQ ID NO: 5097564 - DNA, 25 bp, Homo sapien
tgctccactgcctcacttctctctg

SEQ ID NO: 5097565 - DNA, 25 bp, Homo sapien
ccctggaatacccatacagcactgt

SEQ ID NO: 5097566 - DNA, 25 bp, Homo sapien
ggtggcttcttgacccctggaatac

SEQ ID NO: 5097567 - DNA, 25 bp, Homo sapien
tgacccctggaatacccatacagca

SEQ ID NO: 5097568 - DNA, 25 bp, Homo sapien
gcttcttgacccctggaatacccat

SEQ ID NO: 5097569 - DNA, 25 bp, Homo sapien
gcaggtcaaatcaagtccggctact

SEQ ID NO: 5097570 - DNA, 25 bp, Homo sapien
gatgtcgattagtctctgtgtggtg

SEQ ID NO: 5097571 - DNA, 25 bp, Homo sapien
aactccttttgagtagagtactggc

SEQ ID NO: 5097572 - DNA, 25 bp, Homo sapien
tgtggtgggtgtcccaacactggct

SEQ ID NO: 5097573 - DNA, 25 bp, Homo sapien
aaaggcaaatctgtgggggctttga

SEQ ID NO: 5097574 - DNA, 25 bp, Homo sapien
aaggcaaatctgtgggggctttgag

SEQ ID NO: 5097575 - DNA, 25 bp, Homo sapien
atctcttggcagaaattctataggc

SEQ ID NO: 5097576 - DNA, 25 bp, Homo sapien
tcttggcagaaattctataggccag

SEQ ID NO: 5097577 - DNA, 25 bp, Homo sapien
ttggcagaaattctataggccagaa

SEQ ID NO: 5097578 - DNA, 25 bp, Homo sapien
tctcttggcagaaattctataggcc

SEQ ID NO: 5097579 - DNA, 25 bp, Homo sapien
catttatcccagaaacgtatggttg

SEQ ID NO: 5097580 - DNA, 25 bp, Homo sapien
taccgacagcatattgtgggatttc

SEQ ID NO: 5097581 - DNA, 25 bp, Homo sapien
aatagtttgctctactggattggca

SEQ ID NO: 5097582 - DNA, 25 bp, Homo sapien
taaagctctgtgcaaactaagaaca

SEQ ID NO: 5097583 - DNA, 25 bp, Homo sapien
ctgaggcatcccattaatcgctgtt

SEQ ID NO: 5097584 - DNA, 25 bp, Homo sapien
cattaatcgctgttatgccatagtc

SEQ ID NO: 5097585 - DNA, 25 bp, Homo sapien
tagtctgtcctatcatattgcttaa

SEQ ID NO: 5097586 - DNA, 25 bp, Homo sapien
gtcctatcatattgcttaattacca

SEQ ID NO: 5097587 - DNA, 25 bp, Homo sapien
gggagcattcagctatataaacacc

SEQ ID NO: 5097588 - DNA, 25 bp, Homo sapien
ggagggagcattcagctatataaac

SEQ ID NO: 5097589 - DNA, 25 bp, Homo sapien
gagcattcagctatataaacaccac

SEQ ID NO: 5097590 - DNA, 25 bp, Homo sapien
attcagctatataaacaccacccca

SEQ ID NO: 5097591 - DNA, 25 bp, Homo sapien
aaaccctgttttgcacaagttccag

SEQ ID NO: 5097592 - DNA, 25 bp, Homo sapien
tctggtcctgggttacttccatgaa

SEQ ID NO: 5097593 - DNA, 25 bp, Homo sapien
caagttccagttaaagtcccagctc

SEQ ID NO: 5097594 - DNA, 25 bp, Homo sapien
ttcctattgccaccagtttgggcct

SEQ ID NO: 5097595 - DNA, 25 bp, Homo sapien
attacagccatctgccaccatgtct

SEQ ID NO: 5097596 - DNA, 25 bp, Homo sapien
ttacagccatctgccaccatgtctg

SEQ ID NO: 5097597 - DNA, 25 bp, Homo sapien
cgagaatcttacataacagttgggc

SEQ ID NO: 5097598 - DNA, 25 bp, Homo sapien
tcatagaagataaagcctgcgggtg

SEQ ID NO: 5097599 - DNA, 25 bp, Homo sapien
gtatacccttgcttatggctctgaa

SEQ ID NO: 5097600 - DNA, 25 bp, Homo sapien
tgttgaaacagtctctgggaccaag

SEQ ID NO: 5097601 - DNA, 25 bp, Homo sapien
gaaattgtgcccaactgcaccaaag

SEQ ID NO: 5097602 - DNA, 25 bp, Homo sapien
gattacaaggctccaaggtatccag

SEQ ID NO: 5097603 - DNA, 25 bp, Homo sapien
gccaagaaccatgcaatctggaggt

SEQ ID NO: 5097604 - DNA, 25 bp, Homo sapien
catggtctccatagatgtgcattga

SEQ ID NO: 5097605 - DNA, 25 bp, Homo sapien
tatagggaccttccgcacaagctct

SEQ ID NO: 5097606 - DNA, 25 bp, Homo sapien
tcttttctaagagtcaaccacaggc

SEQ ID NO: 5097607 - DNA, 25 bp, Homo sapien
tcaggaccaagagaacatatcgtgg

SEQ ID NO: 5097608 - DNA, 25 bp, Homo sapien
tggcatccagagtgacagtgaactt

SEQ ID NO: 5097609 - DNA, 25 bp, Homo sapien
gtgcactgcagggacgcacaactgt

SEQ ID NO: 5097610 - DNA, 25 bp, Homo sapien
gaccaagtgtgcatcaatttacggg

SEQ ID NO: 5097611 - DNA, 25 bp, Homo sapien
tacggggatcctttgcatgtcagtg

SEQ ID NO: 5097612 - DNA, 25 bp, Homo sapien
aactgtagagcagaccaagtgtgca

SEQ ID NO: 5097613 - DNA, 25 bp, Homo sapien
cctgtgtggcatgggcttaaacctt

SEQ ID NO: 5097614 - DNA, 25 bp, Homo sapien
tcaaatcacagtgctcaggcagggc

SEQ ID NO: 5097615 - DNA, 25 bp, Homo sapien
taatagggcgggatcttaattcctc

SEQ ID NO: 5097616 - DNA, 25 bp, Homo sapien
gactaatctggctgcaaggcctcag

SEQ ID NO: 5097617 - DNA, 25 bp, Homo sapien
ccctgaggcatatggagaaacattg

SEQ ID NO: 5097618 - DNA, 25 bp, Homo sapien
tttagtgcaaataagggccctgagg

SEQ ID NO: 5097619 - DNA, 25 bp, Homo sapien
cctgcgtgattcaaggaccttaaaa

SEQ ID NO: 5097620 - DNA, 25 bp, Homo sapien
gaaacattgcgcagaaagatcataa

SEQ ID NO: 5097621 - DNA, 25 bp, Homo sapien
gccctgaaatgcagactggccgaaa

SEQ ID NO: 5097622 - DNA, 25 bp, Homo sapien
ggatacctctgccttccgaaaacag

SEQ ID NO: 5097623 - DNA, 25 bp, Homo sapien
gaaataactttgtcatccggcggaa

SEQ ID NO: 5097624 - DNA, 25 bp, Homo sapien
tgtcaaccactatggaggatacctc

SEQ ID NO: 5097625 - DNA, 25 bp, Homo sapien
atcctgtgagacagcaatgcaaagg

SEQ ID NO: 5097626 - DNA, 25 bp, Homo sapien
tcctgtgagacagcaatgcaaaggt

SEQ ID NO: 5097627 - DNA, 25 bp, Homo sapien
tgtaaacagcgtagcaggatggagt

SEQ ID NO: 5097628 - DNA, 25 bp, Homo sapien
tgcaaggaactctgctagctcaagg

SEQ ID NO: 5097629 - DNA, 25 bp, Homo sapien
gaaatgcaccgtcccctttgaaatg

SEQ ID NO: 5097630 - DNA, 25 bp, Homo sapien
ctagagaacagagttttgcagcccc

SEQ ID NO: 5097631 - DNA, 25 bp, Homo sapien
ggtgtgcagcctcggaatgcgatct

SEQ ID NO: 5097632 - DNA, 25 bp, Homo sapien
ggccgcgcgcgggagagtgaggtgg

SEQ ID NO: 5097633 - DNA, 25 bp, Homo sapien
gggtgttgagtacccgagaactgcc

SEQ ID NO: 5097634 - DNA, 25 bp, Homo sapien
ccgagcgagcccagtactcactggg

SEQ ID NO: 5097635 - DNA, 25 bp, Homo sapien
tgaccatctggatagaggaggacca

SEQ ID NO: 5097636 - DNA, 25 bp, Homo sapien
gtcctcatccagtcccagagagtgg

SEQ ID NO: 5097637 - DNA, 25 bp, Homo sapien
tgaaatctgtatccctggccttaag

SEQ ID NO: 5097638 - DNA, 25 bp, Homo sapien
cactctttagagctatgcttcccac

SEQ ID NO: 5097639 - DNA, 25 bp, Homo sapien
tacatgcgttactcaaatctctgct

SEQ ID NO: 5097640 - DNA, 25 bp, Homo sapien
ttgtgttccttagtttatacatgcg

SEQ ID NO: 5097641 - DNA, 25 bp, Homo sapien
ccttagtttatacatgcgttactca

SEQ ID NO: 5097642 - DNA, 25 bp, Homo sapien
tcctttgtgttccttagtttataca

SEQ ID NO: 5097643 - DNA, 25 bp, Homo sapien
ttactgacccagcatattctgaacc

SEQ ID NO: 5097644 - DNA, 25 bp, Homo sapien
tacaaccacacagccagcaaattac

SEQ ID NO: 5097645 - DNA, 25 bp, Homo sapien
ccagcatattctgaacccaggtctt

SEQ ID NO: 5097646 - DNA, 25 bp, Homo sapien
cagcaaattactgacccagcatatt

SEQ ID NO: 5097647 - DNA, 25 bp, Homo sapien
gattcagacactgacacttggctct

SEQ ID NO: 5097648 - DNA, 25 bp, Homo sapien
tctgcatctggattacttccaaagg

SEQ ID NO: 5097649 - DNA, 25 bp, Homo sapien
tccaaaggtccatctgtgagcctgc

SEQ ID NO: 5097650 - DNA, 25 bp, Homo sapien
cacacatgtgaggtagcttttggga

SEQ ID NO: 5097651 - DNA, 25 bp, Homo sapien
ggagacatgcgccagctgttagtga

SEQ ID NO: 5097652 - DNA, 25 bp, Homo sapien
aatcagagcgcctgtgcttcccagt

SEQ ID NO: 5097653 - DNA, 25 bp, Homo sapien
tagtgaataaccattgttatagatc

SEQ ID NO: 5097654 - DNA, 25 bp, Homo sapien
gaaacggttctggttcaccaatcag

SEQ ID NO: 5097655 - DNA, 25 bp, Homo sapien
ctgacaaggcttgtcccgaccgtct

SEQ ID NO: 5097656 - DNA, 25 bp, Homo sapien
ccaagatagcccacttccaagttgc

SEQ ID NO: 5097657 - DNA, 25 bp, Homo sapien
cctgggacgcttttgacggcaattg

SEQ ID NO: 5097658 - DNA, 25 bp, Homo sapien
cctgtgctcagagaaagggcctcca

SEQ ID NO: 5097659 - DNA, 25 bp, Homo sapien
cttgtggcaactgaattcagcattc

SEQ ID NO: 5097660 - DNA, 25 bp, Homo sapien
tggcaactgaattcagcattctgca

SEQ ID NO: 5097661 - DNA, 25 bp, Homo sapien
gcacttctaatagcagtagcagcaa

SEQ ID NO: 5097662 - DNA, 25 bp, Homo sapien
gcattctgcacttctaatagcagta

SEQ ID NO: 5097663 - DNA, 25 bp, Homo sapien
tccaatcaattaggccttcctgcat

SEQ ID NO: 5097664 - DNA, 25 bp, Homo sapien
ttgccttgcaagcaactgaggccat

SEQ ID NO: 5097665 - DNA, 25 bp, Homo sapien
tttgccttgcaagcaactgaggcca

SEQ ID NO: 5097666 - DNA, 25 bp, Homo sapien
ttgttccaatcaattaggccttcct

SEQ ID NO: 5097667 - DNA, 25 bp, Homo sapien
gcgcatcaacaatgaactggcctag

SEQ ID NO: 5097668 - DNA, 25 bp, Homo sapien
cgcatcaacaatgaactggcctaga

SEQ ID NO: 5097669 - DNA, 25 bp, Homo sapien
cagcgcatcaacaatgaactggcct

SEQ ID NO: 5097670 - DNA, 25 bp, Homo sapien
gcatcaacaatgaactggcctagac

SEQ ID NO: 5097671 - DNA, 25 bp, Homo sapien
tttcggagacttccatcctgcaggc

SEQ ID NO: 5097672 - DNA, 25 bp, Homo sapien
gaatgcattaccctgattcctgctc

SEQ ID NO: 5097673 - DNA, 25 bp, Homo sapien
gacgtgctgctgagtttaggaatgc

SEQ ID NO: 5097674 - DNA, 25 bp, Homo sapien
tacatatggttgtaatacgcagacg

SEQ ID NO: 5097675 - DNA, 25 bp, Homo sapien
caacagagaaaccaaaggagggatt

SEQ ID NO: 5097676 - DNA, 25 bp, Homo sapien
cagagaaaccaaaggagggattttg

SEQ ID NO: 5097677 - DNA, 25 bp, Homo sapien
tagcaacagagaaaccaaaggaggg

SEQ ID NO: 5097678 - DNA, 25 bp, Homo sapien
ctagcaacagagaaaccaaaggagg

SEQ ID NO: 5097679 - DNA, 25 bp, Homo sapien
agctgccacgtccaccttgccttca

SEQ ID NO: 5097680 - DNA, 25 bp, Homo sapien
ctttgggaggtgtcactgtagagca

SEQ ID NO: 5097681 - DNA, 25 bp, Homo sapien
tgtagagcatgcacaacgggaagaa

SEQ ID NO: 5097682 - DNA, 25 bp, Homo sapien
tcaaactgtctttgggaggtgtcac

SEQ ID NO: 5097683 - DNA, 25 bp, Homo sapien
caataccaatgggtcattatttaga

SEQ ID NO: 5097684 - DNA, 25 bp, Homo sapien
tatcgcagtgactgaaattctactg

SEQ ID NO: 5097685 - DNA, 25 bp, Homo sapien
taggcatatttaactgctggtattt

SEQ ID NO: 5097686 - DNA, 25 bp, Homo sapien
tagtaattttagaccaggctgccca

SEQ ID NO: 5097687 - DNA, 25 bp, Homo sapien
gcttgaaacaatgcaactggtgtct

SEQ ID NO: 5097688 - DNA, 25 bp, Homo sapien
aataggcatatggacctggagaact

SEQ ID NO: 5097689 - DNA, 25 bp, Homo sapien
actggtgtctgagtgtttttcaaat

SEQ ID NO: 5097690 - DNA, 25 bp, Homo sapien
ctcttcatgaacacccctctgtgaa

SEQ ID NO: 5097691 - DNA, 25 bp, Homo sapien
tttctgactgacagagctcatccca

SEQ ID NO: 5097692 - DNA, 25 bp, Homo sapien
gtttccaagtgtgaacacgtcagcc

SEQ ID NO: 5097693 - DNA, 25 bp, Homo sapien
catcccagaggcgagaacatccttt

SEQ ID NO: 5097694 - DNA, 25 bp, Homo sapien
tgtaactgccatgtagcctgtctcc

SEQ ID NO: 5097695 - DNA, 25 bp, Homo sapien
gctggagatcaaccagacactttat

SEQ ID NO: 5097696 - DNA, 25 bp, Homo sapien
ctgtgtatggctggagatcaaccag

SEQ ID NO: 5097697 - DNA, 25 bp, Homo sapien
tccagtgccaatttcacagtcttca

SEQ ID NO: 5097698 - DNA, 25 bp, Homo sapien
tttcacagtcttcatatggagtcat

SEQ ID NO: 5097699 - DNA, 25 bp, Homo sapien
ccaaaagatgggaggttcttaatag

SEQ ID NO: 5097700 - DNA, 25 bp, Homo sapien
aacatcctctcatcctattgttggg

SEQ ID NO: 5097701 - DNA, 25 bp, Homo sapien
attcacacagcaggttaagcccagg

SEQ ID NO: 5097702 - DNA, 25 bp, Homo sapien
tgatttttgctccttcgtccagggc

SEQ ID NO: 5097703 - DNA, 25 bp, Homo sapien
tccaccgttcttgtggccatgttga

SEQ ID NO: 5097704 - DNA, 25 bp, Homo sapien
ggccatgttgaccagatgtccttcc

SEQ ID NO: 5097705 - DNA, 25 bp, Homo sapien
gctttctctgttcagtggctgctcc

SEQ ID NO: 5097706 - DNA, 25 bp, Homo sapien
gaccagatgtccttccaggctttct

SEQ ID NO: 5097707 - DNA, 25 bp, Homo sapien
tctcagcaggtctgggtgcaaagca

SEQ ID NO: 5097708 - DNA, 25 bp, Homo sapien
cttctcagcaggtctgggtgcaaag

SEQ ID NO: 5097709 - DNA, 25 bp, Homo sapien
ctgcttctcagcaggtctgggtgca

SEQ ID NO: 5097710 - DNA, 25 bp, Homo sapien
ctcagcaggtctgggtgcaaagcat

SEQ ID NO: 5097711 - DNA, 25 bp, Homo sapien
tgactggctttagtgccaaacctgg

SEQ ID NO: 5097712 - DNA, 25 bp, Homo sapien
tagtttgcatgtggctttgactggc

SEQ ID NO: 5097713 - DNA, 25 bp, Homo sapien
ccagcaccatcttattgacacagtt

SEQ ID NO: 5097714 - DNA, 25 bp, Homo sapien
tttagtgccaaacctggctccagaa

SEQ ID NO: 5097715 - DNA, 25 bp, Homo sapien
tccttcgatgatgaagtgaggtctc

SEQ ID NO: 5097716 - DNA, 25 bp, Homo sapien
gaatctccttcgatgatgaagtgag

SEQ ID NO: 5097717 - DNA, 25 bp, Homo sapien
tatagacattgaatctccttcgatg

SEQ ID NO: 5097718 - DNA, 25 bp, Homo sapien
tatggagttatagacattgaatctc

SEQ ID NO: 5097719 - DNA, 25 bp, Homo sapien
ctggtggttgctgaatccagcaaat

SEQ ID NO: 5097720 - DNA, 25 bp, Homo sapien
tgaatccagcaaattcaccttttgc

SEQ ID NO: 5097721 - DNA, 25 bp, Homo sapien
taagaccctatcagaagctgtactt

SEQ ID NO: 5097722 - DNA, 25 bp, Homo sapien
tttgcatttaagaccctatcagaag

SEQ ID NO: 5097723 - DNA, 25 bp, Homo sapien
tgacaaaggcgaaactccttggccc

SEQ ID NO: 5097724 - DNA, 25 bp, Homo sapien
tatttgacaaaggcgaaactccttg

SEQ ID NO: 5097725 - DNA, 25 bp, Homo sapien
tttgacaaaggcgaaactccttggc

SEQ ID NO: 5097726 - DNA, 25 bp, Homo sapien
ctatttgacaaaggcgaaactcctt

SEQ ID NO: 5097727 - DNA, 25 bp, Homo sapien
gatcccaagtcttctaacccaaatc

SEQ ID NO: 5097728 - DNA, 25 bp, Homo sapien
ctggtaagtgcaagatcccaagtct

SEQ ID NO: 5097729 - DNA, 25 bp, Homo sapien
caagtcttctaacccaaatccattt

SEQ ID NO: 5097730 - DNA, 25 bp, Homo sapien
ggtaagtgcaagatcccaagtcttc

SEQ ID NO: 5097731 - DNA, 25 bp, Homo sapien
tcctttcatgttcatatgtatacat

SEQ ID NO: 5097732 - DNA, 25 bp, Homo sapien
tcccaatcctttcatgttcatatgt

SEQ ID NO: 5097733 - DNA, 25 bp, Homo sapien
gagtccttcattcccaatcctttca

SEQ ID NO: 5097734 - DNA, 25 bp, Homo sapien
ccaatcctttcatgttcatatgtat

SEQ ID NO: 5097735 - DNA, 25 bp, Homo sapien
ggttgggagagtgtctcacataacc

SEQ ID NO: 5097736 - DNA, 25 bp, Homo sapien
gggttgggagagtgtctcacataac

SEQ ID NO: 5097737 - DNA, 25 bp, Homo sapien
catgctgtccaaatgcctcagggtt

SEQ ID NO: 5097738 - DNA, 25 bp, Homo sapien
gcctcagggttctccgcaggcagca

SEQ ID NO: 5097739 - DNA, 25 bp, Homo sapien
cagcacagagggctctactagagcc

SEQ ID NO: 5097740 - DNA, 25 bp, Homo sapien
ccttacagatgacccgaaatagtgc

SEQ ID NO: 5097741 - DNA, 25 bp, Homo sapien
ggtgttccgagtggggctacatttc

SEQ ID NO: 5097742 - DNA, 25 bp, Homo sapien
gccacaacaggaggttccaagagaa

SEQ ID NO: 5097743 - DNA, 25 bp, Homo sapien
ctaaacaatcacagaggtgttccga

SEQ ID NO: 5097744 - DNA, 25 bp, Homo sapien
tacatttccaatcagccacaacagg

SEQ ID NO: 5097745 - DNA, 25 bp, Homo sapien
catagtaaagaaacacttgatgaaa

SEQ ID NO: 5097746 - DNA, 25 bp, Homo sapien
cttgattatctacaaatcccttttg

SEQ ID NO: 5097747 - DNA, 25 bp, Homo sapien
ctgggtagatgccagtgtccagctt

SEQ ID NO: 5097748 - DNA, 25 bp, Homo sapien
agatgccagtgtccagcttgattat

SEQ ID NO: 5097749 - DNA, 25 bp, Homo sapien
catagggatcagtttgatttcctcc

SEQ ID NO: 5097750 - DNA, 25 bp, Homo sapien
taagactagactcatagatttccag

SEQ ID NO: 5097751 - DNA, 25 bp, Homo sapien
gacataatctagtgccgttactgtt

SEQ ID NO: 5097752 - DNA, 25 bp, Homo sapien
tgttgtgtagccactaagactagac

SEQ ID NO: 5097753 - DNA, 25 bp, Homo sapien
ttttgctttctatactgctctgaga

SEQ ID NO: 5097754 - DNA, 25 bp, Homo sapien
agccctttttaactccaggtgccat

SEQ ID NO: 5097755 - DNA, 25 bp, Homo sapien
ttgctttctatactgctctgagaaa

SEQ ID NO: 5097756 - DNA, 25 bp, Homo sapien
tgctttctatactgctctgagaaac

SEQ ID NO: 5097757 - DNA, 25 bp, Homo sapien
aagtacaaggagattcagcagctgc

SEQ ID NO: 5097758 - DNA, 25 bp, Homo sapien
agcagctgcatttagtttgtaatga

SEQ ID NO: 5097759 - DNA, 25 bp, Homo sapien
caaggagaagtacaaggagattcag

SEQ ID NO: 5097760 - DNA, 25 bp, Homo sapien
tgtaatgaccattcatttctgttga

SEQ ID NO: 5097761 - DNA, 25 bp, Homo sapien
caaattagcttgagttccctgataa

SEQ ID NO: 5097762 - DNA, 25 bp, Homo sapien
agaattcaacatttgcgccgaaaat

SEQ ID NO: 5097763 - DNA, 25 bp, Homo sapien
gatgggagatactggtctagaattc

SEQ ID NO: 5097764 - DNA, 25 bp, Homo sapien
tgataaacctctgagtagatgatgg

SEQ ID NO: 5097765 - DNA, 25 bp, Homo sapien
cagtgcacaaatggattcgaaatct

SEQ ID NO: 5097766 - DNA, 25 bp, Homo sapien
cacaaatggattcgaaatctttttc

SEQ ID NO: 5097767 - DNA, 25 bp, Homo sapien
gtgcacaaatggattcgaaatcttt

SEQ ID NO: 5097768 - DNA, 25 bp, Homo sapien
aatggattcgaaatctttttcagat

SEQ ID NO: 5097769 - DNA, 25 bp, Homo sapien
ctggtgttggatcccggccctgcag

SEQ ID NO: 5097770 - DNA, 25 bp, Homo sapien
aacacgctattagaaaggccttcag

SEQ ID NO: 5097771 - DNA, 25 bp, Homo sapien
cactgactcgtgcaaggtcttctga

SEQ ID NO: 5097772 - DNA, 25 bp, Homo sapien
aggtcttctgataacacgctattag

SEQ ID NO: 5097773 - DNA, 25 bp, Homo sapien
cagtccagaacactgactcgtgcaa

SEQ ID NO: 5097774 - DNA, 25 bp, Homo sapien
actgttcagatgatgtatgccccat

SEQ ID NO: 5097775 - DNA, 25 bp, Homo sapien
taccattgctttcacttgagactgc

SEQ ID NO: 5097776 - DNA, 25 bp, Homo sapien
tgtgaactgggtgcgtaatattgcc

SEQ ID NO: 5097777 - DNA, 25 bp, Homo sapien
gagatcttattgacgctgccactgg

SEQ ID NO: 5097778 - DNA, 25 bp, Homo sapien
agctcatctctcagtggaaactcta

SEQ ID NO: 5097779 - DNA, 25 bp, Homo sapien
acagctcatctctcagtggaaactc

SEQ ID NO: 5097780 - DNA, 25 bp, Homo sapien
actaacagctcatctctcagtggaa

SEQ ID NO: 5097781 - DNA, 25 bp, Homo sapien
agactaacagctcatctctcagtgg

SEQ ID NO: 5097782 - DNA, 25 bp, Homo sapien
gcttcctggattaatgtgtgtcaca

SEQ ID NO: 5097783 - DNA, 25 bp, Homo sapien
gaggtcaaggcttgtgtgtccattt

SEQ ID NO: 5097784 - DNA, 25 bp, Homo sapien
tgatcataatcttgatcataatcac

SEQ ID NO: 5097785 - DNA, 25 bp, Homo sapien
tcataatcactccaagaggtcaagg

SEQ ID NO: 5097786 - DNA, 25 bp, Homo sapien
tgtctaccaacatgaaagcaccagc

SEQ ID NO: 5097787 - DNA, 25 bp, Homo sapien
gccagtaggtaggtatgcagacata

SEQ ID NO: 5097788 - DNA, 25 bp, Homo sapien
ggtttcaagagccaggtgtctacca

SEQ ID NO: 5097789 - DNA, 25 bp, Homo sapien
tgatatgcaccattcacctctccgg

SEQ ID NO: 5097790 - DNA, 25 bp, Homo sapien
gaagagatctgacctctagtcacca

SEQ ID NO: 5097791 - DNA, 25 bp, Homo sapien
gctctcatgttttgacggctctgtc

SEQ ID NO: 5097792 - DNA, 25 bp, Homo sapien
gagatgattagaaagagggctctca

SEQ ID NO: 5097793 - DNA, 25 bp, Homo sapien
ctggactaccactcaactagagaag

SEQ ID NO: 5097794 - DNA, 25 bp, Homo sapien
ggcccctcactagatttagtttgtc

SEQ ID NO: 5097795 - DNA, 25 bp, Homo sapien
gttgttgatagtatagaacaccacc

SEQ ID NO: 5097796 - DNA, 25 bp, Homo sapien
tggggagtttcagatggcccctcac

SEQ ID NO: 5097797 - DNA, 25 bp, Homo sapien
gcagcaatttgagaattactgttgt

SEQ ID NO: 5097798 - DNA, 25 bp, Homo sapien
tctgttctttccacgcttcaccagg

SEQ ID NO: 5097799 - DNA, 25 bp, Homo sapien
tcaccaggagaagagctaaccttgg

SEQ ID NO: 5097800 - DNA, 25 bp, Homo sapien
gcatgaagcagagctatgctcacag

SEQ ID NO: 5097801 - DNA, 25 bp, Homo sapien
ccccagccaacctgaagatctgcag

SEQ ID NO: 5097802 - DNA, 25 bp, Homo sapien
ggatgattgcctcgtgtccataaca

SEQ ID NO: 5097803 - DNA, 25 bp, Homo sapien
tacctggtattctaaagagaggcag

SEQ ID NO: 5097804 - DNA, 25 bp, Homo sapien
ccatccagctacgtgtaaggcagga

SEQ ID NO: 5097805 - DNA, 25 bp, Homo sapien
tcatgaggtcgtcaaaatcttaggc

SEQ ID NO: 5097806 - DNA, 25 bp, Homo sapien
cctgcttcctgaaacctggatttta

SEQ ID NO: 5097807 - DNA, 25 bp, Homo sapien
ctcggagcaaagcaagccccctcag

SEQ ID NO: 5097808 - DNA, 25 bp, Homo sapien
tgcttcctgaaacctggattttaag

SEQ ID NO: 5097809 - DNA, 25 bp, Homo sapien
ccctcggagcaaagcaagccccctc

SEQ ID NO: 5097810 - DNA, 25 bp, Homo sapien
cgaggtgcttcgtatttggagggat

SEQ ID NO: 5097811 - DNA, 25 bp, Homo sapien
aggtgcttcgtatttggagggatcg

SEQ ID NO: 5097812 - DNA, 25 bp, Homo sapien
gtgcttcgtatttggagggatcggg

SEQ ID NO: 5097813 - DNA, 25 bp, Homo sapien
aatgcgaggtgcttcgtatttggag

SEQ ID NO: 5097814 - DNA, 25 bp, Homo sapien
gggcgcggctctttctgcgcccggg

SEQ ID NO: 5097815 - DNA, 25 bp, Homo sapien
gtggcggaagaagctccctcctctg

SEQ ID NO: 5097816 - DNA, 25 bp, Homo sapien
tggccgcccggtctttgggaggctc

SEQ ID NO: 5097817 - DNA, 25 bp, Homo sapien
caccgtgtggcggaagaagctccct

SEQ ID NO: 5097818 - DNA, 25 bp, Homo sapien
ggctggacgcagctgccactcgacc

SEQ ID NO: 5097819 - DNA, 25 bp, Homo sapien
ctgcccgggccctcgaggtgcgctc

SEQ ID NO: 5097820 - DNA, 25 bp, Homo sapien
agctgccactcgaccgctgcccggg

SEQ ID NO: 5097821 - DNA, 25 bp, Homo sapien
ggacgcagctgccactcgaccgctg

SEQ ID NO: 5097822 - DNA, 25 bp, Homo sapien
tccggaaagccttcgatttgcagag

SEQ ID NO: 5097823 - DNA, 25 bp, Homo sapien
tcgatttgcagagcggagtcgagaa

SEQ ID NO: 5097824 - DNA, 25 bp, Homo sapien
taggctgctccggaaagccttcgat

SEQ ID NO: 5097825 - DNA, 25 bp, Homo sapien
gaaagccttcgatttgcagagcgga

SEQ ID NO: 5097826 - DNA, 25 bp, Homo sapien
ctctcctagcttggagggcgcgccg

SEQ ID NO: 5097827 - DNA, 25 bp, Homo sapien
tcctccgccctaagccgagactgtc

SEQ ID NO: 5097828 - DNA, 25 bp, Homo sapien
caactccgcgcaagtccatggtgag

SEQ ID NO: 5097829 - DNA, 25 bp, Homo sapien
gctgcccgaaggctgctgcgctcct

SEQ ID NO: 5097830 - DNA, 25 bp, Homo sapien
cccgcgctcccccagggcccggcag

SEQ ID NO: 5097831 - DNA, 25 bp, Homo sapien
gggcccggcagccagccgcttgctg

SEQ ID NO: 5097832 - DNA, 25 bp, Homo sapien
ctcgccatccccgcgcgcgcgcccg

SEQ ID NO: 5097833 - DNA, 25 bp, Homo sapien
ccagggcccggcagccagccgcttg

SEQ ID NO: 5097834 - DNA, 25 bp, Homo sapien
gggggtcgcgctgggtggccatcct

SEQ ID NO: 5097835 - DNA, 25 bp, Homo sapien
ccgccttcgacatggtatccgcggg

SEQ ID NO: 5097836 - DNA, 25 bp, Homo sapien
gaggcgactcccgaaggcgcgggcg

SEQ ID NO: 5097837 - DNA, 25 bp, Homo sapien
gtgggtggaagaggcgaggcgactc

SEQ ID NO: 5097838 - DNA, 25 bp, Homo sapien
tatccgcggggtggcaggtgcaagt

SEQ ID NO: 5097839 - DNA, 25 bp, Homo sapien
caggctgcggatcagctcctccttg

SEQ ID NO: 5097840 - DNA, 25 bp, Homo sapien
gcgctcaccttctccgcctcggcgc

SEQ ID NO: 5097841 - DNA, 25 bp, Homo sapien
tcggcgcgccgcaggctgcggatca

SEQ ID NO: 5097842 - DNA, 25 bp, Homo sapien
tccttgctccactgcagcagctcct

SEQ ID NO: 5097843 - DNA, 25 bp, Homo sapien
ctgcaggcggcggttcacctcgcgg

SEQ ID NO: 5097844 - DNA, 25 bp, Homo sapien
ggcggttcacctcgcggatgaggtt

SEQ ID NO: 5097845 - DNA, 25 bp, Homo sapien
ccgcggatctcgccgaggtgcagct

SEQ ID NO: 5097846 - DNA, 25 bp, Homo sapien
cggatctcgccgaggtgcagctgca

SEQ ID NO: 5097847 - DNA, 25 bp, Homo sapien
cgcctccccgaacagccagacagtg

SEQ ID NO: 5097848 - DNA, 25 bp, Homo sapien
ccagacagtggagcgccccgtgttg

SEQ ID NO: 5097849 - DNA, 25 bp, Homo sapien
agccagacagtggagcgccccgtgt

SEQ ID NO: 5097850 - DNA, 25 bp, Homo sapien
cagacgcctccgaagtttggaaaag

SEQ ID NO: 5097851 - DNA, 25 bp, Homo sapien
aacacttggggtactctgtcaaaat

SEQ ID NO: 5097852 - DNA, 25 bp, Homo sapien
ccttccatactgagtctctttgctc

SEQ ID NO: 5097853 - DNA, 25 bp, Homo sapien
caacacttggggtactctgtcaaaa

SEQ ID NO: 5097854 - DNA, 25 bp, Homo sapien
ttccatactgagtctctttgctcct

SEQ ID NO: 5097855 - DNA, 25 bp, Homo sapien
ggctcagaaagaaaccatcactgac

SEQ ID NO: 5097856 - DNA, 25 bp, Homo sapien
ggcaggggggctggctcagaaagaa

SEQ ID NO: 5097857 - DNA, 25 bp, Homo sapien
ctagaagagggtggcaggggggctg

SEQ ID NO: 5097858 - DNA, 25 bp, Homo sapien
gggtggcaggggggctggctcagaa

SEQ ID NO: 5097859 - DNA, 25 bp, Homo sapien
gacccggcgctctccaaggagaaaa

SEQ ID NO: 5097860 - DNA, 25 bp, Homo sapien
gtttgtggtgctcgccagcagggcg

SEQ ID NO: 5097861 - DNA, 25 bp, Homo sapien
ctgggcaggcacactcctcgcagac

SEQ ID NO: 5097862 - DNA, 25 bp, Homo sapien
gcggttcccggccactagtgtactg

SEQ ID NO: 5097863 - DNA, 25 bp, Homo sapien
tgagccttgagcattccactcttcc

SEQ ID NO: 5097864 - DNA, 25 bp, Homo sapien
tgaactgggcccagcacataggtga

SEQ ID NO: 5097865 - DNA, 25 bp, Homo sapien
acagcttgtgccttcgggaatttgc

SEQ ID NO: 5097866 - DNA, 25 bp, Homo sapien
ggagcactgaggcaattccggaaca

SEQ ID NO: 5097867 - DNA, 25 bp, Homo sapien
gaaatgtgtgagtatgaccattcat

SEQ ID NO: 5097868 - DNA, 25 bp, Homo sapien
ccattcaagggaagtacacatctga

SEQ ID NO: 5097869 - DNA, 25 bp, Homo sapien
cctggaaagggagagcctgtaactg

SEQ ID NO: 5097870 - DNA, 25 bp, Homo sapien
gaggtgtcagcaggctcagacttcc

SEQ ID NO: 5097871 - DNA, 25 bp, Homo sapien
aaagagagacacaaccattcaaggg

SEQ ID NO: 5097872 - DNA, 25 bp, Homo sapien
cataatgttgtttgaggtgctccgg

SEQ ID NO: 5097873 - DNA, 25 bp, Homo sapien
gtttctgaagatgctccgggctccc

SEQ ID NO: 5097874 - DNA, 25 bp, Homo sapien
tagtagcacacagagctccttgagc

SEQ ID NO: 5097875 - DNA, 25 bp, Homo sapien
tcagcttctgcaggtataaggccac

SEQ ID NO: 5097876 - DNA, 25 bp, Homo sapien
tcattcgtaactctctactgagttc

SEQ ID NO: 5097877 - DNA, 25 bp, Homo sapien
gtaactctctactgagttccccagc

SEQ ID NO: 5097878 - DNA, 25 bp, Homo sapien
ttcgtaactctctactgagttcccc

SEQ ID NO: 5097879 - DNA, 25 bp, Homo sapien
cgtaactctctactgagttccccag

SEQ ID NO: 5097880 - DNA, 25 bp, Homo sapien
tgctcaggtttaagatgaaagactc

SEQ ID NO: 5097881 - DNA, 25 bp, Homo sapien
ggaaacagcacacaccactaagaaa

SEQ ID NO: 5097882 - DNA, 25 bp, Homo sapien
tagctagcgcctgcactttcttaca

SEQ ID NO: 5097883 - DNA, 25 bp, Homo sapien
ggagaagaaccccatatcatgattt

SEQ ID NO: 5097884 - DNA, 25 bp, Homo sapien
cagctgatgcgttttagatgcaaag

SEQ ID NO: 5097885 - DNA, 25 bp, Homo sapien
tagatccaactcaaccataggtaac

SEQ ID NO: 5097886 - DNA, 25 bp, Homo sapien
gcctcagcaaatgtagtggacgtta

SEQ ID NO: 5097887 - DNA, 25 bp, Homo sapien
gaaagatgtctcttgcagtgtaaga

SEQ ID NO: 5097888 - DNA, 25 bp, Homo sapien
ggctgatgatccataaacatctcat

SEQ ID NO: 5097889 - DNA, 25 bp, Homo sapien
tgcccatgtttataggctgatgatc

SEQ ID NO: 5097890 - DNA, 25 bp, Homo sapien
tataggctgatgatccataaacatc

SEQ ID NO: 5097891 - DNA, 25 bp, Homo sapien
catgtttataggctgatgatccata

SEQ ID NO: 5097892 - DNA, 25 bp, Homo sapien
ggtggatgggtgaattggcatttgc

SEQ ID NO: 5097893 - DNA, 25 bp, Homo sapien
tcatccgcagatatgactaatgact

SEQ ID NO: 5097894 - DNA, 25 bp, Homo sapien
gacttgcctttcagggtcttattat

SEQ ID NO: 5097895 - DNA, 25 bp, Homo sapien
attattctgtttgggtggatgggtg

SEQ ID NO: 5097896 - DNA, 25 bp, Homo sapien
tgccctttatcatatgtgttgggtg

SEQ ID NO: 5097897 - DNA, 25 bp, Homo sapien
cctgccctttatcatatgtgttggg

SEQ ID NO: 5097898 - DNA, 25 bp, Homo sapien
cctttatcatatgtgttgggtgagc

SEQ ID NO: 5097899 - DNA, 25 bp, Homo sapien
ccctttatcatatgtgttgggtgag

SEQ ID NO: 5097900 - DNA, 25 bp, Homo sapien
tggtcctgcccttgatacttgggaa

SEQ ID NO: 5097901 - DNA, 25 bp, Homo sapien
ttggtttgaacaattgagcggtacc

SEQ ID NO: 5097902 - DNA, 25 bp, Homo sapien
gcaaggaatcaaaggcaactaggag

SEQ ID NO: 5097903 - DNA, 25 bp, Homo sapien
catcagatctggtgaggctcactat

SEQ ID NO: 5097904 - DNA, 25 bp, Homo sapien
aatgtgcaccaaccaatcagtagcc

SEQ ID NO: 5097905 - DNA, 25 bp, Homo sapien
taagagacagtcctgcagaggtgaa

SEQ ID NO: 5097906 - DNA, 25 bp, Homo sapien
tagtgagtgatccaatgtgacccgt

SEQ ID NO: 5097907 - DNA, 25 bp, Homo sapien
gaggcactacctaacgcagacaggc

SEQ ID NO: 5097908 - DNA, 25 bp, Homo sapien
tataaaactacctatgctgtctgcg

SEQ ID NO: 5097909 - DNA, 25 bp, Homo sapien
aaccagtatcaaggtaagcctccta

SEQ ID NO: 5097910 - DNA, 25 bp, Homo sapien
gctatttaatcacggctctggttgg

SEQ ID NO: 5097911 - DNA, 25 bp, Homo sapien
tatacgcaggcttatagctacatgg

SEQ ID NO: 5097912 - DNA, 25 bp, Homo sapien
ttgaattttgtgcatgtctttttcc

SEQ ID NO: 5097913 - DNA, 25 bp, Homo sapien
tgtctttttcctctgctaggtggcc

SEQ ID NO: 5097914 - DNA, 25 bp, Homo sapien
attgaattttgtgcatgtctttttc

SEQ ID NO: 5097915 - DNA, 25 bp, Homo sapien
ctttttcctctgctaggtggcccat

SEQ ID NO: 5097916 - DNA, 25 bp, Homo sapien
ctgcctcaggctcctgaatagctgg

SEQ ID NO: 5097917 - DNA, 25 bp, Homo sapien
tgcctgccgggttcaagtgattctc

SEQ ID NO: 5097918 - DNA, 25 bp, Homo sapien
atcactgcaacctctgcctgccggg

SEQ ID NO: 5097919 - DNA, 25 bp, Homo sapien
gagggcagtgctgcaatcttggatc

SEQ ID NO: 5097920 - DNA, 25 bp, Homo sapien
agtaatatgggtcacttccaggtgg

SEQ ID NO: 5097921 - DNA, 25 bp, Homo sapien
cctttgtgatgctaagtccctggaa

SEQ ID NO: 5097922 - DNA, 25 bp, Homo sapien
gccaatggaccatgggcagaagtaa

SEQ ID NO: 5097923 - DNA, 25 bp, Homo sapien
ggaagccttcatcagcggtgtccca

SEQ ID NO: 5097924 - DNA, 25 bp, Homo sapien
actctttgttccattggcttctgta

SEQ ID NO: 5097925 - DNA, 25 bp, Homo sapien
ttgttccattggcttctgtaccaca

SEQ ID NO: 5097926 - DNA, 25 bp, Homo sapien
ttccaaactctttgttccattggct

SEQ ID NO: 5097927 - DNA, 25 bp, Homo sapien
caaactctttgttccattggcttct

SEQ ID NO: 5097928 - DNA, 25 bp, Homo sapien
gcagaactttggctaatggtgaaat

SEQ ID NO: 5097929 - DNA, 25 bp, Homo sapien
gaaatttctagtccttggagaatag

SEQ ID NO: 5097930 - DNA, 25 bp, Homo sapien
agaggcccaatttggcaagaaagac

SEQ ID NO: 5097931 - DNA, 25 bp, Homo sapien
tgtcatcatcagtactgaagaggcc

SEQ ID NO: 5097932 - DNA, 25 bp, Homo sapien
gacactggatcctaagaaggtggtt

SEQ ID NO: 5097933 - DNA, 25 bp, Homo sapien
cactggatcctaagaaggtggttga

SEQ ID NO: 5097934 - DNA, 25 bp, Homo sapien
tggacactggatcctaagaaggtgg

SEQ ID NO: 5097935 - DNA, 25 bp, Homo sapien
actggatcctaagaaggtggttgag

SEQ ID NO: 5097936 - DNA, 25 bp, Homo sapien
tactctctgctatatatgatgtccc

SEQ ID NO: 5097937 - DNA, 25 bp, Homo sapien
cacatgaccatgttaggtggaggag

SEQ ID NO: 5097938 - DNA, 25 bp, Homo sapien
ccctctgtgggatggtaggtaatac

SEQ ID NO: 5097939 - DNA, 25 bp, Homo sapien
gacccttctgaataaatgcatttgg

SEQ ID NO: 5097940 - DNA, 25 bp, Homo sapien
cttatcttcccaaactcagcacaag

SEQ ID NO: 5097941 - DNA, 25 bp, Homo sapien
ttcctaatgtctttgagttactcca

SEQ ID NO: 5097942 - DNA, 25 bp, Homo sapien
tggtccaatacgtcccttcctaatg

SEQ ID NO: 5097943 - DNA, 25 bp, Homo sapien
ttcccaaactcagcacaagggtcac

SEQ ID NO: 5097944 - DNA, 25 bp, Homo sapien
gacccatagcctagtaccagagaca

SEQ ID NO: 5097945 - DNA, 25 bp, Homo sapien
gccagcgtgttcttataagaccaga

SEQ ID NO: 5097946 - DNA, 25 bp, Homo sapien
ttgaaccaggacaatcaccacctcg

SEQ ID NO: 5097947 - DNA, 25 bp, Homo sapien
gatatcatactttactgccagcgtg

SEQ ID NO: 5097948 - DNA, 25 bp, Homo sapien
atcaaactcagagtattgggcatca

SEQ ID NO: 5097949 - DNA, 25 bp, Homo sapien
tcagtcccgcgcattccctctcctg

SEQ ID NO: 5097950 - DNA, 25 bp, Homo sapien
agagtattgggcatcatttcagtcc

SEQ ID NO: 5097951 - DNA, 25 bp, Homo sapien
actcagagtattgggcatcatttca

SEQ ID NO: 5097952 - DNA, 25 bp, Homo sapien
aaaaactcactcttcagccccatgt

SEQ ID NO: 5097953 - DNA, 25 bp, Homo sapien
agctgctcacttcttatagttttac

SEQ ID NO: 5097954 - DNA, 25 bp, Homo sapien
cttcagccccatgtcagactttttc

SEQ ID NO: 5097955 - DNA, 25 bp, Homo sapien
gctgctcacttcttatagttttact

SEQ ID NO: 5097956 - DNA, 25 bp, Homo sapien
tcactaggacatagagatccaacat

SEQ ID NO: 5097957 - DNA, 25 bp, Homo sapien
ggacatagagatccaacatccactc

SEQ ID NO: 5097958 - DNA, 25 bp, Homo sapien
gatgaaaatcactaggacatagaga

SEQ ID NO: 5097959 - DNA, 25 bp, Homo sapien
tagagatccaacatccactcttcca

SEQ ID NO: 5097960 - DNA, 25 bp, Homo sapien
catcattggtgcacaatcttctacc

SEQ ID NO: 5097961 - DNA, 25 bp, Homo sapien
ggctttcatgggctgctgtgtcact

SEQ ID NO: 5097962 - DNA, 25 bp, Homo sapien
gatctaggactacaatcatcattgg

SEQ ID NO: 5097963 - DNA, 25 bp, Homo sapien
tccagcatcatgacggcagatctag

SEQ ID NO: 5097964 - DNA, 25 bp, Homo sapien
cagcagagatggttgcttgctttac

SEQ ID NO: 5097965 - DNA, 25 bp, Homo sapien
ctctccagcagagatggttgcttgc

SEQ ID NO: 5097966 - DNA, 25 bp, Homo sapien
catttctggctctctccagcagaga

SEQ ID NO: 5097967 - DNA, 25 bp, Homo sapien
ttctggctctctccagcagagatgg

SEQ ID NO: 5097968 - DNA, 25 bp, Homo sapien
gaatgagaggctctgcaccgccaga

SEQ ID NO: 5097969 - DNA, 25 bp, Homo sapien
tccgacactgaatgagaggctctgc

SEQ ID NO: 5097970 - DNA, 25 bp, Homo sapien
cactgaatgagaggctctgcaccgc

SEQ ID NO: 5097971 - DNA, 25 bp, Homo sapien
ggcaggtgtccgacactgaatgaga

SEQ ID NO: 5097972 - DNA, 25 bp, Homo sapien
agctgtcttactcttgcctccagct

SEQ ID NO: 5097973 - DNA, 25 bp, Homo sapien
gcctccagctgcctaacataggaca

SEQ ID NO: 5097974 - DNA, 25 bp, Homo sapien
ttcctccagctgtcttactcttgcc

SEQ ID NO: 5097975 - DNA, 25 bp, Homo sapien
ctggggcagcatgcgattttcttcc

SEQ ID NO: 5097976 - DNA, 25 bp, Homo sapien
taggcacccaaaagcataacgacca

SEQ ID NO: 5097977 - DNA, 25 bp, Homo sapien
tggcactcaatacttgctaggcacc

SEQ ID NO: 5097978 - DNA, 25 bp, Homo sapien
agccagcttttatgtaagtccagaa

SEQ ID NO: 5097979 - DNA, 25 bp, Homo sapien
tcacaaacaattgatagagcttggc

SEQ ID NO: 5097980 - DNA, 25 bp, Homo sapien
tctcatgcctatcttgatctcttct

SEQ ID NO: 5097981 - DNA, 25 bp, Homo sapien
taatattaagatcctgagcatagtg

SEQ ID NO: 5097982 - DNA, 25 bp, Homo sapien
tgggtacttaagtgaacatttgagg

SEQ ID NO: 5097983 - DNA, 25 bp, Homo sapien
tatgactggtttccctaaccaagag

SEQ ID NO: 5097984 - DNA, 25 bp, Homo sapien
ggtcagaatgggaatcatcatcaag

SEQ ID NO: 5097985 - DNA, 25 bp, Homo sapien
tgctgggccagtatccaggactcca

SEQ ID NO: 5097986 - DNA, 25 bp, Homo sapien
gactccagctgatactcaggatgtg

SEQ ID NO: 5097987 - DNA, 25 bp, Homo sapien
tcatcaagatggattcaatgctggg

SEQ ID NO: 5097988 - DNA, 25 bp, Homo sapien
tggctgcaaccattacataaaatgt

SEQ ID NO: 5097989 - DNA, 25 bp, Homo sapien
attaacatcagctctgtgctcattt

SEQ ID NO: 5097990 - DNA, 25 bp, Homo sapien
ctgtggctgcaaccattacataaaa

SEQ ID NO: 5097991 - DNA, 25 bp, Homo sapien
tctgtgctcatttgaccttctccac

SEQ ID NO: 5097992 - DNA, 25 bp, Homo sapien
cgaaggaactggattagaagcatgt

SEQ ID NO: 5097993 - DNA, 25 bp, Homo sapien
agcagccttcgaaggaactggatta

SEQ ID NO: 5097994 - DNA, 25 bp, Homo sapien
agggtcagattggttggaatagctc

SEQ ID NO: 5097995 - DNA, 25 bp, Homo sapien
gattggttggaatagctcagcagcc

SEQ ID NO: 5097996 - DNA, 25 bp, Homo sapien
gctgtttctagttggaggttgcctt

SEQ ID NO: 5097997 - DNA, 25 bp, Homo sapien
tagttggaggttgccttctattctg

SEQ ID NO: 5097998 - DNA, 25 bp, Homo sapien
tgtttctagttggaggttgccttct

SEQ ID NO: 5097999 - DNA, 25 bp, Homo sapien
tctagttggaggttgccttctattc

SEQ ID NO: 5098000 - DNA, 25 bp, Homo sapien
tattcctcggcacccttgccaccac

SEQ ID NO: 5098001 - DNA, 25 bp, Homo sapien
ctcggcacccttgccaccactgcaa

SEQ ID NO: 5098002 - DNA, 25 bp, Homo sapien
ggcaggcatcgtcctattcctcggc

SEQ ID NO: 5098003 - DNA, 25 bp, Homo sapien
actgcaagacccgccgggctctgga

SEQ ID NO: 5098004 - DNA, 25 bp, Homo sapien
acaaaggtaaccaagtgcctggtga

SEQ ID NO: 5098005 - DNA, 25 bp, Homo sapien
tgtgatttccagattaagtggcttg

SEQ ID NO: 5098006 - DNA, 25 bp, Homo sapien
gaagtttacttccaacagatgttaa

SEQ ID NO: 5098007 - DNA, 25 bp, Homo sapien
tgcgcttagcagaatcagaccaata

SEQ ID NO: 5098008 - DNA, 25 bp, Homo sapien
cttaagagaatgtaccacaggttca

SEQ ID NO: 5098009 - DNA, 25 bp, Homo sapien
gggtgaactgttactcccatcagcc

SEQ ID NO: 5098010 - DNA, 25 bp, Homo sapien
ctagctgcagagttgggtgaactgt

SEQ ID NO: 5098011 - DNA, 25 bp, Homo sapien
gaaggtgtggcatgtccactgaagc

SEQ ID NO: 5098012 - DNA, 25 bp, Homo sapien
ttgacgatctatagtttcctgaaca

SEQ ID NO: 5098013 - DNA, 25 bp, Homo sapien
tcatactctttaccctgttgacgat

SEQ ID NO: 5098014 - DNA, 25 bp, Homo sapien
tctcactaaggtcatgttcatactc

SEQ ID NO: 5098015 - DNA, 25 bp, Homo sapien
tttctgtctcactaaggtcatgttc

SEQ ID NO: 5098016 - DNA, 25 bp, Homo sapien
gaaggagtgagtatcttacttttcc

SEQ ID NO: 5098017 - DNA, 25 bp, Homo sapien
cctctttcacaaggagatttgcatt

SEQ ID NO: 5098018 - DNA, 25 bp, Homo sapien
taagggtaaattaagagaggagcga

SEQ ID NO: 5098019 - DNA, 25 bp, Homo sapien
agagaggagcgaagatgaagtaaag

SEQ ID NO: 5098020 - DNA, 25 bp, Homo sapien
aatgttgcctaattccaggacacga

SEQ ID NO: 5098021 - DNA, 25 bp, Homo sapien
tgcctaattccaggacacgaacctg

SEQ ID NO: 5098022 - DNA, 25 bp, Homo sapien
aattccaggacacgaacctgcagca

SEQ ID NO: 5098023 - DNA, 25 bp, Homo sapien
tgttgcctaattccaggacacgaac

SEQ ID NO: 5098024 - DNA, 25 bp, Homo sapien
tgaatatgaaggttggtatgcccca

SEQ ID NO: 5098025 - DNA, 25 bp, Homo sapien
tagaaattgacatctcacagctcga

SEQ ID NO: 5098026 - DNA, 25 bp, Homo sapien
gagagacacagaatatcagcttgag

SEQ ID NO: 5098027 - DNA, 25 bp, Homo sapien
tattcaaaacactgaggctccactg

SEQ ID NO: 5098028 - DNA, 25 bp, Homo sapien
aaaacgtagcattcggtcacaggcc

SEQ ID NO: 5098029 - DNA, 25 bp, Homo sapien
cacaggcctcttgcacattcataca

SEQ ID NO: 5098030 - DNA, 25 bp, Homo sapien
aaaatgttagatagctgcagtaggc

SEQ ID NO: 5098031 - DNA, 25 bp, Homo sapien
ctcaataatgaaggacatgcgtcag

SEQ ID NO: 5098032 - DNA, 25 bp, Homo sapien
gaacacatatacttaatactcaatt

SEQ ID NO: 5098033 - DNA, 25 bp, Homo sapien
tattaccattgctaagatgaacaca

SEQ ID NO: 5098034 - DNA, 25 bp, Homo sapien
tactcaattttatgcagaactttaa

SEQ ID NO: 5098035 - DNA, 25 bp, Homo sapien
gatgaacacatatacttaatactca

SEQ ID NO: 5098036 - DNA, 25 bp, Homo sapien
tatttaatccctcattatgagcaca

SEQ ID NO: 5098037 - DNA, 25 bp, Homo sapien
cgtcatgactattacaaatggactc

SEQ ID NO: 5098038 - DNA, 25 bp, Homo sapien
taggagcattaggacacgtcatgac

SEQ ID NO: 5098039 - DNA, 25 bp, Homo sapien
tataatacagaatggtgcaagttga

SEQ ID NO: 5098040 - DNA, 25 bp, Homo sapien
tctgaataacgtataagtcccttaa

SEQ ID NO: 5098041 - DNA, 25 bp, Homo sapien
tgtagaaggccttattccacaatct

SEQ ID NO: 5098042 - DNA, 25 bp, Homo sapien
cacaatcttattagtgacatccaag

SEQ ID NO: 5098043 - DNA, 25 bp, Homo sapien
gacatccaagaagtatgtgttctct

SEQ ID NO: 5098044 - DNA, 25 bp, Homo sapien
tgggcatctaccttgataagccagc

SEQ ID NO: 5098045 - DNA, 25 bp, Homo sapien
cagtttgcccctgatgtagaggtgg

SEQ ID NO: 5098046 - DNA, 25 bp, Homo sapien
gaggtaaccctatcacgatctcaag

SEQ ID NO: 5098047 - DNA, 25 bp, Homo sapien
taagccagcttgaggtaggcagatc

SEQ ID NO: 5098048 - DNA, 25 bp, Homo sapien
gaggttggaccgtatgaaattactg

SEQ ID NO: 5098049 - DNA, 25 bp, Homo sapien
tctactgtattcactctataattcc

SEQ ID NO: 5098050 - DNA, 25 bp, Homo sapien
gactcttctataacttctactgtat

SEQ ID NO: 5098051 - DNA, 25 bp, Homo sapien
ccaaaagtggtcatatattggcaat

SEQ ID NO: 5098052 - DNA, 25 bp, Homo sapien
ttctccttctgtggcatgaccgtca

SEQ ID NO: 5098053 - DNA, 25 bp, Homo sapien
tctccttctgtggcatgaccgtcat

SEQ ID NO: 5098054 - DNA, 25 bp, Homo sapien
tcttcatttggtcctttacacttga

SEQ ID NO: 5098055 - DNA, 25 bp, Homo sapien
cttcatttggtcctttacacttgag

SEQ ID NO: 5098056 - DNA, 25 bp, Homo sapien
tctcacaaccccatgcctacactct

SEQ ID NO: 5098057 - DNA, 25 bp, Homo sapien
caaccccatgcctacactctttctc

SEQ ID NO: 5098058 - DNA, 25 bp, Homo sapien
ttgcctgttgtccccactatccact

SEQ ID NO: 5098059 - DNA, 25 bp, Homo sapien
gcctgttgtccccactatccactct

SEQ ID NO: 5098060 - DNA, 25 bp, Homo sapien
tttgcctgttgtccccactatccac

SEQ ID NO: 5098061 - DNA, 25 bp, Homo sapien
tgcctgttgtccccactatccactc

SEQ ID NO: 5098062 - DNA, 25 bp, Homo sapien
caccaatacaggacatttgtgcttg

SEQ ID NO: 5098063 - DNA, 25 bp, Homo sapien
caaattgagtattaaatccaggacc

SEQ ID NO: 5098064 - DNA, 25 bp, Homo sapien
atacaggacatttgtgcttggccca

SEQ ID NO: 5098065 - DNA, 25 bp, Homo sapien
tctagctggaatacttcatcttctt

SEQ ID NO: 5098066 - DNA, 25 bp, Homo sapien
tcatgctggatgtaagaaccagcag

SEQ ID NO: 5098067 - DNA, 25 bp, Homo sapien
ctagagcccccccagttcattgata

SEQ ID NO: 5098068 - DNA, 25 bp, Homo sapien
tgctggatgtaagaaccagcagagc

SEQ ID NO: 5098069 - DNA, 25 bp, Homo sapien
taccttatctgtcatgaaaaggacc

SEQ ID NO: 5098070 - DNA, 25 bp, Homo sapien
aaaattgggcaggaacaagcctcta

SEQ ID NO: 5098071 - DNA, 25 bp, Homo sapien
taaaattgggcaggaacaagcctct

SEQ ID NO: 5098072 - DNA, 25 bp, Homo sapien
aattgggcaggaacaagcctctatc

SEQ ID NO: 5098073 - DNA, 25 bp, Homo sapien
aataaaattgggcaggaacaagcct

SEQ ID NO: 5098074 - DNA, 25 bp, Homo sapien
ctttctactctcagagaaatgcccc

SEQ ID NO: 5098075 - DNA, 25 bp, Homo sapien
taagttgagagattctgtcaggagg

SEQ ID NO: 5098076 - DNA, 25 bp, Homo sapien
cttccttatcaatggagatcctcgt

SEQ ID NO: 5098077 - DNA, 25 bp, Homo sapien
gagattctgtcaggaggtatttcat

SEQ ID NO: 5098078 - DNA, 25 bp, Homo sapien
gagatcctcgtaagttgagagattc

SEQ ID NO: 5098079 - DNA, 25 bp, Homo sapien
tcttggtgttcttccgacagttcat

SEQ ID NO: 5098080 - DNA, 25 bp, Homo sapien
ttcttccgacagttcatcccattca

SEQ ID NO: 5098081 - DNA, 25 bp, Homo sapien
tgttcttccgacagttcatcccatt

SEQ ID NO: 5098082 - DNA, 25 bp, Homo sapien
tggtgttcttccgacagttcatccc

SEQ ID NO: 5098083 - DNA, 25 bp, Homo sapien
agcatgcatgcatctccaatttccc

SEQ ID NO: 5098084 - DNA, 25 bp, Homo sapien
caatttccctgaaatacctcctagg

SEQ ID NO: 5098085 - DNA, 25 bp, Homo sapien
tcagacatgagccaagtggacaagc

SEQ ID NO: 5098086 - DNA, 25 bp, Homo sapien
tgaaatacctcctaggtctgggtag

SEQ ID NO: 5098087 - DNA, 25 bp, Homo sapien
caatggcacaaaactgcaagtgagc

SEQ ID NO: 5098088 - DNA, 25 bp, Homo sapien
gttaatatgctgcaatcctgtgctc

SEQ ID NO: 5098089 - DNA, 25 bp, Homo sapien
caagtgagccagattgttaatatgc

SEQ ID NO: 5098090 - DNA, 25 bp, Homo sapien
gcatctctaatgtcctcgttccaag

SEQ ID NO: 5098091 - DNA, 25 bp, Homo sapien
tcagcaagcatctggactgtcagct

SEQ ID NO: 5098092 - DNA, 25 bp, Homo sapien
ccaagcaccgtgatggtgaatggga

SEQ ID NO: 5098093 - DNA, 25 bp, Homo sapien
caactggcaatactgtctacatgag

SEQ ID NO: 5098094 - DNA, 25 bp, Homo sapien
ggagattcagtcaaccacccagatg

SEQ ID NO: 5098095 - DNA, 25 bp, Homo sapien
ccagtgcttacttgtgggtatgcac

SEQ ID NO: 5098096 - DNA, 25 bp, Homo sapien
gaagcttcccaggtttctcaagtac

SEQ ID NO: 5098097 - DNA, 25 bp, Homo sapien
cctggtgtcctggaaatttaatgaa

SEQ ID NO: 5098098 - DNA, 25 bp, Homo sapien
ggtttctcaagtactcccagtgctt

SEQ ID NO: 5098099 - DNA, 25 bp, Homo sapien
gcacctttagcatgatggcctgctt

SEQ ID NO: 5098100 - DNA, 25 bp, Homo sapien
gtctcatggcagcatgtctggtgca

SEQ ID NO: 5098101 - DNA, 25 bp, Homo sapien
gctttagttatcctgagaatccaca

SEQ ID NO: 5098102 - DNA, 25 bp, Homo sapien
gataactgaagagtcatcactgggc

SEQ ID NO: 5098103 - DNA, 25 bp, Homo sapien
ttccccatagccatgagaggccaga

SEQ ID NO: 5098104 - DNA, 25 bp, Homo sapien
tctgtggtagattgacttggcaaca

SEQ ID NO: 5098105 - DNA, 25 bp, Homo sapien
ttgaagtcacttccccatagccatg

SEQ ID NO: 5098106 - DNA, 25 bp, Homo sapien
caaaatccataacgccttgaagtca

SEQ ID NO: 5098107 - DNA, 25 bp, Homo sapien
ttttccatcatatctacccgtctct

SEQ ID NO: 5098108 - DNA, 25 bp, Homo sapien
tctgaactaagaatgcttgaatttc

SEQ ID NO: 5098109 - DNA, 25 bp, Homo sapien
tccatcatatctacccgtctctgaa

SEQ ID NO: 5098110 - DNA, 25 bp, Homo sapien
ccgtctctgaactaagaatgcttga

SEQ ID NO: 5098111 - DNA, 25 bp, Homo sapien
gaaggagccaagctacaaacacctt

SEQ ID NO: 5098112 - DNA, 25 bp, Homo sapien
agctacaaacaccttctgatgaact

SEQ ID NO: 5098113 - DNA, 25 bp, Homo sapien
ttgggatcttcagaaggagccaagc

SEQ ID NO: 5098114 - DNA, 25 bp, Homo sapien
gagccaagctacaaacaccttctga

SEQ ID NO: 5098115 - DNA, 25 bp, Homo sapien
actgtttttcattcacggcagtatt

SEQ ID NO: 5098116 - DNA, 25 bp, Homo sapien
aactgtttttcattcacggcagtat

SEQ ID NO: 5098117 - DNA, 25 bp, Homo sapien
tttttcattcacggcagtattttca

SEQ ID NO: 5098118 - DNA, 25 bp, Homo sapien
ccaagtccttgtccaagcaatagcc

SEQ ID NO: 5098119 - DNA, 25 bp, Homo sapien
tgagggctccagaggttggcccacc

SEQ ID NO: 5098120 - DNA, 25 bp, Homo sapien
caagtccttgtccaagcaatagcca

SEQ ID NO: 5098121 - DNA, 25 bp, Homo sapien
gacccatgttctcctaagtactctt

SEQ ID NO: 5098122 - DNA, 25 bp, Homo sapien
gcgcaatggccacaggtaatataca

SEQ ID NO: 5098123 - DNA, 25 bp, Homo sapien
gactaggaactaaagaagtagcgca

SEQ ID NO: 5098124 - DNA, 25 bp, Homo sapien
gaactaaagaagtagcgcaatggcc

SEQ ID NO: 5098125 - DNA, 25 bp, Homo sapien
tctggagggaccttgggctcttaca

SEQ ID NO: 5098126 - DNA, 25 bp, Homo sapien
caaatactgttctctgaagcagaag

SEQ ID NO: 5098127 - DNA, 25 bp, Homo sapien
tatgtacgggcgctgaaagacgaga

SEQ ID NO: 5098128 - DNA, 25 bp, Homo sapien
ccctgactgatgctctggaactact

SEQ ID NO: 5098129 - DNA, 25 bp, Homo sapien
tatcttctaaggctacaaatactgt

SEQ ID NO: 5098130 - DNA, 25 bp, Homo sapien
tatttgatctgagaaggaagttcca

SEQ ID NO: 5098131 - DNA, 25 bp, Homo sapien
ctttgtatttgatctgagaaggaag

SEQ ID NO: 5098132 - DNA, 25 bp, Homo sapien
gctgctgaactttgtatttgatctg

SEQ ID NO: 5098133 - DNA, 25 bp, Homo sapien
aagttccagggagcgagattggaaa

SEQ ID NO: 5098134 - DNA, 25 bp, Homo sapien
tagtaaccgctgacatagattctgg

SEQ ID NO: 5098135 - DNA, 25 bp, Homo sapien
aacggctgtgttcctgaattggagt

SEQ ID NO: 5098136 - DNA, 25 bp, Homo sapien
gttcaatccttttgctgtcccctta

SEQ ID NO: 5098137 - DNA, 25 bp, Homo sapien
tctcatctctgttcaatccttttgc

SEQ ID NO: 5098138 - DNA, 25 bp, Homo sapien
caagcacctctgtgattagtaatgt

SEQ ID NO: 5098139 - DNA, 25 bp, Homo sapien
tgtgattagtaatgtggtatttggc

SEQ ID NO: 5098140 - DNA, 25 bp, Homo sapien
tggtatttggcatgcttctccctat

SEQ ID NO: 5098141 - DNA, 25 bp, Homo sapien
cacctctgtgattagtaatgtggta

SEQ ID NO: 5098142 - DNA, 25 bp, Homo sapien
gacagacctcattattgcaacaggc

SEQ ID NO: 5098143 - DNA, 25 bp, Homo sapien
ctatgctgccaagggagagtgacaa

SEQ ID NO: 5098144 - DNA, 25 bp, Homo sapien
tgacacaggacaccacattgacagt

SEQ ID NO: 5098145 - DNA, 25 bp, Homo sapien
gatttccacacgagtaaggccactt

SEQ ID NO: 5098146 - DNA, 25 bp, Homo sapien
cacttaccgcagctactctgggaga

SEQ ID NO: 5098147 - DNA, 25 bp, Homo sapien
gagaaatgtgtaacatgtgtccaga

SEQ ID NO: 5098148 - DNA, 25 bp, Homo sapien
ccctcagtcgggtggtattgagaaa

SEQ ID NO: 5098149 - DNA, 25 bp, Homo sapien
gattttcaatatgcactattccact

SEQ ID NO: 5098150 - DNA, 25 bp, Homo sapien
gacatgaccatatctctgtggatac

SEQ ID NO: 5098151 - DNA, 25 bp, Homo sapien
aaaagcttgtagcacgagcacatgt

SEQ ID NO: 5098152 - DNA, 25 bp, Homo sapien
tgaggacatgaccatatctctgtgg

SEQ ID NO: 5098153 - DNA, 25 bp, Homo sapien
cacatgtatcaactggaaagggaag

SEQ ID NO: 5098154 - DNA, 25 bp, Homo sapien
taaaatgagacacttaaggaaacca

SEQ ID NO: 5098155 - DNA, 25 bp, Homo sapien
gacacttaaggaaaccaacagattc

SEQ ID NO: 5098156 - DNA, 25 bp, Homo sapien
aatgagacacttaaggaaaccaaca

SEQ ID NO: 5098157 - DNA, 25 bp, Homo sapien
taaggaaaccaacagattctttcat

SEQ ID NO: 5098158 - DNA, 25 bp, Homo sapien
tcattagggtgtttgaaatatccac

SEQ ID NO: 5098159 - DNA, 25 bp, Homo sapien
tgtcattagggtgtttgaaatatcc

SEQ ID NO: 5098160 - DNA, 25 bp, Homo sapien
tttcccgtggtagagtgacttgctg

SEQ ID NO: 5098161 - DNA, 25 bp, Homo sapien
atcagatttcccgtggtagagtgac

SEQ ID NO: 5098162 - DNA, 25 bp, Homo sapien
gggtctggtattctccatggacaag

SEQ ID NO: 5098163 - DNA, 25 bp, Homo sapien
ttgggtctggtattctccatggaca

SEQ ID NO: 5098164 - DNA, 25 bp, Homo sapien
tgtttgtgttgggtctggtattctc

SEQ ID NO: 5098165 - DNA, 25 bp, Homo sapien
tgtgttgggtctggtattctccatg

SEQ ID NO: 5098166 - DNA, 25 bp, Homo sapien
ggagaatccgacctgtgataggaca

SEQ ID NO: 5098167 - DNA, 25 bp, Homo sapien
tctcggagaatccgacctgtgatag

SEQ ID NO: 5098168 - DNA, 25 bp, Homo sapien
gagaatccgacctgtgataggacac

SEQ ID NO: 5098169 - DNA, 25 bp, Homo sapien
tcggagaatccgacctgtgatagga

SEQ ID NO: 5098170 - DNA, 25 bp, Homo sapien
tctatcttcacgacacaaatgatga

SEQ ID NO: 5098171 - DNA, 25 bp, Homo sapien
gttgccaaatctgtgcgtaaaatgg

SEQ ID NO: 5098172 - DNA, 25 bp, Homo sapien
aatggtgaaccaataaatcgactgg

SEQ ID NO: 5098173 - DNA, 25 bp, Homo sapien
gactggtggctctatcttcacgaca

SEQ ID NO: 5098174 - DNA, 25 bp, Homo sapien
gatttttcaagtaaccactctcctg

SEQ ID NO: 5098175 - DNA, 25 bp, Homo sapien
ttctgcatgtgctctgaaactcttg

SEQ ID NO: 5098176 - DNA, 25 bp, Homo sapien
tgctctgaaactcttgagtctaaga

SEQ ID NO: 5098177 - DNA, 25 bp, Homo sapien
tcctgccttctgcatgtgctctgaa

SEQ ID NO: 5098178 - DNA, 25 bp, Homo sapien
gtttccttcatttatatgtctcttg

SEQ ID NO: 5098179 - DNA, 25 bp, Homo sapien
tatatgtctcttgtacacaaaagct

SEQ ID NO: 5098180 - DNA, 25 bp, Homo sapien
aaagctgataaaagagactcagatc

SEQ ID NO: 5098181 - DNA, 25 bp, Homo sapien
gataaaagagactcagatcttcgca

SEQ ID NO: 5098182 - DNA, 25 bp, Homo sapien
ccctttatggctggcttgtggcagc

SEQ ID NO: 5098183 - DNA, 25 bp, Homo sapien
tatcctccggtttcttgctcctgga

SEQ ID NO: 5098184 - DNA, 25 bp, Homo sapien
ctgggccagttccttgctttatgcc

SEQ ID NO: 5098185 - DNA, 25 bp, Homo sapien
tcagtgtggccctttatggctggct

SEQ ID NO: 5098186 - DNA, 25 bp, Homo sapien
ttcataatttttactacgagcaatt

SEQ ID NO: 5098187 - DNA, 25 bp, Homo sapien
taatttttactacgagcaattgaca

SEQ ID NO: 5098188 - DNA, 25 bp, Homo sapien
ttactacgagcaattgacaatgttg

SEQ ID NO: 5098189 - DNA, 25 bp, Homo sapien
tttttactacgagcaattgacaatg

SEQ ID NO: 5098190 - DNA, 25 bp, Homo sapien
gtcatggatactatttgcacaggct

SEQ ID NO: 5098191 - DNA, 25 bp, Homo sapien
atggatactatttgcacaggctgag

SEQ ID NO: 5098192 - DNA, 25 bp, Homo sapien
tggatactatttgcacaggctgagg

SEQ ID NO: 5098193 - DNA, 25 bp, Homo sapien
catggatactatttgcacaggctga

SEQ ID NO: 5098194 - DNA, 25 bp, Homo sapien
taacttctccactaagcacagatgc

SEQ ID NO: 5098195 - DNA, 25 bp, Homo sapien
acataacttctccactaagcacaga

SEQ ID NO: 5098196 - DNA, 25 bp, Homo sapien
gaaaaggggttgtcactgtgctctc

SEQ ID NO: 5098197 - DNA, 25 bp, Homo sapien
gctccactcagcaacataacttctc

SEQ ID NO: 5098198 - DNA, 25 bp, Homo sapien
cacacttcttttacattttcaaatt

SEQ ID NO: 5098199 - DNA, 25 bp, Homo sapien
tcacacttcttttacattttcaaat

SEQ ID NO: 5098200 - DNA, 25 bp, Homo sapien
cagtttcaagggaaatgtggaccca

SEQ ID NO: 5098201 - DNA, 25 bp, Homo sapien
ctccacccacgttggtcagtttcaa

SEQ ID NO: 5098202 - DNA, 25 bp, Homo sapien
tgcccatgagaactctcaggtctct

SEQ ID NO: 5098203 - DNA, 25 bp, Homo sapien
gagaagagtagcaaccctccaccca

SEQ ID NO: 5098204 - DNA, 25 bp, Homo sapien
tagccttgtccaaatgagtggcacc

SEQ ID NO: 5098205 - DNA, 25 bp, Homo sapien
ttttttgtagccttgtccaaatgag

SEQ ID NO: 5098206 - DNA, 25 bp, Homo sapien
ccttgtccaaatgagtggcaccaat

SEQ ID NO: 5098207 - DNA, 25 bp, Homo sapien
aatgagtggcaccaatttacggtca

SEQ ID NO: 5098208 - DNA, 25 bp, Homo sapien
gagaaatcaattgtctggtgctcag

SEQ ID NO: 5098209 - DNA, 25 bp, Homo sapien
accgtcctctaaattctgaatgcca

SEQ ID NO: 5098210 - DNA, 25 bp, Homo sapien
tgaatgccactctgcacactgttgg

SEQ ID NO: 5098211 - DNA, 25 bp, Homo sapien
tggtgctcagacaattcatctgctg

SEQ ID NO: 5098212 - DNA, 25 bp, Homo sapien
ctggaggtcgagtatctctcccttt

SEQ ID NO: 5098213 - DNA, 25 bp, Homo sapien
cctgggcaaactcagctgccagaaa

SEQ ID NO: 5098214 - DNA, 25 bp, Homo sapien
ctgggcaaactcagctgccagaaaa

SEQ ID NO: 5098215 - DNA, 25 bp, Homo sapien
atgagcattgatggatttcctgcaa

SEQ ID NO: 5098216 - DNA, 25 bp, Homo sapien
catctgggtacaaccaaggaaaagg

SEQ ID NO: 5098217 - DNA, 25 bp, Homo sapien
atggatttcctgcaatccatctggg

SEQ ID NO: 5098218 - DNA, 25 bp, Homo sapien
caatccatctgggtacaaccaagga

SEQ ID NO: 5098219 - DNA, 25 bp, Homo sapien
tttagaatgtcaacaaatagagggt

SEQ ID NO: 5098220 - DNA, 25 bp, Homo sapien
tggaatttagaatgtcaacaaatag

SEQ ID NO: 5098221 - DNA, 25 bp, Homo sapien
gaatttagaatgtcaacaaatagag

SEQ ID NO: 5098222 - DNA, 25 bp, Homo sapien
agaatgtcaacaaatagagggtcat

SEQ ID NO: 5098223 - DNA, 25 bp, Homo sapien
cttcacctttaggtcttccctccat

SEQ ID NO: 5098224 - DNA, 25 bp, Homo sapien
atatatgcctttgggagatacgtgc

SEQ ID NO: 5098225 - DNA, 25 bp, Homo sapien
gatacgtgcgttcacagatagtgcc

SEQ ID NO: 5098226 - DNA, 25 bp, Homo sapien
cagatgcagctgatactcccgtttg

SEQ ID NO: 5098227 - DNA, 25 bp, Homo sapien
tacaggtcactcaaattatccccag

SEQ ID NO: 5098228 - DNA, 25 bp, Homo sapien
ttattgtctggagatttggctccgg

SEQ ID NO: 5098229 - DNA, 25 bp, Homo sapien
attgtctggagatttggctccggta

SEQ ID NO: 5098230 - DNA, 25 bp, Homo sapien
gtctggagatttggctccggtattt

SEQ ID NO: 5098231 - DNA, 25 bp, Homo sapien
cattattgtctggagatttggctcc

SEQ ID NO: 5098232 - DNA, 25 bp, Homo sapien
ctttcctaggagtacatggtcatga

SEQ ID NO: 5098233 - DNA, 25 bp, Homo sapien
gaatgtgtctgttattaaggcatcc

SEQ ID NO: 5098234 - DNA, 25 bp, Homo sapien
tcttttctaatatgggtctggctga

SEQ ID NO: 5098235 - DNA, 25 bp, Homo sapien
gagtgcgccagcatgatcgcggctc

SEQ ID NO: 5098236 - DNA, 25 bp, Homo sapien
tgcacattctcctgtggtctaacag

SEQ ID NO: 5098237 - DNA, 25 bp, Homo sapien
taaaaacttgccacgtacttagcag

SEQ ID NO: 5098238 - DNA, 25 bp, Homo sapien
ggtctaacagttacaatgattgcta

SEQ ID NO: 5098239 - DNA, 25 bp, Homo sapien
cacgtacttagcagcaacttgcaca

SEQ ID NO: 5098240 - DNA, 25 bp, Homo sapien
ctggaaagtgggctggtgtttacag

SEQ ID NO: 5098241 - DNA, 25 bp, Homo sapien
tggaaagtgggctggtgtttacaga

SEQ ID NO: 5098242 - DNA, 25 bp, Homo sapien
tgctggaaagtgggctggtgtttac

SEQ ID NO: 5098243 - DNA, 25 bp, Homo sapien
ggaaagtgggctggtgtttacagaa

SEQ ID NO: 5098244 - DNA, 25 bp, Homo sapien
catggtaatgacatgagttacagat

SEQ ID NO: 5098245 - DNA, 25 bp, Homo sapien
taaaagggtaactagttctctcatg

SEQ ID NO: 5098246 - DNA, 25 bp, Homo sapien
taatgacatgagttacagatacagc

SEQ ID NO: 5098247 - DNA, 25 bp, Homo sapien
ctagttctctcatggtaatgacatg

SEQ ID NO: 5098248 - DNA, 25 bp, Homo sapien
tgtaaggtgccaaagcaatgttgtc

SEQ ID NO: 5098249 - DNA, 25 bp, Homo sapien
gcaatgttgtcaacaacttcttctg

SEQ ID NO: 5098250 - DNA, 25 bp, Homo sapien
gggagtataagaaggcaatccaata

SEQ ID NO: 5098251 - DNA, 25 bp, Homo sapien
tccaatatataagtcactccttgta

SEQ ID NO: 5098252 - DNA, 25 bp, Homo sapien
gaagtatatgactaatctttctaca

SEQ ID NO: 5098253 - DNA, 25 bp, Homo sapien
gtactaacactactttatggcccag

SEQ ID NO: 5098254 - DNA, 25 bp, Homo sapien
tgtagtatcatatataaatcgcaag

SEQ ID NO: 5098255 - DNA, 25 bp, Homo sapien
ccatcaattactgagaattgtgtgt

SEQ ID NO: 5098256 - DNA, 25 bp, Homo sapien
tgtgtgtttcacattacctggaaag

SEQ ID NO: 5098257 - DNA, 25 bp, Homo sapien
gcttgttaactaaatgtgcatgcct

SEQ ID NO: 5098258 - DNA, 25 bp, Homo sapien
taaaatttgcatgtatggcctgtga

SEQ ID NO: 5098259 - DNA, 25 bp, Homo sapien
tattacggcatgttaacaaattcca

SEQ ID NO: 5098260 - DNA, 25 bp, Homo sapien
ttgttgttccatttaaaaggccaca

SEQ ID NO: 5098261 - DNA, 25 bp, Homo sapien
tccttattctccgacagcagaagat

SEQ ID NO: 5098262 - DNA, 25 bp, Homo sapien
tgtgccatttaagcatatctccaga

SEQ ID NO: 5098263 - DNA, 25 bp, Homo sapien
tcaggtgaatcaaccacttcaagaa

SEQ ID NO: 5098264 - DNA, 25 bp, Homo sapien
tcactacctaatgaacatttctggg

SEQ ID NO: 5098265 - DNA, 25 bp, Homo sapien
tcctgatcagtcttgtaaggttgtg

SEQ ID NO: 5098266 - DNA, 25 bp, Homo sapien
ccacacaatggagcgtaaaacaacc

SEQ ID NO: 5098267 - DNA, 25 bp, Homo sapien
tacctaaagcaagatcttggagacc

SEQ ID NO: 5098268 - DNA, 25 bp, Homo sapien
taacttaacacttgacaaatggacc

SEQ ID NO: 5098269 - DNA, 25 bp, Homo sapien
caaaatctgtgagtacatttagagc

SEQ ID NO: 5098270 - DNA, 25 bp, Homo sapien
cattaatgtcaaaatctgtgagtac

SEQ ID NO: 5098271 - DNA, 25 bp, Homo sapien
ttgtcattaatgtcaaaatctgtga

SEQ ID NO: 5098272 - DNA, 25 bp, Homo sapien
ggctctggggacttatttcatagat

SEQ ID NO: 5098273 - DNA, 25 bp, Homo sapien
ctgtacttatgtccacataagccat

SEQ ID NO: 5098274 - DNA, 25 bp, Homo sapien
cccagacactttgaataccatgtgg

SEQ ID NO: 5098275 - DNA, 25 bp, Homo sapien
tctcctcttgcggttttccaaagac

SEQ ID NO: 5098276 - DNA, 25 bp, Homo sapien
tgtggttctcctcttgcggttttcc

SEQ ID NO: 5098277 - DNA, 25 bp, Homo sapien
tttatgtaacatctcagtctgcccc

SEQ ID NO: 5098278 - DNA, 25 bp, Homo sapien
tactgagtaaatggctgcaacgatg

SEQ ID NO: 5098279 - DNA, 25 bp, Homo sapien
taatggatgagcaacagcctcaggt

SEQ ID NO: 5098280 - DNA, 25 bp, Homo sapien
tggaaaacagatattcctcaagtgg

SEQ ID NO: 5098281 - DNA, 25 bp, Homo sapien
taataaccctgttcaatagaagcct

SEQ ID NO: 5098282 - DNA, 25 bp, Homo sapien
tgcatggccaaagcgtacttctcca

SEQ ID NO: 5098283 - DNA, 25 bp, Homo sapien
catcacatattaactgcctactcct

SEQ ID NO: 5098284 - DNA, 25 bp, Homo sapien
ccagttcataggcaaaaaatttggc

SEQ ID NO: 5098285 - DNA, 25 bp, Homo sapien
atttggctatatgactggctgtggc

SEQ ID NO: 5098286 - DNA, 25 bp, Homo sapien
tcccaccataattggttgctgccat

SEQ ID NO: 5098287 - DNA, 25 bp, Homo sapien
ttcttgcttccagtgctgcggcatc

SEQ ID NO: 5098288 - DNA, 25 bp, Homo sapien
ctttcccaccataattggttgctgc

SEQ ID NO: 5098289 - DNA, 25 bp, Homo sapien
ccagtgctgcggcatcatctacatt

SEQ ID NO: 5098290 - DNA, 25 bp, Homo sapien
ttagcttcgtggaacacattggtat

SEQ ID NO: 5098291 - DNA, 25 bp, Homo sapien
tatgagtgtttcaagcccagatgtc

SEQ ID NO: 5098292 - DNA, 25 bp, Homo sapien
gaatcatcgtggagctgaggtgaca

SEQ ID NO: 5098293 - DNA, 25 bp, Homo sapien
gaggtgacagacctgctaagacaga

SEQ ID NO: 5098294 - DNA, 25 bp, Homo sapien
tgtggagtcttcatacaaggcattg

SEQ ID NO: 5098295 - DNA, 25 bp, Homo sapien
ttaatcttatatatttgctgctgcc

SEQ ID NO: 5098296 - DNA, 25 bp, Homo sapien
ttttgccattgggatctacatccat

SEQ ID NO: 5098297 - DNA, 25 bp, Homo sapien
gaagtttatagtcacttctctgctg

SEQ ID NO: 5098298 - DNA, 25 bp, Homo sapien
tgctgctgccttatttggtaaataa

SEQ ID NO: 5098299 - DNA, 25 bp, Homo sapien
tatgcctggatataactttggacaa

SEQ ID NO: 5098300 - DNA, 25 bp, Homo sapien
taccatgatgaaatcccctgatgac

SEQ ID NO: 5098301 - DNA, 25 bp, Homo sapien
ttggcagtgtaagacctgggttact

SEQ ID NO: 5098302 - DNA, 25 bp, Homo sapien
cttgtgtcgttaagcaatgtgtgac

SEQ ID NO: 5098303 - DNA, 25 bp, Homo sapien
taaggtagtcaggacatgtgctgaa

SEQ ID NO: 5098304 - DNA, 25 bp, Homo sapien
tcctaaggtagtcaggacatgtgct

SEQ ID NO: 5098305 - DNA, 25 bp, Homo sapien
aggtggtcctaaggtagtcaggaca

SEQ ID NO: 5098306 - DNA, 25 bp, Homo sapien
ggtcctaaggtagtcaggacatgtg

SEQ ID NO: 5098307 - DNA, 25 bp, Homo sapien
catccaaactgattaaaccctgaag

SEQ ID NO: 5098308 - DNA, 25 bp, Homo sapien
gggattagcttccaagttgtgtaca

SEQ ID NO: 5098309 - DNA, 25 bp, Homo sapien
tttattaccaggtgaacttggctac

SEQ ID NO: 5098310 - DNA, 25 bp, Homo sapien
cctatgtagcttcttatggcagcca

SEQ ID NO: 5098311 - DNA, 25 bp, Homo sapien
catccttgacgcctgtttctgagcc

SEQ ID NO: 5098312 - DNA, 25 bp, Homo sapien
tttctcatccttgacgcctgtttct

SEQ ID NO: 5098313 - DNA, 25 bp, Homo sapien
tccattttctcatccttgacgcctg

SEQ ID NO: 5098314 - DNA, 25 bp, Homo sapien
tccttgacgcctgtttctgagccat

SEQ ID NO: 5098315 - DNA, 25 bp, Homo sapien
tcctccatgtacttaaataaactgg

SEQ ID NO: 5098316 - DNA, 25 bp, Homo sapien
ggtgtcctccatgtacttaaataaa

SEQ ID NO: 5098317 - DNA, 25 bp, Homo sapien
ggcaggtgtcctccatgtacttaaa

SEQ ID NO: 5098318 - DNA, 25 bp, Homo sapien
caaatgatccaaggcaggtgtcctc

SEQ ID NO: 5098319 - DNA, 25 bp, Homo sapien
tcacagaaaagacctttatccagta

SEQ ID NO: 5098320 - DNA, 25 bp, Homo sapien
tttgaacattctcacagaaaagacc

SEQ ID NO: 5098321 - DNA, 25 bp, Homo sapien
tctcacagaaaagacctttatccag

SEQ ID NO: 5098322 - DNA, 25 bp, Homo sapien
gctttgaacattctcacagaaaaga

SEQ ID NO: 5098323 - DNA, 25 bp, Homo sapien
ttttgaggacccacaagttctacca

SEQ ID NO: 5098324 - DNA, 25 bp, Homo sapien
tgggcctcctgagccgatactggca

SEQ ID NO: 5098325 - DNA, 25 bp, Homo sapien
aggagatgccagttttgtccctcag

SEQ ID NO: 5098326 - DNA, 25 bp, Homo sapien
gtttcccaacctttagcattatgtg

SEQ ID NO: 5098327 - DNA, 25 bp, Homo sapien
aacataccagtattccacacaagga

SEQ ID NO: 5098328 - DNA, 25 bp, Homo sapien
tagttattgacaaagctgctgctgt

SEQ ID NO: 5098329 - DNA, 25 bp, Homo sapien
aacagagtgtttatgtagccttcag

SEQ ID NO: 5098330 - DNA, 25 bp, Homo sapien
aatttgtgcttcctcaacataccag

SEQ ID NO: 5098331 - DNA, 25 bp, Homo sapien
tgcttcctcaaatggcagaaggaca

SEQ ID NO: 5098332 - DNA, 25 bp, Homo sapien
aagggccttcttgttgcttcctcaa

SEQ ID NO: 5098333 - DNA, 25 bp, Homo sapien
cttcttgttgcttcctcaaatggca

SEQ ID NO: 5098334 - DNA, 25 bp, Homo sapien
ttgcttcctcaaatggcagaaggac

SEQ ID NO: 5098335 - DNA, 25 bp, Homo sapien
aagttgaatgttgaggatgtaggat

SEQ ID NO: 5098336 - DNA, 25 bp, Homo sapien
gaacatcacatttccagttgttccc

SEQ ID NO: 5098337 - DNA, 25 bp, Homo sapien
aatataagctggctatcaggccgaa

SEQ ID NO: 5098338 - DNA, 25 bp, Homo sapien
gctatcaggccgaattatgctacat

SEQ ID NO: 5098339 - DNA, 25 bp, Homo sapien
tggtcaatgcaggagtacagaggcc

SEQ ID NO: 5098340 - DNA, 25 bp, Homo sapien
tccccacgagtgaggctgaagcttc

SEQ ID NO: 5098341 - DNA, 25 bp, Homo sapien
taaacaatcctcaatccaccttcgg

SEQ ID NO: 5098342 - DNA, 25 bp, Homo sapien
agctttctccatagcccagtcgtga

SEQ ID NO: 5098343 - DNA, 25 bp, Homo sapien
gctgctcttccccacaacttcaggc

SEQ ID NO: 5098344 - DNA, 25 bp, Homo sapien
gaggaacttgtgctgctcttcccca

SEQ ID NO: 5098345 - DNA, 25 bp, Homo sapien
ttgaggaacttgtgctgctcttccc

SEQ ID NO: 5098346 - DNA, 25 bp, Homo sapien
tgctcttccccacaacttcaggcat

SEQ ID NO: 5098347 - DNA, 25 bp, Homo sapien
tatccctgtttactatcattcccag

SEQ ID NO: 5098348 - DNA, 25 bp, Homo sapien
catgaagcagaagtatccctgttta

SEQ ID NO: 5098349 - DNA, 25 bp, Homo sapien
gcagaagtatccctgtttactatca

SEQ ID NO: 5098350 - DNA, 25 bp, Homo sapien
tgtttactatcattcccaggaaccc

SEQ ID NO: 5098351 - DNA, 25 bp, Homo sapien
tgatgtactccccatagataggaga

SEQ ID NO: 5098352 - DNA, 25 bp, Homo sapien
tgtactccccatagataggagacac

SEQ ID NO: 5098353 - DNA, 25 bp, Homo sapien
tcatgatgtactccccatagatagg

SEQ ID NO: 5098354 - DNA, 25 bp, Homo sapien
ttatgtcatgatgtactccccatag

SEQ ID NO: 5098355 - DNA, 25 bp, Homo sapien
tagagagacgtttccttttggtagc

SEQ ID NO: 5098356 - DNA, 25 bp, Homo sapien
ttcttttgcacagaagaaacagtag

SEQ ID NO: 5098357 - DNA, 25 bp, Homo sapien
tgcgaaagagaagcctcatatttta

SEQ ID NO: 5098358 - DNA, 25 bp, Homo sapien
gtttccttttggtagctgcctctga

SEQ ID NO: 5098359 - DNA, 25 bp, Homo sapien
tgatcttcagaacgccaaacctggg

SEQ ID NO: 5098360 - DNA, 25 bp, Homo sapien
cctgggctccgatgggtgtttagat

SEQ ID NO: 5098361 - DNA, 25 bp, Homo sapien
caattccacatggtgtcgcttggga

SEQ ID NO: 5098362 - DNA, 25 bp, Homo sapien
tgccttaagaacagaaaaacgtgtc

SEQ ID NO: 5098363 - DNA, 25 bp, Homo sapien
gtaagcctagaaacaaagaagctat

SEQ ID NO: 5098364 - DNA, 25 bp, Homo sapien
gcctagaaacaaagaagctattatg

SEQ ID NO: 5098365 - DNA, 25 bp, Homo sapien
tagaaacaaagaagctattatgcgc

SEQ ID NO: 5098366 - DNA, 25 bp, Homo sapien
gaaacaaagaagctattatgcgcat

SEQ ID NO: 5098367 - DNA, 25 bp, Homo sapien
tctcgatgaggtttcgttttgtctc

SEQ ID NO: 5098368 - DNA, 25 bp, Homo sapien
aatatctatctcgatgaggtttcgt

SEQ ID NO: 5098369 - DNA, 25 bp, Homo sapien
tatctatctcgatgaggttttcctg

SEQ ID NO: 5098370 - DNA, 25 bp, Homo sapien
ttttcactctgttgcaacttttctt

SEQ ID NO: 5098371 - DNA, 25 bp, Homo sapien
cacctcggctgcaaggcattttgta

SEQ ID NO: 5098372 - DNA, 25 bp, Homo sapien
tattaacatctcagctttgcagtca

SEQ ID NO: 5098373 - DNA, 25 bp, Homo sapien
cagtcaaggtttggcatgagagcat

SEQ ID NO: 5098374 - DNA, 25 bp, Homo sapien
aataaggacgctgaagtgccagccc

SEQ ID NO: 5098375 - DNA, 25 bp, Homo sapien
gcagtcgactgcctctcagaattac

SEQ ID NO: 5098376 - DNA, 25 bp, Homo sapien
tggcagtcgactgcctctcagaatt

SEQ ID NO: 5098377 - DNA, 25 bp, Homo sapien
gagctggcagtcgactgcctctcag

SEQ ID NO: 5098378 - DNA, 25 bp, Homo sapien
gtctgagctggcagtcgactgcctc

SEQ ID NO: 5098379 - DNA, 25 bp, Homo sapien
gtacttgggtggatgtggaatgtct

SEQ ID NO: 5098380 - DNA, 25 bp, Homo sapien
ctcactgtacttgggtggatgtgga

SEQ ID NO: 5098381 - DNA, 25 bp, Homo sapien
cttgggtggatgtggaatgtcttct

SEQ ID NO: 5098382 - DNA, 25 bp, Homo sapien
cactgtacttgggtggatgtggaat

SEQ ID NO: 5098383 - DNA, 25 bp, Homo sapien
agatagctctagccagtgctttctc

SEQ ID NO: 5098384 - DNA, 25 bp, Homo sapien
ccagtgctttctccaggtaaagaaa

SEQ ID NO: 5098385 - DNA, 25 bp, Homo sapien
tagccagtgctttctccaggtaaag

SEQ ID NO: 5098386 - DNA, 25 bp, Homo sapien
ctagccagtgctttctccaggtaaa

SEQ ID NO: 5098387 - DNA, 25 bp, Homo sapien
tttcgtgaagcttctttacattgta

SEQ ID NO: 5098388 - DNA, 25 bp, Homo sapien
tcgtgaagcttctttacattgtatg

SEQ ID NO: 5098389 - DNA, 25 bp, Homo sapien
gtgaagcttctttacattgtatgcc

SEQ ID NO: 5098390 - DNA, 25 bp, Homo sapien
tatttttcgtgaagcttctttacat

SEQ ID NO: 5098391 - DNA, 25 bp, Homo sapien
gaactctccattcagtaacagttta

SEQ ID NO: 5098392 - DNA, 25 bp, Homo sapien
ccactgaggcaggatgggaactctc

SEQ ID NO: 5098393 - DNA, 25 bp, Homo sapien
tttgattccactgaggcaggatggg

SEQ ID NO: 5098394 - DNA, 25 bp, Homo sapien
aacagtttagttccagcttgctgaa

SEQ ID NO: 5098395 - DNA, 25 bp, Homo sapien
tattcaattgcaacacagcagtaga

SEQ ID NO: 5098396 - DNA, 25 bp, Homo sapien
ctctgacatgaaagcagtagctgga

SEQ ID NO: 5098397 - DNA, 25 bp, Homo sapien
cataggatctgaagacgtagtctgc

SEQ ID NO: 5098398 - DNA, 25 bp, Homo sapien
tgatggtaggactaaacagagagcg

SEQ ID NO: 5098399 - DNA, 25 bp, Homo sapien
gtgtttccatagacctctattttct

SEQ ID NO: 5098400 - DNA, 25 bp, Homo sapien
tgtgtttccatagacctctattttc

SEQ ID NO: 5098401 - DNA, 25 bp, Homo sapien
gctgtttgtccagtaggtccatcaa

SEQ ID NO: 5098402 - DNA, 25 bp, Homo sapien
aatggtggtggtctctgcgcttccc

SEQ ID NO: 5098403 - DNA, 25 bp, Homo sapien
cgtgatgatacaaagatgttgggcc

SEQ ID NO: 5098404 - DNA, 25 bp, Homo sapien
ttgggcctgttgagggactaatcat

SEQ ID NO: 5098405 - DNA, 25 bp, Homo sapien
tccagtcatggccactctagatagg

SEQ ID NO: 5098406 - DNA, 25 bp, Homo sapien
ccatgacgaccggaagaatcttgga

SEQ ID NO: 5098407 - DNA, 25 bp, Homo sapien
tccaacacccatgacgaccggaaga

SEQ ID NO: 5098408 - DNA, 25 bp, Homo sapien
cactctagataggatgaacaatgac

SEQ ID NO: 5098409 - DNA, 25 bp, Homo sapien
ttcctttgccttctccttttctcac

SEQ ID NO: 5098410 - DNA, 25 bp, Homo sapien
ttccttcatccatccgaggtttttc

SEQ ID NO: 5098411 - DNA, 25 bp, Homo sapien
gcagttggagacttttacatttcct

SEQ ID NO: 5098412 - DNA, 25 bp, Homo sapien
agcagttggagacttttacatttcc

SEQ ID NO: 5098413 - DNA, 25 bp, Homo sapien
tcatccatccgaggtttttcctctc

SEQ ID NO: 5098414 - DNA, 25 bp, Homo sapien
cattcaggggttgactggactggat

SEQ ID NO: 5098415 - DNA, 25 bp, Homo sapien
aagggaaccgcttcagggtgctcat

SEQ ID NO: 5098416 - DNA, 25 bp, Homo sapien
tgcttgttgaggtgaagcaatctcc

SEQ ID NO: 5098417 - DNA, 25 bp, Homo sapien
aataacccatatatatcttgcttgt

SEQ ID NO: 5098418 - DNA, 25 bp, Homo sapien
cagttcagtagctggctttgtggca

SEQ ID NO: 5098419 - DNA, 25 bp, Homo sapien
ttgagaggccctaatgaatagctgg

SEQ ID NO: 5098420 - DNA, 25 bp, Homo sapien
ctagaacttgtggacatacaggagc

SEQ ID NO: 5098421 - DNA, 25 bp, Homo sapien
tctttagggatgaagtgctgcagtc

SEQ ID NO: 5098422 - DNA, 25 bp, Homo sapien
ctcaatctaatttgaggcttcttcc

SEQ ID NO: 5098423 - DNA, 25 bp, Homo sapien
gcccactatcacactgtggtgccag

SEQ ID NO: 5098424 - DNA, 25 bp, Homo sapien
cccactatcacactgtggtgccagg

SEQ ID NO: 5098425 - DNA, 25 bp, Homo sapien
ggtcttgtcacccatgtaggagtcc

SEQ ID NO: 5098426 - DNA, 25 bp, Homo sapien
cagggccatgcgcagcttgttgtag

SEQ ID NO: 5098427 - DNA, 25 bp, Homo sapien
gatgcccacatgcatggccagggta

SEQ ID NO: 5098428 - DNA, 25 bp, Homo sapien
gacaataccagtggtgcactcagag

SEQ ID NO: 5098429 - DNA, 25 bp, Homo sapien
tgttatcatgtcttaaagaatcgag

SEQ ID NO: 5098430 - DNA, 25 bp, Homo sapien
aaccctcacataaatttaaaggatg

SEQ ID NO: 5098431 - DNA, 25 bp, Homo sapien
aaaccaaagtctgttatcatgtctt

SEQ ID NO: 5098432 - DNA, 25 bp, Homo sapien
caaagtctgttatcatgtcttaaag

SEQ ID NO: 5098433 - DNA, 25 bp, Homo sapien
taaagttctattcctaatagtatga

SEQ ID NO: 5098434 - DNA, 25 bp, Homo sapien
tttgtagcatattaaagttctattc

SEQ ID NO: 5098435 - DNA, 25 bp, Homo sapien
tgtagcatattaaagttctattcct

SEQ ID NO: 5098436 - DNA, 25 bp, Homo sapien
tcctaatagtatgaacatcatgttc

SEQ ID NO: 5098437 - DNA, 25 bp, Homo sapien
gaactgctagttggatgagactgga

SEQ ID NO: 5098438 - DNA, 25 bp, Homo sapien
aactgggcagctttagcacttccag

SEQ ID NO: 5098439 - DNA, 25 bp, Homo sapien
ttccagagcttcagcagtagttgga

SEQ ID NO: 5098440 - DNA, 25 bp, Homo sapien
tagttggagatatggggccagacac

SEQ ID NO: 5098441 - DNA, 25 bp, Homo sapien
catccaatttgaagtctaaattttt

SEQ ID NO: 5098442 - DNA, 25 bp, Homo sapien
tgaatatatgtgctgtctgattttt

SEQ ID NO: 5098443 - DNA, 25 bp, Homo sapien
tatgtgctgtctgatttttgataaa

SEQ ID NO: 5098444 - DNA, 25 bp, Homo sapien
ttttctctgggaatttgaatatatg

SEQ ID NO: 5098445 - DNA, 25 bp, Homo sapien
tctatcagaattctctgccatccag

SEQ ID NO: 5098446 - DNA, 25 bp, Homo sapien
ctgagtgttctgtcctccatctatt

SEQ ID NO: 5098447 - DNA, 25 bp, Homo sapien
tttctgcctctatcagaattctctg

SEQ ID NO: 5098448 - DNA, 25 bp, Homo sapien
ttctgtcctccatctatttttttct

SEQ ID NO: 5098449 - DNA, 25 bp, Homo sapien
agactttaatattgttagacggtag

SEQ ID NO: 5098450 - DNA, 25 bp, Homo sapien
tgaggacgtttgtaaatttgagaca

SEQ ID NO: 5098451 - DNA, 25 bp, Homo sapien
ctgaggacgtttgtaaatttgagac

SEQ ID NO: 5098452 - DNA, 25 bp, Homo sapien
gatggctgccccaaggctgtttgaa

SEQ ID NO: 5098453 - DNA, 25 bp, Homo sapien
tgaagctggcgcgtttgaagctgcc

SEQ ID NO: 5098454 - DNA, 25 bp, Homo sapien
aagctgccgcgcgtgtttgaagctg

SEQ ID NO: 5098455 - DNA, 25 bp, Homo sapien
tgaagctgcggcatttgaagctgtc

SEQ ID NO: 5098456 - DNA, 25 bp, Homo sapien
gatttgattcagatctataattcat

SEQ ID NO: 5098457 - DNA, 25 bp, Homo sapien
actctgattttggcagtctccctga

SEQ ID NO: 5098458 - DNA, 25 bp, Homo sapien
tagatgaacagggaagctctccagg

SEQ ID NO: 5098459 - DNA, 25 bp, Homo sapien
caggtgcagacgtgacttggacagc

SEQ ID NO: 5098460 - DNA, 25 bp, Homo sapien
gacactggaccctctggagtaagct

SEQ ID NO: 5098461 - DNA, 25 bp, Homo sapien
gccccaggctgcgaatagatgaaca

SEQ ID NO: 5098462 - DNA, 25 bp, Homo sapien
cgggaagaagctctgtgcggtgtcg

SEQ ID NO: 5098463 - DNA, 25 bp, Homo sapien
tctgccctgcattgaggtgatcgtc

SEQ ID NO: 5098464 - DNA, 25 bp, Homo sapien
aagctctgtgcggtgtcgctggaga

SEQ ID NO: 5098465 - DNA, 25 bp, Homo sapien
ggtgatcgtcgagcctgacactcct

SEQ ID NO: 5098466 - DNA, 25 bp, Homo sapien
gcccgaaggcaccaagttcctgtac

SEQ ID NO: 5098467 - DNA, 25 bp, Homo sapien
ctgcccgaaggcaccaagttcctgt

SEQ ID NO: 5098468 - DNA, 25 bp, Homo sapien
tgcccgaaggcaccaagttcctgta

SEQ ID NO: 5098469 - DNA, 25 bp, Homo sapien
gggtactccaatcctgatcatgagt

SEQ ID NO: 5098470 - DNA, 25 bp, Homo sapien
ttatgggtactccaatcctgatcat

SEQ ID NO: 5098471 - DNA, 25 bp, Homo sapien
taaatatggcattatgggtactcca

SEQ ID NO: 5098472 - DNA, 25 bp, Homo sapien
tgggtactccaatcctgatcatgag

SEQ ID NO: 5098473 - DNA, 25 bp, Homo sapien
caacaagccattgagagccacagca

SEQ ID NO: 5098474 - DNA, 25 bp, Homo sapien
ctggaacttttggatcgaccttcaa

SEQ ID NO: 5098475 - DNA, 25 bp, Homo sapien
cacttccttgtgtaggtctctggaa

SEQ ID NO: 5098476 - DNA, 25 bp, Homo sapien
gagccacagcattgagaatcacaac

SEQ ID NO: 5098477 - DNA, 25 bp, Homo sapien
aggagatgccaggatcctgaagttc

SEQ ID NO: 5098478 - DNA, 25 bp, Homo sapien
gccaacgccctactgcagctttcat

SEQ ID NO: 5098479 - DNA, 25 bp, Homo sapien
ccaactgccaacgccctactgcagc

SEQ ID NO: 5098480 - DNA, 25 bp, Homo sapien
actgccaacgccctactgcagcttt

SEQ ID NO: 5098481 - DNA, 25 bp, Homo sapien
tgccaacgccctactgcagctttca

SEQ ID NO: 5098482 - DNA, 25 bp, Homo sapien
tgatttaattgacagaataaatgca

SEQ ID NO: 5098483 - DNA, 25 bp, Homo sapien
gatttaattgacagaataaatgcac

SEQ ID NO: 5098484 - DNA, 25 bp, Homo sapien
ctgatttaattgacagaataaatgc

SEQ ID NO: 5098485 - DNA, 25 bp, Homo sapien
cggctgttgcagagcatagaaactt

SEQ ID NO: 5098486 - DNA, 25 bp, Homo sapien
ggcacaatattgcaaagtgactctg

SEQ ID NO: 5098487 - DNA, 25 bp, Homo sapien
tatggataatgcaaacaagagagat

SEQ ID NO: 5098488 - DNA, 25 bp, Homo sapien
cacggccaagaaacgccaatatgga

SEQ ID NO: 5098489 - DNA, 25 bp, Homo sapien
ggtgatatatcctcttctattccaa

SEQ ID NO: 5098490 - DNA, 25 bp, Homo sapien
tagtgaagcaatataacattccagg

SEQ ID NO: 5098491 - DNA, 25 bp, Homo sapien
ctgtgcttagccatgaggtgatata

SEQ ID NO: 5098492 - DNA, 25 bp, Homo sapien
aaaacattgatctaagtctccctcc

SEQ ID NO: 5098493 - DNA, 25 bp, Homo sapien
ttaaaccaactttcagtgactattg

SEQ ID NO: 5098494 - DNA, 25 bp, Homo sapien
tgtcaactgcattcgaaaccaatac

SEQ ID NO: 5098495 - DNA, 25 bp, Homo sapien
aacagggccgtaagagagaaactca

SEQ ID NO: 5098496 - DNA, 25 bp, Homo sapien
cattcgaaaccaatactggataaac

SEQ ID NO: 5098497 - DNA, 25 bp, Homo sapien
tgccccgaaccagcaaattgcaaga

SEQ ID NO: 5098498 - DNA, 25 bp, Homo sapien
acacctacactttaatttgggcagc

SEQ ID NO: 5098499 - DNA, 25 bp, Homo sapien
gagcactgtgtcagctatctaggga

SEQ ID NO: 5098500 - DNA, 25 bp, Homo sapien
gctgtatcatagattatgccccgaa

SEQ ID NO: 5098501 - DNA, 25 bp, Homo sapien
cagggacacccttatactcaaattg

SEQ ID NO: 5098502 - DNA, 25 bp, Homo sapien
tcttttcctggtgtatggctaaaca

SEQ ID NO: 5098503 - DNA, 25 bp, Homo sapien
ccttgtgcagtgattagttgcctct

SEQ ID NO: 5098504 - DNA, 25 bp, Homo sapien
caaattgttcatgggtgtcttggag

SEQ ID NO: 5098505 - DNA, 25 bp, Homo sapien
gaatacaacatcactggcagctatg

SEQ ID NO: 5098506 - DNA, 25 bp, Homo sapien
catcactggcagctatgtttctaga

SEQ ID NO: 5098507 - DNA, 25 bp, Homo sapien
ttggagggggaatgaatacaacatc

SEQ ID NO: 5098508 - DNA, 25 bp, Homo sapien
agagcaaaacgtcctcttgaaagtt

SEQ ID NO: 5098509 - DNA, 25 bp, Homo sapien
caggagactaacagccaattgccca

SEQ ID NO: 5098510 - DNA, 25 bp, Homo sapien
ggaacattctttagtccatcaagat

SEQ ID NO: 5098511 - DNA, 25 bp, Homo sapien
tccatcaagatgactcaggagacta

SEQ ID NO: 5098512 - DNA, 25 bp, Homo sapien
ctttagtccatcaagatgactcagg

SEQ ID NO: 5098513 - DNA, 25 bp, Homo sapien
atccagcagctgaacatcttcttat

SEQ ID NO: 5098514 - DNA, 25 bp, Homo sapien
aatccagcagctgaacatcttctta

SEQ ID NO: 5098515 - DNA, 25 bp, Homo sapien
ctaattaaatccagcagctgaacat

SEQ ID NO: 5098516 - DNA, 25 bp, Homo sapien
ttaaatccagcagctgaacatcttc

SEQ ID NO: 5098517 - DNA, 25 bp, Homo sapien
gaaaccctgtgataatctgttccat

SEQ ID NO: 5098518 - DNA, 25 bp, Homo sapien
gggtcatccacttctaatgctggaa

SEQ ID NO: 5098519 - DNA, 25 bp, Homo sapien
ttacggctgcctctattctaacgag

SEQ ID NO: 5098520 - DNA, 25 bp, Homo sapien
cttggcagagaatagcattataatg

SEQ ID NO: 5098521 - DNA, 25 bp, Homo sapien
gagagtttcaaacagttttatgatc

SEQ ID NO: 5098522 - DNA, 25 bp, Homo sapien
gagtttcaaacagttttatgatcat

SEQ ID NO: 5098523 - DNA, 25 bp, Homo sapien
tgagagtttcaaacagttttatgat

SEQ ID NO: 5098524 - DNA, 25 bp, Homo sapien
ctttgagagtttcaaacagttttat

SEQ ID NO: 5098525 - DNA, 25 bp, Homo sapien
ctgggccgtgaagctgtctgcagct

SEQ ID NO: 5098526 - DNA, 25 bp, Homo sapien
acctgggccgtgaagctgtctgcag

SEQ ID NO: 5098527 - DNA, 25 bp, Homo sapien
ctgtgatgaaacctgggccgtgaag

SEQ ID NO: 5098528 - DNA, 25 bp, Homo sapien
atgaaacctgggccgtgaagctgtc

SEQ ID NO: 5098529 - DNA, 25 bp, Homo sapien
cgtcgggtggctaggccctttcttg

SEQ ID NO: 5098530 - DNA, 25 bp, Homo sapien
ggatataggtgataatgggatgcac

SEQ ID NO: 5098531 - DNA, 25 bp, Homo sapien
ggctttttgtgctggcattcgctaa

SEQ ID NO: 5098532 - DNA, 25 bp, Homo sapien
catcacctgagatgtaaatgctggc

SEQ ID NO: 5098533 - DNA, 25 bp, Homo sapien
tagtttcatcaattcttgaaaatta

SEQ ID NO: 5098534 - DNA, 25 bp, Homo sapien
ttcagttggtagtttcatcaattct

SEQ ID NO: 5098535 - DNA, 25 bp, Homo sapien
agttggtagtttcatcaattcttga

SEQ ID NO: 5098536 - DNA, 25 bp, Homo sapien
agtttcatcaattcttgaaaattac

SEQ ID NO: 5098537 - DNA, 25 bp, Homo sapien
tcagatctgaaatgttttatgtttc

SEQ ID NO: 5098538 - DNA, 25 bp, Homo sapien
ctgaagcgtgtgaatagccagggtt

SEQ ID NO: 5098539 - DNA, 25 bp, Homo sapien
agaagtaggattctggatggaagtt

SEQ ID NO: 5098540 - DNA, 25 bp, Homo sapien
gaagttgtgaactgaagcgtgtgaa

SEQ ID NO: 5098541 - DNA, 25 bp, Homo sapien
tttaggatgtttgaagtggttgtag

SEQ ID NO: 5098542 - DNA, 25 bp, Homo sapien
gtgagaagcatcttgtaggatgaag

SEQ ID NO: 5098543 - DNA, 25 bp, Homo sapien
gagagatttgacttggctcttgaag

SEQ ID NO: 5098544 - DNA, 25 bp, Homo sapien
gaaggcttattggaagcagagagat

SEQ ID NO: 5098545 - DNA, 25 bp, Homo sapien
tgagaagaatatggatagagtcagt

SEQ ID NO: 5098546 - DNA, 25 bp, Homo sapien
tcctgggccatagcagacttaaaac

SEQ ID NO: 5098547 - DNA, 25 bp, Homo sapien
tgggcctagtctgcaaactctgtgt

SEQ ID NO: 5098548 - DNA, 25 bp, Homo sapien
cctttaggtgtaagaggatgacatc

SEQ ID NO: 5098549 - DNA, 25 bp, Homo sapien
tcaacattggttagtcctttaggtg

SEQ ID NO: 5098550 - DNA, 25 bp, Homo sapien
caccttttcggatatttggatgaag

SEQ ID NO: 5098551 - DNA, 25 bp, Homo sapien
taacaccttttcggatatttggatg

SEQ ID NO: 5098552 - DNA, 25 bp, Homo sapien
aacaccttttcggatatttggatga

SEQ ID NO: 5098553 - DNA, 25 bp, Homo sapien
ccttttcggatatttggatgaagaa

SEQ ID NO: 5098554 - DNA, 25 bp, Homo sapien
ctcttgttcatgaagatttctagtc

SEQ ID NO: 5098555 - DNA, 25 bp, Homo sapien
tagggaagtggagttgggtacagtg

SEQ ID NO: 5098556 - DNA, 25 bp, Homo sapien
tcttctgctttggtagggaagtgga

SEQ ID NO: 5098557 - DNA, 25 bp, Homo sapien
gttcatgaagatttctagtcatcat

SEQ ID NO: 5098558 - DNA, 25 bp, Homo sapien
gcattagcatgagctgtccactccc

SEQ ID NO: 5098559 - DNA, 25 bp, Homo sapien
aaaccttgatgtttccaattgagcc

SEQ ID NO: 5098560 - DNA, 25 bp, Homo sapien
gtttccaattgagccatatgccagg

SEQ ID NO: 5098561 - DNA, 25 bp, Homo sapien
aagtggcattagcatgagctgtcca

SEQ ID NO: 5098562 - DNA, 25 bp, Homo sapien
aatcagcctataaggttcaagagaa

SEQ ID NO: 5098563 - DNA, 25 bp, Homo sapien
tataaattgcaagtaagctggacag

SEQ ID NO: 5098564 - DNA, 25 bp, Homo sapien
gatgaggtactgattggcaacatta

SEQ ID NO: 5098565 - DNA, 25 bp, Homo sapien
gcttggcctcaatctagctttttgg

SEQ ID NO: 5098566 - DNA, 25 bp, Homo sapien
gtaacaattggaataagggatataa

SEQ ID NO: 5098567 - DNA, 25 bp, Homo sapien
tggtaacaattggaataagggatat

SEQ ID NO: 5098568 - DNA, 25 bp, Homo sapien
ttggtaacaattggaataagggata

SEQ ID NO: 5098569 - DNA, 25 bp, Homo sapien
tgttggtaacaattggaataaggga

SEQ ID NO: 5098570 - DNA, 25 bp, Homo sapien
aaatacaccaaatgtggagaaatcg

SEQ ID NO: 5098571 - DNA, 25 bp, Homo sapien
tcgatccgatgcctgacctgtgaaa

SEQ ID NO: 5098572 - DNA, 25 bp, Homo sapien
gctgcttttagctgtatcgatccga

SEQ ID NO: 5098573 - DNA, 25 bp, Homo sapien
ccttgatggctgctaacactagaag

SEQ ID NO: 5098574 - DNA, 25 bp, Homo sapien
tgccgagcctctggataaattgtat

SEQ ID NO: 5098575 - DNA, 25 bp, Homo sapien
ccagggctcggatgatcaatgctca

SEQ ID NO: 5098576 - DNA, 25 bp, Homo sapien
tgctcctgctgaagtcacaagtgag

SEQ ID NO: 5098577 - DNA, 25 bp, Homo sapien
gaattcagcgctgccagctacagta

SEQ ID NO: 5098578 - DNA, 25 bp, Homo sapien
cagttcaccaataaggcctggtagg

SEQ ID NO: 5098579 - DNA, 25 bp, Homo sapien
tcttttccaacactagcagaatctt

SEQ ID NO: 5098580 - DNA, 25 bp, Homo sapien
cttttcctttgattaagcttgttag

SEQ ID NO: 5098581 - DNA, 25 bp, Homo sapien
gcttgttagatttcagacctccttg

SEQ ID NO: 5098582 - DNA, 25 bp, Homo sapien
agttagatgttctaaatcgaatgat

SEQ ID NO: 5098583 - DNA, 25 bp, Homo sapien
gcatccatcgacatttctgataatt

SEQ ID NO: 5098584 - DNA, 25 bp, Homo sapien
aaatagaagcatccatcgacatttc

SEQ ID NO: 5098585 - DNA, 25 bp, Homo sapien
ttaagaaactcaaatagaagcatcc

SEQ ID NO: 5098586 - DNA, 25 bp, Homo sapien
tttaagaaactcaaatagaagcatc

SEQ ID NO: 5098587 - DNA, 25 bp, Homo sapien
gcagaaacagtcatttcattttgaa

SEQ ID NO: 5098588 - DNA, 25 bp, Homo sapien
tttcattttgaatttgtggctgcat

SEQ ID NO: 5098589 - DNA, 25 bp, Homo sapien
ttctaaaactctcagaaaagcagaa

SEQ ID NO: 5098590 - DNA, 25 bp, Homo sapien
acaaagtacattagattttccttct

SEQ ID NO: 5098591 - DNA, 25 bp, Homo sapien
tgctgacagccttggatagaagctt

SEQ ID NO: 5098592 - DNA, 25 bp, Homo sapien
agctttccgactggcagttgaagca

SEQ ID NO: 5098593 - DNA, 25 bp, Homo sapien
cattgaaattccagttcaagtgtct

SEQ ID NO: 5098594 - DNA, 25 bp, Homo sapien
cataaatggaggcagaactttagaa

SEQ ID NO: 5098595 - DNA, 25 bp, Homo sapien
tttctttagtatcaagggacttata

SEQ ID NO: 5098596 - DNA, 25 bp, Homo sapien
caaagagcatgttgctcatctcagt

SEQ ID NO: 5098597 - DNA, 25 bp, Homo sapien
tatcaagggacttataacaaccaaa

SEQ ID NO: 5098598 - DNA, 25 bp, Homo sapien
aagagcatgttgctcatctcagtca

SEQ ID NO: 5098599 - DNA, 25 bp, Homo sapien
actgaaccaaccttgatatacacca

SEQ ID NO: 5098600 - DNA, 25 bp, Homo sapien
aaaacagaagggcatccttaagcca

SEQ ID NO: 5098601 - DNA, 25 bp, Homo sapien
ctctggtaaactgaaccaaccttga

SEQ ID NO: 5098602 - DNA, 25 bp, Homo sapien
ctggtaaactgaaccaaccttgata

SEQ ID NO: 5098603 - DNA, 25 bp, Homo sapien
gtgagctgtgaccatgtcactggac

SEQ ID NO: 5098604 - DNA, 25 bp, Homo sapien
ctgtgctcctagctacttagaaggc

SEQ ID NO: 5098605 - DNA, 25 bp, Homo sapien
gtgaccatgtcactggactccagct

SEQ ID NO: 5098606 - DNA, 25 bp, Homo sapien
cttcagtgagctgtgaccatgtcac

SEQ ID NO: 5098607 - DNA, 25 bp, Homo sapien
gtcctttttgccacgtaaagcaaca

SEQ ID NO: 5098608 - DNA, 25 bp, Homo sapien
cctttttgccacgtaaagcaacata

SEQ ID NO: 5098609 - DNA, 25 bp, Homo sapien
cagtgtactcagatctgtaaagtcc

SEQ ID NO: 5098610 - DNA, 25 bp, Homo sapien
acccagataatccagtgtactcaga

SEQ ID NO: 5098611 - DNA, 25 bp, Homo sapien
cagccaaaatcttcctaacagtaaa

SEQ ID NO: 5098612 - DNA, 25 bp, Homo sapien
gaactactaattcaactaatcctga

SEQ ID NO: 5098613 - DNA, 25 bp, Homo sapien
tatgatttaaaccacttagcattgg

SEQ ID NO: 5098614 - DNA, 25 bp, Homo sapien
taagtgttcttatgatttaaaccac

SEQ ID NO: 5098615 - DNA, 25 bp, Homo sapien
ctgccgctgcgacgaggcggagccc

SEQ ID NO: 5098616 - DNA, 25 bp, Homo sapien
taggacctgcctaacttctctccag

SEQ ID NO: 5098617 - DNA, 25 bp, Homo sapien
ctccagctgcgtcggcctcgcagtg

SEQ ID NO: 5098618 - DNA, 25 bp, Homo sapien
gaggcgggcccagcactcgagcctg

SEQ ID NO: 5098619 - DNA, 25 bp, Homo sapien
cgggcctcaggatcccccgtcgccg

SEQ ID NO: 5098620 - DNA, 25 bp, Homo sapien
gcctcaggatcccccgtcgccgggc

SEQ ID NO: 5098621 - DNA, 25 bp, Homo sapien
taacacgtcggacccgcttttggca

SEQ ID NO: 5098622 - DNA, 25 bp, Homo sapien
cctgcggaaggtaacgagaagcagc

SEQ ID NO: 5098623 - DNA, 25 bp, Homo sapien
agttctctctgcaccggcaaaaaga

SEQ ID NO: 5098624 - DNA, 25 bp, Homo sapien
aaccaaacgcggaagcagcgactct

SEQ ID NO: 5098625 - DNA, 25 bp, Homo sapien
tggaaatggaataggaagtttgtat

SEQ ID NO: 5098626 - DNA, 25 bp, Homo sapien
ctggaaatggaataggaagtttgta

SEQ ID NO: 5098627 - DNA, 25 bp, Homo sapien
ctaaatatatcaatccaaatcctcc

SEQ ID NO: 5098628 - DNA, 25 bp, Homo sapien
tatatcaatccaaatcctccagagc

SEQ ID NO: 5098629 - DNA, 25 bp, Homo sapien
ttcttgcccagtacccactgattgc

SEQ ID NO: 5098630 - DNA, 25 bp, Homo sapien
tccagagccaatcttcttgcccagt

SEQ ID NO: 5098631 - DNA, 25 bp, Homo sapien
tcaatctagcacttaataaccatag

SEQ ID NO: 5098632 - DNA, 25 bp, Homo sapien
tttcaagcaatttcaagcaagttca

SEQ ID NO: 5098633 - DNA, 25 bp, Homo sapien
ttttcaagcaatttcaagcaagttc

SEQ ID NO: 5098634 - DNA, 25 bp, Homo sapien
gaacagtgttgactatgtcattcaa

SEQ ID NO: 5098635 - DNA, 25 bp, Homo sapien
gcaaaaacatgatgtaatttcatat

SEQ ID NO: 5098636 - DNA, 25 bp, Homo sapien
ttagcatcacttttaatggaacagt

SEQ ID NO: 5098637 - DNA, 25 bp, Homo sapien
gaggaagtgatgagaaccatgataa

SEQ ID NO: 5098638 - DNA, 25 bp, Homo sapien
acagttacaacatttggaacacaca

SEQ ID NO: 5098639 - DNA, 25 bp, Homo sapien
catgtacaatgagctagacagagca

SEQ ID NO: 5098640 - DNA, 25 bp, Homo sapien
taccgaaaggccctggctactgatc

SEQ ID NO: 5098641 - DNA, 25 bp, Homo sapien
tactgatctcaaagctagaggacag

SEQ ID NO: 5098642 - DNA, 25 bp, Homo sapien
agtaaacgctgatcaagtgtctgct

SEQ ID NO: 5098643 - DNA, 25 bp, Homo sapien
aatgccaatgaagggccacatgctt

SEQ ID NO: 5098644 - DNA, 25 bp, Homo sapien
atgccaatgaagggccacatgcttc

SEQ ID NO: 5098645 - DNA, 25 bp, Homo sapien
ggtgtgatgccagtttcaatagggc

SEQ ID NO: 5098646 - DNA, 25 bp, Homo sapien
gggcagcatgcagaacgcagcaaaa

SEQ ID NO: 5098647 - DNA, 25 bp, Homo sapien
gtttcaatagggcataggtgccaat

SEQ ID NO: 5098648 - DNA, 25 bp, Homo sapien
tgcccatacccatctgctagcctgg

SEQ ID NO: 5098649 - DNA, 25 bp, Homo sapien
gctgcttaagtgctggaggcacttg

SEQ ID NO: 5098650 - DNA, 25 bp, Homo sapien
tcatctccactgaatgcatgctgct

SEQ ID NO: 5098651 - DNA, 25 bp, Homo sapien
gctctgctggagaacagaaatattc

SEQ ID NO: 5098652 - DNA, 25 bp, Homo sapien
gatctggctttgattgcacctggct

SEQ ID NO: 5098653 - DNA, 25 bp, Homo sapien
ggattgcaaattaaagacagtctcc

SEQ ID NO: 5098654 - DNA, 25 bp, Homo sapien
ggcatgctgggctcaataatactgc

SEQ ID NO: 5098655 - DNA, 25 bp, Homo sapien
tattctgagctagtcaaacaagtgg

SEQ ID NO: 5098656 - DNA, 25 bp, Homo sapien
gttcatttaactttgagcccttgcc

SEQ ID NO: 5098657 - DNA, 25 bp, Homo sapien
cacacatgtcgaagcttccgattgc

SEQ ID NO: 5098658 - DNA, 25 bp, Homo sapien
aatggaagctatgttctctatgcgc

SEQ ID NO: 5098659 - DNA, 25 bp, Homo sapien
tgaaataaatttgcgggaagctgcc

SEQ ID NO: 5098660 - DNA, 25 bp, Homo sapien
tactccacactaagcattggagaga

SEQ ID NO: 5098661 - DNA, 25 bp, Homo sapien
caaaagctttctgctagagtagaca

SEQ ID NO: 5098662 - DNA, 25 bp, Homo sapien
tcagaaggaacttaaaagtgctccc

SEQ ID NO: 5098663 - DNA, 25 bp, Homo sapien
tgccttaaggcctctatccatgtgc

SEQ ID NO: 5098664 - DNA, 25 bp, Homo sapien
ccagctgcatccattattgccttaa

SEQ ID NO: 5098665 - DNA, 25 bp, Homo sapien
gattagattccaaaactatgacatg

SEQ ID NO: 5098666 - DNA, 25 bp, Homo sapien
aaaagcagtaggcttcaagggaagg

SEQ ID NO: 5098667 - DNA, 25 bp, Homo sapien
ggaaggtggacttgaaatgagcaca

SEQ ID NO: 5098668 - DNA, 25 bp, Homo sapien
aatgagcacaaactgaatatgcaga

SEQ ID NO: 5098669 - DNA, 25 bp, Homo sapien
taacagacggagcaaaacatgtaac

SEQ ID NO: 5098670 - DNA, 25 bp, Homo sapien
aaaattatcaatccaacatccagca

SEQ ID NO: 5098671 - DNA, 25 bp, Homo sapien
aattaatggtcagcagacttgctgt

SEQ ID NO: 5098672 - DNA, 25 bp, Homo sapien
gatattgaagtacaaaagcctgtaa

SEQ ID NO: 5098673 - DNA, 25 bp, Homo sapien
tatagcacttaaaattatcttttcg

SEQ ID NO: 5098674 - DNA, 25 bp, Homo sapien
taaaattatcttttcgccttcattc

SEQ ID NO: 5098675 - DNA, 25 bp, Homo sapien
cttaaaattatcttttcgccttcat

SEQ ID NO: 5098676 - DNA, 25 bp, Homo sapien
agcacttaaaattatcttttcgcct

SEQ ID NO: 5098677 - DNA, 25 bp, Homo sapien
tacatgtcttgcatctttctctggt

SEQ ID NO: 5098678 - DNA, 25 bp, Homo sapien
cttttactacatgtcttgcatcttt

SEQ ID NO: 5098679 - DNA, 25 bp, Homo sapien
ttactacatgtcttgcatctttctc

SEQ ID NO: 5098680 - DNA, 25 bp, Homo sapien
actacatgtcttgcatctttctctg

SEQ ID NO: 5098681 - DNA, 25 bp, Homo sapien
cagggtaatagctggcaatacagaa

SEQ ID NO: 5098682 - DNA, 25 bp, Homo sapien
ctgataaggcaatagttacaaaaat

SEQ ID NO: 5098683 - DNA, 25 bp, Homo sapien
taacattaggtttactgataaggca

SEQ ID NO: 5098684 - DNA, 25 bp, Homo sapien
taacaacgtcaaaacagatgataac

SEQ ID NO: 5098685 - DNA, 25 bp, Homo sapien
ttttgcaactctctgataaaattta

SEQ ID NO: 5098686 - DNA, 25 bp, Homo sapien
tttgcaactctctgataaaatttaa

SEQ ID NO: 5098687 - DNA, 25 bp, Homo sapien
tacacttagggaactcttggtagct

SEQ ID NO: 5098688 - DNA, 25 bp, Homo sapien
cacatatatggaagtagcttgcttt

SEQ ID NO: 5098689 - DNA, 25 bp, Homo sapien
tagccgtcctatccaaatggtttac

SEQ ID NO: 5098690 - DNA, 25 bp, Homo sapien
aatatcaacactcactttagcaagc

SEQ ID NO: 5098691 - DNA, 25 bp, Homo sapien
tccataaaacagaggaattcctaaa

SEQ ID NO: 5098692 - DNA, 25 bp, Homo sapien
aatcaagttgtttgcgttctatcca

SEQ ID NO: 5098693 - DNA, 25 bp, Homo sapien
tgtttgcgttctatccactttttga

SEQ ID NO: 5098694 - DNA, 25 bp, Homo sapien
tgaattcagtcagaccagatccata

SEQ ID NO: 5098695 - DNA, 25 bp, Homo sapien
gcctgagatcttctgtaaatctatt

SEQ ID NO: 5098696 - DNA, 25 bp, Homo sapien
cctaattgcaggacagttgactttt

SEQ ID NO: 5098697 - DNA, 25 bp, Homo sapien
cattcggatacctaattgcaggaca

SEQ ID NO: 5098698 - DNA, 25 bp, Homo sapien
gatcttctgtaaatctattcctagt

SEQ ID NO: 5098699 - DNA, 25 bp, Homo sapien
cccaaaagtagatttgctgctttta

SEQ ID NO: 5098700 - DNA, 25 bp, Homo sapien
ttgtaacccaaaagtagatttgctg

SEQ ID NO: 5098701 - DNA, 25 bp, Homo sapien
aacccaaaagtagatttgctgcttt

SEQ ID NO: 5098702 - DNA, 25 bp, Homo sapien
gtaacccaaaagtagatttgctgct

SEQ ID NO: 5098703 - DNA, 25 bp, Homo sapien
tttcttaagacgtatcacttctgta

SEQ ID NO: 5098704 - DNA, 25 bp, Homo sapien
tcttaagacgtatcacttctgtaag

SEQ ID NO: 5098705 - DNA, 25 bp, Homo sapien
tcttttcttaagacgtatcacttct

SEQ ID NO: 5098706 - DNA, 25 bp, Homo sapien
aagacgtatcacttctgtaagtaca

SEQ ID NO: 5098707 - DNA, 25 bp, Homo sapien
ggtttgcatcagtttccagagagcc

SEQ ID NO: 5098708 - DNA, 25 bp, Homo sapien
gagagccttggaaaccatgctaaga

SEQ ID NO: 5098709 - DNA, 25 bp, Homo sapien
gatggcataagcacatctacaggcc

SEQ ID NO: 5098710 - DNA, 25 bp, Homo sapien
tacaggcctagaggtaacatatact

SEQ ID NO: 5098711 - DNA, 25 bp, Homo sapien
tcagaacaactttgtccgaggccag

SEQ ID NO: 5098712 - DNA, 25 bp, Homo sapien
taaccaggaaagattagtcaccaaa

SEQ ID NO: 5098713 - DNA, 25 bp, Homo sapien
tccatatgaagagggtatttaagcc

SEQ ID NO: 5098714 - DNA, 25 bp, Homo sapien
tctcatattttcaggactcccgtgt

SEQ ID NO: 5098715 - DNA, 25 bp, Homo sapien
ccttgtgggcatccaagctggtaaa

SEQ ID NO: 5098716 - DNA, 25 bp, Homo sapien
taggaaagtccataatctgcaagat

SEQ ID NO: 5098717 - DNA, 25 bp, Homo sapien
tactgtttgtggttcccattgggac

SEQ ID NO: 5098718 - DNA, 25 bp, Homo sapien
ttgtcccattatggccttttctagg

SEQ ID NO: 5098719 - DNA, 25 bp, Homo sapien
tataggagtaagcattagagagaaa

SEQ ID NO: 5098720 - DNA, 25 bp, Homo sapien
ataggagtaagcattagagagaaag

SEQ ID NO: 5098721 - DNA, 25 bp, Homo sapien
ctataggagtaagcattagagagaa

SEQ ID NO: 5098722 - DNA, 25 bp, Homo sapien
taggagtaagcattagagagaaaga

SEQ ID NO: 5098723 - DNA, 25 bp, Homo sapien
tcaacgtcacttcgtctggacaagg

SEQ ID NO: 5098724 - DNA, 25 bp, Homo sapien
tagccgaggatctcaacgtcacttc

SEQ ID NO: 5098725 - DNA, 25 bp, Homo sapien
ggaagtttcccacacaaccaccgca

SEQ ID NO: 5098726 - DNA, 25 bp, Homo sapien
accaccgcagcatgcagtagccgag

SEQ ID NO: 5098727 - DNA, 25 bp, Homo sapien
acatgatgaaatacttgaaaatttg

SEQ ID NO: 5098728 - DNA, 25 bp, Homo sapien
ctggtgcagtacatgatgaaatact

SEQ ID NO: 5098729 - DNA, 25 bp, Homo sapien
gtacatgatgaaatacttgaaaatt

SEQ ID NO: 5098730 - DNA, 25 bp, Homo sapien
gcagtacatgatgaaatacttgaaa

SEQ ID NO: 5098731 - DNA, 25 bp, Homo sapien
gctccctttaatgtatcccttcaga

SEQ ID NO: 5098732 - DNA, 25 bp, Homo sapien
agctccctttaatgtatcccttcag

SEQ ID NO: 5098733 - DNA, 25 bp, Homo sapien
ttagctccctttaatgtatcccttc

SEQ ID NO: 5098734 - DNA, 25 bp, Homo sapien
ctccctttaatgtatcccttcagac

SEQ ID NO: 5098735 - DNA, 25 bp, Homo sapien
caatgttaccttaatggattttatg

SEQ ID NO: 5098736 - DNA, 25 bp, Homo sapien
tacaatgttaccttaatggatttta

SEQ ID NO: 5098737 - DNA, 25 bp, Homo sapien
atgttaccttaatggattttatgtg

SEQ ID NO: 5098738 - DNA, 25 bp, Homo sapien
acaatgttaccttaatggattttat

SEQ ID NO: 5098739 - DNA, 25 bp, Homo sapien
gtattaagaactgatgccacactga

SEQ ID NO: 5098740 - DNA, 25 bp, Homo sapien
aatttttatgctagccgaatccagg

SEQ ID NO: 5098741 - DNA, 25 bp, Homo sapien
aactggctattctgtgctctatgca

SEQ ID NO: 5098742 - DNA, 25 bp, Homo sapien
taatatggacacatcaatcactgca

SEQ ID NO: 5098743 - DNA, 25 bp, Homo sapien
taggcagagtagcaacaatacacac

SEQ ID NO: 5098744 - DNA, 25 bp, Homo sapien
tacacacattgatccagcagcatgc

SEQ ID NO: 5098745 - DNA, 25 bp, Homo sapien
cataagggagatacagtgtcttggc

SEQ ID NO: 5098746 - DNA, 25 bp, Homo sapien
taaacaggtttgtgggatgctcaac

SEQ ID NO: 5098747 - DNA, 25 bp, Homo sapien
caaaagggtatgttctaatggtact

SEQ ID NO: 5098748 - DNA, 25 bp, Homo sapien
agttttatatgacacgacttgagaa

SEQ ID NO: 5098749 - DNA, 25 bp, Homo sapien
cgcccggccccatattcttgatgta

SEQ ID NO: 5098750 - DNA, 25 bp, Homo sapien
gacccaaggaagtctatctttatgc

SEQ ID NO: 5098751 - DNA, 25 bp, Homo sapien
tgactgggggagctcgtccaacaga

SEQ ID NO: 5098752 - DNA, 25 bp, Homo sapien
catttaagcactgactgggggagct

SEQ ID NO: 5098753 - DNA, 25 bp, Homo sapien
gaaggagcccatttaagcactgact

SEQ ID NO: 5098754 - DNA, 25 bp, Homo sapien
ggagcccatttaagcactgactggg

SEQ ID NO: 5098755 - DNA, 25 bp, Homo sapien
tatggtcctgtgaagattggtaagc

SEQ ID NO: 5098756 - DNA, 25 bp, Homo sapien
tgatgcttcatgcagccccttcaca

SEQ ID NO: 5098757 - DNA, 25 bp, Homo sapien
ttacaagacaatggaaaactcctgg

SEQ ID NO: 5098758 - DNA, 25 bp, Homo sapien
ggcactccaccaactgatagcagct

SEQ ID NO: 5098759 - DNA, 25 bp, Homo sapien
gagcacataccaaaaattgggctat

SEQ ID NO: 5098760 - DNA, 25 bp, Homo sapien
ctatgagcacataccaaaaattggg

SEQ ID NO: 5098761 - DNA, 25 bp, Homo sapien
cacataccaaaaattgggctatttc

SEQ ID NO: 5098762 - DNA, 25 bp, Homo sapien
cataccaaaaattgggctatttcac

SEQ ID NO: 5098763 - DNA, 25 bp, Homo sapien
tttgtggaaaagtccagtggtccta

SEQ ID NO: 5098764 - DNA, 25 bp, Homo sapien
tccatgagggttcaaaattttcttg

SEQ ID NO: 5098765 - DNA, 25 bp, Homo sapien
tcttgagggcttgatagtttggctt

SEQ ID NO: 5098766 - DNA, 25 bp, Homo sapien
tggtcctaaaggtattccatgaggg

SEQ ID NO: 5098767 - DNA, 25 bp, Homo sapien
ggctaagcctaaattgtcacaacac

SEQ ID NO: 5098768 - DNA, 25 bp, Homo sapien
tgaaacaaagggtctcccatggttc

SEQ ID NO: 5098769 - DNA, 25 bp, Homo sapien
gagatttgccctcccagctttattg

SEQ ID NO: 5098770 - DNA, 25 bp, Homo sapien
cagaagataggaacagcacaaaggg

SEQ ID NO: 5098771 - DNA, 25 bp, Homo sapien
tttttcgattaacctattgtgtgcc

SEQ ID NO: 5098772 - DNA, 25 bp, Homo sapien
ttccatgttgcacaggactcagcgc

SEQ ID NO: 5098773 - DNA, 25 bp, Homo sapien
tgtgtgccttgttgacttgctttgt

SEQ ID NO: 5098774 - DNA, 25 bp, Homo sapien
ttgcacaggactcagcgcttctctc

SEQ ID NO: 5098775 - DNA, 25 bp, Homo sapien
agtgggttcaaatcaatagcctaag

SEQ ID NO: 5098776 - DNA, 25 bp, Homo sapien
gggttcaaatcaatagcctaagctt

SEQ ID NO: 5098777 - DNA, 25 bp, Homo sapien
gtgggttcaaatcaatagcctaagc

SEQ ID NO: 5098778 - DNA, 25 bp, Homo sapien
tgggttcaaatcaatagcctaagct

SEQ ID NO: 5098779 - DNA, 25 bp, Homo sapien
ctgtgcattaaacagcaaagagttg

SEQ ID NO: 5098780 - DNA, 25 bp, Homo sapien
acagcaaagagttggcatcgcacat

SEQ ID NO: 5098781 - DNA, 25 bp, Homo sapien
tccaccttgcactgagcaaacatca

SEQ ID NO: 5098782 - DNA, 25 bp, Homo sapien
ctgagcaaacatcagagcaacagca

SEQ ID NO: 5098783 - DNA, 25 bp, Homo sapien
caaggtgataccctatcccactggg

SEQ ID NO: 5098784 - DNA, 25 bp, Homo sapien
tgaccgtcctcacactaacaaggtg

SEQ ID NO: 5098785 - DNA, 25 bp, Homo sapien
tcccagcctgtactactgaggtggt

SEQ ID NO: 5098786 - DNA, 25 bp, Homo sapien
caggtagagccctgttgaccgtcct

SEQ ID NO: 5098787 - DNA, 25 bp, Homo sapien
cattcaaaggttcttgagactcttg

SEQ ID NO: 5098788 - DNA, 25 bp, Homo sapien
tcttcactaagagtaaactgggaaa

SEQ ID NO: 5098789 - DNA, 25 bp, Homo sapien
tctaagtctgtgatccccgtgctga

SEQ ID NO: 5098790 - DNA, 25 bp, Homo sapien
gacttcttgaatatatctggactgg

SEQ ID NO: 5098791 - DNA, 25 bp, Homo sapien
cagagaaaaaataaagcaagaaata

SEQ ID NO: 5098792 - DNA, 25 bp, Homo sapien
tcagagaaaaaataaagcaagaaat

SEQ ID NO: 5098793 - DNA, 25 bp, Homo sapien
tatcaaaaggaattttggtatcatc

SEQ ID NO: 5098794 - DNA, 25 bp, Homo sapien
agaatacaacatttcggtgaagagc

SEQ ID NO: 5098795 - DNA, 25 bp, Homo sapien
tcggtgaagagctggaaacttaaaa

SEQ ID NO: 5098796 - DNA, 25 bp, Homo sapien
tacaacatttcggtgaagagctgga

SEQ ID NO: 5098797 - DNA, 25 bp, Homo sapien
tgccgtctgtactttgccaatggag

SEQ ID NO: 5098798 - DNA, 25 bp, Homo sapien
aatggagaacttaggcagaggcatc

SEQ ID NO: 5098799 - DNA, 25 bp, Homo sapien
gcttcataggtttacccgaggtgga

SEQ ID NO: 5098800 - DNA, 25 bp, Homo sapien
cactgttagtgattcagaccagaac

SEQ ID NO: 5098801 - DNA, 25 bp, Homo sapien
gagtcaatagtgatcctctcttttg

SEQ ID NO: 5098802 - DNA, 25 bp, Homo sapien
tcaagacttttttccgctaacacaa

SEQ ID NO: 5098803 - DNA, 25 bp, Homo sapien
aatctaaaatctgttgagtcaatag

SEQ ID NO: 5098804 - DNA, 25 bp, Homo sapien
taacacaacataggaagtattcctg

SEQ ID NO: 5098805 - DNA, 25 bp, Homo sapien
gacggtaccattcctgatcaagtgt

SEQ ID NO: 5098806 - DNA, 25 bp, Homo sapien
caaggctgctaaggttgtagactac

SEQ ID NO: 5098807 - DNA, 25 bp, Homo sapien
taccctgcaggacccatatatagaa

SEQ ID NO: 5098808 - DNA, 25 bp, Homo sapien
tcagggctgcccatggatacaaaaa

SEQ ID NO: 5098809 - DNA, 25 bp, Homo sapien
ctcggttcaccgcaataatgatagt

SEQ ID NO: 5098810 - DNA, 25 bp, Homo sapien
ggttcaccgcaataatgatagttat

SEQ ID NO: 5098811 - DNA, 25 bp, Homo sapien
ttcaccgcaataatgatagttattt

SEQ ID NO: 5098812 - DNA, 25 bp, Homo sapien
tcggttcaccgcaataatgatagtt

SEQ ID NO: 5098813 - DNA, 25 bp, Homo sapien
gagctgaccatggtatgacatctga

SEQ ID NO: 5098814 - DNA, 25 bp, Homo sapien
ccataaatatagaggtagaccccag

SEQ ID NO: 5098815 - DNA, 25 bp, Homo sapien
tacagtgaaataggtagccagacca

SEQ ID NO: 5098816 - DNA, 25 bp, Homo sapien
tagaccccaggcatcctactatgct

SEQ ID NO: 5098817 - DNA, 25 bp, Homo sapien
ttggccatagttctatgaaatgtaa

SEQ ID NO: 5098818 - DNA, 25 bp, Homo sapien
tatgttgatgccagccttagtgaaa

SEQ ID NO: 5098819 - DNA, 25 bp, Homo sapien
gaaacttacgctgtagtccagtaca

SEQ ID NO: 5098820 - DNA, 25 bp, Homo sapien
ccaaattgatcttaagcagttacac

SEQ ID NO: 5098821 - DNA, 25 bp, Homo sapien
gaaaggcttattctacagtgtatgg

SEQ ID NO: 5098822 - DNA, 25 bp, Homo sapien
tagctgctaattagcacaggaatcg

SEQ ID NO: 5098823 - DNA, 25 bp, Homo sapien
caggaatcgtggaacaggtaactca

SEQ ID NO: 5098824 - DNA, 25 bp, Homo sapien
aatcttctcagattagtgtgctcag

SEQ ID NO: 5098825 - DNA, 25 bp, Homo sapien
catgttctcgactataaaatggctg

SEQ ID NO: 5098826 - DNA, 25 bp, Homo sapien
tattgtttcattaggctgtgaactt

SEQ ID NO: 5098827 - DNA, 25 bp, Homo sapien
gagaattcagacctacacccatata

SEQ ID NO: 5098828 - DNA, 25 bp, Homo sapien
taactctgaagctctgcaattagtg

SEQ ID NO: 5098829 - DNA, 25 bp, Homo sapien
taagggtatcaatcctttgtccaat

SEQ ID NO: 5098830 - DNA, 25 bp, Homo sapien
tagtacacaatataggatgctaagg

SEQ ID NO: 5098831 - DNA, 25 bp, Homo sapien
catttggtcctgtgggcagataccc

SEQ ID NO: 5098832 - DNA, 25 bp, Homo sapien
tggctacacatgaggtgactatgtt

SEQ ID NO: 5098833 - DNA, 25 bp, Homo sapien
gtggaattgctatagttactctgtg

SEQ ID NO: 5098834 - DNA, 25 bp, Homo sapien
tgtacacccacagttacaatatctt

SEQ ID NO: 5098835 - DNA, 25 bp, Homo sapien
cacccacagttacaatatcttctag

SEQ ID NO: 5098836 - DNA, 25 bp, Homo sapien
ctgtacacccacagttacaatatct

SEQ ID NO: 5098837 - DNA, 25 bp, Homo sapien
tacacccacagttacaatatcttct

SEQ ID NO: 5098838 - DNA, 25 bp, Homo sapien
taaaggtttgagaagcgccgctgtc

SEQ ID NO: 5098839 - DNA, 25 bp, Homo sapien
taagagagcctcttgcagcgtagct

SEQ ID NO: 5098840 - DNA, 25 bp, Homo sapien
tggttgctttctagctaagagagcc

SEQ ID NO: 5098841 - DNA, 25 bp, Homo sapien
cggagaagtctgtgacgggctagga

SEQ ID NO: 5098842 - DNA, 25 bp, Homo sapien
gtcgaaaaccgtgtatgagggattc

SEQ ID NO: 5098843 - DNA, 25 bp, Homo sapien
cgaaaaccgtgtatgagggattcat

SEQ ID NO: 5098844 - DNA, 25 bp, Homo sapien
cagaaccggtcgaaaaccgtgtatg

SEQ ID NO: 5098845 - DNA, 25 bp, Homo sapien
cggtcgaaaaccgtgtatgagggat

SEQ ID NO: 5098846 - DNA, 25 bp, Homo sapien
tgtgtttctccggacttcgagccat

SEQ ID NO: 5098847 - DNA, 25 bp, Homo sapien
caggtctagagcttttctgtgtttc

SEQ ID NO: 5098848 - DNA, 25 bp, Homo sapien
tgacggaagcgagcctgttgcgcca

SEQ ID NO: 5098849 - DNA, 25 bp, Homo sapien
acttcgagccatggcggtgacggaa

SEQ ID NO: 5098850 - DNA, 25 bp, Homo sapien
tcccgcagagcgccacttggcctgg

SEQ ID NO: 5098851 - DNA, 25 bp, Homo sapien
ctcccgcagagcgccacttggcctg

SEQ ID NO: 5098852 - DNA, 25 bp, Homo sapien
cccgcagagcgccacttggcctggc

SEQ ID NO: 5098853 - DNA, 25 bp, Homo sapien
gctcctgggacaattgaggctagaa

SEQ ID NO: 5098854 - DNA, 25 bp, Homo sapien
gatcttggtcagtcagtcctgtgga

SEQ ID NO: 5098855 - DNA, 25 bp, Homo sapien
cagaatcatcgaaagggctcctggg

SEQ ID NO: 5098856 - DNA, 25 bp, Homo sapien
gacagagtgctacaacgtccaggct

SEQ ID NO: 5098857 - DNA, 25 bp, Homo sapien
ttccaacttactggatatttggttg

SEQ ID NO: 5098858 - DNA, 25 bp, Homo sapien
tatttggttgtctcctatttctagg

SEQ ID NO: 5098859 - DNA, 25 bp, Homo sapien
ggttgtctcctatttctaggaacat

SEQ ID NO: 5098860 - DNA, 25 bp, Homo sapien
aacttactggatatttggttgtctc

SEQ ID NO: 5098861 - DNA, 25 bp, Homo sapien
ggcagaggctgggaccgccgccggg

SEQ ID NO: 5098862 - DNA, 25 bp, Homo sapien
gcagttgtagccgatgctgccgcag

SEQ ID NO: 5098863 - DNA, 25 bp, Homo sapien
cacttgctggtaccgccggtgtggc

SEQ ID NO: 5098864 - DNA, 25 bp, Homo sapien
cgtggccggaggagcacttgctggt

SEQ ID NO: 5098865 - DNA, 25 bp, Homo sapien
cagggtcccgataactcgggcagca

SEQ ID NO: 5098866 - DNA, 25 bp, Homo sapien
gggtcccgataactcgggcagcacc

SEQ ID NO: 5098867 - DNA, 25 bp, Homo sapien
aacagggtcccgataactcgggcag

SEQ ID NO: 5098868 - DNA, 25 bp, Homo sapien
caacagggtcccgataactcgggca

SEQ ID NO: 5098869 - DNA, 25 bp, Homo sapien
gtcaacagccacttcatcttctgac

SEQ ID NO: 5098870 - DNA, 25 bp, Homo sapien
ttttttatgcagttcatacatattc

SEQ ID NO: 5098871 - DNA, 25 bp, Homo sapien
gtcatggcctgtagcgtaccagccc

SEQ ID NO: 5098872 - DNA, 25 bp, Homo sapien
gcctgtagcgtaccagcccaggatg

SEQ ID NO: 5098873 - DNA, 25 bp, Homo sapien
atggcctgtagcgtaccagcccagg

SEQ ID NO: 5098874 - DNA, 25 bp, Homo sapien
ggtgtgaacatcactcccatggtcc

SEQ ID NO: 5098875 - DNA, 25 bp, Homo sapien
cgatgcgttcagtgtcatagtatgc

SEQ ID NO: 5098876 - DNA, 25 bp, Homo sapien
tgatcagctcaactccgatgcgttc

SEQ ID NO: 5098877 - DNA, 25 bp, Homo sapien
tcatgatcagctcaactccgatgcg

SEQ ID NO: 5098878 - DNA, 25 bp, Homo sapien
ggaagcggcccacagtattgtcagc

SEQ ID NO: 5098879 - DNA, 25 bp, Homo sapien
aggaagcggcccacagtattgtcag

SEQ ID NO: 5098880 - DNA, 25 bp, Homo sapien
caggaagcggcccacagtattgtca

SEQ ID NO: 5098881 - DNA, 25 bp, Homo sapien
gaagcggcccacagtattgtcagct

SEQ ID NO: 5098882 - DNA, 25 bp, Homo sapien
tgttgctgttgagcatggtctcaaa

SEQ ID NO: 5098883 - DNA, 25 bp, Homo sapien
tcggtactcggttaaccaggctcat

SEQ ID NO: 5098884 - DNA, 25 bp, Homo sapien
catcgggaactattttcggtactcg

SEQ ID NO: 5098885 - DNA, 25 bp, Homo sapien
ccatcaaaaggtcattgatgttgct

SEQ ID NO: 5098886 - DNA, 25 bp, Homo sapien
caatctgtgactgtgtgaggttggc

SEQ ID NO: 5098887 - DNA, 25 bp, Homo sapien
atctgtgactgtgtgaggttggcca

SEQ ID NO: 5098888 - DNA, 25 bp, Homo sapien
aatctgtgactgtgtgaggttggcc

SEQ ID NO: 5098889 - DNA, 25 bp, Homo sapien
gcaatctgtgactgtgtgaggttgg

SEQ ID NO: 5098890 - DNA, 25 bp, Homo sapien
gagtcacacacaactgactatctca

SEQ ID NO: 5098891 - DNA, 25 bp, Homo sapien
tagagtcacacacaactgactatct

SEQ ID NO: 5098892 - DNA, 25 bp, Homo sapien
ttagagtcacacacaactgactatc

SEQ ID NO: 5098893 - DNA, 25 bp, Homo sapien
gtcacacacaactgactatctcagt

SEQ ID NO: 5098894 - DNA, 25 bp, Homo sapien
tgggttttcagaggcatttggcaga

SEQ ID NO: 5098895 - DNA, 25 bp, Homo sapien
tgtgtttttcaaggtcctctcgcat

SEQ ID NO: 5098896 - DNA, 25 bp, Homo sapien
gctcctgccatagcaacaaatccat

SEQ ID NO: 5098897 - DNA, 25 bp, Homo sapien
tatatgtctcctgtgtttttcaagg

SEQ ID NO: 5098898 - DNA, 25 bp, Homo sapien
tatttggcctattgttaccaggtgg

SEQ ID NO: 5098899 - DNA, 25 bp, Homo sapien
cctattgttaccaggtggtccttgc

SEQ ID NO: 5098900 - DNA, 25 bp, Homo sapien
tggcctattgttaccaggtggtcct

SEQ ID NO: 5098901 - DNA, 25 bp, Homo sapien
agtatttggcctattgttaccaggt

SEQ ID NO: 5098902 - DNA, 25 bp, Homo sapien
caaaatgaaagagtctaaacttgta

SEQ ID NO: 5098903 - DNA, 25 bp, Homo sapien
tgaaagagtctaaacttgtaaatat

SEQ ID NO: 5098904 - DNA, 25 bp, Homo sapien
gaaagagtctaaacttgtaaatatc

SEQ ID NO: 5098905 - DNA, 25 bp, Homo sapien
aatcaaaatgaaagagtctaaactt

SEQ ID NO: 5098906 - DNA, 25 bp, Homo sapien
tccaatacatttgcgagggggtgtt

SEQ ID NO: 5098907 - DNA, 25 bp, Homo sapien
ctgcctccaatacatttgcgagggg

SEQ ID NO: 5098908 - DNA, 25 bp, Homo sapien
tgcctccaatacatttgcgaggggg

SEQ ID NO: 5098909 - DNA, 25 bp, Homo sapien
cctccaatacatttgcgagggggtg

SEQ ID NO: 5098910 - DNA, 25 bp, Homo sapien
gaagcttctggatacaatcaaggca

SEQ ID NO: 5098911 - DNA, 25 bp, Homo sapien
cagagcaagaaattcccaggagcac

SEQ ID NO: 5098912 - DNA, 25 bp, Homo sapien
gaaagcaaccttctctagagtcgag

SEQ ID NO: 5098913 - DNA, 25 bp, Homo sapien
gaaagcactgcaaccaacgagtcta

SEQ ID NO: 5098914 - DNA, 25 bp, Homo sapien
tcagattgcccctgaatctttgatg

SEQ ID NO: 5098915 - DNA, 25 bp, Homo sapien
cagctctgattgttattccttgaga

SEQ ID NO: 5098916 - DNA, 25 bp, Homo sapien
gtcccttgtcaaccagacagctctg

SEQ ID NO: 5098917 - DNA, 25 bp, Homo sapien
ggtcttcttgcaaccataatgtccc

SEQ ID NO: 5098918 - DNA, 25 bp, Homo sapien
gaaccacagaggtatagcgttctag

SEQ ID NO: 5098919 - DNA, 25 bp, Homo sapien
tagctcccctgggatttgagtggaa

SEQ ID NO: 5098920 - DNA, 25 bp, Homo sapien
gtccaaagactttttgaaccacaga

SEQ ID NO: 5098921 - DNA, 25 bp, Homo sapien
gaaatgttggcagataaaggcccct

SEQ ID NO: 5098922 - DNA, 25 bp, Homo sapien
ttctcaatacctccatccaggagcc

SEQ ID NO: 5098923 - DNA, 25 bp, Homo sapien
tcaatacctccatccaggagccagt

SEQ ID NO: 5098924 - DNA, 25 bp, Homo sapien
tttgcgagcctgagccttctcaata

SEQ ID NO: 5098925 - DNA, 25 bp, Homo sapien
tttttgcgagcctgagccttctcaa

SEQ ID NO: 5098926 - DNA, 25 bp, Homo sapien
taagtacacgatggactcagaaatt

SEQ ID NO: 5098927 - DNA, 25 bp, Homo sapien
tataagtacacgatggactcagaaa

SEQ ID NO: 5098928 - DNA, 25 bp, Homo sapien
ttataagtacacgatggactcagaa

SEQ ID NO: 5098929 - DNA, 25 bp, Homo sapien
agtacacgatggactcagaaatttg

SEQ ID NO: 5098930 - DNA, 25 bp, Homo sapien
gtgcacaagggatttcaatagcagt

SEQ ID NO: 5098931 - DNA, 25 bp, Homo sapien
tgcacaagggatttcaatagcagta

SEQ ID NO: 5098932 - DNA, 25 bp, Homo sapien
gcacaagggatttcaatagcagtaa

SEQ ID NO: 5098933 - DNA, 25 bp, Homo sapien
cacaagggatttcaatagcagtaac

SEQ ID NO: 5098934 - DNA, 25 bp, Homo sapien
tctaaactcccctgtggaattttga

SEQ ID NO: 5098935 - DNA, 25 bp, Homo sapien
ttgagtaataggattggcagcagcc

SEQ ID NO: 5098936 - DNA, 25 bp, Homo sapien
gaaagcaatgtctgtacactttagt

SEQ ID NO: 5098937 - DNA, 25 bp, Homo sapien
ttgtagtgactctcctttatcccta

SEQ ID NO: 5098938 - DNA, 25 bp, Homo sapien
tgtctgtacactttagtcctttgta

SEQ ID NO: 5098939 - DNA, 25 bp, Homo sapien
tttatccctacatgttctataggtg

SEQ ID NO: 5098940 - DNA, 25 bp, Homo sapien
gcacagacgtgtttggcacccatga

SEQ ID NO: 5098941 - DNA, 25 bp, Homo sapien
ggttctgcgtaaccaggtttgctgt

SEQ ID NO: 5098942 - DNA, 25 bp, Homo sapien
aaagcttgtcatgtgccgggttctg

SEQ ID NO: 5098943 - DNA, 25 bp, Homo sapien
gacgtgtttggcacccatgagacac

SEQ ID NO: 5098944 - DNA, 25 bp, Homo sapien
ggaaggcgcacggaatcgccgccac

SEQ ID NO: 5098945 - DNA, 25 bp, Homo sapien
aaggcgcacggaatcgccgccacca

SEQ ID NO: 5098946 - DNA, 25 bp, Homo sapien
gaaggcgcacggaatcgccgccacc

SEQ ID NO: 5098947 - DNA, 25 bp, Homo sapien
tcgtcgtttactttgaaagcctgaa

SEQ ID NO: 5098948 - DNA, 25 bp, Homo sapien
aactctagcacccaagttcgctggc

SEQ ID NO: 5098949 - DNA, 25 bp, Homo sapien
caaagtgctgagttcgtcgtttact

SEQ ID NO: 5098950 - DNA, 25 bp, Homo sapien
ggattttggactctgccaaagtgct

SEQ ID NO: 5098951 - DNA, 25 bp, Homo sapien
ctcggccgactcctcggagcccgcg

SEQ ID NO: 5098952 - DNA, 25 bp, Homo sapien
gccagggcgcgggagcagctcggcc

SEQ ID NO: 5098953 - DNA, 25 bp, Homo sapien
cgcgggagcagctcggccgactcct

SEQ ID NO: 5098954 - DNA, 25 bp, Homo sapien
gggcgcgggagcagctcggccgact

SEQ ID NO: 5098955 - DNA, 25 bp, Homo sapien
tctggtactaactggcacagagctc

SEQ ID NO: 5098956 - DNA, 25 bp, Homo sapien
tctactgatttgagttggcctacct

SEQ ID NO: 5098957 - DNA, 25 bp, Homo sapien
tatgtatctgaaaacccagcgatga

SEQ ID NO: 5098958 - DNA, 25 bp, Homo sapien
gcctacctctatggccatggttgtt

SEQ ID NO: 5098959 - DNA, 25 bp, Homo sapien
ggatggcaggtattagatcattagc

SEQ ID NO: 5098960 - DNA, 25 bp, Homo sapien
gaaccttcaaggatggcaggtatta

SEQ ID NO: 5098961 - DNA, 25 bp, Homo sapien
ttttatccgaaccttcaaggatggc

SEQ ID NO: 5098962 - DNA, 25 bp, Homo sapien
caaggatggcaggtattagatcatt

SEQ ID NO: 5098963 - DNA, 25 bp, Homo sapien
tttaaggcagagtatctggcatgca

SEQ ID NO: 5098964 - DNA, 25 bp, Homo sapien
caattatgtacacctccttatgcag

SEQ ID NO: 5098965 - DNA, 25 bp, Homo sapien
gccatacaagcaggtaggagcctat

SEQ ID NO: 5098966 - DNA, 25 bp, Homo sapien
tcagttcatggctcagttatccaaa

SEQ ID NO: 5098967 - DNA, 25 bp, Homo sapien
accaccttctaagtcacgtcaccat

SEQ ID NO: 5098968 - DNA, 25 bp, Homo sapien
gcaccaccttctaagtcacgtcacc

SEQ ID NO: 5098969 - DNA, 25 bp, Homo sapien
caccttctaagtcacgtcaccatga

SEQ ID NO: 5098970 - DNA, 25 bp, Homo sapien
ccttctaagtcacgtcaccatgaga

SEQ ID NO: 5098971 - DNA, 25 bp, Homo sapien
tgaaaactagatgaggcatagaccc

SEQ ID NO: 5098972 - DNA, 25 bp, Homo sapien
cagtagtccctgtgccctaatatta

SEQ ID NO: 5098973 - DNA, 25 bp, Homo sapien
tcttcagtcaccatagctttttagg

SEQ ID NO: 5098974 - DNA, 25 bp, Homo sapien
ttttatctaactgaccttgaaagca

SEQ ID NO: 5098975 - DNA, 25 bp, Homo sapien
agcaactacaaaattgccaaatact

SEQ ID NO: 5098976 - DNA, 25 bp, Homo sapien
actacaaaattgccaaatactcttc

SEQ ID NO: 5098977 - DNA, 25 bp, Homo sapien
gcaactacaaaattgccaaatactc

SEQ ID NO: 5098978 - DNA, 25 bp, Homo sapien
caactacaaaattgccaaatactct

SEQ ID NO: 5098979 - DNA, 25 bp, Homo sapien
ggaataatgataattgcaaatattg

SEQ ID NO: 5098980 - DNA, 25 bp, Homo sapien
ctggaataatgataattgcaaatat

SEQ ID NO: 5098981 - DNA, 25 bp, Homo sapien
taatgataattgcaaatattgccat

SEQ ID NO: 5098982 - DNA, 25 bp, Homo sapien
aataatgataattgcaaatattgcc

SEQ ID NO: 5098983 - DNA, 25 bp, Homo sapien
cctggactcgtcttctatactcaca

SEQ ID NO: 5098984 - DNA, 25 bp, Homo sapien
tgacaccctgcctgaactctagcta

SEQ ID NO: 5098985 - DNA, 25 bp, Homo sapien
ccgctattatgctcctggtgcctgg

SEQ ID NO: 5098986 - DNA, 25 bp, Homo sapien
cctggacttggttctctgaccgcta

SEQ ID NO: 5098987 - DNA, 25 bp, Homo sapien
ggtccctcgagtgttccctctgaca

SEQ ID NO: 5098988 - DNA, 25 bp, Homo sapien
gatttcacctgacgcaataaacagt

SEQ ID NO: 5098989 - DNA, 25 bp, Homo sapien
gagcctatcctgactcagacatggg

SEQ ID NO: 5098990 - DNA, 25 bp, Homo sapien
tttgaagatgtccagtgctgggcaa

SEQ ID NO: 5098991 - DNA, 25 bp, Homo sapien
tgtgcaggaccttaaaatctcgaat

SEQ ID NO: 5098992 - DNA, 25 bp, Homo sapien
atctcgaatttggattgtgtgccca

SEQ ID NO: 5098993 - DNA, 25 bp, Homo sapien
gaggaagggagcacgtctcatgaaa

SEQ ID NO: 5098994 - DNA, 25 bp, Homo sapien
cacgtgggtgaaacgaaattgtgca

SEQ ID NO: 5098995 - DNA, 25 bp, Homo sapien
attggagtaaagagctgcggaagct

SEQ ID NO: 5098996 - DNA, 25 bp, Homo sapien
catctccatagggaaggtgtgatct

SEQ ID NO: 5098997 - DNA, 25 bp, Homo sapien
tgtgatctgaagtgagcccagatgg

SEQ ID NO: 5098998 - DNA, 25 bp, Homo sapien
gccagcatcattacagtagagcaga

SEQ ID NO: 5098999 - DNA, 25 bp, Homo sapien
gatttctgtttacctagcagccacc

SEQ ID NO: 5099000 - DNA, 25 bp, Homo sapien
tcaatcgatttctgtttacctagca

SEQ ID NO: 5099001 - DNA, 25 bp, Homo sapien
tcgatttctgtttacctagcagcca

SEQ ID NO: 5099002 - DNA, 25 bp, Homo sapien
tcaatcaatcgatttctgtttacct

SEQ ID NO: 5099003 - DNA, 25 bp, Homo sapien
tgcatgaataagtattagggcatct

SEQ ID NO: 5099004 - DNA, 25 bp, Homo sapien
tatgcatgaataagtattagggcat

SEQ ID NO: 5099005 - DNA, 25 bp, Homo sapien
ttatgcatgaataagtattagggca

SEQ ID NO: 5099006 - DNA, 25 bp, Homo sapien
catgaataagtattagggcatctct

SEQ ID NO: 5099007 - DNA, 25 bp, Homo sapien
taaagtccccgacctgttccacatc

SEQ ID NO: 5099008 - DNA, 25 bp, Homo sapien
catccacctgtttaaggcattttcc

SEQ ID NO: 5099009 - DNA, 25 bp, Homo sapien
tccacatccacctgtttaaggcatt

SEQ ID NO: 5099010 - DNA, 25 bp, Homo sapien
ccacctgtttaaggcattttccact

SEQ ID NO: 5099011 - DNA, 25 bp, Homo sapien
gtgtcggcgttgaacagattccata

SEQ ID NO: 5099012 - DNA, 25 bp, Homo sapien
tgcagtgacttctaagacatcttca

SEQ ID NO: 5099013 - DNA, 25 bp, Homo sapien
ccatataaattgcagtgacttctaa

SEQ ID NO: 5099014 - DNA, 25 bp, Homo sapien
tcagtgtcggcgttgaacagattcc

SEQ ID NO: 5099015 - DNA, 25 bp, Homo sapien
gaagcgaacagcaaacttggctgca

SEQ ID NO: 5099016 - DNA, 25 bp, Homo sapien
tcaccatcggaagcgaacagcaaac

SEQ ID NO: 5099017 - DNA, 25 bp, Homo sapien
ccatcggaagcgaacagcaaacttg

SEQ ID NO: 5099018 - DNA, 25 bp, Homo sapien
tcggaagcgaacagcaaacttggct

SEQ ID NO: 5099019 - DNA, 25 bp, Homo sapien
ggcctcaaatgagtccattcagcca

SEQ ID NO: 5099020 - DNA, 25 bp, Homo sapien
gcctcaaatgagtccattcagccat

SEQ ID NO: 5099021 - DNA, 25 bp, Homo sapien
tggcctcaaatgagtccattcagcc

SEQ ID NO: 5099022 - DNA, 25 bp, Homo sapien
gagtgaatctgtaataatccatgac

SEQ ID NO: 5099023 - DNA, 25 bp, Homo sapien
cagagttcaattcagcagtctggag

SEQ ID NO: 5099024 - DNA, 25 bp, Homo sapien
tttgaggtttaatggagagtgtcgc

SEQ ID NO: 5099025 - DNA, 25 bp, Homo sapien
gtgtcgcaggttcatcagagttcaa

SEQ ID NO: 5099026 - DNA, 25 bp, Homo sapien
caacacaaacgctgtctgaaataca

SEQ ID NO: 5099027 - DNA, 25 bp, Homo sapien
gctgacaaatctggcaacacaaacg

SEQ ID NO: 5099028 - DNA, 25 bp, Homo sapien
ctgcttagtgaatttttggctgaca

SEQ ID NO: 5099029 - DNA, 25 bp, Homo sapien
tagctactttacatagcctagtagg

SEQ ID NO: 5099030 - DNA, 25 bp, Homo sapien
cctgcttgtgagtccaaagtatgca

SEQ ID NO: 5099031 - DNA, 25 bp, Homo sapien
gtaatacttcaacattccctgctga

SEQ ID NO: 5099032 - DNA, 25 bp, Homo sapien
gtccaataaattgctcaggtgtaaa

SEQ ID NO: 5099033 - DNA, 25 bp, Homo sapien
catcctggataataactgtcttgga

SEQ ID NO: 5099034 - DNA, 25 bp, Homo sapien
tatccagatggcgtccaaggccaag

SEQ ID NO: 5099035 - DNA, 25 bp, Homo sapien
ggagagaagtcctgctgccttttta

SEQ ID NO: 5099036 - DNA, 25 bp, Homo sapien
tgtaagtctcccacatctctttaac

SEQ ID NO: 5099037 - DNA, 25 bp, Homo sapien
tctggttggcctcccatctctgcat

SEQ ID NO: 5099038 - DNA, 25 bp, Homo sapien
gaggagtgggaaggcacttcagatc

SEQ ID NO: 5099039 - DNA, 25 bp, Homo sapien
gggacttctctctcgctggatagca

SEQ ID NO: 5099040 - DNA, 25 bp, Homo sapien
tagcaccaaagcgaaaggcaatttc

SEQ ID NO: 5099041 - DNA, 25 bp, Homo sapien
aagctaatagttaagggcagggact

SEQ ID NO: 5099042 - DNA, 25 bp, Homo sapien
accaatccatgattaaaattcctgc

SEQ ID NO: 5099043 - DNA, 25 bp, Homo sapien
aaccaatccatgattaaaattcctg

SEQ ID NO: 5099044 - DNA, 25 bp, Homo sapien
ccaatccatgattaaaattcctgct

SEQ ID NO: 5099045 - DNA, 25 bp, Homo sapien
tatacaaagcaaacactcaaccatg

SEQ ID NO: 5099046 - DNA, 25 bp, Homo sapien
cagcccttgcccctaatatacaaag

SEQ ID NO: 5099047 - DNA, 25 bp, Homo sapien
aaacactcaaccatgtcaaatggcc

SEQ ID NO: 5099048 - DNA, 25 bp, Homo sapien
cctttgcacgctttgtccccttctc

SEQ ID NO: 5099049 - DNA, 25 bp, Homo sapien
gaaaattcacttctcaactctgttg

SEQ ID NO: 5099050 - DNA, 25 bp, Homo sapien
taacatatcttctggactctccggt

SEQ ID NO: 5099051 - DNA, 25 bp, Homo sapien
tgatgaaaagtgagctaacatatct

SEQ ID NO: 5099052 - DNA, 25 bp, Homo sapien
ccttccactcttgcatagtagacag

SEQ ID NO: 5099053 - DNA, 25 bp, Homo sapien
tcagcaaagcaatagtttcaaacgt

SEQ ID NO: 5099054 - DNA, 25 bp, Homo sapien
tcacatcctagcctggcagtcagat

SEQ ID NO: 5099055 - DNA, 25 bp, Homo sapien
cttaagtgtcacatcctagcctggc

SEQ ID NO: 5099056 - DNA, 25 bp, Homo sapien
gcagtcagatgttttcagcaaagca

SEQ ID NO: 5099057 - DNA, 25 bp, Homo sapien
gcgacttgctgccaacttatcaaag

SEQ ID NO: 5099058 - DNA, 25 bp, Homo sapien
cagacaacagaatcagcggactatt

SEQ ID NO: 5099059 - DNA, 25 bp, Homo sapien
tggatgcatatgatcaagtctgagc

SEQ ID NO: 5099060 - DNA, 25 bp, Homo sapien
caataaagattgatagcgccttctc

SEQ ID NO: 5099061 - DNA, 25 bp, Homo sapien
acacttccttaatgcctcaccaatt

SEQ ID NO: 5099062 - DNA, 25 bp, Homo sapien
caggcatggccgtagccctggattt

SEQ ID NO: 5099063 - DNA, 25 bp, Homo sapien
aatgcctcaccaatttcatcatcaa

SEQ ID NO: 5099064 - DNA, 25 bp, Homo sapien
ggcatggccgtagccctggatttct

SEQ ID NO: 5099065 - DNA, 25 bp, Homo sapien
gctgacagtgctacccctcatgtgc

SEQ ID NO: 5099066 - DNA, 25 bp, Homo sapien
gctacccctcatgtgcaggtaaaag

SEQ ID NO: 5099067 - DNA, 25 bp, Homo sapien
acagtgctacccctcatgtgcaggt

SEQ ID NO: 5099068 - DNA, 25 bp, Homo sapien
acccctcatgtgcaggtaaaagctg

SEQ ID NO: 5099069 - DNA, 25 bp, Homo sapien
cggtgcctgcctgtggcaaccctac

SEQ ID NO: 5099070 - DNA, 25 bp, Homo sapien
atgatacttgtgaatcaaagcacat

SEQ ID NO: 5099071 - DNA, 25 bp, Homo sapien
ctatgatacttgtgaatcaaagcac

SEQ ID NO: 5099072 - DNA, 25 bp, Homo sapien
tatgatacttgtgaatcaaagcaca

SEQ ID NO: 5099073 - DNA, 25 bp, Homo sapien
cctgcaagttgcatacatgtccaga

SEQ ID NO: 5099074 - DNA, 25 bp, Homo sapien
gataaaatgggcctgcaagttgcat

SEQ ID NO: 5099075 - DNA, 25 bp, Homo sapien
gttgcatacatgtccagataaatca

SEQ ID NO: 5099076 - DNA, 25 bp, Homo sapien
ggaacagggcttatttgtaagacaa

SEQ ID NO: 5099077 - DNA, 25 bp, Homo sapien
tgaagatcagggaagaatttaggag

SEQ ID NO: 5099078 - DNA, 25 bp, Homo sapien
gccaggccactggattcataagtct

SEQ ID NO: 5099079 - DNA, 25 bp, Homo sapien
caatattcatctacatgcccagttg

SEQ ID NO: 5099080 - DNA, 25 bp, Homo sapien
atctacatgcccagttgccaggcca

SEQ ID NO: 5099081 - DNA, 25 bp, Homo sapien
cacgaatgataaactaaggcaagct

SEQ ID NO: 5099082 - DNA, 25 bp, Homo sapien
gctctagtatcagatcttcctgcca

SEQ ID NO: 5099083 - DNA, 25 bp, Homo sapien
ctatccacacaaataagggcctcat

SEQ ID NO: 5099084 - DNA, 25 bp, Homo sapien
tgatcatagtctaaacacacgaatg

SEQ ID NO: 5099085 - DNA, 25 bp, Homo sapien
ttgtctaatgctacctcctcctcag

SEQ ID NO: 5099086 - DNA, 25 bp, Homo sapien
gccttgtctaatgctacctcctcct

SEQ ID NO: 5099087 - DNA, 25 bp, Homo sapien
cttgtctaatgctacctcctcctca

SEQ ID NO: 5099088 - DNA, 25 bp, Homo sapien
tgtctaatgctacctcctcctcaga

SEQ ID NO: 5099089 - DNA, 25 bp, Homo sapien
ctttagtgacgagagcagtatcatc

SEQ ID NO: 5099090 - DNA, 25 bp, Homo sapien
tgttgtagtaaattaatatgcatcc

SEQ ID NO: 5099091 - DNA, 25 bp, Homo sapien
taggaagtacttaacacttgtttgc

SEQ ID NO: 5099092 - DNA, 25 bp, Homo sapien
cttgtttgctaataactttagtgac

SEQ ID NO: 5099093 - DNA, 25 bp, Homo sapien
tggtcgtttggaatgtggtgggaaa

SEQ ID NO: 5099094 - DNA, 25 bp, Homo sapien
gacaaggttgaagcagcctgaaaat

SEQ ID NO: 5099095 - DNA, 25 bp, Homo sapien
ttagacaaggttgaagcagcctgaa

SEQ ID NO: 5099096 - DNA, 25 bp, Homo sapien
aaaatactcagatggtggtcgtttg

SEQ ID NO: 5099097 - DNA, 25 bp, Homo sapien
ttcatcattcccgtattcatgacaa

SEQ ID NO: 5099098 - DNA, 25 bp, Homo sapien
tgattttagtccagagttcttttca

SEQ ID NO: 5099099 - DNA, 25 bp, Homo sapien
cattcccgtattcatgacaatccat

SEQ ID NO: 5099100 - DNA, 25 bp, Homo sapien
tttagtccagagttcttttcatcat

SEQ ID NO: 5099101 - DNA, 25 bp, Homo sapien
gcagctccctgtgttaagtaattca

SEQ ID NO: 5099102 - DNA, 25 bp, Homo sapien
taagaagaacctagatggccatgca

SEQ ID NO: 5099103 - DNA, 25 bp, Homo sapien
catgcacgaacccttaaaactgttg

SEQ ID NO: 5099104 - DNA, 25 bp, Homo sapien
gaaacctcctgggttgccatactag

SEQ ID NO: 5099105 - DNA, 25 bp, Homo sapien
ctgaaaggagcttgaggtcagaagc

SEQ ID NO: 5099106 - DNA, 25 bp, Homo sapien
cagcccataattgatagttgcccca

SEQ ID NO: 5099107 - DNA, 25 bp, Homo sapien
gacatctgaggcttattcccactgg

SEQ ID NO: 5099108 - DNA, 25 bp, Homo sapien
tacatcaaggctgcatctaattggg

SEQ ID NO: 5099109 - DNA, 25 bp, Homo sapien
aactgaggttatttggatggaatcc

SEQ ID NO: 5099110 - DNA, 25 bp, Homo sapien
caaatgctctcgatggatgtagtct

SEQ ID NO: 5099111 - DNA, 25 bp, Homo sapien
ggttcaggctgcacaccaagattta

SEQ ID NO: 5099112 - DNA, 25 bp, Homo sapien
tattgagctctatgcaaatctggga

SEQ ID NO: 5099113 - DNA, 25 bp, Homo sapien
tgaaagtaccagtgagcatctagcc

SEQ ID NO: 5099114 - DNA, 25 bp, Homo sapien
ttcataccatctgacaggccctcca

SEQ ID NO: 5099115 - DNA, 25 bp, Homo sapien
tgtctcctataggacttcataccat

SEQ ID NO: 5099116 - DNA, 25 bp, Homo sapien
tctctgtctcctataggacttcata

SEQ ID NO: 5099117 - DNA, 25 bp, Homo sapien
ttgtctctgtctcctataggacttc

SEQ ID NO: 5099118 - DNA, 25 bp, Homo sapien
tatagagccttgtgttacagaaccc

SEQ ID NO: 5099119 - DNA, 25 bp, Homo sapien
gggataggagcactgtcacttcccc

SEQ ID NO: 5099120 - DNA, 25 bp, Homo sapien
ggaatccaggtattgtccctcagag

SEQ ID NO: 5099121 - DNA, 25 bp, Homo sapien
gagtgtgtcccgaactacaggaagc

SEQ ID NO: 5099122 - DNA, 25 bp, Homo sapien
tggatcctgcttaccccgatagtat

SEQ ID NO: 5099123 - DNA, 25 bp, Homo sapien
ccccgatagtatagtgtagctctca

SEQ ID NO: 5099124 - DNA, 25 bp, Homo sapien
ccggtgctttctccgactgtttcct

SEQ ID NO: 5099125 - DNA, 25 bp, Homo sapien
acaaacatgcacactagagatgccc

SEQ ID NO: 5099126 - DNA, 25 bp, Homo sapien
ggtcataatagaaaggcgcaaagag

SEQ ID NO: 5099127 - DNA, 25 bp, Homo sapien
taatagaaaggcgcaaagagttctt

SEQ ID NO: 5099128 - DNA, 25 bp, Homo sapien
atagaaaggcgcaaagagttcttta

SEQ ID NO: 5099129 - DNA, 25 bp, Homo sapien
tcataatagaaaggcgcaaagagtt

SEQ ID NO: 5099130 - DNA, 25 bp, Homo sapien
tgaatcccgcccaaatatattaatt

SEQ ID NO: 5099131 - DNA, 25 bp, Homo sapien
ccttttgtatactgccacctggatg

SEQ ID NO: 5099132 - DNA, 25 bp, Homo sapien
acctccttttgtatactgccacctg

SEQ ID NO: 5099133 - DNA, 25 bp, Homo sapien
acctggatggccgatggtaccgaaa

SEQ ID NO: 5099134 - DNA, 25 bp, Homo sapien
tagagcctggaatttgagtgtcgct

SEQ ID NO: 5099135 - DNA, 25 bp, Homo sapien
tgtcgctgtccacggtcctgatcgt

SEQ ID NO: 5099136 - DNA, 25 bp, Homo sapien
tttgtagaagtgtggagttagagcc

SEQ ID NO: 5099137 - DNA, 25 bp, Homo sapien
gtcctgatcgtcctgttgctgtttc

SEQ ID NO: 5099138 - DNA, 25 bp, Homo sapien
cttgaattgatttccgacaaggcat

SEQ ID NO: 5099139 - DNA, 25 bp, Homo sapien
agccaatcatctttgtccagatggg

SEQ ID NO: 5099140 - DNA, 25 bp, Homo sapien
gataaaatatttagtctgccaaagc

SEQ ID NO: 5099141 - DNA, 25 bp, Homo sapien
gacctcccaattccagccagttttg

SEQ ID NO: 5099142 - DNA, 25 bp, Homo sapien
aagatatgcatgtttcagaactgag

SEQ ID NO: 5099143 - DNA, 25 bp, Homo sapien
gctgataacatctatatttgacatt

SEQ ID NO: 5099144 - DNA, 25 bp, Homo sapien
aatccccttttaagcaatgcagcca

SEQ ID NO: 5099145 - DNA, 25 bp, Homo sapien
atctccagtagcaactaagatatgc

SEQ ID NO: 5099146 - DNA, 25 bp, Homo sapien
tatacttcagttctattgccaacat

SEQ ID NO: 5099147 - DNA, 25 bp, Homo sapien
atacttcagttctattgccaacatg

SEQ ID NO: 5099148 - DNA, 25 bp, Homo sapien
attatacttcagttctattgccaac

SEQ ID NO: 5099149 - DNA, 25 bp, Homo sapien
tacttcagttctattgccaacatga

SEQ ID NO: 5099150 - DNA, 25 bp, Homo sapien
tgtgggatcatctgtgcagagcaaa

SEQ ID NO: 5099151 - DNA, 25 bp, Homo sapien
gtgggatcatctgtgcagagcaaac

SEQ ID NO: 5099152 - DNA, 25 bp, Homo sapien
actgtgggatcatctgtgcagagca

SEQ ID NO: 5099153 - DNA, 25 bp, Homo sapien
ctgtgggatcatctgtgcagagcaa

SEQ ID NO: 5099154 - DNA, 25 bp, Homo sapien
tctaaaccaatttgggccagccgtc

SEQ ID NO: 5099155 - DNA, 25 bp, Homo sapien
ttgggccagccgtctcttgtcctca

SEQ ID NO: 5099156 - DNA, 25 bp, Homo sapien
tcttgtcctcattcaaacactcctt

SEQ ID NO: 5099157 - DNA, 25 bp, Homo sapien
tgtcctcattcaaacactcctttgc

SEQ ID NO: 5099158 - DNA, 25 bp, Homo sapien
tttgcaatcagttttcagctcctgg

SEQ ID NO: 5099159 - DNA, 25 bp, Homo sapien
gaaatctgtttcatatttgcaatca

SEQ ID NO: 5099160 - DNA, 25 bp, Homo sapien
gccattcacattgcagctactcttt

SEQ ID NO: 5099161 - DNA, 25 bp, Homo sapien
gggttcaagtcctgtagtgaaatct

SEQ ID NO: 5099162 - DNA, 25 bp, Homo sapien
cagctgttgcctgccttgtgttgcc

SEQ ID NO: 5099163 - DNA, 25 bp, Homo sapien
tgttgcctggacttgtggatgccaa

SEQ ID NO: 5099164 - DNA, 25 bp, Homo sapien
tcccaccagccattgccaaggatgg

SEQ ID NO: 5099165 - DNA, 25 bp, Homo sapien
cggagaagttggcttttgtctgtct

SEQ ID NO: 5099166 - DNA, 25 bp, Homo sapien
tggcaagaataaatacttcctcggt

SEQ ID NO: 5099167 - DNA, 25 bp, Homo sapien
ccttatatggcaagaaatacagtac

SEQ ID NO: 5099168 - DNA, 25 bp, Homo sapien
gaagctataccttatatggcaagaa

SEQ ID NO: 5099169 - DNA, 25 bp, Homo sapien
gcagcaaagttggcaagaataaata

SEQ ID NO: 5099170 - DNA, 25 bp, Homo sapien
agtcagtagcctttggcagtgatag

SEQ ID NO: 5099171 - DNA, 25 bp, Homo sapien
gtcagtagcctttggcagtgatagc

SEQ ID NO: 5099172 - DNA, 25 bp, Homo sapien
tcagtagcctttggcagtgatagct

SEQ ID NO: 5099173 - DNA, 25 bp, Homo sapien
tagtcagtagcctttggcagtgata

SEQ ID NO: 5099174 - DNA, 25 bp, Homo sapien
gtactcctttgccagtgaagtgcat

SEQ ID NO: 5099175 - DNA, 25 bp, Homo sapien
gggctaatttgattgtgcgggaaca

SEQ ID NO: 5099176 - DNA, 25 bp, Homo sapien
attgtgcgggaacaatagcactgta

SEQ ID NO: 5099177 - DNA, 25 bp, Homo sapien
caatagcactgtactcctttgccag

SEQ ID NO: 5099178 - DNA, 25 bp, Homo sapien
gacggcaactggttcgtacatctga

SEQ ID NO: 5099179 - DNA, 25 bp, Homo sapien
ctattagttacaatggtcacagctg

SEQ ID NO: 5099180 - DNA, 25 bp, Homo sapien
cacgcaaacattgaagacggcaact

SEQ ID NO: 5099181 - DNA, 25 bp, Homo sapien
gtacatctgaccagatgaactggtc

SEQ ID NO: 5099182 - DNA, 25 bp, Homo sapien
tcagtgggtcccagcccggattggg

SEQ ID NO: 5099183 - DNA, 25 bp, Homo sapien
gccatcagatggtttccaagtccaa

SEQ ID NO: 5099184 - DNA, 25 bp, Homo sapien
gaaagagggctgagtttccagtcaa

SEQ ID NO: 5099185 - DNA, 25 bp, Homo sapien
agaccctgaggggacaagcttccct

SEQ ID NO: 5099186 - DNA, 25 bp, Homo sapien
aaatgccattctagcctaccctgtg

SEQ ID NO: 5099187 - DNA, 25 bp, Homo sapien
gagccctgtaccagccactatagag

SEQ ID NO: 5099188 - DNA, 25 bp, Homo sapien
cagtcagttccagtgagctagagat

SEQ ID NO: 5099189 - DNA, 25 bp, Homo sapien
ctaccaaccccaggatcatagaggg

SEQ ID NO: 5099190 - DNA, 25 bp, Homo sapien
caagcttaagataatcttttcacca

SEQ ID NO: 5099191 - DNA, 25 bp, Homo sapien
gaagtatttagagttgataatttcg

SEQ ID NO: 5099192 - DNA, 25 bp, Homo sapien
tccaagcttaagataatcttttcac

SEQ ID NO: 5099193 - DNA, 25 bp, Homo sapien
ttgataatttcgaaggtccctttca

SEQ ID NO: 5099194 - DNA, 25 bp, Homo sapien
ggggcaggttcttaactgctttcaa

SEQ ID NO: 5099195 - DNA, 25 bp, Homo sapien
ccaagaactccacggtagggggcag

SEQ ID NO: 5099196 - DNA, 25 bp, Homo sapien
accagtggccttggggacgcaccca

SEQ ID NO: 5099197 - DNA, 25 bp, Homo sapien
agaaagatctgaagaccagtggcct

SEQ ID NO: 5099198 - DNA, 25 bp, Homo sapien
gcggaggcgttcttctcaagtaaga

SEQ ID NO: 5099199 - DNA, 25 bp, Homo sapien
aggcggaggcgttcttctcaagtaa

SEQ ID NO: 5099200 - DNA, 25 bp, Homo sapien
ggctccaaaacttttcaattcctga

SEQ ID NO: 5099201 - DNA, 25 bp, Homo sapien
ccaacactttgtgcaggagaaagtc

SEQ ID NO: 5099202 - DNA, 25 bp, Homo sapien
gaaagtcctcgaactggctccaaaa

SEQ ID NO: 5099203 - DNA, 25 bp, Homo sapien
aattcctgacaaatgcactggcccc

SEQ ID NO: 5099204 - DNA, 25 bp, Homo sapien
agagccgcaaaaatacaatggacag

SEQ ID NO: 5099205 - DNA, 25 bp, Homo sapien
tattccggtaagaaaagagccgcaa

SEQ ID NO: 5099206 - DNA, 25 bp, Homo sapien
tcaaagaatcttcaaggtgttcaga

SEQ ID NO: 5099207 - DNA, 25 bp, Homo sapien
taaacactagactggctattccggt

SEQ ID NO: 5099208 - DNA, 25 bp, Homo sapien
gctaatgcctcacaagcacaacata

SEQ ID NO: 5099209 - DNA, 25 bp, Homo sapien
gaacacaagccagagcctccgttaa

SEQ ID NO: 5099210 - DNA, 25 bp, Homo sapien
taaaatgacagattaggcgagagct

SEQ ID NO: 5099211 - DNA, 25 bp, Homo sapien
tgctgctttacgaacaaacgctgcg

SEQ ID NO: 5099212 - DNA, 25 bp, Homo sapien
gtttcctcaagcaacatcttttatt

SEQ ID NO: 5099213 - DNA, 25 bp, Homo sapien
tgcacactcactgcagaaatttaat

SEQ ID NO: 5099214 - DNA, 25 bp, Homo sapien
tctggtacaacatcgagtgaaataa

SEQ ID NO: 5099215 - DNA, 25 bp, Homo sapien
attagttgcacactcactgcagaaa

SEQ ID NO: 5099216 - DNA, 25 bp, Homo sapien
gtaattgtctttcatctaggagcaa

SEQ ID NO: 5099217 - DNA, 25 bp, Homo sapien
cagtaattgtctttcatctaggagc

SEQ ID NO: 5099218 - DNA, 25 bp, Homo sapien
aattgtctttcatctaggagcaact

SEQ ID NO: 5099219 - DNA, 25 bp, Homo sapien
ttcagtaattgtctttcatctagga

SEQ ID NO: 5099220 - DNA, 25 bp, Homo sapien
tgagtgtctgttacctcacatttgg

SEQ ID NO: 5099221 - DNA, 25 bp, Homo sapien
catgttccctcttgcttttcgtagc

SEQ ID NO: 5099222 - DNA, 25 bp, Homo sapien
cagttgtaggtgtagccctgtgagt

SEQ ID NO: 5099223 - DNA, 25 bp, Homo sapien
catttttaaattgaccagttgtagg

SEQ ID NO: 5099224 - DNA, 25 bp, Homo sapien
tggcttctttttggtcttgtacttg

SEQ ID NO: 5099225 - DNA, 25 bp, Homo sapien
ttgttagagaatccgaggaaaacca

SEQ ID NO: 5099226 - DNA, 25 bp, Homo sapien
tggtcttgtacttgttagagaatcc

SEQ ID NO: 5099227 - DNA, 25 bp, Homo sapien
tgtacttgttagagaatccgaggaa

SEQ ID NO: 5099228 - DNA, 25 bp, Homo sapien
ctttggcaaaccatgtgttattgct

SEQ ID NO: 5099229 - DNA, 25 bp, Homo sapien
gcagattctttggcaaaccatgtgt

SEQ ID NO: 5099230 - DNA, 25 bp, Homo sapien
ttctttggcaaaccatgtgttattg

SEQ ID NO: 5099231 - DNA, 25 bp, Homo sapien
gattctttggcaaaccatgtgttat

SEQ ID NO: 5099232 - DNA, 25 bp, Homo sapien
cagcccgtgggaagcatagacttgc

SEQ ID NO: 5099233 - DNA, 25 bp, Homo sapien
caagtccgaccctaggtgaaggaga

SEQ ID NO: 5099234 - DNA, 25 bp, Homo sapien
gctttcaggccatgatgcaagtccg

SEQ ID NO: 5099235 - DNA, 25 bp, Homo sapien
aaattcgcccatcggaggatcctgc

SEQ ID NO: 5099236 - DNA, 25 bp, Homo sapien
gctttttcagtatcttggattctga

SEQ ID NO: 5099237 - DNA, 25 bp, Homo sapien
aattgacagttttgacccaagttgc

SEQ ID NO: 5099238 - DNA, 25 bp, Homo sapien
gacataaatccagcaaatggacagc

SEQ ID NO: 5099239 - DNA, 25 bp, Homo sapien
tgagtaattccccatctgacataaa

SEQ ID NO: 5099240 - DNA, 25 bp, Homo sapien
cccattgtaactgaactgtttgcta

SEQ ID NO: 5099241 - DNA, 25 bp, Homo sapien
gctattagaacctgagtaagattta

SEQ ID NO: 5099242 - DNA, 25 bp, Homo sapien
gctttgcaatgccagcccattgtaa

SEQ ID NO: 5099243 - DNA, 25 bp, Homo sapien
tatctgaattgagcagatgctttgc

SEQ ID NO: 5099244 - DNA, 25 bp, Homo sapien
cagtcgttcgaaagtcctccgtgct

SEQ ID NO: 5099245 - DNA, 25 bp, Homo sapien
ggagtcttgccaatgttactgccaa

SEQ ID NO: 5099246 - DNA, 25 bp, Homo sapien
cgtgctcccagggtgtgcgccatat

SEQ ID NO: 5099247 - DNA, 25 bp, Homo sapien
tgttgtcctgggtcaaattcctcaa

SEQ ID NO: 5099248 - DNA, 25 bp, Homo sapien
aagctgaagggcacaagcatagagg

SEQ ID NO: 5099249 - DNA, 25 bp, Homo sapien
catagaggtggtagaaggatgatat

SEQ ID NO: 5099250 - DNA, 25 bp, Homo sapien
cacaagcatagaggtggtagaagga

SEQ ID NO: 5099251 - DNA, 25 bp, Homo sapien
gtggtagaaggatgatatctgctgc

SEQ ID NO: 5099252 - DNA, 25 bp, Homo sapien
gtactccaatcaaccacttctcatt

SEQ ID NO: 5099253 - DNA, 25 bp, Homo sapien
ttttagtactccaatcaaccacttc

SEQ ID NO: 5099254 - DNA, 25 bp, Homo sapien
ccaaattctatagctccctggtcca

SEQ ID NO: 5099255 - DNA, 25 bp, Homo sapien
aattctatagctccctggtccaagt

SEQ ID NO: 5099256 - DNA, 25 bp, Homo sapien
tcccgcagatacagaaagagtctcc

SEQ ID NO: 5099257 - DNA, 25 bp, Homo sapien
gctctctacattctctctgactgga

SEQ ID NO: 5099258 - DNA, 25 bp, Homo sapien
tgtgatgggcaacaagaactgctct

SEQ ID NO: 5099259 - DNA, 25 bp, Homo sapien
tacctggcacctttagggcaaagca

SEQ ID NO: 5099260 - DNA, 25 bp, Homo sapien
ttgggctgctaaaggctacatctgg

SEQ ID NO: 5099261 - DNA, 25 bp, Homo sapien
ggtcatgtcccatttgccagtgtga

SEQ ID NO: 5099262 - DNA, 25 bp, Homo sapien
tcctctattcgtggtgggttctgag

SEQ ID NO: 5099263 - DNA, 25 bp, Homo sapien
gggctcagcaacatgcatactaata

SEQ ID NO: 5099264 - DNA, 25 bp, Homo sapien
acaatgggatgtggtgaagacggac

SEQ ID NO: 5099265 - DNA, 25 bp, Homo sapien
ggcagacaatgggatgtggtgaaga

SEQ ID NO: 5099266 - DNA, 25 bp, Homo sapien
gacaatgggatgtggtgaagacgga

SEQ ID NO: 5099267 - DNA, 25 bp, Homo sapien
cagacaatgggatgtggtgaagacg

SEQ ID NO: 5099268 - DNA, 25 bp, Homo sapien
ctttcagtttagcccttgttcctgg

SEQ ID NO: 5099269 - DNA, 25 bp, Homo sapien
gtgtctttcagtttagcccttgttc

SEQ ID NO: 5099270 - DNA, 25 bp, Homo sapien
ctgtgtctttcagtttagcccttgt

SEQ ID NO: 5099271 - DNA, 25 bp, Homo sapien
aagtaattccaacgctctgtgtgag

SEQ ID NO: 5099272 - DNA, 25 bp, Homo sapien
gaaatcatcatgaagtaattccaac

SEQ ID NO: 5099273 - DNA, 25 bp, Homo sapien
aattccaacgctctgtgtgagataa

SEQ ID NO: 5099274 - DNA, 25 bp, Homo sapien
catgaagtaattccaacgctctgtg

SEQ ID NO: 5099275 - DNA, 25 bp, Homo sapien
gagataaaggcccaaactgcttttg

SEQ ID NO: 5099276 - DNA, 25 bp, Homo sapien
tcagagataaaggcccaaactgctt

SEQ ID NO: 5099277 - DNA, 25 bp, Homo sapien
tggggaaagattcaccacattatat

SEQ ID NO: 5099278 - DNA, 25 bp, Homo sapien
cattatattgggctgagggcatatt

SEQ ID NO: 5099279 - DNA, 25 bp, Homo sapien
ttccgggcagcagtgcactgacact

SEQ ID NO: 5099280 - DNA, 25 bp, Homo sapien
tattccgggcagcagtgcactgaca

SEQ ID NO: 5099281 - DNA, 25 bp, Homo sapien
catcccagtcaattccttctttatt

SEQ ID NO: 5099282 - DNA, 25 bp, Homo sapien
attccgggcagcagtgcactgacac

SEQ ID NO: 5099283 - DNA, 25 bp, Homo sapien
tcccacccaatgcattccagaggaa

SEQ ID NO: 5099284 - DNA, 25 bp, Homo sapien
ctgccagaagagttgacatagaact

SEQ ID NO: 5099285 - DNA, 25 bp, Homo sapien
gaagagttgacatagaactttctct

SEQ ID NO: 5099286 - DNA, 25 bp, Homo sapien
cattccagaggaactttaggatgcc

SEQ ID NO: 5099287 - DNA, 25 bp, Homo sapien
tctgcagatttatgaggaaaggtag

SEQ ID NO: 5099288 - DNA, 25 bp, Homo sapien
tggaccagagagtcaacacattcag

SEQ ID NO: 5099289 - DNA, 25 bp, Homo sapien
tgtgttatgatagtaatcaggccca

SEQ ID NO: 5099290 - DNA, 25 bp, Homo sapien
caggcccatttatgatatgttcagc

SEQ ID NO: 5099291 - DNA, 25 bp, Homo sapien
cattttgacttcctcggtcagcttt

SEQ ID NO: 5099292 - DNA, 25 bp, Homo sapien
ctttcattttgacttcctcggtcag

SEQ ID NO: 5099293 - DNA, 25 bp, Homo sapien
tcagggagcctcagtcctgtctgct

SEQ ID NO: 5099294 - DNA, 25 bp, Homo sapien
ttcattttgacttcctcggtcagct

SEQ ID NO: 5099295 - DNA, 25 bp, Homo sapien
tgcagaagaaagtcaagaatcctag

SEQ ID NO: 5099296 - DNA, 25 bp, Homo sapien
cagaagaaagtcaagaatcctagcc

SEQ ID NO: 5099297 - DNA, 25 bp, Homo sapien
gcagaagaaagtcaagaatcctagc

SEQ ID NO: 5099298 - DNA, 25 bp, Homo sapien
ctgcagaagaaagtcaagaatccta

SEQ ID NO: 5099299 - DNA, 25 bp, Homo sapien
tcttgaagcctaaactctgcttggt

SEQ ID NO: 5099300 - DNA, 25 bp, Homo sapien
cttcttgaagcctaaactctgcttg

SEQ ID NO: 5099301 - DNA, 25 bp, Homo sapien
cttgaagcctaaactctgcttggtg

SEQ ID NO: 5099302 - DNA, 25 bp, Homo sapien
ttcttgaagcctaaactctgcttgg

SEQ ID NO: 5099303 - DNA, 25 bp, Homo sapien
atttcatatttcagcagggctgagg

SEQ ID NO: 5099304 - DNA, 25 bp, Homo sapien
tttcatatttcagcagggctgagga

SEQ ID NO: 5099305 - DNA, 25 bp, Homo sapien
tatttcatatttcagcagggctgag

SEQ ID NO: 5099306 - DNA, 25 bp, Homo sapien
ccccatggcgaggtgtatgctgtag

SEQ ID NO: 5099307 - DNA, 25 bp, Homo sapien
taattgtgcaggcttactccaagaa

SEQ ID NO: 5099308 - DNA, 25 bp, Homo sapien
aagaccaaagcaagattacagaggc

SEQ ID NO: 5099309 - DNA, 25 bp, Homo sapien
attccatttgacatgcaagaccaaa

SEQ ID NO: 5099310 - DNA, 25 bp, Homo sapien
cctcatgtctaggaaggtgattaag

SEQ ID NO: 5099311 - DNA, 25 bp, Homo sapien
actgtcccagcattcaagatcttta

SEQ ID NO: 5099312 - DNA, 25 bp, Homo sapien
taagtcttcgtctagattcctcatg

SEQ ID NO: 5099313 - DNA, 25 bp, Homo sapien
gaatacaggatctggtgaagaagaa

SEQ ID NO: 5099314 - DNA, 25 bp, Homo sapien
tgcctgatactctgctatcccctat

SEQ ID NO: 5099315 - DNA, 25 bp, Homo sapien
gatactctgctatcccctatttcag

SEQ ID NO: 5099316 - DNA, 25 bp, Homo sapien
catcacatctgcctgatactctgct

SEQ ID NO: 5099317 - DNA, 25 bp, Homo sapien
gctatcccctatttcagtgacacta

SEQ ID NO: 5099318 - DNA, 25 bp, Homo sapien
tcaggcttgtattgagtgatccacc

SEQ ID NO: 5099319 - DNA, 25 bp, Homo sapien
gatgacctatttgtgcatgaacaga

SEQ ID NO: 5099320 - DNA, 25 bp, Homo sapien
tcaagcgtgtatggtgatgacctat

SEQ ID NO: 5099321 - DNA, 25 bp, Homo sapien
cgtgcctggttgtggttatgtaaca

SEQ ID NO: 5099322 - DNA, 25 bp, Homo sapien
cttgacaaatagtgcatcttcactt

SEQ ID NO: 5099323 - DNA, 25 bp, Homo sapien
ttttgcctaaggcttcgttcagcag

SEQ ID NO: 5099324 - DNA, 25 bp, Homo sapien
ggcaggaattctacagatactctta

SEQ ID NO: 5099325 - DNA, 25 bp, Homo sapien
gacttgggaggagcttagttatgcc

SEQ ID NO: 5099326 - DNA, 25 bp, Homo sapien
gttatctttccgcagatgaaaaggc

SEQ ID NO: 5099327 - DNA, 25 bp, Homo sapien
gactcatgtacaacagtagactggg

SEQ ID NO: 5099328 - DNA, 25 bp, Homo sapien
tgtctcaggtgcagaaggaacatga

SEQ ID NO: 5099329 - DNA, 25 bp, Homo sapien
tgccaacatccttgtaggagaccct

SEQ ID NO: 5099330 - DNA, 25 bp, Homo sapien
gaggtccagatcaagagaagttcca

SEQ ID NO: 5099331 - DNA, 25 bp, Homo sapien
tgcaagctttcttaaagccaggcgg

SEQ ID NO: 5099332 - DNA, 25 bp, Homo sapien
gattcctgtcttacgttgtggcaca

SEQ ID NO: 5099333 - DNA, 25 bp, Homo sapien
cacaggagctgaacagaggataagc

SEQ ID NO: 5099334 - DNA, 25 bp, Homo sapien
gaggataagccaccccagtgctaat

SEQ ID NO: 5099335 - DNA, 25 bp, Homo sapien
ttttttccttatgacatttagccat

SEQ ID NO: 5099336 - DNA, 25 bp, Homo sapien
tttttttccttatgacatttagcca

SEQ ID NO: 5099337 - DNA, 25 bp, Homo sapien
cataacagagcaattggacgtgaag

SEQ ID NO: 5099338 - DNA, 25 bp, Homo sapien
aattactgcatggtgtgcttctgac

SEQ ID NO: 5099339 - DNA, 25 bp, Homo sapien
taaagaccttctagtggaacagtgg

SEQ ID NO: 5099340 - DNA, 25 bp, Homo sapien
ggtaactggcctactccagtagaaa

SEQ ID NO: 5099341 - DNA, 25 bp, Homo sapien
ctactgccaacacaacttgcttctg

SEQ ID NO: 5099342 - DNA, 25 bp, Homo sapien
caacacaacttgcttctgctgtggc

SEQ ID NO: 5099343 - DNA, 25 bp, Homo sapien
gccaacacaacttgcttctgctgtg

SEQ ID NO: 5099344 - DNA, 25 bp, Homo sapien
acaacttgcttctgctgtggcacat

SEQ ID NO: 5099345 - DNA, 25 bp, Homo sapien
gacaattcaaccaacggactgtgga

SEQ ID NO: 5099346 - DNA, 25 bp, Homo sapien
gataatccatggtacacagaccctg

SEQ ID NO: 5099347 - DNA, 25 bp, Homo sapien
gaaagtaatgtatgcccagccacag

SEQ ID NO: 5099348 - DNA, 25 bp, Homo sapien
gaaaatgttggctacgtcagggaga

SEQ ID NO: 5099349 - DNA, 25 bp, Homo sapien
ggtcctgtcttttcagcgtcgagaa

SEQ ID NO: 5099350 - DNA, 25 bp, Homo sapien
gcctcttattaatgtcaatgaacat

SEQ ID NO: 5099351 - DNA, 25 bp, Homo sapien
tcttgaagccccagtacagatttag

SEQ ID NO: 5099352 - DNA, 25 bp, Homo sapien
gaagaattgggactgaatacttttc

SEQ ID NO: 5099353 - DNA, 25 bp, Homo sapien
gctcgtgttagttactaccacaggc

SEQ ID NO: 5099354 - DNA, 25 bp, Homo sapien
tgtaacccaggacaaattgctcgtg

SEQ ID NO: 5099355 - DNA, 25 bp, Homo sapien
ttataacccagagcaactaacatgt

SEQ ID NO: 5099356 - DNA, 25 bp, Homo sapien
aagttgtgttggttaattgccaggc

SEQ ID NO: 5099357 - DNA, 25 bp, Homo sapien
ccagcctttaatgtgatggatttta

SEQ ID NO: 5099358 - DNA, 25 bp, Homo sapien
atggtatctcattagggtgtgttta

SEQ ID NO: 5099359 - DNA, 25 bp, Homo sapien
ttgcaggaaaccagcctttaatgtg

SEQ ID NO: 5099360 - DNA, 25 bp, Homo sapien
ggtgtgtttatataacctgatacta

SEQ ID NO: 5099361 - DNA, 25 bp, Homo sapien
caatcaatcggtcaggaatgttcca

SEQ ID NO: 5099362 - DNA, 25 bp, Homo sapien
gtctccagctgtactttagaccaaa

SEQ ID NO: 5099363 - DNA, 25 bp, Homo sapien
tgttttacaatcaatcggtcaggaa

SEQ ID NO: 5099364 - DNA, 25 bp, Homo sapien
cagctgtactttagaccaaagaacg

SEQ ID NO: 5099365 - DNA, 25 bp, Homo sapien
gctcatatgcagcatgcaaatttat

SEQ ID NO: 5099366 - DNA, 25 bp, Homo sapien
taatttgtgctctcggtgattcacc

SEQ ID NO: 5099367 - DNA, 25 bp, Homo sapien
tgcccaagaggattaatagcatcat

SEQ ID NO: 5099368 - DNA, 25 bp, Homo sapien
tatgaccgccaggatattatgcacc

SEQ ID NO: 5099369 - DNA, 25 bp, Homo sapien
gctaagagtatcaccacacaatcat

SEQ ID NO: 5099370 - DNA, 25 bp, Homo sapien
ggctccagctaagagtatcaccaca

SEQ ID NO: 5099371 - DNA, 25 bp, Homo sapien
tatgtggctccagctaagagtatca

SEQ ID NO: 5099372 - DNA, 25 bp, Homo sapien
gttgccatatgtggctccagctaag

SEQ ID NO: 5099373 - DNA, 25 bp, Homo sapien
cctcagtgtctacagcccaggcaat

SEQ ID NO: 5099374 - DNA, 25 bp, Homo sapien
gcccaggcaatcagtgtcacatttt

SEQ ID NO: 5099375 - DNA, 25 bp, Homo sapien
cataggaggattggattctgcctgg

SEQ ID NO: 5099376 - DNA, 25 bp, Homo sapien
ttatgcaaggtggataatgacatag

SEQ ID NO: 5099377 - DNA, 25 bp, Homo sapien
aaagcttgatgtcttctagtttcct

SEQ ID NO: 5099378 - DNA, 25 bp, Homo sapien
gaatccagattctatataaagcttg

SEQ ID NO: 5099379 - DNA, 25 bp, Homo sapien
taaagcttgatgtcttctagtttcc

SEQ ID NO: 5099380 - DNA, 25 bp, Homo sapien
tggcatgacggtttagggagataca

SEQ ID NO: 5099381 - DNA, 25 bp, Homo sapien
tagggagatacaagaagatgatttt

SEQ ID NO: 5099382 - DNA, 25 bp, Homo sapien
taagtgtgagtggcatgacggttta

SEQ ID NO: 5099383 - DNA, 25 bp, Homo sapien
cggtttagggagatacaagaagatg

SEQ ID NO: 5099384 - DNA, 25 bp, Homo sapien
gcaaagcgatttgcttcccttcacg

SEQ ID NO: 5099385 - DNA, 25 bp, Homo sapien
agcgatttgcttcccttcacggcaa

SEQ ID NO: 5099386 - DNA, 25 bp, Homo sapien
tgcatgcaaagcgatttgcttccct

SEQ ID NO: 5099387 - DNA, 25 bp, Homo sapien
catgcaaagcgatttgcttcccttc

SEQ ID NO: 5099388 - DNA, 25 bp, Homo sapien
gtgtcataatcattccgtaagtctt

SEQ ID NO: 5099389 - DNA, 25 bp, Homo sapien
tgttctagaagtaaagtacttgttc

SEQ ID NO: 5099390 - DNA, 25 bp, Homo sapien
gtacttgttcttaggacaagtgtca

SEQ ID NO: 5099391 - DNA, 25 bp, Homo sapien
cttaggacaagtgtcataatcattc

SEQ ID NO: 5099392 - DNA, 25 bp, Homo sapien
gtacctgacaaggaatgcttttggc

SEQ ID NO: 5099393 - DNA, 25 bp, Homo sapien
tagtacctgacaaggaatgcttttg

SEQ ID NO: 5099394 - DNA, 25 bp, Homo sapien
caaattagtacctgacaaggaatgc

SEQ ID NO: 5099395 - DNA, 25 bp, Homo sapien
gtcacccaaattagtacctgacaag

SEQ ID NO: 5099396 - DNA, 25 bp, Homo sapien
atcagagcagtcagatttttcttct

SEQ ID NO: 5099397 - DNA, 25 bp, Homo sapien
catcagagcagtcagatttttcttc

SEQ ID NO: 5099398 - DNA, 25 bp, Homo sapien
ttcatcagagcagtcagatttttct

SEQ ID NO: 5099399 - DNA, 25 bp, Homo sapien
tcttcatcagagcagtcagattttt

SEQ ID NO: 5099400 - DNA, 25 bp, Homo sapien
catggcaattgactcacgggtcatg

SEQ ID NO: 5099401 - DNA, 25 bp, Homo sapien
catggaaacccaatcccattcaggt

SEQ ID NO: 5099402 - DNA, 25 bp, Homo sapien
tggcaattgactcacgggtcatgga

SEQ ID NO: 5099403 - DNA, 25 bp, Homo sapien
atggaaacccaatcccattcaggtt

SEQ ID NO: 5099404 - DNA, 25 bp, Homo sapien
caagccattggctacaacaaataaa

SEQ ID NO: 5099405 - DNA, 25 bp, Homo sapien
tgctcaccattatccaaaactccaa

SEQ ID NO: 5099406 - DNA, 25 bp, Homo sapien
aactccaacttgtaccaagccattg

SEQ ID NO: 5099407 - DNA, 25 bp, Homo sapien
gactatatgcacttttacatgcaga

SEQ ID NO: 5099408 - DNA, 25 bp, Homo sapien
agaggctgcacacaaaaattcataa

SEQ ID NO: 5099409 - DNA, 25 bp, Homo sapien
gaggctgcacacaaaaattcataag

SEQ ID NO: 5099410 - DNA, 25 bp, Homo sapien
tacatcatcttcaagaagtgatact

SEQ ID NO: 5099411 - DNA, 25 bp, Homo sapien
ttcaatacatcatcttcaagaagtg

SEQ ID NO: 5099412 - DNA, 25 bp, Homo sapien
cttggagacattgatcttttgcaaa

SEQ ID NO: 5099413 - DNA, 25 bp, Homo sapien
gacattgatcttttgcaaatctgag

SEQ ID NO: 5099414 - DNA, 25 bp, Homo sapien
gggtacttggagacattgatctttt

SEQ ID NO: 5099415 - DNA, 25 bp, Homo sapien
gagacattgatcttttgcaaatctg

SEQ ID NO: 5099416 - DNA, 25 bp, Homo sapien
gctgtgtagggattcgtcagtgccc

SEQ ID NO: 5099417 - DNA, 25 bp, Homo sapien
aatattttatgtgccgggctgtgta

SEQ ID NO: 5099418 - DNA, 25 bp, Homo sapien
tctatgctgcaaaatactctgctga

SEQ ID NO: 5099419 - DNA, 25 bp, Homo sapien
ccttctattggccagaggtctgact

SEQ ID NO: 5099420 - DNA, 25 bp, Homo sapien
catcaatctgaatggctatgtacat

SEQ ID NO: 5099421 - DNA, 25 bp, Homo sapien
attacttgcatcaatctgaatggct

SEQ ID NO: 5099422 - DNA, 25 bp, Homo sapien
tcttgaagtttgctggaattacttg

SEQ ID NO: 5099423 - DNA, 25 bp, Homo sapien
cttgcatcaatctgaatggctatgt

SEQ ID NO: 5099424 - DNA, 25 bp, Homo sapien
taagagttggggctttatcataatc

SEQ ID NO: 5099425 - DNA, 25 bp, Homo sapien
tatcataatcactagagaagtatgc

SEQ ID NO: 5099426 - DNA, 25 bp, Homo sapien
cgcaaatgggtgcgctaagttgggt

SEQ ID NO: 5099427 - DNA, 25 bp, Homo sapien
atgggtgcgctaagttgggttgtta

SEQ ID NO: 5099428 - DNA, 25 bp, Homo sapien
cctcagacagacattcagatagtgg

SEQ ID NO: 5099429 - DNA, 25 bp, Homo sapien
taatttggctgatcctcagacagac

SEQ ID NO: 5099430 - DNA, 25 bp, Homo sapien
tcagatagtggtacgactagactca

SEQ ID NO: 5099431 - DNA, 25 bp, Homo sapien
tcatttgatgcacataccctttctc

SEQ ID NO: 5099432 - DNA, 25 bp, Homo sapien
cttgtacatggtctctgtaggcctt

SEQ ID NO: 5099433 - DNA, 25 bp, Homo sapien
gtacatggtctctgtaggccttggc

SEQ ID NO: 5099434 - DNA, 25 bp, Homo sapien
cttgttctggctggcttgagagttc

SEQ ID NO: 5099435 - DNA, 25 bp, Homo sapien
cttggccttgttctggctggcttga

SEQ ID NO: 5099436 - DNA, 25 bp, Homo sapien
gtgtgttgacgatgctgggaaaagc

SEQ ID NO: 5099437 - DNA, 25 bp, Homo sapien
agtgtgttgacgatgctgggaaaag

SEQ ID NO: 5099438 - DNA, 25 bp, Homo sapien
ctgtggtaccagtggctgctctgtt

SEQ ID NO: 5099439 - DNA, 25 bp, Homo sapien
taccagtggctgctctgtttactga

SEQ ID NO: 5099440 - DNA, 25 bp, Homo sapien
tgttttctgtacttggccctgagca

SEQ ID NO: 5099441 - DNA, 25 bp, Homo sapien
tggtaccagtggctgctctgtttac

SEQ ID NO: 5099442 - DNA, 25 bp, Homo sapien
gcatgtgtccctgcttcgcttattg

SEQ ID NO: 5099443 - DNA, 25 bp, Homo sapien
gaaaagctatctacaacaaaaggcc

SEQ ID NO: 5099444 - DNA, 25 bp, Homo sapien
ggtacaattatgatcttggcaagca

SEQ ID NO: 5099445 - DNA, 25 bp, Homo sapien
aatctgtttacgttacactcttctg

SEQ ID NO: 5099446 - DNA, 25 bp, Homo sapien
gaggtctgatacttcccattggcta

SEQ ID NO: 5099447 - DNA, 25 bp, Homo sapien
ggactggactacactattatttcca

SEQ ID NO: 5099448 - DNA, 25 bp, Homo sapien
agagatgaggtctgatacttcccat

SEQ ID NO: 5099449 - DNA, 25 bp, Homo sapien
gactggactggactacactattatt

SEQ ID NO: 5099450 - DNA, 25 bp, Homo sapien
tccctgggcacctgggttcagagct

SEQ ID NO: 5099451 - DNA, 25 bp, Homo sapien
ctgggcacctgggttcagagctgta

SEQ ID NO: 5099452 - DNA, 25 bp, Homo sapien
tgtgcctgatgctggaaccacagtg

SEQ ID NO: 5099453 - DNA, 25 bp, Homo sapien
ctgtagctctgtgcctgatgctgga

SEQ ID NO: 5099454 - DNA, 25 bp, Homo sapien
ttctccaatttctggagaagttgag

SEQ ID NO: 5099455 - DNA, 25 bp, Homo sapien
cttctccaatttctggagaagttga

SEQ ID NO: 5099456 - DNA, 25 bp, Homo sapien
ctgggaccatgactctaaatcatca

SEQ ID NO: 5099457 - DNA, 25 bp, Homo sapien
catgactctaaatcatcattgtctt

SEQ ID NO: 5099458 - DNA, 25 bp, Homo sapien
ggaccatgactctaaatcatcattg

SEQ ID NO: 5099459 - DNA, 25 bp, Homo sapien
tctgggaccatgactctaaatcatc

SEQ ID NO: 5099460 - DNA, 25 bp, Homo sapien
cctcctgttaacagtccaagttctc

SEQ ID NO: 5099461 - DNA, 25 bp, Homo sapien
agtttcctcctgttaacagtccaag

SEQ ID NO: 5099462 - DNA, 25 bp, Homo sapien
ttcctcctgttaacagtccaagttc

SEQ ID NO: 5099463 - DNA, 25 bp, Homo sapien
cagtttcctcctgttaacagtccaa

SEQ ID NO: 5099464 - DNA, 25 bp, Homo sapien
tccctggggttgatatcaagccctt

SEQ ID NO: 5099465 - DNA, 25 bp, Homo sapien
agtccagaaatcctccctggggttg

SEQ ID NO: 5099466 - DNA, 25 bp, Homo sapien
tcaagccctttactcaggaaatgtt

SEQ ID NO: 5099467 - DNA, 25 bp, Homo sapien
gggttgatatcaagccctttactca

SEQ ID NO: 5099468 - DNA, 25 bp, Homo sapien
gctagaaaaagtcttgtcatttctc

SEQ ID NO: 5099469 - DNA, 25 bp, Homo sapien
catcactgctagaaaaagtcttgtc

SEQ ID NO: 5099470 - DNA, 25 bp, Homo sapien
cttcgaataccaacttatgttcatc

SEQ ID NO: 5099471 - DNA, 25 bp, Homo sapien
gaataccaacttatgttcatcactg

SEQ ID NO: 5099472 - DNA, 25 bp, Homo sapien
agtgaccttatctatataatcatct

SEQ ID NO: 5099473 - DNA, 25 bp, Homo sapien
aagtgaccttatctatataatcatc

SEQ ID NO: 5099474 - DNA, 25 bp, Homo sapien
aaagtgaccttatctatataatcat

SEQ ID NO: 5099475 - DNA, 25 bp, Homo sapien
gatcagatagagaggctgacaaagg

SEQ ID NO: 5099476 - DNA, 25 bp, Homo sapien
tagatcctaactgaagtttgggtgc

SEQ ID NO: 5099477 - DNA, 25 bp, Homo sapien
tgacaaaggttaggttctccagagg

SEQ ID NO: 5099478 - DNA, 25 bp, Homo sapien
gggaaagacaagtaacatgaaagat

SEQ ID NO: 5099479 - DNA, 25 bp, Homo sapien
caagagcgaagcttggcagctgtgc

SEQ ID NO: 5099480 - DNA, 25 bp, Homo sapien
gaagaccctctgtattcaagagcga

SEQ ID NO: 5099481 - DNA, 25 bp, Homo sapien
tctgtattcaagagcgaagcttggc

SEQ ID NO: 5099482 - DNA, 25 bp, Homo sapien
tttgttgggaattgaagaccctctg

SEQ ID NO: 5099483 - DNA, 25 bp, Homo sapien
accagactgaaacttgtgaagaatt

SEQ ID NO: 5099484 - DNA, 25 bp, Homo sapien
gaactgcaaactgagacaaacgagg

SEQ ID NO: 5099485 - DNA, 25 bp, Homo sapien
ttctgagaagagacctgattccctg

SEQ ID NO: 5099486 - DNA, 25 bp, Homo sapien
ctgagggccactagttttctctgaa

SEQ ID NO: 5099487 - DNA, 25 bp, Homo sapien
aggccacagcattagcgaacgaact

SEQ ID NO: 5099488 - DNA, 25 bp, Homo sapien
aattcccacgaagttcctgtactat

SEQ ID NO: 5099489 - DNA, 25 bp, Homo sapien
catagaaagagcttgtacagtctga

SEQ ID NO: 5099490 - DNA, 25 bp, Homo sapien
gaagttcctgtactattattcctgg

SEQ ID NO: 5099491 - DNA, 25 bp, Homo sapien
cctggatgtatatcggcaatggcca

SEQ ID NO: 5099492 - DNA, 25 bp, Homo sapien
cttcgagcagctcgcacaactcctg

SEQ ID NO: 5099493 - DNA, 25 bp, Homo sapien
ttcgagcagctcgcacaactcctga

SEQ ID NO: 5099494 - DNA, 25 bp, Homo sapien
cgacgatcggctccgaggcctgagt

SEQ ID NO: 5099495 - DNA, 25 bp, Homo sapien
atgcacagcgacgatcggctccgag

SEQ ID NO: 5099496 - DNA, 25 bp, Homo sapien
ttcacagctgtgatgcacagcgacg

SEQ ID NO: 5099497 - DNA, 25 bp, Homo sapien
gacacataacaaagcgcacttcaca

SEQ ID NO: 5099498 - DNA, 25 bp, Homo sapien
ctttacaagaataatgaattcttcc

SEQ ID NO: 5099499 - DNA, 25 bp, Homo sapien
taatgaattcttccctcttctccat

SEQ ID NO: 5099500 - DNA, 25 bp, Homo sapien
gaataatgaattcttccctcttctc

SEQ ID NO: 5099501 - DNA, 25 bp, Homo sapien
tttacaagaataatgaattcttccc

SEQ ID NO: 5099502 - DNA, 25 bp, Homo sapien
tattggctttccaatggagcagcag

SEQ ID NO: 5099503 - DNA, 25 bp, Homo sapien
tgtgtgcttcatagcaggcactgca

SEQ ID NO: 5099504 - DNA, 25 bp, Homo sapien
tccactctccaatcagaaggtcctt

SEQ ID NO: 5099505 - DNA, 25 bp, Homo sapien
gagcagcagataagcattgtgtgtg

SEQ ID NO: 5099506 - DNA, 25 bp, Homo sapien
tagtaggggattgcatggataacac

SEQ ID NO: 5099507 - DNA, 25 bp, Homo sapien
gggattgcatggataacacaaagca

SEQ ID NO: 5099508 - DNA, 25 bp, Homo sapien
ttgcatggataacacaaagcatcct

SEQ ID NO: 5099509 - DNA, 25 bp, Homo sapien
tatggttcagagtagtaggggattg

SEQ ID NO: 5099510 - DNA, 25 bp, Homo sapien
tccccaccttaatcatgccatgtag

SEQ ID NO: 5099511 - DNA, 25 bp, Homo sapien
cagatactaggagcatttggcaaaa

SEQ ID NO: 5099512 - DNA, 25 bp, Homo sapien
ggcacaccccctaagatgattgttc

SEQ ID NO: 5099513 - DNA, 25 bp, Homo sapien
gccaatctggagagtacctaagcag

SEQ ID NO: 5099514 - DNA, 25 bp, Homo sapien
ctatccttgctgacaacccatgact

SEQ ID NO: 5099515 - DNA, 25 bp, Homo sapien
caaacggccagaacactggtgacag

SEQ ID NO: 5099516 - DNA, 25 bp, Homo sapien
gttagtgatttgatacctacaaacg

SEQ ID NO: 5099517 - DNA, 25 bp, Homo sapien
tgaaatatcagagacagaacctctg

SEQ ID NO: 5099518 - DNA, 25 bp, Homo sapien
tttggttctagtagtactttgcaca

SEQ ID NO: 5099519 - DNA, 25 bp, Homo sapien
tttatcccatttggttctagtagta

SEQ ID NO: 5099520 - DNA, 25 bp, Homo sapien
ttggttctagtagtactttgcacat

SEQ ID NO: 5099521 - DNA, 25 bp, Homo sapien
atttggttctagtagtactttgcac

SEQ ID NO: 5099522 - DNA, 25 bp, Homo sapien
agcctagatcaggatcattatcttg

SEQ ID NO: 5099523 - DNA, 25 bp, Homo sapien
ctagatcaggatcattatcttgatc

SEQ ID NO: 5099524 - DNA, 25 bp, Homo sapien
gcctagatcaggatcattatcttga

SEQ ID NO: 5099525 - DNA, 25 bp, Homo sapien
cagcctagatcaggatcattatctt

SEQ ID NO: 5099526 - DNA, 25 bp, Homo sapien
ttgagtgaggttctactatgataga

SEQ ID NO: 5099527 - DNA, 25 bp, Homo sapien
gaccaacagtaaccatttgggttgc

SEQ ID NO: 5099528 - DNA, 25 bp, Homo sapien
ccaggaagcaatgctatagggattg

SEQ ID NO: 5099529 - DNA, 25 bp, Homo sapien
gatagaattgaccaacagtaaccat

SEQ ID NO: 5099530 - DNA, 25 bp, Homo sapien
ctggggccagcagaatgatgggaag

SEQ ID NO: 5099531 - DNA, 25 bp, Homo sapien
cagcagaatgatgggaagtagggaa

SEQ ID NO: 5099532 - DNA, 25 bp, Homo sapien
gggccagcagaatgatgggaagtag

SEQ ID NO: 5099533 - DNA, 25 bp, Homo sapien
cagaatgatgggaagtagggaaggc

SEQ ID NO: 5099534 - DNA, 25 bp, Homo sapien
accttgtacttgtaggaaaatgtct

SEQ ID NO: 5099535 - DNA, 25 bp, Homo sapien
tgggctggggataaccttgtacttg

SEQ ID NO: 5099536 - DNA, 25 bp, Homo sapien
tggggataaccttgtacttgtagga

SEQ ID NO: 5099537 - DNA, 25 bp, Homo sapien
gctgaggatgtagattgtgggctgg

SEQ ID NO: 5099538 - DNA, 25 bp, Homo sapien
caatagatttgggtctccgccaaga

SEQ ID NO: 5099539 - DNA, 25 bp, Homo sapien
ttcagggacaaacatcagatcagtg

SEQ ID NO: 5099540 - DNA, 25 bp, Homo sapien
taggatggatccaaaagcattgtgc

SEQ ID NO: 5099541 - DNA, 25 bp, Homo sapien
tatttctgtgaagccgacccatgag

SEQ ID NO: 5099542 - DNA, 25 bp, Homo sapien
tattgggcaaaatagcatgcacatt

SEQ ID NO: 5099543 - DNA, 25 bp, Homo sapien
caaccttgctagagatgcatattat

SEQ ID NO: 5099544 - DNA, 25 bp, Homo sapien
cgtcttgaagaatatacctggttcc

SEQ ID NO: 5099545 - DNA, 25 bp, Homo sapien
ccatgcaagtagaattattgggcaa

SEQ ID NO: 5099546 - DNA, 25 bp, Homo sapien
caggtctggcctgtattcatattct

SEQ ID NO: 5099547 - DNA, 25 bp, Homo sapien
ggtctggcctgtattcatattctga

SEQ ID NO: 5099548 - DNA, 25 bp, Homo sapien
aggtctggcctgtattcatattctg

SEQ ID NO: 5099549 - DNA, 25 bp, Homo sapien
tttgctctcccaattcttgttcttg

SEQ ID NO: 5099550 - DNA, 25 bp, Homo sapien
gctctcccaattcttgttcttgtac

SEQ ID NO: 5099551 - DNA, 25 bp, Homo sapien
tgctctcccaattcttgttcttgta

SEQ ID NO: 5099552 - DNA, 25 bp, Homo sapien
ttgctctcccaattcttgttcttgt

SEQ ID NO: 5099553 - DNA, 25 bp, Homo sapien
tgacttccaggatcagactgaatcc

SEQ ID NO: 5099554 - DNA, 25 bp, Homo sapien
acttccaggatcagactgaatccct

SEQ ID NO: 5099555 - DNA, 25 bp, Homo sapien
gacttccaggatcagactgaatccc

SEQ ID NO: 5099556 - DNA, 25 bp, Homo sapien
tcaccttgccactgtaatcagggaa

SEQ ID NO: 5099557 - DNA, 25 bp, Homo sapien
catccgggttcggatgaaaaaagag

SEQ ID NO: 5099558 - DNA, 25 bp, Homo sapien
ttaattttgctgacaagctcatccg

SEQ ID NO: 5099559 - DNA, 25 bp, Homo sapien
cttggagaacagttgtgcaggagct

SEQ ID NO: 5099560 - DNA, 25 bp, Homo sapien
aggatattacaaagaggggcaaaca

SEQ ID NO: 5099561 - DNA, 25 bp, Homo sapien
ccctttatcagaaccttccctgtca

SEQ ID NO: 5099562 - DNA, 25 bp, Homo sapien
ttccctgtcagtgggctcctcattt

SEQ ID NO: 5099563 - DNA, 25 bp, Homo sapien
gatattacaaagaggggcaaacacc

SEQ ID NO: 5099564 - DNA, 25 bp, Homo sapien
tctcactaatgccagatcccagaag

SEQ ID NO: 5099565 - DNA, 25 bp, Homo sapien
tgtgctccatgatccgctgaatctc

SEQ ID NO: 5099566 - DNA, 25 bp, Homo sapien
tagggccaatggagtagttacctgc

SEQ ID NO: 5099567 - DNA, 25 bp, Homo sapien
taccttctggcgctagggtaggcat

SEQ ID NO: 5099568 - DNA, 25 bp, Homo sapien
tctgcctatcacgaaaagtggattc

SEQ ID NO: 5099569 - DNA, 25 bp, Homo sapien
taaggtgcgtgggacattgcagatg

SEQ ID NO: 5099570 - DNA, 25 bp, Homo sapien
tcccctgtgagatgcagtaaggtgc

SEQ ID NO: 5099571 - DNA, 25 bp, Homo sapien
tgcattcaggtccatagcagtcccc

SEQ ID NO: 5099572 - DNA, 25 bp, Homo sapien
gcttcacaagatgcttgtcgcaata

SEQ ID NO: 5099573 - DNA, 25 bp, Homo sapien
caccgcgcgtaatgagcttcacaag

SEQ ID NO: 5099574 - DNA, 25 bp, Homo sapien
gtcgcaataactccgtacttcccta

SEQ ID NO: 5099575 - DNA, 25 bp, Homo sapien
tatgcgcggcaattcgcatctaaca

SEQ ID NO: 5099576 - DNA, 25 bp, Homo sapien
tttgtctaacatgttccctgaagct

SEQ ID NO: 5099577 - DNA, 25 bp, Homo sapien
taatgcagtgttctgataccagcag

SEQ ID NO: 5099578 - DNA, 25 bp, Homo sapien
ctgataatgcagtgttctgatacca

SEQ ID NO: 5099579 - DNA, 25 bp, Homo sapien
gataccagcagatgttttgtctaac

SEQ ID NO: 5099580 - DNA, 25 bp, Homo sapien
gcttctctgacccaaagaggatctt

SEQ ID NO: 5099581 - DNA, 25 bp, Homo sapien
tgcatgattcttcacatagacccac

SEQ ID NO: 5099582 - DNA, 25 bp, Homo sapien
caaccccgaatgtcaagataagccc

SEQ ID NO: 5099583 - DNA, 25 bp, Homo sapien
tcatatcctaaaggctgtctcttcc

SEQ ID NO: 5099584 - DNA, 25 bp, Homo sapien
ctatgcacgtatcttgcaggagatg

SEQ ID NO: 5099585 - DNA, 25 bp, Homo sapien
tcttgactatcattttggatatagc

SEQ ID NO: 5099586 - DNA, 25 bp, Homo sapien
agaaaatggcattgagtgaaaagta

SEQ ID NO: 5099587 - DNA, 25 bp, Homo sapien
tgaccacccaaccacccactattcc

SEQ ID NO: 5099588 - DNA, 25 bp, Homo sapien
gtagaaaatggcattgagtgaaaag

SEQ ID NO: 5099589 - DNA, 25 bp, Homo sapien
ctgtcccatttgacaaacaggtagg

SEQ ID NO: 5099590 - DNA, 25 bp, Homo sapien
tctccgtactcactgtcccatttga

SEQ ID NO: 5099591 - DNA, 25 bp, Homo sapien
ctctccgtactcactgtcccatttg

SEQ ID NO: 5099592 - DNA, 25 bp, Homo sapien
tcactgtcccatttgacaaacaggt

SEQ ID NO: 5099593 - DNA, 25 bp, Homo sapien
cccagttctagctgtatgttttcag

SEQ ID NO: 5099594 - DNA, 25 bp, Homo sapien
tttgctgctgctaaagtactgagtg

SEQ ID NO: 5099595 - DNA, 25 bp, Homo sapien
ttgctgctgctaaagtactgagtgg

SEQ ID NO: 5099596 - DNA, 25 bp, Homo sapien
gaagcacagggtactgtcttttgtg

SEQ ID NO: 5099597 - DNA, 25 bp, Homo sapien
aaagtatccttagtggcggtgcagc

SEQ ID NO: 5099598 - DNA, 25 bp, Homo sapien
cgtagaaaatgataccttagatggc

SEQ ID NO: 5099599 - DNA, 25 bp, Homo sapien
cagtgattcctcatcaggacagcag

SEQ ID NO: 5099600 - DNA, 25 bp, Homo sapien
gtctgcagttcatggcagccagtat

SEQ ID NO: 5099601 - DNA, 25 bp, Homo sapien
tgcagttcatggcagccagtatttt

SEQ ID NO: 5099602 - DNA, 25 bp, Homo sapien
tattgtctgcagttcatggcagcca

SEQ ID NO: 5099603 - DNA, 25 bp, Homo sapien
cagttcatggcagccagtattttac

SEQ ID NO: 5099604 - DNA, 25 bp, Homo sapien
ccatagtctgctggattagagccac

SEQ ID NO: 5099605 - DNA, 25 bp, Homo sapien
cctgtccttctagtgccatagtctg

SEQ ID NO: 5099606 - DNA, 25 bp, Homo sapien
ttgtgcccattgagcatctgccagc

SEQ ID NO: 5099607 - DNA, 25 bp, Homo sapien
tttcagcctgaacacttgtgcccat

SEQ ID NO: 5099608 - DNA, 25 bp, Homo sapien
tatggccaatgagccatactgtaac

SEQ ID NO: 5099609 - DNA, 25 bp, Homo sapien
caaagttggagtagacaaacatttc

SEQ ID NO: 5099610 - DNA, 25 bp, Homo sapien
gacaatatgtttataacccgtgcaa

SEQ ID NO: 5099611 - DNA, 25 bp, Homo sapien
ctgtaacagatgtgtatggtcatac

SEQ ID NO: 5099612 - DNA, 25 bp, Homo sapien
aaatggtcacaagctaagaaagaag

SEQ ID NO: 5099613 - DNA, 25 bp, Homo sapien
ggcccacaagcattctttaagtgaa

SEQ ID NO: 5099614 - DNA, 25 bp, Homo sapien
gctgtctttgaaaatggtcacaagc

SEQ ID NO: 5099615 - DNA, 25 bp, Homo sapien
aagaggaggcattacagtttaatca

SEQ ID NO: 5099616 - DNA, 25 bp, Homo sapien
gggccgctattgtcacaggtgaaaa

SEQ ID NO: 5099617 - DNA, 25 bp, Homo sapien
gacgaggacaaaactgggccgctat

SEQ ID NO: 5099618 - DNA, 25 bp, Homo sapien
gaaattgactcctgtttaccgccca

SEQ ID NO: 5099619 - DNA, 25 bp, Homo sapien
gctgccttagtctgaataacctgaa

SEQ ID NO: 5099620 - DNA, 25 bp, Homo sapien
aataaccttgtaatgagtgtgcgta

SEQ ID NO: 5099621 - DNA, 25 bp, Homo sapien
ataaccttgtaatgagtgtgcgtag

SEQ ID NO: 5099622 - DNA, 25 bp, Homo sapien
catgtagccaggatggtcacgatct

SEQ ID NO: 5099623 - DNA, 25 bp, Homo sapien
accatgtagccaggatggtcacgat

SEQ ID NO: 5099624 - DNA, 25 bp, Homo sapien
ccatgtagccaggatggtcacgatc

SEQ ID NO: 5099625 - DNA, 25 bp, Homo sapien
ccgcagacttcactttgactgtgct

SEQ ID NO: 5099626 - DNA, 25 bp, Homo sapien
catttgaggactgctttttcccaag

SEQ ID NO: 5099627 - DNA, 25 bp, Homo sapien
caagcgttgataccatcacttctgg

SEQ ID NO: 5099628 - DNA, 25 bp, Homo sapien
ttgatttccgaaagccagatgtgcc

SEQ ID NO: 5099629 - DNA, 25 bp, Homo sapien
tgctgactgcccaggttcatttgta

SEQ ID NO: 5099630 - DNA, 25 bp, Homo sapien
gctgactgcccaggttcatttgtaa

SEQ ID NO: 5099631 - DNA, 25 bp, Homo sapien
aaacactctttgggcataatttcct

SEQ ID NO: 5099632 - DNA, 25 bp, Homo sapien
gctatcgctttgcttgtagcatttt

SEQ ID NO: 5099633 - DNA, 25 bp, Homo sapien
agaggcgatttacaagagaacttgc

SEQ ID NO: 5099634 - DNA, 25 bp, Homo sapien
ttttttagaagccagaggcgattta

SEQ ID NO: 5099635 - DNA, 25 bp, Homo sapien
ttagaagccagaggcgatttacaag

SEQ ID NO: 5099636 - DNA, 25 bp, Homo sapien
tttgcctgaacaaattctccatctg

SEQ ID NO: 5099637 - DNA, 25 bp, Homo sapien
tcaaagataatctttaatagtttat

SEQ ID NO: 5099638 - DNA, 25 bp, Homo sapien
aattgcagacaccttttcaaagata

SEQ ID NO: 5099639 - DNA, 25 bp, Homo sapien
taatctttaatagtttatttgacaa

SEQ ID NO: 5099640 - DNA, 25 bp, Homo sapien
gataatctttaatagtttatttgac

SEQ ID NO: 5099641 - DNA, 25 bp, Homo sapien
cagtgcagatctttcactatccagg

SEQ ID NO: 5099642 - DNA, 25 bp, Homo sapien
atgtgctccccggtagtaagctccc

SEQ ID NO: 5099643 - DNA, 25 bp, Homo sapien
gaagtttgaaagcttccgtgggaga

SEQ ID NO: 5099644 - DNA, 25 bp, Homo sapien
attagaggcggctgtgagaaaatgt

SEQ ID NO: 5099645 - DNA, 25 bp, Homo sapien
ttgtgttactgtgagggagcccttg

SEQ ID NO: 5099646 - DNA, 25 bp, Homo sapien
tctcgtaattgtcctagtggttgtg

SEQ ID NO: 5099647 - DNA, 25 bp, Homo sapien
tcagatgattgacacccgatctcgt

SEQ ID NO: 5099648 - DNA, 25 bp, Homo sapien
tcctagtggttgtgttactgtgagg

SEQ ID NO: 5099649 - DNA, 25 bp, Homo sapien
gaagcgagtaccctctgctggagac

SEQ ID NO: 5099650 - DNA, 25 bp, Homo sapien
ccacagcagcatggggattgaagcg

SEQ ID NO: 5099651 - DNA, 25 bp, Homo sapien
gtcatctgttgttgtggcccaccca

SEQ ID NO: 5099652 - DNA, 25 bp, Homo sapien
aaaagtcatctgttgttgtggccca

SEQ ID NO: 5099653 - DNA, 25 bp, Homo sapien
tcttcttctttctatataacttggt

SEQ ID NO: 5099654 - DNA, 25 bp, Homo sapien
ttccttcacagcctttaccttcttc

SEQ ID NO: 5099655 - DNA, 25 bp, Homo sapien
tagcaacaaatatatggccttcatt

SEQ ID NO: 5099656 - DNA, 25 bp, Homo sapien
tttacttgcagttagtttcttctct

SEQ ID NO: 5099657 - DNA, 25 bp, Homo sapien
caggactatgactggggtagatgaa

SEQ ID NO: 5099658 - DNA, 25 bp, Homo sapien
ggtagatgaagtagtaggtcagacc

SEQ ID NO: 5099659 - DNA, 25 bp, Homo sapien
aggtcagacctactccttgagaaag

SEQ ID NO: 5099660 - DNA, 25 bp, Homo sapien
agtaggtcagacctactccttgaga

SEQ ID NO: 5099661 - DNA, 25 bp, Homo sapien
cattgaccaggacggagttccacgg

SEQ ID NO: 5099662 - DNA, 25 bp, Homo sapien
ccccagctgtgacggaagtgaagaa

SEQ ID NO: 5099663 - DNA, 25 bp, Homo sapien
cttgtgatccagaccgggagaagga

SEQ ID NO: 5099664 - DNA, 25 bp, Homo sapien
catccaggactggtaccacggttta

SEQ ID NO: 5099665 - DNA, 25 bp, Homo sapien
cacagattcaccacaatatggaaac

SEQ ID NO: 5099666 - DNA, 25 bp, Homo sapien
tcctcccaagacagtgagtgaccag

SEQ ID NO: 5099667 - DNA, 25 bp, Homo sapien
gattatctgttgtgctatatggatg

SEQ ID NO: 5099668 - DNA, 25 bp, Homo sapien
tcacagatggaagcccccattacag

SEQ ID NO: 5099669 - DNA, 25 bp, Homo sapien
caggggtaaacaatacaatatgctg

SEQ ID NO: 5099670 - DNA, 25 bp, Homo sapien
gaaggcaaattactacatgcagtag

SEQ ID NO: 5099671 - DNA, 25 bp, Homo sapien
catgtgtggtaatgtcatgaatata

SEQ ID NO: 5099672 - DNA, 25 bp, Homo sapien
aatatgctgtgcattgcgaatgcat

SEQ ID NO: 5099673 - DNA, 25 bp, Homo sapien
gaagatgaatgtatcaggttgagaa

SEQ ID NO: 5099674 - DNA, 25 bp, Homo sapien
ctttatatgaagatgaatgtatcag

SEQ ID NO: 5099675 - DNA, 25 bp, Homo sapien
tatgaagatgaatgtatcaggttga

SEQ ID NO: 5099676 - DNA, 25 bp, Homo sapien
atgaatgtatcaggttgagaagctc

SEQ ID NO: 5099677 - DNA, 25 bp, Homo sapien
cacactcctctttgagcattgagaa

SEQ ID NO: 5099678 - DNA, 25 bp, Homo sapien
tttctgtttatcacacactcctctt

SEQ ID NO: 5099679 - DNA, 25 bp, Homo sapien
cacacactcctctttgagcattgag

SEQ ID NO: 5099680 - DNA, 25 bp, Homo sapien
acacactcctctttgagcattgaga

SEQ ID NO: 5099681 - DNA, 25 bp, Homo sapien
cctgaactgaatgaatccatttgtc

SEQ ID NO: 5099682 - DNA, 25 bp, Homo sapien
gaactgaatgaatccatttgtccag

SEQ ID NO: 5099683 - DNA, 25 bp, Homo sapien
ttttcttcctgaactgaatgaatcc

SEQ ID NO: 5099684 - DNA, 25 bp, Homo sapien
tgaatgaatccatttgtccaggtcc

SEQ ID NO: 5099685 - DNA, 25 bp, Homo sapien
tttggccaagtgtagtctccacatt

SEQ ID NO: 5099686 - DNA, 25 bp, Homo sapien
tgacttggcagaccaggtgcatttt

SEQ ID NO: 5099687 - DNA, 25 bp, Homo sapien
aattaaatgcaagctctgacttggc

SEQ ID NO: 5099688 - DNA, 25 bp, Homo sapien
tctgatgccctagacagagcttggc

SEQ ID NO: 5099689 - DNA, 25 bp, Homo sapien
gatagggttaagtaccacagaacag

SEQ ID NO: 5099690 - DNA, 25 bp, Homo sapien
aatccaggggtagtcataaggccta

SEQ ID NO: 5099691 - DNA, 25 bp, Homo sapien
tgcttgtttttgtactggtgtggtg

SEQ ID NO: 5099692 - DNA, 25 bp, Homo sapien
cataaggcctatctctgtgcatttg

SEQ ID NO: 5099693 - DNA, 25 bp, Homo sapien
aaggttctatgaatcccttctgatg

SEQ ID NO: 5099694 - DNA, 25 bp, Homo sapien
tgttccatgtgtgagctgtaatgat

SEQ ID NO: 5099695 - DNA, 25 bp, Homo sapien
tgtttacactaaagttgttccatgt

SEQ ID NO: 5099696 - DNA, 25 bp, Homo sapien
cttggtgcagaatataagaaggttc

SEQ ID NO: 5099697 - DNA, 25 bp, Homo sapien
agaaacatggtgtatcagctggagt

SEQ ID NO: 5099698 - DNA, 25 bp, Homo sapien
tgacactggtgttccgtaagtttat

SEQ ID NO: 5099699 - DNA, 25 bp, Homo sapien
gtgacactggtgttccgtaagttta

SEQ ID NO: 5099700 - DNA, 25 bp, Homo sapien
acagacctccacaaggcccttaaat

SEQ ID NO: 5099701 - DNA, 25 bp, Homo sapien
cattttcctctgcagatcacagacc

SEQ ID NO: 5099702 - DNA, 25 bp, Homo sapien
tctacttgctacttgtaaggccaag

SEQ ID NO: 5099703 - DNA, 25 bp, Homo sapien
cagctcagtgtaacattttcctctg

SEQ ID NO: 5099704 - DNA, 25 bp, Homo sapien
taatgaattcccaaataatcatata

SEQ ID NO: 5099705 - DNA, 25 bp, Homo sapien
tgaattcccaaataatcatataatg

SEQ ID NO: 5099706 - DNA, 25 bp, Homo sapien
ccctggtgaaaaggggctgccaaag

SEQ ID NO: 5099707 - DNA, 25 bp, Homo sapien
tatttattctcagattggcatcatc

SEQ ID NO: 5099708 - DNA, 25 bp, Homo sapien
ttatatttattctcagattggcatc

SEQ ID NO: 5099709 - DNA, 25 bp, Homo sapien
gaatgtttgtctaaggtaacccaga

SEQ ID NO: 5099710 - DNA, 25 bp, Homo sapien
catacgagggagaagatactgtttc

SEQ ID NO: 5099711 - DNA, 25 bp, Homo sapien
caagcaaaactgcatacgagggaga

SEQ ID NO: 5099712 - DNA, 25 bp, Homo sapien
gcaaaactgcatacgagggagaaga

SEQ ID NO: 5099713 - DNA, 25 bp, Homo sapien
aactgcatacgagggagaagatact

SEQ ID NO: 5099714 - DNA, 25 bp, Homo sapien
agaaaagagtccttggaaggtgcag

SEQ ID NO: 5099715 - DNA, 25 bp, Homo sapien
aaagagtccttggaaggtgcaggcc

SEQ ID NO: 5099716 - DNA, 25 bp, Homo sapien
agaagaaaagagtccttggaaggtg

SEQ ID NO: 5099717 - DNA, 25 bp, Homo sapien
aagagtccttggaaggtgcaggccc

SEQ ID NO: 5099718 - DNA, 25 bp, Homo sapien
tgagagaaactgaacaacaattgtg

SEQ ID NO: 5099719 - DNA, 25 bp, Homo sapien
cattcaccagggtaaatggcttttt

SEQ ID NO: 5099720 - DNA, 25 bp, Homo sapien
ggagagccagtcaagagctaatgaa

SEQ ID NO: 5099721 - DNA, 25 bp, Homo sapien
caagtagtcagcaaacaaggagagc

SEQ ID NO: 5099722 - DNA, 25 bp, Homo sapien
agactgatgacaaggacagtttgca

SEQ ID NO: 5099723 - DNA, 25 bp, Homo sapien
gagactgatgacaaggacagtttgc

SEQ ID NO: 5099724 - DNA, 25 bp, Homo sapien
gactgatgacaaggacagtttgcac

SEQ ID NO: 5099725 - DNA, 25 bp, Homo sapien
ctgatgacaaggacagtttgcacta

SEQ ID NO: 5099726 - DNA, 25 bp, Homo sapien
catttgaggaaagcttatccctgac

SEQ ID NO: 5099727 - DNA, 25 bp, Homo sapien
ttgtttgatgctgcccatttgagga

SEQ ID NO: 5099728 - DNA, 25 bp, Homo sapien
aagtcagtctctgctttgtttgatg

SEQ ID NO: 5099729 - DNA, 25 bp, Homo sapien
gctttgtttgatgctgcccatttga

SEQ ID NO: 5099730 - DNA, 25 bp, Homo sapien
tatatgtcatctttgtgtgggggcc

SEQ ID NO: 5099731 - DNA, 25 bp, Homo sapien
tttatatgtcatctttgtgtggggg

SEQ ID NO: 5099732 - DNA, 25 bp, Homo sapien
ttatatgtcatctttgtgtgggggc

SEQ ID NO: 5099733 - DNA, 25 bp, Homo sapien
caagaagtccatgtctagtggaggc

SEQ ID NO: 5099734 - DNA, 25 bp, Homo sapien
ggaggcacagctactcatgcagcca

SEQ ID NO: 5099735 - DNA, 25 bp, Homo sapien
gaatctctcagtgcaacctaggttt

SEQ ID NO: 5099736 - DNA, 25 bp, Homo sapien
actggacagtgctatgccctctatg

SEQ ID NO: 5099737 - DNA, 25 bp, Homo sapien
gaaatcaggctatattcatctctaa

SEQ ID NO: 5099738 - DNA, 25 bp, Homo sapien
cagctgcttattttactgcgtctga

SEQ ID NO: 5099739 - DNA, 25 bp, Homo sapien
gctccttggtattcagtgaaatcag

SEQ ID NO: 5099740 - DNA, 25 bp, Homo sapien
actgcgtctgaatgcttgctccttg

SEQ ID NO: 5099741 - DNA, 25 bp, Homo sapien
tggttacatgatgtctccctccacc

SEQ ID NO: 5099742 - DNA, 25 bp, Homo sapien
aaagtgcaattaagagactccaccg

SEQ ID NO: 5099743 - DNA, 25 bp, Homo sapien
tgtattccgccccaatatcagaggc

SEQ ID NO: 5099744 - DNA, 25 bp, Homo sapien
gaaattccgcaactctgaagacgtg

SEQ ID NO: 5099745 - DNA, 25 bp, Homo sapien
tgaagccaggtcataatgtagccca

SEQ ID NO: 5099746 - DNA, 25 bp, Homo sapien
ccttcacacctggtgactactattt

SEQ ID NO: 5099747 - DNA, 25 bp, Homo sapien
tatcactttcatcgctgagcatttt

SEQ ID NO: 5099748 - DNA, 25 bp, Homo sapien
taaaggccccttcacacctggtgac

SEQ ID NO: 5099749 - DNA, 25 bp, Homo sapien
ttctctcgtacaccattatcacttt

SEQ ID NO: 5099750 - DNA, 25 bp, Homo sapien
tgtgcctttgactgacaagctgcca

SEQ ID NO: 5099751 - DNA, 25 bp, Homo sapien
catgccatagtgtgctgtatatcac

SEQ ID NO: 5099752 - DNA, 25 bp, Homo sapien
tgcttataatgtctggctgagtgaa

SEQ ID NO: 5099753 - DNA, 25 bp, Homo sapien
tatcacatctagaatgcttataatg

SEQ ID NO: 5099754 - DNA, 25 bp, Homo sapien
ggttggcttggtccccagaactcca

SEQ ID NO: 5099755 - DNA, 25 bp, Homo sapien
aggcaactttgtcttaggttgcagt

SEQ ID NO: 5099756 - DNA, 25 bp, Homo sapien
ggcaactttgtcttaggttgcagtt

SEQ ID NO: 5099757 - DNA, 25 bp, Homo sapien
gttggcttggtccccagaactccac

SEQ ID NO: 5099758 - DNA, 25 bp, Homo sapien
tgaagtatgccagtttgcagaactg

SEQ ID NO: 5099759 - DNA, 25 bp, Homo sapien
tgctcttctgtctgtagaccaaccg

SEQ ID NO: 5099760 - DNA, 25 bp, Homo sapien
accgcactccactcaggccagttgg

SEQ ID NO: 5099761 - DNA, 25 bp, Homo sapien
gccctctgcactgaattggtgttca

SEQ ID NO: 5099762 - DNA, 25 bp, Homo sapien
gtatctgacaccactttcatcacca

SEQ ID NO: 5099763 - DNA, 25 bp, Homo sapien
tttgctatggaaaagacatcttgtc

SEQ ID NO: 5099764 - DNA, 25 bp, Homo sapien
gatttgctatggaaaagacatcttg

SEQ ID NO: 5099765 - DNA, 25 bp, Homo sapien
catggtatctgacaccactttcatc

SEQ ID NO: 5099766 - DNA, 25 bp, Homo sapien
caggtttctcataaaggagacccaa

SEQ ID NO: 5099767 - DNA, 25 bp, Homo sapien
aggtttctcataaaggagacccaag

SEQ ID NO: 5099768 - DNA, 25 bp, Homo sapien
ggtttctcataaaggagacccaaga

SEQ ID NO: 5099769 - DNA, 25 bp, Homo sapien
caggtccaactgtacttagctttag

SEQ ID NO: 5099770 - DNA, 25 bp, Homo sapien
tagctttagggatcagaagagactg

SEQ ID NO: 5099771 - DNA, 25 bp, Homo sapien
ctaaccaggtccaactgtacttagc

SEQ ID NO: 5099772 - DNA, 25 bp, Homo sapien
caactgtacttagctttagggatca

SEQ ID NO: 5099773 - DNA, 25 bp, Homo sapien
ccacttcaagtaatgtcgcatttct

SEQ ID NO: 5099774 - DNA, 25 bp, Homo sapien
agtaatgtcgcatttcttgacccat

SEQ ID NO: 5099775 - DNA, 25 bp, Homo sapien
cacttcaagtaatgtcgcatttctt

SEQ ID NO: 5099776 - DNA, 25 bp, Homo sapien
cttcaagtaatgtcgcatttcttga

SEQ ID NO: 5099777 - DNA, 25 bp, Homo sapien
gatccagctcatctatataacttac

SEQ ID NO: 5099778 - DNA, 25 bp, Homo sapien
gctgtggtctggtttgatccagctc

SEQ ID NO: 5099779 - DNA, 25 bp, Homo sapien
ttttgtgtctttgctgtggtctggt

SEQ ID NO: 5099780 - DNA, 25 bp, Homo sapien
ttctagaggtcagcacgcagatttt

SEQ ID NO: 5099781 - DNA, 25 bp, Homo sapien
tcaaactgacagtgtagcttacttg

SEQ ID NO: 5099782 - DNA, 25 bp, Homo sapien
cttggtcaaactgacagtgtagctt

SEQ ID NO: 5099783 - DNA, 25 bp, Homo sapien
agcttacttggtccagttccctatc

SEQ ID NO: 5099784 - DNA, 25 bp, Homo sapien
tggtccagttccctatcatctgtcc

SEQ ID NO: 5099785 - DNA, 25 bp, Homo sapien
tggaaagggcactttaagtagccac

SEQ ID NO: 5099786 - DNA, 25 bp, Homo sapien
gctgatgcgagtgcttggcttctaa

SEQ ID NO: 5099787 - DNA, 25 bp, Homo sapien
cgttcagaaccccacacaggtctgg

SEQ ID NO: 5099788 - DNA, 25 bp, Homo sapien
tataagtgccttgatgggcacaggc

SEQ ID NO: 5099789 - DNA, 25 bp, Homo sapien
aacctccaaggaaagtgtagatgtc

SEQ ID NO: 5099790 - DNA, 25 bp, Homo sapien
agagcacagtggtgataaatcttga

SEQ ID NO: 5099791 - DNA, 25 bp, Homo sapien
tactggagtttcgaataacccagcg

SEQ ID NO: 5099792 - DNA, 25 bp, Homo sapien
cccagcgcaggtattcaaagtcttc

SEQ ID NO: 5099793 - DNA, 25 bp, Homo sapien
ccccgtagtggtatttctactggag

SEQ ID NO: 5099794 - DNA, 25 bp, Homo sapien
ctctgaggactctctgaggtattct

SEQ ID NO: 5099795 - DNA, 25 bp, Homo sapien
gactctctgaggtattctgttttaa

SEQ ID NO: 5099796 - DNA, 25 bp, Homo sapien
cctctgaggactctctgaggtattc

SEQ ID NO: 5099797 - DNA, 25 bp, Homo sapien
tgaggactctctgaggtattctgtt

SEQ ID NO: 5099798 - DNA, 25 bp, Homo sapien
gttgtggattaaaggctctgtccaa

SEQ ID NO: 5099799 - DNA, 25 bp, Homo sapien
caaaactttgtaatgcactgtgaaa

SEQ ID NO: 5099800 - DNA, 25 bp, Homo sapien
taataatgttgtggattaaaggctc

SEQ ID NO: 5099801 - DNA, 25 bp, Homo sapien
taatgttgtggattaaaggctctgt

SEQ ID NO: 5099802 - DNA, 25 bp, Homo sapien
tcatggattagagaggtggtacttg

SEQ ID NO: 5099803 - DNA, 25 bp, Homo sapien
ccttgctctgtgtttaatgatcctc

SEQ ID NO: 5099804 - DNA, 25 bp, Homo sapien
gcttgttaaagagatgagcttggcc

SEQ ID NO: 5099805 - DNA, 25 bp, Homo sapien
tctgtgtttaatgatcctctcttca

SEQ ID NO: 5099806 - DNA, 25 bp, Homo sapien
taatcaaaatcttggcctctggaac

SEQ ID NO: 5099807 - DNA, 25 bp, Homo sapien
aaagaaacccgagaagtgctgtaat

SEQ ID NO: 5099808 - DNA, 25 bp, Homo sapien
gaggcttcttggcactgccggcagc

SEQ ID NO: 5099809 - DNA, 25 bp, Homo sapien
cagaccgtgagctgaaagaaacccg

SEQ ID NO: 5099810 - DNA, 25 bp, Homo sapien
gactgggaggttgagatctgcgtgc

SEQ ID NO: 5099811 - DNA, 25 bp, Homo sapien
actgggaggttgagatctgcgtgct

SEQ ID NO: 5099812 - DNA, 25 bp, Homo sapien
gggaggttgagatctgcgtgctgac

SEQ ID NO: 5099813 - DNA, 25 bp, Homo sapien
tgggaggttgagatctgcgtgctga

SEQ ID NO: 5099814 - DNA, 25 bp, Homo sapien
caaaattggacaaggattggggaga

SEQ ID NO: 5099815 - DNA, 25 bp, Homo sapien
gtgatcatccccgttctgcttcatt

SEQ ID NO: 5099816 - DNA, 25 bp, Homo sapien
tcaatttgtgatcatccccgttctg

SEQ ID NO: 5099817 - DNA, 25 bp, Homo sapien
tcatccccgttctgcttcattgctt

SEQ ID NO: 5099818 - DNA, 25 bp, Homo sapien
tcttgggccttgtttatcacaggtc

SEQ ID NO: 5099819 - DNA, 25 bp, Homo sapien
cttgggccttgtttatcacaggtct

SEQ ID NO: 5099820 - DNA, 25 bp, Homo sapien
tgggccttgtttatcacaggtctgc

SEQ ID NO: 5099821 - DNA, 25 bp, Homo sapien
ttgggccttgtttatcacaggtctg

SEQ ID NO: 5099822 - DNA, 25 bp, Homo sapien
gaacggtcctcttgagtccttccca

SEQ ID NO: 5099823 - DNA, 25 bp, Homo sapien
ctgtcactaaatagatgaacggtcc

SEQ ID NO: 5099824 - DNA, 25 bp, Homo sapien
taaatagatgaacggtcctcttgag

SEQ ID NO: 5099825 - DNA, 25 bp, Homo sapien
caggatgccagacaagtgttctcag

SEQ ID NO: 5099826 - DNA, 25 bp, Homo sapien
atgtgaccctgatccattctcttcc

SEQ ID NO: 5099827 - DNA, 25 bp, Homo sapien
agggctctgcccatgtgcagcccct

SEQ ID NO: 5099828 - DNA, 25 bp, Homo sapien
cttcccatgtgaccctgatccattc

SEQ ID NO: 5099829 - DNA, 25 bp, Homo sapien
cagggctctgcccatgtgcagcccc

SEQ ID NO: 5099830 - DNA, 25 bp, Homo sapien
tgcgtggtccttggtataaggaact

SEQ ID NO: 5099831 - DNA, 25 bp, Homo sapien
cacaaaatgggacgatgcgtggtcc

SEQ ID NO: 5099832 - DNA, 25 bp, Homo sapien
tttcaggtttgctaaagatttgggc

SEQ ID NO: 5099833 - DNA, 25 bp, Homo sapien
gggcgatagcatgctgagttccatc

SEQ ID NO: 5099834 - DNA, 25 bp, Homo sapien
tggaaaattgtgctgtgctaccttt

SEQ ID NO: 5099835 - DNA, 25 bp, Homo sapien
tggcaccagtagcattaatgtcatg

SEQ ID NO: 5099836 - DNA, 25 bp, Homo sapien
cccatttgtgtcaactgtacagacc

SEQ ID NO: 5099837 - DNA, 25 bp, Homo sapien
gtcatgtctgaagcacccatttgtg

SEQ ID NO: 5099838 - DNA, 25 bp, Homo sapien
tgttgcttttgctgggtcccatgcc

SEQ ID NO: 5099839 - DNA, 25 bp, Homo sapien
atgccggcagccaacaggagtgaaa

SEQ ID NO: 5099840 - DNA, 25 bp, Homo sapien
agcaccacacgttcttctcctgagc

SEQ ID NO: 5099841 - DNA, 25 bp, Homo sapien
cctttcagcaccacacgttcttctc

SEQ ID NO: 5099842 - DNA, 25 bp, Homo sapien
tagaacctggcaagggatgggtcat

SEQ ID NO: 5099843 - DNA, 25 bp, Homo sapien
gcatggtttgtgagcaaatgctcta

SEQ ID NO: 5099844 - DNA, 25 bp, Homo sapien
gcatcccaacctctattaaagaatg

SEQ ID NO: 5099845 - DNA, 25 bp, Homo sapien
tggtcagcttcagttgtggcaggta

SEQ ID NO: 5099846 - DNA, 25 bp, Homo sapien
tcagttcccatttgacacgtttctt

SEQ ID NO: 5099847 - DNA, 25 bp, Homo sapien
tggcgggaccgtccaaccagttgct

SEQ ID NO: 5099848 - DNA, 25 bp, Homo sapien
catgaattgaccaagctgggaccaa

SEQ ID NO: 5099849 - DNA, 25 bp, Homo sapien
tgggaccaacattgctggcgggacc

SEQ ID NO: 5099850 - DNA, 25 bp, Homo sapien
tccagtgccatatgcatggcatcca

SEQ ID NO: 5099851 - DNA, 25 bp, Homo sapien
catggcatccatttgcatgggatga

SEQ ID NO: 5099852 - DNA, 25 bp, Homo sapien
gagagtaggagtaatatccagtgcc

SEQ ID NO: 5099853 - DNA, 25 bp, Homo sapien
atgggatgaagagcatggatccaag

SEQ ID NO: 5099854 - DNA, 25 bp, Homo sapien
ctaaggattttcttgctagatgctt

SEQ ID NO: 5099855 - DNA, 25 bp, Homo sapien
gattttcttgctagatgctttaagc

SEQ ID NO: 5099856 - DNA, 25 bp, Homo sapien
aaggattttcttgctagatgcttta

SEQ ID NO: 5099857 - DNA, 25 bp, Homo sapien
atccctgcattctgtgtactaagga

SEQ ID NO: 5099858 - DNA, 25 bp, Homo sapien
gaagacaatccactagttctttaga

SEQ ID NO: 5099859 - DNA, 25 bp, Homo sapien
tagagtgtgggagaactatcccttg

SEQ ID NO: 5099860 - DNA, 25 bp, Homo sapien
gattcacctatgtcatgcagaaata

SEQ ID NO: 5099861 - DNA, 25 bp, Homo sapien
gcaatgccatgacctgattctgtgt

SEQ ID NO: 5099862 - DNA, 25 bp, Homo sapien
aagagaaggatttctatgatggttg

SEQ ID NO: 5099863 - DNA, 25 bp, Homo sapien
agaaggatttctatgatggttgcaa

SEQ ID NO: 5099864 - DNA, 25 bp, Homo sapien
agagaaggatttctatgatggttgc

SEQ ID NO: 5099865 - DNA, 25 bp, Homo sapien
gagaaggatttctatgatggttgca

SEQ ID NO: 5099866 - DNA, 25 bp, Homo sapien
gatactgaagtctgactgctttcaa

SEQ ID NO: 5099867 - DNA, 25 bp, Homo sapien
tctatggtttggtagtgagtgtgac

SEQ ID NO: 5099868 - DNA, 25 bp, Homo sapien
tgagtgtgactctgatactgaagtc

SEQ ID NO: 5099869 - DNA, 25 bp, Homo sapien
cccatttgatgtcagtacaggaaca

SEQ ID NO: 5099870 - DNA, 25 bp, Homo sapien
actttcaggagctgtgtgggtgaag

SEQ ID NO: 5099871 - DNA, 25 bp, Homo sapien
gtgggtgaaggtcaagtggtggccc

SEQ ID NO: 5099872 - DNA, 25 bp, Homo sapien
gactttcaggagctgtgtgggtgaa

SEQ ID NO: 5099873 - DNA, 25 bp, Homo sapien
ctttcaggagctgtgtgggtgaagg

SEQ ID NO: 5099874 - DNA, 25 bp, Homo sapien
tggtcacatcagactctttgccaac

SEQ ID NO: 5099875 - DNA, 25 bp, Homo sapien
gaccgtcatgggctctggtcacatc

SEQ ID NO: 5099876 - DNA, 25 bp, Homo sapien
gcttacttctaagccaagttctggt

SEQ ID NO: 5099877 - DNA, 25 bp, Homo sapien
gagggcttacttctaagccaagttc

SEQ ID NO: 5099878 - DNA, 25 bp, Homo sapien
gaaggcctagggtatgtctgcttca

SEQ ID NO: 5099879 - DNA, 25 bp, Homo sapien
tcctggaagtgtggcatgaatttcc

SEQ ID NO: 5099880 - DNA, 25 bp, Homo sapien
ccttcagactgcctgatgtagagca

SEQ ID NO: 5099881 - DNA, 25 bp, Homo sapien
tcctgagaccagtgatcctggaagt

SEQ ID NO: 5099882 - DNA, 25 bp, Homo sapien
caacttctttaggatattctgcttt

SEQ ID NO: 5099883 - DNA, 25 bp, Homo sapien
tccacactcagaacatcgagcatta

SEQ ID NO: 5099884 - DNA, 25 bp, Homo sapien
acactcagaacatcgagcattagag

SEQ ID NO: 5099885 - DNA, 25 bp, Homo sapien
tcatgaaatcacaaccatcaaagca

SEQ ID NO: 5099886 - DNA, 25 bp, Homo sapien
cacagggcagttgatattaaagaaa

SEQ ID NO: 5099887 - DNA, 25 bp, Homo sapien
ccttggaagataaaccagagtcgat

SEQ ID NO: 5099888 - DNA, 25 bp, Homo sapien
tggcggtccaggcttgttccagttc

SEQ ID NO: 5099889 - DNA, 25 bp, Homo sapien
cagagtcgattaagattggtttgtc

SEQ ID NO: 5099890 - DNA, 25 bp, Homo sapien
cagcgggctctgctcgaaatggtcc

SEQ ID NO: 5099891 - DNA, 25 bp, Homo sapien
ccaaggcaggctattagtgacccct

SEQ ID NO: 5099892 - DNA, 25 bp, Homo sapien
ttggacgaggaagccgaacatgacc

SEQ ID NO: 5099893 - DNA, 25 bp, Homo sapien
gaacatgacctattggagggcccaa

SEQ ID NO: 5099894 - DNA, 25 bp, Homo sapien
ggaagggttggtatggcttcaccag

SEQ ID NO: 5099895 - DNA, 25 bp, Homo sapien
aagggttggtatggcttcaccagtt

SEQ ID NO: 5099896 - DNA, 25 bp, Homo sapien
gggaagggttggtatggcttcacca

SEQ ID NO: 5099897 - DNA, 25 bp, Homo sapien
gaagggttggtatggcttcaccagt

SEQ ID NO: 5099898 - DNA, 25 bp, Homo sapien
gacactagctccactcaactgattt

SEQ ID NO: 5099899 - DNA, 25 bp, Homo sapien
actagctccactcaactgattttct

SEQ ID NO: 5099900 - DNA, 25 bp, Homo sapien
tggacactagctccactcaactgat

SEQ ID NO: 5099901 - DNA, 25 bp, Homo sapien
aaactggacactagctccactcaac

SEQ ID NO: 5099902 - DNA, 25 bp, Homo sapien
tggaataaactaggccaagggaata

SEQ ID NO: 5099903 - DNA, 25 bp, Homo sapien
gagatgaacacagagaaaccaattt

SEQ ID NO: 5099904 - DNA, 25 bp, Homo sapien
aattactctgtatcctggtgccctc

SEQ ID NO: 5099905 - DNA, 25 bp, Homo sapien
cctgaattgctccagtaatggaata

SEQ ID NO: 5099906 - DNA, 25 bp, Homo sapien
gaggcagcccagttcacatgttctg

SEQ ID NO: 5099907 - DNA, 25 bp, Homo sapien
gctccaactttcaggtaggcttcat

SEQ ID NO: 5099908 - DNA, 25 bp, Homo sapien
gaggcagtcagcatctgaggttaat

SEQ ID NO: 5099909 - DNA, 25 bp, Homo sapien
cactttctccttcggtgcctgggtt

SEQ ID NO: 5099910 - DNA, 25 bp, Homo sapien
ataagggctgtccctgtgcacacac

SEQ ID NO: 5099911 - DNA, 25 bp, Homo sapien
aaactattcagtcagctcattgcat

SEQ ID NO: 5099912 - DNA, 25 bp, Homo sapien
atgatggtgggaaacgctctgctgt

SEQ ID NO: 5099913 - DNA, 25 bp, Homo sapien
tctaggtaaactattcagtcagctc

SEQ ID NO: 5099914 - DNA, 25 bp, Homo sapien
agatgatggtgggaaacgctctgct

SEQ ID NO: 5099915 - DNA, 25 bp, Homo sapien
ttgacttactggtgctcagcaagct

SEQ ID NO: 5099916 - DNA, 25 bp, Homo sapien
tctggcaacacctctggaactttga

SEQ ID NO: 5099917 - DNA, 25 bp, Homo sapien
tttgatgcttgacttactggtgctc

SEQ ID NO: 5099918 - DNA, 25 bp, Homo sapien
ctgcttgatcatctggctctggcaa

SEQ ID NO: 5099919 - DNA, 25 bp, Homo sapien
tcttagacctaacttgagtaaaata

SEQ ID NO: 5099920 - DNA, 25 bp, Homo sapien
gactctagaccccatgtgattaggg

SEQ ID NO: 5099921 - DNA, 25 bp, Homo sapien
catgccttagctaatctcccagact

SEQ ID NO: 5099922 - DNA, 25 bp, Homo sapien
tgtgattagggggtttttcatgcct

SEQ ID NO: 5099923 - DNA, 25 bp, Homo sapien
cacagtagggtaaaaactttgccag

SEQ ID NO: 5099924 - DNA, 25 bp, Homo sapien
agtagggtaaaaactttgccagcat

SEQ ID NO: 5099925 - DNA, 25 bp, Homo sapien
cagtagggtaaaaactttgccagca

SEQ ID NO: 5099926 - DNA, 25 bp, Homo sapien
tcagtgtgctgaccgtcgaagtctc

SEQ ID NO: 5099927 - DNA, 25 bp, Homo sapien
ttgactcagagtggatgacaacttg

SEQ ID NO: 5099928 - DNA, 25 bp, Homo sapien
tctttgctggaaagttcccaggttg

SEQ ID NO: 5099929 - DNA, 25 bp, Homo sapien
taagccctacttccaggagagccac

SEQ ID NO: 5099930 - DNA, 25 bp, Homo sapien
taattcccaacctagtcaccagagc

SEQ ID NO: 5099931 - DNA, 25 bp, Homo sapien
gaagattgggagacttgtgatcatc

SEQ ID NO: 5099932 - DNA, 25 bp, Homo sapien
atatgtgttagtgccagcttccagc

SEQ ID NO: 5099933 - DNA, 25 bp, Homo sapien
ggcaggctcaaggtccatatgacaa

SEQ ID NO: 5099934 - DNA, 25 bp, Homo sapien
gcttgctgcccctaatgtcctaaaa

SEQ ID NO: 5099935 - DNA, 25 bp, Homo sapien
gatggactgcagcttcctgaacacg

SEQ ID NO: 5099936 - DNA, 25 bp, Homo sapien
cagggactttgaggctggcatacaa

SEQ ID NO: 5099937 - DNA, 25 bp, Homo sapien
tacaagcattcttcgagcagggact

SEQ ID NO: 5099938 - DNA, 25 bp, Homo sapien
caatgcccgccttatgtggaatgct

SEQ ID NO: 5099939 - DNA, 25 bp, Homo sapien
tgtcgagtgaacttgatgagcggct

SEQ ID NO: 5099940 - DNA, 25 bp, Homo sapien
tgccagtagattgacggatagcccg

SEQ ID NO: 5099941 - DNA, 25 bp, Homo sapien
ctggcctaaaccctgctggatgaaa

SEQ ID NO: 5099942 - DNA, 25 bp, Homo sapien
ttgaatttgttgtaagtgatctgat

SEQ ID NO: 5099943 - DNA, 25 bp, Homo sapien
aatttgttgtaagtgatctgattgg

SEQ ID NO: 5099944 - DNA, 25 bp, Homo sapien
cttgaatttgttgtaagtgatctga

SEQ ID NO: 5099945 - DNA, 25 bp, Homo sapien
cctggaatggaggaacaaccatggc

SEQ ID NO: 5099946 - DNA, 25 bp, Homo sapien
tctcagcctgcggtgggtactgtga

SEQ ID NO: 5099947 - DNA, 25 bp, Homo sapien
tagccatgtttgctggatgctcctg

SEQ ID NO: 5099948 - DNA, 25 bp, Homo sapien
agctgcgggcactgactggttatga

SEQ ID NO: 5099949 - DNA, 25 bp, Homo sapien
cccatggcggtatccccggtggctg

SEQ ID NO: 5099950 - DNA, 25 bp, Homo sapien
ctctgtgtttattgccagagtccct

SEQ ID NO: 5099951 - DNA, 25 bp, Homo sapien
ctgcttggccctgccgactccccat

SEQ ID NO: 5099952 - DNA, 25 bp, Homo sapien
ggtccctgccgcccaaataatcttg

SEQ ID NO: 5099953 - DNA, 25 bp, Homo sapien
aagggtacttgatggtattggtgcc

SEQ ID NO: 5099954 - DNA, 25 bp, Homo sapien
agagaggtggtgaaagcgaatcctt

SEQ ID NO: 5099955 - DNA, 25 bp, Homo sapien
ttctggaagggtacttgatggtatt

SEQ ID NO: 5099956 - DNA, 25 bp, Homo sapien
gtgaaagcgaatccttctcttctgg

SEQ ID NO: 5099957 - DNA, 25 bp, Homo sapien
catcagcaatggagggtgcctgctc

SEQ ID NO: 5099958 - DNA, 25 bp, Homo sapien
aaatgactgccaagtgtgtattctc

SEQ ID NO: 5099959 - DNA, 25 bp, Homo sapien
ggctctgaggaacagctcttccctt

SEQ ID NO: 5099960 - DNA, 25 bp, Homo sapien
gaggaacagctcttccctttgttaa

SEQ ID NO: 5099961 - DNA, 25 bp, Homo sapien
gtgtgcctaggacacatccatctcc

SEQ ID NO: 5099962 - DNA, 25 bp, Homo sapien
tttacactgaagtatcagtgtgcct

SEQ ID NO: 5099963 - DNA, 25 bp, Homo sapien
tatcagtgtgcctaggacacatcca

SEQ ID NO: 5099964 - DNA, 25 bp, Homo sapien
ccttcgcctctcttcgactcatctt

SEQ ID NO: 5099965 - DNA, 25 bp, Homo sapien
ggttaatgtgccctgaaatattccc

SEQ ID NO: 5099966 - DNA, 25 bp, Homo sapien
catctggattataatgtgtgagttt

SEQ ID NO: 5099967 - DNA, 25 bp, Homo sapien
tccccttggcctagggcttgatggt

SEQ ID NO: 5099968 - DNA, 25 bp, Homo sapien
ttttcttgataagtgtcttggatgc

SEQ ID NO: 5099969 - DNA, 25 bp, Homo sapien
gcttggctgatgagcccaggctctg

SEQ ID NO: 5099970 - DNA, 25 bp, Homo sapien
aggacattgcaggagcccaggcttg

SEQ ID NO: 5099971 - DNA, 25 bp, Homo sapien
cccaggcttggctgatgagcccagg

SEQ ID NO: 5099972 - DNA, 25 bp, Homo sapien
gaggagaggacattgcaggagccca

SEQ ID NO: 5099973 - DNA, 25 bp, Homo sapien
tctgctcagcacttatcaaggtact

SEQ ID NO: 5099974 - DNA, 25 bp, Homo sapien
tgctcagcacttatcaaggtactag

SEQ ID NO: 5099975 - DNA, 25 bp, Homo sapien
ggtttctgcaattgccaaattctct

SEQ ID NO: 5099976 - DNA, 25 bp, Homo sapien
aatgaggtttctgcaattgccaaat

SEQ ID NO: 5099977 - DNA, 25 bp, Homo sapien
cagctggcctgcaaggatcactgca

SEQ ID NO: 5099978 - DNA, 25 bp, Homo sapien
agctggcctgcaaggatcactgcag

SEQ ID NO: 5099979 - DNA, 25 bp, Homo sapien
tccgtagaaagctatttccactgtg

SEQ ID NO: 5099980 - DNA, 25 bp, Homo sapien
gaaatagatctgtctcttccaactt

SEQ ID NO: 5099981 - DNA, 25 bp, Homo sapien
gaaaacactcggtgagaagaaatag

SEQ ID NO: 5099982 - DNA, 25 bp, Homo sapien
tgctctccattccaatatgtctgaa

SEQ ID NO: 5099983 - DNA, 25 bp, Homo sapien
gaagcaggccatttgcagctcttac

SEQ ID NO: 5099984 - DNA, 25 bp, Homo sapien
gcaggccatttgcagctcttacacc

SEQ ID NO: 5099985 - DNA, 25 bp, Homo sapien
ctagaagcaggccatttgcagctct

SEQ ID NO: 5099986 - DNA, 25 bp, Homo sapien
ggccatttgcagctcttacaccttc

SEQ ID NO: 5099987 - DNA, 25 bp, Homo sapien
gcagacaccctgaacttccgccaaa

SEQ ID NO: 5099988 - DNA, 25 bp, Homo sapien
ttccgccaaaccgagctgctctgag

SEQ ID NO: 5099989 - DNA, 25 bp, Homo sapien
caccctgaacttccgccaaaccgag

SEQ ID NO: 5099990 - DNA, 25 bp, Homo sapien
tgaacttccgccaaaccgagctgct

SEQ ID NO: 5099991 - DNA, 25 bp, Homo sapien
actggttgtatcaggaaaatttcca

SEQ ID NO: 5099992 - DNA, 25 bp, Homo sapien
tggttgtatcaggaaaatttccacc

SEQ ID NO: 5099993 - DNA, 25 bp, Homo sapien
gtcgaccaagaaactggttgtatca

SEQ ID NO: 5099994 - DNA, 25 bp, Homo sapien
ccaagaaactggttgtatcaggaaa

SEQ ID NO: 5099995 - DNA, 25 bp, Homo sapien
tccgtgaggaagtgatccctgctac

SEQ ID NO: 5099996 - DNA, 25 bp, Homo sapien
ctgggattcctcctgtattcctgct

SEQ ID NO: 5099997 - DNA, 25 bp, Homo sapien
cctgctacttcctactcgggctgga

SEQ ID NO: 5099998 - DNA, 25 bp, Homo sapien
cttctggtttatcattagcactggc

SEQ ID NO: 5099999 - DNA, 25 bp, Homo sapien
aacaggctgagataccaagtttctt

SEQ ID NO: 5100000 - DNA, 25 bp, Homo sapien
tatttgaacaggctgagataccaag

SEQ ID NO: 5100001 - DNA, 25 bp, Homo sapien
ctgtatttgaacaggctgagatacc

SEQ ID NO: 5100002 - DNA, 25 bp, Homo sapien
gctgagataccaagtttctttcttt

SEQ ID NO: 5100003 - DNA, 25 bp, Homo sapien
ggcaccattatggtctgctcgttca

SEQ ID NO: 5100004 - DNA, 25 bp, Homo sapien
tcagttcaatcgctatttcgccaga

SEQ ID NO: 5100005 - DNA, 25 bp, Homo sapien
aaggcagtcaattcactctcatgag

SEQ ID NO: 5100006 - DNA, 25 bp, Homo sapien
gacttcagatgtactaaggcagtca

SEQ ID NO: 5100007 - DNA, 25 bp, Homo sapien
aagcaggaagacactatttcggtat

SEQ ID NO: 5100008 - DNA, 25 bp, Homo sapien
caggaagacactatttcggtatgac

SEQ ID NO: 5100009 - DNA, 25 bp, Homo sapien
agcaggaagacactatttcggtatg

SEQ ID NO: 5100010 - DNA, 25 bp, Homo sapien
gcaggaagacactatttcggtatga

SEQ ID NO: 5100011 - DNA, 25 bp, Homo sapien
tattataaacccgaggctcgataac

SEQ ID NO: 5100012 - DNA, 25 bp, Homo sapien
tcgataacagaaggagttacagcct

SEQ ID NO: 5100013 - DNA, 25 bp, Homo sapien
gagttttggattcaagttgtgaacc

SEQ ID NO: 5100014 - DNA, 25 bp, Homo sapien
taattgaccaaggagttttggattc

SEQ ID NO: 5100015 - DNA, 25 bp, Homo sapien
gccctctgtcaatcttttcctgaat

SEQ ID NO: 5100016 - DNA, 25 bp, Homo sapien
cctgaattccagctgtataccatct

SEQ ID NO: 5100017 - DNA, 25 bp, Homo sapien
tttcaatccatatgacaatactccc

SEQ ID NO: 5100018 - DNA, 25 bp, Homo sapien
cacaaaatagacttcctgatgccct

SEQ ID NO: 5100019 - DNA, 25 bp, Homo sapien
atcgtgctcattaggatgtgccggc

SEQ ID NO: 5100020 - DNA, 25 bp, Homo sapien
ccagggcatttgaccatcgtgctca

SEQ ID NO: 5100021 - DNA, 25 bp, Homo sapien
gatgccgcgcgctcactgcgtctgt

SEQ ID NO: 5100022 - DNA, 25 bp, Homo sapien
gatgtgccggcaaaccggatgccgc

SEQ ID NO: 5100023 - DNA, 25 bp, Homo sapien
tgcatatggccacaacatatggcaa

SEQ ID NO: 5100024 - DNA, 25 bp, Homo sapien
tatgcatatggccacaacatatggc

SEQ ID NO: 5100025 - DNA, 25 bp, Homo sapien
atatgcatatggccacaacatatgg

SEQ ID NO: 5100026 - DNA, 25 bp, Homo sapien
catatggccacaacatatggcaaac

SEQ ID NO: 5100027 - DNA, 25 bp, Homo sapien
aatctgccaagggtagggtcaatac

SEQ ID NO: 5100028 - DNA, 25 bp, Homo sapien
tagggtcaatacttgatctgcagag

SEQ ID NO: 5100029 - DNA, 25 bp, Homo sapien
tcactaaggaaacttttccttgcag

SEQ ID NO: 5100030 - DNA, 25 bp, Homo sapien
ttccttgcaggattgaaggagggaa

SEQ ID NO: 5100031 - DNA, 25 bp, Homo sapien
ctctaaacacctgggttctgagagc

SEQ ID NO: 5100032 - DNA, 25 bp, Homo sapien
ctctctaaacacctgggttctgaga

SEQ ID NO: 5100033 - DNA, 25 bp, Homo sapien
tctctaaacacctgggttctgagag

SEQ ID NO: 5100034 - DNA, 25 bp, Homo sapien
ggaaaagcctgagctatggtaagtg

SEQ ID NO: 5100035 - DNA, 25 bp, Homo sapien
cgggttcgggaaaagcctgagctat

SEQ ID NO: 5100036 - DNA, 25 bp, Homo sapien
ttcgggaaaagcctgagctatggta

SEQ ID NO: 5100037 - DNA, 25 bp, Homo sapien
tcgggttcgggaaaagcctgagcta

SEQ ID NO: 5100038 - DNA, 25 bp, Homo sapien
catcattcatttttatggttaactc

SEQ ID NO: 5100039 - DNA, 25 bp, Homo sapien
tcattcatttttatggttaactcac

SEQ ID NO: 5100040 - DNA, 25 bp, Homo sapien
acatcattcatttttatggttaact

SEQ ID NO: 5100041 - DNA, 25 bp, Homo sapien
cacatcattcatttttatggttaac

SEQ ID NO: 5100042 - DNA, 25 bp, Homo sapien
cttctcctggacatggaatgttcat

SEQ ID NO: 5100043 - DNA, 25 bp, Homo sapien
gaaagcatgaaggggctccacccca

SEQ ID NO: 5100044 - DNA, 25 bp, Homo sapien
aaccataacctgaggtgttggggtg

SEQ ID NO: 5100045 - DNA, 25 bp, Homo sapien
gggacacctccagagcttgtatcag

SEQ ID NO: 5100046 - DNA, 25 bp, Homo sapien
taaaccttggttgatgtctactgcc

SEQ ID NO: 5100047 - DNA, 25 bp, Homo sapien
tgcattggctccttgaactcgtgaa

SEQ ID NO: 5100048 - DNA, 25 bp, Homo sapien
tgaggccctctggtatcagtccacc

SEQ ID NO: 5100049 - DNA, 25 bp, Homo sapien
gcatggcattgcaagcgacctagat

SEQ ID NO: 5100050 - DNA, 25 bp, Homo sapien
cattttgtcccattgagagcagcca

SEQ ID NO: 5100051 - DNA, 25 bp, Homo sapien
gaaacgataatttggtgagccgcat

SEQ ID NO: 5100052 - DNA, 25 bp, Homo sapien
tgtctgcgcgttagcacacagcagc

SEQ ID NO: 5100053 - DNA, 25 bp, Homo sapien
gagcagccaagagactacatgcgtg

SEQ ID NO: 5100054 - DNA, 25 bp, Homo sapien
aggaggtgtttaagcaatcgcaggt

SEQ ID NO: 5100055 - DNA, 25 bp, Homo sapien
attttctttggaatgcatatctgaa

SEQ ID NO: 5100056 - DNA, 25 bp, Homo sapien
atgcatatctgaattgagttttgag

SEQ ID NO: 5100057 - DNA, 25 bp, Homo sapien
aggtgtttaagcaatcgcaggtagg

SEQ ID NO: 5100058 - DNA, 25 bp, Homo sapien
gctttgattaagacggccagcaccg

SEQ ID NO: 5100059 - DNA, 25 bp, Homo sapien
gaataacggagacatttctaaagcc

SEQ ID NO: 5100060 - DNA, 25 bp, Homo sapien
taagatagccatgcctacaggaaca

SEQ ID NO: 5100061 - DNA, 25 bp, Homo sapien
caaatggaggatcagaagtcagact

SEQ ID NO: 5100062 - DNA, 25 bp, Homo sapien
ccttggggatgggatgccagtctct

SEQ ID NO: 5100063 - DNA, 25 bp, Homo sapien
gccagtctcttccatgctgggccat

SEQ ID NO: 5100064 - DNA, 25 bp, Homo sapien
tcttccctatccttggggatgggat

SEQ ID NO: 5100065 - DNA, 25 bp, Homo sapien
actggctcttggagagcatgtcttc

SEQ ID NO: 5100066 - DNA, 25 bp, Homo sapien
ccttgatcatggtccagagaaccca

SEQ ID NO: 5100067 - DNA, 25 bp, Homo sapien
tctgcattaggcaaccctttctggg

SEQ ID NO: 5100068 - DNA, 25 bp, Homo sapien
tcagccatgccttgatcatggtcca

SEQ ID NO: 5100069 - DNA, 25 bp, Homo sapien
ccctacagagtctacaattgattgt

SEQ ID NO: 5100070 - DNA, 25 bp, Homo sapien
gaatgaacgaagtttgctccctagg

SEQ ID NO: 5100071 - DNA, 25 bp, Homo sapien
atgcaaatgaatgaacgaagtttgc

SEQ ID NO: 5100072 - DNA, 25 bp, Homo sapien
aagtttgctccctaggcttctggcc

SEQ ID NO: 5100073 - DNA, 25 bp, Homo sapien
tgaacgaagtttgctccctaggctt

SEQ ID NO: 5100074 - DNA, 25 bp, Homo sapien
gagactgccccttcagcagagtcct

SEQ ID NO: 5100075 - DNA, 25 bp, Homo sapien
ggcggaggagactgccccttcagca

SEQ ID NO: 5100076 - DNA, 25 bp, Homo sapien
tctccaagaaactcgaaatgaactg

SEQ ID NO: 5100077 - DNA, 25 bp, Homo sapien
caggctgcaatgcttctgctatagg

SEQ ID NO: 5100078 - DNA, 25 bp, Homo sapien
gagggctatcttgatctcgtgcttc

SEQ ID NO: 5100079 - DNA, 25 bp, Homo sapien
ttttgccgagggctatcttgatctc

SEQ ID NO: 5100080 - DNA, 25 bp, Homo sapien
ctccacagttttgccgagggctatc

SEQ ID NO: 5100081 - DNA, 25 bp, Homo sapien
gatctcgtgcttccaaccgggtctc

SEQ ID NO: 5100082 - DNA, 25 bp, Homo sapien
agtttggctttatccagcttctgag

SEQ ID NO: 5100083 - DNA, 25 bp, Homo sapien
tagtttggctttatccagcttctga

SEQ ID NO: 5100084 - DNA, 25 bp, Homo sapien
tttggctttatccagcttctgagcc

SEQ ID NO: 5100085 - DNA, 25 bp, Homo sapien
aatagtttggctttatccagcttct

SEQ ID NO: 5100086 - DNA, 25 bp, Homo sapien
ctgtgacccatgtgagtcacacctg

SEQ ID NO: 5100087 - DNA, 25 bp, Homo sapien
cctgtgtgtccactggctggaagcc

SEQ ID NO: 5100088 - DNA, 25 bp, Homo sapien
cattttagctgaagttggaatgcca

SEQ ID NO: 5100089 - DNA, 25 bp, Homo sapien
aagatttgcttgagcagaatcatag

SEQ ID NO: 5100090 - DNA, 25 bp, Homo sapien
catagaggtcattgattggcaggcc

SEQ ID NO: 5100091 - DNA, 25 bp, Homo sapien
tgagcagaatcatagaggtcattga

SEQ ID NO: 5100092 - DNA, 25 bp, Homo sapien
gaggaactaattgcagcgtgagtgg

SEQ ID NO: 5100093 - DNA, 25 bp, Homo sapien
agtggggccacgagacaaatgctgc

SEQ ID NO: 5100094 - DNA, 25 bp, Homo sapien
cgaggaactaattgcagcgtgagtg

SEQ ID NO: 5100095 - DNA, 25 bp, Homo sapien
gtggggccacgagacaaatgctgca

SEQ ID NO: 5100096 - DNA, 25 bp, Homo sapien
ataatattccatgatctggaacttc

SEQ ID NO: 5100097 - DNA, 25 bp, Homo sapien
tctgccctccctaggtaataatatt

SEQ ID NO: 5100098 - DNA, 25 bp, Homo sapien
aatattccatgatctggaacttctt

SEQ ID NO: 5100099 - DNA, 25 bp, Homo sapien
tgccctccctaggtaataatattcc

SEQ ID NO: 5100100 - DNA, 25 bp, Homo sapien
gggatctgttccttctccgaggaca

SEQ ID NO: 5100101 - DNA, 25 bp, Homo sapien
ctggatgccctgggatctgttcctt

SEQ ID NO: 5100102 - DNA, 25 bp, Homo sapien
cctctggatgccctgggatctgttc

SEQ ID NO: 5100103 - DNA, 25 bp, Homo sapien
ggatctgttccttctccgaggacat

SEQ ID NO: 5100104 - DNA, 25 bp, Homo sapien
cttttcaccttggcacaacaggaaa

SEQ ID NO: 5100105 - DNA, 25 bp, Homo sapien
ttttcaccttggcacaacaggaaat

SEQ ID NO: 5100106 - DNA, 25 bp, Homo sapien
ttcaccttggcacaacaggaaatcc

SEQ ID NO: 5100107 - DNA, 25 bp, Homo sapien
tttcaccttggcacaacaggaaatc

SEQ ID NO: 5100108 - DNA, 25 bp, Homo sapien
gaccgctcagattaggtgctgctga

SEQ ID NO: 5100109 - DNA, 25 bp, Homo sapien
tgtccaagggaaatcaagcccaaat

SEQ ID NO: 5100110 - DNA, 25 bp, Homo sapien
gctgctgatgcataattttgtgtgt

SEQ ID NO: 5100111 - DNA, 25 bp, Homo sapien
gaaggcttccagattggtcccagtt

SEQ ID NO: 5100112 - DNA, 25 bp, Homo sapien
ttctgatcttaggaggatgctctcc

SEQ ID NO: 5100113 - DNA, 25 bp, Homo sapien
cttctgatcttaggaggatgctctc

SEQ ID NO: 5100114 - DNA, 25 bp, Homo sapien
tctgatcttaggaggatgctctcca

SEQ ID NO: 5100115 - DNA, 25 bp, Homo sapien
ctgatcttaggaggatgctctccat

SEQ ID NO: 5100116 - DNA, 25 bp, Homo sapien
tctgctcttgatcccagcaagagaa

SEQ ID NO: 5100117 - DNA, 25 bp, Homo sapien
gttgccagtccacgaagatgaccca

SEQ ID NO: 5100118 - DNA, 25 bp, Homo sapien
gctcttgatcccagcaagagaactc

SEQ ID NO: 5100119 - DNA, 25 bp, Homo sapien
gatgacccagtctaaccaagtcctc

SEQ ID NO: 5100120 - DNA, 25 bp, Homo sapien
tcaagaccctaatcttccatgaagc

SEQ ID NO: 5100121 - DNA, 25 bp, Homo sapien
cctaatcttccatgaagcctctatc

SEQ ID NO: 5100122 - DNA, 25 bp, Homo sapien
ctatcaaagggacaacaggggtgga

SEQ ID NO: 5100123 - DNA, 25 bp, Homo sapien
tcaccttgctcaagaccctaatctt

SEQ ID NO: 5100124 - DNA, 25 bp, Homo sapien
aatgattcggttggtcactgatgcc

SEQ ID NO: 5100125 - DNA, 25 bp, Homo sapien
ctctgacaagcatcacccggtggat

SEQ ID NO: 5100126 - DNA, 25 bp, Homo sapien
tggacaaatgtccaaggcggcttcc

SEQ ID NO: 5100127 - DNA, 25 bp, Homo sapien
taaaactctcttccgaggtcattgg

SEQ ID NO: 5100128 - DNA, 25 bp, Homo sapien
ctgcagccagttgggaaaaggcaga

SEQ ID NO: 5100129 - DNA, 25 bp, Homo sapien
cagccagttgggaaaaggcagacct

SEQ ID NO: 5100130 - DNA, 25 bp, Homo sapien
tttgaactctcttctgtggggcatg

SEQ ID NO: 5100131 - DNA, 25 bp, Homo sapien
ttctcaggtggtgttctccctgctc

SEQ ID NO: 5100132 - DNA, 25 bp, Homo sapien
caggcagagcagtgataacatctga

SEQ ID NO: 5100133 - DNA, 25 bp, Homo sapien
taacatctgaactgagggtgctttt

SEQ ID NO: 5100134 - DNA, 25 bp, Homo sapien
tccagggtggacactaaatcttctg

SEQ ID NO: 5100135 - DNA, 25 bp, Homo sapien
tgaaaactgtgcagcaaaagcaacc

SEQ ID NO: 5100136 - DNA, 25 bp, Homo sapien
tcttcaatcgctgcctctactgttt

SEQ ID NO: 5100137 - DNA, 25 bp, Homo sapien
agctcctgtgcaaccaaaccaactt

SEQ ID NO: 5100138 - DNA, 25 bp, Homo sapien
ttcagctcctgtgcaaccaaaccaa

SEQ ID NO: 5100139 - DNA, 25 bp, Homo sapien
ctgttactttcttcaatcgctgcct

SEQ ID NO: 5100140 - DNA, 25 bp, Homo sapien
ccacttttgctctgtgagtcaaatt

SEQ ID NO: 5100141 - DNA, 25 bp, Homo sapien
tgctctgtgagtcaaattgaagttc

SEQ ID NO: 5100142 - DNA, 25 bp, Homo sapien
aagttcttgaaatggggccgatggc

SEQ ID NO: 5100143 - DNA, 25 bp, Homo sapien
ctgtgagtcaaattgaagttcttga

SEQ ID NO: 5100144 - DNA, 25 bp, Homo sapien
cataatacccctttgcgcagagtgt

SEQ ID NO: 5100145 - DNA, 25 bp, Homo sapien
gcagagtgtctaacatatttgaaca

SEQ ID NO: 5100146 - DNA, 25 bp, Homo sapien
tgtatgcccaagtctatctgtggag

SEQ ID NO: 5100147 - DNA, 25 bp, Homo sapien
tctgtggagacacataatacccctt

SEQ ID NO: 5100148 - DNA, 25 bp, Homo sapien
ccattgtaggacacacgtctgcatc

SEQ ID NO: 5100149 - DNA, 25 bp, Homo sapien
cctttttcaaccattgtaggacaca

SEQ ID NO: 5100150 - DNA, 25 bp, Homo sapien
gtaggacacacgtctgcatcaaatg

SEQ ID NO: 5100151 - DNA, 25 bp, Homo sapien
cacacgtctgcatcaaatgtagcaa

SEQ ID NO: 5100152 - DNA, 25 bp, Homo sapien
aacttttccaattccaccagcttct

SEQ ID NO: 5100153 - DNA, 25 bp, Homo sapien
tcatctcttctgtcctggaaacttt

SEQ ID NO: 5100154 - DNA, 25 bp, Homo sapien
ccaattccaccagcttctcacgttt

SEQ ID NO: 5100155 - DNA, 25 bp, Homo sapien
tgtcctggaaacttttccaattcca

SEQ ID NO: 5100156 - DNA, 25 bp, Homo sapien
gctccgatttaagtcttgatctttc

SEQ ID NO: 5100157 - DNA, 25 bp, Homo sapien
gcatagctccgatttaagtcttgat

SEQ ID NO: 5100158 - DNA, 25 bp, Homo sapien
tcccatagcatagctccgatttaag

SEQ ID NO: 5100159 - DNA, 25 bp, Homo sapien
tttccatatcccatagcatagctcc

SEQ ID NO: 5100160 - DNA, 25 bp, Homo sapien
aatgtgataatgtttccttatcatc

SEQ ID NO: 5100161 - DNA, 25 bp, Homo sapien
taattcttgcctcaatcagctctgg

SEQ ID NO: 5100162 - DNA, 25 bp, Homo sapien
tttcataatcccctaaacactgtct

SEQ ID NO: 5100163 - DNA, 25 bp, Homo sapien
aaacactgtctaattcttgcctcaa

SEQ ID NO: 5100164 - DNA, 25 bp, Homo sapien
aacatatagggttgtggactggaac

SEQ ID NO: 5100165 - DNA, 25 bp, Homo sapien
gggacagtctctaacagggtgcttc

SEQ ID NO: 5100166 - DNA, 25 bp, Homo sapien
gcaaaaaccctgtcttctatgaaag

SEQ ID NO: 5100167 - DNA, 25 bp, Homo sapien
caatgaatttcaaagcgagcagcag

SEQ ID NO: 5100168 - DNA, 25 bp, Homo sapien
tgcccaatggcaggaacctgtcttg

SEQ ID NO: 5100169 - DNA, 25 bp, Homo sapien
cctgcccaatggcaggaacctgtct

SEQ ID NO: 5100170 - DNA, 25 bp, Homo sapien
tcccaccctgcccaatggcaggaac

SEQ ID NO: 5100171 - DNA, 25 bp, Homo sapien
cccaatggcaggaacctgtcttgag

SEQ ID NO: 5100172 - DNA, 25 bp, Homo sapien
tcatgatggtgttgcagaggccctc

SEQ ID NO: 5100173 - DNA, 25 bp, Homo sapien
actgtagcatgaggttcgcagagga

SEQ ID NO: 5100174 - DNA, 25 bp, Homo sapien
tccagttgatgtagatgtaagagat

SEQ ID NO: 5100175 - DNA, 25 bp, Homo sapien
cctcagatgccagagaacgtctatt

SEQ ID NO: 5100176 - DNA, 25 bp, Homo sapien
tgggccccaatgactacatgaaact

SEQ ID NO: 5100177 - DNA, 25 bp, Homo sapien
ctccttcaaaactaaatgtagtcac

SEQ ID NO: 5100178 - DNA, 25 bp, Homo sapien
aaactcagatccagattccttagtg

SEQ ID NO: 5100179 - DNA, 25 bp, Homo sapien
tccttagtgtggcatttatgagaca

SEQ ID NO: 5100180 - DNA, 25 bp, Homo sapien
aaaaatgctctaggggctaataaag

SEQ ID NO: 5100181 - DNA, 25 bp, Homo sapien
cccttataggtccttctttgtgcct

SEQ ID NO: 5100182 - DNA, 25 bp, Homo sapien
atgctctaggggctaataaaggtgt

SEQ ID NO: 5100183 - DNA, 25 bp, Homo sapien
ggcccttataggtccttctttgtgc

SEQ ID NO: 5100184 - DNA, 25 bp, Homo sapien
cagatggactgctctgactcgggct

SEQ ID NO: 5100185 - DNA, 25 bp, Homo sapien
ttcctggattgaccaagcagacaga

SEQ ID NO: 5100186 - DNA, 25 bp, Homo sapien
actgctctgactcgggctgagtgat

SEQ ID NO: 5100187 - DNA, 25 bp, Homo sapien
tgttcctggattgaccaagcagaca

SEQ ID NO: 5100188 - DNA, 25 bp, Homo sapien
gaagtcttgcggttaggcgttccaa

SEQ ID NO: 5100189 - DNA, 25 bp, Homo sapien
gtgaagtcttgcggttaggcgttcc

SEQ ID NO: 5100190 - DNA, 25 bp, Homo sapien
tgtgaagtcttgcggttaggcgttc

SEQ ID NO: 5100191 - DNA, 25 bp, Homo sapien
tgaagtcttgcggttaggcgttcca

SEQ ID NO: 5100192 - DNA, 25 bp, Homo sapien
agacagagaaggtagccttaggggt

SEQ ID NO: 5100193 - DNA, 25 bp, Homo sapien
gacagagaaggtagccttaggggtg

SEQ ID NO: 5100194 - DNA, 25 bp, Homo sapien
acagagaaggtagccttaggggtgg

SEQ ID NO: 5100195 - DNA, 25 bp, Homo sapien
cagagaaggtagccttaggggtgga

SEQ ID NO: 5100196 - DNA, 25 bp, Homo sapien
tcatgacctgtcaacagggcaggtt

SEQ ID NO: 5100197 - DNA, 25 bp, Homo sapien
gatgctcccacctgatattagtgag

SEQ ID NO: 5100198 - DNA, 25 bp, Homo sapien
gggtcatgacctgtcaacagggcag

SEQ ID NO: 5100199 - DNA, 25 bp, Homo sapien
cagggcaggttgatgctcccacctg

SEQ ID NO: 5100200 - DNA, 25 bp, Homo sapien
tgatgacagcggaggcactgacttc

SEQ ID NO: 5100201 - DNA, 25 bp, Homo sapien
agtccccatgtcaatctctgagaag

SEQ ID NO: 5100202 - DNA, 25 bp, Homo sapien
gaccagtagatcagagacagctgtg

SEQ ID NO: 5100203 - DNA, 25 bp, Homo sapien
aagggtagtgtgcatgaagtcccca

SEQ ID NO: 5100204 - DNA, 25 bp, Homo sapien
cgattcacatagcaagtagtcaggg

SEQ ID NO: 5100205 - DNA, 25 bp, Homo sapien
tgagcgccaaggcagagaagcaact

SEQ ID NO: 5100206 - DNA, 25 bp, Homo sapien
cccgggtggatctgtgctgtgaata

SEQ ID NO: 5100207 - DNA, 25 bp, Homo sapien
tgcctccggaacacgaaactcagtc

SEQ ID NO: 5100208 - DNA, 25 bp, Homo sapien
gagagtccttctgggatggtatttt

SEQ ID NO: 5100209 - DNA, 25 bp, Homo sapien
tagaaggagagtccttctgggatgg

SEQ ID NO: 5100210 - DNA, 25 bp, Homo sapien
aggagagtccttctgggatggtatt

SEQ ID NO: 5100211 - DNA, 25 bp, Homo sapien
gaaggagagtccttctgggatggta

SEQ ID NO: 5100212 - DNA, 25 bp, Homo sapien
aatgactccttctttggcgcttaag

SEQ ID NO: 5100213 - DNA, 25 bp, Homo sapien
gccaattagaaatacagccatattg

SEQ ID NO: 5100214 - DNA, 25 bp, Homo sapien
ggaccctgaagaagccaattagaaa

SEQ ID NO: 5100215 - DNA, 25 bp, Homo sapien
tttggcgcttaaggacagattctct

SEQ ID NO: 5100216 - DNA, 25 bp, Homo sapien
tctcacaggccatttgttgacattt

SEQ ID NO: 5100217 - DNA, 25 bp, Homo sapien
ctgctagaaagaccccagttctcac

SEQ ID NO: 5100218 - DNA, 25 bp, Homo sapien
gttctcacaggccatttgttgacat

SEQ ID NO: 5100219 - DNA, 25 bp, Homo sapien
tagaaagaccccagttctcacaggc

SEQ ID NO: 5100220 - DNA, 25 bp, Homo sapien
ctctctgaatttgacaccatcatga

SEQ ID NO: 5100221 - DNA, 25 bp, Homo sapien
tcatttaattcctgtcgcttcacca

SEQ ID NO: 5100222 - DNA, 25 bp, Homo sapien
tcatgaacaaccctgaagattttcc

SEQ ID NO: 5100223 - DNA, 25 bp, Homo sapien
ttcctgtcgcttcaccagggcctga

SEQ ID NO: 5100224 - DNA, 25 bp, Homo sapien
aattaagaaaaggagatgcatttac

SEQ ID NO: 5100225 - DNA, 25 bp, Homo sapien
cagatttttgagatctccggcacaa

SEQ ID NO: 5100226 - DNA, 25 bp, Homo sapien
tgggaaggaaacaacagcagatttt

SEQ ID NO: 5100227 - DNA, 25 bp, Homo sapien
gtaaattagtattgaatccagcaca

SEQ ID NO: 5100228 - DNA, 25 bp, Homo sapien
ctgggggatgtctggaggagtccag

SEQ ID NO: 5100229 - DNA, 25 bp, Homo sapien
gcttccaggaaacaaaggatagaac

SEQ ID NO: 5100230 - DNA, 25 bp, Homo sapien
aggagcttccaggaaacaaaggata

SEQ ID NO: 5100231 - DNA, 25 bp, Homo sapien
caggaaacaaaggatagaactccca

SEQ ID NO: 5100232 - DNA, 25 bp, Homo sapien
gtcagcgaggtgcagctctcagcca

SEQ ID NO: 5100233 - DNA, 25 bp, Homo sapien
tgcaatccttctatgttccctgtga

SEQ ID NO: 5100234 - DNA, 25 bp, Homo sapien
ttctccagctctataaacaaatagt

SEQ ID NO: 5100235 - DNA, 25 bp, Homo sapien
tccctgtgattgcaggtttctccag

SEQ ID NO: 5100236 - DNA, 25 bp, Homo sapien
tattattatgtgcagatgtgccagc

SEQ ID NO: 5100237 - DNA, 25 bp, Homo sapien
gcagcagcctttagtggccgtgtca

SEQ ID NO: 5100238 - DNA, 25 bp, Homo sapien
gcattttctctctgatagcgctaac

SEQ ID NO: 5100239 - DNA, 25 bp, Homo sapien
gccgtgtcagttttgcccgtattat

SEQ ID NO: 5100240 - DNA, 25 bp, Homo sapien
gagtcagcagttgccttagctccag

SEQ ID NO: 5100241 - DNA, 25 bp, Homo sapien
tcgatactctgccttgagtcagcag

SEQ ID NO: 5100242 - DNA, 25 bp, Homo sapien
cacacagggcattacagcctctcat

SEQ ID NO: 5100243 - DNA, 25 bp, Homo sapien
agctctggttctatgtgctccatca

SEQ ID NO: 5100244 - DNA, 25 bp, Homo sapien
tctttgtctctgtccattctgacat

SEQ ID NO: 5100245 - DNA, 25 bp, Homo sapien
ctttgtctctgtccattctgacatc

SEQ ID NO: 5100246 - DNA, 25 bp, Homo sapien
tttgtctctgtccattctgacatcc

SEQ ID NO: 5100247 - DNA, 25 bp, Homo sapien
ctctttgtctctgtccattctgaca

SEQ ID NO: 5100248 - DNA, 25 bp, Homo sapien
tagcaatgaaggcttgaggtccctg

SEQ ID NO: 5100249 - DNA, 25 bp, Homo sapien
gtagaagactccattgttgccacct

SEQ ID NO: 5100250 - DNA, 25 bp, Homo sapien
tgccacctggtttagcaatgaaggc

SEQ ID NO: 5100251 - DNA, 25 bp, Homo sapien
gaaacctccataagcatcagttcct

SEQ ID NO: 5100252 - DNA, 25 bp, Homo sapien
ttgtgcaaggtactgccacgggcat

SEQ ID NO: 5100253 - DNA, 25 bp, Homo sapien
tagtggtgatcctgttgcccagtgg

SEQ ID NO: 5100254 - DNA, 25 bp, Homo sapien
caccagtttccccagcgttgtgcaa

SEQ ID NO: 5100255 - DNA, 25 bp, Homo sapien
gcccagtggatgtgaccaccagttt

SEQ ID NO: 5100256 - DNA, 25 bp, Homo sapien
ctccgtgctggctgaactggatcta

SEQ ID NO: 5100257 - DNA, 25 bp, Homo sapien
tcccgtggaaggagactccgtgctg

SEQ ID NO: 5100258 - DNA, 25 bp, Homo sapien
caagggttacctctattggaatgcc

SEQ ID NO: 5100259 - DNA, 25 bp, Homo sapien
gaactggatctattcccacacagcc

SEQ ID NO: 5100260 - DNA, 25 bp, Homo sapien
gccttgtgcccagaaaagggcctga

SEQ ID NO: 5100261 - DNA, 25 bp, Homo sapien
gaaaagggcctgaaatgtgctcact

SEQ ID NO: 5100262 - DNA, 25 bp, Homo sapien
acccactgtgtggaaccatcagcca

SEQ ID NO: 5100263 - DNA, 25 bp, Homo sapien
ctgaacccactgtgtggaaccatca

SEQ ID NO: 5100264 - DNA, 25 bp, Homo sapien
ttttccacggactctcagattctcc

SEQ ID NO: 5100265 - DNA, 25 bp, Homo sapien
tgtcgacttccaagatgttttcctc

SEQ ID NO: 5100266 - DNA, 25 bp, Homo sapien
ggtggagtgggatctaggcggtcca

SEQ ID NO: 5100267 - DNA, 25 bp, Homo sapien
ttatttctgtcgacttccaagatgt

SEQ ID NO: 5100268 - DNA, 25 bp, Homo sapien
accccaaggtctcaataccagctta

SEQ ID NO: 5100269 - DNA, 25 bp, Homo sapien
ttattgaagtatcccctgtcctgcc

SEQ ID NO: 5100270 - DNA, 25 bp, Homo sapien
agatttgggtggcatccactctgtt

SEQ ID NO: 5100271 - DNA, 25 bp, Homo sapien
ggctcctggattctagatttgggtg

SEQ ID NO: 5100272 - DNA, 25 bp, Homo sapien
cacaacgattttatgaggtaggtac

SEQ ID NO: 5100273 - DNA, 25 bp, Homo sapien
tctcaataccgacagctgttaagtg

SEQ ID NO: 5100274 - DNA, 25 bp, Homo sapien
tctctgtaggaaatgtggtgagctc

SEQ ID NO: 5100275 - DNA, 25 bp, Homo sapien
aagtgtcagagtttcagacctaggc

SEQ ID NO: 5100276 - DNA, 25 bp, Homo sapien
tttgtgggcacttccatgcgggctc

SEQ ID NO: 5100277 - DNA, 25 bp, Homo sapien
catagctccgtatggagtgaggccc

SEQ ID NO: 5100278 - DNA, 25 bp, Homo sapien
gctgactgcagtaattgacccctca

SEQ ID NO: 5100279 - DNA, 25 bp, Homo sapien
gcttgaacggccctgatgtgcatga

SEQ ID NO: 5100280 - DNA, 25 bp, Homo sapien
caatgacaaccagatctactccttg

SEQ ID NO: 5100281 - DNA, 25 bp, Homo sapien
atgacaaccagatctactccttgag

SEQ ID NO: 5100282 - DNA, 25 bp, Homo sapien
gacaaccagatctactccttgagcc

SEQ ID NO: 5100283 - DNA, 25 bp, Homo sapien
ccagatctactccttgagcccacat

SEQ ID NO: 5100284 - DNA, 25 bp, Homo sapien
tacttccacatgaactaacacaatg

SEQ ID NO: 5100285 - DNA, 25 bp, Homo sapien
cacatgaactaacacaatgttctgc

SEQ ID NO: 5100286 - DNA, 25 bp, Homo sapien
tgtcgatgacactgtagaggataga

SEQ ID NO: 5100287 - DNA, 25 bp, Homo sapien
agaggcagggcttctacttctttca

SEQ ID NO: 5100288 - DNA, 25 bp, Homo sapien
gttcttggctactttggttatagcg

SEQ ID NO: 5100289 - DNA, 25 bp, Homo sapien
tggttatagcgttatgagaagtgga

SEQ ID NO: 5100290 - DNA, 25 bp, Homo sapien
ggctactttggttatagcgttatga

SEQ ID NO: 5100291 - DNA, 25 bp, Homo sapien
cgttatgagaagtggagtaagaata

SEQ ID NO: 5100292 - DNA, 25 bp, Homo sapien
aagcgttcactaactgtgccggctc

SEQ ID NO: 5100293 - DNA, 25 bp, Homo sapien
tgtgccggctcgctgttctctttcc

SEQ ID NO: 5100294 - DNA, 25 bp, Homo sapien
cctcttctgtgaagcgttcactaac

SEQ ID NO: 5100295 - DNA, 25 bp, Homo sapien
aaatcgatcaagtcccccagtacag

SEQ ID NO: 5100296 - DNA, 25 bp, Homo sapien
gatagcaccgtaattccttgatttg

SEQ ID NO: 5100297 - DNA, 25 bp, Homo sapien
caccgtaattccttgatttggtgct

SEQ ID NO: 5100298 - DNA, 25 bp, Homo sapien
caggatagcaccgtaattccttgat

SEQ ID NO: 5100299 - DNA, 25 bp, Homo sapien
cgtaattccttgatttggtgctttc

SEQ ID NO: 5100300 - DNA, 25 bp, Homo sapien
cctttgatccctgccatatggagct

SEQ ID NO: 5100301 - DNA, 25 bp, Homo sapien
taatattgcctctgatcttgttgtc

SEQ ID NO: 5100302 - DNA, 25 bp, Homo sapien
ggagctcttccattgattaccacat

SEQ ID NO: 5100303 - DNA, 25 bp, Homo sapien
tgtccaattaacagtactggctggc

SEQ ID NO: 5100304 - DNA, 25 bp, Homo sapien
cctttgtgtgccgaggtattctgac

SEQ ID NO: 5100305 - DNA, 25 bp, Homo sapien
gaggtattctgacagtgttcattca

SEQ ID NO: 5100306 - DNA, 25 bp, Homo sapien
tcctgctggtaaccagtcaggagct

SEQ ID NO: 5100307 - DNA, 25 bp, Homo sapien
tccggccctcctttgtgtgccgagg

SEQ ID NO: 5100308 - DNA, 25 bp, Homo sapien
cttgtttggagacgaatgaatggag

SEQ ID NO: 5100309 - DNA, 25 bp, Homo sapien
tggagacgaatgaatggaggcccac

SEQ ID NO: 5100310 - DNA, 25 bp, Homo sapien
tttggagacgaatgaatggaggccc

SEQ ID NO: 5100311 - DNA, 25 bp, Homo sapien
tgtttggagacgaatgaatggaggc

SEQ ID NO: 5100312 - DNA, 25 bp, Homo sapien
tcctcattaatttgtgtgagctcag

SEQ ID NO: 5100313 - DNA, 25 bp, Homo sapien
tgtacggcctgtgagctaattgctc

SEQ ID NO: 5100314 - DNA, 25 bp, Homo sapien
gctcagctcggataacaaacggtgg

SEQ ID NO: 5100315 - DNA, 25 bp, Homo sapien
attgctctaattgagtgggagggcc

SEQ ID NO: 5100316 - DNA, 25 bp, Homo sapien
gggctgttcttgcaggaggaaggga

SEQ ID NO: 5100317 - DNA, 25 bp, Homo sapien
ccagagtgtttgccagcaacagccc

SEQ ID NO: 5100318 - DNA, 25 bp, Homo sapien
tgttcttgcaggaggaagggacgag

SEQ ID NO: 5100319 - DNA, 25 bp, Homo sapien
cagagtgtttgccagcaacagccct

SEQ ID NO: 5100320 - DNA, 25 bp, Homo sapien
gacctccgtgactgtgaaggagctg

SEQ ID NO: 5100321 - DNA, 25 bp, Homo sapien
taaagcccaaccactccactctctt

SEQ ID NO: 5100322 - DNA, 25 bp, Homo sapien
gacactaaagcccaaccactccact

SEQ ID NO: 5100323 - DNA, 25 bp, Homo sapien
ctttctttgacctccgtgactgtga

SEQ ID NO: 5100324 - DNA, 25 bp, Homo sapien
tcttccgggtccaggagtctgtgtc

SEQ ID NO: 5100325 - DNA, 25 bp, Homo sapien
tggtgagtgtacgagagcatcttcc

SEQ ID NO: 5100326 - DNA, 25 bp, Homo sapien
tgtgtccagacactgctacttgagg

SEQ ID NO: 5100327 - DNA, 25 bp, Homo sapien
ccttgttgggaagcgcactggtctg

SEQ ID NO: 5100328 - DNA, 25 bp, Homo sapien
tcagtgtggagaccgaagccttctt

SEQ ID NO: 5100329 - DNA, 25 bp, Homo sapien
tgatgtcagtgtggagaccgaagcc

SEQ ID NO: 5100330 - DNA, 25 bp, Homo sapien
gagggaaggtcttgctgatgtcagt

SEQ ID NO: 5100331 - DNA, 25 bp, Homo sapien
tgtggagaccgaagccttcttgtct

SEQ ID NO: 5100332 - DNA, 25 bp, Homo sapien
tgaaatttcttcatcaaggataggc

SEQ ID NO: 5100333 - DNA, 25 bp, Homo sapien
caaggataggcttttggttaggcat

SEQ ID NO: 5100334 - DNA, 25 bp, Homo sapien
aggataggcttttggttaggcattg

SEQ ID NO: 5100335 - DNA, 25 bp, Homo sapien
aatttcttcatcaaggataggcttt

SEQ ID NO: 5100336 - DNA, 25 bp, Homo sapien
aggctagagatcttgcaccacacca

SEQ ID NO: 5100337 - DNA, 25 bp, Homo sapien
tgtctgacctgtgggcattgggcct

SEQ ID NO: 5100338 - DNA, 25 bp, Homo sapien
attgggcctggttccctgcgtgcag

SEQ ID NO: 5100339 - DNA, 25 bp, Homo sapien
cctctgccggccaaaaggctagaga

SEQ ID NO: 5100340 - DNA, 25 bp, Homo sapien
caatttcctgtaaccgtgcttgaca

SEQ ID NO: 5100341 - DNA, 25 bp, Homo sapien
gactcaggaaatggcacgactggcc

SEQ ID NO: 5100342 - DNA, 25 bp, Homo sapien
caggctaatggaagctcttttgtca

SEQ ID NO: 5100343 - DNA, 25 bp, Homo sapien
gcagcatcttaataatagggccacg

SEQ ID NO: 5100344 - DNA, 25 bp, Homo sapien
agtcctggtcgattgtctgccgcca

SEQ ID NO: 5100345 - DNA, 25 bp, Homo sapien
ctcgcccaagtgatggtgaaaagcc

SEQ ID NO: 5100346 - DNA, 25 bp, Homo sapien
tctgtaggtgtgttgtcgaggagct

SEQ ID NO: 5100347 - DNA, 25 bp, Homo sapien
ttctgtagttcacgttcagtcctgg

SEQ ID NO: 5100348 - DNA, 25 bp, Homo sapien
ctgtaacgtgagcaccttttggatt

SEQ ID NO: 5100349 - DNA, 25 bp, Homo sapien
gtaacgtgagcaccttttggatttg

SEQ ID NO: 5100350 - DNA, 25 bp, Homo sapien
taacgtgagcaccttttggatttgg

SEQ ID NO: 5100351 - DNA, 25 bp, Homo sapien
aacgtgagcaccttttggatttggg

SEQ ID NO: 5100352 - DNA, 25 bp, Homo sapien
aacgtggaaagtagtggatgtcttc

SEQ ID NO: 5100353 - DNA, 25 bp, Homo sapien
gggtcccatgatccgtttctgggcc

SEQ ID NO: 5100354 - DNA, 25 bp, Homo sapien
gatgtcttcctatttcgaatggact

SEQ ID NO: 5100355 - DNA, 25 bp, Homo sapien
cttagtggcgatgaggaaaaacgtg

SEQ ID NO: 5100356 - DNA, 25 bp, Homo sapien
cacattccatgtatcctgggctttt

SEQ ID NO: 5100357 - DNA, 25 bp, Homo sapien
ctaggcctttggatggctgagtgca

SEQ ID NO: 5100358 - DNA, 25 bp, Homo sapien
cctgggcttttcttgcctaggcctt

SEQ ID NO: 5100359 - DNA, 25 bp, Homo sapien
ggagatgccacattccatgtatcct

SEQ ID NO: 5100360 - DNA, 25 bp, Homo sapien
tctgggttctctaggtcaaatcccc

SEQ ID NO: 5100361 - DNA, 25 bp, Homo sapien
caaatcccctttccctttgattcat

SEQ ID NO: 5100362 - DNA, 25 bp, Homo sapien
tctgtggtctgggttctctaggtca

SEQ ID NO: 5100363 - DNA, 25 bp, Homo sapien
tcaaatcccctttccctttgattca

SEQ ID NO: 5100364 - DNA, 25 bp, Homo sapien
cattcacgtaacgatatggtgcttg

SEQ ID NO: 5100365 - DNA, 25 bp, Homo sapien
gaaactccatgctcactgttgacag

SEQ ID NO: 5100366 - DNA, 25 bp, Homo sapien
tactagagtttgtgttctcacggga

SEQ ID NO: 5100367 - DNA, 25 bp, Homo sapien
aacacatccttgacacttgccttga

SEQ ID NO: 5100368 - DNA, 25 bp, Homo sapien
gtggctgttgtcgcaagcccaccag

SEQ ID NO: 5100369 - DNA, 25 bp, Homo sapien
gagcaaagcgcgtggctgttgtcgc

SEQ ID NO: 5100370 - DNA, 25 bp, Homo sapien
aaagggcaggaatgagcaaagcgcg

SEQ ID NO: 5100371 - DNA, 25 bp, Homo sapien
agtcacttcttctgtgcttaaatag

SEQ ID NO: 5100372 - DNA, 25 bp, Homo sapien
cgtctgaggccacggctgaacagga

SEQ ID NO: 5100373 - DNA, 25 bp, Homo sapien
tgggtgagtgcgacgccagctgtca

SEQ ID NO: 5100374 - DNA, 25 bp, Homo sapien
ggcagggcgggagacaatactccat

SEQ ID NO: 5100375 - DNA, 25 bp, Homo sapien
tctctctcctatttgtaaggcaggg

SEQ ID NO: 5100376 - DNA, 25 bp, Homo sapien
gcagagatttatgagcaccgtacct

SEQ ID NO: 5100377 - DNA, 25 bp, Homo sapien
tcttccttccttctagtagggagca

SEQ ID NO: 5100378 - DNA, 25 bp, Homo sapien
tctttgaaaagacgatgggtcaggg

SEQ ID NO: 5100379 - DNA, 25 bp, Homo sapien
cttctagtagggagcaaatgatgga

SEQ ID NO: 5100380 - DNA, 25 bp, Homo sapien
atctaacctgcagccgccacatgag

SEQ ID NO: 5100381 - DNA, 25 bp, Homo sapien
cagctcctgttaggaatggattaaa

SEQ ID NO: 5100382 - DNA, 25 bp, Homo sapien
ccgccacatgagtggctttcttggg

SEQ ID NO: 5100383 - DNA, 25 bp, Homo sapien
tgtagactatagattccagctcctg

SEQ ID NO: 5100384 - DNA, 25 bp, Homo sapien
agaaggagcattggcttgtatgagc

SEQ ID NO: 5100385 - DNA, 25 bp, Homo sapien
tcctagaggaacctgagtggagaag

SEQ ID NO: 5100386 - DNA, 25 bp, Homo sapien
ggtgaacatgcttagtactccggaa

SEQ ID NO: 5100387 - DNA, 25 bp, Homo sapien
tatgagctcctaacagagtctgtga

SEQ ID NO: 5100388 - DNA, 25 bp, Homo sapien
tcccgccagcatcgagttgtccttg

SEQ ID NO: 5100389 - DNA, 25 bp, Homo sapien
ccgccagcatcgagttgtccttgat

SEQ ID NO: 5100390 - DNA, 25 bp, Homo sapien
gccagcatcgagttgtccttgatca

SEQ ID NO: 5100391 - DNA, 25 bp, Homo sapien
actcccgccagcatcgagttgtcct

SEQ ID NO: 5100392 - DNA, 25 bp, Homo sapien
gattccaaagtatgaccaaagagga

SEQ ID NO: 5100393 - DNA, 25 bp, Homo sapien
tcagtacctcagtgggattccaaag

SEQ ID NO: 5100394 - DNA, 25 bp, Homo sapien
ggatatttatgtacaagctggctca

SEQ ID NO: 5100395 - DNA, 25 bp, Homo sapien
tctgatgctgttttgaggtggctac

SEQ ID NO: 5100396 - DNA, 25 bp, Homo sapien
tctcatgggagtcagggacaaaagt

SEQ ID NO: 5100397 - DNA, 25 bp, Homo sapien
gggttctgggttcggtatgtataca

SEQ ID NO: 5100398 - DNA, 25 bp, Homo sapien
taggttaagtttcctctagtcttga

SEQ ID NO: 5100399 - DNA, 25 bp, Homo sapien
tactgtttccagtgagggttctggg

SEQ ID NO: 5100400 - DNA, 25 bp, Homo sapien
tttttcactagggggaatcctgtgc

SEQ ID NO: 5100401 - DNA, 25 bp, Homo sapien
ttctgaatgtatgaagctcacccat

SEQ ID NO: 5100402 - DNA, 25 bp, Homo sapien
cttcggggtcttggcagtttctgaa

SEQ ID NO: 5100403 - DNA, 25 bp, Homo sapien
agcccttgccagttcagtgcaaact

SEQ ID NO: 5100404 - DNA, 25 bp, Homo sapien
tcatatattcatctggtgagtaaag

SEQ ID NO: 5100405 - DNA, 25 bp, Homo sapien
aacttagcagcaagtgtactttctt

SEQ ID NO: 5100406 - DNA, 25 bp, Homo sapien
taaagtttggatctttgatttgtac

SEQ ID NO: 5100407 - DNA, 25 bp, Homo sapien
tcctccttgtcttggtgcagcaaac

SEQ ID NO: 5100408 - DNA, 25 bp, Homo sapien
ctccctccgcattatctgctaattt

SEQ ID NO: 5100409 - DNA, 25 bp, Homo sapien
agctcctctccctccgcattatctg

SEQ ID NO: 5100410 - DNA, 25 bp, Homo sapien
cctctccctccgcattatctgctaa

SEQ ID NO: 5100411 - DNA, 25 bp, Homo sapien
ggctttgcacacctgagaggcctcc

SEQ ID NO: 5100412 - DNA, 25 bp, Homo sapien
ggcagaccataatcttccatcgagt

SEQ ID NO: 5100413 - DNA, 25 bp, Homo sapien
tgtgtgcaggcagaccataatcttc

SEQ ID NO: 5100414 - DNA, 25 bp, Homo sapien
ttccatcgagtagggctgggctttg

SEQ ID NO: 5100415 - DNA, 25 bp, Homo sapien
tgttggtaaaatggagctgtctcat

SEQ ID NO: 5100416 - DNA, 25 bp, Homo sapien
atgagaatgaggtgttggtaaaatg

SEQ ID NO: 5100417 - DNA, 25 bp, Homo sapien
gtgttggtaaaatggagctgtctca

SEQ ID NO: 5100418 - DNA, 25 bp, Homo sapien
gatgagaatgaggtgttggtaaaat

SEQ ID NO: 5100419 - DNA, 25 bp, Homo sapien
cagataagaaatcagggcctcgcct

SEQ ID NO: 5100420 - DNA, 25 bp, Homo sapien
cctggcatctctgacagcagtagga

SEQ ID NO: 5100421 - DNA, 25 bp, Homo sapien
gagcattctacaagatcacctaggg

SEQ ID NO: 5100422 - DNA, 25 bp, Homo sapien
gtttccagctgcctcgatggcggct

SEQ ID NO: 5100423 - DNA, 25 bp, Homo sapien
tagaagctcaaacctgcattaggga

SEQ ID NO: 5100424 - DNA, 25 bp, Homo sapien
actgaggcatgaccatcttgatcag

SEQ ID NO: 5100425 - DNA, 25 bp, Homo sapien
tagggtgtgtcccaagagaggtcac

SEQ ID NO: 5100426 - DNA, 25 bp, Homo sapien
ggtcacattctaagaccctgtccag

SEQ ID NO: 5100427 - DNA, 25 bp, Homo sapien
agtcatgtctgcccaaaggacagtt

SEQ ID NO: 5100428 - DNA, 25 bp, Homo sapien
gacatcatcgcctgtggtactcttg

SEQ ID NO: 5100429 - DNA, 25 bp, Homo sapien
tttgtgacatcatcgcctgtggtac

SEQ ID NO: 5100430 - DNA, 25 bp, Homo sapien
gtcatgtctgcccaaaggacagttg

SEQ ID NO: 5100431 - DNA, 25 bp, Homo sapien
cacacagtgacctttcaaaccagac

SEQ ID NO: 5100432 - DNA, 25 bp, Homo sapien
gagtttggactttgaaccggccaga

SEQ ID NO: 5100433 - DNA, 25 bp, Homo sapien
ccgctgcgctcctctgttagcctgg

SEQ ID NO: 5100434 - DNA, 25 bp, Homo sapien
gctcctctgttagcctggccacttt

SEQ ID NO: 5100435 - DNA, 25 bp, Homo sapien
gctcaggctttgctggcgattggag

SEQ ID NO: 5100436 - DNA, 25 bp, Homo sapien
gctggcgattggagctgagatgctt

SEQ ID NO: 5100437 - DNA, 25 bp, Homo sapien
ggcgattggagctgagatgcttcag

SEQ ID NO: 5100438 - DNA, 25 bp, Homo sapien
ctcaggctttgctggcgattggagc

SEQ ID NO: 5100439 - DNA, 25 bp, Homo sapien
gaaaaggaagcatgctaagagcagc

SEQ ID NO: 5100440 - DNA, 25 bp, Homo sapien
ttccaacagtattgactgcagggct

SEQ ID NO: 5100441 - DNA, 25 bp, Homo sapien
ggctgaatttggcccggcaggcaca

SEQ ID NO: 5100442 - DNA, 25 bp, Homo sapien
taagagcagctgagttaacggcatc

SEQ ID NO: 5100443 - DNA, 25 bp, Homo sapien
actaaagcccccgtagtgcctctgt

SEQ ID NO: 5100444 - DNA, 25 bp, Homo sapien
atgaactgcccttgcactaaagccc

SEQ ID NO: 5100445 - DNA, 25 bp, Homo sapien
gcttccatgaactgcccttgcacta

SEQ ID NO: 5100446 - DNA, 25 bp, Homo sapien
ccccgtagtgcctctgtcctccttt

SEQ ID NO: 5100447 - DNA, 25 bp, Homo sapien
cagcaacatataaccccctttttct

SEQ ID NO: 5100448 - DNA, 25 bp, Homo sapien
tctacttcagtaacctcagtggtag

SEQ ID NO: 5100449 - DNA, 25 bp, Homo sapien
cagagcctgtcttgtttttaatttc

SEQ ID NO: 5100450 - DNA, 25 bp, Homo sapien
cccagagcctgtcttgtttttaatt

SEQ ID NO: 5100451 - DNA, 25 bp, Homo sapien
caagggggagtgctgggcatagggt

SEQ ID NO: 5100452 - DNA, 25 bp, Homo sapien
gggagtgctgggcatagggtccagc

SEQ ID NO: 5100453 - DNA, 25 bp, Homo sapien
agtgctgggcatagggtccagctcc

SEQ ID NO: 5100454 - DNA, 25 bp, Homo sapien
agggggagtgctgggcatagggtcc

SEQ ID NO: 5100455 - DNA, 25 bp, Homo sapien
ctggaaagaatgatgcctaggaagg

SEQ ID NO: 5100456 - DNA, 25 bp, Homo sapien
agtgatcaccaaccatggcaatgtc

SEQ ID NO: 5100457 - DNA, 25 bp, Homo sapien
gcctaggaaggtggcttctgtcatg

SEQ ID NO: 5100458 - DNA, 25 bp, Homo sapien
tgatcaccaaccatggcaatgtcaa

SEQ ID NO: 5100459 - DNA, 25 bp, Homo sapien
caaatcctttgaaaacattcgtgtg

SEQ ID NO: 5100460 - DNA, 25 bp, Homo sapien
acattcgtgtgggaaattgggagcc

SEQ ID NO: 5100461 - DNA, 25 bp, Homo sapien
tcaggtactctcgtaaccttgagca

SEQ ID NO: 5100462 - DNA, 25 bp, Homo sapien
gtaaccttgagcagtgcatttagtc

SEQ ID NO: 5100463 - DNA, 25 bp, Homo sapien
gggtaatctaccatccctagcccta

SEQ ID NO: 5100464 - DNA, 25 bp, Homo sapien
tcggcgttgcacttggagaaggccc

SEQ ID NO: 5100465 - DNA, 25 bp, Homo sapien
cccagcttcggcgttgcacttggag

SEQ ID NO: 5100466 - DNA, 25 bp, Homo sapien
gagaaggccctggatatctcagggt

SEQ ID NO: 5100467 - DNA, 25 bp, Homo sapien
ctattcatcgtgtgtcttgccattc

SEQ ID NO: 5100468 - DNA, 25 bp, Homo sapien
tcatcgtgtgtcttgccattctccc

SEQ ID NO: 5100469 - DNA, 25 bp, Homo sapien
tgccccatgtccatgtgctcgcatg

SEQ ID NO: 5100470 - DNA, 25 bp, Homo sapien
catgtactgctgtaccggaggctgg

SEQ ID NO: 5100471 - DNA, 25 bp, Homo sapien
cttgactgaagtgccaaggagattc

SEQ ID NO: 5100472 - DNA, 25 bp, Homo sapien
ccttgactgaagtgccaaggagatt

SEQ ID NO: 5100473 - DNA, 25 bp, Homo sapien
agaagcccagtcggcaactctgcca

SEQ ID NO: 5100474 - DNA, 25 bp, Homo sapien
accgaaacgaccctcaagcctgatg

SEQ ID NO: 5100475 - DNA, 25 bp, Homo sapien
gtcggcaactctgccaccttacact

SEQ ID NO: 5100476 - DNA, 25 bp, Homo sapien
tgcacctggtccgtgaggcagtgtg

SEQ ID NO: 5100477 - DNA, 25 bp, Homo sapien
ttgggtggcaggtgatgcgtgtaga

SEQ ID NO: 5100478 - DNA, 25 bp, Homo sapien
tccacaccagagccggtgtgagagc

SEQ ID NO: 5100479 - DNA, 25 bp, Homo sapien
ccacaccagagccggtgtgagagct

SEQ ID NO: 5100480 - DNA, 25 bp, Homo sapien
cacaccagagccggtgtgagagctg

SEQ ID NO: 5100481 - DNA, 25 bp, Homo sapien
acaccagagccggtgtgagagctgc

SEQ ID NO: 5100482 - DNA, 25 bp, Homo sapien
gtgaggtccagcaacacagtggcat

SEQ ID NO: 5100483 - DNA, 25 bp, Homo sapien
tccgtgaggtccagcaacacagtgg

SEQ ID NO: 5100484 - DNA, 25 bp, Homo sapien
gggcttccgtgaggtccagcaacac

SEQ ID NO: 5100485 - DNA, 25 bp, Homo sapien
caggggcttccgtgaggtccagcaa

SEQ ID NO: 5100486 - DNA, 25 bp, Homo sapien
ctgtcaatgctgaagcacgctggtg

SEQ ID NO: 5100487 - DNA, 25 bp, Homo sapien
tgcccaaatcacttggataagtttt

SEQ ID NO: 5100488 - DNA, 25 bp, Homo sapien
tacatttcccgatcagtgccaacag

SEQ ID NO: 5100489 - DNA, 25 bp, Homo sapien
gagaatagggcttgtgataatcaga

SEQ ID NO: 5100490 - DNA, 25 bp, Homo sapien
tgaaatctcagcgttaggcccatct

SEQ ID NO: 5100491 - DNA, 25 bp, Homo sapien
tgtgggtccgtgtatttcctgtaaa

SEQ ID NO: 5100492 - DNA, 25 bp, Homo sapien
tgtaagacagcagtaggtgtcagtg

SEQ ID NO: 5100493 - DNA, 25 bp, Homo sapien
gagtgtgggtccgtgtatttcctgt

SEQ ID NO: 5100494 - DNA, 25 bp, Homo sapien
tcgctaactcagacttgccaggtgc

SEQ ID NO: 5100495 - DNA, 25 bp, Homo sapien
gagggaccatttacctacctgagaa

SEQ ID NO: 5100496 - DNA, 25 bp, Homo sapien
gagcttccttaacatggagcccgaa

SEQ ID NO: 5100497 - DNA, 25 bp, Homo sapien
cagagatgtcaagagaaaccagcct

SEQ ID NO: 5100498 - DNA, 25 bp, Homo sapien
aggccctcggctcgcctgggttctg

SEQ ID NO: 5100499 - DNA, 25 bp, Homo sapien
caggccctcggctcgcctgggttct

SEQ ID NO: 5100500 - DNA, 25 bp, Homo sapien
tgcagagagggctgccggagacttt

SEQ ID NO: 5100501 - DNA, 25 bp, Homo sapien
gctgccggagactttgttggatgca

SEQ ID NO: 5100502 - DNA, 25 bp, Homo sapien
gctgttgtcattcagtaagtgaatt

SEQ ID NO: 5100503 - DNA, 25 bp, Homo sapien
ggctttaattgaattggcttgccaa

SEQ ID NO: 5100504 - DNA, 25 bp, Homo sapien
cattttgtagagcaggagcccaaga

SEQ ID NO: 5100505 - DNA, 25 bp, Homo sapien
accctgaggtacgtttattggccat

SEQ ID NO: 5100506 - DNA, 25 bp, Homo sapien
caggcagcgtcccattttgtagagc

SEQ ID NO: 5100507 - DNA, 25 bp, Homo sapien
gacaggcagcgtcccattttgtaga

SEQ ID NO: 5100508 - DNA, 25 bp, Homo sapien
taagcagagtggtcattaatacagg

SEQ ID NO: 5100509 - DNA, 25 bp, Homo sapien
catctttatgtcttccatagatttc

SEQ ID NO: 5100510 - DNA, 25 bp, Homo sapien
gagtggtcattaatacaggtgtgca

SEQ ID NO: 5100511 - DNA, 25 bp, Homo sapien
tttctgtttggtaagcagagtggtc

SEQ ID NO: 5100512 - DNA, 25 bp, Homo sapien
tattgggtaaatggcagtggctgct

SEQ ID NO: 5100513 - DNA, 25 bp, Homo sapien
gaaaggttgcaagattgagcctcgc

SEQ ID NO: 5100514 - DNA, 25 bp, Homo sapien
agagctgccgcttgagacacgatga

SEQ ID NO: 5100515 - DNA, 25 bp, Homo sapien
cctcgctaagattgggagagctgcc

SEQ ID NO: 5100516 - DNA, 25 bp, Homo sapien
cggaaaaccacctttgcggtcatgg

SEQ ID NO: 5100517 - DNA, 25 bp, Homo sapien
ctcggaaaaccacctttgcggtcat

SEQ ID NO: 5100518 - DNA, 25 bp, Homo sapien
tcggaaaaccacctttgcggtcatg

SEQ ID NO: 5100519 - DNA, 25 bp, Homo sapien
catcctcggaaaaccacctttgcgg

SEQ ID NO: 5100520 - DNA, 25 bp, Homo sapien
gagacctcaagtgatgtcactagga

SEQ ID NO: 5100521 - DNA, 25 bp, Homo sapien
cttagggcatctaggctcagatcct

SEQ ID NO: 5100522 - DNA, 25 bp, Homo sapien
tgctcaggcttggagacctcaagtg

SEQ ID NO: 5100523 - DNA, 25 bp, Homo sapien
catctaggctcagatcctgtccttt

SEQ ID NO: 5100524 - DNA, 25 bp, Homo sapien
acctggcctgagtcaaggtgctgac

SEQ ID NO: 5100525 - DNA, 25 bp, Homo sapien
gtgctgacataagtctctggtgaac

SEQ ID NO: 5100526 - DNA, 25 bp, Homo sapien
ctgggatatcatacacctggcctga

SEQ ID NO: 5100527 - DNA, 25 bp, Homo sapien
tgtctgggatatcatacacctggcc

SEQ ID NO: 5100528 - DNA, 25 bp, Homo sapien
tgtccagaatgtctcagcttgtgtt

SEQ ID NO: 5100529 - DNA, 25 bp, Homo sapien
gtccagaatgtctcagcttgtgttt

SEQ ID NO: 5100530 - DNA, 25 bp, Homo sapien
ctgtccagaatgtctcagcttgtgt

SEQ ID NO: 5100531 - DNA, 25 bp, Homo sapien
tctgtccaaggatttagttggcttc

SEQ ID NO: 5100532 - DNA, 25 bp, Homo sapien
aaggatttagttggcttcagggaag

SEQ ID NO: 5100533 - DNA, 25 bp, Homo sapien
tccaaggatttagttggcttcaggg

SEQ ID NO: 5100534 - DNA, 25 bp, Homo sapien
tgtccaaggatttagttggcttcag

SEQ ID NO: 5100535 - DNA, 25 bp, Homo sapien
cgcagtctcctttccgctgagttgg

SEQ ID NO: 5100536 - DNA, 25 bp, Homo sapien
agctgcctcacagttactccttgag

SEQ ID NO: 5100537 - DNA, 25 bp, Homo sapien
ctaacttcaattttgcctgtgaatg

SEQ ID NO: 5100538 - DNA, 25 bp, Homo sapien
acatcaagggtgtactcacagggac

SEQ ID NO: 5100539 - DNA, 25 bp, Homo sapien
gacaaagacgaagaagggagacaat

SEQ ID NO: 5100540 - DNA, 25 bp, Homo sapien
ttcactggtgaggtactttgacaaa

SEQ ID NO: 5100541 - DNA, 25 bp, Homo sapien
ctttgacaaagacgaagaagggaga

SEQ ID NO: 5100542 - DNA, 25 bp, Homo sapien
ttctttcactggtgaggtactttga

SEQ ID NO: 5100543 - DNA, 25 bp, Homo sapien
tcagagtacccgtggctggagcttc

SEQ ID NO: 5100544 - DNA, 25 bp, Homo sapien
atgagggccaggatcgcagaagtca

SEQ ID NO: 5100545 - DNA, 25 bp, Homo sapien
tatatagaaacttcacagtagacat

SEQ ID NO: 5100546 - DNA, 25 bp, Homo sapien
gaagtgttcttgcttatggcttgat

SEQ ID NO: 5100547 - DNA, 25 bp, Homo sapien
tggggcttaacactccaggctatca

SEQ ID NO: 5100548 - DNA, 25 bp, Homo sapien
caggctatcactgcatcatctggtc

SEQ ID NO: 5100549 - DNA, 25 bp, Homo sapien
ggtggtctggggcttaacactccag

SEQ ID NO: 5100550 - DNA, 25 bp, Homo sapien
actccaggctatcactgcatcatct

SEQ ID NO: 5100551 - DNA, 25 bp, Homo sapien
gtcaccaggttgagaacttgccgca

SEQ ID NO: 5100552 - DNA, 25 bp, Homo sapien
atgaggaagcctccccatgaaaagc

SEQ ID NO: 5100553 - DNA, 25 bp, Homo sapien
ccccctgtgtcccatcgatgaggaa

SEQ ID NO: 5100554 - DNA, 25 bp, Homo sapien
caactccttggacagtacgaatgcc

SEQ ID NO: 5100555 - DNA, 25 bp, Homo sapien
gcatgtgcggcggttgctgcttttc

SEQ ID NO: 5100556 - DNA, 25 bp, Homo sapien
acttctgtgctggagcatgtgcggc

SEQ ID NO: 5100557 - DNA, 25 bp, Homo sapien
gcacttctgtgctggagcatgtgcg

SEQ ID NO: 5100558 - DNA, 25 bp, Homo sapien
cggcggttgctgcttttctaactag

SEQ ID NO: 5100559 - DNA, 25 bp, Homo sapien
gctgccctttgacatcatgttcagc

SEQ ID NO: 5100560 - DNA, 25 bp, Homo sapien
atcccagagtaaccagtaggcaggg

SEQ ID NO: 5100561 - DNA, 25 bp, Homo sapien
ggggctgccctttgacatcatgttc

SEQ ID NO: 5100562 - DNA, 25 bp, Homo sapien
ccagagtaaccagtaggcaggggct

SEQ ID NO: 5100563 - DNA, 25 bp, Homo sapien
cttcagccagctgtcattttctcct

SEQ ID NO: 5100564 - DNA, 25 bp, Homo sapien
gctgtcatagtttggcatcccctgg

SEQ ID NO: 5100565 - DNA, 25 bp, Homo sapien
ttcttgagctgtcatagtttggcat

SEQ ID NO: 5100566 - DNA, 25 bp, Homo sapien
tccccactgaggatgttctggctgg

SEQ ID NO: 5100567 - DNA, 25 bp, Homo sapien
attccccactgaggatgttctggct

SEQ ID NO: 5100568 - DNA, 25 bp, Homo sapien
catagggaacactatctgtgctggc

SEQ ID NO: 5100569 - DNA, 25 bp, Homo sapien
actggacatagggaacactatctgt

SEQ ID NO: 5100570 - DNA, 25 bp, Homo sapien
aaggcaatgggagtgtcctggattc

SEQ ID NO: 5100571 - DNA, 25 bp, Homo sapien
ggccctgcattttgaaggcaatggg

SEQ ID NO: 5100572 - DNA, 25 bp, Homo sapien
tggagaagctaagccgaacttcacg

SEQ ID NO: 5100573 - DNA, 25 bp, Homo sapien
tcctccttggagaagctaagccgaa

SEQ ID NO: 5100574 - DNA, 25 bp, Homo sapien
gccgaacttcacgtggccagatagc

SEQ ID NO: 5100575 - DNA, 25 bp, Homo sapien
gaagctaagccgaacttcacgtggc

SEQ ID NO: 5100576 - DNA, 25 bp, Homo sapien
tagtcctcgaagaagacccactgac

SEQ ID NO: 5100577 - DNA, 25 bp, Homo sapien
cagagcttgatgatcttcgcctgag

SEQ ID NO: 5100578 - DNA, 25 bp, Homo sapien
tcgcctgagccctggtagatatctg

SEQ ID NO: 5100579 - DNA, 25 bp, Homo sapien
gtccctgtcaccatagtcctcgaag

SEQ ID NO: 5100580 - DNA, 25 bp, Homo sapien
aacaggggaatatgggctgactgcc

SEQ ID NO: 5100581 - DNA, 25 bp, Homo sapien
gggcaggaacaggggaatatgggct

SEQ ID NO: 5100582 - DNA, 25 bp, Homo sapien
caggaacaggggaatatgggctgac

SEQ ID NO: 5100583 - DNA, 25 bp, Homo sapien
ggaacaggggaatatgggctgactg

SEQ ID NO: 5100584 - DNA, 25 bp, Homo sapien
ggcggtcagatgcatttgaaatggc

SEQ ID NO: 5100585 - DNA, 25 bp, Homo sapien
gcttctgagtttcggggctgtctgt

SEQ ID NO: 5100586 - DNA, 25 bp, Homo sapien
ggtcagatgcatttgaaatggcttc

SEQ ID NO: 5100587 - DNA, 25 bp, Homo sapien
cagcgattatggcttctgagtttcg

SEQ ID NO: 5100588 - DNA, 25 bp, Homo sapien
gtcacagaactgactccccggaggg

SEQ ID NO: 5100589 - DNA, 25 bp, Homo sapien
cagcaaagtctgcaaatgttgagag

SEQ ID NO: 5100590 - DNA, 25 bp, Homo sapien
cctcttgtgataggctttcctggga

SEQ ID NO: 5100591 - DNA, 25 bp, Homo sapien
cttgttcatcgcatacctccaggca

SEQ ID NO: 5100592 - DNA, 25 bp, Homo sapien
ccttccgttcaagggagcttgccca

SEQ ID NO: 5100593 - DNA, 25 bp, Homo sapien
cttccgttcaagggagcttgcccat

SEQ ID NO: 5100594 - DNA, 25 bp, Homo sapien
tccgttcaagggagcttgcccatct

SEQ ID NO: 5100595 - DNA, 25 bp, Homo sapien
ttccgttcaagggagcttgcccatc

SEQ ID NO: 5100596 - DNA, 25 bp, Homo sapien
ttttggccttgagccccacatgcag

SEQ ID NO: 5100597 - DNA, 25 bp, Homo sapien
cagcatctttacagtaagccgtggg

SEQ ID NO: 5100598 - DNA, 25 bp, Homo sapien
ccagccctggtggttttggtcagca

SEQ ID NO: 5100599 - DNA, 25 bp, Homo sapien
caggtcactttcatcagaacaggaa

SEQ ID NO: 5100600 - DNA, 25 bp, Homo sapien
cgctaagccgagaaggagtcagtca

SEQ ID NO: 5100601 - DNA, 25 bp, Homo sapien
cagccgctaagccgagaaggagtca

SEQ ID NO: 5100602 - DNA, 25 bp, Homo sapien
gaggcgatcgggcagcaacagtctt

SEQ ID NO: 5100603 - DNA, 25 bp, Homo sapien
ttcactgtgagttactggaagctcg

SEQ ID NO: 5100604 - DNA, 25 bp, Homo sapien
cagagagggagagagaggaaaaggg

SEQ ID NO: 5100605 - DNA, 25 bp, Homo sapien
agagggagagagaggaaaagggaga

SEQ ID NO: 5100606 - DNA, 25 bp, Homo sapien
gacagagagggagagagaggaaaag

SEQ ID NO: 5100607 - DNA, 25 bp, Homo sapien
agagagggagagagaggaaaaggga

SEQ ID NO: 5100608 - DNA, 25 bp, Homo sapien
gggtctctctcaagggtgcagttag

SEQ ID NO: 5100609 - DNA, 25 bp, Homo sapien
tacatgggcgtctatagagcagctc

SEQ ID NO: 5100610 - DNA, 25 bp, Homo sapien
tccaggttaggaatccaggtacaga

SEQ ID NO: 5100611 - DNA, 25 bp, Homo sapien
gcagcagagctacaatcttctcgag

SEQ ID NO: 5100612 - DNA, 25 bp, Homo sapien
ccaggtctctggagtaacttacttt

SEQ ID NO: 5100613 - DNA, 25 bp, Homo sapien
ataaccctcctcacgtaattcctgg

SEQ ID NO: 5100614 - DNA, 25 bp, Homo sapien
tattgtgttgtcactagaacggcca

SEQ ID NO: 5100615 - DNA, 25 bp, Homo sapien
gatgagtgaactctgcatagatgcc

SEQ ID NO: 5100616 - DNA, 25 bp, Homo sapien
ctttgcttttggctagtaaacccat

SEQ ID NO: 5100617 - DNA, 25 bp, Homo sapien
tctttgcttttggctagtaaaccca

SEQ ID NO: 5100618 - DNA, 25 bp, Homo sapien
gagacattcttgtgttccggcctct

SEQ ID NO: 5100619 - DNA, 25 bp, Homo sapien
catccagtcttgatggccacgggga

SEQ ID NO: 5100620 - DNA, 25 bp, Homo sapien
gcagcacgcaacagtcacagcagtg

SEQ ID NO: 5100621 - DNA, 25 bp, Homo sapien
ctcttgggactggagtgttgacatc

SEQ ID NO: 5100622 - DNA, 25 bp, Homo sapien
aggaaggacacaatctgtttcctac

SEQ ID NO: 5100623 - DNA, 25 bp, Homo sapien
aaaggaaggacacaatctgtttcct

SEQ ID NO: 5100624 - DNA, 25 bp, Homo sapien
aaggaaggacacaatctgtttccta

SEQ ID NO: 5100625 - DNA, 25 bp, Homo sapien
gtgatagttgcctgaatttccttag

SEQ ID NO: 5100626 - DNA, 25 bp, Homo sapien
aagcagacaactcccgctgccattt

SEQ ID NO: 5100627 - DNA, 25 bp, Homo sapien
tctgagacgaagtaatttgcctgat

SEQ ID NO: 5100628 - DNA, 25 bp, Homo sapien
ccttagatggtaatgcaagcagaca

SEQ ID NO: 5100629 - DNA, 25 bp, Homo sapien
tagtggacatgggttgactttgaat

SEQ ID NO: 5100630 - DNA, 25 bp, Homo sapien
tgtgcgcagcagctgtttagagcct

SEQ ID NO: 5100631 - DNA, 25 bp, Homo sapien
gcagcagctgtttagagcctgcaca

SEQ ID NO: 5100632 - DNA, 25 bp, Homo sapien
ctttgaatgtcttggggcccggtag

SEQ ID NO: 5100633 - DNA, 25 bp, Homo sapien
caaaataactggtgatgcaagcaca

SEQ ID NO: 5100634 - DNA, 25 bp, Homo sapien
cagtatgccacatagctttgactcc

SEQ ID NO: 5100635 - DNA, 25 bp, Homo sapien
tatagtgtgaaggaagcagatttga

SEQ ID NO: 5100636 - DNA, 25 bp, Homo sapien
tattttataaatcagtgtccccgga

SEQ ID NO: 5100637 - DNA, 25 bp, Homo sapien
aagccgttgtgcgaagacagagtcc

SEQ ID NO: 5100638 - DNA, 25 bp, Homo sapien
tattgtggaaatgcgcatgagtccc

SEQ ID NO: 5100639 - DNA, 25 bp, Homo sapien
tgtcatgagtgatgccctggccctt

SEQ ID NO: 5100640 - DNA, 25 bp, Homo sapien
tgacagtagcctccaagaagccgtt

SEQ ID NO: 5100641 - DNA, 25 bp, Homo sapien
cattcggcgtagtacccagagagct

SEQ ID NO: 5100642 - DNA, 25 bp, Homo sapien
ccagagagctcaagatgtgtggcag

SEQ ID NO: 5100643 - DNA, 25 bp, Homo sapien
ttttcggatggaagctcgagagccc

SEQ ID NO: 5100644 - DNA, 25 bp, Homo sapien
tgtctccaacctctttctaggttct

SEQ ID NO: 5100645 - DNA, 25 bp, Homo sapien
cacatccggactcccagttctgctg

SEQ ID NO: 5100646 - DNA, 25 bp, Homo sapien
agccctcttcctcggcacatccgga

SEQ ID NO: 5100647 - DNA, 25 bp, Homo sapien
tcgccatggcaacgaggcctggaat

SEQ ID NO: 5100648 - DNA, 25 bp, Homo sapien
gttctgctgcttcaagtcaatgtcc

SEQ ID NO: 5100649 - DNA, 25 bp, Homo sapien
ctcaaaccctggacatagttttaag

SEQ ID NO: 5100650 - DNA, 25 bp, Homo sapien
caagaaatggaaggtgttttcagtc

SEQ ID NO: 5100651 - DNA, 25 bp, Homo sapien
catctcttagcagaaatccattcaa

SEQ ID NO: 5100652 - DNA, 25 bp, Homo sapien
agtctgatgttaaaaacttactcca

SEQ ID NO: 5100653 - DNA, 25 bp, Homo sapien
tatcaatgtaccttttttggtagtg

SEQ ID NO: 5100654 - DNA, 25 bp, Homo sapien
gatgagaagccatataatggcggtt

SEQ ID NO: 5100655 - DNA, 25 bp, Homo sapien
cctgctagaatgtcacatggatggc

SEQ ID NO: 5100656 - DNA, 25 bp, Homo sapien
ttcctgctgccatactgtatgcagt

SEQ ID NO: 5100657 - DNA, 25 bp, Homo sapien
aaatagcacttgactctgcctgtga

SEQ ID NO: 5100658 - DNA, 25 bp, Homo sapien
tagcatctgccccagttggtgttca

SEQ ID NO: 5100659 - DNA, 25 bp, Homo sapien
gacgcaacattgcaagcgctgtgaa

SEQ ID NO: 5100660 - DNA, 25 bp, Homo sapien
tattgagcttacttacttggacgca

SEQ ID NO: 5100661 - DNA, 25 bp, Homo sapien
ttttaaacttagacagcatgtatgg

SEQ ID NO: 5100662 - DNA, 25 bp, Homo sapien
tctcaccgtttgaatgcatgatctg

SEQ ID NO: 5100663 - DNA, 25 bp, Homo sapien
ttctcttgtgcaataatttacatgt

SEQ ID NO: 5100664 - DNA, 25 bp, Homo sapien
ttgcattttacgcaaactttgagcc

SEQ ID NO: 5100665 - DNA, 25 bp, Homo sapien
catcacccgagtgcctttgacaggg

SEQ ID NO: 5100666 - DNA, 25 bp, Homo sapien
atcagtatcgagagaggcttccggc

SEQ ID NO: 5100667 - DNA, 25 bp, Homo sapien
aatccaatggctatggagcctcccg

SEQ ID NO: 5100668 - DNA, 25 bp, Homo sapien
tgacagggtgctgcggttgaatcca

SEQ ID NO: 5100669 - DNA, 25 bp, Homo sapien
tagttgatgggaatactaaaatgcg

SEQ ID NO: 5100670 - DNA, 25 bp, Homo sapien
ctaaaatgcgatagtgaaaactgta

SEQ ID NO: 5100671 - DNA, 25 bp, Homo sapien
aaatgccattttctctgacctgatg

SEQ ID NO: 5100672 - DNA, 25 bp, Homo sapien
gacattatgattacactagctgccc

SEQ ID NO: 5100673 - DNA, 25 bp, Homo sapien
ggtacaccggcatgagctgagtgaa

SEQ ID NO: 5100674 - DNA, 25 bp, Homo sapien
attagtggactggtaataattacca

SEQ ID NO: 5100675 - DNA, 25 bp, Homo sapien
aatgcatcatttgctattagtggac

SEQ ID NO: 5100676 - DNA, 25 bp, Homo sapien
tagaatctgtgagcactgtaatata

SEQ ID NO: 5100677 - DNA, 25 bp, Homo sapien
cacttggcggcattaacctgctgcc

SEQ ID NO: 5100678 - DNA, 25 bp, Homo sapien
cccattccacttggcggcattaacc

SEQ ID NO: 5100679 - DNA, 25 bp, Homo sapien
ggcggcattaacctgctgcccctgg

SEQ ID NO: 5100680 - DNA, 25 bp, Homo sapien
tccacttggcggcattaacctgctg

SEQ ID NO: 5100681 - DNA, 25 bp, Homo sapien
gtaaatggtatctgaagagcagggc

SEQ ID NO: 5100682 - DNA, 25 bp, Homo sapien
tgcaccctgagaccagattcaaagc

SEQ ID NO: 5100683 - DNA, 25 bp, Homo sapien
cttgtaaatggtatctgaagagcag

SEQ ID NO: 5100684 - DNA, 25 bp, Homo sapien
tgaagagcagggcatgcaccctgag

SEQ ID NO: 5100685 - DNA, 25 bp, Homo sapien
cacacggccagacactgtagagatc

SEQ ID NO: 5100686 - DNA, 25 bp, Homo sapien
tagggctaatgggtttgtagacaag

SEQ ID NO: 5100687 - DNA, 25 bp, Homo sapien
agatctggtcctgccgtcagcttgt

SEQ ID NO: 5100688 - DNA, 25 bp, Homo sapien
tgtagacaagtttgccaacaagaga

SEQ ID NO: 5100689 - DNA, 25 bp, Homo sapien
tatggatgtgtttagtggaagaagc

SEQ ID NO: 5100690 - DNA, 25 bp, Homo sapien
tgtgtttagtggaagaagcagcaga

SEQ ID NO: 5100691 - DNA, 25 bp, Homo sapien
gatgtgtttagtggaagaagcagca

SEQ ID NO: 5100692 - DNA, 25 bp, Homo sapien
aaagagaatattatggatgtgttta

SEQ ID NO: 5100693 - DNA, 25 bp, Homo sapien
cctgttgtttgagtaatcaaggctc

SEQ ID NO: 5100694 - DNA, 25 bp, Homo sapien
ggctctaagaggatagcattgatca

SEQ ID NO: 5100695 - DNA, 25 bp, Homo sapien
tgtttaggcctgacagattggtggc

SEQ ID NO: 5100696 - DNA, 25 bp, Homo sapien
taaagtcactggtgaagtatcaagg

SEQ ID NO: 5100697 - DNA, 25 bp, Homo sapien
ttgaagctcagacatgtaaactttg

SEQ ID NO: 5100698 - DNA, 25 bp, Homo sapien
cttgaagctcagacatgtaaacttt

SEQ ID NO: 5100699 - DNA, 25 bp, Homo sapien
ccttgaagctcagacatgtaaactt

SEQ ID NO: 5100700 - DNA, 25 bp, Homo sapien
tttcttcatttctcgagtggggcag

SEQ ID NO: 5100701 - DNA, 25 bp, Homo sapien
ggctttccaggtgtccaaatgatga

SEQ ID NO: 5100702 - DNA, 25 bp, Homo sapien
ggtgtttgtgatacgtttgtgtgaa

SEQ ID NO: 5100703 - DNA, 25 bp, Homo sapien
gagaaacgcaagtgtggtttgcaag

SEQ ID NO: 5100704 - DNA, 25 bp, Homo sapien
gaaaggagttgaagatgttgtgctg

SEQ ID NO: 5100705 - DNA, 25 bp, Homo sapien
ggtgtccataggctgagtccccacg

SEQ ID NO: 5100706 - DNA, 25 bp, Homo sapien
gccaggtgtccataggctgagtccc

SEQ ID NO: 5100707 - DNA, 25 bp, Homo sapien
gtgtccataggctgagtccccacgt

SEQ ID NO: 5100708 - DNA, 25 bp, Homo sapien
gcagccgtggtgactgcattttctg

SEQ ID NO: 5100709 - DNA, 25 bp, Homo sapien
agagtctggacaaccctgccagctc

SEQ ID NO: 5100710 - DNA, 25 bp, Homo sapien
ggaaactgactgtgtgcggaccttg

SEQ ID NO: 5100711 - DNA, 25 bp, Homo sapien
ggaccttgcgtgtaacttcctgtga

SEQ ID NO: 5100712 - DNA, 25 bp, Homo sapien
tgcggctgctgaccggtgcaaaaaa

SEQ ID NO: 5100713 - DNA, 25 bp, Homo sapien
cgtgagccatgttggaagtacagcc

SEQ ID NO: 5100714 - DNA, 25 bp, Homo sapien
tcttaagaaaaaacacgtgagccat

SEQ ID NO: 5100715 - DNA, 25 bp, Homo sapien
tcagtgaaaagcaacccggtttatc

SEQ ID NO: 5100716 - DNA, 25 bp, Homo sapien
aggcctttggcaaggtagaagtcat

SEQ ID NO: 5100717 - DNA, 25 bp, Homo sapien
aaggcctttggcaaggtagaagtca

SEQ ID NO: 5100718 - DNA, 25 bp, Homo sapien
caaggcctttggcaaggtagaagtc

SEQ ID NO: 5100719 - DNA, 25 bp, Homo sapien
cccaaggcctttggcaaggtagaag

SEQ ID NO: 5100720 - DNA, 25 bp, Homo sapien
cactgaagctttgctgtccacagca

SEQ ID NO: 5100721 - DNA, 25 bp, Homo sapien
ccctgccatggccaagctgatgagg

SEQ ID NO: 5100722 - DNA, 25 bp, Homo sapien
gaatcttaatttcctgcactgaagc

SEQ ID NO: 5100723 - DNA, 25 bp, Homo sapien
gcctccctggagtgttgtgtgagac

SEQ ID NO: 5100724 - DNA, 25 bp, Homo sapien
ttgccagtagtggtctctgttctgt

SEQ ID NO: 5100725 - DNA, 25 bp, Homo sapien
attgccagtagtggtctctgttctg

SEQ ID NO: 5100726 - DNA, 25 bp, Homo sapien
tattgccagtagtggtctctgttct

SEQ ID NO: 5100727 - DNA, 25 bp, Homo sapien
tgccagtagtggtctctgttctgtt

SEQ ID NO: 5100728 - DNA, 25 bp, Homo sapien
tccggttatcctaaagccttcatta

SEQ ID NO: 5100729 - DNA, 25 bp, Homo sapien
tttctgggatttcatgaacaattcc

SEQ ID NO: 5100730 - DNA, 25 bp, Homo sapien
acaattccctgtttccgtaatccat

SEQ ID NO: 5100731 - DNA, 25 bp, Homo sapien
tgacttttcacatatgagggtgacc

SEQ ID NO: 5100732 - DNA, 25 bp, Homo sapien
gttgcctcgtgggacaaggcattct

SEQ ID NO: 5100733 - DNA, 25 bp, Homo sapien
gtcccccatctgtggtagcctgtgt

SEQ ID NO: 5100734 - DNA, 25 bp, Homo sapien
ctcgtgggacaaggcattctgtaaa

SEQ ID NO: 5100735 - DNA, 25 bp, Homo sapien
ctgtggtagcctgtgttgcctcgtg

SEQ ID NO: 5100736 - DNA, 25 bp, Homo sapien
aggctcttccagaaggggtaactgt

SEQ ID NO: 5100737 - DNA, 25 bp, Homo sapien
ccagaaggggtaactgtctcaaatc

SEQ ID NO: 5100738 - DNA, 25 bp, Homo sapien
actgtctcaaatccttgccttgaac

SEQ ID NO: 5100739 - DNA, 25 bp, Homo sapien
aactgtctcaaatccttgccttgaa

SEQ ID NO: 5100740 - DNA, 25 bp, Homo sapien
catgtaagtaagtctgtgtggtcag

SEQ ID NO: 5100741 - DNA, 25 bp, Homo sapien
tggtggctgtcctggcatgtaagta

SEQ ID NO: 5100742 - DNA, 25 bp, Homo sapien
ctgtcctggcatgtaagtaagtctg

SEQ ID NO: 5100743 - DNA, 25 bp, Homo sapien
cattccataaatggcccaggcccct

SEQ ID NO: 5100744 - DNA, 25 bp, Homo sapien
tccacgcaccacttctgtgcccagg

SEQ ID NO: 5100745 - DNA, 25 bp, Homo sapien
ccacgcaccacttctgtgcccaggg

SEQ ID NO: 5100746 - DNA, 25 bp, Homo sapien
tgctgcatgtcctgtgagcggtccc

SEQ ID NO: 5100747 - DNA, 25 bp, Homo sapien
gccctgctggttatcactgttggca

SEQ ID NO: 5100748 - DNA, 25 bp, Homo sapien
ggtcgcggtagggagttgtcggcac

SEQ ID NO: 5100749 - DNA, 25 bp, Homo sapien
cagcctgggtgtgcatcttgtgtgc

SEQ ID NO: 5100750 - DNA, 25 bp, Homo sapien
tgtcttgctctaccaggccttaggt

SEQ ID NO: 5100751 - DNA, 25 bp, Homo sapien
gccccgagaccagagaagataatgg

SEQ ID NO: 5100752 - DNA, 25 bp, Homo sapien
tcccagaaaagccagcgagaaatgg

SEQ ID NO: 5100753 - DNA, 25 bp, Homo sapien
gaacacattgtagggtgatctccca

SEQ ID NO: 5100754 - DNA, 25 bp, Homo sapien
gcagcttaggaacatgtctccttcc

SEQ ID NO: 5100755 - DNA, 25 bp, Homo sapien
gcagcctctccactcaaggttgagc

SEQ ID NO: 5100756 - DNA, 25 bp, Homo sapien
ggttgagcggtttccttcagtgctg

SEQ ID NO: 5100757 - DNA, 25 bp, Homo sapien
caggcagcttaggaacatgtctcct

SEQ ID NO: 5100758 - DNA, 25 bp, Homo sapien
gaggaagagaagacagatggcagag

SEQ ID NO: 5100759 - DNA, 25 bp, Homo sapien
ttatggattaggaggaagagaagac

SEQ ID NO: 5100760 - DNA, 25 bp, Homo sapien
tatggattaggaggaagagaagaca

SEQ ID NO: 5100761 - DNA, 25 bp, Homo sapien
gaagagaagacagatggcagagtac

SEQ ID NO: 5100762 - DNA, 25 bp, Homo sapien
acatgcaatctcactggcaggcagc

SEQ ID NO: 5100763 - DNA, 25 bp, Homo sapien
aaagccctgacatgcaatctcactg

SEQ ID NO: 5100764 - DNA, 25 bp, Homo sapien
gccctgacatgcaatctcactggca

SEQ ID NO: 5100765 - DNA, 25 bp, Homo sapien
tgacatgcaatctcactggcaggca

SEQ ID NO: 5100766 - DNA, 25 bp, Homo sapien
tctgattgttgctttgataagtatc

SEQ ID NO: 5100767 - DNA, 25 bp, Homo sapien
gatagtcttgagttgcattgttaca

SEQ ID NO: 5100768 - DNA, 25 bp, Homo sapien
gagtgaggcatatttttggtctggc

SEQ ID NO: 5100769 - DNA, 25 bp, Homo sapien
gacttctggtggtacagcttctctg

SEQ ID NO: 5100770 - DNA, 25 bp, Homo sapien
tccatcttgggactaggagtgacca

SEQ ID NO: 5100771 - DNA, 25 bp, Homo sapien
cagacacgttggttttgctccaagc

SEQ ID NO: 5100772 - DNA, 25 bp, Homo sapien
atctgggtctgtcccttccacacag

SEQ ID NO: 5100773 - DNA, 25 bp, Homo sapien
aacacattccgtgtgtattaagatg

SEQ ID NO: 5100774 - DNA, 25 bp, Homo sapien
catgcgtgccggtaggcagcagttc

SEQ ID NO: 5100775 - DNA, 25 bp, Homo sapien
gaaaccacagtgcagcatgagccct

SEQ ID NO: 5100776 - DNA, 25 bp, Homo sapien
tcttgtgcccggctgagcatctctg

SEQ ID NO: 5100777 - DNA, 25 bp, Homo sapien
actgcatcttcatcattgatcctgc

SEQ ID NO: 5100778 - DNA, 25 bp, Homo sapien
tgcttccgggaggtgggaatgcatg

SEQ ID NO: 5100779 - DNA, 25 bp, Homo sapien
ccctgcttccgggaggtgggaatgc

SEQ ID NO: 5100780 - DNA, 25 bp, Homo sapien
tccgggaggtgggaatgcatgtgga

SEQ ID NO: 5100781 - DNA, 25 bp, Homo sapien
ggtcgttatttcctaactctcttgc

SEQ ID NO: 5100782 - DNA, 25 bp, Homo sapien
tctgaggaacactgtctgaagtttt

SEQ ID NO: 5100783 - DNA, 25 bp, Homo sapien
tttgacagaccagaatgggggccgc

SEQ ID NO: 5100784 - DNA, 25 bp, Homo sapien
gactggtgcgctcgggttgacccat

SEQ ID NO: 5100785 - DNA, 25 bp, Homo sapien
tgtggcgtcctgagccagctctgtc

SEQ ID NO: 5100786 - DNA, 25 bp, Homo sapien
cttgtgctgtttggaagacaatttc

SEQ ID NO: 5100787 - DNA, 25 bp, Homo sapien
ccgctttctgtcttgtgctgtttgg

SEQ ID NO: 5100788 - DNA, 25 bp, Homo sapien
ctgtcttgtgctgtttggaagacaa

SEQ ID NO: 5100789 - DNA, 25 bp, Homo sapien
gctgtttggaagacaatttccacat

SEQ ID NO: 5100790 - DNA, 25 bp, Homo sapien
tttgccaactaggtaatgtgctagg

SEQ ID NO: 5100791 - DNA, 25 bp, Homo sapien
tcctttgccaactaggtaatgtgct

SEQ ID NO: 5100792 - DNA, 25 bp, Homo sapien
ccaactaggtaatgtgctagggata

SEQ ID NO: 5100793 - DNA, 25 bp, Homo sapien
taggtaatgtgctagggatatttgt

SEQ ID NO: 5100794 - DNA, 25 bp, Homo sapien
caaatgctttacatcccggaggaaa

SEQ ID NO: 5100795 - DNA, 25 bp, Homo sapien
agtcctcttcagaacaggaaaagtc

SEQ ID NO: 5100796 - DNA, 25 bp, Homo sapien
tccacactgtgctattccagaacct

SEQ ID NO: 5100797 - DNA, 25 bp, Homo sapien
caggaaaagtccagtgcagttccac

SEQ ID NO: 5100798 - DNA, 25 bp, Homo sapien
agtgcagagccctctaatggaaaag

SEQ ID NO: 5100799 - DNA, 25 bp, Homo sapien
tctcaggactctcactgccacgtgt

SEQ ID NO: 5100800 - DNA, 25 bp, Homo sapien
tctgctgtgctcaggtccacggtta

SEQ ID NO: 5100801 - DNA, 25 bp, Homo sapien
aagaagtgggctggcacatagagcc

SEQ ID NO: 5100802 - DNA, 25 bp, Homo sapien
ggttgcctggtagggctcatggctc

SEQ ID NO: 5100803 - DNA, 25 bp, Homo sapien
tcagcactgcgatcccaccagtggc

SEQ ID NO: 5100804 - DNA, 25 bp, Homo sapien
gttctccaagtcttgggactgccca

SEQ ID NO: 5100805 - DNA, 25 bp, Homo sapien
cagatggcttgttctccaagtcttg

SEQ ID NO: 5100806 - DNA, 25 bp, Homo sapien
tgcttgtcggatgtggtgatgggcc

SEQ ID NO: 5100807 - DNA, 25 bp, Homo sapien
cttgtcggatgtggtgatgggccac

SEQ ID NO: 5100808 - DNA, 25 bp, Homo sapien
ctgcttgtcggatgtggtgatgggc

SEQ ID NO: 5100809 - DNA, 25 bp, Homo sapien
tgtcggatgtggtgatgggccacat

SEQ ID NO: 5100810 - DNA, 25 bp, Homo sapien
tcttgcctgcagaaccttgacctgt

SEQ ID NO: 5100811 - DNA, 25 bp, Homo sapien
aacccatttggaacataactgacat

SEQ ID NO: 5100812 - DNA, 25 bp, Homo sapien
aaaaatagtatttgctcttgcctgc

SEQ ID NO: 5100813 - DNA, 25 bp, Homo sapien
tatctagtcagctgtatatccaaga

SEQ ID NO: 5100814 - DNA, 25 bp, Homo sapien
taatgcggtcagctgtgtcacaatg

SEQ ID NO: 5100815 - DNA, 25 bp, Homo sapien
tgtgcaaatgtatcagccgttgtat

SEQ ID NO: 5100816 - DNA, 25 bp, Homo sapien
gaagctgccgctaggacagtcttgg

SEQ ID NO: 5100817 - DNA, 25 bp, Homo sapien
taggatttcatagcccaatgttctc

SEQ ID NO: 5100818 - DNA, 25 bp, Homo sapien
aataccatttatatgtggcattgaa

SEQ ID NO: 5100819 - DNA, 25 bp, Homo sapien
gcttttagcacggatgtttctgttt

SEQ ID NO: 5100820 - DNA, 25 bp, Homo sapien
cattggcttttagcacggatgtttc

SEQ ID NO: 5100821 - DNA, 25 bp, Homo sapien
aaataccatttatatgtggcattga

SEQ ID NO: 5100822 - DNA, 25 bp, Homo sapien
cagaaagcttaaaggcatctttcaa

SEQ ID NO: 5100823 - DNA, 25 bp, Homo sapien
tcttgatttgcctcaaagatggaag

SEQ ID NO: 5100824 - DNA, 25 bp, Homo sapien
ggcttggattcgtgattccccaaca

SEQ ID NO: 5100825 - DNA, 25 bp, Homo sapien
ctatggtggagattaaggcttggat

SEQ ID NO: 5100826 - DNA, 25 bp, Homo sapien
taatccgagaggaggcctataaacc

SEQ ID NO: 5100827 - DNA, 25 bp, Homo sapien
gaatcagacgcattataggtcagcc

SEQ ID NO: 5100828 - DNA, 25 bp, Homo sapien
tatctttgggctaatctaaatgcgc

SEQ ID NO: 5100829 - DNA, 25 bp, Homo sapien
tagttccccgcttaagaatgcgttg

SEQ ID NO: 5100830 - DNA, 25 bp, Homo sapien
tttatttgctgggtctcctagactg

SEQ ID NO: 5100831 - DNA, 25 bp, Homo sapien
gctgggtctcctagactgaaatgat

SEQ ID NO: 5100832 - DNA, 25 bp, Homo sapien
tgtctctacatacccttgggtcaag

SEQ ID NO: 5100833 - DNA, 25 bp, Homo sapien
tcattgtctctacatacccttgggt

SEQ ID NO: 5100834 - DNA, 25 bp, Homo sapien
ggtaagtccttctgctagaaccaag

SEQ ID NO: 5100835 - DNA, 25 bp, Homo sapien
tcacaaagaagttgtcggtcacatc

SEQ ID NO: 5100836 - DNA, 25 bp, Homo sapien
ggtcacatccaggttgtcttctgag

SEQ ID NO: 5100837 - DNA, 25 bp, Homo sapien
caagggaggctgttcagatccatca

SEQ ID NO: 5100838 - DNA, 25 bp, Homo sapien
tgtttcttaggacgatgggttctgg

SEQ ID NO: 5100839 - DNA, 25 bp, Homo sapien
tggtaaggcaagtccggaaggcatg

SEQ ID NO: 5100840 - DNA, 25 bp, Homo sapien
gggtcataatctgcttcgaggaggt

SEQ ID NO: 5100841 - DNA, 25 bp, Homo sapien
tcagaattatacagggagggagaga

SEQ ID NO: 5100842 - DNA, 25 bp, Homo sapien
tgtgtggcttggtcaggagactgca

SEQ ID NO: 5100843 - DNA, 25 bp, Homo sapien
cttttaagaagtggtgaggcttggc

SEQ ID NO: 5100844 - DNA, 25 bp, Homo sapien
tgaatgagaaactaagctcggactt

SEQ ID NO: 5100845 - DNA, 25 bp, Homo sapien
cagagggaggaggttttactgtttg

SEQ ID NO: 5100846 - DNA, 25 bp, Homo sapien
gctttgcaagtagtcatttccccat

SEQ ID NO: 5100847 - DNA, 25 bp, Homo sapien
aatcctgctttgcaagtagtcattt

SEQ ID NO: 5100848 - DNA, 25 bp, Homo sapien
tctgtccagaatgagcctgaaatca

SEQ ID NO: 5100849 - DNA, 25 bp, Homo sapien
cagaatgagcctgaaatcaagtgag

SEQ ID NO: 5100850 - DNA, 25 bp, Homo sapien
aagaatgttcccctccagttctggg

SEQ ID NO: 5100851 - DNA, 25 bp, Homo sapien
tcccctccagttctgggcatattga

SEQ ID NO: 5100852 - DNA, 25 bp, Homo sapien
cagttctgggcatattgaaggagca

SEQ ID NO: 5100853 - DNA, 25 bp, Homo sapien
gaatgttcccctccagttctgggca

SEQ ID NO: 5100854 - DNA, 25 bp, Homo sapien
ccaggcaacaactgggcaggaagct

SEQ ID NO: 5100855 - DNA, 25 bp, Homo sapien
ctggacagttgtccctcccatgggt

SEQ ID NO: 5100856 - DNA, 25 bp, Homo sapien
ctttcttcagcggtgccaggcaaca

SEQ ID NO: 5100857 - DNA, 25 bp, Homo sapien
ctcttcagtacgtttgcagctttct

SEQ ID NO: 5100858 - DNA, 25 bp, Homo sapien
tcaatcctttggcctgcggccgcca

SEQ ID NO: 5100859 - DNA, 25 bp, Homo sapien
tggcctgcggccgccaccctctgct

SEQ ID NO: 5100860 - DNA, 25 bp, Homo sapien
gcctgcggccgccaccctctgctac

SEQ ID NO: 5100861 - DNA, 25 bp, Homo sapien
tttggcctgcggccgccaccctctg

SEQ ID NO: 5100862 - DNA, 25 bp, Homo sapien
tagccagactggtttagcagacaga

SEQ ID NO: 5100863 - DNA, 25 bp, Homo sapien
cagggtgcgccctgaacttgaagca

SEQ ID NO: 5100864 - DNA, 25 bp, Homo sapien
tccctggccatggtgtagccagact

SEQ ID NO: 5100865 - DNA, 25 bp, Homo sapien
gggaaaagcgcagacataatcgatg

SEQ ID NO: 5100866 - DNA, 25 bp, Homo sapien
gattccacacgcactatcattttct

SEQ ID NO: 5100867 - DNA, 25 bp, Homo sapien
ggtctccggccaactgcatgcataa

SEQ ID NO: 5100868 - DNA, 25 bp, Homo sapien
tttaggcagtaagatgaactgatgg

SEQ ID NO: 5100869 - DNA, 25 bp, Homo sapien
ttgtgtgtgtcgagcgattctgccc

SEQ ID NO: 5100870 - DNA, 25 bp, Homo sapien
gctgttgaataacctgtgctgtatt

SEQ ID NO: 5100871 - DNA, 25 bp, Homo sapien
tgaataacctgtgctgtattattga

SEQ ID NO: 5100872 - DNA, 25 bp, Homo sapien
aacctgtgctgtattattgatgttc

SEQ ID NO: 5100873 - DNA, 25 bp, Homo sapien
aataacctgtgctgtattattgatg

SEQ ID NO: 5100874 - DNA, 25 bp, Homo sapien
taagtatatgattgaggcacttcca

SEQ ID NO: 5100875 - DNA, 25 bp, Homo sapien
cacttccagatacatagagaaatat

SEQ ID NO: 5100876 - DNA, 25 bp, Homo sapien
cgttaagtacagtttgtgaacgtgt

SEQ ID NO: 5100877 - DNA, 25 bp, Homo sapien
tggctggaaatcgttctcatttggg

SEQ ID NO: 5100878 - DNA, 25 bp, Homo sapien
taccatgtttagagataggtttggc

SEQ ID NO: 5100879 - DNA, 25 bp, Homo sapien
tgcagcctctgtttgtatcttagcc

SEQ ID NO: 5100880 - DNA, 25 bp, Homo sapien
aaagtccgtgacgatgtttgcagcc

SEQ ID NO: 5100881 - DNA, 25 bp, Homo sapien
ggctcttaagggcttagttttatga

SEQ ID NO: 5100882 - DNA, 25 bp, Homo sapien
tgataacatccacatttccggtaag

SEQ ID NO: 5100883 - DNA, 25 bp, Homo sapien
tttccggtaagatcaactctaggag

SEQ ID NO: 5100884 - DNA, 25 bp, Homo sapien
gatcaactctaggagaaagtctgag

SEQ ID NO: 5100885 - DNA, 25 bp, Homo sapien
ttccttgataacatccacatttccg

SEQ ID NO: 5100886 - DNA, 25 bp, Homo sapien
tgcacaggttgctcctctaaggcaa

SEQ ID NO: 5100887 - DNA, 25 bp, Homo sapien
caacgcgcagtgcacgattgacgta

SEQ ID NO: 5100888 - DNA, 25 bp, Homo sapien
cacgattgacgtatgcaccagagct

SEQ ID NO: 5100889 - DNA, 25 bp, Homo sapien
atgcaccagagctaggctgggcctc

SEQ ID NO: 5100890 - DNA, 25 bp, Homo sapien
gatgtgagtggatctgatgcaatgc

SEQ ID NO: 5100891 - DNA, 25 bp, Homo sapien
caccctggagactgatgtgagtgga

SEQ ID NO: 5100892 - DNA, 25 bp, Homo sapien
gtggatctgatgcaatgctgctgga

SEQ ID NO: 5100893 - DNA, 25 bp, Homo sapien
tcaccctggagactgatgtgagtgg

SEQ ID NO: 5100894 - DNA, 25 bp, Homo sapien
ctatagcgaaatgaaaacatcatcc

SEQ ID NO: 5100895 - DNA, 25 bp, Homo sapien
tcttctcttggagttgtctccccaa

SEQ ID NO: 5100896 - DNA, 25 bp, Homo sapien
tcaccaccagaatttttttgcatgt

SEQ ID NO: 5100897 - DNA, 25 bp, Homo sapien
tgccacctcccaattcaccaccaga

SEQ ID NO: 5100898 - DNA, 25 bp, Homo sapien
tctcaggtgccgctcagatgggcgc

SEQ ID NO: 5100899 - DNA, 25 bp, Homo sapien
cacagttactgcaccttggaggagc

SEQ ID NO: 5100900 - DNA, 25 bp, Homo sapien
cccagcagggaataggtgagcttca

SEQ ID NO: 5100901 - DNA, 25 bp, Homo sapien
tgcctttacaataggcgcacagtta

SEQ ID NO: 5100902 - DNA, 25 bp, Homo sapien
cagacagatactctaaagaagggag

SEQ ID NO: 5100903 - DNA, 25 bp, Homo sapien
tgctgttcccttatagaaaagaccc

SEQ ID NO: 5100904 - DNA, 25 bp, Homo sapien
tatttgcctagacagtatagctggt

SEQ ID NO: 5100905 - DNA, 25 bp, Homo sapien
taaaatgtagtaaagtctgctcctg

SEQ ID NO: 5100906 - DNA, 25 bp, Homo sapien
gagcctcttgaagccattcttacag

SEQ ID NO: 5100907 - DNA, 25 bp, Homo sapien
tatcgagcacaaacggaaacaatgc

SEQ ID NO: 5100908 - DNA, 25 bp, Homo sapien
tacagatgatgaaccagaccacggc

SEQ ID NO: 5100909 - DNA, 25 bp, Homo sapien
accacggcccgttgggagctccaga

SEQ ID NO: 5100910 - DNA, 25 bp, Homo sapien
tcccctcgtagagagaattcgcggc

SEQ ID NO: 5100911 - DNA, 25 bp, Homo sapien
cctgttaagacaatcaaggagaagg

SEQ ID NO: 5100912 - DNA, 25 bp, Homo sapien
gcaaacttgaagacacatctccctt

SEQ ID NO: 5100913 - DNA, 25 bp, Homo sapien
gcagctctcgttttgctcgctcctt

SEQ ID NO: 5100914 - DNA, 25 bp, Homo sapien
ttaataatgaataaccgcagccgcc

SEQ ID NO: 5100915 - DNA, 25 bp, Homo sapien
tcggagctcggaatcacaacaatag

SEQ ID NO: 5100916 - DNA, 25 bp, Homo sapien
tgaatctcaggacccgcgcttgagg

SEQ ID NO: 5100917 - DNA, 25 bp, Homo sapien
tactgagactgcaccaggttaacca

SEQ ID NO: 5100918 - DNA, 25 bp, Homo sapien
ggccgcgccggatgcggatcagacg

SEQ ID NO: 5100919 - DNA, 25 bp, Homo sapien
gatgcggatcagacgcggcgcgcgg

SEQ ID NO: 5100920 - DNA, 25 bp, Homo sapien
cggcgcgcggcggtgtgaagttaca

SEQ ID NO: 5100921 - DNA, 25 bp, Homo sapien
tgtgaagttacagcccggccaggta

SEQ ID NO: 5100922 - DNA, 25 bp, Homo sapien
cggcactgccgccttttgttccggc

SEQ ID NO: 5100923 - DNA, 25 bp, Homo sapien
aaggacgggagacgcggccggcact

SEQ ID NO: 5100924 - DNA, 25 bp, Homo sapien
actgccgccttttgttccggccaga

SEQ ID NO: 5100925 - DNA, 25 bp, Homo sapien
ccgccttttgttccggccagaggtg

SEQ ID NO: 5100926 - DNA, 25 bp, Homo sapien
gcacttaagcaaacgggaattctcg

SEQ ID NO: 5100927 - DNA, 25 bp, Homo sapien
cacttaagcaaacgggaattctcgc

SEQ ID NO: 5100928 - DNA, 25 bp, Homo sapien
tcgccgcaagcaaggcaaaccccag

SEQ ID NO: 5100929 - DNA, 25 bp, Homo sapien
gtctcgccgcaagcaaggcaaaccc

SEQ ID NO: 5100930 - DNA, 25 bp, Homo sapien
ggctctcccgatgtgaaccgagccg

SEQ ID NO: 5100931 - DNA, 25 bp, Homo sapien
tcccgatgtgaaccgagccgtcgtc

SEQ ID NO: 5100932 - DNA, 25 bp, Homo sapien
tctcccgatgtgaaccgagccgtcg

SEQ ID NO: 5100933 - DNA, 25 bp, Homo sapien
gatgtgaaccgagccgtcgtccgcc

SEQ ID NO: 5100934 - DNA, 25 bp, Homo sapien
taaaaaaaagccatgacggctctcc

SEQ ID NO: 5100935 - DNA, 25 bp, Homo sapien
ccacaattcatcttccctgcgccat

SEQ ID NO: 5100936 - DNA, 25 bp, Homo sapien
aagccatgacggctctcccacaatt

SEQ ID NO: 5100937 - DNA, 25 bp, Homo sapien
tcttccctgcgccatctttgtatta

SEQ ID NO: 5100938 - DNA, 25 bp, Homo sapien
ttcaagttcgcagggacgtcacgtc

SEQ ID NO: 5100939 - DNA, 25 bp, Homo sapien
tccagactcctgacgttcaagttcg

SEQ ID NO: 5100940 - DNA, 25 bp, Homo sapien
gctcgccctgcccatgttttgtgtg

SEQ ID NO: 5100941 - DNA, 25 bp, Homo sapien
cagcccctgatgtgtgtccattggt

SEQ ID NO: 5100942 - DNA, 25 bp, Homo sapien
caggaacagttgtgctctgcccgta

SEQ ID NO: 5100943 - DNA, 25 bp, Homo sapien
tattcctcgggctctctttctgcga

SEQ ID NO: 5100944 - DNA, 25 bp, Homo sapien
gaggcggtcatctcaccaccgtggt

SEQ ID NO: 5100945 - DNA, 25 bp, Homo sapien
gcctctcagagaggtggacgcctcg

SEQ ID NO: 5100946 - DNA, 25 bp, Homo sapien
tgcagctcagggtctcgcgggccat

SEQ ID NO: 5100947 - DNA, 25 bp, Homo sapien
ctgcagctcagggtctcgcgggcca

SEQ ID NO: 5100948 - DNA, 25 bp, Homo sapien
cagatagcagccctgatagggtgcc

SEQ ID NO: 5100949 - DNA, 25 bp, Homo sapien
aaagcttggttctgaaagaatctgg

SEQ ID NO: 5100950 - DNA, 25 bp, Homo sapien
cgtcagagcgcacacaattgtgtaa

SEQ ID NO: 5100951 - DNA, 25 bp, Homo sapien
tggacgggtgggaacaatattcaaa

SEQ ID NO: 5100952 - DNA, 25 bp, Homo sapien
ctctcctttggcacccagggaaagc

SEQ ID NO: 5100953 - DNA, 25 bp, Homo sapien
cccttcttgaccgatcctctttgtg

SEQ ID NO: 5100954 - DNA, 25 bp, Homo sapien
tgaccgatcctctttgtggaagctg

SEQ ID NO: 5100955 - DNA, 25 bp, Homo sapien
tcttgaccgatcctctttgtggaag

SEQ ID NO: 5100956 - DNA, 25 bp, Homo sapien
ctttcagcccttcttgaccgatcct

SEQ ID NO: 5100957 - DNA, 25 bp, Homo sapien
cctccactttgctgtagctgtaaag

SEQ ID NO: 5100958 - DNA, 25 bp, Homo sapien
tccactttgctgtagctgtaaagat

SEQ ID NO: 5100959 - DNA, 25 bp, Homo sapien
ctccactttgctgtagctgtaaaga

SEQ ID NO: 5100960 - DNA, 25 bp, Homo sapien
tgggccctcaggtcagagctcaaca

SEQ ID NO: 5100961 - DNA, 25 bp, Homo sapien
ggatctatttctaattagttctgcc

SEQ ID NO: 5100962 - DNA, 25 bp, Homo sapien
aggctcattgctgaaattacatagg

SEQ ID NO: 5100963 - DNA, 25 bp, Homo sapien
gttctgcctggtaaatagcatccac

SEQ ID NO: 5100964 - DNA, 25 bp, Homo sapien
tgcccacgtgactccccctcagtca

SEQ ID NO: 5100965 - DNA, 25 bp, Homo sapien
ctcagtcagcctctttaccacccag

SEQ ID NO: 5100966 - DNA, 25 bp, Homo sapien
cagtcagcctctttaccacccagcc

SEQ ID NO: 5100967 - DNA, 25 bp, Homo sapien
acgtgactccccctcagtcagcctc

SEQ ID NO: 5100968 - DNA, 25 bp, Homo sapien
tgcaaacccacgtagatttccacta

SEQ ID NO: 5100969 - DNA, 25 bp, Homo sapien
taagtttgctaagggaactcctcga

SEQ ID NO: 5100970 - DNA, 25 bp, Homo sapien
aaagcaggaacctgcaaacccacgt

SEQ ID NO: 5100971 - DNA, 25 bp, Homo sapien
gggtaaggaatgagtatcctggtct

SEQ ID NO: 5100972 - DNA, 25 bp, Homo sapien
taagcagatttgcacaatatgtggg

SEQ ID NO: 5100973 - DNA, 25 bp, Homo sapien
gagtcctgataaacaaagctaagca

SEQ ID NO: 5100974 - DNA, 25 bp, Homo sapien
gcagtctactttatcatatcaaccc

SEQ ID NO: 5100975 - DNA, 25 bp, Homo sapien
caacccagggacttagagtcctgat

SEQ ID NO: 5100976 - DNA, 25 bp, Homo sapien
aaactgaacagtgacggtgataggc

SEQ ID NO: 5100977 - DNA, 25 bp, Homo sapien
gattattgcagacataacttacaaa

SEQ ID NO: 5100978 - DNA, 25 bp, Homo sapien
ccctggcaaagggtgattattgcag

SEQ ID NO: 5100979 - DNA, 25 bp, Homo sapien
gtgataggcatgacaacatgacatc

SEQ ID NO: 5100980 - DNA, 25 bp, Homo sapien
aagcaacgtcctcatcattccaggg

SEQ ID NO: 5100981 - DNA, 25 bp, Homo sapien
caacacgatgaagcaacgtcctcat

SEQ ID NO: 5100982 - DNA, 25 bp, Homo sapien
ccaactccaacacgatgaagcaacg

SEQ ID NO: 5100983 - DNA, 25 bp, Homo sapien
gatgaagcaacgtcctcatcattcc

SEQ ID NO: 5100984 - DNA, 25 bp, Homo sapien
cttgtatgtgagtccctcccctgga

SEQ ID NO: 5100985 - DNA, 25 bp, Homo sapien
tgttaacttgtcttcggtcccctca

SEQ ID NO: 5100986 - DNA, 25 bp, Homo sapien
gacccactccgcaacatggaccttt

SEQ ID NO: 5100987 - DNA, 25 bp, Homo sapien
aaaagcacctggtattgaactgact

SEQ ID NO: 5100988 - DNA, 25 bp, Homo sapien
ccacaaaatttcagaatccatttat

SEQ ID NO: 5100989 - DNA, 25 bp, Homo sapien
ttaagccacaaaatttcagaatcca

SEQ ID NO: 5100990 - DNA, 25 bp, Homo sapien
acaaaatttcagaatccatttatgc

SEQ ID NO: 5100991 - DNA, 25 bp, Homo sapien
ttttaagccacaaaatttcagaatc

SEQ ID NO: 5100992 - DNA, 25 bp, Homo sapien
ccaggtcagctccaaaatccgatct

SEQ ID NO: 5100993 - DNA, 25 bp, Homo sapien
ctgtgatcataaacatgcccaggtc

SEQ ID NO: 5100994 - DNA, 25 bp, Homo sapien
cctggctgataatccggtctgtgat

SEQ ID NO: 5100995 - DNA, 25 bp, Homo sapien
tgtttcaacgttgcagtttctgctg

SEQ ID NO: 5100996 - DNA, 25 bp, Homo sapien
agcatggatcatgtgcctgttacac

SEQ ID NO: 5100997 - DNA, 25 bp, Homo sapien
tggatcatgtgcctgttacacccga

SEQ ID NO: 5100998 - DNA, 25 bp, Homo sapien
tgttacacccgaaaagatcctggaa

SEQ ID NO: 5100999 - DNA, 25 bp, Homo sapien
tgtgcctgttacacccgaaaagatc

SEQ ID NO: 5101000 - DNA, 25 bp, Homo sapien
gcccgagtctttgtcctacgctgct

SEQ ID NO: 5101001 - DNA, 25 bp, Homo sapien
tgcgcgccgaaccaggcagctgccg

SEQ ID NO: 5101002 - DNA, 25 bp, Homo sapien
gagtctttgtcctacgctgctcgcc

SEQ ID NO: 5101003 - DNA, 25 bp, Homo sapien
tgccgcccgagtctttgtcctacgc

SEQ ID NO: 5101004 - DNA, 25 bp, Homo sapien
acgcttggtggttcgcgcctccgcg

SEQ ID NO: 5101005 - DNA, 25 bp, Homo sapien
cagtacaagcagtcgtggccacgat

SEQ ID NO: 5101006 - DNA, 25 bp, Homo sapien
gtggagcttggagccacgcttggtg

SEQ ID NO: 5101007 - DNA, 25 bp, Homo sapien
tcaggccgcacgatggcgcccgctt

SEQ ID NO: 5101008 - DNA, 25 bp, Homo sapien
tgtgcacatggtacgaaagtcaagg

SEQ ID NO: 5101009 - DNA, 25 bp, Homo sapien
gtcaccagggcaggtacggtaacca

SEQ ID NO: 5101010 - DNA, 25 bp, Homo sapien
gctggcgacggctcagttgcattta

SEQ ID NO: 5101011 - DNA, 25 bp, Homo sapien
tactggaagtggttctgtgttcaca

SEQ ID NO: 5101012 - DNA, 25 bp, Homo sapien
tactctatggtaagaagagtttggc

SEQ ID NO: 5101013 - DNA, 25 bp, Homo sapien
gaatcaggacaacgaagacattttc

SEQ ID NO: 5101014 - DNA, 25 bp, Homo sapien
tgtcctcaccaagactgcaaaacct

SEQ ID NO: 5101015 - DNA, 25 bp, Homo sapien
tttggccaactgaatcaggacaacg

SEQ ID NO: 5101016 - DNA, 25 bp, Homo sapien
ctaacgcctgactgacaagcagctg

SEQ ID NO: 5101017 - DNA, 25 bp, Homo sapien
ttgtaccgtggacatactgtcttct

SEQ ID NO: 5101018 - DNA, 25 bp, Homo sapien
taacgcctgactgacaagcagctgt

SEQ ID NO: 5101019 - DNA, 25 bp, Homo sapien
gacactgtccatccaaacatggatt

SEQ ID NO: 5101020 - DNA, 25 bp, Homo sapien
gaagccggagactggagcaaaatgg

SEQ ID NO: 5101021 - DNA, 25 bp, Homo sapien
ggctgccacagtcatatcctaagag

SEQ ID NO: 5101022 - DNA, 25 bp, Homo sapien
gggctgctctgaaaatctatcagcc

SEQ ID NO: 5101023 - DNA, 25 bp, Homo sapien
tgaaaatctatcagccttgagctca

SEQ ID NO: 5101024 - DNA, 25 bp, Homo sapien
agcccacgacccactctgccttgct

SEQ ID NO: 5101025 - DNA, 25 bp, Homo sapien
gccctcccatcagcagcctttggaa

SEQ ID NO: 5101026 - DNA, 25 bp, Homo sapien
ttggaagggacagtgctccccagcc

SEQ ID NO: 5101027 - DNA, 25 bp, Homo sapien
cccagcccacgacccactctgcctt

SEQ ID NO: 5101028 - DNA, 25 bp, Homo sapien
ctttctccacgtgcatggaaaaggg

SEQ ID NO: 5101029 - DNA, 25 bp, Homo sapien
aaaagggctccccagtctcgcgagg

SEQ ID NO: 5101030 - DNA, 25 bp, Homo sapien
caagcggtagtggactggaacgtgg

SEQ ID NO: 5101031 - DNA, 25 bp, Homo sapien
ccagtctcgcgaggcaagcggtagt

SEQ ID NO: 5101032 - DNA, 25 bp, Homo sapien
gaaatggcaaaagggctgtgttcaa

SEQ ID NO: 5101033 - DNA, 25 bp, Homo sapien
aagaaatggcaaaagggctgtgttc

SEQ ID NO: 5101034 - DNA, 25 bp, Homo sapien
aaatggcaaaagggctgtgttcaat

SEQ ID NO: 5101035 - DNA, 25 bp, Homo sapien
ctaagaaatggcaaaagggctgtgt

SEQ ID NO: 5101036 - DNA, 25 bp, Homo sapien
tgccctagttccagcaaatctgagt

SEQ ID NO: 5101037 - DNA, 25 bp, Homo sapien
ctgtagggtcctcccggagttcttg

SEQ ID NO: 5101038 - DNA, 25 bp, Homo sapien
tctctggaaaatggcagcatgccct

SEQ ID NO: 5101039 - DNA, 25 bp, Homo sapien
ttccagggaatactcacactcactt

SEQ ID NO: 5101040 - DNA, 25 bp, Homo sapien
caccttgatatttgggcacaagggc

SEQ ID NO: 5101041 - DNA, 25 bp, Homo sapien
catgccctcttttgaagacccaggc

SEQ ID NO: 5101042 - DNA, 25 bp, Homo sapien
ccttcactctcaatgtgtcactggg

SEQ ID NO: 5101043 - DNA, 25 bp, Homo sapien
cattattcacctgcagttccatgcc

SEQ ID NO: 5101044 - DNA, 25 bp, Homo sapien
cactggagtaaatcgtcccaggata

SEQ ID NO: 5101045 - DNA, 25 bp, Homo sapien
aatcgtcccaggataatggttacct

SEQ ID NO: 5101046 - DNA, 25 bp, Homo sapien
ggagtaaatcgtcccaggataatgg

SEQ ID NO: 5101047 - DNA, 25 bp, Homo sapien
gagacactggagtaaatcgtcccag

SEQ ID NO: 5101048 - DNA, 25 bp, Homo sapien
ttcctgtcaagtcttgtgtgtgcca

SEQ ID NO: 5101049 - DNA, 25 bp, Homo sapien
tcctgtcaagtcttgtgtgtgccaa

SEQ ID NO: 5101050 - DNA, 25 bp, Homo sapien
ggatttgaagagtcttcatttagca

SEQ ID NO: 5101051 - DNA, 25 bp, Homo sapien
tgaagagtcttcatttagcaggtac

SEQ ID NO: 5101052 - DNA, 25 bp, Homo sapien
ggtactcacagagcacatgctgcat

SEQ ID NO: 5101053 - DNA, 25 bp, Homo sapien
catttagcaggtactcacagagcac

SEQ ID NO: 5101054 - DNA, 25 bp, Homo sapien
ttgccagagggaccttccctccagc

SEQ ID NO: 5101055 - DNA, 25 bp, Homo sapien
tattctcttgccagagggaccttcc

SEQ ID NO: 5101056 - DNA, 25 bp, Homo sapien
ggaagaggatattctcttgccagag

SEQ ID NO: 5101057 - DNA, 25 bp, Homo sapien
aagaggatattctcttgccagaggg

SEQ ID NO: 5101058 - DNA, 25 bp, Homo sapien
ctcccccaaatcttgtttcctccag

SEQ ID NO: 5101059 - DNA, 25 bp, Homo sapien
cccaaatcttgtttcctccaggaag

SEQ ID NO: 5101060 - DNA, 25 bp, Homo sapien
gctctcccccaaatcttgtttcctc

SEQ ID NO: 5101061 - DNA, 25 bp, Homo sapien
ccaaatcttgtttcctccaggaagc

SEQ ID NO: 5101062 - DNA, 25 bp, Homo sapien
ctgaagtttttgtgctggttcccca

SEQ ID NO: 5101063 - DNA, 25 bp, Homo sapien
tgaagtttttgtgctggttccccac

SEQ ID NO: 5101064 - DNA, 25 bp, Homo sapien
tctgaagtttttgtgctggttcccc

SEQ ID NO: 5101065 - DNA, 25 bp, Homo sapien
agggactctgccacacgcttgttct

SEQ ID NO: 5101066 - DNA, 25 bp, Homo sapien
cacgcttgttctggaacttctctcc

SEQ ID NO: 5101067 - DNA, 25 bp, Homo sapien
tgccacacacttcagtttgtccctc

SEQ ID NO: 5101068 - DNA, 25 bp, Homo sapien
tctgggccacacactttactggcat

SEQ ID NO: 5101069 - DNA, 25 bp, Homo sapien
ccctgtcccctaggctgtctcccca

SEQ ID NO: 5101070 - DNA, 25 bp, Homo sapien
cctgtcccctaggctgtctccccac

SEQ ID NO: 5101071 - DNA, 25 bp, Homo sapien
tcttaaaactgagacatctacatgg

SEQ ID NO: 5101072 - DNA, 25 bp, Homo sapien
aactgagacatctacatgggactgt

SEQ ID NO: 5101073 - DNA, 25 bp, Homo sapien
ttggcttccctgatcttaaaactga

SEQ ID NO: 5101074 - DNA, 25 bp, Homo sapien
tctacatgggactgtcagcaaggtg

SEQ ID NO: 5101075 - DNA, 25 bp, Homo sapien
ctcaccagtgtgatcccagtattga

SEQ ID NO: 5101076 - DNA, 25 bp, Homo sapien
cctggaaggtcgcaatgttggtgcc

SEQ ID NO: 5101077 - DNA, 25 bp, Homo sapien
ggctacccaattgacataccgcact

SEQ ID NO: 5101078 - DNA, 25 bp, Homo sapien
gatcccagtattgatctgcatgaga

SEQ ID NO: 5101079 - DNA, 25 bp, Homo sapien
ttttaggatcagctctggtgctaga

SEQ ID NO: 5101080 - DNA, 25 bp, Homo sapien
atggatgaacatgagcagggacttt

SEQ ID NO: 5101081 - DNA, 25 bp, Homo sapien
cttttaggatcagctctggtgctag

SEQ ID NO: 5101082 - DNA, 25 bp, Homo sapien
ccagcctggaatgaggtccctctta

SEQ ID NO: 5101083 - DNA, 25 bp, Homo sapien
ccctcttaggtgtggcagattggat

SEQ ID NO: 5101084 - DNA, 25 bp, Homo sapien
aatgaggtccctcttaggtgtggca

SEQ ID NO: 5101085 - DNA, 25 bp, Homo sapien
gccagcctggaatgaggtccctctt

SEQ ID NO: 5101086 - DNA, 25 bp, Homo sapien
gcagaatctgctgctaaagttagct

SEQ ID NO: 5101087 - DNA, 25 bp, Homo sapien
ctgctgctaaagttagctccctgag

SEQ ID NO: 5101088 - DNA, 25 bp, Homo sapien
caaatataattcttaccactggaaa

SEQ ID NO: 5101089 - DNA, 25 bp, Homo sapien
aagcaaggccccacgcaagaggctt

SEQ ID NO: 5101090 - DNA, 25 bp, Homo sapien
acaattctgccgtgaaatactcagc

SEQ ID NO: 5101091 - DNA, 25 bp, Homo sapien
gatcttcttgtgtacgtgtgggaaa

SEQ ID NO: 5101092 - DNA, 25 bp, Homo sapien
cttttgagtgtctctggcatgcaga

SEQ ID NO: 5101093 - DNA, 25 bp, Homo sapien
tcagctgtaaaagaaacgagactac

SEQ ID NO: 5101094 - DNA, 25 bp, Homo sapien
gatgatgcccaggtgtgtggttcca

SEQ ID NO: 5101095 - DNA, 25 bp, Homo sapien
gggattggcattacacataacttga

SEQ ID NO: 5101096 - DNA, 25 bp, Homo sapien
ggttccagagcaattttgcctcgag

SEQ ID NO: 5101097 - DNA, 25 bp, Homo sapien
ttgcctcgagtaaatcagcaggtcc

SEQ ID NO: 5101098 - DNA, 25 bp, Homo sapien
ggtcaatcgctttctctgcatgcag

SEQ ID NO: 5101099 - DNA, 25 bp, Homo sapien
ccttattggcgagcactgaggtcaa

SEQ ID NO: 5101100 - DNA, 25 bp, Homo sapien
cagtagagggacagcttgtttagct

SEQ ID NO: 5101101 - DNA, 25 bp, Homo sapien
tattcaaagtcactcacgtacagcg

SEQ ID NO: 5101102 - DNA, 25 bp, Homo sapien
tggacaggaagttgcctggagacct

SEQ ID NO: 5101103 - DNA, 25 bp, Homo sapien
ggaagattgtaaagggaatttgata

SEQ ID NO: 5101104 - DNA, 25 bp, Homo sapien
cagcagctacgaccatgaacttgga

SEQ ID NO: 5101105 - DNA, 25 bp, Homo sapien
ctggagacctgggaagattgtaaag

SEQ ID NO: 5101106 - DNA, 25 bp, Homo sapien
aaataagattccagcatttatctgc

SEQ ID NO: 5101107 - DNA, 25 bp, Homo sapien
tcctcaacgacaatcaaaattctcc

SEQ ID NO: 5101108 - DNA, 25 bp, Homo sapien
gattgaaataagattccagcattta

SEQ ID NO: 5101109 - DNA, 25 bp, Homo sapien
ttgaggctctgtcctcaacgacaat

SEQ ID NO: 5101110 - DNA, 25 bp, Homo sapien
tttgatagttatgtgggtgcagccc

SEQ ID NO: 5101111 - DNA, 25 bp, Homo sapien
catttgatagttatgtgggtgcagc

SEQ ID NO: 5101112 - DNA, 25 bp, Homo sapien
tgcatttgatagttatgtgggtgca

SEQ ID NO: 5101113 - DNA, 25 bp, Homo sapien
tgatagttatgtgggtgcagcccat

SEQ ID NO: 5101114 - DNA, 25 bp, Homo sapien
ctgtccagaaaaaaccccgagcata

SEQ ID NO: 5101115 - DNA, 25 bp, Homo sapien
cctgtccagaaaaaaccccgagcat

SEQ ID NO: 5101116 - DNA, 25 bp, Homo sapien
gcagaagaaacctgtccagaaaaaa

SEQ ID NO: 5101117 - DNA, 25 bp, Homo sapien
tgtccagaaaaaaccccgagcatac

SEQ ID NO: 5101118 - DNA, 25 bp, Homo sapien
gagattcagattaagcagccgttga

SEQ ID NO: 5101119 - DNA, 25 bp, Homo sapien
ttgactcgagccaactgcagtcagc

SEQ ID NO: 5101120 - DNA, 25 bp, Homo sapien
tttggagagacaccagctgcgggaa

SEQ ID NO: 5101121 - DNA, 25 bp, Homo sapien
gacttggacattggttgagtttgga

SEQ ID NO: 5101122 - DNA, 25 bp, Homo sapien
ggtgacctgcctgtattgtagattt

SEQ ID NO: 5101123 - DNA, 25 bp, Homo sapien
tgaattggccagagcgggtaagaca

SEQ ID NO: 5101124 - DNA, 25 bp, Homo sapien
cagagggacattctgtcgggaaaat

SEQ ID NO: 5101125 - DNA, 25 bp, Homo sapien
gacatgccaatcaggaaagagccca

SEQ ID NO: 5101126 - DNA, 25 bp, Homo sapien
atgataaagaatctccaaggccagc

SEQ ID NO: 5101127 - DNA, 25 bp, Homo sapien
ccaagcaatttctcaaatgataaag

SEQ ID NO: 5101128 - DNA, 25 bp, Homo sapien
tccaagcaatttctcaaatgataaa

SEQ ID NO: 5101129 - DNA, 25 bp, Homo sapien
tcaaatgataaagaatctccaaggc

SEQ ID NO: 5101130 - DNA, 25 bp, Homo sapien
aagtgcctgaacgtttgcaccctca

SEQ ID NO: 5101131 - DNA, 25 bp, Homo sapien
cagccatgtcgtctggtccctgttc

SEQ ID NO: 5101132 - DNA, 25 bp, Homo sapien
tctcttcatgaattgatgccatctg

SEQ ID NO: 5101133 - DNA, 25 bp, Homo sapien
tgggcatccgtgtgaccacaacact

SEQ ID NO: 5101134 - DNA, 25 bp, Homo sapien
tcccgaccacaactgatcttccctg

SEQ ID NO: 5101135 - DNA, 25 bp, Homo sapien
gctgagggtgccccacaaccctgtt

SEQ ID NO: 5101136 - DNA, 25 bp, Homo sapien
ccctggacacgatgaaccacgctgt

SEQ ID NO: 5101137 - DNA, 25 bp, Homo sapien
tgaaccacgctgtccaaaccgtctt

SEQ ID NO: 5101138 - DNA, 25 bp, Homo sapien
ggtatcccacctcaggaaactggca

SEQ ID NO: 5101139 - DNA, 25 bp, Homo sapien
ttggaagaggtctgagccaaggtca

SEQ ID NO: 5101140 - DNA, 25 bp, Homo sapien
caaggtcaggtatcccacctcagga

SEQ ID NO: 5101141 - DNA, 25 bp, Homo sapien
ggtctgagccaaggtcaggtatccc

SEQ ID NO: 5101142 - DNA, 25 bp, Homo sapien
tggggggtcccagagatccacctgt

SEQ ID NO: 5101143 - DNA, 25 bp, Homo sapien
cctgtgactgcgagtggaggagatg

SEQ ID NO: 5101144 - DNA, 25 bp, Homo sapien
gagagctgtgcccttcgttctcctc

SEQ ID NO: 5101145 - DNA, 25 bp, Homo sapien
ccacctgtgactgcgagtggaggag

SEQ ID NO: 5101146 - DNA, 25 bp, Homo sapien
acagagccccaaagtaacagtgtgc

SEQ ID NO: 5101147 - DNA, 25 bp, Homo sapien
caggatttagatttatggccacacc

SEQ ID NO: 5101148 - DNA, 25 bp, Homo sapien
tctcaggtgaaggtaacagagcccc

SEQ ID NO: 5101149 - DNA, 25 bp, Homo sapien
tgaccagaaatcacaacccattgtg

SEQ ID NO: 5101150 - DNA, 25 bp, Homo sapien
ttggatggtcttcgatcgaacattg

SEQ ID NO: 5101151 - DNA, 25 bp, Homo sapien
gatggtcttcgatcgaacattgtac

SEQ ID NO: 5101152 - DNA, 25 bp, Homo sapien
cttttggatggtcttcgatcgaaca

SEQ ID NO: 5101153 - DNA, 25 bp, Homo sapien
ggatggtcttcgatcgaacattgta

SEQ ID NO: 5101154 - DNA, 25 bp, Homo sapien
tgacccttacagtgtcctcgcgcaa

SEQ ID NO: 5101155 - DNA, 25 bp, Homo sapien
gacccttacagtgtcctcgcgcaac

SEQ ID NO: 5101156 - DNA, 25 bp, Homo sapien
ctgacccttacagtgtcctcgcgca

SEQ ID NO: 5101157 - DNA, 25 bp, Homo sapien
tgtaaacctggattatttggccaat

SEQ ID NO: 5101158 - DNA, 25 bp, Homo sapien
ctgtaaacctggattatttggccaa

SEQ ID NO: 5101159 - DNA, 25 bp, Homo sapien
ttattcctgcaccttccctattgtt

SEQ ID NO: 5101160 - DNA, 25 bp, Homo sapien
ctgcaccttccctattgtttctttc

SEQ ID NO: 5101161 - DNA, 25 bp, Homo sapien
cctgcaccttccctattgtttcttt

SEQ ID NO: 5101162 - DNA, 25 bp, Homo sapien
tattcctgcaccttccctattgttt

SEQ ID NO: 5101163 - DNA, 25 bp, Homo sapien
gtgtagggcacgctaattttctctg

SEQ ID NO: 5101164 - DNA, 25 bp, Homo sapien
atctttgtgtagggcacgctaattt

SEQ ID NO: 5101165 - DNA, 25 bp, Homo sapien
ttgtgtagggcacgctaattttctc

SEQ ID NO: 5101166 - DNA, 25 bp, Homo sapien
ctttgtgtagggcacgctaattttc

SEQ ID NO: 5101167 - DNA, 25 bp, Homo sapien
tcacagtctgtcctgatggagcact

SEQ ID NO: 5101168 - DNA, 25 bp, Homo sapien
gcgcgcacacgatgaagaaggagtc

SEQ ID NO: 5101169 - DNA, 25 bp, Homo sapien
taacttcgtatgcagggtacactga

SEQ ID NO: 5101170 - DNA, 25 bp, Homo sapien
tttcgttacttcaagcatgccgtgg

SEQ ID NO: 5101171 - DNA, 25 bp, Homo sapien
caaaaccggctctatttatgacaat

SEQ ID NO: 5101172 - DNA, 25 bp, Homo sapien
ctgaggcatccaaccgagtagtgaa

SEQ ID NO: 5101173 - DNA, 25 bp, Homo sapien
ggccgacgccaatatggcgccgctt

SEQ ID NO: 5101174 - DNA, 25 bp, Homo sapien
tatgacaatacagcgcggccgacgc

SEQ ID NO: 5101175 - DNA, 25 bp, Homo sapien
cttgctcgctcactttcccacttac

SEQ ID NO: 5101176 - DNA, 25 bp, Homo sapien
ctcgcttgctcgctcactttcccac

SEQ ID NO: 5101177 - DNA, 25 bp, Homo sapien
tagtagctcgcttgctcgctcactt

SEQ ID NO: 5101178 - DNA, 25 bp, Homo sapien
ctagtagctcgcttgctcgctcact

SEQ ID NO: 5101179 - DNA, 25 bp, Homo sapien
gagtgtttatcgctctggagtcctg

SEQ ID NO: 5101180 - DNA, 25 bp, Homo sapien
ccctctccagcgagtgtttatcgct

SEQ ID NO: 5101181 - DNA, 25 bp, Homo sapien
gtttatcgctctggagtcctgttct

SEQ ID NO: 5101182 - DNA, 25 bp, Homo sapien
tccagcgagtgtttatcgctctgga

SEQ ID NO: 5101183 - DNA, 25 bp, Homo sapien
cagctggggactcccggagtccccg

SEQ ID NO: 5101184 - DNA, 25 bp, Homo sapien
gtgcccttgcggaccggccgggagc

SEQ ID NO: 5101185 - DNA, 25 bp, Homo sapien
cgtcctcggaggcgggacagctggg

SEQ ID NO: 5101186 - DNA, 25 bp, Homo sapien
ccggagtccccgagtccgtgcaggg

SEQ ID NO: 5101187 - DNA, 25 bp, Homo sapien
tatgaaggggctattcatactgcct

SEQ ID NO: 5101188 - DNA, 25 bp, Homo sapien
gtaataacagtagtggcagacactt

SEQ ID NO: 5101189 - DNA, 25 bp, Homo sapien
tggcagacactttcttgtaaaggaa

SEQ ID NO: 5101190 - DNA, 25 bp, Homo sapien
gggctattcatactgcctgcagctt

SEQ ID NO: 5101191 - DNA, 25 bp, Homo sapien
acgctggctgtccagcacggtgttt

SEQ ID NO: 5101192 - DNA, 25 bp, Homo sapien
gggaggtaattccataatgcttttg

SEQ ID NO: 5101193 - DNA, 25 bp, Homo sapien
aatgcttttgttgacgctggctgtc

SEQ ID NO: 5101194 - DNA, 25 bp, Homo sapien
taggagatgccaaactaattgggga

SEQ ID NO: 5101195 - DNA, 25 bp, Homo sapien
ctccaaatggtttcatggcgtcaat

SEQ ID NO: 5101196 - DNA, 25 bp, Homo sapien
caaacactccaaatggtttcatggc

SEQ ID NO: 5101197 - DNA, 25 bp, Homo sapien
cactccaaatggtttcatggcgtca

SEQ ID NO: 5101198 - DNA, 25 bp, Homo sapien
caaatggtttcatggcgtcaattaa

SEQ ID NO: 5101199 - DNA, 25 bp, Homo sapien
tgttcaatttaccaagaaccaccag

SEQ ID NO: 5101200 - DNA, 25 bp, Homo sapien
cttactctcgctgacatcagaaatc

SEQ ID NO: 5101201 - DNA, 25 bp, Homo sapien
ttgttcaatttaccaagaaccacca

SEQ ID NO: 5101202 - DNA, 25 bp, Homo sapien
tatattggctacttctgggtaatcc

SEQ ID NO: 5101203 - DNA, 25 bp, Homo sapien
taaattttggcctactacatatgag

SEQ ID NO: 5101204 - DNA, 25 bp, Homo sapien
tacatataccagagagccaagcttt

SEQ ID NO: 5101205 - DNA, 25 bp, Homo sapien
caagaattccacatagtttagagtc

SEQ ID NO: 5101206 - DNA, 25 bp, Homo sapien
gtactccaagcctataggatccaaa

SEQ ID NO: 5101207 - DNA, 25 bp, Homo sapien
tactccaagcctataggatccaaat

SEQ ID NO: 5101208 - DNA, 25 bp, Homo sapien
tcttaagtttctaatgccatcttga

SEQ ID NO: 5101209 - DNA, 25 bp, Homo sapien
catgtcttggagctacacaaagtgc

SEQ ID NO: 5101210 - DNA, 25 bp, Homo sapien
taagtttctaatgccatcttgatgt

SEQ ID NO: 5101211 - DNA, 25 bp, Homo sapien
tccacatgtcttggagctacacaaa

SEQ ID NO: 5101212 - DNA, 25 bp, Homo sapien
taacaggtacaaaggcatcttctac

SEQ ID NO: 5101213 - DNA, 25 bp, Homo sapien
attttataacaggtacaaaggcatc

SEQ ID NO: 5101214 - DNA, 25 bp, Homo sapien
ttataacaggtacaaaggcatcttc

SEQ ID NO: 5101215 - DNA, 25 bp, Homo sapien
aattttataacaggtacaaaggcat

SEQ ID NO: 5101216 - DNA, 25 bp, Homo sapien
tcaggcgagagtcgtctcttagatc

SEQ ID NO: 5101217 - DNA, 25 bp, Homo sapien
catttaagctgcgaatacaccttat

SEQ ID NO: 5101218 - DNA, 25 bp, Homo sapien
ctgatatggtttgtattgccagtct

SEQ ID NO: 5101219 - DNA, 25 bp, Homo sapien
cttatatcaaggcttctcaggcgag

SEQ ID NO: 5101220 - DNA, 25 bp, Homo sapien
tctttatttggcactaaatgcaaaa

SEQ ID NO: 5101221 - DNA, 25 bp, Homo sapien
ttttgcccataatttgacagctctt

SEQ ID NO: 5101222 - DNA, 25 bp, Homo sapien
agctcttagggtgagtctaaaagtt

SEQ ID NO: 5101223 - DNA, 25 bp, Homo sapien
aagtttctttatttggcactaaatg

SEQ ID NO: 5101224 - DNA, 25 bp, Homo sapien
tctatattatgtcccgccaagcgag

SEQ ID NO: 5101225 - DNA, 25 bp, Homo sapien
actgggctccactgatactacattg

SEQ ID NO: 5101226 - DNA, 25 bp, Homo sapien
gaatatccgtgacattcaacaaggt

SEQ ID NO: 5101227 - DNA, 25 bp, Homo sapien
gcaccaccatggttgtcatgaccgt

SEQ ID NO: 5101228 - DNA, 25 bp, Homo sapien
ttgcaactagcattgcccaggagac

SEQ ID NO: 5101229 - DNA, 25 bp, Homo sapien
tgctgctgcatttggatacaattgg

SEQ ID NO: 5101230 - DNA, 25 bp, Homo sapien
agaacttatgaactaaagtagatgc

SEQ ID NO: 5101231 - DNA, 25 bp, Homo sapien
aattggcaagttcttgcaactagca

SEQ ID NO: 5101232 - DNA, 25 bp, Homo sapien
ggatcccagacaggcaaattcaaat

SEQ ID NO: 5101233 - DNA, 25 bp, Homo sapien
ccgaggatcccagacaggcaaattc

SEQ ID NO: 5101234 - DNA, 25 bp, Homo sapien
gaggatcccagacaggcaaattcaa

SEQ ID NO: 5101235 - DNA, 25 bp, Homo sapien
ccagacaggcaaattcaaattgctt

SEQ ID NO: 5101236 - DNA, 25 bp, Homo sapien
tggatcagcattagtgatcctaatc

SEQ ID NO: 5101237 - DNA, 25 bp, Homo sapien
gatcagcattagtgatcctaatcat

SEQ ID NO: 5101238 - DNA, 25 bp, Homo sapien
atttggatcagcattagtgatccta

SEQ ID NO: 5101239 - DNA, 25 bp, Homo sapien
tttggatcagcattagtgatcctaa

SEQ ID NO: 5101240 - DNA, 25 bp, Homo sapien
tggacacattatacgtagaattctg

SEQ ID NO: 5101241 - DNA, 25 bp, Homo sapien
gatgatacctatctgatggatttac

SEQ ID NO: 5101242 - DNA, 25 bp, Homo sapien
ttatgggcatgagatgatacctatc

SEQ ID NO: 5101243 - DNA, 25 bp, Homo sapien
tactgttcgagttgatgtggacaca

SEQ ID NO: 5101244 - DNA, 25 bp, Homo sapien
aatatgtaaagggcaacagggccac

SEQ ID NO: 5101245 - DNA, 25 bp, Homo sapien
atatgtaaagggcaacagggccaca

SEQ ID NO: 5101246 - DNA, 25 bp, Homo sapien
caaaaacttgtgggaatatgtaaag

SEQ ID NO: 5101247 - DNA, 25 bp, Homo sapien
ttcggtggctcaagtagtttggacc

SEQ ID NO: 5101248 - DNA, 25 bp, Homo sapien
gaaagaaattcggtggctcaagtag

SEQ ID NO: 5101249 - DNA, 25 bp, Homo sapien
agtagtttggaccaatctgactttc

SEQ ID NO: 5101250 - DNA, 25 bp, Homo sapien
ttttgaaagaaattcggtggctcaa

SEQ ID NO: 5101251 - DNA, 25 bp, Homo sapien
tttcttctgttgatgcgctggcagt

SEQ ID NO: 5101252 - DNA, 25 bp, Homo sapien
cttctgttgatgcgctggcagtcaa

SEQ ID NO: 5101253 - DNA, 25 bp, Homo sapien
tcttctgttgatgcgctggcagtca

SEQ ID NO: 5101254 - DNA, 25 bp, Homo sapien
tctgttgatgcgctggcagtcaata

SEQ ID NO: 5101255 - DNA, 25 bp, Homo sapien
gatgttccttattccctgggaatga

SEQ ID NO: 5101256 - DNA, 25 bp, Homo sapien
caagtacacggattttagattctac

SEQ ID NO: 5101257 - DNA, 25 bp, Homo sapien
ctggggattcacatgggcaagagta

SEQ ID NO: 5101258 - DNA, 25 bp, Homo sapien
agtaataaattcattccgttccaag

SEQ ID NO: 5101259 - DNA, 25 bp, Homo sapien
tacagatttcagtggtctggccaga

SEQ ID NO: 5101260 - DNA, 25 bp, Homo sapien
taatgcctagacactcaaactcaaa

SEQ ID NO: 5101261 - DNA, 25 bp, Homo sapien
taagttatcccctgttgttctgaga

SEQ ID NO: 5101262 - DNA, 25 bp, Homo sapien
taatgtgtcatactcccatcaatgc

SEQ ID NO: 5101263 - DNA, 25 bp, Homo sapien
aaaattatcccaaggaaccacattg

SEQ ID NO: 5101264 - DNA, 25 bp, Homo sapien
ctactctccgaaaaattatcccaag

SEQ ID NO: 5101265 - DNA, 25 bp, Homo sapien
gaaccacattgatacgtaattgttg

SEQ ID NO: 5101266 - DNA, 25 bp, Homo sapien
gcattttctactctccgaaaaatta

SEQ ID NO: 5101267 - DNA, 25 bp, Homo sapien
tgagaatcacagctctatgatgatg

SEQ ID NO: 5101268 - DNA, 25 bp, Homo sapien
actttaataagtacagccagccaga

SEQ ID NO: 5101269 - DNA, 25 bp, Homo sapien
cagatgacactgagtaatagccagg

SEQ ID NO: 5101270 - DNA, 25 bp, Homo sapien
gccagccagattgtaggcagatgac

SEQ ID NO: 5101271 - DNA, 25 bp, Homo sapien
attcatgaatccactagtttttctt

SEQ ID NO: 5101272 - DNA, 25 bp, Homo sapien
tacacttccatcacatcacaatcct

SEQ ID NO: 5101273 - DNA, 25 bp, Homo sapien
caagggttctgcctaatttttctga

SEQ ID NO: 5101274 - DNA, 25 bp, Homo sapien
atgttaatatgttaaatgggaaact

SEQ ID NO: 5101275 - DNA, 25 bp, Homo sapien
atttatattgtttgcctgtctgtac

SEQ ID NO: 5101276 - DNA, 25 bp, Homo sapien
tttatattgtttgcctgtctgtaca

SEQ ID NO: 5101277 - DNA, 25 bp, Homo sapien
tttctgcaggaaggtagtggtgaag

SEQ ID NO: 5101278 - DNA, 25 bp, Homo sapien
gcccgagcttcgattgacatcagag

SEQ ID NO: 5101279 - DNA, 25 bp, Homo sapien
cagaagggctatcagacttggacgc

SEQ ID NO: 5101280 - DNA, 25 bp, Homo sapien
aaaggtgttccattatcagtgtctc

SEQ ID NO: 5101281 - DNA, 25 bp, Homo sapien
tttggattgaagtccgcccgagctt

SEQ ID NO: 5101282 - DNA, 25 bp, Homo sapien
ttctccacaattacagcagcaggct

SEQ ID NO: 5101283 - DNA, 25 bp, Homo sapien
tcttaggagtcccatctatggatgg

SEQ ID NO: 5101284 - DNA, 25 bp, Homo sapien
cattcagatgcggttgtccctgggc

SEQ ID NO: 5101285 - DNA, 25 bp, Homo sapien
ggaatgacatttcgtcctactacgg

SEQ ID NO: 5101286 - DNA, 25 bp, Homo sapien
gaatgggatctcttaggtgtaacag

SEQ ID NO: 5101287 - DNA, 25 bp, Homo sapien
taaacatggattggtaagagaagat

SEQ ID NO: 5101288 - DNA, 25 bp, Homo sapien
gattgaattcaactgccaccgttaa

SEQ ID NO: 5101289 - DNA, 25 bp, Homo sapien
gcagggcatatcaacacacaagaaa

SEQ ID NO: 5101290 - DNA, 25 bp, Homo sapien
cgttaatttctacagtttgggtgat

SEQ ID NO: 5101291 - DNA, 25 bp, Homo sapien
agtgcgggggtccttaaatgttgat

SEQ ID NO: 5101292 - DNA, 25 bp, Homo sapien
taaatgttgattcaagtcgaataaa

SEQ ID NO: 5101293 - DNA, 25 bp, Homo sapien
tctttcttcagcagtgcgggggtcc

SEQ ID NO: 5101294 - DNA, 25 bp, Homo sapien
gcgggggtccttaaatgttgattca

SEQ ID NO: 5101295 - DNA, 25 bp, Homo sapien
tattctgaagcacactattaatata

SEQ ID NO: 5101296 - DNA, 25 bp, Homo sapien
tctgacctactttctaatatggcac

SEQ ID NO: 5101297 - DNA, 25 bp, Homo sapien
aactaactttcctatatgcaaacac

SEQ ID NO: 5101298 - DNA, 25 bp, Homo sapien
ggcacttttcctgatacatggcgct

SEQ ID NO: 5101299 - DNA, 25 bp, Homo sapien
gcatagattctcctccaatggcatc

SEQ ID NO: 5101300 - DNA, 25 bp, Homo sapien
tgatgtatcaatagttggaataggc

SEQ ID NO: 5101301 - DNA, 25 bp, Homo sapien
ttttgcgtgatgtatcaatagttgg

SEQ ID NO: 5101302 - DNA, 25 bp, Homo sapien
gttggaataggcatagattctcctc

SEQ ID NO: 5101303 - DNA, 25 bp, Homo sapien
ggtgcttggtaagaaattaatgtgc

SEQ ID NO: 5101304 - DNA, 25 bp, Homo sapien
ctccaggtgcttggtaagaaattaa

SEQ ID NO: 5101305 - DNA, 25 bp, Homo sapien
tggtaagaaattaatgtgctgagca

SEQ ID NO: 5101306 - DNA, 25 bp, Homo sapien
gcttggtaagaaattaatgtgctga

SEQ ID NO: 5101307 - DNA, 25 bp, Homo sapien
tctggtagttctttactgggtagtc

SEQ ID NO: 5101308 - DNA, 25 bp, Homo sapien
gttgtttgctggaactggagatgat

SEQ ID NO: 5101309 - DNA, 25 bp, Homo sapien
cgattaagggtcagtcgaatggaat

SEQ ID NO: 5101310 - DNA, 25 bp, Homo sapien
tcgaatggaatttttgatgacacgg

SEQ ID NO: 5101311 - DNA, 25 bp, Homo sapien
gctagatggcatcccgtgagtccta

SEQ ID NO: 5101312 - DNA, 25 bp, Homo sapien
caatcagtgagagaatgctacagca

SEQ ID NO: 5101313 - DNA, 25 bp, Homo sapien
gcaatttgacagcaggtgatcctca

SEQ ID NO: 5101314 - DNA, 25 bp, Homo sapien
tccaagtggctaagaactggttccc

SEQ ID NO: 5101315 - DNA, 25 bp, Homo sapien
ccattttactagttaggagccacag

SEQ ID NO: 5101316 - DNA, 25 bp, Homo sapien
acgaatctaagttatcatgaggcca

SEQ ID NO: 5101317 - DNA, 25 bp, Homo sapien
tccctaagggttcatgattctcaag

SEQ ID NO: 5101318 - DNA, 25 bp, Homo sapien
catgaggccatctgtaaatctgaga

SEQ ID NO: 5101319 - DNA, 25 bp, Homo sapien
tgaggttcatgtgtacaactaagaa

SEQ ID NO: 5101320 - DNA, 25 bp, Homo sapien
aagtacgtgggtctttgttcaaatg

SEQ ID NO: 5101321 - DNA, 25 bp, Homo sapien
gatgacgtgaccttatgcaattgga

SEQ ID NO: 5101322 - DNA, 25 bp, Homo sapien
tagtactgtagagtgatgtagcacc

SEQ ID NO: 5101323 - DNA, 25 bp, Homo sapien
tgctgggctccagcagtctgtccac

SEQ ID NO: 5101324 - DNA, 25 bp, Homo sapien
ggctccagcagtctgtccacctcag

SEQ ID NO: 5101325 - DNA, 25 bp, Homo sapien
tatttgtagagacactatgttggcc

SEQ ID NO: 5101326 - DNA, 25 bp, Homo sapien
ttatttgtagagacactatgttggc

SEQ ID NO: 5101327 - DNA, 25 bp, Homo sapien
aggagcctccttatccttaccatct

SEQ ID NO: 5101328 - DNA, 25 bp, Homo sapien
aagacagcggctttgagtgtgctcc

SEQ ID NO: 5101329 - DNA, 25 bp, Homo sapien
gacacagacggagtccaaaacattt

SEQ ID NO: 5101330 - DNA, 25 bp, Homo sapien
cccttgtgagtttaggacacagacg

SEQ ID NO: 5101331 - DNA, 25 bp, Homo sapien
taatacagctcattgaagacagcgg

SEQ ID NO: 5101332 - DNA, 25 bp, Homo sapien
tttgagagaaggcttgcagctctcc

SEQ ID NO: 5101333 - DNA, 25 bp, Homo sapien
ccttgtgagcgaatggaaagaaagt

SEQ ID NO: 5101334 - DNA, 25 bp, Homo sapien
gatgtttccgccctcagcaggtctt

SEQ ID NO: 5101335 - DNA, 25 bp, Homo sapien
cactgcatctgaggggtatgtggcc

SEQ ID NO: 5101336 - DNA, 25 bp, Homo sapien
atccactattgcatttaggaaagtc

SEQ ID NO: 5101337 - DNA, 25 bp, Homo sapien
tgaagaaacattgggaggcctaggc

SEQ ID NO: 5101338 - DNA, 25 bp, Homo sapien
ggactggggaatccactattgcatt

SEQ ID NO: 5101339 - DNA, 25 bp, Homo sapien
catttaggaaagtcaaagtcattgg

SEQ ID NO: 5101340 - DNA, 25 bp, Homo sapien
cagtctctccgtgataacatttgtg

SEQ ID NO: 5101341 - DNA, 25 bp, Homo sapien
gtctctccgtgataacatttgtggg

SEQ ID NO: 5101342 - DNA, 25 bp, Homo sapien
tccagtctctccgtgataacatttg

SEQ ID NO: 5101343 - DNA, 25 bp, Homo sapien
ctccgtgataacatttgtgggacat

SEQ ID NO: 5101344 - DNA, 25 bp, Homo sapien
atgtttcaggaagctatggcggctg

SEQ ID NO: 5101345 - DNA, 25 bp, Homo sapien
gtttcaggaagctatggcggctgtg

SEQ ID NO: 5101346 - DNA, 25 bp, Homo sapien
acatgtttcaggaagctatggcggc

SEQ ID NO: 5101347 - DNA, 25 bp, Homo sapien
gtcacatgtttcaggaagctatggc

SEQ ID NO: 5101348 - DNA, 25 bp, Homo sapien
acaccatgaattcatcatagggaag

SEQ ID NO: 5101349 - DNA, 25 bp, Homo sapien
tctccgggtgaagcaggctggcacc

SEQ ID NO: 5101350 - DNA, 25 bp, Homo sapien
cctgttggctctcacacagtgcact

SEQ ID NO: 5101351 - DNA, 25 bp, Homo sapien
caagtgccttcctcattggcttcct

SEQ ID NO: 5101352 - DNA, 25 bp, Homo sapien
ccgccctccgctgggtttgcggctc

SEQ ID NO: 5101353 - DNA, 25 bp, Homo sapien
ctgaattcttgcaccccgggtcacc

SEQ ID NO: 5101354 - DNA, 25 bp, Homo sapien
tgggtttgcggctcacaccttccca

SEQ ID NO: 5101355 - DNA, 25 bp, Homo sapien
cgaccaccctagaggcctcctcctt

SEQ ID NO: 5101356 - DNA, 25 bp, Homo sapien
cgctccccgcaccttcccgcaggca

SEQ ID NO: 5101357 - DNA, 25 bp, Homo sapien
ctccccgcaccttcccgcaggcagc

SEQ ID NO: 5101358 - DNA, 25 bp, Homo sapien
ggctccgctccccgcaccttcccgc

SEQ ID NO: 5101359 - DNA, 25 bp, Homo sapien
tccgctccccgcaccttcccgcagg

SEQ ID NO: 5101360 - DNA, 25 bp, Homo sapien
ggatgatttttaaagccgtgacaca

SEQ ID NO: 5101361 - DNA, 25 bp, Homo sapien
gcttgcccgaggtctgaaggttcct

SEQ ID NO: 5101362 - DNA, 25 bp, Homo sapien
tcgtgttaaaataccacggatgatt

SEQ ID NO: 5101363 - DNA, 25 bp, Homo sapien
cggcctacacttggtcgaagcaaca

SEQ ID NO: 5101364 - DNA, 25 bp, Homo sapien
taatgcaactcttagaaaagaccaa

SEQ ID NO: 5101365 - DNA, 25 bp, Homo sapien
tctttctctaaggtctttataacag

SEQ ID NO: 5101366 - DNA, 25 bp, Homo sapien
tacagtgtcaatgaacaaatttaaa

SEQ ID NO: 5101367 - DNA, 25 bp, Homo sapien
taaggtctttataacagattaagga

SEQ ID NO: 5101368 - DNA, 25 bp, Homo sapien
gtgacacagaagaaccatactaaga

SEQ ID NO: 5101369 - DNA, 25 bp, Homo sapien
tccttcctattgtgtgacacagaag

SEQ ID NO: 5101370 - DNA, 25 bp, Homo sapien
aaattcacactacaaatagttggta

SEQ ID NO: 5101371 - DNA, 25 bp, Homo sapien
caaatagttggtaagaagtgaggtt

SEQ ID NO: 5101372 - DNA, 25 bp, Homo sapien
catgctcatgtgtggcattttactt

SEQ ID NO: 5101373 - DNA, 25 bp, Homo sapien
tcatgctcatgtgtggcattttact

SEQ ID NO: 5101374 - DNA, 25 bp, Homo sapien
aacattcatgctcatgtgtggcatt

SEQ ID NO: 5101375 - DNA, 25 bp, Homo sapien
ctgaaacattcatgctcatgtgtgg

SEQ ID NO: 5101376 - DNA, 25 bp, Homo sapien
caaagaatgtgcaatcagtcccatg

SEQ ID NO: 5101377 - DNA, 25 bp, Homo sapien
caatgaacgatagcagatcactggt

SEQ ID NO: 5101378 - DNA, 25 bp, Homo sapien
ccaggagggactttaggctcaaaga

SEQ ID NO: 5101379 - DNA, 25 bp, Homo sapien
gaaagaagttagaccagaagagcac

SEQ ID NO: 5101380 - DNA, 25 bp, Homo sapien
tggaatgctgcctgctgatcgccct

SEQ ID NO: 5101381 - DNA, 25 bp, Homo sapien
catttgtatctaaaacgcattcccc

SEQ ID NO: 5101382 - DNA, 25 bp, Homo sapien
tatctctatatacgggttatacgca

SEQ ID NO: 5101383 - DNA, 25 bp, Homo sapien
tctgcctgggttgttcaattatctc

SEQ ID NO: 5101384 - DNA, 25 bp, Homo sapien
tccaactaaatcatgaggatgaggt

SEQ ID NO: 5101385 - DNA, 25 bp, Homo sapien
caaaggtctgcgttcttgtccaaat

SEQ ID NO: 5101386 - DNA, 25 bp, Homo sapien
tcatagtagccgtctctgcagtctt

SEQ ID NO: 5101387 - DNA, 25 bp, Homo sapien
gggtcattctttgttactaatgtaa

SEQ ID NO: 5101388 - DNA, 25 bp, Homo sapien
gaccagtcaggaggttattccagca

SEQ ID NO: 5101389 - DNA, 25 bp, Homo sapien
aaataaaggtgggtcatgtgggcct

SEQ ID NO: 5101390 - DNA, 25 bp, Homo sapien
tatgggagcctatgctggaacagaa

SEQ ID NO: 5101391 - DNA, 25 bp, Homo sapien
cacaaagacccctagaaaagagcag

SEQ ID NO: 5101392 - DNA, 25 bp, Homo sapien
gaagttatcatgctgtcagttgtac

SEQ ID NO: 5101393 - DNA, 25 bp, Homo sapien
ccaattgctctgataaagatgagag

SEQ ID NO: 5101394 - DNA, 25 bp, Homo sapien
gcattataaacacaaggaatattgc

SEQ ID NO: 5101395 - DNA, 25 bp, Homo sapien
tgtacataccaaagcatgaacgtgc

SEQ ID NO: 5101396 - DNA, 25 bp, Homo sapien
tcacacatcgaatacccaaattttg

SEQ ID NO: 5101397 - DNA, 25 bp, Homo sapien
acacatcgaatacccaaattttgga

SEQ ID NO: 5101398 - DNA, 25 bp, Homo sapien
cttcacacatcgaatacccaaattt

SEQ ID NO: 5101399 - DNA, 25 bp, Homo sapien
ttttcttcacacatcgaatacccaa

SEQ ID NO: 5101400 - DNA, 25 bp, Homo sapien
taatttactcaacctttcaacatac

SEQ ID NO: 5101401 - DNA, 25 bp, Homo sapien
tgaactaagtctcacttaaggaaaa

SEQ ID NO: 5101402 - DNA, 25 bp, Homo sapien
gaactatgtctcagtcgggcatggt

SEQ ID NO: 5101403 - DNA, 25 bp, Homo sapien
aacagtaaaggtgctagaagtatac

SEQ ID NO: 5101404 - DNA, 25 bp, Homo sapien
tatactgcaagtcatgacagcagga

SEQ ID NO: 5101405 - DNA, 25 bp, Homo sapien
cacttggctatactgccaatgcaca

SEQ ID NO: 5101406 - DNA, 25 bp, Homo sapien
gctgactatactgcaagtcatgaca

SEQ ID NO: 5101407 - DNA, 25 bp, Homo sapien
ttaacaataaccactcctaagataa

SEQ ID NO: 5101408 - DNA, 25 bp, Homo sapien
gattcagtgtaaggctgaaacccca

SEQ ID NO: 5101409 - DNA, 25 bp, Homo sapien
tctaaatcagtgcaagacttgacct

SEQ ID NO: 5101410 - DNA, 25 bp, Homo sapien
cagatacccgtttttacccaatgca

SEQ ID NO: 5101411 - DNA, 25 bp, Homo sapien
ggatgtctgatgtatctccactagg

SEQ ID NO: 5101412 - DNA, 25 bp, Homo sapien
aattgggttcgagacaacaggagga

SEQ ID NO: 5101413 - DNA, 25 bp, Homo sapien
caggaggaagagcagtcgtcaaatt

SEQ ID NO: 5101414 - DNA, 25 bp, Homo sapien
tcgtcaaattaccatgttcatcagg

SEQ ID NO: 5101415 - DNA, 25 bp, Homo sapien
tctcaccacattgaggtcacaatct

SEQ ID NO: 5101416 - DNA, 25 bp, Homo sapien
tcctttatagccctaagtctctcta

SEQ ID NO: 5101417 - DNA, 25 bp, Homo sapien
catttctaggtaatgacatattctc

SEQ ID NO: 5101418 - DNA, 25 bp, Homo sapien
tatggcaatacatctccctatggca

SEQ ID NO: 5101419 - DNA, 25 bp, Homo sapien
taaattctgattccgccaatcaatc

SEQ ID NO: 5101420 - DNA, 25 bp, Homo sapien
tgacacttccacaattcttgtttac

SEQ ID NO: 5101421 - DNA, 25 bp, Homo sapien
caaatccttaattctgcagtatttg

SEQ ID NO: 5101422 - DNA, 25 bp, Homo sapien
gacaaatccttaattctgcagtatt

SEQ ID NO: 5101423 - DNA, 25 bp, Homo sapien
ctgacacttccacaattcttgttta

SEQ ID NO: 5101424 - DNA, 25 bp, Homo sapien
tggtcagaaggtctccgcaactgca

SEQ ID NO: 5101425 - DNA, 25 bp, Homo sapien
tcatctggcagatatctaaaatcca

SEQ ID NO: 5101426 - DNA, 25 bp, Homo sapien
aaagatgccttttgcttcccaatcg

SEQ ID NO: 5101427 - DNA, 25 bp, Homo sapien
tactgttacgggttctgtgatagct

SEQ ID NO: 5101428 - DNA, 25 bp, Homo sapien
ctggcacagtttctggaaaagcaga

SEQ ID NO: 5101429 - DNA, 25 bp, Homo sapien
ttctggaaaagcagagttgtctttt

SEQ ID NO: 5101430 - DNA, 25 bp, Homo sapien
gaaaagcagagttgtcttttgtttc

SEQ ID NO: 5101431 - DNA, 25 bp, Homo sapien
tttctttgctttattgccgtaagta

SEQ ID NO: 5101432 - DNA, 25 bp, Homo sapien
ggtcttggtctctcaggaaaattaa

SEQ ID NO: 5101433 - DNA, 25 bp, Homo sapien
attgaaccgaggagaccaggtcttg

SEQ ID NO: 5101434 - DNA, 25 bp, Homo sapien
tctccaattgaaccgaggagaccag

SEQ ID NO: 5101435 - DNA, 25 bp, Homo sapien
ttccttctccaattgaaccgaggag

SEQ ID NO: 5101436 - DNA, 25 bp, Homo sapien
gaaacccctgtaggcatttctctca

SEQ ID NO: 5101437 - DNA, 25 bp, Homo sapien
gattctgcttgacttgaaacccctg

SEQ ID NO: 5101438 - DNA, 25 bp, Homo sapien
gcatgatgtgacaatccacttgaga

SEQ ID NO: 5101439 - DNA, 25 bp, Homo sapien
cccaggtgagggatagtaggattct

SEQ ID NO: 5101440 - DNA, 25 bp, Homo sapien
aatcattcccaacaggtattctcag

SEQ ID NO: 5101441 - DNA, 25 bp, Homo sapien
tccgactatgtcatcggcattgttg

SEQ ID NO: 5101442 - DNA, 25 bp, Homo sapien
ccaacaggtattctcaggaatggtg

SEQ ID NO: 5101443 - DNA, 25 bp, Homo sapien
tgtcatcggcattgttgtaaatgca

SEQ ID NO: 5101444 - DNA, 25 bp, Homo sapien
aaacagtagtattggaattggcgcc

SEQ ID NO: 5101445 - DNA, 25 bp, Homo sapien
gaagtcttggattatcagtctctcc

SEQ ID NO: 5101446 - DNA, 25 bp, Homo sapien
gctgacatactggaagaggacatct

SEQ ID NO: 5101447 - DNA, 25 bp, Homo sapien
acagcatgttgggatcagaaatacc

SEQ ID NO: 5101448 - DNA, 25 bp, Homo sapien
tgactatcttgaacaaaaccatgac

SEQ ID NO: 5101449 - DNA, 25 bp, Homo sapien
cattttgcatactgccaatacctga

SEQ ID NO: 5101450 - DNA, 25 bp, Homo sapien
tatggaaaggagtcactcaattgct

SEQ ID NO: 5101451 - DNA, 25 bp, Homo sapien
tagtactgtttgatggtcccgactc

SEQ ID NO: 5101452 - DNA, 25 bp, Homo sapien
aaaatgctgcatctatataggtggt

SEQ ID NO: 5101453 - DNA, 25 bp, Homo sapien
ccaattttgtattcgctatgtccaa

SEQ ID NO: 5101454 - DNA, 25 bp, Homo sapien
tataggtggtatcaagatttaaaag

SEQ ID NO: 5101455 - DNA, 25 bp, Homo sapien
tacagtattatattctcagtcagta

SEQ ID NO: 5101456 - DNA, 25 bp, Homo sapien
gatcacagggagtgaggacatctaa

SEQ ID NO: 5101457 - DNA, 25 bp, Homo sapien
tggcatagccattacaagttttatc

SEQ ID NO: 5101458 - DNA, 25 bp, Homo sapien
tagatagagatgtcaaataggcagt

SEQ ID NO: 5101459 - DNA, 25 bp, Homo sapien
tctaagaaaggcgaatggtccaagg

SEQ ID NO: 5101460 - DNA, 25 bp, Homo sapien
tatattcaaggacgacctgctcagg

SEQ ID NO: 5101461 - DNA, 25 bp, Homo sapien
tctgggagaacaacattcaaggcag

SEQ ID NO: 5101462 - DNA, 25 bp, Homo sapien
gctcaggtaacagtggagtgacacc

SEQ ID NO: 5101463 - DNA, 25 bp, Homo sapien
tagtagagattacccagcattcagc

SEQ ID NO: 5101464 - DNA, 25 bp, Homo sapien
gagacctgagattaaacctgccaca

SEQ ID NO: 5101465 - DNA, 25 bp, Homo sapien
ggcatgtacaaagcttcacctcaag

SEQ ID NO: 5101466 - DNA, 25 bp, Homo sapien
ggcaggaccaaccttcatacagaag

SEQ ID NO: 5101467 - DNA, 25 bp, Homo sapien
ggttagacgttgacaacccagctgt

SEQ ID NO: 5101468 - DNA, 25 bp, Homo sapien
ctggatcaccaattctaagtctttt

SEQ ID NO: 5101469 - DNA, 25 bp, Homo sapien
acacaacctgttaggtagcaggctg

SEQ ID NO: 5101470 - DNA, 25 bp, Homo sapien
tatttgatgccattaggcggcctgg

SEQ ID NO: 5101471 - DNA, 25 bp, Homo sapien
caggctgggtattacctgagtaaaa

SEQ ID NO: 5101472 - DNA, 25 bp, Homo sapien
tgataagccaaaagaaggctctcca

SEQ ID NO: 5101473 - DNA, 25 bp, Homo sapien
tgagacagtgaccaacattattagc

SEQ ID NO: 5101474 - DNA, 25 bp, Homo sapien
ccaaagctgggcaataactagttaa

SEQ ID NO: 5101475 - DNA, 25 bp, Homo sapien
tacatttaagaacgctggttaccca

SEQ ID NO: 5101476 - DNA, 25 bp, Homo sapien
aaatgaacaagtaaatctttggcac

SEQ ID NO: 5101477 - DNA, 25 bp, Homo sapien
gttgtatagtagttacgaactatgg

SEQ ID NO: 5101478 - DNA, 25 bp, Homo sapien
gaacaagtaaatctttggcacacac

SEQ ID NO: 5101479 - DNA, 25 bp, Homo sapien
tatagtagttacgaactatggcaag

SEQ ID NO: 5101480 - DNA, 25 bp, Homo sapien
cagtgtccttcatagtcaagtgctc

SEQ ID NO: 5101481 - DNA, 25 bp, Homo sapien
taaaatttcacgcaaagagtaagca

SEQ ID NO: 5101482 - DNA, 25 bp, Homo sapien
cagaccccgttcaagttgccagttg

SEQ ID NO: 5101483 - DNA, 25 bp, Homo sapien
tgccagttgtcccatcagtgtcctt

SEQ ID NO: 5101484 - DNA, 25 bp, Homo sapien
gccaatgcattgaaaggcccagaaa

SEQ ID NO: 5101485 - DNA, 25 bp, Homo sapien
gtcagccacgttggaaccaacatag

SEQ ID NO: 5101486 - DNA, 25 bp, Homo sapien
cataccacgttgaaaccatgtgttt

SEQ ID NO: 5101487 - DNA, 25 bp, Homo sapien
taatggacacaaaggagtcagccac

SEQ ID NO: 5101488 - DNA, 25 bp, Homo sapien
tgtagatgttgactggccacctgct

SEQ ID NO: 5101489 - DNA, 25 bp, Homo sapien
tggacatccatggagcacatgccgt

SEQ ID NO: 5101490 - DNA, 25 bp, Homo sapien
taaaaccgtaggagccaaggcatgc

SEQ ID NO: 5101491 - DNA, 25 bp, Homo sapien
ttagagaggtgcacaaacaggacac

SEQ ID NO: 5101492 - DNA, 25 bp, Homo sapien
tcttgactttgagtggtctgcccac

SEQ ID NO: 5101493 - DNA, 25 bp, Homo sapien
tctatataattgatcggcctcccaa

SEQ ID NO: 5101494 - DNA, 25 bp, Homo sapien
cagtcaaaaagcacagttaataacc

SEQ ID NO: 5101495 - DNA, 25 bp, Homo sapien
acctcaggcccaagaatacctagaa

SEQ ID NO: 5101496 - DNA, 25 bp, Homo sapien
aataaaagccacagatagatacggt

SEQ ID NO: 5101497 - DNA, 25 bp, Homo sapien
tgtgttacaacaagactataggctt

SEQ ID NO: 5101498 - DNA, 25 bp, Homo sapien
aagtagatcccctagcctttgatag

SEQ ID NO: 5101499 - DNA, 25 bp, Homo sapien
ttttgaagccagtacgtgaagtgac

SEQ ID NO: 5101500 - DNA, 25 bp, Homo sapien
ggaaaactacccaagtgtctatgaa

SEQ ID NO: 5101501 - DNA, 25 bp, Homo sapien
atgaaaggagccagtcaccaagcac

SEQ ID NO: 5101502 - DNA, 25 bp, Homo sapien
taaatctatagagatacaaagtcag

SEQ ID NO: 5101503 - DNA, 25 bp, Homo sapien
caccaagcaccacgtactgtatgat

SEQ ID NO: 5101504 - DNA, 25 bp, Homo sapien
tagagtaaacccattagatacggcc

SEQ ID NO: 5101505 - DNA, 25 bp, Homo sapien
taacaagtgttctaatcttacgagc

SEQ ID NO: 5101506 - DNA, 25 bp, Homo sapien
ggattgcagacccaacctagagtaa

SEQ ID NO: 5101507 - DNA, 25 bp, Homo sapien
ccagaactttaggaagctagatggg

SEQ ID NO: 5101508 - DNA, 25 bp, Homo sapien
ggtaccttctatgtcaagttgcctg

SEQ ID NO: 5101509 - DNA, 25 bp, Homo sapien
caggagggttgatccactattaaca

SEQ ID NO: 5101510 - DNA, 25 bp, Homo sapien
aaaacatagggcttatcaggattcc

SEQ ID NO: 5101511 - DNA, 25 bp, Homo sapien
caacagatgccccttagggaaaagc

SEQ ID NO: 5101512 - DNA, 25 bp, Homo sapien
ctgcttctagggtgtcatgcttcat

SEQ ID NO: 5101513 - DNA, 25 bp, Homo sapien
cctgcttctagggtgtcatgcttca

SEQ ID NO: 5101514 - DNA, 25 bp, Homo sapien
taaggactgttctcgtccccattta

SEQ ID NO: 5101515 - DNA, 25 bp, Homo sapien
cttgaagtcagacacatccaaactc

SEQ ID NO: 5101516 - DNA, 25 bp, Homo sapien
taactcgttattggggtgctggcac

SEQ ID NO: 5101517 - DNA, 25 bp, Homo sapien
gaagcccaacagataaagcacccag

SEQ ID NO: 5101518 - DNA, 25 bp, Homo sapien
ccctggttggcatgtacaatcagaa

SEQ ID NO: 5101519 - DNA, 25 bp, Homo sapien
tcagaagtccaactatcaaagagtc

SEQ ID NO: 5101520 - DNA, 25 bp, Homo sapien
ccgcgcctggccccactaagtcctt

SEQ ID NO: 5101521 - DNA, 25 bp, Homo sapien
accgcgcctggccccactaagtcct

SEQ ID NO: 5101522 - DNA, 25 bp, Homo sapien
cgcgcctggccccactaagtccttt

SEQ ID NO: 5101523 - DNA, 25 bp, Homo sapien
tttgagatcatgtgagatcaggcac

SEQ ID NO: 5101524 - DNA, 25 bp, Homo sapien
tagcttttgagatcatgtgagatca

SEQ ID NO: 5101525 - DNA, 25 bp, Homo sapien
ttttgagatcatgtgagatcaggca

SEQ ID NO: 5101526 - DNA, 25 bp, Homo sapien
agatcatgtgagatcaggcacattc

SEQ ID NO: 5101527 - DNA, 25 bp, Homo sapien
taaacctcagggtaaaggctcatcg

SEQ ID NO: 5101528 - DNA, 25 bp, Homo sapien
catcgatatttctggtagcggctac

SEQ ID NO: 5101529 - DNA, 25 bp, Homo sapien
tcacttagtcctagcgagagcgggc

SEQ ID NO: 5101530 - DNA, 25 bp, Homo sapien
cctggagcgtaagacacaacgggca

SEQ ID NO: 5101531 - DNA, 25 bp, Homo sapien
ggggaggtggcggctgggacgccat

SEQ ID NO: 5101532 - DNA, 25 bp, Homo sapien
tggggggaggtggcggctgggacgc

SEQ ID NO: 5101533 - DNA, 25 bp, Homo sapien
gggggaggtggcggctgggacgcca

SEQ ID NO: 5101534 - DNA, 25 bp, Homo sapien
gatgccgtggctggacaaatgccgc

SEQ ID NO: 5101535 - DNA, 25 bp, Homo sapien
ggtagcagataatgtcaccgtggct

SEQ ID NO: 5101536 - DNA, 25 bp, Homo sapien
tcattcgacaagcagcctaaatggg

SEQ ID NO: 5101537 - DNA, 25 bp, Homo sapien
tctcgatccgaaacactggctgagt

SEQ ID NO: 5101538 - DNA, 25 bp, Homo sapien
acactgtttaaagttgagtagtgaa

SEQ ID NO: 5101539 - DNA, 25 bp, Homo sapien
cactgtttaaagttgagtagtgaat

SEQ ID NO: 5101540 - DNA, 25 bp, Homo sapien
aacactgtttaaagttgagtagtga

SEQ ID NO: 5101541 - DNA, 25 bp, Homo sapien
ctgtttaaagttgagtagtgaatat

SEQ ID NO: 5101542 - DNA, 25 bp, Homo sapien
tagtctcaactgtccgggagactga

SEQ ID NO: 5101543 - DNA, 25 bp, Homo sapien
caaggatgctagcttatctgtaaat

SEQ ID NO: 5101544 - DNA, 25 bp, Homo sapien
gaagtcaggaccaatacaaggatgc

SEQ ID NO: 5101545 - DNA, 25 bp, Homo sapien
catacaatggtctcaacagatgcag

SEQ ID NO: 5101546 - DNA, 25 bp, Homo sapien
ggaaaaagcccactatttgggcaga

SEQ ID NO: 5101547 - DNA, 25 bp, Homo sapien
ggtgcgaccagtgttcaaccagtcc

SEQ ID NO: 5101548 - DNA, 25 bp, Homo sapien
cacagagctgaagtctatggaggca

SEQ ID NO: 5101549 - DNA, 25 bp, Homo sapien
tataggatccgtcaagccaggcatg

SEQ ID NO: 5101550 - DNA, 25 bp, Homo sapien
taaactgtctatatacaatgtgcag

SEQ ID NO: 5101551 - DNA, 25 bp, Homo sapien
caatgtgcagctctcattaaaaaat

SEQ ID NO: 5101552 - DNA, 25 bp, Homo sapien
atccttaggcctcaaatcacattaa

SEQ ID NO: 5101553 - DNA, 25 bp, Homo sapien
ttaggcctcaaatcacattaaactg

SEQ ID NO: 5101554 - DNA, 25 bp, Homo sapien
aatgggttctcgctacatcttgaga

SEQ ID NO: 5101555 - DNA, 25 bp, Homo sapien
ggaaatgaaacaactgaccgacttg

SEQ ID NO: 5101556 - DNA, 25 bp, Homo sapien
gaccgacttgatgtgtgatatcctt

SEQ ID NO: 5101557 - DNA, 25 bp, Homo sapien
tgatatccttaatctaactcgctgt

SEQ ID NO: 5101558 - DNA, 25 bp, Homo sapien
gaaacagttctgctcccaagtataa

SEQ ID NO: 5101559 - DNA, 25 bp, Homo sapien
gctacgggcctactcaattctggtt

SEQ ID NO: 5101560 - DNA, 25 bp, Homo sapien
tggaaccagttcaatgcttgaggct

SEQ ID NO: 5101561 - DNA, 25 bp, Homo sapien
ccagtgaacggccagatagtgcagt

SEQ ID NO: 5101562 - DNA, 25 bp, Homo sapien
tttctaaatgagaacaatcccattt

SEQ ID NO: 5101563 - DNA, 25 bp, Homo sapien
ttttctaaatgagaacaatcccatt

SEQ ID NO: 5101564 - DNA, 25 bp, Homo sapien
tctagaaatgtcctacccccagccc

SEQ ID NO: 5101565 - DNA, 25 bp, Homo sapien
tcattaaagtaggacccaaatcagc

SEQ ID NO: 5101566 - DNA, 25 bp, Homo sapien
gtcattaaagtaggacccaaatcag

SEQ ID NO: 5101567 - DNA, 25 bp, Homo sapien
cttgtcattaaagtaggacccaaat

SEQ ID NO: 5101568 - DNA, 25 bp, Homo sapien
attaaagtaggacccaaatcagcag

SEQ ID NO: 5101569 - DNA, 25 bp, Homo sapien
gctgtagccgtctgtaaagataccg

SEQ ID NO: 5101570 - DNA, 25 bp, Homo sapien
gcttgctgaacaaatctactgggtg

SEQ ID NO: 5101571 - DNA, 25 bp, Homo sapien
tcaatggactgaaatgcacccctgc

SEQ ID NO: 5101572 - DNA, 25 bp, Homo sapien
taaggaccaccaaggataacagcaa

SEQ ID NO: 5101573 - DNA, 25 bp, Homo sapien
ccatgcctggccattgaatcagcta

SEQ ID NO: 5101574 - DNA, 25 bp, Homo sapien
tccctatcactttccggtacatcaa

SEQ ID NO: 5101575 - DNA, 25 bp, Homo sapien
ttcattctccctatcactttccggt

SEQ ID NO: 5101576 - DNA, 25 bp, Homo sapien
tatcactttccggtacatcaatcaa

SEQ ID NO: 5101577 - DNA, 25 bp, Homo sapien
tctctaatcttgtattcttgtttta

SEQ ID NO: 5101578 - DNA, 25 bp, Homo sapien
gatactggcctacaattcttttgtg

SEQ ID NO: 5101579 - DNA, 25 bp, Homo sapien
tactggcctacaattcttttgtgtg

SEQ ID NO: 5101580 - DNA, 25 bp, Homo sapien
actggcctacaattcttttgtgtgt

SEQ ID NO: 5101581 - DNA, 25 bp, Homo sapien
agggatactggcctacaattctttt

SEQ ID NO: 5101582 - DNA, 25 bp, Homo sapien
caataatatggttctacttctgttc

SEQ ID NO: 5101583 - DNA, 25 bp, Homo sapien
gatcttattgtagaaccttacatca

SEQ ID NO: 5101584 - DNA, 25 bp, Homo sapien
aactacttgctggagcttgatgact

SEQ ID NO: 5101585 - DNA, 25 bp, Homo sapien
gccagatctaataatcttttctcag

SEQ ID NO: 5101586 - DNA, 25 bp, Homo sapien
cactgttacagtggaaaagcagcca

SEQ ID NO: 5101587 - DNA, 25 bp, Homo sapien
gggcagagcaaaagtgaagccatcg

SEQ ID NO: 5101588 - DNA, 25 bp, Homo sapien
tgatgagtgctcaatctggtaatgc

SEQ ID NO: 5101589 - DNA, 25 bp, Homo sapien
tactgaaatttgtagtgggcagagc

SEQ ID NO: 5101590 - DNA, 25 bp, Homo sapien
caaaatcatattctgctctggcaac

SEQ ID NO: 5101591 - DNA, 25 bp, Homo sapien
gagagctaagttcagcatatcacca

SEQ ID NO: 5101592 - DNA, 25 bp, Homo sapien
atcaccagcccggaaagaaatttct

SEQ ID NO: 5101593 - DNA, 25 bp, Homo sapien
actacatggtcatcctcaccacttg

SEQ ID NO: 5101594 - DNA, 25 bp, Homo sapien
caatggaatcaggtgcaactggaac

SEQ ID NO: 5101595 - DNA, 25 bp, Homo sapien
tgttgtttggccatcaaggctagcc

SEQ ID NO: 5101596 - DNA, 25 bp, Homo sapien
cagaagccaaccacgcactttgggt

SEQ ID NO: 5101597 - DNA, 25 bp, Homo sapien
gaatcagcaaccgtggctcctttag

SEQ ID NO: 5101598 - DNA, 25 bp, Homo sapien
ctctaaagtattgttcaactgcagg

SEQ ID NO: 5101599 - DNA, 25 bp, Homo sapien
tactctaaagtattgttcaactgca

SEQ ID NO: 5101600 - DNA, 25 bp, Homo sapien
tctaaagtattgttcaactgcaggc

SEQ ID NO: 5101601 - DNA, 25 bp, Homo sapien
gtactctaaagtattgttcaactgc

SEQ ID NO: 5101602 - DNA, 25 bp, Homo sapien
tagtgtgtaactttaataatttcta

SEQ ID NO: 5101603 - DNA, 25 bp, Homo sapien
ctagtgtgtaactttaataatttct

SEQ ID NO: 5101604 - DNA, 25 bp, Homo sapien
gacatgtcaccactccatttctaag

SEQ ID NO: 5101605 - DNA, 25 bp, Homo sapien
aaatctaggtgaaacaaatgtcctt

SEQ ID NO: 5101606 - DNA, 25 bp, Homo sapien
ggattccaagtcaattaatgcagaa

SEQ ID NO: 5101607 - DNA, 25 bp, Homo sapien
taccaaactgtgcatgctatagttc

SEQ ID NO: 5101608 - DNA, 25 bp, Homo sapien
cagtgtcagttgtttgtgggtgaaa

SEQ ID NO: 5101609 - DNA, 25 bp, Homo sapien
gaatgcttctgggtgaccttttcaa

SEQ ID NO: 5101610 - DNA, 25 bp, Homo sapien
gggctacatactctataattctaga

SEQ ID NO: 5101611 - DNA, 25 bp, Homo sapien
aactattagggctacatactctata

SEQ ID NO: 5101612 - DNA, 25 bp, Homo sapien
aaatggaacagtttgtaagaaagat

SEQ ID NO: 5101613 - DNA, 25 bp, Homo sapien
aatggaacagtttgtaagaaagata

SEQ ID NO: 5101614 - DNA, 25 bp, Homo sapien
tacacaaggtagaagcaaacaatct

SEQ ID NO: 5101615 - DNA, 25 bp, Homo sapien
gaggattatcatattctaaatggca

SEQ ID NO: 5101616 - DNA, 25 bp, Homo sapien
gattcacccagtatgaaaactagtc

SEQ ID NO: 5101617 - DNA, 25 bp, Homo sapien
tttacagagcatcctaaatatggaa

SEQ ID NO: 5101618 - DNA, 25 bp, Homo sapien
ctctgtagtatgttcgtagccaagt

SEQ ID NO: 5101619 - DNA, 25 bp, Homo sapien
tatgttcgtagccaagtatatgaag

SEQ ID NO: 5101620 - DNA, 25 bp, Homo sapien
tcgtagccaagtatatgaagtttcc

SEQ ID NO: 5101621 - DNA, 25 bp, Homo sapien
tagccaagtatatgaagtttccaat

SEQ ID NO: 5101622 - DNA, 25 bp, Homo sapien
gcagaacctttaattgtagaacaca

SEQ ID NO: 5101623 - DNA, 25 bp, Homo sapien
ctatgctgggtatgtacttggttcc

SEQ ID NO: 5101624 - DNA, 25 bp, Homo sapien
gaccgaagcgggctcatcacgaggt

SEQ ID NO: 5101625 - DNA, 25 bp, Homo sapien
tcaacttcaaggctaatacctgggt

SEQ ID NO: 5101626 - DNA, 25 bp, Homo sapien
tcaagtacgtacataaaatgttaaa

SEQ ID NO: 5101627 - DNA, 25 bp, Homo sapien
agacagaatcaagtacgtacataaa

SEQ ID NO: 5101628 - DNA, 25 bp, Homo sapien
gctgtgttcaagtaaatgtgtaatt

SEQ ID NO: 5101629 - DNA, 25 bp, Homo sapien
gaaagcacaagataaaggatagctg

SEQ ID NO: 5101630 - DNA, 25 bp, Homo sapien
cttttcaggttatcgtcacgcagca

SEQ ID NO: 5101631 - DNA, 25 bp, Homo sapien
ggctcttgtaaattctcagaggaac

SEQ ID NO: 5101632 - DNA, 25 bp, Homo sapien
tgaagccagtcttatgacctagtgc

SEQ ID NO: 5101633 - DNA, 25 bp, Homo sapien
cctgagctgaaattatctgcctgtc

SEQ ID NO: 5101634 - DNA, 25 bp, Homo sapien
tacacagacttgttgaaatatacat

SEQ ID NO: 5101635 - DNA, 25 bp, Homo sapien
atttaaggccctatgaggatctgtg

SEQ ID NO: 5101636 - DNA, 25 bp, Homo sapien
gacatatttcccagttaatttcaaa

SEQ ID NO: 5101637 - DNA, 25 bp, Homo sapien
gagtgggcttttccaattaatgagt

SEQ ID NO: 5101638 - DNA, 25 bp, Homo sapien
cctaaaattttgtatgccgtgacca

SEQ ID NO: 5101639 - DNA, 25 bp, Homo sapien
gccgatacagctgctttgtcaaact

SEQ ID NO: 5101640 - DNA, 25 bp, Homo sapien
caaattacagaggtgagtggtccac

SEQ ID NO: 5101641 - DNA, 25 bp, Homo sapien
tcctacctcaacagaaggagaggca

SEQ ID NO: 5101642 - DNA, 25 bp, Homo sapien
ccgcaaccccgtccgcagcgcctca

SEQ ID NO: 5101643 - DNA, 25 bp, Homo sapien
tgcagtggtcggcaccgcccgcgct

SEQ ID NO: 5101644 - DNA, 25 bp, Homo sapien
gcgctcgcgccctgaagctgccgct

SEQ ID NO: 5101645 - DNA, 25 bp, Homo sapien
gaagctgccgctaccgagcccgcaa

SEQ ID NO: 5101646 - DNA, 25 bp, Homo sapien
cggctgccctcgcagcgcctctgtt

SEQ ID NO: 5101647 - DNA, 25 bp, Homo sapien
gctgccctcgcagcgcctctgttac

SEQ ID NO: 5101648 - DNA, 25 bp, Homo sapien
ggctgccctcgcagcgcctctgtta

SEQ ID NO: 5101649 - DNA, 25 bp, Homo sapien
tccaggggcgcagagcggacaaagg

SEQ ID NO: 5101650 - DNA, 25 bp, Homo sapien
ggaggctcactacgcggcgcgtcct

SEQ ID NO: 5101651 - DNA, 25 bp, Homo sapien
tcccgcccgtggaggcacagaaact

SEQ ID NO: 5101652 - DNA, 25 bp, Homo sapien
agagcggacaaaggcgccgggcagc

SEQ ID NO: 5101653 - DNA, 25 bp, Homo sapien
catcgcagttctactacttatggca

SEQ ID NO: 5101654 - DNA, 25 bp, Homo sapien
ccagaatagtggagtggttaagtgt

SEQ ID NO: 5101655 - DNA, 25 bp, Homo sapien
agactgtccaagtttgcatcgcagt

SEQ ID NO: 5101656 - DNA, 25 bp, Homo sapien
tacttatggcattatctggttcaga

SEQ ID NO: 5101657 - DNA, 25 bp, Homo sapien
ggataaaggatcatgtccaatacca

SEQ ID NO: 5101658 - DNA, 25 bp, Homo sapien
tatagtttcccagttgatagtctga

SEQ ID NO: 5101659 - DNA, 25 bp, Homo sapien
tttggtgttaatccaggcacgagcc

SEQ ID NO: 5101660 - DNA, 25 bp, Homo sapien
tctgagggattccaattaatggata

SEQ ID NO: 5101661 - DNA, 25 bp, Homo sapien
aactgcatcatgtccaactggagtc

SEQ ID NO: 5101662 - DNA, 25 bp, Homo sapien
ccatgtatgtcaagaagtgaggatt

SEQ ID NO: 5101663 - DNA, 25 bp, Homo sapien
tgtcaacaggcgagcttccactgct

SEQ ID NO: 5101664 - DNA, 25 bp, Homo sapien
tgtggctaaagtttcaacaggactc

SEQ ID NO: 5101665 - DNA, 25 bp, Homo sapien
catttctccaccattatgagtagta

SEQ ID NO: 5101666 - DNA, 25 bp, Homo sapien
ttatgagtagtacaattttcacttt

SEQ ID NO: 5101667 - DNA, 25 bp, Homo sapien
atttctccaccattatgagtagtac

SEQ ID NO: 5101668 - DNA, 25 bp, Homo sapien
gaacaattccttgtggaagctatac

SEQ ID NO: 5101669 - DNA, 25 bp, Homo sapien
tagtaaagtcggagaattaatggca

SEQ ID NO: 5101670 - DNA, 25 bp, Homo sapien
ttttgtgttaagagatattacttct

SEQ ID NO: 5101671 - DNA, 25 bp, Homo sapien
atgagttattatgttcaaatagtcc

SEQ ID NO: 5101672 - DNA, 25 bp, Homo sapien
tgtttcggtcagttcaacacatgaa

SEQ ID NO: 5101673 - DNA, 25 bp, Homo sapien
ccatgaaaagtaagtatacaaagga

SEQ ID NO: 5101674 - DNA, 25 bp, Homo sapien
gttatatggtacatccatttttcaa

SEQ ID NO: 5101675 - DNA, 25 bp, Homo sapien
ttatatggtacatccatttttcaaa

SEQ ID NO: 5101676 - DNA, 25 bp, Homo sapien
tcctacaacatgaatttaattgaat

SEQ ID NO: 5101677 - DNA, 25 bp, Homo sapien
gtttaattcacacattcctgataca

SEQ ID NO: 5101678 - DNA, 25 bp, Homo sapien
tacattattggaggtccaggcacgg

SEQ ID NO: 5101679 - DNA, 25 bp, Homo sapien
aaaagtacattattggaggtccagg

SEQ ID NO: 5101680 - DNA, 25 bp, Homo sapien
tagagttttagaaaaggagtcaaga

SEQ ID NO: 5101681 - DNA, 25 bp, Homo sapien
gtcttgctagcctgatcatatctta

SEQ ID NO: 5101682 - DNA, 25 bp, Homo sapien
ttttcaagtgtcttgctagcctgat

SEQ ID NO: 5101683 - DNA, 25 bp, Homo sapien
tgatcatatcttagattatgactaa

SEQ ID NO: 5101684 - DNA, 25 bp, Homo sapien
tctgatatcaaaagatctcgcgggc

SEQ ID NO: 5101685 - DNA, 25 bp, Homo sapien
cccagcgctgggcatccatagataa

SEQ ID NO: 5101686 - DNA, 25 bp, Homo sapien
ccagttgaaaatgtgaacgtcgcaa

SEQ ID NO: 5101687 - DNA, 25 bp, Homo sapien
acgtcgcaatgaactgaaatgtcca

SEQ ID NO: 5101688 - DNA, 25 bp, Homo sapien
atatgagcataaacaccggtgtcca

SEQ ID NO: 5101689 - DNA, 25 bp, Homo sapien
tttgtaccatctgagcaacacagtg

SEQ ID NO: 5101690 - DNA, 25 bp, Homo sapien
tgttttgaccttgtagaccctctaa

SEQ ID NO: 5101691 - DNA, 25 bp, Homo sapien
catacattgggaactgctgatctag

SEQ ID NO: 5101692 - DNA, 25 bp, Homo sapien
gagcagctaatttacctcaggactg

SEQ ID NO: 5101693 - DNA, 25 bp, Homo sapien
cattcaatttgtgggtagcctacac

SEQ ID NO: 5101694 - DNA, 25 bp, Homo sapien
tcctcaagagaatcatgtgttgctg

SEQ ID NO: 5101695 - DNA, 25 bp, Homo sapien
tcaggactgaaaataatcgcacaag

SEQ ID NO: 5101696 - DNA, 25 bp, Homo sapien
actccgaagaaataagaattgaaat

SEQ ID NO: 5101697 - DNA, 25 bp, Homo sapien
ctccgaagaaataagaattgaaatg

SEQ ID NO: 5101698 - DNA, 25 bp, Homo sapien
ataagaattgaaatgacatttcctg

SEQ ID NO: 5101699 - DNA, 25 bp, Homo sapien
agaattgaaatgacatttcctggct

SEQ ID NO: 5101700 - DNA, 25 bp, Homo sapien
gggtagctactatggcattcatatt

SEQ ID NO: 5101701 - DNA, 25 bp, Homo sapien
gttgcatggggtagctactatggca

SEQ ID NO: 5101702 - DNA, 25 bp, Homo sapien
gtggcaatactgaatacactgttca

SEQ ID NO: 5101703 - DNA, 25 bp, Homo sapien
ggcaatactgaatacactgttcaac

SEQ ID NO: 5101704 - DNA, 25 bp, Homo sapien
gaagatttgcattaatacagttcat

SEQ ID NO: 5101705 - DNA, 25 bp, Homo sapien
cgtgtgagaagatttgcattaatac

SEQ ID NO: 5101706 - DNA, 25 bp, Homo sapien
gagaagatttgcattaatacagttc

SEQ ID NO: 5101707 - DNA, 25 bp, Homo sapien
gtgagaagatttgcattaatacagt

SEQ ID NO: 5101708 - DNA, 25 bp, Homo sapien
tcatcaacttcattgtgtgagaaca

SEQ ID NO: 5101709 - DNA, 25 bp, Homo sapien
aatcatcaacttcattgtgtgagaa

SEQ ID NO: 5101710 - DNA, 25 bp, Homo sapien
atcatcaacttcattgtgtgagaac

SEQ ID NO: 5101711 - DNA, 25 bp, Homo sapien
ttgaggccgcagtaagccatggctg

SEQ ID NO: 5101712 - DNA, 25 bp, Homo sapien
ggctgtaccactaccctccagcttg

SEQ ID NO: 5101713 - DNA, 25 bp, Homo sapien
aggccgcagtaagccatggctgtac

SEQ ID NO: 5101714 - DNA, 25 bp, Homo sapien
gctcacacttgttaattccaaaact

SEQ ID NO: 5101715 - DNA, 25 bp, Homo sapien
agtactcaggatcaaacagtctttc

SEQ ID NO: 5101716 - DNA, 25 bp, Homo sapien
caggatcaaacagtctttcaatctt

SEQ ID NO: 5101717 - DNA, 25 bp, Homo sapien
actccgagaatctggattcaagtac

SEQ ID NO: 5101718 - DNA, 25 bp, Homo sapien
tacaatgttgctgcattactccgag

SEQ ID NO: 5101719 - DNA, 25 bp, Homo sapien
tatgtgaatatagacaatatttcca

SEQ ID NO: 5101720 - DNA, 25 bp, Homo sapien
tatttccacgtcgatccacattgat

SEQ ID NO: 5101721 - DNA, 25 bp, Homo sapien
cacgtcgatccacattgatttttcc

SEQ ID NO: 5101722 - DNA, 25 bp, Homo sapien
tagacaatatttccacgtcgatcca

SEQ ID NO: 5101723 - DNA, 25 bp, Homo sapien
cagaaaagatgttatcccattcctt

SEQ ID NO: 5101724 - DNA, 25 bp, Homo sapien
aaaacattatgacacttacccagta

SEQ ID NO: 5101725 - DNA, 25 bp, Homo sapien
gctaaagacaattttcctcaccaaa

SEQ ID NO: 5101726 - DNA, 25 bp, Homo sapien
ggcactaaccagaatacctttcaag

SEQ ID NO: 5101727 - DNA, 25 bp, Homo sapien
aaaaaggtatacatcaactgctgac

SEQ ID NO: 5101728 - DNA, 25 bp, Homo sapien
ctgctgacatgtaggaaaatacttt

SEQ ID NO: 5101729 - DNA, 25 bp, Homo sapien
tgttgaagttagtatcaattacttt

SEQ ID NO: 5101730 - DNA, 25 bp, Homo sapien
ttcacatactactaataggtgtata

SEQ ID NO: 5101731 - DNA, 25 bp, Homo sapien
gagtgatacagaatatacaatcagg

SEQ ID NO: 5101732 - DNA, 25 bp, Homo sapien
caagtatcttttagtaattgagtga

SEQ ID NO: 5101733 - DNA, 25 bp, Homo sapien
attagaatcattcatgtattagtac

SEQ ID NO: 5101734 - DNA, 25 bp, Homo sapien
agttactggtgattctaaacattag

SEQ ID NO: 5101735 - DNA, 25 bp, Homo sapien
gccagtatacatctctccaagattt

SEQ ID NO: 5101736 - DNA, 25 bp, Homo sapien
tttaattcttcgaaaagactattca

SEQ ID NO: 5101737 - DNA, 25 bp, Homo sapien
gccaattgattgttccccacaatcg

SEQ ID NO: 5101738 - DNA, 25 bp, Homo sapien
gttccccacaatcgccagtatacat

SEQ ID NO: 5101739 - DNA, 25 bp, Homo sapien
gaaaagctatagtactgcaccagga

SEQ ID NO: 5101740 - DNA, 25 bp, Homo sapien
cctgactggtactctgatcacttgt

SEQ ID NO: 5101741 - DNA, 25 bp, Homo sapien
actctgaggtgggatgaaaagctat

SEQ ID NO: 5101742 - DNA, 25 bp, Homo sapien
agagagttcctcactgggggagact

SEQ ID NO: 5101743 - DNA, 25 bp, Homo sapien
gtgaaaattcaatacagagaaaggc

SEQ ID NO: 5101744 - DNA, 25 bp, Homo sapien
gtggtattgacaatgtgaaaattca

SEQ ID NO: 5101745 - DNA, 25 bp, Homo sapien
ctgagtggtattgacaatgtgaaaa

SEQ ID NO: 5101746 - DNA, 25 bp, Homo sapien
tgtgaaaattcaatacagagaaagg

SEQ ID NO: 5101747 - DNA, 25 bp, Homo sapien
ctttgtaagctgagtaggatcaaac

SEQ ID NO: 5101748 - DNA, 25 bp, Homo sapien
gaacttgctgcagtaggataaacca

SEQ ID NO: 5101749 - DNA, 25 bp, Homo sapien
ccgaagaaccttttggttacagcag

SEQ ID NO: 5101750 - DNA, 25 bp, Homo sapien
gggataaattccagtgccaacagta

SEQ ID NO: 5101751 - DNA, 25 bp, Homo sapien
gctcactgtaagctccacctcccag

SEQ ID NO: 5101752 - DNA, 25 bp, Homo sapien
gtagagaaggcgtttcagcgtgtta

SEQ ID NO: 5101753 - DNA, 25 bp, Homo sapien
cccaggctgccgtgcagtgatctca

SEQ ID NO: 5101754 - DNA, 25 bp, Homo sapien
tttagtagagaaggcgtttcagcgt

SEQ ID NO: 5101755 - DNA, 25 bp, Homo sapien
ggcacaacaatgacatctctgtact

SEQ ID NO: 5101756 - DNA, 25 bp, Homo sapien
gaagtgtaaccatgtggtccctcac

SEQ ID NO: 5101757 - DNA, 25 bp, Homo sapien
aatcgtccaacattctagcagtggg

SEQ ID NO: 5101758 - DNA, 25 bp, Homo sapien
agtgggacaggacggcaaatctccg

SEQ ID NO: 5101759 - DNA, 25 bp, Homo sapien
agctccccagttttgggaccccatg

SEQ ID NO: 5101760 - DNA, 25 bp, Homo sapien
agcattgagctccccagttttggga

SEQ ID NO: 5101761 - DNA, 25 bp, Homo sapien
catggtgtatttggctccagtaaaa

SEQ ID NO: 5101762 - DNA, 25 bp, Homo sapien
tgtatttggctccagtaaaacatca

SEQ ID NO: 5101763 - DNA, 25 bp, Homo sapien
ttgtagagtccagtttttcaatgac

SEQ ID NO: 5101764 - DNA, 25 bp, Homo sapien
gagtccagtttttcaatgacaagaa

SEQ ID NO: 5101765 - DNA, 25 bp, Homo sapien
tagagtccagtttttcaatgacaag

SEQ ID NO: 5101766 - DNA, 25 bp, Homo sapien
cagttgtagagtccagtttttcaat

SEQ ID NO: 5101767 - DNA, 25 bp, Homo sapien
cagtgacctcagatccagtggtata

SEQ ID NO: 5101768 - DNA, 25 bp, Homo sapien
ctcagatccagtggtatattcttct

SEQ ID NO: 5101769 - DNA, 25 bp, Homo sapien
tcatcttcagtgacctcagatccag

SEQ ID NO: 5101770 - DNA, 25 bp, Homo sapien
cttcagtgacctcagatccagtggt

SEQ ID NO: 5101771 - DNA, 25 bp, Homo sapien
cacatttagttgcacctgaagtgaa

SEQ ID NO: 5101772 - DNA, 25 bp, Homo sapien
tgagtattttgtgttcatgcccggg

SEQ ID NO: 5101773 - DNA, 25 bp, Homo sapien
ggcttcagaatgtaaccccttcata

SEQ ID NO: 5101774 - DNA, 25 bp, Homo sapien
catgcccgggttaggaaatcttgat

SEQ ID NO: 5101775 - DNA, 25 bp, Homo sapien
caatggcacaatcttggctcactgc

SEQ ID NO: 5101776 - DNA, 25 bp, Homo sapien
cctccgccttgcgggttcaagcagt

SEQ ID NO: 5101777 - DNA, 25 bp, Homo sapien
tccgccttgcgggttcaagcagttc

SEQ ID NO: 5101778 - DNA, 25 bp, Homo sapien
aacctccgccttgcgggttcaagca

SEQ ID NO: 5101779 - DNA, 25 bp, Homo sapien
gctccactgcttgtagagatgcaaa

SEQ ID NO: 5101780 - DNA, 25 bp, Homo sapien
caagaggaaagcacccatatgccca

SEQ ID NO: 5101781 - DNA, 25 bp, Homo sapien
gcaaatgatccaataaaaatgggcc

SEQ ID NO: 5101782 - DNA, 25 bp, Homo sapien
cagctttttcattggaggattcgag

SEQ ID NO: 5101783 - DNA, 25 bp, Homo sapien
tgagaagacaatgttataaacttag

SEQ ID NO: 5101784 - DNA, 25 bp, Homo sapien
gacaatgttataaacttaggcccca

SEQ ID NO: 5101785 - DNA, 25 bp, Homo sapien
taggccccatatacttttccagtcc

SEQ ID NO: 5101786 - DNA, 25 bp, Homo sapien
gctttacaggggttcataagctgaa

SEQ ID NO: 5101787 - DNA, 25 bp, Homo sapien
tggttgtctagtgaacttctttggc

SEQ ID NO: 5101788 - DNA, 25 bp, Homo sapien
tctgggcacagggtgaagatacctg

SEQ ID NO: 5101789 - DNA, 25 bp, Homo sapien
tttggttgtctagtgaacttctttg

SEQ ID NO: 5101790 - DNA, 25 bp, Homo sapien
ttggttgtctagtgaacttctttgg

SEQ ID NO: 5101791 - DNA, 25 bp, Homo sapien
tatgaactttaacaacagataattc

SEQ ID NO: 5101792 - DNA, 25 bp, Homo sapien
ccatatgaactttaacaacagataa

SEQ ID NO: 5101793 - DNA, 25 bp, Homo sapien
gaactttaacaacagataattcaga

SEQ ID NO: 5101794 - DNA, 25 bp, Homo sapien
tgaactttaacaacagataattcag

SEQ ID NO: 5101795 - DNA, 25 bp, Homo sapien
tatcgagttcttatgtagccttcca

SEQ ID NO: 5101796 - DNA, 25 bp, Homo sapien
taccactatacgtttctgcaccttc

SEQ ID NO: 5101797 - DNA, 25 bp, Homo sapien
gagaggcaaccaattttatcgagtt

SEQ ID NO: 5101798 - DNA, 25 bp, Homo sapien
attgctagcattccatgtgtcttca

SEQ ID NO: 5101799 - DNA, 25 bp, Homo sapien
gaattaacccacttatatgcctgtg

SEQ ID NO: 5101800 - DNA, 25 bp, Homo sapien
ttaaaccttgcaccaaccaaatgag

SEQ ID NO: 5101801 - DNA, 25 bp, Homo sapien
gatgaatgtacaatgtgtccaatgt

SEQ ID NO: 5101802 - DNA, 25 bp, Homo sapien
ggatcttaacccagactcaacctat

SEQ ID NO: 5101803 - DNA, 25 bp, Homo sapien
gaaaggagacacatctctagaagct

SEQ ID NO: 5101804 - DNA, 25 bp, Homo sapien
acgaaaggagacacatctctagaag

SEQ ID NO: 5101805 - DNA, 25 bp, Homo sapien
aaaggagacacatctctagaagctg

SEQ ID NO: 5101806 - DNA, 25 bp, Homo sapien
aaggagacacatctctagaagctga

SEQ ID NO: 5101807 - DNA, 25 bp, Homo sapien
gtggcatcccacttattcttctgca

SEQ ID NO: 5101808 - DNA, 25 bp, Homo sapien
caaggatcttgtggcatcccactta

SEQ ID NO: 5101809 - DNA, 25 bp, Homo sapien
tcctggttgaatctcaaggatcttg

SEQ ID NO: 5101810 - DNA, 25 bp, Homo sapien
gaatctcaaggatcttgtggcatcc

SEQ ID NO: 5101811 - DNA, 25 bp, Homo sapien
gcttcctttgacttgactcggtcca

SEQ ID NO: 5101812 - DNA, 25 bp, Homo sapien
tttgacttgactcggtccagatccc

SEQ ID NO: 5101813 - DNA, 25 bp, Homo sapien
ttgcttcctttgacttgactcggtc

SEQ ID NO: 5101814 - DNA, 25 bp, Homo sapien
cctttgacttgactcggtccagatc

SEQ ID NO: 5101815 - DNA, 25 bp, Homo sapien
cacaagtacaatacactagtacaca

SEQ ID NO: 5101816 - DNA, 25 bp, Homo sapien
gtacaatacactagtacacaattct

SEQ ID NO: 5101817 - DNA, 25 bp, Homo sapien
catctttataatcctaagctgaaaa

SEQ ID NO: 5101818 - DNA, 25 bp, Homo sapien
ttaaaattctgcctaagacatcttt

SEQ ID NO: 5101819 - DNA, 25 bp, Homo sapien
gacatggtggaaaacttttacgtga

SEQ ID NO: 5101820 - DNA, 25 bp, Homo sapien
cacagttaacctactcttggtgtga

SEQ ID NO: 5101821 - DNA, 25 bp, Homo sapien
gcatttggtcaacaacgcacagtta

SEQ ID NO: 5101822 - DNA, 25 bp, Homo sapien
cctatggaccatggataataagaca

SEQ ID NO: 5101823 - DNA, 25 bp, Homo sapien
cttagcacatctaatgatatatgct

SEQ ID NO: 5101824 - DNA, 25 bp, Homo sapien
tgatatatgcttatctggcatggaa

SEQ ID NO: 5101825 - DNA, 25 bp, Homo sapien
gcacatctaatgatatatgcttatc

SEQ ID NO: 5101826 - DNA, 25 bp, Homo sapien
tctaatgatatatgcttatctggca

SEQ ID NO: 5101827 - DNA, 25 bp, Homo sapien
tgtcaagtcgatctacctaccacta

SEQ ID NO: 5101828 - DNA, 25 bp, Homo sapien
taacatgtagccacttgaatctagc

SEQ ID NO: 5101829 - DNA, 25 bp, Homo sapien
ttcacagaatcaatagaagctctgc

SEQ ID NO: 5101830 - DNA, 25 bp, Homo sapien
ttataactactgtcacaatgaagac

SEQ ID NO: 5101831 - DNA, 25 bp, Homo sapien
gcctggaataaatacctcctgcaaa

SEQ ID NO: 5101832 - DNA, 25 bp, Homo sapien
tgctttggcgtgcactaactggcac

SEQ ID NO: 5101833 - DNA, 25 bp, Homo sapien
ccttgatttgtgcttccagcctgga

SEQ ID NO: 5101834 - DNA, 25 bp, Homo sapien
ggcgtgcactaactggcactgaggc

SEQ ID NO: 5101835 - DNA, 25 bp, Homo sapien
tgggaatttcgtcacacaacctgca

SEQ ID NO: 5101836 - DNA, 25 bp, Homo sapien
ggctaggagcgcagaaacatgatct

SEQ ID NO: 5101837 - DNA, 25 bp, Homo sapien
ttaaggtactttatgcaggacgccc

SEQ ID NO: 5101838 - DNA, 25 bp, Homo sapien
tgagcactctttctgcctggctaga

SEQ ID NO: 5101839 - DNA, 25 bp, Homo sapien
gtgctatgtataacagacaaacatt

SEQ ID NO: 5101840 - DNA, 25 bp, Homo sapien
gtatctggcgaaagaaatgctatta

SEQ ID NO: 5101841 - DNA, 25 bp, Homo sapien
agtaaaatgtttgcggtaccagtgc

SEQ ID NO: 5101842 - DNA, 25 bp, Homo sapien
aatattaaagtatctggcgaaagaa

SEQ ID NO: 5101843 - DNA, 25 bp, Homo sapien
gacacagtgccgtctctgggtctca

SEQ ID NO: 5101844 - DNA, 25 bp, Homo sapien
tctgttgctcttagacacagtgccg

SEQ ID NO: 5101845 - DNA, 25 bp, Homo sapien
gagcacactgctcaaaccacttttt

SEQ ID NO: 5101846 - DNA, 25 bp, Homo sapien
tcttagacacagtgccgtctctggg

SEQ ID NO: 5101847 - DNA, 25 bp, Homo sapien
caagcagtattccaagtcctttcat

SEQ ID NO: 5101848 - DNA, 25 bp, Homo sapien
tgtcaagcagtattccaagtccttt

SEQ ID NO: 5101849 - DNA, 25 bp, Homo sapien
tatgtcaagcagtattccaagtcct

SEQ ID NO: 5101850 - DNA, 25 bp, Homo sapien
gatatgtcaagcagtattccaagtc

SEQ ID NO: 5101851 - DNA, 25 bp, Homo sapien
taatagctaacatttttgagcactt

SEQ ID NO: 5101852 - DNA, 25 bp, Homo sapien
tgtggtctactaataatagctaaca

SEQ ID NO: 5101853 - DNA, 25 bp, Homo sapien
aataatagctaacatttttgagcac

SEQ ID NO: 5101854 - DNA, 25 bp, Homo sapien
atagctaacatttttgagcacttac

SEQ ID NO: 5101855 - DNA, 25 bp, Homo sapien
cagagtctaaaaaattgcatgagga

SEQ ID NO: 5101856 - DNA, 25 bp, Homo sapien
catgcatgggcataataagcatcaa

SEQ ID NO: 5101857 - DNA, 25 bp, Homo sapien
gaggatatgtatagtatgaggtcac

SEQ ID NO: 5101858 - DNA, 25 bp, Homo sapien
atgcaggatcctcggtgatagggta

SEQ ID NO: 5101859 - DNA, 25 bp, Homo sapien
caattgtgaactcaaccatttgtca

SEQ ID NO: 5101860 - DNA, 25 bp, Homo sapien
aggtcttcagacaattgtgaactca

SEQ ID NO: 5101861 - DNA, 25 bp, Homo sapien
tcagacaattgtgaactcaaccatt

SEQ ID NO: 5101862 - DNA, 25 bp, Homo sapien
gaactcaaccatttgtcaattagaa

SEQ ID NO: 5101863 - DNA, 25 bp, Homo sapien
tgtgagacgttgaaatctccagaag

SEQ ID NO: 5101864 - DNA, 25 bp, Homo sapien
ctgtgagacgttgaaatctccagaa

SEQ ID NO: 5101865 - DNA, 25 bp, Homo sapien
gaaggacatcaccaattccggaaag

SEQ ID NO: 5101866 - DNA, 25 bp, Homo sapien
aatcaacccttacaggaaggacatc

SEQ ID NO: 5101867 - DNA, 25 bp, Homo sapien
tcccgatttggttgatgagatggaa

SEQ ID NO: 5101868 - DNA, 25 bp, Homo sapien
gaaaaggatgctgcggctttcccga

SEQ ID NO: 5101869 - DNA, 25 bp, Homo sapien
gtcggaaaatgtccagaggcaccat

SEQ ID NO: 5101870 - DNA, 25 bp, Homo sapien
tgctgtcggaaaatgtccagaggca

SEQ ID NO: 5101871 - DNA, 25 bp, Homo sapien
ccaacgatccctgctgtcggaaaat

SEQ ID NO: 5101872 - DNA, 25 bp, Homo sapien
gatccctgctgtcggaaaatgtcca

SEQ ID NO: 5101873 - DNA, 25 bp, Homo sapien
gattttaagactctcggacgacgtc

SEQ ID NO: 5101874 - DNA, 25 bp, Homo sapien
catgtcctcggatctgactgcgcag

SEQ ID NO: 5101875 - DNA, 25 bp, Homo sapien
cccacgagtctggaatccggccaga

SEQ ID NO: 5101876 - DNA, 25 bp, Homo sapien
gactgcgcaggctccaaatagctcg

SEQ ID NO: 5101877 - DNA, 25 bp, Homo sapien
gcccttgaagctcatctgcgctcat

SEQ ID NO: 5101878 - DNA, 25 bp, Homo sapien
ttgcccttgaagctcatctgcgctc

SEQ ID NO: 5101879 - DNA, 25 bp, Homo sapien
cttgcccttgaagctcatctgcgct

SEQ ID NO: 5101880 - DNA, 25 bp, Homo sapien
tgcccttgaagctcatctgcgctca

SEQ ID NO: 5101881 - DNA, 25 bp, Homo sapien
cttggaccaggacagccttgcaagt

SEQ ID NO: 5101882 - DNA, 25 bp, Homo sapien
ttggaccaggacagccttgcaagtg

SEQ ID NO: 5101883 - DNA, 25 bp, Homo sapien
accgcgcccgacatgcttggtaatg

SEQ ID NO: 5101884 - DNA, 25 bp, Homo sapien
ccgcgcccgacatgcttggtaatgt

SEQ ID NO: 5101885 - DNA, 25 bp, Homo sapien
gaaccaccgcgcccgacatgcttgg

SEQ ID NO: 5101886 - DNA, 25 bp, Homo sapien
caccgcgcccgacatgcttggtaat

SEQ ID NO: 5101887 - DNA, 25 bp, Homo sapien
ggtgtccactcgtggtgacaggatc

SEQ ID NO: 5101888 - DNA, 25 bp, Homo sapien
gacttctttgctatggtggccagag

SEQ ID NO: 5101889 - DNA, 25 bp, Homo sapien
gccttgatccatgtgatctgttgaa

SEQ ID NO: 5101890 - DNA, 25 bp, Homo sapien
gatggtccagggcatacgtgaatcc

SEQ ID NO: 5101891 - DNA, 25 bp, Homo sapien
tgcactccagcctaggcaacagagc

SEQ ID NO: 5101892 - DNA, 25 bp, Homo sapien
agaattgcttgaactgggaaggcag

SEQ ID NO: 5101893 - DNA, 25 bp, Homo sapien
cctaggcaacagagcgagactccat

SEQ ID NO: 5101894 - DNA, 25 bp, Homo sapien
ttgcagtgagctgagatcgtgccac

SEQ ID NO: 5101895 - DNA, 25 bp, Homo sapien
tcttctgagaggtccaggttagagg

SEQ ID NO: 5101896 - DNA, 25 bp, Homo sapien
gaggccatttgaaactgtcttgacc

SEQ ID NO: 5101897 - DNA, 25 bp, Homo sapien
tgaaatccctctctatagccctgag

SEQ ID NO: 5101898 - DNA, 25 bp, Homo sapien
tactagtcattctatggagctggca

SEQ ID NO: 5101899 - DNA, 25 bp, Homo sapien
gagctgggacatgtgtgatcacgca

SEQ ID NO: 5101900 - DNA, 25 bp, Homo sapien
tccctcaccccaaaaactatcagga

SEQ ID NO: 5101901 - DNA, 25 bp, Homo sapien
tgggacatgtgtgatcacgcagctc

SEQ ID NO: 5101902 - DNA, 25 bp, Homo sapien
catgtgtgatcacgcagctcacctc

SEQ ID NO: 5101903 - DNA, 25 bp, Homo sapien
aaaaaccaccaataagaggaggatg

SEQ ID NO: 5101904 - DNA, 25 bp, Homo sapien
aaccaccaataagaggaggatgcaa

SEQ ID NO: 5101905 - DNA, 25 bp, Homo sapien
gactcatccactctcacaatcacag

SEQ ID NO: 5101906 - DNA, 25 bp, Homo sapien
atccactctcacaatcacagactgt

SEQ ID NO: 5101907 - DNA, 25 bp, Homo sapien
tctggattgcttgtcaccactttgg

SEQ ID NO: 5101908 - DNA, 25 bp, Homo sapien
tgcacagtctacacctccgtttgca

SEQ ID NO: 5101909 - DNA, 25 bp, Homo sapien
ctccgtttgcatctgtacaaggcac

SEQ ID NO: 5101910 - DNA, 25 bp, Homo sapien
ttgcttgtcaccactttggcagctg

SEQ ID NO: 5101911 - DNA, 25 bp, Homo sapien
caagttcatgacttgcattaagatc

SEQ ID NO: 5101912 - DNA, 25 bp, Homo sapien
aacacttccttactctgtctctgga

SEQ ID NO: 5101913 - DNA, 25 bp, Homo sapien
gcctcatcggcacattcaagttcat

SEQ ID NO: 5101914 - DNA, 25 bp, Homo sapien
agaatgccaggcctcatcggcacat

SEQ ID NO: 5101915 - DNA, 25 bp, Homo sapien
tctaaactgctctttgagagtagaa

SEQ ID NO: 5101916 - DNA, 25 bp, Homo sapien
aattctaaactgctctttgagagta

SEQ ID NO: 5101917 - DNA, 25 bp, Homo sapien
acaaattctaaactgctctttgaga

SEQ ID NO: 5101918 - DNA, 25 bp, Homo sapien
aactgctctttgagagtagaaaaac

SEQ ID NO: 5101919 - DNA, 25 bp, Homo sapien
tgaaggagttctagtgacagatgtg

SEQ ID NO: 5101920 - DNA, 25 bp, Homo sapien
acaactgaaggagttctagtgacag

SEQ ID NO: 5101921 - DNA, 25 bp, Homo sapien
ggagttctagtgacagatgtgtgta

SEQ ID NO: 5101922 - DNA, 25 bp, Homo sapien
gtgacagatgtgtgtattttctgca

SEQ ID NO: 5101923 - DNA, 25 bp, Homo sapien
tgttctcgagtatagcttcgaggtg

SEQ ID NO: 5101924 - DNA, 25 bp, Homo sapien
cattcccaagatccacaacaattac

SEQ ID NO: 5101925 - DNA, 25 bp, Homo sapien
tcgaggtgtagggtattcattccca

SEQ ID NO: 5101926 - DNA, 25 bp, Homo sapien
ttcattcccaagatccacaacaatt

SEQ ID NO: 5101927 - DNA, 25 bp, Homo sapien
aattttgcacatggctcactccttt

SEQ ID NO: 5101928 - DNA, 25 bp, Homo sapien
taagggcaatacaatcaatttcttg

SEQ ID NO: 5101929 - DNA, 25 bp, Homo sapien
caacatgattttgtaccctcagtct

SEQ ID NO: 5101930 - DNA, 25 bp, Homo sapien
tcagtctttcaacgttagtcaaacg

SEQ ID NO: 5101931 - DNA, 25 bp, Homo sapien
ccacattcagcgacagccaactggt

SEQ ID NO: 5101932 - DNA, 25 bp, Homo sapien
aactctcctctacacccacattcag

SEQ ID NO: 5101933 - DNA, 25 bp, Homo sapien
tctcaactctcctctacacccacat

SEQ ID NO: 5101934 - DNA, 25 bp, Homo sapien
agccaactggtgtgaaccaaaccca

SEQ ID NO: 5101935 - DNA, 25 bp, Homo sapien
gaggactgatgtttgctttccccat

SEQ ID NO: 5101936 - DNA, 25 bp, Homo sapien
tactgcgcaagaggactgatgtttg

SEQ ID NO: 5101937 - DNA, 25 bp, Homo sapien
tgctgaagtcaagtactgcgcaaga

SEQ ID NO: 5101938 - DNA, 25 bp, Homo sapien
tcaagtactgcgcaagaggactgat

SEQ ID NO: 5101939 - DNA, 25 bp, Homo sapien
tgcctggtgggccctttccacccaa

SEQ ID NO: 5101940 - DNA, 25 bp, Homo sapien
aagcctccagtaccaagtcttttag

SEQ ID NO: 5101941 - DNA, 25 bp, Homo sapien
tgggctctccagtacacccgtgcat

SEQ ID NO: 5101942 - DNA, 25 bp, Homo sapien
cagtacacccgtgcatttacacttt

SEQ ID NO: 5101943 - DNA, 25 bp, Homo sapien
gttgtagaatctctcgtgcccagca

SEQ ID NO: 5101944 - DNA, 25 bp, Homo sapien
cagttcttctgttttgcacgttgta

SEQ ID NO: 5101945 - DNA, 25 bp, Homo sapien
cagatccaaagataagtacaatagc

SEQ ID NO: 5101946 - DNA, 25 bp, Homo sapien
gcccagcacatagcagatctcaata

SEQ ID NO: 5101947 - DNA, 25 bp, Homo sapien
tagcaatgcactagagaatcaggag

SEQ ID NO: 5101948 - DNA, 25 bp, Homo sapien
tcaggagttggatgccagtttcaca

SEQ ID NO: 5101949 - DNA, 25 bp, Homo sapien
catcacagtagacccatgagctgct

SEQ ID NO: 5101950 - DNA, 25 bp, Homo sapien
gcacccagcccaggattgactctta

SEQ ID NO: 5101951 - DNA, 25 bp, Homo sapien
tgcagcaaagtgagggtgacaacac

SEQ ID NO: 5101952 - DNA, 25 bp, Homo sapien
agcaaagtgagggtgacaacactga

SEQ ID NO: 5101953 - DNA, 25 bp, Homo sapien
aagtgagggtgacaacactgacagg

SEQ ID NO: 5101954 - DNA, 25 bp, Homo sapien
caaagtgagggtgacaacactgaca

SEQ ID NO: 5101955 - DNA, 25 bp, Homo sapien
caagttggacaacttcaggtggcag

SEQ ID NO: 5101956 - DNA, 25 bp, Homo sapien
ggtggcaagttggacaacttcaggt

SEQ ID NO: 5101957 - DNA, 25 bp, Homo sapien
ggaggtggcaagttggacaacttca

SEQ ID NO: 5101958 - DNA, 25 bp, Homo sapien
gatgcaagggaggtggcaagttgga

SEQ ID NO: 5101959 - DNA, 25 bp, Homo sapien
tcggcaggctccctatagctctcga

SEQ ID NO: 5101960 - DNA, 25 bp, Homo sapien
gctctcgaggacacgacctcgaacg

SEQ ID NO: 5101961 - DNA, 25 bp, Homo sapien
gtagacgcgacaccgccgtcaggtg

SEQ ID NO: 5101962 - DNA, 25 bp, Homo sapien
acctcgaacgcccaggtcgctgtaa

SEQ ID NO: 5101963 - DNA, 25 bp, Homo sapien
tgtctgggccgcctgcgaagggcgg

SEQ ID NO: 5101964 - DNA, 25 bp, Homo sapien
agtagcgggtgcctgagagtccaac

SEQ ID NO: 5101965 - DNA, 25 bp, Homo sapien
tcccggcgccgggaagcagggcgct

SEQ ID NO: 5101966 - DNA, 25 bp, Homo sapien
gctggcgggctcgtgattcccggcg

SEQ ID NO: 5101967 - DNA, 25 bp, Homo sapien
ggctccgaagccagcgtttccggcc

SEQ ID NO: 5101968 - DNA, 25 bp, Homo sapien
aggccgcggcgcctaaggctccgaa

SEQ ID NO: 5101969 - DNA, 25 bp, Homo sapien
gcgtggactgggcggaaaacaagga

SEQ ID NO: 5101970 - DNA, 25 bp, Homo sapien
gcggcgcgttcgcagctcccagaaa

SEQ ID NO: 5101971 - DNA, 25 bp, Homo sapien
cagttgttcacgttggtcccgtcct

SEQ ID NO: 5101972 - DNA, 25 bp, Homo sapien
agcgccagttgttcacgttggtccc

SEQ ID NO: 5101973 - DNA, 25 bp, Homo sapien
tcacgttggtcccgtcctcccgctc

SEQ ID NO: 5101974 - DNA, 25 bp, Homo sapien
gccagttgttcacgttggtcccgtc

SEQ ID NO: 5101975 - DNA, 25 bp, Homo sapien
ccagatcccggaaggaggccgccgc

SEQ ID NO: 5101976 - DNA, 25 bp, Homo sapien
ctccccagatcccggaaggaggccg

SEQ ID NO: 5101977 - DNA, 25 bp, Homo sapien
cccagatcccggaaggaggccgccg

SEQ ID NO: 5101978 - DNA, 25 bp, Homo sapien
agatcccggaaggaggccgccgcca

SEQ ID NO: 5101979 - DNA, 25 bp, Homo sapien
tggaaaggtctgtcggaagtcactc

SEQ ID NO: 5101980 - DNA, 25 bp, Homo sapien
cagacggacgtagtggcacgcatct

SEQ ID NO: 5101981 - DNA, 25 bp, Homo sapien
ggagcttgtctcactcacagagggc

SEQ ID NO: 5101982 - DNA, 25 bp, Homo sapien
tctaactccccgaaacatccagagg

SEQ ID NO: 5101983 - DNA, 25 bp, Homo sapien
gctaggacactagaaagtcagatct

SEQ ID NO: 5101984 - DNA, 25 bp, Homo sapien
aatgacatgtccatcgggccaaggc

SEQ ID NO: 5101985 - DNA, 25 bp, Homo sapien
gaaagtcagatctagctcacgcctg

SEQ ID NO: 5101986 - DNA, 25 bp, Homo sapien
cagaaacgagctgagagaaatgaca

SEQ ID NO: 5101987 - DNA, 25 bp, Homo sapien
gtgtcttcgcatatacatcgtctaa

SEQ ID NO: 5101988 - DNA, 25 bp, Homo sapien
catcgtctaatgtaatcttcccagg

SEQ ID NO: 5101989 - DNA, 25 bp, Homo sapien
gtaatcttcccaggcaatattctca

SEQ ID NO: 5101990 - DNA, 25 bp, Homo sapien
gctatcaagtgtcttcgcatataca

SEQ ID NO: 5101991 - DNA, 25 bp, Homo sapien
cagaaagtcgtgaatggaagcccca

SEQ ID NO: 5101992 - DNA, 25 bp, Homo sapien
cttatttaagggaggaggatctagc

SEQ ID NO: 5101993 - DNA, 25 bp, Homo sapien
tagctcgcccactggaaataggcaa

SEQ ID NO: 5101994 - DNA, 25 bp, Homo sapien
aagtcctctcaagcagcctcgaaac

SEQ ID NO: 5101995 - DNA, 25 bp, Homo sapien
cttcaactcgttgatctcgccgcgg

SEQ ID NO: 5101996 - DNA, 25 bp, Homo sapien
tggaacttccctttggacaagctgg

SEQ ID NO: 5101997 - DNA, 25 bp, Homo sapien
tttccagcccagtttgatgttccac

SEQ ID NO: 5101998 - DNA, 25 bp, Homo sapien
tttgcggctgctgcacgaagcctcc

SEQ ID NO: 5101999 - DNA, 25 bp, Homo sapien
acagacttggctccctcaacaagga

SEQ ID NO: 5102000 - DNA, 25 bp, Homo sapien
agtcacaaaagcgatggaaggacag

SEQ ID NO: 5102001 - DNA, 25 bp, Homo sapien
cacaaaagcgatggaaggacagaaa

SEQ ID NO: 5102002 - DNA, 25 bp, Homo sapien
caaaagcgatggaaggacagaaagg

SEQ ID NO: 5102003 - DNA, 25 bp, Homo sapien
tcacaaaagcgatggaaggacagaa

SEQ ID NO: 5102004 - DNA, 25 bp, Homo sapien
ggagtcagcagtccgccgtcctgag

SEQ ID NO: 5102005 - DNA, 25 bp, Homo sapien
ccagggtactctttgcctgggcaaa

SEQ ID NO: 5102006 - DNA, 25 bp, Homo sapien
tgtggggcaagtgcacccatattcc

SEQ ID NO: 5102007 - DNA, 25 bp, Homo sapien
tcttgtcccagggtactctttgcct

SEQ ID NO: 5102008 - DNA, 25 bp, Homo sapien
aagattgggtatttcaatcaatccc

SEQ ID NO: 5102009 - DNA, 25 bp, Homo sapien
gattgggtatttcaatcaatccctt

SEQ ID NO: 5102010 - DNA, 25 bp, Homo sapien
agattgggtatttcaatcaatccct

SEQ ID NO: 5102011 - DNA, 25 bp, Homo sapien
atttgaaatgcccaatgtctgtagc

SEQ ID NO: 5102012 - DNA, 25 bp, Homo sapien
aggcacccgaactaccacacaggaa

SEQ ID NO: 5102013 - DNA, 25 bp, Homo sapien
agtacggcaatccttctcggcaaac

SEQ ID NO: 5102014 - DNA, 25 bp, Homo sapien
tgtctgtagcagaagcttgactgaa

SEQ ID NO: 5102015 - DNA, 25 bp, Homo sapien
atgggagttacacaaggctctgtct

SEQ ID NO: 5102016 - DNA, 25 bp, Homo sapien
aaaagagggcactaacttgaagcca

SEQ ID NO: 5102017 - DNA, 25 bp, Homo sapien
ttgaagccaagcatgggagttacac

SEQ ID NO: 5102018 - DNA, 25 bp, Homo sapien
ccaaaagagggcactaacttgaagc

SEQ ID NO: 5102019 - DNA, 25 bp, Homo sapien
tataacaaagtggaatctcaggccc

SEQ ID NO: 5102020 - DNA, 25 bp, Homo sapien
tctcgggccccagtttgaatctaaa

SEQ ID NO: 5102021 - DNA, 25 bp, Homo sapien
cgttatgttgcggaggctagaccca

SEQ ID NO: 5102022 - DNA, 25 bp, Homo sapien
tagtgtcccgatgcttcagttgagg

SEQ ID NO: 5102023 - DNA, 25 bp, Homo sapien
acattgggctgtatggatgagagaa

SEQ ID NO: 5102024 - DNA, 25 bp, Homo sapien
aacattgggctgtatggatgagaga

SEQ ID NO: 5102025 - DNA, 25 bp, Homo sapien
ggcctccctgaccttggcagtgcct

SEQ ID NO: 5102026 - DNA, 25 bp, Homo sapien
taagtgccttcaggtaatctccaag

SEQ ID NO: 5102027 - DNA, 25 bp, Homo sapien
ccttcaggtaatctccaagggcctc

SEQ ID NO: 5102028 - DNA, 25 bp, Homo sapien
cgtcttaagtgccttcaggtaatct

SEQ ID NO: 5102029 - DNA, 25 bp, Homo sapien
cctgggttgccatagctttcgttgg

SEQ ID NO: 5102030 - DNA, 25 bp, Homo sapien
cagttttcttttgacagtcaattcc

SEQ ID NO: 5102031 - DNA, 25 bp, Homo sapien
gccatagctttcgttggtaaaatca

SEQ ID NO: 5102032 - DNA, 25 bp, Homo sapien
tgacagtcaattcctgggttgccat

SEQ ID NO: 5102033 - DNA, 25 bp, Homo sapien
caaattccatactgcctattccaga

SEQ ID NO: 5102034 - DNA, 25 bp, Homo sapien
gaatgattagcataacaagagagaa

SEQ ID NO: 5102035 - DNA, 25 bp, Homo sapien
tttttagcaccaccagtcttggtct

SEQ ID NO: 5102036 - DNA, 25 bp, Homo sapien
gcttggattacaatagtcttctcag

SEQ ID NO: 5102037 - DNA, 25 bp, Homo sapien
ctcctttacagtgaagatgctatac

SEQ ID NO: 5102038 - DNA, 25 bp, Homo sapien
tgctatacagctgctctacagttgt

SEQ ID NO: 5102039 - DNA, 25 bp, Homo sapien
tgtgtcaaacagttccatcatgtga

SEQ ID NO: 5102040 - DNA, 25 bp, Homo sapien
catcatgtgaagagccacagtggga

SEQ ID NO: 5102041 - DNA, 25 bp, Homo sapien
ggacatagtcccaaagaatgcccat

SEQ ID NO: 5102042 - DNA, 25 bp, Homo sapien
tcttcctagagggagaaaactcaat

SEQ ID NO: 5102043 - DNA, 25 bp, Homo sapien
caatgtcagcacttaacatgctagc

SEQ ID NO: 5102044 - DNA, 25 bp, Homo sapien
catgctagcttagggagttacttac

SEQ ID NO: 5102045 - DNA, 25 bp, Homo sapien
cctagatattcaccagtgatgttcc

SEQ ID NO: 5102046 - DNA, 25 bp, Homo sapien
agatattcaccagtgatgttcccat

SEQ ID NO: 5102047 - DNA, 25 bp, Homo sapien
tgttaaggttgaggcaacacagacc

SEQ ID NO: 5102048 - DNA, 25 bp, Homo sapien
taatagtaaccagaacagagggctg

SEQ ID NO: 5102049 - DNA, 25 bp, Homo sapien
cagcagtaacatcaaggacagcagg

SEQ ID NO: 5102050 - DNA, 25 bp, Homo sapien
gaccctcgtgatttcggtgctaaaa

SEQ ID NO: 5102051 - DNA, 25 bp, Homo sapien
tttcatgatgatcttcttatttgtt

SEQ ID NO: 5102052 - DNA, 25 bp, Homo sapien
ccatttcatgatgatcttcttattt

SEQ ID NO: 5102053 - DNA, 25 bp, Homo sapien
atttcatgatgatcttcttatttgt

SEQ ID NO: 5102054 - DNA, 25 bp, Homo sapien
catttcatgatgatcttcttatttg

SEQ ID NO: 5102055 - DNA, 25 bp, Homo sapien
tgaagggcagtaattagtaacatac

SEQ ID NO: 5102056 - DNA, 25 bp, Homo sapien
catacgaaaaacctagccttagtgt

SEQ ID NO: 5102057 - DNA, 25 bp, Homo sapien
ggacctttaatatgaagggcagtaa

SEQ ID NO: 5102058 - DNA, 25 bp, Homo sapien
tatccatacgaaaaacctagcctta

SEQ ID NO: 5102059 - DNA, 25 bp, Homo sapien
ttcagtgcaaccatggcatagtgtt

SEQ ID NO: 5102060 - DNA, 25 bp, Homo sapien
ctagagtaggcacaaaattcagtgc

SEQ ID NO: 5102061 - DNA, 25 bp, Homo sapien
agagtaggcacaaaattcagtgcaa

SEQ ID NO: 5102062 - DNA, 25 bp, Homo sapien
aattcagtgcaaccatggcatagtg

SEQ ID NO: 5102063 - DNA, 25 bp, Homo sapien
aggaactccttcaattgtaattctg

SEQ ID NO: 5102064 - DNA, 25 bp, Homo sapien
gatagataggaactccttcaattgt

SEQ ID NO: 5102065 - DNA, 25 bp, Homo sapien
cagatagataggaactccttcaatt

SEQ ID NO: 5102066 - DNA, 25 bp, Homo sapien
gataggaactccttcaattgtaatt

SEQ ID NO: 5102067 - DNA, 25 bp, Homo sapien
tcaggacttacctatttccagagga

SEQ ID NO: 5102068 - DNA, 25 bp, Homo sapien
gcttcagcttgggaaacatcaacta

SEQ ID NO: 5102069 - DNA, 25 bp, Homo sapien
ccagaggaatatcgatggaaggtca

SEQ ID NO: 5102070 - DNA, 25 bp, Homo sapien
ctaaaagtacagctgcaagcaagct

SEQ ID NO: 5102071 - DNA, 25 bp, Homo sapien
tcactggaagtgttaccagcagtcc

SEQ ID NO: 5102072 - DNA, 25 bp, Homo sapien
cagtcttctcaggtgaaagtagtga

SEQ ID NO: 5102073 - DNA, 25 bp, Homo sapien
tataccactgttttacgacctaaga

SEQ ID NO: 5102074 - DNA, 25 bp, Homo sapien
gcagtccacagaactaatgtgtccc

SEQ ID NO: 5102075 - DNA, 25 bp, Homo sapien
tgtaccttatagaggcagattgcct

SEQ ID NO: 5102076 - DNA, 25 bp, Homo sapien
tgtatgatatggtgtcctctgtgcc

SEQ ID NO: 5102077 - DNA, 25 bp, Homo sapien
aagaatcctctttagctgtggcctg

SEQ ID NO: 5102078 - DNA, 25 bp, Homo sapien
cagattgcctccgatcgctgtggtt

SEQ ID NO: 5102079 - DNA, 25 bp, Homo sapien
gacttactggttcgtgggcataaaa

SEQ ID NO: 5102080 - DNA, 25 bp, Homo sapien
catgtcgtcacaaggatatctggca

SEQ ID NO: 5102081 - DNA, 25 bp, Homo sapien
caactcccattaaaaggcggcgtgt

SEQ ID NO: 5102082 - DNA, 25 bp, Homo sapien
tatcaggtcacagcatgcagaagaa

SEQ ID NO: 5102083 - DNA, 25 bp, Homo sapien
ggctcattccttggatcaggcataa

SEQ ID NO: 5102084 - DNA, 25 bp, Homo sapien
tgcatctgctctaccccattggaag

SEQ ID NO: 5102085 - DNA, 25 bp, Homo sapien
gagtctggttcagcctcctaccagg

SEQ ID NO: 5102086 - DNA, 25 bp, Homo sapien
aaaactgttgattgtactgcctggt

SEQ ID NO: 5102087 - DNA, 25 bp, Homo sapien
cctagttgcctatgaaggtttgcca

SEQ ID NO: 5102088 - DNA, 25 bp, Homo sapien
gatttggagccacttgcagtaactt

SEQ ID NO: 5102089 - DNA, 25 bp, Homo sapien
ggcagagtggtaccttaatccaaga

SEQ ID NO: 5102090 - DNA, 25 bp, Homo sapien
caaactttggactgagctatgccag

SEQ ID NO: 5102091 - DNA, 25 bp, Homo sapien
ttgcctcttgtgtctaaagggactc

SEQ ID NO: 5102092 - DNA, 25 bp, Homo sapien
gtgagtgacctgacttgcctgtgta

SEQ ID NO: 5102093 - DNA, 25 bp, Homo sapien
tctcaagtccttggtctaacccacg

SEQ ID NO: 5102094 - DNA, 25 bp, Homo sapien
taaccatggctacctgctagctaag

SEQ ID NO: 5102095 - DNA, 25 bp, Homo sapien
aagaaaattgtcccagcctgcagtc

SEQ ID NO: 5102096 - DNA, 25 bp, Homo sapien
ttaagaaaattgtcccagcctgcag

SEQ ID NO: 5102097 - DNA, 25 bp, Homo sapien
cagtcttagctactacggaggctaa

SEQ ID NO: 5102098 - DNA, 25 bp, Homo sapien
ttttaagaaaattgtcccagcctgc

SEQ ID NO: 5102099 - DNA, 25 bp, Homo sapien
gataaatatcaagatatcacagacc

SEQ ID NO: 5102100 - DNA, 25 bp, Homo sapien
gatatcacagaccttttctcaccat

SEQ ID NO: 5102101 - DNA, 25 bp, Homo sapien
ttcaaatgtagatgtttttctccct

SEQ ID NO: 5102102 - DNA, 25 bp, Homo sapien
ttttctcccttatttcacaacagta

SEQ ID NO: 5102103 - DNA, 25 bp, Homo sapien
ttcaggaagggtgaacaaagctgcc

SEQ ID NO: 5102104 - DNA, 25 bp, Homo sapien
tatgggcaactgagcagatcttaag

SEQ ID NO: 5102105 - DNA, 25 bp, Homo sapien
tgtgaccattggtgagaacatctca

SEQ ID NO: 5102106 - DNA, 25 bp, Homo sapien
gaggttacatgtccaagggccacaa

SEQ ID NO: 5102107 - DNA, 25 bp, Homo sapien
gagggacattctatgaaatacccga

SEQ ID NO: 5102108 - DNA, 25 bp, Homo sapien
tatatgtacacatctccccaggagg

SEQ ID NO: 5102109 - DNA, 25 bp, Homo sapien
tacccttgatatggcgtgatggcaa

SEQ ID NO: 5102110 - DNA, 25 bp, Homo sapien
tttacagtacaactcagccgggtga

SEQ ID NO: 5102111 - DNA, 25 bp, Homo sapien
cactttaagttgtacacaagccagt

SEQ ID NO: 5102112 - DNA, 25 bp, Homo sapien
tgtttccttgcttgataagagtgat

SEQ ID NO: 5102113 - DNA, 25 bp, Homo sapien
gcatgatcagcagtaatgaagggaa

SEQ ID NO: 5102114 - DNA, 25 bp, Homo sapien
gatcttagacaggtagacacatatc

SEQ ID NO: 5102115 - DNA, 25 bp, Homo sapien
ctggttacatagaaggatcccctga

SEQ ID NO: 5102116 - DNA, 25 bp, Homo sapien
aaatatgcaatctaggtgtagtggc

SEQ ID NO: 5102117 - DNA, 25 bp, Homo sapien
gctgactgatggaatacttgtacta

SEQ ID NO: 5102118 - DNA, 25 bp, Homo sapien
atcccctgagcctagtaattcaagg

SEQ ID NO: 5102119 - DNA, 25 bp, Homo sapien
tatacttcgtggcaaccaaatggtg

SEQ ID NO: 5102120 - DNA, 25 bp, Homo sapien
gatggatctaggcagttgtcaccac

SEQ ID NO: 5102121 - DNA, 25 bp, Homo sapien
caaacctagatctcatcaagtctgg

SEQ ID NO: 5102122 - DNA, 25 bp, Homo sapien
tagaaacttcaggaaatgtgtacgc

SEQ ID NO: 5102123 - DNA, 25 bp, Homo sapien
cagctgcccttgaaaagatgatagc

SEQ ID NO: 5102124 - DNA, 25 bp, Homo sapien
tagagcgtgcattcgttctttaacc

SEQ ID NO: 5102125 - DNA, 25 bp, Homo sapien
gaacagtctcgatcagaaaggtgaa

SEQ ID NO: 5102126 - DNA, 25 bp, Homo sapien
aagactagaatcagctgaatgtcca

SEQ ID NO: 5102127 - DNA, 25 bp, Homo sapien
tcattgcaagctatatctacaatgg

SEQ ID NO: 5102128 - DNA, 25 bp, Homo sapien
ttgcaagctatatctacaatggtac

SEQ ID NO: 5102129 - DNA, 25 bp, Homo sapien
tgcaagctatatctacaatggtaca

SEQ ID NO: 5102130 - DNA, 25 bp, Homo sapien
tttacatgggaacaaaaggacctga

SEQ ID NO: 5102131 - DNA, 25 bp, Homo sapien
ttcatgtgtcactcgctttgtgaga

SEQ ID NO: 5102132 - DNA, 25 bp, Homo sapien
gagaaccctgttattaattatggaa

SEQ ID NO: 5102133 - DNA, 25 bp, Homo sapien
gtggtcgttcatgtgtcactcgctt

SEQ ID NO: 5102134 - DNA, 25 bp, Homo sapien
ttatggaacatggtgtaaaacctca

SEQ ID NO: 5102135 - DNA, 25 bp, Homo sapien
gcttttaactagtatcttgcctgca

SEQ ID NO: 5102136 - DNA, 25 bp, Homo sapien
ttaactagtatcttgcctgcacatg

SEQ ID NO: 5102137 - DNA, 25 bp, Homo sapien
aatgcttttaactagtatcttgcct

SEQ ID NO: 5102138 - DNA, 25 bp, Homo sapien
tagtatcttgcctgcacatgtgtta

SEQ ID NO: 5102139 - DNA, 25 bp, Homo sapien
gttaattcctgtgactgactgaata

SEQ ID NO: 5102140 - DNA, 25 bp, Homo sapien
ttaattcctgtgactgactgaatat

SEQ ID NO: 5102141 - DNA, 25 bp, Homo sapien
gcaagtccgggcaagtccgagcaag

SEQ ID NO: 5102142 - DNA, 25 bp, Homo sapien
tgatgggcttacaggactcctaagg

SEQ ID NO: 5102143 - DNA, 25 bp, Homo sapien
cctaaggcttgcaacaagtgttgtt

SEQ ID NO: 5102144 - DNA, 25 bp, Homo sapien
acaatcgtgccggaaggcaagtccg

SEQ ID NO: 5102145 - DNA, 25 bp, Homo sapien
ctggcctcaagtgtatattttttta

SEQ ID NO: 5102146 - DNA, 25 bp, Homo sapien
gtttaggacagggtctcaccttgtc

SEQ ID NO: 5102147 - DNA, 25 bp, Homo sapien
cgcgcctggcctcaagtgtatattt

SEQ ID NO: 5102148 - DNA, 25 bp, Homo sapien
tgtttaggacagggtctcaccttgt

SEQ ID NO: 5102149 - DNA, 25 bp, Homo sapien
agattatttaatgccttggtgctcc

SEQ ID NO: 5102150 - DNA, 25 bp, Homo sapien
cctggagttgcaaggtttgatcata

SEQ ID NO: 5102151 - DNA, 25 bp, Homo sapien
taagttgcaataacgtaaactgaga

SEQ ID NO: 5102152 - DNA, 25 bp, Homo sapien
caaaagtgggtaccataattcttca

SEQ ID NO: 5102153 - DNA, 25 bp, Homo sapien
gtttggccctgatgagagttacaca

SEQ ID NO: 5102154 - DNA, 25 bp, Homo sapien
gccatttcctcaagtatagcgcaag

SEQ ID NO: 5102155 - DNA, 25 bp, Homo sapien
tgctgaataagataggtttggccct

SEQ ID NO: 5102156 - DNA, 25 bp, Homo sapien
tagcgcaagtgttactcgagggttg

SEQ ID NO: 5102157 - DNA, 25 bp, Homo sapien
ggctcgaagagccttcccacctcag

SEQ ID NO: 5102158 - DNA, 25 bp, Homo sapien
cctgggctcgaagagccttcccacc

SEQ ID NO: 5102159 - DNA, 25 bp, Homo sapien
tgggctcgaagagccttcccacctc

SEQ ID NO: 5102160 - DNA, 25 bp, Homo sapien
ctgggctcgaagagccttcccacct

SEQ ID NO: 5102161 - DNA, 25 bp, Homo sapien
tgttctaaccttttggactgtctaa

SEQ ID NO: 5102162 - DNA, 25 bp, Homo sapien
tagactgatactgctactagggtga

SEQ ID NO: 5102163 - DNA, 25 bp, Homo sapien
cgtacttgtgattgcctataatgcc

SEQ ID NO: 5102164 - DNA, 25 bp, Homo sapien
gattatgtcctctgatatgttgctg

SEQ ID NO: 5102165 - DNA, 25 bp, Homo sapien
ttgcttgtgcctggggaggttcagg

SEQ ID NO: 5102166 - DNA, 25 bp, Homo sapien
gattgcttgtgcctggggaggttca

SEQ ID NO: 5102167 - DNA, 25 bp, Homo sapien
ttgtgcctggggaggttcaggctgc

SEQ ID NO: 5102168 - DNA, 25 bp, Homo sapien
aggattgcttgtgcctggggaggtt

SEQ ID NO: 5102169 - DNA, 25 bp, Homo sapien
gcagttacagtagaaaaattcattg

SEQ ID NO: 5102170 - DNA, 25 bp, Homo sapien
ctttgtaaatgaatcagttgcctcc

SEQ ID NO: 5102171 - DNA, 25 bp, Homo sapien
atataagaaaccactagtagaactt

SEQ ID NO: 5102172 - DNA, 25 bp, Homo sapien
ttctttaaagggcaatacgttgagc

SEQ ID NO: 5102173 - DNA, 25 bp, Homo sapien
tacttgtggtagatactggtacggc

SEQ ID NO: 5102174 - DNA, 25 bp, Homo sapien
tttaaatgcctgagacgactagtcc

SEQ ID NO: 5102175 - DNA, 25 bp, Homo sapien
tgtagcataccaaccagatgtggct

SEQ ID NO: 5102176 - DNA, 25 bp, Homo sapien
tactaatgattgtgtgccttgagcc

SEQ ID NO: 5102177 - DNA, 25 bp, Homo sapien
tcttgattatacatgtgagtcatac

SEQ ID NO: 5102178 - DNA, 25 bp, Homo sapien
ccagttgaacctaggtcttcatgaa

SEQ ID NO: 5102179 - DNA, 25 bp, Homo sapien
tctaaggcgctaatcccagttgaac

SEQ ID NO: 5102180 - DNA, 25 bp, Homo sapien
tgatgttactactgctctaaggcgc

SEQ ID NO: 5102181 - DNA, 25 bp, Homo sapien
gaagcgtgtgtctctgattatgtct

SEQ ID NO: 5102182 - DNA, 25 bp, Homo sapien
taatagagatggagatttactgtgt

SEQ ID NO: 5102183 - DNA, 25 bp, Homo sapien
agcctctgagtagctcgcgttttag

SEQ ID NO: 5102184 - DNA, 25 bp, Homo sapien
tagctcgcgttttaggcgcatgcca

SEQ ID NO: 5102185 - DNA, 25 bp, Homo sapien
gctccgggaccagctttgtaaacat

SEQ ID NO: 5102186 - DNA, 25 bp, Homo sapien
tgcttacaagcataatactcaccct

SEQ ID NO: 5102187 - DNA, 25 bp, Homo sapien
tagattccacgtggcaagatgagag

SEQ ID NO: 5102188 - DNA, 25 bp, Homo sapien
gaatcttcaaagagttctgatcctt

SEQ ID NO: 5102189 - DNA, 25 bp, Homo sapien
cttaggtccattatcaagcagttta

SEQ ID NO: 5102190 - DNA, 25 bp, Homo sapien
agtttggctgaatctttggctttct

SEQ ID NO: 5102191 - DNA, 25 bp, Homo sapien
tctgacttcaagttcgttttctggg

SEQ ID NO: 5102192 - DNA, 25 bp, Homo sapien
gaagatcatcagtttcttaggtcca

SEQ ID NO: 5102193 - DNA, 25 bp, Homo sapien
tgtggggtcaagtatgtcgccattc

SEQ ID NO: 5102194 - DNA, 25 bp, Homo sapien
cgcatgtgattgaggtcctgctcag

SEQ ID NO: 5102195 - DNA, 25 bp, Homo sapien
aggcgcatgtgattgaggtcctgct

SEQ ID NO: 5102196 - DNA, 25 bp, Homo sapien
tggggtcaagtatgtcgccattcat

SEQ ID NO: 5102197 - DNA, 25 bp, Homo sapien
taagattacggaggtcctgcagcca

SEQ ID NO: 5102198 - DNA, 25 bp, Homo sapien
caggtacagttaactatggtcagtc

SEQ ID NO: 5102199 - DNA, 25 bp, Homo sapien
catatagctgtcacaactttggctg

SEQ ID NO: 5102200 - DNA, 25 bp, Homo sapien
tgccaccattcagagcgacagctta

SEQ ID NO: 5102201 - DNA, 25 bp, Homo sapien
aaaatagtatggtaggccaagcgtg

SEQ ID NO: 5102202 - DNA, 25 bp, Homo sapien
ggtaatggagaatgtttacttcaaa

SEQ ID NO: 5102203 - DNA, 25 bp, Homo sapien
gtagtgtattatctacagtataggt

SEQ ID NO: 5102204 - DNA, 25 bp, Homo sapien
aaaaatagtatggtaggccaagcgt

SEQ ID NO: 5102205 - DNA, 25 bp, Homo sapien
tattgtggcctagattaagattgtc

SEQ ID NO: 5102206 - DNA, 25 bp, Homo sapien
cagtgccttgtagtgaaaatttgtc

SEQ ID NO: 5102207 - DNA, 25 bp, Homo sapien
tctaattagcggataaacaggtact

SEQ ID NO: 5102208 - DNA, 25 bp, Homo sapien
taattgtgctgatagaagggagaac

SEQ ID NO: 5102209 - DNA, 25 bp, Homo sapien
atttcgctcttgttcactagggtgg

SEQ ID NO: 5102210 - DNA, 25 bp, Homo sapien
ttactagtaaatttaaccattcata

SEQ ID NO: 5102211 - DNA, 25 bp, Homo sapien
aatttcgctcttgttcactagggtg

SEQ ID NO: 5102212 - DNA, 25 bp, Homo sapien
ccaccgtgcctagccgtgtttttgt

SEQ ID NO: 5102213 - DNA, 25 bp, Homo sapien
cgtgcctagccgtgtttttgtttat

SEQ ID NO: 5102214 - DNA, 25 bp, Homo sapien
caccgtgcctagccgtgtttttgtt

SEQ ID NO: 5102215 - DNA, 25 bp, Homo sapien
cttgcgcccgaaagagggctacggc

SEQ ID NO: 5102216 - DNA, 25 bp, Homo sapien
cccaaaagcctaagcgcggaagagg

SEQ ID NO: 5102217 - DNA, 25 bp, Homo sapien
taatcaccgatgcagttaagccggg

SEQ ID NO: 5102218 - DNA, 25 bp, Homo sapien
tgggctgattcactctcagaccccg

SEQ ID NO: 5102219 - DNA, 25 bp, Homo sapien
tttctagttacgtcaaggatcttac

SEQ ID NO: 5102220 - DNA, 25 bp, Homo sapien
tccaggacggaggaccttcaaggaa

SEQ ID NO: 5102221 - DNA, 25 bp, Homo sapien
acgtcaaggatcttactgctccagg

SEQ ID NO: 5102222 - DNA, 25 bp, Homo sapien
cctgccatttctagttacgtcaagg

SEQ ID NO: 5102223 - DNA, 25 bp, Homo sapien
cctcttccgtaaaaacgagacgatg

SEQ ID NO: 5102224 - DNA, 25 bp, Homo sapien
cgtaaaaacgagacgatgtcaggca

SEQ ID NO: 5102225 - DNA, 25 bp, Homo sapien
gacgatgtcaggcaaacactcctta

SEQ ID NO: 5102226 - DNA, 25 bp, Homo sapien
tgggcacatcgtgaggggccctctt

SEQ ID NO: 5102227 - DNA, 25 bp, Homo sapien
gagaatctccacaaacagaagggta

SEQ ID NO: 5102228 - DNA, 25 bp, Homo sapien
ggatcacctcaaagcatgccgttca

SEQ ID NO: 5102229 - DNA, 25 bp, Homo sapien
gaggaccactccataagtaaacatg

SEQ ID NO: 5102230 - DNA, 25 bp, Homo sapien
gccaggaaagtggtggaatatgcct

SEQ ID NO: 5102231 - DNA, 25 bp, Homo sapien
ggggtgggggtgatagaatcttgct

SEQ ID NO: 5102232 - DNA, 25 bp, Homo sapien
tcttgctctgttgctcaggctggag

SEQ ID NO: 5102233 - DNA, 25 bp, Homo sapien
aatcttgctctgttgctcaggctgg

SEQ ID NO: 5102234 - DNA, 25 bp, Homo sapien
ttgctctgttgctcaggctggagtg

SEQ ID NO: 5102235 - DNA, 25 bp, Homo sapien
taaacgtcaaatgtctgtccctggc

SEQ ID NO: 5102236 - DNA, 25 bp, Homo sapien
aacagcatgtgggtatttgtcgacc

SEQ ID NO: 5102237 - DNA, 25 bp, Homo sapien
gcatatcatcccattgtaaagcgac

SEQ ID NO: 5102238 - DNA, 25 bp, Homo sapien
ctgaagttagcacctcttggactga

SEQ ID NO: 5102239 - DNA, 25 bp, Homo sapien
taatacgatttaaatgttaagtgcc

SEQ ID NO: 5102240 - DNA, 25 bp, Homo sapien
ctgctggtaagaatttaatacgatt

SEQ ID NO: 5102241 - DNA, 25 bp, Homo sapien
tcttttctgttgtgacagacacttc

SEQ ID NO: 5102242 - DNA, 25 bp, Homo sapien
taaatgttaagtgccagctgggcac

SEQ ID NO: 5102243 - DNA, 25 bp, Homo sapien
cctgtcatgtgagcagtatgaactc

SEQ ID NO: 5102244 - DNA, 25 bp, Homo sapien
tgtatgaactccaccttatgtgtag

SEQ ID NO: 5102245 - DNA, 25 bp, Homo sapien
caagtgagtccataggcagaattga

SEQ ID NO: 5102246 - DNA, 25 bp, Homo sapien
ggagagcggcctagtaataattggt

SEQ ID NO: 5102247 - DNA, 25 bp, Homo sapien
tgaacatgcgtattatgtgaacaga

SEQ ID NO: 5102248 - DNA, 25 bp, Homo sapien
tacaagaagcttgagcacgtgtcgg

SEQ ID NO: 5102249 - DNA, 25 bp, Homo sapien
ttgtggaatacttaagttggctaac

SEQ ID NO: 5102250 - DNA, 25 bp, Homo sapien
aatatcgaaaggttctgaacatgcg

SEQ ID NO: 5102251 - DNA, 25 bp, Homo sapien
tgattctgccacttagaccatgtaa

SEQ ID NO: 5102252 - DNA, 25 bp, Homo sapien
cagttatttgtcaccggatagccac

SEQ ID NO: 5102253 - DNA, 25 bp, Homo sapien
tctgaactggattcccctgggatat

SEQ ID NO: 5102254 - DNA, 25 bp, Homo sapien
ttgtttctaacacgaggacgctgct

SEQ ID NO: 5102255 - DNA, 25 bp, Homo sapien
tggtgcgtgcctgtaatcccagctg

SEQ ID NO: 5102256 - DNA, 25 bp, Homo sapien
ctcaggatgctgaggcaggacaatt

SEQ ID NO: 5102257 - DNA, 25 bp, Homo sapien
gcttgaacccaggaggtggaggcgg

SEQ ID NO: 5102258 - DNA, 25 bp, Homo sapien
aaaaaaaaatagtagctggatgtgg

SEQ ID NO: 5102259 - DNA, 25 bp, Homo sapien
tgagcttaatgttgcaattaatgta

SEQ ID NO: 5102260 - DNA, 25 bp, Homo sapien
tgttgcaattaatgtatagtggaaa

SEQ ID NO: 5102261 - DNA, 25 bp, Homo sapien
aatgttgcaattaatgtatagtgga

SEQ ID NO: 5102262 - DNA, 25 bp, Homo sapien
taatgttgcaattaatgtatagtgg

SEQ ID NO: 5102263 - DNA, 25 bp, Homo sapien
tatttggcaagccttgaggaaggga

SEQ ID NO: 5102264 - DNA, 25 bp, Homo sapien
tccgtccggctggaatgctattctt

SEQ ID NO: 5102265 - DNA, 25 bp, Homo sapien
tacagtataagagtcagaatcagcc

SEQ ID NO: 5102266 - DNA, 25 bp, Homo sapien
tcacagtttctagggccactgtacc

SEQ ID NO: 5102267 - DNA, 25 bp, Homo sapien
taggagtataggcacgaacgactgt

SEQ ID NO: 5102268 - DNA, 25 bp, Homo sapien
gctggtctcaagctcgtttcctcaa

SEQ ID NO: 5102269 - DNA, 25 bp, Homo sapien
catagctcgttgtaacttcagtctc

SEQ ID NO: 5102270 - DNA, 25 bp, Homo sapien
tgtgagccatcgtgcgtgacttgtt

SEQ ID NO: 5102271 - DNA, 25 bp, Homo sapien
agccaccacgcccagccttaatttc

SEQ ID NO: 5102272 - DNA, 25 bp, Homo sapien
cgaactcctgacctggtaatcagcc

SEQ ID NO: 5102273 - DNA, 25 bp, Homo sapien
ccaccacgcccagccttaatttcca

SEQ ID NO: 5102274 - DNA, 25 bp, Homo sapien
ctgacctggtaatcagcccacctca

SEQ ID NO: 5102275 - DNA, 25 bp, Homo sapien
agctagcactgtaggtccgcaccac

SEQ ID NO: 5102276 - DNA, 25 bp, Homo sapien
gagtggttgctattcatggtagtct

SEQ ID NO: 5102277 - DNA, 25 bp, Homo sapien
gaattccctaataaagagtggttgc

SEQ ID NO: 5102278 - DNA, 25 bp, Homo sapien
cgtcccaaattgctaccaagcctgg

SEQ ID NO: 5102279 - DNA, 25 bp, Homo sapien
aagatgttaacactacctgatatta

SEQ ID NO: 5102280 - DNA, 25 bp, Homo sapien
cacagctaggctttgacggcaggcc

SEQ ID NO: 5102281 - DNA, 25 bp, Homo sapien
aataagtatttctaagggctcagta

SEQ ID NO: 5102282 - DNA, 25 bp, Homo sapien
gcctccacaaggtctacccttttga

SEQ ID NO: 5102283 - DNA, 25 bp, Homo sapien
tctttggttgaaatgcagttcagtt

SEQ ID NO: 5102284 - DNA, 25 bp, Homo sapien
agtgctgagaacttatttgcttcag

SEQ ID NO: 5102285 - DNA, 25 bp, Homo sapien
cctttaaagattaggagttggctgg

SEQ ID NO: 5102286 - DNA, 25 bp, Homo sapien
gaaacactgctactggcctagataa

SEQ ID NO: 5102287 - DNA, 25 bp, Homo sapien
tgcagcagcattgaaacgtccgcct

SEQ ID NO: 5102288 - DNA, 25 bp, Homo sapien
agctctccggttttgcagagtggca

SEQ ID NO: 5102289 - DNA, 25 bp, Homo sapien
ccttgtacagtggaggatgccctga

SEQ ID NO: 5102290 - DNA, 25 bp, Homo sapien
gcaaggaaactcgaaagctctccgg

SEQ ID NO: 5102291 - DNA, 25 bp, Homo sapien
tgcaactggcagcagagcgtctccc

SEQ ID NO: 5102292 - DNA, 25 bp, Homo sapien
tgcagtccgtgcaaccacccagagg

SEQ ID NO: 5102293 - DNA, 25 bp, Homo sapien
gggaaccaccagtcgctgaggaaca

SEQ ID NO: 5102294 - DNA, 25 bp, Homo sapien
ccagccgggcgggagcatttattcc

SEQ ID NO: 5102295 - DNA, 25 bp, Homo sapien
caaccggttccgagtttgaggcact

SEQ ID NO: 5102296 - DNA, 25 bp, Homo sapien
cgggagctacagcatcagcaagagc

SEQ ID NO: 5102297 - DNA, 25 bp, Homo sapien
gatggaatctcccagtctgaaccgg

SEQ ID NO: 5102298 - DNA, 25 bp, Homo sapien
ggcgccatgggctgaaaactcaacc

SEQ ID NO: 5102299 - DNA, 25 bp, Homo sapien
tctgagtgttgcagatcaagggcac

SEQ ID NO: 5102300 - DNA, 25 bp, Homo sapien
gacgcttgggaacaaacgagaggca

SEQ ID NO: 5102301 - DNA, 25 bp, Homo sapien
tgcgctgtcaaaccaatcacttggg

SEQ ID NO: 5102302 - DNA, 25 bp, Homo sapien
cgagaggcaaccacgtgaaaggcaa

SEQ ID NO: 5102303 - DNA, 25 bp, Homo sapien
tcttggttccagttcatggaagggc

SEQ ID NO: 5102304 - DNA, 25 bp, Homo sapien
actcacatctctcatgacgaggatt

SEQ ID NO: 5102305 - DNA, 25 bp, Homo sapien
catgacgaggattcagccagagcat

SEQ ID NO: 5102306 - DNA, 25 bp, Homo sapien
ccagagcatccagatagctgtgctg

SEQ ID NO: 5102307 - DNA, 25 bp, Homo sapien
aggagttgcccctgatggccttagg

SEQ ID NO: 5102308 - DNA, 25 bp, Homo sapien
taggagttgcccctgatggccttag

SEQ ID NO: 5102309 - DNA, 25 bp, Homo sapien
ctaggagttgcccctgatggcctta

SEQ ID NO: 5102310 - DNA, 25 bp, Homo sapien
tgggctgataagaacaacggatttc

SEQ ID NO: 5102311 - DNA, 25 bp, Homo sapien
ggctgataagaacaacggatttcca

SEQ ID NO: 5102312 - DNA, 25 bp, Homo sapien
ggtgggctgataagaacaacggatt

SEQ ID NO: 5102313 - DNA, 25 bp, Homo sapien
gggtgggctgataagaacaacggat

SEQ ID NO: 5102314 - DNA, 25 bp, Homo sapien
gctgaccggacaaaacttgttaaca

SEQ ID NO: 5102315 - DNA, 25 bp, Homo sapien
gcagtttgaaggctgaccggacaaa

SEQ ID NO: 5102316 - DNA, 25 bp, Homo sapien
taggaatgaggggacaaatgtctgc

SEQ ID NO: 5102317 - DNA, 25 bp, Homo sapien
tcacatggctgaccgctaggaatga

SEQ ID NO: 5102318 - DNA, 25 bp, Homo sapien
taataattacaagcttcgagagatg

SEQ ID NO: 5102319 - DNA, 25 bp, Homo sapien
tcctctccattgtcgtcctggtata

SEQ ID NO: 5102320 - DNA, 25 bp, Homo sapien
gagagatgcatctgactcatcaaca

SEQ ID NO: 5102321 - DNA, 25 bp, Homo sapien
cattgtcgtcctggtataatacttg

SEQ ID NO: 5102322 - DNA, 25 bp, Homo sapien
tgtttccatcggtatgcgaaggata

SEQ ID NO: 5102323 - DNA, 25 bp, Homo sapien
tccagtgtttccatcggtatgcgaa

SEQ ID NO: 5102324 - DNA, 25 bp, Homo sapien
catcggtatgcgaaggatataggtt

SEQ ID NO: 5102325 - DNA, 25 bp, Homo sapien
acaatatgtgcctccagtgtttcca

SEQ ID NO: 5102326 - DNA, 25 bp, Homo sapien
atgctcagacttaagggactgaatc

SEQ ID NO: 5102327 - DNA, 25 bp, Homo sapien
tgcctctggtgttttactcgtataa

SEQ ID NO: 5102328 - DNA, 25 bp, Homo sapien
tataaatgcctaatttaagtcctcc

SEQ ID NO: 5102329 - DNA, 25 bp, Homo sapien
cagaagataatttcaatctgccctt

SEQ ID NO: 5102330 - DNA, 25 bp, Homo sapien
caaacttttcatcgtgatccttccc

SEQ ID NO: 5102331 - DNA, 25 bp, Homo sapien
cattccgaagtaggactgaaggcgc

SEQ ID NO: 5102332 - DNA, 25 bp, Homo sapien
gactgaaggcgcttgccctggtccc

SEQ ID NO: 5102333 - DNA, 25 bp, Homo sapien
tgttttcatggagttccaaatatgt

SEQ ID NO: 5102334 - DNA, 25 bp, Homo sapien
gatttttacagggagttgctgcatt

SEQ ID NO: 5102335 - DNA, 25 bp, Homo sapien
ctggatgcatgttctggatgagcaa

SEQ ID NO: 5102336 - DNA, 25 bp, Homo sapien
atgagcaacagcagcaattactcca

SEQ ID NO: 5102337 - DNA, 25 bp, Homo sapien
agcaacagcagcaattactccaggg

SEQ ID NO: 5102338 - DNA, 25 bp, Homo sapien
ggatgcatgttctggatgagcaaca

SEQ ID NO: 5102339 - DNA, 25 bp, Homo sapien
caaggcttcggcctgtacggccact

SEQ ID NO: 5102340 - DNA, 25 bp, Homo sapien
ggctccacaaggcttcggcctgtac

SEQ ID NO: 5102341 - DNA, 25 bp, Homo sapien
gacctcgtggatgccgcatagaatg

SEQ ID NO: 5102342 - DNA, 25 bp, Homo sapien
ccacagacctcgtggatgccgcata

SEQ ID NO: 5102343 - DNA, 25 bp, Homo sapien
ccccgccctgcgctttcgcctccga

SEQ ID NO: 5102344 - DNA, 25 bp, Homo sapien
ctgcgctttcgcctccgaggccacg

SEQ ID NO: 5102345 - DNA, 25 bp, Homo sapien
gccctgcgctttcgcctccgaggcc

SEQ ID NO: 5102346 - DNA, 25 bp, Homo sapien
tgcgctttcgcctccgaggccacgc

SEQ ID NO: 5102347 - DNA, 25 bp, Homo sapien
tctcccctccaagtcggcagcggca

SEQ ID NO: 5102348 - DNA, 25 bp, Homo sapien
ggtgggaatcttggcttagggtggc

SEQ ID NO: 5102349 - DNA, 25 bp, Homo sapien
aatcttggcttagggtggcactgcg

SEQ ID NO: 5102350 - DNA, 25 bp, Homo sapien
ctgaagaccccctacccacacagcg

SEQ ID NO: 5102351 - DNA, 25 bp, Homo sapien
agcgcagaccccctgactgcgcccc

SEQ ID NO: 5102352 - DNA, 25 bp, Homo sapien
agtatccataggacactccaaggac

SEQ ID NO: 5102353 - DNA, 25 bp, Homo sapien
aagatggtgactcctctgtttgtct

SEQ ID NO: 5102354 - DNA, 25 bp, Homo sapien
ctgctgatcagggacaatgacctct

SEQ ID NO: 5102355 - DNA, 25 bp, Homo sapien
gactccaaagtatccataggacact

SEQ ID NO: 5102356 - DNA, 25 bp, Homo sapien
tcaagagacttaaacagttggagaa

SEQ ID NO: 5102357 - DNA, 25 bp, Homo sapien
taaggcactatatcatgaaccactg

SEQ ID NO: 5102358 - DNA, 25 bp, Homo sapien
gagttcctcgaaagctcaagagact

SEQ ID NO: 5102359 - DNA, 25 bp, Homo sapien
tccaggggtaagataagtcagaaac

SEQ ID NO: 5102360 - DNA, 25 bp, Homo sapien
gatgaataaattggcctccttcctt

SEQ ID NO: 5102361 - DNA, 25 bp, Homo sapien
tcctcttggtcactcggatgaataa

SEQ ID NO: 5102362 - DNA, 25 bp, Homo sapien
taaatggcaccctatcatctctggg

SEQ ID NO: 5102363 - DNA, 25 bp, Homo sapien
ttccctaaagctccaatcctcttgg

SEQ ID NO: 5102364 - DNA, 25 bp, Homo sapien
tacttccaatttgtcagactccagg

SEQ ID NO: 5102365 - DNA, 25 bp, Homo sapien
tcctcttccaggtgcccttacttcc

SEQ ID NO: 5102366 - DNA, 25 bp, Homo sapien
tggactcctcttccaggtgccctta

SEQ ID NO: 5102367 - DNA, 25 bp, Homo sapien
gactccagggagacccctgttacca

SEQ ID NO: 5102368 - DNA, 25 bp, Homo sapien
ccagtaggaagctggcctgccgaag

SEQ ID NO: 5102369 - DNA, 25 bp, Homo sapien
ggacttgacccagtaggaagctggc

SEQ ID NO: 5102370 - DNA, 25 bp, Homo sapien
ctggcattttgaggacttgacccag

SEQ ID NO: 5102371 - DNA, 25 bp, Homo sapien
tggcctgccgaagcttgtgctgtcc

SEQ ID NO: 5102372 - DNA, 25 bp, Homo sapien
ctaacatctaagattccctttgcct

SEQ ID NO: 5102373 - DNA, 25 bp, Homo sapien
ttatccagacacagtttccttgggc

SEQ ID NO: 5102374 - DNA, 25 bp, Homo sapien
gtcagggtccttgacttttgaagat

SEQ ID NO: 5102375 - DNA, 25 bp, Homo sapien
tccttgggcagcatgtcagggtcct

SEQ ID NO: 5102376 - DNA, 25 bp, Homo sapien
gtttccttgggcagcatgtcagggt

SEQ ID NO: 5102377 - DNA, 25 bp, Homo sapien
gaagtaatagtgtcctgtatttcct

SEQ ID NO: 5102378 - DNA, 25 bp, Homo sapien
gggcgtcagcgagccctgtcttcgc

SEQ ID NO: 5102379 - DNA, 25 bp, Homo sapien
ctgtgggaagaggcgcgggcgaccg

SEQ ID NO: 5102380 - DNA, 25 bp, Homo sapien
ccttcgccggcgtggactcttccca

SEQ ID NO: 5102381 - DNA, 25 bp, Homo sapien
ccagaattccgaggcctgatgtggc

SEQ ID NO: 5102382 - DNA, 25 bp, Homo sapien
cctgatgtggcgtgtttccggtagc

SEQ ID NO: 5102383 - DNA, 25 bp, Homo sapien
tgaggtcacgagctgtccgtccgat

SEQ ID NO: 5102384 - DNA, 25 bp, Homo sapien
gtttccggtagctgggctcctcgga

SEQ ID NO: 5102385 - DNA, 25 bp, Homo sapien
gccttgtttgaccacggcgactcgt

SEQ ID NO: 5102386 - DNA, 25 bp, Homo sapien
tacttatgggtgaggatttacgcgc

SEQ ID NO: 5102387 - DNA, 25 bp, Homo sapien
tcattcctcgggttcggcagtacca

SEQ ID NO: 5102388 - DNA, 25 bp, Homo sapien
ccgccacgcgattggtatcgtagga

SEQ ID NO: 5102389 - DNA, 25 bp, Homo sapien
gctgctttccagatgatgactattc

SEQ ID NO: 5102390 - DNA, 25 bp, Homo sapien
gagctccattgtacaacatctactt

SEQ ID NO: 5102391 - DNA, 25 bp, Homo sapien
tttgagctgctttccagatgatgac

SEQ ID NO: 5102392 - DNA, 25 bp, Homo sapien
gagctgctttccagatgatgactat

SEQ ID NO: 5102393 - DNA, 25 bp, Homo sapien
tcttgcagacccccagcttataagt

SEQ ID NO: 5102394 - DNA, 25 bp, Homo sapien
tgcagacccccagcttataagtttc

SEQ ID NO: 5102395 - DNA, 25 bp, Homo sapien
ccttctcttgcagacccccagctta

SEQ ID NO: 5102396 - DNA, 25 bp, Homo sapien
ttctcttgcagacccccagcttata

SEQ ID NO: 5102397 - DNA, 25 bp, Homo sapien
gaagggctgcaacttccagtgggca

SEQ ID NO: 5102398 - DNA, 25 bp, Homo sapien
tccagacagcctgatgccacattgt

SEQ ID NO: 5102399 - DNA, 25 bp, Homo sapien
tgggcacccaagacttccagataag

SEQ ID NO: 5102400 - DNA, 25 bp, Homo sapien
gaccccacggataagaatgttcaag

SEQ ID NO: 5102401 - DNA, 25 bp, Homo sapien
tcacatggcagcaggaaagagcagt

SEQ ID NO: 5102402 - DNA, 25 bp, Homo sapien
ttcacatggcagcaggaaagagcag

SEQ ID NO: 5102403 - DNA, 25 bp, Homo sapien
cacatggcagcaggaaagagcagtg

SEQ ID NO: 5102404 - DNA, 25 bp, Homo sapien
cttcacatggcagcaggaaagagca

SEQ ID NO: 5102405 - DNA, 25 bp, Homo sapien
agaattggagacttagcaggctttg

SEQ ID NO: 5102406 - DNA, 25 bp, Homo sapien
gagaattggagacttagcaggcttt

SEQ ID NO: 5102407 - DNA, 25 bp, Homo sapien
gggagaattggagacttagcaggct

SEQ ID NO: 5102408 - DNA, 25 bp, Homo sapien
ggagaattggagacttagcaggctt

SEQ ID NO: 5102409 - DNA, 25 bp, Homo sapien
tcccatctcctgatacacactaggg

SEQ ID NO: 5102410 - DNA, 25 bp, Homo sapien
ggtgaggagagcacaaacatcagtc

SEQ ID NO: 5102411 - DNA, 25 bp, Homo sapien
tcttgcatagcagaaggagggccag

SEQ ID NO: 5102412 - DNA, 25 bp, Homo sapien
tagcaaagtcggtgtctgagggtcc

SEQ ID NO: 5102413 - DNA, 25 bp, Homo sapien
caggagaataccaggaggtatcttt

SEQ ID NO: 5102414 - DNA, 25 bp, Homo sapien
gaataccaggaggtatcttttgctt

SEQ ID NO: 5102415 - DNA, 25 bp, Homo sapien
gagaataccaggaggtatcttttgc

SEQ ID NO: 5102416 - DNA, 25 bp, Homo sapien
aataccaggaggtatcttttgcttt

SEQ ID NO: 5102417 - DNA, 25 bp, Homo sapien
ctcctgacagggttacatcatattg

SEQ ID NO: 5102418 - DNA, 25 bp, Homo sapien
gttttcacattacctcttccatgtc

SEQ ID NO: 5102419 - DNA, 25 bp, Homo sapien
tccctctgcctatctcttacaaaga

SEQ ID NO: 5102420 - DNA, 25 bp, Homo sapien
aagtatcactccaatattcgctttt

SEQ ID NO: 5102421 - DNA, 25 bp, Homo sapien
cagtgtgagcccaacggtttgatgc

SEQ ID NO: 5102422 - DNA, 25 bp, Homo sapien
caaaatagtgactttaaggaccacg

SEQ ID NO: 5102423 - DNA, 25 bp, Homo sapien
tacagacctgtttccctgaagtcca

SEQ ID NO: 5102424 - DNA, 25 bp, Homo sapien
cgtgcaagcacagatagaatgggct

SEQ ID NO: 5102425 - DNA, 25 bp, Homo sapien
gcactgttgccttcccgggatgaag

SEQ ID NO: 5102426 - DNA, 25 bp, Homo sapien
tcccgggatgaaggacatcaatgag

SEQ ID NO: 5102427 - DNA, 25 bp, Homo sapien
cgggatgaaggacatcaatgagcat

SEQ ID NO: 5102428 - DNA, 25 bp, Homo sapien
caccagcatgagttctgaatgcaaa

SEQ ID NO: 5102429 - DNA, 25 bp, Homo sapien
aatgtagtaatgctataatttcctg

SEQ ID NO: 5102430 - DNA, 25 bp, Homo sapien
tgtcaggcattccagaatgtagtaa

SEQ ID NO: 5102431 - DNA, 25 bp, Homo sapien
gccttcctaaacttattcttgtcag

SEQ ID NO: 5102432 - DNA, 25 bp, Homo sapien
ctccaagccttcctaaacttattct

SEQ ID NO: 5102433 - DNA, 25 bp, Homo sapien
ctctaacctcactctgagagtggca

SEQ ID NO: 5102434 - DNA, 25 bp, Homo sapien
taacctcactctgagagtggcagcc

SEQ ID NO: 5102435 - DNA, 25 bp, Homo sapien
tctaacctcactctgagagtggcag

SEQ ID NO: 5102436 - DNA, 25 bp, Homo sapien
ctaacctcactctgagagtggcagc

SEQ ID NO: 5102437 - DNA, 25 bp, Homo sapien
agtgatagagactgtcagctgaaaa

SEQ ID NO: 5102438 - DNA, 25 bp, Homo sapien
gtgatagagactgtcagctgaaaaa

SEQ ID NO: 5102439 - DNA, 25 bp, Homo sapien
catcagtcgtttcaaagctcgatcc

SEQ ID NO: 5102440 - DNA, 25 bp, Homo sapien
cagtgtcttctttaatgccagcaac

SEQ ID NO: 5102441 - DNA, 25 bp, Homo sapien
tgtctcttaggtgatgttcttcagt

SEQ ID NO: 5102442 - DNA, 25 bp, Homo sapien
tgtcttctttaatgccagcaacaaa

SEQ ID NO: 5102443 - DNA, 25 bp, Homo sapien
cttctttaatgccagcaacaaatac

SEQ ID NO: 5102444 - DNA, 25 bp, Homo sapien
caaggcataaaatgtatgcttatat

SEQ ID NO: 5102445 - DNA, 25 bp, Homo sapien
tcaaggcataaaatgtatgcttata

SEQ ID NO: 5102446 - DNA, 25 bp, Homo sapien
tacagatggaagtaattatggcatg

SEQ ID NO: 5102447 - DNA, 25 bp, Homo sapien
ctgagagtttactgttaaattgtct

SEQ ID NO: 5102448 - DNA, 25 bp, Homo sapien
taattatggcatgtgtgagttataa

SEQ ID NO: 5102449 - DNA, 25 bp, Homo sapien
gtttactgttaaattgtctacacca

SEQ ID NO: 5102450 - DNA, 25 bp, Homo sapien
tagcctcttgtctatcatattagaa

SEQ ID NO: 5102451 - DNA, 25 bp, Homo sapien
gcctgtcttttatatctctgagcat

SEQ ID NO: 5102452 - DNA, 25 bp, Homo sapien
gcctcttgtctatcatattagaagc

SEQ ID NO: 5102453 - DNA, 25 bp, Homo sapien
tttttagcctcttgtctatcatatt

SEQ ID NO: 5102454 - DNA, 25 bp, Homo sapien
ctaggctggatcccgagttcaagcg

SEQ ID NO: 5102455 - DNA, 25 bp, Homo sapien
cctaggctggatcccgagttcaagc

SEQ ID NO: 5102456 - DNA, 25 bp, Homo sapien
cacctaggctggatcccgagttcaa

SEQ ID NO: 5102457 - DNA, 25 bp, Homo sapien
acctaggctggatcccgagttcaag

SEQ ID NO: 5102458 - DNA, 25 bp, Homo sapien
gatgtgagctagtgacccaagtgtg

SEQ ID NO: 5102459 - DNA, 25 bp, Homo sapien
tccatggatgtgagctagtgaccca

SEQ ID NO: 5102460 - DNA, 25 bp, Homo sapien
gagctagtgacccaagtgtgttctt

SEQ ID NO: 5102461 - DNA, 25 bp, Homo sapien
catggatgtgagctagtgacccaag

SEQ ID NO: 5102462 - DNA, 25 bp, Homo sapien
tcctttggccctgatagccttgtta

SEQ ID NO: 5102463 - DNA, 25 bp, Homo sapien
cctgatagccttgttaagcctggta

SEQ ID NO: 5102464 - DNA, 25 bp, Homo sapien
tgtacatggtgtgggacattcctta

SEQ ID NO: 5102465 - DNA, 25 bp, Homo sapien
tgttttctgaacaatcgcacatgta

SEQ ID NO: 5102466 - DNA, 25 bp, Homo sapien
ggttaattagggtactcacgctgag

SEQ ID NO: 5102467 - DNA, 25 bp, Homo sapien
ggtgtgaatgcaatcccctagcaat

SEQ ID NO: 5102468 - DNA, 25 bp, Homo sapien
cacaagaagttttcagaggcagttc

SEQ ID NO: 5102469 - DNA, 25 bp, Homo sapien
tagtgtctcataaggcaagcacagg

SEQ ID NO: 5102470 - DNA, 25 bp, Homo sapien
cacggcatcttcttcaaacccaagg

SEQ ID NO: 5102471 - DNA, 25 bp, Homo sapien
cataagggagtgcagtgtgacattg

SEQ ID NO: 5102472 - DNA, 25 bp, Homo sapien
gatgtcttcttgtgcgtttaacagc

SEQ ID NO: 5102473 - DNA, 25 bp, Homo sapien
gcagggactacagttctcccataat

SEQ ID NO: 5102474 - DNA, 25 bp, Homo sapien
tcccttggccaggttgacacattag

SEQ ID NO: 5102475 - DNA, 25 bp, Homo sapien
tactcagcctctcaacagattggat

SEQ ID NO: 5102476 - DNA, 25 bp, Homo sapien
acccagttgagatccggtggtgcga

SEQ ID NO: 5102477 - DNA, 25 bp, Homo sapien
taaatctacccactgtcaacttggc

SEQ ID NO: 5102478 - DNA, 25 bp, Homo sapien
ttaaaggcacttagtcaagcactct

SEQ ID NO: 5102479 - DNA, 25 bp, Homo sapien
tttcatgaaagcaactaggcccctc

SEQ ID NO: 5102480 - DNA, 25 bp, Homo sapien
caaaagtttggcctaaacaatctgg

SEQ ID NO: 5102481 - DNA, 25 bp, Homo sapien
taggcccctctagcattgtggagaa

SEQ ID NO: 5102482 - DNA, 25 bp, Homo sapien
taactgactagcaccattatgatca

SEQ ID NO: 5102483 - DNA, 25 bp, Homo sapien
tatgatcaccagtattgtggctgga

SEQ ID NO: 5102484 - DNA, 25 bp, Homo sapien
tttgcctgaagttgtattgaaacaa

SEQ ID NO: 5102485 - DNA, 25 bp, Homo sapien
tctgggcttggtcttccagttggca

SEQ ID NO: 5102486 - DNA, 25 bp, Homo sapien
gaaattccagatgggtaagcagtgg

SEQ ID NO: 5102487 - DNA, 25 bp, Homo sapien
caagcagttcttcacctgtgtagag

SEQ ID NO: 5102488 - DNA, 25 bp, Homo sapien
gtacagaacgccaaatgatggaact

SEQ ID NO: 5102489 - DNA, 25 bp, Homo sapien
ttattaataggcctgacgtggtggc

SEQ ID NO: 5102490 - DNA, 25 bp, Homo sapien
tgactgacatgtctcgacctgtgga

SEQ ID NO: 5102491 - DNA, 25 bp, Homo sapien
gactttcacaaattacagggattca

SEQ ID NO: 5102492 - DNA, 25 bp, Homo sapien
aagggcattgaaatcttgactgaca

SEQ ID NO: 5102493 - DNA, 25 bp, Homo sapien
tacagggattcatccaaccatcatt

SEQ ID NO: 5102494 - DNA, 25 bp, Homo sapien
ggcaccacatcagtagtcatcattg

SEQ ID NO: 5102495 - DNA, 25 bp, Homo sapien
tcaggaatcatgttgcatcttcaaa

SEQ ID NO: 5102496 - DNA, 25 bp, Homo sapien
gctcaagatatagaagcaggagatg

SEQ ID NO: 5102497 - DNA, 25 bp, Homo sapien
tcagaaaggtgggtaggatgtactt

SEQ ID NO: 5102498 - DNA, 25 bp, Homo sapien
catattggagccgaaagcagttcaa

SEQ ID NO: 5102499 - DNA, 25 bp, Homo sapien
gatgatcgccaacccggagtatgga

SEQ ID NO: 5102500 - DNA, 25 bp, Homo sapien
cactagggatctgacgcttgagggc

SEQ ID NO: 5102501 - DNA, 25 bp, Homo sapien
tgtgctctgcgctctcatcgtgggc

SEQ ID NO: 5102502 - DNA, 25 bp, Homo sapien
taattcagctggagtaggtcaggag

SEQ ID NO: 5102503 - DNA, 25 bp, Homo sapien
taactcgtccctatatatggaggca

SEQ ID NO: 5102504 - DNA, 25 bp, Homo sapien
tatgctgcagatgaaataactcgtc

SEQ ID NO: 5102505 - DNA, 25 bp, Homo sapien
accaggagcctagggtaataaatct

SEQ ID NO: 5102506 - DNA, 25 bp, Homo sapien
ggaactcctcgggtggcacctctgg

SEQ ID NO: 5102507 - DNA, 25 bp, Homo sapien
agcgcattcagcagcccgctcaggg

SEQ ID NO: 5102508 - DNA, 25 bp, Homo sapien
ggatatagctggctccgtagcagct

SEQ ID NO: 5102509 - DNA, 25 bp, Homo sapien
tacccgtggaaagtgtcctgggcca

SEQ ID NO: 5102510 - DNA, 25 bp, Homo sapien
ggggcgacagaacgagcaaatctga

SEQ ID NO: 5102511 - DNA, 25 bp, Homo sapien
aaatctgaaggagcccgatgtggag

SEQ ID NO: 5102512 - DNA, 25 bp, Homo sapien
agaaggggcgacagaacgagcaaat

SEQ ID NO: 5102513 - DNA, 25 bp, Homo sapien
agcccgatgtggagcccacggagtg

SEQ ID NO: 5102514 - DNA, 25 bp, Homo sapien
atctgctgaggaaacgcgactgtta

SEQ ID NO: 5102515 - DNA, 25 bp, Homo sapien
gatctgctgaggaaacgcgactgtt

SEQ ID NO: 5102516 - DNA, 25 bp, Homo sapien
cctggacgatatggggagattctgt

SEQ ID NO: 5102517 - DNA, 25 bp, Homo sapien
aggctaaagagagagggttgcttaa

SEQ ID NO: 5102518 - DNA, 25 bp, Homo sapien
gagaccaccctggacgatatgggga

SEQ ID NO: 5102519 - DNA, 25 bp, Homo sapien
gaggctaaagagagagggttgctta

SEQ ID NO: 5102520 - DNA, 25 bp, Homo sapien
gcattggcaagccaatattccactg

SEQ ID NO: 5102521 - DNA, 25 bp, Homo sapien
tttatcagtgcattggcaagccaat

SEQ ID NO: 5102522 - DNA, 25 bp, Homo sapien
tggcaagccaatattccactgccac

SEQ ID NO: 5102523 - DNA, 25 bp, Homo sapien
tcagtgcattggcaagccaatattc

SEQ ID NO: 5102524 - DNA, 25 bp, Homo sapien
tttggcctcattacaggtcacctga

SEQ ID NO: 5102525 - DNA, 25 bp, Homo sapien
gcaattgctgctttatcatatgacg

SEQ ID NO: 5102526 - DNA, 25 bp, Homo sapien
tcccaggtgggtaatctgcaattgc

SEQ ID NO: 5102527 - DNA, 25 bp, Homo sapien
aagatttacaggacatttggcctca

SEQ ID NO: 5102528 - DNA, 25 bp, Homo sapien
ccagccactcctttaacccaagtca

SEQ ID NO: 5102529 - DNA, 25 bp, Homo sapien
ccaagtcaagtttccaggcccagaa

SEQ ID NO: 5102530 - DNA, 25 bp, Homo sapien
acccaagtcaagtttccaggcccag

SEQ ID NO: 5102531 - DNA, 25 bp, Homo sapien
agccactcctttaacccaagtcaag

SEQ ID NO: 5102532 - DNA, 25 bp, Homo sapien
aagggctataaaactgatcattttc

SEQ ID NO: 5102533 - DNA, 25 bp, Homo sapien
tgtatagtctgttactataataaaa

SEQ ID NO: 5102534 - DNA, 25 bp, Homo sapien
aaatattctacagaatacatcgaca

SEQ ID NO: 5102535 - DNA, 25 bp, Homo sapien
gtaacaaatatattcaaatccaaaa

SEQ ID NO: 5102536 - DNA, 25 bp, Homo sapien
gcagcaacgctactatgtgatcagc

SEQ ID NO: 5102537 - DNA, 25 bp, Homo sapien
gacccattcaacttgtctatcagca

SEQ ID NO: 5102538 - DNA, 25 bp, Homo sapien
aactttggcggctgccactgaaggc

SEQ ID NO: 5102539 - DNA, 25 bp, Homo sapien
ccatgagaactttgaggtcttcttc

SEQ ID NO: 5102540 - DNA, 25 bp, Homo sapien
aatgaagaatagaccaatctgagga

SEQ ID NO: 5102541 - DNA, 25 bp, Homo sapien
caagaataaggctagtccaagacac

SEQ ID NO: 5102542 - DNA, 25 bp, Homo sapien
tgaggaggatcataaaagcagcaag

SEQ ID NO: 5102543 - DNA, 25 bp, Homo sapien
agtgaaacaaggctgagataatgaa

SEQ ID NO: 5102544 - DNA, 25 bp, Homo sapien
gggtctgtaaaacataagtggtatc

SEQ ID NO: 5102545 - DNA, 25 bp, Homo sapien
agtggtatctgaatctcttggcaat

SEQ ID NO: 5102546 - DNA, 25 bp, Homo sapien
ggtatctgaatctcttggcaattca

SEQ ID NO: 5102547 - DNA, 25 bp, Homo sapien
aaacataagtggtatctgaatctct

SEQ ID NO: 5102548 - DNA, 25 bp, Homo sapien
tatattcgaatgcttccctgaaggc

SEQ ID NO: 5102549 - DNA, 25 bp, Homo sapien
ccactggactgggtaggaatttcca

SEQ ID NO: 5102550 - DNA, 25 bp, Homo sapien
gacgctaataggtgcatcaaaactg

SEQ ID NO: 5102551 - DNA, 25 bp, Homo sapien
tgaaggctcacaatcagctacaagc

SEQ ID NO: 5102552 - DNA, 25 bp, Homo sapien
ttctagttggtagaggagagccctc

SEQ ID NO: 5102553 - DNA, 25 bp, Homo sapien
ttacctgtaacaatcccactgggcc

SEQ ID NO: 5102554 - DNA, 25 bp, Homo sapien
taattaggtcaaggtcagaccctcc

SEQ ID NO: 5102555 - DNA, 25 bp, Homo sapien
gataccttgtgacaaagcctcctgg

SEQ ID NO: 5102556 - DNA, 25 bp, Homo sapien
aagccaacttgaaaggagcctacat

SEQ ID NO: 5102557 - DNA, 25 bp, Homo sapien
gcataagttcagtaagagtctttta

SEQ ID NO: 5102558 - DNA, 25 bp, Homo sapien
tgagttgtccaaaattcaaattgtg

SEQ ID NO: 5102559 - DNA, 25 bp, Homo sapien
ccaagactttgactaaaatagcata

SEQ ID NO: 5102560 - DNA, 25 bp, Homo sapien
tagtactataaaactgaaggcaggt

SEQ ID NO: 5102561 - DNA, 25 bp, Homo sapien
ttaccagaaaaggtagaatggtctg

SEQ ID NO: 5102562 - DNA, 25 bp, Homo sapien
gggaccagaacataaaaccatacag

SEQ ID NO: 5102563 - DNA, 25 bp, Homo sapien
gaaggcaggtaaatctgccctttga

SEQ ID NO: 5102564 - DNA, 25 bp, Homo sapien
tgccattggcagcaaaaaggccaac

SEQ ID NO: 5102565 - DNA, 25 bp, Homo sapien
gcagcaaaaaggccaacagaaccat

SEQ ID NO: 5102566 - DNA, 25 bp, Homo sapien
cattggcagcaaaaaggccaacaga

SEQ ID NO: 5102567 - DNA, 25 bp, Homo sapien
tggcagcaaaaaggccaacagaacc

SEQ ID NO: 5102568 - DNA, 25 bp, Homo sapien
tcccttatccaacttccctctggaa

SEQ ID NO: 5102569 - DNA, 25 bp, Homo sapien
aaagcccagctgtcattaaccctct

SEQ ID NO: 5102570 - DNA, 25 bp, Homo sapien
ccctctctccgtgggagtttcctgg

SEQ ID NO: 5102571 - DNA, 25 bp, Homo sapien
ctctccgtgggagtttcctggaatt

SEQ ID NO: 5102572 - DNA, 25 bp, Homo sapien
caatgacttcatgtacacctactat

SEQ ID NO: 5102573 - DNA, 25 bp, Homo sapien
taatcatcatgcaaggaaatttcca

SEQ ID NO: 5102574 - DNA, 25 bp, Homo sapien
tattactgccatattctgcatgcta

SEQ ID NO: 5102575 - DNA, 25 bp, Homo sapien
ccaactagtgtttcaattgggtatt

SEQ ID NO: 5102576 - DNA, 25 bp, Homo sapien
ttaatatacaaccaactagtgtttc

SEQ ID NO: 5102577 - DNA, 25 bp, Homo sapien
ggtattactgccatattctgcatgc

SEQ ID NO: 5102578 - DNA, 25 bp, Homo sapien
actagagcctttatacatgaagtcc

SEQ ID NO: 5102579 - DNA, 25 bp, Homo sapien
catttctcacaagtctgtgtaatta

SEQ ID NO: 5102580 - DNA, 25 bp, Homo sapien
tctgtgtaattagtcctctttttgc

SEQ ID NO: 5102581 - DNA, 25 bp, Homo sapien
cttctatttatctgatgacctagga

SEQ ID NO: 5102582 - DNA, 25 bp, Homo sapien
ctatagactatgtttggcaccaagc

SEQ ID NO: 5102583 - DNA, 25 bp, Homo sapien
tattagacttcatcaactggcccca

SEQ ID NO: 5102584 - DNA, 25 bp, Homo sapien
tagagcaatgctacccaaagtatgg

SEQ ID NO: 5102585 - DNA, 25 bp, Homo sapien
tgtggtgacaactactggaaaggct

SEQ ID NO: 5102586 - DNA, 25 bp, Homo sapien
aatttccatcaagtaagtgaactgg

SEQ ID NO: 5102587 - DNA, 25 bp, Homo sapien
caagtttccaagaacgtgctatgtc

SEQ ID NO: 5102588 - DNA, 25 bp, Homo sapien
tctccagtcacttaatgggaaccag

SEQ ID NO: 5102589 - DNA, 25 bp, Homo sapien
tacaacactgccaagttgaaagcac

SEQ ID NO: 5102590 - DNA, 25 bp, Homo sapien
aacatattgctggattgtaccaagg

SEQ ID NO: 5102591 - DNA, 25 bp, Homo sapien
tgtgcccagcgctatgattattctc

SEQ ID NO: 5102592 - DNA, 25 bp, Homo sapien
ttcagtgactaagttatagccagga

SEQ ID NO: 5102593 - DNA, 25 bp, Homo sapien
cacttacatcggaggtttttaatat

SEQ ID NO: 5102594 - DNA, 25 bp, Homo sapien
tcccaccatatcaagggtatgtgct

SEQ ID NO: 5102595 - DNA, 25 bp, Homo sapien
gataagcacctaattcatgacagtt

SEQ ID NO: 5102596 - DNA, 25 bp, Homo sapien
ttgcctcctggttagacaaaggtta

SEQ ID NO: 5102597 - DNA, 25 bp, Homo sapien
gagagttatgcgacacctccttgga

SEQ ID NO: 5102598 - DNA, 25 bp, Homo sapien
taaaacatatgagacgcaaaaaccg

SEQ ID NO: 5102599 - DNA, 25 bp, Homo sapien
caaaaaccgatagaactgcaaagta

SEQ ID NO: 5102600 - DNA, 25 bp, Homo sapien
gaagtatgctcttagacctcaatga

SEQ ID NO: 5102601 - DNA, 25 bp, Homo sapien
cacatggaacaacgaccaagacaga

SEQ ID NO: 5102602 - DNA, 25 bp, Homo sapien
tcttgtggctcttccagaatttgga

SEQ ID NO: 5102603 - DNA, 25 bp, Homo sapien
catgaggctctcacggatttttgtc

SEQ ID NO: 5102604 - DNA, 25 bp, Homo sapien
caagaatgcctccagctggttgaaa

SEQ ID NO: 5102605 - DNA, 25 bp, Homo sapien
cagcagcttggtcagatgtgatccc

SEQ ID NO: 5102606 - DNA, 25 bp, Homo sapien
agctgagtgccttgactgagacttg

SEQ ID NO: 5102607 - DNA, 25 bp, Homo sapien
cttgactgagacttgccatcaactc

SEQ ID NO: 5102608 - DNA, 25 bp, Homo sapien
cagctctataatggcaacaggtgtg

SEQ ID NO: 5102609 - DNA, 25 bp, Homo sapien
ctctataatggcaacaggtgtgtgt

SEQ ID NO: 5102610 - DNA, 25 bp, Homo sapien
ccaaggctaaagtgaagtgatccga

SEQ ID NO: 5102611 - DNA, 25 bp, Homo sapien
ctaaatagccgatataaatagctgg

SEQ ID NO: 5102612 - DNA, 25 bp, Homo sapien
tgagattacagaagcgagcaacctg

SEQ ID NO: 5102613 - DNA, 25 bp, Homo sapien
gctttctaggagtcttaaaacagat

SEQ ID NO: 5102614 - DNA, 25 bp, Homo sapien
tccataggtgaatcaaggcaatcct

SEQ ID NO: 5102615 - DNA, 25 bp, Homo sapien
taacatcacatggaggtttcaagga

SEQ ID NO: 5102616 - DNA, 25 bp, Homo sapien
tcccagtactgagatcccagaaatc

SEQ ID NO: 5102617 - DNA, 25 bp, Homo sapien
ccctgggatctcagtatcccagtac

SEQ ID NO: 5102618 - DNA, 25 bp, Homo sapien
tagaaacagacagcctgaacagctg

SEQ ID NO: 5102619 - DNA, 25 bp, Homo sapien
tgaacagctgaacgaagtccaacac

SEQ ID NO: 5102620 - DNA, 25 bp, Homo sapien
agctgaacgaagtccaacaccaggg

SEQ ID NO: 5102621 - DNA, 25 bp, Homo sapien
agaatagaaacagacagcctgaaca

SEQ ID NO: 5102622 - DNA, 25 bp, Homo sapien
tcttggcaatagagcagtggcatac

SEQ ID NO: 5102623 - DNA, 25 bp, Homo sapien
gggccagaggccttctacatttatc

SEQ ID NO: 5102624 - DNA, 25 bp, Homo sapien
gtcctcttaaggcttggcttcctgg

SEQ ID NO: 5102625 - DNA, 25 bp, Homo sapien
cactgttgccctgagtttaggacaa

SEQ ID NO: 5102626 - DNA, 25 bp, Homo sapien
tgaggagcctcatccaaaactggac

SEQ ID NO: 5102627 - DNA, 25 bp, Homo sapien
cctggactgtaagctgatgctataa

SEQ ID NO: 5102628 - DNA, 25 bp, Homo sapien
ggaattaccaacctgtgcccagctg

SEQ ID NO: 5102629 - DNA, 25 bp, Homo sapien
tcaaaaatggtgtgacgtaacgaca

SEQ ID NO: 5102630 - DNA, 25 bp, Homo sapien
tttaagtctagcaatgtcaggatcc

SEQ ID NO: 5102631 - DNA, 25 bp, Homo sapien
gaaagaaactgctacactatcccac

SEQ ID NO: 5102632 - DNA, 25 bp, Homo sapien
gaatgctacacctatacagtccaca

SEQ ID NO: 5102633 - DNA, 25 bp, Homo sapien
tcatctccctaaagaatacagtggc

SEQ ID NO: 5102634 - DNA, 25 bp, Homo sapien
ccctacccagtgatagttcagagaa

SEQ ID NO: 5102635 - DNA, 25 bp, Homo sapien
tttgtcaaaatcttcagttagaagg

SEQ ID NO: 5102636 - DNA, 25 bp, Homo sapien
tacagtttggataaagcattaaaaa

SEQ ID NO: 5102637 - DNA, 25 bp, Homo sapien
tattaaagtgtatcaagacttaccc

SEQ ID NO: 5102638 - DNA, 25 bp, Homo sapien
cattgcccagggagatctcggccac

SEQ ID NO: 5102639 - DNA, 25 bp, Homo sapien
gtatattgtgaaaacttctagagaa

SEQ ID NO: 5102640 - DNA, 25 bp, Homo sapien
tagtgtggatcttcaagcttagacc

SEQ ID NO: 5102641 - DNA, 25 bp, Homo sapien
accattaaatgagaggtgccatttc

SEQ ID NO: 5102642 - DNA, 25 bp, Homo sapien
cagttaaacttatcatgaatgccta

SEQ ID NO: 5102643 - DNA, 25 bp, Homo sapien
aaacttatttcaattgcctgagcag

SEQ ID NO: 5102644 - DNA, 25 bp, Homo sapien
aaccattctaccttgattgctacag

SEQ ID NO: 5102645 - DNA, 25 bp, Homo sapien
tacacatactctggctctctctcaa

SEQ ID NO: 5102646 - DNA, 25 bp, Homo sapien
cacaaacatagaactgggaatcctc

SEQ ID NO: 5102647 - DNA, 25 bp, Homo sapien
tacaagtaggtttcacttcacataa

SEQ ID NO: 5102648 - DNA, 25 bp, Homo sapien
cacataaattgttttcaagagaaac

SEQ ID NO: 5102649 - DNA, 25 bp, Homo sapien
gatattatgtctaatttcaccatga

SEQ ID NO: 5102650 - DNA, 25 bp, Homo sapien
tagggatattatgtctaatttcacc

SEQ ID NO: 5102651 - DNA, 25 bp, Homo sapien
tagatatcagtagcatgccccgagg

SEQ ID NO: 5102652 - DNA, 25 bp, Homo sapien
ccctcagacgtatggaatcagtagc

SEQ ID NO: 5102653 - DNA, 25 bp, Homo sapien
tggaatacctgagtaagtgctgcct

SEQ ID NO: 5102654 - DNA, 25 bp, Homo sapien
tttgaaatgttcacctagggcagag

SEQ ID NO: 5102655 - DNA, 25 bp, Homo sapien
tctagtgcaatcctaaagaaagatg

SEQ ID NO: 5102656 - DNA, 25 bp, Homo sapien
aaaggctagcttgtgtctatagtcc

SEQ ID NO: 5102657 - DNA, 25 bp, Homo sapien
gaaagatgtagctaaaaacccaaga

SEQ ID NO: 5102658 - DNA, 25 bp, Homo sapien
tagtagatctaaatccaaccatgtc

SEQ ID NO: 5102659 - DNA, 25 bp, Homo sapien
catgttgcctaagccggtctggaac

SEQ ID NO: 5102660 - DNA, 25 bp, Homo sapien
tcaccatgttgcctaagccggtctg

SEQ ID NO: 5102661 - DNA, 25 bp, Homo sapien
ccacaaccagctaatgtttctgtat

SEQ ID NO: 5102662 - DNA, 25 bp, Homo sapien
ctaatgtttctgtatttttcataga

SEQ ID NO: 5102663 - DNA, 25 bp, Homo sapien
ttatctggtggctacactgtgatca

SEQ ID NO: 5102664 - DNA, 25 bp, Homo sapien
gtgggaatttgatagggtaatcagc

SEQ ID NO: 5102665 - DNA, 25 bp, Homo sapien
gggaatttgatagggtaatcagcat

SEQ ID NO: 5102666 - DNA, 25 bp, Homo sapien
acactgtgatcagtgtgtttcttca

SEQ ID NO: 5102667 - DNA, 25 bp, Homo sapien
tcagaaatgaagatggcctgggacc

SEQ ID NO: 5102668 - DNA, 25 bp, Homo sapien
tctttttgggaactgtgcctctaac

SEQ ID NO: 5102669 - DNA, 25 bp, Homo sapien
gaataatcgagagccaacaatttag

SEQ ID NO: 5102670 - DNA, 25 bp, Homo sapien
aaccccaacttgcaacaggcatctg

SEQ ID NO: 5102671 - DNA, 25 bp, Homo sapien
tctagggccagggtagcggaactat

SEQ ID NO: 5102672 - DNA, 25 bp, Homo sapien
tagaggaacacaggcccagtgatgt

SEQ ID NO: 5102673 - DNA, 25 bp, Homo sapien
tgagcaagaagttgtgccacacact

SEQ ID NO: 5102674 - DNA, 25 bp, Homo sapien
tctaggaacttacaacagagtggtc

SEQ ID NO: 5102675 - DNA, 25 bp, Homo sapien
tatgcccagtcccacaattctttat

SEQ ID NO: 5102676 - DNA, 25 bp, Homo sapien
atgcccagtcccacaattctttatc

SEQ ID NO: 5102677 - DNA, 25 bp, Homo sapien
agacccagacttgggactgtcctaa

SEQ ID NO: 5102678 - DNA, 25 bp, Homo sapien
aggaacgccctactgtgtctatgga

SEQ ID NO: 5102679 - DNA, 25 bp, Homo sapien
taagaacgaatgcttgtagcagagc

SEQ ID NO: 5102680 - DNA, 25 bp, Homo sapien
cctgcttttactttgcgctgtggac

SEQ ID NO: 5102681 - DNA, 25 bp, Homo sapien
ccgcgcccggccacagaagagaaat

SEQ ID NO: 5102682 - DNA, 25 bp, Homo sapien
cgcccggccacagaagagaaatttt

SEQ ID NO: 5102683 - DNA, 25 bp, Homo sapien
agacagaatcttgctctgtatccca

SEQ ID NO: 5102684 - DNA, 25 bp, Homo sapien
acagaatcttgctctgtatcccagg

SEQ ID NO: 5102685 - DNA, 25 bp, Homo sapien
ccagctcatgtttcaacctcagagt

SEQ ID NO: 5102686 - DNA, 25 bp, Homo sapien
tcataaaagtcttcaaccaggtaca

SEQ ID NO: 5102687 - DNA, 25 bp, Homo sapien
gggctaccagtccagttgatactct

SEQ ID NO: 5102688 - DNA, 25 bp, Homo sapien
tattcaccaagtggagatatgcctc

SEQ ID NO: 5102689 - DNA, 25 bp, Homo sapien
gcagcagtatcctgcttcctcgatc

SEQ ID NO: 5102690 - DNA, 25 bp, Homo sapien
gctacctcctgatatcctgctgctg

SEQ ID NO: 5102691 - DNA, 25 bp, Homo sapien
cctaatggctacctcctgatatcct

SEQ ID NO: 5102692 - DNA, 25 bp, Homo sapien
gcttcctcgatcttcctaatggcta

SEQ ID NO: 5102693 - DNA, 25 bp, Homo sapien
tatctgcttaattgcccaggtctgc

SEQ ID NO: 5102694 - DNA, 25 bp, Homo sapien
ggcagaagccatatctggcctcacc

SEQ ID NO: 5102695 - DNA, 25 bp, Homo sapien
caccctcattgaacttgattttgaa

SEQ ID NO: 5102696 - DNA, 25 bp, Homo sapien
taatttacggggactgccaggataa

SEQ ID NO: 5102697 - DNA, 25 bp, Homo sapien
gcaaaattttcacaacgctttatcc

SEQ ID NO: 5102698 - DNA, 25 bp, Homo sapien
ggatgccttagaatttcactaacca

SEQ ID NO: 5102699 - DNA, 25 bp, Homo sapien
gtgacaaaatgcttaaactagaaaa

SEQ ID NO: 5102700 - DNA, 25 bp, Homo sapien
gcaatgttggctctaatgtcttgtg

SEQ ID NO: 5102701 - DNA, 25 bp, Homo sapien
tctatgtaggcaaagaaattaccag

SEQ ID NO: 5102702 - DNA, 25 bp, Homo sapien
caggaacaatattcatagagatagg

SEQ ID NO: 5102703 - DNA, 25 bp, Homo sapien
ggcaaagaaattaccaggaacaata

SEQ ID NO: 5102704 - DNA, 25 bp, Homo sapien
gagataggagcaactgagtaaggca

SEQ ID NO: 5102705 - DNA, 25 bp, Homo sapien
ttttttctcctgtgaatcttttgtc

SEQ ID NO: 5102706 - DNA, 25 bp, Homo sapien
ttttctcctgtgaatcttttgtcag

SEQ ID NO: 5102707 - DNA, 25 bp, Homo sapien
ctcctgtgaatcttttgtcagttta

SEQ ID NO: 5102708 - DNA, 25 bp, Homo sapien
ttctcctgtgaatcttttgtcagtt

SEQ ID NO: 5102709 - DNA, 25 bp, Homo sapien
tgactttgacctcatcaaattccaa

SEQ ID NO: 5102710 - DNA, 25 bp, Homo sapien
ctttgacctcatcaaattccaaaca

SEQ ID NO: 5102711 - DNA, 25 bp, Homo sapien
gactttgacctcatcaaattccaaa

SEQ ID NO: 5102712 - DNA, 25 bp, Homo sapien
tttgacctcatcaaattccaaacac

SEQ ID NO: 5102713 - DNA, 25 bp, Homo sapien
ttaggctggctgatcagtgtgctga

SEQ ID NO: 5102714 - DNA, 25 bp, Homo sapien
ggctggctgatcagtgtgctgatac

SEQ ID NO: 5102715 - DNA, 25 bp, Homo sapien
tcagttaggctggctgatcagtgtg

SEQ ID NO: 5102716 - DNA, 25 bp, Homo sapien
agttaggctggctgatcagtgtgct

SEQ ID NO: 5102717 - DNA, 25 bp, Homo sapien
caactccaactccttcatacatcat

SEQ ID NO: 5102718 - DNA, 25 bp, Homo sapien
cttggtttcaacaactccaactcct

SEQ ID NO: 5102719 - DNA, 25 bp, Homo sapien
aacaactccaactccttcatacatc

SEQ ID NO: 5102720 - DNA, 25 bp, Homo sapien
actccaactccttcatacatcatct

SEQ ID NO: 5102721 - DNA, 25 bp, Homo sapien
aaaaggtcagtggggagggatcatg

SEQ ID NO: 5102722 - DNA, 25 bp, Homo sapien
tagaaaaggtcagtggggagggatc

SEQ ID NO: 5102723 - DNA, 25 bp, Homo sapien
gaaaaggtcagtggggagggatcat

SEQ ID NO: 5102724 - DNA, 25 bp, Homo sapien
aaggtcagtggggagggatcatgga

SEQ ID NO: 5102725 - DNA, 25 bp, Homo sapien
ggatttaataccaatgcgggcacaa

SEQ ID NO: 5102726 - DNA, 25 bp, Homo sapien
atgcgaggatttaataccaatgcgg

SEQ ID NO: 5102727 - DNA, 25 bp, Homo sapien
aggatttaataccaatgcgggcaca

SEQ ID NO: 5102728 - DNA, 25 bp, Homo sapien
cgaggatttaataccaatgcgggca

SEQ ID NO: 5102729 - DNA, 25 bp, Homo sapien
cactgaagggtgagaacctctgcac

SEQ ID NO: 5102730 - DNA, 25 bp, Homo sapien
caagtaccccttataacatttatgc

SEQ ID NO: 5102731 - DNA, 25 bp, Homo sapien
gagcaacactccgaatttaataata

SEQ ID NO: 5102732 - DNA, 25 bp, Homo sapien
taacatttatgcacactgaagggtg

SEQ ID NO: 5102733 - DNA, 25 bp, Homo sapien
tagttcagatcaaaccagatgcccc

SEQ ID NO: 5102734 - DNA, 25 bp, Homo sapien
aatatgctagttgacagcctccgcc

SEQ ID NO: 5102735 - DNA, 25 bp, Homo sapien
gggagtccctttgttgtgaggccaa

SEQ ID NO: 5102736 - DNA, 25 bp, Homo sapien
cttgaggcaagtgaagggagtccct

SEQ ID NO: 5102737 - DNA, 25 bp, Homo sapien
ggctaacgggcaggaatctttctaa

SEQ ID NO: 5102738 - DNA, 25 bp, Homo sapien
tctaggatcgcacaggtagaaaacc

SEQ ID NO: 5102739 - DNA, 25 bp, Homo sapien
tacaaggtccagttcaggctgagat

SEQ ID NO: 5102740 - DNA, 25 bp, Homo sapien
aattaatacagccttcctggagagg

SEQ ID NO: 5102741 - DNA, 25 bp, Homo sapien
gatgtcagctatttaagatactcaa

SEQ ID NO: 5102742 - DNA, 25 bp, Homo sapien
tctaaatgttcactcaggtgtaaaa

SEQ ID NO: 5102743 - DNA, 25 bp, Homo sapien
aagatacttactgtacacttcagaa

SEQ ID NO: 5102744 - DNA, 25 bp, Homo sapien
taatgctggaactctttttgaatca

SEQ ID NO: 5102745 - DNA, 25 bp, Homo sapien
tgcatcctgtgaatcaacagaagtt

SEQ ID NO: 5102746 - DNA, 25 bp, Homo sapien
gcagtgaataatggttgcaccattg

SEQ ID NO: 5102747 - DNA, 25 bp, Homo sapien
tgttccacttgagtaatcaaattca

SEQ ID NO: 5102748 - DNA, 25 bp, Homo sapien
atgcctaattacagttcttggtgaa

SEQ ID NO: 5102749 - DNA, 25 bp, Homo sapien
actacccgggtgacagaatcattca

SEQ ID NO: 5102750 - DNA, 25 bp, Homo sapien
ggcacaggctgtggttaccccagta

SEQ ID NO: 5102751 - DNA, 25 bp, Homo sapien
tgcaagttgattctcccagggatgg

SEQ ID NO: 5102752 - DNA, 25 bp, Homo sapien
gtaccctaaagagagtagctcccag

SEQ ID NO: 5102753 - DNA, 25 bp, Homo sapien
cattggttgggctactttagagggc

SEQ ID NO: 5102754 - DNA, 25 bp, Homo sapien
taaacagggatgcatgttcaaggat

SEQ ID NO: 5102755 - DNA, 25 bp, Homo sapien
taatgtgctatgacactagtgatgg

SEQ ID NO: 5102756 - DNA, 25 bp, Homo sapien
catcgttacgcggagcatgactgta

SEQ ID NO: 5102757 - DNA, 25 bp, Homo sapien
tgcaggtagcgtggaaaggactttt

SEQ ID NO: 5102758 - DNA, 25 bp, Homo sapien
ctgcaggtagcgtggaaaggacttt

SEQ ID NO: 5102759 - DNA, 25 bp, Homo sapien
ccagaacaacgccgtatggacccct

SEQ ID NO: 5102760 - DNA, 25 bp, Homo sapien
ctttaagttacgatgggaatccaga

SEQ ID NO: 5102761 - DNA, 25 bp, Homo sapien
gttacgatgggaatccagaacaacg

SEQ ID NO: 5102762 - DNA, 25 bp, Homo sapien
cgatgggaatccagaacaacgccgt

SEQ ID NO: 5102763 - DNA, 25 bp, Homo sapien
gaacttaaggacatcctcctccttc

SEQ ID NO: 5102764 - DNA, 25 bp, Homo sapien
ttgcaggacatcaagggctccggac

SEQ ID NO: 5102765 - DNA, 25 bp, Homo sapien
ctcctccttcatttgcaggacatca

SEQ ID NO: 5102766 - DNA, 25 bp, Homo sapien
ctgcaaggaacttaaggacatcctc

SEQ ID NO: 5102767 - DNA, 25 bp, Homo sapien
caatggcaacaatagcacgagctgc

SEQ ID NO: 5102768 - DNA, 25 bp, Homo sapien
acaatagcacgagctgccagcagaa

SEQ ID NO: 5102769 - DNA, 25 bp, Homo sapien
ttcaatggcaacaatagcacgagct

SEQ ID NO: 5102770 - DNA, 25 bp, Homo sapien
tggcaacaatagcacgagctgccag

SEQ ID NO: 5102771 - DNA, 25 bp, Homo sapien
aactttagcacggccctctggccag

SEQ ID NO: 5102772 - DNA, 25 bp, Homo sapien
cagcaaactttagcacggccctctg

SEQ ID NO: 5102773 - DNA, 25 bp, Homo sapien
gcagcagcaaactttagcacggccc

SEQ ID NO: 5102774 - DNA, 25 bp, Homo sapien
gcaaactttagcacggccctctggc

SEQ ID NO: 5102775 - DNA, 25 bp, Homo sapien
cacaggaaatggtgccacgcatgcg

SEQ ID NO: 5102776 - DNA, 25 bp, Homo sapien
gacctcccatgggtgttcacaggaa

SEQ ID NO: 5102777 - DNA, 25 bp, Homo sapien
acctcccatgggtgttcacaggaaa

SEQ ID NO: 5102778 - DNA, 25 bp, Homo sapien
gcatgcgcagaacttcccgagccag

SEQ ID NO: 5102779 - DNA, 25 bp, Homo sapien
attcctccttggtcactgccttttc

SEQ ID NO: 5102780 - DNA, 25 bp, Homo sapien
tccttggtcactgccttttcagcag

SEQ ID NO: 5102781 - DNA, 25 bp, Homo sapien
tgctcttctctttcaatctcttcag

SEQ ID NO: 5102782 - DNA, 25 bp, Homo sapien
ctctgtagaagtacagatcaggcat

SEQ ID NO: 5102783 - DNA, 25 bp, Homo sapien
ctgagtaacagtgaactcaggagct

SEQ ID NO: 5102784 - DNA, 25 bp, Homo sapien
acctcaggctgagtaacagtgaact

SEQ ID NO: 5102785 - DNA, 25 bp, Homo sapien
agagggcacctgtacaccttcagac

SEQ ID NO: 5102786 - DNA, 25 bp, Homo sapien
agggcacctgtacaccttcagacca

SEQ ID NO: 5102787 - DNA, 25 bp, Homo sapien
tcttccgtggcaggctgagcgctcc

SEQ ID NO: 5102788 - DNA, 25 bp, Homo sapien
tccgtggcaggctgagcgctcccgt

SEQ ID NO: 5102789 - DNA, 25 bp, Homo sapien
taagaccagtcagtggttgctccta

SEQ ID NO: 5102790 - DNA, 25 bp, Homo sapien
ttaagaccagtcagtggttgctcct

SEQ ID NO: 5102791 - DNA, 25 bp, Homo sapien
tctccaggggcaatacgcgcataga

SEQ ID NO: 5102792 - DNA, 25 bp, Homo sapien
ccaggggcaatacgcgcatagagct

SEQ ID NO: 5102793 - DNA, 25 bp, Homo sapien
acggtctccaggggcaatacgcgca

SEQ ID NO: 5102794 - DNA, 25 bp, Homo sapien
ggcaatacgcgcatagagctgtcat

SEQ ID NO: 5102795 - DNA, 25 bp, Homo sapien
cttctcattgttccatcaggaacag

SEQ ID NO: 5102796 - DNA, 25 bp, Homo sapien
cattgttccatcaggaacagaaaat

SEQ ID NO: 5102797 - DNA, 25 bp, Homo sapien
tctcattgttccatcaggaacagaa

SEQ ID NO: 5102798 - DNA, 25 bp, Homo sapien
tcattgttccatcaggaacagaaaa

SEQ ID NO: 5102799 - DNA, 25 bp, Homo sapien
cccgcgcctggctgacaatacatgt

SEQ ID NO: 5102800 - DNA, 25 bp, Homo sapien
gagattggagttacgcaggcacaag

SEQ ID NO: 5102801 - DNA, 25 bp, Homo sapien
tcatactcaaataaggtgggccctt

SEQ ID NO: 5102802 - DNA, 25 bp, Homo sapien
tgccaagattgctggtgacaccaga

SEQ ID NO: 5102803 - DNA, 25 bp, Homo sapien
ataaagataaattgaatgtcatcaa

SEQ ID NO: 5102804 - DNA, 25 bp, Homo sapien
ccataaagataaattgaatgtcatc

SEQ ID NO: 5102805 - DNA, 25 bp, Homo sapien
cataaagataaattgaatgtcatca

SEQ ID NO: 5102806 - DNA, 25 bp, Homo sapien
tccataaagataaattgaatgtcat

SEQ ID NO: 5102807 - DNA, 25 bp, Homo sapien
cctggcaactgtctgaggttcggag

SEQ ID NO: 5102808 - DNA, 25 bp, Homo sapien
caagtctggctgaagaagggaggcc

SEQ ID NO: 5102809 - DNA, 25 bp, Homo sapien
ttctgcagtttcagcaggcttcccg

SEQ ID NO: 5102810 - DNA, 25 bp, Homo sapien
aagtcagacgccaaggacaacaggg

SEQ ID NO: 5102811 - DNA, 25 bp, Homo sapien
tgtattcagtaggttctccagaatc

SEQ ID NO: 5102812 - DNA, 25 bp, Homo sapien
cactgccagctgttgttttcatggg

SEQ ID NO: 5102813 - DNA, 25 bp, Homo sapien
ggagcagccaccatgtagcaatagt

SEQ ID NO: 5102814 - DNA, 25 bp, Homo sapien
tagcaatagtgagatggagatcggc

SEQ ID NO: 5102815 - DNA, 25 bp, Homo sapien
aacttgggcgctggcctgccttgaa

SEQ ID NO: 5102816 - DNA, 25 bp, Homo sapien
ggaaaaatgccccatcctgccaaaa

SEQ ID NO: 5102817 - DNA, 25 bp, Homo sapien
gtaaagtggactcgtgatggaagac

SEQ ID NO: 5102818 - DNA, 25 bp, Homo sapien
gtcctctagcagtataattggccca

SEQ ID NO: 5102819 - DNA, 25 bp, Homo sapien
tctgaagacaacttgcaaagatgtg

SEQ ID NO: 5102820 - DNA, 25 bp, Homo sapien
caaagatgtgataaagccagtgcta

SEQ ID NO: 5102821 - DNA, 25 bp, Homo sapien
gaaaaatagacatggccaaatgtgc

SEQ ID NO: 5102822 - DNA, 25 bp, Homo sapien
taagactccagttgatagctatcac

SEQ ID NO: 5102823 - DNA, 25 bp, Homo sapien
gagcacgtttttacctcctggcact

SEQ ID NO: 5102824 - DNA, 25 bp, Homo sapien
taattagaggtgtgtatgctaaccc

SEQ ID NO: 5102825 - DNA, 25 bp, Homo sapien
gatcctctaggctcaaattgtgtgt

SEQ ID NO: 5102826 - DNA, 25 bp, Homo sapien
gaccctctcggctgacaaataatta

SEQ ID NO: 5102827 - DNA, 25 bp, Homo sapien
catgagggctgcatttttaccactg

SEQ ID NO: 5102828 - DNA, 25 bp, Homo sapien
aataagtgctggctgatcaaatagc

SEQ ID NO: 5102829 - DNA, 25 bp, Homo sapien
tatctcctagttcagtgcctgtctg

SEQ ID NO: 5102830 - DNA, 25 bp, Homo sapien
cacaagaattgtgagccatgagggc

SEQ ID NO: 5102831 - DNA, 25 bp, Homo sapien
cgggacccagccctcagacttaagg

SEQ ID NO: 5102832 - DNA, 25 bp, Homo sapien
taggacagctgagagatagctgtgt

SEQ ID NO: 5102833 - DNA, 25 bp, Homo sapien
cgttactagtaggacagctgagaga

SEQ ID NO: 5102834 - DNA, 25 bp, Homo sapien
cttggtcgttactagtaggacagct

SEQ ID NO: 5102835 - DNA, 25 bp, Homo sapien
cgacagtcggcagtcagggaaatca

SEQ ID NO: 5102836 - DNA, 25 bp, Homo sapien
tccaaagggttctgacgccatcatc

SEQ ID NO: 5102837 - DNA, 25 bp, Homo sapien
tcacttggcaaaatcgtcttacagc

SEQ ID NO: 5102838 - DNA, 25 bp, Homo sapien
taggatccagtgacttacgaaactc

SEQ ID NO: 5102839 - DNA, 25 bp, Homo sapien
cacgacccagagtggtgccctgctt

SEQ ID NO: 5102840 - DNA, 25 bp, Homo sapien
gatcctctggcttatgaagccgtcc

SEQ ID NO: 5102841 - DNA, 25 bp, Homo sapien
tggtgccctgcttggtactgccact

SEQ ID NO: 5102842 - DNA, 25 bp, Homo sapien
ttgctccacctcttaggtgctcacg

SEQ ID NO: 5102843 - DNA, 25 bp, Homo sapien
gctctgctagcctccggcacttgtt

SEQ ID NO: 5102844 - DNA, 25 bp, Homo sapien
gggagatcgcggccacatccacgtc

SEQ ID NO: 5102845 - DNA, 25 bp, Homo sapien
ggcggcagggactgctccggcttgg

SEQ ID NO: 5102846 - DNA, 25 bp, Homo sapien
cggcccggcggtgtcggcggcaggg

SEQ ID NO: 5102847 - DNA, 25 bp, Homo sapien
gaggccggcgcagtgcgagggtggg

SEQ ID NO: 5102848 - DNA, 25 bp, Homo sapien
tgatctccccatgcggcacgggagg

SEQ ID NO: 5102849 - DNA, 25 bp, Homo sapien
gcacggaatgggttgggaggttcca

SEQ ID NO: 5102850 - DNA, 25 bp, Homo sapien
tgcgagcgaggaatcacgcgcgccc

SEQ ID NO: 5102851 - DNA, 25 bp, Homo sapien
gggagccggagacagaagtggcaga

SEQ ID NO: 5102852 - DNA, 25 bp, Homo sapien
tcaacgcaaacagtgtggaatattt

SEQ ID NO: 5102853 - DNA, 25 bp, Homo sapien
tcattcaacgcaaacagtgtggaat

SEQ ID NO: 5102854 - DNA, 25 bp, Homo sapien
ttgggggagccggagacagaagtgg

SEQ ID NO: 5102855 - DNA, 25 bp, Homo sapien
aattctgaagcacaaataaactgca

SEQ ID NO: 5102856 - DNA, 25 bp, Homo sapien
caaaaaaaattctgaagcacaaata

SEQ ID NO: 5102857 - DNA, 25 bp, Homo sapien
aaaaattctgaagcacaaataaact

SEQ ID NO: 5102858 - DNA, 25 bp, Homo sapien
tctgaagcacaaataaactgcagca

SEQ ID NO: 5102859 - DNA, 25 bp, Homo sapien
catgggcgcaattggatacacagtc

SEQ ID NO: 5102860 - DNA, 25 bp, Homo sapien
ggcttgtccatatgccatgggcgca

SEQ ID NO: 5102861 - DNA, 25 bp, Homo sapien
tgagcacgtccaagctgatccttga

SEQ ID NO: 5102862 - DNA, 25 bp, Homo sapien
ctagtgcccacccattagctgagtg

SEQ ID NO: 5102863 - DNA, 25 bp, Homo sapien
gttggataaggaccacccagtctta

SEQ ID NO: 5102864 - DNA, 25 bp, Homo sapien
cagtcttaggctcctggtaccaccg

SEQ ID NO: 5102865 - DNA, 25 bp, Homo sapien
gctgtaggaagcaatgatctgggtt

SEQ ID NO: 5102866 - DNA, 25 bp, Homo sapien
gaccacccagtcttaggctcctggt

SEQ ID NO: 5102867 - DNA, 25 bp, Homo sapien
tattcttcaaataaacacatacaga

SEQ ID NO: 5102868 - DNA, 25 bp, Homo sapien
aagtattcttcaaataaacacatac

SEQ ID NO: 5102869 - DNA, 25 bp, Homo sapien
gtattcttcaaataaacacatacag

SEQ ID NO: 5102870 - DNA, 25 bp, Homo sapien
ttcttcaaataaacacatacagaac

SEQ ID NO: 5102871 - DNA, 25 bp, Homo sapien
tctccagtctgtaagtcacagaact

SEQ ID NO: 5102872 - DNA, 25 bp, Homo sapien
tgtcagctagatttaaggaatttgg

SEQ ID NO: 5102873 - DNA, 25 bp, Homo sapien
gaactattgtcagctagatttaagg

SEQ ID NO: 5102874 - DNA, 25 bp, Homo sapien
agtcacagaactattgtcagctaga

SEQ ID NO: 5102875 - DNA, 25 bp, Homo sapien
ttccaggttctgctcggataaacag

SEQ ID NO: 5102876 - DNA, 25 bp, Homo sapien
agagacagagacagtttgcagctaa

SEQ ID NO: 5102877 - DNA, 25 bp, Homo sapien
cagagacagtttgcagctaaatggc

SEQ ID NO: 5102878 - DNA, 25 bp, Homo sapien
catctgttgcctagtccttgccagc

SEQ ID NO: 5102879 - DNA, 25 bp, Homo sapien
tctggcaagagtggtttacctaagt

SEQ ID NO: 5102880 - DNA, 25 bp, Homo sapien
gcaagagtggtttacctaagtcctc

SEQ ID NO: 5102881 - DNA, 25 bp, Homo sapien
cagaggagcacgttcactctgccct

SEQ ID NO: 5102882 - DNA, 25 bp, Homo sapien
aggccagaggagcacgttcactctg

SEQ ID NO: 5102883 - DNA, 25 bp, Homo sapien
tatcccgatgaggtccagcattgtg

SEQ ID NO: 5102884 - DNA, 25 bp, Homo sapien
gcttatattggagagcctgcccgcc

SEQ ID NO: 5102885 - DNA, 25 bp, Homo sapien
gagtgagggacttaatcgccagcaa

SEQ ID NO: 5102886 - DNA, 25 bp, Homo sapien
tcaggtcaggttcgcagtagttcag

SEQ ID NO: 5102887 - DNA, 25 bp, Homo sapien
taaatgagcactctgcaactgagac

SEQ ID NO: 5102888 - DNA, 25 bp, Homo sapien
aaatgagcactctgcaactgagacc

SEQ ID NO: 5102889 - DNA, 25 bp, Homo sapien
gagcactctgcaactgagaccaaat

SEQ ID NO: 5102890 - DNA, 25 bp, Homo sapien
ttttaaatgagcactctgcaactga

SEQ ID NO: 5102891 - DNA, 25 bp, Homo sapien
gccggtaagatcagaaccaatcatc

SEQ ID NO: 5102892 - DNA, 25 bp, Homo sapien
tcacgtgagtaccaaattgaagggt

SEQ ID NO: 5102893 - DNA, 25 bp, Homo sapien
taaaaatgaccactagccggtaaga

SEQ ID NO: 5102894 - DNA, 25 bp, Homo sapien
ttagaggccctcaaatgggtatcac

SEQ ID NO: 5102895 - DNA, 25 bp, Homo sapien
taacaaagtctttgtagccaatagg

SEQ ID NO: 5102896 - DNA, 25 bp, Homo sapien
ctggataatgtttaacaaagtcttt

SEQ ID NO: 5102897 - DNA, 25 bp, Homo sapien
caaagtctttgtagccaataggttt

SEQ ID NO: 5102898 - DNA, 25 bp, Homo sapien
ttaacaaagtctttgtagccaatag

SEQ ID NO: 5102899 - DNA, 25 bp, Homo sapien
tacactatgataccaccaggaaacc

SEQ ID NO: 5102900 - DNA, 25 bp, Homo sapien
gataaattagatgagtgtcacacca

SEQ ID NO: 5102901 - DNA, 25 bp, Homo sapien
aacacgatatggttgttagcggcaa

SEQ ID NO: 5102902 - DNA, 25 bp, Homo sapien
tcagttggccattaaggaatcacac

SEQ ID NO: 5102903 - DNA, 25 bp, Homo sapien
gaaagtatgttacacaatagtacat

SEQ ID NO: 5102904 - DNA, 25 bp, Homo sapien
cccatctgataagaaccttcaattc

SEQ ID NO: 5102905 - DNA, 25 bp, Homo sapien
tacatataagtaatagtttggcaga

SEQ ID NO: 5102906 - DNA, 25 bp, Homo sapien
cattgtttatagtccccagtatccc

SEQ ID NO: 5102907 - DNA, 25 bp, Homo sapien
gcagttccatccgtgagatggggga

SEQ ID NO: 5102908 - DNA, 25 bp, Homo sapien
cagttccatccgtgagatgggggat

SEQ ID NO: 5102909 - DNA, 25 bp, Homo sapien
aacccatattgtgggcaccaagaga

SEQ ID NO: 5102910 - DNA, 25 bp, Homo sapien
gggatcaggtgagaacccatattgt

SEQ ID NO: 5102911 - DNA, 25 bp, Homo sapien
cccagcacacgatggggagaaggct

SEQ ID NO: 5102912 - DNA, 25 bp, Homo sapien
aacatccggcactgtattaatggac

SEQ ID NO: 5102913 - DNA, 25 bp, Homo sapien
cacgggatgtgggttacaggaagac

SEQ ID NO: 5102914 - DNA, 25 bp, Homo sapien
ttcattttgtgaaagacgggaaaca

SEQ ID NO: 5102915 - DNA, 25 bp, Homo sapien
gccccttcacggaggtggactcaag

SEQ ID NO: 5102916 - DNA, 25 bp, Homo sapien
ggtatgaagggccaacagccccttc

SEQ ID NO: 5102917 - DNA, 25 bp, Homo sapien
ggagggcgcccacagagataactct

SEQ ID NO: 5102918 - DNA, 25 bp, Homo sapien
cctagaagggttctcctggtatgaa

SEQ ID NO: 5102919 - DNA, 25 bp, Homo sapien
ggtgtctgtggacgagccccagagg

SEQ ID NO: 5102920 - DNA, 25 bp, Homo sapien
tgggcatggtcaggtgtctgtggac

SEQ ID NO: 5102921 - DNA, 25 bp, Homo sapien
gggcatggtcaggtgtctgtggacg

SEQ ID NO: 5102922 - DNA, 25 bp, Homo sapien
gccacattttgcagtgagattggaa

SEQ ID NO: 5102923 - DNA, 25 bp, Homo sapien
gagccccagagggtcgtgagtcaaa

SEQ ID NO: 5102924 - DNA, 25 bp, Homo sapien
gcccagttcggtttcctgcaagcct

SEQ ID NO: 5102925 - DNA, 25 bp, Homo sapien
ggcacctgttgcctgattgccgaat

SEQ ID NO: 5102926 - DNA, 25 bp, Homo sapien
gcctcctggttgactgcagctcgga

SEQ ID NO: 5102927 - DNA, 25 bp, Homo sapien
actgcagctcggaagcaggtaggtc

SEQ ID NO: 5102928 - DNA, 25 bp, Homo sapien
cctggttgactgcagctcggaagca

SEQ ID NO: 5102929 - DNA, 25 bp, Homo sapien
ttgactgcagctcggaagcaggtag

SEQ ID NO: 5102930 - DNA, 25 bp, Homo sapien
ccccatacgctgatgagaagaacgg

SEQ ID NO: 5102931 - DNA, 25 bp, Homo sapien
ttgagtaatagtaggctcctcctcc

SEQ ID NO: 5102932 - DNA, 25 bp, Homo sapien
tacgctgatgagaagaacggagctc

SEQ ID NO: 5102933 - DNA, 25 bp, Homo sapien
acccaaccccatacgctgatgagaa

SEQ ID NO: 5102934 - DNA, 25 bp, Homo sapien
acttagatttttggcctaacgcagg

SEQ ID NO: 5102935 - DNA, 25 bp, Homo sapien
aaggtgttccctgcttcctaagtct

SEQ ID NO: 5102936 - DNA, 25 bp, Homo sapien
acagctgaagaaaggtgttccctgc

SEQ ID NO: 5102937 - DNA, 25 bp, Homo sapien
gggtcttcggaccgacactgaacac

SEQ ID NO: 5102938 - DNA, 25 bp, Homo sapien
aacccaggcatgatgcttatgaact

SEQ ID NO: 5102939 - DNA, 25 bp, Homo sapien
gctcacatgggaacgcgaaaaccca

SEQ ID NO: 5102940 - DNA, 25 bp, Homo sapien
tcacatgggaacgcgaaaacccagg

SEQ ID NO: 5102941 - DNA, 25 bp, Homo sapien
agctcacatgggaacgcgaaaaccc

SEQ ID NO: 5102942 - DNA, 25 bp, Homo sapien
tcaggagacaaggttactaaccaag

SEQ ID NO: 5102943 - DNA, 25 bp, Homo sapien
gaacaggttagacatgatattcaag

SEQ ID NO: 5102944 - DNA, 25 bp, Homo sapien
taaccaagagttaaggacatattca

SEQ ID NO: 5102945 - DNA, 25 bp, Homo sapien
taggcatactgagtggaacaggtta

SEQ ID NO: 5102946 - DNA, 25 bp, Homo sapien
tggcaccatctctaattgctgcaaa

SEQ ID NO: 5102947 - DNA, 25 bp, Homo sapien
gcaccatctctaattgctgcaaact

SEQ ID NO: 5102948 - DNA, 25 bp, Homo sapien
aatggcaccatctctaattgctgca

SEQ ID NO: 5102949 - DNA, 25 bp, Homo sapien
caatggcaccatctctaattgctgc

SEQ ID NO: 5102950 - DNA, 25 bp, Homo sapien
ttcagagaaatgaggagagccctgg

SEQ ID NO: 5102951 - DNA, 25 bp, Homo sapien
aatgtaatcgccaggtagcagggac

SEQ ID NO: 5102952 - DNA, 25 bp, Homo sapien
ggccttcagagaaatgaggagagcc

SEQ ID NO: 5102953 - DNA, 25 bp, Homo sapien
gaggcaagaagccttctgccttgac

SEQ ID NO: 5102954 - DNA, 25 bp, Homo sapien
ccccagaccactgacgtgatggtat

SEQ ID NO: 5102955 - DNA, 25 bp, Homo sapien
cagagggcaggaatacaactgctcc

SEQ ID NO: 5102956 - DNA, 25 bp, Homo sapien
aaagtgaccattgaaagagcctcca

SEQ ID NO: 5102957 - DNA, 25 bp, Homo sapien
gagaagcatcctgggagacctcatt

SEQ ID NO: 5102958 - DNA, 25 bp, Homo sapien
caaagccgccctgagggaatgctaa

SEQ ID NO: 5102959 - DNA, 25 bp, Homo sapien
ggctccggaaaccacagcatgtctg

SEQ ID NO: 5102960 - DNA, 25 bp, Homo sapien
ttggaaatgggacacgttagcccta

SEQ ID NO: 5102961 - DNA, 25 bp, Homo sapien
actccaaagcgagcccagagcagat

SEQ ID NO: 5102962 - DNA, 25 bp, Homo sapien
tcaacactgcctccgctgataaagc

SEQ ID NO: 5102963 - DNA, 25 bp, Homo sapien
tctctgggctattctccactgtgct

SEQ ID NO: 5102964 - DNA, 25 bp, Homo sapien
ggcagggcccaagtatctcatcaac

SEQ ID NO: 5102965 - DNA, 25 bp, Homo sapien
tccgctgataaagccttcctggact

SEQ ID NO: 5102966 - DNA, 25 bp, Homo sapien
tgttgtgaggcaagaagcctccgct

SEQ ID NO: 5102967 - DNA, 25 bp, Homo sapien
gaagcctccgctgttctggaggaag

SEQ ID NO: 5102968 - DNA, 25 bp, Homo sapien
tcgcaggccgcctgttgtgaggcaa

SEQ ID NO: 5102969 - DNA, 25 bp, Homo sapien
catgttgggcagcattcgcaggccg

SEQ ID NO: 5102970 - DNA, 25 bp, Homo sapien
tgtagcacagaccacaggtacgtga

SEQ ID NO: 5102971 - DNA, 25 bp, Homo sapien
ccacaggtacgtgagaaaagtggca

SEQ ID NO: 5102972 - DNA, 25 bp, Homo sapien
gagaaaagtggcagtccagtcagac

SEQ ID NO: 5102973 - DNA, 25 bp, Homo sapien
gaaaagtggcagtccagtcagacac

SEQ ID NO: 5102974 - DNA, 25 bp, Homo sapien
aaaaaatgactcaggtgacagcagg

SEQ ID NO: 5102975 - DNA, 25 bp, Homo sapien
gtagccaacatctgaccgagactcg

SEQ ID NO: 5102976 - DNA, 25 bp, Homo sapien
acatcagagatgtgaaacggccgtg

SEQ ID NO: 5102977 - DNA, 25 bp, Homo sapien
gacagcaggctaatcatgtcatcct

SEQ ID NO: 5102978 - DNA, 25 bp, Homo sapien
tctggctgccgaatcaagagcttgg

SEQ ID NO: 5102979 - DNA, 25 bp, Homo sapien
tgccgaatcaagagcttgggttttt

SEQ ID NO: 5102980 - DNA, 25 bp, Homo sapien
aatcaagagcttgggttttttcagt

SEQ ID NO: 5102981 - DNA, 25 bp, Homo sapien
acagtctggctgccgaatcaagagc

SEQ ID NO: 5102982 - DNA, 25 bp, Homo sapien
tggcaataatgccagtgggcacggt

SEQ ID NO: 5102983 - DNA, 25 bp, Homo sapien
ggccctgcttgagaaacctgtgtct

SEQ ID NO: 5102984 - DNA, 25 bp, Homo sapien
gctgagggccctgcttgagaaacct

SEQ ID NO: 5102985 - DNA, 25 bp, Homo sapien
tgtctccaccacactttcggcctca

SEQ ID NO: 5102986 - DNA, 25 bp, Homo sapien
caagagtcgcagacaagctcaaggg

SEQ ID NO: 5102987 - DNA, 25 bp, Homo sapien
ggtcagcagggcagctcgcctcaca

SEQ ID NO: 5102988 - DNA, 25 bp, Homo sapien
cacagcttcatttggacaagagtcg

SEQ ID NO: 5102989 - DNA, 25 bp, Homo sapien
cattgcacttcagtgcagagcctgg

SEQ ID NO: 5102990 - DNA, 25 bp, Homo sapien
atatttcctactggctatgccctcc

SEQ ID NO: 5102991 - DNA, 25 bp, Homo sapien
tctctgcccttgccaacgcagctgc

SEQ ID NO: 5102992 - DNA, 25 bp, Homo sapien
ttctctgcccttgccaacgcagctg

SEQ ID NO: 5102993 - DNA, 25 bp, Homo sapien
ctctgcccttgccaacgcagctgct

SEQ ID NO: 5102994 - DNA, 25 bp, Homo sapien
cctagtagctctatcagtattcatt

SEQ ID NO: 5102995 - DNA, 25 bp, Homo sapien
tatgatttcactattttttggcctg

SEQ ID NO: 5102996 - DNA, 25 bp, Homo sapien
tattccactacgctgagatttttgc

SEQ ID NO: 5102997 - DNA, 25 bp, Homo sapien
gagttaacacttactataattgggc

SEQ ID NO: 5102998 - DNA, 25 bp, Homo sapien
acaacagtgttggatggagctcatg

SEQ ID NO: 5102999 - DNA, 25 bp, Homo sapien
gaaaacacgtgataaggagcttgga

SEQ ID NO: 5103000 - DNA, 25 bp, Homo sapien
caaatctgcctaaggagagcccatc

SEQ ID NO: 5103001 - DNA, 25 bp, Homo sapien
tggagcctctaaaaagcctttcagg

SEQ ID NO: 5103002 - DNA, 25 bp, Homo sapien
actacagccttaagctcccaggatc

SEQ ID NO: 5103003 - DNA, 25 bp, Homo sapien
tagaacataagacatttgtctttcc

SEQ ID NO: 5103004 - DNA, 25 bp, Homo sapien
acagccttaagctcccaggatcaaa

SEQ ID NO: 5103005 - DNA, 25 bp, Homo sapien
cacatatgagttagaacataagaca

SEQ ID NO: 5103006 - DNA, 25 bp, Homo sapien
agagcccagaagttgggatctggtt

SEQ ID NO: 5103007 - DNA, 25 bp, Homo sapien
cccagaagttgggatctggttctga

SEQ ID NO: 5103008 - DNA, 25 bp, Homo sapien
tccctgtgcttgaagcaaagccagg

SEQ ID NO: 5103009 - DNA, 25 bp, Homo sapien
cagtgctccccatccctgtgcttga

SEQ ID NO: 5103010 - DNA, 25 bp, Homo sapien
tgccatggatagcatctgccaggac

SEQ ID NO: 5103011 - DNA, 25 bp, Homo sapien
ctgccatggatagcatctgccagga

SEQ ID NO: 5103012 - DNA, 25 bp, Homo sapien
actgccatggatagcatctgccagg

SEQ ID NO: 5103013 - DNA, 25 bp, Homo sapien
cagacttagtgttgaaagctcaggg

SEQ ID NO: 5103014 - DNA, 25 bp, Homo sapien
gggtacagtcattgccaggacttca

SEQ ID NO: 5103015 - DNA, 25 bp, Homo sapien
tgtctggccaagagacatgcttgga

SEQ ID NO: 5103016 - DNA, 25 bp, Homo sapien
cttggagattgaccacatttcaggt

SEQ ID NO: 5103017 - DNA, 25 bp, Homo sapien
tcatcagtggtaccattctacttgg

SEQ ID NO: 5103018 - DNA, 25 bp, Homo sapien
atcagtggtaccattctacttgggt

SEQ ID NO: 5103019 - DNA, 25 bp, Homo sapien
catcagtggtaccattctacttggg

SEQ ID NO: 5103020 - DNA, 25 bp, Homo sapien
tggtcctctgagtggaacatcaagg

SEQ ID NO: 5103021 - DNA, 25 bp, Homo sapien
catcaaggtcttgtagccacttttc

SEQ ID NO: 5103022 - DNA, 25 bp, Homo sapien
ctgagtggaacatcaaggtcttgta

SEQ ID NO: 5103023 - DNA, 25 bp, Homo sapien
tcaaggtcttgtagccacttttcct

SEQ ID NO: 5103024 - DNA, 25 bp, Homo sapien
accccagggcccgatatcccaatgt

SEQ ID NO: 5103025 - DNA, 25 bp, Homo sapien
gggagttgtcaagaacttcactcat

SEQ ID NO: 5103026 - DNA, 25 bp, Homo sapien
ggcccgatatcccaatgtccacctg

SEQ ID NO: 5103027 - DNA, 25 bp, Homo sapien
tgtccacctgatgtctggcaaaaaa

SEQ ID NO: 5103028 - DNA, 25 bp, Homo sapien
ctggccaatacaacagatgtcaaaa

SEQ ID NO: 5103029 - DNA, 25 bp, Homo sapien
caggaggagacttctccttcgtccc

SEQ ID NO: 5103030 - DNA, 25 bp, Homo sapien
aggagacttctccttcgtcccttct

SEQ ID NO: 5103031 - DNA, 25 bp, Homo sapien
ggccaatacaacagatgtcaaaagc

SEQ ID NO: 5103032 - DNA, 25 bp, Homo sapien
tttactccccgagtctgtttcctca

SEQ ID NO: 5103033 - DNA, 25 bp, Homo sapien
tcatctctaaggctgtcatcactac

SEQ ID NO: 5103034 - DNA, 25 bp, Homo sapien
cctcatctctaaggctgtcatcact

SEQ ID NO: 5103035 - DNA, 25 bp, Homo sapien
tcctcatctctaaggctgtcatcac

SEQ ID NO: 5103036 - DNA, 25 bp, Homo sapien
catggcagcatttcacggggacgaa

SEQ ID NO: 5103037 - DNA, 25 bp, Homo sapien
ggggacgaagatttctgtccaagag

SEQ ID NO: 5103038 - DNA, 25 bp, Homo sapien
tttcacggggacgaagatttctgtc

SEQ ID NO: 5103039 - DNA, 25 bp, Homo sapien
gcatttcacggggacgaagatttct

SEQ ID NO: 5103040 - DNA, 25 bp, Homo sapien
tctccggtgtcaagcatagttctca

SEQ ID NO: 5103041 - DNA, 25 bp, Homo sapien
gcaccgaagttcctgagatcccaag

SEQ ID NO: 5103042 - DNA, 25 bp, Homo sapien
taacatgagagattggctgaaccac

SEQ ID NO: 5103043 - DNA, 25 bp, Homo sapien
gatgctctctgtgcgtgcttgctga

SEQ ID NO: 5103044 - DNA, 25 bp, Homo sapien
tttctacagaggttgaagaagaggc

SEQ ID NO: 5103045 - DNA, 25 bp, Homo sapien
ctgatgtttctacagaggttgaaga

SEQ ID NO: 5103046 - DNA, 25 bp, Homo sapien
caaagactgatgtttctacagaggt

SEQ ID NO: 5103047 - DNA, 25 bp, Homo sapien
gaagaggctattttcaaaagattct

SEQ ID NO: 5103048 - DNA, 25 bp, Homo sapien
tgaggcccaggcaaaagtactcttt

SEQ ID NO: 5103049 - DNA, 25 bp, Homo sapien
ctgaggcccaggcaaaagtactctt

SEQ ID NO: 5103050 - DNA, 25 bp, Homo sapien
tatggaacttgcaatgctggaaggg

SEQ ID NO: 5103051 - DNA, 25 bp, Homo sapien
atggaacttgcaatgctggaaggga

SEQ ID NO: 5103052 - DNA, 25 bp, Homo sapien
ttatggaacttgcaatgctggaagg

SEQ ID NO: 5103053 - DNA, 25 bp, Homo sapien
tggaacttgcaatgctggaagggac

SEQ ID NO: 5103054 - DNA, 25 bp, Homo sapien
gaggctggcccatcttctgaagtgt

SEQ ID NO: 5103055 - DNA, 25 bp, Homo sapien
catcacgcctggtgagtccacagag

SEQ ID NO: 5103056 - DNA, 25 bp, Homo sapien
gatgtcattctttcccataagccca

SEQ ID NO: 5103057 - DNA, 25 bp, Homo sapien
gggaagcattccacttcctgagagg

SEQ ID NO: 5103058 - DNA, 25 bp, Homo sapien
cacggggcaggctagctgtctgtcc

SEQ ID NO: 5103059 - DNA, 25 bp, Homo sapien
cctatggtgctttgaggagacaccc

SEQ ID NO: 5103060 - DNA, 25 bp, Homo sapien
gccagcccctttggactccaagaag

SEQ ID NO: 5103061 - DNA, 25 bp, Homo sapien
tccaagaagtgtgtattgagtctct

SEQ ID NO: 5103062 - DNA, 25 bp, Homo sapien
tcccatggtcccccctctagtgttc

SEQ ID NO: 5103063 - DNA, 25 bp, Homo sapien
agctattgtagacattcccatggtc

SEQ ID NO: 5103064 - DNA, 25 bp, Homo sapien
tgacagcaaccacgaagctattgta

SEQ ID NO: 5103065 - DNA, 25 bp, Homo sapien
ctgacagcaaccacgaagctattgt

SEQ ID NO: 5103066 - DNA, 25 bp, Homo sapien
tgcagaaagcttggatcgcagctcc

SEQ ID NO: 5103067 - DNA, 25 bp, Homo sapien
cccctctagtctcagataggacatc

SEQ ID NO: 5103068 - DNA, 25 bp, Homo sapien
tagatgccagctccgtttcaccctg

SEQ ID NO: 5103069 - DNA, 25 bp, Homo sapien
gaaggcactccatgtcagtctgcag

SEQ ID NO: 5103070 - DNA, 25 bp, Homo sapien
tcactctcttcccaggggacgggtg

SEQ ID NO: 5103071 - DNA, 25 bp, Homo sapien
tttgccagtgggggttctctggaaa

SEQ ID NO: 5103072 - DNA, 25 bp, Homo sapien
cactctcttcccaggggacgggtgg

SEQ ID NO: 5103073 - DNA, 25 bp, Homo sapien
tgctactaatcctggcatcggcagc

SEQ ID NO: 5103074 - DNA, 25 bp, Homo sapien
gctactaatcctggcatcggcagct

SEQ ID NO: 5103075 - DNA, 25 bp, Homo sapien
gtgcctgctggatgggaagtgatct

SEQ ID NO: 5103076 - DNA, 25 bp, Homo sapien
ggcagggaccggctcttgtcttcca

SEQ ID NO: 5103077 - DNA, 25 bp, Homo sapien
ggaagtgatcttacagcatctccag

SEQ ID NO: 5103078 - DNA, 25 bp, Homo sapien
tgccaacaagcactttcaagtgcct

SEQ ID NO: 5103079 - DNA, 25 bp, Homo sapien
ggaaaccccatggaagatgagctct

SEQ ID NO: 5103080 - DNA, 25 bp, Homo sapien
cagatgacccagttgtaccagatgt

SEQ ID NO: 5103081 - DNA, 25 bp, Homo sapien
cacacggcaccttctgattggaata

SEQ ID NO: 5103082 - DNA, 25 bp, Homo sapien
tagattctgtggcagcgagagctcc

SEQ ID NO: 5103083 - DNA, 25 bp, Homo sapien
cccaagtgtccacatgcatgtaaga

SEQ ID NO: 5103084 - DNA, 25 bp, Homo sapien
tcccaagtgtccacatgcatgtaag

SEQ ID NO: 5103085 - DNA, 25 bp, Homo sapien
ccaagtgtccacatgcatgtaagac

SEQ ID NO: 5103086 - DNA, 25 bp, Homo sapien
tggaaagcagcaccacgttgccagc

SEQ ID NO: 5103087 - DNA, 25 bp, Homo sapien
caccacgttgccagccagtggccct

SEQ ID NO: 5103088 - DNA, 25 bp, Homo sapien
cttggggtcaatctcctggaaagca

SEQ ID NO: 5103089 - DNA, 25 bp, Homo sapien
gggtcaatctcctggaaagcagcac

SEQ ID NO: 5103090 - DNA, 25 bp, Homo sapien
ttttgttagaccttgtactccatcc

SEQ ID NO: 5103091 - DNA, 25 bp, Homo sapien
aaagtagtagcgagcagggtttttg

SEQ ID NO: 5103092 - DNA, 25 bp, Homo sapien
gccttggggctactaaggtttcatc

SEQ ID NO: 5103093 - DNA, 25 bp, Homo sapien
cttgtactccatcccatgtcttgct

SEQ ID NO: 5103094 - DNA, 25 bp, Homo sapien
tcttcaagggcaactctggacccca

SEQ ID NO: 5103095 - DNA, 25 bp, Homo sapien
agaggacatggagggccattctgaa

SEQ ID NO: 5103096 - DNA, 25 bp, Homo sapien
catcctgcatgggtttagccttcag

SEQ ID NO: 5103097 - DNA, 25 bp, Homo sapien
ggcagcagatggttcaccaagccat

SEQ ID NO: 5103098 - DNA, 25 bp, Homo sapien
ggtgctcaatcctgccttcctgagc

SEQ ID NO: 5103099 - DNA, 25 bp, Homo sapien
agtctggtgctcaatcctgccttcc

SEQ ID NO: 5103100 - DNA, 25 bp, Homo sapien
tctggtgctcaatcctgccttcctg

SEQ ID NO: 5103101 - DNA, 25 bp, Homo sapien
gggttctgggcagtctggtgctcaa

SEQ ID NO: 5103102 - DNA, 25 bp, Homo sapien
ggccattgcccatacctgaggttga

SEQ ID NO: 5103103 - DNA, 25 bp, Homo sapien
tagagagatgaagcaccgtggattt

SEQ ID NO: 5103104 - DNA, 25 bp, Homo sapien
tcttcagtgccccagtagagagatg

SEQ ID NO: 5103105 - DNA, 25 bp, Homo sapien
gttgagatgaatggtcatgatcttc

SEQ ID NO: 5103106 - DNA, 25 bp, Homo sapien
gcatacgtgacattcacagcatctt

SEQ ID NO: 5103107 - DNA, 25 bp, Homo sapien
tgagtgtagccaggaagcatacgtg

SEQ ID NO: 5103108 - DNA, 25 bp, Homo sapien
gccaggaagcatacgtgacattcac

SEQ ID NO: 5103109 - DNA, 25 bp, Homo sapien
ttgagaacttgagtgtagccaggaa

SEQ ID NO: 5103110 - DNA, 25 bp, Homo sapien
gagggcccttatctggtaagacagg

SEQ ID NO: 5103111 - DNA, 25 bp, Homo sapien
ttcaccttgtgggttcctagagcat

SEQ ID NO: 5103112 - DNA, 25 bp, Homo sapien
gagcatcctcagtgagggcccttat

SEQ ID NO: 5103113 - DNA, 25 bp, Homo sapien
taagacaggggatcaggcacatcca

SEQ ID NO: 5103114 - DNA, 25 bp, Homo sapien
ggcagcgaggatcaccacagagctt

SEQ ID NO: 5103115 - DNA, 25 bp, Homo sapien
gcgaggatcaccacagagctttagg

SEQ ID NO: 5103116 - DNA, 25 bp, Homo sapien
ttggcagcgaggatcaccacagagc

SEQ ID NO: 5103117 - DNA, 25 bp, Homo sapien
cagcgaggatcaccacagagcttta

SEQ ID NO: 5103118 - DNA, 25 bp, Homo sapien
caaggagctcacatcgattttccgg

SEQ ID NO: 5103119 - DNA, 25 bp, Homo sapien
cattaccaactgctctatgctggac

SEQ ID NO: 5103120 - DNA, 25 bp, Homo sapien
ggtgcaagtccctgcccaatataat

SEQ ID NO: 5103121 - DNA, 25 bp, Homo sapien
tgctggacccgctcacaaggagctc

SEQ ID NO: 5103122 - DNA, 25 bp, Homo sapien
gaagctgtcaggctctaatagcagc

SEQ ID NO: 5103123 - DNA, 25 bp, Homo sapien
tggcatagacagtggccaaaacagg

SEQ ID NO: 5103124 - DNA, 25 bp, Homo sapien
catcactggagtatctgagtcacca

SEQ ID NO: 5103125 - DNA, 25 bp, Homo sapien
gtgctgaggccaagtaagttttcta

SEQ ID NO: 5103126 - DNA, 25 bp, Homo sapien
ctaagccctttactcttgcggtggg

SEQ ID NO: 5103127 - DNA, 25 bp, Homo sapien
ggcacctcttgtcaccacttgattt

SEQ ID NO: 5103128 - DNA, 25 bp, Homo sapien
gaactcaggcaccaaagcctctgac

SEQ ID NO: 5103129 - DNA, 25 bp, Homo sapien
gaactatatactgtctcatggcacc

SEQ ID NO: 5103130 - DNA, 25 bp, Homo sapien
taagttacaccatcaagctgcacct

SEQ ID NO: 5103131 - DNA, 25 bp, Homo sapien
cagattcttctcctaagttacacca

SEQ ID NO: 5103132 - DNA, 25 bp, Homo sapien
gctgcacctctgaagttaagctgct

SEQ ID NO: 5103133 - DNA, 25 bp, Homo sapien
gaagtctggccgtctccagtcagat

SEQ ID NO: 5103134 - DNA, 25 bp, Homo sapien
gaatgttcctggactgtttcccaac

SEQ ID NO: 5103135 - DNA, 25 bp, Homo sapien
gaacatagcaagtcacactcacatc

SEQ ID NO: 5103136 - DNA, 25 bp, Homo sapien
aagtcacactcacatcgcatttggt

SEQ ID NO: 5103137 - DNA, 25 bp, Homo sapien
gcatttggtttaacttcccagccga

SEQ ID NO: 5103138 - DNA, 25 bp, Homo sapien
ttgaccttctactgctgtagctccc

SEQ ID NO: 5103139 - DNA, 25 bp, Homo sapien
cggggtcagcgcaaagccctgccag

SEQ ID NO: 5103140 - DNA, 25 bp, Homo sapien
tcccacttgctttgaccttctactg

SEQ ID NO: 5103141 - DNA, 25 bp, Homo sapien
acatagcaagtcaaattcaggtccc

SEQ ID NO: 5103142 - DNA, 25 bp, Homo sapien
tgtgtctcccatgggttcaccggcc

SEQ ID NO: 5103143 - DNA, 25 bp, Homo sapien
ctagaaaagtctgtcatgctaccag

SEQ ID NO: 5103144 - DNA, 25 bp, Homo sapien
aggcaaggaacgagatgaggaaaca

SEQ ID NO: 5103145 - DNA, 25 bp, Homo sapien
cctcggaagatgaataatagcccca

SEQ ID NO: 5103146 - DNA, 25 bp, Homo sapien
catggcaattaattgttctctgctg

SEQ ID NO: 5103147 - DNA, 25 bp, Homo sapien
agcagcattggtctgcacagccgca

SEQ ID NO: 5103148 - DNA, 25 bp, Homo sapien
caacatggcaattaattgttctctg

SEQ ID NO: 5103149 - DNA, 25 bp, Homo sapien
tctgcacagccgcaagtgtagtcat

SEQ ID NO: 5103150 - DNA, 25 bp, Homo sapien
acacgagcatttgcttgacattttc

SEQ ID NO: 5103151 - DNA, 25 bp, Homo sapien
cagcttctaatgaacacgagcattt

SEQ ID NO: 5103152 - DNA, 25 bp, Homo sapien
cttctaatgaacacgagcatttgct

SEQ ID NO: 5103153 - DNA, 25 bp, Homo sapien
aatgaacacgagcatttgcttgaca

SEQ ID NO: 5103154 - DNA, 25 bp, Homo sapien
tgtgcccggccccactactgggaat

SEQ ID NO: 5103155 - DNA, 25 bp, Homo sapien
ggccccactactgggaatttataca

SEQ ID NO: 5103156 - DNA, 25 bp, Homo sapien
cattgtgtttagtgaataagccagg

SEQ ID NO: 5103157 - DNA, 25 bp, Homo sapien
tggaggacattgtgtttagtgaata

SEQ ID NO: 5103158 - DNA, 25 bp, Homo sapien
agatataaagcttgaggggaattcc

SEQ ID NO: 5103159 - DNA, 25 bp, Homo sapien
ttccaaaggtggatcagagccaaac

SEQ ID NO: 5103160 - DNA, 25 bp, Homo sapien
aggtggatcagagccaaactgattt

SEQ ID NO: 5103161 - DNA, 25 bp, Homo sapien
ccagcagccttatcattagaatgaa

SEQ ID NO: 5103162 - DNA, 25 bp, Homo sapien
gagtgcatgcagtgtgatcccactg

SEQ ID NO: 5103163 - DNA, 25 bp, Homo sapien
agtgcatgcagtgtgatcccactgc

SEQ ID NO: 5103164 - DNA, 25 bp, Homo sapien
gtgcatgcagtgtgatcccactgct

SEQ ID NO: 5103165 - DNA, 25 bp, Homo sapien
cctgtcagactttcaatgtcttcta

SEQ ID NO: 5103166 - DNA, 25 bp, Homo sapien
gctgcttctttagttagtcctgtca

SEQ ID NO: 5103167 - DNA, 25 bp, Homo sapien
actggctccctcattggcaaaggtc

SEQ ID NO: 5103168 - DNA, 25 bp, Homo sapien
tggctccctcattggcaaaggtcat

SEQ ID NO: 5103169 - DNA, 25 bp, Homo sapien
caatggctttgcaagagtgttgcct

SEQ ID NO: 5103170 - DNA, 25 bp, Homo sapien
gcagtaaaaatttccgcctttgatg

SEQ ID NO: 5103171 - DNA, 25 bp, Homo sapien
gatagatacagatagacaatggctt

SEQ ID NO: 5103172 - DNA, 25 bp, Homo sapien
tcctagagccaatcaacataagagc

SEQ ID NO: 5103173 - DNA, 25 bp, Homo sapien
ctgaagatcttccagtgtcactcat

SEQ ID NO: 5103174 - DNA, 25 bp, Homo sapien
tggccccaaatttgtccaaggagcc

SEQ ID NO: 5103175 - DNA, 25 bp, Homo sapien
tctgaagatcttccagtgtcactca

SEQ ID NO: 5103176 - DNA, 25 bp, Homo sapien
cccggggatgtgactgcctgatggt

SEQ ID NO: 5103177 - DNA, 25 bp, Homo sapien
ggatgtgactgcctgatggtggcag

SEQ ID NO: 5103178 - DNA, 25 bp, Homo sapien
ggacatccccggggatgtgactgcc

SEQ ID NO: 5103179 - DNA, 25 bp, Homo sapien
gtgactgcctgatggtggcagcaac

SEQ ID NO: 5103180 - DNA, 25 bp, Homo sapien
tggagccagactcagttcccggatc

SEQ ID NO: 5103181 - DNA, 25 bp, Homo sapien
ctctgtcctcgagcagcactggagc

SEQ ID NO: 5103182 - DNA, 25 bp, Homo sapien
ccggatcttgcagccgaggagcctc

SEQ ID NO: 5103183 - DNA, 25 bp, Homo sapien
ggtgggcctctgtcctcgagcagca

SEQ ID NO: 5103184 - DNA, 25 bp, Homo sapien
ggacaagatttttcactagaacctg

SEQ ID NO: 5103185 - DNA, 25 bp, Homo sapien
ctccatcttgccacgcccagccaag

SEQ ID NO: 5103186 - DNA, 25 bp, Homo sapien
ctaccagtcgcaaggacaagatttt

SEQ ID NO: 5103187 - DNA, 25 bp, Homo sapien
tcgcaaggacaagatttttcactag

SEQ ID NO: 5103188 - DNA, 25 bp, Homo sapien
gcttctgctgttccgatggctgaga

SEQ ID NO: 5103189 - DNA, 25 bp, Homo sapien
agaaactcacggcaagcgcactcgg

SEQ ID NO: 5103190 - DNA, 25 bp, Homo sapien
acacgggtgagtcacgcggcagaaa

SEQ ID NO: 5103191 - DNA, 25 bp, Homo sapien
gctgggctccgcgaaggctaaattc

SEQ ID NO: 5103192 - DNA, 25 bp, Homo sapien
agaaaaaccattcccagtcactgca

SEQ ID NO: 5103193 - DNA, 25 bp, Homo sapien
gaaaaaccattcccagtcactgcaa

SEQ ID NO: 5103194 - DNA, 25 bp, Homo sapien
aagaaaaaccattcccagtcactgc

SEQ ID NO: 5103195 - DNA, 25 bp, Homo sapien
aatcactggttaggtggttggcttg

SEQ ID NO: 5103196 - DNA, 25 bp, Homo sapien
ggttggcttggctttttgattcggc

SEQ ID NO: 5103197 - DNA, 25 bp, Homo sapien
gtcaccttttctgattctcacattg

SEQ ID NO: 5103198 - DNA, 25 bp, Homo sapien
tcggcttcttgagatgcacagtcac

SEQ ID NO: 5103199 - DNA, 25 bp, Homo sapien
gaccccagaattgcttgatattctt

SEQ ID NO: 5103200 - DNA, 25 bp, Homo sapien
gaacatgggatcttcttttgccaag

SEQ ID NO: 5103201 - DNA, 25 bp, Homo sapien
ctaaagactatccagaccccagaat

SEQ ID NO: 5103202 - DNA, 25 bp, Homo sapien
tgccaagtgtgcctgacacctcttc

SEQ ID NO: 5103203 - DNA, 25 bp, Homo sapien
gctggactctcgtacttagattggc

SEQ ID NO: 5103204 - DNA, 25 bp, Homo sapien
gtctccttgatcttttcatagcggg

SEQ ID NO: 5103205 - DNA, 25 bp, Homo sapien
catttcatagaacatagctggactc

SEQ ID NO: 5103206 - DNA, 25 bp, Homo sapien
catagcgggtctgtgcagattctgg

SEQ ID NO: 5103207 - DNA, 25 bp, Homo sapien
gggcactgggcatgagccaagggaa

SEQ ID NO: 5103208 - DNA, 25 bp, Homo sapien
ccaagggaaagtagccctgttgctg

SEQ ID NO: 5103209 - DNA, 25 bp, Homo sapien
gctgaagcttgtcccagatgagtag

SEQ ID NO: 5103210 - DNA, 25 bp, Homo sapien
gtagccctgttgctgaagcttgtcc

SEQ ID NO: 5103211 - DNA, 25 bp, Homo sapien
tggccccgttcccttctcatagccg

SEQ ID NO: 5103212 - DNA, 25 bp, Homo sapien
ggagccacatggaacagccaagcca

SEQ ID NO: 5103213 - DNA, 25 bp, Homo sapien
taatcccgctgtcgggctgagtctg

SEQ ID NO: 5103214 - DNA, 25 bp, Homo sapien
acggcgctcgcggtagccgggatct

SEQ ID NO: 5103215 - DNA, 25 bp, Homo sapien
actacaactcgaaatgatgcttggg

SEQ ID NO: 5103216 - DNA, 25 bp, Homo sapien
cagcagctttaataatgcagagggt

SEQ ID NO: 5103217 - DNA, 25 bp, Homo sapien
cactatgatatacgtgacaggatga

SEQ ID NO: 5103218 - DNA, 25 bp, Homo sapien
ccatcttagatgaatggcccagtca

SEQ ID NO: 5103219 - DNA, 25 bp, Homo sapien
gatcagtcaagacactggagcagtt

SEQ ID NO: 5103220 - DNA, 25 bp, Homo sapien
atcagtcaagacactggagcagttc

SEQ ID NO: 5103221 - DNA, 25 bp, Homo sapien
tgatcagtcaagacactggagcagt

SEQ ID NO: 5103222 - DNA, 25 bp, Homo sapien
gatgatcagtcaagacactggagca

SEQ ID NO: 5103223 - DNA, 25 bp, Homo sapien
tttcccacacgctgcagtctcttcc

SEQ ID NO: 5103224 - DNA, 25 bp, Homo sapien
tttcttcgtacactcaaccatgagc

SEQ ID NO: 5103225 - DNA, 25 bp, Homo sapien
tcttcgtacactcaaccatgagctc

SEQ ID NO: 5103226 - DNA, 25 bp, Homo sapien
catttcttcgtacactcaaccatga

SEQ ID NO: 5103227 - DNA, 25 bp, Homo sapien
taggaaattttctatcgccccatga

SEQ ID NO: 5103228 - DNA, 25 bp, Homo sapien
tggatgtcccaaacgaaaagcaaac

SEQ ID NO: 5103229 - DNA, 25 bp, Homo sapien
tactaagatgatccagcctctgagt

SEQ ID NO: 5103230 - DNA, 25 bp, Homo sapien
caagtgttcccctatcccttcaatt

SEQ ID NO: 5103231 - DNA, 25 bp, Homo sapien
tcaagagatttcctggtattcaaaa

SEQ ID NO: 5103232 - DNA, 25 bp, Homo sapien
caagagatttcctggtattcaaaaa

SEQ ID NO: 5103233 - DNA, 25 bp, Homo sapien
aatataaggatatttgtaagacaaa

SEQ ID NO: 5103234 - DNA, 25 bp, Homo sapien
gtacaagggagtgatcatagcccac

SEQ ID NO: 5103235 - DNA, 25 bp, Homo sapien
taaggatatttgtaagacaaacaac

SEQ ID NO: 5103236 - DNA, 25 bp, Homo sapien
gagtacaagggagtgatcatagccc

SEQ ID NO: 5103237 - DNA, 25 bp, Homo sapien
caaaacttggaaagcctccaagctt

SEQ ID NO: 5103238 - DNA, 25 bp, Homo sapien
ctcaaaacttggaaagcctccaagc

SEQ ID NO: 5103239 - DNA, 25 bp, Homo sapien
tcaaaacttggaaagcctccaagct

SEQ ID NO: 5103240 - DNA, 25 bp, Homo sapien
tagaagacttccttcggcttcttct

SEQ ID NO: 5103241 - DNA, 25 bp, Homo sapien
tcttctggtccaaactaccaccagt

SEQ ID NO: 5103242 - DNA, 25 bp, Homo sapien
cttcggcttcttctggtccaaacta

SEQ ID NO: 5103243 - DNA, 25 bp, Homo sapien
aactaccaccagtttatctggttgc

SEQ ID NO: 5103244 - DNA, 25 bp, Homo sapien
tgtggcatcctgaaagtctagtggt

SEQ ID NO: 5103245 - DNA, 25 bp, Homo sapien
tgaggcctgaaaaacggtcactggg

SEQ ID NO: 5103246 - DNA, 25 bp, Homo sapien
tgacgagaacaaagacctgactgga

SEQ ID NO: 5103247 - DNA, 25 bp, Homo sapien
cagttgaagcaaaagtgtggcatcc

SEQ ID NO: 5103248 - DNA, 25 bp, Homo sapien
cacacaacaacaccacgatagggat

SEQ ID NO: 5103249 - DNA, 25 bp, Homo sapien
caacaacaccacgatagggattttt

SEQ ID NO: 5103250 - DNA, 25 bp, Homo sapien
aggccacacaacaacaccacgatag

SEQ ID NO: 5103251 - DNA, 25 bp, Homo sapien
caacaccacgatagggattttttat

SEQ ID NO: 5103252 - DNA, 25 bp, Homo sapien
tagagtaagtaaaggcaaaaggcaa

SEQ ID NO: 5103253 - DNA, 25 bp, Homo sapien
ggcaacaaagtacaagaaacagaga

SEQ ID NO: 5103254 - DNA, 25 bp, Homo sapien
gacagttgtccttgccttcaaagac

SEQ ID NO: 5103255 - DNA, 25 bp, Homo sapien
tactcaagtccactccatgtatcag

SEQ ID NO: 5103256 - DNA, 25 bp, Homo sapien
gtcttcaaattcttccgcatgagga

SEQ ID NO: 5103257 - DNA, 25 bp, Homo sapien
attttctatgacaaatgtccactct

SEQ ID NO: 5103258 - DNA, 25 bp, Homo sapien
aaatgtccactctttgtcttcaaat

SEQ ID NO: 5103259 - DNA, 25 bp, Homo sapien
cttcaaattcttccgcatgaggatc

SEQ ID NO: 5103260 - DNA, 25 bp, Homo sapien
caatttagtattgaagacttacagt

SEQ ID NO: 5103261 - DNA, 25 bp, Homo sapien
atggttccatccaacacatgtttag

SEQ ID NO: 5103262 - DNA, 25 bp, Homo sapien
aaatgccaatgtaccttaataatgc

SEQ ID NO: 5103263 - DNA, 25 bp, Homo sapien
gcactatgctagatgctgacagata

SEQ ID NO: 5103264 - DNA, 25 bp, Homo sapien
tagtcacttgggattccacaacatg

SEQ ID NO: 5103265 - DNA, 25 bp, Homo sapien
tattaaggtaccaatctaggatctc

SEQ ID NO: 5103266 - DNA, 25 bp, Homo sapien
cactatatttggatgggctgtcttc

SEQ ID NO: 5103267 - DNA, 25 bp, Homo sapien
gagatacataccaaagtcaggcata

SEQ ID NO: 5103268 - DNA, 25 bp, Homo sapien
gcaggggtcctctatacattgcttt

SEQ ID NO: 5103269 - DNA, 25 bp, Homo sapien
tgaaagacaagatgagcaggggtcc

SEQ ID NO: 5103270 - DNA, 25 bp, Homo sapien
gatgagcaggggtcctctatacatt

SEQ ID NO: 5103271 - DNA, 25 bp, Homo sapien
aagacaagatgagcaggggtcctct

SEQ ID NO: 5103272 - DNA, 25 bp, Homo sapien
ttactcttgtctcacacgcgtatcc

SEQ ID NO: 5103273 - DNA, 25 bp, Homo sapien
ctcttgtatcctccatagtagttaa

SEQ ID NO: 5103274 - DNA, 25 bp, Homo sapien
tagcactaggctctaaatctagtgc

SEQ ID NO: 5103275 - DNA, 25 bp, Homo sapien
cctcaaaccaaaattaatatctgag

SEQ ID NO: 5103276 - DNA, 25 bp, Homo sapien
gagtgctgtggcgtaaccccagctc

SEQ ID NO: 5103277 - DNA, 25 bp, Homo sapien
ggagtgctgtggcgtaaccccagct

SEQ ID NO: 5103278 - DNA, 25 bp, Homo sapien
agtgctgtggcgtaaccccagctca

SEQ ID NO: 5103279 - DNA, 25 bp, Homo sapien
tgtactgagtagattaggttgtttt

SEQ ID NO: 5103280 - DNA, 25 bp, Homo sapien
tgcttttgtactgagtagattaggt

SEQ ID NO: 5103281 - DNA, 25 bp, Homo sapien
cttttgtactgagtagattaggttg

SEQ ID NO: 5103282 - DNA, 25 bp, Homo sapien
acttgcttttgtactgagtagatta

SEQ ID NO: 5103283 - DNA, 25 bp, Homo sapien
accactgttagagtacacgcttttt

SEQ ID NO: 5103284 - DNA, 25 bp, Homo sapien
cagtacatccatctgtactctaacg

SEQ ID NO: 5103285 - DNA, 25 bp, Homo sapien
atccatctgtactctaacgtggcac

SEQ ID NO: 5103286 - DNA, 25 bp, Homo sapien
catccatctgtactctaacgtggca

SEQ ID NO: 5103287 - DNA, 25 bp, Homo sapien
tacatccatctgtactctaacgtgg

SEQ ID NO: 5103288 - DNA, 25 bp, Homo sapien
ttctgttggtcaaataaatggatcc

SEQ ID NO: 5103289 - DNA, 25 bp, Homo sapien
ttatggacataatttaactaatccc

SEQ ID NO: 5103290 - DNA, 25 bp, Homo sapien
taatcccatatttttggacatttgg

SEQ ID NO: 5103291 - DNA, 25 bp, Homo sapien
tcttcacattgatcctaaattactt

SEQ ID NO: 5103292 - DNA, 25 bp, Homo sapien
catcagtctgagttggcatagggct

SEQ ID NO: 5103293 - DNA, 25 bp, Homo sapien
gcaagagctttccttcgaccagaag

SEQ ID NO: 5103294 - DNA, 25 bp, Homo sapien
catagggcttgcatactgtttcata

SEQ ID NO: 5103295 - DNA, 25 bp, Homo sapien
gaaaactgaagagcggcagatacaa

SEQ ID NO: 5103296 - DNA, 25 bp, Homo sapien
gaattaaagtatggtttcctgagaa

SEQ ID NO: 5103297 - DNA, 25 bp, Homo sapien
tgggaccccaggtgtagagcacaat

SEQ ID NO: 5103298 - DNA, 25 bp, Homo sapien
ccccaggtgtagagcacaatgccca

SEQ ID NO: 5103299 - DNA, 25 bp, Homo sapien
ttcttcatggaattaaagtatggtt

SEQ ID NO: 5103300 - DNA, 25 bp, Homo sapien
ctcatcaaactagccaaactttgca

SEQ ID NO: 5103301 - DNA, 25 bp, Homo sapien
actcatcaaactagccaaactttgc

SEQ ID NO: 5103302 - DNA, 25 bp, Homo sapien
tcatcaaactagccaaactttgcat

SEQ ID NO: 5103303 - DNA, 25 bp, Homo sapien
atcttcttcgaagtcatctaaattg

SEQ ID NO: 5103304 - DNA, 25 bp, Homo sapien
cattatcttcttcgaagtcatctaa

SEQ ID NO: 5103305 - DNA, 25 bp, Homo sapien
ttcattatcttcttcgaagtcatct

SEQ ID NO: 5103306 - DNA, 25 bp, Homo sapien
ttcttcgaagtcatctaaattgcca

SEQ ID NO: 5103307 - DNA, 25 bp, Homo sapien
tatatagctggtgtaaggccacagg

SEQ ID NO: 5103308 - DNA, 25 bp, Homo sapien
ggtgaaaaaggaataccctgctggc

SEQ ID NO: 5103309 - DNA, 25 bp, Homo sapien
ggaaactgtacccatgagactggta

SEQ ID NO: 5103310 - DNA, 25 bp, Homo sapien
tgattttaggtagaccccatggtga

SEQ ID NO: 5103311 - DNA, 25 bp, Homo sapien
tttgttccctgaaggtagccaaata

SEQ ID NO: 5103312 - DNA, 25 bp, Homo sapien
ctgtgctgttagattttgttccctg

SEQ ID NO: 5103313 - DNA, 25 bp, Homo sapien
cctgaaggtagccaaatatgtcact

SEQ ID NO: 5103314 - DNA, 25 bp, Homo sapien
gtgctgttagattttgttccctgaa

SEQ ID NO: 5103315 - DNA, 25 bp, Homo sapien
cttgatcttcatctaagctgctcag

SEQ ID NO: 5103316 - DNA, 25 bp, Homo sapien
cttcagaggaactggctgatttagc

SEQ ID NO: 5103317 - DNA, 25 bp, Homo sapien
tcttcatctaagctgctcagagcat

SEQ ID NO: 5103318 - DNA, 25 bp, Homo sapien
tttagctgaacgcatatttgcttgc

SEQ ID NO: 5103319 - DNA, 25 bp, Homo sapien
atggatttgaattcacggtggccaa

SEQ ID NO: 5103320 - DNA, 25 bp, Homo sapien
gatttgaattcacggtggccaagtc

SEQ ID NO: 5103321 - DNA, 25 bp, Homo sapien
attcacggtggccaagtccttttct

SEQ ID NO: 5103322 - DNA, 25 bp, Homo sapien
tgaattcacggtggccaagtccttt

SEQ ID NO: 5103323 - DNA, 25 bp, Homo sapien
tactgtacatgttagcccagaaaat

SEQ ID NO: 5103324 - DNA, 25 bp, Homo sapien
gagctgaaagtctgtacaccatgga

SEQ ID NO: 5103325 - DNA, 25 bp, Homo sapien
taaagtcaaaccacgtatactgtac

SEQ ID NO: 5103326 - DNA, 25 bp, Homo sapien
attcatcagttacaacaccaaaagc

SEQ ID NO: 5103327 - DNA, 25 bp, Homo sapien
gcttctggctcatcgaatgggttca

SEQ ID NO: 5103328 - DNA, 25 bp, Homo sapien
gaggtacttgctcatatccacaggt

SEQ ID NO: 5103329 - DNA, 25 bp, Homo sapien
tctaggtgaagctgtttcagtgata

SEQ ID NO: 5103330 - DNA, 25 bp, Homo sapien
ggttcaaatactgtggagtctgcac

SEQ ID NO: 5103331 - DNA, 25 bp, Homo sapien
cttgatatctatgtttctttggaaa

SEQ ID NO: 5103332 - DNA, 25 bp, Homo sapien
tatctatgtttctttggaaaaacaa

SEQ ID NO: 5103333 - DNA, 25 bp, Homo sapien
gatatctatgtttctttggaaaaac

SEQ ID NO: 5103334 - DNA, 25 bp, Homo sapien
tgatatctatgtttctttggaaaaa

SEQ ID NO: 5103335 - DNA, 25 bp, Homo sapien
ttttcactcgcctttcagtttctag

SEQ ID NO: 5103336 - DNA, 25 bp, Homo sapien
tcatttaatactcctgtttttggtg

SEQ ID NO: 5103337 - DNA, 25 bp, Homo sapien
ggaggagttgatttaggttcataaa

SEQ ID NO: 5103338 - DNA, 25 bp, Homo sapien
tcagtttctagttcttgaacaggat

SEQ ID NO: 5103339 - DNA, 25 bp, Homo sapien
ttaggagaagtagagagatcttttc

SEQ ID NO: 5103340 - DNA, 25 bp, Homo sapien
cttaggagaagtagagagatctttt

SEQ ID NO: 5103341 - DNA, 25 bp, Homo sapien
tactgtactgtaaacttatgggctc

SEQ ID NO: 5103342 - DNA, 25 bp, Homo sapien
tgtgtgcatatgcttacaccagcaa

SEQ ID NO: 5103343 - DNA, 25 bp, Homo sapien
cagcagtgaggttcatgcccatact

SEQ ID NO: 5103344 - DNA, 25 bp, Homo sapien
aagcccatcaatgacaacagggtgg

SEQ ID NO: 5103345 - DNA, 25 bp, Homo sapien
acggctttgttatctgggacctcaa

SEQ ID NO: 5103346 - DNA, 25 bp, Homo sapien
ggacctcaaatttaagcacctgctg

SEQ ID NO: 5103347 - DNA, 25 bp, Homo sapien
cctgctgtgctcgagggcctgagat

SEQ ID NO: 5103348 - DNA, 25 bp, Homo sapien
aaggctctctcagcactcgtgggct

SEQ ID NO: 5103349 - DNA, 25 bp, Homo sapien
tttctgtgcatagagggatttgtaa

SEQ ID NO: 5103350 - DNA, 25 bp, Homo sapien
taacgagcagtctgtcaatcttatt

SEQ ID NO: 5103351 - DNA, 25 bp, Homo sapien
tgtttccagtaatttactcatatct

SEQ ID NO: 5103352 - DNA, 25 bp, Homo sapien
tcttttactagcctaacgagcagtc

SEQ ID NO: 5103353 - DNA, 25 bp, Homo sapien
catcagggccaatatcacataatgg

SEQ ID NO: 5103354 - DNA, 25 bp, Homo sapien
ggtctgtgcgtctaccagtaccatg

SEQ ID NO: 5103355 - DNA, 25 bp, Homo sapien
catggctatccagttaacctggcac

SEQ ID NO: 5103356 - DNA, 25 bp, Homo sapien
gattgcattggctatccaggctatt

SEQ ID NO: 5103357 - DNA, 25 bp, Homo sapien
tacaggttcaggacgtacatgtgtg

SEQ ID NO: 5103358 - DNA, 25 bp, Homo sapien
ctttccaacttgtattacaggttca

SEQ ID NO: 5103359 - DNA, 25 bp, Homo sapien
cttgtattacaggttcaggacgtac

SEQ ID NO: 5103360 - DNA, 25 bp, Homo sapien
aacacagtatccagtaagtagattt

SEQ ID NO: 5103361 - DNA, 25 bp, Homo sapien
catgtagtcatcacgtattaaaatt

SEQ ID NO: 5103362 - DNA, 25 bp, Homo sapien
atgtagtcatcacgtattaaaattt

SEQ ID NO: 5103363 - DNA, 25 bp, Homo sapien
taggcaatgagggactagagaatca

SEQ ID NO: 5103364 - DNA, 25 bp, Homo sapien
gaagcccaggtacccgagtagagta

SEQ ID NO: 5103365 - DNA, 25 bp, Homo sapien
taatatagcggtaaaagcacaccca

SEQ ID NO: 5103366 - DNA, 25 bp, Homo sapien
gattctggctagtgtcccagtcact

SEQ ID NO: 5103367 - DNA, 25 bp, Homo sapien
tcctctacagagaaattaggaattc

SEQ ID NO: 5103368 - DNA, 25 bp, Homo sapien
tttcctctacagagaaattaggaat

SEQ ID NO: 5103369 - DNA, 25 bp, Homo sapien
tcctttcctctacagagaaattagg

SEQ ID NO: 5103370 - DNA, 25 bp, Homo sapien
cctttcctctacagagaaattagga

SEQ ID NO: 5103371 - DNA, 25 bp, Homo sapien
gagactactgtatcagcactggacc

SEQ ID NO: 5103372 - DNA, 25 bp, Homo sapien
ccatgaagtataagcctaggctgaa

SEQ ID NO: 5103373 - DNA, 25 bp, Homo sapien
tttaatctaagctgacatgtgaggc

SEQ ID NO: 5103374 - DNA, 25 bp, Homo sapien
tactataataggatccctgatgact

SEQ ID NO: 5103375 - DNA, 25 bp, Homo sapien
ggatcttgctgcatctctaaggccg

SEQ ID NO: 5103376 - DNA, 25 bp, Homo sapien
aactattcaacttcgacagcctggg

SEQ ID NO: 5103377 - DNA, 25 bp, Homo sapien
tagtccaggccatgaagtgcacaca

SEQ ID NO: 5103378 - DNA, 25 bp, Homo sapien
taagtattagggcacagcctgctaa

SEQ ID NO: 5103379 - DNA, 25 bp, Homo sapien
taatatgccctaaagtagccctgcc

SEQ ID NO: 5103380 - DNA, 25 bp, Homo sapien
tattcaggttgttttcccatgtgga

SEQ ID NO: 5103381 - DNA, 25 bp, Homo sapien
taaaggtgagctaaccagtgcttcc

SEQ ID NO: 5103382 - DNA, 25 bp, Homo sapien
cccatgtggaggcatttttgtcttc

SEQ ID NO: 5103383 - DNA, 25 bp, Homo sapien
tgcctgtcttggccttccaaggagc

SEQ ID NO: 5103384 - DNA, 25 bp, Homo sapien
gagctggggttataggcgtgagtca

SEQ ID NO: 5103385 - DNA, 25 bp, Homo sapien
gctggggttataggcgtgagtcacc

SEQ ID NO: 5103386 - DNA, 25 bp, Homo sapien
tcttggccttccaaggagctggggt

SEQ ID NO: 5103387 - DNA, 25 bp, Homo sapien
cagctgccccaaagctagaaacttc

SEQ ID NO: 5103388 - DNA, 25 bp, Homo sapien
agtaagtggaatgagcaatccaacc

SEQ ID NO: 5103389 - DNA, 25 bp, Homo sapien
ttatttccattgcttggcacactga

SEQ ID NO: 5103390 - DNA, 25 bp, Homo sapien
gggttcactttgtagtatctccaga

SEQ ID NO: 5103391 - DNA, 25 bp, Homo sapien
tcactcctttccagttacatagcct

SEQ ID NO: 5103392 - DNA, 25 bp, Homo sapien
ggacttcacacatgttgcctggaat

SEQ ID NO: 5103393 - DNA, 25 bp, Homo sapien
tattacttgcttcaaggacttcaca

SEQ ID NO: 5103394 - DNA, 25 bp, Homo sapien
cgattctttaaacacgacaagttat

SEQ ID NO: 5103395 - DNA, 25 bp, Homo sapien
cgtaagatcctttacatcccaggca

SEQ ID NO: 5103396 - DNA, 25 bp, Homo sapien
gatcaaagccctgagtagaccacag

SEQ ID NO: 5103397 - DNA, 25 bp, Homo sapien
ggctttccaccacgcatgatttaat

SEQ ID NO: 5103398 - DNA, 25 bp, Homo sapien
cctaactgaagtggtcaggtacaga

SEQ ID NO: 5103399 - DNA, 25 bp, Homo sapien
tgtggaactccagcatatatgcatg

SEQ ID NO: 5103400 - DNA, 25 bp, Homo sapien
ttgaaactttcagatggcctcagtg

SEQ ID NO: 5103401 - DNA, 25 bp, Homo sapien
tgtccaagtctgatgtaaactgctg

SEQ ID NO: 5103402 - DNA, 25 bp, Homo sapien
agatgtcactgttctactccaaggc

SEQ ID NO: 5103403 - DNA, 25 bp, Homo sapien
tatttgtaaagtggagacaacagca

SEQ ID NO: 5103404 - DNA, 25 bp, Homo sapien
tgatacaatgaatggtctaaccttt

SEQ ID NO: 5103405 - DNA, 25 bp, Homo sapien
ttatttgtaaagtggagacaacagc

SEQ ID NO: 5103406 - DNA, 25 bp, Homo sapien
atgtgatacaatgaatggtctaacc

SEQ ID NO: 5103407 - DNA, 25 bp, Homo sapien
gaattaactcagaggatctattcta

SEQ ID NO: 5103408 - DNA, 25 bp, Homo sapien
tattcacaagcgagaattaactcag

SEQ ID NO: 5103409 - DNA, 25 bp, Homo sapien
tatccagttctatcaaatgaagcta

SEQ ID NO: 5103410 - DNA, 25 bp, Homo sapien
cctgttatcatcattagattttggc

SEQ ID NO: 5103411 - DNA, 25 bp, Homo sapien
tgatccgtctacctcggcctttgga

SEQ ID NO: 5103412 - DNA, 25 bp, Homo sapien
cgtctacctcggcctttggaaagtg

SEQ ID NO: 5103413 - DNA, 25 bp, Homo sapien
gatccgtctacctcggcctttggaa

SEQ ID NO: 5103414 - DNA, 25 bp, Homo sapien
tagtacttcccaaatatgctggcca

SEQ ID NO: 5103415 - DNA, 25 bp, Homo sapien
gctggccatcaaatcacctagagta

SEQ ID NO: 5103416 - DNA, 25 bp, Homo sapien
tatagagtttacaacacctgccaga

SEQ ID NO: 5103417 - DNA, 25 bp, Homo sapien
cgcattggtttaaggttggagatcc

SEQ ID NO: 5103418 - DNA, 25 bp, Homo sapien
catcgtttgccatttgaagtaggac

SEQ ID NO: 5103419 - DNA, 25 bp, Homo sapien
tcagagagtgtacagcttgaggctt

SEQ ID NO: 5103420 - DNA, 25 bp, Homo sapien
cagcttgaggctttgtgattatcca

SEQ ID NO: 5103421 - DNA, 25 bp, Homo sapien
caatatggaaatacagctggtgagt

SEQ ID NO: 5103422 - DNA, 25 bp, Homo sapien
tattgcatattgtaatagctattaa

SEQ ID NO: 5103423 - DNA, 25 bp, Homo sapien
gaaatatatcatccttacctatcac

SEQ ID NO: 5103424 - DNA, 25 bp, Homo sapien
aatatggaaatatatcatccttacc

SEQ ID NO: 5103425 - DNA, 25 bp, Homo sapien
tggaaatatatcatccttacctatc

SEQ ID NO: 5103426 - DNA, 25 bp, Homo sapien
tctttacacactgtttatccaaaca

SEQ ID NO: 5103427 - DNA, 25 bp, Homo sapien
accttttagctgttgatatcaaaat

SEQ ID NO: 5103428 - DNA, 25 bp, Homo sapien
ttcagtaacttctaacagcttctct

SEQ ID NO: 5103429 - DNA, 25 bp, Homo sapien
gcccagctttggattacatttaaca

SEQ ID NO: 5103430 - DNA, 25 bp, Homo sapien
tagatctagttcacatactgtgttg

SEQ ID NO: 5103431 - DNA, 25 bp, Homo sapien
tatatccaggaaatgtcccatgtgc

SEQ ID NO: 5103432 - DNA, 25 bp, Homo sapien
cagaaaagatactttgcatggtttc

SEQ ID NO: 5103433 - DNA, 25 bp, Homo sapien
acaagtgtgtagtttaaaatccaca

SEQ ID NO: 5103434 - DNA, 25 bp, Homo sapien
agtgtgagtcttccactcttgttct

SEQ ID NO: 5103435 - DNA, 25 bp, Homo sapien
tggtgtctacccaagaaatcactcc

SEQ ID NO: 5103436 - DNA, 25 bp, Homo sapien
gagatttatggtcttagcccttaca

SEQ ID NO: 5103437 - DNA, 25 bp, Homo sapien
gaaaatcactgaccttattatatgc

SEQ ID NO: 5103438 - DNA, 25 bp, Homo sapien
atttttaagtatgcagttaatagta

SEQ ID NO: 5103439 - DNA, 25 bp, Homo sapien
tgtgatcttgatttcatataagtga

SEQ ID NO: 5103440 - DNA, 25 bp, Homo sapien
tctgtgatcttgatttcatataagt

SEQ ID NO: 5103441 - DNA, 25 bp, Homo sapien
cagttaatagtattagtatattcac

SEQ ID NO: 5103442 - DNA, 25 bp, Homo sapien
tgaaaacttgctccgtcacatcagt

SEQ ID NO: 5103443 - DNA, 25 bp, Homo sapien
acagggctgatgaaaaaagtttggc

SEQ ID NO: 5103444 - DNA, 25 bp, Homo sapien
caaagaatatccacagatcagtaag

SEQ ID NO: 5103445 - DNA, 25 bp, Homo sapien
tacacaaggtactactgcacacttc

SEQ ID NO: 5103446 - DNA, 25 bp, Homo sapien
gatgctgtaatgctaatatgctatg

SEQ ID NO: 5103447 - DNA, 25 bp, Homo sapien
tgtaatgctaatatgctatgtttcc

SEQ ID NO: 5103448 - DNA, 25 bp, Homo sapien
ctgatgctgtaatgctaatatgcta

SEQ ID NO: 5103449 - DNA, 25 bp, Homo sapien
tgctgtaatgctaatatgctatgtt

SEQ ID NO: 5103450 - DNA, 25 bp, Homo sapien
taaggcagagtggtccacacttacc

SEQ ID NO: 5103451 - DNA, 25 bp, Homo sapien
gaactgtatctaactcgaaggccta

SEQ ID NO: 5103452 - DNA, 25 bp, Homo sapien
tctgacagttgtgtgtatgggctgc

SEQ ID NO: 5103453 - DNA, 25 bp, Homo sapien
tatgggctgctacaagatcctgtgt

SEQ ID NO: 5103454 - DNA, 25 bp, Homo sapien
tcttactagttaattttgcaggcag

SEQ ID NO: 5103455 - DNA, 25 bp, Homo sapien
caaatgatacagctattgtcccaac

SEQ ID NO: 5103456 - DNA, 25 bp, Homo sapien
catgtgaacggtaataaagctacct

SEQ ID NO: 5103457 - DNA, 25 bp, Homo sapien
tcttccacggatacagccacatatt

SEQ ID NO: 5103458 - DNA, 25 bp, Homo sapien
agtcagcacacacttcttcagggat

SEQ ID NO: 5103459 - DNA, 25 bp, Homo sapien
caagtcagcacacacttcttcaggg

SEQ ID NO: 5103460 - DNA, 25 bp, Homo sapien
taggcatcccaactggtcctttcac

SEQ ID NO: 5103461 - DNA, 25 bp, Homo sapien
cagcacacacttcttcagggatttt

SEQ ID NO: 5103462 - DNA, 25 bp, Homo sapien
attggtgatttttactcctcggtag

SEQ ID NO: 5103463 - DNA, 25 bp, Homo sapien
gcatttggctttcgccccaaaacag

SEQ ID NO: 5103464 - DNA, 25 bp, Homo sapien
gataaaccatttctccacgatgtag

SEQ ID NO: 5103465 - DNA, 25 bp, Homo sapien
gtaacttctttacaccatacaagca

SEQ ID NO: 5103466 - DNA, 25 bp, Homo sapien
ttgaggattcagagacttgtagtca

SEQ ID NO: 5103467 - DNA, 25 bp, Homo sapien
attgaaactacgtatttttcttgct

SEQ ID NO: 5103468 - DNA, 25 bp, Homo sapien
actacgtatttttcttgctcatcaa

SEQ ID NO: 5103469 - DNA, 25 bp, Homo sapien
cctgcagagaagccaaaattgaaac

SEQ ID NO: 5103470 - DNA, 25 bp, Homo sapien
aaactacgtatttttcttgctcatc

SEQ ID NO: 5103471 - DNA, 25 bp, Homo sapien
tcgggaaattcctatgctggcaaat

SEQ ID NO: 5103472 - DNA, 25 bp, Homo sapien
gaagtctactgctccgctgataggc

SEQ ID NO: 5103473 - DNA, 25 bp, Homo sapien
tagttcttggccactgaaatgtgcc

SEQ ID NO: 5103474 - DNA, 25 bp, Homo sapien
taggctgttgtagttcaggctcccg

SEQ ID NO: 5103475 - DNA, 25 bp, Homo sapien
tcttagcaaggtctagatctctact

SEQ ID NO: 5103476 - DNA, 25 bp, Homo sapien
tcctcacaaataaagggtggagaca

SEQ ID NO: 5103477 - DNA, 25 bp, Homo sapien
tccaagttactaccgatgtctagag

SEQ ID NO: 5103478 - DNA, 25 bp, Homo sapien
taggagattctggatctgatctgca

SEQ ID NO: 5103479 - DNA, 25 bp, Homo sapien
gatttaaagtggttctatcagcatc

SEQ ID NO: 5103480 - DNA, 25 bp, Homo sapien
tttaaagtggttctatcagcatctg

SEQ ID NO: 5103481 - DNA, 25 bp, Homo sapien
tgatttaaagtggttctatcagcat

SEQ ID NO: 5103482 - DNA, 25 bp, Homo sapien
taaagtggttctatcagcatctgga

SEQ ID NO: 5103483 - DNA, 25 bp, Homo sapien
ttacacttcacctttaatcatttgt

SEQ ID NO: 5103484 - DNA, 25 bp, Homo sapien
cacttcacctttaatcatttgtagc

SEQ ID NO: 5103485 - DNA, 25 bp, Homo sapien
cttcacctttaatcatttgtagcat

SEQ ID NO: 5103486 - DNA, 25 bp, Homo sapien
acacttcacctttaatcatttgtag

SEQ ID NO: 5103487 - DNA, 25 bp, Homo sapien
gcttttatgaatatctttagaagta

SEQ ID NO: 5103488 - DNA, 25 bp, Homo sapien
tgcttttatgaatatctttagaagt

SEQ ID NO: 5103489 - DNA, 25 bp, Homo sapien
tttatgaatatctttagaagtaaat

SEQ ID NO: 5103490 - DNA, 25 bp, Homo sapien
cttttatgaatatctttagaagtaa

SEQ ID NO: 5103491 - DNA, 25 bp, Homo sapien
gtacccagagataataactgtagaa

SEQ ID NO: 5103492 - DNA, 25 bp, Homo sapien
acccagagataataactgtagaatc

SEQ ID NO: 5103493 - DNA, 25 bp, Homo sapien
tacccagagataataactgtagaat

SEQ ID NO: 5103494 - DNA, 25 bp, Homo sapien
cattacatgatgtggagtcagacag

SEQ ID NO: 5103495 - DNA, 25 bp, Homo sapien
tagaaatagaccaactctcagaagg

SEQ ID NO: 5103496 - DNA, 25 bp, Homo sapien
taatgtactgagcactggcacatgg

SEQ ID NO: 5103497 - DNA, 25 bp, Homo sapien
cagttccaccacttaattatgggca

SEQ ID NO: 5103498 - DNA, 25 bp, Homo sapien
aatgtataagtgataacgataagtc

SEQ ID NO: 5103499 - DNA, 25 bp, Homo sapien
taagtgtagctattactttatttca

SEQ ID NO: 5103500 - DNA, 25 bp, Homo sapien
ttcatattatgtgaaaccatctttt

SEQ ID NO: 5103501 - DNA, 25 bp, Homo sapien
taagtctaagttcatgttgaatagg

SEQ ID NO: 5103502 - DNA, 25 bp, Homo sapien
taaccaacttctggctttagatgtc

SEQ ID NO: 5103503 - DNA, 25 bp, Homo sapien
ttttggagaacaacagatactgtcc

SEQ ID NO: 5103504 - DNA, 25 bp, Homo sapien
ctgtggcgataatcctttaaatcct

SEQ ID NO: 5103505 - DNA, 25 bp, Homo sapien
gcacaaatattcatactccttatag

SEQ ID NO: 5103506 - DNA, 25 bp, Homo sapien
tattgtgcttattccccgcctttaa

SEQ ID NO: 5103507 - DNA, 25 bp, Homo sapien
cgcctttaaggctgcatctcttctt

SEQ ID NO: 5103508 - DNA, 25 bp, Homo sapien
ttgcttgctcaagcagaactcttgc

SEQ ID NO: 5103509 - DNA, 25 bp, Homo sapien
cttcttgtctagataacaatcgatg

SEQ ID NO: 5103510 - DNA, 25 bp, Homo sapien
gaataatgatcaaatggtcctacaa

SEQ ID NO: 5103511 - DNA, 25 bp, Homo sapien
gttcagtaagtgcaccaagtattca

SEQ ID NO: 5103512 - DNA, 25 bp, Homo sapien
caagtattcacaatgtacagtccgt

SEQ ID NO: 5103513 - DNA, 25 bp, Homo sapien
tcatcactaacactgctctgtagga

SEQ ID NO: 5103514 - DNA, 25 bp, Homo sapien
tttgggtaaacgtgaaacacatgca

SEQ ID NO: 5103515 - DNA, 25 bp, Homo sapien
tacctagctatatggcacagagctg

SEQ ID NO: 5103516 - DNA, 25 bp, Homo sapien
aacctggcatgtagctacctagcta

SEQ ID NO: 5103517 - DNA, 25 bp, Homo sapien
catagtctcataagcaatagggtac

SEQ ID NO: 5103518 - DNA, 25 bp, Homo sapien
tgattcaaggcagaactgaaagctg

SEQ ID NO: 5103519 - DNA, 25 bp, Homo sapien
cagagtcccaggatatgggaaaagc

SEQ ID NO: 5103520 - DNA, 25 bp, Homo sapien
tataagcttaagtacccaagtggca

SEQ ID NO: 5103521 - DNA, 25 bp, Homo sapien
taaggatttggcatacacacatcat

SEQ ID NO: 5103522 - DNA, 25 bp, Homo sapien
ctttaagggaaattacagcttatat

SEQ ID NO: 5103523 - DNA, 25 bp, Homo sapien
taaagtcactgcactactgtggcac

SEQ ID NO: 5103524 - DNA, 25 bp, Homo sapien
ccaccctgtcaaagaaggtcagaaa

SEQ ID NO: 5103525 - DNA, 25 bp, Homo sapien
tgaacacaaggaagctcacctggta

SEQ ID NO: 5103526 - DNA, 25 bp, Homo sapien
gcaaggtggcgcaatgatttctgac

SEQ ID NO: 5103527 - DNA, 25 bp, Homo sapien
ctcagaggcaggtgataatgaaact

SEQ ID NO: 5103528 - DNA, 25 bp, Homo sapien
acaggctgctcctagtgcaggctag

SEQ ID NO: 5103529 - DNA, 25 bp, Homo sapien
tgatgatattggagactcagaggca

SEQ ID NO: 5103530 - DNA, 25 bp, Homo sapien
tgtcaaaagttagggagcacactat

SEQ ID NO: 5103531 - DNA, 25 bp, Homo sapien
gatagatttgtcatgacaggctgat

SEQ ID NO: 5103532 - DNA, 25 bp, Homo sapien
cagtgtgagcctaaaagaagccagt

SEQ ID NO: 5103533 - DNA, 25 bp, Homo sapien
tggcacctactcatgcagaaggaga

SEQ ID NO: 5103534 - DNA, 25 bp, Homo sapien
cagtcagactggcacctactcatgc

SEQ ID NO: 5103535 - DNA, 25 bp, Homo sapien
atctggcccaacaaatgcactgcca

SEQ ID NO: 5103536 - DNA, 25 bp, Homo sapien
gagctgaacgctctctggctcctta

SEQ ID NO: 5103537 - DNA, 25 bp, Homo sapien
gcccaacaaatgcactgccagtcat

SEQ ID NO: 5103538 - DNA, 25 bp, Homo sapien
ggctgctcttttgtaggcaaaaagg

SEQ ID NO: 5103539 - DNA, 25 bp, Homo sapien
ccatgctatacaaataaagaatcct

SEQ ID NO: 5103540 - DNA, 25 bp, Homo sapien
tgttttgcagtgttataccatgcta

SEQ ID NO: 5103541 - DNA, 25 bp, Homo sapien
gaggctttcctttaagcattctggg

SEQ ID NO: 5103542 - DNA, 25 bp, Homo sapien
cagaaatagtttgagcctccaaaaa

SEQ ID NO: 5103543 - DNA, 25 bp, Homo sapien
taacatcttcaggataaggcaaaag

SEQ ID NO: 5103544 - DNA, 25 bp, Homo sapien
acatcttcaggataaggcaaaagtc

SEQ ID NO: 5103545 - DNA, 25 bp, Homo sapien
aacatcttcaggataaggcaaaagt

SEQ ID NO: 5103546 - DNA, 25 bp, Homo sapien
ctccagtgggatggcatatctgtgt

SEQ ID NO: 5103547 - DNA, 25 bp, Homo sapien
tctccagtgggatggcatatctgtg

SEQ ID NO: 5103548 - DNA, 25 bp, Homo sapien
taatggtgagtttgatgatggctgc

SEQ ID NO: 5103549 - DNA, 25 bp, Homo sapien
tgatgtcagagccaggtgttcagct

SEQ ID NO: 5103550 - DNA, 25 bp, Homo sapien
gcctcaggcaactaagtttaagtgt

SEQ ID NO: 5103551 - DNA, 25 bp, Homo sapien
taagtttagagtcacaacattccac

SEQ ID NO: 5103552 - DNA, 25 bp, Homo sapien
gcaatgtgatggtatgcttcctgaa

SEQ ID NO: 5103553 - DNA, 25 bp, Homo sapien
gacacaagcttattcataggtgagg

SEQ ID NO: 5103554 - DNA, 25 bp, Homo sapien
ccagcctgagcaactgggctacata

SEQ ID NO: 5103555 - DNA, 25 bp, Homo sapien
aatctcgactagtcatgatggcaca

SEQ ID NO: 5103556 - DNA, 25 bp, Homo sapien
catgctgcagccaactgtattttcc

SEQ ID NO: 5103557 - DNA, 25 bp, Homo sapien
agctcttaggtaaatgtccgatggg

SEQ ID NO: 5103558 - DNA, 25 bp, Homo sapien
tccgatggggaaccagatagtcatg

SEQ ID NO: 5103559 - DNA, 25 bp, Homo sapien
gatggccacaacagttatcgctcat

SEQ ID NO: 5103560 - DNA, 25 bp, Homo sapien
ctggcaggacatctgagtagatgtt

SEQ ID NO: 5103561 - DNA, 25 bp, Homo sapien
aataaaatggatactaggatgtgag

SEQ ID NO: 5103562 - DNA, 25 bp, Homo sapien
gatgttagtaggtagttgagaaata

SEQ ID NO: 5103563 - DNA, 25 bp, Homo sapien
aatggatactaggatgtgaggtcag

SEQ ID NO: 5103564 - DNA, 25 bp, Homo sapien
tggtctttagcacataatttgtgct

SEQ ID NO: 5103565 - DNA, 25 bp, Homo sapien
tctttagcacataatttgtgctagg

SEQ ID NO: 5103566 - DNA, 25 bp, Homo sapien
gcacataatttgtgctaggtgctgt

SEQ ID NO: 5103567 - DNA, 25 bp, Homo sapien
tagcacataatttgtgctaggtgct

SEQ ID NO: 5103568 - DNA, 25 bp, Homo sapien
agctgccgacgtcgctcttcatctt

SEQ ID NO: 5103569 - DNA, 25 bp, Homo sapien
tctctctcagctgccgacgtcgctc

SEQ ID NO: 5103570 - DNA, 25 bp, Homo sapien
tcttcactccagatcgagcttctgc

SEQ ID NO: 5103571 - DNA, 25 bp, Homo sapien
tctgctattagctgacgagctctct

SEQ ID NO: 5103572 - DNA, 25 bp, Homo sapien
cctaacagggcgaatgagcattacc

SEQ ID NO: 5103573 - DNA, 25 bp, Homo sapien
gaagaccagagggacagatacacag

SEQ ID NO: 5103574 - DNA, 25 bp, Homo sapien
tgaggcactgtacctggcaagatgg

SEQ ID NO: 5103575 - DNA, 25 bp, Homo sapien
tagtctgtggcctattaagaacctg

SEQ ID NO: 5103576 - DNA, 25 bp, Homo sapien
cgggagtatcaaggtcattttctaa

SEQ ID NO: 5103577 - DNA, 25 bp, Homo sapien
gatctcctcgttagtatctatctca

SEQ ID NO: 5103578 - DNA, 25 bp, Homo sapien
ttcagggatctcctcgttagtatct

SEQ ID NO: 5103579 - DNA, 25 bp, Homo sapien
taagttagtaagttcatctccacct

SEQ ID NO: 5103580 - DNA, 25 bp, Homo sapien
cagcactggagggtgaatttgccac

SEQ ID NO: 5103581 - DNA, 25 bp, Homo sapien
tgccacctgtggctgaacttctagg

SEQ ID NO: 5103582 - DNA, 25 bp, Homo sapien
gaacttctaggagcttcttcagctt

SEQ ID NO: 5103583 - DNA, 25 bp, Homo sapien
caagtccaccaacttactgttttgt

SEQ ID NO: 5103584 - DNA, 25 bp, Homo sapien
tgtaatcgttcagtccggagatctt

SEQ ID NO: 5103585 - DNA, 25 bp, Homo sapien
gctgaacacaacaggatttctaaaa

SEQ ID NO: 5103586 - DNA, 25 bp, Homo sapien
caatatattggctgaaagactgaag

SEQ ID NO: 5103587 - DNA, 25 bp, Homo sapien
ctgactgtagaatctttgctgaaca

SEQ ID NO: 5103588 - DNA, 25 bp, Homo sapien
tttcagttatcgctgccttctcctc

SEQ ID NO: 5103589 - DNA, 25 bp, Homo sapien
ctctgagtttcagttatcgctgcct

SEQ ID NO: 5103590 - DNA, 25 bp, Homo sapien
gagtttcagttatcgctgccttctc

SEQ ID NO: 5103591 - DNA, 25 bp, Homo sapien
tctgagtttcagttatcgctgcctt

SEQ ID NO: 5103592 - DNA, 25 bp, Homo sapien
gaattatcagcaatcatgaaaccac

SEQ ID NO: 5103593 - DNA, 25 bp, Homo sapien
agtttggaattatcagcaatcatga

SEQ ID NO: 5103594 - DNA, 25 bp, Homo sapien
tggaattatcagcaatcatgaaacc

SEQ ID NO: 5103595 - DNA, 25 bp, Homo sapien
tatcagcaatcatgaaaccacacaa

SEQ ID NO: 5103596 - DNA, 25 bp, Homo sapien
gaccatgaaagtatccaacctgaga

SEQ ID NO: 5103597 - DNA, 25 bp, Homo sapien
aattctccttagagttaagtcagag

SEQ ID NO: 5103598 - DNA, 25 bp, Homo sapien
caccaatggcacttttaactcaaaa

SEQ ID NO: 5103599 - DNA, 25 bp, Homo sapien
gagttctagtaaggaattgaccatg

SEQ ID NO: 5103600 - DNA, 25 bp, Homo sapien
tgtgtccatgagatagcgaaggcgc

SEQ ID NO: 5103601 - DNA, 25 bp, Homo sapien
accagcgcggcacgggtgtcaattt

SEQ ID NO: 5103602 - DNA, 25 bp, Homo sapien
aattctcctactacatactgactgg

SEQ ID NO: 5103603 - DNA, 25 bp, Homo sapien
ttctctagtgctgccaattctccta

SEQ ID NO: 5103604 - DNA, 25 bp, Homo sapien
tttacagtgtaattgggcaccgtac

SEQ ID NO: 5103605 - DNA, 25 bp, Homo sapien
tataagagtttgtgaacgctcaatt

SEQ ID NO: 5103606 - DNA, 25 bp, Homo sapien
gtttacagtgtaattgggcaccgta

SEQ ID NO: 5103607 - DNA, 25 bp, Homo sapien
gtgaacgctcaatttgccaaaactg

SEQ ID NO: 5103608 - DNA, 25 bp, Homo sapien
gctgaacattcaggcttcaaagatt

SEQ ID NO: 5103609 - DNA, 25 bp, Homo sapien
caaggcagttttgctgaacattcag

SEQ ID NO: 5103610 - DNA, 25 bp, Homo sapien
caggcttcaaagattcacacttcca

SEQ ID NO: 5103611 - DNA, 25 bp, Homo sapien
ttcaaggcagttttgctgaacattc

SEQ ID NO: 5103612 - DNA, 25 bp, Homo sapien
tcccatgaaggcactcttatcacca

SEQ ID NO: 5103613 - DNA, 25 bp, Homo sapien
ggcgagttatcacttcccatgaagg

SEQ ID NO: 5103614 - DNA, 25 bp, Homo sapien
aaggcactcttatcaccagggccca

SEQ ID NO: 5103615 - DNA, 25 bp, Homo sapien
cggtatcagggcgagttatcacttc

SEQ ID NO: 5103616 - DNA, 25 bp, Homo sapien
ttttggtctaaatctgcagtagcag

SEQ ID NO: 5103617 - DNA, 25 bp, Homo sapien
gatccagttaggatcagattctgtc

SEQ ID NO: 5103618 - DNA, 25 bp, Homo sapien
tcagttttggtctaaatctgcagta

SEQ ID NO: 5103619 - DNA, 25 bp, Homo sapien
tgcagtagcagatccagttaggatc

SEQ ID NO: 5103620 - DNA, 25 bp, Homo sapien
tccctctggtgaaggcataacaagt

SEQ ID NO: 5103621 - DNA, 25 bp, Homo sapien
aagagttgttagaaagtgaattctc

SEQ ID NO: 5103622 - DNA, 25 bp, Homo sapien
tggcttcttccgctgagtttattgg

SEQ ID NO: 5103623 - DNA, 25 bp, Homo sapien
tggaattataatcccctctggcttc

SEQ ID NO: 5103624 - DNA, 25 bp, Homo sapien
ctggcttcttggtaatatagccatc

SEQ ID NO: 5103625 - DNA, 25 bp, Homo sapien
tggtaatatagccatcaggcatctt

SEQ ID NO: 5103626 - DNA, 25 bp, Homo sapien
cttttctccacaactgcagacttca

SEQ ID NO: 5103627 - DNA, 25 bp, Homo sapien
ctctcctgcagtaagtcatatatct

SEQ ID NO: 5103628 - DNA, 25 bp, Homo sapien
gctgccattaaagtccattccacgg

SEQ ID NO: 5103629 - DNA, 25 bp, Homo sapien
gaatacagacattagtgcaacactg

SEQ ID NO: 5103630 - DNA, 25 bp, Homo sapien
taaacatgcattttagggtgctagc

SEQ ID NO: 5103631 - DNA, 25 bp, Homo sapien
tcagacattccactatccagaagag

SEQ ID NO: 5103632 - DNA, 25 bp, Homo sapien
gctttgagccaacctctaattctgg

SEQ ID NO: 5103633 - DNA, 25 bp, Homo sapien
tccacatgagtaaggtagactacga

SEQ ID NO: 5103634 - DNA, 25 bp, Homo sapien
cactggaacctaggaaacttactct

SEQ ID NO: 5103635 - DNA, 25 bp, Homo sapien
gatgcaaaacccaggagtaatccct

SEQ ID NO: 5103636 - DNA, 25 bp, Homo sapien
cacaaaaagcattcgaaattctcat

SEQ ID NO: 5103637 - DNA, 25 bp, Homo sapien
taagttgagaatattcaacgagtgc

SEQ ID NO: 5103638 - DNA, 25 bp, Homo sapien
ttcaacgagtgcgtccactgaaaag

SEQ ID NO: 5103639 - DNA, 25 bp, Homo sapien
gaaaagcaccaggtcctaacacaaa

SEQ ID NO: 5103640 - DNA, 25 bp, Homo sapien
acctaggcgcaagtaatcttcccat

SEQ ID NO: 5103641 - DNA, 25 bp, Homo sapien
gagtagtaatcacatatagccctta

SEQ ID NO: 5103642 - DNA, 25 bp, Homo sapien
gcccttaaaggacagaacatagcaa

SEQ ID NO: 5103643 - DNA, 25 bp, Homo sapien
cagagcagtacatgcaatagtcagt

SEQ ID NO: 5103644 - DNA, 25 bp, Homo sapien
tgccatagccccatagtggtgatgg

SEQ ID NO: 5103645 - DNA, 25 bp, Homo sapien
gatttaattacttagagtgggctgt

SEQ ID NO: 5103646 - DNA, 25 bp, Homo sapien
tgtcacctagaccaacaataatcct

SEQ ID NO: 5103647 - DNA, 25 bp, Homo sapien
gctgtggtggtaaagcagtcttgtt

SEQ ID NO: 5103648 - DNA, 25 bp, Homo sapien
ctagaggagaatacggtaagtacaa

SEQ ID NO: 5103649 - DNA, 25 bp, Homo sapien
taagagctcattaaagagctgtcag

SEQ ID NO: 5103650 - DNA, 25 bp, Homo sapien
aaagagctgtcagtgcggtactttg

SEQ ID NO: 5103651 - DNA, 25 bp, Homo sapien
gtgcggtactttgaatatgcatgaa

SEQ ID NO: 5103652 - DNA, 25 bp, Homo sapien
tatgcatgaagcatataatcagatc

SEQ ID NO: 5103653 - DNA, 25 bp, Homo sapien
gaatgcaacttcctcagcttagaca

SEQ ID NO: 5103654 - DNA, 25 bp, Homo sapien
aaaggccaattgtaccctggtgaag

SEQ ID NO: 5103655 - DNA, 25 bp, Homo sapien
tgttcgtagctctaatgcatgagga

SEQ ID NO: 5103656 - DNA, 25 bp, Homo sapien
tcaggcaatactagaagcaatcagc

SEQ ID NO: 5103657 - DNA, 25 bp, Homo sapien
ccatgtgatgtcttgacactggtca

SEQ ID NO: 5103658 - DNA, 25 bp, Homo sapien
tataggctgcgataggcacaaatcc

SEQ ID NO: 5103659 - DNA, 25 bp, Homo sapien
tgacactggtcatgtgatataggct

SEQ ID NO: 5103660 - DNA, 25 bp, Homo sapien
ttggaccatgtgatgtcttgacact

SEQ ID NO: 5103661 - DNA, 25 bp, Homo sapien
taatggtacgaagccgacttaggac

SEQ ID NO: 5103662 - DNA, 25 bp, Homo sapien
gatagctatgtctatcacacatgtg

SEQ ID NO: 5103663 - DNA, 25 bp, Homo sapien
tagctgttgtttaccagtagggaga

SEQ ID NO: 5103664 - DNA, 25 bp, Homo sapien
cccttctccacaggtaagtatgatt

SEQ ID NO: 5103665 - DNA, 25 bp, Homo sapien
gcttcttcttcttctgtgttccttc

SEQ ID NO: 5103666 - DNA, 25 bp, Homo sapien
tagcttcttcttcttctgtgttcct

SEQ ID NO: 5103667 - DNA, 25 bp, Homo sapien
atagcttcttcttcttctgtgttcc

SEQ ID NO: 5103668 - DNA, 25 bp, Homo sapien
catagcttcttcttcttctgtgttc

SEQ ID NO: 5103669 - DNA, 25 bp, Homo sapien
gaagagagagctgattcattctcct

SEQ ID NO: 5103670 - DNA, 25 bp, Homo sapien
taccgtcgttctaaatcatgttctt

SEQ ID NO: 5103671 - DNA, 25 bp, Homo sapien
ttgccctcaattcccggttcagcag

SEQ ID NO: 5103672 - DNA, 25 bp, Homo sapien
ggttcagcagctcataccgtcgttc

SEQ ID NO: 5103673 - DNA, 25 bp, Homo sapien
ctagcattgccctcaattcccggtt

SEQ ID NO: 5103674 - DNA, 25 bp, Homo sapien
tatatagggccaattattcactccc

SEQ ID NO: 5103675 - DNA, 25 bp, Homo sapien
ggcttggacaaactacaatgtgggt

SEQ ID NO: 5103676 - DNA, 25 bp, Homo sapien
caagattcacattcgcatgttcaag

SEQ ID NO: 5103677 - DNA, 25 bp, Homo sapien
aactgcactgactttggcttggaca

SEQ ID NO: 5103678 - DNA, 25 bp, Homo sapien
ctctctggccagactgtaagggctt

SEQ ID NO: 5103679 - DNA, 25 bp, Homo sapien
tgtaagggcttgtagctgtcaatca

SEQ ID NO: 5103680 - DNA, 25 bp, Homo sapien
tctttgctggtctgatgatttcctt

SEQ ID NO: 5103681 - DNA, 25 bp, Homo sapien
tagaaacaggaccaaatcgaacatt

SEQ ID NO: 5103682 - DNA, 25 bp, Homo sapien
ggtgaaggcttcctcgctaaaagtc

SEQ ID NO: 5103683 - DNA, 25 bp, Homo sapien
gtctacttcctaaacaggtcctgtg

SEQ ID NO: 5103684 - DNA, 25 bp, Homo sapien
cagaagacgggaggctagttaccca

SEQ ID NO: 5103685 - DNA, 25 bp, Homo sapien
gcagtgttggaacctgcttagaacc

SEQ ID NO: 5103686 - DNA, 25 bp, Homo sapien
caccagctcatctagcagaagctgt

SEQ ID NO: 5103687 - DNA, 25 bp, Homo sapien
tgcgcgtccaggtccctgacgagcg

SEQ ID NO: 5103688 - DNA, 25 bp, Homo sapien
tgttcgcgtcgcttctgggcctcgg

SEQ ID NO: 5103689 - DNA, 25 bp, Homo sapien
agcgcatcgcgcttgttcaccaggg

SEQ ID NO: 5103690 - DNA, 25 bp, Homo sapien
tccccagcgggaatggggagcacca

SEQ ID NO: 5103691 - DNA, 25 bp, Homo sapien
ttgaactttccgcacacttctcggc

SEQ ID NO: 5103692 - DNA, 25 bp, Homo sapien
cgtcgcccagtatttggatccccag

SEQ ID NO: 5103693 - DNA, 25 bp, Homo sapien
gccctcccgcgacctctggattgaa

SEQ ID NO: 5103694 - DNA, 25 bp, Homo sapien
tgctccagagttcgctccaaatgct

SEQ ID NO: 5103695 - DNA, 25 bp, Homo sapien
agagttcgctccaaatgctcatctt

SEQ ID NO: 5103696 - DNA, 25 bp, Homo sapien
tccagagttcgctccaaatgctcat

SEQ ID NO: 5103697 - DNA, 25 bp, Homo sapien
tttgctccagagttcgctccaaatg

SEQ ID NO: 5103698 - DNA, 25 bp, Homo sapien
cattcgtgagccaatgttgagaccc

SEQ ID NO: 5103699 - DNA, 25 bp, Homo sapien
gctcaccttcaaaccacagggcttg

SEQ ID NO: 5103700 - DNA, 25 bp, Homo sapien
gtaaagtagtacaatccagccaaac

SEQ ID NO: 5103701 - DNA, 25 bp, Homo sapien
taaactggtgcatatcaattagtcc

SEQ ID NO: 5103702 - DNA, 25 bp, Homo sapien
tgtggagacaaggatccagcatcca

SEQ ID NO: 5103703 - DNA, 25 bp, Homo sapien
accacgcagcgatgtccggatgcag

SEQ ID NO: 5103704 - DNA, 25 bp, Homo sapien
gatctgaggccgagggatctgacca

SEQ ID NO: 5103705 - DNA, 25 bp, Homo sapien
gaggtgaagccgtccagctcaaggc

SEQ ID NO: 5103706 - DNA, 25 bp, Homo sapien
gcgcagcgaggtgggacggcagtgc

SEQ ID NO: 5103707 - DNA, 25 bp, Homo sapien
gctctggaatgtgccagcgcggtcc

SEQ ID NO: 5103708 - DNA, 25 bp, Homo sapien
ccggcgctctcggttccagatgctg

SEQ ID NO: 5103709 - DNA, 25 bp, Homo sapien
acggcagtgcgctctggaatgtgcc

SEQ ID NO: 5103710 - DNA, 25 bp, Homo sapien
aaaagtcagcgacacgggcgcttct

SEQ ID NO: 5103711 - DNA, 25 bp, Homo sapien
gttcacaaaagtcagcgacacgggc

SEQ ID NO: 5103712 - DNA, 25 bp, Homo sapien
tcacaaaagtcagcgacacgggcgc

SEQ ID NO: 5103713 - DNA, 25 bp, Homo sapien
acaaaagtcagcgacacgggcgctt

SEQ ID NO: 5103714 - DNA, 25 bp, Homo sapien
taactgcttctcaaaggacccggga

SEQ ID NO: 5103715 - DNA, 25 bp, Homo sapien
ggtcggttcttttgttgatctctca

SEQ ID NO: 5103716 - DNA, 25 bp, Homo sapien
gcggccgccgctcatcaaagtgctt

SEQ ID NO: 5103717 - DNA, 25 bp, Homo sapien
gacactttcctttggagtccgaata

SEQ ID NO: 5103718 - DNA, 25 bp, Homo sapien
tccacatgctgcgtaaggatcctcc

SEQ ID NO: 5103719 - DNA, 25 bp, Homo sapien
gcgtaaggatcctccttgaggcgat

SEQ ID NO: 5103720 - DNA, 25 bp, Homo sapien
ttgaggcgatttccccggattgttc

SEQ ID NO: 5103721 - DNA, 25 bp, Homo sapien
ggattgttcgtacgggcgaagccca

SEQ ID NO: 5103722 - DNA, 25 bp, Homo sapien
cccaccaagggtgtttgcaagtctt

SEQ ID NO: 5103723 - DNA, 25 bp, Homo sapien
tactgaaacgttggagcccagcgtc

SEQ ID NO: 5103724 - DNA, 25 bp, Homo sapien
taagcgcttctactgaaacgttgga

SEQ ID NO: 5103725 - DNA, 25 bp, Homo sapien
tgcaagtcttaagcgcttctactga

SEQ ID NO: 5103726 - DNA, 25 bp, Homo sapien
ctccccgggtatgtgaacgcgaggc

SEQ ID NO: 5103727 - DNA, 25 bp, Homo sapien
tgccctccccgggtatgtgaacgcg

SEQ ID NO: 5103728 - DNA, 25 bp, Homo sapien
tgaacgcgaggcgagtgcgtaacgg

SEQ ID NO: 5103729 - DNA, 25 bp, Homo sapien
ttctactgccctccccgggtatgtg

SEQ ID NO: 5103730 - DNA, 25 bp, Homo sapien
ggaaatgtagcctgatgaagattga

SEQ ID NO: 5103731 - DNA, 25 bp, Homo sapien
tggaaatgtagcctgatgaagattg

SEQ ID NO: 5103732 - DNA, 25 bp, Homo sapien
tgtcttgctcggttgtttaggtgat

SEQ ID NO: 5103733 - DNA, 25 bp, Homo sapien
gtggcttgtcttgctcggttgttta

SEQ ID NO: 5103734 - DNA, 25 bp, Homo sapien
gatctctcacagagacccgccgggc

SEQ ID NO: 5103735 - DNA, 25 bp, Homo sapien
tgccctcagctgccggggccgttca

SEQ ID NO: 5103736 - DNA, 25 bp, Homo sapien
atctctcacagagacccgccgggca

SEQ ID NO: 5103737 - DNA, 25 bp, Homo sapien
ggggccgttcaccatctacctggat

SEQ ID NO: 5103738 - DNA, 25 bp, Homo sapien
gagataagggtaaccaacgcgctcc

SEQ ID NO: 5103739 - DNA, 25 bp, Homo sapien
aaaatgggactcaaagctgcgacgg

SEQ ID NO: 5103740 - DNA, 25 bp, Homo sapien
tcagcttggttacttcggaggaggc

SEQ ID NO: 5103741 - DNA, 25 bp, Homo sapien
tgcgacggctttgcgaagctgcagc

SEQ ID NO: 5103742 - DNA, 25 bp, Homo sapien
tcagctgcggccagcgtccttcgtt

SEQ ID NO: 5103743 - DNA, 25 bp, Homo sapien
gctgccatccttgtagctgaacccg

SEQ ID NO: 5103744 - DNA, 25 bp, Homo sapien
tgaagggtgactggcctagcacctc

SEQ ID NO: 5103745 - DNA, 25 bp, Homo sapien
agagaactaggcctcagcggcgtag

SEQ ID NO: 5103746 - DNA, 25 bp, Homo sapien
agtaacgggcccaggcttcgcagag

SEQ ID NO: 5103747 - DNA, 25 bp, Homo sapien
gcagtaacgggcccaggcttcgcag

SEQ ID NO: 5103748 - DNA, 25 bp, Homo sapien
ctcaaccgcagtaacgggcccaggc

SEQ ID NO: 5103749 - DNA, 25 bp, Homo sapien
caaccgcagtaacgggcccaggctt

SEQ ID NO: 5103750 - DNA, 25 bp, Homo sapien
tagagactacaaagggccaatgtgg

SEQ ID NO: 5103751 - DNA, 25 bp, Homo sapien
gccactgaaagatcgctgacgcgaa

SEQ ID NO: 5103752 - DNA, 25 bp, Homo sapien
caaaggttcacttggtgcccggacg

SEQ ID NO: 5103753 - DNA, 25 bp, Homo sapien
cccagagcatgaggcgttgtttcat

SEQ ID NO: 5103754 - DNA, 25 bp, Homo sapien
aactgggatccacaaggccttagcc

SEQ ID NO: 5103755 - DNA, 25 bp, Homo sapien
accgtcaatcggagccacttggctg

SEQ ID NO: 5103756 - DNA, 25 bp, Homo sapien
tacagaactgcgcagggtggtcaac

SEQ ID NO: 5103757 - DNA, 25 bp, Homo sapien
ctgccaagtcttgccccgggataga

SEQ ID NO: 5103758 - DNA, 25 bp, Homo sapien
ggtctgatgcgtctgggggcctggc

SEQ ID NO: 5103759 - DNA, 25 bp, Homo sapien
agggtctgatgcgtctgggggcctg

SEQ ID NO: 5103760 - DNA, 25 bp, Homo sapien
gggtctgatgcgtctgggggcctgg

SEQ ID NO: 5103761 - DNA, 25 bp, Homo sapien
tggaggcgccccgacggatccaggg

SEQ ID NO: 5103762 - DNA, 25 bp, Homo sapien
gagcggtgcagggctcccaccacgc

SEQ ID NO: 5103763 - DNA, 25 bp, Homo sapien
agcggtgcagggctcccaccacgca

SEQ ID NO: 5103764 - DNA, 25 bp, Homo sapien
gctgggtggaggcgccccgacggat

SEQ ID NO: 5103765 - DNA, 25 bp, Homo sapien
ggggttgtttgaggtaagacatcat

SEQ ID NO: 5103766 - DNA, 25 bp, Homo sapien
caggcccagcccgttcatgccgtat

SEQ ID NO: 5103767 - DNA, 25 bp, Homo sapien
gcccagcccgttcatgccgtatggg

SEQ ID NO: 5103768 - DNA, 25 bp, Homo sapien
ttcatgccgtatgggggttgtttga

SEQ ID NO: 5103769 - DNA, 25 bp, Homo sapien
cgagtcttggcgaagagcgcctcga

SEQ ID NO: 5103770 - DNA, 25 bp, Homo sapien
cgtccagctgtgaacgcgtgaaggt

SEQ ID NO: 5103771 - DNA, 25 bp, Homo sapien
tggactctagactccggcaggttga

SEQ ID NO: 5103772 - DNA, 25 bp, Homo sapien
catgaagatgtcagggtagcgagtc

SEQ ID NO: 5103773 - DNA, 25 bp, Homo sapien
cccagaccctggagcccggggagtg

SEQ ID NO: 5103774 - DNA, 25 bp, Homo sapien
agaccctggagcccggggagtgcgc

SEQ ID NO: 5103775 - DNA, 25 bp, Homo sapien
accctggagcccggggagtgcgcac

SEQ ID NO: 5103776 - DNA, 25 bp, Homo sapien
ccagaccctggagcccggggagtgc

SEQ ID NO: 5103777 - DNA, 25 bp, Homo sapien
caatctccgctcttccatttctagg

SEQ ID NO: 5103778 - DNA, 25 bp, Homo sapien
caggctccagccaatctccgctctt

SEQ ID NO: 5103779 - DNA, 25 bp, Homo sapien
atctccgctcttccatttctaggat

SEQ ID NO: 5103780 - DNA, 25 bp, Homo sapien
agaattcaggcctctaagggaaact

SEQ ID NO: 5103781 - DNA, 25 bp, Homo sapien
gctgctgctggcggcatttggcgcg

SEQ ID NO: 5103782 - DNA, 25 bp, Homo sapien
ctgctggcggcatttggcgcggcgg

SEQ ID NO: 5103783 - DNA, 25 bp, Homo sapien
cggctcttggttccgctcccgctct

SEQ ID NO: 5103784 - DNA, 25 bp, Homo sapien
tgctgctggcggcatttggcgcggc

SEQ ID NO: 5103785 - DNA, 25 bp, Homo sapien
tggcggcgtgaattggccactgctt

SEQ ID NO: 5103786 - DNA, 25 bp, Homo sapien
agaggacgaggcagagctggacaca

SEQ ID NO: 5103787 - DNA, 25 bp, Homo sapien
agctggacgccgagctagaggacga

SEQ ID NO: 5103788 - DNA, 25 bp, Homo sapien
acacagctggcggcgtgaattggcc

SEQ ID NO: 5103789 - DNA, 25 bp, Homo sapien
catacacgaggtgttgctaggcgcg

SEQ ID NO: 5103790 - DNA, 25 bp, Homo sapien
cctggccgtaggacatgggataaga

SEQ ID NO: 5103791 - DNA, 25 bp, Homo sapien
cgggctccagatagatgaggcagct

SEQ ID NO: 5103792 - DNA, 25 bp, Homo sapien
tagggtagccttggccgtagctgcc

SEQ ID NO: 5103793 - DNA, 25 bp, Homo sapien
gatgtgagtgcatgggcgctaggta

SEQ ID NO: 5103794 - DNA, 25 bp, Homo sapien
gcgctaggtatgagctgcagtccac

SEQ ID NO: 5103795 - DNA, 25 bp, Homo sapien
tgcatgggcgctaggtatgagctgc

SEQ ID NO: 5103796 - DNA, 25 bp, Homo sapien
tgcgggtggtgatgtgagtgcatgg

SEQ ID NO: 5103797 - DNA, 25 bp, Homo sapien
ctggctcaacgggtggtgcgcatgt

SEQ ID NO: 5103798 - DNA, 25 bp, Homo sapien
tcaacgggtggtgcgcatgtgggtg

SEQ ID NO: 5103799 - DNA, 25 bp, Homo sapien
tggtgcgcatgtgggtggtgatgat

SEQ ID NO: 5103800 - DNA, 25 bp, Homo sapien
tgaggactggctcaacgggtggtgc

SEQ ID NO: 5103801 - DNA, 25 bp, Homo sapien
acctggaaccgccatgaggcttggt

SEQ ID NO: 5103802 - DNA, 25 bp, Homo sapien
tgaggcttggtccttatagtccaga

SEQ ID NO: 5103803 - DNA, 25 bp, Homo sapien
cagtcggcagagttgaaggcaagcc

SEQ ID NO: 5103804 - DNA, 25 bp, Homo sapien
ccttgtaatccaagcagtcggcaga

SEQ ID NO: 5103805 - DNA, 25 bp, Homo sapien
tgttgggctcaaacagcggatcaga

SEQ ID NO: 5103806 - DNA, 25 bp, Homo sapien
gaaacacgccagttagtgactccag

SEQ ID NO: 5103807 - DNA, 25 bp, Homo sapien
tgactatgtacagcgttcccgccga

SEQ ID NO: 5103808 - DNA, 25 bp, Homo sapien
tatagaatgtgtaggccaagccgaa

SEQ ID NO: 5103809 - DNA, 25 bp, Homo sapien
ttcctgaaaccaagcggttctcttc

SEQ ID NO: 5103810 - DNA, 25 bp, Homo sapien
tcctccacacttcggatatcccgcg

SEQ ID NO: 5103811 - DNA, 25 bp, Homo sapien
aaccaagcggttctcttcaataaat

SEQ ID NO: 5103812 - DNA, 25 bp, Homo sapien
cacttcggatatcccgcgcccagct

SEQ ID NO: 5103813 - DNA, 25 bp, Homo sapien
tcggagaacgaaggtgcactaaaaa

SEQ ID NO: 5103814 - DNA, 25 bp, Homo sapien
ccaaaattgatacacaggcgcgcgg

SEQ ID NO: 5103815 - DNA, 25 bp, Homo sapien
gacgaagcggccaaagccaaaattg

SEQ ID NO: 5103816 - DNA, 25 bp, Homo sapien
tgtaaactggaactgcgaccctgtg

SEQ ID NO: 5103817 - DNA, 25 bp, Homo sapien
gggggactgccttacatttcaacaa

SEQ ID NO: 5103818 - DNA, 25 bp, Homo sapien
tattttcgggaagtaatgtagataa

SEQ ID NO: 5103819 - DNA, 25 bp, Homo sapien
gaagtaatgtagataaagaggagga

SEQ ID NO: 5103820 - DNA, 25 bp, Homo sapien
gaggagggggactgccttacatttc

SEQ ID NO: 5103821 - DNA, 25 bp, Homo sapien
cagtgccgtggggtttcagcacctg

SEQ ID NO: 5103822 - DNA, 25 bp, Homo sapien
ccagcgtcccggcagcctcaggtgg

SEQ ID NO: 5103823 - DNA, 25 bp, Homo sapien
tccctcttccggtttccactcagtg

SEQ ID NO: 5103824 - DNA, 25 bp, Homo sapien
tccggtttccactcagtgccgtggg

SEQ ID NO: 5103825 - DNA, 25 bp, Homo sapien
tctgaacgttgctaaattttcgcgg

SEQ ID NO: 5103826 - DNA, 25 bp, Homo sapien
caagttttcgttgaccactcaaaga

SEQ ID NO: 5103827 - DNA, 25 bp, Homo sapien
aaagaaaactgttgacgtctgaacg

SEQ ID NO: 5103828 - DNA, 25 bp, Homo sapien
taattgctccgattgtgtcacgaac

SEQ ID NO: 5103829 - DNA, 25 bp, Homo sapien
gcaatttttcattggaggaaccctc

SEQ ID NO: 5103830 - DNA, 25 bp, Homo sapien
ttgcaatttttcattggaggaaccc

SEQ ID NO: 5103831 - DNA, 25 bp, Homo sapien
tataaactattatctcaatagccat

SEQ ID NO: 5103832 - DNA, 25 bp, Homo sapien
aatttttcattggaggaaccctcag

SEQ ID NO: 5103833 - DNA, 25 bp, Homo sapien
cagtctggcccggttcaccccacct

SEQ ID NO: 5103834 - DNA, 25 bp, Homo sapien
actactgattgaccccctttccagt

SEQ ID NO: 5103835 - DNA, 25 bp, Homo sapien
gagtgcaatggttattcaccaggca

SEQ ID NO: 5103836 - DNA, 25 bp, Homo sapien
tacccaatgggcattttgcagccca

SEQ ID NO: 5103837 - DNA, 25 bp, Homo sapien
cgacagtgcaggaagtatgtgatgc

SEQ ID NO: 5103838 - DNA, 25 bp, Homo sapien
tgtgatgcagcctgacattacttgc

SEQ ID NO: 5103839 - DNA, 25 bp, Homo sapien
cacagtatgtttcacgtataagcac

SEQ ID NO: 5103840 - DNA, 25 bp, Homo sapien
gccactcagcattcaatagcagtga

SEQ ID NO: 5103841 - DNA, 25 bp, Homo sapien
tcctaggtataaacatgtgtatgtc

SEQ ID NO: 5103842 - DNA, 25 bp, Homo sapien
ttacagaatatattgggtcagaatt

SEQ ID NO: 5103843 - DNA, 25 bp, Homo sapien
tagtaatggttggtaatgtcttctc

SEQ ID NO: 5103844 - DNA, 25 bp, Homo sapien
gggattttgattagagctccactga

SEQ ID NO: 5103845 - DNA, 25 bp, Homo sapien
acaatattgtgtcgtcatagcttag

SEQ ID NO: 5103846 - DNA, 25 bp, Homo sapien
ttctttatccgctcgttgattggta

SEQ ID NO: 5103847 - DNA, 25 bp, Homo sapien
agtgtccattatacccaatttgaag

SEQ ID NO: 5103848 - DNA, 25 bp, Homo sapien
ccgctcgttgattggtatttggact

SEQ ID NO: 5103849 - DNA, 25 bp, Homo sapien
taaaaagacctatagctgctgctct

SEQ ID NO: 5103850 - DNA, 25 bp, Homo sapien
tgttggcatccctaattaccttggc

SEQ ID NO: 5103851 - DNA, 25 bp, Homo sapien
taccttggccattggcgcaggtcca

SEQ ID NO: 5103852 - DNA, 25 bp, Homo sapien
ggcataaaagccacccaagattgca

SEQ ID NO: 5103853 - DNA, 25 bp, Homo sapien
tgtagtttccataagtggccatgag

SEQ ID NO: 5103854 - DNA, 25 bp, Homo sapien
tcctacttcaacaggagaactcggt

SEQ ID NO: 5103855 - DNA, 25 bp, Homo sapien
gagaactcggttgtagtttccataa

SEQ ID NO: 5103856 - DNA, 25 bp, Homo sapien
cataagtggccatgagaaacatttc

SEQ ID NO: 5103857 - DNA, 25 bp, Homo sapien
tgaatgcattcatcccatgattcag

SEQ ID NO: 5103858 - DNA, 25 bp, Homo sapien
ccctgaatgcattcatcccatgatt

SEQ ID NO: 5103859 - DNA, 25 bp, Homo sapien
cctgaatgcattcatcccatgattc

SEQ ID NO: 5103860 - DNA, 25 bp, Homo sapien
ggctgcctgcattgactctgtgtag

SEQ ID NO: 5103861 - DNA, 25 bp, Homo sapien
tcattcttaaattagagccgtgact

SEQ ID NO: 5103862 - DNA, 25 bp, Homo sapien
cattcttaaattagagccgtgactt

SEQ ID NO: 5103863 - DNA, 25 bp, Homo sapien
tataagagagtgaactgcatctgca

SEQ ID NO: 5103864 - DNA, 25 bp, Homo sapien
agacccaccatactcctgatcaaga

SEQ ID NO: 5103865 - DNA, 25 bp, Homo sapien
tgtaactcctcgctgtcttctctgg

SEQ ID NO: 5103866 - DNA, 25 bp, Homo sapien
gcccaaattctagttgaggtatctg

SEQ ID NO: 5103867 - DNA, 25 bp, Homo sapien
aagacatcttaacatgcaggtcgtg

SEQ ID NO: 5103868 - DNA, 25 bp, Homo sapien
tagtttgggtctttcaaggaatcca

SEQ ID NO: 5103869 - DNA, 25 bp, Homo sapien
ccgttaatgtttgagagaattcacc

SEQ ID NO: 5103870 - DNA, 25 bp, Homo sapien
gacaataggtgtatgccactgttcc

SEQ ID NO: 5103871 - DNA, 25 bp, Homo sapien
catgtgacatgttggtttactgatc

SEQ ID NO: 5103872 - DNA, 25 bp, Homo sapien
tgtgacatgttggtttactgatcaa

SEQ ID NO: 5103873 - DNA, 25 bp, Homo sapien
acatgtgacatgttggtttactgat

SEQ ID NO: 5103874 - DNA, 25 bp, Homo sapien
gacatgttggtttactgatcaacta

SEQ ID NO: 5103875 - DNA, 25 bp, Homo sapien
actgaagacaaactgattctgggct

SEQ ID NO: 5103876 - DNA, 25 bp, Homo sapien
tgttcacagtggagcactccgtaag

SEQ ID NO: 5103877 - DNA, 25 bp, Homo sapien
gtagagtgactctcttagcacagac

SEQ ID NO: 5103878 - DNA, 25 bp, Homo sapien
actggatgttcgctttggcaccaaa

SEQ ID NO: 5103879 - DNA, 25 bp, Homo sapien
gctctgagcctcacagagggctgta

SEQ ID NO: 5103880 - DNA, 25 bp, Homo sapien
ggctctgagcctcacagagggctgt

SEQ ID NO: 5103881 - DNA, 25 bp, Homo sapien
aggctctgagcctcacagagggctg

SEQ ID NO: 5103882 - DNA, 25 bp, Homo sapien
aagctcttcttttttgcagttacgg

SEQ ID NO: 5103883 - DNA, 25 bp, Homo sapien
agttacggtgccctcaacttgcctc

SEQ ID NO: 5103884 - DNA, 25 bp, Homo sapien
tggccacggccactaacataacggc

SEQ ID NO: 5103885 - DNA, 25 bp, Homo sapien
tactccagtgtactttaccagtgta

SEQ ID NO: 5103886 - DNA, 25 bp, Homo sapien
tccttttggcctatgtgtcttcttt

SEQ ID NO: 5103887 - DNA, 25 bp, Homo sapien
cgagtaattgttgatcagttaaaac

SEQ ID NO: 5103888 - DNA, 25 bp, Homo sapien
ttgcattcctatgtatattcaagtc

SEQ ID NO: 5103889 - DNA, 25 bp, Homo sapien
gtaatattatatctcatcgagtaat

SEQ ID NO: 5103890 - DNA, 25 bp, Homo sapien
tcacagggtggataagaaaatgcat

SEQ ID NO: 5103891 - DNA, 25 bp, Homo sapien
taaaatgttcgggtagattatcaca

SEQ ID NO: 5103892 - DNA, 25 bp, Homo sapien
ccaagaaaatcacttggattgtttt

SEQ ID NO: 5103893 - DNA, 25 bp, Homo sapien
catacctcgactagaaagaaggtga

SEQ ID NO: 5103894 - DNA, 25 bp, Homo sapien
tgtggtccatgaacacttgaatgtt

SEQ ID NO: 5103895 - DNA, 25 bp, Homo sapien
ggatctgagttctacttgacatcat

SEQ ID NO: 5103896 - DNA, 25 bp, Homo sapien
tcagcctctagagaatacactgtgg

SEQ ID NO: 5103897 - DNA, 25 bp, Homo sapien
tgaatgtttctaggtggatctgagt

SEQ ID NO: 5103898 - DNA, 25 bp, Homo sapien
gaccattgcaccgttttttgccaag

SEQ ID NO: 5103899 - DNA, 25 bp, Homo sapien
tggaagagccctttgtagaccattg

SEQ ID NO: 5103900 - DNA, 25 bp, Homo sapien
ttgtagaccattgcaccgttttttg

SEQ ID NO: 5103901 - DNA, 25 bp, Homo sapien
gagccctttgtagaccattgcaccg

SEQ ID NO: 5103902 - DNA, 25 bp, Homo sapien
agcaggacaggacattcccatactc

SEQ ID NO: 5103903 - DNA, 25 bp, Homo sapien
tatagcaggacaggacattcccata

SEQ ID NO: 5103904 - DNA, 25 bp, Homo sapien
cctatagcaggacaggacattccca

SEQ ID NO: 5103905 - DNA, 25 bp, Homo sapien
tagcaggacaggacattcccatact

SEQ ID NO: 5103906 - DNA, 25 bp, Homo sapien
gctctaagccctccgtgaatgttga

SEQ ID NO: 5103907 - DNA, 25 bp, Homo sapien
gagtcttaaagttatgccaaacagg

SEQ ID NO: 5103908 - DNA, 25 bp, Homo sapien
caggaggtcacagtatacggttcta

SEQ ID NO: 5103909 - DNA, 25 bp, Homo sapien
ggaagaaacaggatgcgccttaaac

SEQ ID NO: 5103910 - DNA, 25 bp, Homo sapien
gctttgcttttatccgctgtgcgga

SEQ ID NO: 5103911 - DNA, 25 bp, Homo sapien
cttaggatccggaatgcggttggtg

SEQ ID NO: 5103912 - DNA, 25 bp, Homo sapien
ctgtgcggatgcctgcaagctcgcc

SEQ ID NO: 5103913 - DNA, 25 bp, Homo sapien
ttggtgcgccgtcccgctttgcttt

SEQ ID NO: 5103914 - DNA, 25 bp, Homo sapien
tctcgggtccgaggacctagcctag

SEQ ID NO: 5103915 - DNA, 25 bp, Homo sapien
agagaccaagcgagcgtgtcgctcc

SEQ ID NO: 5103916 - DNA, 25 bp, Homo sapien
gtgtcgctccctctcgggtccgagg

SEQ ID NO: 5103917 - DNA, 25 bp, Homo sapien
gagacccaagagaccaagcgagcgt

SEQ ID NO: 5103918 - DNA, 25 bp, Homo sapien
ctgtgattggaggacgacaacaaac

SEQ ID NO: 5103919 - DNA, 25 bp, Homo sapien
tggcgggagagatagcgtgtgtaac

SEQ ID NO: 5103920 - DNA, 25 bp, Homo sapien
gacaacaaacggatggtttgggctc

SEQ ID NO: 5103921 - DNA, 25 bp, Homo sapien
gagcccggcaattggcgggagagat

SEQ ID NO: 5103922 - DNA, 25 bp, Homo sapien
gcgctctgcgccgattgcaaagtag

SEQ ID NO: 5103923 - DNA, 25 bp, Homo sapien
caaagtagtccctgaggatgagccc

SEQ ID NO: 5103924 - DNA, 25 bp, Homo sapien
cggtgttagcgagaaaaggctccgc

SEQ ID NO: 5103925 - DNA, 25 bp, Homo sapien
gaactgtagtttacgctgccctggt

SEQ ID NO: 5103926 - DNA, 25 bp, Homo sapien
ctgcaaaatgagcctcagagagtca

SEQ ID NO: 5103927 - DNA, 25 bp, Homo sapien
gcaaaatgagcctcagagagtcagg

SEQ ID NO: 5103928 - DNA, 25 bp, Homo sapien
tgcaaaatgagcctcagagagtcag

SEQ ID NO: 5103929 - DNA, 25 bp, Homo sapien
caaaatgagcctcagagagtcaggt

SEQ ID NO: 5103930 - DNA, 25 bp, Homo sapien
gaaaactgcggggacaatttcaaca

SEQ ID NO: 5103931 - DNA, 25 bp, Homo sapien
attgaaaactgcggggacaatttca

SEQ ID NO: 5103932 - DNA, 25 bp, Homo sapien
gattgaaaactgcggggacaatttc

SEQ ID NO: 5103933 - DNA, 25 bp, Homo sapien
tgaaaactgcggggacaatttcaac

SEQ ID NO: 5103934 - DNA, 25 bp, Homo sapien
tcactgcggcaatccccagaagatg

SEQ ID NO: 5103935 - DNA, 25 bp, Homo sapien
catgcagcaggattaagatcgctcc

SEQ ID NO: 5103936 - DNA, 25 bp, Homo sapien
taccccgcaaggtggaaatcaatcc

SEQ ID NO: 5103937 - DNA, 25 bp, Homo sapien
cctttggaaaatagctgcagcgtcg

SEQ ID NO: 5103938 - DNA, 25 bp, Homo sapien
tgcccttgccttgaaaacgtgtctt

SEQ ID NO: 5103939 - DNA, 25 bp, Homo sapien
actggccccgttagacaggcagaga

SEQ ID NO: 5103940 - DNA, 25 bp, Homo sapien
ggaaattagtagctgtctccactgg

SEQ ID NO: 5103941 - DNA, 25 bp, Homo sapien
gagtaatgcccttgccttgaaaacg

SEQ ID NO: 5103942 - DNA, 25 bp, Homo sapien
ttcagggagttgagtacactgtctc

SEQ ID NO: 5103943 - DNA, 25 bp, Homo sapien
gaatcctccgctttgaatgagctta

SEQ ID NO: 5103944 - DNA, 25 bp, Homo sapien
tgtgttatctggcaccccagtgacc

SEQ ID NO: 5103945 - DNA, 25 bp, Homo sapien
taacttcatccggaatctcagctag

SEQ ID NO: 5103946 - DNA, 25 bp, Homo sapien
cattaactgcatgctctaggacaag

SEQ ID NO: 5103947 - DNA, 25 bp, Homo sapien
tctgtattaggccatgaagcgctct

SEQ ID NO: 5103948 - DNA, 25 bp, Homo sapien
gctgggtcctgtaaaactatcaaaa

SEQ ID NO: 5103949 - DNA, 25 bp, Homo sapien
tattttaggccagggaatccattgg

SEQ ID NO: 5103950 - DNA, 25 bp, Homo sapien
tttcaaaaaagaagtgtcaggccag

SEQ ID NO: 5103951 - DNA, 25 bp, Homo sapien
aaaagaagtgtcaggccagggatgg

SEQ ID NO: 5103952 - DNA, 25 bp, Homo sapien
aaaaaagaagtgtcaggccagggat

SEQ ID NO: 5103953 - DNA, 25 bp, Homo sapien
tcaaaaaagaagtgtcaggccaggg

SEQ ID NO: 5103954 - DNA, 25 bp, Homo sapien
ctgagacgaaacaaggatggatagc

SEQ ID NO: 5103955 - DNA, 25 bp, Homo sapien
ggatagcctcgaaggcttctttcaa

SEQ ID NO: 5103956 - DNA, 25 bp, Homo sapien
tttcaagcttctgacactaagctct

SEQ ID NO: 5103957 - DNA, 25 bp, Homo sapien
aagcttctgacactaagctctgaaa

SEQ ID NO: 5103958 - DNA, 25 bp, Homo sapien
tacttaaagttccttcttccagatg

SEQ ID NO: 5103959 - DNA, 25 bp, Homo sapien
tgatgtgactaagcccagaagtgtt

SEQ ID NO: 5103960 - DNA, 25 bp, Homo sapien
cttaaagttccttcttccagatgag

SEQ ID NO: 5103961 - DNA, 25 bp, Homo sapien
tggagaaatggtccactgatgtgac

SEQ ID NO: 5103962 - DNA, 25 bp, Homo sapien
gccactagagccacacaaatcctta

SEQ ID NO: 5103963 - DNA, 25 bp, Homo sapien
gcttcaactttgtctggaggaggaa

SEQ ID NO: 5103964 - DNA, 25 bp, Homo sapien
cagtatgtggtgatccaaaccctgg

SEQ ID NO: 5103965 - DNA, 25 bp, Homo sapien
ttatttcgggagaaacaacagcaac

SEQ ID NO: 5103966 - DNA, 25 bp, Homo sapien
tgcatctggctcagtagaaaatgaa

SEQ ID NO: 5103967 - DNA, 25 bp, Homo sapien
ttttgcatctggctcagtagaaaat

SEQ ID NO: 5103968 - DNA, 25 bp, Homo sapien
ttgcatctggctcagtagaaaatga

SEQ ID NO: 5103969 - DNA, 25 bp, Homo sapien
aatgtgctgcatatttacgtggtgt

SEQ ID NO: 5103970 - DNA, 25 bp, Homo sapien
cattaacatctttaagtactactgt

SEQ ID NO: 5103971 - DNA, 25 bp, Homo sapien
ttaacatctttaagtactactgtac

SEQ ID NO: 5103972 - DNA, 25 bp, Homo sapien
agacccattaacatctttaagtact

SEQ ID NO: 5103973 - DNA, 25 bp, Homo sapien
tgaaaaagacccattaacatcttta

SEQ ID NO: 5103974 - DNA, 25 bp, Homo sapien
gcagtgaatatgcaatttgaccagc

SEQ ID NO: 5103975 - DNA, 25 bp, Homo sapien
gaatatgcaatttgaccagctgctc

SEQ ID NO: 5103976 - DNA, 25 bp, Homo sapien
gatctttaccaaagacagatccatt

SEQ ID NO: 5103977 - DNA, 25 bp, Homo sapien
atctttaccaaagacagatccattt

SEQ ID NO: 5103978 - DNA, 25 bp, Homo sapien
gcctggaggcgtacatataaatacc

SEQ ID NO: 5103979 - DNA, 25 bp, Homo sapien
gaggtcaggtatctagcactatgcc

SEQ ID NO: 5103980 - DNA, 25 bp, Homo sapien
cttgctggaagtcggagtgcctgct

SEQ ID NO: 5103981 - DNA, 25 bp, Homo sapien
cattgactgacacctgctggttgca

SEQ ID NO: 5103982 - DNA, 25 bp, Homo sapien
tgatatccaacagcacaagaattat

SEQ ID NO: 5103983 - DNA, 25 bp, Homo sapien
gatatccaacagcacaagaattata

SEQ ID NO: 5103984 - DNA, 25 bp, Homo sapien
gtgatatccaacagcacaagaatta

SEQ ID NO: 5103985 - DNA, 25 bp, Homo sapien
tatccaacagcacaagaattatagg

SEQ ID NO: 5103986 - DNA, 25 bp, Homo sapien
tagttgcatcatagtcaaggctgcc

SEQ ID NO: 5103987 - DNA, 25 bp, Homo sapien
ccaacagaatagtgtgggcagtcat

SEQ ID NO: 5103988 - DNA, 25 bp, Homo sapien
cagcctaggttggtccagagttcaa

SEQ ID NO: 5103989 - DNA, 25 bp, Homo sapien
gatggcagagtatcccttctagcaa

SEQ ID NO: 5103990 - DNA, 25 bp, Homo sapien
aggctgcaccctgggatttgaagat

SEQ ID NO: 5103991 - DNA, 25 bp, Homo sapien
cttaactgacttcttggcgtattta

SEQ ID NO: 5103992 - DNA, 25 bp, Homo sapien
gaaggcaacgtcttctttatctgtt

SEQ ID NO: 5103993 - DNA, 25 bp, Homo sapien
gtctttgaaggcaacgtcttcttta

SEQ ID NO: 5103994 - DNA, 25 bp, Homo sapien
gcaaaaatgcaccagaagatcctgt

SEQ ID NO: 5103995 - DNA, 25 bp, Homo sapien
tatttctcacgaacaaggacgcttt

SEQ ID NO: 5103996 - DNA, 25 bp, Homo sapien
tctaagtagtgcagtgctggcaaat

SEQ ID NO: 5103997 - DNA, 25 bp, Homo sapien
taaccggcaagcctatttgctgggt

SEQ ID NO: 5103998 - DNA, 25 bp, Homo sapien
tacagactatatagttactaactaa

SEQ ID NO: 5103999 - DNA, 25 bp, Homo sapien
agagttacagactatatagttacta

SEQ ID NO: 5104000 - DNA, 25 bp, Homo sapien
ggcactgaagagttacagactatat

SEQ ID NO: 5104001 - DNA, 25 bp, Homo sapien
taactaatctatgttaaaatttgac

SEQ ID NO: 5104002 - DNA, 25 bp, Homo sapien
ggtattggctggattacccacaaca

SEQ ID NO: 5104003 - DNA, 25 bp, Homo sapien
ttgagctttagctcggttgtgatcc

SEQ ID NO: 5104004 - DNA, 25 bp, Homo sapien
tattggctggattacccacaacaat

SEQ ID NO: 5104005 - DNA, 25 bp, Homo sapien
ctcggttgtgatccaaacgagtcaa

SEQ ID NO: 5104006 - DNA, 25 bp, Homo sapien
ttctgtccaagaacgggcaccagga

SEQ ID NO: 5104007 - DNA, 25 bp, Homo sapien
ggcatacttatctatggctctaaga

SEQ ID NO: 5104008 - DNA, 25 bp, Homo sapien
ggcaccaggaccagttagatctgaa

SEQ ID NO: 5104009 - DNA, 25 bp, Homo sapien
gctattgttaattccctggtcactg

SEQ ID NO: 5104010 - DNA, 25 bp, Homo sapien
ctattgatctgcttagcctgtggga

SEQ ID NO: 5104011 - DNA, 25 bp, Homo sapien
gatctaatccctgcaagtcttgcaa

SEQ ID NO: 5104012 - DNA, 25 bp, Homo sapien
aaaatgtctgcaatgactcgactgg

SEQ ID NO: 5104013 - DNA, 25 bp, Homo sapien
gagtggcacgctgttcaatgagtac

SEQ ID NO: 5104014 - DNA, 25 bp, Homo sapien
tgcaatttcaccttggcatggttga

SEQ ID NO: 5104015 - DNA, 25 bp, Homo sapien
ttccttgcaatttcaccttggcatg

SEQ ID NO: 5104016 - DNA, 25 bp, Homo sapien
ccttgcaatttcaccttggcatggt

SEQ ID NO: 5104017 - DNA, 25 bp, Homo sapien
cctttccttgcaatttcaccttggc

SEQ ID NO: 5104018 - DNA, 25 bp, Homo sapien
gggttccaaaccagatgtccctgac

SEQ ID NO: 5104019 - DNA, 25 bp, Homo sapien
tttcgagccttgatgacagcagcgc

SEQ ID NO: 5104020 - DNA, 25 bp, Homo sapien
tccctgacgtggtcacagatggctt

SEQ ID NO: 5104021 - DNA, 25 bp, Homo sapien
acatggcactggatagttttcgagc

SEQ ID NO: 5104022 - DNA, 25 bp, Homo sapien
atgatgattagtttacacaactgac

SEQ ID NO: 5104023 - DNA, 25 bp, Homo sapien
tgatgattagtttacacaactgaca

SEQ ID NO: 5104024 - DNA, 25 bp, Homo sapien
gagtagagcagatcatcaggaacac

SEQ ID NO: 5104025 - DNA, 25 bp, Homo sapien
acaccataggagttgccatcagaga

SEQ ID NO: 5104026 - DNA, 25 bp, Homo sapien
gataacacccatggacacaaactct

SEQ ID NO: 5104027 - DNA, 25 bp, Homo sapien
cttgattacaacagggaatgagtag

SEQ ID NO: 5104028 - DNA, 25 bp, Homo sapien
ataagagatttaaactggaactgat

SEQ ID NO: 5104029 - DNA, 25 bp, Homo sapien
gaggtatatcgttttaaagtctgat

SEQ ID NO: 5104030 - DNA, 25 bp, Homo sapien
taagagatttaaactggaactgatc

SEQ ID NO: 5104031 - DNA, 25 bp, Homo sapien
cttatatttagaggtatatcgtttt

SEQ ID NO: 5104032 - DNA, 25 bp, Homo sapien
tcacgtgagaaatcattaataggga

SEQ ID NO: 5104033 - DNA, 25 bp, Homo sapien
tagggagaccttcaacaaacttcca

SEQ ID NO: 5104034 - DNA, 25 bp, Homo sapien
tcattaatagggagaccttcaacaa

SEQ ID NO: 5104035 - DNA, 25 bp, Homo sapien
tgagaaatcattaatagggagacct

SEQ ID NO: 5104036 - DNA, 25 bp, Homo sapien
tttagaatgcacactaacagcatga

SEQ ID NO: 5104037 - DNA, 25 bp, Homo sapien
caagaagcacgtaatctttaaaatg

SEQ ID NO: 5104038 - DNA, 25 bp, Homo sapien
tattatttggtacttgagtcaaaga

SEQ ID NO: 5104039 - DNA, 25 bp, Homo sapien
cagcatgacgataaactgtcattca

SEQ ID NO: 5104040 - DNA, 25 bp, Homo sapien
tgcttcctgaatagacactaaatat

SEQ ID NO: 5104041 - DNA, 25 bp, Homo sapien
atattagctagaaacagagtctgag

SEQ ID NO: 5104042 - DNA, 25 bp, Homo sapien
ctaaatattagctagaaacagagtc

SEQ ID NO: 5104043 - DNA, 25 bp, Homo sapien
gcaagtttgcttcctgaatagacac

SEQ ID NO: 5104044 - DNA, 25 bp, Homo sapien
tatctttctagccttactgccttcc

SEQ ID NO: 5104045 - DNA, 25 bp, Homo sapien
cacaaggtgggtttctatattctat

SEQ ID NO: 5104046 - DNA, 25 bp, Homo sapien
aatagactgattcattatcacaagg

SEQ ID NO: 5104047 - DNA, 25 bp, Homo sapien
taaatacgagatttatgctttatct

SEQ ID NO: 5104048 - DNA, 25 bp, Homo sapien
tagtagctagccttaaaatcaaatt

SEQ ID NO: 5104049 - DNA, 25 bp, Homo sapien
taatattagtagctagccttaaaat

SEQ ID NO: 5104050 - DNA, 25 bp, Homo sapien
tatctgcaacttatttaatattagt

SEQ ID NO: 5104051 - DNA, 25 bp, Homo sapien
taaaatcaaattatctacaaagcgt

SEQ ID NO: 5104052 - DNA, 25 bp, Homo sapien
cactagcataaacttctgtggtatt

SEQ ID NO: 5104053 - DNA, 25 bp, Homo sapien
tagcataaacttctgtggtatttag

SEQ ID NO: 5104054 - DNA, 25 bp, Homo sapien
ctaacactagcataaacttctgtgg

SEQ ID NO: 5104055 - DNA, 25 bp, Homo sapien
aacactagcataaacttctgtggta

SEQ ID NO: 5104056 - DNA, 25 bp, Homo sapien
tacatgtggacagtgtgttaagcat

SEQ ID NO: 5104057 - DNA, 25 bp, Homo sapien
tattgcctattacatgtggacagtg

SEQ ID NO: 5104058 - DNA, 25 bp, Homo sapien
gcctattacatgtggacagtgtgtt

SEQ ID NO: 5104059 - DNA, 25 bp, Homo sapien
atacaatattgcctattacatgtgg

SEQ ID NO: 5104060 - DNA, 25 bp, Homo sapien
gcaacccagacagctaggcttagcc

SEQ ID NO: 5104061 - DNA, 25 bp, Homo sapien
acagcaacccagacagctaggctta

SEQ ID NO: 5104062 - DNA, 25 bp, Homo sapien
ccaccacagcaacccagacagctag

SEQ ID NO: 5104063 - DNA, 25 bp, Homo sapien
acagtttgtgtagccagcccaccac

SEQ ID NO: 5104064 - DNA, 25 bp, Homo sapien
agaatgccacgctgggccaagcaac

SEQ ID NO: 5104065 - DNA, 25 bp, Homo sapien
ctgggccaagcaactatttcctgcc

SEQ ID NO: 5104066 - DNA, 25 bp, Homo sapien
gggccaagcaactatttcctgccaa

SEQ ID NO: 5104067 - DNA, 25 bp, Homo sapien
caagaccaacagaatgccacgctgg

SEQ ID NO: 5104068 - DNA, 25 bp, Homo sapien
aaagaacatgttccttattgtggaa

SEQ ID NO: 5104069 - DNA, 25 bp, Homo sapien
gaacatgttccttattgtggaaagt

SEQ ID NO: 5104070 - DNA, 25 bp, Homo sapien
ctaaagaacatgttccttattgtgg

SEQ ID NO: 5104071 - DNA, 25 bp, Homo sapien
aagaacatgttccttattgtggaaa

SEQ ID NO: 5104072 - DNA, 25 bp, Homo sapien
gctattttgctctgtctgtaatttt

SEQ ID NO: 5104073 - DNA, 25 bp, Homo sapien
tcctgctgcattgctattttgctct

SEQ ID NO: 5104074 - DNA, 25 bp, Homo sapien
tagggaccaagtttgttgagacact

SEQ ID NO: 5104075 - DNA, 25 bp, Homo sapien
agtcagacctgggagccaataaagc

SEQ ID NO: 5104076 - DNA, 25 bp, Homo sapien
gatgcagagtgccaagtccttatga

SEQ ID NO: 5104077 - DNA, 25 bp, Homo sapien
gagtgtagctgaccaatagcctcca

SEQ ID NO: 5104078 - DNA, 25 bp, Homo sapien
agctagcgacttgccactgaaatgc

SEQ ID NO: 5104079 - DNA, 25 bp, Homo sapien
tgaagctagcgacttgccactgaaa

SEQ ID NO: 5104080 - DNA, 25 bp, Homo sapien
tagcgacttgccactgaaatgctgg

SEQ ID NO: 5104081 - DNA, 25 bp, Homo sapien
catgaagctagcgacttgccactga

SEQ ID NO: 5104082 - DNA, 25 bp, Homo sapien
cactcctgcccaacaggattctgca

SEQ ID NO: 5104083 - DNA, 25 bp, Homo sapien
actcctgcccaacaggattctgcat

SEQ ID NO: 5104084 - DNA, 25 bp, Homo sapien
cccaacaggattctgcatgtgccat

SEQ ID NO: 5104085 - DNA, 25 bp, Homo sapien
ctgcccaacaggattctgcatgtgc

SEQ ID NO: 5104086 - DNA, 25 bp, Homo sapien
tgatggctttgcgtccagagtagtg

SEQ ID NO: 5104087 - DNA, 25 bp, Homo sapien
aggacaagcgacaccttcccaggtt

SEQ ID NO: 5104088 - DNA, 25 bp, Homo sapien
tggctttgcgtccagagtagtgtcc

SEQ ID NO: 5104089 - DNA, 25 bp, Homo sapien
catgatgatggctttgcgtccagag

SEQ ID NO: 5104090 - DNA, 25 bp, Homo sapien
ttgcgggggtagcagtcaattccag

SEQ ID NO: 5104091 - DNA, 25 bp, Homo sapien
agcagtcaattccagccaccagagg

SEQ ID NO: 5104092 - DNA, 25 bp, Homo sapien
tttgcgggggtagcagtcaattcca

SEQ ID NO: 5104093 - DNA, 25 bp, Homo sapien
agtcaattccagccaccagaggtgg

SEQ ID NO: 5104094 - DNA, 25 bp, Homo sapien
taggtgattatagttataaactctc

SEQ ID NO: 5104095 - DNA, 25 bp, Homo sapien
gtgattatagttataaactctcaca

SEQ ID NO: 5104096 - DNA, 25 bp, Homo sapien
attaggtgattatagttataaactc

SEQ ID NO: 5104097 - DNA, 25 bp, Homo sapien
cttgtgggcattaggtgattatagt

SEQ ID NO: 5104098 - DNA, 25 bp, Homo sapien
tactgatgacagttttgttcaaggg

SEQ ID NO: 5104099 - DNA, 25 bp, Homo sapien
atccttactgatgacagttttgttc

SEQ ID NO: 5104100 - DNA, 25 bp, Homo sapien
ccttactgatgacagttttgttcaa

SEQ ID NO: 5104101 - DNA, 25 bp, Homo sapien
gttcaaggggatatccacagagtac

SEQ ID NO: 5104102 - DNA, 25 bp, Homo sapien
cgtttaagagcaggatctctgaaga

SEQ ID NO: 5104103 - DNA, 25 bp, Homo sapien
gtttaagagcaggatctctgaagac

SEQ ID NO: 5104104 - DNA, 25 bp, Homo sapien
ctctcgtcaggccttgcgtttaaga

SEQ ID NO: 5104105 - DNA, 25 bp, Homo sapien
tcgtcaggccttgcgtttaagagca

SEQ ID NO: 5104106 - DNA, 25 bp, Homo sapien
gaagaaccacttgttcttgcctatc

SEQ ID NO: 5104107 - DNA, 25 bp, Homo sapien
tatctctcttcaaacttgaccttga

SEQ ID NO: 5104108 - DNA, 25 bp, Homo sapien
aaaaccgcagcttctggaagaacca

SEQ ID NO: 5104109 - DNA, 25 bp, Homo sapien
tgttcttgcctatcttgtatctctc

SEQ ID NO: 5104110 - DNA, 25 bp, Homo sapien
atttttaatgaccaaaacaaagcat

SEQ ID NO: 5104111 - DNA, 25 bp, Homo sapien
taattctggcctgcttcttacgcat

SEQ ID NO: 5104112 - DNA, 25 bp, Homo sapien
taccagtccttggtgcctattgtgc

SEQ ID NO: 5104113 - DNA, 25 bp, Homo sapien
tgttcacagtgatttggcctgccac

SEQ ID NO: 5104114 - DNA, 25 bp, Homo sapien
gcttcttacgcatcaggtcagccaa

SEQ ID NO: 5104115 - DNA, 25 bp, Homo sapien
gcctctggcattcagggataccatg

SEQ ID NO: 5104116 - DNA, 25 bp, Homo sapien
cagcctctggcattcagggatacca

SEQ ID NO: 5104117 - DNA, 25 bp, Homo sapien
ctctggcattcagggataccatgac

SEQ ID NO: 5104118 - DNA, 25 bp, Homo sapien
agcagcctctggcattcagggatac

SEQ ID NO: 5104119 - DNA, 25 bp, Homo sapien
atgctcatctgacacatctttgccg

SEQ ID NO: 5104120 - DNA, 25 bp, Homo sapien
ttaaatgctcatctgacacatcttt

SEQ ID NO: 5104121 - DNA, 25 bp, Homo sapien
tcatctgacacatctttgccgccct

SEQ ID NO: 5104122 - DNA, 25 bp, Homo sapien
tgacacatctttgccgcccttaatt

SEQ ID NO: 5104123 - DNA, 25 bp, Homo sapien
aactgtgggcatcaacgttgggcca

SEQ ID NO: 5104124 - DNA, 25 bp, Homo sapien
ggcatcaacgttgggccaaggattc

SEQ ID NO: 5104125 - DNA, 25 bp, Homo sapien
tactggagcaacacccaactgtggg

SEQ ID NO: 5104126 - DNA, 25 bp, Homo sapien
gtaattcgtctccatcataccgcag

SEQ ID NO: 5104127 - DNA, 25 bp, Homo sapien
ttttgttctgtagaaagtgtacagc

SEQ ID NO: 5104128 - DNA, 25 bp, Homo sapien
ttgtgactaaaggtgtaacaggtta

SEQ ID NO: 5104129 - DNA, 25 bp, Homo sapien
tgtgactaaaggtgtaacaggttat

SEQ ID NO: 5104130 - DNA, 25 bp, Homo sapien
gtagaaagtgtacagcattccaaga

SEQ ID NO: 5104131 - DNA, 25 bp, Homo sapien
cctaagatgccttatttgggatcag

SEQ ID NO: 5104132 - DNA, 25 bp, Homo sapien
tgaaaactttactgaccaacactct

SEQ ID NO: 5104133 - DNA, 25 bp, Homo sapien
gataaatctggcctttcagcctatt

SEQ ID NO: 5104134 - DNA, 25 bp, Homo sapien
tttgtggcccatgagacctaaaata

SEQ ID NO: 5104135 - DNA, 25 bp, Homo sapien
gataaatacctatagattgaaaaca

SEQ ID NO: 5104136 - DNA, 25 bp, Homo sapien
atacacaggtcatacttaacagcat

SEQ ID NO: 5104137 - DNA, 25 bp, Homo sapien
tctgccagagtatgaatgtcaaagt

SEQ ID NO: 5104138 - DNA, 25 bp, Homo sapien
gactcagtttcataacagcttaatt

SEQ ID NO: 5104139 - DNA, 25 bp, Homo sapien
ttctagtcgttcaccaacattatct

SEQ ID NO: 5104140 - DNA, 25 bp, Homo sapien
tcttgcaaaggtgggatctggccac

SEQ ID NO: 5104141 - DNA, 25 bp, Homo sapien
ttattctagtcgttcaccaacatta

SEQ ID NO: 5104142 - DNA, 25 bp, Homo sapien
tagtcgttcaccaacattatcttgc

SEQ ID NO: 5104143 - DNA, 25 bp, Homo sapien
ttgtccacccgtcagccggctcccg

SEQ ID NO: 5104144 - DNA, 25 bp, Homo sapien
aaagtcacctctgaggcgcccttct

SEQ ID NO: 5104145 - DNA, 25 bp, Homo sapien
ttgagcccctccctaacggtcgcag

SEQ ID NO: 5104146 - DNA, 25 bp, Homo sapien
agaaggctcgcaggctgaaagtcac

SEQ ID NO: 5104147 - DNA, 25 bp, Homo sapien
tctagaggagtcacgctacagggca

SEQ ID NO: 5104148 - DNA, 25 bp, Homo sapien
tgagctccggacacaaatgagggcc

SEQ ID NO: 5104149 - DNA, 25 bp, Homo sapien
taggaggcgctaccaattccacgct

SEQ ID NO: 5104150 - DNA, 25 bp, Homo sapien
caaaagacggaaacttggtgcgact

SEQ ID NO: 5104151 - DNA, 25 bp, Homo sapien
ggcttttctcagtcctcccgcttcc

SEQ ID NO: 5104152 - DNA, 25 bp, Homo sapien
cttcccgtctgcgtgcacgcacagg

SEQ ID NO: 5104153 - DNA, 25 bp, Homo sapien
gcccttcccgtctgcgtgcacgcac

SEQ ID NO: 5104154 - DNA, 25 bp, Homo sapien
tcccgtctgcgtgcacgcacaggta

SEQ ID NO: 5104155 - DNA, 25 bp, Homo sapien
acaatccctggagcaaggaagagca

SEQ ID NO: 5104156 - DNA, 25 bp, Homo sapien
ggaacaatccctggagcaaggaaga

SEQ ID NO: 5104157 - DNA, 25 bp, Homo sapien
ctggaacaatccctggagcaaggaa

SEQ ID NO: 5104158 - DNA, 25 bp, Homo sapien
tgggggccctggaacaatccctgga

SEQ ID NO: 5104159 - DNA, 25 bp, Homo sapien
cagagattacaaggtccatgttgga

SEQ ID NO: 5104160 - DNA, 25 bp, Homo sapien
ggctagctgccatctatcaaatagg

SEQ ID NO: 5104161 - DNA, 25 bp, Homo sapien
ggctgagttagcaagaacacggaca

SEQ ID NO: 5104162 - DNA, 25 bp, Homo sapien
ggagacccctccagttataattagc

SEQ ID NO: 5104163 - DNA, 25 bp, Homo sapien
agacacaggatcaaactcgagaaat

SEQ ID NO: 5104164 - DNA, 25 bp, Homo sapien
caaactcgagaaatgtctctaacct

SEQ ID NO: 5104165 - DNA, 25 bp, Homo sapien
tgtttgatacagcaccaatgcacat

SEQ ID NO: 5104166 - DNA, 25 bp, Homo sapien
tttgtttgatacagcaccaatgcac

SEQ ID NO: 5104167 - DNA, 25 bp, Homo sapien
ctctctgtcaacacaggtctaagtt

SEQ ID NO: 5104168 - DNA, 25 bp, Homo sapien
tctgtcaacacaggtctaagtttca

SEQ ID NO: 5104169 - DNA, 25 bp, Homo sapien
atgtgctctctgtcaacacaggtct

SEQ ID NO: 5104170 - DNA, 25 bp, Homo sapien
gtcaacacaggtctaagtttcagag

SEQ ID NO: 5104171 - DNA, 25 bp, Homo sapien
tagttaggactcgtttcactccagt

SEQ ID NO: 5104172 - DNA, 25 bp, Homo sapien
caaggtccctttatcctgtggcagt

SEQ ID NO: 5104173 - DNA, 25 bp, Homo sapien
tgaaaagggctcaatcccaaggtcc

SEQ ID NO: 5104174 - DNA, 25 bp, Homo sapien
ccccttgagaggtattggcaattcc

SEQ ID NO: 5104175 - DNA, 25 bp, Homo sapien
ttgccgaatgacttcttggaactga

SEQ ID NO: 5104176 - DNA, 25 bp, Homo sapien
taattctagctcttgccgaatgact

SEQ ID NO: 5104177 - DNA, 25 bp, Homo sapien
tagctcttgccgaatgacttcttgg

SEQ ID NO: 5104178 - DNA, 25 bp, Homo sapien
ctagttccttcttcacagataattc

SEQ ID NO: 5104179 - DNA, 25 bp, Homo sapien
caggccagctgatcgtttgagctca

SEQ ID NO: 5104180 - DNA, 25 bp, Homo sapien
cattaggacatggagggagcaagac

SEQ ID NO: 5104181 - DNA, 25 bp, Homo sapien
acatggagggagcaagactttttca

SEQ ID NO: 5104182 - DNA, 25 bp, Homo sapien
tcctaaaagctaatacaggctgggc

SEQ ID NO: 5104183 - DNA, 25 bp, Homo sapien
tctatgaaatagcttccgaaatcca

SEQ ID NO: 5104184 - DNA, 25 bp, Homo sapien
aatctatgaaatagcttccgaaatc

SEQ ID NO: 5104185 - DNA, 25 bp, Homo sapien
tatgaaatagcttccgaaatccatc

SEQ ID NO: 5104186 - DNA, 25 bp, Homo sapien
atgaaatagcttccgaaatccatcc

SEQ ID NO: 5104187 - DNA, 25 bp, Homo sapien
gtaactctgatctatttcccatccc

SEQ ID NO: 5104188 - DNA, 25 bp, Homo sapien
gccccgtacttcctcgtaactctga

SEQ ID NO: 5104189 - DNA, 25 bp, Homo sapien
gcccaacgtgtaagcttggccaaga

SEQ ID NO: 5104190 - DNA, 25 bp, Homo sapien
atccctgtccatgcccaacgtgtaa

SEQ ID NO: 5104191 - DNA, 25 bp, Homo sapien
tcaagagaactcgtcagctccaata

SEQ ID NO: 5104192 - DNA, 25 bp, Homo sapien
caagagaactcgtcagctccaatac

SEQ ID NO: 5104193 - DNA, 25 bp, Homo sapien
gtcacaatctgttccagtaaagtcc

SEQ ID NO: 5104194 - DNA, 25 bp, Homo sapien
tctgttccagtaaagtccttagtaa

SEQ ID NO: 5104195 - DNA, 25 bp, Homo sapien
caatctgttccagtaaagtccttag

SEQ ID NO: 5104196 - DNA, 25 bp, Homo sapien
catcttgtatctcccttcttgttag

SEQ ID NO: 5104197 - DNA, 25 bp, Homo sapien
aaaaccaaatgtcaaccttgctgcc

SEQ ID NO: 5104198 - DNA, 25 bp, Homo sapien
tgagtcctaggtacaaagttccttg

SEQ ID NO: 5104199 - DNA, 25 bp, Homo sapien
tatctgcccacgttctgagtcctag

SEQ ID NO: 5104200 - DNA, 25 bp, Homo sapien
tacacaaatagactgccaacccttt

SEQ ID NO: 5104201 - DNA, 25 bp, Homo sapien
cataggcccttgtggttcaaaatca

SEQ ID NO: 5104202 - DNA, 25 bp, Homo sapien
cgttaaagcatatcaatcccagggt

SEQ ID NO: 5104203 - DNA, 25 bp, Homo sapien
ccagtgatctaagcctatggaggca

SEQ ID NO: 5104204 - DNA, 25 bp, Homo sapien
tgacacaacttacagcagaggccca

SEQ ID NO: 5104205 - DNA, 25 bp, Homo sapien
caccaccactagtttgttcaacacg

SEQ ID NO: 5104206 - DNA, 25 bp, Homo sapien
gctggttcccaaaccaccattgagt

SEQ ID NO: 5104207 - DNA, 25 bp, Homo sapien
caccattgagtttcaccaccactag

SEQ ID NO: 5104208 - DNA, 25 bp, Homo sapien
cactagtttgttcaacacggaagat

SEQ ID NO: 5104209 - DNA, 25 bp, Homo sapien
ccaatcagacttttagggcctttgc

SEQ ID NO: 5104210 - DNA, 25 bp, Homo sapien
tccagaaaggtattctcattcctca

SEQ ID NO: 5104211 - DNA, 25 bp, Homo sapien
aatttgctgaacagtcagatccaga

SEQ ID NO: 5104212 - DNA, 25 bp, Homo sapien
cagatccagaaaggtattctcattc

SEQ ID NO: 5104213 - DNA, 25 bp, Homo sapien
cacacgacaatgattgtacttctgt

SEQ ID NO: 5104214 - DNA, 25 bp, Homo sapien
catccgtgttaaaagagttcattaa

SEQ ID NO: 5104215 - DNA, 25 bp, Homo sapien
ttggtatcttcatccgtgttaaaag

SEQ ID NO: 5104216 - DNA, 25 bp, Homo sapien
gaaagtgtagattttcacacgacaa

SEQ ID NO: 5104217 - DNA, 25 bp, Homo sapien
aggaaaacgggagctagcaccgcaa

SEQ ID NO: 5104218 - DNA, 25 bp, Homo sapien
gcaccgcaacagactaaagactaga

SEQ ID NO: 5104219 - DNA, 25 bp, Homo sapien
ttatgggcatcaaacacttgtgaac

SEQ ID NO: 5104220 - DNA, 25 bp, Homo sapien
tggtacctgtacatcttgaaactgc

SEQ ID NO: 5104221 - DNA, 25 bp, Homo sapien
atggatatattcaggggtggatctc

SEQ ID NO: 5104222 - DNA, 25 bp, Homo sapien
aatggatatattcaggggtggatct

SEQ ID NO: 5104223 - DNA, 25 bp, Homo sapien
aaatggatatattcaggggtggatc

SEQ ID NO: 5104224 - DNA, 25 bp, Homo sapien
aaataagcaccaggttagcattcca

SEQ ID NO: 5104225 - DNA, 25 bp, Homo sapien
gaaaacctatctgggaaatactgcc

SEQ ID NO: 5104226 - DNA, 25 bp, Homo sapien
tccagatggtgatagctgctgcaaa

SEQ ID NO: 5104227 - DNA, 25 bp, Homo sapien
aaaacatgtctctatggtcatacag

SEQ ID NO: 5104228 - DNA, 25 bp, Homo sapien
tttcaatattgaccctgtagagcat

SEQ ID NO: 5104229 - DNA, 25 bp, Homo sapien
caaattcacagcgttttccattggg

SEQ ID NO: 5104230 - DNA, 25 bp, Homo sapien
taagacacgtcctttgctacaggaa

SEQ ID NO: 5104231 - DNA, 25 bp, Homo sapien
tcaccatgacctggagggtaccaag

SEQ ID NO: 5104232 - DNA, 25 bp, Homo sapien
gaatatacagatccactgtggcacc

SEQ ID NO: 5104233 - DNA, 25 bp, Homo sapien
tgccaaactagaagagtattaaagg

SEQ ID NO: 5104234 - DNA, 25 bp, Homo sapien
ttgtaaatacaaagatagtgattat

SEQ ID NO: 5104235 - DNA, 25 bp, Homo sapien
ggcagaaaatagtgagtgcctccac

SEQ ID NO: 5104236 - DNA, 25 bp, Homo sapien
tccacatcagtctcaagtgcatttt

SEQ ID NO: 5104237 - DNA, 25 bp, Homo sapien
gagcaatttccaccagtctcagttt

SEQ ID NO: 5104238 - DNA, 25 bp, Homo sapien
tacatgtgcttttggcacttgagca

SEQ ID NO: 5104239 - DNA, 25 bp, Homo sapien
gaactttgatacagacttgaactcg

SEQ ID NO: 5104240 - DNA, 25 bp, Homo sapien
caatgatttccatgtcaatggcatt

SEQ ID NO: 5104241 - DNA, 25 bp, Homo sapien
ctggaagacagggctaggaactaga

SEQ ID NO: 5104242 - DNA, 25 bp, Homo sapien
tggaagacagggctaggaactagag

SEQ ID NO: 5104243 - DNA, 25 bp, Homo sapien
tatcaagcacctatcatatgccaaa

SEQ ID NO: 5104244 - DNA, 25 bp, Homo sapien
caagcacctatcatatgccaaactc

SEQ ID NO: 5104245 - DNA, 25 bp, Homo sapien
cctatcatatgccaaactcttaaac

SEQ ID NO: 5104246 - DNA, 25 bp, Homo sapien
gcacctatcatatgccaaactctta

SEQ ID NO: 5104247 - DNA, 25 bp, Homo sapien
ccttggcacattaatacctagagaa

SEQ ID NO: 5104248 - DNA, 25 bp, Homo sapien
tactgcagtttctaattgaatgaca

SEQ ID NO: 5104249 - DNA, 25 bp, Homo sapien
gcacattaatacctagagaattctc

SEQ ID NO: 5104250 - DNA, 25 bp, Homo sapien
gaatgacattcaggcctccatccaa

SEQ ID NO: 5104251 - DNA, 25 bp, Homo sapien
tttcactcattgtcagagatcctgc

SEQ ID NO: 5104252 - DNA, 25 bp, Homo sapien
gactatagaggtttgacatcaccag

SEQ ID NO: 5104253 - DNA, 25 bp, Homo sapien
gagatcctgcattaagactatagag

SEQ ID NO: 5104254 - DNA, 25 bp, Homo sapien
caagggcactgtaggaaattcccgc

SEQ ID NO: 5104255 - DNA, 25 bp, Homo sapien
cacattttaggaagagcaacagcac

SEQ ID NO: 5104256 - DNA, 25 bp, Homo sapien
cgtgcaggaaagaccaggagctaca

SEQ ID NO: 5104257 - DNA, 25 bp, Homo sapien
gataatcaacatgccaagagccaga

SEQ ID NO: 5104258 - DNA, 25 bp, Homo sapien
tagagattgtcctatgtgaccccgt

SEQ ID NO: 5104259 - DNA, 25 bp, Homo sapien
aaactgtgaggtgatccaattcaag

SEQ ID NO: 5104260 - DNA, 25 bp, Homo sapien
gcatatctggtatactttcaaatct

SEQ ID NO: 5104261 - DNA, 25 bp, Homo sapien
gaggtgatccaattcaagcatatct

SEQ ID NO: 5104262 - DNA, 25 bp, Homo sapien
aagcatatctggtatactttcaaat

SEQ ID NO: 5104263 - DNA, 25 bp, Homo sapien
ggcactaagactaacaagtattcct

SEQ ID NO: 5104264 - DNA, 25 bp, Homo sapien
aagctaatgctaatagtgatcctat

SEQ ID NO: 5104265 - DNA, 25 bp, Homo sapien
attacactagtaattaaggtggcac

SEQ ID NO: 5104266 - DNA, 25 bp, Homo sapien
tttatgactagaaaatgagacctat

SEQ ID NO: 5104267 - DNA, 25 bp, Homo sapien
gccccttttggaggcctacttgcaa

SEQ ID NO: 5104268 - DNA, 25 bp, Homo sapien
aagtggacccggtgccacagcatgg

SEQ ID NO: 5104269 - DNA, 25 bp, Homo sapien
tcttaagtctttaggcagtctcagc

SEQ ID NO: 5104270 - DNA, 25 bp, Homo sapien
tgtccttctgtaacaatcctggcag

SEQ ID NO: 5104271 - DNA, 25 bp, Homo sapien
tctctaatactgctccaggtgggat

SEQ ID NO: 5104272 - DNA, 25 bp, Homo sapien
ccaggtgggatatcaattctgtcac

SEQ ID NO: 5104273 - DNA, 25 bp, Homo sapien
ggtccaagatgcgaaggtttccaga

SEQ ID NO: 5104274 - DNA, 25 bp, Homo sapien
gatgcgaaggtttccagacacaatc

SEQ ID NO: 5104275 - DNA, 25 bp, Homo sapien
gaaggaaagtattgctccatctgtg

SEQ ID NO: 5104276 - DNA, 25 bp, Homo sapien
tgcagggtacagtaacatagtaaag

SEQ ID NO: 5104277 - DNA, 25 bp, Homo sapien
gaaactagcccattatttaagtgtc

SEQ ID NO: 5104278 - DNA, 25 bp, Homo sapien
aattcaaagtgatcatcattgaggc

SEQ ID NO: 5104279 - DNA, 25 bp, Homo sapien
tgaactaccagcagacctgaatgga

SEQ ID NO: 5104280 - DNA, 25 bp, Homo sapien
tgaactttaaacaagcagcctactc

SEQ ID NO: 5104281 - DNA, 25 bp, Homo sapien
gactcattaagtacacactggctag

SEQ ID NO: 5104282 - DNA, 25 bp, Homo sapien
tgtgtacttaaagggcaaatcttcc

SEQ ID NO: 5104283 - DNA, 25 bp, Homo sapien
cagagtgcctaatatcctgtggtga

SEQ ID NO: 5104284 - DNA, 25 bp, Homo sapien
gaatcttgcctaaccctgtcagagt

SEQ ID NO: 5104285 - DNA, 25 bp, Homo sapien
gatgtgtatacgaacaaagaccagg

SEQ ID NO: 5104286 - DNA, 25 bp, Homo sapien
caccgtatgtcaactgggtaaagcc

SEQ ID NO: 5104287 - DNA, 25 bp, Homo sapien
atggtgtgaccatttcttcagggca

SEQ ID NO: 5104288 - DNA, 25 bp, Homo sapien
gataaattagacatttcccctagtg

SEQ ID NO: 5104289 - DNA, 25 bp, Homo sapien
gctgtaccaactcccacattagtgg

SEQ ID NO: 5104290 - DNA, 25 bp, Homo sapien
tgttaggtattgacagtggctgtac

SEQ ID NO: 5104291 - DNA, 25 bp, Homo sapien
tataatgcaaagtataagtcagtgt

SEQ ID NO: 5104292 - DNA, 25 bp, Homo sapien
agtataagtcagtgttcatttttca

SEQ ID NO: 5104293 - DNA, 25 bp, Homo sapien
aagactatcatttctccactggcac

SEQ ID NO: 5104294 - DNA, 25 bp, Homo sapien
aaagactatcatttctccactggca

SEQ ID NO: 5104295 - DNA, 25 bp, Homo sapien
ataattttaggaaaggatgacacaa

SEQ ID NO: 5104296 - DNA, 25 bp, Homo sapien
acaataacatatgggttgattctaa

SEQ ID NO: 5104297 - DNA, 25 bp, Homo sapien
gttgattctaagaagctaataagtg

SEQ ID NO: 5104298 - DNA, 25 bp, Homo sapien
acacaataacatatgggttgattct

SEQ ID NO: 5104299 - DNA, 25 bp, Homo sapien
acaatgagcgctggaagcaagcaga

SEQ ID NO: 5104300 - DNA, 25 bp, Homo sapien
ggactagcctcctcttagacaatga

SEQ ID NO: 5104301 - DNA, 25 bp, Homo sapien
tcttagacaatgagcgctggaagca

SEQ ID NO: 5104302 - DNA, 25 bp, Homo sapien
tttctccttactgtggactagcctc

SEQ ID NO: 5104303 - DNA, 25 bp, Homo sapien
atgtgtatagtagattgaggtctgc

SEQ ID NO: 5104304 - DNA, 25 bp, Homo sapien
accatgggacccatactaagttcac

SEQ ID NO: 5104305 - DNA, 25 bp, Homo sapien
taattccttgatgtgtatagtagat

SEQ ID NO: 5104306 - DNA, 25 bp, Homo sapien
ggacccatactaagttcactggtga

SEQ ID NO: 5104307 - DNA, 25 bp, Homo sapien
caccctatgcccaagaatggacaag

SEQ ID NO: 5104308 - DNA, 25 bp, Homo sapien
tccaacaaaggtagtctagccccca

SEQ ID NO: 5104309 - DNA, 25 bp, Homo sapien
tagtctagcccccaggcaagaaggt

SEQ ID NO: 5104310 - DNA, 25 bp, Homo sapien
tagttcaccctatgcccaagaatgg

SEQ ID NO: 5104311 - DNA, 25 bp, Homo sapien
catattccaggcctgtgacccttaa

SEQ ID NO: 5104312 - DNA, 25 bp, Homo sapien
tacaatcgtatcagtggcccaaagg

SEQ ID NO: 5104313 - DNA, 25 bp, Homo sapien
gaataccagtgtctaatatggttca

SEQ ID NO: 5104314 - DNA, 25 bp, Homo sapien
cagtacctctgaatgagagatttta

SEQ ID NO: 5104315 - DNA, 25 bp, Homo sapien
tctcttatctttccgggatcccagc

SEQ ID NO: 5104316 - DNA, 25 bp, Homo sapien
tgcctcctgtcagcgaccgcaaacg

SEQ ID NO: 5104317 - DNA, 25 bp, Homo sapien
cgcaaacgccgctcttgcccctctc

SEQ ID NO: 5104318 - DNA, 25 bp, Homo sapien
tctccctccgggatcggggctggca

SEQ ID NO: 5104319 - DNA, 25 bp, Homo sapien
ggtcacagctgaccggcactgaagc

SEQ ID NO: 5104320 - DNA, 25 bp, Homo sapien
caaacggaccgagtttcggtcacag

SEQ ID NO: 5104321 - DNA, 25 bp, Homo sapien
gagtttcggtcacagctgaccggca

SEQ ID NO: 5104322 - DNA, 25 bp, Homo sapien
cagctgaccggcactgaagcttcca

SEQ ID NO: 5104323 - DNA, 25 bp, Homo sapien
tgatttagggatgtttcgagtcggt

SEQ ID NO: 5104324 - DNA, 25 bp, Homo sapien
ataggtcccgggtgatttagggatg

SEQ ID NO: 5104325 - DNA, 25 bp, Homo sapien
tacgctggaggggtcgcgtcccagt

SEQ ID NO: 5104326 - DNA, 25 bp, Homo sapien
gaatctcgtggaagtatttgcttta

SEQ ID NO: 5104327 - DNA, 25 bp, Homo sapien
actgctagtttcaaggcatccttcc

SEQ ID NO: 5104328 - DNA, 25 bp, Homo sapien
aactgctagtttcaaggcatccttc

SEQ ID NO: 5104329 - DNA, 25 bp, Homo sapien
aaactgctagtttcaaggcatcctt

SEQ ID NO: 5104330 - DNA, 25 bp, Homo sapien
tgctagtttcaaggcatccttccac

SEQ ID NO: 5104331 - DNA, 25 bp, Homo sapien
ctgaacttgaccagactccctgagg

SEQ ID NO: 5104332 - DNA, 25 bp, Homo sapien
ctgctccaatccgtgtctctctgtg

SEQ ID NO: 5104333 - DNA, 25 bp, Homo sapien
tcagagatgccatgtggtgtctgaa

SEQ ID NO: 5104334 - DNA, 25 bp, Homo sapien
gtctctctgtgggcccttgctcaga

SEQ ID NO: 5104335 - DNA, 25 bp, Homo sapien
gaaggtggtttcttgcatcctgacg

SEQ ID NO: 5104336 - DNA, 25 bp, Homo sapien
gctgacttgcagaacctcggtgaac

SEQ ID NO: 5104337 - DNA, 25 bp, Homo sapien
gctacatccgagtgaagtgactcca

SEQ ID NO: 5104338 - DNA, 25 bp, Homo sapien
gtgaacttctttaccatctaggagg

SEQ ID NO: 5104339 - DNA, 25 bp, Homo sapien
cttagatccatgttcgtccctatta

SEQ ID NO: 5104340 - DNA, 25 bp, Homo sapien
cactgaaaccacttagatccatgtt

SEQ ID NO: 5104341 - DNA, 25 bp, Homo sapien
agatccatgttcgtccctattagcc

SEQ ID NO: 5104342 - DNA, 25 bp, Homo sapien
gaagacactgaaaccacttagatcc

SEQ ID NO: 5104343 - DNA, 25 bp, Homo sapien
tgaagggcaagaccaaatgggtcag

SEQ ID NO: 5104344 - DNA, 25 bp, Homo sapien
ccacctgtagggtcggtggtacagt

SEQ ID NO: 5104345 - DNA, 25 bp, Homo sapien
cctgtaaaagcgatgggccacctgt

SEQ ID NO: 5104346 - DNA, 25 bp, Homo sapien
tacagtgtttggagtaccatgcaca

SEQ ID NO: 5104347 - DNA, 25 bp, Homo sapien
tccagattatttgtagctccttgct

SEQ ID NO: 5104348 - DNA, 25 bp, Homo sapien
tgtttgcattcagccaacaggagga

SEQ ID NO: 5104349 - DNA, 25 bp, Homo sapien
tgaataaggccagaatggaggtcta

SEQ ID NO: 5104350 - DNA, 25 bp, Homo sapien
tgtcatagttcaatacaatttctcc

SEQ ID NO: 5104351 - DNA, 25 bp, Homo sapien
tcattacgatgagttaagcctgctg

SEQ ID NO: 5104352 - DNA, 25 bp, Homo sapien
tcattccctcattacgatgagttaa

SEQ ID NO: 5104353 - DNA, 25 bp, Homo sapien
tccctcattacgatgagttaagcct

SEQ ID NO: 5104354 - DNA, 25 bp, Homo sapien
attcattccctcattacgatgagtt

SEQ ID NO: 5104355 - DNA, 25 bp, Homo sapien
tcctcgccatatacacctttttcct

SEQ ID NO: 5104356 - DNA, 25 bp, Homo sapien
tcatttagcgaaagcattctgataa

SEQ ID NO: 5104357 - DNA, 25 bp, Homo sapien
catttagcgaaagcattctgataaa

SEQ ID NO: 5104358 - DNA, 25 bp, Homo sapien
tcaaaggcaccacaagtatagacag

SEQ ID NO: 5104359 - DNA, 25 bp, Homo sapien
ggttggcagatgagcaccaatgact

SEQ ID NO: 5104360 - DNA, 25 bp, Homo sapien
cgtggagtgacgcactgcatggtct

SEQ ID NO: 5104361 - DNA, 25 bp, Homo sapien
cctaaggagattgccacagtgagac

SEQ ID NO: 5104362 - DNA, 25 bp, Homo sapien
tgtgatgcatccacgcaatgggttc

SEQ ID NO: 5104363 - DNA, 25 bp, Homo sapien
gatacacagtcagtacaaagcacta

SEQ ID NO: 5104364 - DNA, 25 bp, Homo sapien
gatggatggcttgaccactaatggt

SEQ ID NO: 5104365 - DNA, 25 bp, Homo sapien
aatcatatgtgaacggaatcctccc

SEQ ID NO: 5104366 - DNA, 25 bp, Homo sapien
tcttatcagagcagtactattgttt

SEQ ID NO: 5104367 - DNA, 25 bp, Homo sapien
tttctgtatctcacccagcatatgg

SEQ ID NO: 5104368 - DNA, 25 bp, Homo sapien
tgtcatctgtagagtcacaaaatgg

SEQ ID NO: 5104369 - DNA, 25 bp, Homo sapien
tatgagtgaactttatagctctctg

SEQ ID NO: 5104370 - DNA, 25 bp, Homo sapien
attcagttttaggaagtatgttgta

SEQ ID NO: 5104371 - DNA, 25 bp, Homo sapien
tcacattgtcaatgcttcaggttaa

SEQ ID NO: 5104372 - DNA, 25 bp, Homo sapien
tgcttcaggttaaagtaagcttgca

SEQ ID NO: 5104373 - DNA, 25 bp, Homo sapien
cttgtggtgctaacgatgaaacaga

SEQ ID NO: 5104374 - DNA, 25 bp, Homo sapien
accatagtgaaaaagacctctgttt

SEQ ID NO: 5104375 - DNA, 25 bp, Homo sapien
cctacaatactggtagagattactg

SEQ ID NO: 5104376 - DNA, 25 bp, Homo sapien
tcaactgcttattagacatattaac

SEQ ID NO: 5104377 - DNA, 25 bp, Homo sapien
atctgagctactcctgaggccgagg

SEQ ID NO: 5104378 - DNA, 25 bp, Homo sapien
ggttaactgaagtccaaaagatgtc

SEQ ID NO: 5104379 - DNA, 25 bp, Homo sapien
taattcttcttacatagtgtttgaa

SEQ ID NO: 5104380 - DNA, 25 bp, Homo sapien
ctgaagtccaaaagatgtctaggta

SEQ ID NO: 5104381 - DNA, 25 bp, Homo sapien
gtctaggtaattgttacgtagttca

SEQ ID NO: 5104382 - DNA, 25 bp, Homo sapien
gaagtttactgagcaacatccacag

SEQ ID NO: 5104383 - DNA, 25 bp, Homo sapien
catatggtgattggaggtgcactca

SEQ ID NO: 5104384 - DNA, 25 bp, Homo sapien
aaggatagcccctctggtgaaagaa

SEQ ID NO: 5104385 - DNA, 25 bp, Homo sapien
cttactgaaatgactagatggctga

SEQ ID NO: 5104386 - DNA, 25 bp, Homo sapien
tgtcaatctccttaataggacagga

SEQ ID NO: 5104387 - DNA, 25 bp, Homo sapien
tactatgcacctaggccatatggga

SEQ ID NO: 5104388 - DNA, 25 bp, Homo sapien
ggttggaagtcaaacctggtctcag

SEQ ID NO: 5104389 - DNA, 25 bp, Homo sapien
gtccccatagtgcatcaacccatgt

SEQ ID NO: 5104390 - DNA, 25 bp, Homo sapien
tgctagagatatgattttcagccca

SEQ ID NO: 5104391 - DNA, 25 bp, Homo sapien
caccgtttccgatctgctagagata

SEQ ID NO: 5104392 - DNA, 25 bp, Homo sapien
caggttgacgttattgtaatagagc

SEQ ID NO: 5104393 - DNA, 25 bp, Homo sapien
gctggtaatccatcaactgtgctag

SEQ ID NO: 5104394 - DNA, 25 bp, Homo sapien
tctcgtaacccctccacttctgtct

SEQ ID NO: 5104395 - DNA, 25 bp, Homo sapien
gatgtcattgaatcttgcttctaga

SEQ ID NO: 5104396 - DNA, 25 bp, Homo sapien
ttaggtcaggcacgtcaaggtcgct

SEQ ID NO: 5104397 - DNA, 25 bp, Homo sapien
aaggtcgctaattcctctctcgtaa

SEQ ID NO: 5104398 - DNA, 25 bp, Homo sapien
caaagcgtcctttcaatgccgagag

SEQ ID NO: 5104399 - DNA, 25 bp, Homo sapien
gcaaccacagctgaatagcagatcg

SEQ ID NO: 5104400 - DNA, 25 bp, Homo sapien
tcagctgaccccatgaacaaagcgt

SEQ ID NO: 5104401 - DNA, 25 bp, Homo sapien
agatcggatgaacccatactgccat

SEQ ID NO: 5104402 - DNA, 25 bp, Homo sapien
acacagtgttacacataagagtgta

SEQ ID NO: 5104403 - DNA, 25 bp, Homo sapien
caggaaggcccagatgaatggtcac

SEQ ID NO: 5104404 - DNA, 25 bp, Homo sapien
tcttcagaatctactgcagtgcttg

SEQ ID NO: 5104405 - DNA, 25 bp, Homo sapien
ttacacataagagtgtaagtgtctt

SEQ ID NO: 5104406 - DNA, 25 bp, Homo sapien
aactcaagttcctgtggaatgttta

SEQ ID NO: 5104407 - DNA, 25 bp, Homo sapien
gaatgtttagcgtaatcaatccgaa

SEQ ID NO: 5104408 - DNA, 25 bp, Homo sapien
tcctgtggaatgtttagcgtaatca

SEQ ID NO: 5104409 - DNA, 25 bp, Homo sapien
taatcaatccgaagctctcagcaag

SEQ ID NO: 5104410 - DNA, 25 bp, Homo sapien
cacttttggtcaagccagggtcctc

SEQ ID NO: 5104411 - DNA, 25 bp, Homo sapien
tctcaagcacaatgggatgaaagcc

SEQ ID NO: 5104412 - DNA, 25 bp, Homo sapien
cctttagcacaaaagaggatcggtg

SEQ ID NO: 5104413 - DNA, 25 bp, Homo sapien
gagccaccactaagaagatgccttg

SEQ ID NO: 5104414 - DNA, 25 bp, Homo sapien
ctcttctgcaggagaatagtgggaa

SEQ ID NO: 5104415 - DNA, 25 bp, Homo sapien
ctccatgatggaccctggtgcttcc

SEQ ID NO: 5104416 - DNA, 25 bp, Homo sapien
ccctgctcttctgcaggagaatagt

SEQ ID NO: 5104417 - DNA, 25 bp, Homo sapien
caggagaatagtgggaaaggcagtg

SEQ ID NO: 5104418 - DNA, 25 bp, Homo sapien
cttcattgctgagggtgtgtcagct

SEQ ID NO: 5104419 - DNA, 25 bp, Homo sapien
tcattgctgagggtgtgtcagctgt

SEQ ID NO: 5104420 - DNA, 25 bp, Homo sapien
gtcagctgttcagggcaacaccctt

SEQ ID NO: 5104421 - DNA, 25 bp, Homo sapien
ggtgtgtcagctgttcagggcaaca

SEQ ID NO: 5104422 - DNA, 25 bp, Homo sapien
tgcattgggacgcagaaaacaaaat

SEQ ID NO: 5104423 - DNA, 25 bp, Homo sapien
gcattgggacgcagaaaacaaaatg

SEQ ID NO: 5104424 - DNA, 25 bp, Homo sapien
acaaaatgttgcaatgagcaagggg

SEQ ID NO: 5104425 - DNA, 25 bp, Homo sapien
ctgggaatgctgaacggctggattc

SEQ ID NO: 5104426 - DNA, 25 bp, Homo sapien
caatgatagataatgttgttctgct

SEQ ID NO: 5104427 - DNA, 25 bp, Homo sapien
tctttgccagaatatctctgaacac

SEQ ID NO: 5104428 - DNA, 25 bp, Homo sapien
caggaatagtaacatctttgccaga

SEQ ID NO: 5104429 - DNA, 25 bp, Homo sapien
ttatgtgagtagattggacatctct

SEQ ID NO: 5104430 - DNA, 25 bp, Homo sapien
atttatgtgagtagattggacatct

SEQ ID NO: 5104431 - DNA, 25 bp, Homo sapien
tttatgtgagtagattggacatctc

SEQ ID NO: 5104432 - DNA, 25 bp, Homo sapien
gcacacattctttacctaatctatg

SEQ ID NO: 5104433 - DNA, 25 bp, Homo sapien
gatgacaacgctccttcttctcaca

SEQ ID NO: 5104434 - DNA, 25 bp, Homo sapien
ccagttaaacgtctgcgatgacaac

SEQ ID NO: 5104435 - DNA, 25 bp, Homo sapien
cgtctgcgatgacaacgctccttct

SEQ ID NO: 5104436 - DNA, 25 bp, Homo sapien
agccgggctttgtacgggcttgctt

SEQ ID NO: 5104437 - DNA, 25 bp, Homo sapien
aggagccgggctttgtacgggcttg

SEQ ID NO: 5104438 - DNA, 25 bp, Homo sapien
ctttgtacgggcttgcttttgaaga

SEQ ID NO: 5104439 - DNA, 25 bp, Homo sapien
ggctttgtacgggcttgcttttgaa

SEQ ID NO: 5104440 - DNA, 25 bp, Homo sapien
ctgcgtgcagctggcgcgcgctttc

SEQ ID NO: 5104441 - DNA, 25 bp, Homo sapien
ccgatgaatattcatgcccagcttg

SEQ ID NO: 5104442 - DNA, 25 bp, Homo sapien
caaagcccctgaagggatttgaggg

SEQ ID NO: 5104443 - DNA, 25 bp, Homo sapien
ggcgcgcgctttccgctagtcgcag

SEQ ID NO: 5104444 - DNA, 25 bp, Homo sapien
atgtggccgtctcgagctggcccga

SEQ ID NO: 5104445 - DNA, 25 bp, Homo sapien
aatgtggccgtctcgagctggcccg

SEQ ID NO: 5104446 - DNA, 25 bp, Homo sapien
gagctggcccgaggctggacgtgca

SEQ ID NO: 5104447 - DNA, 25 bp, Homo sapien
ccgtctcgagctggcccgaggctgg

SEQ ID NO: 5104448 - DNA, 25 bp, Homo sapien
ttacgctcagccatcttcaaccagg

SEQ ID NO: 5104449 - DNA, 25 bp, Homo sapien
gacttgcattctgttttacgctcag

SEQ ID NO: 5104450 - DNA, 25 bp, Homo sapien
tcttgattttgatgggtgcgggttc

SEQ ID NO: 5104451 - DNA, 25 bp, Homo sapien
tctgcctccagtagtacgtgctcca

SEQ ID NO: 5104452 - DNA, 25 bp, Homo sapien
tctctctcttgacccatcatagctg

SEQ ID NO: 5104453 - DNA, 25 bp, Homo sapien
tcttgacccatcatagctgtccagg

SEQ ID NO: 5104454 - DNA, 25 bp, Homo sapien
cactacaacctcagtgatcttctga

SEQ ID NO: 5104455 - DNA, 25 bp, Homo sapien
ttcccttcctcacgacagtctcact

SEQ ID NO: 5104456 - DNA, 25 bp, Homo sapien
cagccacagcaggaatagagagtgg

SEQ ID NO: 5104457 - DNA, 25 bp, Homo sapien
agtgccccgagtggagccacccttc

SEQ ID NO: 5104458 - DNA, 25 bp, Homo sapien
ccagaactaccaccgcttctaagtg

SEQ ID NO: 5104459 - DNA, 25 bp, Homo sapien
gaatcagcaagtatggctgagacca

SEQ ID NO: 5104460 - DNA, 25 bp, Homo sapien
gtccagggaacagactgcttctgca

SEQ ID NO: 5104461 - DNA, 25 bp, Homo sapien
aacagactgcttctgcataggaagg

SEQ ID NO: 5104462 - DNA, 25 bp, Homo sapien
ggaacagactgcttctgcataggaa

SEQ ID NO: 5104463 - DNA, 25 bp, Homo sapien
actgcttctgcataggaaggagagg

SEQ ID NO: 5104464 - DNA, 25 bp, Homo sapien
cagattcaagtccacatgccaggaa

SEQ ID NO: 5104465 - DNA, 25 bp, Homo sapien
ccagattcaagtccacatgccagga

SEQ ID NO: 5104466 - DNA, 25 bp, Homo sapien
gccagattcaagtccacatgccagg

SEQ ID NO: 5104467 - DNA, 25 bp, Homo sapien
agattcaagtccacatgccaggaac

SEQ ID NO: 5104468 - DNA, 25 bp, Homo sapien
aatataatgaattccgctgatggcc

SEQ ID NO: 5104469 - DNA, 25 bp, Homo sapien
aaagttcaccatagtaacagctctg

SEQ ID NO: 5104470 - DNA, 25 bp, Homo sapien
aagggatctgcatggcaacatcagt

SEQ ID NO: 5104471 - DNA, 25 bp, Homo sapien
gttaccatctcatagcaaccaaggg

SEQ ID NO: 5104472 - DNA, 25 bp, Homo sapien
tgtcatgaagggtcacgtttccttc

SEQ ID NO: 5104473 - DNA, 25 bp, Homo sapien
ctaagttaccgaacagcgatttatt

SEQ ID NO: 5104474 - DNA, 25 bp, Homo sapien
taccgaacagcgatttattatgtca

SEQ ID NO: 5104475 - DNA, 25 bp, Homo sapien
ccttcatgttagtgatgaggggaaa

SEQ ID NO: 5104476 - DNA, 25 bp, Homo sapien
aaagctacagggaatatctttccca

SEQ ID NO: 5104477 - DNA, 25 bp, Homo sapien
ttaactctgaagagtcgactcaaag

SEQ ID NO: 5104478 - DNA, 25 bp, Homo sapien
aatttggcataggaggatcatcccg

SEQ ID NO: 5104479 - DNA, 25 bp, Homo sapien
gcataggaggatcatcccgcttcag

SEQ ID NO: 5104480 - DNA, 25 bp, Homo sapien
gaaaggattcagacagcacaaaccc

SEQ ID NO: 5104481 - DNA, 25 bp, Homo sapien
gaagttccaactctggttggcccac

SEQ ID NO: 5104482 - DNA, 25 bp, Homo sapien
gcacaaaccctactttgactctgac

SEQ ID NO: 5104483 - DNA, 25 bp, Homo sapien
ctggaagagcatctgagaaaacatt

SEQ ID NO: 5104484 - DNA, 25 bp, Homo sapien
ctgagaagctgagaagctgagccag

SEQ ID NO: 5104485 - DNA, 25 bp, Homo sapien
tgagaagctgagaagctgagccagg

SEQ ID NO: 5104486 - DNA, 25 bp, Homo sapien
gagagtcaggttacgaaattagaag

SEQ ID NO: 5104487 - DNA, 25 bp, Homo sapien
tgttctctcgggttcttcagtcttt

SEQ ID NO: 5104488 - DNA, 25 bp, Homo sapien
cccttttcctatttgctgagagtag

SEQ ID NO: 5104489 - DNA, 25 bp, Homo sapien
tgaagcgtaattggccaggactcac

SEQ ID NO: 5104490 - DNA, 25 bp, Homo sapien
gaaaggtagatctgatgcacttaaa

SEQ ID NO: 5104491 - DNA, 25 bp, Homo sapien
tgttagaaaggtagatctgatgcac

SEQ ID NO: 5104492 - DNA, 25 bp, Homo sapien
tagaaaggtagatctgatgcactta

SEQ ID NO: 5104493 - DNA, 25 bp, Homo sapien
acttgttagaaaggtagatctgatg

SEQ ID NO: 5104494 - DNA, 25 bp, Homo sapien
ttttaaaactgatgtagtctgggtg

SEQ ID NO: 5104495 - DNA, 25 bp, Homo sapien
tatgtaggtataagttttcatccct

SEQ ID NO: 5104496 - DNA, 25 bp, Homo sapien
tgacatgaaagaccaatatgtaggt

SEQ ID NO: 5104497 - DNA, 25 bp, Homo sapien
tattgatacgacacaaaatttcata

SEQ ID NO: 5104498 - DNA, 25 bp, Homo sapien
caaaaggagataagggtggagccgt

SEQ ID NO: 5104499 - DNA, 25 bp, Homo sapien
atctgggcatatatacgggcaagtc

SEQ ID NO: 5104500 - DNA, 25 bp, Homo sapien
ccatctgggcatatatacgggcaag

SEQ ID NO: 5104501 - DNA, 25 bp, Homo sapien
tgggcatatatacgggcaagtcaca

SEQ ID NO: 5104502 - DNA, 25 bp, Homo sapien
ggagttctaatgtcgggagaagatt

SEQ ID NO: 5104503 - DNA, 25 bp, Homo sapien
tggagttctaatgtcgggagaagat

SEQ ID NO: 5104504 - DNA, 25 bp, Homo sapien
agttctaatgtcgggagaagattgg

SEQ ID NO: 5104505 - DNA, 25 bp, Homo sapien
gagttctaatgtcgggagaagattg

SEQ ID NO: 5104506 - DNA, 25 bp, Homo sapien
ggtctaggggtcttccgaggtgatc

SEQ ID NO: 5104507 - DNA, 25 bp, Homo sapien
gatggtctaggggtcttccgaggtg

SEQ ID NO: 5104508 - DNA, 25 bp, Homo sapien
tctaggggtcttccgaggtgatcgg

SEQ ID NO: 5104509 - DNA, 25 bp, Homo sapien
taggggtcttccgaggtgatcgggc

SEQ ID NO: 5104510 - DNA, 25 bp, Homo sapien
tttgtttgttttgaggcacagtcta

SEQ ID NO: 5104511 - DNA, 25 bp, Homo sapien
gctgtgccttgtagcattccgagga

SEQ ID NO: 5104512 - DNA, 25 bp, Homo sapien
tttgttttgaggcacagtctaagtt

SEQ ID NO: 5104513 - DNA, 25 bp, Homo sapien
tgtttgttttgaggcacagtctaag

SEQ ID NO: 5104514 - DNA, 25 bp, Homo sapien
caagcgggattaggggcggcgtggg

SEQ ID NO: 5104515 - DNA, 25 bp, Homo sapien
gcttcaagcgggattaggggcggcg

SEQ ID NO: 5104516 - DNA, 25 bp, Homo sapien
ggcggcgtgggaacctagagcggga

SEQ ID NO: 5104517 - DNA, 25 bp, Homo sapien
taggggcggcgtgggaacctagagc

SEQ ID NO: 5104518 - DNA, 25 bp, Homo sapien
tcaaggtggggcaaggcatattcac

SEQ ID NO: 5104519 - DNA, 25 bp, Homo sapien
ctggcgggcaggagtggggggtcgc

SEQ ID NO: 5104520 - DNA, 25 bp, Homo sapien
tcagtcaaggtggggcaaggcatat

SEQ ID NO: 5104521 - DNA, 25 bp, Homo sapien
gtcaaggtggggcaaggcatattca

SEQ ID NO: 5104522 - DNA, 25 bp, Homo sapien
gtcatacaaagcaaacctacaagag

SEQ ID NO: 5104523 - DNA, 25 bp, Homo sapien
acccagtgctgagatcattgcaaaa

SEQ ID NO: 5104524 - DNA, 25 bp, Homo sapien
tccactgtcccatgtgattgaacca

SEQ ID NO: 5104525 - DNA, 25 bp, Homo sapien
gaagattcagcaaagcgtttctcac

SEQ ID NO: 5104526 - DNA, 25 bp, Homo sapien
gcatctgacatcacagcatgctgga

SEQ ID NO: 5104527 - DNA, 25 bp, Homo sapien
ggagggcatctgacatcacagcatg

SEQ ID NO: 5104528 - DNA, 25 bp, Homo sapien
tttccaggagggcatctgacatcac

SEQ ID NO: 5104529 - DNA, 25 bp, Homo sapien
tctgacatcacagcatgctggagct

SEQ ID NO: 5104530 - DNA, 25 bp, Homo sapien
tattattggtgagtgggtgggtagc

SEQ ID NO: 5104531 - DNA, 25 bp, Homo sapien
gtgggtagctgtccccttccgcatg

SEQ ID NO: 5104532 - DNA, 25 bp, Homo sapien
cacatatagctagcagaggggtgga

SEQ ID NO: 5104533 - DNA, 25 bp, Homo sapien
aggggatcctgctgggatagagtgc

SEQ ID NO: 5104534 - DNA, 25 bp, Homo sapien
ccaattcttgaaggccacggttttg

SEQ ID NO: 5104535 - DNA, 25 bp, Homo sapien
aggtacaagagtggtaagcagcaac

SEQ ID NO: 5104536 - DNA, 25 bp, Homo sapien
attcacccaattcttgaaggccacg

SEQ ID NO: 5104537 - DNA, 25 bp, Homo sapien
tgtttctctttaggtacaagagtgg

SEQ ID NO: 5104538 - DNA, 25 bp, Homo sapien
gacactccagtctttacacgcttga

SEQ ID NO: 5104539 - DNA, 25 bp, Homo sapien
tcccgaaggaagcaacattggagct

SEQ ID NO: 5104540 - DNA, 25 bp, Homo sapien
tgggattcatcgctaaaggacaggc

SEQ ID NO: 5104541 - DNA, 25 bp, Homo sapien
tcctcaacggaatcagacacagcga

SEQ ID NO: 5104542 - DNA, 25 bp, Homo sapien
gcagcaggggcagtcactcggagct

SEQ ID NO: 5104543 - DNA, 25 bp, Homo sapien
gagggttgaagacgccccttggctc

SEQ ID NO: 5104544 - DNA, 25 bp, Homo sapien
gggtgaagtcagtgcgaagccagag

SEQ ID NO: 5104545 - DNA, 25 bp, Homo sapien
agtcagtgcgaagccagagggttga

SEQ ID NO: 5104546 - DNA, 25 bp, Homo sapien
cctagaaacagtccacatatcttca

SEQ ID NO: 5104547 - DNA, 25 bp, Homo sapien
gcttgattcattgtaaggatggctc

SEQ ID NO: 5104548 - DNA, 25 bp, Homo sapien
gcattagcttgattcattgtaagga

SEQ ID NO: 5104549 - DNA, 25 bp, Homo sapien
tggtgttgtgaacctagaaacagtc

SEQ ID NO: 5104550 - DNA, 25 bp, Homo sapien
tcccagttcgacttaagaataccac

SEQ ID NO: 5104551 - DNA, 25 bp, Homo sapien
taaggactctattctcaactcagat

SEQ ID NO: 5104552 - DNA, 25 bp, Homo sapien
gaacccaggagcaccttaaggactc

SEQ ID NO: 5104553 - DNA, 25 bp, Homo sapien
tcagatgtctggcacgtttggctgc

SEQ ID NO: 5104554 - DNA, 25 bp, Homo sapien
tggatctatacactcaccccagatg

SEQ ID NO: 5104555 - DNA, 25 bp, Homo sapien
tcagggctggatctatacactcacc

SEQ ID NO: 5104556 - DNA, 25 bp, Homo sapien
tgtcccctttgctcgatggttcctc

SEQ ID NO: 5104557 - DNA, 25 bp, Homo sapien
ccttgtttctctgccactccagatg

SEQ ID NO: 5104558 - DNA, 25 bp, Homo sapien
aactcaatgtaaagcaggtagcgca

SEQ ID NO: 5104559 - DNA, 25 bp, Homo sapien
gcaggtgggtcacataactcaatgt

SEQ ID NO: 5104560 - DNA, 25 bp, Homo sapien
aggtgggtcacataactcaatgtaa

SEQ ID NO: 5104561 - DNA, 25 bp, Homo sapien
ctcaatgtaaagcaggtagcgcacc

SEQ ID NO: 5104562 - DNA, 25 bp, Homo sapien
tctccacacataaggtggtgccaac

SEQ ID NO: 5104563 - DNA, 25 bp, Homo sapien
cactctccacacataaggtggtgcc

SEQ ID NO: 5104564 - DNA, 25 bp, Homo sapien
ggcactctccacacataaggtggtg

SEQ ID NO: 5104565 - DNA, 25 bp, Homo sapien
tccacacataaggtggtgccaacag

SEQ ID NO: 5104566 - DNA, 25 bp, Homo sapien
ggtcccatccctgacccaatctcag

SEQ ID NO: 5104567 - DNA, 25 bp, Homo sapien
agcaggaaaaatccctcagcaggaa

SEQ ID NO: 5104568 - DNA, 25 bp, Homo sapien
gaaaagtcgtttcattacatctggc

SEQ ID NO: 5104569 - DNA, 25 bp, Homo sapien
actgtgccttactccaccaaatgga

SEQ ID NO: 5104570 - DNA, 25 bp, Homo sapien
cagatccttgcaccagcgtgtctaa

SEQ ID NO: 5104571 - DNA, 25 bp, Homo sapien
caagatctagttcttcaaaggccag

SEQ ID NO: 5104572 - DNA, 25 bp, Homo sapien
tcctatactgtagagaagccctttc

SEQ ID NO: 5104573 - DNA, 25 bp, Homo sapien
catgcaacctggaggcaatccctct

SEQ ID NO: 5104574 - DNA, 25 bp, Homo sapien
ttctcgtaacccttaagattctcat

SEQ ID NO: 5104575 - DNA, 25 bp, Homo sapien
attctcgtaacccttaagattctca

SEQ ID NO: 5104576 - DNA, 25 bp, Homo sapien
ggccaaacagcgtgaatgagaatag

SEQ ID NO: 5104577 - DNA, 25 bp, Homo sapien
tgtccgtatcccaaaatggccagac

SEQ ID NO: 5104578 - DNA, 25 bp, Homo sapien
ttgactgactgatgccaagggcact

SEQ ID NO: 5104579 - DNA, 25 bp, Homo sapien
cagccaccctttgtaggcccaggaa

SEQ ID NO: 5104580 - DNA, 25 bp, Homo sapien
ctgcacagtatttatctccatctcc

SEQ ID NO: 5104581 - DNA, 25 bp, Homo sapien
tccaccccagaaggtaagatccctg

SEQ ID NO: 5104582 - DNA, 25 bp, Homo sapien
ctttttcatgactgtgagaattagg

SEQ ID NO: 5104583 - DNA, 25 bp, Homo sapien
ccctgagcacagaatcttgtctttt

SEQ ID NO: 5104584 - DNA, 25 bp, Homo sapien
tatagcctgtcttttgtaggctaga

SEQ ID NO: 5104585 - DNA, 25 bp, Homo sapien
tagatttactgagtagatcctcacc

SEQ ID NO: 5104586 - DNA, 25 bp, Homo sapien
tcttttgtaggctagatttactgag

SEQ ID NO: 5104587 - DNA, 25 bp, Homo sapien
tttactgagtagatcctcacccagc

SEQ ID NO: 5104588 - DNA, 25 bp, Homo sapien
gaaacttaccgtctactctgggaca

SEQ ID NO: 5104589 - DNA, 25 bp, Homo sapien
ggagaattacctgcacacgcctgta

SEQ ID NO: 5104590 - DNA, 25 bp, Homo sapien
gataataaaggcctcagacccacag

SEQ ID NO: 5104591 - DNA, 25 bp, Homo sapien
aaagagccggtgtctcgcgttcaaa

SEQ ID NO: 5104592 - DNA, 25 bp, Homo sapien
tcctctattaggtgacatccttggc

SEQ ID NO: 5104593 - DNA, 25 bp, Homo sapien
tctcagataaagctgtatcaacata

SEQ ID NO: 5104594 - DNA, 25 bp, Homo sapien
tggcatttccacactaggacgatta

SEQ ID NO: 5104595 - DNA, 25 bp, Homo sapien
tccattgcatgaatcaccggggcgt

SEQ ID NO: 5104596 - DNA, 25 bp, Homo sapien
gtggcgagggccgtgccgcgtcggc

SEQ ID NO: 5104597 - DNA, 25 bp, Homo sapien
aaggtgcttgccgcggcccagaacg

SEQ ID NO: 5104598 - DNA, 25 bp, Homo sapien
ggcagcgcgagctgggagggcgaag

SEQ ID NO: 5104599 - DNA, 25 bp, Homo sapien
tgcccgaccaagaaaagtggcgagg

SEQ ID NO: 5104600 - DNA, 25 bp, Homo sapien
catcgctgtcggccactgatcccgc

SEQ ID NO: 5104601 - DNA, 25 bp, Homo sapien
gcatcgctgtcggccactgatcccg

SEQ ID NO: 5104602 - DNA, 25 bp, Homo sapien
gcggttgcacggcacagagggggct

SEQ ID NO: 5104603 - DNA, 25 bp, Homo sapien
ctggctggcggttgcacggcacaga

SEQ ID NO: 5104604 - DNA, 25 bp, Homo sapien
gctgtcgggcgtccctacccgccat

SEQ ID NO: 5104605 - DNA, 25 bp, Homo sapien
gctggcggttgcacggcacagaggg

SEQ ID NO: 5104606 - DNA, 25 bp, Homo sapien
tagaagtacacagattggctttcca

SEQ ID NO: 5104607 - DNA, 25 bp, Homo sapien
aaaaatagaagtacacagattggct

SEQ ID NO: 5104608 - DNA, 25 bp, Homo sapien
aaaatagaagtacacagattggctt

SEQ ID NO: 5104609 - DNA, 25 bp, Homo sapien
aatagaagtacacagattggctttc

SEQ ID NO: 5104610 - DNA, 25 bp, Homo sapien
tgtttaaatggccatcatctagttt

SEQ ID NO: 5104611 - DNA, 25 bp, Homo sapien
cagtcgtgggaagtacacgtccgct

SEQ ID NO: 5104612 - DNA, 25 bp, Homo sapien
agtacacgtccgcttgaactggaga

SEQ ID NO: 5104613 - DNA, 25 bp, Homo sapien
aagagttgtttaaatggccatcatc

SEQ ID NO: 5104614 - DNA, 25 bp, Homo sapien
acaccttcttgcctggtctcatgcc

SEQ ID NO: 5104615 - DNA, 25 bp, Homo sapien
tctctgggttgaggtctacgatgcc

SEQ ID NO: 5104616 - DNA, 25 bp, Homo sapien
tgccacctttaatgtgcccacaaaa

SEQ ID NO: 5104617 - DNA, 25 bp, Homo sapien
gaggtctacgatgcccatcactaac

SEQ ID NO: 5104618 - DNA, 25 bp, Homo sapien
cacagctttgagttcgattgccaca

SEQ ID NO: 5104619 - DNA, 25 bp, Homo sapien
gagtagctgccgatctgtgaacaca

SEQ ID NO: 5104620 - DNA, 25 bp, Homo sapien
tgaatggaaagtaagggattgctga

SEQ ID NO: 5104621 - DNA, 25 bp, Homo sapien
ctctccccagatatacaagaatttc

SEQ ID NO: 5104622 - DNA, 25 bp, Homo sapien
gaacatggcctcattagcaaaggga

SEQ ID NO: 5104623 - DNA, 25 bp, Homo sapien
aaaagtttggattgtgcttcctgcc

SEQ ID NO: 5104624 - DNA, 25 bp, Homo sapien
gggaaacaaggacacgaacatggcc

SEQ ID NO: 5104625 - DNA, 25 bp, Homo sapien
gcctgtaaccatgaaatagactgag

SEQ ID NO: 5104626 - DNA, 25 bp, Homo sapien
tcagaatgcattgagacctgcagag

SEQ ID NO: 5104627 - DNA, 25 bp, Homo sapien
tccacaatttcaatgaacgctactg

SEQ ID NO: 5104628 - DNA, 25 bp, Homo sapien
cttcagtggttcacaaacatcagaa

SEQ ID NO: 5104629 - DNA, 25 bp, Homo sapien
cagattgttgggctctacctccaaa

SEQ ID NO: 5104630 - DNA, 25 bp, Homo sapien
acgtgggtgctcacaaagaatttcc

SEQ ID NO: 5104631 - DNA, 25 bp, Homo sapien
cgtttgaatgcgatggtaaaaatca

SEQ ID NO: 5104632 - DNA, 25 bp, Homo sapien
cacaaacactcggaaacgtgggtgc

SEQ ID NO: 5104633 - DNA, 25 bp, Homo sapien
ccaagcttggtgatctggaggtctc

SEQ ID NO: 5104634 - DNA, 25 bp, Homo sapien
aatgccaaggccgtttatctcaagg

SEQ ID NO: 5104635 - DNA, 25 bp, Homo sapien
cagttccgtaagtgcagggtaacac

SEQ ID NO: 5104636 - DNA, 25 bp, Homo sapien
tataatggctcggtgtctttgtccc

SEQ ID NO: 5104637 - DNA, 25 bp, Homo sapien
gaagcattcactctactggctggat

SEQ ID NO: 5104638 - DNA, 25 bp, Homo sapien
cataagtgtgaaagtgaggaatcac

SEQ ID NO: 5104639 - DNA, 25 bp, Homo sapien
tgtaagttattaggtctctgagggc

SEQ ID NO: 5104640 - DNA, 25 bp, Homo sapien
tcactgctatgccacgtggtctatg

SEQ ID NO: 5104641 - DNA, 25 bp, Homo sapien
taagtactctatacctggcgccaaa

SEQ ID NO: 5104642 - DNA, 25 bp, Homo sapien
aacccaaggcttgttcataggagac

SEQ ID NO: 5104643 - DNA, 25 bp, Homo sapien
tcttgaggattcagcaaagcgccac

SEQ ID NO: 5104644 - DNA, 25 bp, Homo sapien
ggagaccagccacctatggtttgga

SEQ ID NO: 5104645 - DNA, 25 bp, Homo sapien
tatactcctgatgctcgatgatggc

SEQ ID NO: 5104646 - DNA, 25 bp, Homo sapien
ttgctccttggggtgttccgcagcc

SEQ ID NO: 5104647 - DNA, 25 bp, Homo sapien
tccaaggctccttgtctgctgggac

SEQ ID NO: 5104648 - DNA, 25 bp, Homo sapien
ccaaggctccttgtctgctgggact

SEQ ID NO: 5104649 - DNA, 25 bp, Homo sapien
gtgttccgcagcctcctgtcagact

SEQ ID NO: 5104650 - DNA, 25 bp, Homo sapien
agctctacctttgcaccttggctca

SEQ ID NO: 5104651 - DNA, 25 bp, Homo sapien
gctctacctttgcaccttggctcag

SEQ ID NO: 5104652 - DNA, 25 bp, Homo sapien
gagctctacctttgcaccttggctc

SEQ ID NO: 5104653 - DNA, 25 bp, Homo sapien
ggagctctacctttgcaccttggct

SEQ ID NO: 5104654 - DNA, 25 bp, Homo sapien
gtttctgaaagcaagcgaacctcct

SEQ ID NO: 5104655 - DNA, 25 bp, Homo sapien
gattttctcccctgtgaaactacaa

SEQ ID NO: 5104656 - DNA, 25 bp, Homo sapien
ataaacgcgaaagcgtcagacgccc

SEQ ID NO: 5104657 - DNA, 25 bp, Homo sapien
gaaactacaagacttcataaacgcg

SEQ ID NO: 5104658 - DNA, 25 bp, Homo sapien
ccaagagcttcagggtgacccagtc

SEQ ID NO: 5104659 - DNA, 25 bp, Homo sapien
ggagaaagtggaatgcgacatcacc

SEQ ID NO: 5104660 - DNA, 25 bp, Homo sapien
ggcagcaaggaccagtgcgatcaaa

SEQ ID NO: 5104661 - DNA, 25 bp, Homo sapien
cgacatcacccccaaggagaggaag

SEQ ID NO: 5104662 - DNA, 25 bp, Homo sapien
cagtataaccaaaagtacactaggt

SEQ ID NO: 5104663 - DNA, 25 bp, Homo sapien
acagtataaccaaaagtacactagg

SEQ ID NO: 5104664 - DNA, 25 bp, Homo sapien
tctacagtataaccaaaagtacact

SEQ ID NO: 5104665 - DNA, 25 bp, Homo sapien
tacagtataaccaaaagtacactag

SEQ ID NO: 5104666 - DNA, 25 bp, Homo sapien
cagtgtatctacctttgatttatca

SEQ ID NO: 5104667 - DNA, 25 bp, Homo sapien
aggttcccctccagcggattcctct

SEQ ID NO: 5104668 - DNA, 25 bp, Homo sapien
tggctcatctgttgttgcatgagct

SEQ ID NO: 5104669 - DNA, 25 bp, Homo sapien
gttgttgcatgagctgcaaaagcag

SEQ ID NO: 5104670 - DNA, 25 bp, Homo sapien
tttgcttctcgcatcagcacctgac

SEQ ID NO: 5104671 - DNA, 25 bp, Homo sapien
ctttgcttctcgcatcagcacctga

SEQ ID NO: 5104672 - DNA, 25 bp, Homo sapien
tctcgcatcagcacctgacatgtct

SEQ ID NO: 5104673 - DNA, 25 bp, Homo sapien
gcttctcgcatcagcacctgacatg

SEQ ID NO: 5104674 - DNA, 25 bp, Homo sapien
ggcaactctcctctatgcttagcag

SEQ ID NO: 5104675 - DNA, 25 bp, Homo sapien
cagaaagcttgaacccaaggagaag

SEQ ID NO: 5104676 - DNA, 25 bp, Homo sapien
tcaggatcaggtgagggcaactctc

SEQ ID NO: 5104677 - DNA, 25 bp, Homo sapien
gagaagccctttacgatctggaaga

SEQ ID NO: 5104678 - DNA, 25 bp, Homo sapien
ggatagcctctattttccccgcgag

SEQ ID NO: 5104679 - DNA, 25 bp, Homo sapien
attttccccgcgagtgctttgtttg

SEQ ID NO: 5104680 - DNA, 25 bp, Homo sapien
ccgcgagtgctttgtttggatcagt

SEQ ID NO: 5104681 - DNA, 25 bp, Homo sapien
ttggatcagtgttccaggtgacaca

SEQ ID NO: 5104682 - DNA, 25 bp, Homo sapien
tgtcaaactagctttcaagagattt

SEQ ID NO: 5104683 - DNA, 25 bp, Homo sapien
gccactgatattgcctcaggtaatt

SEQ ID NO: 5104684 - DNA, 25 bp, Homo sapien
gccagctgccactgatattgcctca

SEQ ID NO: 5104685 - DNA, 25 bp, Homo sapien
gggagccgcattgtcaaactagctt

SEQ ID NO: 5104686 - DNA, 25 bp, Homo sapien
ggctgctaattctgagtccctcaag

SEQ ID NO: 5104687 - DNA, 25 bp, Homo sapien
ttgtcaatgccgaactccctgatga

SEQ ID NO: 5104688 - DNA, 25 bp, Homo sapien
ctggctttccagagattgtcaatgc

SEQ ID NO: 5104689 - DNA, 25 bp, Homo sapien
aagctgccaattgccactgatactg

SEQ ID NO: 5104690 - DNA, 25 bp, Homo sapien
agaccccccgcccactccacacact

SEQ ID NO: 5104691 - DNA, 25 bp, Homo sapien
cactccacacactctcccatcatgc

SEQ ID NO: 5104692 - DNA, 25 bp, Homo sapien
gcggagaccccccgcccactccaca

SEQ ID NO: 5104693 - DNA, 25 bp, Homo sapien
ccccgcccactccacacactctccc

SEQ ID NO: 5104694 - DNA, 25 bp, Homo sapien
cccatcccactaccctccgccctct

SEQ ID NO: 5104695 - DNA, 25 bp, Homo sapien
ccatggacgcccacccggagtttca

SEQ ID NO: 5104696 - DNA, 25 bp, Homo sapien
cactaccctccgccctcttccgccg

SEQ ID NO: 5104697 - DNA, 25 bp, Homo sapien
acgcccacccggagtttcaccgctg

SEQ ID NO: 5104698 - DNA, 25 bp, Homo sapien
gaaggaccgtctattccgacgcgga

SEQ ID NO: 5104699 - DNA, 25 bp, Homo sapien
cttcggggcggctgcgatgggcatg

SEQ ID NO: 5104700 - DNA, 25 bp, Homo sapien
tgctcacagccctgtcagcgcagca

SEQ ID NO: 5104701 - DNA, 25 bp, Homo sapien
tggtgagagcggaaggccggctgct

SEQ ID NO: 5104702 - DNA, 25 bp, Homo sapien
cagatgctcccggcccgggtgaggg

SEQ ID NO: 5104703 - DNA, 25 bp, Homo sapien
ctttccccggcgcagctaggggagc

SEQ ID NO: 5104704 - DNA, 25 bp, Homo sapien
accagcggcgttcccgcactcgccg

SEQ ID NO: 5104705 - DNA, 25 bp, Homo sapien
gccgtgcgcttcgggcgccaccagc

SEQ ID NO: 5104706 - DNA, 25 bp, Homo sapien
gcttgtctattttctatgatgctcc

SEQ ID NO: 5104707 - DNA, 25 bp, Homo sapien
cttgtctattttctatgatgctcct

SEQ ID NO: 5104708 - DNA, 25 bp, Homo sapien
cctaagtagtatttgatcatgccca

SEQ ID NO: 5104709 - DNA, 25 bp, Homo sapien
tgaaaaattaccgtgcaacccatgt

SEQ ID NO: 5104710 - DNA, 25 bp, Homo sapien
aattaacattcccttgtgccacagg

SEQ ID NO: 5104711 - DNA, 25 bp, Homo sapien
tgttttcaatgctctaggctaggcc

SEQ ID NO: 5104712 - DNA, 25 bp, Homo sapien
tgagacagaaaactatcatccgctg

SEQ ID NO: 5104713 - DNA, 25 bp, Homo sapien
gaaaccagggtcactgctaatctga

SEQ ID NO: 5104714 - DNA, 25 bp, Homo sapien
gccctgtgctttgtgtaaacttatg

SEQ ID NO: 5104715 - DNA, 25 bp, Homo sapien
ttacgtgtaacacttgccctgtgct

SEQ ID NO: 5104716 - DNA, 25 bp, Homo sapien
gcaattgacttaccttgggctccca

SEQ ID NO: 5104717 - DNA, 25 bp, Homo sapien
agcaattgacttaccttgggctccc

SEQ ID NO: 5104718 - DNA, 25 bp, Homo sapien
tgctggtggcattccattgtacaga

SEQ ID NO: 5104719 - DNA, 25 bp, Homo sapien
gctgggtatcatggtaagtacatgt

SEQ ID NO: 5104720 - DNA, 25 bp, Homo sapien
ttcaaagaactatgtgtgatggctt

SEQ ID NO: 5104721 - DNA, 25 bp, Homo sapien
gacaggctttattggccttctagag

SEQ ID NO: 5104722 - DNA, 25 bp, Homo sapien
ggactaacagccaaagtcctagaat

SEQ ID NO: 5104723 - DNA, 25 bp, Homo sapien
taaacagatacttcttacaactcac

SEQ ID NO: 5104724 - DNA, 25 bp, Homo sapien
aacagatacttcttacaactcacag

SEQ ID NO: 5104725 - DNA, 25 bp, Homo sapien
gccaaagtcctagaataaaaccagc

SEQ ID NO: 5104726 - DNA, 25 bp, Homo sapien
cactcctgggtctgactctttttca

SEQ ID NO: 5104727 - DNA, 25 bp, Homo sapien
catgtacagattactatgtgaaccc

SEQ ID NO: 5104728 - DNA, 25 bp, Homo sapien
ggttgtctacccattcactccatat

SEQ ID NO: 5104729 - DNA, 25 bp, Homo sapien
cccaggagtgtgaatgctgcgtcat

SEQ ID NO: 5104730 - DNA, 25 bp, Homo sapien
tgttcagttgctttcaaataattaa

SEQ ID NO: 5104731 - DNA, 25 bp, Homo sapien
ttgctttcaaataattaatttacac

SEQ ID NO: 5104732 - DNA, 25 bp, Homo sapien
cagttgctttcaaataattaattta

SEQ ID NO: 5104733 - DNA, 25 bp, Homo sapien
gttcagttgctttcaaataattaat

SEQ ID NO: 5104734 - DNA, 25 bp, Homo sapien
tccttgggacgagtataatctggtg

SEQ ID NO: 5104735 - DNA, 25 bp, Homo sapien
tgaaggtacaaactcttccttggga

SEQ ID NO: 5104736 - DNA, 25 bp, Homo sapien
tcaacaaaccctacaccagaagggc

SEQ ID NO: 5104737 - DNA, 25 bp, Homo sapien
tacattcgaatgatgtctggctcca

SEQ ID NO: 5104738 - DNA, 25 bp, Homo sapien
taacagaatccatgcataggtgagc

SEQ ID NO: 5104739 - DNA, 25 bp, Homo sapien
aagcctttgactgaacacctgactg

SEQ ID NO: 5104740 - DNA, 25 bp, Homo sapien
tatgagtgctaagaggcttccgtcc

SEQ ID NO: 5104741 - DNA, 25 bp, Homo sapien
tcctcagcaggactaggtacagagt

SEQ ID NO: 5104742 - DNA, 25 bp, Homo sapien
caacttggctaggaccagctgaact

SEQ ID NO: 5104743 - DNA, 25 bp, Homo sapien
cagtagcctgctggtctccaaaagc

SEQ ID NO: 5104744 - DNA, 25 bp, Homo sapien
tgtaaatggccactagcaactgctc

SEQ ID NO: 5104745 - DNA, 25 bp, Homo sapien
cagagtcttgaaaaccattgcagtc

SEQ ID NO: 5104746 - DNA, 25 bp, Homo sapien
catacaaaatagagaaaattagtaa

SEQ ID NO: 5104747 - DNA, 25 bp, Homo sapien
tcatacaaaatagagaaaattagta

SEQ ID NO: 5104748 - DNA, 25 bp, Homo sapien
gtaaccaacccacaaatcagacagg

SEQ ID NO: 5104749 - DNA, 25 bp, Homo sapien
tcaccaaaaaatccaagttgatgag

SEQ ID NO: 5104750 - DNA, 25 bp, Homo sapien
tgaaaagctgaaattagaagcctcc

SEQ ID NO: 5104751 - DNA, 25 bp, Homo sapien
tcttactgcgctttactataggact

SEQ ID NO: 5104752 - DNA, 25 bp, Homo sapien
caatacagagtatatgcagccataa

SEQ ID NO: 5104753 - DNA, 25 bp, Homo sapien
ctctcaacatcagccaaggatagtt

SEQ ID NO: 5104754 - DNA, 25 bp, Homo sapien
tcttatgagtacaaaggaactttgc

SEQ ID NO: 5104755 - DNA, 25 bp, Homo sapien
aactccctgtagcagattaatgcag

SEQ ID NO: 5104756 - DNA, 25 bp, Homo sapien
aagggcatcctgtaatgagtttctc

SEQ ID NO: 5104757 - DNA, 25 bp, Homo sapien
tcaatagagggctatagatccaggg

SEQ ID NO: 5104758 - DNA, 25 bp, Homo sapien
caatttccataagaccagtttggtg

SEQ ID NO: 5104759 - DNA, 25 bp, Homo sapien
aagtaaatgactggtataataacac

SEQ ID NO: 5104760 - DNA, 25 bp, Homo sapien
gttggagtttagtggtgcaatctcg

SEQ ID NO: 5104761 - DNA, 25 bp, Homo sapien
ctgcctcccaggttcacgtcattct

SEQ ID NO: 5104762 - DNA, 25 bp, Homo sapien
tgcctcccaggttcacgtcattctc

SEQ ID NO: 5104763 - DNA, 25 bp, Homo sapien
ggttggagtttagtggtgcaatctc

SEQ ID NO: 5104764 - DNA, 25 bp, Homo sapien
ccactttcaggtaaggcctctctcg

SEQ ID NO: 5104765 - DNA, 25 bp, Homo sapien
tcagggacaagtatggaaggaaaac

SEQ ID NO: 5104766 - DNA, 25 bp, Homo sapien
ggaaaacatgcttcgaaaattcgct

SEQ ID NO: 5104767 - DNA, 25 bp, Homo sapien
tattggcaaagtgcttgtttccagc

SEQ ID NO: 5104768 - DNA, 25 bp, Homo sapien
tcgggtgtctattcccaaggaggac

SEQ ID NO: 5104769 - DNA, 25 bp, Homo sapien
tgtagctcagtccacacatctagca

SEQ ID NO: 5104770 - DNA, 25 bp, Homo sapien
gcatcatggatatcctgtagctcag

SEQ ID NO: 5104771 - DNA, 25 bp, Homo sapien
gccccactggtatctcaagccatgt

SEQ ID NO: 5104772 - DNA, 25 bp, Homo sapien
gggcactataacaggctgcttctta

SEQ ID NO: 5104773 - DNA, 25 bp, Homo sapien
tataacaggctgcttcttattgccc

SEQ ID NO: 5104774 - DNA, 25 bp, Homo sapien
gctgcttcttattgcccgtgaagag

SEQ ID NO: 5104775 - DNA, 25 bp, Homo sapien
caggctgcttcttattgcccgtgaa

SEQ ID NO: 5104776 - DNA, 25 bp, Homo sapien
gaaagcagaagcaccaactcgggat

SEQ ID NO: 5104777 - DNA, 25 bp, Homo sapien
tttgtacacattaccccatggtgag

SEQ ID NO: 5104778 - DNA, 25 bp, Homo sapien
ggtgcacagcccataaacttaagtt

SEQ ID NO: 5104779 - DNA, 25 bp, Homo sapien
tgacagcactggagacttagttcct

SEQ ID NO: 5104780 - DNA, 25 bp, Homo sapien
tcatatctggtgacatggtggctgt

SEQ ID NO: 5104781 - DNA, 25 bp, Homo sapien
tggttccttggtgggctctaacata

SEQ ID NO: 5104782 - DNA, 25 bp, Homo sapien
gtctgaccgatggaagctatttttt

SEQ ID NO: 5104783 - DNA, 25 bp, Homo sapien
gatgtacatgtgttcatatctggtg

SEQ ID NO: 5104784 - DNA, 25 bp, Homo sapien
gtatatacacgcataaacatattta

SEQ ID NO: 5104785 - DNA, 25 bp, Homo sapien
aggcagtatgtgtggatatatgtgt

SEQ ID NO: 5104786 - DNA, 25 bp, Homo sapien
aaggcagtatgtgtggatatatgtg

SEQ ID NO: 5104787 - DNA, 25 bp, Homo sapien
tatgtgtatatacacgcataaacat

SEQ ID NO: 5104788 - DNA, 25 bp, Homo sapien
tcagtagtggcacaatggtgtgacc

SEQ ID NO: 5104789 - DNA, 25 bp, Homo sapien
gagtgttgaccctactcagcaatga

SEQ ID NO: 5104790 - DNA, 25 bp, Homo sapien
cagtctaagagaagttgctaccggt

SEQ ID NO: 5104791 - DNA, 25 bp, Homo sapien
tgctaccggtgactagatggataac

SEQ ID NO: 5104792 - DNA, 25 bp, Homo sapien
tctagatcagtgacacctttgggca

SEQ ID NO: 5104793 - DNA, 25 bp, Homo sapien
cgctttattgtaaggcaggcactgt

SEQ ID NO: 5104794 - DNA, 25 bp, Homo sapien
aatacgactgtctggataactggga

SEQ ID NO: 5104795 - DNA, 25 bp, Homo sapien
tgcgtaggtaggtaagatcacttgc

SEQ ID NO: 5104796 - DNA, 25 bp, Homo sapien
tgccaaattttataatgtgctgctg

SEQ ID NO: 5104797 - DNA, 25 bp, Homo sapien
gctaatctcctctgaccttgccaaa

SEQ ID NO: 5104798 - DNA, 25 bp, Homo sapien
gtcatccttgtactggggcaatgct

SEQ ID NO: 5104799 - DNA, 25 bp, Homo sapien
ttgtactggggcaatgctaatctcc

SEQ ID NO: 5104800 - DNA, 25 bp, Homo sapien
tctaaagggttagtaaggccactgc

SEQ ID NO: 5104801 - DNA, 25 bp, Homo sapien
ccagtcaaactggacgggtggtaga

SEQ ID NO: 5104802 - DNA, 25 bp, Homo sapien
catctaaagggttagtaaggccact

SEQ ID NO: 5104803 - DNA, 25 bp, Homo sapien
caaactggacgggtggtagagactc

SEQ ID NO: 5104804 - DNA, 25 bp, Homo sapien
cagtttcaggacacgcaccaatgtg

SEQ ID NO: 5104805 - DNA, 25 bp, Homo sapien
tagacaatggctcgaacaacttaag

SEQ ID NO: 5104806 - DNA, 25 bp, Homo sapien
ccagaaagaccgaaaggaatgcgta

SEQ ID NO: 5104807 - DNA, 25 bp, Homo sapien
taggaccccactataaggccaagct

SEQ ID NO: 5104808 - DNA, 25 bp, Homo sapien
agccacacagaaggtaagccaaggg

SEQ ID NO: 5104809 - DNA, 25 bp, Homo sapien
tgttggtaggcagccacacagaagg

SEQ ID NO: 5104810 - DNA, 25 bp, Homo sapien
attcagtgaccgtgttggtaggcag

SEQ ID NO: 5104811 - DNA, 25 bp, Homo sapien
gtaggcagccacacagaaggtaagc

SEQ ID NO: 5104812 - DNA, 25 bp, Homo sapien
ttcagaagagtggaacctccactag

SEQ ID NO: 5104813 - DNA, 25 bp, Homo sapien
tactgtcatccacgggcccaaagaa

SEQ ID NO: 5104814 - DNA, 25 bp, Homo sapien
gctactgtcatccacgggcccaaag

SEQ ID NO: 5104815 - DNA, 25 bp, Homo sapien
caaggttcagaagagtggaacctcc

SEQ ID NO: 5104816 - DNA, 25 bp, Homo sapien
tctgggcatgggcatctctacggca

SEQ ID NO: 5104817 - DNA, 25 bp, Homo sapien
catcatggctgctcaactgttggaa

SEQ ID NO: 5104818 - DNA, 25 bp, Homo sapien
tctcaagaagggcatcctaggtccc

SEQ ID NO: 5104819 - DNA, 25 bp, Homo sapien
tgtcagacaattagctcacccaggt

SEQ ID NO: 5104820 - DNA, 25 bp, Homo sapien
tacagctctaagcttctgaaaccgc

SEQ ID NO: 5104821 - DNA, 25 bp, Homo sapien
tcgcagctgtgtacactgagcctga

SEQ ID NO: 5104822 - DNA, 25 bp, Homo sapien
taaccgcaagctaagacgaaatgac

SEQ ID NO: 5104823 - DNA, 25 bp, Homo sapien
gaaaccgcttgctcttctcgcagct

SEQ ID NO: 5104824 - DNA, 25 bp, Homo sapien
aaatgatagtcagtgatggcaggct

SEQ ID NO: 5104825 - DNA, 25 bp, Homo sapien
tattctgtaaacatctgagtgtttt

SEQ ID NO: 5104826 - DNA, 25 bp, Homo sapien
gggttacccagttagccacaatcca

SEQ ID NO: 5104827 - DNA, 25 bp, Homo sapien
ccagttagccacaatccaagatgca

SEQ ID NO: 5104828 - DNA, 25 bp, Homo sapien
tgttaactcatacaactccggatcc

SEQ ID NO: 5104829 - DNA, 25 bp, Homo sapien
tgaggtggagatttccagcttagaa

SEQ ID NO: 5104830 - DNA, 25 bp, Homo sapien
gacatgagtcttgcaaatgcatcag

SEQ ID NO: 5104831 - DNA, 25 bp, Homo sapien
gtgcttgtcttctctactgtagaca

SEQ ID NO: 5104832 - DNA, 25 bp, Homo sapien
aggtggtttagagctcctcctaatg

SEQ ID NO: 5104833 - DNA, 25 bp, Homo sapien
tcctcctaatggcacgaaatgaatt

SEQ ID NO: 5104834 - DNA, 25 bp, Homo sapien
caaaacttctatagttctttggtca

SEQ ID NO: 5104835 - DNA, 25 bp, Homo sapien
taatggcacgaaatgaattctcatc

SEQ ID NO: 5104836 - DNA, 25 bp, Homo sapien
aacgtatacacaagtgttcacagca

SEQ ID NO: 5104837 - DNA, 25 bp, Homo sapien
ctcctaacagagttggaaacatctg

SEQ ID NO: 5104838 - DNA, 25 bp, Homo sapien
cttggaatgtatattactggtggga

SEQ ID NO: 5104839 - DNA, 25 bp, Homo sapien
gaagttagagttcctataagaccca

SEQ ID NO: 5104840 - DNA, 25 bp, Homo sapien
atctgtggtcattgtgcatgggtgt

SEQ ID NO: 5104841 - DNA, 25 bp, Homo sapien
ctaaatggactttcccatttgtgga

SEQ ID NO: 5104842 - DNA, 25 bp, Homo sapien
ctaagaaacagttggtaaagattat

SEQ ID NO: 5104843 - DNA, 25 bp, Homo sapien
aaacaacagtgaataaatgcgcacc

SEQ ID NO: 5104844 - DNA, 25 bp, Homo sapien
cttttaggacattctgtaggacacc

SEQ ID NO: 5104845 - DNA, 25 bp, Homo sapien
gatacatgacaagtgaaaacctgga

SEQ ID NO: 5104846 - DNA, 25 bp, Homo sapien
tctcagcaccactaacaatggagtc

SEQ ID NO: 5104847 - DNA, 25 bp, Homo sapien
caacagccaggtacaatagtcttca

SEQ ID NO: 5104848 - DNA, 25 bp, Homo sapien
tgtgcagtatgcttcctgtgccaaa

SEQ ID NO: 5104849 - DNA, 25 bp, Homo sapien
tcacatgcacacctagacagctcgt

SEQ ID NO: 5104850 - DNA, 25 bp, Homo sapien
tctcatgaagagtgacgtgcggcct

SEQ ID NO: 5104851 - DNA, 25 bp, Homo sapien
taggctagaagcatctacccaggca

SEQ ID NO: 5104852 - DNA, 25 bp, Homo sapien
ggaaggccagcgatcaccttgatag

SEQ ID NO: 5104853 - DNA, 25 bp, Homo sapien
catgaatgttaagtcaggaaggcca

SEQ ID NO: 5104854 - DNA, 25 bp, Homo sapien
tcttgagagcttgtggaaggtgtta

SEQ ID NO: 5104855 - DNA, 25 bp, Homo sapien
catcaacaccttggcatgcatgaat

SEQ ID NO: 5104856 - DNA, 25 bp, Homo sapien
tatgtatacctttctagtgcggctt

SEQ ID NO: 5104857 - DNA, 25 bp, Homo sapien
ttttgtaagaaggacaccaccagtg

SEQ ID NO: 5104858 - DNA, 25 bp, Homo sapien
gtgcggcttaccaacaaatcagctg

SEQ ID NO: 5104859 - DNA, 25 bp, Homo sapien
aaaggtcaaacagcaatacgccaga

SEQ ID NO: 5104860 - DNA, 25 bp, Homo sapien
aaaagaccttgggcatgcacattaa

SEQ ID NO: 5104861 - DNA, 25 bp, Homo sapien
aaagaccttgggcatgcacattaac

SEQ ID NO: 5104862 - DNA, 25 bp, Homo sapien
tgacagaggtgcaggagttccactg

SEQ ID NO: 5104863 - DNA, 25 bp, Homo sapien
gttccaatggccagtgtaatcccct

SEQ ID NO: 5104864 - DNA, 25 bp, Homo sapien
ggataggcatcttgtcactccgtca

SEQ ID NO: 5104865 - DNA, 25 bp, Homo sapien
tacactcaggcaagcgttccaatgg

SEQ ID NO: 5104866 - DNA, 25 bp, Homo sapien
agactcccaaggcaactcagcagaa

SEQ ID NO: 5104867 - DNA, 25 bp, Homo sapien
gagcttgaactgacccgtgccattc

SEQ ID NO: 5104868 - DNA, 25 bp, Homo sapien
tcttctgggttgtagctgttgctgc

SEQ ID NO: 5104869 - DNA, 25 bp, Homo sapien
gcctcttctttgagccaagggagaa

SEQ ID NO: 5104870 - DNA, 25 bp, Homo sapien
actcaggcagattgacaggtgtgtc

SEQ ID NO: 5104871 - DNA, 25 bp, Homo sapien
tgttttctaccaagccccgtgttga

SEQ ID NO: 5104872 - DNA, 25 bp, Homo sapien
caggtgtgtcgctttacggatgtgc

SEQ ID NO: 5104873 - DNA, 25 bp, Homo sapien
caattatctaaaatcgcgcatgccc

SEQ ID NO: 5104874 - DNA, 25 bp, Homo sapien
gatagcccagtaggagtgatgaccc

SEQ ID NO: 5104875 - DNA, 25 bp, Homo sapien
ggatagcccagtaggagtgatgacc

SEQ ID NO: 5104876 - DNA, 25 bp, Homo sapien
cccagtaggagtgatgacccacagg

SEQ ID NO: 5104877 - DNA, 25 bp, Homo sapien
tagcccagtaggagtgatgacccac

SEQ ID NO: 5104878 - DNA, 25 bp, Homo sapien
cactcggggagcggtttttcaggca

SEQ ID NO: 5104879 - DNA, 25 bp, Homo sapien
gggagcggtttttcaggcacacaca

SEQ ID NO: 5104880 - DNA, 25 bp, Homo sapien
ggggagcggtttttcaggcacacac

SEQ ID NO: 5104881 - DNA, 25 bp, Homo sapien
tcagcactcggggagcggtttttca

SEQ ID NO: 5104882 - DNA, 25 bp, Homo sapien
gccctgttaatctctctctaccata

SEQ ID NO: 5104883 - DNA, 25 bp, Homo sapien
taatctctctctaccatacaaggca

SEQ ID NO: 5104884 - DNA, 25 bp, Homo sapien
tgttaatctctctctaccatacaag

SEQ ID NO: 5104885 - DNA, 25 bp, Homo sapien
gaggctgccctgttaatctctctct

SEQ ID NO: 5104886 - DNA, 25 bp, Homo sapien
aatagggaccgggtcaatgacagcg

SEQ ID NO: 5104887 - DNA, 25 bp, Homo sapien
tctctggaggtaatcgctgtgccgt

SEQ ID NO: 5104888 - DNA, 25 bp, Homo sapien
ctggcaccgtgggaattccctctgt

SEQ ID NO: 5104889 - DNA, 25 bp, Homo sapien
cgtggctcttaatgagccactctcc

SEQ ID NO: 5104890 - DNA, 25 bp, Homo sapien
taatggctccaaaatacaaagggcc

SEQ ID NO: 5104891 - DNA, 25 bp, Homo sapien
tttgaaaaaggtctactggaggctc

SEQ ID NO: 5104892 - DNA, 25 bp, Homo sapien
tacctcggtacagtggacgaacgtg

SEQ ID NO: 5104893 - DNA, 25 bp, Homo sapien
tgacgaagtccatacggctcttagg

SEQ ID NO: 5104894 - DNA, 25 bp, Homo sapien
ggctgggcccagaatgcaagactct

SEQ ID NO: 5104895 - DNA, 25 bp, Homo sapien
tgtggctgggcccagaatgcaagac

SEQ ID NO: 5104896 - DNA, 25 bp, Homo sapien
ctgggcccagaatgcaagactctcc

SEQ ID NO: 5104897 - DNA, 25 bp, Homo sapien
gggcccagaatgcaagactctccga

SEQ ID NO: 5104898 - DNA, 25 bp, Homo sapien
ggctccgggcggttcggcagcgcag

SEQ ID NO: 5104899 - DNA, 25 bp, Homo sapien
aggctcgggtccagccgccacgacc

SEQ ID NO: 5104900 - DNA, 25 bp, Homo sapien
gccacgaccggctcgcgtggctccg

SEQ ID NO: 5104901 - DNA, 25 bp, Homo sapien
gggagcggccgagagtgaagcgcgg

SEQ ID NO: 5104902 - DNA, 25 bp, Homo sapien
tgaaagaatatggtcaacggcctga

SEQ ID NO: 5104903 - DNA, 25 bp, Homo sapien
cctcgtggaggatgacagcaaattt

SEQ ID NO: 5104904 - DNA, 25 bp, Homo sapien
ggctcagtgcccttccatgttggag

SEQ ID NO: 5104905 - DNA, 25 bp, Homo sapien
cctagtccacttggtgtcaggtgtg

SEQ ID NO: 5104906 - DNA, 25 bp, Homo sapien
cctcttcacctctgttccacctcag

SEQ ID NO: 5104907 - DNA, 25 bp, Homo sapien
tgttccacctcagggcgtggggtcc

SEQ ID NO: 5104908 - DNA, 25 bp, Homo sapien
acctctgttccacctcagggcgtgg

SEQ ID NO: 5104909 - DNA, 25 bp, Homo sapien
aaatgcacaggagccgctccccttc

SEQ ID NO: 5104910 - DNA, 25 bp, Homo sapien
ccacctctagccctcttgagggatt

SEQ ID NO: 5104911 - DNA, 25 bp, Homo sapien
ggatttatgacattctcacacttac

SEQ ID NO: 5104912 - DNA, 25 bp, Homo sapien
gagggatttatgacattctcacact

SEQ ID NO: 5104913 - DNA, 25 bp, Homo sapien
ccctcttgagggatttatgacattc

SEQ ID NO: 5104914 - DNA, 25 bp, Homo sapien
ttctgaggactttgaggctgaagat

SEQ ID NO: 5104915 - DNA, 25 bp, Homo sapien
gagaagtttgggcccaaggaactga

SEQ ID NO: 5104916 - DNA, 25 bp, Homo sapien
tgaggctgaagattagcactttatc

SEQ ID NO: 5104917 - DNA, 25 bp, Homo sapien
gctgaagattagcactttatctgaa

SEQ ID NO: 5104918 - DNA, 25 bp, Homo sapien
cacagcccagcagcgtggagaaggc

SEQ ID NO: 5104919 - DNA, 25 bp, Homo sapien
tccttcagcctttcacagcccagca

SEQ ID NO: 5104920 - DNA, 25 bp, Homo sapien
tcagcctttcacagcccagcagcgt

SEQ ID NO: 5104921 - DNA, 25 bp, Homo sapien
tttcacagcccagcagcgtggagaa

SEQ ID NO: 5104922 - DNA, 25 bp, Homo sapien
caaattaaacgcagtcagggtggca

SEQ ID NO: 5104923 - DNA, 25 bp, Homo sapien
tactgagtgttacgtgccaggcaat

SEQ ID NO: 5104924 - DNA, 25 bp, Homo sapien
taatcaagtaacaggtccaggcacg

SEQ ID NO: 5104925 - DNA, 25 bp, Homo sapien
cacattgttgtaacgcacagagggc

SEQ ID NO: 5104926 - DNA, 25 bp, Homo sapien
tctgcactaaggagccagagacctt

SEQ ID NO: 5104927 - DNA, 25 bp, Homo sapien
ctgcactaaggagccagagaccttg

SEQ ID NO: 5104928 - DNA, 25 bp, Homo sapien
gcactaaggagccagagaccttgcg

SEQ ID NO: 5104929 - DNA, 25 bp, Homo sapien
cactaaggagccagagaccttgcgg

SEQ ID NO: 5104930 - DNA, 25 bp, Homo sapien
gggtggcaggcccactgctgcgctg

SEQ ID NO: 5104931 - DNA, 25 bp, Homo sapien
ggtggcaggcccactgctgcgctga

SEQ ID NO: 5104932 - DNA, 25 bp, Homo sapien
cactgctgcgctgaccagagagctc

SEQ ID NO: 5104933 - DNA, 25 bp, Homo sapien
gctgcgctgaccagagagctctgca

SEQ ID NO: 5104934 - DNA, 25 bp, Homo sapien
ccagcttccagatggggctttttag

SEQ ID NO: 5104935 - DNA, 25 bp, Homo sapien
gcctctgactgttgctgagccacct

SEQ ID NO: 5104936 - DNA, 25 bp, Homo sapien
ctgactgttgctgagccacctctgt

SEQ ID NO: 5104937 - DNA, 25 bp, Homo sapien
ggcaagggaagaataggaggggcca

SEQ ID NO: 5104938 - DNA, 25 bp, Homo sapien
tcccatcacagtttctgaggacctg

SEQ ID NO: 5104939 - DNA, 25 bp, Homo sapien
tgctgttgtaaaggtgccctcctcc

SEQ ID NO: 5104940 - DNA, 25 bp, Homo sapien
tctgaggacctggtcccaggcaacc

SEQ ID NO: 5104941 - DNA, 25 bp, Homo sapien
aggtgctccacctgctgttgtaaag

SEQ ID NO: 5104942 - DNA, 25 bp, Homo sapien
gcaaggctggctccagtcttctcca

SEQ ID NO: 5104943 - DNA, 25 bp, Homo sapien
tggctccagtcttctccaaactctt

SEQ ID NO: 5104944 - DNA, 25 bp, Homo sapien
tatccattccttcaggagaggagaa

SEQ ID NO: 5104945 - DNA, 25 bp, Homo sapien
ggctggctccagtcttctccaaact

SEQ ID NO: 5104946 - DNA, 25 bp, Homo sapien
tcagggcctgacagcagctcagctt

SEQ ID NO: 5104947 - DNA, 25 bp, Homo sapien
aaaaatacctgtttctcagggcctg

SEQ ID NO: 5104948 - DNA, 25 bp, Homo sapien
gctcagcttgcctttcactccagat

SEQ ID NO: 5104949 - DNA, 25 bp, Homo sapien
tgaattcccagggtctgagtcccga

SEQ ID NO: 5104950 - DNA, 25 bp, Homo sapien
gtttgggtgttgaattccacttgga

SEQ ID NO: 5104951 - DNA, 25 bp, Homo sapien
caaagccagctattaatccttgcct

SEQ ID NO: 5104952 - DNA, 25 bp, Homo sapien
tgtttgggtgttgaattccacttgg

SEQ ID NO: 5104953 - DNA, 25 bp, Homo sapien
ccagacaaagccagctattaatcct

SEQ ID NO: 5104954 - DNA, 25 bp, Homo sapien
ggatcagtggcctgacctccttgcc

SEQ ID NO: 5104955 - DNA, 25 bp, Homo sapien
gggatcagtggcctgacctccttgc

SEQ ID NO: 5104956 - DNA, 25 bp, Homo sapien
ttgccctatcctgtcccgagccaag

SEQ ID NO: 5104957 - DNA, 25 bp, Homo sapien
ctgtcccgagccaaggcacaggcaa

SEQ ID NO: 5104958 - DNA, 25 bp, Homo sapien
ggttgggtagctccagggctcaggt

SEQ ID NO: 5104959 - DNA, 25 bp, Homo sapien
gggtctgacgtgctgggctccaact

SEQ ID NO: 5104960 - DNA, 25 bp, Homo sapien
tcagagtcaccacaagagggcccca

SEQ ID NO: 5104961 - DNA, 25 bp, Homo sapien
ttttctgggtctgacgtgctgggct

SEQ ID NO: 5104962 - DNA, 25 bp, Homo sapien
tgatggcctgcaagtagtgccaggt

SEQ ID NO: 5104963 - DNA, 25 bp, Homo sapien
cctggagaggctcccgtggagctga

SEQ ID NO: 5104964 - DNA, 25 bp, Homo sapien
gccaggtggccaagtgcgtttgaaa

SEQ ID NO: 5104965 - DNA, 25 bp, Homo sapien
gcccatgctctgagtggaatgcact

SEQ ID NO: 5104966 - DNA, 25 bp, Homo sapien
caaggtgttcgaatccgatcgttac

SEQ ID NO: 5104967 - DNA, 25 bp, Homo sapien
gatcgttacctctataacttccctg

SEQ ID NO: 5104968 - DNA, 25 bp, Homo sapien
ctgaaccttggacctctcttcttca

SEQ ID NO: 5104969 - DNA, 25 bp, Homo sapien
gtcttgtcttcagcctcgaagctga

SEQ ID NO: 5104970 - DNA, 25 bp, Homo sapien
ccatcttcgttttaatgcccttttg

SEQ ID NO: 5104971 - DNA, 25 bp, Homo sapien
ggtcccagaatctctattgcctctt

SEQ ID NO: 5104972 - DNA, 25 bp, Homo sapien
tgcttgcatggcaatatgtggtccc

SEQ ID NO: 5104973 - DNA, 25 bp, Homo sapien
gcctcttccatcttcgttttaatgc

SEQ ID NO: 5104974 - DNA, 25 bp, Homo sapien
catgttgtggtggtcggccacttac

SEQ ID NO: 5104975 - DNA, 25 bp, Homo sapien
tgcatgttgtggtggtcggccactt

SEQ ID NO: 5104976 - DNA, 25 bp, Homo sapien
gcatgttgtggtggtcggccactta

SEQ ID NO: 5104977 - DNA, 25 bp, Homo sapien
cttgcatgttgtggtggtcggccac

SEQ ID NO: 5104978 - DNA, 25 bp, Homo sapien
gtttgttgtctctgtactccctgta

SEQ ID NO: 5104979 - DNA, 25 bp, Homo sapien
ccgcgtcttcggattagctgtgcag

SEQ ID NO: 5104980 - DNA, 25 bp, Homo sapien
aatgcacttagcaagtcctgccgcg

SEQ ID NO: 5104981 - DNA, 25 bp, Homo sapien
tctgcatgcctggagtcaaaaccag

SEQ ID NO: 5104982 - DNA, 25 bp, Homo sapien
agcctgcctccacgtgtccttgctt

SEQ ID NO: 5104983 - DNA, 25 bp, Homo sapien
tgcctccacgtgtccttgcttgcac

SEQ ID NO: 5104984 - DNA, 25 bp, Homo sapien
tgctttgccagcacgcaccagcagc

SEQ ID NO: 5104985 - DNA, 25 bp, Homo sapien
tgctgctttgccagcacgcaccagc

SEQ ID NO: 5104986 - DNA, 25 bp, Homo sapien
gtcttcctgctgtgatcgtctctct

SEQ ID NO: 5104987 - DNA, 25 bp, Homo sapien
atagcgtccccagctcggacccttt

SEQ ID NO: 5104988 - DNA, 25 bp, Homo sapien
tctgaccgccgtacctgtttcctga

SEQ ID NO: 5104989 - DNA, 25 bp, Homo sapien
tttcctgactagtcttcctgctgtg

SEQ ID NO: 5104990 - DNA, 25 bp, Homo sapien
tgtggagcgctaacatctggatcgt

SEQ ID NO: 5104991 - DNA, 25 bp, Homo sapien
catgggcacccttgttcataccaaa

SEQ ID NO: 5104992 - DNA, 25 bp, Homo sapien
gaattatgaataccgcagggcagcc

SEQ ID NO: 5104993 - DNA, 25 bp, Homo sapien
acagaaggagcaaccacatgggcac

SEQ ID NO: 5104994 - DNA, 25 bp, Homo sapien
cacatatacaatagtattgatgatt

SEQ ID NO: 5104995 - DNA, 25 bp, Homo sapien
gtacacatatacaatagtattgatg

SEQ ID NO: 5104996 - DNA, 25 bp, Homo sapien
tacgtacacatatacaatagtattg

SEQ ID NO: 5104997 - DNA, 25 bp, Homo sapien
ctacgtacacatatacaatagtatt

SEQ ID NO: 5104998 - DNA, 25 bp, Homo sapien
cttgcagagaacaagtctgcccaga

SEQ ID NO: 5104999 - DNA, 25 bp, Homo sapien
tgctttctataactggaggacctgg

SEQ ID NO: 5105000 - DNA, 25 bp, Homo sapien
gcagacacctcgtactgctacaggt

SEQ ID NO: 5105001 - DNA, 25 bp, Homo sapien
tcctttaataggaccagggaccatg

SEQ ID NO: 5105002 - DNA, 25 bp, Homo sapien
gcccgggatgcactcttacaacatg

SEQ ID NO: 5105003 - DNA, 25 bp, Homo sapien
ggagttcatcacattacgtcacagc

SEQ ID NO: 5105004 - DNA, 25 bp, Homo sapien
aacatgtgtgactcttgaacctgga

SEQ ID NO: 5105005 - DNA, 25 bp, Homo sapien
caatgtatcatgcttgttgccgaaa

SEQ ID NO: 5105006 - DNA, 25 bp, Homo sapien
tgccttgaggtacacttcatcaggg

SEQ ID NO: 5105007 - DNA, 25 bp, Homo sapien
caaagccctgagagtgagagttccc

SEQ ID NO: 5105008 - DNA, 25 bp, Homo sapien
taggattagcacacagctctggcca

SEQ ID NO: 5105009 - DNA, 25 bp, Homo sapien
tctgaggtgcatccaagatttggtg

SEQ ID NO: 5105010 - DNA, 25 bp, Homo sapien
ggctgccccttggtgtctttcctca

SEQ ID NO: 5105011 - DNA, 25 bp, Homo sapien
ctggctctgtttttacagtgctgcc

SEQ ID NO: 5105012 - DNA, 25 bp, Homo sapien
gctgccccttggtgtctttcctcat

SEQ ID NO: 5105013 - DNA, 25 bp, Homo sapien
tctgtttttacagtgctgccctggc

SEQ ID NO: 5105014 - DNA, 25 bp, Homo sapien
gggctttggataagatcccactgcc

SEQ ID NO: 5105015 - DNA, 25 bp, Homo sapien
ctttctgggctttggataagatccc

SEQ ID NO: 5105016 - DNA, 25 bp, Homo sapien
tctgggctttggataagatcccact

SEQ ID NO: 5105017 - DNA, 25 bp, Homo sapien
gctttggataagatcccactgccat

SEQ ID NO: 5105018 - DNA, 25 bp, Homo sapien
ctcataagacaatcgccacacttct

SEQ ID NO: 5105019 - DNA, 25 bp, Homo sapien
gggaagggaaggaccgctgccagcc

SEQ ID NO: 5105020 - DNA, 25 bp, Homo sapien
ggaaggaccgctgccagccttctca

SEQ ID NO: 5105021 - DNA, 25 bp, Homo sapien
agccttctcataagacaatcgccac

SEQ ID NO: 5105022 - DNA, 25 bp, Homo sapien
tgtaaataagccagagacggtctct

SEQ ID NO: 5105023 - DNA, 25 bp, Homo sapien
ccctgggccagacgcagttgttttg

SEQ ID NO: 5105024 - DNA, 25 bp, Homo sapien
gcaccttcccgcactgtgctggagg

SEQ ID NO: 5105025 - DNA, 25 bp, Homo sapien
tttgctgtttggatgccccagcacc

SEQ ID NO: 5105026 - DNA, 25 bp, Homo sapien
cagcaaacagtggtatcgggttaca

SEQ ID NO: 5105027 - DNA, 25 bp, Homo sapien
caggttcagaatatcgctggagcac

SEQ ID NO: 5105028 - DNA, 25 bp, Homo sapien
cactgtcaagaaagccgggaggatt

SEQ ID NO: 5105029 - DNA, 25 bp, Homo sapien
catggatgttactgcagggacctca

SEQ ID NO: 5105030 - DNA, 25 bp, Homo sapien
tgccttcaatttaataggagcatgt

SEQ ID NO: 5105031 - DNA, 25 bp, Homo sapien
cttcaatttaataggagcatgtaaa

SEQ ID NO: 5105032 - DNA, 25 bp, Homo sapien
gccttcaatttaataggagcatgta

SEQ ID NO: 5105033 - DNA, 25 bp, Homo sapien
ccttcaatttaataggagcatgtaa

SEQ ID NO: 5105034 - DNA, 25 bp, Homo sapien
cttgtttacatggagcactaatagc

SEQ ID NO: 5105035 - DNA, 25 bp, Homo sapien
agcttgcttagcagtgtcctgtgga

SEQ ID NO: 5105036 - DNA, 25 bp, Homo sapien
tccaacttgaattgggcgtgcttgt

SEQ ID NO: 5105037 - DNA, 25 bp, Homo sapien
gaatgagacttttgcgctccttgct

SEQ ID NO: 5105038 - DNA, 25 bp, Homo sapien
cattgtgtggagcagtgtctttctc

SEQ ID NO: 5105039 - DNA, 25 bp, Homo sapien
catatgtcagcccaataagacgaca

SEQ ID NO: 5105040 - DNA, 25 bp, Homo sapien
ccattagcactgtgtggcagttcat

SEQ ID NO: 5105041 - DNA, 25 bp, Homo sapien
tctttgtatgaatctgtgaatggca

SEQ ID NO: 5105042 - DNA, 25 bp, Homo sapien
taggtaacagctgctcaagcttgtt

SEQ ID NO: 5105043 - DNA, 25 bp, Homo sapien
tgacaggaggtgtcctagggaacgg

SEQ ID NO: 5105044 - DNA, 25 bp, Homo sapien
gcgaatgtcacagcgtcttaggtaa

SEQ ID NO: 5105045 - DNA, 25 bp, Homo sapien
gaacggttttattgtcaggcgaatg

SEQ ID NO: 5105046 - DNA, 25 bp, Homo sapien
tcatcttcgtggtaaccgcctatga

SEQ ID NO: 5105047 - DNA, 25 bp, Homo sapien
atatttgcggtcgcgcggctccgcg

SEQ ID NO: 5105048 - DNA, 25 bp, Homo sapien
tcatatttgcggtcgcgcggctccg

SEQ ID NO: 5105049 - DNA, 25 bp, Homo sapien
catatttgcggtcgcgcggctccgc

SEQ ID NO: 5105050 - DNA, 25 bp, Homo sapien
cacgttgccaaatagctcaaatgct

SEQ ID NO: 5105051 - DNA, 25 bp, Homo sapien
cgttgccaaatagctcaaatgcttg

SEQ ID NO: 5105052 - DNA, 25 bp, Homo sapien
gccccacgttgccaaatagctcaaa

SEQ ID NO: 5105053 - DNA, 25 bp, Homo sapien
cggccccacgttgccaaatagctca

SEQ ID NO: 5105054 - DNA, 25 bp, Homo sapien
gcagcgagacgggcgcccgggccag

SEQ ID NO: 5105055 - DNA, 25 bp, Homo sapien
ctgcaggcagcgagacgggcgcccg

SEQ ID NO: 5105056 - DNA, 25 bp, Homo sapien
caggcagcgagacgggcgcccgggc

SEQ ID NO: 5105057 - DNA, 25 bp, Homo sapien
agcgagacgggcgcccgggccagct

SEQ ID NO: 5105058 - DNA, 25 bp, Homo sapien
tggtgacccacttctcgtgtcgggc

SEQ ID NO: 5105059 - DNA, 25 bp, Homo sapien
aaggatgcaactcgttcggtccggc

SEQ ID NO: 5105060 - DNA, 25 bp, Homo sapien
catcctgccgttcggaccagtgcgg

SEQ ID NO: 5105061 - DNA, 25 bp, Homo sapien
cggccccgaaggatgcaactcgttc

SEQ ID NO: 5105062 - DNA, 25 bp, Homo sapien
cacgggagggaaaggctatcaatgt

SEQ ID NO: 5105063 - DNA, 25 bp, Homo sapien
tgggcagaggactgcgcctccgacc

SEQ ID NO: 5105064 - DNA, 25 bp, Homo sapien
gaggactgcgcctccgacctggctg

SEQ ID NO: 5105065 - DNA, 25 bp, Homo sapien
ctatcaatgtgaaacttgtgggcag

SEQ ID NO: 5105066 - DNA, 25 bp, Homo sapien
ttaagtagttccaagcataagctta

SEQ ID NO: 5105067 - DNA, 25 bp, Homo sapien
taagtagttccaagcataagcttac

SEQ ID NO: 5105068 - DNA, 25 bp, Homo sapien
tgccagctcactttaacttcttggt

SEQ ID NO: 5105069 - DNA, 25 bp, Homo sapien
ccagctggtgttaaccacattggca

SEQ ID NO: 5105070 - DNA, 25 bp, Homo sapien
cagctggtgttaaccacattggcag

SEQ ID NO: 5105071 - DNA, 25 bp, Homo sapien
tgttgaaactgccagctcactttaa

SEQ ID NO: 5105072 - DNA, 25 bp, Homo sapien
ttcataaacgggaatctggttcttc

SEQ ID NO: 5105073 - DNA, 25 bp, Homo sapien
aaaggagttcataaacgggaatctg

SEQ ID NO: 5105074 - DNA, 25 bp, Homo sapien
tcataaacgggaatctggttcttct

SEQ ID NO: 5105075 - DNA, 25 bp, Homo sapien
gagttcataaacgggaatctggttc

SEQ ID NO: 5105076 - DNA, 25 bp, Homo sapien
agcctctggatgactgtggtgtagg

SEQ ID NO: 5105077 - DNA, 25 bp, Homo sapien
gcctgccagcctctggatgactgtg

SEQ ID NO: 5105078 - DNA, 25 bp, Homo sapien
ccagcctctggatgactgtggtgta

SEQ ID NO: 5105079 - DNA, 25 bp, Homo sapien
ctgccagcctctggatgactgtggt

SEQ ID NO: 5105080 - DNA, 25 bp, Homo sapien
ctggctgttgtctccctcctccaac

SEQ ID NO: 5105081 - DNA, 25 bp, Homo sapien
ttcatctggctgttgtctccctcct

SEQ ID NO: 5105082 - DNA, 25 bp, Homo sapien
ctttcatctggctgttgtctccctc

SEQ ID NO: 5105083 - DNA, 25 bp, Homo sapien
catctggctgttgtctccctcctcc

SEQ ID NO: 5105084 - DNA, 25 bp, Homo sapien
cagtagctctgaagcattacagagt

SEQ ID NO: 5105085 - DNA, 25 bp, Homo sapien
tgtgtgctcagctctcttaataaca

SEQ ID NO: 5105086 - DNA, 25 bp, Homo sapien
caaagaatagtttccattgcatttt

SEQ ID NO: 5105087 - DNA, 25 bp, Homo sapien
caatgggagttgtatatgtactcaa

SEQ ID NO: 5105088 - DNA, 25 bp, Homo sapien
tctctatttcctgtcacggcatctc

SEQ ID NO: 5105089 - DNA, 25 bp, Homo sapien
tatttcctgtcacggcatctctctc

SEQ ID NO: 5105090 - DNA, 25 bp, Homo sapien
tctatttcctgtcacggcatctctc

SEQ ID NO: 5105091 - DNA, 25 bp, Homo sapien
ttcctgtcacggcatctctctccat

SEQ ID NO: 5105092 - DNA, 25 bp, Homo sapien
tggcagccacgataaacatgttcac

SEQ ID NO: 5105093 - DNA, 25 bp, Homo sapien
aagctggcagccacgataaacatgt

SEQ ID NO: 5105094 - DNA, 25 bp, Homo sapien
gcagccacgataaacatgttcacat

SEQ ID NO: 5105095 - DNA, 25 bp, Homo sapien
gctggcagccacgataaacatgttc

SEQ ID NO: 5105096 - DNA, 25 bp, Homo sapien
ttggattttgcaatagtcccattca

SEQ ID NO: 5105097 - DNA, 25 bp, Homo sapien
gttttgagtacgaagcttttcatgt

SEQ ID NO: 5105098 - DNA, 25 bp, Homo sapien
tcagttttgagtacgaagcttttca

SEQ ID NO: 5105099 - DNA, 25 bp, Homo sapien
ggattttgcaatagtcccattcaaa

SEQ ID NO: 5105100 - DNA, 25 bp, Homo sapien
gagtggggaagcactgaagagatgc

SEQ ID NO: 5105101 - DNA, 25 bp, Homo sapien
ttaactgctacgagttggatctttt

SEQ ID NO: 5105102 - DNA, 25 bp, Homo sapien
aactgctacgagttggatctttttg

SEQ ID NO: 5105103 - DNA, 25 bp, Homo sapien
taactgctacgagttggatcttttt

SEQ ID NO: 5105104 - DNA, 25 bp, Homo sapien
cacatgccacgcataaagagtccat

SEQ ID NO: 5105105 - DNA, 25 bp, Homo sapien
gaactggtgcatgtccacacatgcc

SEQ ID NO: 5105106 - DNA, 25 bp, Homo sapien
tgttgttttagtgccgctgaacgtg

SEQ ID NO: 5105107 - DNA, 25 bp, Homo sapien
gaacgtgaactggtgcatgtccaca

SEQ ID NO: 5105108 - DNA, 25 bp, Homo sapien
gctggatcagggtgtattcttgtct

SEQ ID NO: 5105109 - DNA, 25 bp, Homo sapien
gtcgagactaagcagttggactgac

SEQ ID NO: 5105110 - DNA, 25 bp, Homo sapien
tgtcttcagacaatcaagcaggtaa

SEQ ID NO: 5105111 - DNA, 25 bp, Homo sapien
caagcaggtaaaaaccagtcgagac

SEQ ID NO: 5105112 - DNA, 25 bp, Homo sapien
tatgggaaacgtttattcatggctg

SEQ ID NO: 5105113 - DNA, 25 bp, Homo sapien
tcatggctgtgcagttgaccatact

SEQ ID NO: 5105114 - DNA, 25 bp, Homo sapien
cttgccgtgatgtgtaagtcttgta

SEQ ID NO: 5105115 - DNA, 25 bp, Homo sapien
gtcttgtatgggaaacgtttattca

SEQ ID NO: 5105116 - DNA, 25 bp, Homo sapien
tttaagtggccttcctgggaatcca

SEQ ID NO: 5105117 - DNA, 25 bp, Homo sapien
ggtattcacagtccagttagagaca

SEQ ID NO: 5105118 - DNA, 25 bp, Homo sapien
ctaatagtaagacatggcatctgcc

SEQ ID NO: 5105119 - DNA, 25 bp, Homo sapien
cacaatggaaatggagtcgtctctg

SEQ ID NO: 5105120 - DNA, 25 bp, Homo sapien
taatacatgtcccaagtgcttgagg

SEQ ID NO: 5105121 - DNA, 25 bp, Homo sapien
ctgaaaaaatgtggtggccggtcca

SEQ ID NO: 5105122 - DNA, 25 bp, Homo sapien
tctgaaaaaatgtggtggccggtcc

SEQ ID NO: 5105123 - DNA, 25 bp, Homo sapien
gtgaggaggatctgaaaaaatgtgg

SEQ ID NO: 5105124 - DNA, 25 bp, Homo sapien
ctgggttgggtgaggaggatctgaa

SEQ ID NO: 5105125 - DNA, 25 bp, Homo sapien
cgacccgtctcggagctggactggg

SEQ ID NO: 5105126 - DNA, 25 bp, Homo sapien
cctgtactcgagtgacgcacagaca

SEQ ID NO: 5105127 - DNA, 25 bp, Homo sapien
gactgggtgccgacttcttcgcaga

SEQ ID NO: 5105128 - DNA, 25 bp, Homo sapien
ttcttcgcagaagggtgagtgctgt

SEQ ID NO: 5105129 - DNA, 25 bp, Homo sapien
agccgccgcctgcacgcagagttag

SEQ ID NO: 5105130 - DNA, 25 bp, Homo sapien
attcactccaaatctggctgtcccc

SEQ ID NO: 5105131 - DNA, 25 bp, Homo sapien
agcggtctccaagagtgggcactgc

SEQ ID NO: 5105132 - DNA, 25 bp, Homo sapien
acgcagagttaggagccagcctccg

SEQ ID NO: 5105133 - DNA, 25 bp, Homo sapien
tctttaagtctcaaattacgtgcag

SEQ ID NO: 5105134 - DNA, 25 bp, Homo sapien
cacacgtatgtaaagatttcgctca

SEQ ID NO: 5105135 - DNA, 25 bp, Homo sapien
gtctctccagatgactcctttgtgg

SEQ ID NO: 5105136 - DNA, 25 bp, Homo sapien
taaaatgattgctggacagtagcca

SEQ ID NO: 5105137 - DNA, 25 bp, Homo sapien
tgcagctgggtagtctggctcttca

SEQ ID NO: 5105138 - DNA, 25 bp, Homo sapien
ttgtctgcagctgggtagtctggct

SEQ ID NO: 5105139 - DNA, 25 bp, Homo sapien
gctgggtagtctggctcttcattta

SEQ ID NO: 5105140 - DNA, 25 bp, Homo sapien
tctgcagctgggtagtctggctctt

SEQ ID NO: 5105141 - DNA, 25 bp, Homo sapien
ctgttgtcagattgtttcctccaga

SEQ ID NO: 5105142 - DNA, 25 bp, Homo sapien
ctccagaattcatcgtacaaaccac

SEQ ID NO: 5105143 - DNA, 25 bp, Homo sapien
gttgtcagattgtttcctccagaat

SEQ ID NO: 5105144 - DNA, 25 bp, Homo sapien
gaattcatcgtacaaaccaccacca

SEQ ID NO: 5105145 - DNA, 25 bp, Homo sapien
tgcgccccggagtgggtctaacgca

SEQ ID NO: 5105146 - DNA, 25 bp, Homo sapien
ctccgctgaagaccgtgcgccccgg

SEQ ID NO: 5105147 - DNA, 25 bp, Homo sapien
ggtctaacgcaaccctgagctcggg

SEQ ID NO: 5105148 - DNA, 25 bp, Homo sapien
cgcaaccctgagctcgggttctgca

SEQ ID NO: 5105149 - DNA, 25 bp, Homo sapien
agcaggggcgcctcggtccttcgca

SEQ ID NO: 5105150 - DNA, 25 bp, Homo sapien
gcaggggcgcctcggtccttcgcac

SEQ ID NO: 5105151 - DNA, 25 bp, Homo sapien
gagcaggggcgcctcggtccttcgc

SEQ ID NO: 5105152 - DNA, 25 bp, Homo sapien
ccgagcaggggcgcctcggtccttc

SEQ ID NO: 5105153 - DNA, 25 bp, Homo sapien
tgtgcagataaaggctttgctcccc

SEQ ID NO: 5105154 - DNA, 25 bp, Homo sapien
gcagataaaggctttgctccccaaa

SEQ ID NO: 5105155 - DNA, 25 bp, Homo sapien
tgcagataaaggctttgctccccaa

SEQ ID NO: 5105156 - DNA, 25 bp, Homo sapien
ctgtgcagataaaggctttgctccc

SEQ ID NO: 5105157 - DNA, 25 bp, Homo sapien
cactcaatccggtagggtctgggac

SEQ ID NO: 5105158 - DNA, 25 bp, Homo sapien
gacctaagtgttggctcatctctgg

SEQ ID NO: 5105159 - DNA, 25 bp, Homo sapien
cgcgactgctcctggtaatggatct

SEQ ID NO: 5105160 - DNA, 25 bp, Homo sapien
gtctgggactcctccaatgtctgct

SEQ ID NO: 5105161 - DNA, 25 bp, Homo sapien
cagttttacatcttgggaggtcatc

SEQ ID NO: 5105162 - DNA, 25 bp, Homo sapien
ctacagttttacatcttgggaggtc

SEQ ID NO: 5105163 - DNA, 25 bp, Homo sapien
gttttacatcttgggaggtcatcca

SEQ ID NO: 5105164 - DNA, 25 bp, Homo sapien
tacagttttacatcttgggaggtca

SEQ ID NO: 5105165 - DNA, 25 bp, Homo sapien
tgtccccatgtctgttctcacggcg

SEQ ID NO: 5105166 - DNA, 25 bp, Homo sapien
cacggcggaatgtagatctgctgca

SEQ ID NO: 5105167 - DNA, 25 bp, Homo sapien
aatgtcggcctaacactggccacag

SEQ ID NO: 5105168 - DNA, 25 bp, Homo sapien
gatctgctgcaatgtcggcctaaca

SEQ ID NO: 5105169 - DNA, 25 bp, Homo sapien
aacaaggacttggatatgagggtgg

SEQ ID NO: 5105170 - DNA, 25 bp, Homo sapien
cctgagcccatagtctcgagtcgcc

SEQ ID NO: 5105171 - DNA, 25 bp, Homo sapien
gagggtggatgaccccctcatcaat

SEQ ID NO: 5105172 - DNA, 25 bp, Homo sapien
atagtctcgagtcgccctcaggaag

SEQ ID NO: 5105173 - DNA, 25 bp, Homo sapien
caattttactaccaagagctggcac

SEQ ID NO: 5105174 - DNA, 25 bp, Homo sapien
taaggtgtccttatcacatccgtca

SEQ ID NO: 5105175 - DNA, 25 bp, Homo sapien
gagctggcaccaaccaatcacgtat

SEQ ID NO: 5105176 - DNA, 25 bp, Homo sapien
ggactcatcaccgagtttcaccagc

SEQ ID NO: 5105177 - DNA, 25 bp, Homo sapien
ccccatgccacatcctggaggagtc

SEQ ID NO: 5105178 - DNA, 25 bp, Homo sapien
ctccccatgccacatcctggaggag

SEQ ID NO: 5105179 - DNA, 25 bp, Homo sapien
tccccatgccacatcctggaggagt

SEQ ID NO: 5105180 - DNA, 25 bp, Homo sapien
ccatgccacatcctggaggagtcaa

SEQ ID NO: 5105181 - DNA, 25 bp, Homo sapien
aactagagcaatagcattcaatagc

SEQ ID NO: 5105182 - DNA, 25 bp, Homo sapien
cttcattgtcaactagagcaatagc

SEQ ID NO: 5105183 - DNA, 25 bp, Homo sapien
ctagagcaatagcattcaatagcat

SEQ ID NO: 5105184 - DNA, 25 bp, Homo sapien
attgtcaactagagcaatagcattc

SEQ ID NO: 5105185 - DNA, 25 bp, Homo sapien
ctttctccttcactagcagaatcat

SEQ ID NO: 5105186 - DNA, 25 bp, Homo sapien
tgtccttgccacaatttggagattt

SEQ ID NO: 5105187 - DNA, 25 bp, Homo sapien
attgtccttgccacaatttggagat

SEQ ID NO: 5105188 - DNA, 25 bp, Homo sapien
agatttcagaagatggaccccaaaa

SEQ ID NO: 5105189 - DNA, 25 bp, Homo sapien
ttcagaagatggaccccaaaagctc

SEQ ID NO: 5105190 - DNA, 25 bp, Homo sapien
tcacactgaaaagtaccggcatgaa

SEQ ID NO: 5105191 - DNA, 25 bp, Homo sapien
caacgggcagactttgttgaacaga

SEQ ID NO: 5105192 - DNA, 25 bp, Homo sapien
cctggagagccgcagattggacaac

SEQ ID NO: 5105193 - DNA, 25 bp, Homo sapien
tgttgaacagatgaacaactgtggc

SEQ ID NO: 5105194 - DNA, 25 bp, Homo sapien
gatttggagcagcatgggacccagt

SEQ ID NO: 5105195 - DNA, 25 bp, Homo sapien
agcacagcagaaagatttggagcag

SEQ ID NO: 5105196 - DNA, 25 bp, Homo sapien
tgggacccagtatcagggctgaccc

SEQ ID NO: 5105197 - DNA, 25 bp, Homo sapien
gggctgaccccaacacagacaagca

SEQ ID NO: 5105198 - DNA, 25 bp, Homo sapien
tgggagatcactgtattgatgctaa

SEQ ID NO: 5105199 - DNA, 25 bp, Homo sapien
gcaaacacctgatggtcacagctca

SEQ ID NO: 5105200 - DNA, 25 bp, Homo sapien
attgatcagccctggaactttgacc

SEQ ID NO: 5105201 - DNA, 25 bp, Homo sapien
actgtattgatgctaaatttagtgc

SEQ ID NO: 5105202 - DNA, 25 bp, Homo sapien
cagatgtcctctctggttgttgatg

SEQ ID NO: 5105203 - DNA, 25 bp, Homo sapien
tctatcagtcataaagacgctccac

SEQ ID NO: 5105204 - DNA, 25 bp, Homo sapien
taaagacgctccacagatgtcctct

SEQ ID NO: 5105205 - DNA, 25 bp, Homo sapien
tgtcctctctggttgttgatgaccc

SEQ ID NO: 5105206 - DNA, 25 bp, Homo sapien
cactctctggcttccgaggagactg

SEQ ID NO: 5105207 - DNA, 25 bp, Homo sapien
ctcactctctggcttccgaggagac

SEQ ID NO: 5105208 - DNA, 25 bp, Homo sapien
ccactcactctctggcttccgagga

SEQ ID NO: 5105209 - DNA, 25 bp, Homo sapien
cactcactctctggcttccgaggag

SEQ ID NO: 5105210 - DNA, 25 bp, Homo sapien
agaagtggacatgccaatgcttgcc

SEQ ID NO: 5105211 - DNA, 25 bp, Homo sapien
tccatggccaagtcgtctgtgagct

SEQ ID NO: 5105212 - DNA, 25 bp, Homo sapien
gactggtagaagtggacatgccaat

SEQ ID NO: 5105213 - DNA, 25 bp, Homo sapien
gccttggcttccatggccaagtcgt

SEQ ID NO: 5105214 - DNA, 25 bp, Homo sapien
gcagggagcaccttttagccttcac

SEQ ID NO: 5105215 - DNA, 25 bp, Homo sapien
aagatgttgccgcacccttttccca

SEQ ID NO: 5105216 - DNA, 25 bp, Homo sapien
catcctttcttatcagccacatcag

SEQ ID NO: 5105217 - DNA, 25 bp, Homo sapien
tctgcatatcaaggatggtagacag

SEQ ID NO: 5105218 - DNA, 25 bp, Homo sapien
acaaagagctcattgcttctgcagc

SEQ ID NO: 5105219 - DNA, 25 bp, Homo sapien
gtttgaatgtttcccggtccacaca

SEQ ID NO: 5105220 - DNA, 25 bp, Homo sapien
ttgtttgaatgtttcccggtccaca

SEQ ID NO: 5105221 - DNA, 25 bp, Homo sapien
cagtgtgtagcccgagctggactga

SEQ ID NO: 5105222 - DNA, 25 bp, Homo sapien
tcagtagcgagcaaaaggtgttgcc

SEQ ID NO: 5105223 - DNA, 25 bp, Homo sapien
tagtgacctcgcttctgaactgggt

SEQ ID NO: 5105224 - DNA, 25 bp, Homo sapien
ggcagatgtccgaagaaaacactct

SEQ ID NO: 5105225 - DNA, 25 bp, Homo sapien
tttaagaacccagtagacatgtctg

SEQ ID NO: 5105226 - DNA, 25 bp, Homo sapien
tctcttgccagctccctccaaagcc

SEQ ID NO: 5105227 - DNA, 25 bp, Homo sapien
tagcatagtagttcaccttcacact

SEQ ID NO: 5105228 - DNA, 25 bp, Homo sapien
tctttcatgtcattatagaatccta

SEQ ID NO: 5105229 - DNA, 25 bp, Homo sapien
tatagaatcctatagcatagtagtt

SEQ ID NO: 5105230 - DNA, 25 bp, Homo sapien
ctcagggctcctctgcctacacagg

SEQ ID NO: 5105231 - DNA, 25 bp, Homo sapien
cagggctcctctgcctacacaggtg

SEQ ID NO: 5105232 - DNA, 25 bp, Homo sapien
gctcctctgcctacacaggtgggga

SEQ ID NO: 5105233 - DNA, 25 bp, Homo sapien
gggctcctctgcctacacaggtggg

SEQ ID NO: 5105234 - DNA, 25 bp, Homo sapien
ggttgccctacgttggcacttatca

SEQ ID NO: 5105235 - DNA, 25 bp, Homo sapien
ttatcatggtcactgctttggtgac

SEQ ID NO: 5105236 - DNA, 25 bp, Homo sapien
cgttggcacttatcatggtcactgc

SEQ ID NO: 5105237 - DNA, 25 bp, Homo sapien
cgtgaggttgccctacgttggcact

SEQ ID NO: 5105238 - DNA, 25 bp, Homo sapien
ctgtaagaagtttgatataaaacat

SEQ ID NO: 5105239 - DNA, 25 bp, Homo sapien
gagacattaactgtctttgggtagg

SEQ ID NO: 5105240 - DNA, 25 bp, Homo sapien
tccacctgaagactctggaatccat

SEQ ID NO: 5105241 - DNA, 25 bp, Homo sapien
gcttctctcagcgatggaatggtta

SEQ ID NO: 5105242 - DNA, 25 bp, Homo sapien
gaatggttaaccgatctgagctcct

SEQ ID NO: 5105243 - DNA, 25 bp, Homo sapien
cacaagggggttatggaaacgccag

SEQ ID NO: 5105244 - DNA, 25 bp, Homo sapien
ttcgcaccgcaagtctgcagagcag

SEQ ID NO: 5105245 - DNA, 25 bp, Homo sapien
ctgctcagaccccagagttttcgca

SEQ ID NO: 5105246 - DNA, 25 bp, Homo sapien
tccggccattggaggctcacacaag

SEQ ID NO: 5105247 - DNA, 25 bp, Homo sapien
accaagacagcgacacaaagggcct

SEQ ID NO: 5105248 - DNA, 25 bp, Homo sapien
agcaccaagacagcgacacaaaggg

SEQ ID NO: 5105249 - DNA, 25 bp, Homo sapien
agacagcgacacaaagggcctcctc

SEQ ID NO: 5105250 - DNA, 25 bp, Homo sapien
tccagcaccaagacagcgacacaaa

SEQ ID NO: 5105251 - DNA, 25 bp, Homo sapien
tctgcttggtctcacagacaggcag

SEQ ID NO: 5105252 - DNA, 25 bp, Homo sapien
tggggacgataattagaagcctcac

SEQ ID NO: 5105253 - DNA, 25 bp, Homo sapien
gctggagccgaagtaaacccaggac

SEQ ID NO: 5105254 - DNA, 25 bp, Homo sapien
gctgctggcggttggcattcttgtc

SEQ ID NO: 5105255 - DNA, 25 bp, Homo sapien
cacagaggtaaactgctctcgcttc

SEQ ID NO: 5105256 - DNA, 25 bp, Homo sapien
gatgaatccaacagtaggaagtgac

SEQ ID NO: 5105257 - DNA, 25 bp, Homo sapien
agaggtaaactgctctcgcttccct

SEQ ID NO: 5105258 - DNA, 25 bp, Homo sapien
ctctcgcttccctgagcttggactt

SEQ ID NO: 5105259 - DNA, 25 bp, Homo sapien
tgtgtcatgtcctgaacggaatccc

SEQ ID NO: 5105260 - DNA, 25 bp, Homo sapien
cggaatcccaagttagctcctggaa

SEQ ID NO: 5105261 - DNA, 25 bp, Homo sapien
gaacggaatcccaagttagctcctg

SEQ ID NO: 5105262 - DNA, 25 bp, Homo sapien
tgtcctgaacggaatcccaagttag

SEQ ID NO: 5105263 - DNA, 25 bp, Homo sapien
agtggagtgatgcaagggtgaaggg

SEQ ID NO: 5105264 - DNA, 25 bp, Homo sapien
gggtcaaggtcaaacccaagacaca

SEQ ID NO: 5105265 - DNA, 25 bp, Homo sapien
caagacacagtgccgccagcagctg

SEQ ID NO: 5105266 - DNA, 25 bp, Homo sapien
gtgaagggtgtgaaagtctccctgt

SEQ ID NO: 5105267 - DNA, 25 bp, Homo sapien
ccggtatctccagcgttcttcttct

SEQ ID NO: 5105268 - DNA, 25 bp, Homo sapien
tattatgtccttcccggtatctcca

SEQ ID NO: 5105269 - DNA, 25 bp, Homo sapien
ctcgccctgttgtggaagctttcca

SEQ ID NO: 5105270 - DNA, 25 bp, Homo sapien
ctgttgtggaagctttccagaagac

SEQ ID NO: 5105271 - DNA, 25 bp, Homo sapien
gggaactcagtatcggtccctgaaa

SEQ ID NO: 5105272 - DNA, 25 bp, Homo sapien
tccaaggggaccaatctctctggct

SEQ ID NO: 5105273 - DNA, 25 bp, Homo sapien
tgaaaggttgggtaatggcttcttc

SEQ ID NO: 5105274 - DNA, 25 bp, Homo sapien
agaacttcctgaaccgggaactcag

SEQ ID NO: 5105275 - DNA, 25 bp, Homo sapien
gctcagctccattatctgtggtctg

SEQ ID NO: 5105276 - DNA, 25 bp, Homo sapien
cagctccattatctgtggtctgaac

SEQ ID NO: 5105277 - DNA, 25 bp, Homo sapien
tcagctccattatctgtggtctgaa

SEQ ID NO: 5105278 - DNA, 25 bp, Homo sapien
tgctcagctccattatctgtggtct

SEQ ID NO: 5105279 - DNA, 25 bp, Homo sapien
ggtgtagacacacacgtgcttcatg

SEQ ID NO: 5105280 - DNA, 25 bp, Homo sapien
cataggcaaagatgtgatgtccaca

SEQ ID NO: 5105281 - DNA, 25 bp, Homo sapien
tattccccgtctgtgagcagtaggg

SEQ ID NO: 5105282 - DNA, 25 bp, Homo sapien
gcagtagggctctattgcagttaac

SEQ ID NO: 5105283 - DNA, 25 bp, Homo sapien
tccttagtgagcattctgacgctcc

SEQ ID NO: 5105284 - DNA, 25 bp, Homo sapien
gctccggaggaagaagactgcaccg

SEQ ID NO: 5105285 - DNA, 25 bp, Homo sapien
agcattctgacgctccggaggaaga

SEQ ID NO: 5105286 - DNA, 25 bp, Homo sapien
gcctgaggtccttagtgagcattct

SEQ ID NO: 5105287 - DNA, 25 bp, Homo sapien
tccctgtcggcatggcaacttcaag

SEQ ID NO: 5105288 - DNA, 25 bp, Homo sapien
gaaaatgcctgagcacagtctacta

SEQ ID NO: 5105289 - DNA, 25 bp, Homo sapien
tgaattccctgtcggcatggcaact

SEQ ID NO: 5105290 - DNA, 25 bp, Homo sapien
aactgaattccctgtcggcatggca

SEQ ID NO: 5105291 - DNA, 25 bp, Homo sapien
tgttctcaatgacggatctaggatc

SEQ ID NO: 5105292 - DNA, 25 bp, Homo sapien
ggatctaggatcacaggttcccagg

SEQ ID NO: 5105293 - DNA, 25 bp, Homo sapien
cccactgttctcaatgacggatcta

SEQ ID NO: 5105294 - DNA, 25 bp, Homo sapien
tcaatgacggatctaggatcacagg

SEQ ID NO: 5105295 - DNA, 25 bp, Homo sapien
tcttctttgtgtccagtggaaggat

SEQ ID NO: 5105296 - DNA, 25 bp, Homo sapien
cctactcggaaggatgttctagaat

SEQ ID NO: 5105297 - DNA, 25 bp, Homo sapien
cttagtgctgcattgacccttggag

SEQ ID NO: 5105298 - DNA, 25 bp, Homo sapien
tctagaatagtgtgctaggaagctc

SEQ ID NO: 5105299 - DNA, 25 bp, Homo sapien
tctaagcctaactccagccacggag

SEQ ID NO: 5105300 - DNA, 25 bp, Homo sapien
tgtccagtgtctggaagatggactg

SEQ ID NO: 5105301 - DNA, 25 bp, Homo sapien
agccacggagaaaccacggagaggt

SEQ ID NO: 5105302 - DNA, 25 bp, Homo sapien
agcccctgtgagcttcaactctaag

SEQ ID NO: 5105303 - DNA, 25 bp, Homo sapien
tgaatgcttggatcggtgtccaggc

SEQ ID NO: 5105304 - DNA, 25 bp, Homo sapien
tcggaaacagagacagcggaaatct

SEQ ID NO: 5105305 - DNA, 25 bp, Homo sapien
caggctgcccggtcgtgcttagtaa

SEQ ID NO: 5105306 - DNA, 25 bp, Homo sapien
ctggatacaaagctgaggactgttt

SEQ ID NO: 5105307 - DNA, 25 bp, Homo sapien
tgtacttttctcaagagtggctacc

SEQ ID NO: 5105308 - DNA, 25 bp, Homo sapien
tggcttagtctaatttctcccaagc

SEQ ID NO: 5105309 - DNA, 25 bp, Homo sapien
gcccagcctagttatgtacttttct

SEQ ID NO: 5105310 - DNA, 25 bp, Homo sapien
tagcaagagatgcagtcttgatctg

SEQ ID NO: 5105311 - DNA, 25 bp, Homo sapien
tactaaccagttaggctgacgagca

SEQ ID NO: 5105312 - DNA, 25 bp, Homo sapien
gctcaggggatagggtactaaccag

SEQ ID NO: 5105313 - DNA, 25 bp, Homo sapien
gtgtcctgtcctcaccgggtggctg

SEQ ID NO: 5105314 - DNA, 25 bp, Homo sapien
taggctgacgagcaagtgtcctgtc

SEQ ID NO: 5105315 - DNA, 25 bp, Homo sapien
tccgtagtaatttggcgaattaatc

SEQ ID NO: 5105316 - DNA, 25 bp, Homo sapien
ctcttagttggttcctgattcttca

SEQ ID NO: 5105317 - DNA, 25 bp, Homo sapien
ttcttcatttgagccctcacacgaa

SEQ ID NO: 5105318 - DNA, 25 bp, Homo sapien
gaagataaaatcttcgcctgacatt

SEQ ID NO: 5105319 - DNA, 25 bp, Homo sapien
aagtgacatctggtaggtgagtctg

SEQ ID NO: 5105320 - DNA, 25 bp, Homo sapien
agaagtgacatctggtaggtgagtc

SEQ ID NO: 5105321 - DNA, 25 bp, Homo sapien
gaagtgacatctggtaggtgagtct

SEQ ID NO: 5105322 - DNA, 25 bp, Homo sapien
cagaagtgacatctggtaggtgagt

SEQ ID NO: 5105323 - DNA, 25 bp, Homo sapien
ttggctggtggcacacttgatagag

SEQ ID NO: 5105324 - DNA, 25 bp, Homo sapien
ggtggcacacttgatagaggactcc

SEQ ID NO: 5105325 - DNA, 25 bp, Homo sapien
tccttggctggtggcacacttgata

SEQ ID NO: 5105326 - DNA, 25 bp, Homo sapien
gctggtggcacacttgatagaggac

SEQ ID NO: 5105327 - DNA, 25 bp, Homo sapien
tggacttcaatgtggtgctggacag

SEQ ID NO: 5105328 - DNA, 25 bp, Homo sapien
gtgctggacaggtgaggttttagca

SEQ ID NO: 5105329 - DNA, 25 bp, Homo sapien
agcatcgcagacaagaagtgtggga

SEQ ID NO: 5105330 - DNA, 25 bp, Homo sapien
catcgcagacaagaagtgtgggaca

SEQ ID NO: 5105331 - DNA, 25 bp, Homo sapien
ctgaggggccaaggcagaaacaatc

SEQ ID NO: 5105332 - DNA, 25 bp, Homo sapien
cagcatcagatccttcagcatcagg

SEQ ID NO: 5105333 - DNA, 25 bp, Homo sapien
ggagaaatgaagagattgccgtcca

SEQ ID NO: 5105334 - DNA, 25 bp, Homo sapien
aatgaagagattgccgtccactgca

SEQ ID NO: 5105335 - DNA, 25 bp, Homo sapien
tacagcatcagatccttcagcatca

SEQ ID NO: 5105336 - DNA, 25 bp, Homo sapien
caggctttccgagaggcgggaacct

SEQ ID NO: 5105337 - DNA, 25 bp, Homo sapien
agcaaagtcccctaggtcacaagac

SEQ ID NO: 5105338 - DNA, 25 bp, Homo sapien
cctaggtcacaagaccaggctttcc

SEQ ID NO: 5105339 - DNA, 25 bp, Homo sapien
acaagaccaggctttccgagaggcg

SEQ ID NO: 5105340 - DNA, 25 bp, Homo sapien
tgagtgctggggagtaagtcaccat

SEQ ID NO: 5105341 - DNA, 25 bp, Homo sapien
ctttcctggattcttgctgctgttg

SEQ ID NO: 5105342 - DNA, 25 bp, Homo sapien
ctgagtgctggggagtaagtcacca

SEQ ID NO: 5105343 - DNA, 25 bp, Homo sapien
ggccagttgtgctccgcaggttctg

SEQ ID NO: 5105344 - DNA, 25 bp, Homo sapien
agatgatgcaaacgggagccgcgaa

SEQ ID NO: 5105345 - DNA, 25 bp, Homo sapien
acgccgctccgagctagaggtggca

SEQ ID NO: 5105346 - DNA, 25 bp, Homo sapien
ttcccaatgaatgggtcggtcggcc

SEQ ID NO: 5105347 - DNA, 25 bp, Homo sapien
aggccccgcctgagcgctgtcaagg

SEQ ID NO: 5105348 - DNA, 25 bp, Homo sapien
acctgcgtgcggctcaggctgagcc

SEQ ID NO: 5105349 - DNA, 25 bp, Homo sapien
tagccgttggtctcgttgctcttct

SEQ ID NO: 5105350 - DNA, 25 bp, Homo sapien
agcaccccggacacggtgagcagca

SEQ ID NO: 5105351 - DNA, 25 bp, Homo sapien
tgcgcaccggatcctggcttgatga

SEQ ID NO: 5105352 - DNA, 25 bp, Homo sapien
ggccaggtcgaggaaagagtccacc

SEQ ID NO: 5105353 - DNA, 25 bp, Homo sapien
gccaaagtaggcgacagcgatgccg

SEQ ID NO: 5105354 - DNA, 25 bp, Homo sapien
gcttgatgatgaacgccaaggccac

SEQ ID NO: 5105355 - DNA, 25 bp, Homo sapien
caaccagtaagcattgttagggacc

SEQ ID NO: 5105356 - DNA, 25 bp, Homo sapien
taagttctgagcagctacctcgaga

SEQ ID NO: 5105357 - DNA, 25 bp, Homo sapien
tgggaaatcaaaccactcagcaatg

SEQ ID NO: 5105358 - DNA, 25 bp, Homo sapien
ttagaaatcatgacagagagaccct

SEQ ID NO: 5105359 - DNA, 25 bp, Homo sapien
gaaaccggaatgtcagtgagaatct

SEQ ID NO: 5105360 - DNA, 25 bp, Homo sapien
tatagcggaggtcaactggagatca

SEQ ID NO: 5105361 - DNA, 25 bp, Homo sapien
gagcccaaaggaatgttagaaacca

SEQ ID NO: 5105362 - DNA, 25 bp, Homo sapien
gcctccttggcagttacaccttggt

SEQ ID NO: 5105363 - DNA, 25 bp, Homo sapien
agaaggaggtacgtccagcacacct

SEQ ID NO: 5105364 - DNA, 25 bp, Homo sapien
ccagtccttgagaaggaggtacgtc

SEQ ID NO: 5105365 - DNA, 25 bp, Homo sapien
ctattcaagtaatgtgttctttgca

SEQ ID NO: 5105366 - DNA, 25 bp, Homo sapien
catacatattcacaccagtccttga

SEQ ID NO: 5105367 - DNA, 25 bp, Homo sapien
tggaacatcacgttgtgtgtcatcc

SEQ ID NO: 5105368 - DNA, 25 bp, Homo sapien
acattggaacatcacgttgtgtgtc

SEQ ID NO: 5105369 - DNA, 25 bp, Homo sapien
gaacatcacgttgtgtgtcatcctt

SEQ ID NO: 5105370 - DNA, 25 bp, Homo sapien
gccacgctcgtctcctctattgttc

SEQ ID NO: 5105371 - DNA, 25 bp, Homo sapien
tcttcatcttgcctatagaagagac

SEQ ID NO: 5105372 - DNA, 25 bp, Homo sapien
tctaaactattcaggtgtcctcctg

SEQ ID NO: 5105373 - DNA, 25 bp, Homo sapien
taatttggatccttgttagatgtgc

SEQ ID NO: 5105374 - DNA, 25 bp, Homo sapien
agacatgggcatagttacaacaacc

SEQ ID NO: 5105375 - DNA, 25 bp, Homo sapien
tgcagacccatgcagctcacacagt

SEQ ID NO: 5105376 - DNA, 25 bp, Homo sapien
gtaacagagccagttaacagggatg

SEQ ID NO: 5105377 - DNA, 25 bp, Homo sapien
tcaagggtggtatgcatttctctgt

SEQ ID NO: 5105378 - DNA, 25 bp, Homo sapien
ggatatggcatggtatgtacacctg

SEQ ID NO: 5105379 - DNA, 25 bp, Homo sapien
tcaggcatttttcccaactcctcat

SEQ ID NO: 5105380 - DNA, 25 bp, Homo sapien
gagctctcttctaatccgggatcag

SEQ ID NO: 5105381 - DNA, 25 bp, Homo sapien
ctaatccgggatcagctgcctctct

SEQ ID NO: 5105382 - DNA, 25 bp, Homo sapien
tcctgagctctcttctaatccggga

SEQ ID NO: 5105383 - DNA, 25 bp, Homo sapien
tcatcctctgcttgccacagaccaa

SEQ ID NO: 5105384 - DNA, 25 bp, Homo sapien
gaagcaccatagaaagcatcctcct

SEQ ID NO: 5105385 - DNA, 25 bp, Homo sapien
tcctctgcttgccacagaccaagag

SEQ ID NO: 5105386 - DNA, 25 bp, Homo sapien
cctctgcttgccacagaccaagagc

SEQ ID NO: 5105387 - DNA, 25 bp, Homo sapien
taaattgttgcaaaactgtgaccag

SEQ ID NO: 5105388 - DNA, 25 bp, Homo sapien
tagcatatttagagaataccagagt

SEQ ID NO: 5105389 - DNA, 25 bp, Homo sapien
aggacggccagcatacacagcctgc

SEQ ID NO: 5105390 - DNA, 25 bp, Homo sapien
gcttttagcatatttagagaatacc

SEQ ID NO: 5105391 - DNA, 25 bp, Homo sapien
gacggccagcatacacagcctgcaa

SEQ ID NO: 5105392 - DNA, 25 bp, Homo sapien
gctatgttagaaaggcccacgagac

SEQ ID NO: 5105393 - DNA, 25 bp, Homo sapien
gaaattctattccagctgacagtcc

SEQ ID NO: 5105394 - DNA, 25 bp, Homo sapien
cagagtctaagatggcctcctggta

SEQ ID NO: 5105395 - DNA, 25 bp, Homo sapien
gaggctcccagtccaaacttcaagg

SEQ ID NO: 5105396 - DNA, 25 bp, Homo sapien
catctctctcatggtactccttgat

SEQ ID NO: 5105397 - DNA, 25 bp, Homo sapien
gccacagtagatactttgaagccac

SEQ ID NO: 5105398 - DNA, 25 bp, Homo sapien
caaccaagtctataactgcattgct

SEQ ID NO: 5105399 - DNA, 25 bp, Homo sapien
tgaacttaatggtgtccaaccaagt

SEQ ID NO: 5105400 - DNA, 25 bp, Homo sapien
aaagtatctgctttgagatgtccac

SEQ ID NO: 5105401 - DNA, 25 bp, Homo sapien
tctaaaaccctaacacagtgttctc

SEQ ID NO: 5105402 - DNA, 25 bp, Homo sapien
ttcagtgtgcaaagtatctgctttg

SEQ ID NO: 5105403 - DNA, 25 bp, Homo sapien
gagccatggtacctgtcttcatcag

SEQ ID NO: 5105404 - DNA, 25 bp, Homo sapien
ccacaagattggagggaaacaggtt

SEQ ID NO: 5105405 - DNA, 25 bp, Homo sapien
caaccacaagattggagggaaacag

SEQ ID NO: 5105406 - DNA, 25 bp, Homo sapien
gctgcaaccacaagattggagggaa

SEQ ID NO: 5105407 - DNA, 25 bp, Homo sapien
cacaagattggagggaaacaggttt

SEQ ID NO: 5105408 - DNA, 25 bp, Homo sapien
tttttagcaaagtatcaagccttac

SEQ ID NO: 5105409 - DNA, 25 bp, Homo sapien
tttggaaccagtgggacattttgga

SEQ ID NO: 5105410 - DNA, 25 bp, Homo sapien
tacctaactctatagcagtaattgg

SEQ ID NO: 5105411 - DNA, 25 bp, Homo sapien
tacccattgataaaagtttaggcca

SEQ ID NO: 5105412 - DNA, 25 bp, Homo sapien
gctgttctgggtcacgactttataa

SEQ ID NO: 5105413 - DNA, 25 bp, Homo sapien
tgggtcacgactttataatcggttg

SEQ ID NO: 5105414 - DNA, 25 bp, Homo sapien
tcacgactttataatcggttgcata

SEQ ID NO: 5105415 - DNA, 25 bp, Homo sapien
ttctgggtcacgactttataatcgg

SEQ ID NO: 5105416 - DNA, 25 bp, Homo sapien
gaaagcaggcctagctgacacccac

SEQ ID NO: 5105417 - DNA, 25 bp, Homo sapien
ggaaagcaggcctagctgacaccca

SEQ ID NO: 5105418 - DNA, 25 bp, Homo sapien
gaggtcttctccttcggagcctagt

SEQ ID NO: 5105419 - DNA, 25 bp, Homo sapien
ggaattgaagaaacggatgaggtct

SEQ ID NO: 5105420 - DNA, 25 bp, Homo sapien
tttaaggccactcctaacaccagag

SEQ ID NO: 5105421 - DNA, 25 bp, Homo sapien
caccatcgtcgcctcgttgagggaa

SEQ ID NO: 5105422 - DNA, 25 bp, Homo sapien
aagcctacataaaagggccaggcgc

SEQ ID NO: 5105423 - DNA, 25 bp, Homo sapien
aaagcctacataaaagggccaggcg

SEQ ID NO: 5105424 - DNA, 25 bp, Homo sapien
atgacactctgggaacacgcctgga

SEQ ID NO: 5105425 - DNA, 25 bp, Homo sapien
gcttagacaacatgattccgtggga

SEQ ID NO: 5105426 - DNA, 25 bp, Homo sapien
aataatcttccctctgcaacagtgg

SEQ ID NO: 5105427 - DNA, 25 bp, Homo sapien
cattggcagtgatagagtcaggctc

SEQ ID NO: 5105428 - DNA, 25 bp, Homo sapien
gataaagctggggtgagagatgcag

SEQ ID NO: 5105429 - DNA, 25 bp, Homo sapien
ggcacaagcacagggtactcatcag

SEQ ID NO: 5105430 - DNA, 25 bp, Homo sapien
ctagggcacaagcacagggtactca

SEQ ID NO: 5105431 - DNA, 25 bp, Homo sapien
tactcatcagtgggggataaagctg

SEQ ID NO: 5105432 - DNA, 25 bp, Homo sapien
ccaggaggaatctgaatgggttttt

SEQ ID NO: 5105433 - DNA, 25 bp, Homo sapien
tgtctttcatttccacgatcttgct

SEQ ID NO: 5105434 - DNA, 25 bp, Homo sapien
taacatggcccaatatagatgcgaa

SEQ ID NO: 5105435 - DNA, 25 bp, Homo sapien
ggtagcaaatgctgtcgcaaatggg

SEQ ID NO: 5105436 - DNA, 25 bp, Homo sapien
tgtgtgaatgaaacgacgtgctgcc

SEQ ID NO: 5105437 - DNA, 25 bp, Homo sapien
gcctgggcaatcacgggaagatcct

SEQ ID NO: 5105438 - DNA, 25 bp, Homo sapien
taatgatctgctgacctctaaggag

SEQ ID NO: 5105439 - DNA, 25 bp, Homo sapien
tcctaattagggtgagggacccgca

SEQ ID NO: 5105440 - DNA, 25 bp, Homo sapien
ccagaaatggctctgtgagcttgga

SEQ ID NO: 5105441 - DNA, 25 bp, Homo sapien
aagtagataaccataagaacagtac

SEQ ID NO: 5105442 - DNA, 25 bp, Homo sapien
acccagaaatggctctgtgagcttg

SEQ ID NO: 5105443 - DNA, 25 bp, Homo sapien
taactaagtagataaccataagaac

SEQ ID NO: 5105444 - DNA, 25 bp, Homo sapien
tgagttgcgcaatgaacaccgcggc

SEQ ID NO: 5105445 - DNA, 25 bp, Homo sapien
gggagaataaacctgctgatcctct

SEQ ID NO: 5105446 - DNA, 25 bp, Homo sapien
gaaaatctgtcctgcgttgagctct

SEQ ID NO: 5105447 - DNA, 25 bp, Homo sapien
cacactggaagatggctgctccgtc

SEQ ID NO: 5105448 - DNA, 25 bp, Homo sapien
aacactggacgctgtggcagtcact

SEQ ID NO: 5105449 - DNA, 25 bp, Homo sapien
gcctccaggataatggcaatggtga

SEQ ID NO: 5105450 - DNA, 25 bp, Homo sapien
aggcaggtcatgagtaggcagccca

SEQ ID NO: 5105451 - DNA, 25 bp, Homo sapien
agcccaatggcctccaggataatgg

SEQ ID NO: 5105452 - DNA, 25 bp, Homo sapien
gaagaggcagctattatatctactg

SEQ ID NO: 5105453 - DNA, 25 bp, Homo sapien
gcgatcgggtcctgtcacaggcagc

SEQ ID NO: 5105454 - DNA, 25 bp, Homo sapien
ctgctgggcgatcgggtcctgtcac

SEQ ID NO: 5105455 - DNA, 25 bp, Homo sapien
ttatatctactgctgggcgatcggg

SEQ ID NO: 5105456 - DNA, 25 bp, Homo sapien
ctttgttgccttctgattcaggtgg

SEQ ID NO: 5105457 - DNA, 25 bp, Homo sapien
ccaggggcgatgtctcctcctcaga

SEQ ID NO: 5105458 - DNA, 25 bp, Homo sapien
gcaagttcctgctcgcctttctttg

SEQ ID NO: 5105459 - DNA, 25 bp, Homo sapien
ttcaggtggtggagaatgcctgcac

SEQ ID NO: 5105460 - DNA, 25 bp, Homo sapien
tgggtgaacagggtgggacatcact

SEQ ID NO: 5105461 - DNA, 25 bp, Homo sapien
ctgggtgaacagggtgggacatcac

SEQ ID NO: 5105462 - DNA, 25 bp, Homo sapien
agggcagtgccctgtgtccatgact

SEQ ID NO: 5105463 - DNA, 25 bp, Homo sapien
ccagtgccgagaggtaagcctcagg

SEQ ID NO: 5105464 - DNA, 25 bp, Homo sapien
caaagcattgcttgggagggtaaaa

SEQ ID NO: 5105465 - DNA, 25 bp, Homo sapien
gccgaatgtcagagtgtccttgtcc

SEQ ID NO: 5105466 - DNA, 25 bp, Homo sapien
gtttccaaacagatccctggtgtac

SEQ ID NO: 5105467 - DNA, 25 bp, Homo sapien
aggaccctgtgagtccatgatttct

SEQ ID NO: 5105468 - DNA, 25 bp, Homo sapien
ttttccaagatgtaaccacacagga

SEQ ID NO: 5105469 - DNA, 25 bp, Homo sapien
ctgaccggggagagtgaaatacatc

SEQ ID NO: 5105470 - DNA, 25 bp, Homo sapien
taacttgacaatgtgcggcacctgc

SEQ ID NO: 5105471 - DNA, 25 bp, Homo sapien
ttagattagagaaccctctgccccg

SEQ ID NO: 5105472 - DNA, 25 bp, Homo sapien
cagaacccagggatcagaagctatc

SEQ ID NO: 5105473 - DNA, 25 bp, Homo sapien
tactgcaactcgaggcaatgcgaca

SEQ ID NO: 5105474 - DNA, 25 bp, Homo sapien
aatcagcgtgaatggagaaaaagcc

SEQ ID NO: 5105475 - DNA, 25 bp, Homo sapien
aagccaaagtgttatcagaggccca

SEQ ID NO: 5105476 - DNA, 25 bp, Homo sapien
ccatctctggccttttgccaaatca

SEQ ID NO: 5105477 - DNA, 25 bp, Homo sapien
aaagtgttatcagaggcccaggcct

SEQ ID NO: 5105478 - DNA, 25 bp, Homo sapien
gacattaggaagaggcggcatttga

SEQ ID NO: 5105479 - DNA, 25 bp, Homo sapien
gatgataaatcaacaagggtcctga

SEQ ID NO: 5105480 - DNA, 25 bp, Homo sapien
aaatcaggcgcccagaaccatggtg

SEQ ID NO: 5105481 - DNA, 25 bp, Homo sapien
taatgcacatagagaacaaagccct

SEQ ID NO: 5105482 - DNA, 25 bp, Homo sapien
tagggcccaggtgacacatagcaac

SEQ ID NO: 5105483 - DNA, 25 bp, Homo sapien
ccttttggcttcacaggagactgga

SEQ ID NO: 5105484 - DNA, 25 bp, Homo sapien
ggtctaccgactctgtggactgaaa

SEQ ID NO: 5105485 - DNA, 25 bp, Homo sapien
tggtcggccaatgagtcttaagtcc

SEQ ID NO: 5105486 - DNA, 25 bp, Homo sapien
gattccagtggaaacacggtattca

SEQ ID NO: 5105487 - DNA, 25 bp, Homo sapien
ggtggccgcaaaaggatcagcgaca

SEQ ID NO: 5105488 - DNA, 25 bp, Homo sapien
ttcccagttgcaagcaggtggccgc

SEQ ID NO: 5105489 - DNA, 25 bp, Homo sapien
tgagcagcttgacgcttcccagttg

SEQ ID NO: 5105490 - DNA, 25 bp, Homo sapien
gtagctgatgcatgttgtaaaagtc

SEQ ID NO: 5105491 - DNA, 25 bp, Homo sapien
tgtagctgatgcatgttgtaaaagt

SEQ ID NO: 5105492 - DNA, 25 bp, Homo sapien
catgagagcttgcattggccaaaag

SEQ ID NO: 5105493 - DNA, 25 bp, Homo sapien
agagcttgcattggccaaaagcatg

SEQ ID NO: 5105494 - DNA, 25 bp, Homo sapien
agtacagcgtgccatgagagcttgc

SEQ ID NO: 5105495 - DNA, 25 bp, Homo sapien
agcgtgccatgagagcttgcattgg

SEQ ID NO: 5105496 - DNA, 25 bp, Homo sapien
gtcaattcgcatggcttgaaatgca

SEQ ID NO: 5105497 - DNA, 25 bp, Homo sapien
aagaaaacatgtcaattcgcatggc

SEQ ID NO: 5105498 - DNA, 25 bp, Homo sapien
acagaagtgcacaccgacccggagc

SEQ ID NO: 5105499 - DNA, 25 bp, Homo sapien
aaacagaagtgcacaccgacccgga

SEQ ID NO: 5105500 - DNA, 25 bp, Homo sapien
tagctgatttttaccgtctgttcca

SEQ ID NO: 5105501 - DNA, 25 bp, Homo sapien
tgttcattttgacatccagcctgac

SEQ ID NO: 5105502 - DNA, 25 bp, Homo sapien
acttttgtggcacctctagcactgc

SEQ ID NO: 5105503 - DNA, 25 bp, Homo sapien
tgacacttccttcgcacttttgtgg

SEQ ID NO: 5105504 - DNA, 25 bp, Homo sapien
ggagatctgattggggtagctctga

SEQ ID NO: 5105505 - DNA, 25 bp, Homo sapien
cactgcccggttcctaatgtcacag

SEQ ID NO: 5105506 - DNA, 25 bp, Homo sapien
cccggttcctaatgtcacaggtgtg

SEQ ID NO: 5105507 - DNA, 25 bp, Homo sapien
ctccactgcccggttcctaatgtca

SEQ ID NO: 5105508 - DNA, 25 bp, Homo sapien
gctgcacagacggaaaaccacaaac

SEQ ID NO: 5105509 - DNA, 25 bp, Homo sapien
tgagctgcacagacggaaaaccaca

SEQ ID NO: 5105510 - DNA, 25 bp, Homo sapien
ctgcacagacggaaaaccacaaact

SEQ ID NO: 5105511 - DNA, 25 bp, Homo sapien
gagctgcacagacggaaaaccacaa

SEQ ID NO: 5105512 - DNA, 25 bp, Homo sapien
cccagacagataagagggctgagga

SEQ ID NO: 5105513 - DNA, 25 bp, Homo sapien
acctcttgtcactgtagtggagagg

SEQ ID NO: 5105514 - DNA, 25 bp, Homo sapien
tcccagacagataagagggctgagg

SEQ ID NO: 5105515 - DNA, 25 bp, Homo sapien
ctcccagacagataagagggctgag

SEQ ID NO: 5105516 - DNA, 25 bp, Homo sapien
tctgtatccagtagctggagcaact

SEQ ID NO: 5105517 - DNA, 25 bp, Homo sapien
cagtggctcttgtgatacacaagtc

SEQ ID NO: 5105518 - DNA, 25 bp, Homo sapien
tattagcctcttagctgatctcgtg

SEQ ID NO: 5105519 - DNA, 25 bp, Homo sapien
caactgtttataagtagacggtctc

SEQ ID NO: 5105520 - DNA, 25 bp, Homo sapien
ctggttcattagctaggctgaggtt

SEQ ID NO: 5105521 - DNA, 25 bp, Homo sapien
tagggcctgcctaaacttgctagca

SEQ ID NO: 5105522 - DNA, 25 bp, Homo sapien
ggtatgctaggtagggcctgcctaa

SEQ ID NO: 5105523 - DNA, 25 bp, Homo sapien
cacacagggatgggtatgctaggta

SEQ ID NO: 5105524 - DNA, 25 bp, Homo sapien
ccttgactgatatagcaatcccgaa

SEQ ID NO: 5105525 - DNA, 25 bp, Homo sapien
atcttcatactacactgctcagtgg

SEQ ID NO: 5105526 - DNA, 25 bp, Homo sapien
gagagtatgcttcttgcccggcaaa

SEQ ID NO: 5105527 - DNA, 25 bp, Homo sapien
caaattgtccagtttgagtgtgcca

SEQ ID NO: 5105528 - DNA, 25 bp, Homo sapien
cacaaggtggagtccgtagtaagtg

SEQ ID NO: 5105529 - DNA, 25 bp, Homo sapien
cagagccctcggtccagttctgcag

SEQ ID NO: 5105530 - DNA, 25 bp, Homo sapien
tcctggagcagattcggtggcagcc

SEQ ID NO: 5105531 - DNA, 25 bp, Homo sapien
tggaaatggtttaccctgcgtggga

SEQ ID NO: 5105532 - DNA, 25 bp, Homo sapien
cattcaggaggtgctatcaataacc

SEQ ID NO: 5105533 - DNA, 25 bp, Homo sapien
gaaacctcatgggaagcagttgcaa

SEQ ID NO: 5105534 - DNA, 25 bp, Homo sapien
tatgaaatgcgaggaagggccagac

SEQ ID NO: 5105535 - DNA, 25 bp, Homo sapien
tagaaccctctcttcagtggagtgg

SEQ ID NO: 5105536 - DNA, 25 bp, Homo sapien
gctctggcatcactcattagcagga

SEQ ID NO: 5105537 - DNA, 25 bp, Homo sapien
gacactgcatggctggatctacgat

SEQ ID NO: 5105538 - DNA, 25 bp, Homo sapien
tataaaacctgacacagcctggagc

SEQ ID NO: 5105539 - DNA, 25 bp, Homo sapien
ggagctatctatacccagtgttctt

SEQ ID NO: 5105540 - DNA, 25 bp, Homo sapien
tttttcattggccaaatttgggaca

SEQ ID NO: 5105541 - DNA, 25 bp, Homo sapien
tttcattggccaaatttgggacaat

SEQ ID NO: 5105542 - DNA, 25 bp, Homo sapien
cacctggccttgaaggactttttca

SEQ ID NO: 5105543 - DNA, 25 bp, Homo sapien
ttgaaggactttttcattggccaaa

SEQ ID NO: 5105544 - DNA, 25 bp, Homo sapien
ccacacctggtcagatccgaggtat

SEQ ID NO: 5105545 - DNA, 25 bp, Homo sapien
taaaagtacatagcgacactctagc

SEQ ID NO: 5105546 - DNA, 25 bp, Homo sapien
tcctattgccctgaagtctgaaact

SEQ ID NO: 5105547 - DNA, 25 bp, Homo sapien
tccccagtgatattgacaggttgtt

SEQ ID NO: 5105548 - DNA, 25 bp, Homo sapien
cttccagaggttgccactgtctgcc

SEQ ID NO: 5105549 - DNA, 25 bp, Homo sapien
ggaaccagcagagaagattctgtct

SEQ ID NO: 5105550 - DNA, 25 bp, Homo sapien
gcctgggaaccagcagagaagattc

SEQ ID NO: 5105551 - DNA, 25 bp, Homo sapien
cagagaagattctgtcttccagagg

SEQ ID NO: 5105552 - DNA, 25 bp, Homo sapien
cctggttgggttaagcaagcttttg

SEQ ID NO: 5105553 - DNA, 25 bp, Homo sapien
gatgaggtgcctcaggagatctcct

SEQ ID NO: 5105554 - DNA, 25 bp, Homo sapien
ccaaacaacatgtgacctgtggcat

SEQ ID NO: 5105555 - DNA, 25 bp, Homo sapien
tgcctccgtggtgtaacagcaaccc

SEQ ID NO: 5105556 - DNA, 25 bp, Homo sapien
tgatgttcccggctcgccgccgtgc

SEQ ID NO: 5105557 - DNA, 25 bp, Homo sapien
gaggctctccgaacgcctttcactg

SEQ ID NO: 5105558 - DNA, 25 bp, Homo sapien
gtgccgcagtcacgaggctctccga

SEQ ID NO: 5105559 - DNA, 25 bp, Homo sapien
ttacattcgcgtctgcaagacccgg

SEQ ID NO: 5105560 - DNA, 25 bp, Homo sapien
gaacgcttcgcacgtccggagcggt

SEQ ID NO: 5105561 - DNA, 25 bp, Homo sapien
gaatcgcagctctaagtccgcggct

SEQ ID NO: 5105562 - DNA, 25 bp, Homo sapien
tacgtggacgctcctgcaagatgag

SEQ ID NO: 5105563 - DNA, 25 bp, Homo sapien
gagggctttcggcaatttcgcgcag

SEQ ID NO: 5105564 - DNA, 25 bp, Homo sapien
ggcgcgcgcgcggatctagcccggg

SEQ ID NO: 5105565 - DNA, 25 bp, Homo sapien
acgccgttccgctcgcaagatggag

SEQ ID NO: 5105566 - DNA, 25 bp, Homo sapien
tcggccgccagatgcgcggactcgc

SEQ ID NO: 5105567 - DNA, 25 bp, Homo sapien
cccgcaggcaccgaagagacgcggg

SEQ ID NO: 5105568 - DNA, 25 bp, Homo sapien
ttttctctccgcatctgggcgcggc

SEQ ID NO: 5105569 - DNA, 25 bp, Homo sapien
tgggcgcggcgataagaagacatca

SEQ ID NO: 5105570 - DNA, 25 bp, Homo sapien
ctactaatcatcaagggcctggaac

SEQ ID NO: 5105571 - DNA, 25 bp, Homo sapien
tgatgacagttagaaagggtagccc

SEQ ID NO: 5105572 - DNA, 25 bp, Homo sapien
tgtcttcaaggcctttgcaacagga

SEQ ID NO: 5105573 - DNA, 25 bp, Homo sapien
tcacctcagagctcgttgggaatgc

SEQ ID NO: 5105574 - DNA, 25 bp, Homo sapien
cagaaccttggaatgagaacctgca

SEQ ID NO: 5105575 - DNA, 25 bp, Homo sapien
cattccttgggtgcctatatgccag

SEQ ID NO: 5105576 - DNA, 25 bp, Homo sapien
caacaaaggggccagtcacaaaagg

SEQ ID NO: 5105577 - DNA, 25 bp, Homo sapien
catgggaggtcacatgaaaggaggt

SEQ ID NO: 5105578 - DNA, 25 bp, Homo sapien
taaagacacgtaggggaagccaaca

SEQ ID NO: 5105579 - DNA, 25 bp, Homo sapien
ctagatttatggaataaaggagctt

SEQ ID NO: 5105580 - DNA, 25 bp, Homo sapien
gctgctctttctccaataacatgaa

SEQ ID NO: 5105581 - DNA, 25 bp, Homo sapien
gagaaccaaagaggctttccatgct

SEQ ID NO: 5105582 - DNA, 25 bp, Homo sapien
accaaagaggctttccatgctgctc

SEQ ID NO: 5105583 - DNA, 25 bp, Homo sapien
gaaccaaagaggctttccatgctgc

SEQ ID NO: 5105584 - DNA, 25 bp, Homo sapien
gataattgccatgaacacacagtgg

SEQ ID NO: 5105585 - DNA, 25 bp, Homo sapien
aacctgttttcacaggaggccacag

SEQ ID NO: 5105586 - DNA, 25 bp, Homo sapien
gctagactgagcaagccctatgagt

SEQ ID NO: 5105587 - DNA, 25 bp, Homo sapien
cagaggccaggtgttgctagactga

SEQ ID NO: 5105588 - DNA, 25 bp, Homo sapien
tttataccaactttgcccagggagc

SEQ ID NO: 5105589 - DNA, 25 bp, Homo sapien
tctttaagtcgtgagctccctttga

SEQ ID NO: 5105590 - DNA, 25 bp, Homo sapien
cacctggccaggactctttaagtcg

SEQ ID NO: 5105591 - DNA, 25 bp, Homo sapien
tctgttctggcaagggctcgtctct

SEQ ID NO: 5105592 - DNA, 25 bp, Homo sapien
cgtcgcctcccaaatgaaggaagtg

SEQ ID NO: 5105593 - DNA, 25 bp, Homo sapien
tcccaggtcatcagctttaaacaat

SEQ ID NO: 5105594 - DNA, 25 bp, Homo sapien
tctgagaaaggtctgtacacaacag

SEQ ID NO: 5105595 - DNA, 25 bp, Homo sapien
tcagactggtgaatagcgcttgttg

SEQ ID NO: 5105596 - DNA, 25 bp, Homo sapien
tggcccaggctatgataaacgcaca

SEQ ID NO: 5105597 - DNA, 25 bp, Homo sapien
ggtggccatctgtaacactgcatga

SEQ ID NO: 5105598 - DNA, 25 bp, Homo sapien
gcaatcatgccgaagaaaacactgg

SEQ ID NO: 5105599 - DNA, 25 bp, Homo sapien
tcaggttgcacttctaataagaggc

SEQ ID NO: 5105600 - DNA, 25 bp, Homo sapien
tgacatccctaagtaacttacaagg

SEQ ID NO: 5105601 - DNA, 25 bp, Homo sapien
tatttagcctggagagatagggagt

SEQ ID NO: 5105602 - DNA, 25 bp, Homo sapien
ttttattcatcttgtctggacctca

SEQ ID NO: 5105603 - DNA, 25 bp, Homo sapien
ggagtggtgagctattacaaactat

SEQ ID NO: 5105604 - DNA, 25 bp, Homo sapien
gagatcttacggagccacatcctca

SEQ ID NO: 5105605 - DNA, 25 bp, Homo sapien
tgcgcccgtgagctagaaaaaccag

SEQ ID NO: 5105606 - DNA, 25 bp, Homo sapien
gcctctgagtgagacaagtccagga

SEQ ID NO: 5105607 - DNA, 25 bp, Homo sapien
gagcccaagctgtttatgagccaac

SEQ ID NO: 5105608 - DNA, 25 bp, Homo sapien
agtttggtgatgctttcatgaccag

SEQ ID NO: 5105609 - DNA, 25 bp, Homo sapien
tagtctttacttagaagtttggtga

SEQ ID NO: 5105610 - DNA, 25 bp, Homo sapien
gccataggagcttaactcttattta

SEQ ID NO: 5105611 - DNA, 25 bp, Homo sapien
cacgcctggctcatcttacttgttt

SEQ ID NO: 5105612 - DNA, 25 bp, Homo sapien
tatatcattgataagaaaccctgat

SEQ ID NO: 5105613 - DNA, 25 bp, Homo sapien
tcactgtctgtatggagtgtgcaca

SEQ ID NO: 5105614 - DNA, 25 bp, Homo sapien
gcctggatgatatccagttcatctg

SEQ ID NO: 5105615 - DNA, 25 bp, Homo sapien
gcccagccggtccaatgtcttttca

SEQ ID NO: 5105616 - DNA, 25 bp, Homo sapien
gtctagttcccacaaccaccaggtg

SEQ ID NO: 5105617 - DNA, 25 bp, Homo sapien
aaataccacctagatgggcactgca

SEQ ID NO: 5105618 - DNA, 25 bp, Homo sapien
aagtgaccctggagaagagcatgcc

SEQ ID NO: 5105619 - DNA, 25 bp, Homo sapien
cactgaggacgccttgcactggaat

SEQ ID NO: 5105620 - DNA, 25 bp, Homo sapien
cctgtggaacaggtgagagctactt

SEQ ID NO: 5105621 - DNA, 25 bp, Homo sapien
cctgggttatgctgcacgtggtgat

SEQ ID NO: 5105622 - DNA, 25 bp, Homo sapien
tacttgttccaaggatggccagtga

SEQ ID NO: 5105623 - DNA, 25 bp, Homo sapien
gatcagcaactctcctcaggctggc

SEQ ID NO: 5105624 - DNA, 25 bp, Homo sapien
ggtcagggttctgctgaagacttca

SEQ ID NO: 5105625 - DNA, 25 bp, Homo sapien
cagggttctgctgaagacttcagct

SEQ ID NO: 5105626 - DNA, 25 bp, Homo sapien
tgagactccctacctaggtcagggt

SEQ ID NO: 5105627 - DNA, 25 bp, Homo sapien
actccctacctaggtcagggttctg

SEQ ID NO: 5105628 - DNA, 25 bp, Homo sapien
ccaatccagcaagtaggggcaggta

SEQ ID NO: 5105629 - DNA, 25 bp, Homo sapien
ttgtgtcttcagatgcttccgcttc

SEQ ID NO: 5105630 - DNA, 25 bp, Homo sapien
cctctcccataggactgggcctttg

SEQ ID NO: 5105631 - DNA, 25 bp, Homo sapien
ggccgccagggtcagtcccaatcca

SEQ ID NO: 5105632 - DNA, 25 bp, Homo sapien
ttccccggagagcagaaggtctcca

SEQ ID NO: 5105633 - DNA, 25 bp, Homo sapien
caggaggcaggccactgagtgcagg

SEQ ID NO: 5105634 - DNA, 25 bp, Homo sapien
ctctctgttggcatcactggcctgt

SEQ ID NO: 5105635 - DNA, 25 bp, Homo sapien
agacctctcagctacgggctctctg

SEQ ID NO: 5105636 - DNA, 25 bp, Homo sapien
gagaagcgtctcctggcagatgaaa

SEQ ID NO: 5105637 - DNA, 25 bp, Homo sapien
tctttcttagatgacaacccaggag

SEQ ID NO: 5105638 - DNA, 25 bp, Homo sapien
ggaaaacagtcccttacctctgaga

SEQ ID NO: 5105639 - DNA, 25 bp, Homo sapien
ttccagatgtatgacttcgagcctc

SEQ ID NO: 5105640 - DNA, 25 bp, Homo sapien
gggcaaatctgctagggatggatca

SEQ ID NO: 5105641 - DNA, 25 bp, Homo sapien
agcacggacttccactgtgacaggc

SEQ ID NO: 5105642 - DNA, 25 bp, Homo sapien
ctcctcggaggaagaaagcttggtc

SEQ ID NO: 5105643 - DNA, 25 bp, Homo sapien
ggatggatcatcttcggtatcagca

SEQ ID NO: 5105644 - DNA, 25 bp, Homo sapien
tcagcctggaaggagaggcgtctcc

SEQ ID NO: 5105645 - DNA, 25 bp, Homo sapien
agtggcggtcgggtgatggaggcag

SEQ ID NO: 5105646 - DNA, 25 bp, Homo sapien
tcctgcctagcccagaagcatcacc

SEQ ID NO: 5105647 - DNA, 25 bp, Homo sapien
ctctttatttgggttccagagaggg

SEQ ID NO: 5105648 - DNA, 25 bp, Homo sapien
tatccaggtctaccccggagtcctg

SEQ ID NO: 5105649 - DNA, 25 bp, Homo sapien
gacagagaagctatccaggtctacc

SEQ ID NO: 5105650 - DNA, 25 bp, Homo sapien
gacagggtcagctggcacacggcta

SEQ ID NO: 5105651 - DNA, 25 bp, Homo sapien
acacggctatcaaggtgctttggga

SEQ ID NO: 5105652 - DNA, 25 bp, Homo sapien
tagatgcaagttggctccaagatgc

SEQ ID NO: 5105653 - DNA, 25 bp, Homo sapien
gggtagatgcaagttggctccaaga

SEQ ID NO: 5105654 - DNA, 25 bp, Homo sapien
cactgcttaaggcttggctctctgg

SEQ ID NO: 5105655 - DNA, 25 bp, Homo sapien
accctgtttctggggtactctggag

SEQ ID NO: 5105656 - DNA, 25 bp, Homo sapien
tctctgcgctcccaacgagcatccc

SEQ ID NO: 5105657 - DNA, 25 bp, Homo sapien
aacgagcatccctactgcctggggc

SEQ ID NO: 5105658 - DNA, 25 bp, Homo sapien
tcccaacgagcatccctactgcctg

SEQ ID NO: 5105659 - DNA, 25 bp, Homo sapien
gcgctcccaacgagcatccctactg

SEQ ID NO: 5105660 - DNA, 25 bp, Homo sapien
gggagagcccatatcaaggtgcttg

SEQ ID NO: 5105661 - DNA, 25 bp, Homo sapien
gatttccacctagactctgtgcagg

SEQ ID NO: 5105662 - DNA, 25 bp, Homo sapien
ttgcctatagtcagccggtccttcg

SEQ ID NO: 5105663 - DNA, 25 bp, Homo sapien
cctctgtcccgtgtccttagctggg

SEQ ID NO: 5105664 - DNA, 25 bp, Homo sapien
cggggagggcaagatactcgtcatc

SEQ ID NO: 5105665 - DNA, 25 bp, Homo sapien
gggcaagatactcgtcatcactttc

SEQ ID NO: 5105666 - DNA, 25 bp, Homo sapien
aagatactcgtcatcactttccact

SEQ ID NO: 5105667 - DNA, 25 bp, Homo sapien
gggagggcaagatactcgtcatcac

SEQ ID NO: 5105668 - DNA, 25 bp, Homo sapien
cacggacgaaggagcgcaggaaaca

SEQ ID NO: 5105669 - DNA, 25 bp, Homo sapien
cttcccctgcggagtcgtgggcacg

SEQ ID NO: 5105670 - DNA, 25 bp, Homo sapien
ctttgatatccccagtgggcagggt

SEQ ID NO: 5105671 - DNA, 25 bp, Homo sapien
ggatcctagatacgaaaccaggcta

SEQ ID NO: 5105672 - DNA, 25 bp, Homo sapien
gggtctgagaatggccaccggtcca

SEQ ID NO: 5105673 - DNA, 25 bp, Homo sapien
tctgggtctgagaatggccaccggt

SEQ ID NO: 5105674 - DNA, 25 bp, Homo sapien
catctgggtctgagaatggccaccg

SEQ ID NO: 5105675 - DNA, 25 bp, Homo sapien
ctgggtctgagaatggccaccggtc

SEQ ID NO: 5105676 - DNA, 25 bp, Homo sapien
tacacaaagcttcctaacgttgagt

SEQ ID NO: 5105677 - DNA, 25 bp, Homo sapien
gcttcctaacgttgagtgtcattac

SEQ ID NO: 5105678 - DNA, 25 bp, Homo sapien
gagacaagacacctgtacacaaagc

SEQ ID NO: 5105679 - DNA, 25 bp, Homo sapien
tttattatgatgttagtggattggg

SEQ ID NO: 5105680 - DNA, 25 bp, Homo sapien
tggtccggtggccacaaagtctagg

SEQ ID NO: 5105681 - DNA, 25 bp, Homo sapien
tcatttggttcacaagatggtccgg

SEQ ID NO: 5105682 - DNA, 25 bp, Homo sapien
ccactgtggcaaatgaagctctaga

SEQ ID NO: 5105683 - DNA, 25 bp, Homo sapien
caagggtagtggctaagagctcagc

SEQ ID NO: 5105684 - DNA, 25 bp, Homo sapien
gaagaggcgtgcctgccatggaaac

SEQ ID NO: 5105685 - DNA, 25 bp, Homo sapien
caattcttggatcagcaccattact

SEQ ID NO: 5105686 - DNA, 25 bp, Homo sapien
taactagaatcagcatcttggagcc

SEQ ID NO: 5105687 - DNA, 25 bp, Homo sapien
aaaatgacaggctgagaaaacccag

SEQ ID NO: 5105688 - DNA, 25 bp, Homo sapien
agtttcctctctcctccttgctcac

SEQ ID NO: 5105689 - DNA, 25 bp, Homo sapien
cagtttcctctctcctccttgctca

SEQ ID NO: 5105690 - DNA, 25 bp, Homo sapien
tcagtttcctctctcctccttgctc

SEQ ID NO: 5105691 - DNA, 25 bp, Homo sapien
cttcagtttcctctctcctccttgc

SEQ ID NO: 5105692 - DNA, 25 bp, Homo sapien
acctggctgcagtcccgtggtcagt

SEQ ID NO: 5105693 - DNA, 25 bp, Homo sapien
tatacagccagcagatcagctcttc

SEQ ID NO: 5105694 - DNA, 25 bp, Homo sapien
cccgtggtcagtaacatctgcaaca

SEQ ID NO: 5105695 - DNA, 25 bp, Homo sapien
gacttgtaagattggacctggctgc

SEQ ID NO: 5105696 - DNA, 25 bp, Homo sapien
tttgtaatcgagtaatttagccaca

SEQ ID NO: 5105697 - DNA, 25 bp, Homo sapien
aatttagccacactcttgtgaggga

SEQ ID NO: 5105698 - DNA, 25 bp, Homo sapien
tcgagtaatttagccacactcttgt

SEQ ID NO: 5105699 - DNA, 25 bp, Homo sapien
tgtaatcgagtaatttagccacact

SEQ ID NO: 5105700 - DNA, 25 bp, Homo sapien
cagacattggttatttgagatttta

SEQ ID NO: 5105701 - DNA, 25 bp, Homo sapien
agacattggttatttgagattttac

SEQ ID NO: 5105702 - DNA, 25 bp, Homo sapien
tagaggcgtcataatagtgcaagtc

SEQ ID NO: 5105703 - DNA, 25 bp, Homo sapien
gatctttaaatagtggtgcagtcca

SEQ ID NO: 5105704 - DNA, 25 bp, Homo sapien
tgcactgttctacgtggtagccact

SEQ ID NO: 5105705 - DNA, 25 bp, Homo sapien
taaaagacttgtcccactgcacctg

SEQ ID NO: 5105706 - DNA, 25 bp, Homo sapien
gccaggaaaggccactaagctaggt

SEQ ID NO: 5105707 - DNA, 25 bp, Homo sapien
ctctctgtagtggtactggtcctgg

SEQ ID NO: 5105708 - DNA, 25 bp, Homo sapien
tgtagtggtactggtcctgggccct

SEQ ID NO: 5105709 - DNA, 25 bp, Homo sapien
agctaggtctaccagggcagcttcc

SEQ ID NO: 5105710 - DNA, 25 bp, Homo sapien
catcaggtctgcagaattccccaag

SEQ ID NO: 5105711 - DNA, 25 bp, Homo sapien
aacagtgcaacagtttaacttcagc

SEQ ID NO: 5105712 - DNA, 25 bp, Homo sapien
cagcatgtagggaagccttattccc

SEQ ID NO: 5105713 - DNA, 25 bp, Homo sapien
tcccctctaatgtgtaagattcacc

SEQ ID NO: 5105714 - DNA, 25 bp, Homo sapien
tgtaagacactctccgtcagagact

SEQ ID NO: 5105715 - DNA, 25 bp, Homo sapien
aagaatctcccccttctgtaagaca

SEQ ID NO: 5105716 - DNA, 25 bp, Homo sapien
gacactctccgtcagagactgatgt

SEQ ID NO: 5105717 - DNA, 25 bp, Homo sapien
ccttctgtaagacactctccgtcag

SEQ ID NO: 5105718 - DNA, 25 bp, Homo sapien
tggacttttgacagcatgctcctgg

SEQ ID NO: 5105719 - DNA, 25 bp, Homo sapien
gcgcacggacgcttttgaactttta

SEQ ID NO: 5105720 - DNA, 25 bp, Homo sapien
tgctcctggcggaagaaaagttaag

SEQ ID NO: 5105721 - DNA, 25 bp, Homo sapien
aagttaagttttgcacccgctggag

SEQ ID NO: 5105722 - DNA, 25 bp, Homo sapien
caggtatctctgtaagggcacatcc

SEQ ID NO: 5105723 - DNA, 25 bp, Homo sapien
tttacacaaagtaggacctggcagt

SEQ ID NO: 5105724 - DNA, 25 bp, Homo sapien
ttttgtgggcctcagtgaacagact

SEQ ID NO: 5105725 - DNA, 25 bp, Homo sapien
catgccaaggttcagatgcttaccc

SEQ ID NO: 5105726 - DNA, 25 bp, Homo sapien
tccagctcaccagactgctttgcga

SEQ ID NO: 5105727 - DNA, 25 bp, Homo sapien
tgggtgctccattgccgccatgggc

SEQ ID NO: 5105728 - DNA, 25 bp, Homo sapien
gatagagtcatacaggcgatctgcg

SEQ ID NO: 5105729 - DNA, 25 bp, Homo sapien
gctttgcgatcctcccaaggacatc

SEQ ID NO: 5105730 - DNA, 25 bp, Homo sapien
gaacagtaatggaaagcaccgcagt

SEQ ID NO: 5105731 - DNA, 25 bp, Homo sapien
tagcaactctgtggtggacacaccc

SEQ ID NO: 5105732 - DNA, 25 bp, Homo sapien
gatatgtggagaccctttgtgcagg

SEQ ID NO: 5105733 - DNA, 25 bp, Homo sapien
caaacattttgttgtaggagcgacg

SEQ ID NO: 5105734 - DNA, 25 bp, Homo sapien
taaagcatgactgtagatccccaag

SEQ ID NO: 5105735 - DNA, 25 bp, Homo sapien
tacacgctctttgtggagaagcacc

SEQ ID NO: 5105736 - DNA, 25 bp, Homo sapien
cagtgtttggccgacaggttgcacc

SEQ ID NO: 5105737 - DNA, 25 bp, Homo sapien
caaaatagccgtgttgacgtcgtct

SEQ ID NO: 5105738 - DNA, 25 bp, Homo sapien
taagcattaagataggaagcaggaa

SEQ ID NO: 5105739 - DNA, 25 bp, Homo sapien
tccttaggttgaaatagcagccaaa

SEQ ID NO: 5105740 - DNA, 25 bp, Homo sapien
cagccaaaacattcttcacgcaggg

SEQ ID NO: 5105741 - DNA, 25 bp, Homo sapien
gattttctgaaataggaccttcaag

SEQ ID NO: 5105742 - DNA, 25 bp, Homo sapien
gagcactccagtcaagcagtcaggt

SEQ ID NO: 5105743 - DNA, 25 bp, Homo sapien
tgagattaaaaagcgaatgggtccc

SEQ ID NO: 5105744 - DNA, 25 bp, Homo sapien
tagtagactacacaacagcgaaggt

SEQ ID NO: 5105745 - DNA, 25 bp, Homo sapien
tgcagtaacagtaaggccacagcct

SEQ ID NO: 5105746 - DNA, 25 bp, Homo sapien
tgggcgcagtggctgtccgggcgtc

SEQ ID NO: 5105747 - DNA, 25 bp, Homo sapien
cgtggttcacgcttatagtcctagc

SEQ ID NO: 5105748 - DNA, 25 bp, Homo sapien
ctgtccgggcgtcgtggttcacgct

SEQ ID NO: 5105749 - DNA, 25 bp, Homo sapien
ccgggcgtcgtggttcacgcttata

SEQ ID NO: 5105750 - DNA, 25 bp, Homo sapien
gcccagccttccgataatttttgta

SEQ ID NO: 5105751 - DNA, 25 bp, Homo sapien
ttttacacataacttcagctaggca

SEQ ID NO: 5105752 - DNA, 25 bp, Homo sapien
gagtcaacatagctcctgtgaccag

SEQ ID NO: 5105753 - DNA, 25 bp, Homo sapien
ttcagctaggcatgttgcctcatgc

SEQ ID NO: 5105754 - DNA, 25 bp, Homo sapien
gagttagacgggaaaacaatcaagc

SEQ ID NO: 5105755 - DNA, 25 bp, Homo sapien
agctacatcagcacaattggtgtgg

SEQ ID NO: 5105756 - DNA, 25 bp, Homo sapien
taagaactatagagttagacgggaa

SEQ ID NO: 5105757 - DNA, 25 bp, Homo sapien
caaatagtaagtgacttggctagta

SEQ ID NO: 5105758 - DNA, 25 bp, Homo sapien
cagacgaatagtaacggctcaggca

SEQ ID NO: 5105759 - DNA, 25 bp, Homo sapien
taactgaggcttttgggcagacgaa

SEQ ID NO: 5105760 - DNA, 25 bp, Homo sapien
aagtgatatgtgcacctctgctccc

SEQ ID NO: 5105761 - DNA, 25 bp, Homo sapien
tattaatagagacaatcgtgaggac

SEQ ID NO: 5105762 - DNA, 25 bp, Homo sapien
gaaagcactttttactgcatactgg

SEQ ID NO: 5105763 - DNA, 25 bp, Homo sapien
tcccaagtggatgcgccatcatgcc

SEQ ID NO: 5105764 - DNA, 25 bp, Homo sapien
gctagtgtgttggttattttggaga

SEQ ID NO: 5105765 - DNA, 25 bp, Homo sapien
caagtggctgggacctcccaagtgg

SEQ ID NO: 5105766 - DNA, 25 bp, Homo sapien
tgggcagtccaagagtgcgtatcac

SEQ ID NO: 5105767 - DNA, 25 bp, Homo sapien
aagttacttctgattggcgactcag

SEQ ID NO: 5105768 - DNA, 25 bp, Homo sapien
tatagcttatagcaatgcagtgtgc

SEQ ID NO: 5105769 - DNA, 25 bp, Homo sapien
gttagagatcataggtggcattgcc

SEQ ID NO: 5105770 - DNA, 25 bp, Homo sapien
gtttttgagttaggcctggcaatgt

SEQ ID NO: 5105771 - DNA, 25 bp, Homo sapien
tggagactgtgggtgaataataatg

SEQ ID NO: 5105772 - DNA, 25 bp, Homo sapien
taatgttgtcttagttccatgaagg

SEQ ID NO: 5105773 - DNA, 25 bp, Homo sapien
ggatagtttttgagttaggcctggc

SEQ ID NO: 5105774 - DNA, 25 bp, Homo sapien
taaagaggacacctaagtcattttg

SEQ ID NO: 5105775 - DNA, 25 bp, Homo sapien
ttgatactcgcagattaaaggaagc

SEQ ID NO: 5105776 - DNA, 25 bp, Homo sapien
gaaacgaacgggacctatgatagat

SEQ ID NO: 5105777 - DNA, 25 bp, Homo sapien
gattacctgcttggatgcttgcaga

SEQ ID NO: 5105778 - DNA, 25 bp, Homo sapien
gccgggtccattgccctcctataaa

SEQ ID NO: 5105779 - DNA, 25 bp, Homo sapien
aatatggatgcttttcgggactgcg

SEQ ID NO: 5105780 - DNA, 25 bp, Homo sapien
cactctgcggagctgtcaggatctt

SEQ ID NO: 5105781 - DNA, 25 bp, Homo sapien
gttgtttaagagctcgccgggtcca

SEQ ID NO: 5105782 - DNA, 25 bp, Homo sapien
tcgattacccgtggcgcggagagtc

SEQ ID NO: 5105783 - DNA, 25 bp, Homo sapien
gctgcggcagcaagggcggcggtgg

SEQ ID NO: 5105784 - DNA, 25 bp, Homo sapien
ggcggcggctgctgattgtgttcta

SEQ ID NO: 5105785 - DNA, 25 bp, Homo sapien
gaagacgtttgctctcccggaacag

SEQ ID NO: 5105786 - DNA, 25 bp, Homo sapien
tgagtgacgagaagaaccgctccgt

SEQ ID NO: 5105787 - DNA, 25 bp, Homo sapien
aatggacgatgaccgaacccaggtg

SEQ ID NO: 5105788 - DNA, 25 bp, Homo sapien
gactactgcaatagccaggctgacg

SEQ ID NO: 5105789 - DNA, 25 bp, Homo sapien
gaattggattttaggctggctctgg

SEQ ID NO: 5105790 - DNA, 25 bp, Homo sapien
cgtcttctccagatttggatcctct

SEQ ID NO: 5105791 - DNA, 25 bp, Homo sapien
gtcttctccagatttggatcctctt

SEQ ID NO: 5105792 - DNA, 25 bp, Homo sapien
gcgtcttctccagatttggatcctc

SEQ ID NO: 5105793 - DNA, 25 bp, Homo sapien
tgggcttctgactcaaggagaactc

SEQ ID NO: 5105794 - DNA, 25 bp, Homo sapien
ccattcaggacttttgtgaggagtc

SEQ ID NO: 5105795 - DNA, 25 bp, Homo sapien
taacccctcatagctgaaactgatc

SEQ ID NO: 5105796 - DNA, 25 bp, Homo sapien
ggagcatattcattggccccacagt

SEQ ID NO: 5105797 - DNA, 25 bp, Homo sapien
caggagagctaacgactgctggata

SEQ ID NO: 5105798 - DNA, 25 bp, Homo sapien
caattaagacagtgcttgctgttcc

SEQ ID NO: 5105799 - DNA, 25 bp, Homo sapien
catcacaggcatcacactagccagg

SEQ ID NO: 5105800 - DNA, 25 bp, Homo sapien
tgcactcagattaggaccgactcca

SEQ ID NO: 5105801 - DNA, 25 bp, Homo sapien
tgactgccattttgaccgctccctg

SEQ ID NO: 5105802 - DNA, 25 bp, Homo sapien
tgagtccctcagagattcctggtaa

SEQ ID NO: 5105803 - DNA, 25 bp, Homo sapien
cctcagagggcgtgtagtccacatc

SEQ ID NO: 5105804 - DNA, 25 bp, Homo sapien
ggaaggatccaagagggacccagga

SEQ ID NO: 5105805 - DNA, 25 bp, Homo sapien
ctctcctgaggtggctaggttcaac

SEQ ID NO: 5105806 - DNA, 25 bp, Homo sapien
tgaggtggctaggttcaacttcttt

SEQ ID NO: 5105807 - DNA, 25 bp, Homo sapien
tttgctcaggactatctctaccaga

SEQ ID NO: 5105808 - DNA, 25 bp, Homo sapien
caggactatctctaccagattcttt

SEQ ID NO: 5105809 - DNA, 25 bp, Homo sapien
gccaccgctccgctagctgctgaag

SEQ ID NO: 5105810 - DNA, 25 bp, Homo sapien
tccgctagctgctgaagccgcttgg

SEQ ID NO: 5105811 - DNA, 25 bp, Homo sapien
ctgctgaagccgcttggcacgctcg

SEQ ID NO: 5105812 - DNA, 25 bp, Homo sapien
aagccgcttggcacgctcgcggtcg

SEQ ID NO: 5105813 - DNA, 25 bp, Homo sapien
tctaccagagcagagagtgtaagct

SEQ ID NO: 5105814 - DNA, 25 bp, Homo sapien
ccaactgatatttagctgcaatgcc

SEQ ID NO: 5105815 - DNA, 25 bp, Homo sapien
tcaaagtcaacatcacaaccaaggt

SEQ ID NO: 5105816 - DNA, 25 bp, Homo sapien
gcgcaagtctgtccgtgggtcgcca

SEQ ID NO: 5105817 - DNA, 25 bp, Homo sapien
ttaagcctccaactccagggcgagc

SEQ ID NO: 5105818 - DNA, 25 bp, Homo sapien
cctccaactccagggcgagcccaac

SEQ ID NO: 5105819 - DNA, 25 bp, Homo sapien
agcctccaactccagggcgagccca

SEQ ID NO: 5105820 - DNA, 25 bp, Homo sapien
taagcctccaactccagggcgagcc

SEQ ID NO: 5105821 - DNA, 25 bp, Homo sapien
ttctgatatccattcccaaaggttt

SEQ ID NO: 5105822 - DNA, 25 bp, Homo sapien
gcctgctgctggtcacaatggaaat

SEQ ID NO: 5105823 - DNA, 25 bp, Homo sapien
ggaaatatattaaggccaaatcttc

SEQ ID NO: 5105824 - DNA, 25 bp, Homo sapien
gttttgatcatcttcttgggggaaa

SEQ ID NO: 5105825 - DNA, 25 bp, Homo sapien
atacttaaaatacagctcttgttga

SEQ ID NO: 5105826 - DNA, 25 bp, Homo sapien
gaaaccagctaacaaagaactgtct

SEQ ID NO: 5105827 - DNA, 25 bp, Homo sapien
aaatacagctcttgttgagatcatc

SEQ ID NO: 5105828 - DNA, 25 bp, Homo sapien
gataaccaattcaactagaaaccag

SEQ ID NO: 5105829 - DNA, 25 bp, Homo sapien
atttaaataatgtataggtgactgc

SEQ ID NO: 5105830 - DNA, 25 bp, Homo sapien
tggtgggtagcgcatttaacagtta

SEQ ID NO: 5105831 - DNA, 25 bp, Homo sapien
aataatgtataggtgactgcaggac

SEQ ID NO: 5105832 - DNA, 25 bp, Homo sapien
tgcaggactgcagcattggtaacta

SEQ ID NO: 5105833 - DNA, 25 bp, Homo sapien
ggtagggcggggagcaagcctggag

SEQ ID NO: 5105834 - DNA, 25 bp, Homo sapien
tggaggtcctggcggaccccaccat

SEQ ID NO: 5105835 - DNA, 25 bp, Homo sapien
tggcgggtagggcggggagcaagcc

SEQ ID NO: 5105836 - DNA, 25 bp, Homo sapien
ctggaggtcctggcggaccccacca

SEQ ID NO: 5105837 - DNA, 25 bp, Homo sapien
taaagtgtcacaggagctaagggcg

SEQ ID NO: 5105838 - DNA, 25 bp, Homo sapien
ttaacgaactgcagaagacgcaggc

SEQ ID NO: 5105839 - DNA, 25 bp, Homo sapien
caggcaggtgaaggacaccggttct

SEQ ID NO: 5105840 - DNA, 25 bp, Homo sapien
ttaatggcggccaacatcgccggtg

SEQ ID NO: 5105841 - DNA, 25 bp, Homo sapien
atggaggagcgtcgaggcccctccc

SEQ ID NO: 5105842 - DNA, 25 bp, Homo sapien
gctgaatgcctgcacgaaaagggtg

SEQ ID NO: 5105843 - DNA, 25 bp, Homo sapien
ccgcttccggctcggctgtcacggt

SEQ ID NO: 5105844 - DNA, 25 bp, Homo sapien
gactggcagcggtgagctccaataa

SEQ ID NO: 5105845 - DNA, 25 bp, Homo sapien
acaacctacagccaccgccgcccgg

SEQ ID NO: 5105846 - DNA, 25 bp, Homo sapien
gcacaccaccaccttcctgccctgg

SEQ ID NO: 5105847 - DNA, 25 bp, Homo sapien
accaccaccttcctgccctggctgt

SEQ ID NO: 5105848 - DNA, 25 bp, Homo sapien
acaccaccaccttcctgccctggct

SEQ ID NO: 5105849 - DNA, 25 bp, Homo sapien
cccggtgccgttgtcgcacaccacc

SEQ ID NO: 5105850 - DNA, 25 bp, Homo sapien
gaaaagagcccttctcggaacacac

SEQ ID NO: 5105851 - DNA, 25 bp, Homo sapien
gcttctcgtttggtgtatcttcaac

SEQ ID NO: 5105852 - DNA, 25 bp, Homo sapien
ggtcagtaggctccatgtccagtgc

SEQ ID NO: 5105853 - DNA, 25 bp, Homo sapien
aagtaaacccgcttcctgcttctcg

SEQ ID NO: 5105854 - DNA, 25 bp, Homo sapien
gatgcgctgccgatctggacccctt

SEQ ID NO: 5105855 - DNA, 25 bp, Homo sapien
ctcctgggccaaatactagtatgta

SEQ ID NO: 5105856 - DNA, 25 bp, Homo sapien
gaacatgctggtctccgtgggccta

SEQ ID NO: 5105857 - DNA, 25 bp, Homo sapien
aaacaaaaagtgaacgatgcgctgc

SEQ ID NO: 5105858 - DNA, 25 bp, Homo sapien
cagtaaaataaaagtgggttagcat

SEQ ID NO: 5105859 - DNA, 25 bp, Homo sapien
tttcccactttggtggttgatctga

SEQ ID NO: 5105860 - DNA, 25 bp, Homo sapien
gtttcccactttggtggttgatctg

SEQ ID NO: 5105861 - DNA, 25 bp, Homo sapien
atttttgtgcccctgttcaggtgtt

SEQ ID NO: 5105862 - DNA, 25 bp, Homo sapien
gcccctgttcaggtgttgatataaa

SEQ ID NO: 5105863 - DNA, 25 bp, Homo sapien
actacttttataagaacacctcaca

SEQ ID NO: 5105864 - DNA, 25 bp, Homo sapien
cacctcacatgtcttgattatcatt

SEQ ID NO: 5105865 - DNA, 25 bp, Homo sapien
gccttaaacacgaagaaagtgggca

SEQ ID NO: 5105866 - DNA, 25 bp, Homo sapien
gataggcttacaagattgcacagag

SEQ ID NO: 5105867 - DNA, 25 bp, Homo sapien
taaatgataacagcaaaggtctagc

SEQ ID NO: 5105868 - DNA, 25 bp, Homo sapien
tacttcaacgggtcaagaaaggtga

SEQ ID NO: 5105869 - DNA, 25 bp, Homo sapien
gttaaatgtctgagataagaccagc

SEQ ID NO: 5105870 - DNA, 25 bp, Homo sapien
actgtcccatcaagcaaaagtggaa

SEQ ID NO: 5105871 - DNA, 25 bp, Homo sapien
tgtgaaatctgctcatcagtaagga

SEQ ID NO: 5105872 - DNA, 25 bp, Homo sapien
tggtccattgtacgcaatcaggaaa

SEQ ID NO: 5105873 - DNA, 25 bp, Homo sapien
tagaaagtttaatcatggataatac

SEQ ID NO: 5105874 - DNA, 25 bp, Homo sapien
gagggttttgtatgaggtttcatct

SEQ ID NO: 5105875 - DNA, 25 bp, Homo sapien
tatgtcaaagctgtagatcaaagtt

SEQ ID NO: 5105876 - DNA, 25 bp, Homo sapien
aaaaataaggcctgtgatatgtgaa

SEQ ID NO: 5105877 - DNA, 25 bp, Homo sapien
tgtcatcccaatttcgtactatgcc

SEQ ID NO: 5105878 - DNA, 25 bp, Homo sapien
gccgcccaattcctaattagagcct

SEQ ID NO: 5105879 - DNA, 25 bp, Homo sapien
cagccgcccaattcctaattagagc

SEQ ID NO: 5105880 - DNA, 25 bp, Homo sapien
ttccagccgcccaattcctaattag

SEQ ID NO: 5105881 - DNA, 25 bp, Homo sapien
ccagccgcccaattcctaattagag

SEQ ID NO: 5105882 - DNA, 25 bp, Homo sapien
tggatggctacatatacaccggaaa

SEQ ID NO: 5105883 - DNA, 25 bp, Homo sapien
ctggatggctacatatacaccggaa

SEQ ID NO: 5105884 - DNA, 25 bp, Homo sapien
gatggctacatatacaccggaaaac

SEQ ID NO: 5105885 - DNA, 25 bp, Homo sapien
ggatggctacatatacaccggaaaa

SEQ ID NO: 5105886 - DNA, 25 bp, Homo sapien
tcataaaactcatatacagcccttg

SEQ ID NO: 5105887 - DNA, 25 bp, Homo sapien
gaatatataagtagtcccctccatt

SEQ ID NO: 5105888 - DNA, 25 bp, Homo sapien
gacaggcccagacattctcagtaag

SEQ ID NO: 5105889 - DNA, 25 bp, Homo sapien
tgaagtgcctaaaagactccttggc

SEQ ID NO: 5105890 - DNA, 25 bp, Homo sapien
atatctagttatatccctcccagca

SEQ ID NO: 5105891 - DNA, 25 bp, Homo sapien
agatatctagttatatccctcccag

SEQ ID NO: 5105892 - DNA, 25 bp, Homo sapien
gataagatatctagttatatccctc

SEQ ID NO: 5105893 - DNA, 25 bp, Homo sapien
cttgataagatatctagttatatcc

SEQ ID NO: 5105894 - DNA, 25 bp, Homo sapien
gcgaaccgtttcaaaatcagcagag

SEQ ID NO: 5105895 - DNA, 25 bp, Homo sapien
ttctttaatcatgcgaaccgtttca

SEQ ID NO: 5105896 - DNA, 25 bp, Homo sapien
agagtggttgaaggcgtatcctcgc

SEQ ID NO: 5105897 - DNA, 25 bp, Homo sapien
tattatatcccacgtaacacagttt

SEQ ID NO: 5105898 - DNA, 25 bp, Homo sapien
cagctgcctgaattgtgttaaaaag

SEQ ID NO: 5105899 - DNA, 25 bp, Homo sapien
tctcccccaactttgatgatacgtc

SEQ ID NO: 5105900 - DNA, 25 bp, Homo sapien
gcttctggtgcttcaaatctctctc

SEQ ID NO: 5105901 - DNA, 25 bp, Homo sapien
ctttgatgatacgtccatctgggag

SEQ ID NO: 5105902 - DNA, 25 bp, Homo sapien
taacagaatctgagcgagggtctga

SEQ ID NO: 5105903 - DNA, 25 bp, Homo sapien
gcagtaccctcttttctgatacagt

SEQ ID NO: 5105904 - DNA, 25 bp, Homo sapien
agtaccctgctatctactgacagca

SEQ ID NO: 5105905 - DNA, 25 bp, Homo sapien
gagctgatttgcacccattttggcc

SEQ ID NO: 5105906 - DNA, 25 bp, Homo sapien
tggcaggccaggatacatagtagac

SEQ ID NO: 5105907 - DNA, 25 bp, Homo sapien
ttaagttctcgttccaaccgtgatg

SEQ ID NO: 5105908 - DNA, 25 bp, Homo sapien
taaagctgtttaagttctcgttcca

SEQ ID NO: 5105909 - DNA, 25 bp, Homo sapien
cgttccaaccgtgatggcaggccag

SEQ ID NO: 5105910 - DNA, 25 bp, Homo sapien
tttccacatcacccttcaaaactcg

SEQ ID NO: 5105911 - DNA, 25 bp, Homo sapien
gaaagtttttccacatcacccttca

SEQ ID NO: 5105912 - DNA, 25 bp, Homo sapien
ttttccacatcacccttcaaaactc

SEQ ID NO: 5105913 - DNA, 25 bp, Homo sapien
ttccacatcacccttcaaaactcgt

SEQ ID NO: 5105914 - DNA, 25 bp, Homo sapien
tttaccatggctgaacaagacctgc

SEQ ID NO: 5105915 - DNA, 25 bp, Homo sapien
acagtttatgaaggagcacactacc

SEQ ID NO: 5105916 - DNA, 25 bp, Homo sapien
agtcacaaggctcactcctctcacg

SEQ ID NO: 5105917 - DNA, 25 bp, Homo sapien
tcctctcacgctcaacttaggtctc

SEQ ID NO: 5105918 - DNA, 25 bp, Homo sapien
gctttctgcggggtgggtcttcaat

SEQ ID NO: 5105919 - DNA, 25 bp, Homo sapien
ggtgggtcttcaatgcggatcttaa

SEQ ID NO: 5105920 - DNA, 25 bp, Homo sapien
tttctgcggggtgggtcttcaatgc

SEQ ID NO: 5105921 - DNA, 25 bp, Homo sapien
tgggtcttcaatgcggatcttaaat

SEQ ID NO: 5105922 - DNA, 25 bp, Homo sapien
tgatatccgctagaactgcaccacc

SEQ ID NO: 5105923 - DNA, 25 bp, Homo sapien
tgtcgggtcatccaaaagttgtctt

SEQ ID NO: 5105924 - DNA, 25 bp, Homo sapien
tagcacacggacacccttttcttgg

SEQ ID NO: 5105925 - DNA, 25 bp, Homo sapien
cttggtactcttgtcgggtcatcca

SEQ ID NO: 5105926 - DNA, 25 bp, Homo sapien
tgtgctaaagactacgactagcagc

SEQ ID NO: 5105927 - DNA, 25 bp, Homo sapien
ctgtaattcgaattacccaaaggat

SEQ ID NO: 5105928 - DNA, 25 bp, Homo sapien
ggactgtagggagtctaatcccagc

SEQ ID NO: 5105929 - DNA, 25 bp, Homo sapien
gtacagttgaaagcgccacattaca

SEQ ID NO: 5105930 - DNA, 25 bp, Homo sapien
catgttcccaagatctagtacgggc

SEQ ID NO: 5105931 - DNA, 25 bp, Homo sapien
tcaaatgtagaagtattggcaattc

SEQ ID NO: 5105932 - DNA, 25 bp, Homo sapien
gagggactcatacttgacaactcca

SEQ ID NO: 5105933 - DNA, 25 bp, Homo sapien
ttctacattcaagggacaaacgata

SEQ ID NO: 5105934 - DNA, 25 bp, Homo sapien
tatctgcttgaattccacctaaact

SEQ ID NO: 5105935 - DNA, 25 bp, Homo sapien
tgtcaccatagtttaggttccactc

SEQ ID NO: 5105936 - DNA, 25 bp, Homo sapien
gaatcaaggtcctttaaattgtcac

SEQ ID NO: 5105937 - DNA, 25 bp, Homo sapien
tagagactcctttagaattccaagt

SEQ ID NO: 5105938 - DNA, 25 bp, Homo sapien
aattttctccaatgcactccttagg

SEQ ID NO: 5105939 - DNA, 25 bp, Homo sapien
ttcacttacatcacaaagagctgct

SEQ ID NO: 5105940 - DNA, 25 bp, Homo sapien
aaagtgagcttgctctaaaaactga

SEQ ID NO: 5105941 - DNA, 25 bp, Homo sapien
ggtgagcttgccctaaaaagtgagc

SEQ ID NO: 5105942 - DNA, 25 bp, Homo sapien
caggatatagctgagcacactgtct

SEQ ID NO: 5105943 - DNA, 25 bp, Homo sapien
aagcaaactcggcaggatatagctg

SEQ ID NO: 5105944 - DNA, 25 bp, Homo sapien
gggtgcaaaagcaaactcggcagga

SEQ ID NO: 5105945 - DNA, 25 bp, Homo sapien
ggcaggatatagctgagcacactgt

SEQ ID NO: 5105946 - DNA, 25 bp, Homo sapien
ttatctttgatgtcccttcatggca

SEQ ID NO: 5105947 - DNA, 25 bp, Homo sapien
gctgcacatgaagacgcctttcaag

SEQ ID NO: 5105948 - DNA, 25 bp, Homo sapien
tttgcaaagagctctagggcacggg

SEQ ID NO: 5105949 - DNA, 25 bp, Homo sapien
gcctcctgccataggttacattgta

SEQ ID NO: 5105950 - DNA, 25 bp, Homo sapien
ggatagcaattgtgataaagaccca

SEQ ID NO: 5105951 - DNA, 25 bp, Homo sapien
gagtggtttctaccaaatcctgtga

SEQ ID NO: 5105952 - DNA, 25 bp, Homo sapien
gcccttggtgccttcgtgcagctgt

SEQ ID NO: 5105953 - DNA, 25 bp, Homo sapien
tgggtattccctaaacagtcatcat

SEQ ID NO: 5105954 - DNA, 25 bp, Homo sapien
acgctggtgtacttgtctgttggac

SEQ ID NO: 5105955 - DNA, 25 bp, Homo sapien
gaccaaagattataagaggcttgag

SEQ ID NO: 5105956 - DNA, 25 bp, Homo sapien
caatgcccgactgccagtgggtggt

SEQ ID NO: 5105957 - DNA, 25 bp, Homo sapien
ggtgacggtgccttactcatgcatg

SEQ ID NO: 5105958 - DNA, 25 bp, Homo sapien
catggtctcatcttggtcagggagc

SEQ ID NO: 5105959 - DNA, 25 bp, Homo sapien
catcctcgggtccttggaatcaaca

SEQ ID NO: 5105960 - DNA, 25 bp, Homo sapien
gagcctgggtaatagctgcctctgt

SEQ ID NO: 5105961 - DNA, 25 bp, Homo sapien
ctctgtgagacttcccgggaatctg

SEQ ID NO: 5105962 - DNA, 25 bp, Homo sapien
tgaaggcatcggttaagggcacaaa

SEQ ID NO: 5105963 - DNA, 25 bp, Homo sapien
tccagtgctgtcgagagaccacctt

SEQ ID NO: 5105964 - DNA, 25 bp, Homo sapien
aatacccagtgtgcttatgagtcag

SEQ ID NO: 5105965 - DNA, 25 bp, Homo sapien
cacccttttaagagttacgctagca

SEQ ID NO: 5105966 - DNA, 25 bp, Homo sapien
tagtacaatcagaacctcgtggaga

SEQ ID NO: 5105967 - DNA, 25 bp, Homo sapien
tgcacaggtggttaggtcagccaac

SEQ ID NO: 5105968 - DNA, 25 bp, Homo sapien
cagactcgccactttgggtgcacag

SEQ ID NO: 5105969 - DNA, 25 bp, Homo sapien
cacgatctttctgtggtagcggcca

SEQ ID NO: 5105970 - DNA, 25 bp, Homo sapien
aaatggcagacgacttcctgtttgc

SEQ ID NO: 5105971 - DNA, 25 bp, Homo sapien
cagccttagtagacattgcggggaa

SEQ ID NO: 5105972 - DNA, 25 bp, Homo sapien
gccaaaggagaaaggactgatcata

SEQ ID NO: 5105973 - DNA, 25 bp, Homo sapien
ctgttcccaaagacctgttgacaaa

SEQ ID NO: 5105974 - DNA, 25 bp, Homo sapien
gattggctggtgtgatatagctccc

SEQ ID NO: 5105975 - DNA, 25 bp, Homo sapien
cagacttcctatagtgctccgagca

SEQ ID NO: 5105976 - DNA, 25 bp, Homo sapien
gagacaaacaacagcaggcgggtta

SEQ ID NO: 5105977 - DNA, 25 bp, Homo sapien
gagcagatcctctcaacagttggca

SEQ ID NO: 5105978 - DNA, 25 bp, Homo sapien
gttacatataagacaccattctagg

SEQ ID NO: 5105979 - DNA, 25 bp, Homo sapien
ccgcttccagcctgctatagataat

SEQ ID NO: 5105980 - DNA, 25 bp, Homo sapien
aattcatattctggtaggcaagcag

SEQ ID NO: 5105981 - DNA, 25 bp, Homo sapien
tagtagcatatagaaagccaaagca

SEQ ID NO: 5105982 - DNA, 25 bp, Homo sapien
ccccacatctggagtttatggtcat

SEQ ID NO: 5105983 - DNA, 25 bp, Homo sapien
tgtctgctgtgatattgtcctcccc

SEQ ID NO: 5105984 - DNA, 25 bp, Homo sapien
gctgtgatattgtcctccccacatc

SEQ ID NO: 5105985 - DNA, 25 bp, Homo sapien
ctccccacatctggagtttatggtc

SEQ ID NO: 5105986 - DNA, 25 bp, Homo sapien
gcagctttgagctattcctttttgg

SEQ ID NO: 5105987 - DNA, 25 bp, Homo sapien
gagccactcattgctattgtgtata

SEQ ID NO: 5105988 - DNA, 25 bp, Homo sapien
caaatctgagcccagtccggttctt

SEQ ID NO: 5105989 - DNA, 25 bp, Homo sapien
cttctcttaattcccgccctagtgg

SEQ ID NO: 5105990 - DNA, 25 bp, Homo sapien
ccagcactggcatgagctgccaagc

SEQ ID NO: 5105991 - DNA, 25 bp, Homo sapien
gcccagcactggcatgagctgccaa

SEQ ID NO: 5105992 - DNA, 25 bp, Homo sapien
caggcccagcactggcatgagctgc

SEQ ID NO: 5105993 - DNA, 25 bp, Homo sapien
ccaggcccagcactggcatgagctg

SEQ ID NO: 5105994 - DNA, 25 bp, Homo sapien
tcattgctaatcaagcccccggctc

SEQ ID NO: 5105995 - DNA, 25 bp, Homo sapien
ttcattgctaatcaagcccccggct

SEQ ID NO: 5105996 - DNA, 25 bp, Homo sapien
attgctaatcaagcccccggctctt

SEQ ID NO: 5105997 - DNA, 25 bp, Homo sapien
ttgctaatcaagcccccggctcttc

SEQ ID NO: 5105998 - DNA, 25 bp, Homo sapien
gggaaactggtctcctctcatagac

SEQ ID NO: 5105999 - DNA, 25 bp, Homo sapien
ttgcaaccaggtctgaagccaggcc

SEQ ID NO: 5106000 - DNA, 25 bp, Homo sapien
cttctagatctagacttggtctgtt

SEQ ID NO: 5106001 - DNA, 25 bp, Homo sapien
gacttgagttaacccaatcccttga

SEQ ID NO: 5106002 - DNA, 25 bp, Homo sapien
ctgagaggaggagatactcgaaaca

SEQ ID NO: 5106003 - DNA, 25 bp, Homo sapien
tcgaaacaagttgggtgctctccac

SEQ ID NO: 5106004 - DNA, 25 bp, Homo sapien
gagatactcgaaacaagttgggtgc

SEQ ID NO: 5106005 - DNA, 25 bp, Homo sapien
gaggaggagatactcgaaacaagtt

SEQ ID NO: 5106006 - DNA, 25 bp, Homo sapien
ctgtgatggagtgccagttgaagtc

SEQ ID NO: 5106007 - DNA, 25 bp, Homo sapien
agtgccagttgaagtcattgactgg

SEQ ID NO: 5106008 - DNA, 25 bp, Homo sapien
gccagttgaagtcattgactggcat

SEQ ID NO: 5106009 - DNA, 25 bp, Homo sapien
ggagtgccagttgaagtcattgact

SEQ ID NO: 5106010 - DNA, 25 bp, Homo sapien
ccagtgctgggaagagttaatgttc

SEQ ID NO: 5106011 - DNA, 25 bp, Homo sapien
gagaccggcatacaagccttcgcct

SEQ ID NO: 5106012 - DNA, 25 bp, Homo sapien
tcctccagtgctgggaagagttaat

SEQ ID NO: 5106013 - DNA, 25 bp, Homo sapien
ctgagaccggcatacaagccttcgc

SEQ ID NO: 5106014 - DNA, 25 bp, Homo sapien
agtttttactatagctctcgtgtca

SEQ ID NO: 5106015 - DNA, 25 bp, Homo sapien
gcaccggtaatgtagggatgctcag

SEQ ID NO: 5106016 - DNA, 25 bp, Homo sapien
tgccaagtccctagtttttactata

SEQ ID NO: 5106017 - DNA, 25 bp, Homo sapien
agctctcgtgtcatctttgattgca

SEQ ID NO: 5106018 - DNA, 25 bp, Homo sapien
ttcataagcactggattcactcagg

SEQ ID NO: 5106019 - DNA, 25 bp, Homo sapien
cactgataatgtctttggcccggcc

SEQ ID NO: 5106020 - DNA, 25 bp, Homo sapien
tgatgtgctgaagctgaagacgcga

SEQ ID NO: 5106021 - DNA, 25 bp, Homo sapien
ggagacacgcgatctctaccttgag

SEQ ID NO: 5106022 - DNA, 25 bp, Homo sapien
cataggaaaggggtgatgtgtatca

SEQ ID NO: 5106023 - DNA, 25 bp, Homo sapien
atccaaacataggaaaggggtgatg

SEQ ID NO: 5106024 - DNA, 25 bp, Homo sapien
gggtgatgtgtatcagggtgtccat

SEQ ID NO: 5106025 - DNA, 25 bp, Homo sapien
agaatccaaacataggaaaggggtg

SEQ ID NO: 5106026 - DNA, 25 bp, Homo sapien
cacaagcttccgtgagggttctggt

SEQ ID NO: 5106027 - DNA, 25 bp, Homo sapien
ctggaggtgtcacaagcttccgtga

SEQ ID NO: 5106028 - DNA, 25 bp, Homo sapien
caagcttccgtgagggttctggtct

SEQ ID NO: 5106029 - DNA, 25 bp, Homo sapien
gtcacaagcttccgtgagggttctg

SEQ ID NO: 5106030 - DNA, 25 bp, Homo sapien
tggtcccgtgctggtccatgtgctg

SEQ ID NO: 5106031 - DNA, 25 bp, Homo sapien
gaatctctagttcatggaggtctga

SEQ ID NO: 5106032 - DNA, 25 bp, Homo sapien
tctttgcaggctcctcgaagttcct

SEQ ID NO: 5106033 - DNA, 25 bp, Homo sapien
gaggtctgacggatccatggtcccg

SEQ ID NO: 5106034 - DNA, 25 bp, Homo sapien
gcagaagtgtaaaatgccccaaaca

SEQ ID NO: 5106035 - DNA, 25 bp, Homo sapien
tagtactgccgagtttatagccggt

SEQ ID NO: 5106036 - DNA, 25 bp, Homo sapien
tatagccggtcctgagcttggacgt

SEQ ID NO: 5106037 - DNA, 25 bp, Homo sapien
tcagtgttggctgaaagattgtgcc

SEQ ID NO: 5106038 - DNA, 25 bp, Homo sapien
ggctcccttgcccagcttttgatat

SEQ ID NO: 5106039 - DNA, 25 bp, Homo sapien
ctcccttgcccagcttttgatattt

SEQ ID NO: 5106040 - DNA, 25 bp, Homo sapien
gctcccttgcccagcttttgatatt

SEQ ID NO: 5106041 - DNA, 25 bp, Homo sapien
tgtcataatcgttttgataacattc

SEQ ID NO: 5106042 - DNA, 25 bp, Homo sapien
catgtcataatcgttttgataacat

SEQ ID NO: 5106043 - DNA, 25 bp, Homo sapien
tcataatcgttttgataacattctt

SEQ ID NO: 5106044 - DNA, 25 bp, Homo sapien
gtcataatcgttttgataacattct

SEQ ID NO: 5106045 - DNA, 25 bp, Homo sapien
gggtatgcagctctaatcgtcagca

SEQ ID NO: 5106046 - DNA, 25 bp, Homo sapien
tctgcagcagcgataaccaattctc

SEQ ID NO: 5106047 - DNA, 25 bp, Homo sapien
cacttgcacggtgacttgggtatgc

SEQ ID NO: 5106048 - DNA, 25 bp, Homo sapien
gcttgatgtggaatgcctgggtccc

SEQ ID NO: 5106049 - DNA, 25 bp, Homo sapien
tttgtgatggaagcactcagacccc

SEQ ID NO: 5106050 - DNA, 25 bp, Homo sapien
gatggaagcactcagaccccccagg

SEQ ID NO: 5106051 - DNA, 25 bp, Homo sapien
gtgatggaagcactcagacccccca

SEQ ID NO: 5106052 - DNA, 25 bp, Homo sapien
tatttgtgatggaagcactcagacc

SEQ ID NO: 5106053 - DNA, 25 bp, Homo sapien
gaatacttaagtcaccacatttggc

SEQ ID NO: 5106054 - DNA, 25 bp, Homo sapien
ttggcagtctgtatgttcagtagaa

SEQ ID NO: 5106055 - DNA, 25 bp, Homo sapien
tgaaccactctgataagctttggag

SEQ ID NO: 5106056 - DNA, 25 bp, Homo sapien
tagatttgacgctttctggccttgg

SEQ ID NO: 5106057 - DNA, 25 bp, Homo sapien
ttatactgatgataggcgatgatac

SEQ ID NO: 5106058 - DNA, 25 bp, Homo sapien
gaaaaatgtagtactcacacacgtg

SEQ ID NO: 5106059 - DNA, 25 bp, Homo sapien
ctgatgataggcgatgataatgtga

SEQ ID NO: 5106060 - DNA, 25 bp, Homo sapien
ggcgatgatactccgtggttctcaa

SEQ ID NO: 5106061 - DNA, 25 bp, Homo sapien
gaccaaggttgaagaaagactcctc

SEQ ID NO: 5106062 - DNA, 25 bp, Homo sapien
cctccatgacaactgataggccctt

SEQ ID NO: 5106063 - DNA, 25 bp, Homo sapien
ggttgaagaaagactcctccatgac

SEQ ID NO: 5106064 - DNA, 25 bp, Homo sapien
tgacaactgataggcccttgggcaa

SEQ ID NO: 5106065 - DNA, 25 bp, Homo sapien
cagagctgggtcttagttgtgggtg

SEQ ID NO: 5106066 - DNA, 25 bp, Homo sapien
gcagagctgggtcttagttgtgggt

SEQ ID NO: 5106067 - DNA, 25 bp, Homo sapien
agaatgctgtagaagtctgaatgac

SEQ ID NO: 5106068 - DNA, 25 bp, Homo sapien
tctgagaatgctgtagaagtctgaa

SEQ ID NO: 5106069 - DNA, 25 bp, Homo sapien
tcttgacaaggggttggaacctctg

SEQ ID NO: 5106070 - DNA, 25 bp, Homo sapien
tgcatcttgacaaggggttggaacc

SEQ ID NO: 5106071 - DNA, 25 bp, Homo sapien
tttctcatccgtagaccgattgaat

SEQ ID NO: 5106072 - DNA, 25 bp, Homo sapien
cgtagaccgattgaatctgaatgtc

SEQ ID NO: 5106073 - DNA, 25 bp, Homo sapien
catccgtagaccgattgaatctgaa

SEQ ID NO: 5106074 - DNA, 25 bp, Homo sapien
accgattgaatctgaatgtcacccc

SEQ ID NO: 5106075 - DNA, 25 bp, Homo sapien
ccccaactgtctcaacaaggacaat

SEQ ID NO: 5106076 - DNA, 25 bp, Homo sapien
ttggttggcatgcagcctgaaatat

SEQ ID NO: 5106077 - DNA, 25 bp, Homo sapien
ctgtctcaacaaggacaatttagca

SEQ ID NO: 5106078 - DNA, 25 bp, Homo sapien
gacaatttagcaacaaaaccagagg

SEQ ID NO: 5106079 - DNA, 25 bp, Homo sapien
aggatggagcagtacaacagtgacc

SEQ ID NO: 5106080 - DNA, 25 bp, Homo sapien
caggagaactagatgtgtgtggttc

SEQ ID NO: 5106081 - DNA, 25 bp, Homo sapien
tggagcagtacaacagtgaccagga

SEQ ID NO: 5106082 - DNA, 25 bp, Homo sapien
gatggagcagtacaacagtgaccag

SEQ ID NO: 5106083 - DNA, 25 bp, Homo sapien
ttttcttgttaatccccatcagctg

SEQ ID NO: 5106084 - DNA, 25 bp, Homo sapien
taaaggatcccttgtgaggctaaac

SEQ ID NO: 5106085 - DNA, 25 bp, Homo sapien
cttgtgaggctaaactgtgagggta

SEQ ID NO: 5106086 - DNA, 25 bp, Homo sapien
gctgggcattcttcttagcataaag

SEQ ID NO: 5106087 - DNA, 25 bp, Homo sapien
agaactctgtgcacttagaagccaa

SEQ ID NO: 5106088 - DNA, 25 bp, Homo sapien
gttttggcacattgttgtgagaact

SEQ ID NO: 5106089 - DNA, 25 bp, Homo sapien
gatgggaagggtggcggttttggca

SEQ ID NO: 5106090 - DNA, 25 bp, Homo sapien
ctgtgcacttagaagccaacaggtg

SEQ ID NO: 5106091 - DNA, 25 bp, Homo sapien
ttgatgttaactgccaaggtggtgt

SEQ ID NO: 5106092 - DNA, 25 bp, Homo sapien
gatgttaactgccaaggtggtgtgg

SEQ ID NO: 5106093 - DNA, 25 bp, Homo sapien
acagcaggaagtaatatctgatatg

SEQ ID NO: 5106094 - DNA, 25 bp, Homo sapien
gtggtgtggtcatagacagcaggaa

SEQ ID NO: 5106095 - DNA, 25 bp, Homo sapien
ggcccatgagatccatcacttaaaa

SEQ ID NO: 5106096 - DNA, 25 bp, Homo sapien
gaaggtggtgatcatacactgagag

SEQ ID NO: 5106097 - DNA, 25 bp, Homo sapien
ggacttccagctttgaggtacagct

SEQ ID NO: 5106098 - DNA, 25 bp, Homo sapien
catgtatgcacggaaaggctgccgc

SEQ ID NO: 5106099 - DNA, 25 bp, Homo sapien
tctccagtaggtgacattctgctca

SEQ ID NO: 5106100 - DNA, 25 bp, Homo sapien
acttctccagtaggtgacattctgc

SEQ ID NO: 5106101 - DNA, 25 bp, Homo sapien
ccttcacttctccagtaggtgacat

SEQ ID NO: 5106102 - DNA, 25 bp, Homo sapien
tcacttctccagtaggtgacattct

SEQ ID NO: 5106103 - DNA, 25 bp, Homo sapien
gagaattctgtgatacacctcaaag

SEQ ID NO: 5106104 - DNA, 25 bp, Homo sapien
gaactggtgacaatctgtcattgcc

SEQ ID NO: 5106105 - DNA, 25 bp, Homo sapien
tcagaaaatccccacactactggag

SEQ ID NO: 5106106 - DNA, 25 bp, Homo sapien
cttatcttcccagaaaatgctgtga

SEQ ID NO: 5106107 - DNA, 25 bp, Homo sapien
gctgccactgtctttaagtctagag

SEQ ID NO: 5106108 - DNA, 25 bp, Homo sapien
tctctcagatacctttggaaccagg

SEQ ID NO: 5106109 - DNA, 25 bp, Homo sapien
gaaccaggcagggtttgctacttaa

SEQ ID NO: 5106110 - DNA, 25 bp, Homo sapien
cttaagagaactggtggcatcaaac

SEQ ID NO: 5106111 - DNA, 25 bp, Homo sapien
gattcttggagaggtttgaccactc

SEQ ID NO: 5106112 - DNA, 25 bp, Homo sapien
gtttgaccactctaccttggctcca

SEQ ID NO: 5106113 - DNA, 25 bp, Homo sapien
tgctctggccttgcagattcttgga

SEQ ID NO: 5106114 - DNA, 25 bp, Homo sapien
tctggccttgcagattcttggagag

SEQ ID NO: 5106115 - DNA, 25 bp, Homo sapien
tacagagaaggaatatgctgctggg

SEQ ID NO: 5106116 - DNA, 25 bp, Homo sapien
aaatcaatatttttatgggccctcg

SEQ ID NO: 5106117 - DNA, 25 bp, Homo sapien
ccttttgaacgtgaccaataaatca

SEQ ID NO: 5106118 - DNA, 25 bp, Homo sapien
gccttgctgccttttgaacgtgacc

SEQ ID NO: 5106119 - DNA, 25 bp, Homo sapien
gaactttgactgcagtaacccctga

SEQ ID NO: 5106120 - DNA, 25 bp, Homo sapien
gacgtcccaccgcatctgctggtgt

SEQ ID NO: 5106121 - DNA, 25 bp, Homo sapien
cagacagccgtcacaggagaggatc

SEQ ID NO: 5106122 - DNA, 25 bp, Homo sapien
ttggcgtctgctgttgccagtccgg

SEQ ID NO: 5106123 - DNA, 25 bp, Homo sapien
ttcagtgctgccattagccaaggta

SEQ ID NO: 5106124 - DNA, 25 bp, Homo sapien
ccgcaggcattgagcctcaagagtg

SEQ ID NO: 5106125 - DNA, 25 bp, Homo sapien
ccctgcacattcataaatccggagc

SEQ ID NO: 5106126 - DNA, 25 bp, Homo sapien
cagtgctgtgccctactctaggaaa

SEQ ID NO: 5106127 - DNA, 25 bp, Homo sapien
cacagtgactttgtgactcccgccg

SEQ ID NO: 5106128 - DNA, 25 bp, Homo sapien
ggagagggcaaaaactgctgcgggc

SEQ ID NO: 5106129 - DNA, 25 bp, Homo sapien
aatcctcggcggctagagcggaaga

SEQ ID NO: 5106130 - DNA, 25 bp, Homo sapien
ttcggcgttgggacgcgaggcttcc

SEQ ID NO: 5106131 - DNA, 25 bp, Homo sapien
gagccagatgtgtacgagtcctccg

SEQ ID NO: 5106132 - DNA, 25 bp, Homo sapien
tcccctcccttgagtttcccatctc

SEQ ID NO: 5106133 - DNA, 25 bp, Homo sapien
cgggagccagatgtgtacgagtcct

SEQ ID NO: 5106134 - DNA, 25 bp, Homo sapien
agatgtgtacgagtcctccgctccc

SEQ ID NO: 5106135 - DNA, 25 bp, Homo sapien
gctccggactttccgggcagcccgc

SEQ ID NO: 5106136 - DNA, 25 bp, Homo sapien
tcgcccaggactcggaactgagaag

SEQ ID NO: 5106137 - DNA, 25 bp, Homo sapien
tgggggtgctccctcgcccaggact

SEQ ID NO: 5106138 - DNA, 25 bp, Homo sapien
cggctccgcgctccggactttccgg

SEQ ID NO: 5106139 - DNA, 25 bp, Homo sapien
ttcatctctgctatttaaaatcccg

SEQ ID NO: 5106140 - DNA, 25 bp, Homo sapien
ttgcagctgaaagggaaaacgacct

SEQ ID NO: 5106141 - DNA, 25 bp, Homo sapien
atctctgctatttaaaatcccggca

SEQ ID NO: 5106142 - DNA, 25 bp, Homo sapien
catctctgctatttaaaatcccggc

SEQ ID NO: 5106143 - DNA, 25 bp, Homo sapien
ccaccttgctctgccccatctaatg

SEQ ID NO: 5106144 - DNA, 25 bp, Homo sapien
cagaaggccaccttgctctgcccca

SEQ ID NO: 5106145 - DNA, 25 bp, Homo sapien
aaggccaccttgctctgccccatct

SEQ ID NO: 5106146 - DNA, 25 bp, Homo sapien
cagcagaaggccaccttgctctgcc

SEQ ID NO: 5106147 - DNA, 25 bp, Homo sapien
tctccaatagcctcgggatggtgcc

SEQ ID NO: 5106148 - DNA, 25 bp, Homo sapien
tcacagctctccaatagcctcggga

SEQ ID NO: 5106149 - DNA, 25 bp, Homo sapien
cctcgggatggtgccactgttatct

SEQ ID NO: 5106150 - DNA, 25 bp, Homo sapien
aatagcctcgggatggtgccactgt

SEQ ID NO: 5106151 - DNA, 25 bp, Homo sapien
aaactccagacacagcaccactgca

SEQ ID NO: 5106152 - DNA, 25 bp, Homo sapien
aactccagacacagcaccactgcac

SEQ ID NO: 5106153 - DNA, 25 bp, Homo sapien
caaactccagacacagcaccactgc

SEQ ID NO: 5106154 - DNA, 25 bp, Homo sapien
cccactatcattagacaaaggagtc

SEQ ID NO: 5106155 - DNA, 25 bp, Homo sapien
ttcccactatcattagacaaaggag

SEQ ID NO: 5106156 - DNA, 25 bp, Homo sapien
accttcccactatcattagacaaag

SEQ ID NO: 5106157 - DNA, 25 bp, Homo sapien
ctaaaaccttcccactatcattaga

SEQ ID NO: 5106158 - DNA, 25 bp, Homo sapien
tctatgtgactgtgaggactagcac

SEQ ID NO: 5106159 - DNA, 25 bp, Homo sapien
taatggtattaggtcagcctgtttc

SEQ ID NO: 5106160 - DNA, 25 bp, Homo sapien
catctctctggatgtcagatccgag

SEQ ID NO: 5106161 - DNA, 25 bp, Homo sapien
tgtttctcaaaagtgcttgcttgtg

SEQ ID NO: 5106162 - DNA, 25 bp, Homo sapien
tcccgagagaactcgggtgccctgg

SEQ ID NO: 5106163 - DNA, 25 bp, Homo sapien
ctgacaacctgctgatggagcagct

SEQ ID NO: 5106164 - DNA, 25 bp, Homo sapien
ggagcagctttgagcaagctttgct

SEQ ID NO: 5106165 - DNA, 25 bp, Homo sapien
tcatactagcaggtcagctcctcct

SEQ ID NO: 5106166 - DNA, 25 bp, Homo sapien
tgcagccagctgtcacaggatcagg

SEQ ID NO: 5106167 - DNA, 25 bp, Homo sapien
tgaaaggcttgctgtaccgaggccg

SEQ ID NO: 5106168 - DNA, 25 bp, Homo sapien
tggtgacatgcactaagccaaggcg

SEQ ID NO: 5106169 - DNA, 25 bp, Homo sapien
tttgtgggccacatcacaggcgagt

SEQ ID NO: 5106170 - DNA, 25 bp, Homo sapien
ggccaaccagtcctgcttcgagggc

SEQ ID NO: 5106171 - DNA, 25 bp, Homo sapien
ttgttttgcggccaaccagtcctgc

SEQ ID NO: 5106172 - DNA, 25 bp, Homo sapien
agtcctgcttcgagggccactctgt

SEQ ID NO: 5106173 - DNA, 25 bp, Homo sapien
atttctcttgttttgcggccaacca

SEQ ID NO: 5106174 - DNA, 25 bp, Homo sapien
tggggattcctgaaagtttaggaca

SEQ ID NO: 5106175 - DNA, 25 bp, Homo sapien
ctgaaagtttaggacaacctgggca

SEQ ID NO: 5106176 - DNA, 25 bp, Homo sapien
attcctgaaagtttaggacaacctg

SEQ ID NO: 5106177 - DNA, 25 bp, Homo sapien
ctgatagggggcaagatgtagggga

SEQ ID NO: 5106178 - DNA, 25 bp, Homo sapien
ggcaagatgtaggggagggatttca

SEQ ID NO: 5106179 - DNA, 25 bp, Homo sapien
tgatagggggcaagatgtaggggag

SEQ ID NO: 5106180 - DNA, 25 bp, Homo sapien
gggcaagatgtaggggagggatttc

SEQ ID NO: 5106181 - DNA, 25 bp, Homo sapien
actccaagagtgttggagcgatgtg

SEQ ID NO: 5106182 - DNA, 25 bp, Homo sapien
cccaactccaagagtgttggagcga

SEQ ID NO: 5106183 - DNA, 25 bp, Homo sapien
caactccaagagtgttggagcgatg

SEQ ID NO: 5106184 - DNA, 25 bp, Homo sapien
tccaagagtgttggagcgatgtgct

SEQ ID NO: 5106185 - DNA, 25 bp, Homo sapien
agaaagcattgcctacagcctgaaa

SEQ ID NO: 5106186 - DNA, 25 bp, Homo sapien
ctaggaagcagttgctatgacaaca

SEQ ID NO: 5106187 - DNA, 25 bp, Homo sapien
ctgaggagaaacctccactgaggct

SEQ ID NO: 5106188 - DNA, 25 bp, Homo sapien
tgaggctgacggttaagtctaggaa

SEQ ID NO: 5106189 - DNA, 25 bp, Homo sapien
tataaaggcttgaacctgtaaaagc

SEQ ID NO: 5106190 - DNA, 25 bp, Homo sapien
tgctcttgctttggtgttcttataa

SEQ ID NO: 5106191 - DNA, 25 bp, Homo sapien
ttgaacctgtaaaagccagacttcc

SEQ ID NO: 5106192 - DNA, 25 bp, Homo sapien
ctttggtgttcttataaaggcttga

SEQ ID NO: 5106193 - DNA, 25 bp, Homo sapien
ggtccagaaacttgccaacaggcca

SEQ ID NO: 5106194 - DNA, 25 bp, Homo sapien
tgggtccagaaacttgccaacaggc

SEQ ID NO: 5106195 - DNA, 25 bp, Homo sapien
ccagaaacttgccaacaggccaggg

SEQ ID NO: 5106196 - DNA, 25 bp, Homo sapien
agtgggtccagaaacttgccaacag

SEQ ID NO: 5106197 - DNA, 25 bp, Homo sapien
gaattggggccactgtcaaggatcc

SEQ ID NO: 5106198 - DNA, 25 bp, Homo sapien
caaggatcctggtcaacttgttgaa

SEQ ID NO: 5106199 - DNA, 25 bp, Homo sapien
cctcctggcatctgtataatgacca

SEQ ID NO: 5106200 - DNA, 25 bp, Homo sapien
tgtataatgaccacatggaattggg

SEQ ID NO: 5106201 - DNA, 25 bp, Homo sapien
aaccatgagctgaacttccagcatc

SEQ ID NO: 5106202 - DNA, 25 bp, Homo sapien
aagccatgaacagttagcctcacaa

SEQ ID NO: 5106203 - DNA, 25 bp, Homo sapien
tcacaagcagcaaccatgagctgaa

SEQ ID NO: 5106204 - DNA, 25 bp, Homo sapien
gaacagttagcctcacaagcagcaa

SEQ ID NO: 5106205 - DNA, 25 bp, Homo sapien
ggtccacaaactgagcaggtagcct

SEQ ID NO: 5106206 - DNA, 25 bp, Homo sapien
aggtccacaaactgagcaggtagcc

SEQ ID NO: 5106207 - DNA, 25 bp, Homo sapien
tccacaaactgagcaggtagcctcc

SEQ ID NO: 5106208 - DNA, 25 bp, Homo sapien
gtccacaaactgagcaggtagcctc

SEQ ID NO: 5106209 - DNA, 25 bp, Homo sapien
ttataaaacgtgctaaacaatagga

SEQ ID NO: 5106210 - DNA, 25 bp, Homo sapien
tcatttataaaacgtgctaaacaat

SEQ ID NO: 5106211 - DNA, 25 bp, Homo sapien
aaacaataggaaggaatgttgccag

SEQ ID NO: 5106212 - DNA, 25 bp, Homo sapien
aataggaaggaatgttgccagctcc

SEQ ID NO: 5106213 - DNA, 25 bp, Homo sapien
aggagagtaggtaaatcgtctgcag

SEQ ID NO: 5106214 - DNA, 25 bp, Homo sapien
ggtaaatcgtctgcagatgacagct

SEQ ID NO: 5106215 - DNA, 25 bp, Homo sapien
ttgattttgaggtggccaaaggaga

SEQ ID NO: 5106216 - DNA, 25 bp, Homo sapien
tcagtcaacgatgatgccggtcaga

SEQ ID NO: 5106217 - DNA, 25 bp, Homo sapien
cagggtacatgacctaaacgcccaa

SEQ ID NO: 5106218 - DNA, 25 bp, Homo sapien
ccccagtaagcatttctcattgaga

SEQ ID NO: 5106219 - DNA, 25 bp, Homo sapien
agagaaagcccagggactcgggtca

SEQ ID NO: 5106220 - DNA, 25 bp, Homo sapien
tggcccttcttaagggacagagcaa

SEQ ID NO: 5106221 - DNA, 25 bp, Homo sapien
actggaacatctgaatagggccact

SEQ ID NO: 5106222 - DNA, 25 bp, Homo sapien
ccagaatccatttgtcactggaaca

SEQ ID NO: 5106223 - DNA, 25 bp, Homo sapien
tgaatagggccacttggaagcagcc

SEQ ID NO: 5106224 - DNA, 25 bp, Homo sapien
ggaagcagccccatgacatattaac

SEQ ID NO: 5106225 - DNA, 25 bp, Homo sapien
tcttcagaaatctcctggtcagcca

SEQ ID NO: 5106226 - DNA, 25 bp, Homo sapien
gaatgattgaactctgatgaccaga

SEQ ID NO: 5106227 - DNA, 25 bp, Homo sapien
tcctgaggccagatgtggaggcttt

SEQ ID NO: 5106228 - DNA, 25 bp, Homo sapien
gctggtgtggttcaaagtgccatca

SEQ ID NO: 5106229 - DNA, 25 bp, Homo sapien
gggcggtaaaccaagcccacagctc

SEQ ID NO: 5106230 - DNA, 25 bp, Homo sapien
caggtcctgtttgggccacggcttc

SEQ ID NO: 5106231 - DNA, 25 bp, Homo sapien
gcaaagaagacgtgggatcagaacc

SEQ ID NO: 5106232 - DNA, 25 bp, Homo sapien
tattcgccgatatacagagcccctt

SEQ ID NO: 5106233 - DNA, 25 bp, Homo sapien
tttccagactatgctttacctccat

SEQ ID NO: 5106234 - DNA, 25 bp, Homo sapien
cctctttccagactatgctttacct

SEQ ID NO: 5106235 - DNA, 25 bp, Homo sapien
tctttccagactatgctttacctcc

SEQ ID NO: 5106236 - DNA, 25 bp, Homo sapien
tcctctttccagactatgctttacc

SEQ ID NO: 5106237 - DNA, 25 bp, Homo sapien
tcctgcttccgcaaggagaggctgc

SEQ ID NO: 5106238 - DNA, 25 bp, Homo sapien
tggagaccttgttcccgtgaagaca

SEQ ID NO: 5106239 - DNA, 25 bp, Homo sapien
gagaggctgcttattgtcccacatg

SEQ ID NO: 5106240 - DNA, 25 bp, Homo sapien
gttgcttccaggacgttagcttcca

SEQ ID NO: 5106241 - DNA, 25 bp, Homo sapien
agccggttccttgggccactgatag

SEQ ID NO: 5106242 - DNA, 25 bp, Homo sapien
gttccttgggccactgatagccacc

SEQ ID NO: 5106243 - DNA, 25 bp, Homo sapien
ccagccggttccttgggccactgat

SEQ ID NO: 5106244 - DNA, 25 bp, Homo sapien
tatccaccccatcccacgttttctc

SEQ ID NO: 5106245 - DNA, 25 bp, Homo sapien
gggtgactgtcatgccacctggccg

SEQ ID NO: 5106246 - DNA, 25 bp, Homo sapien
tattcaaaccagatacaactgcttc

SEQ ID NO: 5106247 - DNA, 25 bp, Homo sapien
ccacctggccgagagagctcagcag

SEQ ID NO: 5106248 - DNA, 25 bp, Homo sapien
tcaaaccagatacaactgcttccac

SEQ ID NO: 5106249 - DNA, 25 bp, Homo sapien
gataactaaaaactgcactgacgcc

SEQ ID NO: 5106250 - DNA, 25 bp, Homo sapien
caaatgcggtgcttaaggactcaac

SEQ ID NO: 5106251 - DNA, 25 bp, Homo sapien
taacagtttgggtagcctcatggca

SEQ ID NO: 5106252 - DNA, 25 bp, Homo sapien
tcttccacgggatgaaaccttgaga

SEQ ID NO: 5106253 - DNA, 25 bp, Homo sapien
cattcctgttatagctatgaccttg

SEQ ID NO: 5106254 - DNA, 25 bp, Homo sapien
cagcattcctgttatagctatgacc

SEQ ID NO: 5106255 - DNA, 25 bp, Homo sapien
ttatagctatgaccttgaacctcag

SEQ ID NO: 5106256 - DNA, 25 bp, Homo sapien
tcctgttatagctatgaccttgaac

SEQ ID NO: 5106257 - DNA, 25 bp, Homo sapien
taaggcaaagcacaacgagttggaa

SEQ ID NO: 5106258 - DNA, 25 bp, Homo sapien
tgaattctgacacatcaaaagcatt

SEQ ID NO: 5106259 - DNA, 25 bp, Homo sapien
gaaatactgtagaatattatcatga

SEQ ID NO: 5106260 - DNA, 25 bp, Homo sapien
gaatattatcatgaattccaagtat

SEQ ID NO: 5106261 - DNA, 25 bp, Homo sapien
tccattaagcaacacctgattgggt

SEQ ID NO: 5106262 - DNA, 25 bp, Homo sapien
taagcaacacctgattgggttattt

SEQ ID NO: 5106263 - DNA, 25 bp, Homo sapien
gattttaatgacagtagactccatt

SEQ ID NO: 5106264 - DNA, 25 bp, Homo sapien
cagtagactccattaagcaacacct

SEQ ID NO: 5106265 - DNA, 25 bp, Homo sapien
agtatttcaagtccaaggtagcagc

SEQ ID NO: 5106266 - DNA, 25 bp, Homo sapien
gcaaatttcgacacacagagcacat

SEQ ID NO: 5106267 - DNA, 25 bp, Homo sapien
cagcctgcgtgtacaagttatgccc

SEQ ID NO: 5106268 - DNA, 25 bp, Homo sapien
aattcacttgtgatctggctgggcc

SEQ ID NO: 5106269 - DNA, 25 bp, Homo sapien
gctgctaattactgtagtcacactt

SEQ ID NO: 5106270 - DNA, 25 bp, Homo sapien
tgtatgacgactgagctctgccctg

SEQ ID NO: 5106271 - DNA, 25 bp, Homo sapien
tcctgtggtggatacttgctgctaa

SEQ ID NO: 5106272 - DNA, 25 bp, Homo sapien
cacttcttaattcaacaagcgccag

SEQ ID NO: 5106273 - DNA, 25 bp, Homo sapien
atgtaaacttcaggcattcatattc

SEQ ID NO: 5106274 - DNA, 25 bp, Homo sapien
cttcaggcattcatattcatagaaa

SEQ ID NO: 5106275 - DNA, 25 bp, Homo sapien
ctatgtaaacttcaggcattcatat

SEQ ID NO: 5106276 - DNA, 25 bp, Homo sapien
aaacttcaggcattcatattcatag

SEQ ID NO: 5106277 - DNA, 25 bp, Homo sapien
tgttctttcggcaaacttctcaggc

SEQ ID NO: 5106278 - DNA, 25 bp, Homo sapien
tactccagagagttaacagaaccca

SEQ ID NO: 5106279 - DNA, 25 bp, Homo sapien
tcttgccttagataagtggctccca

SEQ ID NO: 5106280 - DNA, 25 bp, Homo sapien
ggatgttagcgattccactcactcc

SEQ ID NO: 5106281 - DNA, 25 bp, Homo sapien
taatgctgcaatcctctttgggaag

SEQ ID NO: 5106282 - DNA, 25 bp, Homo sapien
cagaatcagggcgaggaaacataca

SEQ ID NO: 5106283 - DNA, 25 bp, Homo sapien
cactttgtaaagaagcacacgtggg

SEQ ID NO: 5106284 - DNA, 25 bp, Homo sapien
caaggatcagcaaggatggttcatc

SEQ ID NO: 5106285 - DNA, 25 bp, Homo sapien
cctctatagatgtcccttgatggca

SEQ ID NO: 5106286 - DNA, 25 bp, Homo sapien
catcccagatagagagtagccagag

SEQ ID NO: 5106287 - DNA, 25 bp, Homo sapien
cacaaattccatcacaagtccctga

SEQ ID NO: 5106288 - DNA, 25 bp, Homo sapien
gagggactgtaaatccattcctaac

SEQ ID NO: 5106289 - DNA, 25 bp, Homo sapien
tccatttgcacttggtcccagaggg

SEQ ID NO: 5106290 - DNA, 25 bp, Homo sapien
cgcagttgacaacctcattggcaaa

SEQ ID NO: 5106291 - DNA, 25 bp, Homo sapien
cagagggccccacacttttaaatgc

SEQ ID NO: 5106292 - DNA, 25 bp, Homo sapien
actgtgctgctaggccccgcagttg

SEQ ID NO: 5106293 - DNA, 25 bp, Homo sapien
ccatggattctcatgagtcccagaa

SEQ ID NO: 5106294 - DNA, 25 bp, Homo sapien
tatctgcagcaatcattttcccctc

SEQ ID NO: 5106295 - DNA, 25 bp, Homo sapien
gattctcatgagtcccagaatatct

SEQ ID NO: 5106296 - DNA, 25 bp, Homo sapien
tcaatcctaacaggcctcatgcggc

SEQ ID NO: 5106297 - DNA, 25 bp, Homo sapien
tctaaagagattcacttgtacaagt

SEQ ID NO: 5106298 - DNA, 25 bp, Homo sapien
taaagagattcacttgtacaagtgt

SEQ ID NO: 5106299 - DNA, 25 bp, Homo sapien
ctaaagagattcacttgtacaagtg

SEQ ID NO: 5106300 - DNA, 25 bp, Homo sapien
aagagattcacttgtacaagtgtct

SEQ ID NO: 5106301 - DNA, 25 bp, Homo sapien
agtgctgctcagactgtgttccacg

SEQ ID NO: 5106302 - DNA, 25 bp, Homo sapien
cctgatttgatacggtgtgcagtgc

SEQ ID NO: 5106303 - DNA, 25 bp, Homo sapien
gatacggtgtgcagtgctgctcaga

SEQ ID NO: 5106304 - DNA, 25 bp, Homo sapien
tgctgctcagactgtgttccacgta

SEQ ID NO: 5106305 - DNA, 25 bp, Homo sapien
gaagattccactaagaacttgttga

SEQ ID NO: 5106306 - DNA, 25 bp, Homo sapien
tttccaaacatccaaccacattaca

SEQ ID NO: 5106307 - DNA, 25 bp, Homo sapien
aacatccaaccacattacattctaa

SEQ ID NO: 5106308 - DNA, 25 bp, Homo sapien
agaaatgagaagattccactaagaa

SEQ ID NO: 5106309 - DNA, 25 bp, Homo sapien
ctgtgttactagcacggcaggtgtt

SEQ ID NO: 5106310 - DNA, 25 bp, Homo sapien
tgagaatggggtccctggtctgcac

SEQ ID NO: 5106311 - DNA, 25 bp, Homo sapien
gtgttactagcacggcaggtgttga

SEQ ID NO: 5106312 - DNA, 25 bp, Homo sapien
tactagcacggcaggtgttgagaat

SEQ ID NO: 5106313 - DNA, 25 bp, Homo sapien
ctgacatcctggcatccatctgctc

SEQ ID NO: 5106314 - DNA, 25 bp, Homo sapien
tgacatcctggcatccatctgctct

SEQ ID NO: 5106315 - DNA, 25 bp, Homo sapien
cctgacatcctggcatccatctgct

SEQ ID NO: 5106316 - DNA, 25 bp, Homo sapien
ctctgagttacccaggccctgcact

SEQ ID NO: 5106317 - DNA, 25 bp, Homo sapien
tacaagagcaacatctgacaccagc

SEQ ID NO: 5106318 - DNA, 25 bp, Homo sapien
acaggctggcttcctacaagagcaa

SEQ ID NO: 5106319 - DNA, 25 bp, Homo sapien
gacacctggtgtctgctgtactgcc

SEQ ID NO: 5106320 - DNA, 25 bp, Homo sapien
ttagaagattaaggaagatttcagc

SEQ ID NO: 5106321 - DNA, 25 bp, Homo sapien
tagaagattaaggaagatttcagca

SEQ ID NO: 5106322 - DNA, 25 bp, Homo sapien
tttagaagattaaggaagatttcag

SEQ ID NO: 5106323 - DNA, 25 bp, Homo sapien
gtttagaagattaaggaagatttca

SEQ ID NO: 5106324 - DNA, 25 bp, Homo sapien
gaacttccatccgatgaagaacctg

SEQ ID NO: 5106325 - DNA, 25 bp, Homo sapien
acttccatccgatgaagaacctggg

SEQ ID NO: 5106326 - DNA, 25 bp, Homo sapien
tccgatgaagaacctgggcttcatt

SEQ ID NO: 5106327 - DNA, 25 bp, Homo sapien
accagagaacttccatccgatgaag

SEQ ID NO: 5106328 - DNA, 25 bp, Homo sapien
ggaagggagcgtatcccagtctcca

SEQ ID NO: 5106329 - DNA, 25 bp, Homo sapien
agatccctttcaggaccatcaataa

SEQ ID NO: 5106330 - DNA, 25 bp, Homo sapien
atcaataacatatcccaggccatca

SEQ ID NO: 5106331 - DNA, 25 bp, Homo sapien
gacctattcaaacgcagatcccttt

SEQ ID NO: 5106332 - DNA, 25 bp, Homo sapien
tataactgctcctcagagccctctc

SEQ ID NO: 5106333 - DNA, 25 bp, Homo sapien
actgctcctcagagccctctcgaac

SEQ ID NO: 5106334 - DNA, 25 bp, Homo sapien
ctataactgctcctcagagccctct

SEQ ID NO: 5106335 - DNA, 25 bp, Homo sapien
taactgctcctcagagccctctcga

SEQ ID NO: 5106336 - DNA, 25 bp, Homo sapien
ccccgatactggcagtgctgtttgc

SEQ ID NO: 5106337 - DNA, 25 bp, Homo sapien
cagagggatccatttaaaaagttct

SEQ ID NO: 5106338 - DNA, 25 bp, Homo sapien
taaaaagttctccccgatactggca

SEQ ID NO: 5106339 - DNA, 25 bp, Homo sapien
gttctccccgatactggcagtgctg

SEQ ID NO: 5106340 - DNA, 25 bp, Homo sapien
tggtatcaagagagcctcctttcca

SEQ ID NO: 5106341 - DNA, 25 bp, Homo sapien
ggtggatcctgaagcttggtatcaa

SEQ ID NO: 5106342 - DNA, 25 bp, Homo sapien
tgggtggatcctgaagcttggtatc

SEQ ID NO: 5106343 - DNA, 25 bp, Homo sapien
aagcttggtatcaagagagcctcct

SEQ ID NO: 5106344 - DNA, 25 bp, Homo sapien
gagtctgcacactgcaccgcacttg

SEQ ID NO: 5106345 - DNA, 25 bp, Homo sapien
catgacaggattctatggagtctgc

SEQ ID NO: 5106346 - DNA, 25 bp, Homo sapien
caggattctatggagtctgcacact

SEQ ID NO: 5106347 - DNA, 25 bp, Homo sapien
ggccatgacaggattctatggagtc

SEQ ID NO: 5106348 - DNA, 25 bp, Homo sapien
caaacctggtggaatgagcttccag

SEQ ID NO: 5106349 - DNA, 25 bp, Homo sapien
cctgaagtctgtgcggtaccagagg

SEQ ID NO: 5106350 - DNA, 25 bp, Homo sapien
taccagagggtactgccagaacgct

SEQ ID NO: 5106351 - DNA, 25 bp, Homo sapien
tgcggtaccagagggtactgccaga

SEQ ID NO: 5106352 - DNA, 25 bp, Homo sapien
aggagagagagaggacagaactcag

SEQ ID NO: 5106353 - DNA, 25 bp, Homo sapien
agagagagaggacagaactcaggct

SEQ ID NO: 5106354 - DNA, 25 bp, Homo sapien
gagagagagaggacagaactcaggc

SEQ ID NO: 5106355 - DNA, 25 bp, Homo sapien
gagagagaggacagaactcaggctt

SEQ ID NO: 5106356 - DNA, 25 bp, Homo sapien
tgcagagatactggtcatgctgctg

SEQ ID NO: 5106357 - DNA, 25 bp, Homo sapien
gcccctgcagagatactggtcatgc

SEQ ID NO: 5106358 - DNA, 25 bp, Homo sapien
cctgcagagatactggtcatgctgc

SEQ ID NO: 5106359 - DNA, 25 bp, Homo sapien
cagcccctgcagagatactggtcat

SEQ ID NO: 5106360 - DNA, 25 bp, Homo sapien
cttccatcctgccagaaccctggcc

SEQ ID NO: 5106361 - DNA, 25 bp, Homo sapien
ggatgtcttccatcctgccagaacc

SEQ ID NO: 5106362 - DNA, 25 bp, Homo sapien
ctggatgtcttccatcctgccagaa

SEQ ID NO: 5106363 - DNA, 25 bp, Homo sapien
gtcttccatcctgccagaaccctgg

SEQ ID NO: 5106364 - DNA, 25 bp, Homo sapien
agcttccgattcttggtatccagtc

SEQ ID NO: 5106365 - DNA, 25 bp, Homo sapien
gattcttggtatccagtctcctcac

SEQ ID NO: 5106366 - DNA, 25 bp, Homo sapien
gcttccgattcttggtatccagtct

SEQ ID NO: 5106367 - DNA, 25 bp, Homo sapien
tccgattcttggtatccagtctcct

SEQ ID NO: 5106368 - DNA, 25 bp, Homo sapien
caagatgggcattgtcgacttgcag

SEQ ID NO: 5106369 - DNA, 25 bp, Homo sapien
cattgtcgacttgcagaacgatgcg

SEQ ID NO: 5106370 - DNA, 25 bp, Homo sapien
agtcatcagcaagatgggcattgtc

SEQ ID NO: 5106371 - DNA, 25 bp, Homo sapien
tgggcattgtcgacttgcagaacga

SEQ ID NO: 5106372 - DNA, 25 bp, Homo sapien
cgctctccatagactggcgcatggc

SEQ ID NO: 5106373 - DNA, 25 bp, Homo sapien
ttccccttcttcgttcttcttcatg

SEQ ID NO: 5106374 - DNA, 25 bp, Homo sapien
ccccttcttcgttcttcttcatgaa

SEQ ID NO: 5106375 - DNA, 25 bp, Homo sapien
gtcgctctccatagactggcgcatg

SEQ ID NO: 5106376 - DNA, 25 bp, Homo sapien
tgcatggtgactactgtgatactct

SEQ ID NO: 5106377 - DNA, 25 bp, Homo sapien
atggtgactactgtgatactctcct

SEQ ID NO: 5106378 - DNA, 25 bp, Homo sapien
actgcatggtgactactgtgatact

SEQ ID NO: 5106379 - DNA, 25 bp, Homo sapien
catggtgactactgtgatactctcc

SEQ ID NO: 5106380 - DNA, 25 bp, Homo sapien
tgagcatcatctcagcagctccaac

SEQ ID NO: 5106381 - DNA, 25 bp, Homo sapien
ccaagcagctccatgagcatcatct

SEQ ID NO: 5106382 - DNA, 25 bp, Homo sapien
catgagcatcatctcagcagctcca

SEQ ID NO: 5106383 - DNA, 25 bp, Homo sapien
ctccaagcagctccatgagcatcat

SEQ ID NO: 5106384 - DNA, 25 bp, Homo sapien
agccttcagatttctcatggagtcc

SEQ ID NO: 5106385 - DNA, 25 bp, Homo sapien
ctagccttcagatttctcatggagt

SEQ ID NO: 5106386 - DNA, 25 bp, Homo sapien
cagatttctcatggagtccaggttg

SEQ ID NO: 5106387 - DNA, 25 bp, Homo sapien
gatttctcatggagtccaggttgat

SEQ ID NO: 5106388 - DNA, 25 bp, Homo sapien
cctgatgctcagcagggcctcgtac

SEQ ID NO: 5106389 - DNA, 25 bp, Homo sapien
gtgcagcaggatcctgttgaactgc

SEQ ID NO: 5106390 - DNA, 25 bp, Homo sapien
cagcaggatcctgttgaactgctcc

SEQ ID NO: 5106391 - DNA, 25 bp, Homo sapien
ctgatgctcagcagggcctcgtact

SEQ ID NO: 5106392 - DNA, 25 bp, Homo sapien
gtggcgatctcagcctccagcttga

SEQ ID NO: 5106393 - DNA, 25 bp, Homo sapien
atcttccagcaggtggtggtaggtg

SEQ ID NO: 5106394 - DNA, 25 bp, Homo sapien
cagcaggtggtggtaggtggcgatc

SEQ ID NO: 5106395 - DNA, 25 bp, Homo sapien
tggcgatctcagcctccagcttgac

SEQ ID NO: 5106396 - DNA, 25 bp, Homo sapien
ttttgcatagtttgcgtggagttga

SEQ ID NO: 5106397 - DNA, 25 bp, Homo sapien
tgcatagtttgcgtggagttgatgc

SEQ ID NO: 5106398 - DNA, 25 bp, Homo sapien
tttgcatagtttgcgtggagttgat

SEQ ID NO: 5106399 - DNA, 25 bp, Homo sapien
catagtttgcgtggagttgatgctg

SEQ ID NO: 5106400 - DNA, 25 bp, Homo sapien
aatagcacccttgatgggagaagaa

SEQ ID NO: 5106401 - DNA, 25 bp, Homo sapien
tgccaaatagcacccttgatgggag

SEQ ID NO: 5106402 - DNA, 25 bp, Homo sapien
ctctgttcaggtggtatgaggagca

SEQ ID NO: 5106403 - DNA, 25 bp, Homo sapien
aagctgccaaatagcacccttgatg

SEQ ID NO: 5106404 - DNA, 25 bp, Homo sapien
cctggatttgagactatgtactggt

SEQ ID NO: 5106405 - DNA, 25 bp, Homo sapien
tttgagactatgtactggtgttggg

SEQ ID NO: 5106406 - DNA, 25 bp, Homo sapien
aagtccacaatcactatgaggatgc

SEQ ID NO: 5106407 - DNA, 25 bp, Homo sapien
ttgagcccaaaagtccacaatcact

SEQ ID NO: 5106408 - DNA, 25 bp, Homo sapien
gatgccacatagtgaccatttttta

SEQ ID NO: 5106409 - DNA, 25 bp, Homo sapien
tgatgccacatagtgaccatttttt

SEQ ID NO: 5106410 - DNA, 25 bp, Homo sapien
ctttggaatagaggtctccttctga

SEQ ID NO: 5106411 - DNA, 25 bp, Homo sapien
tagacaaaccaacatcctatggcaa

SEQ ID NO: 5106412 - DNA, 25 bp, Homo sapien
gatgtctattctgtagccactccag

SEQ ID NO: 5106413 - DNA, 25 bp, Homo sapien
gcaatagtcacatagttacagcctt

SEQ ID NO: 5106414 - DNA, 25 bp, Homo sapien
ttcctggcttagctacatagagcat

SEQ ID NO: 5106415 - DNA, 25 bp, Homo sapien
atttcctggcttagctacatagagc

SEQ ID NO: 5106416 - DNA, 25 bp, Homo sapien
catttcctggcttagctacatagag

SEQ ID NO: 5106417 - DNA, 25 bp, Homo sapien
tttcctggcttagctacatagagca

SEQ ID NO: 5106418 - DNA, 25 bp, Homo sapien
caggaggtgccgaatttaataagtc

SEQ ID NO: 5106419 - DNA, 25 bp, Homo sapien
cattttgacactggtgtgaaacgaa

SEQ ID NO: 5106420 - DNA, 25 bp, Homo sapien
tcagccactgagtatcaggaggtgc

SEQ ID NO: 5106421 - DNA, 25 bp, Homo sapien
gaacagatcagcattctgaggaatg

SEQ ID NO: 5106422 - DNA, 25 bp, Homo sapien
ccataatttatcgatgtgacatcaa

SEQ ID NO: 5106423 - DNA, 25 bp, Homo sapien
cagaaactctcagaaaactaaccag

SEQ ID NO: 5106424 - DNA, 25 bp, Homo sapien
gccattgtaaacctttcccgcagaa

SEQ ID NO: 5106425 - DNA, 25 bp, Homo sapien
gaagaattctatgctgtgagatcac

SEQ ID NO: 5106426 - DNA, 25 bp, Homo sapien
tatagcaacctcgtgatgaagaaca

SEQ ID NO: 5106427 - DNA, 25 bp, Homo sapien
gaagctctcttgctgtacattcgag

SEQ ID NO: 5106428 - DNA, 25 bp, Homo sapien
tactgcatgccaaggaccatgcttg

SEQ ID NO: 5106429 - DNA, 25 bp, Homo sapien
gaacataccatctcgcaattcacag

SEQ ID NO: 5106430 - DNA, 25 bp, Homo sapien
gctttattctcaagcatctggttgc

SEQ ID NO: 5106431 - DNA, 25 bp, Homo sapien
ttgccattgacttataagaagccat

SEQ ID NO: 5106432 - DNA, 25 bp, Homo sapien
tctcaagcatctggttgccattgac

SEQ ID NO: 5106433 - DNA, 25 bp, Homo sapien
ggttgccattgacttataagaagcc

SEQ ID NO: 5106434 - DNA, 25 bp, Homo sapien
tactgactgacatgtttctaggttc

SEQ ID NO: 5106435 - DNA, 25 bp, Homo sapien
ggatgtttccctgggtaaatgccaa

SEQ ID NO: 5106436 - DNA, 25 bp, Homo sapien
cgccctgccacggtacacattagga

SEQ ID NO: 5106437 - DNA, 25 bp, Homo sapien
ttctaggttctttaccacgccctgc

SEQ ID NO: 5106438 - DNA, 25 bp, Homo sapien
aaatgagagccaaaccaagtggagg

SEQ ID NO: 5106439 - DNA, 25 bp, Homo sapien
gagccaaaccaagtggaggaggaag

SEQ ID NO: 5106440 - DNA, 25 bp, Homo sapien
ctgcttcctttcggttctaatttca

SEQ ID NO: 5106441 - DNA, 25 bp, Homo sapien
atctttggccacaactgctccctgc

SEQ ID NO: 5106442 - DNA, 25 bp, Homo sapien
aaggttttgcctgaacacagacgaa

SEQ ID NO: 5106443 - DNA, 25 bp, Homo sapien
ttaacaacataaaggttttgcctga

SEQ ID NO: 5106444 - DNA, 25 bp, Homo sapien
aaaggcataaatccctccagaactg

SEQ ID NO: 5106445 - DNA, 25 bp, Homo sapien
tcttgcatatcaccaaaaagccctt

SEQ ID NO: 5106446 - DNA, 25 bp, Homo sapien
ggcctgtgcattgcatgggtaagtg

SEQ ID NO: 5106447 - DNA, 25 bp, Homo sapien
tggtgccatcctttgggctcttgca

SEQ ID NO: 5106448 - DNA, 25 bp, Homo sapien
gcctgttttacccaacgaggcacac

SEQ ID NO: 5106449 - DNA, 25 bp, Homo sapien
tttacccaacgaggcacactagaag

SEQ ID NO: 5106450 - DNA, 25 bp, Homo sapien
cccaacgaggcacactagaagtacc

SEQ ID NO: 5106451 - DNA, 25 bp, Homo sapien
gaggcacactagaagtaccctggac

SEQ ID NO: 5106452 - DNA, 25 bp, Homo sapien
tagcaaactgctaatgactcttgtt

SEQ ID NO: 5106453 - DNA, 25 bp, Homo sapien
tattcttaaccacattagcaaactg

SEQ ID NO: 5106454 - DNA, 25 bp, Homo sapien
tttgataccaacattccaacctgca

SEQ ID NO: 5106455 - DNA, 25 bp, Homo sapien
catgacaacccagttcaaggccctg

SEQ ID NO: 5106456 - DNA, 25 bp, Homo sapien
cccaagggaattgagtggtaacatg

SEQ ID NO: 5106457 - DNA, 25 bp, Homo sapien
aacatggagagcatgaccgtttatt

SEQ ID NO: 5106458 - DNA, 25 bp, Homo sapien
tatttggcttaaggaacacattaat

SEQ ID NO: 5106459 - DNA, 25 bp, Homo sapien
tctgacaaatgacagtggggttgat

SEQ ID NO: 5106460 - DNA, 25 bp, Homo sapien
atgtcttcccatgtcatctcctgaa

SEQ ID NO: 5106461 - DNA, 25 bp, Homo sapien
gaagggacacaaagcttccatgtct

SEQ ID NO: 5106462 - DNA, 25 bp, Homo sapien
caaggtatatgggaagggacacaaa

SEQ ID NO: 5106463 - DNA, 25 bp, Homo sapien
tagccttctaccacctcaatgtgtt

SEQ ID NO: 5106464 - DNA, 25 bp, Homo sapien
cccacattctgctggatgttgagag

SEQ ID NO: 5106465 - DNA, 25 bp, Homo sapien
attcccacattctgctggatgttga

SEQ ID NO: 5106466 - DNA, 25 bp, Homo sapien
acattctgctggatgttgagaggca

SEQ ID NO: 5106467 - DNA, 25 bp, Homo sapien
attctgctggatgttgagaggcacg

SEQ ID NO: 5106468 - DNA, 25 bp, Homo sapien
tgaagattagcaccaaaacaggaac

SEQ ID NO: 5106469 - DNA, 25 bp, Homo sapien
gtagggtagtcagacaccagtcata

SEQ ID NO: 5106470 - DNA, 25 bp, Homo sapien
tctctagtaccagtagggtagtcag

SEQ ID NO: 5106471 - DNA, 25 bp, Homo sapien
ccagtcataggcatacagaaaaata

SEQ ID NO: 5106472 - DNA, 25 bp, Homo sapien
gtgtcagcatgtctagaacaatgac

SEQ ID NO: 5106473 - DNA, 25 bp, Homo sapien
tacctatgaaggaaccagaactcta

SEQ ID NO: 5106474 - DNA, 25 bp, Homo sapien
ccaataagctgttctgggctcagca

SEQ ID NO: 5106475 - DNA, 25 bp, Homo sapien
gcatcatagttggtggctgctcaca

SEQ ID NO: 5106476 - DNA, 25 bp, Homo sapien
gaagctacctagatgttcagaggga

SEQ ID NO: 5106477 - DNA, 25 bp, Homo sapien
atgagtaactgaagacctatcaagg

SEQ ID NO: 5106478 - DNA, 25 bp, Homo sapien
taactgaagacctatcaaggcatag

SEQ ID NO: 5106479 - DNA, 25 bp, Homo sapien
gagtaactgaagacctatcaaggca

SEQ ID NO: 5106480 - DNA, 25 bp, Homo sapien
actgaagacctatcaaggcatagat

SEQ ID NO: 5106481 - DNA, 25 bp, Homo sapien
tctcatggtactacttagatgtaaa

SEQ ID NO: 5106482 - DNA, 25 bp, Homo sapien
caaagtgaaacatctcacttccaaa

SEQ ID NO: 5106483 - DNA, 25 bp, Homo sapien
cttggttccaaagtgaaacatctca

SEQ ID NO: 5106484 - DNA, 25 bp, Homo sapien
tctttggcatgatccagtctcatgg

SEQ ID NO: 5106485 - DNA, 25 bp, Homo sapien
tacatagaagacagtgccatttgaa

SEQ ID NO: 5106486 - DNA, 25 bp, Homo sapien
tagaagacagtgccatttgaatatg

SEQ ID NO: 5106487 - DNA, 25 bp, Homo sapien
catagaagacagtgccatttgaata

SEQ ID NO: 5106488 - DNA, 25 bp, Homo sapien
ctacatagaagacagtgccatttga

SEQ ID NO: 5106489 - DNA, 25 bp, Homo sapien
gacataagcctcttcaattgtgaat

SEQ ID NO: 5106490 - DNA, 25 bp, Homo sapien
ctaagggactgacataagcctcttc

SEQ ID NO: 5106491 - DNA, 25 bp, Homo sapien
cagcaaatctttgataccagacctc

SEQ ID NO: 5106492 - DNA, 25 bp, Homo sapien
gcaaatctttgataccagacctctc

SEQ ID NO: 5106493 - DNA, 25 bp, Homo sapien
taaggcttgacacatctagtgtggg

SEQ ID NO: 5106494 - DNA, 25 bp, Homo sapien
aaaactaaggcttgacacatctagt

SEQ ID NO: 5106495 - DNA, 25 bp, Homo sapien
actaaggcttgacacatctagtgtg

SEQ ID NO: 5106496 - DNA, 25 bp, Homo sapien
cacatctagtgtgggggtgacaccc

SEQ ID NO: 5106497 - DNA, 25 bp, Homo sapien
ctgtgatatgtcttaggattcttga

SEQ ID NO: 5106498 - DNA, 25 bp, Homo sapien
tgttctccacggaatctgtgatatg

SEQ ID NO: 5106499 - DNA, 25 bp, Homo sapien
tcagatgttctccacggaatctgtg

SEQ ID NO: 5106500 - DNA, 25 bp, Homo sapien
cacggaatctgtgatatgtcttagg

SEQ ID NO: 5106501 - DNA, 25 bp, Homo sapien
gtgccgccatgagatgagaggccat

SEQ ID NO: 5106502 - DNA, 25 bp, Homo sapien
tgtgccgccatgagatgagaggcca

SEQ ID NO: 5106503 - DNA, 25 bp, Homo sapien
ctgtgccgccatgagatgagaggcc

SEQ ID NO: 5106504 - DNA, 25 bp, Homo sapien
aaagtctgagtctatccaaacaagc

SEQ ID NO: 5106505 - DNA, 25 bp, Homo sapien
tatggctgccatgagatcctctaca

SEQ ID NO: 5106506 - DNA, 25 bp, Homo sapien
tcaagagtgataggccttaaaaacc

SEQ ID NO: 5106507 - DNA, 25 bp, Homo sapien
gtccttaacattggctgctgggaaa

SEQ ID NO: 5106508 - DNA, 25 bp, Homo sapien
gtcataattcttggttgcacaattt

SEQ ID NO: 5106509 - DNA, 25 bp, Homo sapien
taggtcataattcttggttgcacaa

SEQ ID NO: 5106510 - DNA, 25 bp, Homo sapien
gatgcttatttacctttatggaagg

SEQ ID NO: 5106511 - DNA, 25 bp, Homo sapien
tattctaatatcagtaggtcataat

SEQ ID NO: 5106512 - DNA, 25 bp, Homo sapien
tctgacgcttttgaagaccttcgct

SEQ ID NO: 5106513 - DNA, 25 bp, Homo sapien
agtttcccaggccatggtgtaaggc

SEQ ID NO: 5106514 - DNA, 25 bp, Homo sapien
tggtgtaaggccaaattgtatcagc

SEQ ID NO: 5106515 - DNA, 25 bp, Homo sapien
gctaaaaattgtctgccttttgcag

SEQ ID NO: 5106516 - DNA, 25 bp, Homo sapien
cagattgtgagagggaattatcacc

SEQ ID NO: 5106517 - DNA, 25 bp, Homo sapien
gagagggaattatcaccaaaccaaa

SEQ ID NO: 5106518 - DNA, 25 bp, Homo sapien
ctgcagattgtgagagggaattatc

SEQ ID NO: 5106519 - DNA, 25 bp, Homo sapien
tgtgagagggaattatcaccaaacc

SEQ ID NO: 5106520 - DNA, 25 bp, Homo sapien
gagtcagagcccagtaaattaaata

SEQ ID NO: 5106521 - DNA, 25 bp, Homo sapien
gttctgaacaccgtagcccatagca

SEQ ID NO: 5106522 - DNA, 25 bp, Homo sapien
acttacccggaagcccatgaaacag

SEQ ID NO: 5106523 - DNA, 25 bp, Homo sapien
gcatttagcgccctctgcagagtca

SEQ ID NO: 5106524 - DNA, 25 bp, Homo sapien
tatatactcttgttttgcaaaaggc

SEQ ID NO: 5106525 - DNA, 25 bp, Homo sapien
gaatgtaactgctgggctccggtga

SEQ ID NO: 5106526 - DNA, 25 bp, Homo sapien
cagggttgccgtaggaatatagcca

SEQ ID NO: 5106527 - DNA, 25 bp, Homo sapien
gctccggtgagagtgcgtatatact

SEQ ID NO: 5106528 - DNA, 25 bp, Homo sapien
cacaaggtgttcccagttaccctag

SEQ ID NO: 5106529 - DNA, 25 bp, Homo sapien
tacatagaaccttgtcacatctctc

SEQ ID NO: 5106530 - DNA, 25 bp, Homo sapien
cagttaccctagtccaggcacttct

SEQ ID NO: 5106531 - DNA, 25 bp, Homo sapien
cctcttttagctcttacagtggtac

SEQ ID NO: 5106532 - DNA, 25 bp, Homo sapien
ccaggcctgggtttcatttagctct

SEQ ID NO: 5106533 - DNA, 25 bp, Homo sapien
cctttggtttcaagcagtaagccta

SEQ ID NO: 5106534 - DNA, 25 bp, Homo sapien
tagtcccggttggagcctaattctc

SEQ ID NO: 5106535 - DNA, 25 bp, Homo sapien
taggtcaaagcatagacttcctctg

SEQ ID NO: 5106536 - DNA, 25 bp, Homo sapien
ctgaaggtagatgctttgtcactac

SEQ ID NO: 5106537 - DNA, 25 bp, Homo sapien
gtcactactagtcaataaattcatt

SEQ ID NO: 5106538 - DNA, 25 bp, Homo sapien
cttcaccactgactgtaagttgcct

SEQ ID NO: 5106539 - DNA, 25 bp, Homo sapien
tgactgtaagttgcctgaaggtaga

SEQ ID NO: 5106540 - DNA, 25 bp, Homo sapien
ctagagctgaacacattgagatggc

SEQ ID NO: 5106541 - DNA, 25 bp, Homo sapien
tggcagccagtcaagcaacctagag

SEQ ID NO: 5106542 - DNA, 25 bp, Homo sapien
gctgcttctacatggcaataagggc

SEQ ID NO: 5106543 - DNA, 25 bp, Homo sapien
gccaggagcaacagggaagatatgt

SEQ ID NO: 5106544 - DNA, 25 bp, Homo sapien
aaaggatgggcttagctcctgtcgc

SEQ ID NO: 5106545 - DNA, 25 bp, Homo sapien
caaaaaggatgggcttagctcctgt

SEQ ID NO: 5106546 - DNA, 25 bp, Homo sapien
gaaccaaaaaggatgggcttagctc

SEQ ID NO: 5106547 - DNA, 25 bp, Homo sapien
accaaaaaggatgggcttagctcct

SEQ ID NO: 5106548 - DNA, 25 bp, Homo sapien
ttttttctgcataagccactgagaa

SEQ ID NO: 5106549 - DNA, 25 bp, Homo sapien
tttttctgcataagccactgagaac

SEQ ID NO: 5106550 - DNA, 25 bp, Homo sapien
tcccagccgtgtctatagatgagta

SEQ ID NO: 5106551 - DNA, 25 bp, Homo sapien
agtgcattcccagccgtgtctatag

SEQ ID NO: 5106552 - DNA, 25 bp, Homo sapien
gcattcccagccgtgtctatagatg

SEQ ID NO: 5106553 - DNA, 25 bp, Homo sapien
agtgcatttccatctgcccttcctt

SEQ ID NO: 5106554 - DNA, 25 bp, Homo sapien
gccagtgtagcagccctcagattag

SEQ ID NO: 5106555 - DNA, 25 bp, Homo sapien
taatatgggactcatcatttgatga

SEQ ID NO: 5106556 - DNA, 25 bp, Homo sapien
aatttgcatgtcgatcggcagccag

SEQ ID NO: 5106557 - DNA, 25 bp, Homo sapien
gacttcccttagaactaatatggga

SEQ ID NO: 5106558 - DNA, 25 bp, Homo sapien
aatgacttgatctaagaggacttgt

SEQ ID NO: 5106559 - DNA, 25 bp, Homo sapien
cctctgaatgacttgatctaagagg

SEQ ID NO: 5106560 - DNA, 25 bp, Homo sapien
ctgaatgacttgatctaagaggact

SEQ ID NO: 5106561 - DNA, 25 bp, Homo sapien
tctgaatgacttgatctaagaggac

SEQ ID NO: 5106562 - DNA, 25 bp, Homo sapien
gcaacagagatggattggagcccac

SEQ ID NO: 5106563 - DNA, 25 bp, Homo sapien
atggcaacagagatggattggagcc

SEQ ID NO: 5106564 - DNA, 25 bp, Homo sapien
ccatggcaacagagatggattggag

SEQ ID NO: 5106565 - DNA, 25 bp, Homo sapien
ggcaacagagatggattggagccca

SEQ ID NO: 5106566 - DNA, 25 bp, Homo sapien
caacaatcttggcattcaatgccat

SEQ ID NO: 5106567 - DNA, 25 bp, Homo sapien
atccaacaatcttggcattcaatgc

SEQ ID NO: 5106568 - DNA, 25 bp, Homo sapien
tccaacaatcttggcattcaatgcc

SEQ ID NO: 5106569 - DNA, 25 bp, Homo sapien
catccaacaatcttggcattcaatg

SEQ ID NO: 5106570 - DNA, 25 bp, Homo sapien
gaggaaatgcttgccattcaggtct

SEQ ID NO: 5106571 - DNA, 25 bp, Homo sapien
ggaggaaatgcttgccattcaggtc

SEQ ID NO: 5106572 - DNA, 25 bp, Homo sapien
gggaggaaatgcttgccattcaggt

SEQ ID NO: 5106573 - DNA, 25 bp, Homo sapien
agggaggaaatgcttgccattcagg

SEQ ID NO: 5106574 - DNA, 25 bp, Homo sapien
aaagccttcatatgggtcacccgga

SEQ ID NO: 5106575 - DNA, 25 bp, Homo sapien
tgagcaccagcacaaggactgcctt

SEQ ID NO: 5106576 - DNA, 25 bp, Homo sapien
caggacatgcatatgccacaaggca

SEQ ID NO: 5106577 - DNA, 25 bp, Homo sapien
aaggcctgcatcttgacacatggca

SEQ ID NO: 5106578 - DNA, 25 bp, Homo sapien
tcagtggcgaggagcttcagttaca

SEQ ID NO: 5106579 - DNA, 25 bp, Homo sapien
tatttgcaccctagaagcaaacggg

SEQ ID NO: 5106580 - DNA, 25 bp, Homo sapien
tccagcatgctgtaagttgagaccc

SEQ ID NO: 5106581 - DNA, 25 bp, Homo sapien
taagctctagaaggttgggcccatt

SEQ ID NO: 5106582 - DNA, 25 bp, Homo sapien
gtatacctctgattccacgtttcca

SEQ ID NO: 5106583 - DNA, 25 bp, Homo sapien
gagatgtcagtatacctctgattcc

SEQ ID NO: 5106584 - DNA, 25 bp, Homo sapien
cccttcacacatcccaatatctttg

SEQ ID NO: 5106585 - DNA, 25 bp, Homo sapien
tgtgtgagatgtcagtatacctctg

SEQ ID NO: 5106586 - DNA, 25 bp, Homo sapien
caagctcaatcacagctcttagaga

SEQ ID NO: 5106587 - DNA, 25 bp, Homo sapien
aagctcaatcacagctcttagagaa

SEQ ID NO: 5106588 - DNA, 25 bp, Homo sapien
gatctttaccatctagctgagagga

SEQ ID NO: 5106589 - DNA, 25 bp, Homo sapien
ccagaaacaaagtaggacacccact

SEQ ID NO: 5106590 - DNA, 25 bp, Homo sapien
gatgtttccctttaacactaatgta

SEQ ID NO: 5106591 - DNA, 25 bp, Homo sapien
tggtggcctatctcccagcgaatca

SEQ ID NO: 5106592 - DNA, 25 bp, Homo sapien
cactgttttgaacatgtttagatgt

SEQ ID NO: 5106593 - DNA, 25 bp, Homo sapien
cattgctcaagggtaaagtgaaaga

SEQ ID NO: 5106594 - DNA, 25 bp, Homo sapien
gaacatgtttagatgtcttgttacc

SEQ ID NO: 5106595 - DNA, 25 bp, Homo sapien
aaaatgatgtctgccagttcacagt

SEQ ID NO: 5106596 - DNA, 25 bp, Homo sapien
cttccctcttttaagtctgtccttg

SEQ ID NO: 5106597 - DNA, 25 bp, Homo sapien
atattcccttcatctgtgaaacact

SEQ ID NO: 5106598 - DNA, 25 bp, Homo sapien
aagtctgtccttgatattcccttca

SEQ ID NO: 5106599 - DNA, 25 bp, Homo sapien
ctggcttcaaacaatagtcttcttc

SEQ ID NO: 5106600 - DNA, 25 bp, Homo sapien
tagttagcccgggtctcttgacgat

SEQ ID NO: 5106601 - DNA, 25 bp, Homo sapien
gctcccagagggatttagttagccc

SEQ ID NO: 5106602 - DNA, 25 bp, Homo sapien
gactacagaataatcagggcagcca

SEQ ID NO: 5106603 - DNA, 25 bp, Homo sapien
tgggcctacaggtccaaaggagaat

SEQ ID NO: 5106604 - DNA, 25 bp, Homo sapien
ttcacagggccctccaatctcactg

SEQ ID NO: 5106605 - DNA, 25 bp, Homo sapien
tttgtgccctttcacagggccctcc

SEQ ID NO: 5106606 - DNA, 25 bp, Homo sapien
tctggtaatgtcttaggcacatcat

SEQ ID NO: 5106607 - DNA, 25 bp, Homo sapien
ggtaatgtcttaggcacatcataaa

SEQ ID NO: 5106608 - DNA, 25 bp, Homo sapien
tgagtccatccagctacatatccct

SEQ ID NO: 5106609 - DNA, 25 bp, Homo sapien
ggctttattccccaagggctgctga

SEQ ID NO: 5106610 - DNA, 25 bp, Homo sapien
tgtgtgttctcacctacgtggactt

SEQ ID NO: 5106611 - DNA, 25 bp, Homo sapien
cctacgtggacttcattcccaggac

SEQ ID NO: 5106612 - DNA, 25 bp, Homo sapien
ttctgtcattgtactcatcatttcc

SEQ ID NO: 5106613 - DNA, 25 bp, Homo sapien
aaggaaggggaaaagcacaagagat

SEQ ID NO: 5106614 - DNA, 25 bp, Homo sapien
tagaaggaaggggaaaagcacaaga

SEQ ID NO: 5106615 - DNA, 25 bp, Homo sapien
gaaggaaggggaaaagcacaagaga

SEQ ID NO: 5106616 - DNA, 25 bp, Homo sapien
ctgtagaaggaaggggaaaagcaca

SEQ ID NO: 5106617 - DNA, 25 bp, Homo sapien
ccctgaagccctcaagttgataaat

SEQ ID NO: 5106618 - DNA, 25 bp, Homo sapien
tccctgaagccctcaagttgataaa

SEQ ID NO: 5106619 - DNA, 25 bp, Homo sapien
caaacatatctaaaggcaagtcaca

SEQ ID NO: 5106620 - DNA, 25 bp, Homo sapien
ctgtgcaaacatatctaaaggcaag

SEQ ID NO: 5106621 - DNA, 25 bp, Homo sapien
aacatatctaaaggcaagtcacatc

SEQ ID NO: 5106622 - DNA, 25 bp, Homo sapien
gtgcaaacatatctaaaggcaagtc

SEQ ID NO: 5106623 - DNA, 25 bp, Homo sapien
aggctgtgggttgatcttcttggac

SEQ ID NO: 5106624 - DNA, 25 bp, Homo sapien
tagttgaaggtccactgggattgac

SEQ ID NO: 5106625 - DNA, 25 bp, Homo sapien
ggctgtgggttgatcttcttggacc

SEQ ID NO: 5106626 - DNA, 25 bp, Homo sapien
tgccagtagttgaaggtccactggg

SEQ ID NO: 5106627 - DNA, 25 bp, Homo sapien
taaaaagcagttattctctcgctca

SEQ ID NO: 5106628 - DNA, 25 bp, Homo sapien
aaaaagcagttattctctcgctcac

SEQ ID NO: 5106629 - DNA, 25 bp, Homo sapien
ttaaaaagcagttattctctcgctc

SEQ ID NO: 5106630 - DNA, 25 bp, Homo sapien
tcacacgtgggggatatttcccaca

SEQ ID NO: 5106631 - DNA, 25 bp, Homo sapien
gccatgctaggacccttggtagcaa

SEQ ID NO: 5106632 - DNA, 25 bp, Homo sapien
ccacattgccatgctaggacccttg

SEQ ID NO: 5106633 - DNA, 25 bp, Homo sapien
ccttggtagcaagttcagcattctt

SEQ ID NO: 5106634 - DNA, 25 bp, Homo sapien
gggtctccgagctctgtgaagtgac

SEQ ID NO: 5106635 - DNA, 25 bp, Homo sapien
tgtggcacagcttgcctctcatgca

SEQ ID NO: 5106636 - DNA, 25 bp, Homo sapien
gattgctgaggttaacaacatgggc

SEQ ID NO: 5106637 - DNA, 25 bp, Homo sapien
taagaggcttctaattagtataatt

SEQ ID NO: 5106638 - DNA, 25 bp, Homo sapien
ccaggcagtctgtcctatgatccat

SEQ ID NO: 5106639 - DNA, 25 bp, Homo sapien
caccaggcagtctgtcctatgatcc

SEQ ID NO: 5106640 - DNA, 25 bp, Homo sapien
accaggcagtctgtcctatgatcca

SEQ ID NO: 5106641 - DNA, 25 bp, Homo sapien
gagtgtccaactgtgctcagttccc

SEQ ID NO: 5106642 - DNA, 25 bp, Homo sapien
tgacccatagagtgtccaactgtgc

SEQ ID NO: 5106643 - DNA, 25 bp, Homo sapien
catagagtgtccaactgtgctcagt

SEQ ID NO: 5106644 - DNA, 25 bp, Homo sapien
gagcatgacccatagagtgtccaac

SEQ ID NO: 5106645 - DNA, 25 bp, Homo sapien
agaagtcatttcgcatttcttcttc

SEQ ID NO: 5106646 - DNA, 25 bp, Homo sapien
gaagtcatttcgcatttcttcttcc

SEQ ID NO: 5106647 - DNA, 25 bp, Homo sapien
tcaaaccaaaccacaactgcagaag

SEQ ID NO: 5106648 - DNA, 25 bp, Homo sapien
aattcaaaccaaaccacaactgcag

SEQ ID NO: 5106649 - DNA, 25 bp, Homo sapien
ctgcagaagttccaagacacctctg

SEQ ID NO: 5106650 - DNA, 25 bp, Homo sapien
tgatgttaattttcagcctgtgcct

SEQ ID NO: 5106651 - DNA, 25 bp, Homo sapien
cagggaggtgcggtcttcttcattg

SEQ ID NO: 5106652 - DNA, 25 bp, Homo sapien
gagtgggacagtcttttcagaggca

SEQ ID NO: 5106653 - DNA, 25 bp, Homo sapien
cagaggcaatcctgttagagaagcc

SEQ ID NO: 5106654 - DNA, 25 bp, Homo sapien
ccagctgtggctaacagaggcgtta

SEQ ID NO: 5106655 - DNA, 25 bp, Homo sapien
ggaccatccagagaaacacgcttga

SEQ ID NO: 5106656 - DNA, 25 bp, Homo sapien
gaaacacgcttgatactgtttctgc

SEQ ID NO: 5106657 - DNA, 25 bp, Homo sapien
cattgtttttgcacggaccatccag

SEQ ID NO: 5106658 - DNA, 25 bp, Homo sapien
tcagtctccacttggaattccattg

SEQ ID NO: 5106659 - DNA, 25 bp, Homo sapien
gtaaccaatactcctgtgtttctgc

SEQ ID NO: 5106660 - DNA, 25 bp, Homo sapien
tttggtctaaactgatcagtcatgg

SEQ ID NO: 5106661 - DNA, 25 bp, Homo sapien
caaaccacagatgataagattggct

SEQ ID NO: 5106662 - DNA, 25 bp, Homo sapien
tcagtcatggttcccaaagtcactg

SEQ ID NO: 5106663 - DNA, 25 bp, Homo sapien
caggacatgggccacatttctccag

SEQ ID NO: 5106664 - DNA, 25 bp, Homo sapien
gtcagattaacaggacatgggccac

SEQ ID NO: 5106665 - DNA, 25 bp, Homo sapien
catgggccacatttctccagctgga

SEQ ID NO: 5106666 - DNA, 25 bp, Homo sapien
gattaacaggacatgggccacattt

SEQ ID NO: 5106667 - DNA, 25 bp, Homo sapien
ttcatttcaaaggaatgccttggcc

SEQ ID NO: 5106668 - DNA, 25 bp, Homo sapien
tcatttcaaaggaatgccttggcca

SEQ ID NO: 5106669 - DNA, 25 bp, Homo sapien
caggcttgaggagttaggatcggca

SEQ ID NO: 5106670 - DNA, 25 bp, Homo sapien
cctataagccgtgtgcatctaagaa

SEQ ID NO: 5106671 - DNA, 25 bp, Homo sapien
ggcatggtcgggctgctccctataa

SEQ ID NO: 5106672 - DNA, 25 bp, Homo sapien
ctaagaacctcttgagggtagtgac

SEQ ID NO: 5106673 - DNA, 25 bp, Homo sapien
cattcaataaaatccttgagcttca

SEQ ID NO: 5106674 - DNA, 25 bp, Homo sapien
gccacattcaataaaatccttgagc

SEQ ID NO: 5106675 - DNA, 25 bp, Homo sapien
ttcaataaaatccttgagcttcaaa

SEQ ID NO: 5106676 - DNA, 25 bp, Homo sapien
atgatgactgccacattcaataaaa

SEQ ID NO: 5106677 - DNA, 25 bp, Homo sapien
ggttctgattttaagcaccaggagc

SEQ ID NO: 5106678 - DNA, 25 bp, Homo sapien
aaatggttctgattttaagcaccag

SEQ ID NO: 5106679 - DNA, 25 bp, Homo sapien
tggttctgattttaagcaccaggag

SEQ ID NO: 5106680 - DNA, 25 bp, Homo sapien
aatggttctgattttaagcaccagg

SEQ ID NO: 5106681 - DNA, 25 bp, Homo sapien
tacttagaattgaccaactccccag

SEQ ID NO: 5106682 - DNA, 25 bp, Homo sapien
tgtacagtgtgtaaatctgccttta

SEQ ID NO: 5106683 - DNA, 25 bp, Homo sapien
gagctgtacagtgtgtaaatctgcc

SEQ ID NO: 5106684 - DNA, 25 bp, Homo sapien
gattggtacagtatttttgcatctg

SEQ ID NO: 5106685 - DNA, 25 bp, Homo sapien
acacagtttgtgtggcttccttggg

SEQ ID NO: 5106686 - DNA, 25 bp, Homo sapien
ctacacagtttgtgtggcttccttg

SEQ ID NO: 5106687 - DNA, 25 bp, Homo sapien
gagagatgggagctggtagataaat

SEQ ID NO: 5106688 - DNA, 25 bp, Homo sapien
gggaagaatttggtccatgagagat

SEQ ID NO: 5106689 - DNA, 25 bp, Homo sapien
cacccatttcaaggaatgatgccga

SEQ ID NO: 5106690 - DNA, 25 bp, Homo sapien
tcaaggaatgatgccgaccactagg

SEQ ID NO: 5106691 - DNA, 25 bp, Homo sapien
tatgactttggcgttcacccatttc

SEQ ID NO: 5106692 - DNA, 25 bp, Homo sapien
gaccactaggattcttattaagaac

SEQ ID NO: 5106693 - DNA, 25 bp, Homo sapien
tctcatctgatcaagcacattggag

SEQ ID NO: 5106694 - DNA, 25 bp, Homo sapien
cctactccagtcattctcatctgat

SEQ ID NO: 5106695 - DNA, 25 bp, Homo sapien
ttagagtttccagagccccctactc

SEQ ID NO: 5106696 - DNA, 25 bp, Homo sapien
cacttgactgtgattcctgcttttt

SEQ ID NO: 5106697 - DNA, 25 bp, Homo sapien
ccatcagctctcttgaaggcatcat

SEQ ID NO: 5106698 - DNA, 25 bp, Homo sapien
cgctcttttccatcagctctcttga

SEQ ID NO: 5106699 - DNA, 25 bp, Homo sapien
gctcttttccatcagctctcttgaa

SEQ ID NO: 5106700 - DNA, 25 bp, Homo sapien
tttccatcagctctcttgaaggcat

SEQ ID NO: 5106701 - DNA, 25 bp, Homo sapien
ttcacccagtcctccaaaagcgttg

SEQ ID NO: 5106702 - DNA, 25 bp, Homo sapien
gcgaccaaaaagtagggcctcagga

SEQ ID NO: 5106703 - DNA, 25 bp, Homo sapien
cttcctgcgccctccctactgcagt

SEQ ID NO: 5106704 - DNA, 25 bp, Homo sapien
caaaagcgttgacccacttcctgcg

SEQ ID NO: 5106705 - DNA, 25 bp, Homo sapien
tggactaaagaccattgcagctgct

SEQ ID NO: 5106706 - DNA, 25 bp, Homo sapien
gcttatgaagaccttggactaaaga

SEQ ID NO: 5106707 - DNA, 25 bp, Homo sapien
gactaaagaccattgcagctgctta

SEQ ID NO: 5106708 - DNA, 25 bp, Homo sapien
tatgaagaccttggactaaagacca

SEQ ID NO: 5106709 - DNA, 25 bp, Homo sapien
tgacacagctgctcaacagaaacag

SEQ ID NO: 5106710 - DNA, 25 bp, Homo sapien
aacagaagaaagagcctcctcccct

SEQ ID NO: 5106711 - DNA, 25 bp, Homo sapien
gtgctgaatgttgcctgggtgacac

SEQ ID NO: 5106712 - DNA, 25 bp, Homo sapien
caactgcggtgatctctcagatggc

SEQ ID NO: 5106713 - DNA, 25 bp, Homo sapien
ttccttttgtagatggcattctgag

SEQ ID NO: 5106714 - DNA, 25 bp, Homo sapien
ggcttcaatgccgtcttcctgttgg

SEQ ID NO: 5106715 - DNA, 25 bp, Homo sapien
cctgttggagcctacattcagctct

SEQ ID NO: 5106716 - DNA, 25 bp, Homo sapien
ctgagtagtaacaagcaaccaggct

SEQ ID NO: 5106717 - DNA, 25 bp, Homo sapien
tattgttttatagggcctgcaaaat

SEQ ID NO: 5106718 - DNA, 25 bp, Homo sapien
gattctatcttggtgtattatgagg

SEQ ID NO: 5106719 - DNA, 25 bp, Homo sapien
caaaatttatgctctaaggagattc

SEQ ID NO: 5106720 - DNA, 25 bp, Homo sapien
gcatggagcatctttttccacccat

SEQ ID NO: 5106721 - DNA, 25 bp, Homo sapien
aaatttccatattgattaccaatga

SEQ ID NO: 5106722 - DNA, 25 bp, Homo sapien
atttccatattgattaccaatgatc

SEQ ID NO: 5106723 - DNA, 25 bp, Homo sapien
ttccatattgattaccaatgatcat

SEQ ID NO: 5106724 - DNA, 25 bp, Homo sapien
tttccatattgattaccaatgatca

SEQ ID NO: 5106725 - DNA, 25 bp, Homo sapien
ggattctgttagctacttgaagatt

SEQ ID NO: 5106726 - DNA, 25 bp, Homo sapien
tattggcttcatagagagatttagt

SEQ ID NO: 5106727 - DNA, 25 bp, Homo sapien
attggcttcatagagagatttagtg

SEQ ID NO: 5106728 - DNA, 25 bp, Homo sapien
ttggcttcatagagagatttagtga

SEQ ID NO: 5106729 - DNA, 25 bp, Homo sapien
cctttggggttagatgctgaattgt

SEQ ID NO: 5106730 - DNA, 25 bp, Homo sapien
ttctttctacatcccccaagctttc

SEQ ID NO: 5106731 - DNA, 25 bp, Homo sapien
agctcctttggggttagatgctgaa

SEQ ID NO: 5106732 - DNA, 25 bp, Homo sapien
ttctacatcccccaagctttccttc

SEQ ID NO: 5106733 - DNA, 25 bp, Homo sapien
tgaggatgtgaccaacacaggaaag

SEQ ID NO: 5106734 - DNA, 25 bp, Homo sapien
gaggatgtgaccaacacaggaaaga

SEQ ID NO: 5106735 - DNA, 25 bp, Homo sapien
ctaaggcttgagttgctaacagact

SEQ ID NO: 5106736 - DNA, 25 bp, Homo sapien
cagctaaggcttgagttgctaacag

SEQ ID NO: 5106737 - DNA, 25 bp, Homo sapien
gtctacagctaaggcttgagttgct

SEQ ID NO: 5106738 - DNA, 25 bp, Homo sapien
tacagctaaggcttgagttgctaac

SEQ ID NO: 5106739 - DNA, 25 bp, Homo sapien
tgtgccaggaatatctccccttcac

SEQ ID NO: 5106740 - DNA, 25 bp, Homo sapien
gccttgcctgcttggcctaaaggcc

SEQ ID NO: 5106741 - DNA, 25 bp, Homo sapien
gccaggaatatctccccttcactca

SEQ ID NO: 5106742 - DNA, 25 bp, Homo sapien
cctgcttggcctaaaggcctgtgcc

SEQ ID NO: 5106743 - DNA, 25 bp, Homo sapien
cagtcatgtatcaccagagatacag

SEQ ID NO: 5106744 - DNA, 25 bp, Homo sapien
ctgcactcgaccgtagatggatctt

SEQ ID NO: 5106745 - DNA, 25 bp, Homo sapien
catgtacctgacagcttggtaacag

SEQ ID NO: 5106746 - DNA, 25 bp, Homo sapien
tcaccagagatacagctggctttgt

SEQ ID NO: 5106747 - DNA, 25 bp, Homo sapien
actgtcgatggcccctgaatctgtg

SEQ ID NO: 5106748 - DNA, 25 bp, Homo sapien
tctgtggagattcctcctgcaccgt

SEQ ID NO: 5106749 - DNA, 25 bp, Homo sapien
cactgtcgatggcccctgaatctgt

SEQ ID NO: 5106750 - DNA, 25 bp, Homo sapien
atgcttataaatgaagtcaacatat

SEQ ID NO: 5106751 - DNA, 25 bp, Homo sapien
agactgctgctctatcattttaaag

SEQ ID NO: 5106752 - DNA, 25 bp, Homo sapien
ctctcttttccatgcagtgtggatg

SEQ ID NO: 5106753 - DNA, 25 bp, Homo sapien
ctcttttccatgcagtgtggatgga

SEQ ID NO: 5106754 - DNA, 25 bp, Homo sapien
actgctgctctatcattttaaagca

SEQ ID NO: 5106755 - DNA, 25 bp, Homo sapien
tctcaatctcatggctctaaatgcc

SEQ ID NO: 5106756 - DNA, 25 bp, Homo sapien
gagacattttatgctcatattcttt

SEQ ID NO: 5106757 - DNA, 25 bp, Homo sapien
ctctctcaatctcatggctctaaat

SEQ ID NO: 5106758 - DNA, 25 bp, Homo sapien
ggagacattttatgctcatattctt

SEQ ID NO: 5106759 - DNA, 25 bp, Homo sapien
cagaaccctctggatcttccctgct

SEQ ID NO: 5106760 - DNA, 25 bp, Homo sapien
tccagaaccctctggatcttccctg

SEQ ID NO: 5106761 - DNA, 25 bp, Homo sapien
ccagaaccctctggatcttccctgc

SEQ ID NO: 5106762 - DNA, 25 bp, Homo sapien
gaagggtctcagtaagaggtttcaa

SEQ ID NO: 5106763 - DNA, 25 bp, Homo sapien
gaggttgaagggtctcagtaagagg

SEQ ID NO: 5106764 - DNA, 25 bp, Homo sapien
agaggagaggttgaagggtctcagt

SEQ ID NO: 5106765 - DNA, 25 bp, Homo sapien
ggtctcagtaagaggtttcaagtac

SEQ ID NO: 5106766 - DNA, 25 bp, Homo sapien
gactttttgatactgaaacatctga

SEQ ID NO: 5106767 - DNA, 25 bp, Homo sapien
tgtaaagcctgttactgctgccaca

SEQ ID NO: 5106768 - DNA, 25 bp, Homo sapien
gatgatgtcataacaggccgttacg

SEQ ID NO: 5106769 - DNA, 25 bp, Homo sapien
ggccgttacgatccataacatgtag

SEQ ID NO: 5106770 - DNA, 25 bp, Homo sapien
tccacacctcatggaattagaacct

SEQ ID NO: 5106771 - DNA, 25 bp, Homo sapien
cactccacacctcatggaattagaa

SEQ ID NO: 5106772 - DNA, 25 bp, Homo sapien
caaagtacggattccaggtccattc

SEQ ID NO: 5106773 - DNA, 25 bp, Homo sapien
acaaaatgcaaagtacggattccag

SEQ ID NO: 5106774 - DNA, 25 bp, Homo sapien
tggcattgcctattgagaaatctcc

SEQ ID NO: 5106775 - DNA, 25 bp, Homo sapien
gaatcagatgttgggaaattccagt

SEQ ID NO: 5106776 - DNA, 25 bp, Homo sapien
tcttgttccggtccccagttgttca

SEQ ID NO: 5106777 - DNA, 25 bp, Homo sapien
cctgggctgctctcttgctattgga

SEQ ID NO: 5106778 - DNA, 25 bp, Homo sapien
tctcctatacaaacagttttaatta

SEQ ID NO: 5106779 - DNA, 25 bp, Homo sapien
taacaacatgagagggaaatcattc

SEQ ID NO: 5106780 - DNA, 25 bp, Homo sapien
ggatttcctacttggagttgataag

SEQ ID NO: 5106781 - DNA, 25 bp, Homo sapien
gcttttcatgacagcggatttccta

SEQ ID NO: 5106782 - DNA, 25 bp, Homo sapien
gagttgataagacaacggcaaatga

SEQ ID NO: 5106783 - DNA, 25 bp, Homo sapien
cagcgtcagaggaataaggcaaaca

SEQ ID NO: 5106784 - DNA, 25 bp, Homo sapien
tgcaaaggctaaagtccagcagctt

SEQ ID NO: 5106785 - DNA, 25 bp, Homo sapien
cacggtcgtaaagtgaagatgcagc

SEQ ID NO: 5106786 - DNA, 25 bp, Homo sapien
cttgggtccaatttgggaattcttg

SEQ ID NO: 5106787 - DNA, 25 bp, Homo sapien
tcctttcaaatctcccttgggtcca

SEQ ID NO: 5106788 - DNA, 25 bp, Homo sapien
aagcaattagtagtagggaatgaag

SEQ ID NO: 5106789 - DNA, 25 bp, Homo sapien
tagtagtagggaatgaagttccgta

SEQ ID NO: 5106790 - DNA, 25 bp, Homo sapien
caattagtagtagggaatgaagttc

SEQ ID NO: 5106791 - DNA, 25 bp, Homo sapien
aaaagcaattagtagtagggaatga

SEQ ID NO: 5106792 - DNA, 25 bp, Homo sapien
tccctcactaaaatgaggccatgga

SEQ ID NO: 5106793 - DNA, 25 bp, Homo sapien
gggaccctggatctgaagtctgaaa

SEQ ID NO: 5106794 - DNA, 25 bp, Homo sapien
aaaggctccatagcctggcacaacc

SEQ ID NO: 5106795 - DNA, 25 bp, Homo sapien
tatgaccagcagttcttcacggtac

SEQ ID NO: 5106796 - DNA, 25 bp, Homo sapien
taggacaggcctactagaagcttgt

SEQ ID NO: 5106797 - DNA, 25 bp, Homo sapien
attttgcagcaaaacctgcataaaa

SEQ ID NO: 5106798 - DNA, 25 bp, Homo sapien
cattttgcagcaaaacctgcataaa

SEQ ID NO: 5106799 - DNA, 25 bp, Homo sapien
aacctgcataaaatggtccttgatt

SEQ ID NO: 5106800 - DNA, 25 bp, Homo sapien
gatttacaataagatggaaacacat

SEQ ID NO: 5106801 - DNA, 25 bp, Homo sapien
cttgtgaggatttacaataagatgg

SEQ ID NO: 5106802 - DNA, 25 bp, Homo sapien
cagcttcttgtgaggatttacaata

SEQ ID NO: 5106803 - DNA, 25 bp, Homo sapien
atgaagcagcttcttgtgaggattt

SEQ ID NO: 5106804 - DNA, 25 bp, Homo sapien
ggagagctctcaaggattcttgaat

SEQ ID NO: 5106805 - DNA, 25 bp, Homo sapien
gagagctctcaaggattcttgaatg

SEQ ID NO: 5106806 - DNA, 25 bp, Homo sapien
tgaatggactgaaatgttttgtgac

SEQ ID NO: 5106807 - DNA, 25 bp, Homo sapien
cccttgcattcgcttttcctctgtt

SEQ ID NO: 5106808 - DNA, 25 bp, Homo sapien
ccaggatgttcttgctgctgccgct

SEQ ID NO: 5106809 - DNA, 25 bp, Homo sapien
aggatgttcttgctgctgccgctca

SEQ ID NO: 5106810 - DNA, 25 bp, Homo sapien
tgcattcgcttttcctctgttccac

SEQ ID NO: 5106811 - DNA, 25 bp, Homo sapien
agctcaggggacatcagggcctggg

SEQ ID NO: 5106812 - DNA, 25 bp, Homo sapien
gcctgggctccagtgtgggtttcat

SEQ ID NO: 5106813 - DNA, 25 bp, Homo sapien
cagagacacaggagttgacaggctg

SEQ ID NO: 5106814 - DNA, 25 bp, Homo sapien
ggctccagtgtgggtttcattgatc

SEQ ID NO: 5106815 - DNA, 25 bp, Homo sapien
tactttaatgggagctggcctgatg

SEQ ID NO: 5106816 - DNA, 25 bp, Homo sapien
aataagctcacacatgccgccattg

SEQ ID NO: 5106817 - DNA, 25 bp, Homo sapien
tatgagtattcatgtcaccaagtgc

SEQ ID NO: 5106818 - DNA, 25 bp, Homo sapien
gggccacatatgagccacatggaaa

SEQ ID NO: 5106819 - DNA, 25 bp, Homo sapien
caaaagaagaaagaacgcactcctc

SEQ ID NO: 5106820 - DNA, 25 bp, Homo sapien
cctgccctggttgatagcatcctct

SEQ ID NO: 5106821 - DNA, 25 bp, Homo sapien
gaagaaagaacgcactcctcttcct

SEQ ID NO: 5106822 - DNA, 25 bp, Homo sapien
tcctcctgccctggttgatagcatc

SEQ ID NO: 5106823 - DNA, 25 bp, Homo sapien
gttagccagttcacatcatagtcgg

SEQ ID NO: 5106824 - DNA, 25 bp, Homo sapien
gccatccaaagacgttagccagttc

SEQ ID NO: 5106825 - DNA, 25 bp, Homo sapien
catagtcggcagaaaagagtgagtg

SEQ ID NO: 5106826 - DNA, 25 bp, Homo sapien
gccctgttcatagcactgtcatctt

SEQ ID NO: 5106827 - DNA, 25 bp, Homo sapien
ctgaaagtcaaggaggtagcagcac

SEQ ID NO: 5106828 - DNA, 25 bp, Homo sapien
gctgctgtagaataaaaccgggata

SEQ ID NO: 5106829 - DNA, 25 bp, Homo sapien
aactctattgtgaacctcttccagg

SEQ ID NO: 5106830 - DNA, 25 bp, Homo sapien
agctgctgtagaataaaaccgggat

SEQ ID NO: 5106831 - DNA, 25 bp, Homo sapien
tccaggatagaaggcttgtgctttt

SEQ ID NO: 5106832 - DNA, 25 bp, Homo sapien
gaaccatgacagtagcacaatcctg

SEQ ID NO: 5106833 - DNA, 25 bp, Homo sapien
caaatagatgctctagcttccagct

SEQ ID NO: 5106834 - DNA, 25 bp, Homo sapien
gagttctgggatcttaacattggga

SEQ ID NO: 5106835 - DNA, 25 bp, Homo sapien
tggctttctctgttgggagttctgg

SEQ ID NO: 5106836 - DNA, 25 bp, Homo sapien
catgccagtggctctaagttgaagg

SEQ ID NO: 5106837 - DNA, 25 bp, Homo sapien
tggctctaagttgaaggtcacctcc

SEQ ID NO: 5106838 - DNA, 25 bp, Homo sapien
cagtggctctaagttgaaggtcacc

SEQ ID NO: 5106839 - DNA, 25 bp, Homo sapien
gccagtggctctaagttgaaggtca

SEQ ID NO: 5106840 - DNA, 25 bp, Homo sapien
ggtgcctgctgcacgagggtaagga

SEQ ID NO: 5106841 - DNA, 25 bp, Homo sapien
cttcttggcgctctgatcaccatca

SEQ ID NO: 5106842 - DNA, 25 bp, Homo sapien
ttggcgctctgatcaccatcaggag

SEQ ID NO: 5106843 - DNA, 25 bp, Homo sapien
cgctctgatcaccatcaggaggctg

SEQ ID NO: 5106844 - DNA, 25 bp, Homo sapien
ggctttgggtgtgagtgcttccttc

SEQ ID NO: 5106845 - DNA, 25 bp, Homo sapien
cattgaataggaatctcattttcag

SEQ ID NO: 5106846 - DNA, 25 bp, Homo sapien
ctttgggtgtgagtgcttccttctt

SEQ ID NO: 5106847 - DNA, 25 bp, Homo sapien
cattttcagccatggctaccccgtt

SEQ ID NO: 5106848 - DNA, 25 bp, Homo sapien
gctggcgatattgcccacgtagacc

SEQ ID NO: 5106849 - DNA, 25 bp, Homo sapien
gccaagttgttattaaacctctgcc

SEQ ID NO: 5106850 - DNA, 25 bp, Homo sapien
tgtgccaattgattcttgagccaag

SEQ ID NO: 5106851 - DNA, 25 bp, Homo sapien
cctggagctggcgatattgcccacg

SEQ ID NO: 5106852 - DNA, 25 bp, Homo sapien
ggctgcccgaggtcctttgtgaaaa

SEQ ID NO: 5106853 - DNA, 25 bp, Homo sapien
tgcccgaggtcctttgtgaaaatgt

SEQ ID NO: 5106854 - DNA, 25 bp, Homo sapien
gttatactgactctcatccagggtg

SEQ ID NO: 5106855 - DNA, 25 bp, Homo sapien
aaaatgtaagttatactgactctca

SEQ ID NO: 5106856 - DNA, 25 bp, Homo sapien
ggttgcatgagaggccaaaactcca

SEQ ID NO: 5106857 - DNA, 25 bp, Homo sapien
agacttttgtacatcgacggttgca

SEQ ID NO: 5106858 - DNA, 25 bp, Homo sapien
tacatcgacggttgcatgagaggcc

SEQ ID NO: 5106859 - DNA, 25 bp, Homo sapien
ttgacccacaaacagggcatcttgg

SEQ ID NO: 5106860 - DNA, 25 bp, Homo sapien
agaacagagggcacggataggaaga

SEQ ID NO: 5106861 - DNA, 25 bp, Homo sapien
gcaattctttgcactgaatcccaga

SEQ ID NO: 5106862 - DNA, 25 bp, Homo sapien
gattctgactagagaaatcttcaaa

SEQ ID NO: 5106863 - DNA, 25 bp, Homo sapien
aatcttcaaacatgggctacaaggc

SEQ ID NO: 5106864 - DNA, 25 bp, Homo sapien
ttggattggttttgatctccagtgg

SEQ ID NO: 5106865 - DNA, 25 bp, Homo sapien
ttgatctccagtgggaaggagtaag

SEQ ID NO: 5106866 - DNA, 25 bp, Homo sapien
gattggttttgatctccagtgggaa

SEQ ID NO: 5106867 - DNA, 25 bp, Homo sapien
tggttttgatctccagtgggaagga

SEQ ID NO: 5106868 - DNA, 25 bp, Homo sapien
gtatctgatacatgctgtctttttc

SEQ ID NO: 5106869 - DNA, 25 bp, Homo sapien
aaattcagaaactggccctctcttg

SEQ ID NO: 5106870 - DNA, 25 bp, Homo sapien
tgctgatgttggtctattgtcagac

SEQ ID NO: 5106871 - DNA, 25 bp, Homo sapien
gactacagtgcactctctcattaat

SEQ ID NO: 5106872 - DNA, 25 bp, Homo sapien
aacccaaacacgctgagttctgtga

SEQ ID NO: 5106873 - DNA, 25 bp, Homo sapien
caaacacgctgagttctgtgaaagg

SEQ ID NO: 5106874 - DNA, 25 bp, Homo sapien
gaaacccaaacacgctgagttctgt

SEQ ID NO: 5106875 - DNA, 25 bp, Homo sapien
aggaaacccaaacacgctgagttct

SEQ ID NO: 5106876 - DNA, 25 bp, Homo sapien
tgtcatcgtgtcctcttgcccattg

SEQ ID NO: 5106877 - DNA, 25 bp, Homo sapien
tcgtcggcacctgtcatcgtgtcct

SEQ ID NO: 5106878 - DNA, 25 bp, Homo sapien
gcaaatagttcatttaccagaccct

SEQ ID NO: 5106879 - DNA, 25 bp, Homo sapien
tctggggtgaatggactttactggc

SEQ ID NO: 5106880 - DNA, 25 bp, Homo sapien
gcagaacactcttagggctttaagg

SEQ ID NO: 5106881 - DNA, 25 bp, Homo sapien
cacacagggaattgaagcagaacac

SEQ ID NO: 5106882 - DNA, 25 bp, Homo sapien
cccatgactgcacctgttacaggct

SEQ ID NO: 5106883 - DNA, 25 bp, Homo sapien
gatgagtaagcagttacaagttcca

SEQ ID NO: 5106884 - DNA, 25 bp, Homo sapien
tcttggtggaagggtcctagacagg

SEQ ID NO: 5106885 - DNA, 25 bp, Homo sapien
cttggtggaagggtcctagacagga

SEQ ID NO: 5106886 - DNA, 25 bp, Homo sapien
gtcttggtggaagggtcctagacag

SEQ ID NO: 5106887 - DNA, 25 bp, Homo sapien
aaatccatgccctttgtagcaactg

SEQ ID NO: 5106888 - DNA, 25 bp, Homo sapien
actttcaacctcgatatgagtggga

SEQ ID NO: 5106889 - DNA, 25 bp, Homo sapien
tggaaccagacactcagagccagtc

SEQ ID NO: 5106890 - DNA, 25 bp, Homo sapien
catgccgttcatgcacagtaggtaa

SEQ ID NO: 5106891 - DNA, 25 bp, Homo sapien
taatgtcccgattttaacatgggag

SEQ ID NO: 5106892 - DNA, 25 bp, Homo sapien
aaaatccttagtgaataatgtcccg

SEQ ID NO: 5106893 - DNA, 25 bp, Homo sapien
gaataaataaaacgatcactctgac

SEQ ID NO: 5106894 - DNA, 25 bp, Homo sapien
tcctttaggcgaggagaattacaaa

SEQ ID NO: 5106895 - DNA, 25 bp, Homo sapien
aggttttgcttcatggctagtgaca

SEQ ID NO: 5106896 - DNA, 25 bp, Homo sapien
ttagataggaatgtgcttgccaatc

SEQ ID NO: 5106897 - DNA, 25 bp, Homo sapien
tgacaattcccacgtcatccaggaa

SEQ ID NO: 5106898 - DNA, 25 bp, Homo sapien
gataggtcttgtgtgggaaaaccag

SEQ ID NO: 5106899 - DNA, 25 bp, Homo sapien
ccttgaccagatattgccaactggg

SEQ ID NO: 5106900 - DNA, 25 bp, Homo sapien
tgtttccttgaccagatattgccaa

SEQ ID NO: 5106901 - DNA, 25 bp, Homo sapien
tgaccagatattgccaactgggaat

SEQ ID NO: 5106902 - DNA, 25 bp, Homo sapien
atcctgtttccttgaccagatattg

SEQ ID NO: 5106903 - DNA, 25 bp, Homo sapien
tcttagggcagcctttgtcaatgat

SEQ ID NO: 5106904 - DNA, 25 bp, Homo sapien
aagatggtcttagggcagcctttgt

SEQ ID NO: 5106905 - DNA, 25 bp, Homo sapien
catttaatttagacctgaacctgga

SEQ ID NO: 5106906 - DNA, 25 bp, Homo sapien
gcagcctttgtcaatgatgagtaaa

SEQ ID NO: 5106907 - DNA, 25 bp, Homo sapien
ttaaatacttcgttcattgttgcac

SEQ ID NO: 5106908 - DNA, 25 bp, Homo sapien
tcgttcattgttgcactgaggtttc

SEQ ID NO: 5106909 - DNA, 25 bp, Homo sapien
ctttggtaatgcctatttcattgta

SEQ ID NO: 5106910 - DNA, 25 bp, Homo sapien
cagacattatggagattacctttgg

SEQ ID NO: 5106911 - DNA, 25 bp, Homo sapien
tatttcttccgagtcttccttttca

SEQ ID NO: 5106912 - DNA, 25 bp, Homo sapien
agccgtatttcttccgagtcttcct

SEQ ID NO: 5106913 - DNA, 25 bp, Homo sapien
atttcttccgagtcttccttttcat

SEQ ID NO: 5106914 - DNA, 25 bp, Homo sapien
tttcttccgagtcttccttttcatc

SEQ ID NO: 5106915 - DNA, 25 bp, Homo sapien
tgctctgtgttccaggactatgtct

SEQ ID NO: 5106916 - DNA, 25 bp, Homo sapien
aggcatatacccttaaggtttccag

SEQ ID NO: 5106917 - DNA, 25 bp, Homo sapien
tctgctctgtgttccaggactatgt

SEQ ID NO: 5106918 - DNA, 25 bp, Homo sapien
ggtttccagcatctcctgtgtctct

SEQ ID NO: 5106919 - DNA, 25 bp, Homo sapien
gatgtgaagtctatgcaaataatac

SEQ ID NO: 5106920 - DNA, 25 bp, Homo sapien
agatgtgaagtctatgcaaataata

SEQ ID NO: 5106921 - DNA, 25 bp, Homo sapien
aaagtgacatttgcctggggcagct

SEQ ID NO: 5106922 - DNA, 25 bp, Homo sapien
gcagctggccaatcaaggtgaagag

SEQ ID NO: 5106923 - DNA, 25 bp, Homo sapien
gggcagctggccaatcaaggtgaag

SEQ ID NO: 5106924 - DNA, 25 bp, Homo sapien
caaagtgacatttgcctggggcagc

SEQ ID NO: 5106925 - DNA, 25 bp, Homo sapien
ttggatgagacctcttagatgccat

SEQ ID NO: 5106926 - DNA, 25 bp, Homo sapien
tagttggatgagacctcttagatgc

SEQ ID NO: 5106927 - DNA, 25 bp, Homo sapien
gcttgcctagttggatgagacctct

SEQ ID NO: 5106928 - DNA, 25 bp, Homo sapien
cccagagcttgcctagttggatgag

SEQ ID NO: 5106929 - DNA, 25 bp, Homo sapien
ttccggtccactagagcagcagaga

SEQ ID NO: 5106930 - DNA, 25 bp, Homo sapien
tgaagtgaatttccggtccactaga

SEQ ID NO: 5106931 - DNA, 25 bp, Homo sapien
ggctgtgtgcgaaaacatagtttat

SEQ ID NO: 5106932 - DNA, 25 bp, Homo sapien
ctttctccctaacgaacattctagg

SEQ ID NO: 5106933 - DNA, 25 bp, Homo sapien
gttaacccttgaactttacatagca

SEQ ID NO: 5106934 - DNA, 25 bp, Homo sapien
tgttaacccttgaactttacatagc

SEQ ID NO: 5106935 - DNA, 25 bp, Homo sapien
taacccttgaactttacatagcaaa

SEQ ID NO: 5106936 - DNA, 25 bp, Homo sapien
cccttgaactttacatagcaaacaa

SEQ ID NO: 5106937 - DNA, 25 bp, Homo sapien
tgcaagttttaaatgattgagtccc

SEQ ID NO: 5106938 - DNA, 25 bp, Homo sapien
ttgcaagttttaaatgattgagtcc

SEQ ID NO: 5106939 - DNA, 25 bp, Homo sapien
cctgttcaattgcaagttttaaatg

SEQ ID NO: 5106940 - DNA, 25 bp, Homo sapien
gtttcccttcctgttcaattgcaag

SEQ ID NO: 5106941 - DNA, 25 bp, Homo sapien
tacctgtaacctttgtgtcagactt

SEQ ID NO: 5106942 - DNA, 25 bp, Homo sapien
tcagcttgaagtatggtgtggccac

SEQ ID NO: 5106943 - DNA, 25 bp, Homo sapien
aggagtgttcggcatcagcttgaag

SEQ ID NO: 5106944 - DNA, 25 bp, Homo sapien
taacctttgtgtcagacttggcact

SEQ ID NO: 5106945 - DNA, 25 bp, Homo sapien
ggaggggctcctaatgggcagagcc

SEQ ID NO: 5106946 - DNA, 25 bp, Homo sapien
gaggggctcctaatgggcagagcct

SEQ ID NO: 5106947 - DNA, 25 bp, Homo sapien
tttcactacgggaatagattccttg

SEQ ID NO: 5106948 - DNA, 25 bp, Homo sapien
ctacttctgaatcaagtcgttggtt

SEQ ID NO: 5106949 - DNA, 25 bp, Homo sapien
ttgcttcttttgggccgtgaggcct

SEQ ID NO: 5106950 - DNA, 25 bp, Homo sapien
gcttgcatttccgagttttcactac

SEQ ID NO: 5106951 - DNA, 25 bp, Homo sapien
gatgcacctcagttgggactagcca

SEQ ID NO: 5106952 - DNA, 25 bp, Homo sapien
tacttcagtggctacaccatagagg

SEQ ID NO: 5106953 - DNA, 25 bp, Homo sapien
tatcagcagtcgatcaagcaaaccc

SEQ ID NO: 5106954 - DNA, 25 bp, Homo sapien
ggaatttggagtatgcccgagtgca

SEQ ID NO: 5106955 - DNA, 25 bp, Homo sapien
tgtttcactatatttaatcaattca

SEQ ID NO: 5106956 - DNA, 25 bp, Homo sapien
cgtaaagactgtcagcagatagttc

SEQ ID NO: 5106957 - DNA, 25 bp, Homo sapien
gatagttctctggtcagccattctg

SEQ ID NO: 5106958 - DNA, 25 bp, Homo sapien
tctttctgggccgtaaagactgtca

SEQ ID NO: 5106959 - DNA, 25 bp, Homo sapien
tggaccacccagaaccatgatattg

SEQ ID NO: 5106960 - DNA, 25 bp, Homo sapien
cagaaccatgatattgtcagcttcc

SEQ ID NO: 5106961 - DNA, 25 bp, Homo sapien
tattccaaagcagatggaccaccca

SEQ ID NO: 5106962 - DNA, 25 bp, Homo sapien
gcagatggaccacccagaaccatga

SEQ ID NO: 5106963 - DNA, 25 bp, Homo sapien
cctttttctggtaaccccagctgct

SEQ ID NO: 5106964 - DNA, 25 bp, Homo sapien
ttattgcacccaagatatgccagag

SEQ ID NO: 5106965 - DNA, 25 bp, Homo sapien
tgcaagcttcttcgcttaagagcta

SEQ ID NO: 5106966 - DNA, 25 bp, Homo sapien
tgccagagacagttcgatttcttgc

SEQ ID NO: 5106967 - DNA, 25 bp, Homo sapien
tctgagggacgtctaaggctttgtt

SEQ ID NO: 5106968 - DNA, 25 bp, Homo sapien
ctctgagggacgtctaaggctttgt

SEQ ID NO: 5106969 - DNA, 25 bp, Homo sapien
aatgaccagagcaaggtcatctgta

SEQ ID NO: 5106970 - DNA, 25 bp, Homo sapien
tgtaggactcaagccttttgattcc

SEQ ID NO: 5106971 - DNA, 25 bp, Homo sapien
aattgatagttatctgtaggactca

SEQ ID NO: 5106972 - DNA, 25 bp, Homo sapien
gggtaataagactcttgctcaagac

SEQ ID NO: 5106973 - DNA, 25 bp, Homo sapien
gccacaggctctgcactgtcatccc

SEQ ID NO: 5106974 - DNA, 25 bp, Homo sapien
tgtcccctggtggcccaaagggagc

SEQ ID NO: 5106975 - DNA, 25 bp, Homo sapien
ccctggtggcccaaagggagcgagt

SEQ ID NO: 5106976 - DNA, 25 bp, Homo sapien
cccaaagggagcgagtggcaatgtg

SEQ ID NO: 5106977 - DNA, 25 bp, Homo sapien
gaatttggttgtccacgaaggcact

SEQ ID NO: 5106978 - DNA, 25 bp, Homo sapien
tttcaaataatcctgggccgtgctg

SEQ ID NO: 5106979 - DNA, 25 bp, Homo sapien
cacttagctacgtgaagggcccagg

SEQ ID NO: 5106980 - DNA, 25 bp, Homo sapien
gattgccagagtgccatgagttgac

SEQ ID NO: 5106981 - DNA, 25 bp, Homo sapien
gactcattaggaggcctctggatca

SEQ ID NO: 5106982 - DNA, 25 bp, Homo sapien
gatgaaatttagagactcattagga

SEQ ID NO: 5106983 - DNA, 25 bp, Homo sapien
agactcattaggaggcctctggatc

SEQ ID NO: 5106984 - DNA, 25 bp, Homo sapien
aagtgtcgatgaaatttagagactc

SEQ ID NO: 5106985 - DNA, 25 bp, Homo sapien
agtggttaactcctcagggtcacct

SEQ ID NO: 5106986 - DNA, 25 bp, Homo sapien
cagtggttaactcctcagggtcacc

SEQ ID NO: 5106987 - DNA, 25 bp, Homo sapien
agattggctatgtctaccctcctct

SEQ ID NO: 5106988 - DNA, 25 bp, Homo sapien
agggtcacctttgagcagattggct

SEQ ID NO: 5106989 - DNA, 25 bp, Homo sapien
cttgactttctgaaccgatactcat

SEQ ID NO: 5106990 - DNA, 25 bp, Homo sapien
gatactcatggatggcaggaaaggc

SEQ ID NO: 5106991 - DNA, 25 bp, Homo sapien
ttctgaaccgatactcatggatggc

SEQ ID NO: 5106992 - DNA, 25 bp, Homo sapien
cctatgcacattattgtcaatatta

SEQ ID NO: 5106993 - DNA, 25 bp, Homo sapien
aatgggagatttgggctggatgtgc

SEQ ID NO: 5106994 - DNA, 25 bp, Homo sapien
gagaggcactcaggtagtaactgga

SEQ ID NO: 5106995 - DNA, 25 bp, Homo sapien
cacttgtgctcatgggtcgagttaa

SEQ ID NO: 5106996 - DNA, 25 bp, Homo sapien
actggaaatgtgattctaggagagc

SEQ ID NO: 5106997 - DNA, 25 bp, Homo sapien
gactttcgtgtaatatcttccttat

SEQ ID NO: 5106998 - DNA, 25 bp, Homo sapien
catgaaaattgtgtggacagatttg

SEQ ID NO: 5106999 - DNA, 25 bp, Homo sapien
acagatttgagtatagccacaggac

SEQ ID NO: 5107000 - DNA, 25 bp, Homo sapien
cagactttcgtgtaatatcttcctt

SEQ ID NO: 5107001 - DNA, 25 bp, Homo sapien
aaacacctggagagtttatcctctc

SEQ ID NO: 5107002 - DNA, 25 bp, Homo sapien
tcctctcctgtgctcctagattatt

SEQ ID NO: 5107003 - DNA, 25 bp, Homo sapien
gctcctagattattacagccatgta

SEQ ID NO: 5107004 - DNA, 25 bp, Homo sapien
tcctgtgctcctagattattacagc

SEQ ID NO: 5107005 - DNA, 25 bp, Homo sapien
ctttggatataaaagcttatcaaat

SEQ ID NO: 5107006 - DNA, 25 bp, Homo sapien
ggctttttcaatatcatcctctttt

SEQ ID NO: 5107007 - DNA, 25 bp, Homo sapien
cctcttttcaaaagtggatgaaggg

SEQ ID NO: 5107008 - DNA, 25 bp, Homo sapien
caaaagtggatgaagggtttatagt

SEQ ID NO: 5107009 - DNA, 25 bp, Homo sapien
gtccctggagtcttcgaagcaaact

SEQ ID NO: 5107010 - DNA, 25 bp, Homo sapien
gagtcttcgaagcaaactgcttctt

SEQ ID NO: 5107011 - DNA, 25 bp, Homo sapien
cctggagtcttcgaagcaaactgct

SEQ ID NO: 5107012 - DNA, 25 bp, Homo sapien
ctggagtcttcgaagcaaactgctt

SEQ ID NO: 5107013 - DNA, 25 bp, Homo sapien
tgcactgctgagcatccaattctcc

SEQ ID NO: 5107014 - DNA, 25 bp, Homo sapien
tggtggtgaccctgatgaacttccc

SEQ ID NO: 5107015 - DNA, 25 bp, Homo sapien
ggtggtgaccctgatgaacttccca

SEQ ID NO: 5107016 - DNA, 25 bp, Homo sapien
tccaattctccatgaatatcaatga

SEQ ID NO: 5107017 - DNA, 25 bp, Homo sapien
ccactgctatgtatctgctcagaag

SEQ ID NO: 5107018 - DNA, 25 bp, Homo sapien
agacacttgttacatgcatgtatat

SEQ ID NO: 5107019 - DNA, 25 bp, Homo sapien
cgtaacttctgcaataatggtcata

SEQ ID NO: 5107020 - DNA, 25 bp, Homo sapien
aaaccacagtgcgataccacgtaac

SEQ ID NO: 5107021 - DNA, 25 bp, Homo sapien
ttcgaacacacgtgcaagtggcccc

SEQ ID NO: 5107022 - DNA, 25 bp, Homo sapien
tgttcattggttcgaacacacgtgc

SEQ ID NO: 5107023 - DNA, 25 bp, Homo sapien
acacgtgcaagtggccccggtgtct

SEQ ID NO: 5107024 - DNA, 25 bp, Homo sapien
caactaagtagtgttcattggttcg

SEQ ID NO: 5107025 - DNA, 25 bp, Homo sapien
cccagtgtttggtctactgatgtcg

SEQ ID NO: 5107026 - DNA, 25 bp, Homo sapien
tggtctactgatgtcgaagctgaag

SEQ ID NO: 5107027 - DNA, 25 bp, Homo sapien
cagtgtttggtctactgatgtcgaa

SEQ ID NO: 5107028 - DNA, 25 bp, Homo sapien
tgtttggtctactgatgtcgaagct

SEQ ID NO: 5107029 - DNA, 25 bp, Homo sapien
tttgtcaattttagtggatcagatg

SEQ ID NO: 5107030 - DNA, 25 bp, Homo sapien
gtcaattttagtggatcagatgctc

SEQ ID NO: 5107031 - DNA, 25 bp, Homo sapien
caattttagtggatcagatgctcag

SEQ ID NO: 5107032 - DNA, 25 bp, Homo sapien
aattttagtggatcagatgctcagc

SEQ ID NO: 5107033 - DNA, 25 bp, Homo sapien
gaagtttcggcatgaatccccaggt

SEQ ID NO: 5107034 - DNA, 25 bp, Homo sapien
aagacaccctggctgactagttccc

SEQ ID NO: 5107035 - DNA, 25 bp, Homo sapien
agccccagggtgtctgattcagaag

SEQ ID NO: 5107036 - DNA, 25 bp, Homo sapien
caggctggaggccaaaattactcag

SEQ ID NO: 5107037 - DNA, 25 bp, Homo sapien
ggaggcgtggaacccagcgccccag

SEQ ID NO: 5107038 - DNA, 25 bp, Homo sapien
gaggcgtggaacccagcgccccagg

SEQ ID NO: 5107039 - DNA, 25 bp, Homo sapien
ttgtggccaaggttgtgatttcagg

SEQ ID NO: 5107040 - DNA, 25 bp, Homo sapien
tgaggggattggtgccgttccttct

SEQ ID NO: 5107041 - DNA, 25 bp, Homo sapien
atcagacgtcctgggagaagcgtga

SEQ ID NO: 5107042 - DNA, 25 bp, Homo sapien
tcaggtgcgctaatgggatcagacg

SEQ ID NO: 5107043 - DNA, 25 bp, Homo sapien
cggtgttctgcagcgcgatccggtc

SEQ ID NO: 5107044 - DNA, 25 bp, Homo sapien
gagtttgctcgcacctggtttggcg

SEQ ID NO: 5107045 - DNA, 25 bp, Homo sapien
gctgagcatccgagggcgcctttct

SEQ ID NO: 5107046 - DNA, 25 bp, Homo sapien
gacgatggcgcaccggcttctgtct

SEQ ID NO: 5107047 - DNA, 25 bp, Homo sapien
tgggagggccactgtttaccgaatg

SEQ ID NO: 5107048 - DNA, 25 bp, Homo sapien
ttgactggcaggtcggcggccactt

SEQ ID NO: 5107049 - DNA, 25 bp, Homo sapien
agctcccggaggataacttcattga

SEQ ID NO: 5107050 - DNA, 25 bp, Homo sapien
ccactgtttaccgaatgagaacctc

SEQ ID NO: 5107051 - DNA, 25 bp, Homo sapien
taacgtcagaatatggctatgctag

SEQ ID NO: 5107052 - DNA, 25 bp, Homo sapien
gggccaatttgaacactggtaacta

SEQ ID NO: 5107053 - DNA, 25 bp, Homo sapien
cgatttatgcgagaaagggccaatt

SEQ ID NO: 5107054 - DNA, 25 bp, Homo sapien
ggctatgctagctaaacatcatttt

SEQ ID NO: 5107055 - DNA, 25 bp, Homo sapien
tcgatcagcagggagcttcgatctg

SEQ ID NO: 5107056 - DNA, 25 bp, Homo sapien
gggaatgcgaactgccagtccctat

SEQ ID NO: 5107057 - DNA, 25 bp, Homo sapien
cgcgcattggctgcggggaaaatca

SEQ ID NO: 5107058 - DNA, 25 bp, Homo sapien
aattatcaaataatcgatcagcagg

SEQ ID NO: 5107059 - DNA, 25 bp, Homo sapien
taggcagccgtggaggagtgctcgg

SEQ ID NO: 5107060 - DNA, 25 bp, Homo sapien
ccaaatctcggtaggcagccgtgga

SEQ ID NO: 5107061 - DNA, 25 bp, Homo sapien
cggtaggcagccgtggaggagtgct

SEQ ID NO: 5107062 - DNA, 25 bp, Homo sapien
caaatctcggtaggcagccgtggag

SEQ ID NO: 5107063 - DNA, 25 bp, Homo sapien
caaagccgactctcttgaaataaat

SEQ ID NO: 5107064 - DNA, 25 bp, Homo sapien
taaattgggaatcaacgccgggcag

SEQ ID NO: 5107065 - DNA, 25 bp, Homo sapien
cagcgggagttattttgcacagggc

SEQ ID NO: 5107066 - DNA, 25 bp, Homo sapien
agggctccgcgcatagacttcatga

SEQ ID NO: 5107067 - DNA, 25 bp, Homo sapien
ctggagaggcagagaggcgctccat

SEQ ID NO: 5107068 - DNA, 25 bp, Homo sapien
ccagaatgctagaacccggaagtag

SEQ ID NO: 5107069 - DNA, 25 bp, Homo sapien
ggtcgcgtcttacacaatgcattgg

SEQ ID NO: 5107070 - DNA, 25 bp, Homo sapien
tagtggtggccataacaggtcgcgt

SEQ ID NO: 5107071 - DNA, 25 bp, Homo sapien
cattgggctgcagcaagtaggctcc

SEQ ID NO: 5107072 - DNA, 25 bp, Homo sapien
gaaaaatcccttaacgtctccagca

SEQ ID NO: 5107073 - DNA, 25 bp, Homo sapien
ccgagtcactgagcataaaagcgct

SEQ ID NO: 5107074 - DNA, 25 bp, Homo sapien
taaaagcgctccgtttccaagacag

SEQ ID NO: 5107075 - DNA, 25 bp, Homo sapien
cagcaacgtgagctactggtcccag

SEQ ID NO: 5107076 - DNA, 25 bp, Homo sapien
ttcaaaagcaaatgcacaactttcc

SEQ ID NO: 5107077 - DNA, 25 bp, Homo sapien
aaattcaaaagcaaatgcacaactt

SEQ ID NO: 5107078 - DNA, 25 bp, Homo sapien
caggtttaaagcaaattcaaaagca

SEQ ID NO: 5107079 - DNA, 25 bp, Homo sapien
gcaaattcaaaagcaaatgcacaac

SEQ ID NO: 5107080 - DNA, 25 bp, Homo sapien
gaaagagaagcattctcccgagggt

SEQ ID NO: 5107081 - DNA, 25 bp, Homo sapien
tcggtggccttgcatctataaagct

SEQ ID NO: 5107082 - DNA, 25 bp, Homo sapien
tatataaggtcaatacagctgggtc

SEQ ID NO: 5107083 - DNA, 25 bp, Homo sapien
ctcgtctgggatgaatgatcttgcc

SEQ ID NO: 5107084 - DNA, 25 bp, Homo sapien
tatgagctgtgtgcgggtactgatg

SEQ ID NO: 5107085 - DNA, 25 bp, Homo sapien
taaagcgtcattgacagaggagccc

SEQ ID NO: 5107086 - DNA, 25 bp, Homo sapien
tgatgcgagtgcagaggaggcccgt

SEQ ID NO: 5107087 - DNA, 25 bp, Homo sapien
tgcgggtccccatacatcgtggagg

SEQ ID NO: 5107088 - DNA, 25 bp, Homo sapien
tccagcccgctgaaggagtctgaga

SEQ ID NO: 5107089 - DNA, 25 bp, Homo sapien
tttcgttacaacacaaaggcgcctg

SEQ ID NO: 5107090 - DNA, 25 bp, Homo sapien
tcagcaagtcagaacaatcagtggc

SEQ ID NO: 5107091 - DNA, 25 bp, Homo sapien
tgtgtaacaattcagagcaagctcc

SEQ ID NO: 5107092 - DNA, 25 bp, Homo sapien
gaaaagcttcttctaatgcccaagg

SEQ ID NO: 5107093 - DNA, 25 bp, Homo sapien
ctgtcaacgggctgcacctagggat

SEQ ID NO: 5107094 - DNA, 25 bp, Homo sapien
cacttgtagttaactctgcggacag

SEQ ID NO: 5107095 - DNA, 25 bp, Homo sapien
tgtcccagagcctaaaccacttgta

SEQ ID NO: 5107096 - DNA, 25 bp, Homo sapien
tctggccggagaaattggcaacatt

SEQ ID NO: 5107097 - DNA, 25 bp, Homo sapien
ccatggacggtatctgaggatcggt

SEQ ID NO: 5107098 - DNA, 25 bp, Homo sapien
ctggagccctgaagtcggaggccct

SEQ ID NO: 5107099 - DNA, 25 bp, Homo sapien
gaggatcggtttagcgtatctggcc

SEQ ID NO: 5107100 - DNA, 25 bp, Homo sapien
cataatggttagtccccagtcaatg

SEQ ID NO: 5107101 - DNA, 25 bp, Homo sapien
tccccagtcaatggaaaaaggtgcc

SEQ ID NO: 5107102 - DNA, 25 bp, Homo sapien
tacaacagtcacaaacaacataatg

SEQ ID NO: 5107103 - DNA, 25 bp, Homo sapien
caaacaacataatggttagtcccca

SEQ ID NO: 5107104 - DNA, 25 bp, Homo sapien
ggtacaagtagctaattcacatttc

SEQ ID NO: 5107105 - DNA, 25 bp, Homo sapien
gaatgactctgacgagcagacgtcc

SEQ ID NO: 5107106 - DNA, 25 bp, Homo sapien
gcgaacacggctatatcttcattga

SEQ ID NO: 5107107 - DNA, 25 bp, Homo sapien
tcaaaaatcagtgctaagagaggga

SEQ ID NO: 5107108 - DNA, 25 bp, Homo sapien
ctacttttgaaagtgtgccgtgtgt

SEQ ID NO: 5107109 - DNA, 25 bp, Homo sapien
catgcatggcttaaggccgactacg

SEQ ID NO: 5107110 - DNA, 25 bp, Homo sapien
aggttggaggtaacatgcatggctt

SEQ ID NO: 5107111 - DNA, 25 bp, Homo sapien
taaggccgactacgtgctggctact

SEQ ID NO: 5107112 - DNA, 25 bp, Homo sapien
acaaccgtggtgttcttgattttat

SEQ ID NO: 5107113 - DNA, 25 bp, Homo sapien
tcagaccgccgagtccacagcagct

SEQ ID NO: 5107114 - DNA, 25 bp, Homo sapien
gagtgagctctccacgtttgctttc

SEQ ID NO: 5107115 - DNA, 25 bp, Homo sapien
gagtccacagcagctacaaccgtgg

SEQ ID NO: 5107116 - DNA, 25 bp, Homo sapien
ctagcaactacggctctcggggagg

SEQ ID NO: 5107117 - DNA, 25 bp, Homo sapien
agcaactacggctctcggggaggct

SEQ ID NO: 5107118 - DNA, 25 bp, Homo sapien
tactagcaactacggctctcgggga

SEQ ID NO: 5107119 - DNA, 25 bp, Homo sapien
ttctactagcaactacggctctcgg

SEQ ID NO: 5107120 - DNA, 25 bp, Homo sapien
aagaaaatagaggtttttctgcgcg

SEQ ID NO: 5107121 - DNA, 25 bp, Homo sapien
tatccagttctggattagaagaaaa

SEQ ID NO: 5107122 - DNA, 25 bp, Homo sapien
caagttatccagttctggattagaa

SEQ ID NO: 5107123 - DNA, 25 bp, Homo sapien
aaaatagaggtttttctgcgcgaat

SEQ ID NO: 5107124 - DNA, 25 bp, Homo sapien
tagagggctaggaagtccgcaaagt

SEQ ID NO: 5107125 - DNA, 25 bp, Homo sapien
ttgtccggtggctgccctcgtgatg

SEQ ID NO: 5107126 - DNA, 25 bp, Homo sapien
agtttaagcacacatgctgacaggc

SEQ ID NO: 5107127 - DNA, 25 bp, Homo sapien
cctcgtgatgggacttagagggcta

SEQ ID NO: 5107128 - DNA, 25 bp, Homo sapien
aaccttaatacttgtatggcttgaa

SEQ ID NO: 5107129 - DNA, 25 bp, Homo sapien
ccttaatacttgtatggcttgaatc

SEQ ID NO: 5107130 - DNA, 25 bp, Homo sapien
ttccaatagatgaaaccttaatact

SEQ ID NO: 5107131 - DNA, 25 bp, Homo sapien
aaaccttaatacttgtatggcttga

SEQ ID NO: 5107132 - DNA, 25 bp, Homo sapien
tttcaaacagctaatataccggtgg

SEQ ID NO: 5107133 - DNA, 25 bp, Homo sapien
cactgtctgattttgatcctccttc

SEQ ID NO: 5107134 - DNA, 25 bp, Homo sapien
tcaccaaatcgataggcattttccc

SEQ ID NO: 5107135 - DNA, 25 bp, Homo sapien
gatcctccttctctatcgtctatca

SEQ ID NO: 5107136 - DNA, 25 bp, Homo sapien
cagtgaggtctagaagcgttcggcc

SEQ ID NO: 5107137 - DNA, 25 bp, Homo sapien
cgttcggccgaggaaaactgacaag

SEQ ID NO: 5107138 - DNA, 25 bp, Homo sapien
caatcagaggcggtcactggcagtt

SEQ ID NO: 5107139 - DNA, 25 bp, Homo sapien
ggctaatgaaccgtacagacaggga

SEQ ID NO: 5107140 - DNA, 25 bp, Homo sapien
tgatgctgatatgtccacaagctgc

SEQ ID NO: 5107141 - DNA, 25 bp, Homo sapien
ccctcagttgagagcaaaggcggtg

SEQ ID NO: 5107142 - DNA, 25 bp, Homo sapien
gccaaggccctcagttgagagcaaa

SEQ ID NO: 5107143 - DNA, 25 bp, Homo sapien
agagcaaaggcggtgcgaggtcccc

SEQ ID NO: 5107144 - DNA, 25 bp, Homo sapien
aaggcggtgcgaggtcccccacact

SEQ ID NO: 5107145 - DNA, 25 bp, Homo sapien
aagaggaattcagcccatgtcgcgg

SEQ ID NO: 5107146 - DNA, 25 bp, Homo sapien
cttagtaacgcatcggaagaagggc

SEQ ID NO: 5107147 - DNA, 25 bp, Homo sapien
tctcgctccccatgggcaaaagagg

SEQ ID NO: 5107148 - DNA, 25 bp, Homo sapien
cataagatgacactaagaaccaggc

SEQ ID NO: 5107149 - DNA, 25 bp, Homo sapien
tacactgccgaaagtttccaactct

SEQ ID NO: 5107150 - DNA, 25 bp, Homo sapien
gactacactgccgaaagtttccaac

SEQ ID NO: 5107151 - DNA, 25 bp, Homo sapien
gcaatggactacactgccgaaagtt

SEQ ID NO: 5107152 - DNA, 25 bp, Homo sapien
atggactacactgccgaaagtttcc

SEQ ID NO: 5107153 - DNA, 25 bp, Homo sapien
ccagctgaaacttgggtgagcccca

SEQ ID NO: 5107154 - DNA, 25 bp, Homo sapien
tgctgtcctccgaccagctgaaact

SEQ ID NO: 5107155 - DNA, 25 bp, Homo sapien
ctgtcctccgaccagctgaaacttg

SEQ ID NO: 5107156 - DNA, 25 bp, Homo sapien
gctgaaacttgggtgagccccaggg

SEQ ID NO: 5107157 - DNA, 25 bp, Homo sapien
gctatttgaatgacctactgccatg

SEQ ID NO: 5107158 - DNA, 25 bp, Homo sapien
taatacaagtctctaagttaggacc

SEQ ID NO: 5107159 - DNA, 25 bp, Homo sapien
gccatggagctagttaaatcactga

SEQ ID NO: 5107160 - DNA, 25 bp, Homo sapien
ggacttccactgagagagagattga

SEQ ID NO: 5107161 - DNA, 25 bp, Homo sapien
tattttacatccgtaacttagtatc

SEQ ID NO: 5107162 - DNA, 25 bp, Homo sapien
tccgtaacttagtatcagtgctcct

SEQ ID NO: 5107163 - DNA, 25 bp, Homo sapien
tacatccgtaacttagtatcagtgc

SEQ ID NO: 5107164 - DNA, 25 bp, Homo sapien
gtaacttagtatcagtgctccttgt

SEQ ID NO: 5107165 - DNA, 25 bp, Homo sapien
ggacgtgaaatagcatactttagag

SEQ ID NO: 5107166 - DNA, 25 bp, Homo sapien
ccttttctaagtccacactgtgcac

SEQ ID NO: 5107167 - DNA, 25 bp, Homo sapien
tatttcactgtgcacacgtgctgtg

SEQ ID NO: 5107168 - DNA, 25 bp, Homo sapien
aagtgttgtgaggaatgatatggac

SEQ ID NO: 5107169 - DNA, 25 bp, Homo sapien
tctggaaagaatggttaacctgagc

SEQ ID NO: 5107170 - DNA, 25 bp, Homo sapien
aacctgagctggcttcgtgcacagc

SEQ ID NO: 5107171 - DNA, 25 bp, Homo sapien
tcgtgcacagcttggtatgctttgt

SEQ ID NO: 5107172 - DNA, 25 bp, Homo sapien
gctttgtgctatctcccagctgctg

SEQ ID NO: 5107173 - DNA, 25 bp, Homo sapien
gaagaatgctgtaagacgtaatctg

SEQ ID NO: 5107174 - DNA, 25 bp, Homo sapien
ttctgcagcataccagaagaatgct

SEQ ID NO: 5107175 - DNA, 25 bp, Homo sapien
gaacacacgctcagaatgcaaacag

SEQ ID NO: 5107176 - DNA, 25 bp, Homo sapien
actgcagctctaaaagggggacttg

SEQ ID NO: 5107177 - DNA, 25 bp, Homo sapien
tgtccccactgtgtgacgtgtggcc

SEQ ID NO: 5107178 - DNA, 25 bp, Homo sapien
catcatgatctctgttccaagaggg

SEQ ID NO: 5107179 - DNA, 25 bp, Homo sapien
actgtgtgacgtgtggccaccgctg

SEQ ID NO: 5107180 - DNA, 25 bp, Homo sapien
gggttcctcctgaacgagtagatgc

SEQ ID NO: 5107181 - DNA, 25 bp, Homo sapien
tagtaactcactagacatttctgat

SEQ ID NO: 5107182 - DNA, 25 bp, Homo sapien
tacttagtaactcactagacatttc

SEQ ID NO: 5107183 - DNA, 25 bp, Homo sapien
gaaaaactgtatacttagtaactca

SEQ ID NO: 5107184 - DNA, 25 bp, Homo sapien
tgtatacttagtaactcactagaca

SEQ ID NO: 5107185 - DNA, 25 bp, Homo sapien
aaatgacttcaacccagtggagagg

SEQ ID NO: 5107186 - DNA, 25 bp, Homo sapien
tccagtaaaagtcagaggtcagagg

SEQ ID NO: 5107187 - DNA, 25 bp, Homo sapien
tgttgtctaacagcactccagtgaa

SEQ ID NO: 5107188 - DNA, 25 bp, Homo sapien
tatagcactctgaacagcaacgcca

SEQ ID NO: 5107189 - DNA, 25 bp, Homo sapien
aattccttgttacagcatgtcagag

SEQ ID NO: 5107190 - DNA, 25 bp, Homo sapien
taaaaacaactaggtattggactca

SEQ ID NO: 5107191 - DNA, 25 bp, Homo sapien
gaagaactggtattgggcatttgct

SEQ ID NO: 5107192 - DNA, 25 bp, Homo sapien
aataggcctttggagaacacttgtt

SEQ ID NO: 5107193 - DNA, 25 bp, Homo sapien
gcagcaacactttcaggcatcattc

SEQ ID NO: 5107194 - DNA, 25 bp, Homo sapien
ggcatggaagtgtgcataagttgtt

SEQ ID NO: 5107195 - DNA, 25 bp, Homo sapien
tttagaagggtgacggttggcatgg

SEQ ID NO: 5107196 - DNA, 25 bp, Homo sapien
gcaacactttcaggcatcattctgc

SEQ ID NO: 5107197 - DNA, 25 bp, Homo sapien
acatgtactacaggccaaatgctgg

SEQ ID NO: 5107198 - DNA, 25 bp, Homo sapien
tgaagagggctgttatttacccagt

SEQ ID NO: 5107199 - DNA, 25 bp, Homo sapien
cacagttaatccgaaggctgcacaa

SEQ ID NO: 5107200 - DNA, 25 bp, Homo sapien
ggctgcacaaagaccaagctctgca

SEQ ID NO: 5107201 - DNA, 25 bp, Homo sapien
actgatcacaacagctactaattca

SEQ ID NO: 5107202 - DNA, 25 bp, Homo sapien
aaatgtgtactaaaactctttcact

SEQ ID NO: 5107203 - DNA, 25 bp, Homo sapien
tatcttattcacagctaggtcacca

SEQ ID NO: 5107204 - DNA, 25 bp, Homo sapien
agcacagcgccaggttcagtacaga

SEQ ID NO: 5107205 - DNA, 25 bp, Homo sapien
gcatgcaaaactaggttctccctcc

SEQ ID NO: 5107206 - DNA, 25 bp, Homo sapien
taggtcaccattacggagcacagcg

SEQ ID NO: 5107207 - DNA, 25 bp, Homo sapien
cacttaagccgagccataattggaa

SEQ ID NO: 5107208 - DNA, 25 bp, Homo sapien
ttaagacatccaatcagagcgctcc

SEQ ID NO: 5107209 - DNA, 25 bp, Homo sapien
tcctgaacctgagtcgctacggtag

SEQ ID NO: 5107210 - DNA, 25 bp, Homo sapien
caaactctgtgcgaaatgtgctcat

SEQ ID NO: 5107211 - DNA, 25 bp, Homo sapien
cttcctaagggcaaatactatgacc

SEQ ID NO: 5107212 - DNA, 25 bp, Homo sapien
taaatacactcacggctccctaaga

SEQ ID NO: 5107213 - DNA, 25 bp, Homo sapien
tatagctcacacagagtacctggca

SEQ ID NO: 5107214 - DNA, 25 bp, Homo sapien
tcttggtagcacacaggaacttcct

SEQ ID NO: 5107215 - DNA, 25 bp, Homo sapien
attactatattacaacttggcttta

SEQ ID NO: 5107216 - DNA, 25 bp, Homo sapien
ttactatattacaacttggctttaa

SEQ ID NO: 5107217 - DNA, 25 bp, Homo sapien
tactatattacaacttggctttaaa

SEQ ID NO: 5107218 - DNA, 25 bp, Homo sapien
ctctctggttccattaaccctgttc

SEQ ID NO: 5107219 - DNA, 25 bp, Homo sapien
ctgaatctctctggttccattaacc

SEQ ID NO: 5107220 - DNA, 25 bp, Homo sapien
gaatctctctggttccattaaccct

SEQ ID NO: 5107221 - DNA, 25 bp, Homo sapien
aatctctctggttccattaaccctg

SEQ ID NO: 5107222 - DNA, 25 bp, Homo sapien
gaacctgctcactagggagacttaa

SEQ ID NO: 5107223 - DNA, 25 bp, Homo sapien
tgctctcttaggagactgagtggga

SEQ ID NO: 5107224 - DNA, 25 bp, Homo sapien
ccgtgacaagggtgctgtgatccat

SEQ ID NO: 5107225 - DNA, 25 bp, Homo sapien
gagaaggacctgcatctgcactcct

SEQ ID NO: 5107226 - DNA, 25 bp, Homo sapien
taaatcacataatatcccagtgtgc

SEQ ID NO: 5107227 - DNA, 25 bp, Homo sapien
agtgtgctaaatctccttgaaagaa

SEQ ID NO: 5107228 - DNA, 25 bp, Homo sapien
ggataaatcacataatatcccagtg

SEQ ID NO: 5107229 - DNA, 25 bp, Homo sapien
tgaaagaaactctggcttagattct

SEQ ID NO: 5107230 - DNA, 25 bp, Homo sapien
gtacccaagacttgtctatcttcag

SEQ ID NO: 5107231 - DNA, 25 bp, Homo sapien
ggtatgtgccatgtcagaaataaac

SEQ ID NO: 5107232 - DNA, 25 bp, Homo sapien
cataggaaagtagaagtcagcaagc

SEQ ID NO: 5107233 - DNA, 25 bp, Homo sapien
cattcaaagggtctgttctcacaaa

SEQ ID NO: 5107234 - DNA, 25 bp, Homo sapien
ggaagtgacaagaaatgccacgtca

SEQ ID NO: 5107235 - DNA, 25 bp, Homo sapien
cctggattagctttagctggctgaa

SEQ ID NO: 5107236 - DNA, 25 bp, Homo sapien
aacccagataagtccagagcaatgc

SEQ ID NO: 5107237 - DNA, 25 bp, Homo sapien
agaatggcagcgtcattgctgtcat

SEQ ID NO: 5107238 - DNA, 25 bp, Homo sapien
gaagtaactctccataagtcaggca

SEQ ID NO: 5107239 - DNA, 25 bp, Homo sapien
tgaatgatggatcactgcagaccca

SEQ ID NO: 5107240 - DNA, 25 bp, Homo sapien
gatccagattaggtgctccaaaccc

SEQ ID NO: 5107241 - DNA, 25 bp, Homo sapien
tgcagacccaaagctggatgtccgt

SEQ ID NO: 5107242 - DNA, 25 bp, Homo sapien
acatcagctggctgggaatctctct

SEQ ID NO: 5107243 - DNA, 25 bp, Homo sapien
tctggatctagtcttctctccaaca

SEQ ID NO: 5107244 - DNA, 25 bp, Homo sapien
gaactgaatactgctctcctgtgct

SEQ ID NO: 5107245 - DNA, 25 bp, Homo sapien
aacatcagctggctgggaatctctc

SEQ ID NO: 5107246 - DNA, 25 bp, Homo sapien
aacgagaacgttcccgagtgtgcct

SEQ ID NO: 5107247 - DNA, 25 bp, Homo sapien
tgggaggatgccagttccaatgctt

SEQ ID NO: 5107248 - DNA, 25 bp, Homo sapien
catgtctgacccataaagtgagttc

SEQ ID NO: 5107249 - DNA, 25 bp, Homo sapien
cagatctgacttgaggctaaactcc

SEQ ID NO: 5107250 - DNA, 25 bp, Homo sapien
tccactcggttagtcagggacgtag

SEQ ID NO: 5107251 - DNA, 25 bp, Homo sapien
cagggacgtaggcttgtttgaaaat

SEQ ID NO: 5107252 - DNA, 25 bp, Homo sapien
tgaaaataatcgtacttcacaaagt

SEQ ID NO: 5107253 - DNA, 25 bp, Homo sapien
agtttgattactttggtgggcacag

SEQ ID NO: 5107254 - DNA, 25 bp, Homo sapien
tctttgcagacaaagtgaagtggaa

SEQ ID NO: 5107255 - DNA, 25 bp, Homo sapien
tctcttactgcaaatctatctgaaa

SEQ ID NO: 5107256 - DNA, 25 bp, Homo sapien
gcagcctgagagctaatgatagaga

SEQ ID NO: 5107257 - DNA, 25 bp, Homo sapien
catcctaggatcaggcagaagttgg

SEQ ID NO: 5107258 - DNA, 25 bp, Homo sapien
gggttgcaaccagtccactgtctgg

SEQ ID NO: 5107259 - DNA, 25 bp, Homo sapien
catgggttgcaaccagtccactgtc

SEQ ID NO: 5107260 - DNA, 25 bp, Homo sapien
ctacatgggttgcaaccagtccact

SEQ ID NO: 5107261 - DNA, 25 bp, Homo sapien
tacatgggttgcaaccagtccactg

SEQ ID NO: 5107262 - DNA, 25 bp, Homo sapien
ctatgtaccctcacttcactggtct

SEQ ID NO: 5107263 - DNA, 25 bp, Homo sapien
taccctcacttcactggtctgtgtg

SEQ ID NO: 5107264 - DNA, 25 bp, Homo sapien
cactggtctgtgtggctagacagac

SEQ ID NO: 5107265 - DNA, 25 bp, Homo sapien
tgtaccctcacttcactggtctgtg

SEQ ID NO: 5107266 - DNA, 25 bp, Homo sapien
cttagaaacttcaggatgtgagtac

SEQ ID NO: 5107267 - DNA, 25 bp, Homo sapien
aattggttgcctacacacagaggac

SEQ ID NO: 5107268 - DNA, 25 bp, Homo sapien
tcttttgagataggaataccttttc

SEQ ID NO: 5107269 - DNA, 25 bp, Homo sapien
tttgcactttcaagtgcaaaggtaa

SEQ ID NO: 5107270 - DNA, 25 bp, Homo sapien
tagttcctgttgtaagatggctaca

SEQ ID NO: 5107271 - DNA, 25 bp, Homo sapien
taatcccaaaacgtacctagactca

SEQ ID NO: 5107272 - DNA, 25 bp, Homo sapien
cctagactcaaaaatcaggccattt

SEQ ID NO: 5107273 - DNA, 25 bp, Homo sapien
gagtatctacatgagggaaaatggc

SEQ ID NO: 5107274 - DNA, 25 bp, Homo sapien
gctccagtgggtgatttatgctcgt

SEQ ID NO: 5107275 - DNA, 25 bp, Homo sapien
ttgctgatgctatgaggaaatgcca

SEQ ID NO: 5107276 - DNA, 25 bp, Homo sapien
catagggcgactttagccaaccgct

SEQ ID NO: 5107277 - DNA, 25 bp, Homo sapien
cctcattaggatagcagtaggctcc

SEQ ID NO: 5107278 - DNA, 25 bp, Homo sapien
tcctggagctgacttctcctgccgc

SEQ ID NO: 5107279 - DNA, 25 bp, Homo sapien
ctgacttctcctgccgccaaatgaa

SEQ ID NO: 5107280 - DNA, 25 bp, Homo sapien
tggagctgacttctcctgccgccaa

SEQ ID NO: 5107281 - DNA, 25 bp, Homo sapien
ttctcctgccgccaaatgaaggcaa

SEQ ID NO: 5107282 - DNA, 25 bp, Homo sapien
ccgccggccgaccacacggcagcag

SEQ ID NO: 5107283 - DNA, 25 bp, Homo sapien
ccggccgaccacacggcagcaggca

SEQ ID NO: 5107284 - DNA, 25 bp, Homo sapien
gaaccgccggccgaccacacggcag

SEQ ID NO: 5107285 - DNA, 25 bp, Homo sapien
ttggagaaccgccggccgaccacac

SEQ ID NO: 5107286 - DNA, 25 bp, Homo sapien
cactccgcaatttgatatagtcacc

SEQ ID NO: 5107287 - DNA, 25 bp, Homo sapien
ttacttttgagatcactaaacaaac

SEQ ID NO: 5107288 - DNA, 25 bp, Homo sapien
gcatttccattcactccgcaatttg

SEQ ID NO: 5107289 - DNA, 25 bp, Homo sapien
cacctcaatgtggtctctcgagaat

SEQ ID NO: 5107290 - DNA, 25 bp, Homo sapien
ggaaaagacacatacgacctgatca

SEQ ID NO: 5107291 - DNA, 25 bp, Homo sapien
tatactccattaggagaggaaggct

SEQ ID NO: 5107292 - DNA, 25 bp, Homo sapien
tagtgcctgcctagaagagaattca

SEQ ID NO: 5107293 - DNA, 25 bp, Homo sapien
ttcctgaaagcgtgccttgagggca

SEQ ID NO: 5107294 - DNA, 25 bp, Homo sapien
tctgtgctgttccagacccctacat

SEQ ID NO: 5107295 - DNA, 25 bp, Homo sapien
tagaaagtttgttgggtgaggaaca

SEQ ID NO: 5107296 - DNA, 25 bp, Homo sapien
tcttgtgttcacttggaaaagatca

SEQ ID NO: 5107297 - DNA, 25 bp, Homo sapien
tgtaccctggcatggaactactggg

SEQ ID NO: 5107298 - DNA, 25 bp, Homo sapien
gatgccacgctttttgtgacgcttt

SEQ ID NO: 5107299 - DNA, 25 bp, Homo sapien
cacgccctcatgatatttgtggcta

SEQ ID NO: 5107300 - DNA, 25 bp, Homo sapien
ttagatgctggaacagccacgccct

SEQ ID NO: 5107301 - DNA, 25 bp, Homo sapien
gtgacgctttttgtccttatcaggg

SEQ ID NO: 5107302 - DNA, 25 bp, Homo sapien
ttgtaaagatccactaaagcatcag

SEQ ID NO: 5107303 - DNA, 25 bp, Homo sapien
agaagatattaagtctctctctagg

SEQ ID NO: 5107304 - DNA, 25 bp, Homo sapien
aactttcttcttagtaggagatggt

SEQ ID NO: 5107305 - DNA, 25 bp, Homo sapien
ttttgtggaccatttgttgtaaaga

SEQ ID NO: 5107306 - DNA, 25 bp, Homo sapien
aagtcacaagggactacacaggaag

SEQ ID NO: 5107307 - DNA, 25 bp, Homo sapien
ggaagagctgactctatattgctgt

SEQ ID NO: 5107308 - DNA, 25 bp, Homo sapien
gcagtgaaaacagcaatactggcac

SEQ ID NO: 5107309 - DNA, 25 bp, Homo sapien
tggcacagacaatataaactgttac

SEQ ID NO: 5107310 - DNA, 25 bp, Homo sapien
tacccttgagtattattagaggcac

SEQ ID NO: 5107311 - DNA, 25 bp, Homo sapien
agaggcacagcctctatccagagga

SEQ ID NO: 5107312 - DNA, 25 bp, Homo sapien
agaactaacatgacctgcagacatc

SEQ ID NO: 5107313 - DNA, 25 bp, Homo sapien
tctctgtacccgtaaaactcactga

SEQ ID NO: 5107314 - DNA, 25 bp, Homo sapien
tgctggtctctggacatcccaaaaa

SEQ ID NO: 5107315 - DNA, 25 bp, Homo sapien
tggcaaatgacagcacttgggtact

SEQ ID NO: 5107316 - DNA, 25 bp, Homo sapien
tactgcagggatgctagcaacaaag

SEQ ID NO: 5107317 - DNA, 25 bp, Homo sapien
tcagggtaatctatgccacgtggca

SEQ ID NO: 5107318 - DNA, 25 bp, Homo sapien
tccagcctgctaaaagatccaggag

SEQ ID NO: 5107319 - DNA, 25 bp, Homo sapien
tgctatgttcttactctgagtccca

SEQ ID NO: 5107320 - DNA, 25 bp, Homo sapien
tcacagtgtggtatctagtgctact

SEQ ID NO: 5107321 - DNA, 25 bp, Homo sapien
tgttaaaagtctagccagtccttgg

SEQ ID NO: 5107322 - DNA, 25 bp, Homo sapien
caacagtagactcttctggagcagt

SEQ ID NO: 5107323 - DNA, 25 bp, Homo sapien
tgtaaccgtgtacgtggcactccca

SEQ ID NO: 5107324 - DNA, 25 bp, Homo sapien
gatgtaagcacataggccctgtcaa

SEQ ID NO: 5107325 - DNA, 25 bp, Homo sapien
caagggcagaaatgtccgcaataca

SEQ ID NO: 5107326 - DNA, 25 bp, Homo sapien
cactgtcttggctcaagatggcagc

SEQ ID NO: 5107327 - DNA, 25 bp, Homo sapien
caggatgtcgagtgattttacagac

SEQ ID NO: 5107328 - DNA, 25 bp, Homo sapien
cacacacaggatgtcgagtgatttt

SEQ ID NO: 5107329 - DNA, 25 bp, Homo sapien
aggcctggggtctcatcctgacaca

SEQ ID NO: 5107330 - DNA, 25 bp, Homo sapien
tctggtccacccaaaattctggtta

SEQ ID NO: 5107331 - DNA, 25 bp, Homo sapien
tcccataggaacagaagacactcca

SEQ ID NO: 5107332 - DNA, 25 bp, Homo sapien
tccctgttcaaaaatctgcctacgg

SEQ ID NO: 5107333 - DNA, 25 bp, Homo sapien
tactgactatctatggtgaatcagg

SEQ ID NO: 5107334 - DNA, 25 bp, Homo sapien
ctctgtgatgttaaccaatatgtga

SEQ ID NO: 5107335 - DNA, 25 bp, Homo sapien
gcagcaacagaattaactcactaaa

SEQ ID NO: 5107336 - DNA, 25 bp, Homo sapien
cagagggccttgtgattgttccatg

SEQ ID NO: 5107337 - DNA, 25 bp, Homo sapien
tactgccagagtgtttacccctatt

SEQ ID NO: 5107338 - DNA, 25 bp, Homo sapien
taaattacagtgatgatgtagcctc

SEQ ID NO: 5107339 - DNA, 25 bp, Homo sapien
tacagtgatgatgtagcctcatctc

SEQ ID NO: 5107340 - DNA, 25 bp, Homo sapien
tctcattagagatcattgtccccag

SEQ ID NO: 5107341 - DNA, 25 bp, Homo sapien
tccccagtagacagttgtgtttatg

SEQ ID NO: 5107342 - DNA, 25 bp, Homo sapien
gagacactttgtgcctcctatttgc

SEQ ID NO: 5107343 - DNA, 25 bp, Homo sapien
gtcgcagaacatagcctgaatgcat

SEQ ID NO: 5107344 - DNA, 25 bp, Homo sapien
cctgaatgcatagtagttgagtcct

SEQ ID NO: 5107345 - DNA, 25 bp, Homo sapien
gcattacaaaagcagtgcaccgtgc

SEQ ID NO: 5107346 - DNA, 25 bp, Homo sapien
tcctccacagctaagtttaatgcat

SEQ ID NO: 5107347 - DNA, 25 bp, Homo sapien
aggaggaattatggcaactgtccaa

SEQ ID NO: 5107348 - DNA, 25 bp, Homo sapien
tatccaggcaatgttctgttgcttg

SEQ ID NO: 5107349 - DNA, 25 bp, Homo sapien
gaccttgagctaaactctggtatgt

SEQ ID NO: 5107350 - DNA, 25 bp, Homo sapien
tcttgtgacacagaactgcctctat

SEQ ID NO: 5107351 - DNA, 25 bp, Homo sapien
taatagcacattgtaatggcagcag

SEQ ID NO: 5107352 - DNA, 25 bp, Homo sapien
gctggtgagataatggaaggctaca

SEQ ID NO: 5107353 - DNA, 25 bp, Homo sapien
gaaaataatcctgtacagagcttgc

SEQ ID NO: 5107354 - DNA, 25 bp, Homo sapien
taaccttcagactggttaccatggc

SEQ ID NO: 5107355 - DNA, 25 bp, Homo sapien
ctgtgaaataaccttcagactggtt

SEQ ID NO: 5107356 - DNA, 25 bp, Homo sapien
ccttcagactggttaccatggcctg

SEQ ID NO: 5107357 - DNA, 25 bp, Homo sapien
cagactggttaccatggcctgcaag

SEQ ID NO: 5107358 - DNA, 25 bp, Homo sapien
aggatgtagcagacgcctttcataa

SEQ ID NO: 5107359 - DNA, 25 bp, Homo sapien
tagcagacgcctttcataatcccca

SEQ ID NO: 5107360 - DNA, 25 bp, Homo sapien
gacgcctttcataatccccattcat

SEQ ID NO: 5107361 - DNA, 25 bp, Homo sapien
catgaccaaaggatgtagcagacgc

SEQ ID NO: 5107362 - DNA, 25 bp, Homo sapien
ttgaaggatggtgagtcccgtgtct

SEQ ID NO: 5107363 - DNA, 25 bp, Homo sapien
agtcccgtgtcttgtgccaactgct

SEQ ID NO: 5107364 - DNA, 25 bp, Homo sapien
gagtcccgtgtcttgtgccaactgc

SEQ ID NO: 5107365 - DNA, 25 bp, Homo sapien
tgaaggatggtgagtcccgtgtctt

SEQ ID NO: 5107366 - DNA, 25 bp, Homo sapien
taggatgatactactctatcgatta

SEQ ID NO: 5107367 - DNA, 25 bp, Homo sapien
gaaaataggatgatactactctatc

SEQ ID NO: 5107368 - DNA, 25 bp, Homo sapien
aaataggatgatactactctatcga

SEQ ID NO: 5107369 - DNA, 25 bp, Homo sapien
ggatgatactactctatcgattacc

SEQ ID NO: 5107370 - DNA, 25 bp, Homo sapien
tatgagtggagtttgctagcaaccc

SEQ ID NO: 5107371 - DNA, 25 bp, Homo sapien
taaggccgtccacccatagtaagca

SEQ ID NO: 5107372 - DNA, 25 bp, Homo sapien
gatagatcccctgaatgacagcgct

SEQ ID NO: 5107373 - DNA, 25 bp, Homo sapien
tctctcaaggcagcagtaaggtcat

SEQ ID NO: 5107374 - DNA, 25 bp, Homo sapien
gaaaataacttgtaccgatgctcag

SEQ ID NO: 5107375 - DNA, 25 bp, Homo sapien
atagcaaaacccctgcctcaacaaa

SEQ ID NO: 5107376 - DNA, 25 bp, Homo sapien
ccgatgctcagtatagctaagatga

SEQ ID NO: 5107377 - DNA, 25 bp, Homo sapien
catggtattgtcattatttgtcaaa

SEQ ID NO: 5107378 - DNA, 25 bp, Homo sapien
cagtacaccctaggccaaaactctg

SEQ ID NO: 5107379 - DNA, 25 bp, Homo sapien
ttcccaggtccgcaacactggtgtg

SEQ ID NO: 5107380 - DNA, 25 bp, Homo sapien
gcatccagtaagtacgacacaagta

SEQ ID NO: 5107381 - DNA, 25 bp, Homo sapien
tgtgtgtgtcttccataaagttcta

SEQ ID NO: 5107382 - DNA, 25 bp, Homo sapien
tatgaaaccctatgacccctattga

SEQ ID NO: 5107383 - DNA, 25 bp, Homo sapien
gaagtgatgcctgaatgctttgcag

SEQ ID NO: 5107384 - DNA, 25 bp, Homo sapien
taggttacacttcaattctcaaggg

SEQ ID NO: 5107385 - DNA, 25 bp, Homo sapien
tgaatagcaaacaagtgacccagag

SEQ ID NO: 5107386 - DNA, 25 bp, Homo sapien
ctttaacagtattaacgatgtgatt

SEQ ID NO: 5107387 - DNA, 25 bp, Homo sapien
tttcataaggagctttcgtctttaa

SEQ ID NO: 5107388 - DNA, 25 bp, Homo sapien
ctgagtaaacttatggtgtaaaact

SEQ ID NO: 5107389 - DNA, 25 bp, Homo sapien
taacgatgtgattttatgcagtggg

SEQ ID NO: 5107390 - DNA, 25 bp, Homo sapien
ttttaaaccagaggacactgtcgcc

SEQ ID NO: 5107391 - DNA, 25 bp, Homo sapien
taattcctcaggttgtaccagctgg

SEQ ID NO: 5107392 - DNA, 25 bp, Homo sapien
tatggatgaggcgtagccaagctct

SEQ ID NO: 5107393 - DNA, 25 bp, Homo sapien
gaatgagagtttcagagcgcacact

SEQ ID NO: 5107394 - DNA, 25 bp, Homo sapien
cactggagcaatgcagaccggatct

SEQ ID NO: 5107395 - DNA, 25 bp, Homo sapien
gtctacagaaagctcctcggcgtgc

SEQ ID NO: 5107396 - DNA, 25 bp, Homo sapien
tctaagaccaacgtttgccctcgga

SEQ ID NO: 5107397 - DNA, 25 bp, Homo sapien
tatgagggcattgaacaggacagcc

SEQ ID NO: 5107398 - DNA, 25 bp, Homo sapien
ccactcaccggcaagttttctagca

SEQ ID NO: 5107399 - DNA, 25 bp, Homo sapien
aagacaggtctttgttgctatactg

SEQ ID NO: 5107400 - DNA, 25 bp, Homo sapien
agtcaaaacactacccagtggcggg

SEQ ID NO: 5107401 - DNA, 25 bp, Homo sapien
tgggatgatcgaatgaaaagtgctt

SEQ ID NO: 5107402 - DNA, 25 bp, Homo sapien
tccaacagttccaagattgcaatac

SEQ ID NO: 5107403 - DNA, 25 bp, Homo sapien
agattgcaatacatcatcagtgtgt

SEQ ID NO: 5107404 - DNA, 25 bp, Homo sapien
atccaacagttccaagattgcaata

SEQ ID NO: 5107405 - DNA, 25 bp, Homo sapien
aagattgcaatacatcatcagtgtg

SEQ ID NO: 5107406 - DNA, 25 bp, Homo sapien
tgtgagaaccaggagaggtgaggag

SEQ ID NO: 5107407 - DNA, 25 bp, Homo sapien
ctgtgagaaccaggagaggtgagga

SEQ ID NO: 5107408 - DNA, 25 bp, Homo sapien
ggagaggtgaggagatcacagtggg

SEQ ID NO: 5107409 - DNA, 25 bp, Homo sapien
gaggtgaggagatcacagtgggcat

SEQ ID NO: 5107410 - DNA, 25 bp, Homo sapien
ctgaatagttttctgagcaagatct

SEQ ID NO: 5107411 - DNA, 25 bp, Homo sapien
ttgtcctttagtttatcctccactc

SEQ ID NO: 5107412 - DNA, 25 bp, Homo sapien
tgtcctttagtttatcctccactcc

SEQ ID NO: 5107413 - DNA, 25 bp, Homo sapien
tatggaatgtcaggagtacacagcc

SEQ ID NO: 5107414 - DNA, 25 bp, Homo sapien
gccacatgacagttttgctcactca

SEQ ID NO: 5107415 - DNA, 25 bp, Homo sapien
gaagataatgggtttgctctatagc

SEQ ID NO: 5107416 - DNA, 25 bp, Homo sapien
aattggactccctgcaggtggtgga

SEQ ID NO: 5107417 - DNA, 25 bp, Homo sapien
cattgtggaagagtctaaattatca

SEQ ID NO: 5107418 - DNA, 25 bp, Homo sapien
tcccactataagtcaaactgaggtc

SEQ ID NO: 5107419 - DNA, 25 bp, Homo sapien
tatgctacacacagcagagccatgt

SEQ ID NO: 5107420 - DNA, 25 bp, Homo sapien
ccatgtttagatggcttcagggtga

SEQ ID NO: 5107421 - DNA, 25 bp, Homo sapien
tgtcagctacccctagaatgtgtag

SEQ ID NO: 5107422 - DNA, 25 bp, Homo sapien
caacaccaacgacatttattccagg

SEQ ID NO: 5107423 - DNA, 25 bp, Homo sapien
tagccaactgcccacaggtactaga

SEQ ID NO: 5107424 - DNA, 25 bp, Homo sapien
gaagccttgcagtggacaacaccaa

SEQ ID NO: 5107425 - DNA, 25 bp, Homo sapien
aaggaagaagcatgactgtgaacat

SEQ ID NO: 5107426 - DNA, 25 bp, Homo sapien
agtcaaggaagaagcatgactgtga

SEQ ID NO: 5107427 - DNA, 25 bp, Homo sapien
ggaagaagcatgactgtgaacattt

SEQ ID NO: 5107428 - DNA, 25 bp, Homo sapien
tcaaggaagaagcatgactgtgaac

SEQ ID NO: 5107429 - DNA, 25 bp, Homo sapien
tagtgccactcatctagaatatcca

SEQ ID NO: 5107430 - DNA, 25 bp, Homo sapien
tggcacagtgactagagcaccgcaa

SEQ ID NO: 5107431 - DNA, 25 bp, Homo sapien
cagctgtcagtggtagcaagcaccc

SEQ ID NO: 5107432 - DNA, 25 bp, Homo sapien
ggtcacatgttaccaaagagatgtt

SEQ ID NO: 5107433 - DNA, 25 bp, Homo sapien
cattatctgcagactcttagaggga

SEQ ID NO: 5107434 - DNA, 25 bp, Homo sapien
tacgctctccagagtcatacgcatg

SEQ ID NO: 5107435 - DNA, 25 bp, Homo sapien
tagcctctccaaaagtgacaagtca

SEQ ID NO: 5107436 - DNA, 25 bp, Homo sapien
tgtatatgaagtccctgaactgcta

SEQ ID NO: 5107437 - DNA, 25 bp, Homo sapien
gaaacaatactagccaccactcctt

SEQ ID NO: 5107438 - DNA, 25 bp, Homo sapien
gaatgtctggagtttatcaccacta

SEQ ID NO: 5107439 - DNA, 25 bp, Homo sapien
taaagagttagatgctcataagggc

SEQ ID NO: 5107440 - DNA, 25 bp, Homo sapien
tctgttacctctcctaattagtgac

SEQ ID NO: 5107441 - DNA, 25 bp, Homo sapien
cctgttttaccacagttggacactt

SEQ ID NO: 5107442 - DNA, 25 bp, Homo sapien
tgtaacccccagtgacctttgagta

SEQ ID NO: 5107443 - DNA, 25 bp, Homo sapien
tgacctttgagtacacaggcttggg

SEQ ID NO: 5107444 - DNA, 25 bp, Homo sapien
ttgatttatgtttgcctgttttacc

SEQ ID NO: 5107445 - DNA, 25 bp, Homo sapien
tcgcagttggagtaaaactagatct

SEQ ID NO: 5107446 - DNA, 25 bp, Homo sapien
gttggagtaaaactagatcttggca

SEQ ID NO: 5107447 - DNA, 25 bp, Homo sapien
gaaaagatgaatcgcagttggagta

SEQ ID NO: 5107448 - DNA, 25 bp, Homo sapien
ggaagaggaaaagatgaatcgcagt

SEQ ID NO: 5107449 - DNA, 25 bp, Homo sapien
caagaaagtgaaacaaatcgttatt

SEQ ID NO: 5107450 - DNA, 25 bp, Homo sapien
tgtaaccaagaaagtgaaacaaatc

SEQ ID NO: 5107451 - DNA, 25 bp, Homo sapien
ctgtaaccaagaaagtgaaacaaat

SEQ ID NO: 5107452 - DNA, 25 bp, Homo sapien
ccaagaaagtgaaacaaatcgttat

SEQ ID NO: 5107453 - DNA, 25 bp, Homo sapien
gcactattcttctccgggcattaat

SEQ ID NO: 5107454 - DNA, 25 bp, Homo sapien
gggctgcactattcttctccgggca

SEQ ID NO: 5107455 - DNA, 25 bp, Homo sapien
gctgcactattcttctccgggcatt

SEQ ID NO: 5107456 - DNA, 25 bp, Homo sapien
ctgctcggttggactggtctatcat

SEQ ID NO: 5107457 - DNA, 25 bp, Homo sapien
ttgaggatggttttcgcttgcgtga

SEQ ID NO: 5107458 - DNA, 25 bp, Homo sapien
gatggttttcgcttgcgtgacttga

SEQ ID NO: 5107459 - DNA, 25 bp, Homo sapien
ttcgcttgcgtgacttgaatacagt

SEQ ID NO: 5107460 - DNA, 25 bp, Homo sapien
ttttcgcttgcgtgacttgaataca

SEQ ID NO: 5107461 - DNA, 25 bp, Homo sapien
taattgccaggcgttcctatactca

SEQ ID NO: 5107462 - DNA, 25 bp, Homo sapien
gctgcttcagaagtaagctgccttg

SEQ ID NO: 5107463 - DNA, 25 bp, Homo sapien
aagtttacagcaattccacaccaag

SEQ ID NO: 5107464 - DNA, 25 bp, Homo sapien
tactgagtcccacaagcaatcctga

SEQ ID NO: 5107465 - DNA, 25 bp, Homo sapien
tgtgtgttgcctcaatgcgatgcta

SEQ ID NO: 5107466 - DNA, 25 bp, Homo sapien
aagtaaagactcacatcacccctag

SEQ ID NO: 5107467 - DNA, 25 bp, Homo sapien
catagtgctccctaagagatgagag

SEQ ID NO: 5107468 - DNA, 25 bp, Homo sapien
gcttgggttttgtctggtgaccaca

SEQ ID NO: 5107469 - DNA, 25 bp, Homo sapien
gtccatcaggattataaggtgttcc

SEQ ID NO: 5107470 - DNA, 25 bp, Homo sapien
cattacgaaacctcccatgggctgt

SEQ ID NO: 5107471 - DNA, 25 bp, Homo sapien
attcccatatgttgctgaccgtcca

SEQ ID NO: 5107472 - DNA, 25 bp, Homo sapien
tgctgaccgtccattacgaaacctc

SEQ ID NO: 5107473 - DNA, 25 bp, Homo sapien
gagaaatagtgagatcttcagtgca

SEQ ID NO: 5107474 - DNA, 25 bp, Homo sapien
tagatgcacagatagcagacaaggc

SEQ ID NO: 5107475 - DNA, 25 bp, Homo sapien
tcaacagatagtgccaaaagaccct

SEQ ID NO: 5107476 - DNA, 25 bp, Homo sapien
gatgaggcggatttacctgtgttga

SEQ ID NO: 5107477 - DNA, 25 bp, Homo sapien
tattcatgcccattccactcatagg

SEQ ID NO: 5107478 - DNA, 25 bp, Homo sapien
attcatgcccattccactcataggt

SEQ ID NO: 5107479 - DNA, 25 bp, Homo sapien
ttcatgcccattccactcataggtc

SEQ ID NO: 5107480 - DNA, 25 bp, Homo sapien
atattcatgcccattccactcatag

SEQ ID NO: 5107481 - DNA, 25 bp, Homo sapien
gtagtgccactgcccctccatgccc

SEQ ID NO: 5107482 - DNA, 25 bp, Homo sapien
tgtagtgccactgcccctccatgcc

SEQ ID NO: 5107483 - DNA, 25 bp, Homo sapien
atgtagtgccactgcccctccatgc

SEQ ID NO: 5107484 - DNA, 25 bp, Homo sapien
tgctttgcgattggttaactagatg

SEQ ID NO: 5107485 - DNA, 25 bp, Homo sapien
cttgctttgcgattggttaactaga

SEQ ID NO: 5107486 - DNA, 25 bp, Homo sapien
ctttgcgattggttaactagatgaa

SEQ ID NO: 5107487 - DNA, 25 bp, Homo sapien
ttgcgattggttaactagatgaagg

SEQ ID NO: 5107488 - DNA, 25 bp, Homo sapien
gaatctgggacagttttcctaggcc

SEQ ID NO: 5107489 - DNA, 25 bp, Homo sapien
aatgtaactcatgcatcaactgcgg

SEQ ID NO: 5107490 - DNA, 25 bp, Homo sapien
tggatatagtcaattagcctgggct

SEQ ID NO: 5107491 - DNA, 25 bp, Homo sapien
cccagagaagatgaccagtacgaat

SEQ ID NO: 5107492 - DNA, 25 bp, Homo sapien
tggtcaccaaacatctcacaggcag

SEQ ID NO: 5107493 - DNA, 25 bp, Homo sapien
caagaatacactgagctggtcacca

SEQ ID NO: 5107494 - DNA, 25 bp, Homo sapien
tgaaaaagcaatagtgtggtcctgg

SEQ ID NO: 5107495 - DNA, 25 bp, Homo sapien
caggcagctgaactacacaggctca

SEQ ID NO: 5107496 - DNA, 25 bp, Homo sapien
tgggtataacttggctgtcccatac

SEQ ID NO: 5107497 - DNA, 25 bp, Homo sapien
acatactcccctggcatactttgca

SEQ ID NO: 5107498 - DNA, 25 bp, Homo sapien
catactcacacccattggaccaccc

SEQ ID NO: 5107499 - DNA, 25 bp, Homo sapien
attggaccaccccgggctacatact

SEQ ID NO: 5107500 - DNA, 25 bp, Homo sapien
gcttgatgctgacattggcattcca

SEQ ID NO: 5107501 - DNA, 25 bp, Homo sapien
tgtccaggaatgtacgtatgcatgg

SEQ ID NO: 5107502 - DNA, 25 bp, Homo sapien
cattgttgggtctcctgtattaaga

SEQ ID NO: 5107503 - DNA, 25 bp, Homo sapien
catgacttgtccactcattgttggg

SEQ ID NO: 5107504 - DNA, 25 bp, Homo sapien
gcatggctgaaatcctaggcgagaa

SEQ ID NO: 5107505 - DNA, 25 bp, Homo sapien
gacaattaggcttctaaacacacgg

SEQ ID NO: 5107506 - DNA, 25 bp, Homo sapien
cacatgaccgatgctttgctcagaa

SEQ ID NO: 5107507 - DNA, 25 bp, Homo sapien
tctacataaatgctccaaggtggga

SEQ ID NO: 5107508 - DNA, 25 bp, Homo sapien
ctgcactcaaacgactacaactggg

SEQ ID NO: 5107509 - DNA, 25 bp, Homo sapien
tcagaaacgctaagactcagtgtgc

SEQ ID NO: 5107510 - DNA, 25 bp, Homo sapien
acaactgggcttggcgttattatac

SEQ ID NO: 5107511 - DNA, 25 bp, Homo sapien
tagtaaatcttgtatgcatgccaac

SEQ ID NO: 5107512 - DNA, 25 bp, Homo sapien
gatattaggagttcattaagtcagc

SEQ ID NO: 5107513 - DNA, 25 bp, Homo sapien
tattttctaccatttagccggctgc

SEQ ID NO: 5107514 - DNA, 25 bp, Homo sapien
gccggctgccatgcagaaatcttgt

SEQ ID NO: 5107515 - DNA, 25 bp, Homo sapien
tatactgctcatcctaggtaacatc

SEQ ID NO: 5107516 - DNA, 25 bp, Homo sapien
gaattgccactaggtcaacaaggga

SEQ ID NO: 5107517 - DNA, 25 bp, Homo sapien
gaatgcattgctactccagcaggtg

SEQ ID NO: 5107518 - DNA, 25 bp, Homo sapien
tgcgcatccacgtgtttagaaacaa

SEQ ID NO: 5107519 - DNA, 25 bp, Homo sapien
caaggccccatcagcaaaaggtgag

SEQ ID NO: 5107520 - DNA, 25 bp, Homo sapien
tgagaatcgaacagccacaaaagtc

SEQ ID NO: 5107521 - DNA, 25 bp, Homo sapien
cagtgttactgggatatttctgctc

SEQ ID NO: 5107522 - DNA, 25 bp, Homo sapien
gactcatgtggattgggattgcctt

SEQ ID NO: 5107523 - DNA, 25 bp, Homo sapien
tctgatcttttagtaccgaccttgt

SEQ ID NO: 5107524 - DNA, 25 bp, Homo sapien
tgtgtcaaattatcagagcacactc

SEQ ID NO: 5107525 - DNA, 25 bp, Homo sapien
taaatatatgcatggctacgtatcc

SEQ ID NO: 5107526 - DNA, 25 bp, Homo sapien
tacgtatccattccagtctgagcat

SEQ ID NO: 5107527 - DNA, 25 bp, Homo sapien
tctttaggataatctgccttccaga

SEQ ID NO: 5107528 - DNA, 25 bp, Homo sapien
gcggtcaacgagcaaggtcatcttt

SEQ ID NO: 5107529 - DNA, 25 bp, Homo sapien
ttaacatacttcctatactgctccc

SEQ ID NO: 5107530 - DNA, 25 bp, Homo sapien
cagtaaacttttggaccattgtgca

SEQ ID NO: 5107531 - DNA, 25 bp, Homo sapien
gaggacccatgccagatccgggaca

SEQ ID NO: 5107532 - DNA, 25 bp, Homo sapien
acttcgtcttggcaggttccggatc

SEQ ID NO: 5107533 - DNA, 25 bp, Homo sapien
taaaagattgacgaggattgtcctc

SEQ ID NO: 5107534 - DNA, 25 bp, Homo sapien
tctgcctgagtggtcgcagagtgca

SEQ ID NO: 5107535 - DNA, 25 bp, Homo sapien
cagccggtgactatgattgcagcca

SEQ ID NO: 5107536 - DNA, 25 bp, Homo sapien
tcccctgctgaggaatagctccgtt

SEQ ID NO: 5107537 - DNA, 25 bp, Homo sapien
cccctgctgaggaatagctccgttc

SEQ ID NO: 5107538 - DNA, 25 bp, Homo sapien
cctgctgaggaatagctccgttcct

SEQ ID NO: 5107539 - DNA, 25 bp, Homo sapien
gctgaggaatagctccgttcctcca

SEQ ID NO: 5107540 - DNA, 25 bp, Homo sapien
accttgaacgatgtgcagtctctga

SEQ ID NO: 5107541 - DNA, 25 bp, Homo sapien
gaaaccatgtctttgtaatgcaccc

SEQ ID NO: 5107542 - DNA, 25 bp, Homo sapien
tgtgcccaaagttcagtatatcagg

SEQ ID NO: 5107543 - DNA, 25 bp, Homo sapien
ggatcccacctggaataaattttga

SEQ ID NO: 5107544 - DNA, 25 bp, Homo sapien
caacctagaatctgccaacctagaa

SEQ ID NO: 5107545 - DNA, 25 bp, Homo sapien
ctagaatctgccaacctagaatctg

SEQ ID NO: 5107546 - DNA, 25 bp, Homo sapien
cttgccagtcaacctagaatctgcc

SEQ ID NO: 5107547 - DNA, 25 bp, Homo sapien
cagtcaacctagaatctgccaacct

SEQ ID NO: 5107548 - DNA, 25 bp, Homo sapien
tctctgatgaactacatcgtttctt

SEQ ID NO: 5107549 - DNA, 25 bp, Homo sapien
tctagctctctgatgaactacatcg

SEQ ID NO: 5107550 - DNA, 25 bp, Homo sapien
tcagtctagctctctgatgaactac

SEQ ID NO: 5107551 - DNA, 25 bp, Homo sapien
cccatcagtctagctctctgatgaa

SEQ ID NO: 5107552 - DNA, 25 bp, Homo sapien
tgaaacctgaaagcaccagacaatt

SEQ ID NO: 5107553 - DNA, 25 bp, Homo sapien
ggagtccatagaaccacaatttcaa

SEQ ID NO: 5107554 - DNA, 25 bp, Homo sapien
aaatctctggtaatagccctctgct

SEQ ID NO: 5107555 - DNA, 25 bp, Homo sapien
cagacaattgtacgcccaacccttg

SEQ ID NO: 5107556 - DNA, 25 bp, Homo sapien
gaaagcctagtggtctcttcccagt

SEQ ID NO: 5107557 - DNA, 25 bp, Homo sapien
tggcatcatggagacactgtacccg

SEQ ID NO: 5107558 - DNA, 25 bp, Homo sapien
gccatctcataatcccaagggtgaa

SEQ ID NO: 5107559 - DNA, 25 bp, Homo sapien
tcattgtttggcagctacgaaagcc

SEQ ID NO: 5107560 - DNA, 25 bp, Homo sapien
tagcctcagttctaaatgggtgcca

SEQ ID NO: 5107561 - DNA, 25 bp, Homo sapien
tgggtgccaacacaagtactttaag

SEQ ID NO: 5107562 - DNA, 25 bp, Homo sapien
caagtttgtattgcccctcgcatga

SEQ ID NO: 5107563 - DNA, 25 bp, Homo sapien
tacaaagcttacacacctggcacac

SEQ ID NO: 5107564 - DNA, 25 bp, Homo sapien
ccttaattgaactcataccctaata

SEQ ID NO: 5107565 - DNA, 25 bp, Homo sapien
cataccctaatactgtttgagcttc

SEQ ID NO: 5107566 - DNA, 25 bp, Homo sapien
ccatgactgacaggtgtcctagaat

SEQ ID NO: 5107567 - DNA, 25 bp, Homo sapien
attgcaagtctataaacttatgaga

SEQ ID NO: 5107568 - DNA, 25 bp, Homo sapien
catgaaagtcttgcccattcctgca

SEQ ID NO: 5107569 - DNA, 25 bp, Homo sapien
caatcgaaatcttatggccagcaaa

SEQ ID NO: 5107570 - DNA, 25 bp, Homo sapien
cagagacagagtatgcaattcacag

SEQ ID NO: 5107571 - DNA, 25 bp, Homo sapien
tctgcagaccgaaccgtgtagacca

SEQ ID NO: 5107572 - DNA, 25 bp, Homo sapien
tatggcacccatatgctttcctgtc

SEQ ID NO: 5107573 - DNA, 25 bp, Homo sapien
tgcaattggcacaacctattcctaa

SEQ ID NO: 5107574 - DNA, 25 bp, Homo sapien
gtggaccccactgaaactaagagct

SEQ ID NO: 5107575 - DNA, 25 bp, Homo sapien
gctatgggccactaatatgaaagaa

SEQ ID NO: 5107576 - DNA, 25 bp, Homo sapien
caggttacagtctataccatgagag

SEQ ID NO: 5107577 - DNA, 25 bp, Homo sapien
cgatgaatcttgcacacgtggcctt

SEQ ID NO: 5107578 - DNA, 25 bp, Homo sapien
tgtaaaagttccagtcagtcattct

SEQ ID NO: 5107579 - DNA, 25 bp, Homo sapien
gcccatgggaggctgattattaaac

SEQ ID NO: 5107580 - DNA, 25 bp, Homo sapien
gtcctattactataacattacactt

SEQ ID NO: 5107581 - DNA, 25 bp, Homo sapien
aagtcctattactataacattacac

SEQ ID NO: 5107582 - DNA, 25 bp, Homo sapien
aaagtcctattactataacattaca

SEQ ID NO: 5107583 - DNA, 25 bp, Homo sapien
cctattactataacattacacttta

SEQ ID NO: 5107584 - DNA, 25 bp, Homo sapien
atatacacacctgatggtagttcgt

SEQ ID NO: 5107585 - DNA, 25 bp, Homo sapien
tacacacctgatggtagttcgtatt

SEQ ID NO: 5107586 - DNA, 25 bp, Homo sapien
atacacacctgatggtagttcgtat

SEQ ID NO: 5107587 - DNA, 25 bp, Homo sapien
tatacacacctgatggtagttcgta

SEQ ID NO: 5107588 - DNA, 25 bp, Homo sapien
aatgttaggaggcaatacatatttc

SEQ ID NO: 5107589 - DNA, 25 bp, Homo sapien
taatgttaggaggcaatacatattt

SEQ ID NO: 5107590 - DNA, 25 bp, Homo sapien
acagaccttagcttccatgctcaaa

SEQ ID NO: 5107591 - DNA, 25 bp, Homo sapien
atttttacaagatatgaatatagag

SEQ ID NO: 5107592 - DNA, 25 bp, Homo sapien
cagaccttagcttccatgctcaaat

SEQ ID NO: 5107593 - DNA, 25 bp, Homo sapien
ttttacaagatatgaatatagagta

SEQ ID NO: 5107594 - DNA, 25 bp, Homo sapien
ccctgaggggtcatttgtgccagat

SEQ ID NO: 5107595 - DNA, 25 bp, Homo sapien
gatcgggaaagaagtatgccccaag

SEQ ID NO: 5107596 - DNA, 25 bp, Homo sapien
ggaaagaagtatgccccaagagact

SEQ ID NO: 5107597 - DNA, 25 bp, Homo sapien
tttgtgccagatcgggaaagaagta

SEQ ID NO: 5107598 - DNA, 25 bp, Homo sapien
cagaaggtcagcagttgctaagtca

SEQ ID NO: 5107599 - DNA, 25 bp, Homo sapien
aacgcgtactcttatgaaccaaatg

SEQ ID NO: 5107600 - DNA, 25 bp, Homo sapien
cacacgcctcctttggtgctctaaa

SEQ ID NO: 5107601 - DNA, 25 bp, Homo sapien
tagaatgttcctgtacccgggtgca

SEQ ID NO: 5107602 - DNA, 25 bp, Homo sapien
aaagctcagtggattaaaggaacat

SEQ ID NO: 5107603 - DNA, 25 bp, Homo sapien
cccgtgcaagaggaggattatcaaa

SEQ ID NO: 5107604 - DNA, 25 bp, Homo sapien
tcattctaagatgaggatcccaggg

SEQ ID NO: 5107605 - DNA, 25 bp, Homo sapien
caaggtccagttcttatcgatgtgc

SEQ ID NO: 5107606 - DNA, 25 bp, Homo sapien
ccttagaagactcgccattttgcag

SEQ ID NO: 5107607 - DNA, 25 bp, Homo sapien
gacaaagtatccgtggcagtgcgaa

SEQ ID NO: 5107608 - DNA, 25 bp, Homo sapien
tgtcagctacccatagcagtggccc

SEQ ID NO: 5107609 - DNA, 25 bp, Homo sapien
tagctgtgcaacactgcatctcgag

SEQ ID NO: 5107610 - DNA, 25 bp, Homo sapien
tgctctgagatctaaggcactccag

SEQ ID NO: 5107611 - DNA, 25 bp, Homo sapien
gcgtgttttacattgcaatagacca

SEQ ID NO: 5107612 - DNA, 25 bp, Homo sapien
gatggcaatcaagtgtgagagctaa

SEQ ID NO: 5107613 - DNA, 25 bp, Homo sapien
taactagtaagaatcggctttgagc

SEQ ID NO: 5107614 - DNA, 25 bp, Homo sapien
tgagcagcacccgaacaactcgttt

SEQ ID NO: 5107615 - DNA, 25 bp, Homo sapien
ggatcatagcagcaatgggttcaga

SEQ ID NO: 5107616 - DNA, 25 bp, Homo sapien
acaggtttaggcagtgagttgacac

SEQ ID NO: 5107617 - DNA, 25 bp, Homo sapien
cagatgtaaccgtttcagagcagag

SEQ ID NO: 5107618 - DNA, 25 bp, Homo sapien
tgtagcacggagaaatgccccattg

SEQ ID NO: 5107619 - DNA, 25 bp, Homo sapien
cagtatatacagctttcttatgcac

SEQ ID NO: 5107620 - DNA, 25 bp, Homo sapien
ccagtatatacagctttcttatgca

SEQ ID NO: 5107621 - DNA, 25 bp, Homo sapien
ccaggaaagaaccagtatatacagc

SEQ ID NO: 5107622 - DNA, 25 bp, Homo sapien
gtatatacagctttcttatgcacag

SEQ ID NO: 5107623 - DNA, 25 bp, Homo sapien
catagacaaatatcagattagctat

SEQ ID NO: 5107624 - DNA, 25 bp, Homo sapien
gacaaatatcagattagctattgct

SEQ ID NO: 5107625 - DNA, 25 bp, Homo sapien
aatatcagattagctattgctgtcc

SEQ ID NO: 5107626 - DNA, 25 bp, Homo sapien
tcagattagctattgctgtccattc

SEQ ID NO: 5107627 - DNA, 25 bp, Homo sapien
ggtaccagttagatagtccaggtac

SEQ ID NO: 5107628 - DNA, 25 bp, Homo sapien
accagttagatagtccaggtaccag

SEQ ID NO: 5107629 - DNA, 25 bp, Homo sapien
aagtggagaacggtccaggtaccag

SEQ ID NO: 5107630 - DNA, 25 bp, Homo sapien
gagaacggtccaggtaccagttaga

SEQ ID NO: 5107631 - DNA, 25 bp, Homo sapien
ggtggtgctttaggtgtaattaaca

SEQ ID NO: 5107632 - DNA, 25 bp, Homo sapien
tagagatacacagatttgctggtgg

SEQ ID NO: 5107633 - DNA, 25 bp, Homo sapien
gatacacagatttgctggtggtgct

SEQ ID NO: 5107634 - DNA, 25 bp, Homo sapien
gtaattaacactgtaattgatgctg

SEQ ID NO: 5107635 - DNA, 25 bp, Homo sapien
tttccactaagagtgttacattcag

SEQ ID NO: 5107636 - DNA, 25 bp, Homo sapien
ccactaagagtgttacattcagttg

SEQ ID NO: 5107637 - DNA, 25 bp, Homo sapien
gtgttacattcagttgtagggccat

SEQ ID NO: 5107638 - DNA, 25 bp, Homo sapien
taagagtgttacattcagttgtagg

SEQ ID NO: 5107639 - DNA, 25 bp, Homo sapien
tcccttttggcctgtcctctctcct

SEQ ID NO: 5107640 - DNA, 25 bp, Homo sapien
gcaagtagccccagagcagagatgc

SEQ ID NO: 5107641 - DNA, 25 bp, Homo sapien
agcagagatgcaaacagcaccaggg

SEQ ID NO: 5107642 - DNA, 25 bp, Homo sapien
cttggcaagtagccccagagcagag

SEQ ID NO: 5107643 - DNA, 25 bp, Homo sapien
tctgctcatcagcagttataattct

SEQ ID NO: 5107644 - DNA, 25 bp, Homo sapien
atctctgctcatcagcagttataat

SEQ ID NO: 5107645 - DNA, 25 bp, Homo sapien
gctcatcagcagttataattctata

SEQ ID NO: 5107646 - DNA, 25 bp, Homo sapien
tgctcatcagcagttataattctat

SEQ ID NO: 5107647 - DNA, 25 bp, Homo sapien
gagagtctcttaattccatgccagt

SEQ ID NO: 5107648 - DNA, 25 bp, Homo sapien
ctactgccaccagtgtctgctcttg

SEQ ID NO: 5107649 - DNA, 25 bp, Homo sapien
tactgccaccagtgtctgctcttgg

SEQ ID NO: 5107650 - DNA, 25 bp, Homo sapien
tcttggctgtggataaagaaggaga

SEQ ID NO: 5107651 - DNA, 25 bp, Homo sapien
ggagcattatctcctataacagtgc

SEQ ID NO: 5107652 - DNA, 25 bp, Homo sapien
cataaaacagtgatataactgttga

SEQ ID NO: 5107653 - DNA, 25 bp, Homo sapien
cctctagaatacctcctgatggaaa

SEQ ID NO: 5107654 - DNA, 25 bp, Homo sapien
taacgtgcatggagcattatctcct

SEQ ID NO: 5107655 - DNA, 25 bp, Homo sapien
ccttgatctcaagcacctctttgat

SEQ ID NO: 5107656 - DNA, 25 bp, Homo sapien
ctcacacccatccccaaactttctc

SEQ ID NO: 5107657 - DNA, 25 bp, Homo sapien
ttgatctcaagcacctctttgattc

SEQ ID NO: 5107658 - DNA, 25 bp, Homo sapien
tttcccttgatctcaagcacctctt

SEQ ID NO: 5107659 - DNA, 25 bp, Homo sapien
ccagcttccccagctcaacacatac

SEQ ID NO: 5107660 - DNA, 25 bp, Homo sapien
tgcgcttcttgaataattgtgaagg

SEQ ID NO: 5107661 - DNA, 25 bp, Homo sapien
tcagtgaacgctgcgcttcttgaat

SEQ ID NO: 5107662 - DNA, 25 bp, Homo sapien
gcttcttgaataattgtgaaggtgg

SEQ ID NO: 5107663 - DNA, 25 bp, Homo sapien
gtgaacgctgcgcttcttgaataat

SEQ ID NO: 5107664 - DNA, 25 bp, Homo sapien
tagtggatcatcttatcttcccttt

SEQ ID NO: 5107665 - DNA, 25 bp, Homo sapien
ctagtggatcatcttatcttccctt

SEQ ID NO: 5107666 - DNA, 25 bp, Homo sapien
gtggatcatcttatcttccctttct

SEQ ID NO: 5107667 - DNA, 25 bp, Homo sapien
agtggatcatcttatcttccctttc

SEQ ID NO: 5107668 - DNA, 25 bp, Homo sapien
cttctctgaattctgtaaggccttc

SEQ ID NO: 5107669 - DNA, 25 bp, Homo sapien
gatttgacaatgtaccctttcctcc

SEQ ID NO: 5107670 - DNA, 25 bp, Homo sapien
catcagttttccctatgggatttga

SEQ ID NO: 5107671 - DNA, 25 bp, Homo sapien
taaggccttctgtccgatttctccc

SEQ ID NO: 5107672 - DNA, 25 bp, Homo sapien
agactgatgtttgcacttgaggttc

SEQ ID NO: 5107673 - DNA, 25 bp, Homo sapien
accccacctcctttctgagacccat

SEQ ID NO: 5107674 - DNA, 25 bp, Homo sapien
gactgatgtttgcacttgaggttca

SEQ ID NO: 5107675 - DNA, 25 bp, Homo sapien
taccccacctcctttctgagaccca

SEQ ID NO: 5107676 - DNA, 25 bp, Homo sapien
ctataaacaacagaaaaattcctct

SEQ ID NO: 5107677 - DNA, 25 bp, Homo sapien
cagcattcaggctcaataatgtaaa

SEQ ID NO: 5107678 - DNA, 25 bp, Homo sapien
aaatgtgtcaacattctcatttagc

SEQ ID NO: 5107679 - DNA, 25 bp, Homo sapien
aataaatgtgtcaacattctcattt

SEQ ID NO: 5107680 - DNA, 25 bp, Homo sapien
aattctggacggcattccccagtgg

SEQ ID NO: 5107681 - DNA, 25 bp, Homo sapien
taaaattctggacggcattccccag

SEQ ID NO: 5107682 - DNA, 25 bp, Homo sapien
tacaagtgtatagatcgcttaacct

SEQ ID NO: 5107683 - DNA, 25 bp, Homo sapien
tagatcgcttaaccttttcataaaa

SEQ ID NO: 5107684 - DNA, 25 bp, Homo sapien
gtgtatagatcgcttaaccttttca

SEQ ID NO: 5107685 - DNA, 25 bp, Homo sapien
taaatacaagtgtatagatcgctta

SEQ ID NO: 5107686 - DNA, 25 bp, Homo sapien
taggtaacacaggaacaacttcatt

SEQ ID NO: 5107687 - DNA, 25 bp, Homo sapien
ggtaacacaggaacaacttcattta

SEQ ID NO: 5107688 - DNA, 25 bp, Homo sapien
cttaggtaacacaggaacaacttca

SEQ ID NO: 5107689 - DNA, 25 bp, Homo sapien
ttaggtaacacaggaacaacttcat

SEQ ID NO: 5107690 - DNA, 25 bp, Homo sapien
tgtagtaataagtccagtgcttctg

SEQ ID NO: 5107691 - DNA, 25 bp, Homo sapien
atgtcatcaatcttatctctccctg

SEQ ID NO: 5107692 - DNA, 25 bp, Homo sapien
tcaaggtaaagtaatgttgtagtaa

SEQ ID NO: 5107693 - DNA, 25 bp, Homo sapien
gtcatcaatcttatctctccctgag

SEQ ID NO: 5107694 - DNA, 25 bp, Homo sapien
acatgagctgcataccatattgtgc

SEQ ID NO: 5107695 - DNA, 25 bp, Homo sapien
atgatgcccccagtgcatcggccat

SEQ ID NO: 5107696 - DNA, 25 bp, Homo sapien
ttttacatgagctgcataccatatt

SEQ ID NO: 5107697 - DNA, 25 bp, Homo sapien
agctgcataccatattgtgcagcat

SEQ ID NO: 5107698 - DNA, 25 bp, Homo sapien
cacactggacatcatataagggaag

SEQ ID NO: 5107699 - DNA, 25 bp, Homo sapien
tcattttatccagtagactttgttc

SEQ ID NO: 5107700 - DNA, 25 bp, Homo sapien
tgttctttgggatcattttatccag

SEQ ID NO: 5107701 - DNA, 25 bp, Homo sapien
tacccttctctgatacttgagcttg

SEQ ID NO: 5107702 - DNA, 25 bp, Homo sapien
gcaggaatttttggcacgtaagaac

SEQ ID NO: 5107703 - DNA, 25 bp, Homo sapien
tgagttgcccacattggactgaact

SEQ ID NO: 5107704 - DNA, 25 bp, Homo sapien
ctgtttgttgagttgcccacattgg

SEQ ID NO: 5107705 - DNA, 25 bp, Homo sapien
gttgcccacattggactgaactcac

SEQ ID NO: 5107706 - DNA, 25 bp, Homo sapien
tgtttgttgagttgcccacattgga

SEQ ID NO: 5107707 - DNA, 25 bp, Homo sapien
gaaaataggacccaaagcagctgtc

SEQ ID NO: 5107708 - DNA, 25 bp, Homo sapien
ggaagaatgctccaacacactccgt

SEQ ID NO: 5107709 - DNA, 25 bp, Homo sapien
agcacagggtggctctttgataccc

SEQ ID NO: 5107710 - DNA, 25 bp, Homo sapien
cagaatgaactgtgacttatggaag

SEQ ID NO: 5107711 - DNA, 25 bp, Homo sapien
tctccttcttgcatgagcagcagga

SEQ ID NO: 5107712 - DNA, 25 bp, Homo sapien
gagagtctcacactggataaaaggg

SEQ ID NO: 5107713 - DNA, 25 bp, Homo sapien
ggaggccaagacctcctgtgcatcc

SEQ ID NO: 5107714 - DNA, 25 bp, Homo sapien
agtggacctactggaggctctcctt

SEQ ID NO: 5107715 - DNA, 25 bp, Homo sapien
tcttagtggaatagtaaagcatccc

SEQ ID NO: 5107716 - DNA, 25 bp, Homo sapien
tcttggcgatcaccatgctcacttg

SEQ ID NO: 5107717 - DNA, 25 bp, Homo sapien
aaagcatcccacttgagagctgaag

SEQ ID NO: 5107718 - DNA, 25 bp, Homo sapien
caacatcccaatgctcatagtcaaa

SEQ ID NO: 5107719 - DNA, 25 bp, Homo sapien
tcaataccattaccgctttcagccg

SEQ ID NO: 5107720 - DNA, 25 bp, Homo sapien
atttccctaagtatggacaattgtg

SEQ ID NO: 5107721 - DNA, 25 bp, Homo sapien
tttcagccgtagcatcaaagaccat

SEQ ID NO: 5107722 - DNA, 25 bp, Homo sapien
cttagaaaagatcagatcatcatcc

SEQ ID NO: 5107723 - DNA, 25 bp, Homo sapien
tcttcatagctgaacccattttctc

SEQ ID NO: 5107724 - DNA, 25 bp, Homo sapien
tgactgatatctgatcccaaagcca

SEQ ID NO: 5107725 - DNA, 25 bp, Homo sapien
ctttcaggtgactgatatctgatcc

SEQ ID NO: 5107726 - DNA, 25 bp, Homo sapien
tccaaatatctttcaggtgactgat

SEQ ID NO: 5107727 - DNA, 25 bp, Homo sapien
attccaaatatctttcaggtgactg

SEQ ID NO: 5107728 - DNA, 25 bp, Homo sapien
cagttatcaccattgaccaatagac

SEQ ID NO: 5107729 - DNA, 25 bp, Homo sapien
cattgaccaatagactgccttcagg

SEQ ID NO: 5107730 - DNA, 25 bp, Homo sapien
tatcaccattgaccaatagactgcc

SEQ ID NO: 5107731 - DNA, 25 bp, Homo sapien
accattgaccaatagactgccttca

SEQ ID NO: 5107732 - DNA, 25 bp, Homo sapien
cacaggacccatgggttttgtcatt

SEQ ID NO: 5107733 - DNA, 25 bp, Homo sapien
aagttctggagtcttgccacaggac

SEQ ID NO: 5107734 - DNA, 25 bp, Homo sapien
tctctacagcaaccttaaaattctt

SEQ ID NO: 5107735 - DNA, 25 bp, Homo sapien
ggacagcgataaccatcaaagttga

SEQ ID NO: 5107736 - DNA, 25 bp, Homo sapien
cccggttcactaatagtgcggtcat

SEQ ID NO: 5107737 - DNA, 25 bp, Homo sapien
gaacgtactgatgtacttccagaat

SEQ ID NO: 5107738 - DNA, 25 bp, Homo sapien
tctgctccccggttcactaatagtg

SEQ ID NO: 5107739 - DNA, 25 bp, Homo sapien
gaataaccattgttctgctccccgg

SEQ ID NO: 5107740 - DNA, 25 bp, Homo sapien
tctcattggattggcggtcataaca

SEQ ID NO: 5107741 - DNA, 25 bp, Homo sapien
taagaatctcattggattggcggtc

SEQ ID NO: 5107742 - DNA, 25 bp, Homo sapien
ttatttactaagaatctcattggat

SEQ ID NO: 5107743 - DNA, 25 bp, Homo sapien
gaatctcattggattggcggtcata

SEQ ID NO: 5107744 - DNA, 25 bp, Homo sapien
gatagagtcattactgtggtaagcc

SEQ ID NO: 5107745 - DNA, 25 bp, Homo sapien
tggtaagcctcagggtatttggaaa

SEQ ID NO: 5107746 - DNA, 25 bp, Homo sapien
tcattactgtggtaagcctcagggt

SEQ ID NO: 5107747 - DNA, 25 bp, Homo sapien
cccacaacagggatagagtcattac

SEQ ID NO: 5107748 - DNA, 25 bp, Homo sapien
cttgggtataatgatgacagaggtt

SEQ ID NO: 5107749 - DNA, 25 bp, Homo sapien
tgggtataatgatgacagaggttga

SEQ ID NO: 5107750 - DNA, 25 bp, Homo sapien
aggtgactccctccattgatgtatt

SEQ ID NO: 5107751 - DNA, 25 bp, Homo sapien
tccctccattgatgtatttcgccat

SEQ ID NO: 5107752 - DNA, 25 bp, Homo sapien
ctgcacgcacacatatcctcacttt

SEQ ID NO: 5107753 - DNA, 25 bp, Homo sapien
cacgcacacatatcctcactttgcc

SEQ ID NO: 5107754 - DNA, 25 bp, Homo sapien
cgcacacatatcctcactttgcccc

SEQ ID NO: 5107755 - DNA, 25 bp, Homo sapien
tgcacgcacacatatcctcactttg

SEQ ID NO: 5107756 - DNA, 25 bp, Homo sapien
ccctctcccataagtctaccctgct

SEQ ID NO: 5107757 - DNA, 25 bp, Homo sapien
cttctgacccctctcccataagtct

SEQ ID NO: 5107758 - DNA, 25 bp, Homo sapien
gcccaaaatccagaaattggacagt

SEQ ID NO: 5107759 - DNA, 25 bp, Homo sapien
tgccttagtccttctgacccctctc

SEQ ID NO: 5107760 - DNA, 25 bp, Homo sapien
cttgcccaaccaagagttgtaaatg

SEQ ID NO: 5107761 - DNA, 25 bp, Homo sapien
tgtaaatgatgtgggataggagcca

SEQ ID NO: 5107762 - DNA, 25 bp, Homo sapien
cacactggctaaaggttatcactaa

SEQ ID NO: 5107763 - DNA, 25 bp, Homo sapien
gttctcttgaccacactggctaaag

SEQ ID NO: 5107764 - DNA, 25 bp, Homo sapien
gaaaaccatttgatgaggactcaac

SEQ ID NO: 5107765 - DNA, 25 bp, Homo sapien
accatttgatgaggactcaacttga

SEQ ID NO: 5107766 - DNA, 25 bp, Homo sapien
agtccacagaggatgacggatgcag

SEQ ID NO: 5107767 - DNA, 25 bp, Homo sapien
cggatgcaggcaaagatttccatga

SEQ ID NO: 5107768 - DNA, 25 bp, Homo sapien
tctgtggctactcctcctatttaga

SEQ ID NO: 5107769 - DNA, 25 bp, Homo sapien
ttcttcctaagaggtctccccacag

SEQ ID NO: 5107770 - DNA, 25 bp, Homo sapien
caatccatttcccatactgagtgat

SEQ ID NO: 5107771 - DNA, 25 bp, Homo sapien
tcctcctatttagaatactgaactg

SEQ ID NO: 5107772 - DNA, 25 bp, Homo sapien
caaaggtggctatgaagaacaaagg

SEQ ID NO: 5107773 - DNA, 25 bp, Homo sapien
tccaaaggtggctatgaagaacaaa

SEQ ID NO: 5107774 - DNA, 25 bp, Homo sapien
gagggctcacaaatccaaaggtggc

SEQ ID NO: 5107775 - DNA, 25 bp, Homo sapien
atcctgatgtgagggctcacaaatc

SEQ ID NO: 5107776 - DNA, 25 bp, Homo sapien
cagctagttatttaggtaggtgtcc

SEQ ID NO: 5107777 - DNA, 25 bp, Homo sapien
ccattgagtagctgctccaagttac

SEQ ID NO: 5107778 - DNA, 25 bp, Homo sapien
tcctttatatctgcagcatggacat

SEQ ID NO: 5107779 - DNA, 25 bp, Homo sapien
gctttaagtggaagagacagctagt

SEQ ID NO: 5107780 - DNA, 25 bp, Homo sapien
actattcaatagtcaacctgccaga

SEQ ID NO: 5107781 - DNA, 25 bp, Homo sapien
taagcacgtaaagatgatgacttac

SEQ ID NO: 5107782 - DNA, 25 bp, Homo sapien
tattagtgccagtcgggtactattc

SEQ ID NO: 5107783 - DNA, 25 bp, Homo sapien
tcaacctgccagatccaagtgacaa

SEQ ID NO: 5107784 - DNA, 25 bp, Homo sapien
acagcagtaccattgacaaagatat

SEQ ID NO: 5107785 - DNA, 25 bp, Homo sapien
agttattctaccaacagcagtacca

SEQ ID NO: 5107786 - DNA, 25 bp, Homo sapien
cagttattctaccaacagcagtacc

SEQ ID NO: 5107787 - DNA, 25 bp, Homo sapien
cagcagtaccattgacaaagatatc

SEQ ID NO: 5107788 - DNA, 25 bp, Homo sapien
tgtgatcgcaggaatgccagcacct

SEQ ID NO: 5107789 - DNA, 25 bp, Homo sapien
agcctcaggcgtccgagggcccttt

SEQ ID NO: 5107790 - DNA, 25 bp, Homo sapien
gatggtgaatttgggtctgcctgca

SEQ ID NO: 5107791 - DNA, 25 bp, Homo sapien
gccctttgtgatcgcaggaatgcca

SEQ ID NO: 5107792 - DNA, 25 bp, Homo sapien
ataatatcagtttcccccaaacagg

SEQ ID NO: 5107793 - DNA, 25 bp, Homo sapien
gccctaattgcaccaaaggctgaaa

SEQ ID NO: 5107794 - DNA, 25 bp, Homo sapien
ctgtctacagaggatgtcagggtgt

SEQ ID NO: 5107795 - DNA, 25 bp, Homo sapien
aaaagcttcaggttgcacgttaggc

SEQ ID NO: 5107796 - DNA, 25 bp, Homo sapien
tagtaaatattctcgtaagtggtgg

SEQ ID NO: 5107797 - DNA, 25 bp, Homo sapien
taggattaaagggaatttgtcgaca

SEQ ID NO: 5107798 - DNA, 25 bp, Homo sapien
cacatttaaatagcgatttgtctcc

SEQ ID NO: 5107799 - DNA, 25 bp, Homo sapien
tatacactcagccaagagagccttc

SEQ ID NO: 5107800 - DNA, 25 bp, Homo sapien
tggtagatcagcttattgtataaac

SEQ ID NO: 5107801 - DNA, 25 bp, Homo sapien
taaactagatatttcctgactctca

SEQ ID NO: 5107802 - DNA, 25 bp, Homo sapien
tctttccaagtaatgtcagcttcac

SEQ ID NO: 5107803 - DNA, 25 bp, Homo sapien
tcatccctgcagtcctcatgacaga

SEQ ID NO: 5107804 - DNA, 25 bp, Homo sapien
taaaggagagtcaccttggcctaat

SEQ ID NO: 5107805 - DNA, 25 bp, Homo sapien
gagccttactatgtactctcaggtg

SEQ ID NO: 5107806 - DNA, 25 bp, Homo sapien
caatttgatgatgagatccgtctga

SEQ ID NO: 5107807 - DNA, 25 bp, Homo sapien
caaggacagtacttggcatctggaa

SEQ ID NO: 5107808 - DNA, 25 bp, Homo sapien
aaagtccagtgggagtacttcccag

SEQ ID NO: 5107809 - DNA, 25 bp, Homo sapien
gctggcatgatgctttctcactaga

SEQ ID NO: 5107810 - DNA, 25 bp, Homo sapien
tctcactagaagagtttgcaatcag

SEQ ID NO: 5107811 - DNA, 25 bp, Homo sapien
tcacgtatccattgtaagctttctt

SEQ ID NO: 5107812 - DNA, 25 bp, Homo sapien
gaccagatggtgcatgttctagcct

SEQ ID NO: 5107813 - DNA, 25 bp, Homo sapien
tgaccatagtactctgtccaaagat

SEQ ID NO: 5107814 - DNA, 25 bp, Homo sapien
tctaactccccgttgatgttttcca

SEQ ID NO: 5107815 - DNA, 25 bp, Homo sapien
tccaaagattgttgtaagaaacctc

SEQ ID NO: 5107816 - DNA, 25 bp, Homo sapien
tcttagcctgattggcttggttttc

SEQ ID NO: 5107817 - DNA, 25 bp, Homo sapien
attagatctagcctcttagcctgat

SEQ ID NO: 5107818 - DNA, 25 bp, Homo sapien
tttataaagtcagcaacgatgagtt

SEQ ID NO: 5107819 - DNA, 25 bp, Homo sapien
tagcctgattggcttggttttcctt

SEQ ID NO: 5107820 - DNA, 25 bp, Homo sapien
taatctgagtaagcaatgccccaaa

SEQ ID NO: 5107821 - DNA, 25 bp, Homo sapien
tctgagtaagcaatgccccaaatgg

SEQ ID NO: 5107822 - DNA, 25 bp, Homo sapien
ctaatctgagtaagcaatgccccaa

SEQ ID NO: 5107823 - DNA, 25 bp, Homo sapien
tgagtaagcaatgccccaaatggca

SEQ ID NO: 5107824 - DNA, 25 bp, Homo sapien
caaaaacggtgccgttgtttgtcag

SEQ ID NO: 5107825 - DNA, 25 bp, Homo sapien
cagggtgtcttgtccgggatgttga

SEQ ID NO: 5107826 - DNA, 25 bp, Homo sapien
tgtcttgtccgggatgttgaagtcc

SEQ ID NO: 5107827 - DNA, 25 bp, Homo sapien
ttgtcagggtgtcttgtccgggatg

SEQ ID NO: 5107828 - DNA, 25 bp, Homo sapien
tatagaacagaaagctctttagagt

SEQ ID NO: 5107829 - DNA, 25 bp, Homo sapien
tcacatttgaagtaggtgatcctat

SEQ ID NO: 5107830 - DNA, 25 bp, Homo sapien
tctttagagtcagagcttgcgccaa

SEQ ID NO: 5107831 - DNA, 25 bp, Homo sapien
cataggtttatgaaatctcaacaaa

SEQ ID NO: 5107832 - DNA, 25 bp, Homo sapien
gtgcctcttgggcaactatgcccat

SEQ ID NO: 5107833 - DNA, 25 bp, Homo sapien
cagacttaactgcctgtttatctac

SEQ ID NO: 5107834 - DNA, 25 bp, Homo sapien
ctacaaaggttacatgtgcctcttg

SEQ ID NO: 5107835 - DNA, 25 bp, Homo sapien
tgtgcctcttgggcaactatgccca

SEQ ID NO: 5107836 - DNA, 25 bp, Homo sapien
tctctgatggacattgataccctcc

SEQ ID NO: 5107837 - DNA, 25 bp, Homo sapien
ccttctctgatggacattgataccc

SEQ ID NO: 5107838 - DNA, 25 bp, Homo sapien
gatggacattgataccctccaaata

SEQ ID NO: 5107839 - DNA, 25 bp, Homo sapien
ctttggaaagtgcaccatcttttct

SEQ ID NO: 5107840 - DNA, 25 bp, Homo sapien
ctgagattcttcatcccccttgaag

SEQ ID NO: 5107841 - DNA, 25 bp, Homo sapien
tgagattcttcatcccccttgaagg

SEQ ID NO: 5107842 - DNA, 25 bp, Homo sapien
gagattcttcatcccccttgaaggc

SEQ ID NO: 5107843 - DNA, 25 bp, Homo sapien
tcatgaatctaccagataatactgg

SEQ ID NO: 5107844 - DNA, 25 bp, Homo sapien
tctaccagataatactggttcatgg

SEQ ID NO: 5107845 - DNA, 25 bp, Homo sapien
ggttcatggtacaagggttcttcaa

SEQ ID NO: 5107846 - DNA, 25 bp, Homo sapien
cagataatactggttcatggtacaa

SEQ ID NO: 5107847 - DNA, 25 bp, Homo sapien
tctctatctttttggcacagaccga

SEQ ID NO: 5107848 - DNA, 25 bp, Homo sapien
ccatttacaagcttaaagttctcta

SEQ ID NO: 5107849 - DNA, 25 bp, Homo sapien
tctttttggcacagaccgaacacca

SEQ ID NO: 5107850 - DNA, 25 bp, Homo sapien
ttttggcacagaccgaacaccattc

SEQ ID NO: 5107851 - DNA, 25 bp, Homo sapien
caagatctctagacacttggcaaac

SEQ ID NO: 5107852 - DNA, 25 bp, Homo sapien
cctgtagaagaatgatgcattcaag

SEQ ID NO: 5107853 - DNA, 25 bp, Homo sapien
gaagaatgatgcattcaagatctct

SEQ ID NO: 5107854 - DNA, 25 bp, Homo sapien
gatgcattcaagatctctagacact

SEQ ID NO: 5107855 - DNA, 25 bp, Homo sapien
tgttgtgccgaccacatgatttctg

SEQ ID NO: 5107856 - DNA, 25 bp, Homo sapien
ctgttgtgccgaccacatgatttct

SEQ ID NO: 5107857 - DNA, 25 bp, Homo sapien
cgtggagcgcccacttgaacagtga

SEQ ID NO: 5107858 - DNA, 25 bp, Homo sapien
cagaacaatggttgccggagtacac

SEQ ID NO: 5107859 - DNA, 25 bp, Homo sapien
cattccatggaatgaacagtactgg

SEQ ID NO: 5107860 - DNA, 25 bp, Homo sapien
tggatgctgccatgtgtcgtcagaa

SEQ ID NO: 5107861 - DNA, 25 bp, Homo sapien
tgtcataagctgtcctaactcaagg

SEQ ID NO: 5107862 - DNA, 25 bp, Homo sapien
gagaaaatatgccttgctggtccaa

SEQ ID NO: 5107863 - DNA, 25 bp, Homo sapien
tcattaaaagcgagaaagaactgct

SEQ ID NO: 5107864 - DNA, 25 bp, Homo sapien
gggagtcatacctggagaaatagaa

SEQ ID NO: 5107865 - DNA, 25 bp, Homo sapien
gaattgcatccctaacaacaaatgc

SEQ ID NO: 5107866 - DNA, 25 bp, Homo sapien
ttctcagagatgtatattgtcagct

SEQ ID NO: 5107867 - DNA, 25 bp, Homo sapien
gctgaattgcatccctaacaacaaa

SEQ ID NO: 5107868 - DNA, 25 bp, Homo sapien
cagagatgtatattgtcagctgaat

SEQ ID NO: 5107869 - DNA, 25 bp, Homo sapien
ttgtattattggacagactttaatc

SEQ ID NO: 5107870 - DNA, 25 bp, Homo sapien
tataaatacaggacctgtcccggct

SEQ ID NO: 5107871 - DNA, 25 bp, Homo sapien
aaacgctatttgcagttctgtccca

SEQ ID NO: 5107872 - DNA, 25 bp, Homo sapien
gcattatacaggaccacatttttcc

SEQ ID NO: 5107873 - DNA, 25 bp, Homo sapien
tatcctgttaagtaaggtcctgctg

SEQ ID NO: 5107874 - DNA, 25 bp, Homo sapien
ctggaaggttagctagcaagtgaca

SEQ ID NO: 5107875 - DNA, 25 bp, Homo sapien
catggtgaccctgctttggcaagct

SEQ ID NO: 5107876 - DNA, 25 bp, Homo sapien
ttttggcaagtacccaccagctgtt

SEQ ID NO: 5107877 - DNA, 25 bp, Homo sapien
tcagcagaagctcgtagtcaaccat

SEQ ID NO: 5107878 - DNA, 25 bp, Homo sapien
tgagaagatgttgtggtccagtgat

SEQ ID NO: 5107879 - DNA, 25 bp, Homo sapien
gactgaaagcatgcgctcatgtttg

SEQ ID NO: 5107880 - DNA, 25 bp, Homo sapien
gcaaaagttgcattcccttccctaa

SEQ ID NO: 5107881 - DNA, 25 bp, Homo sapien
tccagttatgtgagaagatgttgtg

SEQ ID NO: 5107882 - DNA, 25 bp, Homo sapien
tgggcatccaacagcatagccttca

SEQ ID NO: 5107883 - DNA, 25 bp, Homo sapien
ctgggcatccaacagcatagccttc

SEQ ID NO: 5107884 - DNA, 25 bp, Homo sapien
ggagcagacccggtgagattatacc

SEQ ID NO: 5107885 - DNA, 25 bp, Homo sapien
gacccggtgagattataccagcatg

SEQ ID NO: 5107886 - DNA, 25 bp, Homo sapien
gagattataccagcatggctgaggt

SEQ ID NO: 5107887 - DNA, 25 bp, Homo sapien
gaaaaatgggaatgtagctgcagcc

SEQ ID NO: 5107888 - DNA, 25 bp, Homo sapien
gggttggtctctggtaagggctgcc

SEQ ID NO: 5107889 - DNA, 25 bp, Homo sapien
ggttggtctctggtaagggctgcct

SEQ ID NO: 5107890 - DNA, 25 bp, Homo sapien
gttggtctctggtaagggctgcctt

SEQ ID NO: 5107891 - DNA, 25 bp, Homo sapien
agggttggtctctggtaagggctgc

SEQ ID NO: 5107892 - DNA, 25 bp, Homo sapien
gctgctttttatgaagatagcttgg

SEQ ID NO: 5107893 - DNA, 25 bp, Homo sapien
tagcttggaatgtgattttgtgctt

SEQ ID NO: 5107894 - DNA, 25 bp, Homo sapien
ttttatgaagatagcttggaatgtg

SEQ ID NO: 5107895 - DNA, 25 bp, Homo sapien
cttggaatgtgattttgtgcttctc

SEQ ID NO: 5107896 - DNA, 25 bp, Homo sapien
ctcccatcggttgaggatttccccg

SEQ ID NO: 5107897 - DNA, 25 bp, Homo sapien
tggactgcatctcccatcggttgag

SEQ ID NO: 5107898 - DNA, 25 bp, Homo sapien
gtagtataagcttccttcccccaca

SEQ ID NO: 5107899 - DNA, 25 bp, Homo sapien
tctactggactgcatctcccatcgg

SEQ ID NO: 5107900 - DNA, 25 bp, Homo sapien
gagtcatttttaggtagttgctgct

SEQ ID NO: 5107901 - DNA, 25 bp, Homo sapien
agttcatgtttcgagtcatttttag

SEQ ID NO: 5107902 - DNA, 25 bp, Homo sapien
atcagttaagttcatgtttcgagtc

SEQ ID NO: 5107903 - DNA, 25 bp, Homo sapien
cagttaagttcatgtttcgagtcat

SEQ ID NO: 5107904 - DNA, 25 bp, Homo sapien
gacctcctgttggatagctttaggg

SEQ ID NO: 5107905 - DNA, 25 bp, Homo sapien
caaacactggtttggcgtttcaact

SEQ ID NO: 5107906 - DNA, 25 bp, Homo sapien
ctgtgacctcctgttggatagcttt

SEQ ID NO: 5107907 - DNA, 25 bp, Homo sapien
agcagttcttgtagggcttccatcc

SEQ ID NO: 5107908 - DNA, 25 bp, Homo sapien
cagagtggattgggccattaagttg

SEQ ID NO: 5107909 - DNA, 25 bp, Homo sapien
gattgggccattaagttgaaggacc

SEQ ID NO: 5107910 - DNA, 25 bp, Homo sapien
gccattaagttgaaggaccatggtg

SEQ ID NO: 5107911 - DNA, 25 bp, Homo sapien
agtggattgggccattaagttgaag

SEQ ID NO: 5107912 - DNA, 25 bp, Homo sapien
tggcttcatgttagtcaggactttc

SEQ ID NO: 5107913 - DNA, 25 bp, Homo sapien
aaagtgttcctgggagatactgcaa

SEQ ID NO: 5107914 - DNA, 25 bp, Homo sapien
gcttcatgttagtcaggactttctt

SEQ ID NO: 5107915 - DNA, 25 bp, Homo sapien
ctggcttcatgttagtcaggacttt

SEQ ID NO: 5107916 - DNA, 25 bp, Homo sapien
aagagaattttagaccaatatcctt

SEQ ID NO: 5107917 - DNA, 25 bp, Homo sapien
tggcagagacacaaccaaaccaaaa

SEQ ID NO: 5107918 - DNA, 25 bp, Homo sapien
aaggctggttcaacatacacaaatc

SEQ ID NO: 5107919 - DNA, 25 bp, Homo sapien
ttgatgaacatcaatgcaaaaaccc

SEQ ID NO: 5107920 - DNA, 25 bp, Homo sapien
tttttacttggatagttcttttgca

SEQ ID NO: 5107921 - DNA, 25 bp, Homo sapien
tttacttggatagttcttttgcatc

SEQ ID NO: 5107922 - DNA, 25 bp, Homo sapien
ctctcatctaggccattttgagtat

SEQ ID NO: 5107923 - DNA, 25 bp, Homo sapien
ttttacttggatagttcttttgcat

SEQ ID NO: 5107924 - DNA, 25 bp, Homo sapien
tatagttgggcactggctgcctccg

SEQ ID NO: 5107925 - DNA, 25 bp, Homo sapien
ctgcctccgttaggcagggctgcca

SEQ ID NO: 5107926 - DNA, 25 bp, Homo sapien
gccacagtaagctatagttgggcac

SEQ ID NO: 5107927 - DNA, 25 bp, Homo sapien
catagtatagcctcaggccacagta

SEQ ID NO: 5107928 - DNA, 25 bp, Homo sapien
caagacctagcaataggcttttatc

SEQ ID NO: 5107929 - DNA, 25 bp, Homo sapien
tgtctccaagacctagcaataggct

SEQ ID NO: 5107930 - DNA, 25 bp, Homo sapien
tctccaagacctagcaataggcttt

SEQ ID NO: 5107931 - DNA, 25 bp, Homo sapien
gacctagcaataggcttttatccca

SEQ ID NO: 5107932 - DNA, 25 bp, Homo sapien
gccttcatcagcttaactagttcca

SEQ ID NO: 5107933 - DNA, 25 bp, Homo sapien
gcacagcttgtaacctttcttgggc

SEQ ID NO: 5107934 - DNA, 25 bp, Homo sapien
actagttccaatacttcatagctga

SEQ ID NO: 5107935 - DNA, 25 bp, Homo sapien
gatgggaccatatttgtacgtggca

SEQ ID NO: 5107936 - DNA, 25 bp, Homo sapien
tttgtgattcccaccatcatgtgca

SEQ ID NO: 5107937 - DNA, 25 bp, Homo sapien
ttttgtgattcccaccatcatgtgc

SEQ ID NO: 5107938 - DNA, 25 bp, Homo sapien
gcttttgtgattcccaccatcatgt

SEQ ID NO: 5107939 - DNA, 25 bp, Homo sapien
tgcttttgtgattcccaccatcatg

SEQ ID NO: 5107940 - DNA, 25 bp, Homo sapien
gccactggagtaatatgattaaacc

SEQ ID NO: 5107941 - DNA, 25 bp, Homo sapien
gattaaaccagccacttagacaacc

SEQ ID NO: 5107942 - DNA, 25 bp, Homo sapien
ttgcgggccactggagtaatatgat

SEQ ID NO: 5107943 - DNA, 25 bp, Homo sapien
cgggccactggagtaatatgattaa

SEQ ID NO: 5107944 - DNA, 25 bp, Homo sapien
attagcttttctggaatgtggtcca

SEQ ID NO: 5107945 - DNA, 25 bp, Homo sapien
ggcatttacaaatatcattagcttt

SEQ ID NO: 5107946 - DNA, 25 bp, Homo sapien
taataatggcatttacaaatatcat

SEQ ID NO: 5107947 - DNA, 25 bp, Homo sapien
ttagcttttctggaatgtggtccat

SEQ ID NO: 5107948 - DNA, 25 bp, Homo sapien
gaagaggccagtttttatgcaccat

SEQ ID NO: 5107949 - DNA, 25 bp, Homo sapien
gtgaagaggccagtttttatgcacc

SEQ ID NO: 5107950 - DNA, 25 bp, Homo sapien
gggtgaagaggccagtttttatgca

SEQ ID NO: 5107951 - DNA, 25 bp, Homo sapien
ttgggtgaagaggccagtttttatg

SEQ ID NO: 5107952 - DNA, 25 bp, Homo sapien
gcactcgtgactttctttggtctga

SEQ ID NO: 5107953 - DNA, 25 bp, Homo sapien
gattctagggtgaggtaaatgcgag

SEQ ID NO: 5107954 - DNA, 25 bp, Homo sapien
aatacctcaggctgcactcgtgact

SEQ ID NO: 5107955 - DNA, 25 bp, Homo sapien
tctagggtgaggtaaatgcgaggag

SEQ ID NO: 5107956 - DNA, 25 bp, Homo sapien
gctcatggtgggcctcatgtcctct

SEQ ID NO: 5107957 - DNA, 25 bp, Homo sapien
catgacagcaccaagaggtggttcc

SEQ ID NO: 5107958 - DNA, 25 bp, Homo sapien
tttgtcaggttgaagttgccatgac

SEQ ID NO: 5107959 - DNA, 25 bp, Homo sapien
ttacttttgtcaggttgaagttgcc

SEQ ID NO: 5107960 - DNA, 25 bp, Homo sapien
gtcaattgaaggaccttgcttgaga

SEQ ID NO: 5107961 - DNA, 25 bp, Homo sapien
gctgtaggaggatagtattaggctt

SEQ ID NO: 5107962 - DNA, 25 bp, Homo sapien
ctgaggctcgatttgaatgtatggc

SEQ ID NO: 5107963 - DNA, 25 bp, Homo sapien
gcagaggtaacacccattttgtagg

SEQ ID NO: 5107964 - DNA, 25 bp, Homo sapien
cctggcttggcgtggtgatgtaaac

SEQ ID NO: 5107965 - DNA, 25 bp, Homo sapien
aagatgctctacctcgggcagctgc

SEQ ID NO: 5107966 - DNA, 25 bp, Homo sapien
gtaaacaagatgctctacctcgggc

SEQ ID NO: 5107967 - DNA, 25 bp, Homo sapien
ttgctctgcagtactcaatggtatt

SEQ ID NO: 5107968 - DNA, 25 bp, Homo sapien
aaaaactgggccaaagcgctgtgat

SEQ ID NO: 5107969 - DNA, 25 bp, Homo sapien
caaaaactgggccaaagcgctgtga

SEQ ID NO: 5107970 - DNA, 25 bp, Homo sapien
ttccaaaaactgggccaaagcgctg

SEQ ID NO: 5107971 - DNA, 25 bp, Homo sapien
actggcagtgctattaatcacattt

SEQ ID NO: 5107972 - DNA, 25 bp, Homo sapien
aaaggccgactttggcagcaattcc

SEQ ID NO: 5107973 - DNA, 25 bp, Homo sapien
tctaatccgatgacaaacagttggt

SEQ ID NO: 5107974 - DNA, 25 bp, Homo sapien
taatccagcacctaaacggatagtg

SEQ ID NO: 5107975 - DNA, 25 bp, Homo sapien
tgtaaagactatactgcggactcgc

SEQ ID NO: 5107976 - DNA, 25 bp, Homo sapien
gtatgacatgtagtttccattcagg

SEQ ID NO: 5107977 - DNA, 25 bp, Homo sapien
agtcagaggagcagtgttccagtgg

SEQ ID NO: 5107978 - DNA, 25 bp, Homo sapien
gtctgacgtcaggaaggtggattcc

SEQ ID NO: 5107979 - DNA, 25 bp, Homo sapien
aaggtggattccatccgacttacag

SEQ ID NO: 5107980 - DNA, 25 bp, Homo sapien
tgttggccttgcctcgttaagaatt

SEQ ID NO: 5107981 - DNA, 25 bp, Homo sapien
ggccttgcctcgttaagaatttctg

SEQ ID NO: 5107982 - DNA, 25 bp, Homo sapien
ctatggtgccgtgatgttgaatgaa

SEQ ID NO: 5107983 - DNA, 25 bp, Homo sapien
taaaaagaggccactatggtgccgt

SEQ ID NO: 5107984 - DNA, 25 bp, Homo sapien
aatccgacagcagctctactgtcac

SEQ ID NO: 5107985 - DNA, 25 bp, Homo sapien
tcaatccgacagcagctctactgtc

SEQ ID NO: 5107986 - DNA, 25 bp, Homo sapien
gacagcagctctactgtcacccagc

SEQ ID NO: 5107987 - DNA, 25 bp, Homo sapien
agcagctctactgtcacccagctag

SEQ ID NO: 5107988 - DNA, 25 bp, Homo sapien
ttgtcgtcatgggtgcctagcctga

SEQ ID NO: 5107989 - DNA, 25 bp, Homo sapien
tcaagacattttgtcgtcatgggtg

SEQ ID NO: 5107990 - DNA, 25 bp, Homo sapien
cattttgtcgtcatgggtgcctagc

SEQ ID NO: 5107991 - DNA, 25 bp, Homo sapien
gtcatgggtgcctagcctgacaggc

SEQ ID NO: 5107992 - DNA, 25 bp, Homo sapien
tcttatggaatcagctccagggcag

SEQ ID NO: 5107993 - DNA, 25 bp, Homo sapien
tgtatgggggctggctaagatcatt

SEQ ID NO: 5107994 - DNA, 25 bp, Homo sapien
tcatttgcttatcttgagtgatgaa

SEQ ID NO: 5107995 - DNA, 25 bp, Homo sapien
cattgctgtaattacctctaacttc

SEQ ID NO: 5107996 - DNA, 25 bp, Homo sapien
ctccaactggttatgactactcaaa

SEQ ID NO: 5107997 - DNA, 25 bp, Homo sapien
gaggcaaggcatagatgggtgtgag

SEQ ID NO: 5107998 - DNA, 25 bp, Homo sapien
tgtgaggaactgtcttgacattcca

SEQ ID NO: 5107999 - DNA, 25 bp, Homo sapien
ccccagcattatctccaactggtta

SEQ ID NO: 5108000 - DNA, 25 bp, Homo sapien
taaccagcaggttgcagggtgagct

SEQ ID NO: 5108001 - DNA, 25 bp, Homo sapien
tgtactctcaccgttggcagcctgt

SEQ ID NO: 5108002 - DNA, 25 bp, Homo sapien
gagttcatgcgtccatctcaggaaa

SEQ ID NO: 5108003 - DNA, 25 bp, Homo sapien
tggagatgatgcacacctcacggtg

SEQ ID NO: 5108004 - DNA, 25 bp, Homo sapien
gacattgcactaggcctgaaggaga

SEQ ID NO: 5108005 - DNA, 25 bp, Homo sapien
tagaaatcggtgaagggcccactat

SEQ ID NO: 5108006 - DNA, 25 bp, Homo sapien
tattaagagcccatggaaagagttc

SEQ ID NO: 5108007 - DNA, 25 bp, Homo sapien
gaaagagttctgcaaagatccctga

SEQ ID NO: 5108008 - DNA, 25 bp, Homo sapien
gctttgccagggtaaactgaagcca

SEQ ID NO: 5108009 - DNA, 25 bp, Homo sapien
ttctgcttacttgtgtgccctttgg

SEQ ID NO: 5108010 - DNA, 25 bp, Homo sapien
agagtcccggtagcccaggcacttc

SEQ ID NO: 5108011 - DNA, 25 bp, Homo sapien
gcttacttgtgtgccctttggacaa

SEQ ID NO: 5108012 - DNA, 25 bp, Homo sapien
acatttcagagtcccggtagcccag

SEQ ID NO: 5108013 - DNA, 25 bp, Homo sapien
tgacacgagggcgaaagaacctcct

SEQ ID NO: 5108014 - DNA, 25 bp, Homo sapien
gcgaaagaacctcctcgtgtcatct

SEQ ID NO: 5108015 - DNA, 25 bp, Homo sapien
ttatttgacacgagggcgaaagaac

SEQ ID NO: 5108016 - DNA, 25 bp, Homo sapien
gagggcgaaagaacctcctcgtgtc

SEQ ID NO: 5108017 - DNA, 25 bp, Homo sapien
cattcctgctttgcaatctgtgttt

SEQ ID NO: 5108018 - DNA, 25 bp, Homo sapien
ttcattcctgctttgcaatctgtgt

SEQ ID NO: 5108019 - DNA, 25 bp, Homo sapien
gttttcattcctgctttgcaatctg

SEQ ID NO: 5108020 - DNA, 25 bp, Homo sapien
cctgctttgcaatctgtgttttgtt

SEQ ID NO: 5108021 - DNA, 25 bp, Homo sapien
gttacctctggagagcagaaactga

SEQ ID NO: 5108022 - DNA, 25 bp, Homo sapien
ctttgggttacctctggagagcaga

SEQ ID NO: 5108023 - DNA, 25 bp, Homo sapien
tggagagcagaaactgagacaaaga

SEQ ID NO: 5108024 - DNA, 25 bp, Homo sapien
acctctggagagcagaaactgagac

SEQ ID NO: 5108025 - DNA, 25 bp, Homo sapien
caaaacaggtttaggatctgtttct

SEQ ID NO: 5108026 - DNA, 25 bp, Homo sapien
ataataacagccaccaatacaggtg

SEQ ID NO: 5108027 - DNA, 25 bp, Homo sapien
cagccaccaatacaggtggtttgaa

SEQ ID NO: 5108028 - DNA, 25 bp, Homo sapien
caccaatacaggtggtttgaatgtt

SEQ ID NO: 5108029 - DNA, 25 bp, Homo sapien
gtggtgaccaggtggtttcagtcca

SEQ ID NO: 5108030 - DNA, 25 bp, Homo sapien
cttgatgtagcttctagtggtgacc

SEQ ID NO: 5108031 - DNA, 25 bp, Homo sapien
taaacaaattgtagaggccaaattg

SEQ ID NO: 5108032 - DNA, 25 bp, Homo sapien
caagtaacgaggtgactgttgcatc

SEQ ID NO: 5108033 - DNA, 25 bp, Homo sapien
gaaagctgttaaataggatgcaatt

SEQ ID NO: 5108034 - DNA, 25 bp, Homo sapien
taaataatgattctcagctggattt

SEQ ID NO: 5108035 - DNA, 25 bp, Homo sapien
atgaaagctgttaaataggatgcaa

SEQ ID NO: 5108036 - DNA, 25 bp, Homo sapien
gcaatgaaagctgttaaataggatg

SEQ ID NO: 5108037 - DNA, 25 bp, Homo sapien
gatagatgagcagtcccttgtttcc

SEQ ID NO: 5108038 - DNA, 25 bp, Homo sapien
tgtaacaagctgaaagtgactcgtc

SEQ ID NO: 5108039 - DNA, 25 bp, Homo sapien
aaactcggacctgagcatatgcagc

SEQ ID NO: 5108040 - DNA, 25 bp, Homo sapien
tgttttcaatcgagcagatacagga

SEQ ID NO: 5108041 - DNA, 25 bp, Homo sapien
cctagtttgtgagcctgagagctgg

SEQ ID NO: 5108042 - DNA, 25 bp, Homo sapien
tgggaagtaggttgttctgttgctc

SEQ ID NO: 5108043 - DNA, 25 bp, Homo sapien
gtgcttcctcctgtatggttgacca

SEQ ID NO: 5108044 - DNA, 25 bp, Homo sapien
tttgagtgactaatgaaagttggga

SEQ ID NO: 5108045 - DNA, 25 bp, Homo sapien
tgtagagctcgaatctccagcatgg

SEQ ID NO: 5108046 - DNA, 25 bp, Homo sapien
cactgtttcttctgtagagctcgaa

SEQ ID NO: 5108047 - DNA, 25 bp, Homo sapien
ttgactatgctgtagctttggatca

SEQ ID NO: 5108048 - DNA, 25 bp, Homo sapien
gtagtactttgactatgctgtagct

SEQ ID NO: 5108049 - DNA, 25 bp, Homo sapien
ctgtacagcttttactatgccttgt

SEQ ID NO: 5108050 - DNA, 25 bp, Homo sapien
gattggattcagtcaaataggctgt

SEQ ID NO: 5108051 - DNA, 25 bp, Homo sapien
ttcagtcaaataggctgtacagctt

SEQ ID NO: 5108052 - DNA, 25 bp, Homo sapien
tgtttgattggattcagtcaaatag

SEQ ID NO: 5108053 - DNA, 25 bp, Homo sapien
tccagaaaatatgaacgcatccttc

SEQ ID NO: 5108054 - DNA, 25 bp, Homo sapien
tatgaacgcatccttctgccacggg

SEQ ID NO: 5108055 - DNA, 25 bp, Homo sapien
agaaaatatgaacgcatccttctgc

SEQ ID NO: 5108056 - DNA, 25 bp, Homo sapien
aatatgaacgcatccttctgccacg

SEQ ID NO: 5108057 - DNA, 25 bp, Homo sapien
tcagatgtcatccagccaggtgtgt

SEQ ID NO: 5108058 - DNA, 25 bp, Homo sapien
ggggccactcgccatgcacagcttc

SEQ ID NO: 5108059 - DNA, 25 bp, Homo sapien
gggccactcgccatgcacagcttct

SEQ ID NO: 5108060 - DNA, 25 bp, Homo sapien
ggccactcgccatgcacagcttctc

SEQ ID NO: 5108061 - DNA, 25 bp, Homo sapien
cagtgattctacaccctaacagtga

SEQ ID NO: 5108062 - DNA, 25 bp, Homo sapien
aacagtgactagtttaggaattggc

SEQ ID NO: 5108063 - DNA, 25 bp, Homo sapien
gtatatatatttcccgcaagacccc

SEQ ID NO: 5108064 - DNA, 25 bp, Homo sapien
cagcaaatgcatagtggattcttac

SEQ ID NO: 5108065 - DNA, 25 bp, Homo sapien
atgcacttctgtgcgaagagaccac

SEQ ID NO: 5108066 - DNA, 25 bp, Homo sapien
ccaaatttcatgcacttctgtgcga

SEQ ID NO: 5108067 - DNA, 25 bp, Homo sapien
ttcatgcacttctgtgcgaagagac

SEQ ID NO: 5108068 - DNA, 25 bp, Homo sapien
atttcatgcacttctgtgcgaagag

SEQ ID NO: 5108069 - DNA, 25 bp, Homo sapien
gttgaacagtccgatttccagtggg

SEQ ID NO: 5108070 - DNA, 25 bp, Homo sapien
gagttgaacagtccgatttccagtg

SEQ ID NO: 5108071 - DNA, 25 bp, Homo sapien
ttgaacagtccgatttccagtgggg

SEQ ID NO: 5108072 - DNA, 25 bp, Homo sapien
gtgagttgaacagtccgatttccag

SEQ ID NO: 5108073 - DNA, 25 bp, Homo sapien
tcatctgagtgcaaatgagtttggc

SEQ ID NO: 5108074 - DNA, 25 bp, Homo sapien
ttaagcaattgcttcttgagaagtg

SEQ ID NO: 5108075 - DNA, 25 bp, Homo sapien
caggcatttgacagcttggatgact

SEQ ID NO: 5108076 - DNA, 25 bp, Homo sapien
ttttattagccgtgagtggcacctc

SEQ ID NO: 5108077 - DNA, 25 bp, Homo sapien
ttaaagcagcgagacaaacatttca

SEQ ID NO: 5108078 - DNA, 25 bp, Homo sapien
tcaaccattaggagatacggccatg

SEQ ID NO: 5108079 - DNA, 25 bp, Homo sapien
tcattaactgaactgtgggcccata

SEQ ID NO: 5108080 - DNA, 25 bp, Homo sapien
tcatgcatgtctactttggaggcac

SEQ ID NO: 5108081 - DNA, 25 bp, Homo sapien
ttcagatgctaaccatctaccttac

SEQ ID NO: 5108082 - DNA, 25 bp, Homo sapien
taaattttcttggagcaatagggtc

SEQ ID NO: 5108083 - DNA, 25 bp, Homo sapien
tctcttcagatgctaaccatctacc

SEQ ID NO: 5108084 - DNA, 25 bp, Homo sapien
tgtgactggctaaaaattgtcctct

SEQ ID NO: 5108085 - DNA, 25 bp, Homo sapien
tctgctccatggtaaataaactttc

SEQ ID NO: 5108086 - DNA, 25 bp, Homo sapien
ctctgctccatggtaaataaacttt

SEQ ID NO: 5108087 - DNA, 25 bp, Homo sapien
tgctccatggtaaataaactttctc

SEQ ID NO: 5108088 - DNA, 25 bp, Homo sapien
ctgctccatggtaaataaactttct

SEQ ID NO: 5108089 - DNA, 25 bp, Homo sapien
ctaaatgttggtaaaggagggatgt

SEQ ID NO: 5108090 - DNA, 25 bp, Homo sapien
gaaatattcagttgcatttgaccag

SEQ ID NO: 5108091 - DNA, 25 bp, Homo sapien
ggatgtttgtttgtgtcgttggcat

SEQ ID NO: 5108092 - DNA, 25 bp, Homo sapien
ttgtgtcgttggcattgagagctgt

SEQ ID NO: 5108093 - DNA, 25 bp, Homo sapien
caccagccgcttcttctttcacatt

SEQ ID NO: 5108094 - DNA, 25 bp, Homo sapien
gatgagtagggcaacagcactacaa

SEQ ID NO: 5108095 - DNA, 25 bp, Homo sapien
ttttgcaaagggatgagtagggcaa

SEQ ID NO: 5108096 - DNA, 25 bp, Homo sapien
ccattttggtcggtggggcgcgcgc

SEQ ID NO: 5108097 - DNA, 25 bp, Homo sapien
cactgttttgtgcggcgttttcttc

SEQ ID NO: 5108098 - DNA, 25 bp, Homo sapien
cgttttcttcgggctagggctgtca

SEQ ID NO: 5108099 - DNA, 25 bp, Homo sapien
catcatgtttccttcgccgactcat

SEQ ID NO: 5108100 - DNA, 25 bp, Homo sapien
cctggctcgaccaccgagccgcatt

SEQ ID NO: 5108101 - DNA, 25 bp, Homo sapien
tctcgctgccgcactggcccgggag

SEQ ID NO: 5108102 - DNA, 25 bp, Homo sapien
aggctgctctcgctgccgcactggc

SEQ ID NO: 5108103 - DNA, 25 bp, Homo sapien
cctcggggttacttttactgcacag

SEQ ID NO: 5108104 - DNA, 25 bp, Homo sapien
cttttactgcacagggcggcggtcg

SEQ ID NO: 5108105 - DNA, 25 bp, Homo sapien
aagccaaggcaggccgcgctgccga

SEQ ID NO: 5108106 - DNA, 25 bp, Homo sapien
ggcgccgaagccaaggcaggccgcg

SEQ ID NO: 5108107 - DNA, 25 bp, Homo sapien
ctgggatgtggggatgcggcgccga

SEQ ID NO: 5108108 - DNA, 25 bp, Homo sapien
ggcaggccgcgctgccgacgtctca

SEQ ID NO: 5108109 - DNA, 25 bp, Homo sapien
ttaaagacatgtaaggtggccgggc

SEQ ID NO: 5108110 - DNA, 25 bp, Homo sapien
aattgctttataggagtattattaa

SEQ ID NO: 5108111 - DNA, 25 bp, Homo sapien
tataggagtattattaaagacatgt

SEQ ID NO: 5108112 - DNA, 25 bp, Homo sapien
tattattaaagacatgtaaggtggc

SEQ ID NO: 5108113 - DNA, 25 bp, Homo sapien
tcgtaagaccccaaggtcaaatagc

SEQ ID NO: 5108114 - DNA, 25 bp, Homo sapien
cctgaaccgtaacagaaatgcttgt

SEQ ID NO: 5108115 - DNA, 25 bp, Homo sapien
tagcaaacacttctagataatccag

SEQ ID NO: 5108116 - DNA, 25 bp, Homo sapien
cataaaaatccacgcggcacttcgc

SEQ ID NO: 5108117 - DNA, 25 bp, Homo sapien
cattttcagcgctctctttggtgtt

SEQ ID NO: 5108118 - DNA, 25 bp, Homo sapien
ccattttcagcgctctctttggtgt

SEQ ID NO: 5108119 - DNA, 25 bp, Homo sapien
gatatcattctgtccatctggatca

SEQ ID NO: 5108120 - DNA, 25 bp, Homo sapien
aagatatcattctgtccatctggat

SEQ ID NO: 5108121 - DNA, 25 bp, Homo sapien
agatatcattctgtccatctggatc

SEQ ID NO: 5108122 - DNA, 25 bp, Homo sapien
aaagatatcattctgtccatctgga

SEQ ID NO: 5108123 - DNA, 25 bp, Homo sapien
ctcatcactatctgtggtgtaaatc

SEQ ID NO: 5108124 - DNA, 25 bp, Homo sapien
tatgtgaaatctcatcactatctgt

SEQ ID NO: 5108125 - DNA, 25 bp, Homo sapien
tgaaatctcatcactatctgtggtg

SEQ ID NO: 5108126 - DNA, 25 bp, Homo sapien
aatctcatcactatctgtggtgtaa

SEQ ID NO: 5108127 - DNA, 25 bp, Homo sapien
tataaagtaccagtgtagcatcccc

SEQ ID NO: 5108128 - DNA, 25 bp, Homo sapien
aaagaggtataaagtaccagtgtag

SEQ ID NO: 5108129 - DNA, 25 bp, Homo sapien
gaggtataaagtaccagtgtagcat

SEQ ID NO: 5108130 - DNA, 25 bp, Homo sapien
aaagtaccagtgtagcatcccccgt

SEQ ID NO: 5108131 - DNA, 25 bp, Homo sapien
cacatgtccagcatagaatttgttg

SEQ ID NO: 5108132 - DNA, 25 bp, Homo sapien
ccacatgtccagcatagaatttgtt

SEQ ID NO: 5108133 - DNA, 25 bp, Homo sapien
caaaggtagtattactggtgctcca

SEQ ID NO: 5108134 - DNA, 25 bp, Homo sapien
tttgcatagcaaaaggttcactacc

SEQ ID NO: 5108135 - DNA, 25 bp, Homo sapien
tttgaatctcctaacctggcatctg

SEQ ID NO: 5108136 - DNA, 25 bp, Homo sapien
tatcatcacatgcttggtacaacaa

SEQ ID NO: 5108137 - DNA, 25 bp, Homo sapien
tattcacttgtattggaacatcagt

SEQ ID NO: 5108138 - DNA, 25 bp, Homo sapien
tttgtggcacctaaaaatcttggag

SEQ ID NO: 5108139 - DNA, 25 bp, Homo sapien
gaaccaatttggaactattcacttg

SEQ ID NO: 5108140 - DNA, 25 bp, Homo sapien
cagtgttagtataagacacatgcag

SEQ ID NO: 5108141 - DNA, 25 bp, Homo sapien
tcctccagtaatgggttgacacctt

SEQ ID NO: 5108142 - DNA, 25 bp, Homo sapien
tctccacaccctgtgtaattttggt

SEQ ID NO: 5108143 - DNA, 25 bp, Homo sapien
tcaccaaagattgctgtccaacagc

SEQ ID NO: 5108144 - DNA, 25 bp, Homo sapien
tatggcatggctgattagtactcaa

SEQ ID NO: 5108145 - DNA, 25 bp, Homo sapien
taagcatagaaacgccatttttgcc

SEQ ID NO: 5108146 - DNA, 25 bp, Homo sapien
catcaccgctagcacgtttatatca

SEQ ID NO: 5108147 - DNA, 25 bp, Homo sapien
tatttgaaatatgacgggcagccat

SEQ ID NO: 5108148 - DNA, 25 bp, Homo sapien
caaatatcacactagtaaagacgtt

SEQ ID NO: 5108149 - DNA, 25 bp, Homo sapien
gatacaattatacaagcatgcggaa

SEQ ID NO: 5108150 - DNA, 25 bp, Homo sapien
gcaagttgccaaatagtgggtatac

SEQ ID NO: 5108151 - DNA, 25 bp, Homo sapien
tccgtaagggatggttatcagaaag

SEQ ID NO: 5108152 - DNA, 25 bp, Homo sapien
aaattggtataactgcttcggatag

SEQ ID NO: 5108153 - DNA, 25 bp, Homo sapien
tccctggagagcagcttgctacata

SEQ ID NO: 5108154 - DNA, 25 bp, Homo sapien
gcaagaatgttaacctttgagtatc

SEQ ID NO: 5108155 - DNA, 25 bp, Homo sapien
tgctacataccaaagtaaaaggaag

SEQ ID NO: 5108156 - DNA, 25 bp, Homo sapien
gctcacctgtaccactgtagcaaaa

SEQ ID NO: 5108157 - DNA, 25 bp, Homo sapien
caaatgataatcaggtcacaccatg

SEQ ID NO: 5108158 - DNA, 25 bp, Homo sapien
gaaaatttgatttagggactcatcc

SEQ ID NO: 5108159 - DNA, 25 bp, Homo sapien
tggtcttacaatttgcttggcaata

SEQ ID NO: 5108160 - DNA, 25 bp, Homo sapien
aaacaggttaataatctgtaacagc

SEQ ID NO: 5108161 - DNA, 25 bp, Homo sapien
gacatctaatttatatgacccacga

SEQ ID NO: 5108162 - DNA, 25 bp, Homo sapien
gaaaatcaagcactgatggatctgt

SEQ ID NO: 5108163 - DNA, 25 bp, Homo sapien
tacagatataatgctccagttcaaa

SEQ ID NO: 5108164 - DNA, 25 bp, Homo sapien
tttgatagaaaactgactacccacc

SEQ ID NO: 5108165 - DNA, 25 bp, Homo sapien
gatgaggctcgtgctttagccattc

SEQ ID NO: 5108166 - DNA, 25 bp, Homo sapien
ccgaaccagtgcttcttgtcttttt

SEQ ID NO: 5108167 - DNA, 25 bp, Homo sapien
cattctccgaaccagtgcttcttgt

SEQ ID NO: 5108168 - DNA, 25 bp, Homo sapien
gctttagccattctccgaaccagtg

SEQ ID NO: 5108169 - DNA, 25 bp, Homo sapien
gaagtccaggctttataaaagtcag

SEQ ID NO: 5108170 - DNA, 25 bp, Homo sapien
ataaaagtcagcattacatttctca

SEQ ID NO: 5108171 - DNA, 25 bp, Homo sapien
caatcacagatagttatcagcagtc

SEQ ID NO: 5108172 - DNA, 25 bp, Homo sapien
cgtgaagtcttccaactaatatttc

SEQ ID NO: 5108173 - DNA, 25 bp, Homo sapien
taatatccgtacataattgctaact

SEQ ID NO: 5108174 - DNA, 25 bp, Homo sapien
gacattagaataggaaataacgtag

SEQ ID NO: 5108175 - DNA, 25 bp, Homo sapien
ataggaaataacgtagattacctct

SEQ ID NO: 5108176 - DNA, 25 bp, Homo sapien
ttgatgatcctctgcaataatagca

SEQ ID NO: 5108177 - DNA, 25 bp, Homo sapien
catatcaaccatgttcctagaaata

SEQ ID NO: 5108178 - DNA, 25 bp, Homo sapien
tatcaaccatgttcctagaaatatg

SEQ ID NO: 5108179 - DNA, 25 bp, Homo sapien
tggaagtgtataaaaaccttaagca

SEQ ID NO: 5108180 - DNA, 25 bp, Homo sapien
atatcaaccatgttcctagaaatat

SEQ ID NO: 5108181 - DNA, 25 bp, Homo sapien
ttctcaccgatacaataaggaagct

SEQ ID NO: 5108182 - DNA, 25 bp, Homo sapien
agatgacatatgaagtttctgccag

SEQ ID NO: 5108183 - DNA, 25 bp, Homo sapien
tgccagttctaaatgttaatgatgc

SEQ ID NO: 5108184 - DNA, 25 bp, Homo sapien
gcattaacttgcctatgactttgaa

SEQ ID NO: 5108185 - DNA, 25 bp, Homo sapien
tgccttacgccctctagttggactt

SEQ ID NO: 5108186 - DNA, 25 bp, Homo sapien
tgataaatgccacaccatgacaggt

SEQ ID NO: 5108187 - DNA, 25 bp, Homo sapien
ggaataaagcatcctccctgcctta

SEQ ID NO: 5108188 - DNA, 25 bp, Homo sapien
tattatcacagctttgagacacttg

SEQ ID NO: 5108189 - DNA, 25 bp, Homo sapien
aataatataggttagctaaactcca

SEQ ID NO: 5108190 - DNA, 25 bp, Homo sapien
acttgcatttatctaggttattata

SEQ ID NO: 5108191 - DNA, 25 bp, Homo sapien
gtactccactgtagatatgaaaata

SEQ ID NO: 5108192 - DNA, 25 bp, Homo sapien
tagctaaactccagtactccactgt

SEQ ID NO: 5108193 - DNA, 25 bp, Homo sapien
ctcaagttgattcggatggtgacca

SEQ ID NO: 5108194 - DNA, 25 bp, Homo sapien
gaattgccaaaatttgtaatgctag

SEQ ID NO: 5108195 - DNA, 25 bp, Homo sapien
gtcctcaagttgattcggatggtga

SEQ ID NO: 5108196 - DNA, 25 bp, Homo sapien
gccaaaatttgtaatgctagcttct

SEQ ID NO: 5108197 - DNA, 25 bp, Homo sapien
ggctccatgatagcattttgtacgg

SEQ ID NO: 5108198 - DNA, 25 bp, Homo sapien
agttagcagcttgtgcttggctcca

SEQ ID NO: 5108199 - DNA, 25 bp, Homo sapien
ccccaacaccagacaaagttagcag

SEQ ID NO: 5108200 - DNA, 25 bp, Homo sapien
ttcagtgaagcctacccgcgatgac

SEQ ID NO: 5108201 - DNA, 25 bp, Homo sapien
tatcccccttggtctgttgtataag

SEQ ID NO: 5108202 - DNA, 25 bp, Homo sapien
ttttctgcccttgacggctctatcc

SEQ ID NO: 5108203 - DNA, 25 bp, Homo sapien
ccccttggtctgttgtataagaaag

SEQ ID NO: 5108204 - DNA, 25 bp, Homo sapien
gcccttgacggctctatcccccttg

SEQ ID NO: 5108205 - DNA, 25 bp, Homo sapien
tttgacaggactggaaacttgttct

SEQ ID NO: 5108206 - DNA, 25 bp, Homo sapien
ttgttcttcctgttcgcacttctta

SEQ ID NO: 5108207 - DNA, 25 bp, Homo sapien
tacgctagtctaattaatttgacag

SEQ ID NO: 5108208 - DNA, 25 bp, Homo sapien
ttcctgttcgcacttcttattcatc

SEQ ID NO: 5108209 - DNA, 25 bp, Homo sapien
tctagttatcttggtgtcatccggc

SEQ ID NO: 5108210 - DNA, 25 bp, Homo sapien
tccggcaaagcaagtattctgatgt

SEQ ID NO: 5108211 - DNA, 25 bp, Homo sapien
tcttacggtcatcattttgtgtaag

SEQ ID NO: 5108212 - DNA, 25 bp, Homo sapien
gttacatgagaaatcaagcccagca

SEQ ID NO: 5108213 - DNA, 25 bp, Homo sapien
agtttcctggtgattgaatctgatt

SEQ ID NO: 5108214 - DNA, 25 bp, Homo sapien
gagtttcctggtgattgaatctgat

SEQ ID NO: 5108215 - DNA, 25 bp, Homo sapien
tttcctggtgattgaatctgatttg

SEQ ID NO: 5108216 - DNA, 25 bp, Homo sapien
gtttcctggtgattgaatctgattt

SEQ ID NO: 5108217 - DNA, 25 bp, Homo sapien
gctctggttgcaattatcatatgca

SEQ ID NO: 5108218 - DNA, 25 bp, Homo sapien
gaggtgtaaatttcaaagctaggct

SEQ ID NO: 5108219 - DNA, 25 bp, Homo sapien
ttctttgcacgtgatgcatgccttt

SEQ ID NO: 5108220 - DNA, 25 bp, Homo sapien
tttctattctttgcacgtgatgcat

SEQ ID NO: 5108221 - DNA, 25 bp, Homo sapien
ctggaggtgtaaatttcaaagctag

SEQ ID NO: 5108222 - DNA, 25 bp, Homo sapien
tacagcttcttgtttgccaacaagc

SEQ ID NO: 5108223 - DNA, 25 bp, Homo sapien
cagattggagcatgttttccacata

SEQ ID NO: 5108224 - DNA, 25 bp, Homo sapien
acagattggagcatgttttccacat

SEQ ID NO: 5108225 - DNA, 25 bp, Homo sapien
cagcttcttgtttgccaacaagccc

SEQ ID NO: 5108226 - DNA, 25 bp, Homo sapien
ctaattttcatggcttgcttcgttt

SEQ ID NO: 5108227 - DNA, 25 bp, Homo sapien
aattttcatggcttgcttcgtttac

SEQ ID NO: 5108228 - DNA, 25 bp, Homo sapien
taattttcatggcttgcttcgttta

SEQ ID NO: 5108229 - DNA, 25 bp, Homo sapien
cttcaaaatctttaccaccttccat

SEQ ID NO: 5108230 - DNA, 25 bp, Homo sapien
tcttcaaaatctttaccaccttcca

SEQ ID NO: 5108231 - DNA, 25 bp, Homo sapien
tgcttttcctcttcaaaatctttac

SEQ ID NO: 5108232 - DNA, 25 bp, Homo sapien
cgtgcttttcctcttcaaaatcttt

SEQ ID NO: 5108233 - DNA, 25 bp, Homo sapien
gatccctggttctgtttattcatcc

SEQ ID NO: 5108234 - DNA, 25 bp, Homo sapien
ggatgatcaagctaccctgatacaa

SEQ ID NO: 5108235 - DNA, 25 bp, Homo sapien
tattcatccacttcatggacggggc

SEQ ID NO: 5108236 - DNA, 25 bp, Homo sapien
aagctaccctgatacaaagatccct

SEQ ID NO: 5108237 - DNA, 25 bp, Homo sapien
cctagcacagggccgtcttgctgca

SEQ ID NO: 5108238 - DNA, 25 bp, Homo sapien
tagcacagggccgtcttgctgcaca

SEQ ID NO: 5108239 - DNA, 25 bp, Homo sapien
tcctagcacagggccgtcttgctgc

SEQ ID NO: 5108240 - DNA, 25 bp, Homo sapien
gcacagggccgtcttgctgcacaca

SEQ ID NO: 5108241 - DNA, 25 bp, Homo sapien
ctccgcaggtggtttcctgagagca

SEQ ID NO: 5108242 - DNA, 25 bp, Homo sapien
gagagcagcttccatagtagcctta

SEQ ID NO: 5108243 - DNA, 25 bp, Homo sapien
gaccccaagccttccatgaacgttg

SEQ ID NO: 5108244 - DNA, 25 bp, Homo sapien
gggaatgtgcatgactggctccgca

SEQ ID NO: 5108245 - DNA, 25 bp, Homo sapien
gtaaaatctacatctagttacaggg

SEQ ID NO: 5108246 - DNA, 25 bp, Homo sapien
aaccccagaagggttgcttcagtgg

SEQ ID NO: 5108247 - DNA, 25 bp, Homo sapien
gcttcagtgggattcttttgaagta

SEQ ID NO: 5108248 - DNA, 25 bp, Homo sapien
tacaggggacactttctgccatcca

SEQ ID NO: 5108249 - DNA, 25 bp, Homo sapien
agcttttgataatcctgggcagcac

SEQ ID NO: 5108250 - DNA, 25 bp, Homo sapien
tttgataatcctgggcagcaccgct

SEQ ID NO: 5108251 - DNA, 25 bp, Homo sapien
atccctccactcttcagcccattct

SEQ ID NO: 5108252 - DNA, 25 bp, Homo sapien
ataatcctgggcagcaccgctcatc

SEQ ID NO: 5108253 - DNA, 25 bp, Homo sapien
ctgtcagggctgaatgcgtatgtgt

SEQ ID NO: 5108254 - DNA, 25 bp, Homo sapien
gggctgaatgcgtatgtgtctccct

SEQ ID NO: 5108255 - DNA, 25 bp, Homo sapien
tcagggctgaatgcgtatgtgtctc

SEQ ID NO: 5108256 - DNA, 25 bp, Homo sapien
tgtcagggctgaatgcgtatgtgtc

SEQ ID NO: 5108257 - DNA, 25 bp, Homo sapien
tgtcagtaaccgtcccaaaggagca

SEQ ID NO: 5108258 - DNA, 25 bp, Homo sapien
aataaggaagctgtaacatattgcg

SEQ ID NO: 5108259 - DNA, 25 bp, Homo sapien
acctcccggaggcaagcatctttaa

SEQ ID NO: 5108260 - DNA, 25 bp, Homo sapien
acatattgcgtacagtaaatcaggg

SEQ ID NO: 5108261 - DNA, 25 bp, Homo sapien
tcaggttcagcagattctgtattaa

SEQ ID NO: 5108262 - DNA, 25 bp, Homo sapien
gggcctggtgacatgcattttaggt

SEQ ID NO: 5108263 - DNA, 25 bp, Homo sapien
accttcaggttcagcagattctgta

SEQ ID NO: 5108264 - DNA, 25 bp, Homo sapien
tccaccccgaaagagattggtgtgg

SEQ ID NO: 5108265 - DNA, 25 bp, Homo sapien
ctttgatcctgctgacatcaatggc

SEQ ID NO: 5108266 - DNA, 25 bp, Homo sapien
tttgatcctgctgacatcaatggca

SEQ ID NO: 5108267 - DNA, 25 bp, Homo sapien
tgagatgctaaactgaccatatcac

SEQ ID NO: 5108268 - DNA, 25 bp, Homo sapien
caaacactgctcatgtcttgccttg

SEQ ID NO: 5108269 - DNA, 25 bp, Homo sapien
tcatactagagtgtcaagtgaacaa

SEQ ID NO: 5108270 - DNA, 25 bp, Homo sapien
tctgcatgctacagctgtaatagtg

SEQ ID NO: 5108271 - DNA, 25 bp, Homo sapien
tcagtggagaccatctgagaagtct

SEQ ID NO: 5108272 - DNA, 25 bp, Homo sapien
taattgttcaggaaaccttcagcgg

SEQ ID NO: 5108273 - DNA, 25 bp, Homo sapien
taatactttgtgttacctgagggtc

SEQ ID NO: 5108274 - DNA, 25 bp, Homo sapien
ccatgtctacctccgaacaagggaa

SEQ ID NO: 5108275 - DNA, 25 bp, Homo sapien
ggcacattgcattatactctgctgc

SEQ ID NO: 5108276 - DNA, 25 bp, Homo sapien
ttgcattatactctgctgcccatgg

SEQ ID NO: 5108277 - DNA, 25 bp, Homo sapien
cacacttgtcatgttggcacattgc

SEQ ID NO: 5108278 - DNA, 25 bp, Homo sapien
ttttgatgatgtttcagaaacaggt

SEQ ID NO: 5108279 - DNA, 25 bp, Homo sapien
gcaagaggtgagctcatatctccca

SEQ ID NO: 5108280 - DNA, 25 bp, Homo sapien
tctcccataaatttgtcagccgtga

SEQ ID NO: 5108281 - DNA, 25 bp, Homo sapien
tgagtaatgccttgctatttgcgcc

SEQ ID NO: 5108282 - DNA, 25 bp, Homo sapien
gacacagtgttctccggcttggcat

SEQ ID NO: 5108283 - DNA, 25 bp, Homo sapien
tgttttcacttgctcgcgattgaca

SEQ ID NO: 5108284 - DNA, 25 bp, Homo sapien
gtggaagcgcaaggtcaccccttct

SEQ ID NO: 5108285 - DNA, 25 bp, Homo sapien
aaacaaaccaatgagtggaagcgca

SEQ ID NO: 5108286 - DNA, 25 bp, Homo sapien
tgacatggggaagtaaaacctgtac

SEQ ID NO: 5108287 - DNA, 25 bp, Homo sapien
tggacaggtgatatttccagggaga

SEQ ID NO: 5108288 - DNA, 25 bp, Homo sapien
tataaagtctcaaggtagaaaacac

SEQ ID NO: 5108289 - DNA, 25 bp, Homo sapien
ccagggagaagcttaagggattgta

SEQ ID NO: 5108290 - DNA, 25 bp, Homo sapien
tggagatgatgctaagaggatcact

SEQ ID NO: 5108291 - DNA, 25 bp, Homo sapien
acatggtgacaaatggccccggcag

SEQ ID NO: 5108292 - DNA, 25 bp, Homo sapien
gccagatggaatgtggtgaaagttc

SEQ ID NO: 5108293 - DNA, 25 bp, Homo sapien
ggcaccaccagtgagtgccagatgg

SEQ ID NO: 5108294 - DNA, 25 bp, Homo sapien
tgatttgtacctttcagactaaagg

SEQ ID NO: 5108295 - DNA, 25 bp, Homo sapien
ggcaggagttacaatggaataatta

SEQ ID NO: 5108296 - DNA, 25 bp, Homo sapien
ttgggtgcacatttgtcacctggga

SEQ ID NO: 5108297 - DNA, 25 bp, Homo sapien
gggaatactaccagcaagcctcata

SEQ ID NO: 5108298 - DNA, 25 bp, Homo sapien
cttttctgtagggtgttgggtgcac

SEQ ID NO: 5108299 - DNA, 25 bp, Homo sapien
agagtgtgacttgcatcttgccttc

SEQ ID NO: 5108300 - DNA, 25 bp, Homo sapien
aggttacaaaaagagtgtgacttgc

SEQ ID NO: 5108301 - DNA, 25 bp, Homo sapien
tacaaaaagagtgtgacttgcatct

SEQ ID NO: 5108302 - DNA, 25 bp, Homo sapien
agcagaattcaggaaatgtgatggg

SEQ ID NO: 5108303 - DNA, 25 bp, Homo sapien
tgctactcttgattctttactctgc

SEQ ID NO: 5108304 - DNA, 25 bp, Homo sapien
catcttgaatgtgggctgaatctag

SEQ ID NO: 5108305 - DNA, 25 bp, Homo sapien
ccctcaactgctactcttgattctt

SEQ ID NO: 5108306 - DNA, 25 bp, Homo sapien
tccctggggttgacagcctctaaaa

SEQ ID NO: 5108307 - DNA, 25 bp, Homo sapien
tataatctctgattctgcttttgga

SEQ ID NO: 5108308 - DNA, 25 bp, Homo sapien
cattcctttgttgtcttctaacctt

SEQ ID NO: 5108309 - DNA, 25 bp, Homo sapien
catttccaaggaatgatataatctc

SEQ ID NO: 5108310 - DNA, 25 bp, Homo sapien
tgttgtcttctaaccttccatccat

SEQ ID NO: 5108311 - DNA, 25 bp, Homo sapien
ggtttgtttcaagatgctggagcca

SEQ ID NO: 5108312 - DNA, 25 bp, Homo sapien
gatgctggagccattaacagtactg

SEQ ID NO: 5108313 - DNA, 25 bp, Homo sapien
ccaaaattggtttgtttcaagatgc

SEQ ID NO: 5108314 - DNA, 25 bp, Homo sapien
tactgaatgtaagtcagggtattgc

SEQ ID NO: 5108315 - DNA, 25 bp, Homo sapien
tcaagctgcagtgtgactccaggcc

SEQ ID NO: 5108316 - DNA, 25 bp, Homo sapien
gagttcacgtcatcttggacagcgg

SEQ ID NO: 5108317 - DNA, 25 bp, Homo sapien
cttattgttacacccaggaagaagc

SEQ ID NO: 5108318 - DNA, 25 bp, Homo sapien
ggaaagtcaatagcctggagttcac

SEQ ID NO: 5108319 - DNA, 25 bp, Homo sapien
tttaagaagtattgcagtttattaa

SEQ ID NO: 5108320 - DNA, 25 bp, Homo sapien
tcaagcttgatggaaatgacagggt

SEQ ID NO: 5108321 - DNA, 25 bp, Homo sapien
gatgtatattttcaagcttgatgga

SEQ ID NO: 5108322 - DNA, 25 bp, Homo sapien
taagatgtatattttcaagcttgat

SEQ ID NO: 5108323 - DNA, 25 bp, Homo sapien
aatttttccggcattgctctttgtc

SEQ ID NO: 5108324 - DNA, 25 bp, Homo sapien
ttggctgaaagagactgctatgcat

SEQ ID NO: 5108325 - DNA, 25 bp, Homo sapien
caagtcacagcagttagacttaatt

SEQ ID NO: 5108326 - DNA, 25 bp, Homo sapien
ttttgtagaggcgagttattggctg

SEQ ID NO: 5108327 - DNA, 25 bp, Homo sapien
catgaaatctgtacagtaaagttca

SEQ ID NO: 5108328 - DNA, 25 bp, Homo sapien
ctgcaaacatgaaatctgtacagta

SEQ ID NO: 5108329 - DNA, 25 bp, Homo sapien
gaatccacagctgaaagggctatca

SEQ ID NO: 5108330 - DNA, 25 bp, Homo sapien
ctgtacagtaaagttcagaatccac

SEQ ID NO: 5108331 - DNA, 25 bp, Homo sapien
tccccttttctcttcagttgtgctg

SEQ ID NO: 5108332 - DNA, 25 bp, Homo sapien
cctgctgtccctggaccttcacctg

SEQ ID NO: 5108333 - DNA, 25 bp, Homo sapien
ctcttcagttgtgctgctccctgct

SEQ ID NO: 5108334 - DNA, 25 bp, Homo sapien
ttcacctgcttcatggcactgacat

SEQ ID NO: 5108335 - DNA, 25 bp, Homo sapien
agccactcgcctttatgcagtcctg

SEQ ID NO: 5108336 - DNA, 25 bp, Homo sapien
tcgcctttatgcagtcctgatgttt

SEQ ID NO: 5108337 - DNA, 25 bp, Homo sapien
tgcagtcctgatgtttttgtctaaa

SEQ ID NO: 5108338 - DNA, 25 bp, Homo sapien
tatgcagtcctgatgtttttgtcta

SEQ ID NO: 5108339 - DNA, 25 bp, Homo sapien
cacgtaaattggactgaggagccac

SEQ ID NO: 5108340 - DNA, 25 bp, Homo sapien
gttcttcttcacgtaaattggactg

SEQ ID NO: 5108341 - DNA, 25 bp, Homo sapien
tttgccatttctatctgtcaccacc

SEQ ID NO: 5108342 - DNA, 25 bp, Homo sapien
ttggactgaggagccacagtgtgcc

SEQ ID NO: 5108343 - DNA, 25 bp, Homo sapien
taagccacactagcctgctgcaggc

SEQ ID NO: 5108344 - DNA, 25 bp, Homo sapien
ctaagccacactagcctgctgcagg

SEQ ID NO: 5108345 - DNA, 25 bp, Homo sapien
gcaggccttcttctttaggccactt

SEQ ID NO: 5108346 - DNA, 25 bp, Homo sapien
tgctgcaggccttcttctttaggcc

SEQ ID NO: 5108347 - DNA, 25 bp, Homo sapien
gagtgatggctctctgttgcgcaat

SEQ ID NO: 5108348 - DNA, 25 bp, Homo sapien
tccagcatgagaattccagcgggct

SEQ ID NO: 5108349 - DNA, 25 bp, Homo sapien
gcagaaaatagaagtttgggcagcc

SEQ ID NO: 5108350 - DNA, 25 bp, Homo sapien
caaatgtttcgtggaggaatgagct

SEQ ID NO: 5108351 - DNA, 25 bp, Homo sapien
tgaccaatctttccaccatcgactt

SEQ ID NO: 5108352 - DNA, 25 bp, Homo sapien
ctctgaccaatctttccaccatcga

SEQ ID NO: 5108353 - DNA, 25 bp, Homo sapien
ctttccaccatcgacttcctctgcc

SEQ ID NO: 5108354 - DNA, 25 bp, Homo sapien
atctttccaccatcgacttcctctg

SEQ ID NO: 5108355 - DNA, 25 bp, Homo sapien
cgtgataaacttgggtaaccttgct

SEQ ID NO: 5108356 - DNA, 25 bp, Homo sapien
tgggctcctgtcatcgaaagctgtt

SEQ ID NO: 5108357 - DNA, 25 bp, Homo sapien
caggagattttgtcgtgtaagtcac

SEQ ID NO: 5108358 - DNA, 25 bp, Homo sapien
gattcctcaagcgtttctcaggaga

SEQ ID NO: 5108359 - DNA, 25 bp, Homo sapien
caaaagatgtgccacctccagatgt

SEQ ID NO: 5108360 - DNA, 25 bp, Homo sapien
gatgtgccacctccagatgtcttct

SEQ ID NO: 5108361 - DNA, 25 bp, Homo sapien
gaggttggtgataattacagtcaat

SEQ ID NO: 5108362 - DNA, 25 bp, Homo sapien
tctgaggttggtgataattacagtc

SEQ ID NO: 5108363 - DNA, 25 bp, Homo sapien
gtcagataaaagatattcatgacca

SEQ ID NO: 5108364 - DNA, 25 bp, Homo sapien
tcagataaaagatattcatgaccat

SEQ ID NO: 5108365 - DNA, 25 bp, Homo sapien
ctgtcagataaaagatattcatgac

SEQ ID NO: 5108366 - DNA, 25 bp, Homo sapien
tgtcagataaaagatattcatgacc

SEQ ID NO: 5108367 - DNA, 25 bp, Homo sapien
gatatcactgtaggtgcccatgccc

SEQ ID NO: 5108368 - DNA, 25 bp, Homo sapien
agcttggatatcactgtaggtgccc

SEQ ID NO: 5108369 - DNA, 25 bp, Homo sapien
cagtgtagctttttgaggtgctctt

SEQ ID NO: 5108370 - DNA, 25 bp, Homo sapien
tgcttgtctacccagtgtagctttt

SEQ ID NO: 5108371 - DNA, 25 bp, Homo sapien
tctgcagctataaccctggagctat

SEQ ID NO: 5108372 - DNA, 25 bp, Homo sapien
tctgaggtccccttggagtctgcag

SEQ ID NO: 5108373 - DNA, 25 bp, Homo sapien
acctgggtgtgtaagaatcagaatc

SEQ ID NO: 5108374 - DNA, 25 bp, Homo sapien
ctgtaagaccacctgggtgtgtaag

SEQ ID NO: 5108375 - DNA, 25 bp, Homo sapien
cactctgagctttgagatctctaga

SEQ ID NO: 5108376 - DNA, 25 bp, Homo sapien
ccatccatgaggcattaaggatgac

SEQ ID NO: 5108377 - DNA, 25 bp, Homo sapien
caggtagggtagtattattggaaca

SEQ ID NO: 5108378 - DNA, 25 bp, Homo sapien
tgaggaatgggagatcactctgagc

SEQ ID NO: 5108379 - DNA, 25 bp, Homo sapien
tcacaagtagcacctgtcctctctg

SEQ ID NO: 5108380 - DNA, 25 bp, Homo sapien
ttcacaagtagcacctgtcctctct

SEQ ID NO: 5108381 - DNA, 25 bp, Homo sapien
ggccatcagacagttctgctacatt

SEQ ID NO: 5108382 - DNA, 25 bp, Homo sapien
catcagacagttctgctacattact

SEQ ID NO: 5108383 - DNA, 25 bp, Homo sapien
agttctgctacattacttgactgta

SEQ ID NO: 5108384 - DNA, 25 bp, Homo sapien
cttggccatcagacagttctgctac

SEQ ID NO: 5108385 - DNA, 25 bp, Homo sapien
tgagctaattctacgataccagcca

SEQ ID NO: 5108386 - DNA, 25 bp, Homo sapien
gataccagccagtagatgtctctct

SEQ ID NO: 5108387 - DNA, 25 bp, Homo sapien
gaataaatgagctaattctacgata

SEQ ID NO: 5108388 - DNA, 25 bp, Homo sapien
gtctctctctgttatatcccttctg

SEQ ID NO: 5108389 - DNA, 25 bp, Homo sapien
ccctaagatcttatgcagtctggac

SEQ ID NO: 5108390 - DNA, 25 bp, Homo sapien
tttttagctgcagttaccatcctca

SEQ ID NO: 5108391 - DNA, 25 bp, Homo sapien
agggcacgttggcttgtgaaacaag

SEQ ID NO: 5108392 - DNA, 25 bp, Homo sapien
caatgaaagctgcatgtgcatgtag

SEQ ID NO: 5108393 - DNA, 25 bp, Homo sapien
acctctgggtagacaagttggctgg

SEQ ID NO: 5108394 - DNA, 25 bp, Homo sapien
tgacataggcgagcagcaagcacat

SEQ ID NO: 5108395 - DNA, 25 bp, Homo sapien
tctggacccacacacatcatgtttg

SEQ ID NO: 5108396 - DNA, 25 bp, Homo sapien
gagtatggtcagagatgatttccag

SEQ ID NO: 5108397 - DNA, 25 bp, Homo sapien
gtgtaatagcagtagttacaattga

SEQ ID NO: 5108398 - DNA, 25 bp, Homo sapien
gtagttacaattgattccagaggac

SEQ ID NO: 5108399 - DNA, 25 bp, Homo sapien
ccagaggacacacactctttgctgc

SEQ ID NO: 5108400 - DNA, 25 bp, Homo sapien
ttacaattgattccagaggacacac

SEQ ID NO: 5108401 - DNA, 25 bp, Homo sapien
cagctacctgtcctgacatccagtt

SEQ ID NO: 5108402 - DNA, 25 bp, Homo sapien
agcagctacctgtcctgacatccag

SEQ ID NO: 5108403 - DNA, 25 bp, Homo sapien
gctacctgtcctgacatccagttca

SEQ ID NO: 5108404 - DNA, 25 bp, Homo sapien
acagcagctacctgtcctgacatcc

SEQ ID NO: 5108405 - DNA, 25 bp, Homo sapien
tggaccgctgttctgtgagctccca

SEQ ID NO: 5108406 - DNA, 25 bp, Homo sapien
tttgctgctggccacgaaagatgac

SEQ ID NO: 5108407 - DNA, 25 bp, Homo sapien
gatgactgccctacagtggaccgct

SEQ ID NO: 5108408 - DNA, 25 bp, Homo sapien
gcctggaagaaggacccctgaggtg

SEQ ID NO: 5108409 - DNA, 25 bp, Homo sapien
cagcctagggacaaatcggatgtgt

SEQ ID NO: 5108410 - DNA, 25 bp, Homo sapien
agcctagggacaaatcggatgtgtc

SEQ ID NO: 5108411 - DNA, 25 bp, Homo sapien
gcagcctagggacaaatcggatgtg

SEQ ID NO: 5108412 - DNA, 25 bp, Homo sapien
agcagcctagggacaaatcggatgt

SEQ ID NO: 5108413 - DNA, 25 bp, Homo sapien
aaaactgagtgaaagtgggatctct

SEQ ID NO: 5108414 - DNA, 25 bp, Homo sapien
taagctaaacaaaactgcatgaaag

SEQ ID NO: 5108415 - DNA, 25 bp, Homo sapien
cattgattaattatgtgtgccaggc

SEQ ID NO: 5108416 - DNA, 25 bp, Homo sapien
tgtgccaggctttcagtatacaatt

SEQ ID NO: 5108417 - DNA, 25 bp, Homo sapien
cagttgtgcccagtactcctgtgtg

SEQ ID NO: 5108418 - DNA, 25 bp, Homo sapien
gtcaaaaatataggaggtagctctt

SEQ ID NO: 5108419 - DNA, 25 bp, Homo sapien
ccactttgataacgctcatctgagg

SEQ ID NO: 5108420 - DNA, 25 bp, Homo sapien
caacagatacgggttgttcaacagt

SEQ ID NO: 5108421 - DNA, 25 bp, Homo sapien
tgtggtgacccaatccaggtgctct

SEQ ID NO: 5108422 - DNA, 25 bp, Homo sapien
taatgtctgttctagcacacgagga

SEQ ID NO: 5108423 - DNA, 25 bp, Homo sapien
aaagctgctgaaatgtgtctgggac

SEQ ID NO: 5108424 - DNA, 25 bp, Homo sapien
taatgaaacttcaagccctgcccag

SEQ ID NO: 5108425 - DNA, 25 bp, Homo sapien
atttgctgttgagaacactgtgacc

SEQ ID NO: 5108426 - DNA, 25 bp, Homo sapien
acactgtgaccacccattctgctgt

SEQ ID NO: 5108427 - DNA, 25 bp, Homo sapien
gaacagaagcctcctcatagaagtt

SEQ ID NO: 5108428 - DNA, 25 bp, Homo sapien
aagtaaagttgacgcaaacaacaag

SEQ ID NO: 5108429 - DNA, 25 bp, Homo sapien
gagattggattacctttgacccatg

SEQ ID NO: 5108430 - DNA, 25 bp, Homo sapien
caaacaacaagtttgtttatggaca

SEQ ID NO: 5108431 - DNA, 25 bp, Homo sapien
taatcctcgggacacgctgactttc

SEQ ID NO: 5108432 - DNA, 25 bp, Homo sapien
cactggagcaggctttttaataagc

SEQ ID NO: 5108433 - DNA, 25 bp, Homo sapien
tcttctctgtttcgcttatggcaaa

SEQ ID NO: 5108434 - DNA, 25 bp, Homo sapien
tcggatcttccgacctctccttaat

SEQ ID NO: 5108435 - DNA, 25 bp, Homo sapien
catggactatttaagccaaagaagg

SEQ ID NO: 5108436 - DNA, 25 bp, Homo sapien
ccaaagaagggctttagaaagcagt

SEQ ID NO: 5108437 - DNA, 25 bp, Homo sapien
taaaatcttaaaagggctccatgga

SEQ ID NO: 5108438 - DNA, 25 bp, Homo sapien
gaaagcagttcaggaaattgccatg

SEQ ID NO: 5108439 - DNA, 25 bp, Homo sapien
taatacaggttactaggtcaaatgc

SEQ ID NO: 5108440 - DNA, 25 bp, Homo sapien
tagtgacctagggttgactttgctc

SEQ ID NO: 5108441 - DNA, 25 bp, Homo sapien
caccagtgaaccatagcaggaattt

SEQ ID NO: 5108442 - DNA, 25 bp, Homo sapien
ggcatgtgggaaaagcttaatactg

SEQ ID NO: 5108443 - DNA, 25 bp, Homo sapien
gtcactactgagtctgccagccttc

SEQ ID NO: 5108444 - DNA, 25 bp, Homo sapien
tggcccatttacctcctcactagaa

SEQ ID NO: 5108445 - DNA, 25 bp, Homo sapien
ctcactagaactctggtcactactg

SEQ ID NO: 5108446 - DNA, 25 bp, Homo sapien
ggtggcccatttacctcctcactag

SEQ ID NO: 5108447 - DNA, 25 bp, Homo sapien
gatatcatacagtcaacagtgtctg

SEQ ID NO: 5108448 - DNA, 25 bp, Homo sapien
gtatcatctaattcctggaccggag

SEQ ID NO: 5108449 - DNA, 25 bp, Homo sapien
acagtgtctgtgtaaagctttgaga

SEQ ID NO: 5108450 - DNA, 25 bp, Homo sapien
tggaccggagtccacaggctgtacc

SEQ ID NO: 5108451 - DNA, 25 bp, Homo sapien
ccttcttagtcatgatccattcaaa

SEQ ID NO: 5108452 - DNA, 25 bp, Homo sapien
tcaggttgaacgatctttgcaattc

SEQ ID NO: 5108453 - DNA, 25 bp, Homo sapien
tctccaactccttcttagtcatgat

SEQ ID NO: 5108454 - DNA, 25 bp, Homo sapien
cattcaaaaactatgggctctccaa

SEQ ID NO: 5108455 - DNA, 25 bp, Homo sapien
ccctccttgcaccacctgcgcatgt

SEQ ID NO: 5108456 - DNA, 25 bp, Homo sapien
ctccttgcaccacctgcgcatgtcc

SEQ ID NO: 5108457 - DNA, 25 bp, Homo sapien
tccttgcaccacctgcgcatgtcca

SEQ ID NO: 5108458 - DNA, 25 bp, Homo sapien
cctccttgcaccacctgcgcatgtc

SEQ ID NO: 5108459 - DNA, 25 bp, Homo sapien
caccttgccctttgacaaatttgcc

SEQ ID NO: 5108460 - DNA, 25 bp, Homo sapien
cttgccctttgacaaatttgccatc

SEQ ID NO: 5108461 - DNA, 25 bp, Homo sapien
accttgccctttgacaaatttgcca

SEQ ID NO: 5108462 - DNA, 25 bp, Homo sapien
ccaccttgccctttgacaaatttgc

SEQ ID NO: 5108463 - DNA, 25 bp, Homo sapien
tttgctttcaaatctgcatgaatta

SEQ ID NO: 5108464 - DNA, 25 bp, Homo sapien
tgccttttcatggattttgctttca

SEQ ID NO: 5108465 - DNA, 25 bp, Homo sapien
aaatgtgccttttcatggattttgc

SEQ ID NO: 5108466 - DNA, 25 bp, Homo sapien
gattttgctttcaaatctgcatgaa

SEQ ID NO: 5108467 - DNA, 25 bp, Homo sapien
taggcatggcctctaaagggccctt

SEQ ID NO: 5108468 - DNA, 25 bp, Homo sapien
ttgggtgtcacaccaatgtgctgat

SEQ ID NO: 5108469 - DNA, 25 bp, Homo sapien
gcccttgataaaatacatgtgtgct

SEQ ID NO: 5108470 - DNA, 25 bp, Homo sapien
tgctgatgaacactaggatggacta

SEQ ID NO: 5108471 - DNA, 25 bp, Homo sapien
tccatttagattagtgtggcctacg

SEQ ID NO: 5108472 - DNA, 25 bp, Homo sapien
gaaagcaaagcttcctccaatgcta

SEQ ID NO: 5108473 - DNA, 25 bp, Homo sapien
tggcctacggtcagtcccatgacag

SEQ ID NO: 5108474 - DNA, 25 bp, Homo sapien
tgtcccggtgcatgatgtctctcca

SEQ ID NO: 5108475 - DNA, 25 bp, Homo sapien
gtggtgccaagctctggaatatggg

SEQ ID NO: 5108476 - DNA, 25 bp, Homo sapien
ccttgtctccaaagggcttattatt

SEQ ID NO: 5108477 - DNA, 25 bp, Homo sapien
tggagcacagtgagagttgaacaga

SEQ ID NO: 5108478 - DNA, 25 bp, Homo sapien
caaaggggtttggatcatggagcac

SEQ ID NO: 5108479 - DNA, 25 bp, Homo sapien
tttggagtgatggcaagatatccaa

SEQ ID NO: 5108480 - DNA, 25 bp, Homo sapien
tcctgagtgcaaacctgcctgtcac

SEQ ID NO: 5108481 - DNA, 25 bp, Homo sapien
tgagtgcaaacctgcctgtcacagc

SEQ ID NO: 5108482 - DNA, 25 bp, Homo sapien
tatttcctgagtgcaaacctgcctg

SEQ ID NO: 5108483 - DNA, 25 bp, Homo sapien
aagtatttcctgagtgcaaacctgc

SEQ ID NO: 5108484 - DNA, 25 bp, Homo sapien
gtctgccacagcaggaggagttcca

SEQ ID NO: 5108485 - DNA, 25 bp, Homo sapien
tgccacagcaggaggagttccagtg

SEQ ID NO: 5108486 - DNA, 25 bp, Homo sapien
cagcaggaggagttccagtggccat

SEQ ID NO: 5108487 - DNA, 25 bp, Homo sapien
cacagcaggaggagttccagtggcc

SEQ ID NO: 5108488 - DNA, 25 bp, Homo sapien
tctgacatgcaatactgagcggcgt

SEQ ID NO: 5108489 - DNA, 25 bp, Homo sapien
tattaaaggcgaagcaaacctctga

SEQ ID NO: 5108490 - DNA, 25 bp, Homo sapien
acaaaataatagtctgggtttcagg

SEQ ID NO: 5108491 - DNA, 25 bp, Homo sapien
gagcggcgtaattataaggcagttc

SEQ ID NO: 5108492 - DNA, 25 bp, Homo sapien
tttcgacatgcccaccccctcctgc

SEQ ID NO: 5108493 - DNA, 25 bp, Homo sapien
cttttcgacatgcccaccccctcct

SEQ ID NO: 5108494 - DNA, 25 bp, Homo sapien
catattctgcttttcgacatgccca

SEQ ID NO: 5108495 - DNA, 25 bp, Homo sapien
tattctgcttttcgacatgcccacc

SEQ ID NO: 5108496 - DNA, 25 bp, Homo sapien
tccacccttctcgtgctggaatccc

SEQ ID NO: 5108497 - DNA, 25 bp, Homo sapien
ttccacccttctcgtgctggaatcc

SEQ ID NO: 5108498 - DNA, 25 bp, Homo sapien
ctggaatcccactgctgcctgtagc

SEQ ID NO: 5108499 - DNA, 25 bp, Homo sapien
tggaatcccactgctgcctgtagcc

SEQ ID NO: 5108500 - DNA, 25 bp, Homo sapien
ttccaaggagtttaacgagtgctca

SEQ ID NO: 5108501 - DNA, 25 bp, Homo sapien
taacgagtgctcattattttggcca

SEQ ID NO: 5108502 - DNA, 25 bp, Homo sapien
ttccagctgcataatccaattacag

SEQ ID NO: 5108503 - DNA, 25 bp, Homo sapien
aaacttgcttgtaggcactgccttg

SEQ ID NO: 5108504 - DNA, 25 bp, Homo sapien
ccgaagccaaaggtgagggaccact

SEQ ID NO: 5108505 - DNA, 25 bp, Homo sapien
ggagccggcttgtgcacggcgcccg

SEQ ID NO: 5108506 - DNA, 25 bp, Homo sapien
tgcacggcgcccgaagccaaaggtg

SEQ ID NO: 5108507 - DNA, 25 bp, Homo sapien
agccggcttgtgcacggcgcccgaa

SEQ ID NO: 5108508 - DNA, 25 bp, Homo sapien
ggtctgatcattctaccaaggccat

SEQ ID NO: 5108509 - DNA, 25 bp, Homo sapien
cagctgtagtggtctgatcattcta

SEQ ID NO: 5108510 - DNA, 25 bp, Homo sapien
ctccttgcagctgtagtggtctgat

SEQ ID NO: 5108511 - DNA, 25 bp, Homo sapien
catgactgtgaagagcactgtgggt

SEQ ID NO: 5108512 - DNA, 25 bp, Homo sapien
ggatctccgttactaaactgtgtgg

SEQ ID NO: 5108513 - DNA, 25 bp, Homo sapien
gatttaatagtctacctcgaggtga

SEQ ID NO: 5108514 - DNA, 25 bp, Homo sapien
cctgagggagggcataatggatctc

SEQ ID NO: 5108515 - DNA, 25 bp, Homo sapien
tggtgctctgaatgcgccacgctct

SEQ ID NO: 5108516 - DNA, 25 bp, Homo sapien
tgggtggggatggtgatgggctggg

SEQ ID NO: 5108517 - DNA, 25 bp, Homo sapien
agtgggtgggtggggatggtgatgg

SEQ ID NO: 5108518 - DNA, 25 bp, Homo sapien
tgggtgggtggggatggtgatgggc

SEQ ID NO: 5108519 - DNA, 25 bp, Homo sapien
gtaagtgggtgggtggggatggtga

SEQ ID NO: 5108520 - DNA, 25 bp, Homo sapien
tttgtgcattggagctggaaatctc

SEQ ID NO: 5108521 - DNA, 25 bp, Homo sapien
ggaggtcgtttatcacttcacagct

SEQ ID NO: 5108522 - DNA, 25 bp, Homo sapien
gtcatgtggaactacacaacttcct

SEQ ID NO: 5108523 - DNA, 25 bp, Homo sapien
taagccaatgttgtttggaggtcgt

SEQ ID NO: 5108524 - DNA, 25 bp, Homo sapien
tgctctcaatactgtgtttcccagg

SEQ ID NO: 5108525 - DNA, 25 bp, Homo sapien
gtgtttcccagggattgcagcaatt

SEQ ID NO: 5108526 - DNA, 25 bp, Homo sapien
gcagcaattcctacccatattctca

SEQ ID NO: 5108527 - DNA, 25 bp, Homo sapien
gatttagtaagtcctctgctctcaa

SEQ ID NO: 5108528 - DNA, 25 bp, Homo sapien
aaggactggaggtatgtgtacgaca

SEQ ID NO: 5108529 - DNA, 25 bp, Homo sapien
cagtgtgagaccgtggcgttgccag

SEQ ID NO: 5108530 - DNA, 25 bp, Homo sapien
tatgtgtacgacatcccaagctgtg

SEQ ID NO: 5108531 - DNA, 25 bp, Homo sapien
ccaagctgtgacagttgggcaggtt

SEQ ID NO: 5108532 - DNA, 25 bp, Homo sapien
aacccatgtctgatgggaccatgtg

SEQ ID NO: 5108533 - DNA, 25 bp, Homo sapien
caatctgtgagagtaatggccgtgt

SEQ ID NO: 5108534 - DNA, 25 bp, Homo sapien
gtttgggcacatgactgtgacccca

SEQ ID NO: 5108535 - DNA, 25 bp, Homo sapien
tggacacttggaacagactgagcca

SEQ ID NO: 5108536 - DNA, 25 bp, Homo sapien
aactgtaagactaaaccatctgctg

SEQ ID NO: 5108537 - DNA, 25 bp, Homo sapien
ttcttagttgggttggagcttccag

SEQ ID NO: 5108538 - DNA, 25 bp, Homo sapien
ttctgaacggtccaagttgtcctca

SEQ ID NO: 5108539 - DNA, 25 bp, Homo sapien
tctggcttctttcttagttgggttg

SEQ ID NO: 5108540 - DNA, 25 bp, Homo sapien
ttgtccacccatgcctcatgttgct

SEQ ID NO: 5108541 - DNA, 25 bp, Homo sapien
cactgcttgtttggagctagagatc

SEQ ID NO: 5108542 - DNA, 25 bp, Homo sapien
tattttcatggaactcactgtgttc

SEQ ID NO: 5108543 - DNA, 25 bp, Homo sapien
tagagatctttaagctggtgttctg

SEQ ID NO: 5108544 - DNA, 25 bp, Homo sapien
gcaccccatttcattgcatgagctt

SEQ ID NO: 5108545 - DNA, 25 bp, Homo sapien
ctttggtcctagagcaccccatttc

SEQ ID NO: 5108546 - DNA, 25 bp, Homo sapien
ggtcctagagcaccccatttcattg

SEQ ID NO: 5108547 - DNA, 25 bp, Homo sapien
tagagcaccccatttcattgcatga

SEQ ID NO: 5108548 - DNA, 25 bp, Homo sapien
tttgctatgcttattcacaatgacg

SEQ ID NO: 5108549 - DNA, 25 bp, Homo sapien
ttttgctatgcttattcacaatgac

SEQ ID NO: 5108550 - DNA, 25 bp, Homo sapien
tgctatgcttattcacaatgacgat

SEQ ID NO: 5108551 - DNA, 25 bp, Homo sapien
gctatgcttattcacaatgacgatg

SEQ ID NO: 5108552 - DNA, 25 bp, Homo sapien
ggaactgagaaaaatcgcagagatg

SEQ ID NO: 5108553 - DNA, 25 bp, Homo sapien
ttgtggtgtaacaagcttgcttttc

SEQ ID NO: 5108554 - DNA, 25 bp, Homo sapien
cagtagcgtctgtgtgatttgtggt

SEQ ID NO: 5108555 - DNA, 25 bp, Homo sapien
tcagcccccacaaaatctgttggaa

SEQ ID NO: 5108556 - DNA, 25 bp, Homo sapien
caagttccatttcgagaaagtggga

SEQ ID NO: 5108557 - DNA, 25 bp, Homo sapien
agttccatttcgagaaagtgggact

SEQ ID NO: 5108558 - DNA, 25 bp, Homo sapien
tccaagttccatttcgagaaagtgg

SEQ ID NO: 5108559 - DNA, 25 bp, Homo sapien
ccaagttccatttcgagaaagtggg

SEQ ID NO: 5108560 - DNA, 25 bp, Homo sapien
cccaaatctggtttagcaagagacc

SEQ ID NO: 5108561 - DNA, 25 bp, Homo sapien
caaatctggtttagcaagagacctg

SEQ ID NO: 5108562 - DNA, 25 bp, Homo sapien
ctcccaaatctggtttagcaagaga

SEQ ID NO: 5108563 - DNA, 25 bp, Homo sapien
aaatctggtttagcaagagacctgg

SEQ ID NO: 5108564 - DNA, 25 bp, Homo sapien
tctgaataagggaggtagatactcc

SEQ ID NO: 5108565 - DNA, 25 bp, Homo sapien
tagatactcctgtgactgggatggt

SEQ ID NO: 5108566 - DNA, 25 bp, Homo sapien
ggaattccacgcttctgcagacagg

SEQ ID NO: 5108567 - DNA, 25 bp, Homo sapien
tgtttcggacacaagggaatggcct

SEQ ID NO: 5108568 - DNA, 25 bp, Homo sapien
tccatttggagataagcactgatgc

SEQ ID NO: 5108569 - DNA, 25 bp, Homo sapien
catttggagataagcactgatgcat

SEQ ID NO: 5108570 - DNA, 25 bp, Homo sapien
ctccatttggagataagcactgatg

SEQ ID NO: 5108571 - DNA, 25 bp, Homo sapien
ccatttggagataagcactgatgca

SEQ ID NO: 5108572 - DNA, 25 bp, Homo sapien
ctgtaatataggccattaatcgata

SEQ ID NO: 5108573 - DNA, 25 bp, Homo sapien
gaatggacgagagaatgcttcattt

SEQ ID NO: 5108574 - DNA, 25 bp, Homo sapien
cagaatggacgagagaatgcttcat

SEQ ID NO: 5108575 - DNA, 25 bp, Homo sapien
ggacagaatggacgagagaatgctt

SEQ ID NO: 5108576 - DNA, 25 bp, Homo sapien
gagggacagaatggacgagagaatg

SEQ ID NO: 5108577 - DNA, 25 bp, Homo sapien
ttccggtggttgaagcccagcgctg

SEQ ID NO: 5108578 - DNA, 25 bp, Homo sapien
ggttccggtggttgaagcccagcgc

SEQ ID NO: 5108579 - DNA, 25 bp, Homo sapien
gctaggttccggtggttgaagccca

SEQ ID NO: 5108580 - DNA, 25 bp, Homo sapien
taggttccggtggttgaagcccagc

SEQ ID NO: 5108581 - DNA, 25 bp, Homo sapien
taaacgaattttctctagaaggcaa

SEQ ID NO: 5108582 - DNA, 25 bp, Homo sapien
ccaactggaatgagaagccttttgc

SEQ ID NO: 5108583 - DNA, 25 bp, Homo sapien
ttttcaatgatctttaagtggtaac

SEQ ID NO: 5108584 - DNA, 25 bp, Homo sapien
ttccaactggaatgagaagcctttt

SEQ ID NO: 5108585 - DNA, 25 bp, Homo sapien
tttggccttgaaatccaactgtctg

SEQ ID NO: 5108586 - DNA, 25 bp, Homo sapien
gcttgagatccgagaacactttttt

SEQ ID NO: 5108587 - DNA, 25 bp, Homo sapien
aagttctatctctctactgcttgag

SEQ ID NO: 5108588 - DNA, 25 bp, Homo sapien
aatgataccttggaggaagccgttg

SEQ ID NO: 5108589 - DNA, 25 bp, Homo sapien
ctgcagagagaagcccaggaggctc

SEQ ID NO: 5108590 - DNA, 25 bp, Homo sapien
agagagaagcccaggaggctcagtg

SEQ ID NO: 5108591 - DNA, 25 bp, Homo sapien
tgcagagagaagcccaggaggctca

SEQ ID NO: 5108592 - DNA, 25 bp, Homo sapien
cagagagaagcccaggaggctcagt

SEQ ID NO: 5108593 - DNA, 25 bp, Homo sapien
ctatggggtccatgggcttagactc

SEQ ID NO: 5108594 - DNA, 25 bp, Homo sapien
ttctcttcaacttggtctgagctat

SEQ ID NO: 5108595 - DNA, 25 bp, Homo sapien
tcttcaacttggtctgagctatggg

SEQ ID NO: 5108596 - DNA, 25 bp, Homo sapien
ggtccatgggcttagactccagctg

SEQ ID NO: 5108597 - DNA, 25 bp, Homo sapien
tctgacgattcatctggaagggcct

SEQ ID NO: 5108598 - DNA, 25 bp, Homo sapien
tagccaaacttggtaccactagcga

SEQ ID NO: 5108599 - DNA, 25 bp, Homo sapien
tggcttccttcatccgatccaggaa

SEQ ID NO: 5108600 - DNA, 25 bp, Homo sapien
cactagcgaaacaggcggtaggaac

SEQ ID NO: 5108601 - DNA, 25 bp, Homo sapien
tgtaatttggacagccttgttggat

SEQ ID NO: 5108602 - DNA, 25 bp, Homo sapien
tatagggcctctctgctgtaatttg

SEQ ID NO: 5108603 - DNA, 25 bp, Homo sapien
gttggatttccaaatgggtgaagcc

SEQ ID NO: 5108604 - DNA, 25 bp, Homo sapien
gtgaagcccatacaaggccgggcct

SEQ ID NO: 5108605 - DNA, 25 bp, Homo sapien
tgatgatatgtggttttactgtatg

SEQ ID NO: 5108606 - DNA, 25 bp, Homo sapien
atgatatgtggttttactgtatgtc

SEQ ID NO: 5108607 - DNA, 25 bp, Homo sapien
ctgatgatatgtggttttactgtat

SEQ ID NO: 5108608 - DNA, 25 bp, Homo sapien
gatgatatgtggttttactgtatgt

SEQ ID NO: 5108609 - DNA, 25 bp, Homo sapien
tgacggccaactttctgggtaatta

SEQ ID NO: 5108610 - DNA, 25 bp, Homo sapien
cctgggaacttgtgctgaatctatc

SEQ ID NO: 5108611 - DNA, 25 bp, Homo sapien
tgctgaatctatcacatatgtggct

SEQ ID NO: 5108612 - DNA, 25 bp, Homo sapien
gcttctgggtctaagtaaatcgggc

SEQ ID NO: 5108613 - DNA, 25 bp, Homo sapien
tatatcaaacactgccactaggcca

SEQ ID NO: 5108614 - DNA, 25 bp, Homo sapien
ttttgggttgcattaggcagtcgag

SEQ ID NO: 5108615 - DNA, 25 bp, Homo sapien
cactaggccagctcttttgggttgc

SEQ ID NO: 5108616 - DNA, 25 bp, Homo sapien
ttatatcaaacactgccactaggcc

SEQ ID NO: 5108617 - DNA, 25 bp, Homo sapien
tatttggaccaaagtagagagcctt

SEQ ID NO: 5108618 - DNA, 25 bp, Homo sapien
acacaagagttgaaggtaggccgaa

SEQ ID NO: 5108619 - DNA, 25 bp, Homo sapien
gataaatgtgagctatcaggagcca

SEQ ID NO: 5108620 - DNA, 25 bp, Homo sapien
tgtttacctcctgctgaacagattc

SEQ ID NO: 5108621 - DNA, 25 bp, Homo sapien
tttgacttcagggtgcaactttttc

SEQ ID NO: 5108622 - DNA, 25 bp, Homo sapien
gatctaacagtgaattctttacaaa

SEQ ID NO: 5108623 - DNA, 25 bp, Homo sapien
tagtgtagtttagcaacgcagttgc

SEQ ID NO: 5108624 - DNA, 25 bp, Homo sapien
taaagctaatattgatctaacagtg

SEQ ID NO: 5108625 - DNA, 25 bp, Homo sapien
gctgtcatggtgacagtagatgagc

SEQ ID NO: 5108626 - DNA, 25 bp, Homo sapien
catggtgacagtagatgagccctga

SEQ ID NO: 5108627 - DNA, 25 bp, Homo sapien
tggtgacagtagatgagccctgaaa

SEQ ID NO: 5108628 - DNA, 25 bp, Homo sapien
tgtcatggtgacagtagatgagccc

SEQ ID NO: 5108629 - DNA, 25 bp, Homo sapien
cagtgattagtgtgatagggtagtc

SEQ ID NO: 5108630 - DNA, 25 bp, Homo sapien
ttcagtgattagtgtgatagggtag

SEQ ID NO: 5108631 - DNA, 25 bp, Homo sapien
gaaggaggataggtcctgttacttg

SEQ ID NO: 5108632 - DNA, 25 bp, Homo sapien
ctaaactgcctttgaaggaggatag

SEQ ID NO: 5108633 - DNA, 25 bp, Homo sapien
ccatgtcaggcttcaagtgggagcg

SEQ ID NO: 5108634 - DNA, 25 bp, Homo sapien
gtcactggaggacaaataaatggtg

SEQ ID NO: 5108635 - DNA, 25 bp, Homo sapien
tgccatgtcaggcttcaagtgggag

SEQ ID NO: 5108636 - DNA, 25 bp, Homo sapien
aataaatggtgtttgccatgtcagg

SEQ ID NO: 5108637 - DNA, 25 bp, Homo sapien
tcatggctgcaattatcaggtgtgt

SEQ ID NO: 5108638 - DNA, 25 bp, Homo sapien
agaagtttcagccggcctcatggct

SEQ ID NO: 5108639 - DNA, 25 bp, Homo sapien
tggtggtgaccagtttagcagaagt

SEQ ID NO: 5108640 - DNA, 25 bp, Homo sapien
ttatcaggtgtgtggtgtgttcttc

SEQ ID NO: 5108641 - DNA, 25 bp, Homo sapien
gtctgttcaggacttatgaatgatt

SEQ ID NO: 5108642 - DNA, 25 bp, Homo sapien
ggtatggatttatccctctgtgttt

SEQ ID NO: 5108643 - DNA, 25 bp, Homo sapien
gaagatccttctttgccagagcctt

SEQ ID NO: 5108644 - DNA, 25 bp, Homo sapien
tgtgtttcctgagttgaaatccggc

SEQ ID NO: 5108645 - DNA, 25 bp, Homo sapien
taggatgtggagagaagaaggagcc

SEQ ID NO: 5108646 - DNA, 25 bp, Homo sapien
aggagcccagcagagcacacaaaac

SEQ ID NO: 5108647 - DNA, 25 bp, Homo sapien
agaaggagcccagcagagcacacaa

SEQ ID NO: 5108648 - DNA, 25 bp, Homo sapien
ctttaggatgtggagagaagaagga

SEQ ID NO: 5108649 - DNA, 25 bp, Homo sapien
catggggagacagtcgaatctcagt

SEQ ID NO: 5108650 - DNA, 25 bp, Homo sapien
agacagtcgaatctcagtgatctga

SEQ ID NO: 5108651 - DNA, 25 bp, Homo sapien
tggggagacagtcgaatctcagtga

SEQ ID NO: 5108652 - DNA, 25 bp, Homo sapien
gggagacagtcgaatctcagtgatc

SEQ ID NO: 5108653 - DNA, 25 bp, Homo sapien
ctcttggcatttccacaaccttgta

SEQ ID NO: 5108654 - DNA, 25 bp, Homo sapien
gcatttccacaaccttgtaacggta

SEQ ID NO: 5108655 - DNA, 25 bp, Homo sapien
ccttgtaacggtatctttttgctag

SEQ ID NO: 5108656 - DNA, 25 bp, Homo sapien
acggtatctttttgctaggtatttg

SEQ ID NO: 5108657 - DNA, 25 bp, Homo sapien
aaagggaagcttcttggcttgggca

SEQ ID NO: 5108658 - DNA, 25 bp, Homo sapien
tagtgaaagggaagcttcttggctt

SEQ ID NO: 5108659 - DNA, 25 bp, Homo sapien
ctggggtagtgaaagggaagcttct

SEQ ID NO: 5108660 - DNA, 25 bp, Homo sapien
ggtagtgaaagggaagcttcttggc

SEQ ID NO: 5108661 - DNA, 25 bp, Homo sapien
gaggagtaagagtcctcttcggttc

SEQ ID NO: 5108662 - DNA, 25 bp, Homo sapien
ccttggaggagtaagagtcctcttc

SEQ ID NO: 5108663 - DNA, 25 bp, Homo sapien
gccccttggaggagtaagagtcctc

SEQ ID NO: 5108664 - DNA, 25 bp, Homo sapien
cctcttcggttctcagcttatgttc

SEQ ID NO: 5108665 - DNA, 25 bp, Homo sapien
cataggcttagatacaggctgtccg

SEQ ID NO: 5108666 - DNA, 25 bp, Homo sapien
gtccgtggtttgatttccagtgaga

SEQ ID NO: 5108667 - DNA, 25 bp, Homo sapien
gatacaggctgtccgtggtttgatt

SEQ ID NO: 5108668 - DNA, 25 bp, Homo sapien
catacgctcacataggcttagatac

SEQ ID NO: 5108669 - DNA, 25 bp, Homo sapien
actctgaactctcagaggaatcttc

SEQ ID NO: 5108670 - DNA, 25 bp, Homo sapien
cactctgaactctcagaggaatctt

SEQ ID NO: 5108671 - DNA, 25 bp, Homo sapien
ccacacactctgaactctcagagga

SEQ ID NO: 5108672 - DNA, 25 bp, Homo sapien
cacactctgaactctcagaggaatc

SEQ ID NO: 5108673 - DNA, 25 bp, Homo sapien
tcatggagggagtgaaatgaaaaca

SEQ ID NO: 5108674 - DNA, 25 bp, Homo sapien
gagagccaactgtgtgaaaggtacc

SEQ ID NO: 5108675 - DNA, 25 bp, Homo sapien
cactcagaagattggcagacaggag

SEQ ID NO: 5108676 - DNA, 25 bp, Homo sapien
aacactcagaagattggcagacagg

SEQ ID NO: 5108677 - DNA, 25 bp, Homo sapien
ctggaagaaggtccaagtccagagg

SEQ ID NO: 5108678 - DNA, 25 bp, Homo sapien
gaagaaggtccaagtccagagggca

SEQ ID NO: 5108679 - DNA, 25 bp, Homo sapien
tcatttgattgtgaaagcctcatct

SEQ ID NO: 5108680 - DNA, 25 bp, Homo sapien
tttgattgtgaaagcctcatctgga

SEQ ID NO: 5108681 - DNA, 25 bp, Homo sapien
aggccaataggaccatgtgtaaggg

SEQ ID NO: 5108682 - DNA, 25 bp, Homo sapien
gaggccaataggaccatgtgtaagg

SEQ ID NO: 5108683 - DNA, 25 bp, Homo sapien
aagttcagagtccttgagctgcagt

SEQ ID NO: 5108684 - DNA, 25 bp, Homo sapien
tccaagttcagagtccttgagctgc

SEQ ID NO: 5108685 - DNA, 25 bp, Homo sapien
agggagttgcggctggatgccagcc

SEQ ID NO: 5108686 - DNA, 25 bp, Homo sapien
tgtaagggagttgcggctggatgcc

SEQ ID NO: 5108687 - DNA, 25 bp, Homo sapien
taccgtgtaagggagttgcggctgg

SEQ ID NO: 5108688 - DNA, 25 bp, Homo sapien
agttgcggctggatgccagcctgca

SEQ ID NO: 5108689 - DNA, 25 bp, Homo sapien
atgcatcatgctggactgcgtccct

SEQ ID NO: 5108690 - DNA, 25 bp, Homo sapien
accatgctgcccctgttcgaatgca

SEQ ID NO: 5108691 - DNA, 25 bp, Homo sapien
tcctgtcctgataagagccctggcc

SEQ ID NO: 5108692 - DNA, 25 bp, Homo sapien
tgtcctgataagagccctggccaga

SEQ ID NO: 5108693 - DNA, 25 bp, Homo sapien
gtcgacctgacgctctacatgatgc

SEQ ID NO: 5108694 - DNA, 25 bp, Homo sapien
aagtcatgtagcacctccttggccg

SEQ ID NO: 5108695 - DNA, 25 bp, Homo sapien
tccttggccggtacatggcatccca

SEQ ID NO: 5108696 - DNA, 25 bp, Homo sapien
tcattccctgtggatgggcggctac

SEQ ID NO: 5108697 - DNA, 25 bp, Homo sapien
tgcttgaagggtcaactttggaaac

SEQ ID NO: 5108698 - DNA, 25 bp, Homo sapien
gataatacatatgaagagccatttg

SEQ ID NO: 5108699 - DNA, 25 bp, Homo sapien
ataatacatatgaagagccatttga

SEQ ID NO: 5108700 - DNA, 25 bp, Homo sapien
gtttccaaagttgacccttcaagca

SEQ ID NO: 5108701 - DNA, 25 bp, Homo sapien
caaatggctcttcatatgtattatc

SEQ ID NO: 5108702 - DNA, 25 bp, Homo sapien
tcaaatggctcttcatatgtattat

SEQ ID NO: 5108703 - DNA, 25 bp, Homo sapien
gtttccaaagttgacccttcaagca

SEQ ID NO: 5108704 - DNA, 25 bp, Homo sapien
ctgtttccaaagttgacccttcaag

SEQ ID NO: 5108705 - DNA, 25 bp, Homo sapien
caaatggctcttcatatgtattatc

SEQ ID NO: 5108706 - DNA, 25 bp, Homo sapien
ttatctcagctactgtttccaaagt

SEQ ID NO: 5108707 - DNA, 25 bp, Homo sapien
cttttcaaatggctcttcatatgta

SEQ ID NO: 5108708 - DNA, 25 bp, Homo sapien
tatgtattatctcagctactgtttc

SEQ ID NO: 5108709 - DNA, 25 bp, Homo sapien
ggctacgcagccaaactccgatttt

SEQ ID NO: 5108710 - DNA, 25 bp, Homo sapien
ccccaacgaagagctgtgagagact

SEQ ID NO: 5108711 - DNA, 25 bp, Homo sapien
tcctggaaggctacgcagccaaact

SEQ ID NO: 5108712 - DNA, 25 bp, Homo sapien
actccgattttctcagtctgcccag

SEQ ID NO: 5108713 - DNA, 25 bp, Homo sapien
caatgctgccccaacgaagagctgt

SEQ ID NO: 5108714 - DNA, 25 bp, Homo sapien
gtgagagactgcattcctggaaggc

SEQ ID NO: 5108715 - DNA, 25 bp, Homo sapien
agtctctcacagctcttcgttgggg

SEQ ID NO: 5108716 - DNA, 25 bp, Homo sapien
tctgggcagactgagaaaatcggag

SEQ ID NO: 5108717 - DNA, 25 bp, Homo sapien
gagtttggctgcgtagccttccagg

SEQ ID NO: 5108718 - DNA, 25 bp, Homo sapien
aaaatcggagtttggctgcgtagcc

SEQ ID NO: 5108719 - DNA, 25 bp, Homo sapien
gccttccaggaatgcagtctctcac

SEQ ID NO: 5108720 - DNA, 25 bp, Homo sapien
cttcgttggggcagcattgttggca

SEQ ID NO: 5108721 - DNA, 25 bp, Homo sapien
ggtagacaaaagttccgagtgccgc

SEQ ID NO: 5108722 - DNA, 25 bp, Homo sapien
cacaacatgggtctgagctactcaa

SEQ ID NO: 5108723 - DNA, 25 bp, Homo sapien
cagcgtgagatcatcgggaagcgcc

SEQ ID NO: 5108724 - DNA, 25 bp, Homo sapien
gcgtggcgagcagcgtgagatcatc

SEQ ID NO: 5108725 - DNA, 25 bp, Homo sapien
tcccagaggtctgcgcctgaagttg

SEQ ID NO: 5108726 - DNA, 25 bp, Homo sapien
cctttaaacagaatctggaccatct

SEQ ID NO: 5108727 - DNA, 25 bp, Homo sapien
taacatgtgtagtaagccagcacct

SEQ ID NO: 5108728 - DNA, 25 bp, Homo sapien
tcatagaatgcttccatgagaagca

SEQ ID NO: 5108729 - DNA, 25 bp, Homo sapien
ccaggacaggccagtgttgagtatg

SEQ ID NO: 5108730 - DNA, 25 bp, Homo sapien
gacaggccagtgttgagtatgaagt

SEQ ID NO: 5108731 - DNA, 25 bp, Homo sapien
caccaggacaggccagtgttgagta

SEQ ID NO: 5108732 - DNA, 25 bp, Homo sapien
caggacaggccagtgttgagtatga

SEQ ID NO: 5108733 - DNA, 25 bp, Homo sapien
ggtctcttctcgattccctgagatt

SEQ ID NO: 5108734 - DNA, 25 bp, Homo sapien
caggccacttcagtgctacacgcgg

SEQ ID NO: 5108735 - DNA, 25 bp, Homo sapien
gtcccttatgtacaaactctttcca

SEQ ID NO: 5108736 - DNA, 25 bp, Homo sapien
acattttgccaatgccagtgtcctg

SEQ ID NO: 5108737 - DNA, 25 bp, Homo sapien
acttgagaaaaactgagtcaattca

SEQ ID NO: 5108738 - DNA, 25 bp, Homo sapien
tctgaccgacttcatagtcactggc

SEQ ID NO: 5108739 - DNA, 25 bp, Homo sapien
caattcaatctgaccgacttcatag

SEQ ID NO: 5108740 - DNA, 25 bp, Homo sapien
tcacgcttgaagacttgagaaaaac

SEQ ID NO: 5108741 - DNA, 25 bp, Homo sapien
cagcagggtaggtgttcctggtgta

SEQ ID NO: 5108742 - DNA, 25 bp, Homo sapien
gcagctgccaatagaggcccattca

SEQ ID NO: 5108743 - DNA, 25 bp, Homo sapien
tatgatgagagtcattcctgcccag

SEQ ID NO: 5108744 - DNA, 25 bp, Homo sapien
gaaggatcccatgaaggaatatgat

SEQ ID NO: 5108745 - DNA, 25 bp, Homo sapien
agagacaactcggaccttgcctgcc

SEQ ID NO: 5108746 - DNA, 25 bp, Homo sapien
ctttatgagctgaattgaattgtcc

SEQ ID NO: 5108747 - DNA, 25 bp, Homo sapien
gaattgtcctctgtagagcctccca

SEQ ID NO: 5108748 - DNA, 25 bp, Homo sapien
ggtacagagggcaaacagagacaac

SEQ ID NO: 5108749 - DNA, 25 bp, Homo sapien
gagccgcctgcaaatcttaagagcc

SEQ ID NO: 5108750 - DNA, 25 bp, Homo sapien
tggagagtctgccagtcaaacggga

SEQ ID NO: 5108751 - DNA, 25 bp, Homo sapien
gagccattgctaagaggagaccagc

SEQ ID NO: 5108752 - DNA, 25 bp, Homo sapien
gggataaggtctgcataggctctct

SEQ ID NO: 5108753 - DNA, 25 bp, Homo sapien
tgccccatgaatgctacagaataag

SEQ ID NO: 5108754 - DNA, 25 bp, Homo sapien
gcttctagccttactctgaggtcaa

SEQ ID NO: 5108755 - DNA, 25 bp, Homo sapien
tgaggtcaaacttttggagagtgga

SEQ ID NO: 5108756 - DNA, 25 bp, Homo sapien
tttgctgctcatgtcagcttctagc

SEQ ID NO: 5108757 - DNA, 25 bp, Homo sapien
gagagtgattgcatcgcaggcttct

SEQ ID NO: 5108758 - DNA, 25 bp, Homo sapien
acaagagagtgattgcatcgcaggc

SEQ ID NO: 5108759 - DNA, 25 bp, Homo sapien
gtgattgcatcgcaggcttctactg

SEQ ID NO: 5108760 - DNA, 25 bp, Homo sapien
caagagagtgattgcatcgcaggct

SEQ ID NO: 5108761 - DNA, 25 bp, Homo sapien
ggtgaggtttgattcagtaagccct

SEQ ID NO: 5108762 - DNA, 25 bp, Homo sapien
aagctcaggtttagcctcaatagca

SEQ ID NO: 5108763 - DNA, 25 bp, Homo sapien
ttgattcagtaagcccttcaaagtc

SEQ ID NO: 5108764 - DNA, 25 bp, Homo sapien
tcaggtttagcctcaatagcacaaa

SEQ ID NO: 5108765 - DNA, 25 bp, Homo sapien
tgtagataaacaagtgtttgatctg

SEQ ID NO: 5108766 - DNA, 25 bp, Homo sapien
gtggagttgaccacgctggtagtac

SEQ ID NO: 5108767 - DNA, 25 bp, Homo sapien
acagggcttccggtggcgttggcat

SEQ ID NO: 5108768 - DNA, 25 bp, Homo sapien
tagtacagggcttccggtggcgttg

SEQ ID NO: 5108769 - DNA, 25 bp, Homo sapien
cactgtcgatggcaatttctaagaa

SEQ ID NO: 5108770 - DNA, 25 bp, Homo sapien
cataaaccctggaataattgtgtga

SEQ ID NO: 5108771 - DNA, 25 bp, Homo sapien
cctggaataattgtgtgaaagcagg

SEQ ID NO: 5108772 - DNA, 25 bp, Homo sapien
ggaataattgtgtgaaagcaggaac

SEQ ID NO: 5108773 - DNA, 25 bp, Homo sapien
acacataaaccctggaataattgtg

SEQ ID NO: 5108774 - DNA, 25 bp, Homo sapien
ccccatagatggaccagtgccatta

SEQ ID NO: 5108775 - DNA, 25 bp, Homo sapien
gatgccaggacctttatgcttcagg

SEQ ID NO: 5108776 - DNA, 25 bp, Homo sapien
caagatgccaggacctttatgcttc

SEQ ID NO: 5108777 - DNA, 25 bp, Homo sapien
ttatgcttcaggatgaagttctcgt

SEQ ID NO: 5108778 - DNA, 25 bp, Homo sapien
tttatgcttcaggatgaagttctcg

SEQ ID NO: 5108779 - DNA, 25 bp, Homo sapien
ccttgccatagactacatggttgcc

SEQ ID NO: 5108780 - DNA, 25 bp, Homo sapien
tcaccttgccatagactacatggtt

SEQ ID NO: 5108781 - DNA, 25 bp, Homo sapien
gccatagactacatggttgccatcc

SEQ ID NO: 5108782 - DNA, 25 bp, Homo sapien
tgccatagactacatggttgccatc

SEQ ID NO: 5108783 - DNA, 25 bp, Homo sapien
cacttgtatttggtaatataataga

SEQ ID NO: 5108784 - DNA, 25 bp, Homo sapien
tcctaggacacttgtatttggtaat

SEQ ID NO: 5108785 - DNA, 25 bp, Homo sapien
tttgtggaaatctctcctaggacac

SEQ ID NO: 5108786 - DNA, 25 bp, Homo sapien
gaacaatgggatataattatgaaag

SEQ ID NO: 5108787 - DNA, 25 bp, Homo sapien
actaggttgaaatatctcaaaaaat

SEQ ID NO: 5108788 - DNA, 25 bp, Homo sapien
taaactaggttgaaatatctcaaaa

SEQ ID NO: 5108789 - DNA, 25 bp, Homo sapien
tctaaactaggttgaaatatctcaa

SEQ ID NO: 5108790 - DNA, 25 bp, Homo sapien
ctaaactaggttgaaatatctcaaa

SEQ ID NO: 5108791 - DNA, 25 bp, Homo sapien
gtttgactgtaagtgggtgccctgc

SEQ ID NO: 5108792 - DNA, 25 bp, Homo sapien
tcagctgtacgagatccagcacggg

SEQ ID NO: 5108793 - DNA, 25 bp, Homo sapien
gggcaccggcgtcattcagctgtac

SEQ ID NO: 5108794 - DNA, 25 bp, Homo sapien
gagaagcctcagatcatcgcccata

SEQ ID NO: 5108795 - DNA, 25 bp, Homo sapien
ggtgtggcggttgccgtagctgaaa

SEQ ID NO: 5108796 - DNA, 25 bp, Homo sapien
ttgccaatgtttggagtctggtttc

SEQ ID NO: 5108797 - DNA, 25 bp, Homo sapien
ggagggacaaattgccaatgtttgg

SEQ ID NO: 5108798 - DNA, 25 bp, Homo sapien
gcagaatacggaaagcgggagggac

SEQ ID NO: 5108799 - DNA, 25 bp, Homo sapien
ctgcaccacgcagaagccagcctca

SEQ ID NO: 5108800 - DNA, 25 bp, Homo sapien
gcaccacgcagaagccagcctcagc

SEQ ID NO: 5108801 - DNA, 25 bp, Homo sapien
tgcaccacgcagaagccagcctcag

SEQ ID NO: 5108802 - DNA, 25 bp, Homo sapien
caccacgcagaagccagcctcagcc

SEQ ID NO: 5108803 - DNA, 25 bp, Homo sapien
cccggaaatcttaaagcgctgccgg

SEQ ID NO: 5108804 - DNA, 25 bp, Homo sapien
ctcctctgccctggcgctctgcgtt

SEQ ID NO: 5108805 - DNA, 25 bp, Homo sapien
aagacgggcctcttcgccggcctgg

SEQ ID NO: 5108806 - DNA, 25 bp, Homo sapien
agcctgtcgtttcttcgcccgtcgg

SEQ ID NO: 5108807 - DNA, 25 bp, Homo sapien
ctctgtgtccatgcggcccgcatcc

SEQ ID NO: 5108808 - DNA, 25 bp, Homo sapien
taaagcgtatctgaagtcccaaatg

SEQ ID NO: 5108809 - DNA, 25 bp, Homo sapien
cccaaatgttccacaataggagtaa

SEQ ID NO: 5108810 - DNA, 25 bp, Homo sapien
aatggtgtgtatctgttagctggga

SEQ ID NO: 5108811 - DNA, 25 bp, Homo sapien
caataggagtaaatatcttcatcca

SEQ ID NO: 5108812 - DNA, 25 bp, Homo sapien
ccacctgaaagccgagaataaaagc

SEQ ID NO: 5108813 - DNA, 25 bp, Homo sapien
ctccacctgaaagccgagaataaaa

SEQ ID NO: 5108814 - DNA, 25 bp, Homo sapien
ctgaaagccgagaataaaagctttc

SEQ ID NO: 5108815 - DNA, 25 bp, Homo sapien
acctgaaagccgagaataaaagctt

SEQ ID NO: 5108816 - DNA, 25 bp, Homo sapien
ccaacctgatgagggcaagtgcatc

SEQ ID NO: 5108817 - DNA, 25 bp, Homo sapien
ctaggaagaggtcatccaacctgat

SEQ ID NO: 5108818 - DNA, 25 bp, Homo sapien
ctctaggaagaggtcatccaacctg

SEQ ID NO: 5108819 - DNA, 25 bp, Homo sapien
gaggtcatccaacctgatgagggca

SEQ ID NO: 5108820 - DNA, 25 bp, Homo sapien
tccttgtccgtgtcacattctctat

SEQ ID NO: 5108821 - DNA, 25 bp, Homo sapien
cagcgattcttcctattgccctgga

SEQ ID NO: 5108822 - DNA, 25 bp, Homo sapien
caaaactatccttgtccgtgtcaca

SEQ ID NO: 5108823 - DNA, 25 bp, Homo sapien
cctggatagatggtctccctttagg

SEQ ID NO: 5108824 - DNA, 25 bp, Homo sapien
cattggcaaatcagttagttttaga

SEQ ID NO: 5108825 - DNA, 25 bp, Homo sapien
tttcagggctactcagccagtccat

SEQ ID NO: 5108826 - DNA, 25 bp, Homo sapien
tatgccacaataaacttctaaaacg

SEQ ID NO: 5108827 - DNA, 25 bp, Homo sapien
gacagactatataatttcattggca

SEQ ID NO: 5108828 - DNA, 25 bp, Homo sapien
cctgtagagtgcaacatgccaacct

SEQ ID NO: 5108829 - DNA, 25 bp, Homo sapien
tggctgggatgcaatgactcacacc

SEQ ID NO: 5108830 - DNA, 25 bp, Homo sapien
gtgcaacatgccaacctgagtgaca

SEQ ID NO: 5108831 - DNA, 25 bp, Homo sapien
aaatgagacaaattagtggctggga

SEQ ID NO: 5108832 - DNA, 25 bp, Homo sapien
ccaagattaggttgcaaatggcagt

SEQ ID NO: 5108833 - DNA, 25 bp, Homo sapien
cttgatattttggaaggagccaagg

SEQ ID NO: 5108834 - DNA, 25 bp, Homo sapien
agattaggttgcaaatggcagttct

SEQ ID NO: 5108835 - DNA, 25 bp, Homo sapien
gaaggagccaaggatgtgaactttc

SEQ ID NO: 5108836 - DNA, 25 bp, Homo sapien
tgccataaaccttggaaggaggatt

SEQ ID NO: 5108837 - DNA, 25 bp, Homo sapien
atattgccataaaccttggaaggag

SEQ ID NO: 5108838 - DNA, 25 bp, Homo sapien
gatctgctgatctgctagccacagc

SEQ ID NO: 5108839 - DNA, 25 bp, Homo sapien
cgatctgctgatctgctagccacag

SEQ ID NO: 5108840 - DNA, 25 bp, Homo sapien
agggacggaggcttcaaatgactga

SEQ ID NO: 5108841 - DNA, 25 bp, Homo sapien
taaacaagaagtttccctctgagag

SEQ ID NO: 5108842 - DNA, 25 bp, Homo sapien
cctaaaacctgttgagtgtgaatcc

SEQ ID NO: 5108843 - DNA, 25 bp, Homo sapien
ggtttcttgtgaccgaccactgtaa

SEQ ID NO: 5108844 - DNA, 25 bp, Homo sapien
ttttggtattttcaactcacagtgg

SEQ ID NO: 5108845 - DNA, 25 bp, Homo sapien
taatgtagtgttcggagccctttta

SEQ ID NO: 5108846 - DNA, 25 bp, Homo sapien
gaagcatctgtatacccaacattgg

SEQ ID NO: 5108847 - DNA, 25 bp, Homo sapien
aagctatgatgtttgacttttggta

SEQ ID NO: 5108848 - DNA, 25 bp, Homo sapien
aacaggcagaaactagctaatctgc

SEQ ID NO: 5108849 - DNA, 25 bp, Homo sapien
tcacctttactagaagaaacagact

SEQ ID NO: 5108850 - DNA, 25 bp, Homo sapien
gctgtatttcaagtacccaaccatt

SEQ ID NO: 5108851 - DNA, 25 bp, Homo sapien
gaaacagacttatgatggttcttac

SEQ ID NO: 5108852 - DNA, 25 bp, Homo sapien
tatggtcacctagcaatggttcaat

SEQ ID NO: 5108853 - DNA, 25 bp, Homo sapien
ccatgctgctgttgccaaaggataa

SEQ ID NO: 5108854 - DNA, 25 bp, Homo sapien
gaggtgggacatactcagcaatttc

SEQ ID NO: 5108855 - DNA, 25 bp, Homo sapien
ggttcaattcagtccaagtgcttgg

SEQ ID NO: 5108856 - DNA, 25 bp, Homo sapien
ttgttagacctaagcaagtagatgg

SEQ ID NO: 5108857 - DNA, 25 bp, Homo sapien
tgtgcactagttacaatgggttctg

SEQ ID NO: 5108858 - DNA, 25 bp, Homo sapien
tagatggatttaaggcccagagctc

SEQ ID NO: 5108859 - DNA, 25 bp, Homo sapien
gaacacctgtatcaccagatgtgca

SEQ ID NO: 5108860 - DNA, 25 bp, Homo sapien
tgagtgctgcacatcatgggctctg

SEQ ID NO: 5108861 - DNA, 25 bp, Homo sapien
tgccatcgctgttccttcaactgag

SEQ ID NO: 5108862 - DNA, 25 bp, Homo sapien
taccacgagggatagagcatgcata

SEQ ID NO: 5108863 - DNA, 25 bp, Homo sapien
ccagccatgttagcctccggtggta

SEQ ID NO: 5108864 - DNA, 25 bp, Homo sapien
aatttgagccgggtgttaggccagc

SEQ ID NO: 5108865 - DNA, 25 bp, Homo sapien
tctgctactttgtaactaggagcca

SEQ ID NO: 5108866 - DNA, 25 bp, Homo sapien
tgttcatatagtaactgcacagggc

SEQ ID NO: 5108867 - DNA, 25 bp, Homo sapien
gtccctcagtaacgttaagtgctag

SEQ ID NO: 5108868 - DNA, 25 bp, Homo sapien
tagagtacaaaagtgccaagcagaa

SEQ ID NO: 5108869 - DNA, 25 bp, Homo sapien
acaatagagtacaaaagtgccaagc

SEQ ID NO: 5108870 - DNA, 25 bp, Homo sapien
aacaaaacaatagagtacaaaagtg

SEQ ID NO: 5108871 - DNA, 25 bp, Homo sapien
gagtacaaaagtgccaagcagaaca

SEQ ID NO: 5108872 - DNA, 25 bp, Homo sapien
gaagctagacacgaaagagattcca

SEQ ID NO: 5108873 - DNA, 25 bp, Homo sapien
gctaaaaatcttaagagacctggag

SEQ ID NO: 5108874 - DNA, 25 bp, Homo sapien
caggagttgtagaattcgttggcac

SEQ ID NO: 5108875 - DNA, 25 bp, Homo sapien
acctggaggtaaatagtgcaagtca

SEQ ID NO: 5108876 - DNA, 25 bp, Homo sapien
tataatggactatactgctctgcag

SEQ ID NO: 5108877 - DNA, 25 bp, Homo sapien
taaaagaagatagacgcgagtacct

SEQ ID NO: 5108878 - DNA, 25 bp, Homo sapien
tctgaaaacttaaccctgtgaccca

SEQ ID NO: 5108879 - DNA, 25 bp, Homo sapien
taggcaataccacttgttagcaagg

SEQ ID NO: 5108880 - DNA, 25 bp, Homo sapien
gccaaagcctagtgcagagcaattc

SEQ ID NO: 5108881 - DNA, 25 bp, Homo sapien
tatggtctggatagcaggtcaaacc

SEQ ID NO: 5108882 - DNA, 25 bp, Homo sapien
taatagtgctaactccagtgaacaa

SEQ ID NO: 5108883 - DNA, 25 bp, Homo sapien
aacagtcttattgcttatatgggta

SEQ ID NO: 5108884 - DNA, 25 bp, Homo sapien
tccaatttgatggtacccgttaatg

SEQ ID NO: 5108885 - DNA, 25 bp, Homo sapien
caatttgatggtacccgttaatggg

SEQ ID NO: 5108886 - DNA, 25 bp, Homo sapien
tatccaatttgatggtacccgttaa

SEQ ID NO: 5108887 - DNA, 25 bp, Homo sapien
catatccaatttgatggtacccgtt

SEQ ID NO: 5108888 - DNA, 25 bp, Homo sapien
tttacattattggtcatagagaaac

SEQ ID NO: 5108889 - DNA, 25 bp, Homo sapien
tggaataatcctcagtcatggtgtt

SEQ ID NO: 5108890 - DNA, 25 bp, Homo sapien
cctctgttaatgttgtgaatcacgt

SEQ ID NO: 5108891 - DNA, 25 bp, Homo sapien
ttaaggatttttacattattggtca

SEQ ID NO: 5108892 - DNA, 25 bp, Homo sapien
taaacctgtagacatccagaccagg

SEQ ID NO: 5108893 - DNA, 25 bp, Homo sapien
actagcaggcagaagtagttaccca

SEQ ID NO: 5108894 - DNA, 25 bp, Homo sapien
gcttaatagcaaatagaccagactg

SEQ ID NO: 5108895 - DNA, 25 bp, Homo sapien
taacacttgtgtcgttagagtcaca

SEQ ID NO: 5108896 - DNA, 25 bp, Homo sapien
gtgagttggcagtaacaagccactt

SEQ ID NO: 5108897 - DNA, 25 bp, Homo sapien
gtgtgagttggcagtaacaagccac

SEQ ID NO: 5108898 - DNA, 25 bp, Homo sapien
ctgctgttttagatatatggaagac

SEQ ID NO: 5108899 - DNA, 25 bp, Homo sapien
gtttctgcgattgtgactgctgttt

SEQ ID NO: 5108900 - DNA, 25 bp, Homo sapien
tcagtagacactagctgtatgtggt

SEQ ID NO: 5108901 - DNA, 25 bp, Homo sapien
tctacaatgattttgcacctgcatg

SEQ ID NO: 5108902 - DNA, 25 bp, Homo sapien
tgtatccattgtggcagaagtttcc

SEQ ID NO: 5108903 - DNA, 25 bp, Homo sapien
ccatgttggtcaagttggccagctc

SEQ ID NO: 5108904 - DNA, 25 bp, Homo sapien
ggactgttaacgtctgttcgtacat

SEQ ID NO: 5108905 - DNA, 25 bp, Homo sapien
tggactgttaacgtctgttcgtaca

SEQ ID NO: 5108906 - DNA, 25 bp, Homo sapien
cttgcttctggactgttaacgtctg

SEQ ID NO: 5108907 - DNA, 25 bp, Homo sapien
taaaacccagattaagagcagactt

SEQ ID NO: 5108908 - DNA, 25 bp, Homo sapien
gacttaaatgattgccgattttgat

SEQ ID NO: 5108909 - DNA, 25 bp, Homo sapien
tttgatgtgtagagaaagtttttcc

SEQ ID NO: 5108910 - DNA, 25 bp, Homo sapien
gccaacttgcgaggcagctcagaga

SEQ ID NO: 5108911 - DNA, 25 bp, Homo sapien
ttcccagcagtgagtcttggcaggg

SEQ ID NO: 5108912 - DNA, 25 bp, Homo sapien
tttagctgcggtgcgcagccctgcg

SEQ ID NO: 5108913 - DNA, 25 bp, Homo sapien
ggtttccgttcgctgctgctttgct

SEQ ID NO: 5108914 - DNA, 25 bp, Homo sapien
tcctgcgagcgtcggtttagctgcg

SEQ ID NO: 5108915 - DNA, 25 bp, Homo sapien
gaagtatcccttctcctcgtttgcc

SEQ ID NO: 5108916 - DNA, 25 bp, Homo sapien
ccacaggagtggatatagctctact

SEQ ID NO: 5108917 - DNA, 25 bp, Homo sapien
tagctctactaaaaggataagcggg

SEQ ID NO: 5108918 - DNA, 25 bp, Homo sapien
gataagcgggcaatctacattcgag

SEQ ID NO: 5108919 - DNA, 25 bp, Homo sapien
ctcaaaggctttatcaataaggagt

SEQ ID NO: 5108920 - DNA, 25 bp, Homo sapien
aaaatgcatgctcatcatatggaaa

SEQ ID NO: 5108921 - DNA, 25 bp, Homo sapien
gttctcatgtaaggatcattaagac

SEQ ID NO: 5108922 - DNA, 25 bp, Homo sapien
tcctagggcaaatcgctgagcgttt

SEQ ID NO: 5108923 - DNA, 25 bp, Homo sapien
catagggctctggtactactagcag

SEQ ID NO: 5108924 - DNA, 25 bp, Homo sapien
ttgagtctcagtggcgcagttccct

SEQ ID NO: 5108925 - DNA, 25 bp, Homo sapien
tatcctcagtgtcgattgtagcagg

SEQ ID NO: 5108926 - DNA, 25 bp, Homo sapien
tcctggaactgcatagagctctggc

SEQ ID NO: 5108927 - DNA, 25 bp, Homo sapien
cattgccatttcatatctcagagga

SEQ ID NO: 5108928 - DNA, 25 bp, Homo sapien
tgggcgcctaaacggcaaatagtac

SEQ ID NO: 5108929 - DNA, 25 bp, Homo sapien
tgtatgttgggcaattgaaaccatg

SEQ ID NO: 5108930 - DNA, 25 bp, Homo sapien
ataagacgagtacatatcattgcca

SEQ ID NO: 5108931 - DNA, 25 bp, Homo sapien
tgcttaatggagaaatctgttttat

SEQ ID NO: 5108932 - DNA, 25 bp, Homo sapien
ttaccttgttgctttcagtcttcat

SEQ ID NO: 5108933 - DNA, 25 bp, Homo sapien
tttatttaccttgttgctttcagtc

SEQ ID NO: 5108934 - DNA, 25 bp, Homo sapien
ctgcttaatggagaaatctgtttta

SEQ ID NO: 5108935 - DNA, 25 bp, Homo sapien
ttccattgatttgatcaatatcaga

SEQ ID NO: 5108936 - DNA, 25 bp, Homo sapien
ctactttccattgatttgatcaata

SEQ ID NO: 5108937 - DNA, 25 bp, Homo sapien
tttccattgatttgatcaatatcag

SEQ ID NO: 5108938 - DNA, 25 bp, Homo sapien
actttccattgatttgatcaatatc

SEQ ID NO: 5108939 - DNA, 25 bp, Homo sapien
gcagtgatgctgtacagccaccagg

SEQ ID NO: 5108940 - DNA, 25 bp, Homo sapien
cagtgatgctgtacagccaccaggg

SEQ ID NO: 5108941 - DNA, 25 bp, Homo sapien
agtgatgctgtacagccaccaggga

SEQ ID NO: 5108942 - DNA, 25 bp, Homo sapien
gtgatgctgtacagccaccagggaa

SEQ ID NO: 5108943 - DNA, 25 bp, Homo sapien
agtaaaaagtggaccaggcttgcaa

SEQ ID NO: 5108944 - DNA, 25 bp, Homo sapien
gaagtacactcgagattctatgcca

SEQ ID NO: 5108945 - DNA, 25 bp, Homo sapien
ggcttgcaactcgtaagaacattac

SEQ ID NO: 5108946 - DNA, 25 bp, Homo sapien
ttgttctgtcctcccaagccaatgg

SEQ ID NO: 5108947 - DNA, 25 bp, Homo sapien
tgatccacacccctcggcttcgcaa

SEQ ID NO: 5108948 - DNA, 25 bp, Homo sapien
acccctcggcttcgcaaagtggtgg

SEQ ID NO: 5108949 - DNA, 25 bp, Homo sapien
atccacacccctcggcttcgcaaag

SEQ ID NO: 5108950 - DNA, 25 bp, Homo sapien
cacacccctcggcttcgcaaagtgg

SEQ ID NO: 5108951 - DNA, 25 bp, Homo sapien
taatatcttctttactgccaggtgt

SEQ ID NO: 5108952 - DNA, 25 bp, Homo sapien
tatcttctttactgccaggtgtgtg

SEQ ID NO: 5108953 - DNA, 25 bp, Homo sapien
catacccagcaaaacctttttatat

SEQ ID NO: 5108954 - DNA, 25 bp, Homo sapien
aatatcttctttactgccaggtgtg

SEQ ID NO: 5108955 - DNA, 25 bp, Homo sapien
ctgtaaaatacgtatatgtgaaggg

SEQ ID NO: 5108956 - DNA, 25 bp, Homo sapien
gaatcaaaatgtaaggattactgcc

SEQ ID NO: 5108957 - DNA, 25 bp, Homo sapien
tacaatcctatacattttgacaaaa

SEQ ID NO: 5108958 - DNA, 25 bp, Homo sapien
ttgtaacaatgatatgtagttagac

SEQ ID NO: 5108959 - DNA, 25 bp, Homo sapien
tacggaaaaatcaaaatagactaga

SEQ ID NO: 5108960 - DNA, 25 bp, Homo sapien
ctttgtaaaatgatataggtataaa

SEQ ID NO: 5108961 - DNA, 25 bp, Homo sapien
aatagactagaaaagttaacttgat

SEQ ID NO: 5108962 - DNA, 25 bp, Homo sapien
tcttaaattctttgtaaaatgatat

SEQ ID NO: 5108963 - DNA, 25 bp, Homo sapien
taatctagcagctcatccctttgca

SEQ ID NO: 5108964 - DNA, 25 bp, Homo sapien
tttaaaaccacaatagtcacataag

SEQ ID NO: 5108965 - DNA, 25 bp, Homo sapien
gaaatgtataattcctgcaagagag

SEQ ID NO: 5108966 - DNA, 25 bp, Homo sapien
agtcacataaggaaataatctagca

SEQ ID NO: 5108967 - DNA, 25 bp, Homo sapien
tcttgtcacattccaagtatttggg

SEQ ID NO: 5108968 - DNA, 25 bp, Homo sapien
tgtcacattccaagtatttgggggg

SEQ ID NO: 5108969 - DNA, 25 bp, Homo sapien
gctcttgtcacattccaagtatttg

SEQ ID NO: 5108970 - DNA, 25 bp, Homo sapien
ctgctcttgtcacattccaagtatt

SEQ ID NO: 5108971 - DNA, 25 bp, Homo sapien
gactactgatgcaatcaaagacgtt

SEQ ID NO: 5108972 - DNA, 25 bp, Homo sapien
ctactgatgcaatcaaagacgtttg

SEQ ID NO: 5108973 - DNA, 25 bp, Homo sapien
tactgatgcaatcaaagacgtttgc

SEQ ID NO: 5108974 - DNA, 25 bp, Homo sapien
gggactactgatgcaatcaaagacg

SEQ ID NO: 5108975 - DNA, 25 bp, Homo sapien
gtgtcaggtatcaggcatctgcagc

SEQ ID NO: 5108976 - DNA, 25 bp, Homo sapien
tcagtgcagacgtcagttccgaggg

SEQ ID NO: 5108977 - DNA, 25 bp, Homo sapien
cagacgtcagttccgagggtgtcag

SEQ ID NO: 5108978 - DNA, 25 bp, Homo sapien
tcagttccgagggtgtcaggtatca

SEQ ID NO: 5108979 - DNA, 25 bp, Homo sapien
agctttgtaggagcttggcccatca

SEQ ID NO: 5108980 - DNA, 25 bp, Homo sapien
aaagcgccttctgctttggtgtggc

SEQ ID NO: 5108981 - DNA, 25 bp, Homo sapien
gcttggcccatcagcacttctgctg

SEQ ID NO: 5108982 - DNA, 25 bp, Homo sapien
tgagaaagcgccttctgctttggtg

SEQ ID NO: 5108983 - DNA, 25 bp, Homo sapien
tattcttgagatcctggaaatgccc

SEQ ID NO: 5108984 - DNA, 25 bp, Homo sapien
taaattagtctgcacatcggccagg

SEQ ID NO: 5108985 - DNA, 25 bp, Homo sapien
ccctcactgggttggaagatcagaa

SEQ ID NO: 5108986 - DNA, 25 bp, Homo sapien
gagtccacacatcaaacccataggg

SEQ ID NO: 5108987 - DNA, 25 bp, Homo sapien
cctctctgatccgctttggttccat

SEQ ID NO: 5108988 - DNA, 25 bp, Homo sapien
cttcacaaggtagccctctctgatc

SEQ ID NO: 5108989 - DNA, 25 bp, Homo sapien
ccctctctgatccgctttggttcca

SEQ ID NO: 5108990 - DNA, 25 bp, Homo sapien
cttcttcacaaggtagccctctctg

SEQ ID NO: 5108991 - DNA, 25 bp, Homo sapien
gaattctcagacccgtaatatcaaa

SEQ ID NO: 5108992 - DNA, 25 bp, Homo sapien
atctggaattctcagacccgtaata

SEQ ID NO: 5108993 - DNA, 25 bp, Homo sapien
tctggaattctcagacccgtaatat

SEQ ID NO: 5108994 - DNA, 25 bp, Homo sapien
tggaattctcagacccgtaatatca

SEQ ID NO: 5108995 - DNA, 25 bp, Homo sapien
ttgccaaagtcttgacaagggctag

SEQ ID NO: 5108996 - DNA, 25 bp, Homo sapien
catcttctaacaatacaacccacat

SEQ ID NO: 5108997 - DNA, 25 bp, Homo sapien
catgggtttccacgtattgaacacg

SEQ ID NO: 5108998 - DNA, 25 bp, Homo sapien
tagtcagagtgctccctttcagcgg

SEQ ID NO: 5108999 - DNA, 25 bp, Homo sapien
tttaatggccttcttgatatcccga

SEQ ID NO: 5109000 - DNA, 25 bp, Homo sapien
aatggtttctggcagtcgaatggac

SEQ ID NO: 5109001 - DNA, 25 bp, Homo sapien
ggacctcctggtagatttcctggca

SEQ ID NO: 5109002 - DNA, 25 bp, Homo sapien
ctggaagaagtggtcctgctgtttg

SEQ ID NO: 5109003 - DNA, 25 bp, Homo sapien
aatttgtactccattcgcctcctct

SEQ ID NO: 5109004 - DNA, 25 bp, Homo sapien
taggccttggatcactccttcagac

SEQ ID NO: 5109005 - DNA, 25 bp, Homo sapien
tagtacaccaagtgccagtattgac

SEQ ID NO: 5109006 - DNA, 25 bp, Homo sapien
tcctctcctcagctagtaggccttg

SEQ ID NO: 5109007 - DNA, 25 bp, Homo sapien
ccacttagttctgacagcactggcc

SEQ ID NO: 5109008 - DNA, 25 bp, Homo sapien
tgtggctccctatagcccgagcatt

SEQ ID NO: 5109009 - DNA, 25 bp, Homo sapien
tgcagctgcactaggtgcctcgttg

SEQ ID NO: 5109010 - DNA, 25 bp, Homo sapien
caggactgtggtcactcgatggccc

SEQ ID NO: 5109011 - DNA, 25 bp, Homo sapien
ctgtgaagcagtgattaaaaatctt

SEQ ID NO: 5109012 - DNA, 25 bp, Homo sapien
gtgtctttcatggacaaatataagg

SEQ ID NO: 5109013 - DNA, 25 bp, Homo sapien
tcttgtccttctctagattcagttc

SEQ ID NO: 5109014 - DNA, 25 bp, Homo sapien
gtgaagcagtgattaaaaatcttct

SEQ ID NO: 5109015 - DNA, 25 bp, Homo sapien
tcccagtcgccctatttcaggcctg

SEQ ID NO: 5109016 - DNA, 25 bp, Homo sapien
gaaggaggactccatatcgccttcc

SEQ ID NO: 5109017 - DNA, 25 bp, Homo sapien
cgccttcccagtcgccctatttcag

SEQ ID NO: 5109018 - DNA, 25 bp, Homo sapien
gaggactccatatcgccttcccagt

SEQ ID NO: 5109019 - DNA, 25 bp, Homo sapien
ccaaggtggtctggctctaaaggac

SEQ ID NO: 5109020 - DNA, 25 bp, Homo sapien
gattatccccactaaatagacagag

SEQ ID NO: 5109021 - DNA, 25 bp, Homo sapien
catatagcactgagtgtgtgccagg

SEQ ID NO: 5109022 - DNA, 25 bp, Homo sapien
taacacttaatacctgaccctgtgc

SEQ ID NO: 5109023 - DNA, 25 bp, Homo sapien
gtatgaaaggcttttgctcactttt

SEQ ID NO: 5109024 - DNA, 25 bp, Homo sapien
aaggcttttgctcacttttctttct

SEQ ID NO: 5109025 - DNA, 25 bp, Homo sapien
tatgaaaggcttttgctcacttttc

SEQ ID NO: 5109026 - DNA, 25 bp, Homo sapien
tgaaaggcttttgctcacttttctt

SEQ ID NO: 5109027 - DNA, 25 bp, Homo sapien
ggatgccaccctcaaaacaggagtg

SEQ ID NO: 5109028 - DNA, 25 bp, Homo sapien
ctgtcctgtcatccgggcaaaagca

SEQ ID NO: 5109029 - DNA, 25 bp, Homo sapien
ggagtcaacatgacagcctgcctgt

SEQ ID NO: 5109030 - DNA, 25 bp, Homo sapien
tgacagcagttggatagcgagcctt

SEQ ID NO: 5109031 - DNA, 25 bp, Homo sapien
tttgcagagtctagcagggaccttg

SEQ ID NO: 5109032 - DNA, 25 bp, Homo sapien
gcagcagtgtgaacagatgcactca

SEQ ID NO: 5109033 - DNA, 25 bp, Homo sapien
cgtttgccaagcatatgaagcagga

SEQ ID NO: 5109034 - DNA, 25 bp, Homo sapien
gatgcactcaggcataaagcagccc

SEQ ID NO: 5109035 - DNA, 25 bp, Homo sapien
gatacccctcattgagcagcgatga

SEQ ID NO: 5109036 - DNA, 25 bp, Homo sapien
tcatgaggccttcctggcgattcct

SEQ ID NO: 5109037 - DNA, 25 bp, Homo sapien
gcagcgatgaagcaatcatgaggcc

SEQ ID NO: 5109038 - DNA, 25 bp, Homo sapien
gataccagccaatcaatgacgcagt

SEQ ID NO: 5109039 - DNA, 25 bp, Homo sapien
ggaagaagagatggggagcttttct

SEQ ID NO: 5109040 - DNA, 25 bp, Homo sapien
agaagagatggggagcttttcttac

SEQ ID NO: 5109041 - DNA, 25 bp, Homo sapien
ttacaggaagaagagatggggagct

SEQ ID NO: 5109042 - DNA, 25 bp, Homo sapien
caggaagaagagatggggagctttt

SEQ ID NO: 5109043 - DNA, 25 bp, Homo sapien
tccattcctgtgtacatcccaatct

SEQ ID NO: 5109044 - DNA, 25 bp, Homo sapien
tcctgtgtacatcccaatctgaact

SEQ ID NO: 5109045 - DNA, 25 bp, Homo sapien
cattcctgtgtacatcccaatctga

SEQ ID NO: 5109046 - DNA, 25 bp, Homo sapien
ctgtgtacatcccaatctgaacttc

SEQ ID NO: 5109047 - DNA, 25 bp, Homo sapien
tcaccagtcttaggcacattgcaac

SEQ ID NO: 5109048 - DNA, 25 bp, Homo sapien
acattgcaacttgtgccatctccat

SEQ ID NO: 5109049 - DNA, 25 bp, Homo sapien
agctaacatcaccagtcttaggcac

SEQ ID NO: 5109050 - DNA, 25 bp, Homo sapien
taggcacattgcaacttgtgccatc

SEQ ID NO: 5109051 - DNA, 25 bp, Homo sapien
cttcagtaaacatccctgcttgata

SEQ ID NO: 5109052 - DNA, 25 bp, Homo sapien
ttcagtaaacatccctgcttgataa

SEQ ID NO: 5109053 - DNA, 25 bp, Homo sapien
cagtaaacatccctgcttgataatg

SEQ ID NO: 5109054 - DNA, 25 bp, Homo sapien
tcagtaaacatccctgcttgataat

SEQ ID NO: 5109055 - DNA, 25 bp, Homo sapien
aactcaatcttcctgatctaaagcc

SEQ ID NO: 5109056 - DNA, 25 bp, Homo sapien
cctacttttagggacatcttctgcc

SEQ ID NO: 5109057 - DNA, 25 bp, Homo sapien
cactttgatatctaaagagctactc

SEQ ID NO: 5109058 - DNA, 25 bp, Homo sapien
aaggctagatgggagcagttgtggc

SEQ ID NO: 5109059 - DNA, 25 bp, Homo sapien
tgggtaggaggacaactgacaacac

SEQ ID NO: 5109060 - DNA, 25 bp, Homo sapien
tgttgatgaataagaccagtctggc

SEQ ID NO: 5109061 - DNA, 25 bp, Homo sapien
tgcacttatccatgtgggacacagg

SEQ ID NO: 5109062 - DNA, 25 bp, Homo sapien
ttgtcagggagatagtgctacagcc

SEQ ID NO: 5109063 - DNA, 25 bp, Homo sapien
cagcagggtcatagtagtgcaggta

SEQ ID NO: 5109064 - DNA, 25 bp, Homo sapien
cccagcagggtcatagtagtgcagg

SEQ ID NO: 5109065 - DNA, 25 bp, Homo sapien
gtcttctctcaagatgaacttcctc

SEQ ID NO: 5109066 - DNA, 25 bp, Homo sapien
tctctcaagatgaacttcctcactt

SEQ ID NO: 5109067 - DNA, 25 bp, Homo sapien
cagcctctcaagtgaattgctccca

SEQ ID NO: 5109068 - DNA, 25 bp, Homo sapien
gcctctcaagtgaattgctcccagg

SEQ ID NO: 5109069 - DNA, 25 bp, Homo sapien
cacacagcctctcaagtgaattgct

SEQ ID NO: 5109070 - DNA, 25 bp, Homo sapien
cacagcctctcaagtgaattgctcc

SEQ ID NO: 5109071 - DNA, 25 bp, Homo sapien
tgatccactctgtgcgctccttggg

SEQ ID NO: 5109072 - DNA, 25 bp, Homo sapien
tctgctgtgatgatctcaaaaaggt

SEQ ID NO: 5109073 - DNA, 25 bp, Homo sapien
ttcccagttcgggaggccatctgga

SEQ ID NO: 5109074 - DNA, 25 bp, Homo sapien
ggtggctgcttgcaagaaatagtgc

SEQ ID NO: 5109075 - DNA, 25 bp, Homo sapien
taaaaccagagtggaatagggctcc

SEQ ID NO: 5109076 - DNA, 25 bp, Homo sapien
gggaaccttgcacaccacatggtga

SEQ ID NO: 5109077 - DNA, 25 bp, Homo sapien
tgttacacgatctcaaggccaagag

SEQ ID NO: 5109078 - DNA, 25 bp, Homo sapien
gatgccctcagaactcaagcaggag

SEQ ID NO: 5109079 - DNA, 25 bp, Homo sapien
tcaaaacattaagttgacttcccat

SEQ ID NO: 5109080 - DNA, 25 bp, Homo sapien
ttcaaaacattaagttgacttccca

SEQ ID NO: 5109081 - DNA, 25 bp, Homo sapien
caaaacattaagttgacttcccatt

SEQ ID NO: 5109082 - DNA, 25 bp, Homo sapien
aacattaagttgacttcccattaat

SEQ ID NO: 5109083 - DNA, 25 bp, Homo sapien
tacctagttgtgtcaccctggccaa

SEQ ID NO: 5109084 - DNA, 25 bp, Homo sapien
tgaggtcatcagctttcccacagaa

SEQ ID NO: 5109085 - DNA, 25 bp, Homo sapien
gaattcctggtaccgtgcatgctaa

SEQ ID NO: 5109086 - DNA, 25 bp, Homo sapien
tcccacagaaagttgtacaagactg

SEQ ID NO: 5109087 - DNA, 25 bp, Homo sapien
cacatattatcaccaggtgtcccac

SEQ ID NO: 5109088 - DNA, 25 bp, Homo sapien
tccttaaaggcccctgaacaactgc

SEQ ID NO: 5109089 - DNA, 25 bp, Homo sapien
cctgaacaactgcacaggccattca

SEQ ID NO: 5109090 - DNA, 25 bp, Homo sapien
ctgaacaactgcacaggccattcat

SEQ ID NO: 5109091 - DNA, 25 bp, Homo sapien
ttaaaggcccctgaacaactgcaca

SEQ ID NO: 5109092 - DNA, 25 bp, Homo sapien
tcctttggttccttggccatgccaa

SEQ ID NO: 5109093 - DNA, 25 bp, Homo sapien
caatggtttctcaatgtgtctcaaa

SEQ ID NO: 5109094 - DNA, 25 bp, Homo sapien
cagagatatttactggagcctccac

SEQ ID NO: 5109095 - DNA, 25 bp, Homo sapien
gtcactccctacatgaaaactgtca

SEQ ID NO: 5109096 - DNA, 25 bp, Homo sapien
ccatgagacatccacgcaagttctg

SEQ ID NO: 5109097 - DNA, 25 bp, Homo sapien
atgagacatccacgcaagttctgtg

SEQ ID NO: 5109098 - DNA, 25 bp, Homo sapien
acccatgagacatccacgcaagttc

SEQ ID NO: 5109099 - DNA, 25 bp, Homo sapien
gagacatccacgcaagttctgtgca

SEQ ID NO: 5109100 - DNA, 25 bp, Homo sapien
cctacttatgcaggcagcaatttga

SEQ ID NO: 5109101 - DNA, 25 bp, Homo sapien
cgatgtataactcatctatagaagg

SEQ ID NO: 5109102 - DNA, 25 bp, Homo sapien
tttgaaatactagaatgaatgtctc

SEQ ID NO: 5109103 - DNA, 25 bp, Homo sapien
ttctaaaaacctgtggtctccgatg

SEQ ID NO: 5109104 - DNA, 25 bp, Homo sapien
cgcgtttcagtgtcgcagggagctc

SEQ ID NO: 5109105 - DNA, 25 bp, Homo sapien
tacaggaaggtgatcgaagacgtcg

SEQ ID NO: 5109106 - DNA, 25 bp, Homo sapien
tgggaagtgcccaaacgcgtttcag

SEQ ID NO: 5109107 - DNA, 25 bp, Homo sapien
tggcgcttgcacagacggtgaactt

SEQ ID NO: 5109108 - DNA, 25 bp, Homo sapien
cagcctggcgttgctgatcttggct

SEQ ID NO: 5109109 - DNA, 25 bp, Homo sapien
gggagtcagcctggcgttgctgatc

SEQ ID NO: 5109110 - DNA, 25 bp, Homo sapien
taaggccgggggagtcagcctggcg

SEQ ID NO: 5109111 - DNA, 25 bp, Homo sapien
gaagcagcagcgcagttgagtcccc

SEQ ID NO: 5109112 - DNA, 25 bp, Homo sapien
accatggcaatgtctgagtgtcagg

SEQ ID NO: 5109113 - DNA, 25 bp, Homo sapien
tattagacgtggctgtgcatcctga

SEQ ID NO: 5109114 - DNA, 25 bp, Homo sapien
tcttccagtttcacgccggtagaca

SEQ ID NO: 5109115 - DNA, 25 bp, Homo sapien
gacaaggaggtgtacggacctgacc

SEQ ID NO: 5109116 - DNA, 25 bp, Homo sapien
gcgggcaaggattaggccccttcgc

SEQ ID NO: 5109117 - DNA, 25 bp, Homo sapien
attaggccccttcgccaggagactg

SEQ ID NO: 5109118 - DNA, 25 bp, Homo sapien
aggattaggccccttcgccaggaga

SEQ ID NO: 5109119 - DNA, 25 bp, Homo sapien
ggagactggcccctccgctgtttcc

SEQ ID NO: 5109120 - DNA, 25 bp, Homo sapien
cggcccgcggccgatcaccgtctcc

SEQ ID NO: 5109121 - DNA, 25 bp, Homo sapien
cgatcaccgtctccccgggcgccag

SEQ ID NO: 5109122 - DNA, 25 bp, Homo sapien
cgcggccgatcaccgtctccccggg

SEQ ID NO: 5109123 - DNA, 25 bp, Homo sapien
agcagcggcccgcggccgatcaccg

SEQ ID NO: 5109124 - DNA, 25 bp, Homo sapien
ggccggtcttcaggagccggcgcgg

SEQ ID NO: 5109125 - DNA, 25 bp, Homo sapien
tccacggctctcggggtccgctaag

SEQ ID NO: 5109126 - DNA, 25 bp, Homo sapien
gcggaactccacggctctcggggtc

SEQ ID NO: 5109127 - DNA, 25 bp, Homo sapien
tccgctaagcccccgcccacactta

SEQ ID NO: 5109128 - DNA, 25 bp, Homo sapien
ccaggcactctttcaggtctcataa

SEQ ID NO: 5109129 - DNA, 25 bp, Homo sapien
caggcactctttcaggtctcataag

SEQ ID NO: 5109130 - DNA, 25 bp, Homo sapien
gcctatcactgctccttatacagag

SEQ ID NO: 5109131 - DNA, 25 bp, Homo sapien
tgtcacgattgatatacggagaggg

SEQ ID NO: 5109132 - DNA, 25 bp, Homo sapien
aagtataatgtgacctctagtggac

SEQ ID NO: 5109133 - DNA, 25 bp, Homo sapien
catttgcactttctcaatgggaagc

SEQ ID NO: 5109134 - DNA, 25 bp, Homo sapien
tgaccacctgccacctcaagaatgg

SEQ ID NO: 5109135 - DNA, 25 bp, Homo sapien
ctgaccacctgccacctcaagaatg

SEQ ID NO: 5109136 - DNA, 25 bp, Homo sapien
ggtttgattcgcagctgaccacctg

SEQ ID NO: 5109137 - DNA, 25 bp, Homo sapien
cggtttgattcgcagctgaccacct

SEQ ID NO: 5109138 - DNA, 25 bp, Homo sapien
catagtggttttatgatctgcgtac

SEQ ID NO: 5109139 - DNA, 25 bp, Homo sapien
ggagcctttttataactgaacactg

SEQ ID NO: 5109140 - DNA, 25 bp, Homo sapien
tctgcgtaccatctaattaaagacc

SEQ ID NO: 5109141 - DNA, 25 bp, Homo sapien
gaaatttggctcagtacatactgga

SEQ ID NO: 5109142 - DNA, 25 bp, Homo sapien
tctgagcttgtgtccgctgctgaac

SEQ ID NO: 5109143 - DNA, 25 bp, Homo sapien
catgacaaattgacaggctctgagc

SEQ ID NO: 5109144 - DNA, 25 bp, Homo sapien
gtatgtcatggtcatcagagtcagg

SEQ ID NO: 5109145 - DNA, 25 bp, Homo sapien
tgaacttgggaatcgtgccctgtat

SEQ ID NO: 5109146 - DNA, 25 bp, Homo sapien
ctggtaaaaacatggatttgtgtgt

SEQ ID NO: 5109147 - DNA, 25 bp, Homo sapien
tggtaaaaacatggatttgtgtgta

SEQ ID NO: 5109148 - DNA, 25 bp, Homo sapien
ggtaaaaacatggatttgtgtgtat

SEQ ID NO: 5109149 - DNA, 25 bp, Homo sapien
tagatttggcttcaatggtaagagc

SEQ ID NO: 5109150 - DNA, 25 bp, Homo sapien
ccaggattcaaatagcaccatagat

SEQ ID NO: 5109151 - DNA, 25 bp, Homo sapien
gtatagagagaatgcggaaaatgta

SEQ ID NO: 5109152 - DNA, 25 bp, Homo sapien
cggaaaatgtatttgtcaactaaca

SEQ ID NO: 5109153 - DNA, 25 bp, Homo sapien
cctcaacattatggtagggagattt

SEQ ID NO: 5109154 - DNA, 25 bp, Homo sapien
tgtgtatctaccaccccgatagaaa

SEQ ID NO: 5109155 - DNA, 25 bp, Homo sapien
catatagttataggactacaccaaa

SEQ ID NO: 5109156 - DNA, 25 bp, Homo sapien
tatccatgttttaacctgagctctc

SEQ ID NO: 5109157 - DNA, 25 bp, Homo sapien
acttgcatattatcatactatcatg

SEQ ID NO: 5109158 - DNA, 25 bp, Homo sapien
gaatgagctggatctaaaactacat

SEQ ID NO: 5109159 - DNA, 25 bp, Homo sapien
atgagctggatctaaaactacattt

SEQ ID NO: 5109160 - DNA, 25 bp, Homo sapien
tgaaacttgcatattatcatactat

SEQ ID NO: 5109161 - DNA, 25 bp, Homo sapien
gcaccagtagtctcatgaggtaaat

SEQ ID NO: 5109162 - DNA, 25 bp, Homo sapien
gtgaggcaccagtagtctcatgagg

SEQ ID NO: 5109163 - DNA, 25 bp, Homo sapien
atcacgggggattttggtgtttcat

SEQ ID NO: 5109164 - DNA, 25 bp, Homo sapien
cttccttccagttgtgaggcaccag

SEQ ID NO: 5109165 - DNA, 25 bp, Homo sapien
ggttttgatcacttaaatgttctgc

SEQ ID NO: 5109166 - DNA, 25 bp, Homo sapien
ttcctctcggcaaggattggctgct

SEQ ID NO: 5109167 - DNA, 25 bp, Homo sapien
ctccactgattgctggtactgaaag

SEQ ID NO: 5109168 - DNA, 25 bp, Homo sapien
ggctgctgcttattgcagtctctat

SEQ ID NO: 5109169 - DNA, 25 bp, Homo sapien
ctgggttgtgtttagctgggattta

SEQ ID NO: 5109170 - DNA, 25 bp, Homo sapien
gaacttcctgatgaaattaattgcc

SEQ ID NO: 5109171 - DNA, 25 bp, Homo sapien
gaaatggtagactcttcctgatcag

SEQ ID NO: 5109172 - DNA, 25 bp, Homo sapien
tcctgatcagtatttttgcactctt

SEQ ID NO: 5109173 - DNA, 25 bp, Homo sapien
tgagcctcataaagcacctgtacca

SEQ ID NO: 5109174 - DNA, 25 bp, Homo sapien
gtaagcatgagcctcataaagcacc

SEQ ID NO: 5109175 - DNA, 25 bp, Homo sapien
catgagcctcataaagcacctgtac

SEQ ID NO: 5109176 - DNA, 25 bp, Homo sapien
agcatgagcctcataaagcacctgt

SEQ ID NO: 5109177 - DNA, 25 bp, Homo sapien
gatggtcttttgggacaggaggaac

SEQ ID NO: 5109178 - DNA, 25 bp, Homo sapien
tccctgaggctagagtccagctgga

SEQ ID NO: 5109179 - DNA, 25 bp, Homo sapien
agcaggacgtccctgaggctagagt

SEQ ID NO: 5109180 - DNA, 25 bp, Homo sapien
ggacgtccctgaggctagagtccag

SEQ ID NO: 5109181 - DNA, 25 bp, Homo sapien
cctgaggctagagtccagctggacc

SEQ ID NO: 5109182 - DNA, 25 bp, Homo sapien
tgtttccctagtccagacacccaag

SEQ ID NO: 5109183 - DNA, 25 bp, Homo sapien
aatatctttgaatatagatggtttc

SEQ ID NO: 5109184 - DNA, 25 bp, Homo sapien
gacacccaagagtatgtccctctct

SEQ ID NO: 5109185 - DNA, 25 bp, Homo sapien
gagtggccaaatggtttttcataca

SEQ ID NO: 5109186 - DNA, 25 bp, Homo sapien
aatcatttcggtgcacagtcttcca

SEQ ID NO: 5109187 - DNA, 25 bp, Homo sapien
atttcggtgcacagtcttccatgac

SEQ ID NO: 5109188 - DNA, 25 bp, Homo sapien
tttcaatcatttcggtgcacagtct

SEQ ID NO: 5109189 - DNA, 25 bp, Homo sapien
gcatttcaatcatttcggtgcacag

SEQ ID NO: 5109190 - DNA, 25 bp, Homo sapien
tcagtctaggctacttcatggtaca

SEQ ID NO: 5109191 - DNA, 25 bp, Homo sapien
tgagctgccaggattacctctgtga

SEQ ID NO: 5109192 - DNA, 25 bp, Homo sapien
gaggcaccattcacacgagtaaagc

SEQ ID NO: 5109193 - DNA, 25 bp, Homo sapien
tgtcttcaccctatgagacctggta

SEQ ID NO: 5109194 - DNA, 25 bp, Homo sapien
gtcgccctgggcactcgaacaattt

SEQ ID NO: 5109195 - DNA, 25 bp, Homo sapien
tttcagaacagctcattgcctcatc

SEQ ID NO: 5109196 - DNA, 25 bp, Homo sapien
tgtgattgcagaaaatgattgtggc

SEQ ID NO: 5109197 - DNA, 25 bp, Homo sapien
gcctcatcttctttatgtggtgttc

SEQ ID NO: 5109198 - DNA, 25 bp, Homo sapien
cagtttgccccatacatgcaggatg

SEQ ID NO: 5109199 - DNA, 25 bp, Homo sapien
gaatcagttgcctttgcatgcaaag

SEQ ID NO: 5109200 - DNA, 25 bp, Homo sapien
tttccttcagaaccttgtagaactg

SEQ ID NO: 5109201 - DNA, 25 bp, Homo sapien
attggagggattagagctggactca

SEQ ID NO: 5109202 - DNA, 25 bp, Homo sapien
ggcccacgatttgtacacctccata

SEQ ID NO: 5109203 - DNA, 25 bp, Homo sapien
acattcaggccggtcatcagtctca

SEQ ID NO: 5109204 - DNA, 25 bp, Homo sapien
taatcactatcaccaggatggctaa

SEQ ID NO: 5109205 - DNA, 25 bp, Homo sapien
taacaggatggtccatagggacatt

SEQ ID NO: 5109206 - DNA, 25 bp, Homo sapien
ttccttcttacagttgagtagtatt

SEQ ID NO: 5109207 - DNA, 25 bp, Homo sapien
ttctttgcactgtttatccactcgt

SEQ ID NO: 5109208 - DNA, 25 bp, Homo sapien
tttcatatgacgacttcatttcctc

SEQ ID NO: 5109209 - DNA, 25 bp, Homo sapien
gtttatccactcgtttattgatgcg

SEQ ID NO: 5109210 - DNA, 25 bp, Homo sapien
taggttccagagactcagtcagtag

SEQ ID NO: 5109211 - DNA, 25 bp, Homo sapien
taaaacagtcctattgccatccatt

SEQ ID NO: 5109212 - DNA, 25 bp, Homo sapien
taatgatgtaggtgcataagtaaca

SEQ ID NO: 5109213 - DNA, 25 bp, Homo sapien
aatatttcctgatgatgctcctaca

SEQ ID NO: 5109214 - DNA, 25 bp, Homo sapien
tctttgggggaatacgagcatttga

SEQ ID NO: 5109215 - DNA, 25 bp, Homo sapien
tggcaactctgtacaactctttggg

SEQ ID NO: 5109216 - DNA, 25 bp, Homo sapien
tgcatgtaactctaagtcaaagcta

SEQ ID NO: 5109217 - DNA, 25 bp, Homo sapien
ggggaatacgagcatttgaaataac

SEQ ID NO: 5109218 - DNA, 25 bp, Homo sapien
aaatactgtaatgcagaccagaaga

SEQ ID NO: 5109219 - DNA, 25 bp, Homo sapien
ccagaagaaactagctgagttggtg

SEQ ID NO: 5109220 - DNA, 25 bp, Homo sapien
catcctttcctagaacgtgctcttt

SEQ ID NO: 5109221 - DNA, 25 bp, Homo sapien
gagttggtgtttttcaactggacac

SEQ ID NO: 5109222 - DNA, 25 bp, Homo sapien
cacagtgcaaaagtgtaactccaca

SEQ ID NO: 5109223 - DNA, 25 bp, Homo sapien
tattagctcaagaaacagttacaga

SEQ ID NO: 5109224 - DNA, 25 bp, Homo sapien
gatctttcctactgaccatgctggt

SEQ ID NO: 5109225 - DNA, 25 bp, Homo sapien
caaatgaacaaagctatggtgacga

SEQ ID NO: 5109226 - DNA, 25 bp, Homo sapien
tggaagcgtattatgtctatattct

SEQ ID NO: 5109227 - DNA, 25 bp, Homo sapien
ctggaagcgtattatgtctatattc

SEQ ID NO: 5109228 - DNA, 25 bp, Homo sapien
atgtctatattctatcttgtgctgg

SEQ ID NO: 5109229 - DNA, 25 bp, Homo sapien
tatgtctatattctatcttgtgctg

SEQ ID NO: 5109230 - DNA, 25 bp, Homo sapien
tattaatgagccaaagcaatatagc

SEQ ID NO: 5109231 - DNA, 25 bp, Homo sapien
caattatcatttaggccagtttgag

SEQ ID NO: 5109232 - DNA, 25 bp, Homo sapien
catttgctatacaaaagggtcacag

SEQ ID NO: 5109233 - DNA, 25 bp, Homo sapien
tatctaaatccagccctagctctgg

SEQ ID NO: 5109234 - DNA, 25 bp, Homo sapien
ccattctggtttcaggagcggtaca

SEQ ID NO: 5109235 - DNA, 25 bp, Homo sapien
tttttcctaggaatcatgagggtca

SEQ ID NO: 5109236 - DNA, 25 bp, Homo sapien
gagcggtacaaactaatcagtggcc

SEQ ID NO: 5109237 - DNA, 25 bp, Homo sapien
tgattatcgtcccagctgaataagg

SEQ ID NO: 5109238 - DNA, 25 bp, Homo sapien
tgagtgcagcctggatagtatgcat

SEQ ID NO: 5109239 - DNA, 25 bp, Homo sapien
cagaaatattatgcgctgaatcagc

SEQ ID NO: 5109240 - DNA, 25 bp, Homo sapien
tacaagtcagctgtttgtatgcaca

SEQ ID NO: 5109241 - DNA, 25 bp, Homo sapien
gcacatataaatgcaagtgagtgca

SEQ ID NO: 5109242 - DNA, 25 bp, Homo sapien
gaggctcctgaaactaaaatgaccc

SEQ ID NO: 5109243 - DNA, 25 bp, Homo sapien
cagaagattggtacacaacacatca

SEQ ID NO: 5109244 - DNA, 25 bp, Homo sapien
tctggaaacggcactaaaatgatgc

SEQ ID NO: 5109245 - DNA, 25 bp, Homo sapien
tcaccactcaacctgggatgacaga

SEQ ID NO: 5109246 - DNA, 25 bp, Homo sapien
gggttgcccaacattatcattatct

SEQ ID NO: 5109247 - DNA, 25 bp, Homo sapien
ggtcatactcattgggttgcccaac

SEQ ID NO: 5109248 - DNA, 25 bp, Homo sapien
tcatctagaaagctgtcgttcaggt

SEQ ID NO: 5109249 - DNA, 25 bp, Homo sapien
tgtcgttcaggtcatactcattggg

SEQ ID NO: 5109250 - DNA, 25 bp, Homo sapien
tttcctggttcccagtcagaatctt

SEQ ID NO: 5109251 - DNA, 25 bp, Homo sapien
ctttcctggttcccagtcagaatct

SEQ ID NO: 5109252 - DNA, 25 bp, Homo sapien
taagtacctccttagttcataaatg

SEQ ID NO: 5109253 - DNA, 25 bp, Homo sapien
ataactgtcacttaagtacctcctt

SEQ ID NO: 5109254 - DNA, 25 bp, Homo sapien
aaagtaaatgtaaggcagatatgac

SEQ ID NO: 5109255 - DNA, 25 bp, Homo sapien
taaggcagatatgactacagaagtt

SEQ ID NO: 5109256 - DNA, 25 bp, Homo sapien
gtaaagagtcagtagtaaaagtcat

SEQ ID NO: 5109257 - DNA, 25 bp, Homo sapien
taaagagtcagtagtaaaagtcatt

SEQ ID NO: 5109258 - DNA, 25 bp, Homo sapien
ctcatttgtaaagagtcagtagtaa

SEQ ID NO: 5109259 - DNA, 25 bp, Homo sapien
aagagtcagtagtaaaagtcattaa

SEQ ID NO: 5109260 - DNA, 25 bp, Homo sapien
tttattaccaatatacaaagtacat

SEQ ID NO: 5109261 - DNA, 25 bp, Homo sapien
tatgcaacctatggcttttactttt

SEQ ID NO: 5109262 - DNA, 25 bp, Homo sapien
ttttatgcaacctatggcttttact

SEQ ID NO: 5109263 - DNA, 25 bp, Homo sapien
ccagatgctttaagtaggaaagaaa

SEQ ID NO: 5109264 - DNA, 25 bp, Homo sapien
ggtttcttcttgatatgggaggcca

SEQ ID NO: 5109265 - DNA, 25 bp, Homo sapien
aacaacttgctactttcatctgagg

SEQ ID NO: 5109266 - DNA, 25 bp, Homo sapien
gaaattgcaaagctcacatctaagg

SEQ ID NO: 5109267 - DNA, 25 bp, Homo sapien
ttatactaccaaggctaaagggaca

SEQ ID NO: 5109268 - DNA, 25 bp, Homo sapien
gcagctaccatgaactattacatta

SEQ ID NO: 5109269 - DNA, 25 bp, Homo sapien
taaaagactggtattaccctttgca

SEQ ID NO: 5109270 - DNA, 25 bp, Homo sapien
tactacgaagaatatcctttgatat

SEQ ID NO: 5109271 - DNA, 25 bp, Homo sapien
aagtgtcttcaggatgattatgaaa

SEQ ID NO: 5109272 - DNA, 25 bp, Homo sapien
gacagggagaattggctcttatcca

SEQ ID NO: 5109273 - DNA, 25 bp, Homo sapien
aaatcaagctttgttaatggtgctc

SEQ ID NO: 5109274 - DNA, 25 bp, Homo sapien
cactgacagcctaatgttaccggtt

SEQ ID NO: 5109275 - DNA, 25 bp, Homo sapien
taaaattaggcacataggtgagaaa

SEQ ID NO: 5109276 - DNA, 25 bp, Homo sapien
tatgtacattatattagggtggcca

SEQ ID NO: 5109277 - DNA, 25 bp, Homo sapien
tagaaactcagtatcaatagggcca

SEQ ID NO: 5109278 - DNA, 25 bp, Homo sapien
cagcgtgctggtggacagtttcccc

SEQ ID NO: 5109279 - DNA, 25 bp, Homo sapien
gactcctggccaacaaagagactga

SEQ ID NO: 5109280 - DNA, 25 bp, Homo sapien
atgaagagtgaagatgcgggaaatt

SEQ ID NO: 5109281 - DNA, 25 bp, Homo sapien
gaagagtgaagatgcgggaaattat

SEQ ID NO: 5109282 - DNA, 25 bp, Homo sapien
atatcacagaatgtcaggagttgtc

SEQ ID NO: 5109283 - DNA, 25 bp, Homo sapien
cacagaatgtcaggagttgtccaga

SEQ ID NO: 5109284 - DNA, 25 bp, Homo sapien
gttcacctgctgacctaatgatgcc

SEQ ID NO: 5109285 - DNA, 25 bp, Homo sapien
gatgccaacagtgaagagtccaagc

SEQ ID NO: 5109286 - DNA, 25 bp, Homo sapien
gagtccaagcaccaagatatcaagg

SEQ ID NO: 5109287 - DNA, 25 bp, Homo sapien
tcaaggagaactgaatcatgcaatg

SEQ ID NO: 5109288 - DNA, 25 bp, Homo sapien
accattgccctctggcttaggtgac

SEQ ID NO: 5109289 - DNA, 25 bp, Homo sapien
gattgtaccattgccctctggctta

SEQ ID NO: 5109290 - DNA, 25 bp, Homo sapien
tgattgtaccattgccctctggctt

SEQ ID NO: 5109291 - DNA, 25 bp, Homo sapien
tgtaccattgccctctggcttaggt

SEQ ID NO: 5109292 - DNA, 25 bp, Homo sapien
aacgtgttcaagttatttctggata

SEQ ID NO: 5109293 - DNA, 25 bp, Homo sapien
agatccagttattctctgggtccag

SEQ ID NO: 5109294 - DNA, 25 bp, Homo sapien
gaagagacaactaactaccagtggg

SEQ ID NO: 5109295 - DNA, 25 bp, Homo sapien
cagtggccccgtctaacgtgttcaa

SEQ ID NO: 5109296 - DNA, 25 bp, Homo sapien
gccaatcacattaaagtactccaga

SEQ ID NO: 5109297 - DNA, 25 bp, Homo sapien
ggccaatcacattaaagtactccag

SEQ ID NO: 5109298 - DNA, 25 bp, Homo sapien
tgcctgaattttctgcacatcacat

SEQ ID NO: 5109299 - DNA, 25 bp, Homo sapien
tggccaatcacattaaagtactcca

SEQ ID NO: 5109300 - DNA, 25 bp, Homo sapien
gatttgttgcaggaactgattcaga

SEQ ID NO: 5109301 - DNA, 25 bp, Homo sapien
ttggatttgttgcaggaactgattc

SEQ ID NO: 5109302 - DNA, 25 bp, Homo sapien
gctgtggggtgggaggtggggctac

SEQ ID NO: 5109303 - DNA, 25 bp, Homo sapien
ctgattcagagctgtggggtgggag

SEQ ID NO: 5109304 - DNA, 25 bp, Homo sapien
cctgattgacatgtagcagcagcac

SEQ ID NO: 5109305 - DNA, 25 bp, Homo sapien
gcagcagcacaagctatttccacca

SEQ ID NO: 5109306 - DNA, 25 bp, Homo sapien
acaagctatttccaccacagctgag

SEQ ID NO: 5109307 - DNA, 25 bp, Homo sapien
ttgcctcctctcctgattgacatgt

SEQ ID NO: 5109308 - DNA, 25 bp, Homo sapien
ctgggtggatgttgccatcagtgtt

SEQ ID NO: 5109309 - DNA, 25 bp, Homo sapien
gccatcagtgttggtggacactgca

SEQ ID NO: 5109310 - DNA, 25 bp, Homo sapien
tgttggtggacactgcactagagat

SEQ ID NO: 5109311 - DNA, 25 bp, Homo sapien
cagtgttggtggacactgcactaga

SEQ ID NO: 5109312 - DNA, 25 bp, Homo sapien
agcagcttttgtgcactgagcacct

SEQ ID NO: 5109313 - DNA, 25 bp, Homo sapien
gcactgagcacctagtgttccatcg

SEQ ID NO: 5109314 - DNA, 25 bp, Homo sapien
ctcttgcagggcagcaatagcagct

SEQ ID NO: 5109315 - DNA, 25 bp, Homo sapien
gcacctagtgttccatcgatgagac

SEQ ID NO: 5109316 - DNA, 25 bp, Homo sapien
tgaagatgtcctttggttgccacag

SEQ ID NO: 5109317 - DNA, 25 bp, Homo sapien
tgcatgattctttgtgacaccaggt

SEQ ID NO: 5109318 - DNA, 25 bp, Homo sapien
ttagaccctggtgcatattcctgaa

SEQ ID NO: 5109319 - DNA, 25 bp, Homo sapien
caaatcaatgaagtgagttccctgg

SEQ ID NO: 5109320 - DNA, 25 bp, Homo sapien
aatgctcaagatacccacctcagtg

SEQ ID NO: 5109321 - DNA, 25 bp, Homo sapien
cattctagtggcttacatggttagt

SEQ ID NO: 5109322 - DNA, 25 bp, Homo sapien
cagggcttaggatatgaaagtgtct

SEQ ID NO: 5109323 - DNA, 25 bp, Homo sapien
gtcttggagaatcttggcgttttcc

SEQ ID NO: 5109324 - DNA, 25 bp, Homo sapien
tgtgtgtgcgtgtaatgtttaactc

SEQ ID NO: 5109325 - DNA, 25 bp, Homo sapien
taactcggcatagtacatgatgtat

SEQ ID NO: 5109326 - DNA, 25 bp, Homo sapien
taggtgtcctctctaaatctcatgt

SEQ ID NO: 5109327 - DNA, 25 bp, Homo sapien
gcgtgtaatgtttaactcggcatag

SEQ ID NO: 5109328 - DNA, 25 bp, Homo sapien
tcaaaagacaatgggcaaaatacac

SEQ ID NO: 5109329 - DNA, 25 bp, Homo sapien
taccattttgtctatcaagttagcc

SEQ ID NO: 5109330 - DNA, 25 bp, Homo sapien
tacattctaataaggaaaacactca

SEQ ID NO: 5109331 - DNA, 25 bp, Homo sapien
gcaatagattatattccaaaggaga

SEQ ID NO: 5109332 - DNA, 25 bp, Homo sapien
gcgtgaagtctgatagctcagtgga

SEQ ID NO: 5109333 - DNA, 25 bp, Homo sapien
tgcctgggcgtgaagtctgatagct

SEQ ID NO: 5109334 - DNA, 25 bp, Homo sapien
cagtggaatcgccattctggagtat

SEQ ID NO: 5109335 - DNA, 25 bp, Homo sapien
ctggtgtcaagatccggatatgcct

SEQ ID NO: 5109336 - DNA, 25 bp, Homo sapien
cagcgtgcgagccagtaagcttgac

SEQ ID NO: 5109337 - DNA, 25 bp, Homo sapien
aaagcccactcagctgatccggtgg

SEQ ID NO: 5109338 - DNA, 25 bp, Homo sapien
agataggtacagacacacgcccctc

SEQ ID NO: 5109339 - DNA, 25 bp, Homo sapien
agcttgactggtctcccaaagccca

SEQ ID NO: 5109340 - DNA, 25 bp, Homo sapien
tgccctacctctccgtaaaagaggc

SEQ ID NO: 5109341 - DNA, 25 bp, Homo sapien
cctgaacggacaccagggccatctt

SEQ ID NO: 5109342 - DNA, 25 bp, Homo sapien
gccatctttgttgccagctgcccta

SEQ ID NO: 5109343 - DNA, 25 bp, Homo sapien
tacctctccgtaaaagaggctcaga

SEQ ID NO: 5109344 - DNA, 25 bp, Homo sapien
gcgttgcccggctcaggcttcggaa

SEQ ID NO: 5109345 - DNA, 25 bp, Homo sapien
gggagttaccttcgcgccgccgctg

SEQ ID NO: 5109346 - DNA, 25 bp, Homo sapien
cttcttccagaagccggcaggcgaa

SEQ ID NO: 5109347 - DNA, 25 bp, Homo sapien
gggccggatcaggagacgcttcttc

SEQ ID NO: 5109348 - DNA, 25 bp, Homo sapien
ctggccaggtggtgctgtgagcaac

SEQ ID NO: 5109349 - DNA, 25 bp, Homo sapien
caatgtctgcaaggctgatgtcacc

SEQ ID NO: 5109350 - DNA, 25 bp, Homo sapien
agccagctctcccttaatgagtcag

SEQ ID NO: 5109351 - DNA, 25 bp, Homo sapien
tgtgagcaacactgctcagaattcc

SEQ ID NO: 5109352 - DNA, 25 bp, Homo sapien
aagctggtggaagtgttggtggcat

SEQ ID NO: 5109353 - DNA, 25 bp, Homo sapien
ggtggcattgtcatccatgaacccc

SEQ ID NO: 5109354 - DNA, 25 bp, Homo sapien
tgggaaggaagtggcatgggctcca

SEQ ID NO: 5109355 - DNA, 25 bp, Homo sapien
gctccatgagggttgagcacagaaa

SEQ ID NO: 5109356 - DNA, 25 bp, Homo sapien
catagagagagacagtgcgcaggta

SEQ ID NO: 5109357 - DNA, 25 bp, Homo sapien
cagtttcttgtagcggaccagggca

SEQ ID NO: 5109358 - DNA, 25 bp, Homo sapien
gagagctggcgcaccacatagtagt

SEQ ID NO: 5109359 - DNA, 25 bp, Homo sapien
cgcaggtagttgacagaggtgcaca

SEQ ID NO: 5109360 - DNA, 25 bp, Homo sapien
ctccagtgcttgcaatagcatctgt

SEQ ID NO: 5109361 - DNA, 25 bp, Homo sapien
ccatcctttggttataagctccagg

SEQ ID NO: 5109362 - DNA, 25 bp, Homo sapien
tgtttgcctgactggatctctctcc

SEQ ID NO: 5109363 - DNA, 25 bp, Homo sapien
cactgtcgtatctccagtgcttgca

SEQ ID NO: 5109364 - DNA, 25 bp, Homo sapien
ggcaagaacacaagtggaggcagcc

SEQ ID NO: 5109365 - DNA, 25 bp, Homo sapien
gggcaagaacacaagtggaggcagc

SEQ ID NO: 5109366 - DNA, 25 bp, Homo sapien
tagggcaagaacacaagtggaggca

SEQ ID NO: 5109367 - DNA, 25 bp, Homo sapien
ctagggcaagaacacaagtggaggc

SEQ ID NO: 5109368 - DNA, 25 bp, Homo sapien
tcttgacggtcacgaagcacagagt

SEQ ID NO: 5109369 - DNA, 25 bp, Homo sapien
caattgtcttgaggtccaggtctgc

SEQ ID NO: 5109370 - DNA, 25 bp, Homo sapien
tggtctcagcggatggacaatagcc

SEQ ID NO: 5109371 - DNA, 25 bp, Homo sapien
gatggcgatcaggatggacaccgtc

SEQ ID NO: 5109372 - DNA, 25 bp, Homo sapien
catgaatactgggatgtccgtgcac

SEQ ID NO: 5109373 - DNA, 25 bp, Homo sapien
tgcaaggcccctcgccatgaaagat

SEQ ID NO: 5109374 - DNA, 25 bp, Homo sapien
tacctactggcgtgtaaattagaca

SEQ ID NO: 5109375 - DNA, 25 bp, Homo sapien
tgaagtccagtgcaagaatagtccc

SEQ ID NO: 5109376 - DNA, 25 bp, Homo sapien
tatcatctgtatacctggagagcct

SEQ ID NO: 5109377 - DNA, 25 bp, Homo sapien
gacatgcttaccctgaatccaggct

SEQ ID NO: 5109378 - DNA, 25 bp, Homo sapien
aataacaggtgggaacggtatcatc

SEQ ID NO: 5109379 - DNA, 25 bp, Homo sapien
ccacatccaggaggtattgtgtcca

SEQ ID NO: 5109380 - DNA, 25 bp, Homo sapien
ctgtctggttaggagggaactcttc

SEQ ID NO: 5109381 - DNA, 25 bp, Homo sapien
ggttaggagggaactcttcatcact

SEQ ID NO: 5109382 - DNA, 25 bp, Homo sapien
ctggttaggagggaactcttcatca

SEQ ID NO: 5109383 - DNA, 25 bp, Homo sapien
catgctgtctggttaggagggaact

SEQ ID NO: 5109384 - DNA, 25 bp, Homo sapien
tcattcacgctgaggactagaaacg

SEQ ID NO: 5109385 - DNA, 25 bp, Homo sapien
gaaacgtgtggcttatccctcctaa

SEQ ID NO: 5109386 - DNA, 25 bp, Homo sapien
cagtaataaggatatcttgccctca

SEQ ID NO: 5109387 - DNA, 25 bp, Homo sapien
aaagactaggatgggattcaggtgc

SEQ ID NO: 5109388 - DNA, 25 bp, Homo sapien
cccttctttcctgggtgcccagact

SEQ ID NO: 5109389 - DNA, 25 bp, Homo sapien
tccccttctttcctgggtgcccaga

SEQ ID NO: 5109390 - DNA, 25 bp, Homo sapien
tcttcaacaacctatggggtcactg

SEQ ID NO: 5109391 - DNA, 25 bp, Homo sapien
ttagaaagtgggatgagtcttcaac

SEQ ID NO: 5109392 - DNA, 25 bp, Homo sapien
tccaactccaaaataccaaactcca

SEQ ID NO: 5109393 - DNA, 25 bp, Homo sapien
ccagggctacacagttgacagagtc

SEQ ID NO: 5109394 - DNA, 25 bp, Homo sapien
tagccactcagtcagaaggtatcac

SEQ ID NO: 5109395 - DNA, 25 bp, Homo sapien
taaccttgtaagtgcgctgctctag

SEQ ID NO: 5109396 - DNA, 25 bp, Homo sapien
ggttgaaggcatctcccacgtattg

SEQ ID NO: 5109397 - DNA, 25 bp, Homo sapien
tggttgccgcatataaaaagctcct

SEQ ID NO: 5109398 - DNA, 25 bp, Homo sapien
gatacgctgattgactgctgagaac

SEQ ID NO: 5109399 - DNA, 25 bp, Homo sapien
tctccatggatacgctgattgactg

SEQ ID NO: 5109400 - DNA, 25 bp, Homo sapien
tgatatgtctccatggatacgctga

SEQ ID NO: 5109401 - DNA, 25 bp, Homo sapien
ttggtttggtgatatgtctccatgg

SEQ ID NO: 5109402 - DNA, 25 bp, Homo sapien
tgtaattagctatatctttagtgag

SEQ ID NO: 5109403 - DNA, 25 bp, Homo sapien
ctgactgctgatgcttgagaccacg

SEQ ID NO: 5109404 - DNA, 25 bp, Homo sapien
ctatatctttagtgagattgtgtcc

SEQ ID NO: 5109405 - DNA, 25 bp, Homo sapien
tgagaccacgactactgtggttttc

SEQ ID NO: 5109406 - DNA, 25 bp, Homo sapien
tacaaaaattgaggaggagccaaga

SEQ ID NO: 5109407 - DNA, 25 bp, Homo sapien
tatacaaaaattgaggaggagccaa

SEQ ID NO: 5109408 - DNA, 25 bp, Homo sapien
ctttcactatatacaaaaattgagg

SEQ ID NO: 5109409 - DNA, 25 bp, Homo sapien
ctatatacaaaaattgaggaggagc

SEQ ID NO: 5109410 - DNA, 25 bp, Homo sapien
ttttcctgaccttccgctggtaatc

SEQ ID NO: 5109411 - DNA, 25 bp, Homo sapien
catgttttcctgaccttccgctggt

SEQ ID NO: 5109412 - DNA, 25 bp, Homo sapien
agcatgttttcctgaccttccgctg

SEQ ID NO: 5109413 - DNA, 25 bp, Homo sapien
tgttttcctgaccttccgctggtaa

SEQ ID NO: 5109414 - DNA, 25 bp, Homo sapien
gtcagcagcaaaaagggaagtgtta

SEQ ID NO: 5109415 - DNA, 25 bp, Homo sapien
ctgtcagcagcaaaaagggaagtgt

SEQ ID NO: 5109416 - DNA, 25 bp, Homo sapien
tgtcagcagcaaaaagggaagtgtt

SEQ ID NO: 5109417 - DNA, 25 bp, Homo sapien
tggcatggcggtggttcttggaaaa

SEQ ID NO: 5109418 - DNA, 25 bp, Homo sapien
caatggcatggcggtggttcttgga

SEQ ID NO: 5109419 - DNA, 25 bp, Homo sapien
aatggcatggcggtggttcttggaa

SEQ ID NO: 5109420 - DNA, 25 bp, Homo sapien
ggcaatggcatggcggtggttcttg

SEQ ID NO: 5109421 - DNA, 25 bp, Homo sapien
ctggaagacagccaactttagtagc

SEQ ID NO: 5109422 - DNA, 25 bp, Homo sapien
ccaactttagtagctgagtaaagac

SEQ ID NO: 5109423 - DNA, 25 bp, Homo sapien
caccaccaggagaggagttgagtga

SEQ ID NO: 5109424 - DNA, 25 bp, Homo sapien
tagctgagtaaagactagagttcca

SEQ ID NO: 5109425 - DNA, 25 bp, Homo sapien
tttcaagttctcacacctgattgct

SEQ ID NO: 5109426 - DNA, 25 bp, Homo sapien
aatgagtgtgagcttcataacgcgc

SEQ ID NO: 5109427 - DNA, 25 bp, Homo sapien
tgattattctcccacctcctgtaca

SEQ ID NO: 5109428 - DNA, 25 bp, Homo sapien
cataacgcgcatactgtaacagatc

SEQ ID NO: 5109429 - DNA, 25 bp, Homo sapien
gctcatccgggttgaccatctctgc

SEQ ID NO: 5109430 - DNA, 25 bp, Homo sapien
tcatccgggttgaccatctctgctg

SEQ ID NO: 5109431 - DNA, 25 bp, Homo sapien
cagctcatccgggttgaccatctct

SEQ ID NO: 5109432 - DNA, 25 bp, Homo sapien
agctcatccgggttgaccatctctg

SEQ ID NO: 5109433 - DNA, 25 bp, Homo sapien
tccggtccacatcaactgggaagac

SEQ ID NO: 5109434 - DNA, 25 bp, Homo sapien
acaactcccaacctgttcacagcca

SEQ ID NO: 5109435 - DNA, 25 bp, Homo sapien
aggaaagtccggtccacatcaactg

SEQ ID NO: 5109436 - DNA, 25 bp, Homo sapien
aaagtccggtccacatcaactggga

SEQ ID NO: 5109437 - DNA, 25 bp, Homo sapien
tgtacacatcgagggccatcttctt

SEQ ID NO: 5109438 - DNA, 25 bp, Homo sapien
tgcatctgagctttgtacacatcga

SEQ ID NO: 5109439 - DNA, 25 bp, Homo sapien
attgcatctgagctttgtacacatc

SEQ ID NO: 5109440 - DNA, 25 bp, Homo sapien
gcatctgagctttgtacacatcgag

SEQ ID NO: 5109441 - DNA, 25 bp, Homo sapien
cctaaagattttcctagttccactg

SEQ ID NO: 5109442 - DNA, 25 bp, Homo sapien
gaaagtccggtccacatcaactagg

SEQ ID NO: 5109443 - DNA, 25 bp, Homo sapien
ctgagctttgtacacatggagggcc

SEQ ID NO: 5109444 - DNA, 25 bp, Homo sapien
ttatccacatcggtaaccactggga

SEQ ID NO: 5109445 - DNA, 25 bp, Homo sapien
agaaaaccacctgtcccctcaggat

SEQ ID NO: 5109446 - DNA, 25 bp, Homo sapien
ttggatcttggtttaatatgttcca

SEQ ID NO: 5109447 - DNA, 25 bp, Homo sapien
tttggatcttggtttaatatgttcc

SEQ ID NO: 5109448 - DNA, 25 bp, Homo sapien
aagaagccagtaaagccaagtctga

SEQ ID NO: 5109449 - DNA, 25 bp, Homo sapien
gaagccagtaaagccaagtctgaat

SEQ ID NO: 5109450 - DNA, 25 bp, Homo sapien
agaagccagtaaagccaagtctgaa

SEQ ID NO: 5109451 - DNA, 25 bp, Homo sapien
aagccagtaaagccaagtctgaatc

SEQ ID NO: 5109452 - DNA, 25 bp, Homo sapien
cctttagctggaacaactttgagag

SEQ ID NO: 5109453 - DNA, 25 bp, Homo sapien
aactttgagagctcctaggctggtg

SEQ ID NO: 5109454 - DNA, 25 bp, Homo sapien
caaaagctgagtgtgtcctttagct

SEQ ID NO: 5109455 - DNA, 25 bp, Homo sapien
ctgctgcagagacatatttatggag

SEQ ID NO: 5109456 - DNA, 25 bp, Homo sapien
tcaagttggcttcattcctgggttc

SEQ ID NO: 5109457 - DNA, 25 bp, Homo sapien
caagttggcttcattcctgggttca

SEQ ID NO: 5109458 - DNA, 25 bp, Homo sapien
cattcctgggttcaacatcaacaaa

SEQ ID NO: 5109459 - DNA, 25 bp, Homo sapien
cctgggttcaacatcaacaaatcaa

SEQ ID NO: 5109460 - DNA, 25 bp, Homo sapien
tgacagatcccatatacagtagtgg

SEQ ID NO: 5109461 - DNA, 25 bp, Homo sapien
gtttgatgtattcagtcatgtgcca

SEQ ID NO: 5109462 - DNA, 25 bp, Homo sapien
cacacagcaatgaacctaaggtttg

SEQ ID NO: 5109463 - DNA, 25 bp, Homo sapien
gcaatagcccgtaccatatggccta

SEQ ID NO: 5109464 - DNA, 25 bp, Homo sapien
cagaggctgtgattaagttatcgtc

SEQ ID NO: 5109465 - DNA, 25 bp, Homo sapien
ctcaactccacaaacctgtcagagg

SEQ ID NO: 5109466 - DNA, 25 bp, Homo sapien
tatcgtcttttgcagaggaagtgtc

SEQ ID NO: 5109467 - DNA, 25 bp, Homo sapien
aacacccttgtcaagcctcaactcc

SEQ ID NO: 5109468 - DNA, 25 bp, Homo sapien
tactcccaccaagtgaattatctgt

SEQ ID NO: 5109469 - DNA, 25 bp, Homo sapien
cattccaagatgatataaaccgtac

SEQ ID NO: 5109470 - DNA, 25 bp, Homo sapien
gttgcccagctaatgcattccaaga

SEQ ID NO: 5109471 - DNA, 25 bp, Homo sapien
ctttgatgagtgcatagtagctgct

SEQ ID NO: 5109472 - DNA, 25 bp, Homo sapien
tagctccagggacataaggagggaa

SEQ ID NO: 5109473 - DNA, 25 bp, Homo sapien
gaagttgcccccaagaagtttcatg

SEQ ID NO: 5109474 - DNA, 25 bp, Homo sapien
aaagcaatgaggatattatgccaca

SEQ ID NO: 5109475 - DNA, 25 bp, Homo sapien
ctttgagtgtttctgcgttcagcca

SEQ ID NO: 5109476 - DNA, 25 bp, Homo sapien
ggcccagcaagtgtgcgaacaatga

SEQ ID NO: 5109477 - DNA, 25 bp, Homo sapien
cacacccagtttgatcagcttggac

SEQ ID NO: 5109478 - DNA, 25 bp, Homo sapien
gaaaggagagagttataatctcgac

SEQ ID NO: 5109479 - DNA, 25 bp, Homo sapien
agtgtgcgaacaatgacacacccag

SEQ ID NO: 5109480 - DNA, 25 bp, Homo sapien
gtgtggtttaaggagccgctccttg

SEQ ID NO: 5109481 - DNA, 25 bp, Homo sapien
tttaaggagccgctccttgcctgcc

SEQ ID NO: 5109482 - DNA, 25 bp, Homo sapien
gtggtttaaggagccgctccttgcc

SEQ ID NO: 5109483 - DNA, 25 bp, Homo sapien
tggtgtggtttaaggagccgctcct

SEQ ID NO: 5109484 - DNA, 25 bp, Homo sapien
gacactcgtatttgcctcaagcact

SEQ ID NO: 5109485 - DNA, 25 bp, Homo sapien
gggagcctatgtggctgttgacctt

SEQ ID NO: 5109486 - DNA, 25 bp, Homo sapien
cctatgtggctgttgaccttggcct

SEQ ID NO: 5109487 - DNA, 25 bp, Homo sapien
gcaccaagtgacactcgtatttgcc

SEQ ID NO: 5109488 - DNA, 25 bp, Homo sapien
ccagaggtcactcatctgacggtcc

SEQ ID NO: 5109489 - DNA, 25 bp, Homo sapien
gctccagaggtcactcatctgacgg

SEQ ID NO: 5109490 - DNA, 25 bp, Homo sapien
tccagaggtcactcatctgacggtc

SEQ ID NO: 5109491 - DNA, 25 bp, Homo sapien
cagaggtcactcatctgacggtcct

SEQ ID NO: 5109492 - DNA, 25 bp, Homo sapien
cattatagatttaggtgtcaggtag

SEQ ID NO: 5109493 - DNA, 25 bp, Homo sapien
tagagaccagatgtttagagagttg

SEQ ID NO: 5109494 - DNA, 25 bp, Homo sapien
aaatgtcagctccttaacacctgga

SEQ ID NO: 5109495 - DNA, 25 bp, Homo sapien
caggtagtctaagcttagagaccag

SEQ ID NO: 5109496 - DNA, 25 bp, Homo sapien
taccatgatggttgtagctgttgtt

SEQ ID NO: 5109497 - DNA, 25 bp, Homo sapien
cttctccatcgagctctccaggttg

SEQ ID NO: 5109498 - DNA, 25 bp, Homo sapien
gtggttgtcaccgtcatccctcatt

SEQ ID NO: 5109499 - DNA, 25 bp, Homo sapien
ccatcgagctctccaggttgtggtt

SEQ ID NO: 5109500 - DNA, 25 bp, Homo sapien
cgccctgacaccggctgttgtctct

SEQ ID NO: 5109501 - DNA, 25 bp, Homo sapien
ccctgacaccggctgttgtctctta

SEQ ID NO: 5109502 - DNA, 25 bp, Homo sapien
gacaccggctgttgtctcttacagt

SEQ ID NO: 5109503 - DNA, 25 bp, Homo sapien
ctgacaccggctgttgtctcttaca

SEQ ID NO: 5109504 - DNA, 25 bp, Homo sapien
taccagaaatatcccagttgacact

SEQ ID NO: 5109505 - DNA, 25 bp, Homo sapien
gaggtcgtgataaacaactgctgcc

SEQ ID NO: 5109506 - DNA, 25 bp, Homo sapien
cctctgcgtcatgggaagcaaagct

SEQ ID NO: 5109507 - DNA, 25 bp, Homo sapien
ttttcgaaagaatctcaggccttac

SEQ ID NO: 5109508 - DNA, 25 bp, Homo sapien
gaccaacatgcaaatggtgctcgag

SEQ ID NO: 5109509 - DNA, 25 bp, Homo sapien
ttttaagtagactatgctccctgca

SEQ ID NO: 5109510 - DNA, 25 bp, Homo sapien
gatttgctgcgagatccatttttaa

SEQ ID NO: 5109511 - DNA, 25 bp, Homo sapien
gagtatacgtaagaatcacagaggc

SEQ ID NO: 5109512 - DNA, 25 bp, Homo sapien
caaaatgtgctcaagtagactggcc

SEQ ID NO: 5109513 - DNA, 25 bp, Homo sapien
tagactggcctggtcattgggaagc

SEQ ID NO: 5109514 - DNA, 25 bp, Homo sapien
gaccggaggctactcatggaaagca

SEQ ID NO: 5109515 - DNA, 25 bp, Homo sapien
gacctttatctatcagggaccggag

SEQ ID NO: 5109516 - DNA, 25 bp, Homo sapien
tcaggggccttacacacatgaatgt

SEQ ID NO: 5109517 - DNA, 25 bp, Homo sapien
ttcacagtcaggggccttacacaca

SEQ ID NO: 5109518 - DNA, 25 bp, Homo sapien
ggccttacacacatgaatgtggaca

SEQ ID NO: 5109519 - DNA, 25 bp, Homo sapien
cagtcaggggccttacacacatgaa

SEQ ID NO: 5109520 - DNA, 25 bp, Homo sapien
tctagtggaccaacaataggtttgg

SEQ ID NO: 5109521 - DNA, 25 bp, Homo sapien
tgccaaatgcccgtggctctttagt

SEQ ID NO: 5109522 - DNA, 25 bp, Homo sapien
tgctaactggaggatagtaagagtc

SEQ ID NO: 5109523 - DNA, 25 bp, Homo sapien
tgcgaataggaggaaatctactgct

SEQ ID NO: 5109524 - DNA, 25 bp, Homo sapien
cagtttacacctcgcaatgaacagg

SEQ ID NO: 5109525 - DNA, 25 bp, Homo sapien
aaacttggctgagtttgccgccatc

SEQ ID NO: 5109526 - DNA, 25 bp, Homo sapien
acagcttgccagttggtagcgccaa

SEQ ID NO: 5109527 - DNA, 25 bp, Homo sapien
agtggccactcccagcgtcagttta

SEQ ID NO: 5109528 - DNA, 25 bp, Homo sapien
gaaagaacagtaaatccctgcccca

SEQ ID NO: 5109529 - DNA, 25 bp, Homo sapien
gaagctaatgaaatggatgccagga

SEQ ID NO: 5109530 - DNA, 25 bp, Homo sapien
ttcaatcaactattcgtggtcgcgt

SEQ ID NO: 5109531 - DNA, 25 bp, Homo sapien
cccttagagatgtcaggacgtggag

SEQ ID NO: 5109532 - DNA, 25 bp, Homo sapien
cacagataatgcaagttctgaagtt

SEQ ID NO: 5109533 - DNA, 25 bp, Homo sapien
tccacagataatgcaagttctgaag

SEQ ID NO: 5109534 - DNA, 25 bp, Homo sapien
tgtttccacagataatgcaagttct

SEQ ID NO: 5109535 - DNA, 25 bp, Homo sapien
aaatgtttccacagataatgcaagt

SEQ ID NO: 5109536 - DNA, 25 bp, Homo sapien
gcagtagcactcctcaatatttacc

SEQ ID NO: 5109537 - DNA, 25 bp, Homo sapien
gacaatcccaatatctttcaagtga

SEQ ID NO: 5109538 - DNA, 25 bp, Homo sapien
agagataaaacgttatgctcacaca

SEQ ID NO: 5109539 - DNA, 25 bp, Homo sapien
taacaatatcaaggatcagtgagaa

SEQ ID NO: 5109540 - DNA, 25 bp, Homo sapien
tagtgtccttttatatcaacctgca

SEQ ID NO: 5109541 - DNA, 25 bp, Homo sapien
agtgtccttttatatcaacctgcag

SEQ ID NO: 5109542 - DNA, 25 bp, Homo sapien
ttagtgtccttttatatcaacctgc

SEQ ID NO: 5109543 - DNA, 25 bp, Homo sapien
tttatatcaacctgcaggaaggact

SEQ ID NO: 5109544 - DNA, 25 bp, Homo sapien
gttttgtagtgcaagtatttcacct

SEQ ID NO: 5109545 - DNA, 25 bp, Homo sapien
cagctttttggtcgaatccttagga

SEQ ID NO: 5109546 - DNA, 25 bp, Homo sapien
taagtcttccaacctagggagcctg

SEQ ID NO: 5109547 - DNA, 25 bp, Homo sapien
cactgttagtgtatagaagtgcaac

SEQ ID NO: 5109548 - DNA, 25 bp, Homo sapien
ctatctcgctgtagttcgtgttgca

SEQ ID NO: 5109549 - DNA, 25 bp, Homo sapien
cataatgggtgtgagttgctatctc

SEQ ID NO: 5109550 - DNA, 25 bp, Homo sapien
tgagttgctatctcgctgtagttcg

SEQ ID NO: 5109551 - DNA, 25 bp, Homo sapien
tgtagttcgtgttgcatttccctaa

SEQ ID NO: 5109552 - DNA, 25 bp, Homo sapien
gaagaactgagggacttactgaggc

SEQ ID NO: 5109553 - DNA, 25 bp, Homo sapien
gctgccagtatggatagtatttcct

SEQ ID NO: 5109554 - DNA, 25 bp, Homo sapien
agacagatccgcctccatatccctg

SEQ ID NO: 5109555 - DNA, 25 bp, Homo sapien
gagggacttactgaggctgccagta

SEQ ID NO: 5109556 - DNA, 25 bp, Homo sapien
tcctatgacctttacagttagatcg

SEQ ID NO: 5109557 - DNA, 25 bp, Homo sapien
tgtcattcgagtaagtccagcctgt

SEQ ID NO: 5109558 - DNA, 25 bp, Homo sapien
cagttagatcgtcactgccaataga

SEQ ID NO: 5109559 - DNA, 25 bp, Homo sapien
caatagaactcagaagcaggatttg

SEQ ID NO: 5109560 - DNA, 25 bp, Homo sapien
gaaggctcggggtgagtcccacgca

SEQ ID NO: 5109561 - DNA, 25 bp, Homo sapien
aaggctcggggtgagtcccacgcag

SEQ ID NO: 5109562 - DNA, 25 bp, Homo sapien
aggctcggggtgagtcccacgcagc

SEQ ID NO: 5109563 - DNA, 25 bp, Homo sapien
ggtccggatctgagccagagaaagt

SEQ ID NO: 5109564 - DNA, 25 bp, Homo sapien
gctgcagtcggtggccccgtgcaca

SEQ ID NO: 5109565 - DNA, 25 bp, Homo sapien
cctgcgtgggagtcagtatctgaca

SEQ ID NO: 5109566 - DNA, 25 bp, Homo sapien
caaaccgaaaggttggctggagcct

SEQ ID NO: 5109567 - DNA, 25 bp, Homo sapien
ctatagagaggaacagacaggccga

SEQ ID NO: 5109568 - DNA, 25 bp, Homo sapien
tcttcatccttgtagtagtagagct

SEQ ID NO: 5109569 - DNA, 25 bp, Homo sapien
gctgccagttcttcacgatggacct

SEQ ID NO: 5109570 - DNA, 25 bp, Homo sapien
gcgccctcagcacaaagtacctctg

SEQ ID NO: 5109571 - DNA, 25 bp, Homo sapien
cagttcttcacgatggacctctgct

SEQ ID NO: 5109572 - DNA, 25 bp, Homo sapien
tctgggtttgtggcgatctccttga

SEQ ID NO: 5109573 - DNA, 25 bp, Homo sapien
cttgattgtacatcctggtagatac

SEQ ID NO: 5109574 - DNA, 25 bp, Homo sapien
tttgtggcgatctccttgattgtac

SEQ ID NO: 5109575 - DNA, 25 bp, Homo sapien
tccttgattgtacatcctggtagat

SEQ ID NO: 5109576 - DNA, 25 bp, Homo sapien
cctgcactggtatagcaatgttgaa

SEQ ID NO: 5109577 - DNA, 25 bp, Homo sapien
tggtgcaaagcccacagtgaatctt

SEQ ID NO: 5109578 - DNA, 25 bp, Homo sapien
ggttgtgtcccatgaattgcactgg

SEQ ID NO: 5109579 - DNA, 25 bp, Homo sapien
cagctggatctctcagtagggttac

SEQ ID NO: 5109580 - DNA, 25 bp, Homo sapien
tgtcccatgcgattctggtcccatg

SEQ ID NO: 5109581 - DNA, 25 bp, Homo sapien
agcaactctcctgaggaatttaacc

SEQ ID NO: 5109582 - DNA, 25 bp, Homo sapien
cctgtcccatgcgattctggtccca

SEQ ID NO: 5109583 - DNA, 25 bp, Homo sapien
gcaactctcctgaggaatttaaccc

SEQ ID NO: 5109584 - DNA, 25 bp, Homo sapien
aaagcaggtctggacagagtgtgat

SEQ ID NO: 5109585 - DNA, 25 bp, Homo sapien
gtctggacagagtgtgatgatttgc

SEQ ID NO: 5109586 - DNA, 25 bp, Homo sapien
gagcaaaacttcagatggctcatct

SEQ ID NO: 5109587 - DNA, 25 bp, Homo sapien
gatgatttgcaatttggactgcttg

SEQ ID NO: 5109588 - DNA, 25 bp, Homo sapien
ctgggttgggtaaaggagaacaatg

SEQ ID NO: 5109589 - DNA, 25 bp, Homo sapien
gagacgaaagcaagtctcattcctg

SEQ ID NO: 5109590 - DNA, 25 bp, Homo sapien
gccaagttggctgccatagccagga

SEQ ID NO: 5109591 - DNA, 25 bp, Homo sapien
gaggcttggccttaagctgaatggc

SEQ ID NO: 5109592 - DNA, 25 bp, Homo sapien
tgaatggcatctcctatggcctagg

SEQ ID NO: 5109593 - DNA, 25 bp, Homo sapien
atcccagcaaacaagcagtgccagg

SEQ ID NO: 5109594 - DNA, 25 bp, Homo sapien
gaaatcccagcaaacaagcagtgcc

SEQ ID NO: 5109595 - DNA, 25 bp, Homo sapien
ccagcaaacaagcagtgccagggca

SEQ ID NO: 5109596 - DNA, 25 bp, Homo sapien
aatcccagcaaacaagcagtgccag

SEQ ID NO: 5109597 - DNA, 25 bp, Homo sapien
gcctatatcgttataatggtttctt

SEQ ID NO: 5109598 - DNA, 25 bp, Homo sapien
cggcctaggttggtacattccaaat

SEQ ID NO: 5109599 - DNA, 25 bp, Homo sapien
actgctgctgcctatatcgttataa

SEQ ID NO: 5109600 - DNA, 25 bp, Homo sapien
gcccggcctaggttggtacattcca

SEQ ID NO: 5109601 - DNA, 25 bp, Homo sapien
gtttccaaaacgtaatgctctgcag

SEQ ID NO: 5109602 - DNA, 25 bp, Homo sapien
tccaaaacgtaatgctctgcagtct

SEQ ID NO: 5109603 - DNA, 25 bp, Homo sapien
cttggcccctctcaaatatcatcat

SEQ ID NO: 5109604 - DNA, 25 bp, Homo sapien
ctgacgtttccaaaacgtaatgctc

SEQ ID NO: 5109605 - DNA, 25 bp, Homo sapien
ccaggcagacggaagatgccctctt

SEQ ID NO: 5109606 - DNA, 25 bp, Homo sapien
ccagcatcaaaagcgtctctcagct

SEQ ID NO: 5109607 - DNA, 25 bp, Homo sapien
tccaggatgaactctgcacatttct

SEQ ID NO: 5109608 - DNA, 25 bp, Homo sapien
agctgcttcaccaggttgtcctgcc

SEQ ID NO: 5109609 - DNA, 25 bp, Homo sapien
cagccgtgaagttggggacagcaag

SEQ ID NO: 5109610 - DNA, 25 bp, Homo sapien
gaggatctgggtgagttcccacagc

SEQ ID NO: 5109611 - DNA, 25 bp, Homo sapien
gggacagcaagagggagctccttgc

SEQ ID NO: 5109612 - DNA, 25 bp, Homo sapien
cagaggatctgggtgagttcccaca

SEQ ID NO: 5109613 - DNA, 25 bp, Homo sapien
ggaagccacagtgtgcacatctgtg

SEQ ID NO: 5109614 - DNA, 25 bp, Homo sapien
ctttaacagggaagccacagtgtgc

SEQ ID NO: 5109615 - DNA, 25 bp, Homo sapien
acagggaagccacagtgtgcacatc

SEQ ID NO: 5109616 - DNA, 25 bp, Homo sapien
gggaagccacagtgtgcacatctgt

SEQ ID NO: 5109617 - DNA, 25 bp, Homo sapien
tggctccagggaaccacgggctctg

SEQ ID NO: 5109618 - DNA, 25 bp, Homo sapien
atccgcattcgtgagctgcccacag

SEQ ID NO: 5109619 - DNA, 25 bp, Homo sapien
aggaacccttcgtactggctccagg

SEQ ID NO: 5109620 - DNA, 25 bp, Homo sapien
cacgggctctgggaggtctcggagg

SEQ ID NO: 5109621 - DNA, 25 bp, Homo sapien
ggatggaagttctcacagctgtgtt

SEQ ID NO: 5109622 - DNA, 25 bp, Homo sapien
ctgtgcaccattttgccagagaggg

SEQ ID NO: 5109623 - DNA, 25 bp, Homo sapien
caaaacaatcctaggcatggctgat

SEQ ID NO: 5109624 - DNA, 25 bp, Homo sapien
ccagagagggcttttaacatagtcg

SEQ ID NO: 5109625 - DNA, 25 bp, Homo sapien
tgtagctcaggagactatagttgtc

SEQ ID NO: 5109626 - DNA, 25 bp, Homo sapien
tagttgtcacgaggaaggatggaga

SEQ ID NO: 5109627 - DNA, 25 bp, Homo sapien
gctcaggagactatagttgtcacga

SEQ ID NO: 5109628 - DNA, 25 bp, Homo sapien
ggagactatagttgtcacgaggaag

SEQ ID NO: 5109629 - DNA, 25 bp, Homo sapien
gaccttcgacctgatgagattcaca

SEQ ID NO: 5109630 - DNA, 25 bp, Homo sapien
gagattcacaccaatcacagtagcc

SEQ ID NO: 5109631 - DNA, 25 bp, Homo sapien
ctctcatgatcacggcagggtcttc

SEQ ID NO: 5109632 - DNA, 25 bp, Homo sapien
catcttgttaacagcacagttcagc

SEQ ID NO: 5109633 - DNA, 25 bp, Homo sapien
gctttcactacgggaccagccatac

SEQ ID NO: 5109634 - DNA, 25 bp, Homo sapien
tgctttcactacgggaccagccata

SEQ ID NO: 5109635 - DNA, 25 bp, Homo sapien
ctgctttcactacgggaccagccat

SEQ ID NO: 5109636 - DNA, 25 bp, Homo sapien
gcatcccagcctacagagcttcggg

SEQ ID NO: 5109637 - DNA, 25 bp, Homo sapien
cctagaaattcggaggtcttcagtg

SEQ ID NO: 5109638 - DNA, 25 bp, Homo sapien
catcactctttggatctgaggagtc

SEQ ID NO: 5109639 - DNA, 25 bp, Homo sapien
gaagctgtctgtcctagaaattcgg

SEQ ID NO: 5109640 - DNA, 25 bp, Homo sapien
ccgagagcaggccttacatgggatg

SEQ ID NO: 5109641 - DNA, 25 bp, Homo sapien
tagaaactagatttggaaagaggcc

SEQ ID NO: 5109642 - DNA, 25 bp, Homo sapien
caaagatgccaatagaaactagatt

SEQ ID NO: 5109643 - DNA, 25 bp, Homo sapien
actgccactgcatcacctaaaactc

SEQ ID NO: 5109644 - DNA, 25 bp, Homo sapien
ggacgttcacccagaattttcaaca

SEQ ID NO: 5109645 - DNA, 25 bp, Homo sapien
acctcattgctcagtcactgggtga

SEQ ID NO: 5109646 - DNA, 25 bp, Homo sapien
aaggaatcacgtttcatgggttagc

SEQ ID NO: 5109647 - DNA, 25 bp, Homo sapien
cactgggtgattggcacacttgtca

SEQ ID NO: 5109648 - DNA, 25 bp, Homo sapien
gagtatctcccttggagtcacaggc

SEQ ID NO: 5109649 - DNA, 25 bp, Homo sapien
gttggcaccctgaaaagctgatgtc

SEQ ID NO: 5109650 - DNA, 25 bp, Homo sapien
cgttatcgtaggtggaagtccgttg

SEQ ID NO: 5109651 - DNA, 25 bp, Homo sapien
tctgaggaaggcgaccagaattcat

SEQ ID NO: 5109652 - DNA, 25 bp, Homo sapien
tagctatctcattgttccctttact

SEQ ID NO: 5109653 - DNA, 25 bp, Homo sapien
tgtgacttctctggcggatgggaac

SEQ ID NO: 5109654 - DNA, 25 bp, Homo sapien
tctaggcctgctatagattactgtc

SEQ ID NO: 5109655 - DNA, 25 bp, Homo sapien
tagagtgttcaccaatttagctatc

SEQ ID NO: 5109656 - DNA, 25 bp, Homo sapien
gaagatactcatatgtgagggcagt

SEQ ID NO: 5109657 - DNA, 25 bp, Homo sapien
cagtgtgtgccttctatgggactgc

SEQ ID NO: 5109658 - DNA, 25 bp, Homo sapien
cactgtgctagatcctgaccatggg

SEQ ID NO: 5109659 - DNA, 25 bp, Homo sapien
gaaattccaagtgaggcactgtgct

SEQ ID NO: 5109660 - DNA, 25 bp, Homo sapien
gcgctccatgttgcggaggctgatc

SEQ ID NO: 5109661 - DNA, 25 bp, Homo sapien
tctctagggctgcagacttcttctt

SEQ ID NO: 5109662 - DNA, 25 bp, Homo sapien
cactttagcccaaacgtcataattt

SEQ ID NO: 5109663 - DNA, 25 bp, Homo sapien
taagcctcggtcttgggttccttca

SEQ ID NO: 5109664 - DNA, 25 bp, Homo sapien
tgtctgacaaggtgagctgttccac

SEQ ID NO: 5109665 - DNA, 25 bp, Homo sapien
tttgtttccccgtcatcagatagca

SEQ ID NO: 5109666 - DNA, 25 bp, Homo sapien
catttgaatacagcgatggatggtc

SEQ ID NO: 5109667 - DNA, 25 bp, Homo sapien
gggttctcgcttcagcagatgcagc

SEQ ID NO: 5109668 - DNA, 25 bp, Homo sapien
cacctatcatctagtgcctgttgtc

SEQ ID NO: 5109669 - DNA, 25 bp, Homo sapien
gccaagctggcttgacatagaaggg

SEQ ID NO: 5109670 - DNA, 25 bp, Homo sapien
cctttaagggtaaaatcacttgcat

SEQ ID NO: 5109671 - DNA, 25 bp, Homo sapien
tcccacctatcatctagtgcctgtt

SEQ ID NO: 5109672 - DNA, 25 bp, Homo sapien
tgcaagcaggcctagataggaatgc

SEQ ID NO: 5109673 - DNA, 25 bp, Homo sapien
tcaatcttctgcaagcaggcctaga

SEQ ID NO: 5109674 - DNA, 25 bp, Homo sapien
gaatgccgtaggagtcgccctcctt

SEQ ID NO: 5109675 - DNA, 25 bp, Homo sapien
caggcctagataggaatgccgtagg

SEQ ID NO: 5109676 - DNA, 25 bp, Homo sapien
ccaatatgccccactcaaaggccct

SEQ ID NO: 5109677 - DNA, 25 bp, Homo sapien
taggctctgcataactctcttttgc

SEQ ID NO: 5109678 - DNA, 25 bp, Homo sapien
caagcagagtaatttgccaaagagc

SEQ ID NO: 5109679 - DNA, 25 bp, Homo sapien
ggctattaatatgtgcaagcagagt

SEQ ID NO: 5109680 - DNA, 25 bp, Homo sapien
caagttggctaagcttggctattaa

SEQ ID NO: 5109681 - DNA, 25 bp, Homo sapien
gaatgcaacctgataccaatagagt

SEQ ID NO: 5109682 - DNA, 25 bp, Homo sapien
tccaaatgcgttaagggccactcca

SEQ ID NO: 5109683 - DNA, 25 bp, Homo sapien
cctccaaactaagtgctggtgtgaa

SEQ ID NO: 5109684 - DNA, 25 bp, Homo sapien
ggcagagggcgcacatctggactct

SEQ ID NO: 5109685 - DNA, 25 bp, Homo sapien
gagtggcatgaacctagagctccca

SEQ ID NO: 5109686 - DNA, 25 bp, Homo sapien
taccccatccttgggttgatggagt

SEQ ID NO: 5109687 - DNA, 25 bp, Homo sapien
catatgggatcaacagccaggctta

SEQ ID NO: 5109688 - DNA, 25 bp, Homo sapien
gccaggcttatagtataccagaagt

SEQ ID NO: 5109689 - DNA, 25 bp, Homo sapien
tgctcaccatagtactgctcaagtg

SEQ ID NO: 5109690 - DNA, 25 bp, Homo sapien
gaatcattccttgaccagtccctgc

SEQ ID NO: 5109691 - DNA, 25 bp, Homo sapien
tacagcactggttttattgatacgg

SEQ ID NO: 5109692 - DNA, 25 bp, Homo sapien
caatagtaacctgtacatgccccta

SEQ ID NO: 5109693 - DNA, 25 bp, Homo sapien
cattgtttaccagagttgtcctgtt

SEQ ID NO: 5109694 - DNA, 25 bp, Homo sapien
tccatcagggaagttgatactggtc

SEQ ID NO: 5109695 - DNA, 25 bp, Homo sapien
aggatcattgtttaccagagttgtc

SEQ ID NO: 5109696 - DNA, 25 bp, Homo sapien
tggtctgagtcaatataaatgcttg

SEQ ID NO: 5109697 - DNA, 25 bp, Homo sapien
cttctgatcagtggccactcactgt

SEQ ID NO: 5109698 - DNA, 25 bp, Homo sapien
actgtcactcaggttttttgtccac

SEQ ID NO: 5109699 - DNA, 25 bp, Homo sapien
gagtcttctgatcagtggccactca

SEQ ID NO: 5109700 - DNA, 25 bp, Homo sapien
tacaggtccctgagtcttctgatca

SEQ ID NO: 5109701 - DNA, 25 bp, Homo sapien
tctgtgctaatgtccccttatgcct

SEQ ID NO: 5109702 - DNA, 25 bp, Homo sapien
aatgtccccttatgcctccaggcag

SEQ ID NO: 5109703 - DNA, 25 bp, Homo sapien
tccaggcagtcttatcggatggtgc

SEQ ID NO: 5109704 - DNA, 25 bp, Homo sapien
cctccaggcagtcttatcggatggt

SEQ ID NO: 5109705 - DNA, 25 bp, Homo sapien
tcgacccccactggggaagaggcat

SEQ ID NO: 5109706 - DNA, 25 bp, Homo sapien
ctcctcgacccccactggggaagag

SEQ ID NO: 5109707 - DNA, 25 bp, Homo sapien
ctcgacccccactggggaagaggca

SEQ ID NO: 5109708 - DNA, 25 bp, Homo sapien
ggagctgttcttcactactacatct

SEQ ID NO: 5109709 - DNA, 25 bp, Homo sapien
cccataggttaagagctcactgaga

SEQ ID NO: 5109710 - DNA, 25 bp, Homo sapien
tcttcactactacatctttaagagt

SEQ ID NO: 5109711 - DNA, 25 bp, Homo sapien
cctgccctttctcaatgtatgggtc

SEQ ID NO: 5109712 - DNA, 25 bp, Homo sapien
ccacatttgtatagttatcactaga

SEQ ID NO: 5109713 - DNA, 25 bp, Homo sapien
tccacatttgtatagttatcactag

SEQ ID NO: 5109714 - DNA, 25 bp, Homo sapien
gtccacatttgtatagttatcacta

SEQ ID NO: 5109715 - DNA, 25 bp, Homo sapien
aatcagctgatgcacggtcatgttc

SEQ ID NO: 5109716 - DNA, 25 bp, Homo sapien
agctgatgcacggtcatgttctggg

SEQ ID NO: 5109717 - DNA, 25 bp, Homo sapien
cgaatcagctgatgcacggtcatgt

SEQ ID NO: 5109718 - DNA, 25 bp, Homo sapien
tcagctgatgcacggtcatgttctg

SEQ ID NO: 5109719 - DNA, 25 bp, Homo sapien
gcagttctgcaagctcacatatggt

SEQ ID NO: 5109720 - DNA, 25 bp, Homo sapien
cccaaacaggaacagttgatttcct

SEQ ID NO: 5109721 - DNA, 25 bp, Homo sapien
ggaaatgctggtatgactctgtgca

SEQ ID NO: 5109722 - DNA, 25 bp, Homo sapien
gtgggtcattctcaaccctttgcag

SEQ ID NO: 5109723 - DNA, 25 bp, Homo sapien
ggagaaatcttgtctcgagcactta

SEQ ID NO: 5109724 - DNA, 25 bp, Homo sapien
ttctggagaaatcttgtctcgagca

SEQ ID NO: 5109725 - DNA, 25 bp, Homo sapien
gaaatcttgtctcgagcacttatag

SEQ ID NO: 5109726 - DNA, 25 bp, Homo sapien
tgtctcgagcacttatagtcactct

SEQ ID NO: 5109727 - DNA, 25 bp, Homo sapien
gctgtcctgtggcagttacacgcac

SEQ ID NO: 5109728 - DNA, 25 bp, Homo sapien
cagagttttggagtgtgcgttgaca

SEQ ID NO: 5109729 - DNA, 25 bp, Homo sapien
gcctgtttggatgcaggacatgata

SEQ ID NO: 5109730 - DNA, 25 bp, Homo sapien
tgtgtgtgaagataaatgggtgcct

SEQ ID NO: 5109731 - DNA, 25 bp, Homo sapien
aggaaacagcagaattcatcaggat

SEQ ID NO: 5109732 - DNA, 25 bp, Homo sapien
gcagaattcatcaggatgctgtcca

SEQ ID NO: 5109733 - DNA, 25 bp, Homo sapien
gatgctgtccagtggctctgaccat

SEQ ID NO: 5109734 - DNA, 25 bp, Homo sapien
gaaacagcagaattcatcaggatgc

SEQ ID NO: 5109735 - DNA, 25 bp, Homo sapien
gcagactgatttggctgagatgaat

SEQ ID NO: 5109736 - DNA, 25 bp, Homo sapien
gtgacgcagacatttgcagactgat

SEQ ID NO: 5109737 - DNA, 25 bp, Homo sapien
tttgcagactgatttggctgagatg

SEQ ID NO: 5109738 - DNA, 25 bp, Homo sapien
gtctgactgtgacgcagacatttgc

SEQ ID NO: 5109739 - DNA, 25 bp, Homo sapien
agccacttggaggaccaggattccc

SEQ ID NO: 5109740 - DNA, 25 bp, Homo sapien
gccacttggaggaccaggattccca

SEQ ID NO: 5109741 - DNA, 25 bp, Homo sapien
cacttggaggaccaggattcccatg

SEQ ID NO: 5109742 - DNA, 25 bp, Homo sapien
acttggaggaccaggattcccatgg

SEQ ID NO: 5109743 - DNA, 25 bp, Homo sapien
tatggaaacaagtggactgtgtgtg

SEQ ID NO: 5109744 - DNA, 25 bp, Homo sapien
agagtttacgggcttggtcgatgat

SEQ ID NO: 5109745 - DNA, 25 bp, Homo sapien
gtgcacagtaagagagtttacgggc

SEQ ID NO: 5109746 - DNA, 25 bp, Homo sapien
tcgatgatgggacagggttgacgga

SEQ ID NO: 5109747 - DNA, 25 bp, Homo sapien
atttctcctgcttttgcaagctgca

SEQ ID NO: 5109748 - DNA, 25 bp, Homo sapien
tccacatatccgtgagaggacaggc

SEQ ID NO: 5109749 - DNA, 25 bp, Homo sapien
ggctgcaggatatctcagatttctc

SEQ ID NO: 5109750 - DNA, 25 bp, Homo sapien
gtctctgttgagtatggtcatttca

SEQ ID NO: 5109751 - DNA, 25 bp, Homo sapien
tgatctgagataacccgttccacca

SEQ ID NO: 5109752 - DNA, 25 bp, Homo sapien
tggctgccgcaggaatttgatctga

SEQ ID NO: 5109753 - DNA, 25 bp, Homo sapien
caggctctaaaggaatgtgtgtcca

SEQ ID NO: 5109754 - DNA, 25 bp, Homo sapien
tggtgtgcatctgcaatgcgcggcc

SEQ ID NO: 5109755 - DNA, 25 bp, Homo sapien
caggtctggcaaatatgggcatcga

SEQ ID NO: 5109756 - DNA, 25 bp, Homo sapien
tctggcaaatatgggcatcgaatag

SEQ ID NO: 5109757 - DNA, 25 bp, Homo sapien
tccaggtctggcaaatatgggcatc

SEQ ID NO: 5109758 - DNA, 25 bp, Homo sapien
cagtccaggtctggcaaatatgggc

SEQ ID NO: 5109759 - DNA, 25 bp, Homo sapien
tcaggctctgcttgcccaccctagc

SEQ ID NO: 5109760 - DNA, 25 bp, Homo sapien
cacactcaggctctgcttgcccacc

SEQ ID NO: 5109761 - DNA, 25 bp, Homo sapien
actcaggctctgcttgcccacccta

SEQ ID NO: 5109762 - DNA, 25 bp, Homo sapien
caggctctgcttgcccaccctagcc

SEQ ID NO: 5109763 - DNA, 25 bp, Homo sapien
tgtgagtataaattggcattttgac

SEQ ID NO: 5109764 - DNA, 25 bp, Homo sapien
tgagtataaattggcattttgacag

SEQ ID NO: 5109765 - DNA, 25 bp, Homo sapien
ccttgtgagtataaattggcatttt

SEQ ID NO: 5109766 - DNA, 25 bp, Homo sapien
tataaattggcattttgacagccat

SEQ ID NO: 5109767 - DNA, 25 bp, Homo sapien
caaagcctacttccgctggggaaag

SEQ ID NO: 5109768 - DNA, 25 bp, Homo sapien
aagcactccagagtttatcaaagcc

SEQ ID NO: 5109769 - DNA, 25 bp, Homo sapien
ttatcaaagcctacttccgctgggg

SEQ ID NO: 5109770 - DNA, 25 bp, Homo sapien
gcactccagagtttatcaaagccta

SEQ ID NO: 5109771 - DNA, 25 bp, Homo sapien
cacatacttgtacacgctcttttgt

SEQ ID NO: 5109772 - DNA, 25 bp, Homo sapien
ggagaagcttccttcacccattcca

SEQ ID NO: 5109773 - DNA, 25 bp, Homo sapien
cttgtacacgctcttttgtcttttg

SEQ ID NO: 5109774 - DNA, 25 bp, Homo sapien
aggggagaagcttccttcacccatt

SEQ ID NO: 5109775 - DNA, 25 bp, Homo sapien
gaagcctcagtgttgccttataagg

SEQ ID NO: 5109776 - DNA, 25 bp, Homo sapien
gcacagggcaaacctccggtatcta

SEQ ID NO: 5109777 - DNA, 25 bp, Homo sapien
tctggcaatgtgaccctgggccacg

SEQ ID NO: 5109778 - DNA, 25 bp, Homo sapien
ggcacctgctattttacttccgtta

SEQ ID NO: 5109779 - DNA, 25 bp, Homo sapien
ctgtagcatgccattcacaaagtgg

SEQ ID NO: 5109780 - DNA, 25 bp, Homo sapien
atccctgtagcatgccattcacaaa

SEQ ID NO: 5109781 - DNA, 25 bp, Homo sapien
tccctgtagcatgccattcacaaag

SEQ ID NO: 5109782 - DNA, 25 bp, Homo sapien
cctgtagcatgccattcacaaagtg

SEQ ID NO: 5109783 - DNA, 25 bp, Homo sapien
ggtgtctcataccccacacaacagc

SEQ ID NO: 5109784 - DNA, 25 bp, Homo sapien
tgtctcataccccacacaacagcat

SEQ ID NO: 5109785 - DNA, 25 bp, Homo sapien
ctcataccccacacaacagcatgca

SEQ ID NO: 5109786 - DNA, 25 bp, Homo sapien
gtctcataccccacacaacagcatg

SEQ ID NO: 5109787 - DNA, 25 bp, Homo sapien
gccagggatggggttaggacgaaga

SEQ ID NO: 5109788 - DNA, 25 bp, Homo sapien
ggacgaagaccccaaggatggaaga

SEQ ID NO: 5109789 - DNA, 25 bp, Homo sapien
ttaggacgaagaccccaaggatgga

SEQ ID NO: 5109790 - DNA, 25 bp, Homo sapien
gacgaagaccccaaggatggaagat

SEQ ID NO: 5109791 - DNA, 25 bp, Homo sapien
aatttgagtcccaaaagatccatac

SEQ ID NO: 5109792 - DNA, 25 bp, Homo sapien
tacaaaggatggttgaaacggatgt

SEQ ID NO: 5109793 - DNA, 25 bp, Homo sapien
aagatccatacaaaggatggttgaa

SEQ ID NO: 5109794 - DNA, 25 bp, Homo sapien
ccaatatggataatttgagtcccaa

SEQ ID NO: 5109795 - DNA, 25 bp, Homo sapien
aaaatattgttgtctcggatgctga

SEQ ID NO: 5109796 - DNA, 25 bp, Homo sapien
gaaaatattgttgtctcggatgctg

SEQ ID NO: 5109797 - DNA, 25 bp, Homo sapien
aaatattgttgtctcggatgctgac

SEQ ID NO: 5109798 - DNA, 25 bp, Homo sapien
agcaacacagcagaaacacgtcatt

SEQ ID NO: 5109799 - DNA, 25 bp, Homo sapien
cttaaagcaacacagcagaaacacg

SEQ ID NO: 5109800 - DNA, 25 bp, Homo sapien
taaagcaacacagcagaaacacgtc

SEQ ID NO: 5109801 - DNA, 25 bp, Homo sapien
aacacagcagaaacacgtcattcat

SEQ ID NO: 5109802 - DNA, 25 bp, Homo sapien
ccaaacttgggaagactgccttgtc

SEQ ID NO: 5109803 - DNA, 25 bp, Homo sapien
cttgtccagggccttgctaatgtca

SEQ ID NO: 5109804 - DNA, 25 bp, Homo sapien
gccttgctaatgtcatccaaacttg

SEQ ID NO: 5109805 - DNA, 25 bp, Homo sapien
tccaaacttgggaagactgccttgt

SEQ ID NO: 5109806 - DNA, 25 bp, Homo sapien
tgctaagttcttgacccagctgggt

SEQ ID NO: 5109807 - DNA, 25 bp, Homo sapien
taggtggggtcatctctgcacatgt

SEQ ID NO: 5109808 - DNA, 25 bp, Homo sapien
gccgcgagtagacgggtaatactta

SEQ ID NO: 5109809 - DNA, 25 bp, Homo sapien
cccagctgggtaaaacagtgtaagt

SEQ ID NO: 5109810 - DNA, 25 bp, Homo sapien
gtcccataaaggacagaagttggat

SEQ ID NO: 5109811 - DNA, 25 bp, Homo sapien
ttggagtcaattgccagggcagtac

SEQ ID NO: 5109812 - DNA, 25 bp, Homo sapien
agaattggagtcaattgccagggca

SEQ ID NO: 5109813 - DNA, 25 bp, Homo sapien
cgcagatgaagagtcccataaagga

SEQ ID NO: 5109814 - DNA, 25 bp, Homo sapien
aggtgagtccacatgccagacagcc

SEQ ID NO: 5109815 - DNA, 25 bp, Homo sapien
ggtgagtccacatgccagacagccc

SEQ ID NO: 5109816 - DNA, 25 bp, Homo sapien
tcaggccaggtgagtccacatgcca

SEQ ID NO: 5109817 - DNA, 25 bp, Homo sapien
gccaggtgagtccacatgccagaca

SEQ ID NO: 5109818 - DNA, 25 bp, Homo sapien
actaaaaggagcagcttcccacagg

SEQ ID NO: 5109819 - DNA, 25 bp, Homo sapien
gaagactaaaaggagcagcttccca

SEQ ID NO: 5109820 - DNA, 25 bp, Homo sapien
agaaggtagaagactaaaaggagca

SEQ ID NO: 5109821 - DNA, 25 bp, Homo sapien
ggtagaagactaaaaggagcagctt

SEQ ID NO: 5109822 - DNA, 25 bp, Homo sapien
acatctgcgcatgtgtctctaacac

SEQ ID NO: 5109823 - DNA, 25 bp, Homo sapien
tctgcgcatgtgtctctaacactcc

SEQ ID NO: 5109824 - DNA, 25 bp, Homo sapien
atgtgtctctaacactccttcccca

SEQ ID NO: 5109825 - DNA, 25 bp, Homo sapien
catgtgtctctaacactccttcccc

SEQ ID NO: 5109826 - DNA, 25 bp, Homo sapien
ggaaaccagtcccagctggaaagcg

SEQ ID NO: 5109827 - DNA, 25 bp, Homo sapien
aaccagtcccagctggaaagcgagt

SEQ ID NO: 5109828 - DNA, 25 bp, Homo sapien
ccagtcccagctggaaagcgagtat

SEQ ID NO: 5109829 - DNA, 25 bp, Homo sapien
gaaaccagtcccagctggaaagcga

SEQ ID NO: 5109830 - DNA, 25 bp, Homo sapien
gacaagtcctctaaggtctagaggg

SEQ ID NO: 5109831 - DNA, 25 bp, Homo sapien
cttgacaagtcctctaaggtctaga

SEQ ID NO: 5109832 - DNA, 25 bp, Homo sapien
atgcacatcgggagggcagcaggcc

SEQ ID NO: 5109833 - DNA, 25 bp, Homo sapien
ccaatgacagccaagtgtgatgatg

SEQ ID NO: 5109834 - DNA, 25 bp, Homo sapien
aaagacttcttggtaatcctccaag

SEQ ID NO: 5109835 - DNA, 25 bp, Homo sapien
tgggacacagtcctaatccagtaac

SEQ ID NO: 5109836 - DNA, 25 bp, Homo sapien
caagtgcccaaagattctttcaggg

SEQ ID NO: 5109837 - DNA, 25 bp, Homo sapien
ctttcagggtagatctgctcaggaa

SEQ ID NO: 5109838 - DNA, 25 bp, Homo sapien
cccacggtcctgagtttggacacag

SEQ ID NO: 5109839 - DNA, 25 bp, Homo sapien
tacccacggtcctgagtttggacac

SEQ ID NO: 5109840 - DNA, 25 bp, Homo sapien
ccatacccacggtcctgagtttgga

SEQ ID NO: 5109841 - DNA, 25 bp, Homo sapien
cacggtcctgagtttggacacagct

SEQ ID NO: 5109842 - DNA, 25 bp, Homo sapien
cagagtgagcaggtagccagaaaat

SEQ ID NO: 5109843 - DNA, 25 bp, Homo sapien
cacagagtgagcaggtagccagaaa

SEQ ID NO: 5109844 - DNA, 25 bp, Homo sapien
ggtctctccgccccaagcagacagc

SEQ ID NO: 5109845 - DNA, 25 bp, Homo sapien
tgggtctctccgccccaagcagaca

SEQ ID NO: 5109846 - DNA, 25 bp, Homo sapien
atcagcactgaaaggcccgggttcc

SEQ ID NO: 5109847 - DNA, 25 bp, Homo sapien
tagagcccatcagcactgaaaggcc

SEQ ID NO: 5109848 - DNA, 25 bp, Homo sapien
gccagaggacccagtgctgtggtct

SEQ ID NO: 5109849 - DNA, 25 bp, Homo sapien
taagtccatggacagctacagctct

SEQ ID NO: 5109850 - DNA, 25 bp, Homo sapien
tctttctgagcaaactgcacaccag

SEQ ID NO: 5109851 - DNA, 25 bp, Homo sapien
tgtctttctgagcaaactgcacacc

SEQ ID NO: 5109852 - DNA, 25 bp, Homo sapien
gatggtccccagtcaagtggttcat

SEQ ID NO: 5109853 - DNA, 25 bp, Homo sapien
tgcacaccagtctgatggtcctttt

SEQ ID NO: 5109854 - DNA, 25 bp, Homo sapien
cttcctcaatttctcctatctgtgc

SEQ ID NO: 5109855 - DNA, 25 bp, Homo sapien
cctcaatttctcctatctgtgccat

SEQ ID NO: 5109856 - DNA, 25 bp, Homo sapien
tcctcaatttctcctatctgtgcca

SEQ ID NO: 5109857 - DNA, 25 bp, Homo sapien
ttcctcaatttctcctatctgtgcc

SEQ ID NO: 5109858 - DNA, 25 bp, Homo sapien
ttctcatatttgtacttaaccaggt

SEQ ID NO: 5109859 - DNA, 25 bp, Homo sapien
caggttgactcaaactaggtgttat

SEQ ID NO: 5109860 - DNA, 25 bp, Homo sapien
cttctcatatttgtacttaaccagg

SEQ ID NO: 5109861 - DNA, 25 bp, Homo sapien
taaccaggttgactcaaactaggtg

SEQ ID NO: 5109862 - DNA, 25 bp, Homo sapien
cttgtcttcacgaaagcagtggaca

SEQ ID NO: 5109863 - DNA, 25 bp, Homo sapien
ttgtcttcacgaaagcagtggacag

SEQ ID NO: 5109864 - DNA, 25 bp, Homo sapien
agctagaaagactccaagaagtcca

SEQ ID NO: 5109865 - DNA, 25 bp, Homo sapien
gagctagaaagactccaagaagtcc

SEQ ID NO: 5109866 - DNA, 25 bp, Homo sapien
ggagctagaaagactccaagaagtc

SEQ ID NO: 5109867 - DNA, 25 bp, Homo sapien
tatcacatttccttgcaaatgcatt

SEQ ID NO: 5109868 - DNA, 25 bp, Homo sapien
tccttgcaaatgcattttggtagca

SEQ ID NO: 5109869 - DNA, 25 bp, Homo sapien
ctgaagtttataagagattgagagt

SEQ ID NO: 5109870 - DNA, 25 bp, Homo sapien
agagattgagagtgatttaatatca

SEQ ID NO: 5109871 - DNA, 25 bp, Homo sapien
cattgttgacactcactgactgctg

SEQ ID NO: 5109872 - DNA, 25 bp, Homo sapien
ggagtcccatccgttgttattgtca

SEQ ID NO: 5109873 - DNA, 25 bp, Homo sapien
gtcaacattggccacattgtgttca

SEQ ID NO: 5109874 - DNA, 25 bp, Homo sapien
ttccataatcccagatggaattcca

SEQ ID NO: 5109875 - DNA, 25 bp, Homo sapien
tgggaactccaagatcgtgatgagc

SEQ ID NO: 5109876 - DNA, 25 bp, Homo sapien
gaggcatgtgttctccgaggagctt

SEQ ID NO: 5109877 - DNA, 25 bp, Homo sapien
aaagtagatggcaaatagtgaggca

SEQ ID NO: 5109878 - DNA, 25 bp, Homo sapien
gaggagcttttcttatcagaggtca

SEQ ID NO: 5109879 - DNA, 25 bp, Homo sapien
tggagggcatgacttccttgttcat

SEQ ID NO: 5109880 - DNA, 25 bp, Homo sapien
ggattgaatggagggcatgacttcc

SEQ ID NO: 5109881 - DNA, 25 bp, Homo sapien
gaccagtgcatcaagggattgaatg

SEQ ID NO: 5109882 - DNA, 25 bp, Homo sapien
cttttgaaagagtctggttgcagca

SEQ ID NO: 5109883 - DNA, 25 bp, Homo sapien
gagctttgctcctctaacagtcaag

SEQ ID NO: 5109884 - DNA, 25 bp, Homo sapien
cactcacctggattagtatggccag

SEQ ID NO: 5109885 - DNA, 25 bp, Homo sapien
tactgaggctcctattggtgtgacc

SEQ ID NO: 5109886 - DNA, 25 bp, Homo sapien
aatgtccttggcaaagtactgaggc

SEQ ID NO: 5109887 - DNA, 25 bp, Homo sapien
catcgactttgtttgggttgactga

SEQ ID NO: 5109888 - DNA, 25 bp, Homo sapien
tcagccatgtatgttggaatcccac

SEQ ID NO: 5109889 - DNA, 25 bp, Homo sapien
ggaatcccacgacacatgtttgcaa

SEQ ID NO: 5109890 - DNA, 25 bp, Homo sapien
tgttttttccgaacttgctcaggtc

SEQ ID NO: 5109891 - DNA, 25 bp, Homo sapien
tcactggtgcccactatggacacgc

SEQ ID NO: 5109892 - DNA, 25 bp, Homo sapien
caaaatgcttggaattgacccaggc

SEQ ID NO: 5109893 - DNA, 25 bp, Homo sapien
gacacgcgcgaggatagtctgacaa

SEQ ID NO: 5109894 - DNA, 25 bp, Homo sapien
agcactgcacaaatgttggccttga

SEQ ID NO: 5109895 - DNA, 25 bp, Homo sapien
ccacaatccatagtacactggtcgt

SEQ ID NO: 5109896 - DNA, 25 bp, Homo sapien
catagtacactggtcgtgtagcacg

SEQ ID NO: 5109897 - DNA, 25 bp, Homo sapien
agtacactggtcgtgtagcacgttc

SEQ ID NO: 5109898 - DNA, 25 bp, Homo sapien
tccaccgtgtctccacagaaggaaa

SEQ ID NO: 5109899 - DNA, 25 bp, Homo sapien
tcagatgactaaatccatagtggct

SEQ ID NO: 5109900 - DNA, 25 bp, Homo sapien
attcagatgactaaatccatagtgg

SEQ ID NO: 5109901 - DNA, 25 bp, Homo sapien
gactaaatccatagtggctttaaaa

SEQ ID NO: 5109902 - DNA, 25 bp, Homo sapien
gatgactaaatccatagtggcttta

SEQ ID NO: 5109903 - DNA, 25 bp, Homo sapien
cattccaagtcataagaaattgtaa

SEQ ID NO: 5109904 - DNA, 25 bp, Homo sapien
attccaagtcataagaaattgtaag

SEQ ID NO: 5109905 - DNA, 25 bp, Homo sapien
caggagacaggtcttgaatataggc

SEQ ID NO: 5109906 - DNA, 25 bp, Homo sapien
acaggtcttgaatataggctagcag

SEQ ID NO: 5109907 - DNA, 25 bp, Homo sapien
ctttacaggagacaggtcttgaata

SEQ ID NO: 5109908 - DNA, 25 bp, Homo sapien
ggtcttgaatataggctagcagttg

SEQ ID NO: 5109909 - DNA, 25 bp, Homo sapien
tgtgcacaacaactatagagcagcc

SEQ ID NO: 5109910 - DNA, 25 bp, Homo sapien
tcttgcttatgtgactctgagtgaa

SEQ ID NO: 5109911 - DNA, 25 bp, Homo sapien
gctgatctgaaacgttactgtgcac

SEQ ID NO: 5109912 - DNA, 25 bp, Homo sapien
cagttggagagtattggaaccattc

SEQ ID NO: 5109913 - DNA, 25 bp, Homo sapien
gagaaaaggtaacgcgtggcttcag

SEQ ID NO: 5109914 - DNA, 25 bp, Homo sapien
gagttattacctcttgaactggaaa

SEQ ID NO: 5109915 - DNA, 25 bp, Homo sapien
cgcaatatgcgaaaaagagggaagt

SEQ ID NO: 5109916 - DNA, 25 bp, Homo sapien
gacatgtaaacacgagagatgaggc

SEQ ID NO: 5109917 - DNA, 25 bp, Homo sapien
catgtttcacccactgaacctagag

SEQ ID NO: 5109918 - DNA, 25 bp, Homo sapien
taccattgattaaaaagcccatgtt

SEQ ID NO: 5109919 - DNA, 25 bp, Homo sapien
gagtgcaacctgtgtcctattccag

SEQ ID NO: 5109920 - DNA, 25 bp, Homo sapien
cattgttctgcaccagtaacttggc

SEQ ID NO: 5109921 - DNA, 25 bp, Homo sapien
ctaatctgcaaatgattcgtggtcc

SEQ ID NO: 5109922 - DNA, 25 bp, Homo sapien
caggagagcaggtgattgaagcaac

SEQ ID NO: 5109923 - DNA, 25 bp, Homo sapien
gcaaatgattcgtggtccatgccag

SEQ ID NO: 5109924 - DNA, 25 bp, Homo sapien
ccagcttccatttcactccggtaac

SEQ ID NO: 5109925 - DNA, 25 bp, Homo sapien
tcgggtttcaaggatcccaatcctg

SEQ ID NO: 5109926 - DNA, 25 bp, Homo sapien
caatcctgtcctccgcttcttttaa

SEQ ID NO: 5109927 - DNA, 25 bp, Homo sapien
tttccgctccgatgctgtttctggg

SEQ ID NO: 5109928 - DNA, 25 bp, Homo sapien
ggccgcgccgagcttttgcaatgga

SEQ ID NO: 5109929 - DNA, 25 bp, Homo sapien
gtccgctccttcccacgctccgcga

SEQ ID NO: 5109930 - DNA, 25 bp, Homo sapien
ggtccgctccttcccacgctccgcg

SEQ ID NO: 5109931 - DNA, 25 bp, Homo sapien
tccgctccttcccacgctccgcgaa

SEQ ID NO: 5109932 - DNA, 25 bp, Homo sapien
ctccttcccacgctccgcgaactcg

SEQ ID NO: 5109933 - DNA, 25 bp, Homo sapien
ctggaagccgatgccgagggctctc

SEQ ID NO: 5109934 - DNA, 25 bp, Homo sapien
tcaaatccgccgtagcaggctggac

SEQ ID NO: 5109935 - DNA, 25 bp, Homo sapien
caaaatgaagtacaggtcaaatccg

SEQ ID NO: 5109936 - DNA, 25 bp, Homo sapien
tgagcaccagagtggccaaagagag

SEQ ID NO: 5109937 - DNA, 25 bp, Homo sapien
gaaaaggagttagtcttgatggcta

SEQ ID NO: 5109938 - DNA, 25 bp, Homo sapien
tccttgaatgtggaaaggtataact

SEQ ID NO: 5109939 - DNA, 25 bp, Homo sapien
ccacctcaggaattttgtttaatca

SEQ ID NO: 5109940 - DNA, 25 bp, Homo sapien
ggtataacttggcttggcatttgct

SEQ ID NO: 5109941 - DNA, 25 bp, Homo sapien
gaaattatgagaattccttaaacat

SEQ ID NO: 5109942 - DNA, 25 bp, Homo sapien
tcatatggtgccacaattgaccttt

SEQ ID NO: 5109943 - DNA, 25 bp, Homo sapien
tctcctgtttcacaaatttactgtt

SEQ ID NO: 5109944 - DNA, 25 bp, Homo sapien
taacttaattgaagtcatatggtgc

SEQ ID NO: 5109945 - DNA, 25 bp, Homo sapien
gcattgaaagtttcttctagactat

SEQ ID NO: 5109946 - DNA, 25 bp, Homo sapien
atttggtcctttgaatagctatttt

SEQ ID NO: 5109947 - DNA, 25 bp, Homo sapien
gagattatcacttggtgagcctact

SEQ ID NO: 5109948 - DNA, 25 bp, Homo sapien
tctagactatactttagcaatgaaa

SEQ ID NO: 5109949 - DNA, 25 bp, Homo sapien
tgtcagagaccctgcattcatttgc

SEQ ID NO: 5109950 - DNA, 25 bp, Homo sapien
tcagcagcttcaggcgcatgtaagt

SEQ ID NO: 5109951 - DNA, 25 bp, Homo sapien
ctgtcagagaccctgcattcatttg

SEQ ID NO: 5109952 - DNA, 25 bp, Homo sapien
atgtaagtgggactcacacttgatt

SEQ ID NO: 5109953 - DNA, 25 bp, Homo sapien
gattctagggcatagctgcttggtg

SEQ ID NO: 5109954 - DNA, 25 bp, Homo sapien
agatgggtcactgattctagggcat

SEQ ID NO: 5109955 - DNA, 25 bp, Homo sapien
tcactgattctagggcatagctgct

SEQ ID NO: 5109956 - DNA, 25 bp, Homo sapien
tctagggcatagctgcttggtgact

SEQ ID NO: 5109957 - DNA, 25 bp, Homo sapien
gatactgggtggcaatcggtcttaa

SEQ ID NO: 5109958 - DNA, 25 bp, Homo sapien
ctgggtggcaatcggtcttaaagaa

SEQ ID NO: 5109959 - DNA, 25 bp, Homo sapien
atcccctgatactgggtggcaatcg

SEQ ID NO: 5109960 - DNA, 25 bp, Homo sapien
tggcaatcggtcttaaagaaatttc

SEQ ID NO: 5109961 - DNA, 25 bp, Homo sapien
ctgatgaatttgtgagccaactgtt

SEQ ID NO: 5109962 - DNA, 25 bp, Homo sapien
gaatttgtgagccaactgttccaca

SEQ ID NO: 5109963 - DNA, 25 bp, Homo sapien
aaagtaatagatttcattccagtgg

SEQ ID NO: 5109964 - DNA, 25 bp, Homo sapien
ttcattccagtggtgcagcacactt

SEQ ID NO: 5109965 - DNA, 25 bp, Homo sapien
ggattacgagtaagaatgataaact

SEQ ID NO: 5109966 - DNA, 25 bp, Homo sapien
tacgagtaagaatgataaacttcat

SEQ ID NO: 5109967 - DNA, 25 bp, Homo sapien
gcttagtgagtgtggattacgagta

SEQ ID NO: 5109968 - DNA, 25 bp, Homo sapien
ctgatatcattgcttagtgagtgtg

SEQ ID NO: 5109969 - DNA, 25 bp, Homo sapien
aacaataaaggacattctcaactgt

SEQ ID NO: 5109970 - DNA, 25 bp, Homo sapien
aaacaataaaggacattctcaactg

SEQ ID NO: 5109971 - DNA, 25 bp, Homo sapien
acaataaaggacattctcaactgtg

SEQ ID NO: 5109972 - DNA, 25 bp, Homo sapien
cagtacaaagtacaggagttggacc

SEQ ID NO: 5109973 - DNA, 25 bp, Homo sapien
gaaatgacccacactaccatgaggt

SEQ ID NO: 5109974 - DNA, 25 bp, Homo sapien
tatccagggactcatatgcagtagt

SEQ ID NO: 5109975 - DNA, 25 bp, Homo sapien
aagactctccttggagtatccaggg

SEQ ID NO: 5109976 - DNA, 25 bp, Homo sapien
gatgaaatgtatagcgggcataggc

SEQ ID NO: 5109977 - DNA, 25 bp, Homo sapien
aagcccatgaagatgaaatgtatag

SEQ ID NO: 5109978 - DNA, 25 bp, Homo sapien
gaagatgaaatgtatagcgggcata

SEQ ID NO: 5109979 - DNA, 25 bp, Homo sapien
catgaagatgaaatgtatagcgggc

SEQ ID NO: 5109980 - DNA, 25 bp, Homo sapien
cctttgaatcactgttgggcctact

SEQ ID NO: 5109981 - DNA, 25 bp, Homo sapien
tttgaatcactgttgggcctactgt

SEQ ID NO: 5109982 - DNA, 25 bp, Homo sapien
tgaatcactgttgggcctactgtga

SEQ ID NO: 5109983 - DNA, 25 bp, Homo sapien
ggtgggatttgtccaggaggatttg

SEQ ID NO: 5109984 - DNA, 25 bp, Homo sapien
caaactctgttgtttggtaatgaga

SEQ ID NO: 5109985 - DNA, 25 bp, Homo sapien
atattccaataaatcccatcaaaag

SEQ ID NO: 5109986 - DNA, 25 bp, Homo sapien
ttggtaatgagaaagggcatatatc

SEQ ID NO: 5109987 - DNA, 25 bp, Homo sapien
taaatcccatcaaaaggcatacttt

SEQ ID NO: 5109988 - DNA, 25 bp, Homo sapien
cttcatgcatgtaagtgtctcctcc

SEQ ID NO: 5109989 - DNA, 25 bp, Homo sapien
ttcttctaggccttgacggatttgt

SEQ ID NO: 5109990 - DNA, 25 bp, Homo sapien
cttctaggccttgacggatttgttc

SEQ ID NO: 5109991 - DNA, 25 bp, Homo sapien
ttctaggccttgacggatttgttct

SEQ ID NO: 5109992 - DNA, 25 bp, Homo sapien
tgtctgttttcataataaatctgct

SEQ ID NO: 5109993 - DNA, 25 bp, Homo sapien
gttttcataataaatctgctcactg

SEQ ID NO: 5109994 - DNA, 25 bp, Homo sapien
tttcataataaatctgctcactggc

SEQ ID NO: 5109995 - DNA, 25 bp, Homo sapien
ctgttttcataataaatctgctcac

SEQ ID NO: 5109996 - DNA, 25 bp, Homo sapien
tagcagttggcaaaacctactagaa

SEQ ID NO: 5109997 - DNA, 25 bp, Homo sapien
gacagtttggtgaaagtaatagtca

SEQ ID NO: 5109998 - DNA, 25 bp, Homo sapien
tgctgtaatggaccacatacaccac

SEQ ID NO: 5109999 - DNA, 25 bp, Homo sapien
catgatttacaagttgactggaaga

SEQ ID NO: 5110000 - DNA, 25 bp, Homo sapien
atcagtcaaagcaatgatgacgctg

SEQ ID NO: 5110001 - DNA, 25 bp, Homo sapien
ctccatcagtcaaagcaatgatgac

SEQ ID NO: 5110002 - DNA, 25 bp, Homo sapien
aatgatgacgctggctgtcctgtac

SEQ ID NO: 5110003 - DNA, 25 bp, Homo sapien
caatgatgacgctggctgtcctgta

SEQ ID NO: 5110004 - DNA, 25 bp, Homo sapien
gaaatctttcacaccaacacagtaa

SEQ ID NO: 5110005 - DNA, 25 bp, Homo sapien
cacagtaaacaattgcaccaagatc

SEQ ID NO: 5110006 - DNA, 25 bp, Homo sapien
tcacaccaacacagtaaacaattgc

SEQ ID NO: 5110007 - DNA, 25 bp, Homo sapien
caccaagatctcgagacctattagc

SEQ ID NO: 5110008 - DNA, 25 bp, Homo sapien
cctgtataccaagctaatcaggagg

SEQ ID NO: 5110009 - DNA, 25 bp, Homo sapien
ctgtataccaagctaatcaggaggc

SEQ ID NO: 5110010 - DNA, 25 bp, Homo sapien
tgaatcaagcagattcaagttccct

SEQ ID NO: 5110011 - DNA, 25 bp, Homo sapien
caactttatctgaatcaagcagatt

SEQ ID NO: 5110012 - DNA, 25 bp, Homo sapien
gaatcaagcagattcaagttccctt

SEQ ID NO: 5110013 - DNA, 25 bp, Homo sapien
atctgaatcaagcagattcaagttc

SEQ ID NO: 5110014 - DNA, 25 bp, Homo sapien
taagagcgcccagcttgatgaacgc

SEQ ID NO: 5110015 - DNA, 25 bp, Homo sapien
caatacttttctcctcgggagcaga

SEQ ID NO: 5110016 - DNA, 25 bp, Homo sapien
tgatgaacgcttggcctgggttgat

SEQ ID NO: 5110017 - DNA, 25 bp, Homo sapien
caggccaagggttggctccagcttt

SEQ ID NO: 5110018 - DNA, 25 bp, Homo sapien
gagactgttaggcttggatgtggaa

SEQ ID NO: 5110019 - DNA, 25 bp, Homo sapien
tacacaaacacatggggagactgtt

SEQ ID NO: 5110020 - DNA, 25 bp, Homo sapien
ggaatatgaggccttcactgggctc

SEQ ID NO: 5110021 - DNA, 25 bp, Homo sapien
ggggctctagttatattcagaaccc

SEQ ID NO: 5110022 - DNA, 25 bp, Homo sapien
tgatccttactgtccgcaatccggg

SEQ ID NO: 5110023 - DNA, 25 bp, Homo sapien
gcagagcctgaaagccgtcattcac

SEQ ID NO: 5110024 - DNA, 25 bp, Homo sapien
tgagtggatgatgccttgcagagcc

SEQ ID NO: 5110025 - DNA, 25 bp, Homo sapien
tcattcacgggaaacacatgatcct

SEQ ID NO: 5110026 - DNA, 25 bp, Homo sapien
cctgaatgtctagtctcagaggaag

SEQ ID NO: 5110027 - DNA, 25 bp, Homo sapien
gacggaaggtgcctgaatgtctagt

SEQ ID NO: 5110028 - DNA, 25 bp, Homo sapien
gggtattaatagcagatcagagacg

SEQ ID NO: 5110029 - DNA, 25 bp, Homo sapien
taatagcagatcagagacggaaggt

SEQ ID NO: 5110030 - DNA, 25 bp, Homo sapien
gccctggaagccagtgtcctgttta

SEQ ID NO: 5110031 - DNA, 25 bp, Homo sapien
tgtatgggaggtggagaatagaggc

SEQ ID NO: 5110032 - DNA, 25 bp, Homo sapien
ggaggtggagaatagaggccctgga

SEQ ID NO: 5110033 - DNA, 25 bp, Homo sapien
ggccctggaagccagtgtcctgttt

SEQ ID NO: 5110034 - DNA, 25 bp, Homo sapien
cagtagcatccaatattctatttgg

SEQ ID NO: 5110035 - DNA, 25 bp, Homo sapien
taagacagtagcatccaatattcta

SEQ ID NO: 5110036 - DNA, 25 bp, Homo sapien
ggctttaagacagtagcatccaata

SEQ ID NO: 5110037 - DNA, 25 bp, Homo sapien
ctgaggctttaagacagtagcatcc

SEQ ID NO: 5110038 - DNA, 25 bp, Homo sapien
ccactctgcattccactctgctgga

SEQ ID NO: 5110039 - DNA, 25 bp, Homo sapien
ttcccactctgcattccactctgct

SEQ ID NO: 5110040 - DNA, 25 bp, Homo sapien
actctgcattccactctgctggagc

SEQ ID NO: 5110041 - DNA, 25 bp, Homo sapien
tctgcattccactctgctggagctc

SEQ ID NO: 5110042 - DNA, 25 bp, Homo sapien
tgcaaacaagcacttcttgaataaa

SEQ ID NO: 5110043 - DNA, 25 bp, Homo sapien
cttgaggaggcatatattctttgca

SEQ ID NO: 5110044 - DNA, 25 bp, Homo sapien
ctgtggactgacaactgggtctgat

SEQ ID NO: 5110045 - DNA, 25 bp, Homo sapien
cactttctggttaaggtagcttgag

SEQ ID NO: 5110046 - DNA, 25 bp, Homo sapien
ctttccctggtttttcaatgattcg

SEQ ID NO: 5110047 - DNA, 25 bp, Homo sapien
tcaatgattcgggtctgcgctgcct

SEQ ID NO: 5110048 - DNA, 25 bp, Homo sapien
gtttttcaatgattcgggtctgcgc

SEQ ID NO: 5110049 - DNA, 25 bp, Homo sapien
ggtctgcgctgccttctcatgagga

SEQ ID NO: 5110050 - DNA, 25 bp, Homo sapien
agcgagtgggaaaactgtcgtggtg

SEQ ID NO: 5110051 - DNA, 25 bp, Homo sapien
gcgagtgggaaaactgtcgtggtgc

SEQ ID NO: 5110052 - DNA, 25 bp, Homo sapien
aagcgagtgggaaaactgtcgtggt

SEQ ID NO: 5110053 - DNA, 25 bp, Homo sapien
ggcttcaagggctacaatcttccag

SEQ ID NO: 5110054 - DNA, 25 bp, Homo sapien
gaagccacaatatgagaaggcacag

SEQ ID NO: 5110055 - DNA, 25 bp, Homo sapien
ctcgagggctggtgctaaattcacc

SEQ ID NO: 5110056 - DNA, 25 bp, Homo sapien
cagttgtggtcggtggaaattccct

SEQ ID NO: 5110057 - DNA, 25 bp, Homo sapien
ttcactgcctgaaacacttttgaaa

SEQ ID NO: 5110058 - DNA, 25 bp, Homo sapien
cttttatgcgggttcctgtttcact

SEQ ID NO: 5110059 - DNA, 25 bp, Homo sapien
tgcgggttcctgtttcactgcctga

SEQ ID NO: 5110060 - DNA, 25 bp, Homo sapien
acccagcttttatgcgggttcctgt

SEQ ID NO: 5110061 - DNA, 25 bp, Homo sapien
tcacggtaaccaggccgagtgttgg

SEQ ID NO: 5110062 - DNA, 25 bp, Homo sapien
aggaggagctggcatcacggtaacc

SEQ ID NO: 5110063 - DNA, 25 bp, Homo sapien
gcatcacggtaaccaggccgagtgt

SEQ ID NO: 5110064 - DNA, 25 bp, Homo sapien
gctggcatcacggtaaccaggccga

SEQ ID NO: 5110065 - DNA, 25 bp, Homo sapien
cctcagttgcacaccaagtggggat

SEQ ID NO: 5110066 - DNA, 25 bp, Homo sapien
ttggtttcaggcaccaccctcagtt

SEQ ID NO: 5110067 - DNA, 25 bp, Homo sapien
tcagttgcacaccaagtggggatag

SEQ ID NO: 5110068 - DNA, 25 bp, Homo sapien
gtttcaggcaccaccctcagttgca

SEQ ID NO: 5110069 - DNA, 25 bp, Homo sapien
tccgttgatctcacagtttccctga

SEQ ID NO: 5110070 - DNA, 25 bp, Homo sapien
tagattgattcctcggttccgttga

SEQ ID NO: 5110071 - DNA, 25 bp, Homo sapien
gatggtcatgccacagcttgcgaga

SEQ ID NO: 5110072 - DNA, 25 bp, Homo sapien
cagaaagctctatgtgctgactcac

SEQ ID NO: 5110073 - DNA, 25 bp, Homo sapien
gacagccctgcctgaattgtgaaga

SEQ ID NO: 5110074 - DNA, 25 bp, Homo sapien
gaggcagcggatgtacaagaacttt

SEQ ID NO: 5110075 - DNA, 25 bp, Homo sapien
gctgctacttttgggcgtggaccgt

SEQ ID NO: 5110076 - DNA, 25 bp, Homo sapien
tatagcaccgtattaggactgggac

SEQ ID NO: 5110077 - DNA, 25 bp, Homo sapien
tctatcctgactgtagcatgaaggg

SEQ ID NO: 5110078 - DNA, 25 bp, Homo sapien
gcatccttctgactccgcagttgga

SEQ ID NO: 5110079 - DNA, 25 bp, Homo sapien
catgaagggaatgctccggactccc

SEQ ID NO: 5110080 - DNA, 25 bp, Homo sapien
tctctgttagagtcagcggtcctca

SEQ ID NO: 5110081 - DNA, 25 bp, Homo sapien
gggtgcgaggagtctaacatcttga

SEQ ID NO: 5110082 - DNA, 25 bp, Homo sapien
tctgcttttagctactgagatagag

SEQ ID NO: 5110083 - DNA, 25 bp, Homo sapien
tattaagccagattgtgctagatgc

SEQ ID NO: 5110084 - DNA, 25 bp, Homo sapien
taggaggagcggaaataaaagagtc

SEQ ID NO: 5110085 - DNA, 25 bp, Homo sapien
gctagaatttcgatgcaggacttct

SEQ ID NO: 5110086 - DNA, 25 bp, Homo sapien
agaatttcgatgcaggacttcttca

SEQ ID NO: 5110087 - DNA, 25 bp, Homo sapien
gctgctagaatttcgatgcaggact

SEQ ID NO: 5110088 - DNA, 25 bp, Homo sapien
tcagctgctagaatttcgatgcagg

SEQ ID NO: 5110089 - DNA, 25 bp, Homo sapien
ccttttctccttggagcaaatttgg

SEQ ID NO: 5110090 - DNA, 25 bp, Homo sapien
tacatacgtgacttgaactcaaaat

SEQ ID NO: 5110091 - DNA, 25 bp, Homo sapien
ccttggagcaaatttggttagcaat

SEQ ID NO: 5110092 - DNA, 25 bp, Homo sapien
caacaatgaagtacatacgtgactt

SEQ ID NO: 5110093 - DNA, 25 bp, Homo sapien
gattataggcaagcgccatcacacc

SEQ ID NO: 5110094 - DNA, 25 bp, Homo sapien
attataggcaagcgccatcacacct

SEQ ID NO: 5110095 - DNA, 25 bp, Homo sapien
aataattgcagtcaaggaactccct

SEQ ID NO: 5110096 - DNA, 25 bp, Homo sapien
caaggagcctacaggaagggaattc

SEQ ID NO: 5110097 - DNA, 25 bp, Homo sapien
ccacctagtgagtgctgggtaccct

SEQ ID NO: 5110098 - DNA, 25 bp, Homo sapien
tcaaataggcaagtatcagtggcat

SEQ ID NO: 5110099 - DNA, 25 bp, Homo sapien
agactgtgctcaggcacagggtgca

SEQ ID NO: 5110100 - DNA, 25 bp, Homo sapien
ttggaggccaactgagtgggaccac

SEQ ID NO: 5110101 - DNA, 25 bp, Homo sapien
tgagtgggaccacagaaagactgtg

SEQ ID NO: 5110102 - DNA, 25 bp, Homo sapien
ttgtgaactgtggaagttggaggcc

SEQ ID NO: 5110103 - DNA, 25 bp, Homo sapien
ccgagtcattgatcttgaagctgca

SEQ ID NO: 5110104 - DNA, 25 bp, Homo sapien
cctctcacgacaacttgaaatgact

SEQ ID NO: 5110105 - DNA, 25 bp, Homo sapien
ccacgttgcgggcatgtcggaagcc

SEQ ID NO: 5110106 - DNA, 25 bp, Homo sapien
tgagtgtgaccgagtcattgatctt

SEQ ID NO: 5110107 - DNA, 25 bp, Homo sapien
tccttgaagccacttgtcgaagaaa

SEQ ID NO: 5110108 - DNA, 25 bp, Homo sapien
ctttccagcaaataagactcttttc

SEQ ID NO: 5110109 - DNA, 25 bp, Homo sapien
cacccaagtggtgccttttctgact

SEQ ID NO: 5110110 - DNA, 25 bp, Homo sapien
tctgactggaaccactgtaagggct

SEQ ID NO: 5110111 - DNA, 25 bp, Homo sapien
ctgagagtgagccactcggtagatg

SEQ ID NO: 5110112 - DNA, 25 bp, Homo sapien
ccactcggtagatggcaggggacaa

SEQ ID NO: 5110113 - DNA, 25 bp, Homo sapien
gccactcggtagatggcaggggaca

SEQ ID NO: 5110114 - DNA, 25 bp, Homo sapien
agagtgagccactcggtagatggca

SEQ ID NO: 5110115 - DNA, 25 bp, Homo sapien
tttcggtttattcaagattaatgca

SEQ ID NO: 5110116 - DNA, 25 bp, Homo sapien
gctcatgtttctgcagtcctaatta

SEQ ID NO: 5110117 - DNA, 25 bp, Homo sapien
ttcacacttacccttaagagtccca

SEQ ID NO: 5110118 - DNA, 25 bp, Homo sapien
gcagtcctaattaaccatcaccagc

SEQ ID NO: 5110119 - DNA, 25 bp, Homo sapien
aactactaaagtgggttttatgatg

SEQ ID NO: 5110120 - DNA, 25 bp, Homo sapien
tttatgatgtcaagaaggaaatatc

SEQ ID NO: 5110121 - DNA, 25 bp, Homo sapien
agcatgtgtctgtttaactactaaa

SEQ ID NO: 5110122 - DNA, 25 bp, Homo sapien
tttggaattactccaaggccaggaa

SEQ ID NO: 5110123 - DNA, 25 bp, Homo sapien
tgtttttgtgtgatgccttggcaca

SEQ ID NO: 5110124 - DNA, 25 bp, Homo sapien
taaatgattggtgtatcctgctgga

SEQ ID NO: 5110125 - DNA, 25 bp, Homo sapien
tgattggtgtatcctgctggagcct

SEQ ID NO: 5110126 - DNA, 25 bp, Homo sapien
gcttccttgcccaattaaatgattg

SEQ ID NO: 5110127 - DNA, 25 bp, Homo sapien
gggctagtttcttgacttggtgctt

SEQ ID NO: 5110128 - DNA, 25 bp, Homo sapien
acattttggggctagtttcttgact

SEQ ID NO: 5110129 - DNA, 25 bp, Homo sapien
aggaagatcacggacacattttggg

SEQ ID NO: 5110130 - DNA, 25 bp, Homo sapien
tctgtagggccacagagatcaggaa

SEQ ID NO: 5110131 - DNA, 25 bp, Homo sapien
ggagaacttgggcacacacttgggc

SEQ ID NO: 5110132 - DNA, 25 bp, Homo sapien
acacttgggccactaaagtgctgtg

SEQ ID NO: 5110133 - DNA, 25 bp, Homo sapien
acttgggcacacacttgggccacta

SEQ ID NO: 5110134 - DNA, 25 bp, Homo sapien
gggcacacacttgggccactaaagt

SEQ ID NO: 5110135 - DNA, 25 bp, Homo sapien
ctttggaattggaactgagtggcaa

SEQ ID NO: 5110136 - DNA, 25 bp, Homo sapien
ggcaagtctaccaaaatggctaaag

SEQ ID NO: 5110137 - DNA, 25 bp, Homo sapien
acgggttatggcaaatgctgactgc

SEQ ID NO: 5110138 - DNA, 25 bp, Homo sapien
cacactcatggccacgggttatggc

SEQ ID NO: 5110139 - DNA, 25 bp, Homo sapien
aatcctgaggtcagaataactgcag

SEQ ID NO: 5110140 - DNA, 25 bp, Homo sapien
tgcacaaggtatgtgtctcctgaca

SEQ ID NO: 5110141 - DNA, 25 bp, Homo sapien
gggttcagcgttcttgcaaagtatt

SEQ ID NO: 5110142 - DNA, 25 bp, Homo sapien
cacgaacccttgtggcagtatacaa

SEQ ID NO: 5110143 - DNA, 25 bp, Homo sapien
cctctaggtggccatttcgctgctc

SEQ ID NO: 5110144 - DNA, 25 bp, Homo sapien
agcctcgctgcagcgtgtgccaaag

SEQ ID NO: 5110145 - DNA, 25 bp, Homo sapien
caaagccagtggtgtcgtgacatat

SEQ ID NO: 5110146 - DNA, 25 bp, Homo sapien
ttcgctgctcactagcaccgggtgg

SEQ ID NO: 5110147 - DNA, 25 bp, Homo sapien
aaaggagtgagaggatgagtgtggc

SEQ ID NO: 5110148 - DNA, 25 bp, Homo sapien
ccttttctgcttgggagaccaaata

SEQ ID NO: 5110149 - DNA, 25 bp, Homo sapien
cttttctgcttgggagaccaaatat

SEQ ID NO: 5110150 - DNA, 25 bp, Homo sapien
agtgagaggatgagtgtggcccagg

SEQ ID NO: 5110151 - DNA, 25 bp, Homo sapien
cacgccgaggagagcatccgaggca

SEQ ID NO: 5110152 - DNA, 25 bp, Homo sapien
cgaggagagcatccgaggcagcgca

SEQ ID NO: 5110153 - DNA, 25 bp, Homo sapien
ctgggtcacgccgaggagagcatcc

SEQ ID NO: 5110154 - DNA, 25 bp, Homo sapien
gagctgggtcacgccgaggagagca

SEQ ID NO: 5110155 - DNA, 25 bp, Homo sapien
tgtccacatagccagcccacagagc

SEQ ID NO: 5110156 - DNA, 25 bp, Homo sapien
cacaggaggccatgtgactctggct

SEQ ID NO: 5110157 - DNA, 25 bp, Homo sapien
tgggagtacagattcctgtccacat

SEQ ID NO: 5110158 - DNA, 25 bp, Homo sapien
atagccagcccacagagccacgggg

SEQ ID NO: 5110159 - DNA, 25 bp, Homo sapien
ttaagataggcgctggacacagtaa

SEQ ID NO: 5110160 - DNA, 25 bp, Homo sapien
ggcgctggacacagtaaataagtat

SEQ ID NO: 5110161 - DNA, 25 bp, Homo sapien
gataggcgctggacacagtaaataa

SEQ ID NO: 5110162 - DNA, 25 bp, Homo sapien
tcttttaagataggcgctggacaca

SEQ ID NO: 5110163 - DNA, 25 bp, Homo sapien
tggtgatgatgacagaactggagat

SEQ ID NO: 5110164 - DNA, 25 bp, Homo sapien
catgctgacctggagtgcagctttc

SEQ ID NO: 5110165 - DNA, 25 bp, Homo sapien
taaaagagaggccatcgttcatgct

SEQ ID NO: 5110166 - DNA, 25 bp, Homo sapien
gatgacagaactggagataaaagag

SEQ ID NO: 5110167 - DNA, 25 bp, Homo sapien
ggtggtatggtcagacataatgaga

SEQ ID NO: 5110168 - DNA, 25 bp, Homo sapien
tgccataccacaagtttagtcctga

SEQ ID NO: 5110169 - DNA, 25 bp, Homo sapien
tagaggcccatgatttaaagttgta

SEQ ID NO: 5110170 - DNA, 25 bp, Homo sapien
tttaaagttgtagccctgtatttgc

SEQ ID NO: 5110171 - DNA, 25 bp, Homo sapien
cccggcctattatacactcttttat

SEQ ID NO: 5110172 - DNA, 25 bp, Homo sapien
tccaactggattttaggctccttaa

SEQ ID NO: 5110173 - DNA, 25 bp, Homo sapien
tttctccaactggattttaggctcc

SEQ ID NO: 5110174 - DNA, 25 bp, Homo sapien
ctggattttaggctccttaaggaca

SEQ ID NO: 5110175 - DNA, 25 bp, Homo sapien
gagatagcctgtttataagccacgg

SEQ ID NO: 5110176 - DNA, 25 bp, Homo sapien
tcgtagagactcaaaaggagcatgc

SEQ ID NO: 5110177 - DNA, 25 bp, Homo sapien
tcaaaagtagcaaagagtcagcctg

SEQ ID NO: 5110178 - DNA, 25 bp, Homo sapien
taagccacgggacatgtacagtgaa

SEQ ID NO: 5110179 - DNA, 25 bp, Homo sapien
tcccaaccaactcagagccccctgt

SEQ ID NO: 5110180 - DNA, 25 bp, Homo sapien
agagccccctgttctgattctacct

SEQ ID NO: 5110181 - DNA, 25 bp, Homo sapien
ttctttcctgccagtaggtgccatc

SEQ ID NO: 5110182 - DNA, 25 bp, Homo sapien
ctttcctgccagtaggtgccatcat

SEQ ID NO: 5110183 - DNA, 25 bp, Homo sapien
gttaaattatgctcaagctccttgg

SEQ ID NO: 5110184 - DNA, 25 bp, Homo sapien
gatatgaagatagaattgctggcca

SEQ ID NO: 5110185 - DNA, 25 bp, Homo sapien
tgctcaagctccttggatatgaaga

SEQ ID NO: 5110186 - DNA, 25 bp, Homo sapien
tttcccctgttaaattatgctcaag

SEQ ID NO: 5110187 - DNA, 25 bp, Homo sapien
tctctgcaactggttgtttggaagg

SEQ ID NO: 5110188 - DNA, 25 bp, Homo sapien
tcagttagtgagtcctgattctgtt

SEQ ID NO: 5110189 - DNA, 25 bp, Homo sapien
gttagtgagtcctgattctgttctc

SEQ ID NO: 5110190 - DNA, 25 bp, Homo sapien
ttcctggtattgagaaacagtttgg

SEQ ID NO: 5110191 - DNA, 25 bp, Homo sapien
catataagggttacaagggttgtca

SEQ ID NO: 5110192 - DNA, 25 bp, Homo sapien
tgtggtcttttaccgtctctaatga

SEQ ID NO: 5110193 - DNA, 25 bp, Homo sapien
tagagatgttggcaaactactttta

SEQ ID NO: 5110194 - DNA, 25 bp, Homo sapien
tccgcactctgatattcctgtggtc

SEQ ID NO: 5110195 - DNA, 25 bp, Homo sapien
tctcattcctgttaatggctgcatc

SEQ ID NO: 5110196 - DNA, 25 bp, Homo sapien
gtctcattcctgttaatggctgcat

SEQ ID NO: 5110197 - DNA, 25 bp, Homo sapien
gagtggaatttagaaccatcccaag

SEQ ID NO: 5110198 - DNA, 25 bp, Homo sapien
ctctgagtggaatttagaaccatcc

SEQ ID NO: 5110199 - DNA, 25 bp, Homo sapien
caggactggcgccttggaggcatca

SEQ ID NO: 5110200 - DNA, 25 bp, Homo sapien
gactggcgccttggaggcatcacat

SEQ ID NO: 5110201 - DNA, 25 bp, Homo sapien
gtggggcctgatgcaattttgtgga

SEQ ID NO: 5110202 - DNA, 25 bp, Homo sapien
ggcctgatgcaattttgtggaggct

SEQ ID NO: 5110203 - DNA, 25 bp, Homo sapien
ctattccatgcaagcagctgttgtg

SEQ ID NO: 5110204 - DNA, 25 bp, Homo sapien
aagcagctgttgtggggcctgatgc

SEQ ID NO: 5110205 - DNA, 25 bp, Homo sapien
ggctgcccggcttgaatggccaaat

SEQ ID NO: 5110206 - DNA, 25 bp, Homo sapien
caggcctctggatgatacggtatca

SEQ ID NO: 5110207 - DNA, 25 bp, Homo sapien
tatgtagccaataaagtgcctccag

SEQ ID NO: 5110208 - DNA, 25 bp, Homo sapien
cattcaatacgaaggcaggacaagc

SEQ ID NO: 5110209 - DNA, 25 bp, Homo sapien
cagccacacgtggagtcttaccaat

SEQ ID NO: 5110210 - DNA, 25 bp, Homo sapien
cacgtggagtcttaccaatgttatt

SEQ ID NO: 5110211 - DNA, 25 bp, Homo sapien
taagtatcaacccaagtccaattct

SEQ ID NO: 5110212 - DNA, 25 bp, Homo sapien
tttctcaatagcctaagtatcaacc

SEQ ID NO: 5110213 - DNA, 25 bp, Homo sapien
cctgactttatgacgcagatgacag

SEQ ID NO: 5110214 - DNA, 25 bp, Homo sapien
tgacagcggaagctgacctgtccag

SEQ ID NO: 5110215 - DNA, 25 bp, Homo sapien
gggacctgcatggacctgactttat

SEQ ID NO: 5110216 - DNA, 25 bp, Homo sapien
caggtagcccctgcatgtagttcac

SEQ ID NO: 5110217 - DNA, 25 bp, Homo sapien
gcttctgagaatgggtgctccctga

SEQ ID NO: 5110218 - DNA, 25 bp, Homo sapien
tagggccacatagataccactctgg

SEQ ID NO: 5110219 - DNA, 25 bp, Homo sapien
tccaagatctccttcccggattgca

SEQ ID NO: 5110220 - DNA, 25 bp, Homo sapien
tgctcacagcctaactcgggactgg

SEQ ID NO: 5110221 - DNA, 25 bp, Homo sapien
ctggctccgctctgcactgttttgc

SEQ ID NO: 5110222 - DNA, 25 bp, Homo sapien
tgttggcatactccgtgctaactgc

SEQ ID NO: 5110223 - DNA, 25 bp, Homo sapien
gggcagactgcctcgactccttggc

SEQ ID NO: 5110224 - DNA, 25 bp, Homo sapien
atggcatagcctgacccccatagag

SEQ ID NO: 5110225 - DNA, 25 bp, Homo sapien
tagcgagaatgaaggacttggtgca

SEQ ID NO: 5110226 - DNA, 25 bp, Homo sapien
ggcttccatactgggagatttcctg

SEQ ID NO: 5110227 - DNA, 25 bp, Homo sapien
gcccctaatgaggaacaaactgtcc

SEQ ID NO: 5110228 - DNA, 25 bp, Homo sapien
aaactgtccccctaatgaggcccag

SEQ ID NO: 5110229 - DNA, 25 bp, Homo sapien
ggcttacaaaacagcagtacttcaa

SEQ ID NO: 5110230 - DNA, 25 bp, Homo sapien
taagtggttctggtcagtaagaggc

SEQ ID NO: 5110231 - DNA, 25 bp, Homo sapien
tctccaaacttagggctggccaagg

SEQ ID NO: 5110232 - DNA, 25 bp, Homo sapien
ctctgggctgcaacatttatacatg

SEQ ID NO: 5110233 - DNA, 25 bp, Homo sapien
gagacataaagactgtctgatattt

SEQ ID NO: 5110234 - DNA, 25 bp, Homo sapien
agatgacaaaacactcctggtataa

SEQ ID NO: 5110235 - DNA, 25 bp, Homo sapien
tatatgtatgtcaagagtgagagag

SEQ ID NO: 5110236 - DNA, 25 bp, Homo sapien
aagactgtctgatatttactaaatt

SEQ ID NO: 5110237 - DNA, 25 bp, Homo sapien
cacctaaaaatgtggcgaggccagt

SEQ ID NO: 5110238 - DNA, 25 bp, Homo sapien
gctacagtcagatcaagtggctaca

SEQ ID NO: 5110239 - DNA, 25 bp, Homo sapien
tagcaaacagagaccccacttggtg

SEQ ID NO: 5110240 - DNA, 25 bp, Homo sapien
ggaagctgcttaggaacacgggtct

SEQ ID NO: 5110241 - DNA, 25 bp, Homo sapien
ggtcagcagcgggatgggaccatgt

SEQ ID NO: 5110242 - DNA, 25 bp, Homo sapien
ggccaagagagaggcggtcagcagc

SEQ ID NO: 5110243 - DNA, 25 bp, Homo sapien
gggaccatgtgtgatcttccctccc

SEQ ID NO: 5110244 - DNA, 25 bp, Homo sapien
ctgcagggccaagagagaggcggtc

SEQ ID NO: 5110245 - DNA, 25 bp, Homo sapien
cgatggccaggatggaaccgtcaga

SEQ ID NO: 5110246 - DNA, 25 bp, Homo sapien
ctaggagcaggaacaggatcagcag

SEQ ID NO: 5110247 - DNA, 25 bp, Homo sapien
aggaacaggatcagcagggcgatgg

SEQ ID NO: 5110248 - DNA, 25 bp, Homo sapien
agcaggaacaggatcagcagggcga

SEQ ID NO: 5110249 - DNA, 25 bp, Homo sapien
cacagtgcagcagaggggccagaac

SEQ ID NO: 5110250 - DNA, 25 bp, Homo sapien
ggggccagaaccaccagaggagagc

SEQ ID NO: 5110251 - DNA, 25 bp, Homo sapien
ggccagaaccaccagaggagagcca

SEQ ID NO: 5110252 - DNA, 25 bp, Homo sapien
ccagaaccaccagaggagagccagg

SEQ ID NO: 5110253 - DNA, 25 bp, Homo sapien
agatgcggctctgctagtaggttga

SEQ ID NO: 5110254 - DNA, 25 bp, Homo sapien
gctagtaggttgaggggcattcccc

SEQ ID NO: 5110255 - DNA, 25 bp, Homo sapien
cagcacggagatgcggctctgctag

SEQ ID NO: 5110256 - DNA, 25 bp, Homo sapien
tcctccagcacggagatgcggctct

SEQ ID NO: 5110257 - DNA, 25 bp, Homo sapien
gctgcaggctcccatcagggcattg

SEQ ID NO: 5110258 - DNA, 25 bp, Homo sapien
tgcaggctcccatcagggcattggc

SEQ ID NO: 5110259 - DNA, 25 bp, Homo sapien
caggctcccatcagggcattggctc

SEQ ID NO: 5110260 - DNA, 25 bp, Homo sapien
gggctgcaggctcccatcagggcat

SEQ ID NO: 5110261 - DNA, 25 bp, Homo sapien
tcgatactccagatttctcatttgg

SEQ ID NO: 5110262 - DNA, 25 bp, Homo sapien
catggagtcatgaaactgagagccc

SEQ ID NO: 5110263 - DNA, 25 bp, Homo sapien
agagccccaacagggatttcttcga

SEQ ID NO: 5110264 - DNA, 25 bp, Homo sapien
gcagccagtccccattgctaatcgg

SEQ ID NO: 5110265 - DNA, 25 bp, Homo sapien
agctgtagcctgaggcgtgtccata

SEQ ID NO: 5110266 - DNA, 25 bp, Homo sapien
tgtgctaacgagaaataatcttgtc

SEQ ID NO: 5110267 - DNA, 25 bp, Homo sapien
cctgaggcgtgtccatatgggaatg

SEQ ID NO: 5110268 - DNA, 25 bp, Homo sapien
agagctctgtgtgctaacgagaaat

SEQ ID NO: 5110269 - DNA, 25 bp, Homo sapien
tggtcatctgcatacaaggctggca

SEQ ID NO: 5110270 - DNA, 25 bp, Homo sapien
ccactgcctcccgtcctgtgttggg

SEQ ID NO: 5110271 - DNA, 25 bp, Homo sapien
ctggcacggcctggatttctagatc

SEQ ID NO: 5110272 - DNA, 25 bp, Homo sapien
cagctctgcatgcaggtactccttg

SEQ ID NO: 5110273 - DNA, 25 bp, Homo sapien
aattctgactttatccgtctctgtt

SEQ ID NO: 5110274 - DNA, 25 bp, Homo sapien
ttcaggctgacatgaggtagggtca

SEQ ID NO: 5110275 - DNA, 25 bp, Homo sapien
tagggtcagatttgatgacgatcat

SEQ ID NO: 5110276 - DNA, 25 bp, Homo sapien
ccgtctctgttcaggctgacatgag

SEQ ID NO: 5110277 - DNA, 25 bp, Homo sapien
aggagcagcttgggcaaaagcctgc

SEQ ID NO: 5110278 - DNA, 25 bp, Homo sapien
gagcagcttgggcaaaagcctgcat

SEQ ID NO: 5110279 - DNA, 25 bp, Homo sapien
ctcccctcagggccagagtctgtgt

SEQ ID NO: 5110280 - DNA, 25 bp, Homo sapien
ccctcagggccagagtctgtgttgc

SEQ ID NO: 5110281 - DNA, 25 bp, Homo sapien
tctgttaaccttagccaatggccca

SEQ ID NO: 5110282 - DNA, 25 bp, Homo sapien
tctttgctggacagagtagctctgc

SEQ ID NO: 5110283 - DNA, 25 bp, Homo sapien
taattaccatggcaatggccccagc

SEQ ID NO: 5110284 - DNA, 25 bp, Homo sapien
ggagacagtctaacccatgagagaa

SEQ ID NO: 5110285 - DNA, 25 bp, Homo sapien
ctctcctcggcagggggtggaggga

SEQ ID NO: 5110286 - DNA, 25 bp, Homo sapien
tctcctcggcagggggtggagggac

SEQ ID NO: 5110287 - DNA, 25 bp, Homo sapien
gcagggggtggagggacctccttga

SEQ ID NO: 5110288 - DNA, 25 bp, Homo sapien
gtcttttctggcagtttagttcagt

SEQ ID NO: 5110289 - DNA, 25 bp, Homo sapien
cacaggcaggtacattaaatccttt

SEQ ID NO: 5110290 - DNA, 25 bp, Homo sapien
ttcatccctggttaggaaaggccag

SEQ ID NO: 5110291 - DNA, 25 bp, Homo sapien
ctgcttcacaggcaggtacattaaa

SEQ ID NO: 5110292 - DNA, 25 bp, Homo sapien
ttaggtggcctaactcacagggcca

SEQ ID NO: 5110293 - DNA, 25 bp, Homo sapien
acattaggaaggagattaggtggcc

SEQ ID NO: 5110294 - DNA, 25 bp, Homo sapien
atcagcacatgccaaaaagcgcctg

SEQ ID NO: 5110295 - DNA, 25 bp, Homo sapien
gggccaacacacacgctaaggcaat

SEQ ID NO: 5110296 - DNA, 25 bp, Homo sapien
gctatttattgaatgttagacactg

SEQ ID NO: 5110297 - DNA, 25 bp, Homo sapien
gactgtctagattgagactatgatt

SEQ ID NO: 5110298 - DNA, 25 bp, Homo sapien
cattgtataaaatacgttgcacggg

SEQ ID NO: 5110299 - DNA, 25 bp, Homo sapien
tgaatacagggaactagaggaaaag

SEQ ID NO: 5110300 - DNA, 25 bp, Homo sapien
cacggggcttactaggaagcttctc

SEQ ID NO: 5110301 - DNA, 25 bp, Homo sapien
gcaccagtctgttggttggctgtga

SEQ ID NO: 5110302 - DNA, 25 bp, Homo sapien
cagatgtgacccaagagcaccagtc

SEQ ID NO: 5110303 - DNA, 25 bp, Homo sapien
tggccacggggcttactaggaagct

SEQ ID NO: 5110304 - DNA, 25 bp, Homo sapien
ggagttcaacttatctggccctgta

SEQ ID NO: 5110305 - DNA, 25 bp, Homo sapien
gagatcccctcaatgtcagtcttgg

SEQ ID NO: 5110306 - DNA, 25 bp, Homo sapien
aagatgcctgacagtagcttggccc

SEQ ID NO: 5110307 - DNA, 25 bp, Homo sapien
ttaatggtcactggcaagaagatgc

SEQ ID NO: 5110308 - DNA, 25 bp, Homo sapien
aactcccagttcactgcaggtttca

SEQ ID NO: 5110309 - DNA, 25 bp, Homo sapien
ctcccagttcactgcaggtttcaat

SEQ ID NO: 5110310 - DNA, 25 bp, Homo sapien
cagttcactgcaggtttcaatagga

SEQ ID NO: 5110311 - DNA, 25 bp, Homo sapien
cccagttcactgcaggtttcaatag

SEQ ID NO: 5110312 - DNA, 25 bp, Homo sapien
cctgggtgtgcctgcaggcacagtg

SEQ ID NO: 5110313 - DNA, 25 bp, Homo sapien
ggcagacctgggtgtgcctgcaggc

SEQ ID NO: 5110314 - DNA, 25 bp, Homo sapien
acctgggtgtgcctgcaggcacagt

SEQ ID NO: 5110315 - DNA, 25 bp, Homo sapien
tcctcaggcagacctgggtgtgcct

SEQ ID NO: 5110316 - DNA, 25 bp, Homo sapien
tgtgccagagctgctagatcgtgtc

SEQ ID NO: 5110317 - DNA, 25 bp, Homo sapien
gatcgtgtctagcaaaccgagaaga

SEQ ID NO: 5110318 - DNA, 25 bp, Homo sapien
gaagatgagataacgcggaagaagc

SEQ ID NO: 5110319 - DNA, 25 bp, Homo sapien
cagtaaaatttgctgcgcagttgga

SEQ ID NO: 5110320 - DNA, 25 bp, Homo sapien
gaaagcctgggcattcccagtctgg

SEQ ID NO: 5110321 - DNA, 25 bp, Homo sapien
caccttatgatgtgaaagcaggaat

SEQ ID NO: 5110322 - DNA, 25 bp, Homo sapien
gatatacaaaatatggctctgaaag

SEQ ID NO: 5110323 - DNA, 25 bp, Homo sapien
gccaccgcacatggacttaattttg

SEQ ID NO: 5110324 - DNA, 25 bp, Homo sapien
ggttgctcgctctcagattctgctg

SEQ ID NO: 5110325 - DNA, 25 bp, Homo sapien
ttctaagtgcaaagtaggtgctcga

SEQ ID NO: 5110326 - DNA, 25 bp, Homo sapien
ggtgctcgataaacacatattgcat

SEQ ID NO: 5110327 - DNA, 25 bp, Homo sapien
ttggttgctcgctctcagattctgc

SEQ ID NO: 5110328 - DNA, 25 bp, Homo sapien
ttttcttaggcagaccatcatcatc

SEQ ID NO: 5110329 - DNA, 25 bp, Homo sapien
ccaccataataagaggcgtctaccg

SEQ ID NO: 5110330 - DNA, 25 bp, Homo sapien
aacgcctctcccaccataataagag

SEQ ID NO: 5110331 - DNA, 25 bp, Homo sapien
taagaggcgtctaccgttggccact

SEQ ID NO: 5110332 - DNA, 25 bp, Homo sapien
catattgttgttgagatttcgcggc

SEQ ID NO: 5110333 - DNA, 25 bp, Homo sapien
ttgattggagagtaccacttccggg

SEQ ID NO: 5110334 - DNA, 25 bp, Homo sapien
ggaagaaggccgacgcatattgttg

SEQ ID NO: 5110335 - DNA, 25 bp, Homo sapien
gaattcatattcctgctccggcatc

SEQ ID NO: 5110336 - DNA, 25 bp, Homo sapien
cttctctatattgttccagttttac

SEQ ID NO: 5110337 - DNA, 25 bp, Homo sapien
tctctatattgttccagttttacta

SEQ ID NO: 5110338 - DNA, 25 bp, Homo sapien
gttttactatatgtgctgcagaagt

SEQ ID NO: 5110339 - DNA, 25 bp, Homo sapien
tctatattgttccagttttactata

SEQ ID NO: 5110340 - DNA, 25 bp, Homo sapien
tatcagggaaaatttcccgatcatg

SEQ ID NO: 5110341 - DNA, 25 bp, Homo sapien
tcagggaaaatttcccgatcatgag

SEQ ID NO: 5110342 - DNA, 25 bp, Homo sapien
cagggaaaatttcccgatcatgagt

SEQ ID NO: 5110343 - DNA, 25 bp, Homo sapien
aatatcagggaaaatttcccgatca

SEQ ID NO: 5110344 - DNA, 25 bp, Homo sapien
taggacccacaaggcatcgagtttt

SEQ ID NO: 5110345 - DNA, 25 bp, Homo sapien
gtctcctggctgtggacgcatcaca

SEQ ID NO: 5110346 - DNA, 25 bp, Homo sapien
tcacagacacacgatcatatccttt

SEQ ID NO: 5110347 - DNA, 25 bp, Homo sapien
tatcctttcctcagtaggacccaca

SEQ ID NO: 5110348 - DNA, 25 bp, Homo sapien
tggtactctgtgatgcaccactggc

SEQ ID NO: 5110349 - DNA, 25 bp, Homo sapien
tcactgtgcctatacattgagaagc

SEQ ID NO: 5110350 - DNA, 25 bp, Homo sapien
cctcctgaaactgccccaagtaggg

SEQ ID NO: 5110351 - DNA, 25 bp, Homo sapien
tgctgggaagatggtaggtgttttc

SEQ ID NO: 5110352 - DNA, 25 bp, Homo sapien
gagtactaactatggcctatgcttg

SEQ ID NO: 5110353 - DNA, 25 bp, Homo sapien
ggtttctgccaaactggtcagtgga

SEQ ID NO: 5110354 - DNA, 25 bp, Homo sapien
cagaggagtctcatgcatgctaaaa

SEQ ID NO: 5110355 - DNA, 25 bp, Homo sapien
caaattccatatgtgatgagggcca

SEQ ID NO: 5110356 - DNA, 25 bp, Homo sapien
cctcagaggctctgttggtgggctt

SEQ ID NO: 5110357 - DNA, 25 bp, Homo sapien
tgggtgccaatcccagggaagggcg

SEQ ID NO: 5110358 - DNA, 25 bp, Homo sapien
aggtgggtgccaatcccagggaagg

SEQ ID NO: 5110359 - DNA, 25 bp, Homo sapien
gtgccaatcccagggaagggcggtg

SEQ ID NO: 5110360 - DNA, 25 bp, Homo sapien
attctccagttgtgtcaataggtgc

SEQ ID NO: 5110361 - DNA, 25 bp, Homo sapien
tattctccagttgtgtcaataggtg

SEQ ID NO: 5110362 - DNA, 25 bp, Homo sapien
ttattctccagttgtgtcaataggt

SEQ ID NO: 5110363 - DNA, 25 bp, Homo sapien
ttctccagttgtgtcaataggtgct

SEQ ID NO: 5110364 - DNA, 25 bp, Homo sapien
gcaaaacaagccctgagtgagcttt

SEQ ID NO: 5110365 - DNA, 25 bp, Homo sapien
gaatgtaccggcctcctgatgccag

SEQ ID NO: 5110366 - DNA, 25 bp, Homo sapien
tgttcttgcagatagtaatggaatg

SEQ ID NO: 5110367 - DNA, 25 bp, Homo sapien
tctcttctggttgcaaggagatcca

SEQ ID NO: 5110368 - DNA, 25 bp, Homo sapien
tcacagggagaacagagcccatcac

SEQ ID NO: 5110369 - DNA, 25 bp, Homo sapien
gaatgtggagaagtgctgccagcat

SEQ ID NO: 5110370 - DNA, 25 bp, Homo sapien
tcccacagggatgtcctcacttcct

SEQ ID NO: 5110371 - DNA, 25 bp, Homo sapien
ccagcataggagcaatggggttccc

SEQ ID NO: 5110372 - DNA, 25 bp, Homo sapien
caatggcagttttcagggagaagga

SEQ ID NO: 5110373 - DNA, 25 bp, Homo sapien
tacctggtgtcagataggaattctg

SEQ ID NO: 5110374 - DNA, 25 bp, Homo sapien
cctccagatctgttgggaccttata

SEQ ID NO: 5110375 - DNA, 25 bp, Homo sapien
aattctgaagatgtccatttacaca

SEQ ID NO: 5110376 - DNA, 25 bp, Homo sapien
gggagatgagacaatctgaagttga

SEQ ID NO: 5110377 - DNA, 25 bp, Homo sapien
tttgggagatgagacaatctgaagt

SEQ ID NO: 5110378 - DNA, 25 bp, Homo sapien
ctgtttgggagatgagacaatctga

SEQ ID NO: 5110379 - DNA, 25 bp, Homo sapien
tgtttgggagatgagacaatctgaa

SEQ ID NO: 5110380 - DNA, 25 bp, Homo sapien
gaaaaaatgaggtcggagaatttga

SEQ ID NO: 5110381 - DNA, 25 bp, Homo sapien
gattccaggactcgaccttctgttg

SEQ ID NO: 5110382 - DNA, 25 bp, Homo sapien
tattcccatccctgtctggttcagc

SEQ ID NO: 5110383 - DNA, 25 bp, Homo sapien
tgctatttgcaacctgattccagga

SEQ ID NO: 5110384 - DNA, 25 bp, Homo sapien
agagtccttgaaacataggtgttgc

SEQ ID NO: 5110385 - DNA, 25 bp, Homo sapien
ccttgaaacataggtgttgcagtaa

SEQ ID NO: 5110386 - DNA, 25 bp, Homo sapien
tcagtgaagcaaccaaattcagacg

SEQ ID NO: 5110387 - DNA, 25 bp, Homo sapien
tgcagtaattgaggccagtcaatgc

SEQ ID NO: 5110388 - DNA, 25 bp, Homo sapien
ttgagatgttcaggatctaaaaaca

SEQ ID NO: 5110389 - DNA, 25 bp, Homo sapien
ggatagtcagctctagattttactt

SEQ ID NO: 5110390 - DNA, 25 bp, Homo sapien
gcacatgtcatttctcactagccac

SEQ ID NO: 5110391 - DNA, 25 bp, Homo sapien
catttatagcacatgtcatttctca

SEQ ID NO: 5110392 - DNA, 25 bp, Homo sapien
ccaaggctgctggcaatgggggcat

SEQ ID NO: 5110393 - DNA, 25 bp, Homo sapien
cccaaggctgctggcaatgggggca

SEQ ID NO: 5110394 - DNA, 25 bp, Homo sapien
tcccaaggctgctggcaatgggggc

SEQ ID NO: 5110395 - DNA, 25 bp, Homo sapien
gtcccaaggctgctggcaatggggg

SEQ ID NO: 5110396 - DNA, 25 bp, Homo sapien
cagattcacattgtgcacttgcaat

SEQ ID NO: 5110397 - DNA, 25 bp, Homo sapien
tccagtaaggcctcattagggatga

SEQ ID NO: 5110398 - DNA, 25 bp, Homo sapien
ttgcaataggcgagtggcccatcct

SEQ ID NO: 5110399 - DNA, 25 bp, Homo sapien
gagccctgagttgatgttgttgata

SEQ ID NO: 5110400 - DNA, 25 bp, Homo sapien
tccatgaaattcgagctctacaggg

SEQ ID NO: 5110401 - DNA, 25 bp, Homo sapien
gaacctgtccatgagataacctgtg

SEQ ID NO: 5110402 - DNA, 25 bp, Homo sapien
ggatagcaaatccacaagccaggtg

SEQ ID NO: 5110403 - DNA, 25 bp, Homo sapien
gaggatcttttccatataccgctag

SEQ ID NO: 5110404 - DNA, 25 bp, Homo sapien
cacagagcagagttgacttgctaca

SEQ ID NO: 5110405 - DNA, 25 bp, Homo sapien
ttcatagttagctaggattggcccc

SEQ ID NO: 5110406 - DNA, 25 bp, Homo sapien
tgcatacgagcagtgttcccaggat

SEQ ID NO: 5110407 - DNA, 25 bp, Homo sapien
caagaccatttgatacacggagaga

SEQ ID NO: 5110408 - DNA, 25 bp, Homo sapien
tgtgatcagaactccaccccttctt

SEQ ID NO: 5110409 - DNA, 25 bp, Homo sapien
aattgactcactgagagtctctctc

SEQ ID NO: 5110410 - DNA, 25 bp, Homo sapien
tctctctggttgttctgtgatcaga

SEQ ID NO: 5110411 - DNA, 25 bp, Homo sapien
gaactaagatgctactgagtctctt

SEQ ID NO: 5110412 - DNA, 25 bp, Homo sapien
tcagaacatttccttgtgaatgaga

SEQ ID NO: 5110413 - DNA, 25 bp, Homo sapien
cttgtgaatgagaagagtcctctga

SEQ ID NO: 5110414 - DNA, 25 bp, Homo sapien
gtttctcttcttgatatgcaagggc

SEQ ID NO: 5110415 - DNA, 25 bp, Homo sapien
gcaacctggataaggatgcctcctc

SEQ ID NO: 5110416 - DNA, 25 bp, Homo sapien
caaacttactggagctaaaggagac

SEQ ID NO: 5110417 - DNA, 25 bp, Homo sapien
tactgagtgctatccttccaacaac

SEQ ID NO: 5110418 - DNA, 25 bp, Homo sapien
gatctaagcttcatcggtgacctcc

SEQ ID NO: 5110419 - DNA, 25 bp, Homo sapien
tgggtatacacctacattcgagatc

SEQ ID NO: 5110420 - DNA, 25 bp, Homo sapien
ctttcgcctactttcaaagtgtgtt

SEQ ID NO: 5110421 - DNA, 25 bp, Homo sapien
cctactttcaaagtgtgttgccaca

SEQ ID NO: 5110422 - DNA, 25 bp, Homo sapien
tttcaaagtgtgttgccacaatctt

SEQ ID NO: 5110423 - DNA, 25 bp, Homo sapien
actttcaaagtgtgttgccacaatc

SEQ ID NO: 5110424 - DNA, 25 bp, Homo sapien
tatgctctggtcaagagagggcctg

SEQ ID NO: 5110425 - DNA, 25 bp, Homo sapien
tgtgcaggatcctgccagagtgtct

SEQ ID NO: 5110426 - DNA, 25 bp, Homo sapien
gccaatcctttatgctctggtcaag

SEQ ID NO: 5110427 - DNA, 25 bp, Homo sapien
gccagagtgtctgccaatcctttat

SEQ ID NO: 5110428 - DNA, 25 bp, Homo sapien
tcacagagatcagccctggagtgaa

SEQ ID NO: 5110429 - DNA, 25 bp, Homo sapien
gctgctcacagagatcagccctgga

SEQ ID NO: 5110430 - DNA, 25 bp, Homo sapien
acatccttccccaattgactggtct

SEQ ID NO: 5110431 - DNA, 25 bp, Homo sapien
ctttcactaggtcccattccacagg

SEQ ID NO: 5110432 - DNA, 25 bp, Homo sapien
ctagcttgacctttgccttcctccg

SEQ ID NO: 5110433 - DNA, 25 bp, Homo sapien
tagcttgacctttgccttcctccgg

SEQ ID NO: 5110434 - DNA, 25 bp, Homo sapien
gacctttgccttcctccggcctcat

SEQ ID NO: 5110435 - DNA, 25 bp, Homo sapien
ctttgccttcctccggcctcatgac

SEQ ID NO: 5110436 - DNA, 25 bp, Homo sapien
ttattctaaaggagcggccccagtg

SEQ ID NO: 5110437 - DNA, 25 bp, Homo sapien
aagggctgccatgatcctgccagag

SEQ ID NO: 5110438 - DNA, 25 bp, Homo sapien
gaagacagtagtcaaaaccctgaag

SEQ ID NO: 5110439 - DNA, 25 bp, Homo sapien
gatctgaaataagaccatgagccag

SEQ ID NO: 5110440 - DNA, 25 bp, Homo sapien
catgtctaccctacgcgtaaagtta

SEQ ID NO: 5110441 - DNA, 25 bp, Homo sapien
aaggactcactctgatggcccctga

SEQ ID NO: 5110442 - DNA, 25 bp, Homo sapien
taaggccaagtggtaaaggactcac

SEQ ID NO: 5110443 - DNA, 25 bp, Homo sapien
tacaaatgaatgaaactgtaaggcc

SEQ ID NO: 5110444 - DNA, 25 bp, Homo sapien
tcacgctgccagtgggtagctcaag

SEQ ID NO: 5110445 - DNA, 25 bp, Homo sapien
aagtagccgtgccatcaaaataggg

SEQ ID NO: 5110446 - DNA, 25 bp, Homo sapien
tacttgtgtaagctgagcctatgac

SEQ ID NO: 5110447 - DNA, 25 bp, Homo sapien
gctcaaggttgaaaagtctctcccg

SEQ ID NO: 5110448 - DNA, 25 bp, Homo sapien
gaagcaagagtttaatcccttattg

SEQ ID NO: 5110449 - DNA, 25 bp, Homo sapien
cagtggtgtctaagtgcttttttga

SEQ ID NO: 5110450 - DNA, 25 bp, Homo sapien
ctttattgaagtccaagggtggttg

SEQ ID NO: 5110451 - DNA, 25 bp, Homo sapien
taatcactgggccacccaagagtag

SEQ ID NO: 5110452 - DNA, 25 bp, Homo sapien
cgtgagctctcttcgcttggccact

SEQ ID NO: 5110453 - DNA, 25 bp, Homo sapien
tacagaattgctccccacagcggct

SEQ ID NO: 5110454 - DNA, 25 bp, Homo sapien
tgtctggatgcctacagaattgctc

SEQ ID NO: 5110455 - DNA, 25 bp, Homo sapien
ggccacttgcctgggtgggtaccca

SEQ ID NO: 5110456 - DNA, 25 bp, Homo sapien
ctgcaacggaggggagacaggggtt

SEQ ID NO: 5110457 - DNA, 25 bp, Homo sapien
tgcaacggaggggagacaggggttc

SEQ ID NO: 5110458 - DNA, 25 bp, Homo sapien
gggagacaggggttctcctgctcac

SEQ ID NO: 5110459 - DNA, 25 bp, Homo sapien
gaggggagacaggggttctcctgct

SEQ ID NO: 5110460 - DNA, 25 bp, Homo sapien
tctcatctggtactcaggaacttct

SEQ ID NO: 5110461 - DNA, 25 bp, Homo sapien
agtctcatctggtactcaggaactt

SEQ ID NO: 5110462 - DNA, 25 bp, Homo sapien
ctcaggaacttctgtgcaacactca

SEQ ID NO: 5110463 - DNA, 25 bp, Homo sapien
ctcatctggtactcaggaacttctg

SEQ ID NO: 5110464 - DNA, 25 bp, Homo sapien
tggaaccccttaaagcagcctcctg

SEQ ID NO: 5110465 - DNA, 25 bp, Homo sapien
aagccagccttaagtagccctgtct

SEQ ID NO: 5110466 - DNA, 25 bp, Homo sapien
tcctgaaagtcagcgtccaaagcca

SEQ ID NO: 5110467 - DNA, 25 bp, Homo sapien
gggacattctattgccaagcaggca

SEQ ID NO: 5110468 - DNA, 25 bp, Homo sapien
tgtgcaggtagccttagttgttgtc

SEQ ID NO: 5110469 - DNA, 25 bp, Homo sapien
caggtagccttagttgttgtcacag

SEQ ID NO: 5110470 - DNA, 25 bp, Homo sapien
tcacaggaactgacaacctgtgtac

SEQ ID NO: 5110471 - DNA, 25 bp, Homo sapien
ttgtcacaggaactgacaacctgtg

SEQ ID NO: 5110472 - DNA, 25 bp, Homo sapien
ggaatccctcttctacacgcggctg

SEQ ID NO: 5110473 - DNA, 25 bp, Homo sapien
acagtttgtcctgcccttgttctgg

SEQ ID NO: 5110474 - DNA, 25 bp, Homo sapien
gtttgtcctgcccttgttctggctg

SEQ ID NO: 5110475 - DNA, 25 bp, Homo sapien
gggaatccctcttctacacgcggct

SEQ ID NO: 5110476 - DNA, 25 bp, Homo sapien
tctctactgatgtgatcaatacagc

SEQ ID NO: 5110477 - DNA, 25 bp, Homo sapien
gatgtgatcaatacagcttcctcat

SEQ ID NO: 5110478 - DNA, 25 bp, Homo sapien
gaatgaaggaggcagctatctctac

SEQ ID NO: 5110479 - DNA, 25 bp, Homo sapien
tcaaacacttgttcccggtaatgaa

SEQ ID NO: 5110480 - DNA, 25 bp, Homo sapien
ggctggctggttgttcttgaccctg

SEQ ID NO: 5110481 - DNA, 25 bp, Homo sapien
gtggtaggcgttgttgagtgggtac

SEQ ID NO: 5110482 - DNA, 25 bp, Homo sapien
tgtggtaggcgttgttgagtgggta

SEQ ID NO: 5110483 - DNA, 25 bp, Homo sapien
tattctggcccctgcttatgaggaa

SEQ ID NO: 5110484 - DNA, 25 bp, Homo sapien
tcctgaagtttctgagagagcccag

SEQ ID NO: 5110485 - DNA, 25 bp, Homo sapien
tcatctgactgttgagtggcggctc

SEQ ID NO: 5110486 - DNA, 25 bp, Homo sapien
tgttgagtttcttaccacaccaggg

SEQ ID NO: 5110487 - DNA, 25 bp, Homo sapien
gatgggctcaatgtctctacactgt

SEQ ID NO: 5110488 - DNA, 25 bp, Homo sapien
gcagtcaaaacagttgtgatgggct

SEQ ID NO: 5110489 - DNA, 25 bp, Homo sapien
tctacactgtgagcctggggaaccc

SEQ ID NO: 5110490 - DNA, 25 bp, Homo sapien
gtcaaaacagttgtgatgggctcaa

SEQ ID NO: 5110491 - DNA, 25 bp, Homo sapien
ctgaatggccgcgggaatcacgcgg

SEQ ID NO: 5110492 - DNA, 25 bp, Homo sapien
ccgcgggaatcacgcggcagtgcca

SEQ ID NO: 5110493 - DNA, 25 bp, Homo sapien
gaatggccgcgggaatcacgcggca

SEQ ID NO: 5110494 - DNA, 25 bp, Homo sapien
tggccgcgggaatcacgcggcagtg

SEQ ID NO: 5110495 - DNA, 25 bp, Homo sapien
ggtgcatttgcactgatgctcacca

SEQ ID NO: 5110496 - DNA, 25 bp, Homo sapien
tcagcaacgtcagcatctcggcttg

SEQ ID NO: 5110497 - DNA, 25 bp, Homo sapien
caacatcttgtaactgcactgggca

SEQ ID NO: 5110498 - DNA, 25 bp, Homo sapien
cactgggcatatgactgatgtgctg

SEQ ID NO: 5110499 - DNA, 25 bp, Homo sapien
catcatacatttgcagttccctatt

SEQ ID NO: 5110500 - DNA, 25 bp, Homo sapien
atcatcatacatttgcagttcccta

SEQ ID NO: 5110501 - DNA, 25 bp, Homo sapien
aaatcatcatacatttgcagttccc

SEQ ID NO: 5110502 - DNA, 25 bp, Homo sapien
catacatttgcagttccctattcca

SEQ ID NO: 5110503 - DNA, 25 bp, Homo sapien
tctcactggagggtgcaccaagctt

SEQ ID NO: 5110504 - DNA, 25 bp, Homo sapien
tacccatggccagatatcgaagact

SEQ ID NO: 5110505 - DNA, 25 bp, Homo sapien
gatgatagttacaatgaggttaccc

SEQ ID NO: 5110506 - DNA, 25 bp, Homo sapien
gctgtgcaaacaagggtctcgtcat

SEQ ID NO: 5110507 - DNA, 25 bp, Homo sapien
tcctatagcatggtatagtgataac

SEQ ID NO: 5110508 - DNA, 25 bp, Homo sapien
ctatagcatggtatagtgataactg

SEQ ID NO: 5110509 - DNA, 25 bp, Homo sapien
tctcctatagcatggtatagtgata

SEQ ID NO: 5110510 - DNA, 25 bp, Homo sapien
gcccagtctcctatagcatggtata

SEQ ID NO: 5110511 - DNA, 25 bp, Homo sapien
gtattatgatcaggatattgaggac

SEQ ID NO: 5110512 - DNA, 25 bp, Homo sapien
tattgaggacttgaatacgttgcac

SEQ ID NO: 5110513 - DNA, 25 bp, Homo sapien
gcccagtctcctatagcatggtatt

SEQ ID NO: 5110514 - DNA, 25 bp, Homo sapien
tataacaaacagacaaccagaaaaa

SEQ ID NO: 5110515 - DNA, 25 bp, Homo sapien
tgagcaatcagccttggtcaactcc

SEQ ID NO: 5110516 - DNA, 25 bp, Homo sapien
agcaatcagccttggtcaactccga

SEQ ID NO: 5110517 - DNA, 25 bp, Homo sapien
aatcagccttggtcaactccgacat

SEQ ID NO: 5110518 - DNA, 25 bp, Homo sapien
caatcagccttggtcaactccgaca

SEQ ID NO: 5110519 - DNA, 25 bp, Homo sapien
gacagcctgtctagtaggtactaga

SEQ ID NO: 5110520 - DNA, 25 bp, Homo sapien
ctgtctagtaggtactagattagtc

SEQ ID NO: 5110521 - DNA, 25 bp, Homo sapien
gcctgtctagtaggtactagattag

SEQ ID NO: 5110522 - DNA, 25 bp, Homo sapien
cagcctgtctagtaggtactagatt

SEQ ID NO: 5110523 - DNA, 25 bp, Homo sapien
cctgagggtgtgttgagtggtttgt

SEQ ID NO: 5110524 - DNA, 25 bp, Homo sapien
cgccctccagtaggctgactccctg

SEQ ID NO: 5110525 - DNA, 25 bp, Homo sapien
cagagagcgccctccagtaggctga

SEQ ID NO: 5110526 - DNA, 25 bp, Homo sapien
agagcgccctccagtaggctgactc

SEQ ID NO: 5110527 - DNA, 25 bp, Homo sapien
tctgcagagcggaatctggcttcct

SEQ ID NO: 5110528 - DNA, 25 bp, Homo sapien
caggtggcggtcagcccgtatagat

SEQ ID NO: 5110529 - DNA, 25 bp, Homo sapien
tttctggtccgcttgggcagactgc

SEQ ID NO: 5110530 - DNA, 25 bp, Homo sapien
tcaaaggtgctctagaaggtggatg

SEQ ID NO: 5110531 - DNA, 25 bp, Homo sapien
ggcctttgttgtggggacagcccca

SEQ ID NO: 5110532 - DNA, 25 bp, Homo sapien
tggctcctgagccccagggatctcc

SEQ ID NO: 5110533 - DNA, 25 bp, Homo sapien
cctgagccccagggatctccaaaaa

SEQ ID NO: 5110534 - DNA, 25 bp, Homo sapien
gctcctgagccccagggatctccaa

SEQ ID NO: 5110535 - DNA, 25 bp, Homo sapien
aagcctggccttggtctctggtcat

SEQ ID NO: 5110536 - DNA, 25 bp, Homo sapien
caagcctggccttggtctctggtca

SEQ ID NO: 5110537 - DNA, 25 bp, Homo sapien
cgcaagcctggccttggtctctggt

SEQ ID NO: 5110538 - DNA, 25 bp, Homo sapien
gtcgcaagcctggccttggtctctg

SEQ ID NO: 5110539 - DNA, 25 bp, Homo sapien
tcttcggtcccatttgggaagctct

SEQ ID NO: 5110540 - DNA, 25 bp, Homo sapien
gggaagctctccctcaacgtggaaa

SEQ ID NO: 5110541 - DNA, 25 bp, Homo sapien
ttcaaattccttattcaggttccag

SEQ ID NO: 5110542 - DNA, 25 bp, Homo sapien
cctcacctatgagattcatgtcttc

SEQ ID NO: 5110543 - DNA, 25 bp, Homo sapien
acaagtgtgagatggtcatgactgg

SEQ ID NO: 5110544 - DNA, 25 bp, Homo sapien
tgagatggtcatgactgggcaggcc

SEQ ID NO: 5110545 - DNA, 25 bp, Homo sapien
ttacaccagggacaagtgtgagatg

SEQ ID NO: 5110546 - DNA, 25 bp, Homo sapien
tggggcttacaccagggacaagtgt

SEQ ID NO: 5110547 - DNA, 25 bp, Homo sapien
tcacggactttaaaatctgggctct

SEQ ID NO: 5110548 - DNA, 25 bp, Homo sapien
taagcttaggcctgagtgcataggg

SEQ ID NO: 5110549 - DNA, 25 bp, Homo sapien
agtctgtacggtgtgggtctccctc

SEQ ID NO: 5110550 - DNA, 25 bp, Homo sapien
cactgccagagtattcagctgtgac

SEQ ID NO: 5110551 - DNA, 25 bp, Homo sapien
agactgcaggcttggctggacctca

SEQ ID NO: 5110552 - DNA, 25 bp, Homo sapien
tattatcactgcttgctcagagcag

SEQ ID NO: 5110553 - DNA, 25 bp, Homo sapien
tcagagcagtcatacccatagtctg

SEQ ID NO: 5110554 - DNA, 25 bp, Homo sapien
gtctgagaaagcatgagactgcagg

SEQ ID NO: 5110555 - DNA, 25 bp, Homo sapien
taccttgggatttggactgatgtga

SEQ ID NO: 5110556 - DNA, 25 bp, Homo sapien
gaagctcttcgtgagattaacaccc

SEQ ID NO: 5110557 - DNA, 25 bp, Homo sapien
cctcctgagagtttagtaccttggg

SEQ ID NO: 5110558 - DNA, 25 bp, Homo sapien
gggttccagcaactttatagaagct

SEQ ID NO: 5110559 - DNA, 25 bp, Homo sapien
gatccagtgcctcgctccatcttat

SEQ ID NO: 5110560 - DNA, 25 bp, Homo sapien
ttcaccatggcactggtatgacatg

SEQ ID NO: 5110561 - DNA, 25 bp, Homo sapien
catggcactggtatgacatgactgg

SEQ ID NO: 5110562 - DNA, 25 bp, Homo sapien
gcactggtatgacatgactggctct

SEQ ID NO: 5110563 - DNA, 25 bp, Homo sapien
cattgtaattgtgagggcctttgcc

SEQ ID NO: 5110564 - DNA, 25 bp, Homo sapien
gggtaattactcgtcctccaggatc

SEQ ID NO: 5110565 - DNA, 25 bp, Homo sapien
cagccgtcaacaccaaatgcattgt

SEQ ID NO: 5110566 - DNA, 25 bp, Homo sapien
caaccacttctgtggcagccgtcaa

SEQ ID NO: 5110567 - DNA, 25 bp, Homo sapien
gacgctgacaccacaaaatcagatg

SEQ ID NO: 5110568 - DNA, 25 bp, Homo sapien
gcatttagcaacagcgtttctggag

SEQ ID NO: 5110569 - DNA, 25 bp, Homo sapien
aaccagcatttagcaacagcgtttc

SEQ ID NO: 5110570 - DNA, 25 bp, Homo sapien
ccttcggggtagtggacgctgacac

SEQ ID NO: 5110571 - DNA, 25 bp, Homo sapien
caaggcctaaaatgtctgggtgctc

SEQ ID NO: 5110572 - DNA, 25 bp, Homo sapien
ggaactcgtgtatcttgtgcgcgct

SEQ ID NO: 5110573 - DNA, 25 bp, Homo sapien
tgaggtccttctggtggaactcgtg

SEQ ID NO: 5110574 - DNA, 25 bp, Homo sapien
tgttctgtgcttggcgccgcagttc

SEQ ID NO: 5110575 - DNA, 25 bp, Homo sapien
ggtggggcattcaagggctgctgca

SEQ ID NO: 5110576 - DNA, 25 bp, Homo sapien
ggccggagcgctgaacaagggagtt

SEQ ID NO: 5110577 - DNA, 25 bp, Homo sapien
agccggcatctggagaggaccacac

SEQ ID NO: 5110578 - DNA, 25 bp, Homo sapien
gctgcagacagaggagccggcatct

SEQ ID NO: 5110579 - DNA, 25 bp, Homo sapien
ggaggggttgggcattgctcaggag

SEQ ID NO: 5110580 - DNA, 25 bp, Homo sapien
aggggttgggcattgctcaggagcc

SEQ ID NO: 5110581 - DNA, 25 bp, Homo sapien
gaggggttgggcattgctcaggagc

SEQ ID NO: 5110582 - DNA, 25 bp, Homo sapien
ggtgctgcctgtggggccgtgctca

SEQ ID NO: 5110583 - DNA, 25 bp, Homo sapien
gggtgcccaggaggtgctgcctgtg

SEQ ID NO: 5110584 - DNA, 25 bp, Homo sapien
gaggtgctgcctgtggggccgtgct

SEQ ID NO: 5110585 - DNA, 25 bp, Homo sapien
tgctgcctgtggggccgtgctcagt

SEQ ID NO: 5110586 - DNA, 25 bp, Homo sapien
cctggtcaggtcttgtatttgaagc

SEQ ID NO: 5110587 - DNA, 25 bp, Homo sapien
gagctcacagatatttgagggcaga

SEQ ID NO: 5110588 - DNA, 25 bp, Homo sapien
cagggaaagccttgttgtctaattc

SEQ ID NO: 5110589 - DNA, 25 bp, Homo sapien
agtgtcaggccgcaacaggctttct

SEQ ID NO: 5110590 - DNA, 25 bp, Homo sapien
gggatcttcattgccctcgtgtggg

SEQ ID NO: 5110591 - DNA, 25 bp, Homo sapien
tgcaggtgccccttcgtgaaccttc

SEQ ID NO: 5110592 - DNA, 25 bp, Homo sapien
tgtggcacgcaatctggttcctggt

SEQ ID NO: 5110593 - DNA, 25 bp, Homo sapien
tcttctgaagttcgcgagcaggcaa

SEQ ID NO: 5110594 - DNA, 25 bp, Homo sapien
atgagcaaacgtccatgtccgtggg

SEQ ID NO: 5110595 - DNA, 25 bp, Homo sapien
ccaatgccatgagcaaacgtccatg

SEQ ID NO: 5110596 - DNA, 25 bp, Homo sapien
tgccatgagcaaacgtccatgtccg

SEQ ID NO: 5110597 - DNA, 25 bp, Homo sapien
aaccaatgccatgagcaaacgtcca

SEQ ID NO: 5110598 - DNA, 25 bp, Homo sapien
gtgaggttgcgcatgtgtgtgaagg

SEQ ID NO: 5110599 - DNA, 25 bp, Homo sapien
acacagatggtgaggttgcgcatgt

SEQ ID NO: 5110600 - DNA, 25 bp, Homo sapien
tcagacacagatggtgaggttgcgc

SEQ ID NO: 5110601 - DNA, 25 bp, Homo sapien
tgaagggccagggtttctccttggc

SEQ ID NO: 5110602 - DNA, 25 bp, Homo sapien
tttgacacaaagaggagaaggcact

SEQ ID NO: 5110603 - DNA, 25 bp, Homo sapien
ccaggctatgcatgtggtttgagca

SEQ ID NO: 5110604 - DNA, 25 bp, Homo sapien
tgtcaagttacacaactgctgaggt

SEQ ID NO: 5110605 - DNA, 25 bp, Homo sapien
gatatcaggtcctaaccctgggacc

SEQ ID NO: 5110606 - DNA, 25 bp, Homo sapien
taatggctagcgagaacatctttgg

SEQ ID NO: 5110607 - DNA, 25 bp, Homo sapien
tcatagtgaaagtacgattgtaaaa

SEQ ID NO: 5110608 - DNA, 25 bp, Homo sapien
tacctttcttactacactgtttgca

SEQ ID NO: 5110609 - DNA, 25 bp, Homo sapien
tgtagaaatgatcctgttagctttc

SEQ ID NO: 5110610 - DNA, 25 bp, Homo sapien
ctctctatcccatttgatgtagtga

SEQ ID NO: 5110611 - DNA, 25 bp, Homo sapien
aaagagacattgtaatgaggcacac

SEQ ID NO: 5110612 - DNA, 25 bp, Homo sapien
aatgaggcacaccactaaagtgagc

SEQ ID NO: 5110613 - DNA, 25 bp, Homo sapien
gtgagcatgcccaattaaaaccagt

SEQ ID NO: 5110614 - DNA, 25 bp, Homo sapien
taggaagcgaaatattacagtagtg

SEQ ID NO: 5110615 - DNA, 25 bp, Homo sapien
tttggttagccttagtttctcagac

SEQ ID NO: 5110616 - DNA, 25 bp, Homo sapien
tacagtagtgcattggtgggtctca

SEQ ID NO: 5110617 - DNA, 25 bp, Homo sapien
tgtacatgttgggtatcctactact

SEQ ID NO: 5110618 - DNA, 25 bp, Homo sapien
cacatagaaaggttcttactaagtg

SEQ ID NO: 5110619 - DNA, 25 bp, Homo sapien
tccacatagaaaggttcttactaag

SEQ ID NO: 5110620 - DNA, 25 bp, Homo sapien
tttccacatagaaaggttcttacta

SEQ ID NO: 5110621 - DNA, 25 bp, Homo sapien
catagaaaggttcttactaagtgaa

SEQ ID NO: 5110622 - DNA, 25 bp, Homo sapien
tagtgacccactattggactaccct

SEQ ID NO: 5110623 - DNA, 25 bp, Homo sapien
ctttagtaacgctaatgttaatgag

SEQ ID NO: 5110624 - DNA, 25 bp, Homo sapien
atgttaatgagttctagtgacccac

SEQ ID NO: 5110625 - DNA, 25 bp, Homo sapien
gttctagtgacccactattggacta

SEQ ID NO: 5110626 - DNA, 25 bp, Homo sapien
taaacgcttcatctaacgctaagac

SEQ ID NO: 5110627 - DNA, 25 bp, Homo sapien
tatcctgaataactgactacactct

SEQ ID NO: 5110628 - DNA, 25 bp, Homo sapien
aagatgtaaacacgttagtggtggc

SEQ ID NO: 5110629 - DNA, 25 bp, Homo sapien
tgtggatgccaagactactgtagta

SEQ ID NO: 5110630 - DNA, 25 bp, Homo sapien
aagaccaatatttgcccacgtagtt

SEQ ID NO: 5110631 - DNA, 25 bp, Homo sapien
cagtgagtgaaactatctggtcacc

SEQ ID NO: 5110632 - DNA, 25 bp, Homo sapien
tattgtcagtgcagaagcataggtg

SEQ ID NO: 5110633 - DNA, 25 bp, Homo sapien
tatggtcctaaacagaaagtctatg

SEQ ID NO: 5110634 - DNA, 25 bp, Homo sapien
tataaattatttgggaagctagtga

SEQ ID NO: 5110635 - DNA, 25 bp, Homo sapien
tgtaattaatgccaaggtctgtgga

SEQ ID NO: 5110636 - DNA, 25 bp, Homo sapien
taggcagaggtacacaaacaggctt

SEQ ID NO: 5110637 - DNA, 25 bp, Homo sapien
gagtaagcaggagacaggtcttatg

SEQ ID NO: 5110638 - DNA, 25 bp, Homo sapien
tttgcctttgcatgaccctgatcca

SEQ ID NO: 5110639 - DNA, 25 bp, Homo sapien
ctgtagtccagtctacttagaagac

SEQ ID NO: 5110640 - DNA, 25 bp, Homo sapien
cttcagagagtagtatgtgtaatat

SEQ ID NO: 5110641 - DNA, 25 bp, Homo sapien
tacaagtaggggagaggctagcttc

SEQ ID NO: 5110642 - DNA, 25 bp, Homo sapien
gtctctcttgagattacaaggaagg

SEQ ID NO: 5110643 - DNA, 25 bp, Homo sapien
gaaaacaatgtacacataatctcgg

SEQ ID NO: 5110644 - DNA, 25 bp, Homo sapien
aaaacaatgtacacataatctcggg

SEQ ID NO: 5110645 - DNA, 25 bp, Homo sapien
agaaaacaatgtacacataatctcg

SEQ ID NO: 5110646 - DNA, 25 bp, Homo sapien
tcagaaaacaatgtacacataatct

SEQ ID NO: 5110647 - DNA, 25 bp, Homo sapien
tgaactccctctgctgactatttgg

SEQ ID NO: 5110648 - DNA, 25 bp, Homo sapien
tggactgaatgaggaggtctctcca

SEQ ID NO: 5110649 - DNA, 25 bp, Homo sapien
tgtcatttgttaggagatagaaacc

SEQ ID NO: 5110650 - DNA, 25 bp, Homo sapien
taaaggacaaggaccacgctcattc

SEQ ID NO: 5110651 - DNA, 25 bp, Homo sapien
gaacacaatttgatgctgaagcagc

SEQ ID NO: 5110652 - DNA, 25 bp, Homo sapien
ccacagtaattgactaacaggcagt

SEQ ID NO: 5110653 - DNA, 25 bp, Homo sapien
cacatgcattgatgaaccctgaaag

SEQ ID NO: 5110654 - DNA, 25 bp, Homo sapien
gcacccagggagtctaggtcatacg

SEQ ID NO: 5110655 - DNA, 25 bp, Homo sapien
gctgaatcaggtaggcatgaaaact

SEQ ID NO: 5110656 - DNA, 25 bp, Homo sapien
tctctatcctctttagatgttgaaa

SEQ ID NO: 5110657 - DNA, 25 bp, Homo sapien
gaaagatctgacttattcctagctt

SEQ ID NO: 5110658 - DNA, 25 bp, Homo sapien
cataccctttattattagtgcctta

SEQ ID NO: 5110659 - DNA, 25 bp, Homo sapien
tcgtatcaccatgtagctgcacata

SEQ ID NO: 5110660 - DNA, 25 bp, Homo sapien
tgtctgtccacataaatcgcaagga

SEQ ID NO: 5110661 - DNA, 25 bp, Homo sapien
ccaactgatactatgtgaggaaggt

SEQ ID NO: 5110662 - DNA, 25 bp, Homo sapien
tatcatcttggtatcactgagacaa

SEQ ID NO: 5110663 - DNA, 25 bp, Homo sapien
tgatggatcgggctaaaagaattgt

SEQ ID NO: 5110664 - DNA, 25 bp, Homo sapien
tggccagaagacatcaagagtaatc

SEQ ID NO: 5110665 - DNA, 25 bp, Homo sapien
caagtctggtggctcaggcgtcctt

SEQ ID NO: 5110666 - DNA, 25 bp, Homo sapien
tcacaggtgcatagttggcagacaa

SEQ ID NO: 5110667 - DNA, 25 bp, Homo sapien
gaaatgtgagctctaaattcccttc

SEQ ID NO: 5110668 - DNA, 25 bp, Homo sapien
gaatttatgtgatctaagtctcctc

SEQ ID NO: 5110669 - DNA, 25 bp, Homo sapien
catgtctttaattgggcaagttaca

SEQ ID NO: 5110670 - DNA, 25 bp, Homo sapien
ttaaaagaacgttgttgacatgtct

SEQ ID NO: 5110671 - DNA, 25 bp, Homo sapien
gatacttggcttcggtgtgtttcta

SEQ ID NO: 5110672 - DNA, 25 bp, Homo sapien
ccatcatgatacttggcttcggtgt

SEQ ID NO: 5110673 - DNA, 25 bp, Homo sapien
atcatgatacttggcttcggtgtgt

SEQ ID NO: 5110674 - DNA, 25 bp, Homo sapien
ttggcttcggtgtgtttctattaaa

SEQ ID NO: 5110675 - DNA, 25 bp, Homo sapien
cctctggagtgaaagcaggtgccgt

SEQ ID NO: 5110676 - DNA, 25 bp, Homo sapien
tccagggactggaaatgtcgccggt

SEQ ID NO: 5110677 - DNA, 25 bp, Homo sapien
caggtgccgtatgtctttgaagcca

SEQ ID NO: 5110678 - DNA, 25 bp, Homo sapien
cactgggttcccacatttcaagggc

SEQ ID NO: 5110679 - DNA, 25 bp, Homo sapien
ggcacactggggctgaccggccact

SEQ ID NO: 5110680 - DNA, 25 bp, Homo sapien
tcactgagctgggtctgatagcagc

SEQ ID NO: 5110681 - DNA, 25 bp, Homo sapien
tgggtctgatagcagctgctggcac

SEQ ID NO: 5110682 - DNA, 25 bp, Homo sapien
gctgaccggccactgggtaggacat

SEQ ID NO: 5110683 - DNA, 25 bp, Homo sapien
tagtagtgtgtcagtgggggttgga

SEQ ID NO: 5110684 - DNA, 25 bp, Homo sapien
gggttggaggtgaccttccatccca

SEQ ID NO: 5110685 - DNA, 25 bp, Homo sapien
ttggaggtgaccttccatcccatcc

SEQ ID NO: 5110686 - DNA, 25 bp, Homo sapien
ttagtagtgtgtcagtgggggttgg

SEQ ID NO: 5110687 - DNA, 25 bp, Homo sapien
ttggaaggtgtgagattaggatccc

SEQ ID NO: 5110688 - DNA, 25 bp, Homo sapien
gaaggtgtgagattaggatcccaag

SEQ ID NO: 5110689 - DNA, 25 bp, Homo sapien
cccaaggagtgttggaagtccaagg

SEQ ID NO: 5110690 - DNA, 25 bp, Homo sapien
ctagaagaaggttgaaggtccaaga

SEQ ID NO: 5110691 - DNA, 25 bp, Homo sapien
ccgtttctaatctgcgctggttcaa

SEQ ID NO: 5110692 - DNA, 25 bp, Homo sapien
gcatagcatactacaacccttgact

SEQ ID NO: 5110693 - DNA, 25 bp, Homo sapien
taatctgcgctggttcaaccctcct

SEQ ID NO: 5110694 - DNA, 25 bp, Homo sapien
acctgctccgtttctaatctgcgct

SEQ ID NO: 5110695 - DNA, 25 bp, Homo sapien
gtgaggcagctgcaaaaaagaccca

SEQ ID NO: 5110696 - DNA, 25 bp, Homo sapien
ttcctgaaccagtgaaagccagtga

SEQ ID NO: 5110697 - DNA, 25 bp, Homo sapien
ggcagctgcaaaaaagacccagcca

SEQ ID NO: 5110698 - DNA, 25 bp, Homo sapien
attcctgcaaagcttcctgaaccag

SEQ ID NO: 5110699 - DNA, 25 bp, Homo sapien
tggaaccagaccctgacaaaaggcc

SEQ ID NO: 5110700 - DNA, 25 bp, Homo sapien
gagtccctctggtgcaaagcataga

SEQ ID NO: 5110701 - DNA, 25 bp, Homo sapien
ttaagctactcaagaaagagtgccc

SEQ ID NO: 5110702 - DNA, 25 bp, Homo sapien
caaggaagcccatggtaagaccgtg

SEQ ID NO: 5110703 - DNA, 25 bp, Homo sapien
gactatataactccgtggaaccagg

SEQ ID NO: 5110704 - DNA, 25 bp, Homo sapien
aagctccggtaccaaaggagtccag

SEQ ID NO: 5110705 - DNA, 25 bp, Homo sapien
cagaaatcctaactgcctggagcag

SEQ ID NO: 5110706 - DNA, 25 bp, Homo sapien
agtccagctgactcatatcaagtga

SEQ ID NO: 5110707 - DNA, 25 bp, Homo sapien
caggtggcaatttgtgatggaaact

SEQ ID NO: 5110708 - DNA, 25 bp, Homo sapien
aattcctgataattctcgatattct

SEQ ID NO: 5110709 - DNA, 25 bp, Homo sapien
gataattctcgatattctcaagaca

SEQ ID NO: 5110710 - DNA, 25 bp, Homo sapien
ggatgtttgttgtataaattatgct

SEQ ID NO: 5110711 - DNA, 25 bp, Homo sapien
ggcaaaatcatcactacgaaggcag

SEQ ID NO: 5110712 - DNA, 25 bp, Homo sapien
tggtcaacctgtacagtggcaaaat

SEQ ID NO: 5110713 - DNA, 25 bp, Homo sapien
gagcaccagaaatggtcaacctgta

SEQ ID NO: 5110714 - DNA, 25 bp, Homo sapien
tacacaacgctgtcctatcgagcac

SEQ ID NO: 5110715 - DNA, 25 bp, Homo sapien
ttggaagcgccaccaacaaattcca

SEQ ID NO: 5110716 - DNA, 25 bp, Homo sapien
caaactgagggagtcaatgcagtag

SEQ ID NO: 5110717 - DNA, 25 bp, Homo sapien
ggaagcgccaccaacaaattccaga

SEQ ID NO: 5110718 - DNA, 25 bp, Homo sapien
gaatccacaaactgagggagtcaat

SEQ ID NO: 5110719 - DNA, 25 bp, Homo sapien
atgtgccttgaaacgcatgtttgtc

SEQ ID NO: 5110720 - DNA, 25 bp, Homo sapien
caagcaatgggatgaaatgtgcctt

SEQ ID NO: 5110721 - DNA, 25 bp, Homo sapien
ccttgaaacgcatgtttgtcaacaa

SEQ ID NO: 5110722 - DNA, 25 bp, Homo sapien
tctggtgaggacaagcaatgggatg

SEQ ID NO: 5110723 - DNA, 25 bp, Homo sapien
gaatggtacacccaagctctcacca

SEQ ID NO: 5110724 - DNA, 25 bp, Homo sapien
aatggtacacccaagctctcaccat

SEQ ID NO: 5110725 - DNA, 25 bp, Homo sapien
tagtccacccaagctctcaccgtgg

SEQ ID NO: 5110726 - DNA, 25 bp, Homo sapien
gtgtacccgaactctcactgtggag

SEQ ID NO: 5110727 - DNA, 25 bp, Homo sapien
gacactctgccacctgaatagtcca

SEQ ID NO: 5110728 - DNA, 25 bp, Homo sapien
aacagtgtacccgaactctcactgt

SEQ ID NO: 5110729 - DNA, 25 bp, Homo sapien
ccaggccagtgtgccatgttcagcc

SEQ ID NO: 5110730 - DNA, 25 bp, Homo sapien
tccacaaccaccaccgtttgccagt

SEQ ID NO: 5110731 - DNA, 25 bp, Homo sapien
gctgtggcctcgattgggttctgtt

SEQ ID NO: 5110732 - DNA, 25 bp, Homo sapien
ccaccgtttgccagtctctgatttt

SEQ ID NO: 5110733 - DNA, 25 bp, Homo sapien
ctgtgtttcctcccgtttgagggct

SEQ ID NO: 5110734 - DNA, 25 bp, Homo sapien
tgctttctgataatcccaggtgaaa

SEQ ID NO: 5110735 - DNA, 25 bp, Homo sapien
caggtcaggtgggattccctgttct

SEQ ID NO: 5110736 - DNA, 25 bp, Homo sapien
tcaggtgggattccctgttcttctt

SEQ ID NO: 5110737 - DNA, 25 bp, Homo sapien
actagcattagatacttgggtggaa

SEQ ID NO: 5110738 - DNA, 25 bp, Homo sapien
gggtggaatgcttctcgtcttcctt

SEQ ID NO: 5110739 - DNA, 25 bp, Homo sapien
ttttgtaggagttgtggtctggcag

SEQ ID NO: 5110740 - DNA, 25 bp, Homo sapien
cctgtttagggctggcattagagca

SEQ ID NO: 5110741 - DNA, 25 bp, Homo sapien
tattccccgctccagggtactttca

SEQ ID NO: 5110742 - DNA, 25 bp, Homo sapien
ttctttagaccaggctattccccgc

SEQ ID NO: 5110743 - DNA, 25 bp, Homo sapien
catttatttgatcttgtagaagcga

SEQ ID NO: 5110744 - DNA, 25 bp, Homo sapien
cagaccgctatctaaggtggagaca

SEQ ID NO: 5110745 - DNA, 25 bp, Homo sapien
ggtggagacacttccatggtcattt

SEQ ID NO: 5110746 - DNA, 25 bp, Homo sapien
gtagaagcgaggctctagaggccat

SEQ ID NO: 5110747 - DNA, 25 bp, Homo sapien
tacttattggtaaactgggccttga

SEQ ID NO: 5110748 - DNA, 25 bp, Homo sapien
atgggtaacttggtgagaaaagcac

SEQ ID NO: 5110749 - DNA, 25 bp, Homo sapien
gatcctcttgtaggtgggctttaag

SEQ ID NO: 5110750 - DNA, 25 bp, Homo sapien
gaaaagcacagtagaacatgctgga

SEQ ID NO: 5110751 - DNA, 25 bp, Homo sapien
cttaggttcataggcccacaggttt

SEQ ID NO: 5110752 - DNA, 25 bp, Homo sapien
cacccactttgccttaggttcatag

SEQ ID NO: 5110753 - DNA, 25 bp, Homo sapien
tggtattcaaccacccactttgcct

SEQ ID NO: 5110754 - DNA, 25 bp, Homo sapien
agcctggtattcaaccacccacttt

SEQ ID NO: 5110755 - DNA, 25 bp, Homo sapien
gatgtccgtgacaaatactgaaagt

SEQ ID NO: 5110756 - DNA, 25 bp, Homo sapien
tatcagcaaaagttcccataactag

SEQ ID NO: 5110757 - DNA, 25 bp, Homo sapien
catgtcctatatcagcaaaagttcc

SEQ ID NO: 5110758 - DNA, 25 bp, Homo sapien
tgatgtcaggtacccacctgatggg

SEQ ID NO: 5110759 - DNA, 25 bp, Homo sapien
tccactttgtgcctaaatctccata

SEQ ID NO: 5110760 - DNA, 25 bp, Homo sapien
ggttttgattgatcaccagttattt

SEQ ID NO: 5110761 - DNA, 25 bp, Homo sapien
gttgtgaccttttgagttgagttct

SEQ ID NO: 5110762 - DNA, 25 bp, Homo sapien
ttgatcaccagttatttcatgctcc

SEQ ID NO: 5110763 - DNA, 25 bp, Homo sapien
accttggtggcatatggtaaatctc

SEQ ID NO: 5110764 - DNA, 25 bp, Homo sapien
tggcttgtaggaatgatacttccat

SEQ ID NO: 5110765 - DNA, 25 bp, Homo sapien
ggtaaatctcttgggtacggtcaca

SEQ ID NO: 5110766 - DNA, 25 bp, Homo sapien
cagtggtgttggtcagtagacctta

SEQ ID NO: 5110767 - DNA, 25 bp, Homo sapien
tttgttgcagttttggattccaaac

SEQ ID NO: 5110768 - DNA, 25 bp, Homo sapien
ctgggaatttggagcggtcttcctt

SEQ ID NO: 5110769 - DNA, 25 bp, Homo sapien
tactgggaatttggagcggtcttcc

SEQ ID NO: 5110770 - DNA, 25 bp, Homo sapien
ttgttgcagttttggattccaaact

SEQ ID NO: 5110771 - DNA, 25 bp, Homo sapien
tcctacttgaactagagcccttatg

SEQ ID NO: 5110772 - DNA, 25 bp, Homo sapien
tagagcccttatgtgggtgccagat

SEQ ID NO: 5110773 - DNA, 25 bp, Homo sapien
gggctacacacgatccacaggatcc

SEQ ID NO: 5110774 - DNA, 25 bp, Homo sapien
caggatcctcctacttgaactagag

SEQ ID NO: 5110775 - DNA, 25 bp, Homo sapien
tgaggtaacacatcacgaggaaact

SEQ ID NO: 5110776 - DNA, 25 bp, Homo sapien
acaggagaccccatgtgagggatcc

SEQ ID NO: 5110777 - DNA, 25 bp, Homo sapien
tcaggagcgatagcaacaggagacc

SEQ ID NO: 5110778 - DNA, 25 bp, Homo sapien
tagtgacatcctacttggaagggct

SEQ ID NO: 5110779 - DNA, 25 bp, Homo sapien
ttatatgtatccaaaacatgtggtt

SEQ ID NO: 5110780 - DNA, 25 bp, Homo sapien
attatatgtatccaaaacatgtggt

SEQ ID NO: 5110781 - DNA, 25 bp, Homo sapien
tatatgtatccaaaacatgtggttg

SEQ ID NO: 5110782 - DNA, 25 bp, Homo sapien
aaaacatgtggttgcattatgtcac

SEQ ID NO: 5110783 - DNA, 25 bp, Homo sapien
caaatatcgatggaaacatcagtgt

SEQ ID NO: 5110784 - DNA, 25 bp, Homo sapien
tcaaatatcgatggaaacatcagtg

SEQ ID NO: 5110785 - DNA, 25 bp, Homo sapien
atatcgatggaaacatcagtgtctg

SEQ ID NO: 5110786 - DNA, 25 bp, Homo sapien
aaatatcgatggaaacatcagtgtc

SEQ ID NO: 5110787 - DNA, 25 bp, Homo sapien
tgcaatcacacatctgagttgacag

SEQ ID NO: 5110788 - DNA, 25 bp, Homo sapien
taatgatctccttgtaaaaaaagcc

SEQ ID NO: 5110789 - DNA, 25 bp, Homo sapien
tcaaaaagtaatgatctccttgtaa

SEQ ID NO: 5110790 - DNA, 25 bp, Homo sapien
tctgagttgacagacatccacatca

SEQ ID NO: 5110791 - DNA, 25 bp, Homo sapien
caggactggaatggcctgaccaggt

SEQ ID NO: 5110792 - DNA, 25 bp, Homo sapien
ctgggaccctgcactgttgctgcca

SEQ ID NO: 5110793 - DNA, 25 bp, Homo sapien
gaccaggtctggcttcatgagagag

SEQ ID NO: 5110794 - DNA, 25 bp, Homo sapien
tgccactctcgggaaactttcagct

SEQ ID NO: 5110795 - DNA, 25 bp, Homo sapien
gtccgggaagtgaatttagctgtaa

SEQ ID NO: 5110796 - DNA, 25 bp, Homo sapien
tcaagtccgggaagtgaatttagct

SEQ ID NO: 5110797 - DNA, 25 bp, Homo sapien
agttgaagccagtgcagtaggattg

SEQ ID NO: 5110798 - DNA, 25 bp, Homo sapien
ggattgactgtcacagtttcttgct

SEQ ID NO: 5110799 - DNA, 25 bp, Homo sapien
tggataatctgtggcctggcaagtg

SEQ ID NO: 5110800 - DNA, 25 bp, Homo sapien
tggagctatgttaccatacactggg

SEQ ID NO: 5110801 - DNA, 25 bp, Homo sapien
taggtgctagtggagctatgttacc

SEQ ID NO: 5110802 - DNA, 25 bp, Homo sapien
gggcccctggataatctgtggcctg

SEQ ID NO: 5110803 - DNA, 25 bp, Homo sapien
caagtatggatgtagttcaggatgc

SEQ ID NO: 5110804 - DNA, 25 bp, Homo sapien
aagagacgggcttcagttagggact

SEQ ID NO: 5110805 - DNA, 25 bp, Homo sapien
taggactggcctgcattgtagagaa

SEQ ID NO: 5110806 - DNA, 25 bp, Homo sapien
ggctactggcttaagtgactgggta

SEQ ID NO: 5110807 - DNA, 25 bp, Homo sapien
gtactgtatgtacctctgggaacaa

SEQ ID NO: 5110808 - DNA, 25 bp, Homo sapien
cacattatagacttaagaggtcgga

SEQ ID NO: 5110809 - DNA, 25 bp, Homo sapien
gcaatcaacagcaaattctgcgtgg

SEQ ID NO: 5110810 - DNA, 25 bp, Homo sapien
aaaatgagtctagagaggtggtacc

SEQ ID NO: 5110811 - DNA, 25 bp, Homo sapien
agtttttcgactcccggcgagagca

SEQ ID NO: 5110812 - DNA, 25 bp, Homo sapien
gctgctccctattcgcaagatgaag

SEQ ID NO: 5110813 - DNA, 25 bp, Homo sapien
gattgacacgcatattcctataggc

SEQ ID NO: 5110814 - DNA, 25 bp, Homo sapien
cagtggctacatcggaagagtcttc

SEQ ID NO: 5110815 - DNA, 25 bp, Homo sapien
gatgtgtttaaattgccgagtcccc

SEQ ID NO: 5110816 - DNA, 25 bp, Homo sapien
gttttgaggtcaagccaacgggctg

SEQ ID NO: 5110817 - DNA, 25 bp, Homo sapien
tacttatttcaaggctggcgctcgg

SEQ ID NO: 5110818 - DNA, 25 bp, Homo sapien
aagtttaggctttgatgcgcaccca

SEQ ID NO: 5110819 - DNA, 25 bp, Homo sapien
gcacactgggtttatggtaacatga

SEQ ID NO: 5110820 - DNA, 25 bp, Homo sapien
tttcctcaaagatacagcacactgg

SEQ ID NO: 5110821 - DNA, 25 bp, Homo sapien
gattaaatacccaacatagtgcttg

SEQ ID NO: 5110822 - DNA, 25 bp, Homo sapien
gtctactttgtaggcaaccatgaag

SEQ ID NO: 5110823 - DNA, 25 bp, Homo sapien
gctcacagtgtatgatatttcacag

SEQ ID NO: 5110824 - DNA, 25 bp, Homo sapien
aaggctgtagatttctactgtggcc

SEQ ID NO: 5110825 - DNA, 25 bp, Homo sapien
cattgtaaagccactataatagctc

SEQ ID NO: 5110826 - DNA, 25 bp, Homo sapien
taaaatatatgagcgagtacaaggt

SEQ ID NO: 5110827 - DNA, 25 bp, Homo sapien
ccaggcccaggactaaggtgcttca

SEQ ID NO: 5110828 - DNA, 25 bp, Homo sapien
gattatctgtctgtaccaggcccag

SEQ ID NO: 5110829 - DNA, 25 bp, Homo sapien
tgctatgtgtcctttcactgagggt

SEQ ID NO: 5110830 - DNA, 25 bp, Homo sapien
cactgagggtgccactctttgagag

SEQ ID NO: 5110831 - DNA, 25 bp, Homo sapien
cacatgggattgaacatactgttgc

SEQ ID NO: 5110832 - DNA, 25 bp, Homo sapien
gggaaaggacatagatgccatctct

SEQ ID NO: 5110833 - DNA, 25 bp, Homo sapien
gaggtgcagtcacagaaacccgtcc

SEQ ID NO: 5110834 - DNA, 25 bp, Homo sapien
ccaacatagcattactttagaggtg

SEQ ID NO: 5110835 - DNA, 25 bp, Homo sapien
tacccattagcagtctctttcattt

SEQ ID NO: 5110836 - DNA, 25 bp, Homo sapien
gctttgtcgaggtattcacgtgcca

SEQ ID NO: 5110837 - DNA, 25 bp, Homo sapien
atctccatagagttgcttattttac

SEQ ID NO: 5110838 - DNA, 25 bp, Homo sapien
cacgtgccagtttacctgtgtgaag

SEQ ID NO: 5110839 - DNA, 25 bp, Homo sapien
gtgcgtgaataccaatcattatgcc

SEQ ID NO: 5110840 - DNA, 25 bp, Homo sapien
gcgtgaataccaatcattatgccca

SEQ ID NO: 5110841 - DNA, 25 bp, Homo sapien
gaataccaatcattatgcccatgaa

SEQ ID NO: 5110842 - DNA, 25 bp, Homo sapien
gtgaataccaatcattatgcccatg

SEQ ID NO: 5110843 - DNA, 25 bp, Homo sapien
tgaatcagtctataacacttttatg

SEQ ID NO: 5110844 - DNA, 25 bp, Homo sapien
actgaatcagtctataacactttta

SEQ ID NO: 5110845 - DNA, 25 bp, Homo sapien
aatcagtctataacacttttatggg

SEQ ID NO: 5110846 - DNA, 25 bp, Homo sapien
tcagtctataacacttttatgggac

SEQ ID NO: 5110847 - DNA, 25 bp, Homo sapien
aacatactaaaggccatataggaca

SEQ ID NO: 5110848 - DNA, 25 bp, Homo sapien
catactaaaggccatataggacaaa

SEQ ID NO: 5110849 - DNA, 25 bp, Homo sapien
taagaattcccaacaaactaggcat

SEQ ID NO: 5110850 - DNA, 25 bp, Homo sapien
atactaaaggccatataggacaaac

SEQ ID NO: 5110851 - DNA, 25 bp, Homo sapien
catgcaagtgtcttgagctccaggc

SEQ ID NO: 5110852 - DNA, 25 bp, Homo sapien
tctccgttgtttcacacactcgtga

SEQ ID NO: 5110853 - DNA, 25 bp, Homo sapien
acactcgtgactttggttctctgcc

SEQ ID NO: 5110854 - DNA, 25 bp, Homo sapien
ttctggaataaagggatctgggtgt

SEQ ID NO: 5110855 - DNA, 25 bp, Homo sapien
actgtggccctgacatgtggcagtc

SEQ ID NO: 5110856 - DNA, 25 bp, Homo sapien
gccctgacatgtggcagtccttggg

SEQ ID NO: 5110857 - DNA, 25 bp, Homo sapien
tgtggccctgacatgtggcagtcct

SEQ ID NO: 5110858 - DNA, 25 bp, Homo sapien
gacactgtggccctgacatgtggca

SEQ ID NO: 5110859 - DNA, 25 bp, Homo sapien
agcgtggtttctcctccacttcgtt

SEQ ID NO: 5110860 - DNA, 25 bp, Homo sapien
agtccactgttggaaaggcttctcc

SEQ ID NO: 5110861 - DNA, 25 bp, Homo sapien
ctccacttcgttgcttccattcaat

SEQ ID NO: 5110862 - DNA, 25 bp, Homo sapien
tcagtccactgttggaaaggcttct

SEQ ID NO: 5110863 - DNA, 25 bp, Homo sapien
cccactatctgcacctcatggctgt

SEQ ID NO: 5110864 - DNA, 25 bp, Homo sapien
ccactatctgcacctcatggctgtc

SEQ ID NO: 5110865 - DNA, 25 bp, Homo sapien
ctagtcgtgtccgtagagagttgcg

SEQ ID NO: 5110866 - DNA, 25 bp, Homo sapien
cactgaccgaacaattctaatggtc

SEQ ID NO: 5110867 - DNA, 25 bp, Homo sapien
ggtctttatcctggctagtcgtgtc

SEQ ID NO: 5110868 - DNA, 25 bp, Homo sapien
tccgtagagagttgcggaaggctct

SEQ ID NO: 5110869 - DNA, 25 bp, Homo sapien
gaggtcctgttgctaatgttggtcc

SEQ ID NO: 5110870 - DNA, 25 bp, Homo sapien
tactgagatggttgtctcccctagg

SEQ ID NO: 5110871 - DNA, 25 bp, Homo sapien
gatcccatggcctgtctgaatgtca

SEQ ID NO: 5110872 - DNA, 25 bp, Homo sapien
tctttacgagggagtgggtagatcc

SEQ ID NO: 5110873 - DNA, 25 bp, Homo sapien
gagtagagctccttccatattcgaa

SEQ ID NO: 5110874 - DNA, 25 bp, Homo sapien
cctttctcctcttcacggcagggag

SEQ ID NO: 5110875 - DNA, 25 bp, Homo sapien
gccccattctcttgcggaggacaga

SEQ ID NO: 5110876 - DNA, 25 bp, Homo sapien
gtccgacctttgtgttcctccatca

SEQ ID NO: 5110877 - DNA, 25 bp, Homo sapien
tatgtgagttttcggtcacgtgccc

SEQ ID NO: 5110878 - DNA, 25 bp, Homo sapien
gcatggatgcatttggtcctcaccg

SEQ ID NO: 5110879 - DNA, 25 bp, Homo sapien
caacacaggaggttaatgggagctc

SEQ ID NO: 5110880 - DNA, 25 bp, Homo sapien
aaagagctagggcttgtcagaaggc

SEQ ID NO: 5110881 - DNA, 25 bp, Homo sapien
tgtccactgaaacaggatgatactg

SEQ ID NO: 5110882 - DNA, 25 bp, Homo sapien
acttggttataagagcagggctcaa

SEQ ID NO: 5110883 - DNA, 25 bp, Homo sapien
agggaggaccttgcgttaggcttca

SEQ ID NO: 5110884 - DNA, 25 bp, Homo sapien
tcttggctttatgatactggcccat

SEQ ID NO: 5110885 - DNA, 25 bp, Homo sapien
gagttggtctcatcctttcttgcta

SEQ ID NO: 5110886 - DNA, 25 bp, Homo sapien
taagtaaggactagacagagccacc

SEQ ID NO: 5110887 - DNA, 25 bp, Homo sapien
ggactcttgactttaagggacagaa

SEQ ID NO: 5110888 - DNA, 25 bp, Homo sapien
ggaatggctagatccagacacccaa

SEQ ID NO: 5110889 - DNA, 25 bp, Homo sapien
caagactgtctgttatgcaaatatc

SEQ ID NO: 5110890 - DNA, 25 bp, Homo sapien
ccaaatctctttgcagggagtcact

SEQ ID NO: 5110891 - DNA, 25 bp, Homo sapien
tgttaccctggaatatctcaggaag

SEQ ID NO: 5110892 - DNA, 25 bp, Homo sapien
taaagggcacggtctctagctctgt

SEQ ID NO: 5110893 - DNA, 25 bp, Homo sapien
cagggcgagagtcagcatcatcact

SEQ ID NO: 5110894 - DNA, 25 bp, Homo sapien
cagctgcaaatagtccagggcgaga

SEQ ID NO: 5110895 - DNA, 25 bp, Homo sapien
tgtggattgcgctgaagtgactgca

SEQ ID NO: 5110896 - DNA, 25 bp, Homo sapien
tgtggccactgctaagttcgagcaa

SEQ ID NO: 5110897 - DNA, 25 bp, Homo sapien
cagacacagcgagcgacacccacaa

SEQ ID NO: 5110898 - DNA, 25 bp, Homo sapien
ctgatctacagacacagcgagcgac

SEQ ID NO: 5110899 - DNA, 25 bp, Homo sapien
atctacagacacagcgagcgacacc

SEQ ID NO: 5110900 - DNA, 25 bp, Homo sapien
acagacacagcgagcgacacccaca

SEQ ID NO: 5110901 - DNA, 25 bp, Homo sapien
cattccataatcttgtggagttggg

SEQ ID NO: 5110902 - DNA, 25 bp, Homo sapien
ggcagggttgacaaggggtgactgt

SEQ ID NO: 5110903 - DNA, 25 bp, Homo sapien
ggagttggggacaacaggatgttgt

SEQ ID NO: 5110904 - DNA, 25 bp, Homo sapien
tcaaaggttcattccataatcttgt

SEQ ID NO: 5110905 - DNA, 25 bp, Homo sapien
ctctgcccacgagaccggaaaatcc

SEQ ID NO: 5110906 - DNA, 25 bp, Homo sapien
gagactgagcccaagttcctggttg

SEQ ID NO: 5110907 - DNA, 25 bp, Homo sapien
cagcgggtcttatccgggacggatc

SEQ ID NO: 5110908 - DNA, 25 bp, Homo sapien
aaaatccctctctaggggaagcgca

SEQ ID NO: 5110909 - DNA, 25 bp, Homo sapien
tctgcatattgtacaagcttcctgg

SEQ ID NO: 5110910 - DNA, 25 bp, Homo sapien
tgaacctctgcctaaacttgtagtg

SEQ ID NO: 5110911 - DNA, 25 bp, Homo sapien
tcaaagtgaggcctgaatcacaatc

SEQ ID NO: 5110912 - DNA, 25 bp, Homo sapien
acttgtagtgacagagctctcgcca

SEQ ID NO: 5110913 - DNA, 25 bp, Homo sapien
caatccacctgcttagcctgggatt

SEQ ID NO: 5110914 - DNA, 25 bp, Homo sapien
cctattacacagagtggtaaagcat

SEQ ID NO: 5110915 - DNA, 25 bp, Homo sapien
ggtaaagcataggatatagagtcat

SEQ ID NO: 5110916 - DNA, 25 bp, Homo sapien
gatatagagtcatactgacaagttc

SEQ ID NO: 5110917 - DNA, 25 bp, Homo sapien
caagtggtttggacttaggctctcc

SEQ ID NO: 5110918 - DNA, 25 bp, Homo sapien
gatcccctagatactcagaatgacc

SEQ ID NO: 5110919 - DNA, 25 bp, Homo sapien
caagttcatcttggacaagtggttt

SEQ ID NO: 5110920 - DNA, 25 bp, Homo sapien
cagaatgacctaaatcaatatcaag

SEQ ID NO: 5110921 - DNA, 25 bp, Homo sapien
acagccttaggagggagcataaaag

SEQ ID NO: 5110922 - DNA, 25 bp, Homo sapien
ccccaggacagccttaggagggagc

SEQ ID NO: 5110923 - DNA, 25 bp, Homo sapien
gccttaggagggagcataaaagaac

SEQ ID NO: 5110924 - DNA, 25 bp, Homo sapien
ccaggacagccttaggagggagcat

SEQ ID NO: 5110925 - DNA, 25 bp, Homo sapien
taaagctagtcaagggaaacagtac

SEQ ID NO: 5110926 - DNA, 25 bp, Homo sapien
tctctcacttgggtgtatattggaa

SEQ ID NO: 5110927 - DNA, 25 bp, Homo sapien
tttactgacatatacattatgcata

SEQ ID NO: 5110928 - DNA, 25 bp, Homo sapien
tatttcaatagttagaaaagtctgg

SEQ ID NO: 5110929 - DNA, 25 bp, Homo sapien
tttgcagaggtagagtctccctatg

SEQ ID NO: 5110930 - DNA, 25 bp, Homo sapien
tgtgcttggtctccttttaacctta

SEQ ID NO: 5110931 - DNA, 25 bp, Homo sapien
gcttataggcgtaagcctctgtgct

SEQ ID NO: 5110932 - DNA, 25 bp, Homo sapien
tagtaggggtcaggtacggtagctc

SEQ ID NO: 5110933 - DNA, 25 bp, Homo sapien
cttgtagatacttacttctgttggc

SEQ ID NO: 5110934 - DNA, 25 bp, Homo sapien
tgccaagacgggtcttgaactactg

SEQ ID NO: 5110935 - DNA, 25 bp, Homo sapien
tctgttggcttattccttgtgatat

SEQ ID NO: 5110936 - DNA, 25 bp, Homo sapien
caaagcccaaccacccataagttag

SEQ ID NO: 5110937 - DNA, 25 bp, Homo sapien
ggaaactattaggtatcctcagtgt

SEQ ID NO: 5110938 - DNA, 25 bp, Homo sapien
catagcattctaaacagggaagaag

SEQ ID NO: 5110939 - DNA, 25 bp, Homo sapien
catactcatcacatcaagggcaaga

SEQ ID NO: 5110940 - DNA, 25 bp, Homo sapien
tcctttgagactacagattttggct

SEQ ID NO: 5110941 - DNA, 25 bp, Homo sapien
tatctctttaaatcacgcacacaaa

SEQ ID NO: 5110942 - DNA, 25 bp, Homo sapien
tgttatagctaatgttgattgaaca

SEQ ID NO: 5110943 - DNA, 25 bp, Homo sapien
ctcagcctcactttgtatttctact

SEQ ID NO: 5110944 - DNA, 25 bp, Homo sapien
acactttacatgaatggtcagacta

SEQ ID NO: 5110945 - DNA, 25 bp, Homo sapien
gatatttttctaggcactgatgcaa

SEQ ID NO: 5110946 - DNA, 25 bp, Homo sapien
gactgtctctataccccaatatggt

SEQ ID NO: 5110947 - DNA, 25 bp, Homo sapien
gcagcctccagcttttagggtccag

SEQ ID NO: 5110948 - DNA, 25 bp, Homo sapien
gcaactgaaagtggctagagagact

SEQ ID NO: 5110949 - DNA, 25 bp, Homo sapien
cagccgctcccagtttctcattcaa

SEQ ID NO: 5110950 - DNA, 25 bp, Homo sapien
gccgctcccagtttctcattcaaga

SEQ ID NO: 5110951 - DNA, 25 bp, Homo sapien
agccgctcccagtttctcattcaag

SEQ ID NO: 5110952 - DNA, 25 bp, Homo sapien
tagaatcaaagtccctcgaggaaac

SEQ ID NO: 5110953 - DNA, 25 bp, Homo sapien
tagcaacgcccactctaaggcaaag

SEQ ID NO: 5110954 - DNA, 25 bp, Homo sapien
caagttctcaacctaagtaagaggc

SEQ ID NO: 5110955 - DNA, 25 bp, Homo sapien
tccttaaaagaaacgatggctcatc

SEQ ID NO: 5110956 - DNA, 25 bp, Homo sapien
gatggccccggtcaaacatgtttag

SEQ ID NO: 5110957 - DNA, 25 bp, Homo sapien
catgtttagtacaaggctggtggcc

SEQ ID NO: 5110958 - DNA, 25 bp, Homo sapien
tacaggtctaactatggtgcagcca

SEQ ID NO: 5110959 - DNA, 25 bp, Homo sapien
aactggaccacacttttgacgggca

SEQ ID NO: 5110960 - DNA, 25 bp, Homo sapien
ccctttctacaatccataagctgca

SEQ ID NO: 5110961 - DNA, 25 bp, Homo sapien
ctgaagccctttctacaatccataa

SEQ ID NO: 5110962 - DNA, 25 bp, Homo sapien
cctttctacaatccataagctgcac

SEQ ID NO: 5110963 - DNA, 25 bp, Homo sapien
tctctgaagccctttctacaatcca

SEQ ID NO: 5110964 - DNA, 25 bp, Homo sapien
caaatgcttattagcatagagcctg

SEQ ID NO: 5110965 - DNA, 25 bp, Homo sapien
gcagaaaatggtactcctcgattca

SEQ ID NO: 5110966 - DNA, 25 bp, Homo sapien
ggtaaggcctcaataactcttggca

SEQ ID NO: 5110967 - DNA, 25 bp, Homo sapien
tcagatagtatgtgtaaagtcagtc

SEQ ID NO: 5110968 - DNA, 25 bp, Homo sapien
ttgtactcaagctggacacagattc

SEQ ID NO: 5110969 - DNA, 25 bp, Homo sapien
ggttaagtaccaatacttgtactca

SEQ ID NO: 5110970 - DNA, 25 bp, Homo sapien
gattctgaactgaatgttacagcag

SEQ ID NO: 5110971 - DNA, 25 bp, Homo sapien
gatacacactacagaaaggattcct

SEQ ID NO: 5110972 - DNA, 25 bp, Homo sapien
gtcaagatcagagttcagccaccca

SEQ ID NO: 5110973 - DNA, 25 bp, Homo sapien
caagatcagagttcagccacccaag

SEQ ID NO: 5110974 - DNA, 25 bp, Homo sapien
ggtcaagatcagagttcagccaccc

SEQ ID NO: 5110975 - DNA, 25 bp, Homo sapien
agatcagagttcagccacccaagca

SEQ ID NO: 5110976 - DNA, 25 bp, Homo sapien
tgtaggaaagctgtgagcctgctga

SEQ ID NO: 5110977 - DNA, 25 bp, Homo sapien
tccgagtggaaagcacacaaagggc

SEQ ID NO: 5110978 - DNA, 25 bp, Homo sapien
cacaaagggccacttgattacagtc

SEQ ID NO: 5110979 - DNA, 25 bp, Homo sapien
ccaatgttgcgactgtatagtgtga

SEQ ID NO: 5110980 - DNA, 25 bp, Homo sapien
tgctgcaagaccaggctttcatgtt

SEQ ID NO: 5110981 - DNA, 25 bp, Homo sapien
atagtggcccacatcaagcccatcc

SEQ ID NO: 5110982 - DNA, 25 bp, Homo sapien
ccaagtcctcaggtacccagggcac

SEQ ID NO: 5110983 - DNA, 25 bp, Homo sapien
gtacccagggcacgggccttctctg

SEQ ID NO: 5110984 - DNA, 25 bp, Homo sapien
ctgaagcagctttgacagtacctcc

SEQ ID NO: 5110985 - DNA, 25 bp, Homo sapien
cctgaagcagctttgacagtacctc

SEQ ID NO: 5110986 - DNA, 25 bp, Homo sapien
caataatccaattgggacattggca

SEQ ID NO: 5110987 - DNA, 25 bp, Homo sapien
tatatgtgttacttgtgtaatgcct

SEQ ID NO: 5110988 - DNA, 25 bp, Homo sapien
ttctgaaagaacctcactcagaggc

SEQ ID NO: 5110989 - DNA, 25 bp, Homo sapien
tgcaaaatcttataactgctggatc

SEQ ID NO: 5110990 - DNA, 25 bp, Homo sapien
taggtcctctggtattacgcttggg

SEQ ID NO: 5110991 - DNA, 25 bp, Homo sapien
tccctgagtcacattgaaaagaacc

SEQ ID NO: 5110992 - DNA, 25 bp, Homo sapien
catgactagcccattgattaggtcc

SEQ ID NO: 5110993 - DNA, 25 bp, Homo sapien
ctcctctggagtgcattctgaagca

SEQ ID NO: 5110994 - DNA, 25 bp, Homo sapien
cccaaggagctaactggagggtagc

SEQ ID NO: 5110995 - DNA, 25 bp, Homo sapien
cactaccagtgttataggaggcaaa

SEQ ID NO: 5110996 - DNA, 25 bp, Homo sapien
tagcatgctggaagacactaccagt

SEQ ID NO: 5110997 - DNA, 25 bp, Homo sapien
tacccagcatgaaggtgttggcccc

SEQ ID NO: 5110998 - DNA, 25 bp, Homo sapien
ctaataatggcgtcttcatcggtgc

SEQ ID NO: 5110999 - DNA, 25 bp, Homo sapien
ggtgctcttgtaggctgtcctgatc

SEQ ID NO: 5111000 - DNA, 25 bp, Homo sapien
tgttgcggtaggcaaggacgctaat

SEQ ID NO: 5111001 - DNA, 25 bp, Homo sapien
ggctgtcctgatctcctggcgctgg

SEQ ID NO: 5111002 - DNA, 25 bp, Homo sapien
ccactcagttctgacttcaggtcgt

SEQ ID NO: 5111003 - DNA, 25 bp, Homo sapien
ttcgcagctcttgcacgtcatacag

SEQ ID NO: 5111004 - DNA, 25 bp, Homo sapien
gcagctcttgcacgtcatacagcac

SEQ ID NO: 5111005 - DNA, 25 bp, Homo sapien
acgtcatacagcaccgtgggcgtca

SEQ ID NO: 5111006 - DNA, 25 bp, Homo sapien
tcatacagcaccgtgggcgtcatca

SEQ ID NO: 5111007 - DNA, 25 bp, Homo sapien
ggtacgtcatctagggaagccagga

SEQ ID NO: 5111008 - DNA, 25 bp, Homo sapien
gaagtaagcctatagtagacctgga

SEQ ID NO: 5111009 - DNA, 25 bp, Homo sapien
taaaatttggcagaccaggctaggg

SEQ ID NO: 5111010 - DNA, 25 bp, Homo sapien
ggaggcccctaaagtgtcagtcata

SEQ ID NO: 5111011 - DNA, 25 bp, Homo sapien
taggtttggcttatgcgccggatct

SEQ ID NO: 5111012 - DNA, 25 bp, Homo sapien
ggccaggatctcaattaggcagccc

SEQ ID NO: 5111013 - DNA, 25 bp, Homo sapien
ctgctggtaggtttggcttatgcgc

SEQ ID NO: 5111014 - DNA, 25 bp, Homo sapien
tctcaattaggcagccctcatcagt

SEQ ID NO: 5111015 - DNA, 25 bp, Homo sapien
gaggatccctcatgctcagcgttct

SEQ ID NO: 5111016 - DNA, 25 bp, Homo sapien
ggatctccctcgaagcagagcttgg

SEQ ID NO: 5111017 - DNA, 25 bp, Homo sapien
tctctaatcacagcgaaacctcagc

SEQ ID NO: 5111018 - DNA, 25 bp, Homo sapien
aaatcttaaggagccaacagaccgc

SEQ ID NO: 5111019 - DNA, 25 bp, Homo sapien
ggcaaggcgaggaactccactgcag

SEQ ID NO: 5111020 - DNA, 25 bp, Homo sapien
cccagaaataagaatcattgacaac

SEQ ID NO: 5111021 - DNA, 25 bp, Homo sapien
tttaaaaatgggatcatagcatact

SEQ ID NO: 5111022 - DNA, 25 bp, Homo sapien
tccactgcagtctaatcacccagaa

SEQ ID NO: 5111023 - DNA, 25 bp, Homo sapien
gacaccagcactcgctggaacatga

SEQ ID NO: 5111024 - DNA, 25 bp, Homo sapien
gaacgatgtgtcagagcgaatgtca

SEQ ID NO: 5111025 - DNA, 25 bp, Homo sapien
cactcgctggaacatgaacgatgtg

SEQ ID NO: 5111026 - DNA, 25 bp, Homo sapien
gtcatcttcaaggctccgtccatat

SEQ ID NO: 5111027 - DNA, 25 bp, Homo sapien
gtctgagaacactacctggggaata

SEQ ID NO: 5111028 - DNA, 25 bp, Homo sapien
gggaatatccacatgtcaggggctg

SEQ ID NO: 5111029 - DNA, 25 bp, Homo sapien
ggcaggattagccagagtctctgaa

SEQ ID NO: 5111030 - DNA, 25 bp, Homo sapien
ggcaggcaggattagccagagtctc

SEQ ID NO: 5111031 - DNA, 25 bp, Homo sapien
gtgtaaactgctcccaacatagaat

SEQ ID NO: 5111032 - DNA, 25 bp, Homo sapien
aactgctcccaacatagaattccag

SEQ ID NO: 5111033 - DNA, 25 bp, Homo sapien
taaactgctcccaacatagaattcc

SEQ ID NO: 5111034 - DNA, 25 bp, Homo sapien
ataagtgtaaactgctcccaacata

SEQ ID NO: 5111035 - DNA, 25 bp, Homo sapien
cactgttcatcctacacgtcactat

SEQ ID NO: 5111036 - DNA, 25 bp, Homo sapien
ggtagcttcctacctggtcgtccag

SEQ ID NO: 5111037 - DNA, 25 bp, Homo sapien
acatcactcccatcatcgttgtcat

SEQ ID NO: 5111038 - DNA, 25 bp, Homo sapien
acgtcactattacattactcttctg

SEQ ID NO: 5111039 - DNA, 25 bp, Homo sapien
cagtgtggcccctaacgttgcatga

SEQ ID NO: 5111040 - DNA, 25 bp, Homo sapien
caagaattggagcttcagacccagg

SEQ ID NO: 5111041 - DNA, 25 bp, Homo sapien
tgtgtgcctagagggctgagcctca

SEQ ID NO: 5111042 - DNA, 25 bp, Homo sapien
tgccaatagcaggagaagcttccca

SEQ ID NO: 5111043 - DNA, 25 bp, Homo sapien
tgtctcacgagagcatcgtccagat

SEQ ID NO: 5111044 - DNA, 25 bp, Homo sapien
cgagagcatcgtccagataatttcc

SEQ ID NO: 5111045 - DNA, 25 bp, Homo sapien
gataatttccttcatccctcccacc

SEQ ID NO: 5111046 - DNA, 25 bp, Homo sapien
ggcatcctgtctcacgagagcatcg

SEQ ID NO: 5111047 - DNA, 25 bp, Homo sapien
gagtcagggcaaacactagcagttc

SEQ ID NO: 5111048 - DNA, 25 bp, Homo sapien
tacaggtagccggtagtcacccata

SEQ ID NO: 5111049 - DNA, 25 bp, Homo sapien
gcataaggctgttgggaccctgtca

SEQ ID NO: 5111050 - DNA, 25 bp, Homo sapien
tggaacaaaaccataggctggcctg

SEQ ID NO: 5111051 - DNA, 25 bp, Homo sapien
tgcaacaggtgatttcggttccggg

SEQ ID NO: 5111052 - DNA, 25 bp, Homo sapien
gcaacaggtgatttcggttccggga

SEQ ID NO: 5111053 - DNA, 25 bp, Homo sapien
caggtgatttcggttccgggaacag

SEQ ID NO: 5111054 - DNA, 25 bp, Homo sapien
catgcaacaggtgatttcggttccg

SEQ ID NO: 5111055 - DNA, 25 bp, Homo sapien
cacgtgagcagttgacccagtcagg

SEQ ID NO: 5111056 - DNA, 25 bp, Homo sapien
tgggaccctcacacataaaatggag

SEQ ID NO: 5111057 - DNA, 25 bp, Homo sapien
ggtagcccgggatattgattaacag

SEQ ID NO: 5111058 - DNA, 25 bp, Homo sapien
taattagtaatgtgggcaagcagcc

SEQ ID NO: 5111059 - DNA, 25 bp, Homo sapien
ctgttcaatatccttctgtgatatc

SEQ ID NO: 5111060 - DNA, 25 bp, Homo sapien
gcagatttgttcctcatgcacttta

SEQ ID NO: 5111061 - DNA, 25 bp, Homo sapien
gagcttttcagcaaaatatgcagat

SEQ ID NO: 5111062 - DNA, 25 bp, Homo sapien
cttcatcgatttatagagcttttca

SEQ ID NO: 5111063 - DNA, 25 bp, Homo sapien
aaaatatgcagatttgttcctcatg

SEQ ID NO: 5111064 - DNA, 25 bp, Homo sapien
gaggttagtaatagtaccagcctga

SEQ ID NO: 5111065 - DNA, 25 bp, Homo sapien
cctcactgagaatcttgggcaaact

SEQ ID NO: 5111066 - DNA, 25 bp, Homo sapien
taagtaagcttaagaaggtggacac

SEQ ID NO: 5111067 - DNA, 25 bp, Homo sapien
taggaatacgggctctggagctaga

SEQ ID NO: 5111068 - DNA, 25 bp, Homo sapien
gaagtgtgcccggatatccaacatg

SEQ ID NO: 5111069 - DNA, 25 bp, Homo sapien
caacatgtcaatttctgctcgagaa

SEQ ID NO: 5111070 - DNA, 25 bp, Homo sapien
ttgatgaacgagtacagagactttc

SEQ ID NO: 5111071 - DNA, 25 bp, Homo sapien
gggtgttatcatcggtgcccaagcc

SEQ ID NO: 5111072 - DNA, 25 bp, Homo sapien
ctggacttaggctgctgtgacctac

SEQ ID NO: 5111073 - DNA, 25 bp, Homo sapien
tctggacttaggctgctgtgaccta

SEQ ID NO: 5111074 - DNA, 25 bp, Homo sapien
caggctggagtcttgaagtggtaca

SEQ ID NO: 5111075 - DNA, 25 bp, Homo sapien
ctggagtcttgaagtggtacagtca

SEQ ID NO: 5111076 - DNA, 25 bp, Homo sapien
tactcaggctggagtcttgaagtgg

SEQ ID NO: 5111077 - DNA, 25 bp, Homo sapien
ggagtcttgaagtggtacagtcatg

SEQ ID NO: 5111078 - DNA, 25 bp, Homo sapien
ttttacatgtcactgtattttagtt

SEQ ID NO: 5111079 - DNA, 25 bp, Homo sapien
ttattgaatgagtaatgtattcttt

SEQ ID NO: 5111080 - DNA, 25 bp, Homo sapien
tattgaatgagtaatgtattcttta

SEQ ID NO: 5111081 - DNA, 25 bp, Homo sapien
tgagcaaccgtgctagggccctatt

SEQ ID NO: 5111082 - DNA, 25 bp, Homo sapien
gcaaccgtgctagggccctattttg

SEQ ID NO: 5111083 - DNA, 25 bp, Homo sapien
cgtgagcaaccgtgctagggcccta

SEQ ID NO: 5111084 - DNA, 25 bp, Homo sapien
gagcaaccgtgctagggccctattt

SEQ ID NO: 5111085 - DNA, 25 bp, Homo sapien
ctgttcgatagggaagcaaagttag

SEQ ID NO: 5111086 - DNA, 25 bp, Homo sapien
ttcgatagggaagcaaagttagata

SEQ ID NO: 5111087 - DNA, 25 bp, Homo sapien
gccaactttttcaagcttggctgga

SEQ ID NO: 5111088 - DNA, 25 bp, Homo sapien
tcaaagtcatctaagccaacttttt

SEQ ID NO: 5111089 - DNA, 25 bp, Homo sapien
aatcatctcctccacagagaacaag

SEQ ID NO: 5111090 - DNA, 25 bp, Homo sapien
tcctgtagtctccagatgtgtcacc

SEQ ID NO: 5111091 - DNA, 25 bp, Homo sapien
agagaacaagcagtactttcctgta

SEQ ID NO: 5111092 - DNA, 25 bp, Homo sapien
agtactttcctgtagtctccagatg

SEQ ID NO: 5111093 - DNA, 25 bp, Homo sapien
gctgtaggcgttttaattggaaata

SEQ ID NO: 5111094 - DNA, 25 bp, Homo sapien
ttcaaagtgttgagaatcctcctgt

SEQ ID NO: 5111095 - DNA, 25 bp, Homo sapien
cagctgtaggcgttttaattggaaa

SEQ ID NO: 5111096 - DNA, 25 bp, Homo sapien
aaaattcaaagtgttgagaatcctc

SEQ ID NO: 5111097 - DNA, 25 bp, Homo sapien
ccatttatatcttataagctttgaa

SEQ ID NO: 5111098 - DNA, 25 bp, Homo sapien
aaatctccatttatatcttataagc

SEQ ID NO: 5111099 - DNA, 25 bp, Homo sapien
tataggtgaataataatacagacag

SEQ ID NO: 5111100 - DNA, 25 bp, Homo sapien
gcatcataatgactaattataggtg

SEQ ID NO: 5111101 - DNA, 25 bp, Homo sapien
tgtctgtgaaacacaaagtagaaag

SEQ ID NO: 5111102 - DNA, 25 bp, Homo sapien
aatatattcaatgtctgtgaaacac

SEQ ID NO: 5111103 - DNA, 25 bp, Homo sapien
tttaatatattcaatgtctgtgaaa

SEQ ID NO: 5111104 - DNA, 25 bp, Homo sapien
taatttaatatattcaatgtctgtg

SEQ ID NO: 5111105 - DNA, 25 bp, Homo sapien
tggatgggcattcttactgaccgga

SEQ ID NO: 5111106 - DNA, 25 bp, Homo sapien
tcagagcattacatcattcccagaa

SEQ ID NO: 5111107 - DNA, 25 bp, Homo sapien
taagatgtgatgaaggaagtctccc

SEQ ID NO: 5111108 - DNA, 25 bp, Homo sapien
tcaactgatgctatggacaaaacct

SEQ ID NO: 5111109 - DNA, 25 bp, Homo sapien
tcttcagaatgtttctggagttgaa

SEQ ID NO: 5111110 - DNA, 25 bp, Homo sapien
gtacatcttcagaatgtttctggag

SEQ ID NO: 5111111 - DNA, 25 bp, Homo sapien
taaatccaagtacatcttcagaatg

SEQ ID NO: 5111112 - DNA, 25 bp, Homo sapien
aatgtttctggagttgaaaggcaca

SEQ ID NO: 5111113 - DNA, 25 bp, Homo sapien
gcagagggcatcactcatttccaga

SEQ ID NO: 5111114 - DNA, 25 bp, Homo sapien
tagccagtaggcacgcataagacta

SEQ ID NO: 5111115 - DNA, 25 bp, Homo sapien
ggatcagagaaagactatacctcac

SEQ ID NO: 5111116 - DNA, 25 bp, Homo sapien
tgagtagtgtttggcatatgtgaac

SEQ ID NO: 5111117 - DNA, 25 bp, Homo sapien
ggcaggtggagcctgcgcacaatcc

SEQ ID NO: 5111118 - DNA, 25 bp, Homo sapien
atccggcgcgccagtgcaggctggt

SEQ ID NO: 5111119 - DNA, 25 bp, Homo sapien
gcgtgcgtgcgtggcaggtggagcc

SEQ ID NO: 5111120 - DNA, 25 bp, Homo sapien
tggagcctgcgcacaatccggcgcg

SEQ ID NO: 5111121 - DNA, 25 bp, Homo sapien
cctcgctttcgcaacaaagcgcggg

SEQ ID NO: 5111122 - DNA, 25 bp, Homo sapien
tttcgcaacaaagcgcgggacggag

SEQ ID NO: 5111123 - DNA, 25 bp, Homo sapien
acggagggcgcatgcgtacggcgag

SEQ ID NO: 5111124 - DNA, 25 bp, Homo sapien
gctttcgcaacaaagcgcgggacgg

SEQ ID NO: 5111125 - DNA, 25 bp, Homo sapien
accgttgcagcggacgccacagtct

SEQ ID NO: 5111126 - DNA, 25 bp, Homo sapien
ccgcagcgtccggtcgcgccgcgct

SEQ ID NO: 5111127 - DNA, 25 bp, Homo sapien
acgcgcagccccaaccgttgcagcg

SEQ ID NO: 5111128 - DNA, 25 bp, Homo sapien
agtctccatcctcttccccgcccgc

SEQ ID NO: 5111129 - DNA, 25 bp, Homo sapien
agggctggtcttggctggcgcagca

SEQ ID NO: 5111130 - DNA, 25 bp, Homo sapien
ctggtcttggctggcgcagcacccg

SEQ ID NO: 5111131 - DNA, 25 bp, Homo sapien
gcacccggctgctcaacgatcccat

SEQ ID NO: 5111132 - DNA, 25 bp, Homo sapien
tcttggctggcgcagcacccggctg

SEQ ID NO: 5111133 - DNA, 25 bp, Homo sapien
gagccccccgccctggcaccctgcg

SEQ ID NO: 5111134 - DNA, 25 bp, Homo sapien
ccgagccccccgccctggcaccctg

SEQ ID NO: 5111135 - DNA, 25 bp, Homo sapien
agccccccgccctggcaccctgcgc

SEQ ID NO: 5111136 - DNA, 25 bp, Homo sapien
cgagccccccgccctggcaccctgc

SEQ ID NO: 5111137 - DNA, 25 bp, Homo sapien
ctgcccgcacagtaacagaatccgt

SEQ ID NO: 5111138 - DNA, 25 bp, Homo sapien
atccgtggcccgccgcatcgtctcc

SEQ ID NO: 5111139 - DNA, 25 bp, Homo sapien
gtaacagaatccgtggcccgccgca

SEQ ID NO: 5111140 - DNA, 25 bp, Homo sapien
gaatccgtggcccgccgcatcgtct

SEQ ID NO: 5111141 - DNA, 25 bp, Homo sapien
tcagggtgacagtagcagaaggacc

SEQ ID NO: 5111142 - DNA, 25 bp, Homo sapien
ggtgacagtagcagaaggacccgct

SEQ ID NO: 5111143 - DNA, 25 bp, Homo sapien
ccgagtcagggtgacagtagcagaa

SEQ ID NO: 5111144 - DNA, 25 bp, Homo sapien
gtccgtctccgagtcagggtgacag

SEQ ID NO: 5111145 - DNA, 25 bp, Homo sapien
ctgtcaagggcacgtcccctctcca

SEQ ID NO: 5111146 - DNA, 25 bp, Homo sapien
tgtcaagggcacgtcccctctccat

SEQ ID NO: 5111147 - DNA, 25 bp, Homo sapien
gtcaagggcacgtcccctctccata

SEQ ID NO: 5111148 - DNA, 25 bp, Homo sapien
tcaagggcacgtcccctctccatag

SEQ ID NO: 5111149 - DNA, 25 bp, Homo sapien
ttaacgagacgcgagctcgggcttg

SEQ ID NO: 5111150 - DNA, 25 bp, Homo sapien
tgaaaatgcggaacacctggcgtct

SEQ ID NO: 5111151 - DNA, 25 bp, Homo sapien
gccagccgggcgtctctaaggttta

SEQ ID NO: 5111152 - DNA, 25 bp, Homo sapien
ggctgtaacaacaccctggaagcgt

SEQ ID NO: 5111153 - DNA, 25 bp, Homo sapien
cattcttctcctagagcacaaatct

SEQ ID NO: 5111154 - DNA, 25 bp, Homo sapien
ccattcttctcctagagcacaaatc

SEQ ID NO: 5111155 - DNA, 25 bp, Homo sapien
caacaccacgtcagctatgaaagtt

SEQ ID NO: 5111156 - DNA, 25 bp, Homo sapien
cagaaggcaccgaaaaaagcatttt

SEQ ID NO: 5111157 - DNA, 25 bp, Homo sapien
cactcaatgtgaactacaaagcaac

SEQ ID NO: 5111158 - DNA, 25 bp, Homo sapien
aatacgtagtattaggctagtctga

SEQ ID NO: 5111159 - DNA, 25 bp, Homo sapien
actcatccattctattacttcaaca

SEQ ID NO: 5111160 - DNA, 25 bp, Homo sapien
aaaaagtcaacgattatcaagtact

SEQ ID NO: 5111161 - DNA, 25 bp, Homo sapien
ttctatccattaactaaactcatcc

SEQ ID NO: 5111162 - DNA, 25 bp, Homo sapien
gattatcaagtactttctgtgtctt

SEQ ID NO: 5111163 - DNA, 25 bp, Homo sapien
catcaatgttctggtcaggaatctc

SEQ ID NO: 5111164 - DNA, 25 bp, Homo sapien
tcatgctggattctttccaagaacc

SEQ ID NO: 5111165 - DNA, 25 bp, Homo sapien
tcaggaatctccagttcaataatat

SEQ ID NO: 5111166 - DNA, 25 bp, Homo sapien
tgaacatactagaaaagtagccaga

SEQ ID NO: 5111167 - DNA, 25 bp, Homo sapien
caccttgaggtgataaaaggagttt

SEQ ID NO: 5111168 - DNA, 25 bp, Homo sapien
gagttttctagactacaaggctgga

SEQ ID NO: 5111169 - DNA, 25 bp, Homo sapien
tctaccagaagaataagattatgtt

SEQ ID NO: 5111170 - DNA, 25 bp, Homo sapien
taaactatggtgtaaatcaacatca

SEQ ID NO: 5111171 - DNA, 25 bp, Homo sapien
atttctttgcctttgtatcgcacca

SEQ ID NO: 5111172 - DNA, 25 bp, Homo sapien
gcctttgtatcgcaccaggtacttc

SEQ ID NO: 5111173 - DNA, 25 bp, Homo sapien
cttccatgtggaccaccaatgaggg

SEQ ID NO: 5111174 - DNA, 25 bp, Homo sapien
ccaggtacttccatgtggaccacca

SEQ ID NO: 5111175 - DNA, 25 bp, Homo sapien
gccaaaatggcaacaactcgactgg

SEQ ID NO: 5111176 - DNA, 25 bp, Homo sapien
ttatcaagacatcatctcgatacag

SEQ ID NO: 5111177 - DNA, 25 bp, Homo sapien
catcatctcgatacagtgaaccaaa

SEQ ID NO: 5111178 - DNA, 25 bp, Homo sapien
ccaaaatggcaacaactcgactggg

SEQ ID NO: 5111179 - DNA, 25 bp, Homo sapien
tcctcccttggacgaatgcaacaag

SEQ ID NO: 5111180 - DNA, 25 bp, Homo sapien
caagactctgtgtgaaaatgtaact

SEQ ID NO: 5111181 - DNA, 25 bp, Homo sapien
tccaaaggtactgtgtatgctaaac

SEQ ID NO: 5111182 - DNA, 25 bp, Homo sapien
gtaactttcgtatgtgacaccacca

SEQ ID NO: 5111183 - DNA, 25 bp, Homo sapien
tagtcagttaaccatgtgatgggac

SEQ ID NO: 5111184 - DNA, 25 bp, Homo sapien
tattcttcccctgtctgagaccttt

SEQ ID NO: 5111185 - DNA, 25 bp, Homo sapien
tatgcattagcagaaagtgatcaag

SEQ ID NO: 5111186 - DNA, 25 bp, Homo sapien
tgatgggactaaactaacagtatgc

SEQ ID NO: 5111187 - DNA, 25 bp, Homo sapien
gctgatgtgtaatagccacatacag

SEQ ID NO: 5111188 - DNA, 25 bp, Homo sapien
gttcaacattctggtgagtcatcaa

SEQ ID NO: 5111189 - DNA, 25 bp, Homo sapien
gtgagtcatcaaattgtttagaagc

SEQ ID NO: 5111190 - DNA, 25 bp, Homo sapien
aaagttcaacattctggtgagtcat

SEQ ID NO: 5111191 - DNA, 25 bp, Homo sapien
aaaaagttcaacattctggtgagtc

SEQ ID NO: 5111192 - DNA, 25 bp, Homo sapien
gtgactgcggtcctattattccagc

SEQ ID NO: 5111193 - DNA, 25 bp, Homo sapien
caggtcccgcttgaggacgaaggcg

SEQ ID NO: 5111194 - DNA, 25 bp, Homo sapien
gctctgcgctgtgctgcgtctgacc

SEQ ID NO: 5111195 - DNA, 25 bp, Homo sapien
gatggagaaatcttggacctctggc

SEQ ID NO: 5111196 - DNA, 25 bp, Homo sapien
tagaaccctggaatccatttctcac

SEQ ID NO: 5111197 - DNA, 25 bp, Homo sapien
ttagaaccctggaatccatttctca

SEQ ID NO: 5111198 - DNA, 25 bp, Homo sapien
gtttcagaacctcctacaaatacca

SEQ ID NO: 5111199 - DNA, 25 bp, Homo sapien
tcagtgagaaattagagtcatcccc

SEQ ID NO: 5111200 - DNA, 25 bp, Homo sapien
catctctaggtgttcttacagtacc

SEQ ID NO: 5111201 - DNA, 25 bp, Homo sapien
gaggatcctgctcctttttcaaaaa

SEQ ID NO: 5111202 - DNA, 25 bp, Homo sapien
ttttttagagcagtgtatatatcca

SEQ ID NO: 5111203 - DNA, 25 bp, Homo sapien
tttttagagcagtgtatatatccat

SEQ ID NO: 5111204 - DNA, 25 bp, Homo sapien
ttttagagcagtgtatatatccatc

SEQ ID NO: 5111205 - DNA, 25 bp, Homo sapien
tttagagcagtgtatatatccatct

SEQ ID NO: 5111206 - DNA, 25 bp, Homo sapien
aagatccattccaagaaggcacaag

SEQ ID NO: 5111207 - DNA, 25 bp, Homo sapien
aagctgttttaaagatccattccaa

SEQ ID NO: 5111208 - DNA, 25 bp, Homo sapien
ccattccaagaaggcacaagttgaa

SEQ ID NO: 5111209 - DNA, 25 bp, Homo sapien
aaagctgttttaaagatccattcca

SEQ ID NO: 5111210 - DNA, 25 bp, Homo sapien
tcacggctgtagaagagactggctc

SEQ ID NO: 5111211 - DNA, 25 bp, Homo sapien
ggattgtctcatagaaatctggtga

SEQ ID NO: 5111212 - DNA, 25 bp, Homo sapien
tcatgaagccttttcgtcacggctg

SEQ ID NO: 5111213 - DNA, 25 bp, Homo sapien
gtttcttgctggacaacatgtggcc

SEQ ID NO: 5111214 - DNA, 25 bp, Homo sapien
cccaggagagtatgtatacccagtc

SEQ ID NO: 5111215 - DNA, 25 bp, Homo sapien
ccagtgtgctttcatgagtcagaag

SEQ ID NO: 5111216 - DNA, 25 bp, Homo sapien
gttaaacgacatatacccaggagag

SEQ ID NO: 5111217 - DNA, 25 bp, Homo sapien
ggtatttgtgcatgagccctagtct

SEQ ID NO: 5111218 - DNA, 25 bp, Homo sapien
attgtaaccttaaatgtctgaatac

SEQ ID NO: 5111219 - DNA, 25 bp, Homo sapien
gtaaccttaaatgtctgaatactga

SEQ ID NO: 5111220 - DNA, 25 bp, Homo sapien
ttaaatgtctgaatactgacacaaa

SEQ ID NO: 5111221 - DNA, 25 bp, Homo sapien
catcttgttcaataattcttgcaga

SEQ ID NO: 5111222 - DNA, 25 bp, Homo sapien
gtgagagtgacctaacatgatctat

SEQ ID NO: 5111223 - DNA, 25 bp, Homo sapien
aaggacacagagttgaagacaactg

SEQ ID NO: 5111224 - DNA, 25 bp, Homo sapien
cacagagttgaagacaactgtgaga

SEQ ID NO: 5111225 - DNA, 25 bp, Homo sapien
caactgtgagagtgacctaacatga

SEQ ID NO: 5111226 - DNA, 25 bp, Homo sapien
attgggtagaaagttggaacagagt

SEQ ID NO: 5111227 - DNA, 25 bp, Homo sapien
gggtagaaagttggaacagagtggc

SEQ ID NO: 5111228 - DNA, 25 bp, Homo sapien
tgacaatgaggtaattgggtagaaa

SEQ ID NO: 5111229 - DNA, 25 bp, Homo sapien
tagaaagttggaacagagtggcaga

SEQ ID NO: 5111230 - DNA, 25 bp, Homo sapien
cccgcagcatagcaaaccactgctg

SEQ ID NO: 5111231 - DNA, 25 bp, Homo sapien
ctgcccgcagcatagcaaaccactg

SEQ ID NO: 5111232 - DNA, 25 bp, Homo sapien
tgttctgcccgcagcatagcaaacc

SEQ ID NO: 5111233 - DNA, 25 bp, Homo sapien
gttctgcccgcagcatagcaaacca

SEQ ID NO: 5111234 - DNA, 25 bp, Homo sapien
ccctctagttcttctttattgattt

SEQ ID NO: 5111235 - DNA, 25 bp, Homo sapien
ctgtttccctctagttcttctttat

SEQ ID NO: 5111236 - DNA, 25 bp, Homo sapien
gctgtttccctctagttcttcttta

SEQ ID NO: 5111237 - DNA, 25 bp, Homo sapien
tttccctctagttcttctttattga

SEQ ID NO: 5111238 - DNA, 25 bp, Homo sapien
ccatctttggcaagctttctaccac

SEQ ID NO: 5111239 - DNA, 25 bp, Homo sapien
accatctttggcaagctttctacca

SEQ ID NO: 5111240 - DNA, 25 bp, Homo sapien
catctttggcaagctttctaccaca

SEQ ID NO: 5111241 - DNA, 25 bp, Homo sapien
tctttggcaagctttctaccacacc

SEQ ID NO: 5111242 - DNA, 25 bp, Homo sapien
tttcattgcagtaggcagcaaggcc

SEQ ID NO: 5111243 - DNA, 25 bp, Homo sapien
catggagtgcaacccttgacaagag

SEQ ID NO: 5111244 - DNA, 25 bp, Homo sapien
tacaggtgcaggtagactggcagaa

SEQ ID NO: 5111245 - DNA, 25 bp, Homo sapien
taagcaagggaccaattttacgatg

SEQ ID NO: 5111246 - DNA, 25 bp, Homo sapien
ggtggtcgactttttgtcagtgact

SEQ ID NO: 5111247 - DNA, 25 bp, Homo sapien
tatttcagtttatcatattagcaag

SEQ ID NO: 5111248 - DNA, 25 bp, Homo sapien
cattccaagtatttccctcatgggt

SEQ ID NO: 5111249 - DNA, 25 bp, Homo sapien
tttttgtctctaactcattccaagt

SEQ ID NO: 5111250 - DNA, 25 bp, Homo sapien
ctgacagatccgctacatggctgat

SEQ ID NO: 5111251 - DNA, 25 bp, Homo sapien
tgtaaactgacagatccgctacatg

SEQ ID NO: 5111252 - DNA, 25 bp, Homo sapien
aaactgacagatccgctacatggct

SEQ ID NO: 5111253 - DNA, 25 bp, Homo sapien
tgacagatccgctacatggctgatt

SEQ ID NO: 5111254 - DNA, 25 bp, Homo sapien
attttctctggagtgaggaggagtg

SEQ ID NO: 5111255 - DNA, 25 bp, Homo sapien
tatattttctctggagtgaggagga

SEQ ID NO: 5111256 - DNA, 25 bp, Homo sapien
gtggggtggggaaatctcatcctac

SEQ ID NO: 5111257 - DNA, 25 bp, Homo sapien
agtggggtggggaaatctcatccta

SEQ ID NO: 5111258 - DNA, 25 bp, Homo sapien
agtatttgatagccagttgttctac

SEQ ID NO: 5111259 - DNA, 25 bp, Homo sapien
tttgatagccagttgttctactaca

SEQ ID NO: 5111260 - DNA, 25 bp, Homo sapien
tatttgatagccagttgttctacta

SEQ ID NO: 5111261 - DNA, 25 bp, Homo sapien
atttgatagccagttgttctactac

SEQ ID NO: 5111262 - DNA, 25 bp, Homo sapien
gcagctgctcagttacaggtcagag

SEQ ID NO: 5111263 - DNA, 25 bp, Homo sapien
ggaaatcttactcaccatttgaggc

SEQ ID NO: 5111264 - DNA, 25 bp, Homo sapien
atgccctggctctagttatactgaa

SEQ ID NO: 5111265 - DNA, 25 bp, Homo sapien
cagttccttgaatatgacccatgta

SEQ ID NO: 5111266 - DNA, 25 bp, Homo sapien
gaagaaagcccatgttcagctggct

SEQ ID NO: 5111267 - DNA, 25 bp, Homo sapien
gaggagctctatgacaccaatgtgg

SEQ ID NO: 5111268 - DNA, 25 bp, Homo sapien
caatgtggccaagatcaacaccgtg

SEQ ID NO: 5111269 - DNA, 25 bp, Homo sapien
catctaagttgaatccagctggcaa

SEQ ID NO: 5111270 - DNA, 25 bp, Homo sapien
agcttccaagtaggtggtaccacag

SEQ ID NO: 5111271 - DNA, 25 bp, Homo sapien
catctcttaaataccagtggtccct

SEQ ID NO: 5111272 - DNA, 25 bp, Homo sapien
tggtccctagggttctatcctgtca

SEQ ID NO: 5111273 - DNA, 25 bp, Homo sapien
cagcttttcaatgtctcaccaggtt

SEQ ID NO: 5111274 - DNA, 25 bp, Homo sapien
tctctctctgtacgagggaaagtgg

SEQ ID NO: 5111275 - DNA, 25 bp, Homo sapien
tccattcccaaacaggataggtcga

SEQ ID NO: 5111276 - DNA, 25 bp, Homo sapien
gtcaccagagaggaattatgccaaa

SEQ ID NO: 5111277 - DNA, 25 bp, Homo sapien
ggcacgtggatatcacttggctgaa

SEQ ID NO: 5111278 - DNA, 25 bp, Homo sapien
taagagtacctgacttaaaggagga

SEQ ID NO: 5111279 - DNA, 25 bp, Homo sapien
tgagtctgagatccacaactccact

SEQ ID NO: 5111280 - DNA, 25 bp, Homo sapien
gcaaagccagctatctattaagtac

SEQ ID NO: 5111281 - DNA, 25 bp, Homo sapien
caaaggagatagtgtcctgagtctg

SEQ ID NO: 5111282 - DNA, 25 bp, Homo sapien
tgatatatacaagaagttacagcag

SEQ ID NO: 5111283 - DNA, 25 bp, Homo sapien
tttttctggtgatatatacaagaag

SEQ ID NO: 5111284 - DNA, 25 bp, Homo sapien
ggtgatatatacaagaagttacagc

SEQ ID NO: 5111285 - DNA, 25 bp, Homo sapien
tctggtgatatatacaagaagttac

SEQ ID NO: 5111286 - DNA, 25 bp, Homo sapien
aaaatgttcttacgcatatgcatag

SEQ ID NO: 5111287 - DNA, 25 bp, Homo sapien
ggaaagctttcaatacaccaactga

SEQ ID NO: 5111288 - DNA, 25 bp, Homo sapien
aagcatgaattgacatcgttctaac

SEQ ID NO: 5111289 - DNA, 25 bp, Homo sapien
tacctacagcaattttctattgatg

SEQ ID NO: 5111290 - DNA, 25 bp, Homo sapien
tatgaaatttctattagcatgtgtc

SEQ ID NO: 5111291 - DNA, 25 bp, Homo sapien
agcatgtgtcactcaaaggcactca

SEQ ID NO: 5111292 - DNA, 25 bp, Homo sapien
gaaggtgcaaagctaactttcactg

SEQ ID NO: 5111293 - DNA, 25 bp, Homo sapien
ggctccatattacatcctctgacct

SEQ ID NO: 5111294 - DNA, 25 bp, Homo sapien
ccaaatgggcatttattatttgcac

SEQ ID NO: 5111295 - DNA, 25 bp, Homo sapien
tccaaatgggcatttattatttgca

SEQ ID NO: 5111296 - DNA, 25 bp, Homo sapien
caaatgggcatttattatttgcaca

SEQ ID NO: 5111297 - DNA, 25 bp, Homo sapien
ggatgacataagcaacttggccagg

SEQ ID NO: 5111298 - DNA, 25 bp, Homo sapien
aaagcaatttatgaacctatgggca

SEQ ID NO: 5111299 - DNA, 25 bp, Homo sapien
cttggccaggacagaaccaatggat

SEQ ID NO: 5111300 - DNA, 25 bp, Homo sapien
cagcttcccgtgaaaaagacctaat

SEQ ID NO: 5111301 - DNA, 25 bp, Homo sapien
cggtcttctttgttcacggtgggca

SEQ ID NO: 5111302 - DNA, 25 bp, Homo sapien
ccgcttcccggaaacaactgtgcaa

SEQ ID NO: 5111303 - DNA, 25 bp, Homo sapien
cgagttgcgagggttccggtcttct

SEQ ID NO: 5111304 - DNA, 25 bp, Homo sapien
aactgtgcaacaacttccgggaggg

SEQ ID NO: 5111305 - DNA, 25 bp, Homo sapien
tccgtggagagcggctgcgactgcg

SEQ ID NO: 5111306 - DNA, 25 bp, Homo sapien
ccctccgtggagagcggctgcgact

SEQ ID NO: 5111307 - DNA, 25 bp, Homo sapien
agcgtcttcggtgcggggatcgcga

SEQ ID NO: 5111308 - DNA, 25 bp, Homo sapien
cgggagcgtcttcggtgcggggatc

SEQ ID NO: 5111309 - DNA, 25 bp, Homo sapien
ttcggtgcggggatcgcgagcggct

SEQ ID NO: 5111310 - DNA, 25 bp, Homo sapien
gggatcgcgagcggctccttctccg

SEQ ID NO: 5111311 - DNA, 25 bp, Homo sapien
gagatgtggatctatgtcgtcttgg

SEQ ID NO: 5111312 - DNA, 25 bp, Homo sapien
ctttctttcagtcgagaaggggaag

SEQ ID NO: 5111313 - DNA, 25 bp, Homo sapien
ctcttctttctttcagtcgagaagg

SEQ ID NO: 5111314 - DNA, 25 bp, Homo sapien
cagtaatctgccgttctttgctctt

SEQ ID NO: 5111315 - DNA, 25 bp, Homo sapien
cctctgttttgccctctaagtcttc

SEQ ID NO: 5111316 - DNA, 25 bp, Homo sapien
ttcctctgttttgccctctaagtct

SEQ ID NO: 5111317 - DNA, 25 bp, Homo sapien
tcttcctctgttttgccctctaagt

SEQ ID NO: 5111318 - DNA, 25 bp, Homo sapien
tctgttttgccctctaagtcttcct

SEQ ID NO: 5111319 - DNA, 25 bp, Homo sapien
gcattttcatgagctcttccctcta

SEQ ID NO: 5111320 - DNA, 25 bp, Homo sapien
ttcatgagctcttccctctacctga

SEQ ID NO: 5111321 - DNA, 25 bp, Homo sapien
catgagctcttccctctacctgaaa

SEQ ID NO: 5111322 - DNA, 25 bp, Homo sapien
attttcatgagctcttccctctacc

SEQ ID NO: 5111323 - DNA, 25 bp, Homo sapien
tcctcttctgagagacatttatggc

SEQ ID NO: 5111324 - DNA, 25 bp, Homo sapien
ctgagagacatttatggcataggca

SEQ ID NO: 5111325 - DNA, 25 bp, Homo sapien
taggcatttacagagccatccacct

SEQ ID NO: 5111326 - DNA, 25 bp, Homo sapien
tttacagagccatccaccttcttac

SEQ ID NO: 5111327 - DNA, 25 bp, Homo sapien
catgattatctcataataaagtttg

SEQ ID NO: 5111328 - DNA, 25 bp, Homo sapien
caaacataataatgggggctatgca

SEQ ID NO: 5111329 - DNA, 25 bp, Homo sapien
gttcaaacataataatgggggctat

SEQ ID NO: 5111330 - DNA, 25 bp, Homo sapien
tcattcaaacaaggaacagtatgga

SEQ ID NO: 5111331 - DNA, 25 bp, Homo sapien
tgaatccaccttttcgattcatgta

SEQ ID NO: 5111332 - DNA, 25 bp, Homo sapien
gcaatgaaatccaaaggtctgttga

SEQ ID NO: 5111333 - DNA, 25 bp, Homo sapien
aatccaaaggtctgttgaatccacc

SEQ ID NO: 5111334 - DNA, 25 bp, Homo sapien
tccaccttttcgattcatgtactgc

SEQ ID NO: 5111335 - DNA, 25 bp, Homo sapien
tccactctctgaccaagatgagggg

SEQ ID NO: 5111336 - DNA, 25 bp, Homo sapien
tcctgttttttgaatgcaagttaaa

SEQ ID NO: 5111337 - DNA, 25 bp, Homo sapien
gagatcctgttttttgaatgcaagt

SEQ ID NO: 5111338 - DNA, 25 bp, Homo sapien
tctctgaccaagatgaggggaaaaa

SEQ ID NO: 5111339 - DNA, 25 bp, Homo sapien
ttaacctttcttctgttgaggcaag

SEQ ID NO: 5111340 - DNA, 25 bp, Homo sapien
taagttaactgcatatatcataaat

SEQ ID NO: 5111341 - DNA, 25 bp, Homo sapien
ctgttgaggcaaggtaagttaactg

SEQ ID NO: 5111342 - DNA, 25 bp, Homo sapien
gaggcaaggtaagttaactgcatat

SEQ ID NO: 5111343 - DNA, 25 bp, Homo sapien
ccacaggaataaggacaaataaaat

SEQ ID NO: 5111344 - DNA, 25 bp, Homo sapien
tttaagaagtcctaatgagcattca

SEQ ID NO: 5111345 - DNA, 25 bp, Homo sapien
ctgcttccacaggaataaggacaaa

SEQ ID NO: 5111346 - DNA, 25 bp, Homo sapien
tttttaagaagtcctaatgagcatt

SEQ ID NO: 5111347 - DNA, 25 bp, Homo sapien
aaatactgctttattggataaactt

SEQ ID NO: 5111348 - DNA, 25 bp, Homo sapien
aatactgctttattggataaactta

SEQ ID NO: 5111349 - DNA, 25 bp, Homo sapien
atactgctttattggataaacttac

SEQ ID NO: 5111350 - DNA, 25 bp, Homo sapien
tacttgcggagagaaccataaatgg

SEQ ID NO: 5111351 - DNA, 25 bp, Homo sapien
ggaggcaagccaatgtttaccaata

SEQ ID NO: 5111352 - DNA, 25 bp, Homo sapien
tgggatcaacccaaagaagcctgga

SEQ ID NO: 5111353 - DNA, 25 bp, Homo sapien
tatttctgggagtagataacaggtg

SEQ ID NO: 5111354 - DNA, 25 bp, Homo sapien
ctgaggaaataatgaaacatacaaa

SEQ ID NO: 5111355 - DNA, 25 bp, Homo sapien
acaaaaatatgtatgtaatggagac

SEQ ID NO: 5111356 - DNA, 25 bp, Homo sapien
ggaaataatgaaacatacaaaaata

SEQ ID NO: 5111357 - DNA, 25 bp, Homo sapien
aaaatatgtatgtaatggagacaga

SEQ ID NO: 5111358 - DNA, 25 bp, Homo sapien
tcatactttactggatagagttggc

SEQ ID NO: 5111359 - DNA, 25 bp, Homo sapien
cagcaatgccacgtctaagtacgga

SEQ ID NO: 5111360 - DNA, 25 bp, Homo sapien
tgttaccttttagccagagatacca

SEQ ID NO: 5111361 - DNA, 25 bp, Homo sapien
tggcccttttaatctcactcagcaa

SEQ ID NO: 5111362 - DNA, 25 bp, Homo sapien
caggaatgaccttagtttgagcaga

SEQ ID NO: 5111363 - DNA, 25 bp, Homo sapien
gactctgggagtagacacaagcctg

SEQ ID NO: 5111364 - DNA, 25 bp, Homo sapien
ccagggtctaggtcatatggaggcc

SEQ ID NO: 5111365 - DNA, 25 bp, Homo sapien
taaagaagctactcgtgcaaatcgg

SEQ ID NO: 5111366 - DNA, 25 bp, Homo sapien
tatactccagatgggcataggacag

SEQ ID NO: 5111367 - DNA, 25 bp, Homo sapien
tcaaagggtgtttggtgccatctac

SEQ ID NO: 5111368 - DNA, 25 bp, Homo sapien
cacactatggagttctctgccggag

SEQ ID NO: 5111369 - DNA, 25 bp, Homo sapien
ttagccagcaacaccaactagggat

SEQ ID NO: 5111370 - DNA, 25 bp, Homo sapien
catctcatacatgcaatgggaacac

SEQ ID NO: 5111371 - DNA, 25 bp, Homo sapien
gacaggtaatgtactaacgctgtaa

SEQ ID NO: 5111372 - DNA, 25 bp, Homo sapien
actaacgctgtaacaagctctttgg

SEQ ID NO: 5111373 - DNA, 25 bp, Homo sapien
ggaacacctaattactatgtttatg

SEQ ID NO: 5111374 - DNA, 25 bp, Homo sapien
catggaaactgaacctatgtatgtc

SEQ ID NO: 5111375 - DNA, 25 bp, Homo sapien
tatgtatgtctcacccagagcccaa

SEQ ID NO: 5111376 - DNA, 25 bp, Homo sapien
tccagactgagtcacaaaacactga

SEQ ID NO: 5111377 - DNA, 25 bp, Homo sapien
cactgacaactcaagtactgaagaa

SEQ ID NO: 5111378 - DNA, 25 bp, Homo sapien
tggtgacaggattcgcaactccgcc

SEQ ID NO: 5111379 - DNA, 25 bp, Homo sapien
ccctacacttgtgcgattgggagag

SEQ ID NO: 5111380 - DNA, 25 bp, Homo sapien
ccttctcttgacaggccagcttcgg

SEQ ID NO: 5111381 - DNA, 25 bp, Homo sapien
aaacctcccagctacgatgatgtca

SEQ ID NO: 5111382 - DNA, 25 bp, Homo sapien
ccggaccgctgtggagcccgctatg

SEQ ID NO: 5111383 - DNA, 25 bp, Homo sapien
cacagtgacagaacccggagcagag

SEQ ID NO: 5111384 - DNA, 25 bp, Homo sapien
aaccacgctcgacaagagagggagg

SEQ ID NO: 5111385 - DNA, 25 bp, Homo sapien
ctgggcaccgccgacacagtgacag

SEQ ID NO: 5111386 - DNA, 25 bp, Homo sapien
gagccacgggaccaacccccactgc

SEQ ID NO: 5111387 - DNA, 25 bp, Homo sapien
tctggatgttcatccgaaccgccgc

SEQ ID NO: 5111388 - DNA, 25 bp, Homo sapien
agcatctggatgttcatccgaaccg

SEQ ID NO: 5111389 - DNA, 25 bp, Homo sapien
cgccgctccagatagtcggccgcct

SEQ ID NO: 5111390 - DNA, 25 bp, Homo sapien
tctctcccgccgctccagatagtcg

SEQ ID NO: 5111391 - DNA, 25 bp, Homo sapien
ctgcccaggagactggggcgccggg

SEQ ID NO: 5111392 - DNA, 25 bp, Homo sapien
gcccaggagactggggcgccgggcc

SEQ ID NO: 5111393 - DNA, 25 bp, Homo sapien
caggagactggggcgccgggcccac

SEQ ID NO: 5111394 - DNA, 25 bp, Homo sapien
ccaggagactggggcgccgggccca

SEQ ID NO: 5111395 - DNA, 25 bp, Homo sapien
gtgcggggcaagcaccgtgagccgg

SEQ ID NO: 5111396 - DNA, 25 bp, Homo sapien
gggtttcccactggctacatccagc

SEQ ID NO: 5111397 - DNA, 25 bp, Homo sapien
ggaaccagctcaggcgaaggtgcgg

SEQ ID NO: 5111398 - DNA, 25 bp, Homo sapien
cagcaggttggtgcgggttaagtgg

SEQ ID NO: 5111399 - DNA, 25 bp, Homo sapien
gttcctccgttttaaggcatctctg

SEQ ID NO: 5111400 - DNA, 25 bp, Homo sapien
gttattgtatggtaacatggaggca

SEQ ID NO: 5111401 - DNA, 25 bp, Homo sapien
catggaggcataaccatgttcagct

SEQ ID NO: 5111402 - DNA, 25 bp, Homo sapien
atctctgtccttgttattgtatggt

SEQ ID NO: 5111403 - DNA, 25 bp, Homo sapien
tattgtaacaaaatgcaacacagct

SEQ ID NO: 5111404 - DNA, 25 bp, Homo sapien
tgcacaaaactactggctaccacct

SEQ ID NO: 5111405 - DNA, 25 bp, Homo sapien
aaagtgccttcatacccatgcacaa

SEQ ID NO: 5111406 - DNA, 25 bp, Homo sapien
ttaagcctcaataagtaacttggac

SEQ ID NO: 5111407 - DNA, 25 bp, Homo sapien
catttcttggcttaagattcttaac

SEQ ID NO: 5111408 - DNA, 25 bp, Homo sapien
tcctaatcaccttttgggaccaagc

SEQ ID NO: 5111409 - DNA, 25 bp, Homo sapien
ttcttatccccactagtgaacatcc

SEQ ID NO: 5111410 - DNA, 25 bp, Homo sapien
gggaccaagccacttcaacatctca

SEQ ID NO: 5111411 - DNA, 25 bp, Homo sapien
ttcttctccatttcattgtgagttg

SEQ ID NO: 5111412 - DNA, 25 bp, Homo sapien
cttctccatttcattgtgagttgat

SEQ ID NO: 5111413 - DNA, 25 bp, Homo sapien
tattcttctccatttcattgtgagt

SEQ ID NO: 5111414 - DNA, 25 bp, Homo sapien
ctattcttctccatttcattgtgag

SEQ ID NO: 5111415 - DNA, 25 bp, Homo sapien
gatattcagtagcatgtaatttttt

SEQ ID NO: 5111416 - DNA, 25 bp, Homo sapien
gtattttagataacactgccaatga

SEQ ID NO: 5111417 - DNA, 25 bp, Homo sapien
tgtggaaatgttgcctctgactaaa

SEQ ID NO: 5111418 - DNA, 25 bp, Homo sapien
tctgtggaatagtcattcaaaggcc

SEQ ID NO: 5111419 - DNA, 25 bp, Homo sapien
catggtcagtcacaatcatagaaca

SEQ ID NO: 5111420 - DNA, 25 bp, Homo sapien
ggaagctccaacttaaaacatggtc

SEQ ID NO: 5111421 - DNA, 25 bp, Homo sapien
gacgatgggatgagcagaagcatat

SEQ ID NO: 5111422 - DNA, 25 bp, Homo sapien
tagctaaagcataaaggaagctcca

SEQ ID NO: 5111423 - DNA, 25 bp, Homo sapien
cctgaagttcttaagcatccatgct

SEQ ID NO: 5111424 - DNA, 25 bp, Homo sapien
tatattagcatttacccgagtggta

SEQ ID NO: 5111425 - DNA, 25 bp, Homo sapien
agagtggagcccagcaactttaacc

SEQ ID NO: 5111426 - DNA, 25 bp, Homo sapien
gccaagaagcaatgaaagccatgat

SEQ ID NO: 5111427 - DNA, 25 bp, Homo sapien
gacttgttacaacatcccagagtga

SEQ ID NO: 5111428 - DNA, 25 bp, Homo sapien
tacattttggagagataaggtcact

SEQ ID NO: 5111429 - DNA, 25 bp, Homo sapien
gcaggtgtcatctactcaagggtta

SEQ ID NO: 5111430 - DNA, 25 bp, Homo sapien
tgatcgctgtgtctctccttcgtaa

SEQ ID NO: 5111431 - DNA, 25 bp, Homo sapien
ccagcaagtcttgggatacaatatt

SEQ ID NO: 5111432 - DNA, 25 bp, Homo sapien
gatagatatcagctctcacctaaag

SEQ ID NO: 5111433 - DNA, 25 bp, Homo sapien
tgtaggagctatattcaaaccctga

SEQ ID NO: 5111434 - DNA, 25 bp, Homo sapien
gagtaagatcaagtccctacctttg

SEQ ID NO: 5111435 - DNA, 25 bp, Homo sapien
caggctagtagatctgcaaattggg

SEQ ID NO: 5111436 - DNA, 25 bp, Homo sapien
ggatgtaatcaagaccagaagtggt

SEQ ID NO: 5111437 - DNA, 25 bp, Homo sapien
gtttactgtagcatcaacttcgcag

SEQ ID NO: 5111438 - DNA, 25 bp, Homo sapien
gctgctttcttaggtcccaggctat

SEQ ID NO: 5111439 - DNA, 25 bp, Homo sapien
caggaataggcagacaaatcaaatg

SEQ ID NO: 5111440 - DNA, 25 bp, Homo sapien
cataaatccttagggaaagaatgga

SEQ ID NO: 5111441 - DNA, 25 bp, Homo sapien
aggaggaatgtgctgtaccagatat

SEQ ID NO: 5111442 - DNA, 25 bp, Homo sapien
ccagaaacagacctaagaatagata

SEQ ID NO: 5111443 - DNA, 25 bp, Homo sapien
tagtgaaatccaatccctgaaccag

SEQ ID NO: 5111444 - DNA, 25 bp, Homo sapien
tctcactaggcagacagaggctatc

SEQ ID NO: 5111445 - DNA, 25 bp, Homo sapien
actgctttgtacctaggccatggac

SEQ ID NO: 5111446 - DNA, 25 bp, Homo sapien
tagccttataggagtcttgcccaga

SEQ ID NO: 5111447 - DNA, 25 bp, Homo sapien
ccaggctcaacagattctccttctt

SEQ ID NO: 5111448 - DNA, 25 bp, Homo sapien
cccaggctcaacagattctccttct

SEQ ID NO: 5111449 - DNA, 25 bp, Homo sapien
ttcagcctcctgagtatctgggatt

SEQ ID NO: 5111450 - DNA, 25 bp, Homo sapien
caagcaatctgcctgcctcagcctc

SEQ ID NO: 5111451 - DNA, 25 bp, Homo sapien
cattgcagtctccttagaaagtcag

SEQ ID NO: 5111452 - DNA, 25 bp, Homo sapien
gattgcagcttaatcattgctgtgc

SEQ ID NO: 5111453 - DNA, 25 bp, Homo sapien
tttcttacttaaccattcattgcag

SEQ ID NO: 5111454 - DNA, 25 bp, Homo sapien
tgctgtgctgtcaccgtgcctcaaa

SEQ ID NO: 5111455 - DNA, 25 bp, Homo sapien
cctccttaaagccttcccaagccat

SEQ ID NO: 5111456 - DNA, 25 bp, Homo sapien
gcaatggcacggagtgggagaggga

SEQ ID NO: 5111457 - DNA, 25 bp, Homo sapien
agccacggcaactgactgaagagag

SEQ ID NO: 5111458 - DNA, 25 bp, Homo sapien
ggaaaattctatgaatgtaagaagc

SEQ ID NO: 5111459 - DNA, 25 bp, Homo sapien
gagagcacgagagttgctccaactg

SEQ ID NO: 5111460 - DNA, 25 bp, Homo sapien
ttatgatgggcttcttgagacataa

SEQ ID NO: 5111461 - DNA, 25 bp, Homo sapien
catattagacttgggatgtttttta

SEQ ID NO: 5111462 - DNA, 25 bp, Homo sapien
tgtggagttatttgttgaagcttta

SEQ ID NO: 5111463 - DNA, 25 bp, Homo sapien
ttttatttatgatgggcttcttgag

SEQ ID NO: 5111464 - DNA, 25 bp, Homo sapien
ttaataaactcaacgtagtgtgtcg

SEQ ID NO: 5111465 - DNA, 25 bp, Homo sapien
tagtgtgtcgacttgattcgggtcc

SEQ ID NO: 5111466 - DNA, 25 bp, Homo sapien
ttgattcgggtccaagtggcaccag

SEQ ID NO: 5111467 - DNA, 25 bp, Homo sapien
caggcacaagcgaagatgagcccgt

SEQ ID NO: 5111468 - DNA, 25 bp, Homo sapien
cacttgatgggagcttaagaaacac

SEQ ID NO: 5111469 - DNA, 25 bp, Homo sapien
tcaggtagcaaagagagtgtcaact

SEQ ID NO: 5111470 - DNA, 25 bp, Homo sapien
tcccagaattgtcatgaatgcaggc

SEQ ID NO: 5111471 - DNA, 25 bp, Homo sapien
gaacacctgatctccggactagaaa

SEQ ID NO: 5111472 - DNA, 25 bp, Homo sapien
tcagacgcctttcggtgccactcat

SEQ ID NO: 5111473 - DNA, 25 bp, Homo sapien
ggcttcgtctgactcttcagcatcg

SEQ ID NO: 5111474 - DNA, 25 bp, Homo sapien
ttcggtgccactcatcaagcttctc

SEQ ID NO: 5111475 - DNA, 25 bp, Homo sapien
tcagcatcgccagtgctgggggtac

SEQ ID NO: 5111476 - DNA, 25 bp, Homo sapien
gcctcttcaggtgtcgctgctctcg

SEQ ID NO: 5111477 - DNA, 25 bp, Homo sapien
ccctgtcggagtcggagcgctccga

SEQ ID NO: 5111478 - DNA, 25 bp, Homo sapien
gctggtcgatttggtgaacggcttt

SEQ ID NO: 5111479 - DNA, 25 bp, Homo sapien
gctgctctcgctgaagctggtcgat

SEQ ID NO: 5111480 - DNA, 25 bp, Homo sapien
gaaggacattgatgaaagcgctctg

SEQ ID NO: 5111481 - DNA, 25 bp, Homo sapien
tgatgaaagcgctctgcagaaagct

SEQ ID NO: 5111482 - DNA, 25 bp, Homo sapien
gaggacaagagagaaggacattgat

SEQ ID NO: 5111483 - DNA, 25 bp, Homo sapien
cgctctgcagaaagctcaggcgtgg

SEQ ID NO: 5111484 - DNA, 25 bp, Homo sapien
gtcagagtcgctcacactgctgctg

SEQ ID NO: 5111485 - DNA, 25 bp, Homo sapien
tcatcactgccgaggctctgcatgc

SEQ ID NO: 5111486 - DNA, 25 bp, Homo sapien
gatcacctgtgagatagtccgtgct

SEQ ID NO: 5111487 - DNA, 25 bp, Homo sapien
gagaccaagacacgccttgtgactg

SEQ ID NO: 5111488 - DNA, 25 bp, Homo sapien
aatacagacgacctgggtgctcggc

SEQ ID NO: 5111489 - DNA, 25 bp, Homo sapien
taaaaatgctacaaagtcggagacc

SEQ ID NO: 5111490 - DNA, 25 bp, Homo sapien
tgtgtgactacagaaaggagccagc

SEQ ID NO: 5111491 - DNA, 25 bp, Homo sapien
caaattggcgaatcagggctgccga

SEQ ID NO: 5111492 - DNA, 25 bp, Homo sapien
gtccatggaaatgcccagcgtccct

SEQ ID NO: 5111493 - DNA, 25 bp, Homo sapien
ccagagcactgggtcatacactgat

SEQ ID NO: 5111494 - DNA, 25 bp, Homo sapien
gaaagaggaccctgcaggtcgtaac

SEQ ID NO: 5111495 - DNA, 25 bp, Homo sapien
gggtgccagttatccccaggactga

SEQ ID NO: 5111496 - DNA, 25 bp, Homo sapien
aagggagccctgtcctctaggacag

SEQ ID NO: 5111497 - DNA, 25 bp, Homo sapien
tccctgcactaggaaggacgtgaag

SEQ ID NO: 5111498 - DNA, 25 bp, Homo sapien
cctgtctctaggagttcctagcaga

SEQ ID NO: 5111499 - DNA, 25 bp, Homo sapien
agcctggagaactgtgtaactctga

SEQ ID NO: 5111500 - DNA, 25 bp, Homo sapien
ggtgtgcagggagtgcctcgagggc

SEQ ID NO: 5111501 - DNA, 25 bp, Homo sapien
acaaatgaggaagccgagcgcagct

SEQ ID NO: 5111502 - DNA, 25 bp, Homo sapien
aatgaggaagccgagcgcagctgct

SEQ ID NO: 5111503 - DNA, 25 bp, Homo sapien
ggccagtgtcaaggtgtgtccttat

SEQ ID NO: 5111504 - DNA, 25 bp, Homo sapien
ctgtgccgatgttgtagcaaggtgc

SEQ ID NO: 5111505 - DNA, 25 bp, Homo sapien
aggtggcacatcacacacgctcctg

SEQ ID NO: 5111506 - DNA, 25 bp, Homo sapien
tcacacagctactgtgccgatgttg

SEQ ID NO: 5111507 - DNA, 25 bp, Homo sapien
ggtgcgaggtggcacatcacacacg

SEQ ID NO: 5111508 - DNA, 25 bp, Homo sapien
gacaccatggcagtccttataccta

SEQ ID NO: 5111509 - DNA, 25 bp, Homo sapien
caggaagattcatctgccttctggg

SEQ ID NO: 5111510 - DNA, 25 bp, Homo sapien
gccttctgggtataggatggagtaa

SEQ ID NO: 5111511 - DNA, 25 bp, Homo sapien
cacagtgggcgtttgaaccatggga

SEQ ID NO: 5111512 - DNA, 25 bp, Homo sapien
gagacccgagtgaggctgagaccgc

SEQ ID NO: 5111513 - DNA, 25 bp, Homo sapien
gctgagaccgctgctgcatgcgggt

SEQ ID NO: 5111514 - DNA, 25 bp, Homo sapien
gcagatgcgtcaacgtggaacccag

SEQ ID NO: 5111515 - DNA, 25 bp, Homo sapien
catgcgggtgagagtgatcacagct

SEQ ID NO: 5111516 - DNA, 25 bp, Homo sapien
ctgtcctgggtgattgcaaatggga

SEQ ID NO: 5111517 - DNA, 25 bp, Homo sapien
ccctgtcctgggtgattgcaaatgg

SEQ ID NO: 5111518 - DNA, 25 bp, Homo sapien
cctgtcctgggtgattgcaaatggg

SEQ ID NO: 5111519 - DNA, 25 bp, Homo sapien
cccagacctcttgatggaggcatga

SEQ ID NO: 5111520 - DNA, 25 bp, Homo sapien
gcacatcgggcgagcctgttctcag

SEQ ID NO: 5111521 - DNA, 25 bp, Homo sapien
tcagagactcgaacgtgcagggatc

SEQ ID NO: 5111522 - DNA, 25 bp, Homo sapien
gcccaggaagattggcgcaaggtca

SEQ ID NO: 5111523 - DNA, 25 bp, Homo sapien
cagcagggctgggaatctgaaactc

SEQ ID NO: 5111524 - DNA, 25 bp, Homo sapien
ttaggggtccatctcgtatttgctt

SEQ ID NO: 5111525 - DNA, 25 bp, Homo sapien
ggtccatctcgtatttgcttccaaa

SEQ ID NO: 5111526 - DNA, 25 bp, Homo sapien
ggggtccatctcgtatttgcttcca

SEQ ID NO: 5111527 - DNA, 25 bp, Homo sapien
caaagcctgtcttagttgggctggg

SEQ ID NO: 5111528 - DNA, 25 bp, Homo sapien
gttgctctgggacacctccctgaag

SEQ ID NO: 5111529 - DNA, 25 bp, Homo sapien
gctgctgttgatgacaaagactcaa

SEQ ID NO: 5111530 - DNA, 25 bp, Homo sapien
tatggcttggtcactctcaggtcct

SEQ ID NO: 5111531 - DNA, 25 bp, Homo sapien
ttgcccggaagactccagtgtgccc

SEQ ID NO: 5111532 - DNA, 25 bp, Homo sapien
catcttgcccggaagactccagtgt

SEQ ID NO: 5111533 - DNA, 25 bp, Homo sapien
agtgtgccccgcacctcctatgctc

SEQ ID NO: 5111534 - DNA, 25 bp, Homo sapien
tgccatcttgcccggaagactccag

SEQ ID NO: 5111535 - DNA, 25 bp, Homo sapien
ttgttccctggtttcagggctactg

SEQ ID NO: 5111536 - DNA, 25 bp, Homo sapien
ttttggtctgtggatgcccttgttc

SEQ ID NO: 5111537 - DNA, 25 bp, Homo sapien
ttggtctgtggatgcccttgttccc

SEQ ID NO: 5111538 - DNA, 25 bp, Homo sapien
ggctactgcatgtttcccctgtaat

SEQ ID NO: 5111539 - DNA, 25 bp, Homo sapien
aagacccagaaacttgggatacaga

SEQ ID NO: 5111540 - DNA, 25 bp, Homo sapien
agtggtcgtagtggcagaagaccca

SEQ ID NO: 5111541 - DNA, 25 bp, Homo sapien
gtcgtagtggcagaagacccagaaa

SEQ ID NO: 5111542 - DNA, 25 bp, Homo sapien
gggagtggtcgtagtggcagaagac

SEQ ID NO: 5111543 - DNA, 25 bp, Homo sapien
accacctcgtctacagcagtctgtg

SEQ ID NO: 5111544 - DNA, 25 bp, Homo sapien
tgacccaaggtagtaattgcttaat

SEQ ID NO: 5111545 - DNA, 25 bp, Homo sapien
ttctgtggctaacactgccatctgc

SEQ ID NO: 5111546 - DNA, 25 bp, Homo sapien
tcgtctacagcagtctgtgacccaa

SEQ ID NO: 5111547 - DNA, 25 bp, Homo sapien
gggaacatcgcggcttctgtgtctg

SEQ ID NO: 5111548 - DNA, 25 bp, Homo sapien
gaacatcgcggcttctgtgtctggt

SEQ ID NO: 5111549 - DNA, 25 bp, Homo sapien
tggggcttggctgtttggaccaggg

SEQ ID NO: 5111550 - DNA, 25 bp, Homo sapien
aacatcgcggcttctgtgtctggtg

SEQ ID NO: 5111551 - DNA, 25 bp, Homo sapien
agagtccctgtgtcgctgctgctgt

SEQ ID NO: 5111552 - DNA, 25 bp, Homo sapien
atggctcttggcctgtgcccgactg

SEQ ID NO: 5111553 - DNA, 25 bp, Homo sapien
tgctgttactgctatggctcttggc

SEQ ID NO: 5111554 - DNA, 25 bp, Homo sapien
ccagagacagtcctgtgggccctca

SEQ ID NO: 5111555 - DNA, 25 bp, Homo sapien
gtgaagctgactttaaacaccaggg

SEQ ID NO: 5111556 - DNA, 25 bp, Homo sapien
cagcaaagatgtgaagttgtagatg

SEQ ID NO: 5111557 - DNA, 25 bp, Homo sapien
gacatagggctattctgatcagccc

SEQ ID NO: 5111558 - DNA, 25 bp, Homo sapien
gggaagtgctcccttggatcaaagc

SEQ ID NO: 5111559 - DNA, 25 bp, Homo sapien
ggagaaaaagaggcagttgtctggc

SEQ ID NO: 5111560 - DNA, 25 bp, Homo sapien
gagaaaaagaggcagttgtctggcc

SEQ ID NO: 5111561 - DNA, 25 bp, Homo sapien
agaaaaagaggcagttgtctggcct

SEQ ID NO: 5111562 - DNA, 25 bp, Homo sapien
tctcctccgtccactccttcaagaa

SEQ ID NO: 5111563 - DNA, 25 bp, Homo sapien
gaattttgtctcaattagataatta

SEQ ID NO: 5111564 - DNA, 25 bp, Homo sapien
cagagaattttgtctcaattagata

SEQ ID NO: 5111565 - DNA, 25 bp, Homo sapien
agagaattttgtctcaattagataa

SEQ ID NO: 5111566 - DNA, 25 bp, Homo sapien
gagaattttgtctcaattagataat

SEQ ID NO: 5111567 - DNA, 25 bp, Homo sapien
tattctaaatgctcctagtgccctg

SEQ ID NO: 5111568 - DNA, 25 bp, Homo sapien
aaaatgtggatcagcctttctcagc

SEQ ID NO: 5111569 - DNA, 25 bp, Homo sapien
tgtgaagaacctggcattatcctcc

SEQ ID NO: 5111570 - DNA, 25 bp, Homo sapien
taaggataatctaggaaccctcaga

SEQ ID NO: 5111571 - DNA, 25 bp, Homo sapien
tgtactggaaagtctgtctagtgac

SEQ ID NO: 5111572 - DNA, 25 bp, Homo sapien
gcagttatgctgctgcaaactaagg

SEQ ID NO: 5111573 - DNA, 25 bp, Homo sapien
tcaaacttgtagcttcctaaactgc

SEQ ID NO: 5111574 - DNA, 25 bp, Homo sapien
tctggccctccaaggattgctgata

SEQ ID NO: 5111575 - DNA, 25 bp, Homo sapien
ggtaataaacatgtgctctagctct

SEQ ID NO: 5111576 - DNA, 25 bp, Homo sapien
ggactgctttgaagggccattgttc

SEQ ID NO: 5111577 - DNA, 25 bp, Homo sapien
gctagtcagcttatttcagaactct

SEQ ID NO: 5111578 - DNA, 25 bp, Homo sapien
cactccagactgagaatattggtgg

SEQ ID NO: 5111579 - DNA, 25 bp, Homo sapien
tataaacttctattagcacatgaga

SEQ ID NO: 5111580 - DNA, 25 bp, Homo sapien
tcacggagccaaactacccttaaga

SEQ ID NO: 5111581 - DNA, 25 bp, Homo sapien
catgcttgtgcactatctcttcagg

SEQ ID NO: 5111582 - DNA, 25 bp, Homo sapien
gcattctatgataaacacttgatat

SEQ ID NO: 5111583 - DNA, 25 bp, Homo sapien
ggcaccttcatctgctcacagttcg

SEQ ID NO: 5111584 - DNA, 25 bp, Homo sapien
cctttgcagtgctgtatagcctctg

SEQ ID NO: 5111585 - DNA, 25 bp, Homo sapien
gaccccttctccagtagtttctggc

SEQ ID NO: 5111586 - DNA, 25 bp, Homo sapien
ccggtcctccagaccatatttagag

SEQ ID NO: 5111587 - DNA, 25 bp, Homo sapien
ggcctggtcatctagtctctgtgag

SEQ ID NO: 5111588 - DNA, 25 bp, Homo sapien
gactgggcagtctatggcctggtca

SEQ ID NO: 5111589 - DNA, 25 bp, Homo sapien
gaggaacggtgtgttctgttttgaa

SEQ ID NO: 5111590 - DNA, 25 bp, Homo sapien
gatggagtggttatgtgcacagact

SEQ ID NO: 5111591 - DNA, 25 bp, Homo sapien
ccttgaagctggcatctatacccat

SEQ ID NO: 5111592 - DNA, 25 bp, Homo sapien
gccagcaaggccacttgatcactgt

SEQ ID NO: 5111593 - DNA, 25 bp, Homo sapien
ctgtccttgaagctggcatctatac

SEQ ID NO: 5111594 - DNA, 25 bp, Homo sapien
tctttgaaatttctgctggccagga

SEQ ID NO: 5111595 - DNA, 25 bp, Homo sapien
ggataaatgtggtcatgccctattg

SEQ ID NO: 5111596 - DNA, 25 bp, Homo sapien
ttgatctttggatttccccagccct

SEQ ID NO: 5111597 - DNA, 25 bp, Homo sapien
tagtagtcaggagttggataaatgt

SEQ ID NO: 5111598 - DNA, 25 bp, Homo sapien
caacctgggatgcttctgtgggaac

SEQ ID NO: 5111599 - DNA, 25 bp, Homo sapien
tagctactaagttgtactgcctggt

SEQ ID NO: 5111600 - DNA, 25 bp, Homo sapien
tttatgcagtctccttgtctccagc

SEQ ID NO: 5111601 - DNA, 25 bp, Homo sapien
ggacatcgttgttgaaaagctctca

SEQ ID NO: 5111602 - DNA, 25 bp, Homo sapien
gagctcatcagttcttaggacatcg

SEQ ID NO: 5111603 - DNA, 25 bp, Homo sapien
gatttgactatacttgctagagcac

SEQ ID NO: 5111604 - DNA, 25 bp, Homo sapien
ctagcagactgcaaagtggaggaca

SEQ ID NO: 5111605 - DNA, 25 bp, Homo sapien
ctcttttaaggtgaagacatcagaa

SEQ ID NO: 5111606 - DNA, 25 bp, Homo sapien
cctgtccagagattctaaggagaaa

SEQ ID NO: 5111607 - DNA, 25 bp, Homo sapien
aaaataaattcgctctggcaccaag

SEQ ID NO: 5111608 - DNA, 25 bp, Homo sapien
aaataaattcgctctggcaccaagc

SEQ ID NO: 5111609 - DNA, 25 bp, Homo sapien
tgcttccgtcagctccccatgggct

SEQ ID NO: 5111610 - DNA, 25 bp, Homo sapien
tggttttttgtatgactgacttgct

SEQ ID NO: 5111611 - DNA, 25 bp, Homo sapien
ggtcggcccgaaagctctagaatgc

SEQ ID NO: 5111612 - DNA, 25 bp, Homo sapien
gagctacgaagagactacagtgcct

SEQ ID NO: 5111613 - DNA, 25 bp, Homo sapien
gactttttcataggacagttggccg

SEQ ID NO: 5111614 - DNA, 25 bp, Homo sapien
cacaaaatggcgacacgtggttagc

SEQ ID NO: 5111615 - DNA, 25 bp, Homo sapien
agaaagggccccgtgcgcaacgtgc

SEQ ID NO: 5111616 - DNA, 25 bp, Homo sapien
ggaaagcggctaacgtggcgctact

SEQ ID NO: 5111617 - DNA, 25 bp, Homo sapien
caacgtgcttcacaatctctcaggg

SEQ ID NO: 5111618 - DNA, 25 bp, Homo sapien
gggctaagccagaccagaaagggcc

SEQ ID NO: 5111619 - DNA, 25 bp, Homo sapien
aggaagtgtcgctcaagacgctggc

SEQ ID NO: 5111620 - DNA, 25 bp, Homo sapien
ggccccgtcagggcccgccatcttg

SEQ ID NO: 5111621 - DNA, 25 bp, Homo sapien
ccgcggctgcttttcgggcccatgg

SEQ ID NO: 5111622 - DNA, 25 bp, Homo sapien
agggcttcaggacgtttctgcggct

SEQ ID NO: 5111623 - DNA, 25 bp, Homo sapien
cttttcgggcccatgggcgcagcca

SEQ ID NO: 5111624 - DNA, 25 bp, Homo sapien
caggacgtttctgcggctttccccg

SEQ ID NO: 5111625 - DNA, 25 bp, Homo sapien
ggctcgttacgtggtcaagtctttg

SEQ ID NO: 5111626 - DNA, 25 bp, Homo sapien
cgagggccgcgggagcgagcgggag

SEQ ID NO: 5111627 - DNA, 25 bp, Homo sapien
gtaggcccaaaactgccggcgcgag

SEQ ID NO: 5111628 - DNA, 25 bp, Homo sapien
cggcgcgaggcgagcgagggccgcg

SEQ ID NO: 5111629 - DNA, 25 bp, Homo sapien
tcctttccgtgcataagaagccgaa

SEQ ID NO: 5111630 - DNA, 25 bp, Homo sapien
ttcccctccgagatgttgatccgcg

SEQ ID NO: 5111631 - DNA, 25 bp, Homo sapien
catagcgaaagccttaaagatggca

SEQ ID NO: 5111632 - DNA, 25 bp, Homo sapien
ccgcggtactgttggtcatggagct

SEQ ID NO: 5111633 - DNA, 25 bp, Homo sapien
ggagttgggcagcatatcccccgcc

SEQ ID NO: 5111634 - DNA, 25 bp, Homo sapien
gtggagttgggcagcatatcccccg

SEQ ID NO: 5111635 - DNA, 25 bp, Homo sapien
ctcggtggagttgggcagcatatcc

SEQ ID NO: 5111636 - DNA, 25 bp, Homo sapien
cggtggagttgggcagcatatcccc

SEQ ID NO: 5111637 - DNA, 25 bp, Homo sapien
tgacacactcggtgacagactgcgg

SEQ ID NO: 5111638 - DNA, 25 bp, Homo sapien
gagagctggagtcaattccggcgaa

SEQ ID NO: 5111639 - DNA, 25 bp, Homo sapien
gagtagatgcatccaaacttgccca

SEQ ID NO: 5111640 - DNA, 25 bp, Homo sapien
tgactctcccttgcggagactggga

SEQ ID NO: 5111641 - DNA, 25 bp, Homo sapien
gatactgggccagactaatactggc

SEQ ID NO: 5111642 - DNA, 25 bp, Homo sapien
gccagactaatactggcagcagagc

SEQ ID NO: 5111643 - DNA, 25 bp, Homo sapien
tgggccagactaatactggcagcag

SEQ ID NO: 5111644 - DNA, 25 bp, Homo sapien
gctgcaccccatgcccttctcagag

SEQ ID NO: 5111645 - DNA, 25 bp, Homo sapien
cacagttggatcatgggagaacagc

SEQ ID NO: 5111646 - DNA, 25 bp, Homo sapien
tcttagcggatgataaagttgtgta

SEQ ID NO: 5111647 - DNA, 25 bp, Homo sapien
cactgaccagaaattacacagttgg

SEQ ID NO: 5111648 - DNA, 25 bp, Homo sapien
cttacatttcttatcgacaaacaga

SEQ ID NO: 5111649 - DNA, 25 bp, Homo sapien
ttcccagctttttcaaatatgaagc

SEQ ID NO: 5111650 - DNA, 25 bp, Homo sapien
aagacagcaattcccagctttttca

SEQ ID NO: 5111651 - DNA, 25 bp, Homo sapien
attcccagctttttcaaatatgaag

SEQ ID NO: 5111652 - DNA, 25 bp, Homo sapien
acagcaattcccagctttttcaaat

SEQ ID NO: 5111653 - DNA, 25 bp, Homo sapien
tcctggtatagggattctctaaaca

SEQ ID NO: 5111654 - DNA, 25 bp, Homo sapien
gtttctggatacaccacttggcagg

SEQ ID NO: 5111655 - DNA, 25 bp, Homo sapien
cagctgaagaattggaaactgggcc

SEQ ID NO: 5111656 - DNA, 25 bp, Homo sapien
cacaggtgcatgcttgacacgtgcg

SEQ ID NO: 5111657 - DNA, 25 bp, Homo sapien
ttattatctcctgttagtgaggttc

SEQ ID NO: 5111658 - DNA, 25 bp, Homo sapien
tcagcttactattggttccttatta

SEQ ID NO: 5111659 - DNA, 25 bp, Homo sapien
ttcagcttactattggttccttatt

SEQ ID NO: 5111660 - DNA, 25 bp, Homo sapien
ggttccttattatctcctgttagtg

SEQ ID NO: 5111661 - DNA, 25 bp, Homo sapien
catgatatgagtttgctgacgctga

SEQ ID NO: 5111662 - DNA, 25 bp, Homo sapien
gaaggacggtggtctcagctcccta

SEQ ID NO: 5111663 - DNA, 25 bp, Homo sapien
tttggcatcttgcaccattcgagtg

SEQ ID NO: 5111664 - DNA, 25 bp, Homo sapien
cgagtggctagctgacatgatatga

SEQ ID NO: 5111665 - DNA, 25 bp, Homo sapien
gtgaatccggccgcgcgctctcacc

SEQ ID NO: 5111666 - DNA, 25 bp, Homo sapien
ggtgaatccggccgcgcgctctcac

SEQ ID NO: 5111667 - DNA, 25 bp, Homo sapien
ccaggtaacagtccttgcagcgctt

SEQ ID NO: 5111668 - DNA, 25 bp, Homo sapien
atgtggagagggctcgaggcttcac

SEQ ID NO: 5111669 - DNA, 25 bp, Homo sapien
gaccccgcctcttcaccaggtaaca

SEQ ID NO: 5111670 - DNA, 25 bp, Homo sapien
tcttaaggacagtcttgtttttgaa

SEQ ID NO: 5111671 - DNA, 25 bp, Homo sapien
tgtgcctcggatgggttttacagta

SEQ ID NO: 5111672 - DNA, 25 bp, Homo sapien
ctctgcttgtgcctcggatgggttt

SEQ ID NO: 5111673 - DNA, 25 bp, Homo sapien
gcttgtgcctcggatgggttttaca

SEQ ID NO: 5111674 - DNA, 25 bp, Homo sapien
tcggatgggttttacagtagacgta

SEQ ID NO: 5111675 - DNA, 25 bp, Homo sapien
tccataagatacaaccattctccca

SEQ ID NO: 5111676 - DNA, 25 bp, Homo sapien
tgacgagtatgtgcgtgactctgga

SEQ ID NO: 5111677 - DNA, 25 bp, Homo sapien
tacactgaaacgtgatgggtaactt

SEQ ID NO: 5111678 - DNA, 25 bp, Homo sapien
ttcccctgactccttgatgtgataa

SEQ ID NO: 5111679 - DNA, 25 bp, Homo sapien
tccagataaagagatcgaagtttct

SEQ ID NO: 5111680 - DNA, 25 bp, Homo sapien
tttctccaagatctgattccccagg

SEQ ID NO: 5111681 - DNA, 25 bp, Homo sapien
taggaatgaaacttgctagaaaaat

SEQ ID NO: 5111682 - DNA, 25 bp, Homo sapien
gcaatgctatctttgtgccttccag

SEQ ID NO: 5111683 - DNA, 25 bp, Homo sapien
tctaaggccttagtcttacacaaat

SEQ ID NO: 5111684 - DNA, 25 bp, Homo sapien
tggcctgacaatctaaggtcctctg

SEQ ID NO: 5111685 - DNA, 25 bp, Homo sapien
gaacgtgggacatattctaaggcct

SEQ ID NO: 5111686 - DNA, 25 bp, Homo sapien
cagccggactgtggacctcaaacat

SEQ ID NO: 5111687 - DNA, 25 bp, Homo sapien
ctgcgagcgctttgccagggtgacg

SEQ ID NO: 5111688 - DNA, 25 bp, Homo sapien
gtgacgggcggaaatgtccccgcat

SEQ ID NO: 5111689 - DNA, 25 bp, Homo sapien
ggtgacgggcggaaatgtccccgca

SEQ ID NO: 5111690 - DNA, 25 bp, Homo sapien
tctctacttggatctgagaactctg

SEQ ID NO: 5111691 - DNA, 25 bp, Homo sapien
gccaccagaaactgccgcgatgaat

SEQ ID NO: 5111692 - DNA, 25 bp, Homo sapien
ccgcgatgaatgtcagtccccagag

SEQ ID NO: 5111693 - DNA, 25 bp, Homo sapien
tttctctacttggatctgagaactc

SEQ ID NO: 5111694 - DNA, 25 bp, Homo sapien
ttagaactagttccccactcagcag

SEQ ID NO: 5111695 - DNA, 25 bp, Homo sapien
gaacttaacaactagtggccagggc

SEQ ID NO: 5111696 - DNA, 25 bp, Homo sapien
gcaccagactgcacttggagtagca

SEQ ID NO: 5111697 - DNA, 25 bp, Homo sapien
gcatgccgcccgattcagaagcttt

SEQ ID NO: 5111698 - DNA, 25 bp, Homo sapien
tgcattttgcccgtgagaaaacagg

SEQ ID NO: 5111699 - DNA, 25 bp, Homo sapien
tacccatgaagatgttagaggctca

SEQ ID NO: 5111700 - DNA, 25 bp, Homo sapien
tgccagcagcagtcatgtacccatg

SEQ ID NO: 5111701 - DNA, 25 bp, Homo sapien
gcttggctcagtcccaaggacagta

SEQ ID NO: 5111702 - DNA, 25 bp, Homo sapien
caaggcgttgtggaaaaccagtgcc

SEQ ID NO: 5111703 - DNA, 25 bp, Homo sapien
gagctcggtcctgaatgcaatgcag

SEQ ID NO: 5111704 - DNA, 25 bp, Homo sapien
tccagacagtggatgggacgatcat

SEQ ID NO: 5111705 - DNA, 25 bp, Homo sapien
gcaaggcaagccagaagcacagttt

SEQ ID NO: 5111706 - DNA, 25 bp, Homo sapien
tcgttacagcgaacagtttggcccc

SEQ ID NO: 5111707 - DNA, 25 bp, Homo sapien
gatatgtgtgtgtcgctgcagaccc

SEQ ID NO: 5111708 - DNA, 25 bp, Homo sapien
gggcggctctgaccaataacgattg

SEQ ID NO: 5111709 - DNA, 25 bp, Homo sapien
ttcccagcggaaagcatgtccaagg

SEQ ID NO: 5111710 - DNA, 25 bp, Homo sapien
caccaaatggaattggcattctgca

SEQ ID NO: 5111711 - DNA, 25 bp, Homo sapien
tacaaagacaggtttactaagtgct

SEQ ID NO: 5111712 - DNA, 25 bp, Homo sapien
tgagcagggataaacaactcctaga

SEQ ID NO: 5111713 - DNA, 25 bp, Homo sapien
tcgtcaatcttaagcatgagcaggg

SEQ ID NO: 5111714 - DNA, 25 bp, Homo sapien
gggagctccctgcattttacctaga

SEQ ID NO: 5111715 - DNA, 25 bp, Homo sapien
ttctacagatcagggcatgcaacca

SEQ ID NO: 5111716 - DNA, 25 bp, Homo sapien
ttttcaagaccttcagggagctccc

SEQ ID NO: 5111717 - DNA, 25 bp, Homo sapien
ctttactcaagaggaaaggtcccag

SEQ ID NO: 5111718 - DNA, 25 bp, Homo sapien
gataaaggatattcatttgttcggt

SEQ ID NO: 5111719 - DNA, 25 bp, Homo sapien
acaaataatggaaattcgagtcttt

SEQ ID NO: 5111720 - DNA, 25 bp, Homo sapien
gtctttccagataaaggatattcat

SEQ ID NO: 5111721 - DNA, 25 bp, Homo sapien
taatggaaattcgagtctttccaga

SEQ ID NO: 5111722 - DNA, 25 bp, Homo sapien
ttttgcttgtggtgtcccctccagc

SEQ ID NO: 5111723 - DNA, 25 bp, Homo sapien
tctctagaggaacctaagagttatc

SEQ ID NO: 5111724 - DNA, 25 bp, Homo sapien
tcactgctactgcaatgctcctggc

SEQ ID NO: 5111725 - DNA, 25 bp, Homo sapien
aagaatggccttcttgccgggtgcg

SEQ ID NO: 5111726 - DNA, 25 bp, Homo sapien
gctccctggaccatacacttttgtg

SEQ ID NO: 5111727 - DNA, 25 bp, Homo sapien
taagcttacctttgatgtgtgcaca

SEQ ID NO: 5111728 - DNA, 25 bp, Homo sapien
ccaatgctactctattttcaaggtc

SEQ ID NO: 5111729 - DNA, 25 bp, Homo sapien
ccttcagtagtagattaagcttacc

SEQ ID NO: 5111730 - DNA, 25 bp, Homo sapien
ccaaccttgttggtgcatgcttata

SEQ ID NO: 5111731 - DNA, 25 bp, Homo sapien
aaaaacagccaaccttgttggtgca

SEQ ID NO: 5111732 - DNA, 25 bp, Homo sapien
ggctgttcctaccatagtaaagaaa

SEQ ID NO: 5111733 - DNA, 25 bp, Homo sapien
cctgttgcaaccagtaaaggctgtt

SEQ ID NO: 5111734 - DNA, 25 bp, Homo sapien
catcttaattacttcggcaaagacc

SEQ ID NO: 5111735 - DNA, 25 bp, Homo sapien
tctttacttcttatgaggacttgag

SEQ ID NO: 5111736 - DNA, 25 bp, Homo sapien
ttcacagataccagggtataggact

SEQ ID NO: 5111737 - DNA, 25 bp, Homo sapien
ccgtgcccagtctgatctttacttc

SEQ ID NO: 5111738 - DNA, 25 bp, Homo sapien
gactgtagggttctgctatataaaa

SEQ ID NO: 5111739 - DNA, 25 bp, Homo sapien
gcaaaggatgtctcttgataacctg

SEQ ID NO: 5111740 - DNA, 25 bp, Homo sapien
gataacctgtgtatggcctctggag

SEQ ID NO: 5111741 - DNA, 25 bp, Homo sapien
gatgggctaggaactcatttttcac

SEQ ID NO: 5111742 - DNA, 25 bp, Homo sapien
gagatagcattcatcatagaagaac

SEQ ID NO: 5111743 - DNA, 25 bp, Homo sapien
gttattagtcatacattttaggccc

SEQ ID NO: 5111744 - DNA, 25 bp, Homo sapien
gaataaataccttacttgagatagc

SEQ ID NO: 5111745 - DNA, 25 bp, Homo sapien
tctgttgggtacttctatgatacca

SEQ ID NO: 5111746 - DNA, 25 bp, Homo sapien
tgaatggtgtaatgtctgggcaacc

SEQ ID NO: 5111747 - DNA, 25 bp, Homo sapien
gacccgtttggtagcagctgatgcc

SEQ ID NO: 5111748 - DNA, 25 bp, Homo sapien
gctagttcaagctttctgacccgtt

SEQ ID NO: 5111749 - DNA, 25 bp, Homo sapien
taacttgtccgctactttggtgcta

SEQ ID NO: 5111750 - DNA, 25 bp, Homo sapien
aaactttgtcttggcctcgttgctt

SEQ ID NO: 5111751 - DNA, 25 bp, Homo sapien
attaattgttgatgtgcacagtgac

SEQ ID NO: 5111752 - DNA, 25 bp, Homo sapien
aatctgtttaggaggctatggaaag

SEQ ID NO: 5111753 - DNA, 25 bp, Homo sapien
tgtgcgcccagactggaatccagtg

SEQ ID NO: 5111754 - DNA, 25 bp, Homo sapien
tggatgcttacaaccaagacccaat

SEQ ID NO: 5111755 - DNA, 25 bp, Homo sapien
tgtttccttagcatgcacctggatg

SEQ ID NO: 5111756 - DNA, 25 bp, Homo sapien
tctccgtggacaccgcgatatcgtg

SEQ ID NO: 5111757 - DNA, 25 bp, Homo sapien
cataaccgcttaaacgatttgggag

SEQ ID NO: 5111758 - DNA, 25 bp, Homo sapien
tcaacagcgccgctggtgtagtggt

SEQ ID NO: 5111759 - DNA, 25 bp, Homo sapien
atgcaagattcccattcttgcgacc

SEQ ID NO: 5111760 - DNA, 25 bp, Homo sapien
ccgctggtgtagtggtatcatgcaa

SEQ ID NO: 5111761 - DNA, 25 bp, Homo sapien
gtatcatgcaagattcccattcttg

SEQ ID NO: 5111762 - DNA, 25 bp, Homo sapien
cgtcccattccccagtggattcgga

SEQ ID NO: 5111763 - DNA, 25 bp, Homo sapien
ggattaagtgattcctgcccaagaa

SEQ ID NO: 5111764 - DNA, 25 bp, Homo sapien
taagtgattcctgcccaagaaacaa

SEQ ID NO: 5111765 - DNA, 25 bp, Homo sapien
tcaggattaagtgattcctgcccaa

SEQ ID NO: 5111766 - DNA, 25 bp, Homo sapien
acaagctctgcagctggcctcaaga

SEQ ID NO: 5111767 - DNA, 25 bp, Homo sapien
ccacaagctctgcagctggcctcaa

SEQ ID NO: 5111768 - DNA, 25 bp, Homo sapien
ggcctccacaagctctgcagctggc

SEQ ID NO: 5111769 - DNA, 25 bp, Homo sapien
gctggcctcaagagccccgcagtcc

SEQ ID NO: 5111770 - DNA, 25 bp, Homo sapien
cagcgaggagacgagctccgcgacg

SEQ ID NO: 5111771 - DNA, 25 bp, Homo sapien
cgattttatctggcggagcacgcag

SEQ ID NO: 5111772 - DNA, 25 bp, Homo sapien
ttatctggcggagcacgcagctcgg

SEQ ID NO: 5111773 - DNA, 25 bp, Homo sapien
aggagacgagctccgcgacgacgcg

SEQ ID NO: 5111774 - DNA, 25 bp, Homo sapien
ctgaagtgccaccaattccggctcc

SEQ ID NO: 5111775 - DNA, 25 bp, Homo sapien
tgaagtgccaccaattccggctcca

SEQ ID NO: 5111776 - DNA, 25 bp, Homo sapien
aagtgccaccaattccggctccaat

SEQ ID NO: 5111777 - DNA, 25 bp, Homo sapien
gtgccaccaattccggctccaataa

SEQ ID NO: 5111778 - DNA, 25 bp, Homo sapien
tcaaacaggtctatcttcacatctt

SEQ ID NO: 5111779 - DNA, 25 bp, Homo sapien
taaaggatggatgacagaacctcct

SEQ ID NO: 5111780 - DNA, 25 bp, Homo sapien
tgacaaaacgtttcatgtgcagatt

SEQ ID NO: 5111781 - DNA, 25 bp, Homo sapien
tgcaccatcatggtagccaggcggc

SEQ ID NO: 5111782 - DNA, 25 bp, Homo sapien
ttcctgtgagaatcctattttgcaa

SEQ ID NO: 5111783 - DNA, 25 bp, Homo sapien
cctgtgagaatcctattttgcaaaa

SEQ ID NO: 5111784 - DNA, 25 bp, Homo sapien
ggcagctgaggcacttccattcctg

SEQ ID NO: 5111785 - DNA, 25 bp, Homo sapien
ccattcctgtgagaatcctattttg

SEQ ID NO: 5111786 - DNA, 25 bp, Homo sapien
gatgtcagacatgcatcttcgtggc

SEQ ID NO: 5111787 - DNA, 25 bp, Homo sapien
tgttctgggtataccttcgccctcg

SEQ ID NO: 5111788 - DNA, 25 bp, Homo sapien
catcttcgtggcataatttgttctg

SEQ ID NO: 5111789 - DNA, 25 bp, Homo sapien
ccctcgtggaggaaacggaagcaga

SEQ ID NO: 5111790 - DNA, 25 bp, Homo sapien
ccacatgtgcatacggagggattga

SEQ ID NO: 5111791 - DNA, 25 bp, Homo sapien
cagttgctctcctcaaataccagag

SEQ ID NO: 5111792 - DNA, 25 bp, Homo sapien
tctccattatatatccccagtaggc

SEQ ID NO: 5111793 - DNA, 25 bp, Homo sapien
tcatgaacttgtctaacacgtcctc

SEQ ID NO: 5111794 - DNA, 25 bp, Homo sapien
gcaaactgcttttccattaatggag

SEQ ID NO: 5111795 - DNA, 25 bp, Homo sapien
aatttgtagtaatgactgtgttgac

SEQ ID NO: 5111796 - DNA, 25 bp, Homo sapien
ttcaattttggagcgcagtagctat

SEQ ID NO: 5111797 - DNA, 25 bp, Homo sapien
gttaaagatgaactatttggtctca

SEQ ID NO: 5111798 - DNA, 25 bp, Homo sapien
cacctttatcttggtatagaactga

SEQ ID NO: 5111799 - DNA, 25 bp, Homo sapien
ccttcaggtattgagtaacaccttt

SEQ ID NO: 5111800 - DNA, 25 bp, Homo sapien
ctgaaacaattttcacacccttaag

SEQ ID NO: 5111801 - DNA, 25 bp, Homo sapien
ccttaagtggttgatacgtacctat

SEQ ID NO: 5111802 - DNA, 25 bp, Homo sapien
taatttttcgacactactgaaggca

SEQ ID NO: 5111803 - DNA, 25 bp, Homo sapien
aagtgttcgattaagcattccaagg

SEQ ID NO: 5111804 - DNA, 25 bp, Homo sapien
gaggaacttctcagaaaagccggcc

SEQ ID NO: 5111805 - DNA, 25 bp, Homo sapien
gtgctttggccataattgaccctca

SEQ ID NO: 5111806 - DNA, 25 bp, Homo sapien
ttactgagccagatataagattgct

SEQ ID NO: 5111807 - DNA, 25 bp, Homo sapien
atcagaacaggacagtgacaccgcc

SEQ ID NO: 5111808 - DNA, 25 bp, Homo sapien
tataagattgcttttggatgcctgc

SEQ ID NO: 5111809 - DNA, 25 bp, Homo sapien
tttctcctcgatgtacattactgag

SEQ ID NO: 5111810 - DNA, 25 bp, Homo sapien
tgtcatagaagtctgaacgagtctc

SEQ ID NO: 5111811 - DNA, 25 bp, Homo sapien
tgctgcacactctatgccattgagg

SEQ ID NO: 5111812 - DNA, 25 bp, Homo sapien
ttttcgattcaacggagtggccacc

SEQ ID NO: 5111813 - DNA, 25 bp, Homo sapien
tggccaccaagacgatgtcatagaa

SEQ ID NO: 5111814 - DNA, 25 bp, Homo sapien
aagccatcctgatcaatcatgtctg

SEQ ID NO: 5111815 - DNA, 25 bp, Homo sapien
taagccatcctgatcaatcatgtct

SEQ ID NO: 5111816 - DNA, 25 bp, Homo sapien
agccatcctgatcaatcatgtctgt

SEQ ID NO: 5111817 - DNA, 25 bp, Homo sapien
tataagccatcctgatcaatcatgt

SEQ ID NO: 5111818 - DNA, 25 bp, Homo sapien
cactgatagtcatttggaactagga

SEQ ID NO: 5111819 - DNA, 25 bp, Homo sapien
tcctatgaccagcagggattacttt

SEQ ID NO: 5111820 - DNA, 25 bp, Homo sapien
cttttttgccactgatagtcatttg

SEQ ID NO: 5111821 - DNA, 25 bp, Homo sapien
ctatgaccagcagggattactttta

SEQ ID NO: 5111822 - DNA, 25 bp, Homo sapien
tttgatcaaaatccagcgcgccact

SEQ ID NO: 5111823 - DNA, 25 bp, Homo sapien
taaaactacctaatgcgcccagagt

SEQ ID NO: 5111824 - DNA, 25 bp, Homo sapien
cttattgaataaacagggtggagcc

SEQ ID NO: 5111825 - DNA, 25 bp, Homo sapien
catgggcacacgtacttcaaaccgg

SEQ ID NO: 5111826 - DNA, 25 bp, Homo sapien
aaaaacattccagtgtatcatggtt

SEQ ID NO: 5111827 - DNA, 25 bp, Homo sapien
aacattccagtgtatcatggttctt

SEQ ID NO: 5111828 - DNA, 25 bp, Homo sapien
atcatggttctttgtgagtgagtag

SEQ ID NO: 5111829 - DNA, 25 bp, Homo sapien
catggttctttgtgagtgagtagag

SEQ ID NO: 5111830 - DNA, 25 bp, Homo sapien
ccttaccataaatcttggcagtctc

SEQ ID NO: 5111831 - DNA, 25 bp, Homo sapien
tggcagtctcaacatatgattcttt

SEQ ID NO: 5111832 - DNA, 25 bp, Homo sapien
tggccagcacgaacttctttttact

SEQ ID NO: 5111833 - DNA, 25 bp, Homo sapien
taaatcttggcagtctcaacatatg

SEQ ID NO: 5111834 - DNA, 25 bp, Homo sapien
acctgtcagttggatcgttacctaa

SEQ ID NO: 5111835 - DNA, 25 bp, Homo sapien
tcaggcactcttgctagggttgtcc

SEQ ID NO: 5111836 - DNA, 25 bp, Homo sapien
tccccagagttgtcagtggcatcgc

SEQ ID NO: 5111837 - DNA, 25 bp, Homo sapien
tagcatcattgaagcacaaaaaagg

SEQ ID NO: 5111838 - DNA, 25 bp, Homo sapien
taccttgtccaagtcagtgatccat

SEQ ID NO: 5111839 - DNA, 25 bp, Homo sapien
ggccattgaaattacttaatactgt

SEQ ID NO: 5111840 - DNA, 25 bp, Homo sapien
caagtcagtgatccattgaggccat

SEQ ID NO: 5111841 - DNA, 25 bp, Homo sapien
cagtgatccattgaggccattgaaa

SEQ ID NO: 5111842 - DNA, 25 bp, Homo sapien
tatacagaacctaaggtcctagcgc

SEQ ID NO: 5111843 - DNA, 25 bp, Homo sapien
gatctgccagttcacaggtaacact

SEQ ID NO: 5111844 - DNA, 25 bp, Homo sapien
tactaatgcctaatgcagatctgcc

SEQ ID NO: 5111845 - DNA, 25 bp, Homo sapien
tgcatacggcagttactcagctgta

SEQ ID NO: 5111846 - DNA, 25 bp, Homo sapien
cccagcccataaatatatttttact

SEQ ID NO: 5111847 - DNA, 25 bp, Homo sapien
ccgcgcccagcccataaatatattt

SEQ ID NO: 5111848 - DNA, 25 bp, Homo sapien
gcccagcccataaatatatttttac

SEQ ID NO: 5111849 - DNA, 25 bp, Homo sapien
gcgcccagcccataaatatattttt

SEQ ID NO: 5111850 - DNA, 25 bp, Homo sapien
ttgtgaaatccggtcagatctgccg

SEQ ID NO: 5111851 - DNA, 25 bp, Homo sapien
cagatctgccgccaaaatgacttaa

SEQ ID NO: 5111852 - DNA, 25 bp, Homo sapien
tctcttcctcgtaggtttcatgaat

SEQ ID NO: 5111853 - DNA, 25 bp, Homo sapien
ggtttcatgaattgtgaaatccggt

SEQ ID NO: 5111854 - DNA, 25 bp, Homo sapien
catgttctagatagacggctagagg

SEQ ID NO: 5111855 - DNA, 25 bp, Homo sapien
aggctcccgcgcatgagacgtgaag

SEQ ID NO: 5111856 - DNA, 25 bp, Homo sapien
ctcgcgcgtcggtgtggttacagcc

SEQ ID NO: 5111857 - DNA, 25 bp, Homo sapien
tcatttcttcttccggtccgaggtc

SEQ ID NO: 5111858 - DNA, 25 bp, Homo sapien
caacttgggctaggatgagctgact

SEQ ID NO: 5111859 - DNA, 25 bp, Homo sapien
cctggcaacaggaaattcaagggag

SEQ ID NO: 5111860 - DNA, 25 bp, Homo sapien
aaagtggtgctaaatcgagtcagag

SEQ ID NO: 5111861 - DNA, 25 bp, Homo sapien
ttgtcctggcagtaaggctttcccc

SEQ ID NO: 5111862 - DNA, 25 bp, Homo sapien
ctcgcttcacacagcgcgggtttct

SEQ ID NO: 5111863 - DNA, 25 bp, Homo sapien
ccagaaaggcgaggacttccggcct

SEQ ID NO: 5111864 - DNA, 25 bp, Homo sapien
cagaggcgctgccaacgtgaaagac

SEQ ID NO: 5111865 - DNA, 25 bp, Homo sapien
ggcctccccgttggccaggtcatgc

SEQ ID NO: 5111866 - DNA, 25 bp, Homo sapien
aacatccggaagatgcaggtagcgg

SEQ ID NO: 5111867 - DNA, 25 bp, Homo sapien
ggatgaaatccgtgtgcccttgccg

SEQ ID NO: 5111868 - DNA, 25 bp, Homo sapien
tgcgcgaggctgttttccgcccctt

SEQ ID NO: 5111869 - DNA, 25 bp, Homo sapien
aggacttcggaagctttggcggatc

SEQ ID NO: 5111870 - DNA, 25 bp, Homo sapien
gattccatatgggcgccggcgcgga

SEQ ID NO: 5111871 - DNA, 25 bp, Homo sapien
attccatatgggcgccggcgcggag

SEQ ID NO: 5111872 - DNA, 25 bp, Homo sapien
gccgattccatatgggcgccggcgc

SEQ ID NO: 5111873 - DNA, 25 bp, Homo sapien
ccgattccatatgggcgccggcgcg

SEQ ID NO: 5111874 - DNA, 25 bp, Homo sapien
agctcaggtcatccacctgcccacg

SEQ ID NO: 5111875 - DNA, 25 bp, Homo sapien
aggtcatccacctgcccacggcctc

SEQ ID NO: 5111876 - DNA, 25 bp, Homo sapien
tcaggtcatccacctgcccacggcc

SEQ ID NO: 5111877 - DNA, 25 bp, Homo sapien
gctcaggtcatccacctgcccacgg

SEQ ID NO: 5111878 - DNA, 25 bp, Homo sapien
aatggatcaacaaatgtgggccggg

SEQ ID NO: 5111879 - DNA, 25 bp, Homo sapien
atcaacaaatgtgggccgggaccga

SEQ ID NO: 5111880 - DNA, 25 bp, Homo sapien
atgtgggccgggaccgatgcctcat

SEQ ID NO: 5111881 - DNA, 25 bp, Homo sapien
aatgtgggccgggaccgatgcctca

SEQ ID NO: 5111882 - DNA, 25 bp, Homo sapien
taagtaacaacatgtagttaagtgg

SEQ ID NO: 5111883 - DNA, 25 bp, Homo sapien
taagtggctgccatcctggatggca

SEQ ID NO: 5111884 - DNA, 25 bp, Homo sapien
gatggcacagtagatagtctatcta

SEQ ID NO: 5111885 - DNA, 25 bp, Homo sapien
attaatcgagatagttaaaataaca

SEQ ID NO: 5111886 - DNA, 25 bp, Homo sapien
caaaaacctctgtagctagaactgg

SEQ ID NO: 5111887 - DNA, 25 bp, Homo sapien
caggggagtagctctcacaaaaacc

SEQ ID NO: 5111888 - DNA, 25 bp, Homo sapien
aacctctgtagctagaactggcaga

SEQ ID NO: 5111889 - DNA, 25 bp, Homo sapien
ctcacaaaaacctctgtagctagaa

SEQ ID NO: 5111890 - DNA, 25 bp, Homo sapien
ctcatttggcagtttggcgaatgct

SEQ ID NO: 5111891 - DNA, 25 bp, Homo sapien
tctccactgagaactaagatgctca

SEQ ID NO: 5111892 - DNA, 25 bp, Homo sapien
taatctccactgagaactaagatgc

SEQ ID NO: 5111893 - DNA, 25 bp, Homo sapien
tttggcgaatgcttattaaacaccc

SEQ ID NO: 5111894 - DNA, 25 bp, Homo sapien
taggcaggtagattgggtccaagag

SEQ ID NO: 5111895 - DNA, 25 bp, Homo sapien
caggtagattgggtccaagagggtc

SEQ ID NO: 5111896 - DNA, 25 bp, Homo sapien
ttgggtccaagagggtcgtgattca

SEQ ID NO: 5111897 - DNA, 25 bp, Homo sapien
tagattgggtccaagagggtcgtga

SEQ ID NO: 5111898 - DNA, 25 bp, Homo sapien
tcctgaagatagaaatcggttggtg

SEQ ID NO: 5111899 - DNA, 25 bp, Homo sapien
cagcagcttcctgaagatagaaatc

SEQ ID NO: 5111900 - DNA, 25 bp, Homo sapien
cagcttcctgaagatagaaatcggt

SEQ ID NO: 5111901 - DNA, 25 bp, Homo sapien
gaagatagaaatcggttggtgccta

SEQ ID NO: 5111902 - DNA, 25 bp, Homo sapien
gggcagcgcccccctccggcttcac

SEQ ID NO: 5111903 - DNA, 25 bp, Homo sapien
gcagcgcccccctccggcttcacat

SEQ ID NO: 5111904 - DNA, 25 bp, Homo sapien
cagcgcccccctccggcttcacatt

SEQ ID NO: 5111905 - DNA, 25 bp, Homo sapien
tggggcagcgcccccctccggcttc

SEQ ID NO: 5111906 - DNA, 25 bp, Homo sapien
tgagcacttgagcctctgttcagcc

SEQ ID NO: 5111907 - DNA, 25 bp, Homo sapien
tgtatcatccatttgagcacttgag

SEQ ID NO: 5111908 - DNA, 25 bp, Homo sapien
agcacttgagcctctgttcagccca

SEQ ID NO: 5111909 - DNA, 25 bp, Homo sapien
tatcatccatttgagcacttgagcc

SEQ ID NO: 5111910 - DNA, 25 bp, Homo sapien
ggagaccaggcatggcagcctttac

SEQ ID NO: 5111911 - DNA, 25 bp, Homo sapien
caaaactgcctttctgagctgactg

SEQ ID NO: 5111912 - DNA, 25 bp, Homo sapien
tgctatcagagtcagatcagaacaa

SEQ ID NO: 5111913 - DNA, 25 bp, Homo sapien
gacatgctatcagagtcagatcaga

SEQ ID NO: 5111914 - DNA, 25 bp, Homo sapien
agctgactgggtcactgaggtcatc

SEQ ID NO: 5111915 - DNA, 25 bp, Homo sapien
ctagtctgctgcccaggggtcagag

SEQ ID NO: 5111916 - DNA, 25 bp, Homo sapien
tgctgcccaggggtcagaggttatt

SEQ ID NO: 5111917 - DNA, 25 bp, Homo sapien
tctgctgcccaggggtcagaggtta

SEQ ID NO: 5111918 - DNA, 25 bp, Homo sapien
ctgcccaggggtcagaggttattgc

SEQ ID NO: 5111919 - DNA, 25 bp, Homo sapien
ctttcatttgtacaggtgtgcagcc

SEQ ID NO: 5111920 - DNA, 25 bp, Homo sapien
caggtgtgcagccaaatgacctcac

SEQ ID NO: 5111921 - DNA, 25 bp, Homo sapien
ttgtacaggtgtgcagccaaatgac

SEQ ID NO: 5111922 - DNA, 25 bp, Homo sapien
tcatttgtacaggtgtgcagccaaa

SEQ ID NO: 5111923 - DNA, 25 bp, Homo sapien
ctatcttgattggcactccttgtgg

SEQ ID NO: 5111924 - DNA, 25 bp, Homo sapien
tatcttgattggcactccttgtggg

SEQ ID NO: 5111925 - DNA, 25 bp, Homo sapien
tgattggcactccttgtgggtgaga

SEQ ID NO: 5111926 - DNA, 25 bp, Homo sapien
tcttgattggcactccttgtgggtg

SEQ ID NO: 5111927 - DNA, 25 bp, Homo sapien
taaacaagacggtgtggctcagatc

SEQ ID NO: 5111928 - DNA, 25 bp, Homo sapien
ccttccctagggtatagaggtgcaa

SEQ ID NO: 5111929 - DNA, 25 bp, Homo sapien
cttgatccatgagaaaacgcggagc

SEQ ID NO: 5111930 - DNA, 25 bp, Homo sapien
tcagatcatatcactgggaggctct

SEQ ID NO: 5111931 - DNA, 25 bp, Homo sapien
tagttcctaggtccagcaagtcaca

SEQ ID NO: 5111932 - DNA, 25 bp, Homo sapien
ttagagaccaatcaacggacactgg

SEQ ID NO: 5111933 - DNA, 25 bp, Homo sapien
tcaagtttacatcccttgggccaga

SEQ ID NO: 5111934 - DNA, 25 bp, Homo sapien
taacacacatgcagtgagaggcctc

SEQ ID NO: 5111935 - DNA, 25 bp, Homo sapien
cagaatattcattgtttcaccatct

SEQ ID NO: 5111936 - DNA, 25 bp, Homo sapien
taggtcagaatattcattgtttcac

SEQ ID NO: 5111937 - DNA, 25 bp, Homo sapien
gccactgtggaataggtcagaatat

SEQ ID NO: 5111938 - DNA, 25 bp, Homo sapien
ttcaccatctaagtctacagaggtc

SEQ ID NO: 5111939 - DNA, 25 bp, Homo sapien
gacacggatggaaggaggcaaaata

SEQ ID NO: 5111940 - DNA, 25 bp, Homo sapien
tagaggtactcagacacggatggaa

SEQ ID NO: 5111941 - DNA, 25 bp, Homo sapien
cttagaggtactcagacacggatgg

SEQ ID NO: 5111942 - DNA, 25 bp, Homo sapien
cggatggaaggaggcaaaatatcct

SEQ ID NO: 5111943 - DNA, 25 bp, Homo sapien
gtcttgtgcttcgtctggtgttgag

SEQ ID NO: 5111944 - DNA, 25 bp, Homo sapien
cagcccagaacatcctggtcttgtg

SEQ ID NO: 5111945 - DNA, 25 bp, Homo sapien
cgttgtgggaacattccccaggcag

SEQ ID NO: 5111946 - DNA, 25 bp, Homo sapien
ctggtgttgagagattttagtaaac

SEQ ID NO: 5111947 - DNA, 25 bp, Homo sapien
cattatccgactgaaatttccagtg

SEQ ID NO: 5111948 - DNA, 25 bp, Homo sapien
taactgcagtgcaaagcgcattatc

SEQ ID NO: 5111949 - DNA, 25 bp, Homo sapien
gcaaagcgcattatccgactgaaat

SEQ ID NO: 5111950 - DNA, 25 bp, Homo sapien
agtgcaaagcgcattatccgactga

SEQ ID NO: 5111951 - DNA, 25 bp, Homo sapien
cccaatctcagcaaacttgctgggt

SEQ ID NO: 5111952 - DNA, 25 bp, Homo sapien
tcattgtcctcagacccaatctcag

SEQ ID NO: 5111953 - DNA, 25 bp, Homo sapien
aaggaagcaccatcctgaacctcca

SEQ ID NO: 5111954 - DNA, 25 bp, Homo sapien
tgaaggaagcaccatcctgaacctc

SEQ ID NO: 5111955 - DNA, 25 bp, Homo sapien
gcaggtctaagatcctgtgaatata

SEQ ID NO: 5111956 - DNA, 25 bp, Homo sapien
cctgtgaatataaggcatgacttgc

SEQ ID NO: 5111957 - DNA, 25 bp, Homo sapien
ggcatgacttgctcatggtttttct

SEQ ID NO: 5111958 - DNA, 25 bp, Homo sapien
tagacctcatgcaggtctaagatcc

SEQ ID NO: 5111959 - DNA, 25 bp, Homo sapien
cagggccatgctcgattgaccatga

SEQ ID NO: 5111960 - DNA, 25 bp, Homo sapien
agaaggaaatggcgcattcaagtat

SEQ ID NO: 5111961 - DNA, 25 bp, Homo sapien
ctcgattgaccatgatccaagccag

SEQ ID NO: 5111962 - DNA, 25 bp, Homo sapien
agatgtcagggccatgctcgattga

SEQ ID NO: 5111963 - DNA, 25 bp, Homo sapien
tttgttaaccatcattaggtatgtc

SEQ ID NO: 5111964 - DNA, 25 bp, Homo sapien
agttctgttcctccttaagcatttg

SEQ ID NO: 5111965 - DNA, 25 bp, Homo sapien
taggtatgtcattgttatggcactg

SEQ ID NO: 5111966 - DNA, 25 bp, Homo sapien
cactaaggttcccttcttgctctaa

SEQ ID NO: 5111967 - DNA, 25 bp, Homo sapien
tccctaaacgccagccccagggtca

SEQ ID NO: 5111968 - DNA, 25 bp, Homo sapien
ccctaaacgccagccccagggtcat

SEQ ID NO: 5111969 - DNA, 25 bp, Homo sapien
tccttcaatcctgggtttctcccta

SEQ ID NO: 5111970 - DNA, 25 bp, Homo sapien
ctcagctccctgcaagtgcccagaa

SEQ ID NO: 5111971 - DNA, 25 bp, Homo sapien
ggcaaaggaaggtctcagctccctg

SEQ ID NO: 5111972 - DNA, 25 bp, Homo sapien
tgaaggccagagaagcagaggcaca

SEQ ID NO: 5111973 - DNA, 25 bp, Homo sapien
gaaggcaaaggaaggtctcagctcc

SEQ ID NO: 5111974 - DNA, 25 bp, Homo sapien
cgataaattggagggaaccaccagg

SEQ ID NO: 5111975 - DNA, 25 bp, Homo sapien
ttatgggagacgtggaatgctttgc

SEQ ID NO: 5111976 - DNA, 25 bp, Homo sapien
ttcaggaggaacatcgataaattgg

SEQ ID NO: 5111977 - DNA, 25 bp, Homo sapien
gctttgcactattccagcaacaaga

SEQ ID NO: 5111978 - DNA, 25 bp, Homo sapien
ttaatgagcatgtctccttgccttg

SEQ ID NO: 5111979 - DNA, 25 bp, Homo sapien
acttgtcgggtattgctatgaaatc

SEQ ID NO: 5111980 - DNA, 25 bp, Homo sapien
tccttgccttgcacagtaggtccag

SEQ ID NO: 5111981 - DNA, 25 bp, Homo sapien
gaaagtgaaacttgtcgggtattgc

SEQ ID NO: 5111982 - DNA, 25 bp, Homo sapien
gcacttgttagtggcattgactcta

SEQ ID NO: 5111983 - DNA, 25 bp, Homo sapien
cctaaatcagtaatggtgggaaatg

SEQ ID NO: 5111984 - DNA, 25 bp, Homo sapien
ctcttgaagtagggaaagatagtaa

SEQ ID NO: 5111985 - DNA, 25 bp, Homo sapien
ttgactctaaagagttcaaagcagt

SEQ ID NO: 5111986 - DNA, 25 bp, Homo sapien
catactttacccttaagagtctctc

SEQ ID NO: 5111987 - DNA, 25 bp, Homo sapien
tctgcagtgacattcaagggttgat

SEQ ID NO: 5111988 - DNA, 25 bp, Homo sapien
tgatgacatactttacccttaagag

SEQ ID NO: 5111989 - DNA, 25 bp, Homo sapien
ttctctgcagtgacattcaagggtt

SEQ ID NO: 5111990 - DNA, 25 bp, Homo sapien
ggaggcaaagccaagcgtgcctgct

SEQ ID NO: 5111991 - DNA, 25 bp, Homo sapien
gaggcaaagccaagcgtgcctgctc

SEQ ID NO: 5111992 - DNA, 25 bp, Homo sapien
aactaaagatagaacctgcgagagc

SEQ ID NO: 5111993 - DNA, 25 bp, Homo sapien
gaacctgcgagagcacagttgctaa

SEQ ID NO: 5111994 - DNA, 25 bp, Homo sapien
ccaccaactttagcgatgacatgaa

SEQ ID NO: 5111995 - DNA, 25 bp, Homo sapien
agtccaactaaagatagaacctgcg

SEQ ID NO: 5111996 - DNA, 25 bp, Homo sapien
tatcctctctcctattgtttctgga

SEQ ID NO: 5111997 - DNA, 25 bp, Homo sapien
catggtgaacctgcttatcctctct

SEQ ID NO: 5111998 - DNA, 25 bp, Homo sapien
atcctccacattctggtgaactgag

SEQ ID NO: 5111999 - DNA, 25 bp, Homo sapien
tctggaacttagtgttttataagaa

SEQ ID NO: 5112000 - DNA, 25 bp, Homo sapien
cagcaggtaacatgggtatgggagg

SEQ ID NO: 5112001 - DNA, 25 bp, Homo sapien
taacatgggtatgggaggcttttcc

SEQ ID NO: 5112002 - DNA, 25 bp, Homo sapien
caggtaacatgggtatgggaggctt

SEQ ID NO: 5112003 - DNA, 25 bp, Homo sapien
gtaacatgggtatgggaggcttttc

SEQ ID NO: 5112004 - DNA, 25 bp, Homo sapien
tccaagcccggctcagccggcgtcg

SEQ ID NO: 5112005 - DNA, 25 bp, Homo sapien
ccctctggccgggtcttgcctgcgc

SEQ ID NO: 5112006 - DNA, 25 bp, Homo sapien
gggtcttgcctgcgcccctttggca

SEQ ID NO: 5112007 - DNA, 25 bp, Homo sapien
cgtgtagactgggccgcctcggaac

SEQ ID NO: 5112008 - DNA, 25 bp, Homo sapien
gccctgttcgctctgggtacgtacg

SEQ ID NO: 5112009 - DNA, 25 bp, Homo sapien
tcgctctgggtacgtacgccggctg

SEQ ID NO: 5112010 - DNA, 25 bp, Homo sapien
cgccactcgggcaccgcaggtaggg

SEQ ID NO: 5112011 - DNA, 25 bp, Homo sapien
actcgggcaccgcaggtagggcagg

SEQ ID NO: 5112012 - DNA, 25 bp, Homo sapien
gcacgctggagtccgctgccgcacg

SEQ ID NO: 5112013 - DNA, 25 bp, Homo sapien
gatgccccaggagcggcccctcggt

SEQ ID NO: 5112014 - DNA, 25 bp, Homo sapien
gcctagagcctggaagccgccactg

SEQ ID NO: 5112015 - DNA, 25 bp, Homo sapien
ggcccaggacaatccggctacgcgg

SEQ ID NO: 5112016 - DNA, 25 bp, Homo sapien
cttcaaggaaagtggatctacccgg

SEQ ID NO: 5112017 - DNA, 25 bp, Homo sapien
agaagagggtcagtccgtgagctcc

SEQ ID NO: 5112018 - DNA, 25 bp, Homo sapien
tccgggtacctggagaacatgaatc

SEQ ID NO: 5112019 - DNA, 25 bp, Homo sapien
tgagggtcaccgaggaacctatgga

SEQ ID NO: 5112020 - DNA, 25 bp, Homo sapien
gcagaggtcaaccgtgagagcctga

SEQ ID NO: 5112021 - DNA, 25 bp, Homo sapien
gtaaacagcaaaagattccccaggc

SEQ ID NO: 5112022 - DNA, 25 bp, Homo sapien
actgggcagaggtcaaccgtgagag

SEQ ID NO: 5112023 - DNA, 25 bp, Homo sapien
cctccccaagtaaacagcaaaagat

SEQ ID NO: 5112024 - DNA, 25 bp, Homo sapien
ctgaaccagcccagttactgctccc

SEQ ID NO: 5112025 - DNA, 25 bp, Homo sapien
ctgtcacccaggaaggtcctgcagc

SEQ ID NO: 5112026 - DNA, 25 bp, Homo sapien
tctttctcatacacagatgacatct

SEQ ID NO: 5112027 - DNA, 25 bp, Homo sapien
ctttctcatacacagatgacatctc

SEQ ID NO: 5112028 - DNA, 25 bp, Homo sapien
tttctcatacacagatgacatctct

SEQ ID NO: 5112029 - DNA, 25 bp, Homo sapien
gcagaaacattccaagagcacaagc

SEQ ID NO: 5112030 - DNA, 25 bp, Homo sapien
cacaggagtttatggagtctctgca

SEQ ID NO: 5112031 - DNA, 25 bp, Homo sapien
gactgggttcactcttacagccaaa

SEQ ID NO: 5112032 - DNA, 25 bp, Homo sapien
gagcacaagccctaatgcacaggag

SEQ ID NO: 5112033 - DNA, 25 bp, Homo sapien
aactctgtcctttgtgttggacagt

SEQ ID NO: 5112034 - DNA, 25 bp, Homo sapien
tctgtcctttgtgttggacagtgga

SEQ ID NO: 5112035 - DNA, 25 bp, Homo sapien
ctctgtcctttgtgttggacagtgg

SEQ ID NO: 5112036 - DNA, 25 bp, Homo sapien
actctgtcctttgtgttggacagtg

SEQ ID NO: 5112037 - DNA, 25 bp, Homo sapien
tagagccccgcccacaggatgcgta

SEQ ID NO: 5112038 - DNA, 25 bp, Homo sapien
tgaaagcggcaagggtagagccccg

SEQ ID NO: 5112039 - DNA, 25 bp, Homo sapien
agcggcaagggtagagccccgccca

SEQ ID NO: 5112040 - DNA, 25 bp, Homo sapien
cacaggatgcgtactcggcattcct

SEQ ID NO: 5112041 - DNA, 25 bp, Homo sapien
tgcaaggccaagagaatccagtgag

SEQ ID NO: 5112042 - DNA, 25 bp, Homo sapien
ccatacctgcattgtgggatcagac

SEQ ID NO: 5112043 - DNA, 25 bp, Homo sapien
ccatggttccaatgcccagcttgat

SEQ ID NO: 5112044 - DNA, 25 bp, Homo sapien
caggcttagtgtctggacttcacag

SEQ ID NO: 5112045 - DNA, 25 bp, Homo sapien
tccagactcaaaggatctagtatct

SEQ ID NO: 5112046 - DNA, 25 bp, Homo sapien
gactcaaaggatctagtatctggac

SEQ ID NO: 5112047 - DNA, 25 bp, Homo sapien
atttctccagactcaaaggatctag

SEQ ID NO: 5112048 - DNA, 25 bp, Homo sapien
aggatctagtatctggacttgggct

SEQ ID NO: 5112049 - DNA, 25 bp, Homo sapien
tatcgtgtggcaacaagacaacgga

SEQ ID NO: 5112050 - DNA, 25 bp, Homo sapien
caggagttcctacaatcacagaggc

SEQ ID NO: 5112051 - DNA, 25 bp, Homo sapien
ctcgggtcaccaagccaagagctga

SEQ ID NO: 5112052 - DNA, 25 bp, Homo sapien
taggcctccatgtggcataaagaag

SEQ ID NO: 5112053 - DNA, 25 bp, Homo sapien
agtttcctcctgcatattctgagat

SEQ ID NO: 5112054 - DNA, 25 bp, Homo sapien
tctgagatgctttgtttcacactgt

SEQ ID NO: 5112055 - DNA, 25 bp, Homo sapien
tcctcctgcatattctgagatgctt

SEQ ID NO: 5112056 - DNA, 25 bp, Homo sapien
catattctgagatgctttgtttcac

SEQ ID NO: 5112057 - DNA, 25 bp, Homo sapien
ccctcctttataactgccaactggg

SEQ ID NO: 5112058 - DNA, 25 bp, Homo sapien
gccctcctttataactgccaactgg

SEQ ID NO: 5112059 - DNA, 25 bp, Homo sapien
tttataactgccaactggggcctgg

SEQ ID NO: 5112060 - DNA, 25 bp, Homo sapien
taactgccaactggggcctggtcct

SEQ ID NO: 5112061 - DNA, 25 bp, Homo sapien
atagactggtgttttagttatctct

SEQ ID NO: 5112062 - DNA, 25 bp, Homo sapien
tagactggtgttttagttatctcta

SEQ ID NO: 5112063 - DNA, 25 bp, Homo sapien
gattttgcctgccaaggattccctt

SEQ ID NO: 5112064 - DNA, 25 bp, Homo sapien
ctttaagatcggtaattttgctggc

SEQ ID NO: 5112065 - DNA, 25 bp, Homo sapien
gcagcatcctttctgtacgcaaatg

SEQ ID NO: 5112066 - DNA, 25 bp, Homo sapien
gaaccaaattagattcagggtcact

SEQ ID NO: 5112067 - DNA, 25 bp, Homo sapien
ttcgccgttgccagcccatgagcgt

SEQ ID NO: 5112068 - DNA, 25 bp, Homo sapien
tattttggtggcagcgcatgacggt

SEQ ID NO: 5112069 - DNA, 25 bp, Homo sapien
tgtggccacttcactgggcccttga

SEQ ID NO: 5112070 - DNA, 25 bp, Homo sapien
cggtttccctgcatctggtccctgt

SEQ ID NO: 5112071 - DNA, 25 bp, Homo sapien
ttatgggcacgtctgctttccacag

SEQ ID NO: 5112072 - DNA, 25 bp, Homo sapien
tatccaagggtagagcccctcttcc

SEQ ID NO: 5112073 - DNA, 25 bp, Homo sapien
catccaggtatcctgaagtttccac

SEQ ID NO: 5112074 - DNA, 25 bp, Homo sapien
acagactgcctgtatccaagggtag

SEQ ID NO: 5112075 - DNA, 25 bp, Homo sapien
aatccacaaggccaatgtgtgttct

SEQ ID NO: 5112076 - DNA, 25 bp, Homo sapien
tggcatctgacttgtgggagaggct

SEQ ID NO: 5112077 - DNA, 25 bp, Homo sapien
tggaatccacaaggccaatgtgtgt

SEQ ID NO: 5112078 - DNA, 25 bp, Homo sapien
gaaagcgggaagatctcttgctcca

SEQ ID NO: 5112079 - DNA, 25 bp, Homo sapien
ggtcagaacaacaggatgtccaagt

SEQ ID NO: 5112080 - DNA, 25 bp, Homo sapien
gaaaatggaaaatgatcacttgtca

SEQ ID NO: 5112081 - DNA, 25 bp, Homo sapien
ctgggtcagaacaacaggatgtcca

SEQ ID NO: 5112082 - DNA, 25 bp, Homo sapien
gaacaacaggatgtccaagtgaaaa

SEQ ID NO: 5112083 - DNA, 25 bp, Homo sapien
ctgggtgagacagcccccagcagct

SEQ ID NO: 5112084 - DNA, 25 bp, Homo sapien
cagagccatgggcaggtggcggtag

SEQ ID NO: 5112085 - DNA, 25 bp, Homo sapien
gagttctccttgtccctcattggtg

SEQ ID NO: 5112086 - DNA, 25 bp, Homo sapien
gacgagtctcttcgaatgcctccac

SEQ ID NO: 5112087 - DNA, 25 bp, Homo sapien
ccactctggacagcattgggtcagg

SEQ ID NO: 5112088 - DNA, 25 bp, Homo sapien
tgaggaagtgagcttgccaggccta

SEQ ID NO: 5112089 - DNA, 25 bp, Homo sapien
tgtctcatgatgtgtagtctccagc

SEQ ID NO: 5112090 - DNA, 25 bp, Homo sapien
cagggcgaatcccaagcagggactc

SEQ ID NO: 5112091 - DNA, 25 bp, Homo sapien
tgcttggtgacaggaagcgtgtctc

SEQ ID NO: 5112092 - DNA, 25 bp, Homo sapien
gcagcttgcgtctttccactttgag

SEQ ID NO: 5112093 - DNA, 25 bp, Homo sapien
gacttctagcctaagtcctggagca

SEQ ID NO: 5112094 - DNA, 25 bp, Homo sapien
tcatttagggatcggtaagtctggc

SEQ ID NO: 5112095 - DNA, 25 bp, Homo sapien
gagcaaatgctatgccgtccttgtg

SEQ ID NO: 5112096 - DNA, 25 bp, Homo sapien
gggctatgcacatcagtctgccttg

SEQ ID NO: 5112097 - DNA, 25 bp, Homo sapien
aacaaatctggtctactgataagcc

SEQ ID NO: 5112098 - DNA, 25 bp, Homo sapien
gcagaagcatggattgacagccaac

SEQ ID NO: 5112099 - DNA, 25 bp, Homo sapien
taagccctgaatccaggtgtcaagg

SEQ ID NO: 5112100 - DNA, 25 bp, Homo sapien
tattcagctcagtttcagattcgtt

SEQ ID NO: 5112101 - DNA, 25 bp, Homo sapien
gcttgctgactagatagaatccaga

SEQ ID NO: 5112102 - DNA, 25 bp, Homo sapien
gcagtcagcccagatgtgtgcttgc

SEQ ID NO: 5112103 - DNA, 25 bp, Homo sapien
cagattcgttgatgttcccttgaga

SEQ ID NO: 5112104 - DNA, 25 bp, Homo sapien
ctatgtcttgtagtgcagaaattga

SEQ ID NO: 5112105 - DNA, 25 bp, Homo sapien
ctagtacagtgcctcgcctctgcgt

SEQ ID NO: 5112106 - DNA, 25 bp, Homo sapien
tcagaggagcacaagcacagccgtg

SEQ ID NO: 5112107 - DNA, 25 bp, Homo sapien
ctgcgtcagaggagcacaagcacag

SEQ ID NO: 5112108 - DNA, 25 bp, Homo sapien
tcgcctctgcgtcagaggagcacaa

SEQ ID NO: 5112109 - DNA, 25 bp, Homo sapien
cccagctgttggcatgtgtaggatg

SEQ ID NO: 5112110 - DNA, 25 bp, Homo sapien
taggatgtagagcacatctccctca

SEQ ID NO: 5112111 - DNA, 25 bp, Homo sapien
tatcttgatacagtgtgggcatctg

SEQ ID NO: 5112112 - DNA, 25 bp, Homo sapien
tgtccacacccaatactgtgtaaag

SEQ ID NO: 5112113 - DNA, 25 bp, Homo sapien
agggctgagatatctcatgtatagc

SEQ ID NO: 5112114 - DNA, 25 bp, Homo sapien
tgagatatctcatgtatagcatccc

SEQ ID NO: 5112115 - DNA, 25 bp, Homo sapien
atatctcatgtatagcatcccaggg

SEQ ID NO: 5112116 - DNA, 25 bp, Homo sapien
ttctcaccactccattcacactggg

SEQ ID NO: 5112117 - DNA, 25 bp, Homo sapien
gaactcagcagtccatcgctgtggg

SEQ ID NO: 5112118 - DNA, 25 bp, Homo sapien
gacatgacacatatgggctggccat

SEQ ID NO: 5112119 - DNA, 25 bp, Homo sapien
tataactccagcaagagatctgtgc

SEQ ID NO: 5112120 - DNA, 25 bp, Homo sapien
cctcttgtgggactgcctgacatga

SEQ ID NO: 5112121 - DNA, 25 bp, Homo sapien
gatgcagtgcctagaatgccagctt

SEQ ID NO: 5112122 - DNA, 25 bp, Homo sapien
tgcctagaatgccagcttagtgcct

SEQ ID NO: 5112123 - DNA, 25 bp, Homo sapien
cagtgcctagaatgccagcttagtg

SEQ ID NO: 5112124 - DNA, 25 bp, Homo sapien
gaatgccagcttagtgccttgcctt

SEQ ID NO: 5112125 - DNA, 25 bp, Homo sapien
ggatggctcagggagatccgggacc

SEQ ID NO: 5112126 - DNA, 25 bp, Homo sapien
ggtctcgtagtctgtccagtgcttt

SEQ ID NO: 5112127 - DNA, 25 bp, Homo sapien
ggagatccgggaccagaccctggtc

SEQ ID NO: 5112128 - DNA, 25 bp, Homo sapien
accagaccctggtctcgtagtctgt

SEQ ID NO: 5112129 - DNA, 25 bp, Homo sapien
tggttcatttgctttaaccaccagg

SEQ ID NO: 5112130 - DNA, 25 bp, Homo sapien
agaaaagcctctgcaatccaaacct

SEQ ID NO: 5112131 - DNA, 25 bp, Homo sapien
ggttcatttgctttaaccaccaggc

SEQ ID NO: 5112132 - DNA, 25 bp, Homo sapien
ctggttcatttgctttaaccaccag

SEQ ID NO: 5112133 - DNA, 25 bp, Homo sapien
ttgaggttcagctttcttgtttaaa

SEQ ID NO: 5112134 - DNA, 25 bp, Homo sapien
taatcttgaggttcagctttcttgt

SEQ ID NO: 5112135 - DNA, 25 bp, Homo sapien
gctctggattgtaatcttgaggttc

SEQ ID NO: 5112136 - DNA, 25 bp, Homo sapien
tggattgtaatcttgaggttcagct

SEQ ID NO: 5112137 - DNA, 25 bp, Homo sapien
ggcaggacccacatgataaggcaat

SEQ ID NO: 5112138 - DNA, 25 bp, Homo sapien
tgataaggcaatcatgtcttcaaac

SEQ ID NO: 5112139 - DNA, 25 bp, Homo sapien
ctctaaatacttggagtgaggagga

SEQ ID NO: 5112140 - DNA, 25 bp, Homo sapien
tctaaatacttggagtgaggaggag

SEQ ID NO: 5112141 - DNA, 25 bp, Homo sapien
gacgcccttgtctagccttgttctg

SEQ ID NO: 5112142 - DNA, 25 bp, Homo sapien
gctctgtgatgacgcccttgtctag

SEQ ID NO: 5112143 - DNA, 25 bp, Homo sapien
tggctctgtgatgacgcccttgtct

SEQ ID NO: 5112144 - DNA, 25 bp, Homo sapien
tgtgatgacgcccttgtctagcctt

SEQ ID NO: 5112145 - DNA, 25 bp, Homo sapien
tataaagatgtcgatccctcacagt

SEQ ID NO: 5112146 - DNA, 25 bp, Homo sapien
cctcacagttcctgccgcgtgaatg

SEQ ID NO: 5112147 - DNA, 25 bp, Homo sapien
tccctggtaaccagaagtgatggag

SEQ ID NO: 5112148 - DNA, 25 bp, Homo sapien
tcccagatgggaagaaccgatgtta

SEQ ID NO: 5112149 - DNA, 25 bp, Homo sapien
ttctcatcctgattgggctgtacca

SEQ ID NO: 5112150 - DNA, 25 bp, Homo sapien
gttctcatcctgattgggctgtacc

SEQ ID NO: 5112151 - DNA, 25 bp, Homo sapien
tctcatcctgattgggctgtaccat

SEQ ID NO: 5112152 - DNA, 25 bp, Homo sapien
gggaactctgtacagctgccactct

SEQ ID NO: 5112153 - DNA, 25 bp, Homo sapien
gacgtggccggcttgtctcactgga

SEQ ID NO: 5112154 - DNA, 25 bp, Homo sapien
gtatgatgttgacactcaggtgccc

SEQ ID NO: 5112155 - DNA, 25 bp, Homo sapien
tgccaccacacagggtatgatgttg

SEQ ID NO: 5112156 - DNA, 25 bp, Homo sapien
gcaaggtggcggcggtgacagcagt

SEQ ID NO: 5112157 - DNA, 25 bp, Homo sapien
tgggcaaggtggcggcggtgacagc

SEQ ID NO: 5112158 - DNA, 25 bp, Homo sapien
cggtgacagcagtgggacttagatg

SEQ ID NO: 5112159 - DNA, 25 bp, Homo sapien
cttgggcaaggtggcggcggtgaca

SEQ ID NO: 5112160 - DNA, 25 bp, Homo sapien
tctctgaggtgtgtccaccttggct

SEQ ID NO: 5112161 - DNA, 25 bp, Homo sapien
cttctctgaggtgtgtccaccttgg

SEQ ID NO: 5112162 - DNA, 25 bp, Homo sapien
tggatcttctctgaggtgtgtccac

SEQ ID NO: 5112163 - DNA, 25 bp, Homo sapien
tgtggatcttctctgaggtgtgtcc

SEQ ID NO: 5112164 - DNA, 25 bp, Homo sapien
tgggaccttccgttggccttgtgga

SEQ ID NO: 5112165 - DNA, 25 bp, Homo sapien
gacaactggcggcacaagaatgggc

SEQ ID NO: 5112166 - DNA, 25 bp, Homo sapien
tcgatgccttcggagcctctgagct

SEQ ID NO: 5112167 - DNA, 25 bp, Homo sapien
aatgggcagactgaagactgtgtcc

SEQ ID NO: 5112168 - DNA, 25 bp, Homo sapien
taagcatggcaggagttatcatccc

SEQ ID NO: 5112169 - DNA, 25 bp, Homo sapien
tctagctctggtgaacagcccaaag

SEQ ID NO: 5112170 - DNA, 25 bp, Homo sapien
tatcatccccattagacaacccagg

SEQ ID NO: 5112171 - DNA, 25 bp, Homo sapien
gatcggtggtctcggtctcagagct

SEQ ID NO: 5112172 - DNA, 25 bp, Homo sapien
aggaaatgtcctcgggtccctggag

SEQ ID NO: 5112173 - DNA, 25 bp, Homo sapien
gcaccagagctttccctatcaatca

SEQ ID NO: 5112174 - DNA, 25 bp, Homo sapien
gctggtggccaaacatgaggccttt

SEQ ID NO: 5112175 - DNA, 25 bp, Homo sapien
gaccataggccacaatcacataaag

SEQ ID NO: 5112176 - DNA, 25 bp, Homo sapien
cactcttgtggactctggcgttctc

SEQ ID NO: 5112177 - DNA, 25 bp, Homo sapien
tgtaatgccagggagccgcttcggc

SEQ ID NO: 5112178 - DNA, 25 bp, Homo sapien
cgcttcggcagggatctcaggaatc

SEQ ID NO: 5112179 - DNA, 25 bp, Homo sapien
gagcgccggcggaattgtaatgcca

SEQ ID NO: 5112180 - DNA, 25 bp, Homo sapien
cccactgtggctgaggtatctgatg

SEQ ID NO: 5112181 - DNA, 25 bp, Homo sapien
ctgatgctgacactgtgtggatgtc

SEQ ID NO: 5112182 - DNA, 25 bp, Homo sapien
gtggatgtctccctgcttggatccc

SEQ ID NO: 5112183 - DNA, 25 bp, Homo sapien
ctgtggctgaggtatctgatgctga

SEQ ID NO: 5112184 - DNA, 25 bp, Homo sapien
cacaatggtaagactcctcttgacg

SEQ ID NO: 5112185 - DNA, 25 bp, Homo sapien
tgacgccacttccaacctctgtgca

SEQ ID NO: 5112186 - DNA, 25 bp, Homo sapien
atatacacaatggtaagactcctct

SEQ ID NO: 5112187 - DNA, 25 bp, Homo sapien
ggtaagactcctcttgacgccactt

SEQ ID NO: 5112188 - DNA, 25 bp, Homo sapien
aagccagtccaaagggatcgatcgc

SEQ ID NO: 5112189 - DNA, 25 bp, Homo sapien
aacagccttcggctcagggtggccg

SEQ ID NO: 5112190 - DNA, 25 bp, Homo sapien
tttcgctcggccagccggctggttc

SEQ ID NO: 5112191 - DNA, 25 bp, Homo sapien
gatcgccggagaaaccccacgcatt

SEQ ID NO: 5112192 - DNA, 25 bp, Homo sapien
gctctccccgcaaggtctcccgaaa

SEQ ID NO: 5112193 - DNA, 25 bp, Homo sapien
caaagcgcggcccggtgggcgaggg

SEQ ID NO: 5112194 - DNA, 25 bp, Homo sapien
agcgcggcccggtgggcgagggcca

SEQ ID NO: 5112195 - DNA, 25 bp, Homo sapien
gccagctgctctccccgcaaggtct

SEQ ID NO: 5112196 - DNA, 25 bp, Homo sapien
gtgggggaagccgcggaagccggca

SEQ ID NO: 5112197 - DNA, 25 bp, Homo sapien
ctggggcgcgagtgtgaaaggacag

SEQ ID NO: 5112198 - DNA, 25 bp, Homo sapien
tctgttttgggtctggttgattttc

SEQ ID NO: 5112199 - DNA, 25 bp, Homo sapien
tgattttccacggagaaccgaagag

SEQ ID NO: 5112200 - DNA, 25 bp, Homo sapien
gaaccgaagagtccgctcctcaggg

SEQ ID NO: 5112201 - DNA, 25 bp, Homo sapien
tcctcaggggcgaagtttgcaagtc

SEQ ID NO: 5112202 - DNA, 25 bp, Homo sapien
aaatggagcccggatgctcaggcgc

SEQ ID NO: 5112203 - DNA, 25 bp, Homo sapien
ctttaggtctcccttcccgcagatg

SEQ ID NO: 5112204 - DNA, 25 bp, Homo sapien
aggcgcgcggcgtggtatccccaaa

SEQ ID NO: 5112205 - DNA, 25 bp, Homo sapien
tcccgcagatgtcgcctggagaaat

SEQ ID NO: 5112206 - DNA, 25 bp, Homo sapien
gaagtgggcgcctcactcggaaacc

SEQ ID NO: 5112207 - DNA, 25 bp, Homo sapien
tgggatgcgaagtgggcgcctcact

SEQ ID NO: 5112208 - DNA, 25 bp, Homo sapien
ctggcggtactgtgggatgcgaagt

SEQ ID NO: 5112209 - DNA, 25 bp, Homo sapien
actgtgggatgcgaagtgggcgcct

SEQ ID NO: 5112210 - DNA, 25 bp, Homo sapien
acccgggtacgagtgcgcggcaact

SEQ ID NO: 5112211 - DNA, 25 bp, Homo sapien
caacttcaatgaatgtatccgaggt

SEQ ID NO: 5112212 - DNA, 25 bp, Homo sapien
gagtgcgcggcaacttcaatgaatg

SEQ ID NO: 5112213 - DNA, 25 bp, Homo sapien
aatgtatccgaggtcgccaggcgcg

SEQ ID NO: 5112214 - DNA, 25 bp, Homo sapien
cggcattcgagtgtaggccgcgccc

SEQ ID NO: 5112215 - DNA, 25 bp, Homo sapien
aaaggcagcgggcattgcgatcgcg

SEQ ID NO: 5112216 - DNA, 25 bp, Homo sapien
agagaggcgggttccggactgggct

SEQ ID NO: 5112217 - DNA, 25 bp, Homo sapien
gaagcccaagttccgagcgcgtgga

SEQ ID NO: 5112218 - DNA, 25 bp, Homo sapien
tgatctttgtgggtccgatgggttt

SEQ ID NO: 5112219 - DNA, 25 bp, Homo sapien
cagtttggtgtgttaccgaagattt

SEQ ID NO: 5112220 - DNA, 25 bp, Homo sapien
tccccacagcgtcgccagtttggtg

SEQ ID NO: 5112221 - DNA, 25 bp, Homo sapien
cttgggagagtgcttgcttccccac

SEQ ID NO: 5112222 - DNA, 25 bp, Homo sapien
tggccgctagggcttctccctcctt

SEQ ID NO: 5112223 - DNA, 25 bp, Homo sapien
ggccgctagggcttctccctccttg

SEQ ID NO: 5112224 - DNA, 25 bp, Homo sapien
ccgctagggcttctccctccttggt

SEQ ID NO: 5112225 - DNA, 25 bp, Homo sapien
gccgctagggcttctccctccttgg

SEQ ID NO: 5112226 - DNA, 25 bp, Homo sapien
gaacactgtacattcaaggtcacta

SEQ ID NO: 5112227 - DNA, 25 bp, Homo sapien
tcttttcgtctttgccactagtcac

SEQ ID NO: 5112228 - DNA, 25 bp, Homo sapien
tgccactagtcactacaaagtaggc

SEQ ID NO: 5112229 - DNA, 25 bp, Homo sapien
tgccttctgtgcaagccagaacact

SEQ ID NO: 5112230 - DNA, 25 bp, Homo sapien
tctctccggcggtgcgcaggcgtcg

SEQ ID NO: 5112231 - DNA, 25 bp, Homo sapien
tgttgcctctctcagctagcgcatc

SEQ ID NO: 5112232 - DNA, 25 bp, Homo sapien
ctgcctctacgaccctgttgcctct

SEQ ID NO: 5112233 - DNA, 25 bp, Homo sapien
gcttggctccttcgggtgcgcttgc

SEQ ID NO: 5112234 - DNA, 25 bp, Homo sapien
cggttcaggtgctcagaacctgtgt

SEQ ID NO: 5112235 - DNA, 25 bp, Homo sapien
gagccttcagtatccggttcaggtg

SEQ ID NO: 5112236 - DNA, 25 bp, Homo sapien
gttcaggtgctcagaacctgtgtcc

SEQ ID NO: 5112237 - DNA, 25 bp, Homo sapien
ggctggcagagccttcagtatccgg

SEQ ID NO: 5112238 - DNA, 25 bp, Homo sapien
cctgcggcctcactgtgatctcaac

SEQ ID NO: 5112239 - DNA, 25 bp, Homo sapien
cccagataatttctttcgactcttt

SEQ ID NO: 5112240 - DNA, 25 bp, Homo sapien
tctcaacccgccaataccccaggag

SEQ ID NO: 5112241 - DNA, 25 bp, Homo sapien
cagataatttctttcgactctttac

SEQ ID NO: 5112242 - DNA, 25 bp, Homo sapien
agctcgctgcctgggcggtctagtt

SEQ ID NO: 5112243 - DNA, 25 bp, Homo sapien
agacccctttcaggccgagctggga

SEQ ID NO: 5112244 - DNA, 25 bp, Homo sapien
gaacacaggttcttgaaccccaggc

SEQ ID NO: 5112245 - DNA, 25 bp, Homo sapien
gtctagttccccaccaagaaggcgc

SEQ ID NO: 5112246 - DNA, 25 bp, Homo sapien
gagcagggtgctttggtctgtccaa

SEQ ID NO: 5112247 - DNA, 25 bp, Homo sapien
tgtagcatggctgagtgtgtccctg

SEQ ID NO: 5112248 - DNA, 25 bp, Homo sapien
taatctggttaagggtgtctgtgag

SEQ ID NO: 5112249 - DNA, 25 bp, Homo sapien
agctggcgtggatatgcccgtgaaa

SEQ ID NO: 5112250 - DNA, 25 bp, Homo sapien
cacagacagacagccggttgcaggc

SEQ ID NO: 5112251 - DNA, 25 bp, Homo sapien
aagtcctgggttccccgcaggtctg

SEQ ID NO: 5112252 - DNA, 25 bp, Homo sapien
accgcaccacgagacagggatagaa

SEQ ID NO: 5112253 - DNA, 25 bp, Homo sapien
caggcgcccagaggctcgagaataa

SEQ ID NO: 5112254 - DNA, 25 bp, Homo sapien
gcgctccggccggttcagcaggatc

SEQ ID NO: 5112255 - DNA, 25 bp, Homo sapien
agtgcgcaaagaaggcgacctcgga

SEQ ID NO: 5112256 - DNA, 25 bp, Homo sapien
caggatcaataaccaaagtgcgcaa

SEQ ID NO: 5112257 - DNA, 25 bp, Homo sapien
ccggccggttcagcaggatcaataa

SEQ ID NO: 5112258 - DNA, 25 bp, Homo sapien
gccccggtcgcgctcggcgccccca

SEQ ID NO: 5112259 - DNA, 25 bp, Homo sapien
gcgcggggccccggtcgcgctcggc

SEQ ID NO: 5112260 - DNA, 25 bp, Homo sapien
gcggggccccggtcgcgctcggcgc

SEQ ID NO: 5112261 - DNA, 25 bp, Homo sapien
cccggtcgcgctcggcgcccccatc

SEQ ID NO: 5112262 - DNA, 25 bp, Homo sapien
ccccgctccgctgcggtctccgcag

SEQ ID NO: 5112263 - DNA, 25 bp, Homo sapien
cagctcgcaagtcccccgctccgct

SEQ ID NO: 5112264 - DNA, 25 bp, Homo sapien
gcaagtcccccgctccgctgcggtc

SEQ ID NO: 5112265 - DNA, 25 bp, Homo sapien
aagtcccccgctccgctgcggtctc

SEQ ID NO: 5112266 - DNA, 25 bp, Homo sapien
cccgggctgcccgtcgctgtcggct

SEQ ID NO: 5112267 - DNA, 25 bp, Homo sapien
tcgctgtcggctccactctccctgg

SEQ ID NO: 5112268 - DNA, 25 bp, Homo sapien
agtggtctgcctcgccgggcccggg

SEQ ID NO: 5112269 - DNA, 25 bp, Homo sapien
ctcgcaccagtatgcggcggcagtg

SEQ ID NO: 5112270 - DNA, 25 bp, Homo sapien
gccacagtagccgttccgaatgggc

SEQ ID NO: 5112271 - DNA, 25 bp, Homo sapien
gtcacgggacggagtccaggctctc

SEQ ID NO: 5112272 - DNA, 25 bp, Homo sapien
cgcggagcgcgcaagacgcttttct

SEQ ID NO: 5112273 - DNA, 25 bp, Homo sapien
ttttctccgcacttgccttgagggt

SEQ ID NO: 5112274 - DNA, 25 bp, Homo sapien
cttggcattgcgaaaggctggcgct

SEQ ID NO: 5112275 - DNA, 25 bp, Homo sapien
ccagatcgagggaaagcggagccct

SEQ ID NO: 5112276 - DNA, 25 bp, Homo sapien
gagctgggtaatcggtcgcagtcca

SEQ ID NO: 5112277 - DNA, 25 bp, Homo sapien
gacttcaggctctggccgcggcctg

SEQ ID NO: 5112278 - DNA, 25 bp, Homo sapien
gatcaaacataatcccctcgctgga

SEQ ID NO: 5112279 - DNA, 25 bp, Homo sapien
gagggtagccgagctcagatcaaac

SEQ ID NO: 5112280 - DNA, 25 bp, Homo sapien
cccagggtgtcccagtcagcttgag

SEQ ID NO: 5112281 - DNA, 25 bp, Homo sapien
ggaggccaaagaaatccgctcgggc

SEQ ID NO: 5112282 - DNA, 25 bp, Homo sapien
gaaggactggactccactaaggtca

SEQ ID NO: 5112283 - DNA, 25 bp, Homo sapien
taatccaagcagaaagcgagcagag

SEQ ID NO: 5112284 - DNA, 25 bp, Homo sapien
ccattgtgctgtgtgtacgagttcg

SEQ ID NO: 5112285 - DNA, 25 bp, Homo sapien
gcccagtggctgttggtaatccaag

SEQ ID NO: 5112286 - DNA, 25 bp, Homo sapien
tggctttgactgactgcgggtgcat

SEQ ID NO: 5112287 - DNA, 25 bp, Homo sapien
tcggactccccagaagctacctggg

SEQ ID NO: 5112288 - DNA, 25 bp, Homo sapien
aggaagacttgagcccggtggcttt

SEQ ID NO: 5112289 - DNA, 25 bp, Homo sapien
cggtgctgcgcaaaagaggaagact

SEQ ID NO: 5112290 - DNA, 25 bp, Homo sapien
taaagaaaccgtggcgtcaactgcg

SEQ ID NO: 5112291 - DNA, 25 bp, Homo sapien
accattgactttacgagcggcccag

SEQ ID NO: 5112292 - DNA, 25 bp, Homo sapien
tacattgtaagtgtggccctgccgg

SEQ ID NO: 5112293 - DNA, 25 bp, Homo sapien
gaaaaatcgcctggaaggactcgcc

SEQ ID NO: 5112294 - DNA, 25 bp, Homo sapien
caaatgtccacaaatagggtactgg

SEQ ID NO: 5112295 - DNA, 25 bp, Homo sapien
tgagtccagcttaaacccaaaatag

SEQ ID NO: 5112296 - DNA, 25 bp, Homo sapien
tataactgcactgatttccataggc

SEQ ID NO: 5112297 - DNA, 25 bp, Homo sapien
ccagctatgtgagcacttgagtcca

SEQ ID NO: 5112298 - DNA, 25 bp, Homo sapien
gaagatgggactcaaatgactgcat

SEQ ID NO: 5112299 - DNA, 25 bp, Homo sapien
agtttatcataaaagggcattcaag

SEQ ID NO: 5112300 - DNA, 25 bp, Homo sapien
cacgttaagcagattggtgaccata

SEQ ID NO: 5112301 - DNA, 25 bp, Homo sapien
gacacatgtatccatagtcatagag

SEQ ID NO: 5112302 - DNA, 25 bp, Homo sapien
tgaggaggaggctagctgatgagcg

SEQ ID NO: 5112303 - DNA, 25 bp, Homo sapien
agctgatgagcggtagaggacagtc

SEQ ID NO: 5112304 - DNA, 25 bp, Homo sapien
gagctgaggtccctaggaggagccc

SEQ ID NO: 5112305 - DNA, 25 bp, Homo sapien
ctgaggtccctaggaggagcccaag

SEQ ID NO: 5112306 - DNA, 25 bp, Homo sapien
ctgcagaggccatgaaaggagccag

SEQ ID NO: 5112307 - DNA, 25 bp, Homo sapien
ggcaggacaatttcccgaattgtcc

SEQ ID NO: 5112308 - DNA, 25 bp, Homo sapien
taggcaggacaatttcccgaattgt

SEQ ID NO: 5112309 - DNA, 25 bp, Homo sapien
atttcccgaattgtccctttggcat

SEQ ID NO: 5112310 - DNA, 25 bp, Homo sapien
cttaggcaggacaatttcccgaatt

SEQ ID NO: 5112311 - DNA, 25 bp, Homo sapien
ctggcgggccagctcagtgcgctcg

SEQ ID NO: 5112312 - DNA, 25 bp, Homo sapien
aaggatgtacgtgtccgcttgggcc

SEQ ID NO: 5112313 - DNA, 25 bp, Homo sapien
tacgtgtccgcttgggccggtccag

SEQ ID NO: 5112314 - DNA, 25 bp, Homo sapien
cagctgctcggcagtgaaggatgta

SEQ ID NO: 5112315 - DNA, 25 bp, Homo sapien
tcagggtggatctctaggtagtttc

SEQ ID NO: 5112316 - DNA, 25 bp, Homo sapien
gatctctaggtagtttcaggactgg

SEQ ID NO: 5112317 - DNA, 25 bp, Homo sapien
ggtggatctctaggtagtttcagga

SEQ ID NO: 5112318 - DNA, 25 bp, Homo sapien
ctaatgaggtgattcagggtggatc

SEQ ID NO: 5112319 - DNA, 25 bp, Homo sapien
cttttgatagtcttgagagagagat

SEQ ID NO: 5112320 - DNA, 25 bp, Homo sapien
gagagagagattcctctgaggctgc

SEQ ID NO: 5112321 - DNA, 25 bp, Homo sapien
gttcactgttcctactctggtggac

SEQ ID NO: 5112322 - DNA, 25 bp, Homo sapien
gagtctgggcaaggccgggacagag

SEQ ID NO: 5112323 - DNA, 25 bp, Homo sapien
gcttctttgggctcatggtcaatat

SEQ ID NO: 5112324 - DNA, 25 bp, Homo sapien
tgttgatctggaaatggcattcatc

SEQ ID NO: 5112325 - DNA, 25 bp, Homo sapien
cacttggctgccaggactacagagg

SEQ ID NO: 5112326 - DNA, 25 bp, Homo sapien
caaattccaggattcattgttgatc

SEQ ID NO: 5112327 - DNA, 25 bp, Homo sapien
tgggccacactgtgatccatggccg

SEQ ID NO: 5112328 - DNA, 25 bp, Homo sapien
ggccacactgtgatccatggccgcg

SEQ ID NO: 5112329 - DNA, 25 bp, Homo sapien
tgcccagtgcaccttctgggctgtc

SEQ ID NO: 5112330 - DNA, 25 bp, Homo sapien
actgtgacccatggcactgccccct

SEQ ID NO: 5112331 - DNA, 25 bp, Homo sapien
tgaggcctgggtattcttctaaagc

SEQ ID NO: 5112332 - DNA, 25 bp, Homo sapien
cattcctagccgacttcacagggtg

SEQ ID NO: 5112333 - DNA, 25 bp, Homo sapien
catatgggctaggtcaggaattctc

SEQ ID NO: 5112334 - DNA, 25 bp, Homo sapien
aggaattctcaaccttggccgcaca

SEQ ID NO: 5112335 - DNA, 25 bp, Homo sapien
tgacagatgaggaatgaccaggcat

SEQ ID NO: 5112336 - DNA, 25 bp, Homo sapien
gatgtcatgactccagtccttggga

SEQ ID NO: 5112337 - DNA, 25 bp, Homo sapien
aaacagagggcaattcgtactcagg

SEQ ID NO: 5112338 - DNA, 25 bp, Homo sapien
ggagtggcactaactcattcccaaa

SEQ ID NO: 5112339 - DNA, 25 bp, Homo sapien
tgaatccttgccacgtggagtgggc

SEQ ID NO: 5112340 - DNA, 25 bp, Homo sapien
caagggctttgagccgtgtttctca

SEQ ID NO: 5112341 - DNA, 25 bp, Homo sapien
tgtctgtcaattggcagcaagggct

SEQ ID NO: 5112342 - DNA, 25 bp, Homo sapien
caccagatatacattgaggcccagg

SEQ ID NO: 5112343 - DNA, 25 bp, Homo sapien
caccaagtgtgactggatgtggcag

SEQ ID NO: 5112344 - DNA, 25 bp, Homo sapien
gtggcaggttgttgagggggacttc

SEQ ID NO: 5112345 - DNA, 25 bp, Homo sapien
tgtgacaccaagtgtgactggatgt

SEQ ID NO: 5112346 - DNA, 25 bp, Homo sapien
tgacaccaagtgtgactggatgtgg

SEQ ID NO: 5112347 - DNA, 25 bp, Homo sapien
gcagaatgttggaggtggcaaaggc

SEQ ID NO: 5112348 - DNA, 25 bp, Homo sapien
ccagcagccgcagaatgttggaggt

SEQ ID NO: 5112349 - DNA, 25 bp, Homo sapien
gcaaaggcctcggaggctgaggagg

SEQ ID NO: 5112350 - DNA, 25 bp, Homo sapien
gcctggcaggctaggggtcagcgcc

SEQ ID NO: 5112351 - DNA, 25 bp, Homo sapien
cgaggacagcgggttgaggcgtggg

SEQ ID NO: 5112352 - DNA, 25 bp, Homo sapien
gggcggcagtgggggggacgctgag

SEQ ID NO: 5112353 - DNA, 25 bp, Homo sapien
ggccgaggacagcgggttgaggcgt

SEQ ID NO: 5112354 - DNA, 25 bp, Homo sapien
ggggcggcagtgggggggacgctga

SEQ ID NO: 5112355 - DNA, 25 bp, Homo sapien
gttcgtagccggcaggcagatccag

SEQ ID NO: 5112356 - DNA, 25 bp, Homo sapien
ccagctgtatggctcgaaggccgag

SEQ ID NO: 5112357 - DNA, 25 bp, Homo sapien
ttccgttctagccagctgtatggct

SEQ ID NO: 5112358 - DNA, 25 bp, Homo sapien
ctcgaaggccgaggaacccagttcg

SEQ ID NO: 5112359 - DNA, 25 bp, Homo sapien
gtgttagctttcttgcagctgctgg

SEQ ID NO: 5112360 - DNA, 25 bp, Homo sapien
ttaagtgttagctttcttgcagctg

SEQ ID NO: 5112361 - DNA, 25 bp, Homo sapien
agctttcttgcagctgctggcgctg

SEQ ID NO: 5112362 - DNA, 25 bp, Homo sapien
ttagctttcttgcagctgctggcgc

SEQ ID NO: 5112363 - DNA, 25 bp, Homo sapien
tttggtcacgagtctctgagctggg

SEQ ID NO: 5112364 - DNA, 25 bp, Homo sapien
tgctgtgctcgggactcagtgtcac

SEQ ID NO: 5112365 - DNA, 25 bp, Homo sapien
acgcacacaagctgcgggaccaagg

SEQ ID NO: 5112366 - DNA, 25 bp, Homo sapien
gggaccaaggccatttggtcacgag

SEQ ID NO: 5112367 - DNA, 25 bp, Homo sapien
ctcctgaggacccatttcaggtctc

SEQ ID NO: 5112368 - DNA, 25 bp, Homo sapien
ccccaaactgtatgaattcaattcc

SEQ ID NO: 5112369 - DNA, 25 bp, Homo sapien
aactgtatgaattcaattcctcccc

SEQ ID NO: 5112370 - DNA, 25 bp, Homo sapien
atgaattcaattcctcccctggacc

SEQ ID NO: 5112371 - DNA, 25 bp, Homo sapien
caaactgtatgaattcaattcctcc

SEQ ID NO: 5112372 - DNA, 25 bp, Homo sapien
tgctggtggcagctctgagacttca

SEQ ID NO: 5112373 - DNA, 25 bp, Homo sapien
tgagacttcaggtccagctggagct

SEQ ID NO: 5112374 - DNA, 25 bp, Homo sapien
agacttcaggtccagctggagctgg

SEQ ID NO: 5112375 - DNA, 25 bp, Homo sapien
tgggagcccagtgtctgagcctgct

SEQ ID NO: 5112376 - DNA, 25 bp, Homo sapien
gcagctactgccggggagcccccca

SEQ ID NO: 5112377 - DNA, 25 bp, Homo sapien
cagctactgccggggagccccccag

SEQ ID NO: 5112378 - DNA, 25 bp, Homo sapien
tgaccgcctgcatgtgttctcgggc

SEQ ID NO: 5112379 - DNA, 25 bp, Homo sapien
tcgggtgaccgcctgcatgtgttct

SEQ ID NO: 5112380 - DNA, 25 bp, Homo sapien
tagtttcgggtgaccgcctgcatgt

SEQ ID NO: 5112381 - DNA, 25 bp, Homo sapien
gtgatgtagtttcgggtgaccgcct

SEQ ID NO: 5112382 - DNA, 25 bp, Homo sapien
gctggacagagagccctccaggtct

SEQ ID NO: 5112383 - DNA, 25 bp, Homo sapien
tctccccaggtcttgggtcctcctc

SEQ ID NO: 5112384 - DNA, 25 bp, Homo sapien
aggtggccccactgcgtcactctgc

SEQ ID NO: 5112385 - DNA, 25 bp, Homo sapien
tccaggtctccccaggtcttgggtc

SEQ ID NO: 5112386 - DNA, 25 bp, Homo sapien
tgggtgggaaagagctggctggagg

SEQ ID NO: 5112387 - DNA, 25 bp, Homo sapien
gaggtggctccaggcttgggccaac

SEQ ID NO: 5112388 - DNA, 25 bp, Homo sapien
ctgggtgggaaagagctggctggag

SEQ ID NO: 5112389 - DNA, 25 bp, Homo sapien
gtgggaaagagctggctggaggtgg

SEQ ID NO: 5112390 - DNA, 25 bp, Homo sapien
gaacctccagggcatgttgactata

SEQ ID NO: 5112391 - DNA, 25 bp, Homo sapien
gctctgggtccactgttgggttgtt

SEQ ID NO: 5112392 - DNA, 25 bp, Homo sapien
tgtgaacacattctcctgggtggag

SEQ ID NO: 5112393 - DNA, 25 bp, Homo sapien
ccatatagagccagcatcgagggaa

SEQ ID NO: 5112394 - DNA, 25 bp, Homo sapien
cttctttcccaaggtagatgttggc

SEQ ID NO: 5112395 - DNA, 25 bp, Homo sapien
tttctagccaatcctctctcagcca

SEQ ID NO: 5112396 - DNA, 25 bp, Homo sapien
gggaaccattctagctccacgggag

SEQ ID NO: 5112397 - DNA, 25 bp, Homo sapien
ggctgcctccactctttctagtgtc

SEQ ID NO: 5112398 - DNA, 25 bp, Homo sapien
gggagagggctgagacaggcgccca

SEQ ID NO: 5112399 - DNA, 25 bp, Homo sapien
agggctgagacaggcgcccatgcgt

SEQ ID NO: 5112400 - DNA, 25 bp, Homo sapien
gagacaggcgcccatgcgtgaggcc

SEQ ID NO: 5112401 - DNA, 25 bp, Homo sapien
gcgcccatgcgtgaggccgggatgg

SEQ ID NO: 5112402 - DNA, 25 bp, Homo sapien
ggctgttgggcataggaagactcct

SEQ ID NO: 5112403 - DNA, 25 bp, Homo sapien
cctcaacgagaaagggtaggagaca

SEQ ID NO: 5112404 - DNA, 25 bp, Homo sapien
ggcttgggcattacccttcccatca

SEQ ID NO: 5112405 - DNA, 25 bp, Homo sapien
cacacccacatggtgtttggatcag

SEQ ID NO: 5112406 - DNA, 25 bp, Homo sapien
cattgaccagcctaaagggttgcac

SEQ ID NO: 5112407 - DNA, 25 bp, Homo sapien
ccagcctaaagggttgcacccctag

SEQ ID NO: 5112408 - DNA, 25 bp, Homo sapien
tcccattgaccagcctaaagggttg

SEQ ID NO: 5112409 - DNA, 25 bp, Homo sapien
taaagggttgcacccctagcaccag

SEQ ID NO: 5112410 - DNA, 25 bp, Homo sapien
gagcctgggtgcactgtcctttgga

SEQ ID NO: 5112411 - DNA, 25 bp, Homo sapien
taattacaaactgcagtgggtgctc

SEQ ID NO: 5112412 - DNA, 25 bp, Homo sapien
cacaggctcgcttcaggtgcagtaa

SEQ ID NO: 5112413 - DNA, 25 bp, Homo sapien
gctgggaatatggtacacactcaag

SEQ ID NO: 5112414 - DNA, 25 bp, Homo sapien
tcagggtcattagctgtgacagggc

SEQ ID NO: 5112415 - DNA, 25 bp, Homo sapien
ctgtaagggtcatgcccctgcccgc

SEQ ID NO: 5112416 - DNA, 25 bp, Homo sapien
cattagctgtgacagggccagccac

SEQ ID NO: 5112417 - DNA, 25 bp, Homo sapien
ggccgtcagggtcattagctgtgac

SEQ ID NO: 5112418 - DNA, 25 bp, Homo sapien
gtgagtaggggtctcaccccaaaca

SEQ ID NO: 5112419 - DNA, 25 bp, Homo sapien
tgagtaggggtctcaccccaaacac

SEQ ID NO: 5112420 - DNA, 25 bp, Homo sapien
accaccaggggcccgttcacgctgc

SEQ ID NO: 5112421 - DNA, 25 bp, Homo sapien
accaggggcccgttcacgctgcaca

SEQ ID NO: 5112422 - DNA, 25 bp, Homo sapien
ggggcccgttcacgctgcacacagt

SEQ ID NO: 5112423 - DNA, 25 bp, Homo sapien
caggggcccgttcacgctgcacaca

SEQ ID NO: 5112424 - DNA, 25 bp, Homo sapien
aggcaggacagcttgttagggatag

SEQ ID NO: 5112425 - DNA, 25 bp, Homo sapien
caggacagcttgttagggatagtag

SEQ ID NO: 5112426 - DNA, 25 bp, Homo sapien
cagggaggagaaagcttggacggct

SEQ ID NO: 5112427 - DNA, 25 bp, Homo sapien
ggaggagaaagcttggacggctggg

SEQ ID NO: 5112428 - DNA, 25 bp, Homo sapien
gagactgagatattccaaaggcctt

SEQ ID NO: 5112429 - DNA, 25 bp, Homo sapien
tcctctgaggaggttaggtacgtcc

SEQ ID NO: 5112430 - DNA, 25 bp, Homo sapien
ccctcgaggaggttaggtacagccg

SEQ ID NO: 5112431 - DNA, 25 bp, Homo sapien
tcccgttaaaagaagatcctgtgag

SEQ ID NO: 5112432 - DNA, 25 bp, Homo sapien
caaccccaggactcaagatactgtc

SEQ ID NO: 5112433 - DNA, 25 bp, Homo sapien
ctcaagatactgtcagtgtctgcca

SEQ ID NO: 5112434 - DNA, 25 bp, Homo sapien
gtgtctgccagtttcccaggggcta

SEQ ID NO: 5112435 - DNA, 25 bp, Homo sapien
aagatactgtcagtgtctgccagtt

SEQ ID NO: 5112436 - DNA, 25 bp, Homo sapien
cagaaggtggcgctgtagaaacaga

SEQ ID NO: 5112437 - DNA, 25 bp, Homo sapien
gagtaattgcctgtgtgattcaatg

SEQ ID NO: 5112438 - DNA, 25 bp, Homo sapien
tgggcagaaggtggcgctgtagaaa

SEQ ID NO: 5112439 - DNA, 25 bp, Homo sapien
agaaacagaattgtagcatttgcca

SEQ ID NO: 5112440 - DNA, 25 bp, Homo sapien
agcccaggagcacggacagcgaggg

SEQ ID NO: 5112441 - DNA, 25 bp, Homo sapien
cctgggaaacgcgtggaacacacgt

SEQ ID NO: 5112442 - DNA, 25 bp, Homo sapien
caggcgtcttgggttctcaaccaca

SEQ ID NO: 5112443 - DNA, 25 bp, Homo sapien
cacccctcagccttgcggagtgggg

SEQ ID NO: 5112444 - DNA, 25 bp, Homo sapien
gaggtcatgattttgtgccattacc

SEQ ID NO: 5112445 - DNA, 25 bp, Homo sapien
cctatgaaagatataaagctgtgcc

SEQ ID NO: 5112446 - DNA, 25 bp, Homo sapien
ttaaagcacgcttctgaattactcc

SEQ ID NO: 5112447 - DNA, 25 bp, Homo sapien
gaattactccttgtcattagaggca

SEQ ID NO: 5112448 - DNA, 25 bp, Homo sapien
taaaaactatgttgaatggcccaga

SEQ ID NO: 5112449 - DNA, 25 bp, Homo sapien
aaaacctatggtggctatgaagtcc

SEQ ID NO: 5112450 - DNA, 25 bp, Homo sapien
tgatatcatccaatggtcatgaatg

SEQ ID NO: 5112451 - DNA, 25 bp, Homo sapien
gaatggcccagatcagtttgctgag

SEQ ID NO: 5112452 - DNA, 25 bp, Homo sapien
gaagtggacgatctccgcatactgg

SEQ ID NO: 5112453 - DNA, 25 bp, Homo sapien
ggacgatctccgcatactgggcaaa

SEQ ID NO: 5112454 - DNA, 25 bp, Homo sapien
ttggtgccagccacctcaagcacct

SEQ ID NO: 5112455 - DNA, 25 bp, Homo sapien
agggtgaagtggacgatctccgcat

SEQ ID NO: 5112456 - DNA, 25 bp, Homo sapien
ggtcttcctggcatcgatccctgat

SEQ ID NO: 5112457 - DNA, 25 bp, Homo sapien
tcgatccctgatgtcccttcaaaca

SEQ ID NO: 5112458 - DNA, 25 bp, Homo sapien
cctctgacaccggagttcgtaggat

SEQ ID NO: 5112459 - DNA, 25 bp, Homo sapien
ggatgtcccctgtaaattcgcaagt

SEQ ID NO: 5112460 - DNA, 25 bp, Homo sapien
caggtaacccagagagccagctaca

SEQ ID NO: 5112461 - DNA, 25 bp, Homo sapien
acccagagagccagctacaaggact

SEQ ID NO: 5112462 - DNA, 25 bp, Homo sapien
catgactctaatgggggattccagg

SEQ ID NO: 5112463 - DNA, 25 bp, Homo sapien
ccccggcagcccacaggtaacccag

SEQ ID NO: 5112464 - DNA, 25 bp, Homo sapien
atccagaaagtcctccgccatgacc

SEQ ID NO: 5112465 - DNA, 25 bp, Homo sapien
ttgccggagccattgaaaacccgac

SEQ ID NO: 5112466 - DNA, 25 bp, Homo sapien
ttgtcaatgggcttgccggagccat

SEQ ID NO: 5112467 - DNA, 25 bp, Homo sapien
gaccactggccccttgtcaatgggc

SEQ ID NO: 5112468 - DNA, 25 bp, Homo sapien
caataggagaaatgcccgtctgaat

SEQ ID NO: 5112469 - DNA, 25 bp, Homo sapien
ggatcttctggccgcgggcaatgct

SEQ ID NO: 5112470 - DNA, 25 bp, Homo sapien
gctgttcatgacgtcaataggagaa

SEQ ID NO: 5112471 - DNA, 25 bp, Homo sapien
cgggagtgcgggttgatgggctggc

SEQ ID NO: 5112472 - DNA, 25 bp, Homo sapien
gatggcgaagttgtcgtcatggtaa

SEQ ID NO: 5112473 - DNA, 25 bp, Homo sapien
tcgtcatggtaatccagcacagcct

SEQ ID NO: 5112474 - DNA, 25 bp, Homo sapien
cccatggctgcaaagacgatggcga

SEQ ID NO: 5112475 - DNA, 25 bp, Homo sapien
cccgcctggcggcagatctgagcgg

SEQ ID NO: 5112476 - DNA, 25 bp, Homo sapien
aggaagaggcagacgttccccatgg

SEQ ID NO: 5112477 - DNA, 25 bp, Homo sapien
agaggcagacgttccccatggttcc

SEQ ID NO: 5112478 - DNA, 25 bp, Homo sapien
aagaggcagacgttccccatggttc

SEQ ID NO: 5112479 - DNA, 25 bp, Homo sapien
gaagaggcagacgttccccatggtt

SEQ ID NO: 5112480 - DNA, 25 bp, Homo sapien
tacacaatgagggttgttctcccag

SEQ ID NO: 5112481 - DNA, 25 bp, Homo sapien
cgtgaagtgctcctgaataccgtac

SEQ ID NO: 5112482 - DNA, 25 bp, Homo sapien
taatgtgctcgtccctatgcttgcc

SEQ ID NO: 5112483 - DNA, 25 bp, Homo sapien
gctctgtcttatcctagggcaccca

SEQ ID NO: 5112484 - DNA, 25 bp, Homo sapien
catgtccgtcagtatgaccagcaca

SEQ ID NO: 5112485 - DNA, 25 bp, Homo sapien
caaggcctctgcataggaactcatg

SEQ ID NO: 5112486 - DNA, 25 bp, Homo sapien
tctcacactggtaggcaaggaattc

SEQ ID NO: 5112487 - DNA, 25 bp, Homo sapien
caaggaattcagcagtggtcagcgc

SEQ ID NO: 5112488 - DNA, 25 bp, Homo sapien
gcggcccgcccgctcgtagatggtg

SEQ ID NO: 5112489 - DNA, 25 bp, Homo sapien
atatatccaggaaaccctcggcgcc

SEQ ID NO: 5112490 - DNA, 25 bp, Homo sapien
ccgctcgtagatggtggccaggtct

SEQ ID NO: 5112491 - DNA, 25 bp, Homo sapien
ccgcccgctcgtagatggtggccag

SEQ ID NO: 5112492 - DNA, 25 bp, Homo sapien
caggtctccaaccactcagggccac

SEQ ID NO: 5112493 - DNA, 25 bp, Homo sapien
aggtctccaaccactcagggccacc

SEQ ID NO: 5112494 - DNA, 25 bp, Homo sapien
ggtctccaaccactcagggccacct

SEQ ID NO: 5112495 - DNA, 25 bp, Homo sapien
gtccacgtagatctgtccctctgtg

SEQ ID NO: 5112496 - DNA, 25 bp, Homo sapien
cacgtagatctgtccctctgtgatg

SEQ ID NO: 5112497 - DNA, 25 bp, Homo sapien
gtagatctgtccctctgtgatgaag

SEQ ID NO: 5112498 - DNA, 25 bp, Homo sapien
atctgtccctctgtgatgaagcccg

SEQ ID NO: 5112499 - DNA, 25 bp, Homo sapien
agcaaagagaaaaacgtcatagagg

SEQ ID NO: 5112500 - DNA, 25 bp, Homo sapien
aagagaaaaacgtcatagaggtcac

SEQ ID NO: 5112501 - DNA, 25 bp, Homo sapien
agaaaaacgtcatagaggtcacctt

SEQ ID NO: 5112502 - DNA, 25 bp, Homo sapien
caaagagaaaaacgtcatagaggtc

SEQ ID NO: 5112503 - DNA, 25 bp, Homo sapien
ttcatcagccgcgacagggaaggga

SEQ ID NO: 5112504 - DNA, 25 bp, Homo sapien
gttggagacatctccatggtccttt

SEQ ID NO: 5112505 - DNA, 25 bp, Homo sapien
tcatgccttccccaatggctgactt

SEQ ID NO: 5112506 - DNA, 25 bp, Homo sapien
cagctggttggagacatctccatgg

SEQ ID NO: 5112507 - DNA, 25 bp, Homo sapien
atggcctgcacgtccttcccgatgg

SEQ ID NO: 5112508 - DNA, 25 bp, Homo sapien
agaggtgagcgcctcctccccaact

SEQ ID NO: 5112509 - DNA, 25 bp, Homo sapien
gcaggaattccaggtagagcaggtc

SEQ ID NO: 5112510 - DNA, 25 bp, Homo sapien
tccccaactactgccttcatggcct

SEQ ID NO: 5112511 - DNA, 25 bp, Homo sapien
tggctccacaccagcgacgcgcctt

SEQ ID NO: 5112512 - DNA, 25 bp, Homo sapien
gctccacaccagcgacgcgccttac

SEQ ID NO: 5112513 - DNA, 25 bp, Homo sapien
ggctccacaccagcgacgcgcctta

SEQ ID NO: 5112514 - DNA, 25 bp, Homo sapien
aggtccagcgactcgaacaccgagc

SEQ ID NO: 5112515 - DNA, 25 bp, Homo sapien
tgcggaatgcgcttcagcatctcct

SEQ ID NO: 5112516 - DNA, 25 bp, Homo sapien
gactcgaacaccgagcggttctcgt

SEQ ID NO: 5112517 - DNA, 25 bp, Homo sapien
cgatcacggcctgcggaatgcgctt

SEQ ID NO: 5112518 - DNA, 25 bp, Homo sapien
agtgtcaggcgcgaggtcctgcagc

SEQ ID NO: 5112519 - DNA, 25 bp, Homo sapien
gtcaggcgcgaggtcctgcagcgcc

SEQ ID NO: 5112520 - DNA, 25 bp, Homo sapien
gagcgcagtgtcaggcgcgaggtcc

SEQ ID NO: 5112521 - DNA, 25 bp, Homo sapien
agcgcagtgtcaggcgcgaggtcct

SEQ ID NO: 5112522 - DNA, 25 bp, Homo sapien
gagggaaagggatggagcgtgcggc

SEQ ID NO: 5112523 - DNA, 25 bp, Homo sapien
ttccctgccggtgttggggtgccac

SEQ ID NO: 5112524 - DNA, 25 bp, Homo sapien
gtgttggggtgccacggcgcgcggg

SEQ ID NO: 5112525 - DNA, 25 bp, Homo sapien
ggaaagggatggagcgtgcggcgcc

SEQ ID NO: 5112526 - DNA, 25 bp, Homo sapien
cagatgctcccgtcagagtaaggca

SEQ ID NO: 5112527 - DNA, 25 bp, Homo sapien
tcagttcttccgcagcaccgggagt

SEQ ID NO: 5112528 - DNA, 25 bp, Homo sapien
ttcttccgcagcaccgggagtcgag

SEQ ID NO: 5112529 - DNA, 25 bp, Homo sapien
gtaaggcatcgcaaccttcagttct

SEQ ID NO: 5112530 - DNA, 25 bp, Homo sapien
gttatgacctgtttggtttcagacc

SEQ ID NO: 5112531 - DNA, 25 bp, Homo sapien
gttctgctattgatcagcactggag

SEQ ID NO: 5112532 - DNA, 25 bp, Homo sapien
catatcagcatagcgcacgacagac

SEQ ID NO: 5112533 - DNA, 25 bp, Homo sapien
gtggctattcccaggaacggttctg

SEQ ID NO: 5112534 - DNA, 25 bp, Homo sapien
tccttgccagctggccgcggtttcc

SEQ ID NO: 5112535 - DNA, 25 bp, Homo sapien
tccaggccgctagggttcggctgcc

SEQ ID NO: 5112536 - DNA, 25 bp, Homo sapien
gggccgggcgggctactcacacacc

SEQ ID NO: 5112537 - DNA, 25 bp, Homo sapien
ggcgggctactcacacacccgccgg

SEQ ID NO: 5112538 - DNA, 25 bp, Homo sapien
tggactccgcgtcagtccaggtggc

SEQ ID NO: 5112539 - DNA, 25 bp, Homo sapien
ggagactttgttcgcctgctgcatg

SEQ ID NO: 5112540 - DNA, 25 bp, Homo sapien
ctgggctgcttggactccgcgtcag

SEQ ID NO: 5112541 - DNA, 25 bp, Homo sapien
gagttggctgcggccgagcacctct

SEQ ID NO: 5112542 - DNA, 25 bp, Homo sapien
tgggccgggttctcgctccctgcag

SEQ ID NO: 5112543 - DNA, 25 bp, Homo sapien
gctggcttctcgggccgcagcctcc

SEQ ID NO: 5112544 - DNA, 25 bp, Homo sapien
gcgctgggccgggttctcgctccct

SEQ ID NO: 5112545 - DNA, 25 bp, Homo sapien
aggcgctgggccgggttctcgctcc

SEQ ID NO: 5112546 - DNA, 25 bp, Homo sapien
tgcgcactgaggtggtctgcgaggt

SEQ ID NO: 5112547 - DNA, 25 bp, Homo sapien
actgaggtggtctgcgaggtcgggc

SEQ ID NO: 5112548 - DNA, 25 bp, Homo sapien
agggcagtcgcctgcgcactgaggt

SEQ ID NO: 5112549 - DNA, 25 bp, Homo sapien
gcctggcgagggcagtcgcctgcgc

SEQ ID NO: 5112550 - DNA, 25 bp, Homo sapien
gatcgccgtctggtcgattgccgtc

SEQ ID NO: 5112551 - DNA, 25 bp, Homo sapien
tgcgaacagctggtagtagctcccg

SEQ ID NO: 5112552 - DNA, 25 bp, Homo sapien
ccgtctggtcggactccttgctggg

SEQ ID NO: 5112553 - DNA, 25 bp, Homo sapien
gacagaatcgcagccattccacgtt

SEQ ID NO: 5112554 - DNA, 25 bp, Homo sapien
tgtcgtcggtggggatttccctgag

SEQ ID NO: 5112555 - DNA, 25 bp, Homo sapien
cttgtcgtcggtggggatttccctg

SEQ ID NO: 5112556 - DNA, 25 bp, Homo sapien
ttgtcgtcggtggggatttccctga

SEQ ID NO: 5112557 - DNA, 25 bp, Homo sapien
gctcacacccttttgctaattaacc

SEQ ID NO: 5112558 - DNA, 25 bp, Homo sapien
accactccgagcagcgtagcgggag

SEQ ID NO: 5112559 - DNA, 25 bp, Homo sapien
gttaaattaggaagatctacccaga

SEQ ID NO: 5112560 - DNA, 25 bp, Homo sapien
ggtcccagggtccacaatttatata

SEQ ID NO: 5112561 - DNA, 25 bp, Homo sapien
gcattgaggtctgcgcctttctcca

SEQ ID NO: 5112562 - DNA, 25 bp, Homo sapien
tgaggtctgcgcctttctccagcag

SEQ ID NO: 5112563 - DNA, 25 bp, Homo sapien
ccattgggcggcgaagtggatggca

SEQ ID NO: 5112564 - DNA, 25 bp, Homo sapien
gcatgcaagcttgccccattgggcg

SEQ ID NO: 5112565 - DNA, 25 bp, Homo sapien
agcccagtctctttattacaccatg

SEQ ID NO: 5112566 - DNA, 25 bp, Homo sapien
tgcctggaagtagggctgtgcccgt

SEQ ID NO: 5112567 - DNA, 25 bp, Homo sapien
accatgtggattcctgactgcttta

SEQ ID NO: 5112568 - DNA, 25 bp, Homo sapien
tgctttatgtgggacccaatccttg

SEQ ID NO: 5112569 - DNA, 25 bp, Homo sapien
gcagaagtcaatgggtttgtagccc

SEQ ID NO: 5112570 - DNA, 25 bp, Homo sapien
acagtccagcaagccgtcacgggct

SEQ ID NO: 5112571 - DNA, 25 bp, Homo sapien
gcacaggcacggtggttccatattt

SEQ ID NO: 5112572 - DNA, 25 bp, Homo sapien
catcttgggcatggacgttggcgcc

SEQ ID NO: 5112573 - DNA, 25 bp, Homo sapien
ttaggtgaaagacgaaagtccttga

SEQ ID NO: 5112574 - DNA, 25 bp, Homo sapien
gtgaaagacgaaagtccttgatgac

SEQ ID NO: 5112575 - DNA, 25 bp, Homo sapien
cgggggtgtcatcccacagtgacag

SEQ ID NO: 5112576 - DNA, 25 bp, Homo sapien
ttgatgacctggtcaccaccctcct

SEQ ID NO: 5112577 - DNA, 25 bp, Homo sapien
tcattttcgtcatctcacgggcaaa

SEQ ID NO: 5112578 - DNA, 25 bp, Homo sapien
ttcgtcatctcacgggcaaagtcct

SEQ ID NO: 5112579 - DNA, 25 bp, Homo sapien
ttgatactcaatcaggtagttgtgc

SEQ ID NO: 5112580 - DNA, 25 bp, Homo sapien
actcaatcaggtagttgtgctccat

SEQ ID NO: 5112581 - DNA, 25 bp, Homo sapien
agctgtcccctggcccccctgctgt

SEQ ID NO: 5112582 - DNA, 25 bp, Homo sapien
ctgtcccctggcccccctgctgtcc

SEQ ID NO: 5112583 - DNA, 25 bp, Homo sapien
tgtcccctggcccccctgctgtccc

SEQ ID NO: 5112584 - DNA, 25 bp, Homo sapien
gctgtcccctggcccccctgctgtc

SEQ ID NO: 5112585 - DNA, 25 bp, Homo sapien
gacacttgatcgaattgaggccata

SEQ ID NO: 5112586 - DNA, 25 bp, Homo sapien
gaactgaaacagacccggtgtgccg

SEQ ID NO: 5112587 - DNA, 25 bp, Homo sapien
tcagaggctttggagattgacccag

SEQ ID NO: 5112588 - DNA, 25 bp, Homo sapien
gaggatacagttggctggctctcca

SEQ ID NO: 5112589 - DNA, 25 bp, Homo sapien
gatagtagagaaatgtcctgccata

SEQ ID NO: 5112590 - DNA, 25 bp, Homo sapien
tagagaaatgtcctgccataggaga

SEQ ID NO: 5112591 - DNA, 25 bp, Homo sapien
aaatgtcctgccataggagagtctc

SEQ ID NO: 5112592 - DNA, 25 bp, Homo sapien
aatccacagtctgatagtagagaaa

SEQ ID NO: 5112593 - DNA, 25 bp, Homo sapien
agtctgagtctgatggaagcaacac

SEQ ID NO: 5112594 - DNA, 25 bp, Homo sapien
gagacaactttttccataagggagc

SEQ ID NO: 5112595 - DNA, 25 bp, Homo sapien
gaagcaacacctgccttatgggagc

SEQ ID NO: 5112596 - DNA, 25 bp, Homo sapien
gagtcatggaggactgctgccctct

SEQ ID NO: 5112597 - DNA, 25 bp, Homo sapien
gcttcctgtagatgggcttgggcat

SEQ ID NO: 5112598 - DNA, 25 bp, Homo sapien
cattgcaggcgtgcatccacagagg

SEQ ID NO: 5112599 - DNA, 25 bp, Homo sapien
tggaagctcctggaacgctgcgatt

SEQ ID NO: 5112600 - DNA, 25 bp, Homo sapien
ccgtggagccactttctgatagcag

SEQ ID NO: 5112601 - DNA, 25 bp, Homo sapien
ccagagtgtcggtccagaaggtgtt

SEQ ID NO: 5112602 - DNA, 25 bp, Homo sapien
gtgggtacagcatgcgcagcagcac

SEQ ID NO: 5112603 - DNA, 25 bp, Homo sapien
ttctgtatggccatacacgtgggta

SEQ ID NO: 5112604 - DNA, 25 bp, Homo sapien
agcacctcaaaaggcagccgcggca

SEQ ID NO: 5112605 - DNA, 25 bp, Homo sapien
gccacccacaacgtgaattgccaca

SEQ ID NO: 5112606 - DNA, 25 bp, Homo sapien
agtccttgatgagatcgcacagctg

SEQ ID NO: 5112607 - DNA, 25 bp, Homo sapien
acaacgtgaattgccacacttcagc

SEQ ID NO: 5112608 - DNA, 25 bp, Homo sapien
gggagtccttgatgagatcgcacag

SEQ ID NO: 5112609 - DNA, 25 bp, Homo sapien
ggggtgccaagagatttatttgcag

SEQ ID NO: 5112610 - DNA, 25 bp, Homo sapien
tgccaagagatttatttgcagagaa

SEQ ID NO: 5112611 - DNA, 25 bp, Homo sapien
ggtgccaagagatttatttgcagag

SEQ ID NO: 5112612 - DNA, 25 bp, Homo sapien
ggggggtgccaagagatttatttgc

SEQ ID NO: 5112613 - DNA, 25 bp, Homo sapien
caacttttacaatgccaaggtgaag

SEQ ID NO: 5112614 - DNA, 25 bp, Homo sapien
gggtctcagcttagagcctgcagca

SEQ ID NO: 5112615 - DNA, 25 bp, Homo sapien
cagcaggaagggcttaatctgaaca

SEQ ID NO: 5112616 - DNA, 25 bp, Homo sapien
cctaacttggatttcctggcggcgg

SEQ ID NO: 5112617 - DNA, 25 bp, Homo sapien
tgcacagtagggtctttcagggttc

SEQ ID NO: 5112618 - DNA, 25 bp, Homo sapien
gaatttagagttgacctccagcccc

SEQ ID NO: 5112619 - DNA, 25 bp, Homo sapien
tcaggataaagtctggacccctcag

SEQ ID NO: 5112620 - DNA, 25 bp, Homo sapien
tctaggtgcacagacaattcaggtc

SEQ ID NO: 5112621 - DNA, 25 bp, Homo sapien
tctgtgaagcttaagagcagatggt

SEQ ID NO: 5112622 - DNA, 25 bp, Homo sapien
agggcagggtctgtgaagcttaaga

SEQ ID NO: 5112623 - DNA, 25 bp, Homo sapien
cagggtctgtgaagcttaagagcag

SEQ ID NO: 5112624 - DNA, 25 bp, Homo sapien
ccgaggtccctcagtcctcccctgt

SEQ ID NO: 5112625 - DNA, 25 bp, Homo sapien
cccctgggcctctatgccaggtggg

SEQ ID NO: 5112626 - DNA, 25 bp, Homo sapien
gggggcaagatcaggagagtcaggc

SEQ ID NO: 5112627 - DNA, 25 bp, Homo sapien
gtggggggcaagatcaggagagtca

SEQ ID NO: 5112628 - DNA, 25 bp, Homo sapien
caggcaggatgtggggggcaagatc

SEQ ID NO: 5112629 - DNA, 25 bp, Homo sapien
cactgcccgagaaagggtgactcga

SEQ ID NO: 5112630 - DNA, 25 bp, Homo sapien
tcatcacgctggctgtcggtgagac

SEQ ID NO: 5112631 - DNA, 25 bp, Homo sapien
aggtgtcacagagtccgctccggca

SEQ ID NO: 5112632 - DNA, 25 bp, Homo sapien
tgtcggtgagactgcacgaccccgg

SEQ ID NO: 5112633 - DNA, 25 bp, Homo sapien
tacaaaggtgcagaatgtaccccaa

SEQ ID NO: 5112634 - DNA, 25 bp, Homo sapien
tgttgacaaggactaaccggttcca

SEQ ID NO: 5112635 - DNA, 25 bp, Homo sapien
ccagtatgggcgcttggtcgtctcc

SEQ ID NO: 5112636 - DNA, 25 bp, Homo sapien
tagtaaatgcatccagcgcctagcg

SEQ ID NO: 5112637 - DNA, 25 bp, Homo sapien
cctgtctccgccactagatgggaga

SEQ ID NO: 5112638 - DNA, 25 bp, Homo sapien
ctacatactttattttgcatgcctg

SEQ ID NO: 5112639 - DNA, 25 bp, Homo sapien
gcctgtctccgccactagatgggag

SEQ ID NO: 5112640 - DNA, 25 bp, Homo sapien
tttattttgcatgcctgtctccgcc

SEQ ID NO: 5112641 - DNA, 25 bp, Homo sapien
ggaaattggagacatcctagcaggc

SEQ ID NO: 5112642 - DNA, 25 bp, Homo sapien
tcctcacatagggactgggtaacaa

SEQ ID NO: 5112643 - DNA, 25 bp, Homo sapien
aattggagacatcctagcaggccca

SEQ ID NO: 5112644 - DNA, 25 bp, Homo sapien
catagggactgggtaacaacaggaa

SEQ ID NO: 5112645 - DNA, 25 bp, Homo sapien
cactgggaccacagatcctactaag

SEQ ID NO: 5112646 - DNA, 25 bp, Homo sapien
tccccagcgtgtgggtggaccactg

SEQ ID NO: 5112647 - DNA, 25 bp, Homo sapien
tggcctcaggcatagtgaatgtgta

SEQ ID NO: 5112648 - DNA, 25 bp, Homo sapien
ctttccataagcgatgaacctggct

SEQ ID NO: 5112649 - DNA, 25 bp, Homo sapien
gtgaattgccatggtattcaaatat

SEQ ID NO: 5112650 - DNA, 25 bp, Homo sapien
cctgtcatgggaggaccccctggag

SEQ ID NO: 5112651 - DNA, 25 bp, Homo sapien
gaatgtagagctagcatcctcctca

SEQ ID NO: 5112652 - DNA, 25 bp, Homo sapien
tagatatataggctttttctggcag

SEQ ID NO: 5112653 - DNA, 25 bp, Homo sapien
tgtacaccgtgtgcatcaactgcct

SEQ ID NO: 5112654 - DNA, 25 bp, Homo sapien
actgtcacagggagagtacaccatg

SEQ ID NO: 5112655 - DNA, 25 bp, Homo sapien
taacatcgtagggagatgctactcc

SEQ ID NO: 5112656 - DNA, 25 bp, Homo sapien
gatgttgctcctaatgtcacctgga

SEQ ID NO: 5112657 - DNA, 25 bp, Homo sapien
cataagcttgtatgctgggcggaac

SEQ ID NO: 5112658 - DNA, 25 bp, Homo sapien
ctgaagtctacctggagatctccaa

SEQ ID NO: 5112659 - DNA, 25 bp, Homo sapien
tctctgaagtctacctggagatctc

SEQ ID NO: 5112660 - DNA, 25 bp, Homo sapien
cggctggaccttgcctcacattatg

SEQ ID NO: 5112661 - DNA, 25 bp, Homo sapien
caggcccgttatgtgagccgatccg

SEQ ID NO: 5112662 - DNA, 25 bp, Homo sapien
tctgtaccatggcagccaaaaacgc

SEQ ID NO: 5112663 - DNA, 25 bp, Homo sapien
aggcccgttatgtgagccgatccgt

SEQ ID NO: 5112664 - DNA, 25 bp, Homo sapien
tggcagccaaaaacgcaggcccgtt

SEQ ID NO: 5112665 - DNA, 25 bp, Homo sapien
gaggcggcatgcagtttccgtgtga

SEQ ID NO: 5112666 - DNA, 25 bp, Homo sapien
gctgggaggcggcatgcagtttccg

SEQ ID NO: 5112667 - DNA, 25 bp, Homo sapien
gggaggcggcatgcagtttccgtgt

SEQ ID NO: 5112668 - DNA, 25 bp, Homo sapien
tgggaggcggcatgcagtttccgtg

SEQ ID NO: 5112669 - DNA, 25 bp, Homo sapien
aaccagcccttaatgctgtgtgtat

SEQ ID NO: 5112670 - DNA, 25 bp, Homo sapien
aagataaaaaccagcccttaatgct

SEQ ID NO: 5112671 - DNA, 25 bp, Homo sapien
aaaaaccagcccttaatgctgtgtg

SEQ ID NO: 5112672 - DNA, 25 bp, Homo sapien
gataaaaaccagcccttaatgctgt

SEQ ID NO: 5112673 - DNA, 25 bp, Homo sapien
aggaggagttctcaggctcctgtga

SEQ ID NO: 5112674 - DNA, 25 bp, Homo sapien
gttctcaggctcctgtgagattccg

SEQ ID NO: 5112675 - DNA, 25 bp, Homo sapien
caggaggaggagttctcaggctcct

SEQ ID NO: 5112676 - DNA, 25 bp, Homo sapien
tcccaggaggaggagttctcaggct

SEQ ID NO: 5112677 - DNA, 25 bp, Homo sapien
tcctcagcaccgtgaccagatacat

SEQ ID NO: 5112678 - DNA, 25 bp, Homo sapien
ggctgatgaggaggttcctcagcac

SEQ ID NO: 5112679 - DNA, 25 bp, Homo sapien
caggctgatgaggaggttcctcagc

SEQ ID NO: 5112680 - DNA, 25 bp, Homo sapien
ggagtcagagctgacagccaggctg

SEQ ID NO: 5112681 - DNA, 25 bp, Homo sapien
taagagatgactccgctatgcgacc

SEQ ID NO: 5112682 - DNA, 25 bp, Homo sapien
tccgcataagagatgactccgctat

SEQ ID NO: 5112683 - DNA, 25 bp, Homo sapien
ggcagtccgcataagagatgactcc

SEQ ID NO: 5112684 - DNA, 25 bp, Homo sapien
agtccgcataagagatgactccgct

SEQ ID NO: 5112685 - DNA, 25 bp, Homo sapien
attcttgaagaaggtgaattgcaac

SEQ ID NO: 5112686 - DNA, 25 bp, Homo sapien
cttgaagaaggtgaattgcaacaca

SEQ ID NO: 5112687 - DNA, 25 bp, Homo sapien
agaaggtgaattgcaacacaatcca

SEQ ID NO: 5112688 - DNA, 25 bp, Homo sapien
aagaaggtgaattgcaacacaatcc

SEQ ID NO: 5112689 - DNA, 25 bp, Homo sapien
tatgaacatgctatcgatgatgctg

SEQ ID NO: 5112690 - DNA, 25 bp, Homo sapien
aatatatgaacatgctatcgatgat

SEQ ID NO: 5112691 - DNA, 25 bp, Homo sapien
aacatgctatcgatgatgctgtcag

SEQ ID NO: 5112692 - DNA, 25 bp, Homo sapien
tgaacatgctatcgatgatgctgtc

SEQ ID NO: 5112693 - DNA, 25 bp, Homo sapien
tactacccatctgacgatgaaatcc

SEQ ID NO: 5112694 - DNA, 25 bp, Homo sapien
tttatactacccatctgacgatgaa

SEQ ID NO: 5112695 - DNA, 25 bp, Homo sapien
tatactacccatctgacgatgaaat

SEQ ID NO: 5112696 - DNA, 25 bp, Homo sapien
ctttatactacccatctgacgatga

SEQ ID NO: 5112697 - DNA, 25 bp, Homo sapien
aaataagcaaacaactggcaggtga

SEQ ID NO: 5112698 - DNA, 25 bp, Homo sapien
aactggcaggtgagagccacaggcg

SEQ ID NO: 5112699 - DNA, 25 bp, Homo sapien
tggcaggtgagagccacaggcggag

SEQ ID NO: 5112700 - DNA, 25 bp, Homo sapien
gcaggtgagagccacaggcggagaa

SEQ ID NO: 5112701 - DNA, 25 bp, Homo sapien
gctgaagtcaggtacacgccaatgc

SEQ ID NO: 5112702 - DNA, 25 bp, Homo sapien
ctgaggggtggtgccacagctgaag

SEQ ID NO: 5112703 - DNA, 25 bp, Homo sapien
cagctgaagtcaggtacacgccaat

SEQ ID NO: 5112704 - DNA, 25 bp, Homo sapien
cacagctgaagtcaggtacacgcca

SEQ ID NO: 5112705 - DNA, 25 bp, Homo sapien
gcatacgtcactgacgccaccacac

SEQ ID NO: 5112706 - DNA, 25 bp, Homo sapien
ccacagcatacgtcactgacgccac

SEQ ID NO: 5112707 - DNA, 25 bp, Homo sapien
acagcatacgtcactgacgccacca

SEQ ID NO: 5112708 - DNA, 25 bp, Homo sapien
agcatacgtcactgacgccaccaca

SEQ ID NO: 5112709 - DNA, 25 bp, Homo sapien
tgagatttgactgttctgctgcgca

SEQ ID NO: 5112710 - DNA, 25 bp, Homo sapien
aggatggaacagatcatgagatttg

SEQ ID NO: 5112711 - DNA, 25 bp, Homo sapien
catgagatttgactgttctgctgcg

SEQ ID NO: 5112712 - DNA, 25 bp, Homo sapien
gatggaacagatcatgagatttgac

SEQ ID NO: 5112713 - DNA, 25 bp, Homo sapien
atgtagggatttaatgtgcttgccc

SEQ ID NO: 5112714 - DNA, 25 bp, Homo sapien
gggatttaatgtgcttgccctttct

SEQ ID NO: 5112715 - DNA, 25 bp, Homo sapien
agggatttaatgtgcttgccctttc

SEQ ID NO: 5112716 - DNA, 25 bp, Homo sapien
cagatgtagggatttaatgtgcttg

SEQ ID NO: 5112717 - DNA, 25 bp, Homo sapien
catgaccacagagaacaggtccact

SEQ ID NO: 5112718 - DNA, 25 bp, Homo sapien
cctctgctgggccatgaccacagag

SEQ ID NO: 5112719 - DNA, 25 bp, Homo sapien
gctgggccatgaccacagagaacag

SEQ ID NO: 5112720 - DNA, 25 bp, Homo sapien
gccatgaccacagagaacaggtcca

SEQ ID NO: 5112721 - DNA, 25 bp, Homo sapien
tgagataaggacaaaataaaatgtc

SEQ ID NO: 5112722 - DNA, 25 bp, Homo sapien
ctagaaaagaggattgagaaatcgg

SEQ ID NO: 5112723 - DNA, 25 bp, Homo sapien
gaggattgagaaatcggaaacaagt

SEQ ID NO: 5112724 - DNA, 25 bp, Homo sapien
caagtaaaccaacacccagaatcat

SEQ ID NO: 5112725 - DNA, 25 bp, Homo sapien
acaagtaaaccaacacccagaatca

SEQ ID NO: 5112726 - DNA, 25 bp, Homo sapien
acaggaacaacccagcaaggaccag

SEQ ID NO: 5112727 - DNA, 25 bp, Homo sapien
ctgaggttctcggaggaggaatata

SEQ ID NO: 5112728 - DNA, 25 bp, Homo sapien
aacccagcaaggaccagctgccatt

SEQ ID NO: 5112729 - DNA, 25 bp, Homo sapien
agcaaggaccagctgccattctgga

SEQ ID NO: 5112730 - DNA, 25 bp, Homo sapien
cacaatcatcttggctaccgtggtg

SEQ ID NO: 5112731 - DNA, 25 bp, Homo sapien
ctgtgagattggatgtccacaatca

SEQ ID NO: 5112732 - DNA, 25 bp, Homo sapien
taccgtggtggaggtgaaaccgatg

SEQ ID NO: 5112733 - DNA, 25 bp, Homo sapien
gaaaccgatgtcaggcaaggacagg

SEQ ID NO: 5112734 - DNA, 25 bp, Homo sapien
aaatggcaaagggagacatctgagt

SEQ ID NO: 5112735 - DNA, 25 bp, Homo sapien
ccaaaaatggcaaagggagacatct

SEQ ID NO: 5112736 - DNA, 25 bp, Homo sapien
actcaggagcgtgtctctcttccat

SEQ ID NO: 5112737 - DNA, 25 bp, Homo sapien
atggcaaagggagacatctgagtca

SEQ ID NO: 5112738 - DNA, 25 bp, Homo sapien
caaaactagaaagccacagaaacac

SEQ ID NO: 5112739 - DNA, 25 bp, Homo sapien
tagaaagccacagaaacacgggttc

SEQ ID NO: 5112740 - DNA, 25 bp, Homo sapien
aaagccacagaaacacgggttcatg

SEQ ID NO: 5112741 - DNA, 25 bp, Homo sapien
gaaacacgggttcatgatggctgaa

SEQ ID NO: 5112742 - DNA, 25 bp, Homo sapien
gcaatcaagttgtgcagctgggcat

SEQ ID NO: 5112743 - DNA, 25 bp, Homo sapien
cagcagggaaatacatgattatgtt

SEQ ID NO: 5112744 - DNA, 25 bp, Homo sapien
attatgttattggtgaaggtgtcac

SEQ ID NO: 5112745 - DNA, 25 bp, Homo sapien
cagggaaatacatgattatgttatt

SEQ ID NO: 5112746 - DNA, 25 bp, Homo sapien
ttagaccgtgctgccgtgcggccac

SEQ ID NO: 5112747 - DNA, 25 bp, Homo sapien
tagaccgtgctgccgtgcggccacc

SEQ ID NO: 5112748 - DNA, 25 bp, Homo sapien
gaccgtgctgccgtgcggccaccgc

SEQ ID NO: 5112749 - DNA, 25 bp, Homo sapien
ccgtgctgccgtgcggccaccgcag

SEQ ID NO: 5112750 - DNA, 25 bp, Homo sapien
aatatcacagtgagtgtacaccacg

SEQ ID NO: 5112751 - DNA, 25 bp, Homo sapien
tactcctaatatcgcagtgggtgca

SEQ ID NO: 5112752 - DNA, 25 bp, Homo sapien
taatcacctagggagatacgactcc

SEQ ID NO: 5112753 - DNA, 25 bp, Homo sapien
taacatcctagagagctattgctcc

SEQ ID NO: 5112754 - DNA, 25 bp, Homo sapien
ggacagggacagcccagggaggaca

SEQ ID NO: 5112755 - DNA, 25 bp, Homo sapien
ggatcctctgagagtcccaggagga

SEQ ID NO: 5112756 - DNA, 25 bp, Homo sapien
atcctctgagagtcccaggaggagg

SEQ ID NO: 5112757 - DNA, 25 bp, Homo sapien
cagggaggacaggctgcagttctgg

SEQ ID NO: 5112758 - DNA, 25 bp, Homo sapien
tgaaagcgatgtcagcccatgacgg

SEQ ID NO: 5112759 - DNA, 25 bp, Homo sapien
ggtgaaagcgatgtcagcccatgac

SEQ ID NO: 5112760 - DNA, 25 bp, Homo sapien
aagcgatgtcagcccatgacgggtt

SEQ ID NO: 5112761 - DNA, 25 bp, Homo sapien
gaaagcgatgtcagcccatgacggg

SEQ ID NO: 5112762 - DNA, 25 bp, Homo sapien
agcttgcataagagatgactgctat

SEQ ID NO: 5112763 - DNA, 25 bp, Homo sapien
atctgtgtcaggcagcttgcataag

SEQ ID NO: 5112764 - DNA, 25 bp, Homo sapien
tctgtgtcaggcagcttgcataaga

SEQ ID NO: 5112765 - DNA, 25 bp, Homo sapien
aggcagcttgcataagagatgactg

SEQ ID NO: 5112766 - DNA, 25 bp, Homo sapien
tatgcatgcaaaaagggcaaagaaa

SEQ ID NO: 5112767 - DNA, 25 bp, Homo sapien
tgcatgcaaaaagggcaaagaaaga

SEQ ID NO: 5112768 - DNA, 25 bp, Homo sapien
ctatgcatgcaaaaagggcaaagaa

SEQ ID NO: 5112769 - DNA, 25 bp, Homo sapien
gcatgcaaaaagggcaaagaaagac

SEQ ID NO: 5112770 - DNA, 25 bp, Homo sapien
gtgtggggagtgacagacggctaca

SEQ ID NO: 5112771 - DNA, 25 bp, Homo sapien
agtgtggggagtgacagacggctac

SEQ ID NO: 5112772 - DNA, 25 bp, Homo sapien
ggtagtgtggggagtgacagacggc

SEQ ID NO: 5112773 - DNA, 25 bp, Homo sapien
tagtgtggggagtgacagacggcta

SEQ ID NO: 5112774 - DNA, 25 bp, Homo sapien
ggacaatgttagagtaagacaaaag

SEQ ID NO: 5112775 - DNA, 25 bp, Homo sapien
ggaggggacaatgttagagtaagac

SEQ ID NO: 5112776 - DNA, 25 bp, Homo sapien
aggggacaatgttagagtaagacaa

SEQ ID NO: 5112777 - DNA, 25 bp, Homo sapien
aatggaggggacaatgttagagtaa

SEQ ID NO: 5112778 - DNA, 25 bp, Homo sapien
tgccaggtgagagcgacaggtggag

SEQ ID NO: 5112779 - DNA, 25 bp, Homo sapien
ctgggggtggtgccacagctgaagt

SEQ ID NO: 5112780 - DNA, 25 bp, Homo sapien
acaactgccaggtgagagcgacagg

SEQ ID NO: 5112781 - DNA, 25 bp, Homo sapien
actgccaggtgagagcgacaggtgg

SEQ ID NO: 5112782 - DNA, 25 bp, Homo sapien
tccacagggcgctttgaatgtccct

SEQ ID NO: 5112783 - DNA, 25 bp, Homo sapien
ccacagtgtacatcactgacaccac

SEQ ID NO: 5112784 - DNA, 25 bp, Homo sapien
cctccacagggcgctttgaatgtcc

SEQ ID NO: 5112785 - DNA, 25 bp, Homo sapien
gcgcagcctccacagggcgctttga

SEQ ID NO: 5112786 - DNA, 25 bp, Homo sapien
aaggatggaacagatcatgagattc

SEQ ID NO: 5112787 - DNA, 25 bp, Homo sapien
gaaaaaggatggaacagatcatgag

SEQ ID NO: 5112788 - DNA, 25 bp, Homo sapien
aaaaggatggaacagatcatgagat

SEQ ID NO: 5112789 - DNA, 25 bp, Homo sapien
ggatggaacagatcatgagattcga

SEQ ID NO: 5112790 - DNA, 25 bp, Homo sapien
catgagcatgatggctggtaagctg

SEQ ID NO: 5112791 - DNA, 25 bp, Homo sapien
gaggactgagatcccggacatgagc

SEQ ID NO: 5112792 - DNA, 25 bp, Homo sapien
cggtgtcaagggacatgacagcatc

SEQ ID NO: 5112793 - DNA, 25 bp, Homo sapien
ccccggaagcggtgtcaagggacat

SEQ ID NO: 5112794 - DNA, 25 bp, Homo sapien
tttcctgagtcagccctgaatatac

SEQ ID NO: 5112795 - DNA, 25 bp, Homo sapien
gaaagacttcggctgctccagcctt

SEQ ID NO: 5112796 - DNA, 25 bp, Homo sapien
gaatataccgcagatactgtttccg

SEQ ID NO: 5112797 - DNA, 25 bp, Homo sapien
tactgtttccgaaagacttcggctg

SEQ ID NO: 5112798 - DNA, 25 bp, Homo sapien
ctgcccaggagagctggacagtgac

SEQ ID NO: 5112799 - DNA, 25 bp, Homo sapien
aacacagaggcagccgtagacaact

SEQ ID NO: 5112800 - DNA, 25 bp, Homo sapien
caacccagaagggacgaggggtgca

SEQ ID NO: 5112801 - DNA, 25 bp, Homo sapien
gggaaagacagcctacgggactgcc

SEQ ID NO: 5112802 - DNA, 25 bp, Homo sapien
ttcagaacacagaggcagccgtaga

SEQ ID NO: 5112803 - DNA, 25 bp, Homo sapien
caacggtggaggtgggactctgggg

SEQ ID NO: 5112804 - DNA, 25 bp, Homo sapien
gtggaggtgggactctggggctggc

SEQ ID NO: 5112805 - DNA, 25 bp, Homo sapien
cggtggaggtgggactctggggctg

SEQ ID NO: 5112806 - DNA, 25 bp, Homo sapien
ggaggtgggactctggggctggcat

SEQ ID NO: 5112807 - DNA, 25 bp, Homo sapien
gtcccgtcaatgtagaatacacaca

SEQ ID NO: 5112808 - DNA, 25 bp, Homo sapien
gtatccatatgtgaatactgagcac

SEQ ID NO: 5112809 - DNA, 25 bp, Homo sapien
tgtggttagtccaaaatgagatgtc

SEQ ID NO: 5112810 - DNA, 25 bp, Homo sapien
gtcctgcacagtatccatatgtgaa

SEQ ID NO: 5112811 - DNA, 25 bp, Homo sapien
ggctcagggacctgcgcccatggac

SEQ ID NO: 5112812 - DNA, 25 bp, Homo sapien
tgtaaacgcccggaagttgctggca

SEQ ID NO: 5112813 - DNA, 25 bp, Homo sapien
cagtcccgcgttaggttgcgcgtgc

SEQ ID NO: 5112814 - DNA, 25 bp, Homo sapien
tcttggccgcgtaggttgtgacgca

SEQ ID NO: 5112815 - DNA, 25 bp, Homo sapien
tcggacccttaggacacatcactga

SEQ ID NO: 5112816 - DNA, 25 bp, Homo sapien
gtcggtcggacccttaggacacatc

SEQ ID NO: 5112817 - DNA, 25 bp, Homo sapien
ggtcggacccttaggacacatcact

SEQ ID NO: 5112818 - DNA, 25 bp, Homo sapien
caaagaggggtatctaggtcggtcg

SEQ ID NO: 5112819 - DNA, 25 bp, Homo sapien
ggagcgactgcggtccgcagcggcc

SEQ ID NO: 5112820 - DNA, 25 bp, Homo sapien
ggatggctgcgtccctcaggctgtc

SEQ ID NO: 5112821 - DNA, 25 bp, Homo sapien
tcctccaggtggagcgactgcggtc

SEQ ID NO: 5112822 - DNA, 25 bp, Homo sapien
taggagccggggatggctgcgtccc

SEQ ID NO: 5112823 - DNA, 25 bp, Homo sapien
ctccagctgtctgggcaccgcccca

SEQ ID NO: 5112824 - DNA, 25 bp, Homo sapien
gctgactccctgtgcgcgtgcgcat

SEQ ID NO: 5112825 - DNA, 25 bp, Homo sapien
gctggtcccgccgtttgcgtctctc

SEQ ID NO: 5112826 - DNA, 25 bp, Homo sapien
gctgctgctaccgtcgctgctggtc

SEQ ID NO: 5112827 - DNA, 25 bp, Homo sapien
ctacacccccatagatcgcggccat

SEQ ID NO: 5112828 - DNA, 25 bp, Homo sapien
tctacacccccatagatcgcggcca

SEQ ID NO: 5112829 - DNA, 25 bp, Homo sapien
ctctacacccccatagatcgcggcc

SEQ ID NO: 5112830 - DNA, 25 bp, Homo sapien
ccctctacacccccatagatcgcgg

SEQ ID NO: 5112831 - DNA, 25 bp, Homo sapien
aaaactctgtccgaggtcaggaata

SEQ ID NO: 5112832 - DNA, 25 bp, Homo sapien
aaagtgcccggacgccgaggatcaa

SEQ ID NO: 5112833 - DNA, 25 bp, Homo sapien
gcgtggttccgccaagaaacacaaa

SEQ ID NO: 5112834 - DNA, 25 bp, Homo sapien
taaggcatacagctgtgcgctccag

SEQ ID NO: 5112835 - DNA, 25 bp, Homo sapien
tggagcggttttcagacatcaggac

SEQ ID NO: 5112836 - DNA, 25 bp, Homo sapien
tctcagaacgagcacaggagctggc

SEQ ID NO: 5112837 - DNA, 25 bp, Homo sapien
ggtcacagtagttcacagggagatc

SEQ ID NO: 5112838 - DNA, 25 bp, Homo sapien
tgatcttgctcggaaaaacccacag

SEQ ID NO: 5112839 - DNA, 25 bp, Homo sapien
cccatcctctgagactaaaaggacc

SEQ ID NO: 5112840 - DNA, 25 bp, Homo sapien
ccatcctctgagactaaaaggacct

SEQ ID NO: 5112841 - DNA, 25 bp, Homo sapien
atcctctgagactaaaaggacctcg

SEQ ID NO: 5112842 - DNA, 25 bp, Homo sapien
catcctctgagactaaaaggacctc

SEQ ID NO: 5112843 - DNA, 25 bp, Homo sapien
agaaccaagccctctgatcccctca

SEQ ID NO: 5112844 - DNA, 25 bp, Homo sapien
agaagctatgttgcccccacaggct

SEQ ID NO: 5112845 - DNA, 25 bp, Homo sapien
ctgatcccctcagtgtggtttttac

SEQ ID NO: 5112846 - DNA, 25 bp, Homo sapien
gccaccacctcaacaggaattacag

SEQ ID NO: 5112847 - DNA, 25 bp, Homo sapien
ctggccccaatcaagggaagaagga

SEQ ID NO: 5112848 - DNA, 25 bp, Homo sapien
atcaagggaagaaggagttacaaag

SEQ ID NO: 5112849 - DNA, 25 bp, Homo sapien
ccaatcaagggaagaaggagttaca

SEQ ID NO: 5112850 - DNA, 25 bp, Homo sapien
tggccccaatcaagggaagaaggag

SEQ ID NO: 5112851 - DNA, 25 bp, Homo sapien
caagcttcgcagcggtaccagagga

SEQ ID NO: 5112852 - DNA, 25 bp, Homo sapien
gctttccgtttggccctgttcacca

SEQ ID NO: 5112853 - DNA, 25 bp, Homo sapien
ttccgtttggccctgttcaccatct

SEQ ID NO: 5112854 - DNA, 25 bp, Homo sapien
gcttcgcagcggtaccagaggatcc

SEQ ID NO: 5112855 - DNA, 25 bp, Homo sapien
agtccaaacttgctagctgtctcag

SEQ ID NO: 5112856 - DNA, 25 bp, Homo sapien
taatgagtgcttatgggtcaggctc

SEQ ID NO: 5112857 - DNA, 25 bp, Homo sapien
tacacagggttacgcagatactgag

SEQ ID NO: 5112858 - DNA, 25 bp, Homo sapien
tagctggagctaccgcaacttggga

SEQ ID NO: 5112859 - DNA, 25 bp, Homo sapien
catccggtgtagctgtggcgatgga

SEQ ID NO: 5112860 - DNA, 25 bp, Homo sapien
tgtggcgatggagccggcggcatcg

SEQ ID NO: 5112861 - DNA, 25 bp, Homo sapien
ttcactcaggtagggaaatcggtcc

SEQ ID NO: 5112862 - DNA, 25 bp, Homo sapien
catcggtggtgattaagtagctttc

SEQ ID NO: 5112863 - DNA, 25 bp, Homo sapien
tgctagacccgttctcacagtgata

SEQ ID NO: 5112864 - DNA, 25 bp, Homo sapien
tgcaagcctgcacctcttagaggga

SEQ ID NO: 5112865 - DNA, 25 bp, Homo sapien
aactgagcccagctagtttcctgcc

SEQ ID NO: 5112866 - DNA, 25 bp, Homo sapien
gctttactgggattgtgctagaccc

SEQ ID NO: 5112867 - DNA, 25 bp, Homo sapien
tcatcacccatcatatggccccagc

SEQ ID NO: 5112868 - DNA, 25 bp, Homo sapien
gagcctgttccagatatgagcacaa

SEQ ID NO: 5112869 - DNA, 25 bp, Homo sapien
agccactctcggagccatcagggtt

SEQ ID NO: 5112870 - DNA, 25 bp, Homo sapien
atcagggttgatgagcctgcagttg

SEQ ID NO: 5112871 - DNA, 25 bp, Homo sapien
tgttgtcacaaataccaccggagtc

SEQ ID NO: 5112872 - DNA, 25 bp, Homo sapien
tacccaaggataaggcaaggtcagt

SEQ ID NO: 5112873 - DNA, 25 bp, Homo sapien
ttcaggagttgtccccaggaagccc

SEQ ID NO: 5112874 - DNA, 25 bp, Homo sapien
cctagcagactggtatggcatctcc

SEQ ID NO: 5112875 - DNA, 25 bp, Homo sapien
cgcctctaggttgtcaatggagtca

SEQ ID NO: 5112876 - DNA, 25 bp, Homo sapien
catggcctgtttgacgtagccgata

SEQ ID NO: 5112877 - DNA, 25 bp, Homo sapien
tagccgatatcatgaggagccgcct

SEQ ID NO: 5112878 - DNA, 25 bp, Homo sapien
tttcactgcttggtgtgcgatccag

SEQ ID NO: 5112879 - DNA, 25 bp, Homo sapien
gccgggcccctctttaatcatcaat

SEQ ID NO: 5112880 - DNA, 25 bp, Homo sapien
ttacctctggttccgctaaaggcag

SEQ ID NO: 5112881 - DNA, 25 bp, Homo sapien
tgagtccggatagcttaacagttac

SEQ ID NO: 5112882 - DNA, 25 bp, Homo sapien
agcccacctaaatgtctggacagga

SEQ ID NO: 5112883 - DNA, 25 bp, Homo sapien
aggtgagtgagtatccctagccgat

SEQ ID NO: 5112884 - DNA, 25 bp, Homo sapien
tacaggtgagtgagtatccctagcc

SEQ ID NO: 5112885 - DNA, 25 bp, Homo sapien
aagtccctatacaggtgagtgagta

SEQ ID NO: 5112886 - DNA, 25 bp, Homo sapien
aaagtccctatacaggtgagtgagt

SEQ ID NO: 5112887 - DNA, 25 bp, Homo sapien
ttctgcaattttccggcaaaaccca

SEQ ID NO: 5112888 - DNA, 25 bp, Homo sapien
tgcaattttccggcaaaacccagca

SEQ ID NO: 5112889 - DNA, 25 bp, Homo sapien
tctgcaattttccggcaaaacccag

SEQ ID NO: 5112890 - DNA, 25 bp, Homo sapien
ctgcaattttccggcaaaacccagc

SEQ ID NO: 5112891 - DNA, 25 bp, Homo sapien
taaggcaggatggacctcacagtgg

SEQ ID NO: 5112892 - DNA, 25 bp, Homo sapien
taggagtctactgccggatggatgc

SEQ ID NO: 5112893 - DNA, 25 bp, Homo sapien
taagagagccctagaatgccctgag

SEQ ID NO: 5112894 - DNA, 25 bp, Homo sapien
gggacccaggatcctagctgaacag

SEQ ID NO: 5112895 - DNA, 25 bp, Homo sapien
ttcctgaagatatagcgggaaaggg

SEQ ID NO: 5112896 - DNA, 25 bp, Homo sapien
cgggcaacactgctacgatgtgtct

SEQ ID NO: 5112897 - DNA, 25 bp, Homo sapien
acactgctacgatgtgtctgcccag

SEQ ID NO: 5112898 - DNA, 25 bp, Homo sapien
gtcaatctcgggcaacactgctacg

SEQ ID NO: 5112899 - DNA, 25 bp, Homo sapien
ggatggggagtccaatcttgccctg

SEQ ID NO: 5112900 - DNA, 25 bp, Homo sapien
agagcccacgcacaggatggggagt

SEQ ID NO: 5112901 - DNA, 25 bp, Homo sapien
atggggagtccaatcttgccctgga

SEQ ID NO: 5112902 - DNA, 25 bp, Homo sapien
gcccacgcacaggatggggagtcca

SEQ ID NO: 5112903 - DNA, 25 bp, Homo sapien
tcagggtgaagctggagaagaagtt

SEQ ID NO: 5112904 - DNA, 25 bp, Homo sapien
tgccctgggtcagcgccagaagaaa

SEQ ID NO: 5112905 - DNA, 25 bp, Homo sapien
ctgccctgggtcagcgccagaagaa

SEQ ID NO: 5112906 - DNA, 25 bp, Homo sapien
agacccagtgtccactgagcttgga

SEQ ID NO: 5112907 - DNA, 25 bp, Homo sapien
caggtgcactgaggatgtacatagc

SEQ ID NO: 5112908 - DNA, 25 bp, Homo sapien
cacagacaaatcatctgcccaagtg

SEQ ID NO: 5112909 - DNA, 25 bp, Homo sapien
taaattcactcatgagccctccagg

SEQ ID NO: 5112910 - DNA, 25 bp, Homo sapien
gctgagtggatacagatcacaggct

SEQ ID NO: 5112911 - DNA, 25 bp, Homo sapien
tccactgggcccagaaggtcttgac

SEQ ID NO: 5112912 - DNA, 25 bp, Homo sapien
tacacatcaggacttttgaagcatc

SEQ ID NO: 5112913 - DNA, 25 bp, Homo sapien
tggctccacttacaaagctgcacag

SEQ ID NO: 5112914 - DNA, 25 bp, Homo sapien
agctgcacaggcattaaagatcgtg

SEQ ID NO: 5112915 - DNA, 25 bp, Homo sapien
cagataacgtcttggtagtttgttc

SEQ ID NO: 5112916 - DNA, 25 bp, Homo sapien
tgcgcccagccgtgtctggcttttt

SEQ ID NO: 5112917 - DNA, 25 bp, Homo sapien
gcatccaccatctccgtggttcaag

SEQ ID NO: 5112918 - DNA, 25 bp, Homo sapien
ttttgaggtttgtccatgacagata

SEQ ID NO: 5112919 - DNA, 25 bp, Homo sapien
ggggcagcggcagcaaggagtggga

SEQ ID NO: 5112920 - DNA, 25 bp, Homo sapien
gcagcggcagcaaggagtgggagag

SEQ ID NO: 5112921 - DNA, 25 bp, Homo sapien
gcagggtaggggcaccgacactgtg

SEQ ID NO: 5112922 - DNA, 25 bp, Homo sapien
agggtaggggcaccgacactgtggg
